United States Patent Application Publication US 2025/0084491 A1 - sequence listing, part 45

SEQ ID NO: 863652 - DNA, 75 bp, synthetic construct
  source 1..75: mol_type = other DNA
ctcaggcattgatagcgccacctcccaaggaaaagtcagtgatttccccactctggacctttgaagaaaaggaca

SEQ ID NO: 863653 - DNA, 75 bp, synthetic construct
  source 1..75: mol_type = other DNA
atggaaaaggcgaacgcctctgctccgctttgtaataaacctcttattacgccggattctctttcccgcttctga

SEQ ID NO: 863654 - DNA, 75 bp, synthetic construct
  source 1..75: mol_type = other DNA
gtgcaattcaaaggcaatgcctcggttctcccggcagataacacgctggctacggttacctttaaaatcaccgaa

SEQ ID NO: 863655 - DNA, 75 bp, synthetic construct
  source 1..75: mol_type = other DNA
atgctaaccgtgagcgagagtgaacaagtaaccatagccaggaacactagctgcgtgattcttaagctgagtggc

SEQ ID NO: 863656 - DNA, 75 bp, synthetic construct
  source 1..75: mol_type = other DNA
agatggcaaacgtggtcagttcaaaatcgtttattgggtcgatgcttctaaagatctgggtgttgcaaaagtcta

SEQ ID NO: 863657 - DNA, 75 bp, synthetic construct
  source 1..75: mol_type = other DNA
accatgcagggcgacgatgaatcagtagtcaccaaagaatacacctttgtagttgatggtgctccggttaaacaa

SEQ ID NO: 863658 - DNA, 75 bp, synthetic construct
  source 1..75: mol_type = other DNA
gttgctatgaacggtggcgatgaagaagttgtaaccaaagagtttaccttcgcggtggatggtgctccgctgaaa

SEQ ID NO: 863659 - DNA, 75 bp, synthetic construct
  source 1..75: mol_type = other DNA
cttccgctcgcaaaaagcctatatctccggtcaggtgaataaatccggtcaacaggccattaccaacgtgcctct

SEQ ID NO: 863660 - DNA, 75 bp, synthetic construct
  source 1..75: mol_type = other DNA
cgtatgtcaaaagtggttcaggatgaactggacaaggctatcaatgaggtccttgaaagaaatttgagtcaataa

SEQ ID NO: 863661 - DNA, 75 bp, synthetic construct
  source 1..75: mol_type = other DNA
ctctggacctttgaagaaaaggacaagttcgcgcgcaagcgtgtgaaagggcgtacgctgacttatgagtttagc

SEQ ID NO: 863662 - DNA, 75 bp, synthetic construct
  source 1..75: mol_type = other DNA
gtgcgtgaaaatctgccgctgatgccaggcttaacgcagctggtactcaagctggaaacgctgggctggaaagtg

SEQ ID NO: 863663 - DNA, 75 bp, synthetic construct
  source 1..75: mol_type = other DNA
agctgtgttgactgaactcggtgcttcgcaatctgttgaaaaaatgcctccttctgctactgattcggtgcagga

SEQ ID NO: 863664 - DNA, 75 bp, synthetic construct
  source 1..75: mol_type = other DNA
taactgggtacagcctgacggcaccatgttctatccgtatattggcaaggttcacgtggtgggcaaaactctcgc

SEQ ID NO: 863665 - DNA, 75 bp, synthetic construct
  source 1..75: mol_type = other DNA
ttcctcgcggtaaacagccgtttcaatgcttctggtgatggtgtcgcgcaattaggccgctcgctggatgttgat

SEQ ID NO: 863666 - DNA, 75 bp, synthetic construct
  source 1..75: mol_type = other DNA
ttttcctgagtgcacacgccgacacgtcctccccggtggccatgcgtcgccactggaaagtgctgaacgaactgc

SEQ ID NO: 863667 - DNA, 75 bp, synthetic construct
  source 1..75: mol_type = other DNA
ctgacgcaaccccggacggacaaactggttcgtgccctgcagaagcaggggctggaggtttctgtgaaacgggat

SEQ ID NO: 863668 - DNA, 75 bp, synthetic construct
  source 1..75: mol_type = other DNA
aaagcgcagctttctacccaggacgccagtaaataccgccgcccggaagcgaccggcgcaactgaaaaatctaac

SEQ ID NO: 863669 - DNA, 75 bp, synthetic construct
  source 1..75: mol_type = other DNA
ggaaaacagcaaggacaactgctggaaaaagcgcgcaatgaaatgggtgaactggcctatatggtgccggtaaaa

SEQ ID NO: 863670 - DNA, 75 bp, synthetic construct
  source 1..75: mol_type = other DNA
tcaacaaagtaacattccggtgaccgttgaacgccagttgtattggcttatccccggtgaagaagagatgagctt

SEQ ID NO: 863671 - DNA, 75 bp, synthetic construct
  source 1..75: mol_type = other DNA
tacaccggagtctccactggcagatgcggtggcaaacgtcttaaccatgacgttgctgaaaaaagcgcagttgaa

SEQ ID NO: 863672 - DNA, 75 bp, synthetic construct
  source 1..75: mol_type = other DNA
ttagcaggataagcaacatgattcgtcagtacttcagccaggcacgacctgaagaagagaccatacgagccctga

SEQ ID NO: 863673 - DNA, 75 bp, synthetic construct
  source 1..75: mol_type = other DNA
cgtcaatgtctgacattgtcagggacctttcgcgtctgggctggacagatgagcgtattggcacagagtctgggg

SEQ ID NO: 863674 - DNA, 75 bp, synthetic construct
  source 1..75: mol_type = other DNA
aggatgaggtcctgagactgaagcagattagcggtctgacagaattattccaggcagaagatttcagtccggcct

SEQ ID NO: 863675 - DNA, 75 bp, synthetic construct
  source 1..75: mol_type = other DNA
tcaccaaacagtgatttccgtgcttatggcgatgttattgccgtcaaggctgaggaagtcaccgaagagccgtta

SEQ ID NO: 863676 - DNA, 75 bp, synthetic construct
  source 1..75: mol_type = other DNA
attggcacagagttggggatggaccaagatgaggtattgaggctgaaacagattagtgggctgacggagttattt

SEQ ID NO: 863677 - DNA, 75 bp, synthetic construct
  source 1..75: mol_type = other DNA
cggagagaaaaggacaggctgcacgcattgctgcgaccattcgacataaccgggccagggggaaacatcagataa

SEQ ID NO: 863678 - DNA, 75 bp, synthetic construct
  source 1..75: mol_type = other DNA
gcgtgaaccggcaaaaacggctcaacaaagtaacattccggtgaccgttgaacgccagttgtatcggcttatccc

SEQ ID NO: 863679 - DNA, 75 bp, synthetic construct
  source 1..75: mol_type = other DNA
ttaattctgacacatcaagattaagcgattatgtggattttacagcgagagcaagtcgggatagcttcttgaaat

SEQ ID NO: 863680 - DNA, 75 bp, synthetic construct
  source 1..75: mol_type = other DNA
gaaaagattattagcgatgagatatatttttctataaacaatctttctgagattttagacaaaaagcttgagaag

SEQ ID NO: 863681 - DNA, 75 bp, synthetic construct
  source 1..75: mol_type = other DNA
cggctgttatgctgggtggcttaggcgctggcgctacgtatatggctatgagcaaagcctctgaatttgttacta

SEQ ID NO: 863682 - DNA, 75 bp, synthetic construct
  source 1..75: mol_type = other DNA
tatttggaggcgctacagcggcggctggcgtgatggctgtaagcaaagcctctgattttgttactagcagcttcg

SEQ ID NO: 863683 - DNA, 75 bp, synthetic construct
  source 1..75: mol_type = other DNA
agagcacaagctgccgcagcaagagcacaggcaaggcaacagcaacaaatagcagcacgcagtgagaaggcagcc

SEQ ID NO: 863684 - DNA, 75 bp, synthetic construct
  source 1..75: mol_type = other DNA
attgtatagccgtgcgaagctgggcggtgtagacgttaaccagatgaacaatattgaacaatgggcgtataaaaa

SEQ ID NO: 863685 - DNA, 75 bp, synthetic construct
  source 1..75: mol_type = other DNA
gccgcaccgttttcttctgtcactttcagacttaagcagaaggtttctccgtcaggaaaagtggaatggacggtg

SEQ ID NO: 863686 - DNA, 75 bp, synthetic construct
  source 1..75: mol_type = other DNA
gacaaagttgaagccgaacagtcgctgatcaccgtagaaggtgacaaagcctcgatggaagttccatctccgcag

SEQ ID NO: 863687 - DNA, 75 bp, synthetic construct
  source 1..75: mol_type = other DNA
aacgttccggatatcggcggtgacgaagttgaagtgaccgaagtgatggtgaaagtgggcgacaaagttgccgct

SEQ ID NO: 863688 - DNA, 75 bp, synthetic construct
  source 1..75: mol_type = other DNA
atcgatatgagtgggattctccggtcagtgttgtcgggagtttttcgtatatgaaaggtgactgggcggacagtc

SEQ ID NO: 863689 - DNA, 75 bp, synthetic construct
  source 1..75: mol_type = other DNA
gcattagtgcattgcaccgcctttctgtagcggaacaatataaagctattgcacaggctagagaaattgccctcc

SEQ ID NO: 863690 - DNA, 75 bp, synthetic construct
  source 1..75: mol_type = other DNA
gcggtccgcaggatttcagtcgccgcctcgtaggcttcagacgggaccactcggtccggaggcgttgcggcggga

SEQ ID NO: 863691 - DNA, 75 bp, synthetic construct
  source 1..75: mol_type = other DNA
ggaagggacaggctgcgcgtatcgctgcgacgatcagacataaccgtgcgagaggaaaacaccagatagcttcta

SEQ ID NO: 863692 - DNA, 75 bp, synthetic construct
  source 1..75: mol_type = other DNA
tgaactgctggatgctatcctgctgcaggcggaagtgctggagctgaaagcggtacgtaaaggtatggcgagcgg

SEQ ID NO: 863693 - DNA, 75 bp, synthetic construct
  source 1..75: mol_type = other DNA
cggtacgtaaaggtatggcgagcggtgcggttatcgaatccttcctcgataaaggtcgtggtccggttgctaccg

SEQ ID NO: 863694 - DNA, 75 bp, synthetic construct
  source 1..75: mol_type = other DNA
cagaaaaattcaggcccggacaaattgacgctgcaacgtaaaacacgcagcacccttaacattcctggtaccggt

SEQ ID NO: 863695 - DNA, 75 bp, synthetic construct
  source 1..75: mol_type = other DNA
aagcgatcgtgaagtcgaaggcggccgtggccgtggtcgtaacgcgaaagctgcgcgtccgaagaaaggcaacaa

SEQ ID NO: 863696 - DNA, 75 bp, synthetic construct
  source 1..75: mol_type = other DNA
gtatgctgtctccggaactgaaacaacagattatcggtctggcggaagttcgtgacgtattcaaatcaccgaaat

SEQ ID NO: 863697 - DNA, 75 bp, synthetic construct
  source 1..75: mol_type = other DNA
cgtgaagttgcactgtatcgtcagggtaaattccgcgaagttaaactggcgcgtcagcagaaatctaaactcgag

SEQ ID NO: 863698 - DNA, 75 bp, synthetic construct
  source 1..75: mol_type = other DNA
aaagcaaacagtgggaaggggcgtttgaaggcttaaccgctggagtgaactggcgtatttccggataccgtaacg

SEQ ID NO: 863699 - DNA, 75 bp, synthetic construct
  source 1..75: mol_type = other DNA
cttcaatgtctgaaattgtcagggacctgtcacgtctgggctggacagatgagcgaattggaacagaggctgggc

SEQ ID NO: 863700 - DNA, 75 bp, synthetic construct
  source 1..75: mol_type = other DNA
cttcaatgtctgaaattgtcagggacctttcacgcctgggctggacagatgaacgaattggaacagaggctgggc

SEQ ID NO: 863701 - DNA, 75 bp, synthetic construct
  source 1..75: mol_type = other DNA
gaaggctatcgttttatcgcttcttatggcacgtcgtacaaggcacctaatcttgggcaactgtatggtttctac

SEQ ID NO: 863702 - DNA, 75 bp, synthetic construct
  source 1..75: mol_type = other DNA
gtatctatctgaccggattgcaacaagtcggcgattttacgtttgaaggcgcagcccgcagcgacgataactcac

SEQ ID NO: 863703 - DNA, 75 bp, synthetic construct
  source 1..75: mol_type = other DNA
cggaccgctgacgcatacggtgagttatgattatgtcgatgcgcgtaacgcgattaccgacacgccgttgctacg

SEQ ID NO: 863704 - DNA, 75 bp, synthetic construct
  source 1..75: mol_type = other DNA
actatattcgttcaacgaaagtggcttctggcgaagcgggcggcattacccagcacatcggtgcataccacgttg

SEQ ID NO: 863705 - DNA, 75 bp, synthetic construct
  source 1..75: mol_type = other DNA
tggtggccaacgattacaatcccaatgtcatggcgccgggtgagaagaaactgctgaagcagtcactggagaaag

SEQ ID NO: 863706 - DNA, 75 bp, synthetic construct
  source 1..75: mol_type = other DNA
tgcgtactgtgggtgaaagcggatgaggtggtggccaacgattataatcctaatgtcatggcgccaggtgagaag

SEQ ID NO: 863707 - DNA, 75 bp, synthetic construct
  source 1..75: mol_type = other DNA
agactgaaacagattagcgggctgacggaattgtttcaggaagaggacttcagcccggcatggacggttcgctga

SEQ ID NO: 863708 - DNA, 75 bp, synthetic construct
  source 1..75: mol_type = other DNA
gtggactgtgtgttatgggtgaaagcgaatgaggtggtggccaacgattacaatcccaatgtcatgtcttccagt

SEQ ID NO: 863709 - DNA, 75 bp, synthetic construct
  source 1..75: mol_type = other DNA
atgggggattttgtgacaccggagatgctgggcgacatgattcgtcagtacttcagccaggaacggccagaagaa

SEQ ID NO: 863710 - DNA, 75 bp, synthetic construct
  source 1..75: mol_type = other DNA
gcgcctgggctggacgaatgaacgcattggtacggagctgggtatggaccaggatgaagttctcagattgaaaca

SEQ ID NO: 863711 - DNA, 75 bp, synthetic construct
  source 1..75: mol_type = other DNA
ttccggctgcgggtgacgaagttaccgttgttcgtgacgagaaaaaagcacgtgaagttgcactgtaccgtcagg

SEQ ID NO: 863712 - DNA, 75 bp, synthetic construct
  source 1..75: mol_type = other DNA
gtaccggctgcgggtgatgaagttaccgttgtacgtgacgagaagaaagcgcgtgaagttgcactctatcgtcag

SEQ ID NO: 863713 - DNA, 75 bp, synthetic construct
  source 1..75: mol_type = other DNA
cctgaaggcagacgtacagggttctgtggaagctatctccgactccttgctgaaactgtctactgacgaagttaa

SEQ ID NO: 863714 - DNA, 75 bp, synthetic construct
  source 1..75: mol_type = other DNA
ggttgttgctgcagacgacggtgtaatgccgcagaccattgaagctatccagcacgcgaaagcggcgggtgttcc

SEQ ID NO: 863715 - DNA, 75 bp, synthetic construct
  source 1..75: mol_type = other DNA
gcaaattccgtgaagttaaactggcacgtcagcagaaatcgaaactcgagaacatgttcgccaacatgaccgaag

SEQ ID NO: 863716 - DNA, 75 bp, synthetic construct
  source 1..75: mol_type = other DNA
tctggttggcttcaacgttcgtgctgatgcctctgcgcgtaaagtgattgaggctgaaagcctggatctgcgtta

SEQ ID NO: 863717 - DNA, 75 bp, synthetic construct
  source 1..75: mol_type = other DNA
aaaatacggtaaaaacacatctttataatcttttcaagaagatagctgtaaaaaaccggactcaggcggtctcat

SEQ ID NO: 863718 - DNA, 75 bp, synthetic construct
  source 1..75: mol_type = other DNA
cccctttagtaatggcatcctctgaggaagtattcgatatcgagacagatagcttatatcacttacaattggata

SEQ ID NO: 863719 - DNA, 75 bp, synthetic construct
  source 1..75: mol_type = other DNA
ccttaccgggcgcataagccacggtcaggttgatttaagcgagctgggaccgaacgccgacgaactgctgtcgaa

SEQ ID NO: 863720 - DNA, 75 bp, synthetic construct
  source 1..75: mol_type = other DNA
aatacggttaaaacgcatctttataatcttttcaagaagatagccgtaaaaaaccggacacaagcggtttcctgg

SEQ ID NO: 863721 - DNA, 75 bp, synthetic construct
  source 1..75: mol_type = other DNA
tcgtcacctacgaatggggtgagtacctcaagcgcgcgaaagatggcgagcatcagacggtaatgatgggctgga

SEQ ID NO: 863722 - DNA, 75 bp, synthetic construct
  source 1..75: mol_type = other DNA
caagcgcaggtggtgatgcacgatcaggctccggcactgatcatcgctcactccaccgtgtttgaaccggtacgc

SEQ ID NO: 863723 - DNA, 75 bp, synthetic construct
  source 1..75: mol_type = other DNA
acgacaacacagttcagttcgtgctgactcgcccggaagcgccgttcctcgctgatctggcaatggacttcgcct

SEQ ID NO: 863724 - DNA, 75 bp, synthetic construct
  source 1..75: mol_type = other DNA
tgctttgatgattggtctgctgctggcaggattagtctactggggctgtacggtagtcgtcttacacttcgacgc

SEQ ID NO: 863725 - DNA, 75 bp, synthetic construct
  source 1..75: mol_type = other DNA
gtcggtatggcgtttggttcgcggcttgagcgagtcaccggctggttgtttttatcggtcattcccgtgggtttg

SEQ ID NO: 863726 - DNA, 75 bp, synthetic construct
  source 1..75: mol_type = other DNA
attgccggacttatcgtcgcgctgattgtcgctatctggtgggcgggcgatatcaaacctgcgaatatccccttc

SEQ ID NO: 863727 - DNA, 75 bp, synthetic construct
  source 1..75: mol_type = other DNA
acatgcacatcatcgagatgccgcatgtggaagaggtgattgcaccgatcttctacaccgttccgctgcagctgc

SEQ ID NO: 863728 - DNA, 75 bp, synthetic construct
  source 1..75: mol_type = other DNA
gcgaagagttaaaagcgcgtggctatatcttcgtttctgaaacagacaccgaagtaattgcccatctggtgaact

SEQ ID NO: 863729 - DNA, 75 bp, synthetic construct
  source 1..75: mol_type = other DNA
ttgaagaagttcgcgcgcgtggtggtcagttgtatgtcttcgccgatcaggatgcgggttttgtaagtagcgata

SEQ ID NO: 863730 - DNA, 75 bp, synthetic construct
  source 1..75: mol_type = other DNA
tcagaagctggtggatcagaaccggcatacagggttattgctcggagaactgaaaaaagataccacggtagcgca

SEQ ID NO: 863731 - DNA, 75 bp, synthetic construct
  source 1..75: mol_type = other DNA
ttgccgcaagtgctatcgcactcactgcccccgtatatgcgtctgatccgtgtgcttccgttctttgtctgtacg

SEQ ID NO: 863732 - DNA, 75 bp, synthetic construct
  source 1..75: mol_type = other DNA
cgctgattgatgcagatatgccggttatcgtcgttgcgccgaacaacgaactgttggaaaaactgaaatccaaca

SEQ ID NO: 863733 - DNA, 75 bp, synthetic construct
  source 1..75: mol_type = other DNA
tcttgccgggcgtatcagccacggtcaggtggatctaagtgaactggggccgaacgcagatgaactgctgtcgaa

SEQ ID NO: 863734 - DNA, 75 bp, synthetic construct
  source 1..75: mol_type = other DNA
ggataccctgctggcggctcgttccggtagtccgctggttatcggccttggcatgggcgaaaactttatcgcttc

SEQ ID NO: 863735 - DNA, 75 bp, synthetic construct
  source 1..75: mol_type = other DNA
tgtggaagaggtgattgcaccgattttctacaccgttccgctgcagctgctggcttaccatgtcgcgctgatcaa

SEQ ID NO: 863736 - DNA, 75 bp, synthetic construct
  source 1..75: mol_type = other DNA
aaagtacagatgctggctcaggcagcggaagaacatcctctgcatggcggcaccggtattgctcatactcgctgg

SEQ ID NO: 863737 - DNA, 75 bp, synthetic construct
  source 1..75: mol_type = other DNA
cgttgattgacgccgatatgccggttatcgtcgtcgcgccgaataacgaactgttggaaaaactgaaatccaaca

SEQ ID NO: 863738 - DNA, 75 bp, synthetic construct
  source 1..75: mol_type = other DNA
gcgaaagtgggcgtacaggccaaaatcgtcacctacgaatggggtgagtacctcaagcgtgcgaaagatggcgag

SEQ ID NO: 863739 - DNA, 75 bp, synthetic construct
  source 1..75: mol_type = other DNA
tgctctggagttgctggccagaattcgtgatgcgcagggaaaactgtcaccattactgcgtattcattcgatgaa

SEQ ID NO: 863740 - DNA, 75 bp, synthetic construct
  source 1..75: mol_type = other DNA
gaggttaaacatcatgggagctttacttgcggagcacaagttcggctatcaagaagagatggcctatgcaatgaa

SEQ ID NO: 863741 - DNA, 75 bp, synthetic construct
  source 1..75: mol_type = other DNA
tcgatgctctgtgtgctgaactccagcaacaaacccatactgcggaaaccgcccaagaaattattctgtcacgtg

SEQ ID NO: 863742 - DNA, 75 bp, synthetic construct
  source 1..75: mol_type = other DNA
ctactggaaccacacggcgtcgagtttcaggtgatggcaacaggttttacctgggatacgcaaaaccgcgaagct

SEQ ID NO: 863743 - DNA, 75 bp, synthetic construct
  source 1..75: mol_type = other DNA
ggctgtcatcgggatattcttgaactggcggatacggtaagtgagctgcgccccatcaaacatgcgtttgatgcc

SEQ ID NO: 863744 - DNA, 75 bp, synthetic construct
  source 1..75: mol_type = other DNA
atattcagcgacccgaaaacgggagacccctgggcgaacgccgacgctatccgtaaaaaagcatgggtgccgacc

SEQ ID NO: 863745 - DNA, 75 bp, synthetic construct
  source 1..75: mol_type = other DNA
gcggtcagtctttcattcctcaaacactggataaactgcgcgaagtacgtcgtcgtatcgacgagtctggctttg

SEQ ID NO: 863746 - DNA, 75 bp, synthetic construct
  source 1..75: mol_type = other DNA
cgcggatatgttcgttgccggttcggcaatcttcgaccagccagactacaaaaaagtcattgatgaaatgcgcag

SEQ ID NO: 863747 - DNA, 75 bp, synthetic construct
  source 1..75: mol_type = other DNA
cctgggtgaagataccgcaaaagccctggcagctggcgctgatgtcgtgcattttgacgtcatggataaccacta

SEQ ID NO: 863748 - DNA, 75 bp, synthetic construct
  source 1..75: mol_type = other DNA
atcgatctgaagctgaaagatggtcaatcgttacatgaatgtagcgccaatgaaaaagaatttgttaaacgcctg

SEQ ID NO: 863749 - DNA, 75 bp, synthetic construct
  source 1..75: mol_type = other DNA
ttgatttcgatgaaggtaactggcgaaaacggcagcctgcgcagctgtagcgatgaagaagagcgctttgtcagt

SEQ ID NO: 863750 - DNA, 75 bp, synthetic construct
  source 1..75: mol_type = other DNA
cgcacgctgcaactgattaaagaaaatggctgtaaagcgggtctggtgttcaacccggccacgccgttgagttat

SEQ ID NO: 863751 - DNA, 75 bp, synthetic construct
  source 1..75: mol_type = other DNA
tgggcgtcgtgcaatttattaaaggcacctggcctaatggcgaacgaaatctgctggagccacacggcgttgagt

SEQ ID NO: 863752 - DNA, 75 bp, synthetic construct
  source 1..75: mol_type = other DNA
cgctgtttgcgacgggggtttttattatctctcgcgggacattatatgaattgcagtggcgcggaaattttgccg

SEQ ID NO: 863753 - DNA, 75 bp, synthetic construct
  source 1..75: mol_type = other DNA
ctacattgcgctgtttacctccatcaatatggagttagcgctgaaaaacctgctgcaaaagccagtgttttacca

SEQ ID NO: 863754 - DNA, 75 bp, synthetic construct
  source 1..75: mol_type = other DNA
attgtcagccagctggcttttgctgacggtgatgttctggttaccggagagatgaatgaatcggagagagcgtct

SEQ ID NO: 863755 - DNA, 75 bp, synthetic construct
  source 1..75: mol_type = other DNA
ctgaaggtattgctctgacatttcgtgttcctgaaggaaatatgaaacatcctttgattatcttatgccatggat

SEQ ID NO: 863756 - DNA, 75 bp, synthetic construct
  source 1..75: mol_type = other DNA
tgaatggttaccgattaacttatatatcaatggcgatactttttactacatcctgtatggcatgctgggccgcgc

SEQ ID NO: 863757 - DNA, 75 bp, synthetic construct
  source 1..75: mol_type = other DNA
ccgtgccgcagaaaatcgacggttttgaatggctgccaattaacttatatatcaatggcgatactttttactaca

SEQ ID NO: 863758 - DNA, 75 bp, synthetic construct
  source 1..75: mol_type = other DNA
ggcgaactgaaacacggtccgctggcgctgattgacgcggatatgccggttatcgtcgtcgcaccgaacaacgaa

SEQ ID NO: 863759 - DNA, 75 bp, synthetic construct
  source 1..75: mol_type = other DNA
ttatgaaaaatgcctgtcggcgctgtcagcattgcataaatttcatgtatcagaactgacacctgcagtactaaa

SEQ ID NO: 863760 - DNA, 75 bp, synthetic construct
  source 1..75: mol_type = other DNA
gtgaagtacgccgagcgtctgctgggagaaataaaaaatcagattatcgatggtaccttcgaatatgcaaaatac

SEQ ID NO: 863761 - DNA, 75 bp, synthetic construct
  source 1..75: mol_type = other DNA
tgaatccgccggaacagggaagagcattatatgatgctgttgcttctagtactaaggaattatacgaggaagctg

SEQ ID NO: 863762 - DNA, 75 bp, synthetic construct
  source 1..75: mol_type = other DNA
gaagtgattgcacacctggtgaactgggaactgaaacaaggcggtactctgcgtgaggctgttctgcgtgctatt

SEQ ID NO: 863763 - DNA, 75 bp, synthetic construct
  source 1..75: mol_type = other DNA
caccgggattgctcacactcgctgggcgacgcacggcgaaccttcagaagtgaatgcgcatccgcatgtttctga

SEQ ID NO: 863764 - DNA, 75 bp, synthetic construct
  source 1..75: mol_type = other DNA
aagtgacaccaccagcaccgacagcaacggccagacgctggcggatatgtacgccatactgcgcgaacaattccc

SEQ ID NO: 863765 - DNA, 75 bp, synthetic construct
  source 1..75: mol_type = other DNA
gcgcatcaaggccgggcaggaaatgcggttactggatattccggcacagcggctttacggggcatttgactgtct

SEQ ID NO: 863766 - DNA, 75 bp, synthetic construct
  source 1..75: mol_type = other DNA
cagggtgctgcgccgttcctcggcggtggttttggtcacttttaccattacgcgccggtgaaaattgagtacgcc

SEQ ID NO: 863767 - DNA, 75 bp, synthetic construct
  source 1..75: mol_type = other DNA
acgtggagcacataacttacgcgcagtgcgccctgctggacgaaacggtcctgagccgtggcggcatggacgacg

SEQ ID NO: 863768 - DNA, 75 bp, synthetic construct
  source 1..75: mol_type = other DNA
ctggcttaaataatatggaggaggtatttaaagaattacactctaatataaattacaaaattaagataagcaaag

SEQ ID NO: 863769 - DNA, 75 bp, synthetic construct
  source 1..75: mol_type = other DNA
catctcacaacgaaagtgatgttcaaaacaaaggattaaataaatccagttcgacgtttattgactcatttaagg

SEQ ID NO: 863770 - DNA, 75 bp, synthetic construct
  source 1..75: mol_type = other DNA
aatcgcccgatgtctggcccgacacatgaaaaagcgctaccggttggtaaacacccgttgcagctctattctctg

SEQ ID NO: 863771 - DNA, 75 bp, synthetic construct
  source 1..75: mol_type = other DNA
ataatccgccgatccgcgtgtttgagtcaggatcgattctgctttatctggcagagaaatttggctacttcttgc

SEQ ID NO: 863772 - DNA, 75 bp, synthetic construct
  source 1..75: mol_type = other DNA
atgccaacgaaaccgccttatcctcgtgaagcatatatagtgacgattgaaaaaggaaagccaggacagacggta

SEQ ID NO: 863773 - DNA, 75 bp, synthetic construct
  source 1..75: mol_type = other DNA
ataatccgccgatccgcgtgtttgagtctggatcgattctgctttatctggcggagaaatttggctacttcctgc

SEQ ID NO: 863774 - DNA, 75 bp, synthetic construct
  source 1..75: mol_type = other DNA
gtgaaaattgagtacgccatcaaccgctttactatggaagccaagcgccttctcgacgtgctggataagcaactg

SEQ ID NO: 863775 - DNA, 75 bp, synthetic construct
  source 1..75: mol_type = other DNA
gcgggcgatgagtacaccattgcggatatggcgatttggccgtggtttggcaatgtggtgttaggcggcgtgtat

SEQ ID NO: 863776 - DNA, 75 bp, synthetic construct
  source 1..75: mol_type = other DNA
ggctggcccagggcatcggcctgctatcgacgtcattattaggcactggcgtgtttgccgttcctgcgttagctg

SEQ ID NO: 863777 - DNA, 75 bp, synthetic construct
  source 1..75: mol_type = other DNA
tgttgataccgctgcgaccccggcaccaacggcaacaacaacgccagatggtgctgcgccgttgccaaccgatca

SEQ ID NO: 863778 - DNA, 75 bp, synthetic construct
  source 1..75: mol_type = other DNA
accacgccgacatcacctgtggataccaccgcaaccaacacgcaaaccacctgccgtaactgcgccagcaccagc

SEQ ID NO: 863779 - DNA, 75 bp, synthetic construct
  source 1..75: mol_type = other DNA
tgcaatctccccttacttatccggaggcaattgcaatatctctgtgaacttacacatacaggcggctatatgacg

SEQ ID NO: 863780 - DNA, 75 bp, synthetic construct
  source 1..75: mol_type = other DNA
atgatagctacccgtcgaatctttccggtgggcagaaacaacgtgtggcgattgcccgtgcattagccagcaatc

SEQ ID NO: 863781 - DNA, 75 bp, synthetic construct
  source 1..75: mol_type = other DNA
cgattgctggctggaagtcaccgatgctaccggtaaaaaactgtttagcggtatgcagcgtaaagacggtaattt

SEQ ID NO: 863782 - DNA, 75 bp, synthetic construct
  source 1..75: mol_type = other DNA
accacgtccacgccgccagcgtctgtggatactaccgcaactaacacgcaaacacctgccataacttcgccagca

SEQ ID NO: 863783 - DNA, 75 bp, synthetic construct
  source 1..75: mol_type = other DNA
gcaaatattacatgtgccaggcttctggtcagaattatcctggcatttacgccagcgtacgacgggtaagactaa

SEQ ID NO: 863784 - DNA, 75 bp, synthetic construct
  source 1..75: mol_type = other DNA
tcagaacggccatgtactgtatccgaaaggctataccttcaacccgcttcagtttgtccagcttccgcagcggat

SEQ ID NO: 863785 - DNA, 75 bp, synthetic construct
  source 1..75: mol_type = other DNA
tgcctggaaaattctcgatatgttttacgacataccttgtcttgatgatgaaggttatgacgtagcaatgatgac

SEQ ID NO: 863786 - DNA, 75 bp, synthetic construct
  source 1..75: mol_type = other DNA
cgcggttgcattcctggcatccgacgaagcagcttacatcacgggtgaaactttgcatgtgaacggcgggatgta

SEQ ID NO: 863787 - DNA, 75 bp, synthetic construct
  source 1..75: mol_type = other DNA
gctaacggcaaaggtctgatgttgaatgtgaccgacctggcatctatcgaatctgttctggaaaaaattcgcgca

SEQ ID NO: 863788 - DNA, 75 bp, synthetic construct
  source 1..75: mol_type = other DNA
gtgctgacgccaaaaaagtccaacggcaaatattacatgtacctggcttctgggcagaattatcctggcatttac

SEQ ID NO: 863789 - DNA, 75 bp, synthetic construct
  source 1..75: mol_type = other DNA
aaaagcaggcacctctgcgggccgcaaaagttgcgccgatgcagagtttctccctcgggaagcgacgtaaaaaac

SEQ ID NO: 863790 - DNA, 75 bp, synthetic construct
  source 1..75: mol_type = other DNA
caaaattcccgttgcgggaagagtttgcgcctatgctcttaacccacacgaggtgtggaaaggctatgacaataa

SEQ ID NO: 863791 - DNA, 75 bp, synthetic construct
  source 1..75: mol_type = other DNA
acaccgaagtggtcgataaagacggaaaaaaacagacgttaaagattggctatattggcgtggtgccgccgcaga

SEQ ID NO: 863792 - DNA, 75 bp, synthetic construct
  source 1..75: mol_type = other DNA
tgagttgattaccaaaagcgccctcctcagtacggaagctctgctggcacgccttccagagcttgagatgcatga

SEQ ID NO: 863793 - DNA, 75 bp, synthetic construct
  source 1..75: mol_type = other DNA
tgcgtctgactttcgtcgtatctacaacgacgcggccaaaaatgcacagtttgaagatccggttgaagcgctgat

SEQ ID NO: 863794 - DNA, 75 bp, synthetic construct
  source 1..75: mol_type = other DNA
tttgaaaggttttctgattcagcttctttttttgatataatatatacaacagacgcggattcaattaatcgatat

SEQ ID NO: 863795 - DNA, 75 bp, synthetic construct
  source 1..75: mol_type = other DNA
ggtaaacgtgcaaaagaaattgtattatctcaacatacttggcaacaccgccttaggcagatgaatcaagacttt

SEQ ID NO: 863796 - DNA, 75 bp, synthetic construct
  source 1..75: mol_type = other DNA
atgaaaattttagttactggtgctgcagggtttatcggtcgaaatttggttttccgccttaaggaagctggatat

SEQ ID NO: 863797 - DNA, 75 bp, synthetic construct
  source 1..75: mol_type = other DNA
ctcgaaaaacgtaacggccagtaccacttacgctacgtcagcgaaccggataaagggctttacgatgcgatgaac

SEQ ID NO: 863798 - DNA, 75 bp, synthetic construct
  source 1..75: mol_type = other DNA
cggggattatcagcggctctgcagagacattcagcgagtatctgaaacagcagattgaatcgctgattgcctggc

SEQ ID NO: 863799 - DNA, 75 bp, synthetic construct
  source 1..75: mol_type = other DNA
cgagagaacgggatgaggtcatgttccgtctctggtacagctactggctggagcgcatcgcggcggtattcaatc

SEQ ID NO: 863800 - DNA, 75 bp, synthetic construct
  source 1..75: mol_type = other DNA
gtgcatctatggggcttaaacatcgcgaccaactttccctccctcaaaaaatcattgcgttactgactgtcggta

SEQ ID NO: 863801 - DNA, 75 bp, synthetic construct
  source 1..75: mol_type = other DNA
gtatcgcctctggaatagttactggcttgagcacattgtggaggtgtttaatcgccgcatggatacggttatcaa

SEQ ID NO: 863802 - DNA, 75 bp, synthetic construct
  source 1..75: mol_type = other DNA
tttattcctgttctccgatcaaactttttccattgctgtattttccttcttttttgctttcaccatcattatggt

SEQ ID NO: 863803 - DNA, 75 bp, synthetic construct
  source 1..75: mol_type = other DNA
agctcacaatatcagcgcggcacaagtattgctggcgtgggtaatcagccatcagggcgtgatggcgattccaaa

SEQ ID NO: 863804 - DNA, 75 bp, synthetic construct
  source 1..75: mol_type = other DNA
gccaaaggcaccgataaacaggcagctgttgctgcccttcagacgcttaatgaaatgcgtatatctccacgcccg

SEQ ID NO: 863805 - DNA, 75 bp, synthetic construct
  source 1..75: mol_type = other DNA
ccaatcatcgcgctgggactggcatttagttttgccttctacggcctggtacgcaagaagattgcggttgaagct

SEQ ID NO: 863806 - DNA, 75 bp, synthetic construct
  source 1..75: mol_type = other DNA
tataaactgaaaattggtgcaccagccgcagtacagatccagtatcaagggaaacctgtcgatctgagtcgtttt

SEQ ID NO: 863807 - DNA, 75 bp, synthetic construct
  source 1..75: mol_type = other DNA
aaaagcaggctccgttgcgggccgcaaaagttgctccgatgcagagtttctctctcggtaagcgacgtaaaaaac

SEQ ID NO: 863808 - DNA, 75 bp, synthetic construct
  source 1..75: mol_type = other DNA
aactttcgtcagcggaattaaccatgctggataaagcatatccggcaccaaaaggaaaaactgcgctggatatgg

SEQ ID NO: 863809 - DNA, 75 bp, synthetic construct
  source 1..75: mol_type = other DNA
ggtgactttcgcctttatttgggtggcgctggcaatttttgtgatggatgcgatttatacgcagcgtagaaaaag

SEQ ID NO: 863810 - DNA, 75 bp, synthetic construct
  source 1..75: mol_type = other DNA
tccccgcgttcaaaaacgatgatcttattggagggttgacactggccagcgaaaatatcggcgcgcttctgttga

SEQ ID NO: 863811 - DNA, 75 bp, synthetic construct
  source 1..75: mol_type = other DNA
gttgcctggtcggatcgcactgtccgcatccaggtaggttatgggctggaagaaaaggtaaccgacgctctggct

SEQ ID NO: 863812 - DNA, 75 bp, synthetic construct
  source 1..75: mol_type = other DNA
aatgattttcctcggtgagcggttccgccggatgcagtggctggcggtaattctggcggtgtgtggtgtgctggt

SEQ ID NO: 863813 - DNA, 75 bp, synthetic construct
  source 1..75: mol_type = other DNA
gtggtgctgatgagtatcagccgccagtggtcctatttaaaaacactgattcagacaccaaagaaaattctgatg

SEQ ID NO: 863814 - DNA, 75 bp, synthetic construct
  source 1..75: mol_type = other DNA
cgccgccggtattgtcaccaccgtaccgctgttgtgttttaccgcagctgctacacgcctgcgtctctccacgtt

SEQ ID NO: 863815 - DNA, 75 bp, synthetic construct
  source 1..75: mol_type = other DNA
accgcttcacggtttggtattgaccagcgtgatctgctgatttgccaggttgaattctccctggacgcacaaaaa

SEQ ID NO: 863816 - DNA, 75 bp, synthetic construct
  source 1..75: mol_type = other DNA
agttggcgattttacgttagaaggcgcggtgcgtaatgacgacaactcgcaatttgatcgccacacaacatggca

SEQ ID NO: 863817 - DNA, 75 bp, synthetic construct
  source 1..75: mol_type = other DNA
tcagtagtcgtccggaagcgctcgaaggcccaaccaagcgctggctgaaggacttcggcattgattatgactggc

SEQ ID NO: 863818 - DNA, 75 bp, synthetic construct
  source 1..75: mol_type = other DNA
tgtgtgttatgggtgaaatcggatgaggtgatagccaacgattataatcccaatgtcatggcgccgggtgagaag

SEQ ID NO: 863819 - DNA, 75 bp, synthetic construct
  source 1..75: mol_type = other DNA
ccaaggaatttctcatagagcacgtcgttcagaaattggtattgttgaaagacttgggtattcttattctgaaaa

SEQ ID NO: 863820 - DNA, 75 bp, synthetic construct
  source 1..75: mol_type = other DNA
ggcggaaatgatgccggtggcgtggatgcctttatccatcagcagatgaaaaaacaggggatcacctttaatgat

SEQ ID NO: 863821 - DNA, 75 bp, synthetic construct
  source 1..75: mol_type = other DNA
tcatgaacagttaaaaaccgcgatgcttcacgccccggacggacgccttcgcctccggaatgttctgcaacatcc

SEQ ID NO: 863822 - DNA, 75 bp, synthetic construct
  source 1..75: mol_type = other DNA
ctgacatatgaagcgccagccggcctttttgaacttcttatgcgtacggctgacctcactcatcccgataatatc

SEQ ID NO: 863823 - DNA, 75 bp, synthetic construct
  source 1..75: mol_type = other DNA
ctaaaggtggtgaaggtaaatccactcattccgccaacctggctggcttctgtgccgatgccggtctcaaaaccc

SEQ ID NO: 863824 - DNA, 75 bp, synthetic construct
  source 1..75: mol_type = other DNA
gtgattccgcgcttgtcacgatgcacagcctggcctgtgaactatttcctgagtggaaacaggcgtttgacgggc

SEQ ID NO: 863825 - DNA, 75 bp, synthetic construct
  source 1..75: mol_type = other DNA
gtctgccacggagtctgtggtggggatggtgaatccggttctgccggatgtgcgtgagttcattcgtggcacagt

SEQ ID NO: 863826 - DNA, 75 bp, synthetic construct
  source 1..75: mol_type = other DNA
tttttgaattactgatgcgcacggttgacctcagtcatcccgacaacatcatctcccgcacggctatcgacggcc

SEQ ID NO: 863827 - DNA, 75 bp, synthetic construct
  source 1..75: mol_type = other DNA
aaaaaaattaacagttcttttcgacgcggagccataattgaactaacagaatgcgttaaacgcataaaagaagct

SEQ ID NO: 863828 - DNA, 75 bp, synthetic construct
  source 1..75: mol_type = other DNA
cgtgccagggggaaacaccagataacgtcaatgtctgaaattgtcagggacctttcccgactgggctggacagat

SEQ ID NO: 863829 - DNA, 75 bp, synthetic construct
  source 1..75: mol_type = other DNA
atggctattccaaaattacaggcttacgcattgccggagtctcacgatattccacagaataaagtcgattgggcc

SEQ ID NO: 863830 - DNA, 75 bp, synthetic construct
  source 1..75: mol_type = other DNA
atggctattccaaaattacaggcttacgcactgccggagtctcacgatatccctaagaataaagtcgactgggcc

SEQ ID NO: 863831 - DNA, 75 bp, synthetic construct
  source 1..75: mol_type = other DNA
cttcaatgtctgaaattgtcagggacctatcacgcctgggctggacagatgatcgaattggaacagaggctgggc

SEQ ID NO: 863832 - DNA, 75 bp, synthetic construct
  source 1..75: mol_type = other DNA
cgggccagggggaaacaccagataacgtcaatgtctgaaattgtcagggacctttcccgtctgggctggacagat

SEQ ID NO: 863833 - DNA, 75 bp, synthetic construct
  source 1..75: mol_type = other DNA
cgggccagggggaaacaccagataacgtcaatgtctgaaattgtcagggacctttcccgactgggctggactgat

SEQ ID NO: 863834 - DNA, 75 bp, synthetic construct
  source 1..75: mol_type = other DNA
aagtggtggccaacgattacaatcccaatgtcatggcgccgggtgagaagaaactgctgaagcagtcactggaga

SEQ ID NO: 863835 - DNA, 75 bp, synthetic construct
  source 1..75: mol_type = other DNA
atgggggattctgtgacagcggagatactgggtaacatgattcgtcagtatttcagtcaggtacgaaatgaagaa

SEQ ID NO: 863836 - DNA, 75 bp, synthetic construct
  source 1..75: mol_type = other DNA
gacataaccgggccagggggaaacaccagataacttcaatgtctgatattgtcagggacctgtcgcggctgggct

SEQ ID NO: 863837 - DNA, 75 bp, synthetic construct
  source 1..75: mol_type = other DNA
tgtggccggacgttctggccgggtggtgatgaccgaagaattgctgccagcacctatccccgccagcaaagcggc

SEQ ID NO: 863838 - DNA, 75 bp, synthetic construct
  source 1..75: mol_type = other DNA
acgtaaccagctgattattaccggggtatatgcccacattggctgtatgactaccgcaaccgacgcatttatgcg

SEQ ID NO: 863839 - DNA, 75 bp, synthetic construct
  source 1..75: mol_type = other DNA
tttcagtcaggtacgaactgaagaagagaccatacaggctctgaatcatctgcgcagggtgcttcatgaggtcag

SEQ ID NO: 863840 - DNA, 75 bp, synthetic construct
  source 1..75: mol_type = other DNA
taccgtgaactgggtattcccctgccgaaagtccgcaccctggttaactgcatggattatacggcgctggccaga

SEQ ID NO: 863841 - DNA, 75 bp, synthetic construct
  source 1..75: mol_type = other DNA
ggccatgaatccgggaacaacccgtattttattaacgttaaccgtggcgcaaacctgaaacgccaaccgcaaacc

SEQ ID NO: 863842 - DNA, 75 bp, synthetic construct
  source 1..75: mol_type = other DNA
gtacacctgacaacgatttaataagtatcaaacaggattacgaaagacgtgattgggctaaaaagtttggcgtta

SEQ ID NO: 863843 - DNA, 75 bp, synthetic construct
  source 1..75: mol_type = other DNA
atccgtctctgaaacaagagcaacgtaactggaacaagacgatccgtgatacaatgatcggtatcgggcagattc

SEQ ID NO: 863844 - DNA, 75 bp, synthetic construct
  source 1..75: mol_type = other DNA
cggagcaactacatagaaaaacgcatcgtgctgatgcgctggtggggcgaatttgtcgaggctgcggcgacgggc

SEQ ID NO: 863845 - DNA, 75 bp, synthetic construct
  source 1..75: mol_type = other DNA
tgcttacccccatcaaggagcgcggcaacctggaaacactcaagcgggttttacagcgcgttaatgaggtaatgg

SEQ ID NO: 863846 - DNA, 75 bp, synthetic construct
  source 1..75: mol_type = other DNA
attgaaaacagtaccagtgatgagtcattatgtcagcaacctggagataagcacaaaaaatctcaagaagatctt

SEQ ID NO: 863847 - DNA, 75 bp, synthetic construct
  source 1..75: mol_type = other DNA
tattctgaccgagccgaatgcgtccatcaccgtgcagtacaaagcgctgatggcgaccgaaggcgtgaacatcga

SEQ ID NO: 863848 - DNA, 75 bp, synthetic construct
  source 1..75: mol_type = other DNA
aatcaaagacgccatgaagctgctgattgaagaagaagcggcgaaactggtgaacccggaagagctgaagcaaga

SEQ ID NO: 863849 - DNA, 75 bp, synthetic construct
  source 1..75: mol_type = other DNA
cgccgctagcgcagaagtttattcagtcgaccctgcatctggatatcccggaagactatcaggaacgactgcaag

SEQ ID NO: 863850 - DNA, 75 bp, synthetic construct
  source 1..75: mol_type = other DNA
ctcgcccgctgtcggatatcacgggtaaagatatggatatccgtaaaggtcagaagaaacggtttctgacacatg

SEQ ID NO: 863851 - DNA, 75 bp, synthetic construct
  source 1..75: mol_type = other DNA
ccagccgcagtacagatccagtatcaagggaaaactgtcgatctgagtcgttttatcagaactaaccaggttgcg

SEQ ID NO: 863852 - DNA, 75 bp, synthetic construct
  source 1..75: mol_type = other DNA
tatcactattgacgcagattatgtgagcaaacatctggatgcgttggtggcagatgaagatctgagccgttttat

SEQ ID NO: 863853 - DNA, 75 bp, synthetic construct
  source 1..75: mol_type = other DNA
atctggagcaacgccgcccactgatggcgtggtggggtgattttatcgaacaggcagcaaccggaagccttagtg

SEQ ID NO: 863854 - DNA, 75 bp, synthetic construct
  source 1..75: mol_type = other DNA
ataaaatagctttagaaagatccccctggaaagatgactcaccacgagatgcaaaatcaattattgaattcaaaa

SEQ ID NO: 863855 - DNA, 75 bp, synthetic construct
  source 1..75: mol_type = other DNA
atgacaatattcctgccacgtgagttcaatactatatatacaataaaaagtgagttaaaagataaaacgcatcaa

SEQ ID NO: 863856 - DNA, 75 bp, synthetic construct
  source 1..75: mol_type = other DNA
gcggagccataattgaactaacagaatgcgttaaacgcataaaagaagctttagaacaaagcatcgctttaaaag

SEQ ID NO: 863857 - DNA, 75 bp, synthetic construct
  source 1..75: mol_type = other DNA
attaataatcgacatgttaatcttgatttttatattattgctgatgtttataacgacgatttctttcaaaaagtc

SEQ ID NO: 863858 - DNA, 75 bp, synthetic construct
  source 1..75: mol_type = other DNA
aggtgtttccatcacatcaattgtcctaaataatcgacatattaatcttgatttttatattattgctgatgttta

SEQ ID NO: 863859 - DNA, 75 bp, synthetic construct
  source 1..75: mol_type = other DNA
tcgatgctaattatcttgatggtgtaggtgtttccatcacatcaattgtcctaaataatcgacatattaatcttg

SEQ ID NO: 863860 - DNA, 75 bp, synthetic construct
  source 1..75: mol_type = other DNA
gccagcaatacgccctgaagaactccccgaatttatgcagaagctggcaacggcacgggtggaacgacaaacgcg

SEQ ID NO: 863861 - DNA, 75 bp, synthetic construct
  source 1..75: mol_type = other DNA
caacctggaaactctgaaacgcgttttacaacgcatcaatgaagtgatggattttgctgccaacagtgggctgat

SEQ ID NO: 863862 - DNA, 75 bp, synthetic construct
  source 1..75: mol_type = other DNA
tttgaaccgcaacgtgccgcgttgttaatccatgatatgcaggactattttgtcagcttctggggtgagaactgc

SEQ ID NO: 863863 - DNA, 75 bp, synthetic construct
  source 1..75: mol_type = other DNA
actgccaggggtatggcaggtttatgacaagagcgattatttagaagaacagcgtaaagcttaccaggcgtggtg

SEQ ID NO: 863864 - DNA, 75 bp, synthetic construct
  source 1..75: mol_type = other DNA
ctctatgaacaacggttccgatatgctttttactaaggaaggaagcagggaaccagttggtcggacatcattgca

SEQ ID NO: 863865 - DNA, 75 bp, synthetic construct
  source 1..75: mol_type = other DNA
gtgaccaaaaaaaccaagtccttatcaccagcaacgatcaaaagcctccagcgaaaagccagcaacgaaaaaaag

SEQ ID NO: 863866 - DNA, 75 bp, synthetic construct
  source 1..75: mol_type = other DNA
atatggacgaaatgcgcataagcggcttaagcaggaacactggacgctgcatgatttccgacacacgtttacaac

SEQ ID NO: 863867 - DNA, 75 bp, synthetic construct
  source 1..75: mol_type = other DNA
caaaaaatctcggtatcgaactgactgacgatcagctgaatattacgccgccacctgacgtaaacgggctgataa

SEQ ID NO: 863868 - DNA, 75 bp, synthetic construct
  source 1..75: mol_type = other DNA
tacacaaatcagccgtcttggtgggccgaattttcatgaaattccgattaatcgccctacctgcccgtaccacaa

SEQ ID NO: 863869 - DNA, 75 bp, synthetic construct
  source 1..75: mol_type = other DNA
ttcgacctgcttgacccaacgaaactcatcccggaagagttagtccccgttcagcgcgtcggcaaaatggtgctt

SEQ ID NO: 863870 - DNA, 75 bp, synthetic construct
  source 1..75: mol_type = other DNA
gtcaggtggcttttgccgcaaagcgtaagcctactgcgtcacagaacaggcggaagaaagggtacgcagtaagat

SEQ ID NO: 863871 - DNA, 75 bp, synthetic construct
  source 1..75: mol_type = other DNA
ctggaaaccactggcaggtaaagcctcactggtgtgggatgaagcgcagaaactcaccggacgtgatccagactt

SEQ ID NO: 863872 - DNA, 75 bp, synthetic construct
  source 1..75: mol_type = other DNA
cacatcagcaccagtcccccctgcacgattcgagcgaagcgaaacccgggatggactcactggcacctgaggacg

SEQ ID NO: 863873 - DNA, 75 bp, synthetic construct
  source 1..75: mol_type = other DNA
ccaccgccgcgagttgtgggaagcgattgaagcaggcgattttccggaatacgaactgggcttccagttgattcc

SEQ ID NO: 863874 - DNA, 75 bp, synthetic construct
  source 1..75: mol_type = other DNA
atgtcgcaacataacgaaaagaacccacatcagcaccagtcaccactacacgactccagcgaagcgaaaccggga

SEQ ID NO: 863875 - DNA, 75 bp, synthetic construct
  source 1..75: mol_type = other DNA
gccggcgaacaataagctgcggatggaggataagcgccaggaagagcatatcaagctcgcaacggaatatggcaa

SEQ ID NO: 863876 - DNA, 75 bp, synthetic construct
  source 1..75: mol_type = other DNA
atgaactgggcttccagttgatccccgaagaagatgaattcaaattcgacttcgacctgcttgacccaacgaaac

SEQ ID NO: 863877 - DNA, 75 bp, synthetic construct
  source 1..75: mol_type = other DNA
ctggaaaccactggcaggtaaagcctcgctggtttgggatgaagcgcagaaacttaccggacgtgatccagactt

SEQ ID NO: 863878 - DNA, 75 bp, synthetic construct
  source 1..75: mol_type = other DNA
tttggcgaatattattcccatccgcgtctgttctggctaagtcagacgccattcgagcagcgccatattgtcgat

SEQ ID NO: 863879 - DNA, 75 bp, synthetic construct
  source 1..75: mol_type = other DNA
ctgccgtttgggatcttttttgcctggttactggtgcgttgcacgtttccgggcaaagctctgctcgacagcgta

SEQ ID NO: 863880 - DNA, 75 bp, synthetic construct
  source 1..75: mol_type = other DNA
acgggatgggaattgaaccgggattaattaatctcgataccttccttgaaaccgcagcgtattgtgaccagatgg

SEQ ID NO: 863881 - DNA, 75 bp, synthetic construct
  source 1..75: mol_type = other DNA
acgggatgggaattgaacctggattaattaatctcgatacatttcttgaaacggcagcgtattgtgaccagatgg

SEQ ID NO: 863882 - DNA, 75 bp, synthetic construct
  source 1..75: mol_type = other DNA
gaatgataacttcaatatgaccgtagagatgaaaggacaagaaatctatgattttaatagtggtactacttttgc

SEQ ID NO: 863883 - DNA, 75 bp, synthetic construct
  source 1..75: mol_type = other DNA
ttggagtcattacctaacatcccaaacagtgattcacagtacttattcagtgaacaggcaatatgctacgcggga

SEQ ID NO: 863884 - DNA, 75 bp, synthetic construct
  source 1..75: mol_type = other DNA
ttcagcgtgacgggcaggttattaccctaagccgtgattactcttggtgctatgacgctgatgtactggcgaaga

SEQ ID NO: 863885 - DNA, 75 bp, synthetic construct
  source 1..75: mol_type = other DNA
attgaaaatatctgtcaggtatttggcggtattatgtatgtacatgcagggcaaatctgtattacgacggatcgt

SEQ ID NO: 863886 - DNA, 75 bp, synthetic construct
  source 1..75: mol_type = other DNA
ccgaaagccagtattgcggcaaagtatcaggaatttctacaattagaagtacgctttggtggtgattataccagt

SEQ ID NO: 863887 - DNA, 75 bp, synthetic construct
  source 1..75: mol_type = other DNA
gcgcggtgcggttctcgctgccgccgtcatgtcgtttccgctgatggtgcgggcaattcgtctggcgctggaagg

SEQ ID NO: 863888 - DNA, 75 bp, synthetic construct
  source 1..75: mol_type = other DNA
gggcgattcgtctggcgctggaaggggttgatgtcaaactggaacaggccgcaagaacgctgggggccgggcgtt

SEQ ID NO: 863889 - DNA, 75 bp, synthetic construct
  source 1..75: mol_type = other DNA
acgaaaacattagcaaaacaatatgctgggccaaagtggaccgataaatttttagggaaaggtgtagtatctatt

SEQ ID NO: 863890 - DNA, 75 bp, synthetic construct
  source 1..75: mol_type = other DNA
aatacagtaactttcactacttccgaagcatgggatttaaaagtattcgattgtattactattgtacttgatgaa

SEQ ID NO: 863891 - DNA, 75 bp, synthetic construct
  source 1..75: mol_type = other DNA
acaatgcagttattgcagcagatggacgtgttattactaaatcactagatttcggatggatttatagtaaagagc

SEQ ID NO: 863892 - DNA, 75 bp, synthetic construct
  source 1..75: mol_type = other DNA
ccgcaacagtacagaacggggttacgcttatctgtggctgcggctggctaaaccttatgccggtgatacgtacgg

SEQ ID NO: 863893 - DNA, 75 bp, synthetic construct
  source 1..75: mol_type = other DNA
atcgcggcattccccgtagctatcgcatgatggagggattcggcatccatacctataaaatgattaatgctgaag

SEQ ID NO: 863894 - DNA, 75 bp, synthetic construct
  source 1..75: mol_type = other DNA
ttggccacgtgaagcccccccgacagagggtgggtttacaacctacccacaaccagtaaatggatacaagtctcg

SEQ ID NO: 863895 - DNA, 75 bp, synthetic construct
  source 1..75: mol_type = other DNA
atcagtttgaccggaaactgaataattgcgaagaagtggagcagccaaccgcgctgctattaacagcatgtttac

SEQ ID NO: 863896 - DNA, 75 bp, synthetic construct
  source 1..75: mol_type = other DNA
tcgataaacagactctggaggttcgatttaaatcaccggatgttttatttggcttaggaagcacagagctaaaac

SEQ ID NO: 863897 - DNA, 75 bp, synthetic construct
  source 1..75: mol_type = other DNA
tggttgagtgcagccgtgtgatattgcgtcgcaagaacgacatcgcgcggctgacatctggcgcaccatccgtat

SEQ ID NO: 863898 - DNA, 75 bp, synthetic construct
  source 1..75: mol_type = other DNA
gtaaaggtgttcgtcttgctggtctttatggcgtgaaacgaactctcgatttaccacacgccgaaccgctgcctc

SEQ ID NO: 863899 - DNA, 75 bp, synthetic construct
  source 1..75: mol_type = other DNA
aaacagccaaacctaaagacaaagattataaactctctgatgaacgtggtttatatctgctggtaaaaaccacgg

SEQ ID NO: 863900 - DNA, 75 bp, synthetic construct
  source 1..75: mol_type = other DNA
aagttacgccagaagcgtactggaggcgctggataaagatattttcccgtatctgggcaaacgaagcgttactga

SEQ ID NO: 863901 - DNA, 75 bp, synthetic construct
  source 1..75: mol_type = other DNA
aggcatctactttcgataatgaaaagaacctgccagcagattacattccttcgcttcttgaatcataccctccag

SEQ ID NO: 863902 - DNA, 75 bp, synthetic construct
  source 1..75: mol_type = other DNA
ctcagctgcggcaggctcaaaaacagcggctgcgtcatctgccagtgccgcgtcaacaagtgccgggcaggcctc

SEQ ID NO: 863903 - DNA, 75 bp, synthetic construct
  source 1..75: mol_type = other DNA
tccgaaggtggtgacccgggcgaaaagaagcgaaaggaaaaactcactcagaaaatctctgccaccaatacgttc

SEQ ID NO: 863904 - DNA, 75 bp, synthetic construct
  source 1..75: mol_type = other DNA
aagtactgactggacaggaacaacgaatcctgatattgcttattttaataatatggcactatcgcaaggtcgtac

SEQ ID NO: 863905 - DNA, 75 bp, synthetic construct
  source 1..75: mol_type = other DNA
tggtacccggaaatggcagcactctgccgcaggagacaccggactttaaaaggacagacgttacggtcacgaccc

SEQ ID NO: 863906 - DNA, 75 bp, synthetic construct
  source 1..75: mol_type = other DNA
aaccatgagcatggcccaggcgggattactgattcgaaaactgaaaggcacaccctcaaaacgcacatggaccat

SEQ ID NO: 863907 - DNA, 75 bp, synthetic construct
  source 1..75: mol_type = other DNA
atgaaatgcaaatcggtatcaaaaaaatcgccgcgctataaacagctaaagcagatgcgggaaacgctggcaaaa

SEQ ID NO: 863908 - DNA, 75 bp, synthetic construct
  source 1..75: mol_type = other DNA
tatccggttcgcttccggcgcggattgagagtcacgagaagaacgatatctacgcccatctggacgatcaggggc

SEQ ID NO: 863909 - DNA, 75 bp, synthetic construct
  source 1..75: mol_type = other DNA
gtcaacagccggcgtgaaaagcgaggtgccggttttgaactgcgaacggatgagcatggggctgtacgtgcggca

SEQ ID NO: 863910 - DNA, 75 bp, synthetic construct
  source 1..75: mol_type = other DNA
gggagcgaaatctacctcaatcagtcagtcactgaagtggttgagcaggtattacgtaaacatggtctggaaggg

SEQ ID NO: 863911 - DNA, 75 bp, synthetic construct
  source 1..75: mol_type = other DNA
ttgtcacccgggcactgaacgactgttccggttttggcggtcgggtgtattccccgcgcaccctgccggtgatgc

SEQ ID NO: 863912 - DNA, 75 bp, synthetic construct
  source 1..75: mol_type = other DNA
tgtcacatttatcttcattggctatgcaagtcgtaatacaaggtgggacaaaactgagacacataaggcctcgca

SEQ ID NO: 863913 - DNA, 75 bp, synthetic construct
  source 1..75: mol_type = other DNA
tcacttcagtcatggcagaaaggtatgcatgctggagaagtcgtgaaagaaaagaagactgctgcgccgtttgtc

SEQ ID NO: 863914 - DNA, 75 bp, synthetic construct
  source 1..75: mol_type = other DNA
aacggggaaacgccggtaccagccggaacggtgggttacgcgcaacaaaacggaatgcgcgtaaaggtcagccgc

SEQ ID NO: 863915 - DNA, 75 bp, synthetic construct
  source 1..75: mol_type = other DNA
ctgacatcctacacatcatccgtatctatcaggcaaacgctttattgcagcttctgcaagaaaccacagcacgcc

SEQ ID NO: 863916 - DNA, 75 bp, synthetic construct
  source 1..75: mol_type = other DNA
gtgaggtgaacgtgcgcggcgtgtatccgtcattccgcctgcattttgatttgtctgccggtgatgaaaccggca

SEQ ID NO: 863917 - DNA, 75 bp, synthetic construct
  source 1..75: mol_type = other DNA
ccgccgccactgcatgatgaatggtctggacagcatcggcctgaccctgcagcacgacgacgctattgcgtctta

SEQ ID NO: 863918 - DNA, 75 bp, synthetic construct
  source 1..75: mol_type = other DNA
atggtaagtggtcgttatgtcacggcaaacgaaagcgcatcggaaaaagataatcaggataataacgggtattat

SEQ ID NO: 863919 - DNA, 75 bp, synthetic construct
  source 1..75: mol_type = other DNA
ttattggtatcgcagcgtttgtttccggtatgttttcccgctggctggcgaaaaccatcactctctcgccacata

SEQ ID NO: 863920 - DNA, 75 bp, synthetic construct
  source 1..75: mol_type = other DNA
aaggtattgaaaatactttaaggtattcagcttatcataggactttagaaagtttcattaataatattgttaatg

SEQ ID NO: 863921 - DNA, 75 bp, synthetic construct
  source 1..75: mol_type = other DNA
gcacacgcacatactgtcggtattggtgctcatacgcactccgttgcgattggctcacatggacacaccatcacc

SEQ ID NO: 863922 - DNA, 75 bp, synthetic construct
  source 1..75: mol_type = other DNA
tcttctacggcaatagctttaacaaccagctgctgccggtgaaattaagcgatgcagaagtggacgaactgtttg

SEQ ID NO: 863923 - DNA, 75 bp, synthetic construct
  source 1..75: mol_type = other DNA
ttctcggcggttggctggacggtgctcgccagtttgatcgaaaaccggctggcttcggatattcatggccgcccg

SEQ ID NO: 863924 - DNA, 75 bp, synthetic construct
  source 1..75: mol_type = other DNA
ctctgttgcccgcgctgtatggaactggattttcttctgaacagtctgccagggaaatgcctgataacattacgt

SEQ ID NO: 863925 - DNA, 75 bp, synthetic construct
  source 1..75: mol_type = other DNA
tcgccagctccggcgggcggtagtggttccggcccgctgacactgcatccgtctgtggtatttacccgctggcgg

SEQ ID NO: 863926 - DNA, 75 bp, synthetic construct
  source 1..75: mol_type = other DNA
gcagacttatcaggtgctgcctgctccgggcgcgaccccggctgaaccgttaccgccgggggaaccaacgcttta

SEQ ID NO: 863927 - DNA, 75 bp, synthetic construct
  source 1..75: mol_type = other DNA
tgaacaaaaaaaagcggcctatggtgcactggcggatgtgctggataatgacacctcgcgcaaagagctggtcga

SEQ ID NO: 863928 - DNA, 75 bp, synthetic construct
  source 1..75: mol_type = other DNA
ttgccgggattgtcggcttaagcaataccgcgtttacactgcgtgtttcgttcaccacgctgccactcaaacagt

SEQ ID NO: 863929 - DNA, 75 bp, synthetic construct
  source 1..75: mol_type = other DNA
atggctacagtaccaacaaggtcaggtagtccccgccagttaaccactaaacagaccggcgatgcgtgggaagca

SEQ ID NO: 863930 - DNA, 75 bp, synthetic construct
  source 1..75: mol_type = other DNA
tgaaaatcagcggagcgcgtctggaaaacaaaggccagtttgacggtaaatggctggatgaaaaagatccgctgc

SEQ ID NO: 863931 - DNA, 75 bp, synthetic construct
  source 1..75: mol_type = other DNA
attcgcgaagtcagcgaccgtgagtttgctgcggtgccgatccgtaccggccatccgcaaaatgaagtgcgcctg

SEQ ID NO: 863932 - DNA, 75 bp, synthetic construct
  source 1..75: mol_type = other DNA
tgggcagaccagacgccaccatcacgcgatacgacaaaagcacgttcacctgctcatcggcctgtactgacgcgg

SEQ ID NO: 863933 - DNA, 75 bp, synthetic construct
  source 1..75: mol_type = other DNA
ctttctgaactacggtgtagtcttcacagatgtgggaatggcgtgggagattttctcactgcgcttcttgcgtga

SEQ ID NO: 863934 - DNA, 75 bp, synthetic construct
  source 1..75: mol_type = other DNA
tatgtaccttcaccgttggcggcaactacggtgggacgtgtttgcgcggtgatgaatcactggtcatcaaaaaaa

SEQ ID NO: 863935 - DNA, 75 bp, synthetic construct
  source 1..75: mol_type = other DNA
tggctggatgaaaaagatccgctacaaaacgcctatgtgcaggccaacggtcaggtgatcaatcaggatccgtat

SEQ ID NO: 863936 - DNA, 75 bp, synthetic construct
  source 1..75: mol_type = other DNA
ctcagcaaccgacgaatggggttgatgaaatattacgggatgatggattgcggtttttgcaaaaagcccagcgcg

SEQ ID NO: 863937 - DNA, 75 bp, synthetic construct
  source 1..75: mol_type = other DNA
catgtttctcattcatacaatcaactttcattccattgaaaataaaggaattgtttgaagagaagaaaaacatga

SEQ ID NO: 863938 - DNA, 75 bp, synthetic construct
  source 1..75: mol_type = other DNA
cgtgaacgagcgtggcggcgagatcgatctgataatgcgtgaaggccagaccaccgtttttgtcgaggtgcgtta

SEQ ID NO: 863939 - DNA, 75 bp, synthetic construct
  source 1..75: mol_type = other DNA
cctggcgggtggcatcaacgaggatttttatcttgcacagcttgctgccctgggcagaccagatgccaccatcac

SEQ ID NO: 863940 - DNA, 75 bp, synthetic construct
  source 1..75: mol_type = other DNA
atggacgtgacaaacgatgattacatccatctgttgtcggcactgttgccccccggtccggcgtggtcagccagc

SEQ ID NO: 863941 - DNA, 75 bp, synthetic construct
  source 1..75: mol_type = other DNA
tgaaatattacgggatgatggattgcggtttttgcaaaaagcccagcgcggcgcaaaaccgctggaaaaaccact

SEQ ID NO: 863942 - DNA, 75 bp, synthetic construct
  source 1..75: mol_type = other DNA
gtcggtggtatttacccgctggcgggagcgcagcatacggcgttctgctgaacctgacgacagtcactattcaaa

SEQ ID NO: 863943 - DNA, 75 bp, synthetic construct
  source 1..75: mol_type = other DNA
ggccagaagagggaatgcgtcgcctgaccggcgggattgccgaccagcactacaccccgaccatcagttcgttga

SEQ ID NO: 863944 - DNA, 75 bp, synthetic construct
  source 1..75: mol_type = other DNA
tttgatgttaaacctgattataatttacggattatgcagcctgggcaaacattagtatctgtagcaacaaatata

SEQ ID NO: 863945 - DNA, 75 bp, synthetic construct
  source 1..75: mol_type = other DNA
ctgcgtgtatcgcgaagcggaaagcaaagaagcccagatagaagcgctggcggggattcgtgcaattttctatac

SEQ ID NO: 863946 - DNA, 75 bp, synthetic construct
  source 1..75: mol_type = other DNA
tagagaaaatcatggagaaggaattgaacgaatttgcaatgctttagctaaattggctcaacgagatgacgttca

SEQ ID NO: 863947 - DNA, 75 bp, synthetic construct
  source 1..75: mol_type = other DNA
cgcgagtatgtgtaactggacagcatcgtgagatgttggatcaagtgttaaaattatttgagattaagcctgact

SEQ ID NO: 863948 - DNA, 75 bp, synthetic construct
  source 1..75: mol_type = other DNA
tcgtgagtgaaactattcgtcttttagatgatgatgccgcatatcagtcaatgagtcatgcaaataatccttatg

SEQ ID NO: 863949 - DNA, 75 bp, synthetic construct
  source 1..75: mol_type = other DNA
gggtggcggcggaggttccggcagtggtcagggccaggccagccaggatggtgaaggtcaggatgaatttgtctt

SEQ ID NO: 863950 - DNA, 75 bp, synthetic construct
  source 1..75: mol_type = other DNA
tgaacggcaaaaacaaaagcatggtgaatcgccagcgtttcttacgccgttataaagcgcaaattaaacagtcga

SEQ ID NO: 863951 - DNA, 75 bp, synthetic construct
  source 1..75: mol_type = other DNA
ccgaacgcgattatgcaggtgcaattattcaggtgacaagtgcacttaatacacaaacttttatttcaaataaac

SEQ ID NO: 863952 - DNA, 75 bp, synthetic construct
  source 1..75: mol_type = other DNA
aaacactggggcaggagctggccgcatggtctgtgccgcacaattacgccatgctctttctgaaaaaaagcactg

SEQ ID NO: 863953 - DNA, 75 bp, synthetic construct
  source 1..75: mol_type = other DNA
agtatcaacatacctttaaggcgattaatcaacgtaacggagagcgcaacaacgcgtttctcaccattggagtgc

SEQ ID NO: 863954 - DNA, 75 bp, synthetic construct
  source 1..75: mol_type = other DNA
attgtccagaacaaacaatcagtatcaactccaagtaccagtttaccgaagatgatgcagaggcaattaacggga

SEQ ID NO: 863955 - DNA, 75 bp, synthetic construct
  source 1..75: mol_type = other DNA
atgaatatcagaacagggatgtgcgcttttttattgagcttagtgctgcctgcacaggccaccagctttaccgaa

SEQ ID NO: 863956 - DNA, 75 bp, synthetic construct
  source 1..75: mol_type = other DNA
cagtgtttttaaagatacttatcaatatggttatacaagctcaggtcaaaatacctggggtgtacaaggctcagt

SEQ ID NO: 863957 - DNA, 75 bp, synthetic construct
  source 1..75: mol_type = other DNA
ctactttgaattgctggcacaaggtgaagaagcattaagcattgacgagtacgcggagtgcttagggtttaaagg

SEQ ID NO: 863958 - DNA, 75 bp, synthetic construct
  source 1..75: mol_type = other DNA
atgaacgctaacgctaaatatccggcatgggtttttgagttatatgcccgctactttgaattgctggcaccaggt

SEQ ID NO: 863959 - DNA, 75 bp, synthetic construct
  source 1..75: mol_type = other DNA
cctttaaaccgactggcgaccagcaaaaagatgctattgcccacatcgaagttatgcaggaacgagcagtaaaag

SEQ ID NO: 863960 - DNA, 75 bp, synthetic construct
  source 1..75: mol_type = other DNA
aacctggttttgcgcccgctatgcatggtattgccagcagatgacacagccaagagaactggaattagaacattg

SEQ ID NO: 863961 - DNA, 75 bp, synthetic construct
  source 1..75: mol_type = other DNA
aacctggttttgcgcacgttatgcctggtattgccaacaaatgatgcaaaccagagaacttgaattagaacactg

SEQ ID NO: 863962 - DNA, 75 bp, synthetic construct
  source 1..75: mol_type = other DNA
ataatgtcgggagataacactgatattagtgccgggcagtcatttacagttgtagcagaaggtgctgttagcctg

SEQ ID NO: 863963 - DNA, 75 bp, synthetic construct
  source 1..75: mol_type = other DNA
gacggcccgtgtggccagtgcaaaagaaggggatatctacgcctggcaggatgcatcaggtatgtaccgggtgaa

SEQ ID NO: 863964 - DNA, 75 bp, synthetic construct
  source 1..75: mol_type = other DNA
gtgcgttcagcgactggttgccccgcaaccagtcgctgcactgggatctgcccataccctgtatgaggagttcag

SEQ ID NO: 863965 - DNA, 75 bp, synthetic construct
  source 1..75: mol_type = other DNA
ccctacagcgagattgtctgctggcgaccaccgttacttcctcgtccgaaaatcaccgggaccatgacggcccgt

SEQ ID NO: 863966 - DNA, 75 bp, synthetic construct
  source 1..75: mol_type = other DNA
ccggtataacggattcagacgggaatacagccgaaatattcacggcattatctgaagagctcaaaattgaacttg

SEQ ID NO: 863967 - DNA, 75 bp, synthetic construct
  source 1..75: mol_type = other DNA
ctgatgctgcctggttcctgcgtaaatccgcaaccctgataatgggaaccggattactggaaagcctgactgaac

SEQ ID NO: 863968 - DNA, 75 bp, synthetic construct
  source 1..75: mol_type = other DNA
atgacccgcctgcaggacgagctgcgcacggaatctgtccgggctcaggcccgtgaacagtttaccggtgcggtg

SEQ ID NO: 863969 - DNA, 75 bp, synthetic construct
  source 1..75: mol_type = other DNA
tgctgtcaggataccgacgaagacaggactaccgtgctgtacttgcaggactgcgcccagcaggcaggacaggaa

SEQ ID NO: 863970 - DNA, 75 bp, synthetic construct
  source 1..75: mol_type = other DNA
aaagcggggccggtaaatcctcactctgtaatgcactgtttcagggggaggtcaccccggtcagtgatgttcacg

SEQ ID NO: 863971 - DNA, 75 bp, synthetic construct
  source 1..75: mol_type = other DNA
tcagggggaggtcaccccggtcagtgatgttcacgccggcacccgggaagtgcagcgcttccgtctgagtggcca

SEQ ID NO: 863972 - DNA, 75 bp, synthetic construct
  source 1..75: mol_type = other DNA
acggaggcggtattccgtctgttccggcccgtacatccggttgttgccgtatcggcccgcaccggctgggaactg

SEQ ID NO: 863973 - DNA, 75 bp, synthetic construct
  source 1..75: mol_type = other DNA
tccggcatggctattactggctggcaaaccaatgatgattgtgaatcgcccgaagccccccccccacgataacct

SEQ ID NO: 863974 - DNA, 75 bp, synthetic construct
  source 1..75: mol_type = other DNA
atgctccatccgcgagccagaaccatgttgttattatcgctccccgccgtggcaattgggattgcgtccagtctt

SEQ ID NO: 863975 - DNA, 75 bp, synthetic construct
  source 1..75: mol_type = other DNA
tggcttaccacgtcgcgctgattaaaggcaccgacgttgatcagccgcgtaacctggcgaaatcggttacggttg

SEQ ID NO: 863976 - DNA, 75 bp, synthetic construct
  source 1..75: mol_type = other DNA
cctggtcatcctaatcttctggcgtcctggtttgagggcgaaaaactgcagatcgccgctggcgaaagctatgtg

SEQ ID NO: 863977 - DNA, 75 bp, synthetic construct
  source 1..75: mol_type = other DNA
gttcggaggttcactgacactgcgtgactacgatggtcaggttgcagaggctatggccctggtacgagcgctgaa

SEQ ID NO: 863978 - DNA, 75 bp, synthetic construct
  source 1..75: mol_type = other DNA
gcagactcacagaaaaatcagggcagccgcggcagacggcgcttacgacacccggctctgtcacgatgaactgcg

SEQ ID NO: 863979 - DNA, 75 bp, synthetic construct
  source 1..75: mol_type = other DNA
ggggcatcagcaggtgctgtttgtggtgacgcaggccgacaaaacggagccctgccatgaatgggatatggccgg

SEQ ID NO: 863980 - DNA, 75 bp, synthetic construct
  source 1..75: mol_type = other DNA
gcacggagtctgtccgctctcaggcccgtgaacagtttaccggtgcggtggaccggatatttgacacggcggaga

SEQ ID NO: 863981 - DNA, 75 bp, synthetic construct
  source 1..75: mol_type = other DNA
ggtactgtggctgattaaagccgatgaccgcgccctgtctgtggatgagtatttctggcgacacatcctgcaccg

SEQ ID NO: 863982 - DNA, 75 bp, synthetic construct
  source 1..75: mol_type = other DNA
agagtatgaagccctgtaccgtgacattctgcccgaactggacctggtactgtggctgattaaagccgatgaccg

SEQ ID NO: 863983 - DNA, 75 bp, synthetic construct
  source 1..75: mol_type = other DNA
ctgctgctgctcgacgaaccgactaaccaccttgacctcgacatgcgccaggcactaaccgaagcgttaatcgag

SEQ ID NO: 863984 - DNA, 75 bp, synthetic construct
  source 1..75: mol_type = other DNA
gaaaaccagaccgacgaagcgccaaaagagaacgcgaacagcgcccaggcacgtaaagatcagaagcgtcgggaa

SEQ ID NO: 863985 - DNA, 75 bp, synthetic construct
  source 1..75: mol_type = other DNA
gaagaaacgcgccgcttctcaggtggggaaaaagcccgcctggtgctggcattaattgtctggcagcgtccgaat

SEQ ID NO: 863986 - DNA, 75 bp, synthetic construct
  source 1..75: mol_type = other DNA
tcctgcaccggggacatcagcgggtactgtttgtggtgatgcaggccgataaaacggagccctgccatgaatggg

SEQ ID NO: 863987 - DNA, 75 bp, synthetic construct
  source 1..75: mol_type = other DNA
cggcggacggctacatcaataccaatttgaccgccaacggcagcgtcggctggcagggtaaaaacatcgctgcca

SEQ ID NO: 863988 - DNA, 75 bp, synthetic construct
  source 1..75: mol_type = other DNA
tgcaaaacatgctggccagtgacagctcatggagcaacatcgccagcatcagcgccactctacctggaggcttca

SEQ ID NO: 863989 - DNA, 75 bp, synthetic construct
  source 1..75: mol_type = other DNA
tggtcagtgcgctaatgacagcacttcccgaccatgccgccagtcccctgatgacccgcctgcaggacgagctgc

SEQ ID NO: 863990 - DNA, 75 bp, synthetic construct
  source 1..75: mol_type = other DNA
ccgtgaacagtttaccggtgcggtggaccggatatttgacacagcggagagcgtctgtattgcctctgttgcacg

SEQ ID NO: 863991 - DNA, 75 bp, synthetic construct
  source 1..75: mol_type = other DNA
tcacgccggcacccgggaagtgaagcgtttccgtctgagtggacacggtcacagcatggttatcactgacctgcc

SEQ ID NO: 863992 - DNA, 75 bp, synthetic construct
  source 1..75: mol_type = other DNA
ggcgaagctgtctcgcctgaaaggtctggatgcctccattgaacatgatattgtgcatggtctgcaggcgctgcc

SEQ ID NO: 863993 - DNA, 75 bp, synthetic construct
  source 1..75: mol_type = other DNA
aatctcgcgggaatggatgatggtgagctagtgaggcttaaatatgcgacggacgccctgctgcattgtgcagac

SEQ ID NO: 863994 - DNA, 75 bp, synthetic construct
  source 1..75: mol_type = other DNA
acgcaccaaaattcgccgctggcgaggcatttgggcttcaggaggcgtccggcatgaaaggcattcttttccgtg

SEQ ID NO: 863995 - DNA, 75 bp, synthetic construct
  source 1..75: mol_type = other DNA
agaagcgcatcaagacgccagcagagaatatccgctttaagctcaatagccgttggttcgaccgttccgtcattc

SEQ ID NO: 863996 - DNA, 75 bp, synthetic construct
  source 1..75: mol_type = other DNA
gatatcctccgttcagataagtcagaaatggagaacgccgacgccaatgacatgatcgaaatgcagatgtatacc

SEQ ID NO: 863997 - DNA, 75 bp, synthetic construct
  source 1..75: mol_type = other DNA
acacccgattgatggcctgtccggtgaatatgcggagaaatccctagaagaatgggcggaacagattcgcaaagg

SEQ ID NO: 863998 - DNA, 75 bp, synthetic construct
  source 1..75: mol_type = other DNA
ctgctgctttcaatcacggatttatcaataagtctttacgtgaagttttcgacgttacacgcatgattctgtcag

SEQ ID NO: 863999 - DNA, 75 bp, synthetic construct
  source 1..75: mol_type = other DNA
cgggcgtgtggccagcgcaatggactccgattcccatcgcaaagaggcggcgcgtcgccgggtattgtcggagta

SEQ ID NO: 864000 - DNA, 75 bp, synthetic construct
  source 1..75: mol_type = other DNA
taacgagatagtggctccaaaacaggaattcctcgccacgctccccgacggtccagtaaagaacaacgtccttaa

SEQ ID NO: 864001 - DNA, 75 bp, synthetic construct
  source 1..75: mol_type = other DNA
ctttgctttatggaaagaagcgcctgataccattgaactgttcagaacacgaataaatcatgcctggcatcagaa

SEQ ID NO: 864002 - DNA, 75 bp, synthetic construct
  source 1..75: mol_type = other DNA
cttaccgctgaattagagcgaagcaaagcggaacttgaaaagaccaccgccgaggtagctaaattcaaacaggcg

SEQ ID NO: 864003 - DNA, 75 bp, synthetic construct
  source 1..75: mol_type = other DNA
gatatcctccgctcagataagtctgaaatggagaacgccgacgccaacgatatgatcgaaatgcagatgtatacc

SEQ ID NO: 864004 - DNA, 75 bp, synthetic construct
  source 1..75: mol_type = other DNA
cacgatgaactgcggcgtaagaaaatcagcgcgcttatccctccccgaaaaggtgcgggttactggcccggtgaa

SEQ ID NO: 864005 - DNA, 75 bp, synthetic construct
  source 1..75: mol_type = other DNA
atgagcgcgttagctgtattttcgtttcaggaagagcatcaggttcgtgtagtgatgattaacggcgatccgtgg

SEQ ID NO: 864006 - DNA, 75 bp, synthetic construct
  source 1..75: mol_type = other DNA
aactcagctatcgcatgacctacaacctggtatcaatgtttaccgaccttgccatccttgggctggtggacctta

SEQ ID NO: 864007 - DNA, 75 bp, synthetic construct
  source 1..75: mol_type = other DNA
cgttatgcgcgatgcccttaagctggcagatgaagccactatcacggcgcggatgaacgcgatcccgcactcaaa

SEQ ID NO: 864008 - DNA, 75 bp, synthetic construct
  source 1..75: mol_type = other DNA
gcaatggccaaggcagcggataacgcagactggaaggcacgctgggggagtgtccatcacacagaccgtatgttg

SEQ ID NO: 864009 - DNA, 75 bp, synthetic construct
  source 1..75: mol_type = other DNA
acccgtcgctttatcttccttgaagagggcgacattgcggaaattactcgccgttcggtaaacatcttcgataaa

SEQ ID NO: 864010 - DNA, 75 bp, synthetic construct
  source 1..75: mol_type = other DNA
tggcttaccacgttgcgctgatcaaaggcacagacgttgaccagccgcgtaacctggcaaaatcggtaacggttg

SEQ ID NO: 864011 - DNA, 75 bp, synthetic construct
  source 1..75: mol_type = other DNA
ccctggtggatgaaagcactcttgaatcggcaaatgtgctttggccaacgtttatttctggcaagtggtttgaaa

SEQ ID NO: 864012 - DNA, 75 bp, synthetic construct
  source 1..75: mol_type = other DNA
aaaaacagatcctcaggcggcagaaaaattaaacaaattaattgaggggtacacatatggtgaagagacgaaaat

SEQ ID NO: 864013 - DNA, 75 bp, synthetic construct
  source 1..75: mol_type = other DNA
gtgtggtgatttgcccatcaccgatatcaactctgatctggaaaaggcgttacccgcgcattttgaactggcagt

SEQ ID NO: 864014 - DNA, 75 bp, synthetic construct
  source 1..75: mol_type = other DNA
gaacatgcgcacgtatgaacgagagttgttgcgtgatgttgttcgtgggggtaggcggagtatgtcgtgtggtga

SEQ ID NO: 864015 - DNA, 75 bp, synthetic construct
  source 1..75: mol_type = other DNA
atcggcaaatgtgctttggccaacgtttatttctggcaagtggtttgaaaaggacggccgccggtttgttcatgg

SEQ ID NO: 864016 - DNA, 75 bp, synthetic construct
  source 1..75: mol_type = other DNA
ctctattactattttatcggcttctttgggatacttgccgcaatagcgataacgcttgtctggcaaaggcatacg

SEQ ID NO: 864017 - DNA, 75 bp, synthetic construct
  source 1..75: mol_type = other DNA
aaacaaaggccagtttgacggtaaatggctggatgaactgggctgggatgctgccgggcaactgattgatgggga

SEQ ID NO: 864018 - DNA, 75 bp, synthetic construct
  source 1..75: mol_type = other DNA
gattgtcatgcccctgttccaattccttgctatacctgcccttactttaaaccttggatagatgctcctcataat

SEQ ID NO: 864019 - DNA, 75 bp, synthetic construct
  source 1..75: mol_type = other DNA
tgcctcaatggcatcagacggattcatacatgtattcccggtgaaaaaagacaaaaccccgcgcaccggaaaggt

SEQ ID NO: 864020 - DNA, 75 bp, synthetic construct
  source 1..75: mol_type = other DNA
cggggccggtaaatcctcactctgtaatgccctgtttcagggggaggtcaccccggtcagtgatgttcacgccgg

SEQ ID NO: 864021 - DNA, 75 bp, synthetic construct
  source 1..75: mol_type = other DNA
ttcaaaattggccgaactcttgccgacgaacattatgaaaaatcacacgtaacagtgttggatgtcgggatcctg

SEQ ID NO: 864022 - DNA, 75 bp, synthetic construct
  source 1..75: mol_type = other DNA
cggatctgtgcacaatactgaacaccacgccggatcatctcaaccgtgttttatcgggtcttgagcgtaaaaagt

SEQ ID NO: 864023 - DNA, 75 bp, synthetic construct
  source 1..75: mol_type = other DNA
cgaaactcttcaacaaaaggatgtttttgagaaactcaagactataagcgatcaaccattatcggtcttgaagga

SEQ ID NO: 864024 - DNA, 75 bp, synthetic construct
  source 1..75: mol_type = other DNA
ctgaaacgcgcgattacgaggccattcggcaaattcacgcccagccggaggtgtattacaacacgctacaggtgc

SEQ ID NO: 864025 - DNA, 75 bp, synthetic construct
  source 1..75: mol_type = other DNA
cgagagatgattgaaatgtgcgacaactggttgcgggtagatcgcattgaactaaccgtgtttgtcgataacgcc

SEQ ID NO: 864026 - DNA, 75 bp, synthetic construct
  source 1..75: mol_type = other DNA
gatgcagagtatgaagccctgtaccgtgacattctgcctgaactggacctggtactgtggctgattaaagccgat

SEQ ID NO: 864027 - DNA, 75 bp, synthetic construct
  source 1..75: mol_type = other DNA
ttaaagccgatgaccgtgccctgtctgtggatgagtatttctggcgacacatcctgcaccggggacatcagcagg

SEQ ID NO: 864028 - DNA, 75 bp, synthetic construct
  source 1..75: mol_type = other DNA
gctggtcagtgcgctcatgacagcacttcccgaccatgccgccagtcccctgatgacccgcctgcaggacgagct

SEQ ID NO: 864029 - DNA, 75 bp, synthetic construct
  source 1..75: mol_type = other DNA
cattgacgtgcagcaacgcccgcgccgcagtcatgttgccgattttggtatctgcgtcgactcccgctggcacaa

SEQ ID NO: 864030 - DNA, 75 bp, synthetic construct
  source 1..75: mol_type = other DNA
cccggagaactcagtctgtgcagactgagtacaggcaatggcatctggccatccgtctgtgaccggaacggttag

SEQ ID NO: 864031 - DNA, 75 bp, synthetic construct
  source 1..75: mol_type = other DNA
aagccgcctatgtcaaagcaggcttcctggctgctgtcgccaaaggtgaagccaaatccccactgctgacaccgg

SEQ ID NO: 864032 - DNA, 75 bp, synthetic construct
  source 1..75: mol_type = other DNA
tgaaaacagaagctaaaagccgtattaacctgcgcgctcaaacgcttgaggaggctcggagcggcttagataagg

SEQ ID NO: 864033 - DNA, 75 bp, synthetic construct
  source 1..75: mol_type = other DNA
tgcacgtagcaatggctataaaacgcctataaaaagattgcgctggaaagatcatcgcaatatgtcgatgcgtgg

SEQ ID NO: 864034 - DNA, 75 bp, synthetic construct
  source 1..75: mol_type = other DNA
aaaaagtgacgcagaatctacaagtattaacagcgttggtttacatgatttacaacatagaatcgctctacttga

SEQ ID NO: 864035 - DNA, 75 bp, synthetic construct
  source 1..75: mol_type = other DNA
ccgctgatcgacgcgctggatgatgccaaactggcaccgatcgctgccaaagcactttctcacacgctgctgatg

SEQ ID NO: 864036 - DNA, 75 bp, synthetic construct
  source 1..75: mol_type = other DNA
cccggaagcgctgccggggtctcgttccatttctgatgatgacctgtgcgcctggtgtacccgtctgctttaccg

SEQ ID NO: 864037 - DNA, 75 bp, synthetic construct
  source 1..75: mol_type = other DNA
ttcaggcacccgtatcacccgacgccccggaggcgctgccgggatgtcgttccatttctgatgatgacctgtgcg

SEQ ID NO: 864038 - DNA, 75 bp, synthetic construct
  source 1..75: mol_type = other DNA
ctggaacatctgcgcaaactcaccagtcacgaacccgtgcctggcattatgggtaaaagcggggccggtaaatcc

SEQ ID NO: 864039 - DNA, 75 bp, synthetic construct
  source 1..75: mol_type = other DNA
tgcaaacatgctgcggctaaggtgaacgaggacttgggattactatctgcggaaaaatctgctgctattatgcgg

SEQ ID NO: 864040 - DNA, 75 bp, synthetic construct
  source 1..75: mol_type = other DNA
tttcagcgatcaaacgatgttcaaacatcatgcctgttctgcgcatatatggatggtcagcaggcgctggaacaa

SEQ ID NO: 864041 - DNA, 75 bp, synthetic construct
  source 1..75: mol_type = other DNA
ctgagtacaggtaatggcatctggccatccgtctgtgaccggaacggttacgcgtacggctgcccggagtttcag

SEQ ID NO: 864042 - DNA, 75 bp, synthetic construct
  source 1..75: mol_type = other DNA
ggccggtattcagccttctcccgcacaggcacagaacattcgcgaaaaaacggaggcggtattccgtctgttccg

SEQ ID NO: 864043 - DNA, 75 bp, synthetic construct
  source 1..75: mol_type = other DNA
gccaacccggattacctgcgtactatcgtcgatcaggaactgctgccgtatgtgcaggtgaaatacgctggtgca

SEQ ID NO: 864044 - DNA, 75 bp, synthetic construct
  source 1..75: mol_type = other DNA
gcgttaccattattgacccgaatggccgcccgccggtgcgtctggacttccagtggcgtaaaaactcccagacgg

SEQ ID NO: 864045 - DNA, 75 bp, synthetic construct
  source 1..75: mol_type = other DNA
ctccgtgaatcccccgccacctttccggtgcgcggggttttgtcttttttcaccgggaatacatgtatgaatccg

SEQ ID NO: 864046 - DNA, 75 bp, synthetic construct
  source 1..75: mol_type = other DNA
atttgacacggtggagagcgtctgtgttgcctctgttgcacgcacagttctgcgtgccgtccgtgacacggtggt

SEQ ID NO: 864047 - DNA, 75 bp, synthetic construct
  source 1..75: mol_type = other DNA
atactttgccgctttccgtgagtacctgaagcaggcttacggtcaggcactggcgatgtatcacgggcagactta

SEQ ID NO: 864048 - DNA, 75 bp, synthetic construct
  source 1..75: mol_type = other DNA
gccaacccggattacctgcgtaccatcgtcgatcaggaactgttaccgtacgtacagataaaatacgccggtgcg

SEQ ID NO: 864049 - DNA, 75 bp, synthetic construct
  source 1..75: mol_type = other DNA
caattgaaaaaccgctctcctccctgccttactcactttcccgtcacatcctggaacatctgcgtaaactcacca

SEQ ID NO: 864050 - DNA, 75 bp, synthetic construct
  source 1..75: mol_type = other DNA
ctcatgacagcgcttcccgaccatgccgccagccccctgatgacccgactgcaggacgagctgcgcacggagtct

SEQ ID NO: 864051 - DNA, 75 bp, synthetic construct
  source 1..75: mol_type = other DNA
gcgcattggtctgttaggccgcaacggcgcgggtaaatcgacattaatcaaactgttagccggtgaacttgcgcc

SEQ ID NO: 864052 - DNA, 75 bp, synthetic construct
  source 1..75: mol_type = other DNA
gggaggtcaccccggtcagtgatgttcacgccggcacccaggaagtacggcgcttccgtctgagtggccacggtc

SEQ ID NO: 864053 - DNA, 75 bp, synthetic construct
  source 1..75: mol_type = other DNA
caattgaaaaaccgctctcctccctccctgccttactcactttcccgtcacatcctggaacatctgcgcaaactc

SEQ ID NO: 864054 - DNA, 75 bp, synthetic construct
  source 1..75: mol_type = other DNA
agtcacgaacccgtgattggcattatgggtaaaagcggggccggtaaatcctcactctgtaatgcactgtttcag

SEQ ID NO: 864055 - DNA, 75 bp, synthetic construct
  source 1..75: mol_type = other DNA
cctctgttgcccgtacggttctgcgtgccgtccgtgacacggtggtctctgttgcccgcgctgtatggaactgga

SEQ ID NO: 864056 - DNA, 75 bp, synthetic construct
  source 1..75: mol_type = other DNA
cagaacattcgcgaaaaaacggaggcggtattccggctgtttcggcccgcaccggccgggagccggatacgctgg

SEQ ID NO: 864057 - DNA, 75 bp, synthetic construct
  source 1..75: mol_type = other DNA
gaccgtgccctgtctgtggatgagtatttctggcgacacatcctgcaccgggtgcgtattaccgtgaaggagatc

SEQ ID NO: 864058 - DNA, 75 bp, synthetic construct
  source 1..75: mol_type = other DNA
tcacgctggcacccgggaagtgcggcgcttccgtctgagtggccacggtcacagcatggttatcactgacctgcc

SEQ ID NO: 864059 - DNA, 75 bp, synthetic construct
  source 1..75: mol_type = other DNA
tcacagcatggttatcactgacctgcccggggtgggcgagagccgggacagggatgcagagtatgaagccctgta

SEQ ID NO: 864060 - DNA, 75 bp, synthetic construct
  source 1..75: mol_type = other DNA
atctgtccggtctcaggcccgtgaacagtttaccggtgcggtggaccggatatttgacacggcggagagcgtctg

SEQ ID NO: 864061 - DNA, 75 bp, synthetic construct
  source 1..75: mol_type = other DNA
aaaaatatcccatcgccagtaacaagaccgctcagggcagagccgagaaccgccgcgtcgcagtggtcattacta

SEQ ID NO: 864062 - DNA, 75 bp, synthetic construct
  source 1..75: mol_type = other DNA
aatctcaccacacagggtttaggaaaaaaatatcccatagccagtaacaagaccgcccagggccgcgccgagaac

SEQ ID NO: 864063 - DNA, 75 bp, synthetic construct
  source 1..75: mol_type = other DNA
gtgtggatcactattgcaccgttcgtgacacaaaccatggcagccaaattggcctcgacagggctaacacatgcc

SEQ ID NO: 864064 - DNA, 75 bp, synthetic construct
  source 1..75: mol_type = other DNA
aggaataccgttcactttttggtcttgccagtttgcgttttcagggcgaccaacatttgctggatattgctttct

SEQ ID NO: 864065 - DNA, 75 bp, synthetic construct
  source 1..75: mol_type = other DNA
atgctaaatcatgaaaaaggtctatactatttgacccgtgatttgcagtgttctattgatccccataattacctt

SEQ ID NO: 864066 - DNA, 75 bp, synthetic construct
  source 1..75: mol_type = other DNA
gccaaattggcctcgacagggctaacacatgcccgtatggatggacacactgaaccgccccggaaatcctggaga

SEQ ID NO: 864067 - DNA, 75 bp, synthetic construct
  source 1..75: mol_type = other DNA
gctttttgatactgtcgcagctattggtggaatcagtaatttcttcgatattaatggacgtagcaacccgggagt

SEQ ID NO: 864068 - DNA, 75 bp, synthetic construct
  source 1..75: mol_type = other DNA
aagaatcttgagactttcgacggcgctattcagttctggcgtaagtatggttccatgccgcgtctgcgtgatttt

SEQ ID NO: 864069 - DNA, 75 bp, synthetic construct
  source 1..75: mol_type = other DNA
tactttcgctattcagctttgtggtcaaatttggtctgatggtccagattagcgatctgtggcaatttttactgt

SEQ ID NO: 864070 - DNA, 75 bp, synthetic construct
  source 1..75: mol_type = other DNA
ccgatatgctgccagaatttggtggtgatactgcatacagcgatgacttcttcgttggtcgtgttggccgttgct

SEQ ID NO: 864071 - DNA, 75 bp, synthetic construct
  source 1..75: mol_type = other DNA
taatgtttgcctgcgtgtgatgctggatgctgctcaggaagcaggggtattgtttgaaccaattcgacaaacaaa

SEQ ID NO: 864072 - DNA, 75 bp, synthetic construct
  source 1..75: mol_type = other DNA
gtatggcagtacctaatgactgggctaatgtttgcctgcgtgtgatgctggatgctgctcaggaagcaggggtat

SEQ ID NO: 864073 - DNA, 75 bp, synthetic construct
  source 1..75: mol_type = other DNA
gggacacttgagatcaacaagaacatgctgctatggatcaatgacgctctgatggcggtatttttcctgttggtt

SEQ ID NO: 864074 - DNA, 75 bp, synthetic construct
  source 1..75: mol_type = other DNA
ttgcctttgcacttggtgtgttggcgctgttgggaagtcgtgttccgttagcgctgaagatctttttgatggctc

SEQ ID NO: 864075 - DNA, 75 bp, synthetic construct
  source 1..75: mol_type = other DNA
tggcgtatctgattttgccgctgtttgcatttgctaatgctggcgtttcactgcaaggtgtcacgctggaaggtt

SEQ ID NO: 864076 - DNA, 75 bp, synthetic construct
  source 1..75: mol_type = other DNA
gtacgttgatgatgattggcgcatggagtattgcatcgcaatgggatgccggtgccaatgcattaacgctggcag

SEQ ID NO: 864077 - DNA, 75 bp, synthetic construct
  source 1..75: mol_type = other DNA
cggcgatcaattggggtacggttaccgacgtagctaaacgcaaatcagcgtttgcaggtacgccgatcagcgtcg

SEQ ID NO: 864078 - DNA, 75 bp, synthetic construct
  source 1..75: mol_type = other DNA
ggatttgcatgaaaaatgttcagaaggacgatttatttgtgcatcctgtggttcctgctgtacgacgcatcagga

SEQ ID NO: 864079 - DNA, 75 bp, synthetic construct
  source 1..75: mol_type = other DNA
aatacaataattatcgggcgtgttgggtcatattgtggttcagtttatatttccggtaaaaaatgttgggttact

SEQ ID NO: 864080 - DNA, 75 bp, synthetic construct
  source 1..75: mol_type = other DNA
acagctacgactgtggtaaaaaaatgggctacatgcaggcattcgttaagtacggcctacgtaacctgaaggaag

SEQ ID NO: 864081 - DNA, 75 bp, synthetic construct
  source 1..75: mol_type = other DNA
ggaaggcgatctgtctgagtactctgttattcagaccaaagagcctttagataacgaaggtaaagtcagccgtat

SEQ ID NO: 864082 - DNA, 75 bp, synthetic construct
  source 1..75: mol_type = other DNA
ttcgtagtcgtattacctgatgtggttcttgatacagcgagcgcagatccgctgcgctacaacctggctgccatg

SEQ ID NO: 864083 - DNA, 75 bp, synthetic construct
  source 1..75: mol_type = other DNA
aagaacgccggaaaatatgcttttattcatgttgatttgctggaaggcgcgtcaaataaagaagtggtgattcag

SEQ ID NO: 864084 - DNA, 75 bp, synthetic construct
  source 1..75: mol_type = other DNA
ctttccaccacgaataccggggtctggacgctagcgaaaaaattgctttgtcgggataatcgtaacgaattgaat

SEQ ID NO: 864085 - DNA, 75 bp, synthetic construct
  source 1..75: mol_type = other DNA
tgtgcgatgaagaagatgcgcgtaatgcgattaacgcgggtgtcgtggcgctttccaccacgaataccggggtct

SEQ ID NO: 864086 - DNA, 75 bp, synthetic construct
  source 1..75: mol_type = other DNA
aaatccctgacgaccctccgcgacaccttgctcccaaaactcatctccggtgagctatccctggatgatcttccg

SEQ ID NO: 864087 - DNA, 75 bp, synthetic construct
  source 1..75: mol_type = other DNA
agttttacaacagaagaaggttatctagaacgtatcaagagagccattccctctgaagaagatatagttctaacc

SEQ ID NO: 864088 - DNA, 75 bp, synthetic construct
  source 1..75: mol_type = other DNA
gtttggatgaaattacgactttaattgttgattgtcctcattcaacgccagaatggacagactcaggagttattg

SEQ ID NO: 864089 - DNA, 75 bp, synthetic construct
  source 1..75: mol_type = other DNA
tgctgagctggctaaaaaacagtcggtagatgcgatgctgatgacgggcgacagctacgactgcgggaagaaaat

SEQ ID NO: 864090 - DNA, 75 bp, synthetic construct
  source 1..75: mol_type = other DNA
gacgtattcagttgacggatgctatcgccgagctggcgaagaaacagtccgttgacgcgatgctgatgagcggcg

SEQ ID NO: 864091 - DNA, 75 bp, synthetic construct
  source 1..75: mol_type = other DNA
gcagccaggtgctggcgaaacgtatgccgggcgatctttctgagtactcggttattcagactaaagagccgctga

SEQ ID NO: 864092 - DNA, 75 bp, synthetic construct
  source 1..75: mol_type = other DNA
cagcaaattatggcggttggtatcctgtgcggtatcggttttactatgtctatctttattgccagcctggcattt

SEQ ID NO: 864093 - DNA, 75 bp, synthetic construct
  source 1..75: mol_type = other DNA
gttatacctttgacgacgaaactgtcacgctgttgccaagtcagggtgtcaaccagctacacggcggcccggaag

SEQ ID NO: 864094 - DNA, 75 bp, synthetic construct
  source 1..75: mol_type = other DNA
tccgctttccgatggcagcgtccgcgaggcgctgctcggctgcgccagcccggaatgctatcaggatcaggccgc

SEQ ID NO: 864095 - DNA, 75 bp, synthetic construct
  source 1..75: mol_type = other DNA
gtgtgaaaacgccctccgggtagttgcactggggcggcgtaactaccggacgtggtttctgccaggtaaaggcaa

SEQ ID NO: 864096 - DNA, 75 bp, synthetic construct
  source 1..75: mol_type = other DNA
gcctgatgaatcaggttgccagccagatgaacgctatcgcgagtaaactgccggaaggttttcatattgggatta

SEQ ID NO: 864097 - DNA, 75 bp, synthetic construct
  source 1..75: mol_type = other DNA
gcagattctggcggacgaatatctgccggttgatgaaggcggcattccgcacgacggcctgaaatctgtcgccgg

SEQ ID NO: 864098 - DNA, 75 bp, synthetic construct
  source 1..75: mol_type = other DNA
gacgctttcaccaagtcagggcgtcaaccaattgcatggcggcccggaagggttcgacaaacgtcgctggcagat

SEQ ID NO: 864099 - DNA, 75 bp, synthetic construct
  source 1..75: mol_type = other DNA
atacctgctgaaacagtgggatgcactgaacgtgtactgcagtaatggctgggtggaaatcgacaacaacatcgc

SEQ ID NO: 864100 - DNA, 75 bp, synthetic construct
  source 1..75: mol_type = other DNA
gggcggcgtaactaccggacgtggtttctgccaggtaaaggcaacggaacaaaagaatcatggtttttccggaac

SEQ ID NO: 864101 - DNA, 75 bp, synthetic construct
  source 1..75: mol_type = other DNA
acctggcaaagtatcagggcgtgctgcaggctgatgcctgtgcaggttataacgtactgtacgaaacgggccggg

SEQ ID NO: 864102 - DNA, 75 bp, synthetic construct
  source 1..75: mol_type = other DNA
agtccggcagaagagcgactggcggtcagaaaagccagaacggtaccgctaatgcagtcgttgtatgagtggctc

SEQ ID NO: 864103 - DNA, 75 bp, synthetic construct
  source 1..75: mol_type = other DNA
aggattatttaactatcgctcagttaaacctattgatacgataatagcacgtgcattgcttgaaacattaatata

SEQ ID NO: 864104 - DNA, 75 bp, synthetic construct
  source 1..75: mol_type = other DNA
ggggttgtttaattatcgaccagtaaaacccatcgatacgatcattgcgcgcgcactgcttgagacactgattta

SEQ ID NO: 864105 - DNA, 75 bp, synthetic construct
  source 1..75: mol_type = other DNA
ccggaaggttttcatattgggattaattttagcgcctcgcatattatttcgccgacgtttgtcgacgagtgctta

SEQ ID NO: 864106 - DNA, 75 bp, synthetic construct
  source 1..75: mol_type = other DNA
ctcgaagttttaaagcttcttcaaaaaagctattctggtaaggttaagcttatttacatcgatccaccttataat

SEQ ID NO: 864107 - DNA, 75 bp, synthetic construct
  source 1..75: mol_type = other DNA
tgatagccaaaataaagcctataaaaattatgataatgaccctagaggagagtggaaggccggcgacctttctgt

SEQ ID NO: 864108 - DNA, 75 bp, synthetic construct
  source 1..75: mol_type = other DNA
agcctgacgataaaataacaaagagatataataagacagacgaaaacggtgaaatattccgtgacatagatttac

SEQ ID NO: 864109 - DNA, 75 bp, synthetic construct
  source 1..75: mol_type = other DNA
aatgacagggtatgacggcattcgtcaggcgtttcttactgcgatggaagatcccgacatttcgggcatttgcct

SEQ ID NO: 864110 - DNA, 75 bp, synthetic construct
  source 1..75: mol_type = other DNA
gacccgagagcaccacttaaaaggtttactaaaatagatgaaaaaggtccatatagagatgatggtaatattaac

SEQ ID NO: 864111 - DNA, 75 bp, synthetic construct
  source 1..75: mol_type = other DNA
tattccccacaaaatgatgccacttattttagtgatatgcatgatcatatcttggtatatgctaaaaatgccaaa

SEQ ID NO: 864112 - DNA, 75 bp, synthetic construct
  source 1..75: mol_type = other DNA
actaatgacttatcgatggcctctcttggtgtcgcggctgtagcaattgcggtactcgcggtattgaatctgtgt

SEQ ID NO: 864113 - DNA, 75 bp, synthetic construct
  source 1..75: mol_type = other DNA
gcatgggcgttctccagcgaagcgactggagcatgtgttgcacccgtgggtggcatatctgattttgccgctgtt

SEQ ID NO: 864114 - DNA, 75 bp, synthetic construct
  source 1..75: mol_type = other DNA
acgcctgaagagatcctgcgacgggctataaataatggggagatcgtccctttttaccaacctgtggtaaatggt

SEQ ID NO: 864115 - DNA, 75 bp, synthetic construct
  source 1..75: mol_type = other DNA
gggtacggtgcgttcacgtatcttccgtgcgagggaagctattgataataaagttcaaccgcttatcaggcgttg

SEQ ID NO: 864116 - DNA, 75 bp, synthetic construct
  source 1..75: mol_type = other DNA
aaaatagatgatgaaaaataccatacaatatcagaactaaccaaagaacgcctccgccgcgctggtaaaaaggtt

SEQ ID NO: 864117 - DNA, 75 bp, synthetic construct
  source 1..75: mol_type = other DNA
aaggaacttgatgactcttcttatgggattatttgccttacaaaaaataatattaatgcaccgtggataaatttt

SEQ ID NO: 864118 - DNA, 75 bp, synthetic construct
  source 1..75: mol_type = other DNA
ccgccgcctgcgtgccgctaacaaattcccggcaatcatctacggtggcaacgaagcgccgctggcaattgagct

SEQ ID NO: 864119 - DNA, 75 bp, synthetic construct
  source 1..75: mol_type = other DNA
taaacaacgcattcgaacaagtggaaatagcaatcgttaagggtttcgacgacgcattcaaatacggtcaattca

SEQ ID NO: 864120 - DNA, 75 bp, synthetic construct
  source 1..75: mol_type = other DNA
gggtttggtgaattactcagttatgtgcgagaaggcgatacgctgatagttattgctatagaccgccttgggcgt

SEQ ID NO: 864121 - DNA, 75 bp, synthetic construct
  source 1..75: mol_type = other DNA
aacgtgcgtcagggcgaacctttaggtttaggccactccattttgtgtgcacgacctgccattggtgacaaccca

SEQ ID NO: 864122 - DNA, 75 bp, synthetic construct
  source 1..75: mol_type = other DNA
ttatggccgtaggtcgttatgtgctttctgccgatatttggccggaacttgaacgcactcaacctggtgcatggg

SEQ ID NO: 864123 - DNA, 75 bp, synthetic construct
  source 1..75: mol_type = other DNA
acgacccgccattggtgacaatccatttgtcgtggtgctgccagacgttgtgatcgacgacgccagtgccgatcc

SEQ ID NO: 864124 - DNA, 75 bp, synthetic construct
  source 1..75: mol_type = other DNA
aacactatcgatgtactatctactgttgaaatgttgcaaatgaagggtgtgaaggttgtcagcttgcgagagggg

SEQ ID NO: 864125 - DNA, 75 bp, synthetic construct
  source 1..75: mol_type = other DNA
ggccgacgacgaacaggtgctggtgtggggcagccgccatcctgaacgccagaacgccatccgggtggaagatgg

SEQ ID NO: 864126 - DNA, 75 bp, synthetic construct
  source 1..75: mol_type = other DNA
tggtggcggcggcccgccgtaatcaccccgatgcccgcctgctgctgcgtactcacccggatacccggctgggta

SEQ ID NO: 864127 - DNA, 75 bp, synthetic construct
  source 1..75: mol_type = other DNA
acattgcggcagacctataaaagcaaccgttgaacaggtgcgagaattgttagcgcaaggtttaccgccagcagt

SEQ ID NO: 864128 - DNA, 75 bp, synthetic construct
  source 1..75: mol_type = other DNA
ttcgacctgtcaacgccagttggtaaagcgatgctcactatgatggcagggcttgccagcctggaaaaagatctg

SEQ ID NO: 864129 - DNA, 75 bp, synthetic construct
  source 1..75: mol_type = other DNA
atgacaactgtgatcggatatgtgcgagtttccaccagcgaccaaaacgttgaaaaccagaagcagcagatagcc

SEQ ID NO: 864130 - DNA, 75 bp, synthetic construct
  source 1..75: mol_type = other DNA
tgccgaactggcgaaaaaacagtccgttgatgccatgctgatgaccggcgacagctacgactgcggtaaaaaaat

SEQ ID NO: 864131 - DNA, 75 bp, synthetic construct
  source 1..75: mol_type = other DNA
gtggtgaaggtcgtaactgtggtaagcacccggtaactccgtggggcgttcagaccaaaggtaagaagacccgca

SEQ ID NO: 864132 - DNA, 75 bp, synthetic construct
  source 1..75: mol_type = other DNA
cctctactgagtttatggctaatgcgccggaaggcgattttgaccgctcattctctgatggcgttctcgaagata

SEQ ID NO: 864133 - DNA, 75 bp, synthetic construct
  source 1..75: mol_type = other DNA
agatcatcaatattcaccattccttcctgccagcgtttatcggcgcacgtccttatcaccaggcctatgagcgtg

SEQ ID NO: 864134 - DNA, 75 bp, synthetic construct
  source 1..75: mol_type = other DNA
aaattcttcaccccagtagcagaagcggcgaccagcggtctgaaattcaccaaactgcaaccggcacgagaattt

SEQ ID NO: 864135 - DNA, 75 bp, synthetic construct
  source 1..75: mol_type = other DNA
agtggcgtaactatccggtaacgctggtggcagaaaataacgttaccgaaggctttatcgctggtcgtctcactc

SEQ ID NO: 864136 - DNA, 75 bp, synthetic construct
  source 1..75: mol_type = other DNA
caaaaaatcgtccgcaggcagatgtacaggtgatctacaacgtgcgtacgccgcaggacgtcattttcgccgatg

SEQ ID NO: 864137 - DNA, 75 bp, synthetic construct
  source 1..75: mol_type = other DNA
atgctggataaaattgttattgccaaccgtggcgagattgcattgcgtattcttcgtgcctgtaaagaactgggc

SEQ ID NO: 864138 - DNA, 75 bp, synthetic construct
  source 1..75: mol_type = other DNA
ccgccgcctgcgtaccgctaacaaattcccggcaatcatctacggtggcaacgaagcgccgctggctgttgctct

SEQ ID NO: 864139 - DNA, 75 bp, synthetic construct
  source 1..75: mol_type = other DNA
ccgggcaaaatcacccgtttccacgcacctggtggttttggcgtacgttgggagtctcatatctacgcgggctac

SEQ ID NO: 864140 - DNA, 75 bp, synthetic construct
  source 1..75: mol_type = other DNA
cgtgacgtcgagaaaaacgtattaagccgcgccctttaccaggttttggcgcaacgtgtgtttgtttacggtaac

SEQ ID NO: 864141 - DNA, 75 bp, synthetic construct
  source 1..75: mol_type = other DNA
aagatggcggatgccattgatgcttatcagcctgattacgttgtgctggcgaagtatatgcgcgtattaacgccg

SEQ ID NO: 864142 - DNA, 75 bp, synthetic construct
  source 1..75: mol_type = other DNA
tgaaaaccgtgacgtggcgattgctcgcatgaagaatgctctgcaggagctgatcatcgacggtatcaaaaccaa

SEQ ID NO: 864143 - DNA, 75 bp, synthetic construct
  source 1..75: mol_type = other DNA
caaatcagacaaaaagcccacgatctaggcctgccgtactggcagcttgaggatggctttatcgggtatattggc

SEQ ID NO: 864144 - DNA, 75 bp, synthetic construct
  source 1..75: mol_type = other DNA
atgcagaaattttatctgccgcgtaaaaagtcttcgttttaccggcctgatacgtttttgcaatggggtggactg

SEQ ID NO: 864145 - DNA, 75 bp, synthetic construct
  source 1..75: mol_type = other DNA
atggcgatattagcggtcattctctacggtaacctgagtcccgtaggctgggcaggaatgagtctggtgggcgat

SEQ ID NO: 864146 - DNA, 75 bp, synthetic construct
  source 1..75: mol_type = other DNA
ccggatgattttacgctggcagaccgaacagcagaacgcatgacccgcgcccgcaatgggctggctcacgttatg

SEQ ID NO: 864147 - DNA, 75 bp, synthetic construct
  source 1..75: mol_type = other DNA
agccagacaagtctcagtcagtttgagtatcagggtaaggaagcggcagatattcttgtttatgacctgggaatt

SEQ ID NO: 864148 - DNA, 75 bp, synthetic construct
  source 1..75: mol_type = other DNA
agccagacaagtctcagtcagtttgaatatcagggtaaggaagcggcggatattcttgtttatgaactgggcatt

SEQ ID NO: 864149 - DNA, 75 bp, synthetic construct
  source 1..75: mol_type = other DNA
caaacgacgaagttaatcagactgttgaaacttctctaaatgcaggcatgaatgaacaggacgtggcatctctcg

SEQ ID NO: 864150 - DNA, 75 bp, synthetic construct
  source 1..75: mol_type = other DNA
gtatctactggccggtgtcgcagtgggcgtcaggcgcgacagcaaacagcatgctggcgtccttcttccttcaga

SEQ ID NO: 864151 - DNA, 75 bp, synthetic construct
  source 1..75: mol_type = other DNA
gtcattcagaccaaagaaccactggatcgtgaaggtaaagtcagccgcattgttgaatttatcgaaaaaccggat

SEQ ID NO: 864152 - DNA, 75 bp, synthetic construct
  source 1..75: mol_type = other DNA
ccgtgttatacggcaatatttgcaccatcagtcatatcgtcaaaaagattaagaacgccggaaaatatgctttta

SEQ ID NO: 864153 - DNA, 75 bp, synthetic construct
  source 1..75: mol_type = other DNA
attgctgagccgtgaagagccatatccagacacattcactcttgcagatcgcacgactgaacggcttaccagagc

SEQ ID NO: 864154 - DNA, 75 bp, synthetic construct
  source 1..75: mol_type = other DNA
ttgcccgccgggcgtgaccattatgaacgtgcgtcagggcgaacctttaggtttgggccactccattttatgtgc

SEQ ID NO: 864155 - DNA, 75 bp, synthetic construct
  source 1..75: mol_type = other DNA
atgacgaatttaaaagcagttataccggtagcgggtcttgggatgcatatgttgcctgccactaaggcgataccc

SEQ ID NO: 864156 - DNA, 75 bp, synthetic construct
  source 1..75: mol_type = other DNA
ccagtggatggtatcacgactttctggagacgccggttcagctccgggttggttcactcgaaatcaacaaaaaca

SEQ ID NO: 864157 - DNA, 75 bp, synthetic construct
  source 1..75: mol_type = other DNA
acctacgcgtgctgcgctacctgaccgaagagctgaacgtcagtgaagaagataaaaaacgctggtatgcgcact

SEQ ID NO: 864158 - DNA, 75 bp, synthetic construct
  source 1..75: mol_type = other DNA
gcattggtcagcaaaatgaactggcctatcggcggatgaatccggtcgggctggtgccgacgctgctgactgacg

SEQ ID NO: 864159 - DNA, 75 bp, synthetic construct
  source 1..75: mol_type = other DNA
atgaagctgtacagtttttttaatagttcagcatcgtaccgggtacgcattgcgctggcgctgaaaggcattaat

SEQ ID NO: 864160 - DNA, 75 bp, synthetic construct
  source 1..75: mol_type = other DNA
ggatcctggcccgaaaagcccagctcgagccaatgcttggccgcccgttacacgccttcaaaagcggcatggaac

SEQ ID NO: 864161 - DNA, 75 bp, synthetic construct
  source 1..75: mol_type = other DNA
gcttgtgatattcatccattgaataacttgcgcgtgctgcgctacctgaccgaagaactgaacgtcagtgaagaa

SEQ ID NO: 864162 - DNA, 75 bp, synthetic construct
  source 1..75: mol_type = other DNA
taccagaccgaaggggtgaatatccgtattggtcagcaaaatgaactggcctatcggcggatgaatccggtcggg

SEQ ID NO: 864163 - DNA, 75 bp, synthetic construct
  source 1..75: mol_type = other DNA
catcgccggtttgctgattggcaagccgctgggtattagtctgttctgctggctggcgctgcgtttgaagctggc

SEQ ID NO: 864164 - DNA, 75 bp, synthetic construct
  source 1..75: mol_type = other DNA
ggccgtgctgaaatcaggcgtccacgcaacgctggctggggttattgttggcttctttattccgttaaaagagaa

SEQ ID NO: 864165 - DNA, 75 bp, synthetic construct
  source 1..75: mol_type = other DNA
tcgcctttgcgctgggagtcctggcactgctgggaagccgtgtaccgttggctctgaagatcttcttgatggcgc

SEQ ID NO: 864166 - DNA, 75 bp, synthetic construct
  source 1..75: mol_type = other DNA
cagcatcttttctgttcttgctgtggtgatatagtggcgtcttcaattcaaggacaagagaacgtgatgagccag

SEQ ID NO: 864167 - DNA, 75 bp, synthetic construct
  source 1..75: mol_type = other DNA
gcggcattaaacattaaaccggggcatacgctaggtgtcattgatgccatgttggttcatgaaatggctaaggcg

SEQ ID NO: 864168 - DNA, 75 bp, synthetic construct
  source 1..75: mol_type = other DNA
gtgctggcacccagcaattacgagaaaaaattagccgcgttttgggcgaagttattacaccagatcgtcataaac

SEQ ID NO: 864169 - DNA, 75 bp, synthetic construct
  source 1..75: mol_type = other DNA
cgccgcgtctttactctatcgcctcttcgcaggcggaagtggaaagcgaagtccacgtgaccgtgggtgtggtgc

SEQ ID NO: 864170 - DNA, 75 bp, synthetic construct
  source 1..75: mol_type = other DNA
gccccggtacgggcatcgcgccgttccgcgcctttatgcagcagcgtgccgccgacgaagcgccgggtaaaaact

SEQ ID NO: 864171 - DNA, 75 bp, synthetic construct
  source 1..75: mol_type = other DNA
ccagcgagtggcgcgcccgcgtggttgatgcgcttaaatcgcgtgcgcctgtcgcggcaccttcgcaatccgtcg

SEQ ID NO: 864172 - DNA, 75 bp, synthetic construct
  source 1..75: mol_type = other DNA
gatggcgaattttgggcgcaaagtatgcccgtctggcctgtgctgacttcgttgacccatcgtcagcaacttcct

SEQ ID NO: 864173 - DNA, 75 bp, synthetic construct
  source 1..75: mol_type = other DNA
cgaactgccgtgtaatgcggatttctggctggcagtacagcaagagttattaccccaggtgaaagctatcgcccc

SEQ ID NO: 864174 - DNA, 75 bp, synthetic construct
  source 1..75: mol_type = other DNA
cccgccgtgtatgtgttgattgaagccatcgacaccgcgcaccgtgctcacgaacttccgtgtaatgcggatttc

SEQ ID NO: 864175 - DNA, 75 bp, synthetic construct
  source 1..75: mol_type = other DNA
cttatgaatttttctgccagtccgggaaagattttgacagcaagctggcggaactgggcggtgaacgcctgctcg

SEQ ID NO: 864176 - DNA, 75 bp, synthetic construct
  source 1..75: mol_type = other DNA
ctccgcctcgcaaaccggcaatgcgcgccgggttgctgaagcattacgcgatgatttattagcagcaaaactgaa

SEQ ID NO: 864177 - DNA, 75 bp, synthetic construct
  source 1..75: mol_type = other DNA
cgctgccagcgagtggcgcgcccgcgtggtcgatgttcttaaatcgcgcgcgcctgtcgcagcaccttcacaatc

SEQ ID NO: 864178 - DNA, 75 bp, synthetic construct
  source 1..75: mol_type = other DNA
gccgacgaagcgccgggtaaaaactggctgttctttggcaacccgcactttacggaagatttcctctaccaggtg

SEQ ID NO: 864179 - DNA, 75 bp, synthetic construct
  source 1..75: mol_type = other DNA
acaagacaaactgcgcgaacagggcgcagagctgtggcgctggatcaatgacggtgcccacatttatgtctgcgg

SEQ ID NO: 864180 - DNA, 75 bp, synthetic construct
  source 1..75: mol_type = other DNA
gccgacgaagcgccaggtaaaaactggctgttctttggtaatccgcactttacggaagacttcctgtatcaggtg

SEQ ID NO: 864181 - DNA, 75 bp, synthetic construct
  source 1..75: mol_type = other DNA
aattacctggagaagtgaacggctgggaaattcacgccgtgtatggatttttaccaccggcgatgtaccagccga

SEQ ID NO: 864182 - DNA, 75 bp, synthetic construct
  source 1..75: mol_type = other DNA
tgccgccacgctgtttttcccgatggcgttgattttgtatgattttgccgcgtacctgtcgacggatctgattca

SEQ ID NO: 864183 - DNA, 75 bp, synthetic construct
  source 1..75: mol_type = other DNA
gggattgctcaatcgcgtgcgccagcatcaggctgccgagctggcggaggagcggggatttttgcgcgatcctgc

SEQ ID NO: 864184 - DNA, 75 bp, synthetic construct
  source 1..75: mol_type = other DNA
ttatcagccgaccctggcggaagagatgggcgttctgcaggagcgtatcacctccaccaaaaccggttctatcac

SEQ ID NO: 864185 - DNA, 75 bp, synthetic construct
  source 1..75: mol_type = other DNA
ttaataatggttaatacaccaaagagtgatgccgctaaacgaactgtatttatatacgataaaatatcaattgat

SEQ ID NO: 864186 - DNA, 75 bp, synthetic construct
  source 1..75: mol_type = other DNA
ttgcgcagagaaaaatgatggaacctttttttggttttcagggagaaacaaacacagaaatttatcctaatgcca

SEQ ID NO: 864187 - DNA, 75 bp, synthetic construct
  source 1..75: mol_type = other DNA
aatggcttcagtgattgaattgcagtactggcgtaacgctgatacctatcctgtctggctgacaaaacatctccg

SEQ ID NO: 864188 - DNA, 75 bp, synthetic construct
  source 1..75: mol_type = other DNA
ggatctgttctaccagacccaggaagcgccgggcgcgatgctcgatcagaacaacatcatgccgaccgggctgca

SEQ ID NO: 864189 - DNA, 75 bp, synthetic construct
  source 1..75: mol_type = other DNA
catttcgagaatgttaaaaccaaggttcaaggtactgtagtaatgttttccgcttcagggaaaaatagcatccaa

SEQ ID NO: 864190 - DNA, 75 bp, synthetic construct
  source 1..75: mol_type = other DNA
ctagaatttacacaccacttaccctaaagctttatgactggtgggttttgggagtatcaaatcggcttgcatggg

SEQ ID NO: 864191 - DNA, 75 bp, synthetic construct
  source 1..75: mol_type = other DNA
ggcgttctacatggtcggttccatcgaagaagctgtggaaaaagccaaaaactttaacgccttaatcggagggtg

SEQ ID NO: 864192 - DNA, 75 bp, synthetic construct
  source 1..75: mol_type = other DNA
cttaacacatatactctcagagcatttcgagaatgttaaaaccaaggttcaaggtactgtagtaatgttttccgc

SEQ ID NO: 864193 - DNA, 75 bp, synthetic construct
  source 1..75: mol_type = other DNA
gaccgagttagggcaactgacgctggttaacttcgctaacccggcggggctttccgccgagggtgacaacctgta

SEQ ID NO: 864194 - DNA, 75 bp, synthetic construct
  source 1..75: mol_type = other DNA
tgctggcaggctgccaggcccgtttcctgcaggaccagccgccctcgcagctggagcacctgaagtctgcgctcc

SEQ ID NO: 864195 - DNA, 75 bp, synthetic construct
  source 1..75: mol_type = other DNA
ttgataccgctggtcgtgatagcaaagaaatgcgcaccggtattactgcggcggatgttttgcttgttccattca

SEQ ID NO: 864196 - DNA, 75 bp, synthetic construct
  source 1..75: mol_type = other DNA
tggtgaagggctgccgctgccggagacatatgaccgtccggacccgcgtattaaacagctggcgcgtcgcagtac

SEQ ID NO: 864197 - DNA, 75 bp, synthetic construct
  source 1..75: mol_type = other DNA
caaccatgtgtattgtgttacgtcgtgatgacaaatctcttgctgctggtgttgatattctccagccaaatagcc

SEQ ID NO: 864198 - DNA, 75 bp, synthetic construct
  source 1..75: mol_type = other DNA
atagccagaaaatataatgcttcatcctggaaagtcacatcgatgcgaattgataataattcaaccgcaacagca

SEQ ID NO: 864199 - DNA, 75 bp, synthetic construct
  source 1..75: mol_type = other DNA
caatcagacgccagaacaaatattctggcgtctcagagaaaagaatcttattaattctctgttactctataactt

SEQ ID NO: 864200 - DNA, 75 bp, synthetic construct
  source 1..75: mol_type = other DNA
gcatggctgaagggaagggcgttgttgagatggacaacgggaaagctaaaggtgaaatccagatgttggttaagg

SEQ ID NO: 864201 - DNA, 75 bp, synthetic construct
  source 1..75: mol_type = other DNA
cgatcctaagacagtattacccgttcttttcggtactacccgaactggtgcaatctgcgtttacaaagcaatttc

SEQ ID NO: 864202 - DNA, 75 bp, synthetic construct
  source 1..75: mol_type = other DNA
ttcccgcatcgccaaccaaactggcctgatggtgcaatcactgtaagggtcgaagatgatcatccattcgatcgc

SEQ ID NO: 864203 - DNA, 75 bp, synthetic construct
  source 1..75: mol_type = other DNA
caggacaaagaagcactggaagacctgattggtttacaagatcgcttagatgaaaccatcgcggatgctattgct

SEQ ID NO: 864204 - DNA, 75 bp, synthetic construct
  source 1..75: mol_type = other DNA
caaactgtgtttacaaagcagtttctaagcaagaaaacaataagctagtgcaaatcttctctgtagccgagggtg

SEQ ID NO: 864205 - DNA, 75 bp, synthetic construct
  source 1..75: mol_type = other DNA
ttcccacattgggacgaaaacccatcattgggctatcccggttatccgcaaggtacaatcactgttcgaattgaa

SEQ ID NO: 864206 - DNA, 75 bp, synthetic construct
  source 1..75: mol_type = other DNA
ttcccgcatcgtgatgttaacgttgataatggttatgctggttatccacagggtacggtcactgttcgcgttgaa

SEQ ID NO: 864207 - DNA, 75 bp, synthetic construct
  source 1..75: mol_type = other DNA
cacctccatcgtactgattgcgccgattattggcccgctttccggcgcagctctgatgcactttgtgcactggaa

SEQ ID NO: 864208 - DNA, 75 bp, synthetic construct
  source 1..75: mol_type = other DNA
atgaaactgaatatggattcgttaaaacaggcaggggcgttcactggtcgtcctgttgaaaaggaaattacctgg

SEQ ID NO: 864209 - DNA, 75 bp, synthetic construct
  source 1..75: mol_type = other DNA
atgtcgcaaaaaccgttaaaaaccaccgtgatgtgtatcacggtagtgctcattatctggatcacccacacttca

SEQ ID NO: 864210 - DNA, 75 bp, synthetic construct
  source 1..75: mol_type = other DNA
tggaatggcagaaaggttcgtgaaaacgatgaaagaagactacatcgcgttcatgccgaaaccgaatgtaagaac

SEQ ID NO: 864211 - DNA, 75 bp, synthetic construct
  source 1..75: mol_type = other DNA
acaaaccggaaagccacatctggtttctggagcatgatgccgccgggcagggggcagagttgctgaagaaaggcg

SEQ ID NO: 864212 - DNA, 75 bp, synthetic construct
  source 1..75: mol_type = other DNA
cggcgagcctcctgccgtgaccgcgccgctggagcagatagaccatacggtcatcgacctgatcgtggtcgatgc

SEQ ID NO: 864213 - DNA, 75 bp, synthetic construct
  source 1..75: mol_type = other DNA
atgtctgttatgcattatcttcaggacaaaacatttcaggatatagttaaaaatctggtgttatcgttcctgtct

SEQ ID NO: 864214 - DNA, 75 bp, synthetic construct
  source 1..75: mol_type = other DNA
atcagtgagggtgcgattccgtttgcgctggaaagccccatcaccgccattccgtcgtatatggtcggcgcgatt

SEQ ID NO: 864215 - DNA, 75 bp, synthetic construct
  source 1..75: mol_type = other DNA
gagttatcgtcgttttcaccctggcggggttgctcaatcgcgtgcaccaacatcaggctgccgagctggcggagg

SEQ ID NO: 864216 - DNA, 75 bp, synthetic construct
  source 1..75: mol_type = other DNA
agacctcggcacgctggggtgtagataagccactgtacaaggacctgcttacccgtactcaggccgcactgaagg

SEQ ID NO: 864217 - DNA, 75 bp, synthetic construct
  source 1..75: mol_type = other DNA
gctgtctggctgggcgcagtgcaatggttcccggaatccgctatctgggcgtggccgctggtcactaatctgggt

SEQ ID NO: 864218 - DNA, 75 bp, synthetic construct
  source 1..75: mol_type = other DNA
atccgctatatgggcgtggccgctggtcactaatctgggtgtctatatggcggggatcgcgctgggagcaatcat

SEQ ID NO: 864219 - DNA, 75 bp, synthetic construct
  source 1..75: mol_type = other DNA
cccagctttatccgcagggtaaaaccgcgatgttcctggcgtttatggggatcagtgaaggtgcgattccgtttg

SEQ ID NO: 864220 - DNA, 75 bp, synthetic construct
  source 1..75: mol_type = other DNA
gtatcgtggtgaaagatggcgcgaacattcaggataattgcgttatgcacggttttcccgagcaggatactgttg

SEQ ID NO: 864221 - DNA, 75 bp, synthetic construct
  source 1..75: mol_type = other DNA
gcagacgttacatcaagtcgagccattgcgggaaattgaacctggcaggaaacgcctggtatttgatgagaatct

SEQ ID NO: 864222 - DNA, 75 bp, synthetic construct
  source 1..75: mol_type = other DNA
atgcgcgtgtttaaaaccaaatggtttgcaagggaagccaggtctcatgcaataacagatgaagagttgtgccgg

SEQ ID NO: 864223 - DNA, 75 bp, synthetic construct
  source 1..75: mol_type = other DNA
ccacaggatggaggctggatcggatggatgatcaaacctttgggtcgctggtcgttaatcatggaaatcgacgaa

SEQ ID NO: 864224 - DNA, 75 bp, synthetic construct
  source 1..75: mol_type = other DNA
tgcgttaggcgttctcggtaacgatgacaccgcccgcaaactgacgccattaatccgcgcctggcctggcgaatc

SEQ ID NO: 864225 - DNA, 75 bp, synthetic construct
  source 1..75: mol_type = other DNA
ggcaccccgcaggatggaggctggatcggctggatgatcaaacctctgggccgctggtcgttaatcatggaaatc

SEQ ID NO: 864226 - DNA, 75 bp, synthetic construct
  source 1..75: mol_type = other DNA
aggtggcggctgttaaagcattgttttttagagaaattcgaactcggtttggtaaatttcgcttgggatatttat

SEQ ID NO: 864227 - DNA, 75 bp, synthetic construct
  source 1..75: mol_type = other DNA
ttccggaatatcatgatgttgttgtaaaaaactctgaaagaacagctggacaaaccggtgtaaatcttgaactat

SEQ ID NO: 864228 - DNA, 75 bp, synthetic construct
  source 1..75: mol_type = other DNA
ttaatgaaagcttcacctaaagaaaatattaggaaggggtttatattctatcttctacaacttccggaatatcat

SEQ ID NO: 864229 - DNA, 75 bp, synthetic construct
  source 1..75: mol_type = other DNA
aggactatttaactatagacccgtaaaacctattgatactattattgcacgagctattttagaaatattaattta

SEQ ID NO: 864230 - DNA, 75 bp, synthetic construct
  source 1..75: mol_type = other DNA
gtcagttgttacaggttatgttagcgaaggagttagcttagagtatttggcattttgcgcgttaattgctctttt

SEQ ID NO: 864231 - DNA, 75 bp, synthetic construct
  source 1..75: mol_type = other DNA
caattagttctgtacttatactttttattgggttagcactttatcgtacttatgaagagaaaatgttgacatcat

SEQ ID NO: 864232 - DNA, 75 bp, synthetic construct
  source 1..75: mol_type = other DNA
aatgcccgagcggtgggtcatgggactggcgaataaaggttgggtgcgtggtgaaccgcaggatggtggctggat

SEQ ID NO: 864233 - DNA, 75 bp, synthetic construct
  source 1..75: mol_type = other DNA
atgaaatccatcattttatcgatggttgccgccaccgcattactgtcaggctgcgcggatagcaaaacacaacca

SEQ ID NO: 864234 - DNA, 75 bp, synthetic construct
  source 1..75: mol_type = other DNA
tggctttcgacacccgcagttgcagtgctgaaatcatgccagcaacaactgacacagccctcaaaccatgccagc

SEQ ID NO: 864235 - DNA, 75 bp, synthetic construct
  source 1..75: mol_type = other DNA
accgttgccgcccagcaggtagcaaggctggaatccgccatgtgcctgcgccgccgctggtcagaggaaaacttt

SEQ ID NO: 864236 - DNA, 75 bp, synthetic construct
  source 1..75: mol_type = other DNA
gtgcgctgggtatcagaaatggcagacaaactccgtcctctgtatatagcgctgaatgactatgttctggaggca

SEQ ID NO: 864237 - DNA, 75 bp, synthetic construct
  source 1..75: mol_type = other DNA
ccagagcaaaaagatgctggatcaacggaatcatctaagcctgacgctggcaagaagggtaagccgcagagcaaa

SEQ ID NO: 864238 - DNA, 75 bp, synthetic construct
  source 1..75: mol_type = other DNA
aaaaagccctcctgatgctcaaggatatgatccaaaaacgctctggaagatggctcgttactccggtcttggaag

SEQ ID NO: 864239 - DNA, 75 bp, synthetic construct
  source 1..75: mol_type = other DNA
taacgatgacaccgcccgcaaactgacgcctttgattcgcgcctggcctggtgaatcccagcataaacgcgccac

SEQ ID NO: 864240 - DNA, 75 bp, synthetic construct
  source 1..75: mol_type = other DNA
aaaaatcacataaattctgggcggtggagcagcaagacaacgagctgcatatcaactggggtaaagtcggcacta

SEQ ID NO: 864241 - DNA, 75 bp, synthetic construct
  source 1..75: mol_type = other DNA
gctggatcggatggatgatcaaacctttgggtcgctggtcgttaatcatggaaatcgatgaaggctttgcggtag

SEQ ID NO: 864242 - DNA, 75 bp, synthetic construct
  source 1..75: mol_type = other DNA
gaacaagtcgccctgcgttataaccaaccggaagtaacagccgccatcaacgccctgctggctctcgatccgctg

SEQ ID NO: 864243 - DNA, 75 bp, synthetic construct
  source 1..75: mol_type = other DNA
atccccacataccgataccgaatacgtcatgttacatctgggtctcatgggtttaccggggttagtgaactcaat

SEQ ID NO: 864244 - DNA, 75 bp, synthetic construct
  source 1..75: mol_type = other DNA
aacatgccattatcggcctgttgcctgcggcactcggcaaagctggtgaagcccaggataacgcccgcgccgcct

SEQ ID NO: 864245 - DNA, 75 bp, synthetic construct
  source 1..75: mol_type = other DNA
ggatatcagcgccagtatcgcggggatgggtgatctgcaatacaaatatattgtgatgccttataccgatgaacc

SEQ ID NO: 864246 - DNA, 75 bp, synthetic construct
  source 1..75: mol_type = other DNA
accactcaaagcggcatgaccattcagattcataaaccaaaagaggaaaaattatgtggcctatatgtgttaatt

SEQ ID NO: 864247 - DNA, 75 bp, synthetic construct
  source 1..75: mol_type = other DNA
agcgctgcgcactgaagaagtccgcgggacgctgaaagcgtctatccgtaaaacgtttgaggctcagattgatgc

SEQ ID NO: 864248 - DNA, 75 bp, synthetic construct
  source 1..75: mol_type = other DNA
ctgaaaaaatcagtgccggtcagtcagcagagccaaagtccacgtccctcccgtaatcacatcttacagcgagaa

SEQ ID NO: 864249 - DNA, 75 bp, synthetic construct
  source 1..75: mol_type = other DNA
ccgccacacgcgccctgattctggagcgttaccgcgatgcggacacaacggacaagggcgaccgccgggcggacg

SEQ ID NO: 864250 - DNA, 75 bp, synthetic construct
  source 1..75: mol_type = other DNA
ctcccgggctaaccagctgcagataacgatccccgggctgtccggtatttgccggtatgaaattaccggaaggcg

SEQ ID NO: 864251 - DNA, 75 bp, synthetic construct
  source 1..75: mol_type = other DNA
tcagcctggttctgtcgttgtagtcaccactcaaagcggcatgacgatacaaattcacaagccaaaggaggaagg

SEQ ID NO: 864252 - DNA, 75 bp, synthetic construct
  source 1..75: mol_type = other DNA
aacggcggtcgcttgccgtttcatctgttagccgtcgtggcgggcgttatcgtcgttttcaccctggcgggattg

SEQ ID NO: 864253 - DNA, 75 bp, synthetic construct
  source 1..75: mol_type = other DNA
gtcgttttcaccctggcgggattgctcaatcgcgtgcgccaacatcaggctgccgagctggcggaggagcggtga

SEQ ID NO: 864254 - DNA, 75 bp, synthetic construct
  source 1..75: mol_type = other DNA
atggagttgtgcacaatagcttcggtcaaaaactgatgcgcatttacaatcagaaaggcatcttttcaaacacaa

SEQ ID NO: 864255 - DNA, 75 bp, synthetic construct
  source 1..75: mol_type = other DNA
ctgaaagcgtctatccgtaaaacgtttgaggctcagattgatgcggatgtggaagcgattctggatgagcttatc

SEQ ID NO: 864256 - DNA, 75 bp, synthetic construct
  source 1..75: mol_type = other DNA
accattgtctgcatgatgtgcaggacatgagccgtcttaaccatccgaaagcgaacctgtcaaaggggcagtacg

SEQ ID NO: 864257 - DNA, 75 bp, synthetic construct
  source 1..75: mol_type = other DNA
gggctgcgggatttactggctcaaccgttattgctgaatttgaatcgctggaagcagctcaggcctgggccgatg

SEQ ID NO: 864258 - DNA, 75 bp, synthetic construct
  source 1..75: mol_type = other DNA
tggtttttacggaacgcggtgcgcacggtggaacttatggcggaaagttcgttgcttatgattacgcagcatggc

SEQ ID NO: 864259 - DNA, 75 bp, synthetic construct
  source 1..75: mol_type = other DNA
tttttgacgcatggtcatctttttggcccggaaaatctgcctgctttaaaccagaacgatgtgctggtgtacggt

SEQ ID NO: 864260 - DNA, 75 bp, synthetic construct
  source 1..75: mol_type = other DNA
catacccatctgccagtggcagaacagcggggggagattttccacttcaaccccggctcggtgagtattccgaaa

SEQ ID NO: 864261 - DNA, 75 bp, synthetic construct
  source 1..75: mol_type = other DNA
gcgttaccgcgatgcggacacaacggataagggcgaccgccgggcggacgcactggatatacagacatcggattt

SEQ ID NO: 864262 - DNA, 75 bp, synthetic construct
  source 1..75: mol_type = other DNA
gccataaactggccgataacggcacccccgtccggcccggtcagaatatcgtgacgccggagatcatgacgctcc

SEQ ID NO: 864263 - DNA, 75 bp, synthetic construct
  source 1..75: mol_type = other DNA
cgataccgatgatggcgatacccgcatttcagcgggtgcattctggccggatattgtgctgcgcgagctgcgtct

SEQ ID NO: 864264 - DNA, 75 bp, synthetic construct
  source 1..75: mol_type = other DNA
catacccatctaccagtggcggaacagcggggtgaaatcttccactttaaccccggttcggtaagcatcccgaaa

SEQ ID NO: 864265 - DNA, 75 bp, synthetic construct
  source 1..75: mol_type = other DNA
aattaacggagaaagcgtcaatctctggcactggcgcaatgcggtttacaccgccacacgcgccctgattctgga

SEQ ID NO: 864266 - DNA, 75 bp, synthetic construct
  source 1..75: mol_type = other DNA
ggctggcggcatggcgctatacgaagccagtgttggtcgctgagattaactccctggctaaccagctgcagatta

SEQ ID NO: 864267 - DNA, 75 bp, synthetic construct
  source 1..75: mol_type = other DNA
taaaccccggatttaaatatgcagcctataaagtcctcgatgattacttcaccggagagcttcatcatcggaaca

SEQ ID NO: 864268 - DNA, 75 bp, synthetic construct
  source 1..75: mol_type = other DNA
atttcagcgggcgcattctggccggatattgtgctgcgtgagctgcgtctggcgatacgactgccgggccgtgtg

SEQ ID NO: 864269 - DNA, 75 bp, synthetic construct
  source 1..75: mol_type = other DNA
acagggccggcctgtgttgaagcctgcccgacaaaggcgttgcagtgtatggatgttgagaaagtgcagcgaaat

SEQ ID NO: 864270 - DNA, 75 bp, synthetic construct
  source 1..75: mol_type = other DNA
taaaagctgtatgctggcatgtccgtttggtgcgatggaagtcgtttcatcgcgcgcaaaggcgagggcgattaa

SEQ ID NO: 864271 - DNA, 75 bp, synthetic construct
  source 1..75: mol_type = other DNA
ataacgttaccgaaggctttatcgctggtcgtctcactcgcgaactgctggcaggtgtccctgacttagcttcac

SEQ ID NO: 864272 - DNA, 75 bp, synthetic construct
  source 1..75: mol_type = other DNA
atttcccatggagcctggctcaggaaggttagacatagctccaggtgacttttggctcaataatctttcagatgt

SEQ ID NO: 864273 - DNA, 75 bp, synthetic construct
  source 1..75: mol_type = other DNA
gccggggcgcggatttaacttcagcgacggcaaacagccactggcgatggcgcgtaaatcactgacggaaatggc

SEQ ID NO: 864274 - DNA, 75 bp, synthetic construct
  source 1..75: mol_type = other DNA
cggattggaaatgtctttcattaatgcaaatgtggttaaaggtggcgaaatagaaaccgatttaatgagttgcct

SEQ ID NO: 864275 - DNA, 75 bp, synthetic construct
  source 1..75: mol_type = other DNA
ccggctccgtttgcaggcgtcgtgaaggaactgaaagtcaacgttggcgataaagtgaaaactggctcgctgatt

SEQ ID NO: 864276 - DNA, 75 bp, synthetic construct
  source 1..75: mol_type = other DNA
gtaacttcgacaaaggctatgtcgaagcagaactggatatcaatccagacctatggttcttcggctgccacttca

SEQ ID NO: 864277 - DNA, 75 bp, synthetic construct
  source 1..75: mol_type = other DNA
tgctggttgatggtcgtctgatctataccgccagcgacctgaaagtcggtctgttccaggatacgtctgccttct

SEQ ID NO: 864278 - DNA, 75 bp, synthetic construct
  source 1..75: mol_type = other DNA
ctataagcacaggttaaagctaccaaatggtattgaggcatatttttctaagcattacccaaatgtgtatgatga

SEQ ID NO: 864279 - DNA, 75 bp, synthetic construct
  source 1..75: mol_type = other DNA
ggagaatcatcactctctgatctttctgaggcagaagaagcacaggaacaacctaaaggccataaacagccttct

SEQ ID NO: 864280 - DNA, 75 bp, synthetic construct
  source 1..75: mol_type = other DNA
tggaggatgaaaatcagcggctccgtcgtctggtggcagacctcagtctggacaaggaaatgctccaggatgtca

SEQ ID NO: 864281 - DNA, 75 bp, synthetic construct
  source 1..75: mol_type = other DNA
tcttggaatggctatttcatttattaatagcaatatgattaataatggggactttaatatatcaatggttgatat

SEQ ID NO: 864282 - DNA, 75 bp, synthetic construct
  source 1..75: mol_type = other DNA
tattttgagggcttaacaacagtaatacaggacgcattttttacaatatttaaagcatttgcaatcatgatggca

SEQ ID NO: 864283 - DNA, 75 bp, synthetic construct
  source 1..75: mol_type = other DNA
caggacaaacccctctcagcgaggaaccacccgccccctcaaatttttacgcacggtgatttttttgaaaataaa

SEQ ID NO: 864284 - DNA, 75 bp, synthetic construct
  source 1..75: mol_type = other DNA
gacaaagttgaagccgaacagtcgctgatcaccgtagaaggcgataaagcctctatggaagtaccatctccgcag

SEQ ID NO: 864285 - DNA, 75 bp, synthetic construct
  source 1..75: mol_type = other DNA
caaagaatcgtacatgaggctaaacgaaaaagcccttgatgatttttgccagagtctggtcgattacctttctgc

SEQ ID NO: 864286 - DNA, 75 bp, synthetic construct
  source 1..75: mol_type = other DNA
tgcgtgagatagcaaaaaaggcaacacaaggcgaatgggtcgcatttatttcgccgggcaaatacggcacgtacg

SEQ ID NO: 864287 - DNA, 75 bp, synthetic construct
  source 1..75: mol_type = other DNA
aattccctcgcccggataaactcagcgacggcgttagtcgctttgatgtttcagctatccgtaagtggcttgcag

SEQ ID NO: 864288 - DNA, 75 bp, synthetic construct
  source 1..75: mol_type = other DNA
atgaagacttacaacgccaatcccggttacgaaatggatcaccagctcctgacgcattttaaccagcatctggat

SEQ ID NO: 864289 - DNA, 75 bp, synthetic construct
  source 1..75: mol_type = other DNA
gaggccaggataactcagcatccggtgatgcaacgtcctctcagagcacaaccgttggtcaggaatacgatctgt

SEQ ID NO: 864290 - DNA, 75 bp, synthetic construct
  source 1..75: mol_type = other DNA
caacagattatggattactacgattccagcctggaaaccgctatcgatcatgataattaccttgagtttcaacag

SEQ ID NO: 864291 - DNA, 75 bp, synthetic construct
  source 1..75: mol_type = other DNA
tgacgttttatggtgaaaaaccgggtgccgataagatggtgactttcgcctttatttgggtggcgctggcaattt

SEQ ID NO: 864292 - DNA, 75 bp, synthetic construct
  source 1..75: mol_type = other DNA
atctacgctcgtgtttctatggatcttggtcatggtgacggaagaggtcgttatgtaaaacaggtttattttaac

SEQ ID NO: 864293 - DNA, 75 bp, synthetic construct
  source 1..75: mol_type = other DNA
ttctcaagaaaaaggaaccatatcaataccaattactggaaatgtattatgtatatgggatcacattacgagcgt

SEQ ID NO: 864294 - DNA, 75 bp, synthetic construct
  source 1..75: mol_type = other DNA
ccggataacttcctctgcccggaatgctccctcggcaaagacgtctttgacgaactggcatcggaggcaaaatga

SEQ ID NO: 864295 - DNA, 75 bp, synthetic construct
  source 1..75: mol_type = other DNA
gtcactcagcctgaaagccaaatggcgaccggaccaggacgcactggaattatgtcgtgaacacggtcgtgaaat

SEQ ID NO: 864296 - DNA, 75 bp, synthetic construct
  source 1..75: mol_type = other DNA
tgcgacgagcatctgttcaacgatgaagtggatcagacggagcttttcgagcagtgccagcgttactacgccaat

SEQ ID NO: 864297 - DNA, 75 bp, synthetic construct
  source 1..75: mol_type = other DNA
ggtgattggacacgattcatgttttgccctgcatatacactaatgccaagagcgacaaatcctgaactaattgct

SEQ ID NO: 864298 - DNA, 75 bp, synthetic construct
  source 1..75: mol_type = other DNA
tcattgcggggagttgaggtattagcccgctggaaacaacctcacggcaaatatatctcacccgcggcatttatt

SEQ ID NO: 864299 - DNA, 75 bp, synthetic construct
  source 1..75: mol_type = other DNA
gagtcaggtcgccacacaaatgaacgcgatcgccagtaaactgccggaaggatttcatgttgggatcaattttag

SEQ ID NO: 864300 - DNA, 75 bp, synthetic construct
  source 1..75: mol_type = other DNA
tcgttgcggtgtgcctgtttattactggcgtctctattttgaatattcagctctggtattccgcaaaagcagaga

SEQ ID NO: 864301 - DNA, 75 bp, synthetic construct
  source 1..75: mol_type = other DNA
atgaatcttttaattaaaagaaatgtagaagaatttttaagattgttagggggtgatttttatttatttgataat

SEQ ID NO: 864302 - DNA, 75 bp, synthetic construct
  source 1..75: mol_type = other DNA
ctatacgcacggatatgcgacaaaaaggttatgcgctgaaaactgaaaaaacttacctgcactggattaagcgtt

SEQ ID NO: 864303 - DNA, 75 bp, synthetic construct
  source 1..75: mol_type = other DNA
acattgcggggagttgaggtgttagcccgctggaaacaacctcacggtggatatatatcacccgcgcatttattc

SEQ ID NO: 864304 - DNA, 75 bp, synthetic construct
  source 1..75: mol_type = other DNA
taccgatatcatgttatcactggggtatagtgcacactatgatgacattaatattatgccgcgcatgggggtatc

SEQ ID NO: 864305 - DNA, 75 bp, synthetic construct
  source 1..75: mol_type = other DNA
tcgctcgggcttacccgcagccaaaatgcattacgttattataactggtctcagcccttttatggcaatgcttca

SEQ ID NO: 864306 - DNA, 75 bp, synthetic construct
  source 1..75: mol_type = other DNA
attttgcgataaccgggaatggattcttttggggagagggaagaggcgatgctacccagctctcaggaatggttg

SEQ ID NO: 864307 - DNA, 75 bp, synthetic construct
  source 1..75: mol_type = other DNA
cgatctggatgaacaataccaactaggtacagaggctgcgctgaaaccacatctgcggacgatcatcattctcaa

SEQ ID NO: 864308 - DNA, 75 bp, synthetic construct
  source 1..75: mol_type = other DNA
ctgtgacgttaaaaatctaccataatggtcagttgtcccgagtgatgacacaatattttcgtaatactggcgatg

SEQ ID NO: 864309 - DNA, 75 bp, synthetic construct
  source 1..75: mol_type = other DNA
aaaaaatgttgggtctgtttctgtttgttgtatcgtcaacactggccaaagcagtccccccaggttttgaaactt

SEQ ID NO: 864310 - DNA, 75 bp, synthetic construct
  source 1..75: mol_type = other DNA
gcaccctcaaccattcggacatgagatgatgaaggctcttgatgcgtatgagaagcatcaggatgaagtgccaga

SEQ ID NO: 864311 - DNA, 75 bp, synthetic construct
  source 1..75: mol_type = other DNA
attaaatttgcttcagaagtgatgcttgccgagtgtgtgcttgtatcacccgatgaagctccatcaaaagcatta

SEQ ID NO: 864312 - DNA, 75 bp, synthetic construct
  source 1..75: mol_type = other DNA
tggtgttgttttattctccgcccctgaacgagggcgttcagtaagtcttttacctgaagcgtctgtgtttgtttt

SEQ ID NO: 864313 - DNA, 75 bp, synthetic construct
  source 1..75: mol_type = other DNA
ttgcgattgccagaaagcttggcagaccactaagacaaaccccagaagctatgcctgaacctgtaagcacactgg

SEQ ID NO: 864314 - DNA, 75 bp, synthetic construct
  source 1..75: mol_type = other DNA
tcgaaggttggtatgtttgcgaaacacagaaaacgaggacaggaaaaaatgcggaagggttagatacgaggccat

SEQ ID NO: 864315 - DNA, 75 bp, synthetic construct
  source 1..75: mol_type = other DNA
ctggtcgttaaacgggatcacgccattatttcgttcttcgatcaggggatgaatcctgcagtgcccagggttgcc

SEQ ID NO: 864316 - DNA, 75 bp, synthetic construct
  source 1..75: mol_type = other DNA
tgactgaagtaatccccggtcttcatgacgtgaccggggctgttgaattaccagaagataactggttttttactg

SEQ ID NO: 864317 - DNA, 75 bp, synthetic construct
  source 1..75: mol_type = other DNA
gggcgcagggtgttgaattgttgcgcgagcatcctgctatccagatttgctctttaacgcacgtatgcgacgagt

SEQ ID NO: 864318 - DNA, 75 bp, synthetic construct
  source 1..75: mol_type = other DNA
cgcagggcgtggagatggctatggagcatatgcagtcgagcggttcgttaacatttggagattgctacatatcac

SEQ ID NO: 864319 - DNA, 75 bp, synthetic construct
  source 1..75: mol_type = other DNA
ccgttaagtttctacgcagtgaagcgtctagtgtacgtttgttcgccgaccagcttcgcaaaggaggcaaccagt

SEQ ID NO: 864320 - DNA, 75 bp, synthetic construct
  source 1..75: mol_type = other DNA
cgatgaaaatatccatcttgctgaaaaggcaaaaactggtgtcgttttcgctgagtatgggctgacagaatcagg

SEQ ID NO: 864321 - DNA, 75 bp, synthetic construct
  source 1..75: mol_type = other DNA
tcaaagctgatgccctgaatgctgtaagtgaagcagcaaaaacagcattaattaaaaaaggctttcagcttgaag

SEQ ID NO: 864322 - DNA, 75 bp, synthetic construct
  source 1..75: mol_type = other DNA
ttccaagtcgaaagacgtttacagatctggtggcttattgtactgatccgtttgcctctgtagaaaacaaggttt

SEQ ID NO: 864323 - DNA, 75 bp, synthetic construct
  source 1..75: mol_type = other DNA
aaaacctacggtggtcaggtgtggattgataacaccaaccaagggaacggagtctacatggttccacagccgccg

SEQ ID NO: 864324 - DNA, 75 bp, synthetic construct
  source 1..75: mol_type = other DNA
ttttgccgatttaaacgcgcaggttgagcaactcagcaagcgttgctcagaggcttttggctcacatggccatta

SEQ ID NO: 864325 - DNA, 75 bp, synthetic construct
  source 1..75: mol_type = other DNA
ctcgtttccggcctgatgcatcacgatattctgaccggaagcgcaaaatcttttgccgatttaaacgcgcaggtt

SEQ ID NO: 864326 - DNA, 75 bp, synthetic construct
  source 1..75: mol_type = other DNA
gtggttgccggtggaactgctactggcgctcggcatcatgccttacggtgtggcggacaccattaactatcgact

SEQ ID NO: 864327 - DNA, 75 bp, synthetic construct
  source 1..75: mol_type = other DNA
agctgatttaccgtccggcatccattaaggacagtcgcaaggatgcggaaaagcaactgaagctggagcagcgtg

SEQ ID NO: 864328 - DNA, 75 bp, synthetic construct
  source 1..75: mol_type = other DNA
aacataaagcgtgacggtaaggacatccctctcggtgatagcgtgatgaaaggtatcgcgcagctcaggccgttc

SEQ ID NO: 864329 - DNA, 75 bp, synthetic construct
  source 1..75: mol_type = other DNA
acatgttttgcaccaatcgtacggtgcaacatcatgttctgttcaccgacaatatggtgttaatttgccgcgagg

SEQ ID NO: 864330 - DNA, 75 bp, synthetic construct
  source 1..75: mol_type = other DNA
tctttagaagatgacagagagactatcgacaacgctgcgcatgtactcctgttaccggaagggcaaaatttcagc

SEQ ID NO: 864331 - DNA, 75 bp, synthetic construct
  source 1..75: mol_type = other DNA
ctctatccactacaacaaattcagcctgcgcgatcctatcctgcatggggttatagatgttatccgtaatgcatt

SEQ ID NO: 864332 - DNA, 75 bp, synthetic construct
  source 1..75: mol_type = other DNA
ctgatgcatcacgatattctgaccggaagcgcaaagtcttttgctgatttaaacgcgcaggttgagcaactcagc

SEQ ID NO: 864333 - DNA, 75 bp, synthetic construct
  source 1..75: mol_type = other DNA
tgtttttcccgaaatagacttggttaaaatagataatatttcgaaggtgattgataaggtggttaagactatgat

SEQ ID NO: 864334 - DNA, 75 bp, synthetic construct
  source 1..75: mol_type = other DNA
caatctatcagcctattcagaaactgcgcgttatattccctgacctattgtttattcgcaaaggccagggtgtca

SEQ ID NO: 864335 - DNA, 75 bp, synthetic construct
  source 1..75: mol_type = other DNA
taaaaatgagcgtaagggtgcagaaaataaactcattctggagcagcgcggaaacgaaacatggttgaaaaatcc

SEQ ID NO: 864336 - DNA, 75 bp, synthetic construct
  source 1..75: mol_type = other DNA
atgcccagcatggcatggaagaaaaactggagcgtcagaccaccttcgggcgggatgagcgctatctcagcagca

SEQ ID NO: 864337 - DNA, 75 bp, synthetic construct
  source 1..75: mol_type = other DNA
ctgccagatagcattcgagggagccggttcgctcggtggaaccgtggttaaattatctccggagctaaacaccct

SEQ ID NO: 864338 - DNA, 75 bp, synthetic construct
  source 1..75: mol_type = other DNA
ccgccagatagcattcgagggcgccggttcgctcggtggaaccgtggtgaaattatctccagaactgaacaccct

SEQ ID NO: 864339 - DNA, 75 bp, synthetic construct
  source 1..75: mol_type = other DNA
cgtgcacacgctcgtggtgtttgccgatgagtggttcatcaatctgcagcagacgaaccatattgaaagtttcct

SEQ ID NO: 864340 - DNA, 75 bp, synthetic construct
  source 1..75: mol_type = other DNA
atcagactatttatgacgacgtgattaaaatcatccggacaatgaaaccccgtacccagtttatctttgccactc

SEQ ID NO: 864341 - DNA, 75 bp, synthetic construct
  source 1..75: mol_type = other DNA
ttgtcggcggaggcgtggatgcccctcttgtacaacagcacattatttcggtaatggaaggagggcgggaagcct

SEQ ID NO: 864342 - DNA, 75 bp, synthetic construct
  source 1..75: mol_type = other DNA
caacaccttcccctaccgctgcaagtgccaggagcatcagcttaccgtacgccgccataatcgcgtagttcgtgg

SEQ ID NO: 864343 - DNA, 75 bp, synthetic construct
  source 1..75: mol_type = other DNA
atcgccatccaacaggccgttatgcgtcgcctgcgggaaaaactcgcccaggccaacctgaagctagggcgtaac

SEQ ID NO: 864344 - DNA, 75 bp, synthetic construct
  source 1..75: mol_type = other DNA
cccaggccaacctgaagctggagcgtaattacccggagccaaaaatcgcttacacccagcgtggtacatccgccg

SEQ ID NO: 864345 - DNA, 75 bp, synthetic construct
  source 1..75: mol_type = other DNA
tttttcattaatatgcgtttgtttgtttcaatgcataaagaataaaaccttaaaaatattctttaaaatctatgt

SEQ ID NO: 864346 - DNA, 75 bp, synthetic construct
  source 1..75: mol_type = other DNA
ggattcttaagttcactaacaacgcctaggaatgggtatttccagactgtttctacatttatagttggtctgact

SEQ ID NO: 864347 - DNA, 75 bp, synthetic construct
  source 1..75: mol_type = other DNA
aactgatttaccgcccagcatccgttaaggatggtcgtaagaatgcggaaaaactgctgaaactggaacagcgtg

SEQ ID NO: 864348 - DNA, 75 bp, synthetic construct
  source 1..75: mol_type = other DNA
gacgaagaacgcaccgggccattctactgcaagaacgtcgatggctccgccgccagcgagcttcacaccttacgc

SEQ ID NO: 864349 - DNA, 75 bp, synthetic construct
  source 1..75: mol_type = other DNA
ttctcgggaggtcaacgacaacgtattgcgattgcccgagcattgattctgaaaccttcgctgatcattcttgat

SEQ ID NO: 864350 - DNA, 75 bp, synthetic construct
  source 1..75: mol_type = other DNA
tgggtatgctgtttattactcataacctcagcattgtcagaaaactggcccaccgcgtggcggtaatgcaaaacg

SEQ ID NO: 864351 - DNA, 75 bp, synthetic construct
  source 1..75: mol_type = other DNA
ccttacacacaaaaattgctgaacagcgaaccgtcgggagatcccgtgccgttgccggagccagcctcaacattg

SEQ ID NO: 864352 - DNA, 75 bp, synthetic construct
  source 1..75: mol_type = other DNA
ccccctactaatggcagtagtggtatccggtcgcctattgggtgtcaatgatgatcatgacgctttcgtactaat

SEQ ID NO: 864353 - DNA, 75 bp, synthetic construct
  source 1..75: mol_type = other DNA
tctttaaaagaaggtgtagcacaactacacgaactaggatttaacagtacacaagatatcatcattcaagagtgt

SEQ ID NO: 864354 - DNA, 75 bp, synthetic construct
  source 1..75: mol_type = other DNA
ggaattgatattgatgacgaagaacataaagaatttaaattaatcccattaccagaaaatgggaagtattacaga

SEQ ID NO: 864355 - DNA, 75 bp, synthetic construct
  source 1..75: mol_type = other DNA
tattaaattgccttgatcgcgtcggtatccgtcaggcagcaaaacgactgacagattacccgcatcagctctctg

SEQ ID NO: 864356 - DNA, 75 bp, synthetic construct
  source 1..75: mol_type = other DNA
aaacgttgcgcggtgtacgcggtaataagatcgccatgatttttcaggaaccgatggtgtcgttaaatccattgc

SEQ ID NO: 864357 - DNA, 75 bp, synthetic construct
  source 1..75: mol_type = other DNA
ttaccgaaaaaacaccctcagctacagatgtgcctgcaggtacgccatgtgcgcggagatactgcgactgattaa

SEQ ID NO: 864358 - DNA, 75 bp, synthetic construct
  source 1..75: mol_type = other DNA
gaacaagggccgtgcgcacgcgtatttgccgcaccacagcaggagtatacgcgtcagctactggcgttaagctga

SEQ ID NO: 864359 - DNA, 75 bp, synthetic construct
  source 1..75: mol_type = other DNA
agcacgacgggactggcgctgctgagactgattaactctcagggcagtattatctttgacggtcagccactgcaa

SEQ ID NO: 864360 - DNA, 75 bp, synthetic construct
  source 1..75: mol_type = other DNA
cttgatgttgaacagcttcaggttgccttccccattcgcaaggggattttaaaacgcgttgtcgatcataacgtg

SEQ ID NO: 864361 - DNA, 75 bp, synthetic construct
  source 1..75: mol_type = other DNA
atggaaaataatactaataaagagtccttatgtttgcaatcagagaaagggggcaaaacatcgtataaagatatt

SEQ ID NO: 864362 - DNA, 75 bp, synthetic construct
  source 1..75: mol_type = other DNA
gctgtggagcccgaatgaagaggaagaccgacagctacgcgaagactgggaagaattaatggatatgattgttct

SEQ ID NO: 864363 - DNA, 75 bp, synthetic construct
  source 1..75: mol_type = other DNA
aaatttaatcagtatcgctacatcagattcctgaacaagcgcgcaaaaaagcgcctaaacaccaagctattcagg

SEQ ID NO: 864364 - DNA, 75 bp, synthetic construct
  source 1..75: mol_type = other DNA
cgaaaccagcctgatgctggacgtctttacggaggaatcgggacgcgtgcgtctggttgccaaaggcgcacgttc

SEQ ID NO: 864365 - DNA, 75 bp, synthetic construct
  source 1..75: mol_type = other DNA
tatgtggagttgttgacggtggatatggatgttgacgatagtaaacaaattatattacttaatcaggcgctcgat

SEQ ID NO: 864366 - DNA, 75 bp, synthetic construct
  source 1..75: mol_type = other DNA
atgtctcaacctcgcccattgtcctctcctcccgaaactgaagcgcagttattagcacaagcacagcaactttct

SEQ ID NO: 864367 - DNA, 75 bp, synthetic construct
  source 1..75: mol_type = other DNA
ggcgaacggattctgacgctgccgcgcggcttttatttgaagaagaatttcaccagtgcgctactggcccgtcat

SEQ ID NO: 864368 - DNA, 75 bp, synthetic construct
  source 1..75: mol_type = other DNA
aacgctgcgcagtgctgaagctgtctcgctggcgctgccattaagcggtatcacgctttacagcggtctgtacat

SEQ ID NO: 864369 - DNA, 75 bp, synthetic construct
  source 1..75: mol_type = other DNA
caccagggggatgagctaaaacgtgaagaagatctggatgtcgttctgaaggtgctggattcttatatcaaataa

SEQ ID NO: 864370 - DNA, 75 bp, synthetic construct
  source 1..75: mol_type = other DNA
gtcatctgacagaacacattgttcaccagggcgatgaactaaagcgtgaagaagatctggatgtcgttctgaagg

SEQ ID NO: 864371 - DNA, 75 bp, synthetic construct
  source 1..75: mol_type = other DNA
tcctgcatagtcgcccgtggagcgaaacgagcctgatgctggacgtcttcacggaggaatcgggtcgcgtgcgtc

SEQ ID NO: 864372 - DNA, 75 bp, synthetic construct
  source 1..75: mol_type = other DNA
atgatggaaggctggcagcgcgcattcgtattgcatagtcgcccgtggagcgaaaccagcctgatgctggacgtc

SEQ ID NO: 864373 - DNA, 75 bp, synthetic construct
  source 1..75: mol_type = other DNA
caacgaacttctctcccgcgtactggaatacgagacgcgcttctctgaactctttttcgattacttgcactgcat

SEQ ID NO: 864374 - DNA, 75 bp, synthetic construct
  source 1..75: mol_type = other DNA
gaggctgtgaaatcagcacatcaagatgctgtaaacaccatcttgtataccgccaatcgaacgggtgttttatac

SEQ ID NO: 864375 - DNA, 75 bp, synthetic construct
  source 1..75: mol_type = other DNA
ctatcgcgcaaagtctctgcaatcagacaccccagccaccgatgctttcctggctgatgtacgggcacagggggt

SEQ ID NO: 864376 - DNA, 75 bp, synthetic construct
  source 1..75: mol_type = other DNA
ccatgtatgcaagagggtggaatgactatcgcgcagccatgtttcagtcaggaaactttcgggaaaacaagaatt

SEQ ID NO: 864377 - DNA, 75 bp, synthetic construct
  source 1..75: mol_type = other DNA
cgtggtcgcctacgcgcgcgaaagccctgccaatttgtgaaagctggcgcattccttatgccgattcgttatcca

SEQ ID NO: 864378 - DNA, 75 bp, synthetic construct
  source 1..75: mol_type = other DNA
gccgtgactgacggtgcgctcatcgacattacggatatgcgcgaatggcgtgaggagcgcgggcagggcgtagtg

SEQ ID NO: 864379 - DNA, 75 bp, synthetic construct
  source 1..75: mol_type = other DNA
ttgcgcaaaaagcgtggttaccggtgctggcggcagcgtctgactggatgttacaaggagcctggcgcgcctacg

SEQ ID NO: 864380 - DNA, 75 bp, synthetic construct
  source 1..75: mol_type = other DNA
ctggcgaaagcgaacttgccaccgctgctttctgtacctgtgggtgaaaaagccaaatttaactggactccaacc

SEQ ID NO: 864381 - DNA, 75 bp, synthetic construct
  source 1..75: mol_type = other DNA
ggatatcagcagcagtatgcagacgctggcgaaggcaaatttgccgccgttgctttctgttcctgtaggtgaaaa

SEQ ID NO: 864382 - DNA, 75 bp, synthetic construct
  source 1..75: mol_type = other DNA
tcgaaagcatttgctggggggtaattattcagcaggcaaccaaggtcggtgaacgcaagaagaggaaatgcgaca

SEQ ID NO: 864383 - DNA, 75 bp, synthetic construct
  source 1..75: mol_type = other DNA
gaaacaaacgctgagtatctggtgcgtaaatttgctgaagcggaggccaagtgcgcggcgctggcagcggagaat

SEQ ID NO: 864384 - DNA, 75 bp, synthetic construct
  source 1..75: mol_type = other DNA
tgactgaagtccgggctaaggcgtttgatgacctttgcgcggcgttcgttaagcacgcgtcggtgtccgggctgg

SEQ ID NO: 864385 - DNA, 75 bp, synthetic construct
  source 1..75: mol_type = other DNA
ttctcagaaaaattcggaggtggcactccgctatccaatatggtcaaagaggttgcggctgattttgcggcgaag

SEQ ID NO: 864386 - DNA, 75 bp, synthetic construct
  source 1..75: mol_type = other DNA
attccttatgccgattcgttatctaaccttgctgccagttgcgatgcagtttttgtccactccagcaccgccagt

SEQ ID NO: 864387 - DNA, 75 bp, synthetic construct
  source 1..75: mol_type = other DNA
gattcgaaaatacgcgccagcgatctgatgcatcttgaacacagtaaactcaccgttcacgtcgttgacatttaa

SEQ ID NO: 864388 - DNA, 75 bp, synthetic construct
  source 1..75: mol_type = other DNA
atgaattcccgacaacaaactattctacagatggtcattgaccagggtcaggttagcgtaaccgatctggcaaaa

SEQ ID NO: 864389 - DNA, 75 bp, synthetic construct
  source 1..75: mol_type = other DNA
cacagcggatgtggttatcctactggcatgttcgattattactacaaccagtggctggagtcagataacaaaacc

SEQ ID NO: 864390 - DNA, 75 bp, synthetic construct
  source 1..75: mol_type = other DNA
cggtcagggcaacgctatctatctggcggaacgtgactgctctatgcagcgtcgtcaccagaaagtggtcgaaga

SEQ ID NO: 864391 - DNA, 75 bp, synthetic construct
  source 1..75: mol_type = other DNA
atgctggataaaattgttattgccaaccgcggcgagattgcattgcgtattcttcgtgcctgtaaagaattgggc

SEQ ID NO: 864392 - DNA, 75 bp, synthetic construct
  source 1..75: mol_type = other DNA
tgagagaatcaaacgcgttataaccgattcaaagattagcgccagcgatctgatgtctttggaacacagtaaatt

SEQ ID NO: 864393 - DNA, 75 bp, synthetic construct
  source 1..75: mol_type = other DNA
gccattactcaagctgcagactggcgtttggcaacggcacagttgctggaaattgcaggagttggcgatgaatga

SEQ ID NO: 864394 - DNA, 75 bp, synthetic construct
  source 1..75: mol_type = other DNA
gccattacccaggcggcagactggcgtttggcaacggcacaattgctggaaattgcaggagttggcgatgaatga

SEQ ID NO: 864395 - DNA, 75 bp, synthetic construct
  source 1..75: mol_type = other DNA
agcgcggcgatttttttgataccgatttgcatttcatttgataccgctgaaaaacgccgatacgcaacttatttg

SEQ ID NO: 864396 - DNA, 75 bp, synthetic construct
  source 1..75: mol_type = other DNA
tattaatgattactggcggctggcgatcaagcatcaggcgtatggcgtccatctggggcaggaagatttgcaatc

SEQ ID NO: 864397 - DNA, 75 bp, synthetic construct
  source 1..75: mol_type = other DNA
atcccaccgtggcgattggcggtatcagtctggcgcgcgcgcctgcggtgatagcaacgggtgtcggcagtatcg

SEQ ID NO: 864398 - DNA, 75 bp, synthetic construct
  source 1..75: mol_type = other DNA
atcgaacgtctgttggatgcaggcgtacgtactctccagctacgcatcaaagatcggcgcgatgaagaggtggaa

SEQ ID NO: 864399 - DNA, 75 bp, synthetic construct
  source 1..75: mol_type = other DNA
gagatgtttgcacagaaatgtaactcaaaatccgaacagtcatttgcatctgatatacgcgataactggaaacta

SEQ ID NO: 864400 - DNA, 75 bp, synthetic construct
  source 1..75: mol_type = other DNA
tgactatcatgaacgttcgccaggcgctgccgctgggcctgggacactctattttgtgcgcacgcccggttatcg

SEQ ID NO: 864401 - DNA, 75 bp, synthetic construct
  source 1..75: mol_type = other DNA
gaacgcactcagcctggtgcatgggggcgtattcagctgactgatgctattgctgaactggcaaaaaacagtctg

SEQ ID NO: 864402 - DNA, 75 bp, synthetic construct
  source 1..75: mol_type = other DNA
acgacccgccattggtgacaacccatttgtcgtggtgctgccagacgttgtgatcgacgacgccagtgccgaccc

SEQ ID NO: 864403 - DNA, 75 bp, synthetic construct
  source 1..75: mol_type = other DNA
tgatcgacgacgccagcgccgacccgctgcgctacaaccttgctgccatgattgcacgattcaacgaaacgggtc

SEQ ID NO: 864404 - DNA, 75 bp, synthetic construct
  source 1..75: mol_type = other DNA
agctgctggcggaagtacaatctatctgcccgccaggtgtgaccattatgaacgtgcgtcagggggaacctttag

SEQ ID NO: 864405 - DNA, 75 bp, synthetic construct
  source 1..75: mol_type = other DNA
gggctatatgcaggcgttcgtgaagtatggactgcgtaacctaaaagaaggggcgaagttccgcaaaggcattga

SEQ ID NO: 864406 - DNA, 75 bp, synthetic construct
  source 1..75: mol_type = other DNA
gctgaccgacgccgaaatcgctgaaggttacgtactggcctgctcctgccatccgcagggggatttggttctcgc

SEQ ID NO: 864407 - DNA, 75 bp, synthetic construct
  source 1..75: mol_type = other DNA
aagtggtttccggtgaatatacggtgagcagcacaatgacgctgaccgacgccgaaatcgctgaaggttacgtac

SEQ ID NO: 864408 - DNA, 75 bp, synthetic construct
  source 1..75: mol_type = other DNA
ggcggatgcaggttcatcacattacgcaagaaacgccggatgtgtggacgatttccctgatttgccacgattact

SEQ ID NO: 864409 - DNA, 75 bp, synthetic construct
  source 1..75: mol_type = other DNA
aaagagatgctaccgatcgtcgacaagccaatgattcagtacattgttgacgagattgtggctgcagggatcaaa

SEQ ID NO: 864410 - DNA, 75 bp, synthetic construct
  source 1..75: mol_type = other DNA
cggagctgagatgatgaaggctcttgatgcgtatgagaagcatcaggatgaagtgccagagactggaatgctcaa

SEQ ID NO: 864411 - DNA, 75 bp, synthetic construct
  source 1..75: mol_type = other DNA
tggatggttttctgaaaggtaaatgcatcccacgagatttaaaggttaacgaaacaaatgctgagtatctggtgc

SEQ ID NO: 864412 - DNA, 75 bp, synthetic construct
  source 1..75: mol_type = other DNA
gggctatatgcaggcgtttgtgaagtatgggctacgtaacctgaaagaaggggcgaagttccgcaaaggtattga

SEQ ID NO: 864413 - DNA, 75 bp, synthetic construct
  source 1..75: mol_type = other DNA
ggaaggcgattttgatcgctcattctctgatggcgttctcgaagatatcgccgaacagcttcgtaaaggagtcat

SEQ ID NO: 864414 - DNA, 75 bp, synthetic construct
  source 1..75: mol_type = other DNA
ccaccgatgcttttctggctgaagggaagactgaagcacgcaaggaaggcgcttattttgtggcgaacagaatgt

SEQ ID NO: 864415 - DNA, 75 bp, synthetic construct
  source 1..75: mol_type = other DNA
cgcacgttcatcatgaatggggtgcagcttggttatatccaggttccgacagtggaaacagacccggcacttgaa

SEQ ID NO: 864416 - DNA, 75 bp, synthetic construct
  source 1..75: mol_type = other DNA
aagttttcggtgctggcggcggagaatgcggggcttaaggccttcaaaaccgccgtttatcagcagatgggcgtc

SEQ ID NO: 864417 - DNA, 75 bp, synthetic construct
  source 1..75: mol_type = other DNA
acgtgagttctttaccaaagagctacctgatgaagagcacgaaggcgaaacattcaatgaatgtccacttagctg

SEQ ID NO: 864418 - DNA, 75 bp, synthetic construct
  source 1..75: mol_type = other DNA
aagggtttcttcgcgggaaatgcatcccacgagatttaaaggttaacgaaacaaatgctgaatatctggtgcgta

SEQ ID NO: 864419 - DNA, 75 bp, synthetic construct
  source 1..75: mol_type = other DNA
aacgtgcgtcagggcgaacctttaggtttaggtcactccattttgtgtgcacgacccgccattggtgacaaccca

SEQ ID NO: 864420 - DNA, 75 bp, synthetic construct
  source 1..75: mol_type = other DNA
gtgaagtatggactacgcaacctgaaagaaggagcgaagttccgcaaaggcattgagaagctgttaagcgaataa

SEQ ID NO: 864421 - DNA, 75 bp, synthetic construct
  source 1..75: mol_type = other DNA
tgttgaatttatcgaaaaaccggatcagccgcagacgctggactcagacatcatggccgttggtcgctatgtgct

SEQ ID NO: 864422 - DNA, 75 bp, synthetic construct
  source 1..75: mol_type = other DNA
aaaacggtggtgagcagttcgacgaaaaatcagtacgcatcagagacatcatcgtctcagcccgcttgttcaggg

SEQ ID NO: 864423 - DNA, 75 bp, synthetic construct
  source 1..75: mol_type = other DNA
ggaatcacgattgataaccttgaggctaaatgcgcgaagatggctgctgaaaatacatcgcttaagcaatctgag

SEQ ID NO: 864424 - DNA, 75 bp, synthetic construct
  source 1..75: mol_type = other DNA
ttctgccgatatttggccggaacttgaacgcacgcagccaggggcatggggacgtattcagctgactgatgccat

SEQ ID NO: 864425 - DNA, 75 bp, synthetic construct
  source 1..75: mol_type = other DNA
ttatcaccagtcaacaaaatatccgcagagtgatattgaactggcgcgacagctgcatcagcatggcgtacccag

SEQ ID NO: 864426 - DNA, 75 bp, synthetic construct
  source 1..75: mol_type = other DNA
gtgcccaggagagaaatcgccagaaaattcggaattccgttgcgcacagtgaataactacgtttatttcgacagg

SEQ ID NO: 864427 - DNA, 75 bp, synthetic construct
  source 1..75: mol_type = other DNA
gggaaattgccgaaaagttcggaatgaagttgcgtgcagtgaataactacgtttatttcgacaggaggattcagg

SEQ ID NO: 864428 - DNA, 75 bp, synthetic construct
  source 1..75: mol_type = other DNA
aggcggcggtcagaacgaaagcgcgggaactgggtattagtatgatgttacggggtgattatcaccagtcagcaa

SEQ ID NO: 864429 - DNA, 75 bp, synthetic construct
  source 1..75: mol_type = other DNA
ggtgatacgacagctacatgagaagggcatttcaggtcgcgagatagcggaaaaattcgaaatgccgctgcgcac

SEQ ID NO: 864430 - DNA, 75 bp, synthetic construct
  source 1..75: mol_type = other DNA
ggtatttctcgtcgcgagatagcggaaaaattcgaaatgccgctgcgcacggtgaataactatgtttatttcgac

SEQ ID NO: 864431 - DNA, 75 bp, synthetic construct
  source 1..75: mol_type = other DNA
gccaggagattaaagataataacagtcacaaaaaagcattattaatactatccctgaagccgagagtgtccacac

SEQ ID NO: 864432 - DNA, 75 bp, synthetic construct
  source 1..75: mol_type = other DNA
tccctaatctatttcatttcaggtgcgtattttcatgaaaggagatcactcaataacttccatcgagatcgggta

SEQ ID NO: 864433 - DNA, 75 bp, synthetic construct
  source 1..75: mol_type = other DNA
atgatactccggcagtgtgcgggaacgatgaaggtaaaaagcattggcgcacttatcggacgaactgaagcggca

SEQ ID NO: 864434 - DNA, 75 bp, synthetic construct
  source 1..75: mol_type = other DNA
ttactgccaccaaccgcgcagaattcgctgaaaaagttaacaagcggttacaggaaggctgggaacttctcggta

SEQ ID NO: 864435 - DNA, 75 bp, synthetic construct
  source 1..75: mol_type = other DNA
tatttatattcctgtcatacacaaaattcctttacgccaataagaaggttttagaatacaaagcatcaaataaaa

SEQ ID NO: 864436 - DNA, 75 bp, synthetic construct
  source 1..75: mol_type = other DNA
cgcctgcaataagctcttacagctaaacgaggaggactccgaatggttaagtcaggagattaaagataataacag

SEQ ID NO: 864437 - DNA, 75 bp, synthetic construct
  source 1..75: mol_type = other DNA
gtgaaaaagtgggtgcgtgccgagatactgattctacggcagtgtgcgggaacaatgacggtggaatgcatcggg

SEQ ID NO: 864438 - DNA, 75 bp, synthetic construct
  source 1..75: mol_type = other DNA
cggcctcaatgggcgcattcctgctgacagccggggcaaaaggtaaacgtttctgcctgccgaattcgcgcgtga

SEQ ID NO: 864439 - DNA, 75 bp, synthetic construct
  source 1..75: mol_type = other DNA
attcatgcccgtgaaattctgaaagttaaagggcgcatgaatgaacttatggcgcttcatacgggtcaatcatta

SEQ ID NO: 864440 - DNA, 75 bp, synthetic construct
  source 1..75: mol_type = other DNA
ctcagtccattacaacaaattcagcttgcgcgatcctatacttgagggcgttattgatgtaatacgaaatgcgtt

SEQ ID NO: 864441 - DNA, 75 bp, synthetic construct
  source 1..75: mol_type = other DNA
gttcgtcatgaattgcatccaggtgttacctggacaggtgcgatgcaataccatgataaaaattatctcatggaa

SEQ ID NO: 864442 - DNA, 75 bp, synthetic construct
  source 1..75: mol_type = other DNA
agcaagttgccggatgacgcaatgatctggctaaataatgaagggcttaccagtatagaggatattttacgatga

SEQ ID NO: 864443 - DNA, 75 bp, synthetic construct
  source 1..75: mol_type = other DNA
gcatgacaactggggatttgacgcggaccttttccatgagctggtaacaccatcgattgtgctgacactgctgga

SEQ ID NO: 864444 - DNA, 75 bp, synthetic construct
  source 1..75: mol_type = other DNA
ttgtcaaaaagcgaaccgccaaaccccgccggccaaagcactaccgtctggtaaagaccggtgagctcattggga

SEQ ID NO: 864445 - DNA, 75 bp, synthetic construct
  source 1..75: mol_type = other DNA
tttttgccgcagatagcggcgtgaagctaggcaaacaggaagtacaaagcggcagcgtgatgagccacctgatgg

SEQ ID NO: 864446 - DNA, 75 bp, synthetic construct
  source 1..75: mol_type = other DNA
agaaatagtgtatttgaggtgagaaatgaaaatactgatgaggttgtcggagcactgagggaggggatgacgata

SEQ ID NO: 864447 - DNA, 75 bp, synthetic construct
  source 1..75: mol_type = other DNA
gatgcagtgatgattttgatccttttgatattattagggtgccggatcttacttacaacaaaggagctttacaat

SEQ ID NO: 864448 - DNA, 75 bp, synthetic construct
  source 1..75: mol_type = other DNA
agtaaaaattgaggaaagtagacaaggtaaagaaggttctaaatgtaaagtttatggtctgttatgtccgcatca

SEQ ID NO: 864449 - DNA, 75 bp, synthetic construct
  source 1..75: mol_type = other DNA
agcaggttctaagtaccgttatttcgggaataataggcatagcggctacagtagggcttttccatttcacttcac

SEQ ID NO: 864450 - DNA, 75 bp, synthetic construct
  source 1..75: mol_type = other DNA
aaacatgcggagaccgcaatactttggtcatcttgtgaataacataacttatgaccgcatggcaccagagctaag

SEQ ID NO: 864451 - DNA, 75 bp, synthetic construct
  source 1..75: mol_type = other DNA
catcgcgcacagcgtattctgcgagaaatcaatcaacatcatcggcataaattcgcccatttcgatgagaatttc

SEQ ID NO: 864452 - DNA, 75 bp, synthetic construct
  source 1..75: mol_type = other DNA
tttgcccaagggttcctgcaaaccgcgtgggaaacacaggaaaaagcgttccagctgatcaacgagcagcatctg

SEQ ID NO: 864453 - DNA, 75 bp, synthetic construct
  source 1..75: mol_type = other DNA
tgatgaacgccctgccggaagacgccaaagcgtgggtagaagaacacgttggctttgtcgattccgccgttgacc

SEQ ID NO: 864454 - DNA, 75 bp, synthetic construct
  source 1..75: mol_type = other DNA
gttggtgaaaccgagcaggtagataccgtttccggcgtcaatgctgtcagcagcattggtgatgatgtcgttgat

SEQ ID NO: 864455 - DNA, 75 bp, synthetic construct
  source 1..75: mol_type = other DNA
atgagtaattttgctctgattgaacatggcgtggtgaaaaatattattatctgggatggagagggtgatttattc

SEQ ID NO: 864456 - DNA, 75 bp, synthetic construct
  source 1..75: mol_type = other DNA
cggaaggagattttgaccgctcattctctgatggcgttctcaaagatatcgccgcccagcttcgcaaaggaggca

SEQ ID NO: 864457 - DNA, 75 bp, synthetic construct
  source 1..75: mol_type = other DNA
tgcgggcgcagggggtggatgctgctatagaagctgcaaaaaatctggtggcccaagacgggcgcagggggtgga

SEQ ID NO: 864458 - DNA, 75 bp, synthetic construct
  source 1..75: mol_type = other DNA
cgaaaccacagccaccgacgctttcttggctgaagtacgggcgcagggcgtggagatggctatggagcatatgca

SEQ ID NO: 864459 - DNA, 75 bp, synthetic construct
  source 1..75: mol_type = other DNA
gtgagtgggattaattatcaggcgctgcgtgaggcggcacaaaactatcagtcgatgctggcgtggtatcaggag

SEQ ID NO: 864460 - DNA, 75 bp, synthetic construct
  source 1..75: mol_type = other DNA
cgttctgctggaatcacgattgataaccttgaggctaaatgcgcgaagatggctgctgaaaatacatcgcttaag

SEQ ID NO: 864461 - DNA, 75 bp, synthetic construct
  source 1..75: mol_type = other DNA
atcgcggtgatgcttgcgatggatggagcgaagaggtcgatagtatttgctggggaatcatcatgcaatcgtcaa

SEQ ID NO: 864462 - DNA, 75 bp, synthetic construct
  source 1..75: mol_type = other DNA
aactaacgatccgctggaagtgacggtagaaacattcagcgaatggattgttgataaaacccagttcaaaggcgc

SEQ ID NO: 864463 - DNA, 75 bp, synthetic construct
  source 1..75: mol_type = other DNA
gagttcgtagcacgcttcccgaataaaattatcaatattcaccattcattcctgccagcgtttatcggtgcacgt

SEQ ID NO: 864464 - DNA, 75 bp, synthetic construct
  source 1..75: mol_type = other DNA
atgcgcccgggtgatgtattaggtgcgctgacaggagatatcgggcttgatggcgcagatattggcaaaatcgcc

SEQ ID NO: 864465 - DNA, 75 bp, synthetic construct
  source 1..75: mol_type = other DNA
taaaaattgggtaagacttataaaaaacatgactgttttgcgtaatgatatttatacaaaaggcgataagattga

SEQ ID NO: 864466 - DNA, 75 bp, synthetic construct
  source 1..75: mol_type = other DNA
agaaaaagcccaacaggaaactaaagcccaagttgcaagtttaacttctcaacttcagcagctgtctcagcaaat

SEQ ID NO: 864467 - DNA, 75 bp, synthetic construct
  source 1..75: mol_type = other DNA
aatttgttgttagatgattcgcaaatgaacaaattgagtaatgaagaaagccagaaagtatataaagaaatggtt

SEQ ID NO: 864468 - DNA, 75 bp, synthetic construct
  source 1..75: mol_type = other DNA
ttgtataggacaagctgctagtatgggcgcttttttacttagttgcggaacaaaaggaaagcgttacgctcttcc

SEQ ID NO: 864469 - DNA, 75 bp, synthetic construct
  source 1..75: mol_type = other DNA
tccgcagtgaagaagatccacaggctcaggaactggctgcgctgattgccgacaaagggccgcaggctgcgctgg

SEQ ID NO: 864470 - DNA, 75 bp, synthetic construct
  source 1..75: mol_type = other DNA
gcgcacatttccgggcttgatgccaacagcgaggttgtcaccgaggcagtaaccgcttataacgcaatgcaataa

SEQ ID NO: 864471 - DNA, 75 bp, synthetic construct
  source 1..75: mol_type = other DNA
ggcgtacatccagaaaatcctcggtcgttttgagaacccgtatctgaaagatgatgtagagcgcgtaggccgtca

SEQ ID NO: 864472 - DNA, 75 bp, synthetic construct
  source 1..75: mol_type = other DNA
ctggagccaaggcttagtaggtgtacctgatactcaaaaactgaaagacatatgccgtatgggttttacttcgtc

SEQ ID NO: 864473 - DNA, 75 bp, synthetic construct
  source 1..75: mol_type = other DNA
atcagaaatcagccgtctcaaactttatattcaggcaggccaggagttccttagggattcgactgaagaaaaaaa

SEQ ID NO: 864474 - DNA, 75 bp, synthetic construct
  source 1..75: mol_type = other DNA
tcgataaaacgcagttcaaaggtgcactgccgaacatcccaggcatggagttaaccgacaacctgatggcatttg

SEQ ID NO: 864475 - DNA, 75 bp, synthetic construct
  source 1..75: mol_type = other DNA
acacggctgatatcgtgatgtgttttcttaacaaacccagcgcggcgcaaaaccgctggaaaaaccacttgcgca

SEQ ID NO: 864476 - DNA, 75 bp, synthetic construct
  source 1..75: mol_type = other DNA
atgatttgtatgattgttatcggcttcctgatctatggccctgtgatgctgatcggtctgcatgcgctggaactg

SEQ ID NO: 864477 - DNA, 75 bp, synthetic construct
  source 1..75: mol_type = other DNA
gcaggtattccgggcaccctgctgtgcggctggatgtcggataaagtctttcgtggtaaccgtggggcaaccggc

SEQ ID NO: 864478 - DNA, 75 bp, synthetic construct
  source 1..75: mol_type = other DNA
tcctgatttatggccctgtcatgctgatcggtctgcatgcgctggaactggcaccgaaaaaagcggcaggtacgg

SEQ ID NO: 864479 - DNA, 75 bp, synthetic construct
  source 1..75: mol_type = other DNA
cgaaaaatacagacacccggcggctatatcacctacgacaccgaccgctcccgtggcgtcagccatggtgacctc

SEQ ID NO: 864480 - DNA, 75 bp, synthetic construct
  source 1..75: mol_type = other DNA
ttgttcctctgcggttggttccaggggatggggtggccgccatgcggtcgtactatggtgcactggtggtcgcag

SEQ ID NO: 864481 - DNA, 75 bp, synthetic construct
  source 1..75: mol_type = other DNA
cggtggtggtattccgccgctgctgttcctgctggggatggcctggttcaatgactggcacgcagcgctctatat

SEQ ID NO: 864482 - DNA, 75 bp, synthetic construct
  source 1..75: mol_type = other DNA
cagggcgctgggagtatgaccggggcgaacgtgagctggtcagggcattcaacgccgtgcgcaaggcaaaaacgg

SEQ ID NO: 864483 - DNA, 75 bp, synthetic construct
  source 1..75: mol_type = other DNA
tgaaaccatcgcccaggtcactggctcggcccatgttggtaacctgtatgttaaccgtaatatggtgggcgcagt

SEQ ID NO: 864484 - DNA, 75 bp, synthetic construct
  source 1..75: mol_type = other DNA
ttatgtcgtcctctgtttgattgtgtcactggttctgtatgtttggcttttgccaaatatgatctcatctgacag

SEQ ID NO: 864485 - DNA, 75 bp, synthetic construct
  source 1..75: mol_type = other DNA
gcttctcacgcggtgatttaggttttgccctttcggggatctcgattgcttatggattttcgaaattcatcatgg

SEQ ID NO: 864486 - DNA, 75 bp, synthetic construct
  source 1..75: mol_type = other DNA
ccatcgccaacgtgttcgtttatctgctgcgttacggcatcctcgactggtcaccgacttacctgaaagaggtta

SEQ ID NO: 864487 - DNA, 75 bp, synthetic construct
  source 1..75: mol_type = other DNA
gccgccgatcgaagagtacaaaaatgattatccggacgactataacgaaaaagcggaacaggagctgacggcgaa

SEQ ID NO: 864488 - DNA, 75 bp, synthetic construct
  source 1..75: mol_type = other DNA
cgggggaccgctggaacagcgaacagccacgctcaaaacgcagtgagtttgatgtttcacatgcgcatctgaagg

SEQ ID NO: 864489 - DNA, 75 bp, synthetic construct
  source 1..75: mol_type = other DNA
gtgaaaaagttcttccccctggctgttccgtacaacttcaatatcgcgtccaaacgggcgctggtcatgaagatg

SEQ ID NO: 864490 - DNA, 75 bp, synthetic construct
  source 1..75: mol_type = other DNA
atggcggcagattgtcactattgaggatgctgtcgctaacggatggcggtacaccaatattggtgttattcgcgg

SEQ ID NO: 864491 - DNA, 75 bp, synthetic construct
  source 1..75: mol_type = other DNA
ggtatgaaaaccgccaccaccgtaatcgtatgatcctgaagtcgcgtcagattggggctacctggtattttgcgc

SEQ ID NO: 864492 - DNA, 75 bp, synthetic construct
  source 1..75: mol_type = other DNA
cagtattaccgttattttgctatgcaatattgtcgccttgctgtggctggagcgtggtttgccatggcgtaatca

SEQ ID NO: 864493 - DNA, 75 bp, synthetic construct
  source 1..75: mol_type = other DNA
acaatcaccactggcgtaaccgcatgatcctgaaaagccgtcaggttggcgcgacgtggtatttcgcacgtgaag

SEQ ID NO: 864494 - DNA, 75 bp, synthetic construct
  source 1..75: mol_type = other DNA
tgcagcgtgcacgacagctttactggcagggctacccgccagcagagatcgcacgcctgatggggatcaaccaga

SEQ ID NO: 864495 - DNA, 75 bp, synthetic construct
  source 1..75: mol_type = other DNA
attcagaaggccgcggctgaagttgatgtggagctgaaagggggcgataaaatcatcctctccaacggcgcagag

SEQ ID NO: 864496 - DNA, 75 bp, synthetic construct
  source 1..75: mol_type = other DNA
gggtgcagccgttcggcggcgaagggttgtccggcaccgggccgaaagcaggcggtccgctctatctctaccgtc

SEQ ID NO: 864497 - DNA, 75 bp, synthetic construct
  source 1..75: mol_type = other DNA
gctgtggacggatgacacactgcatcgtcaattagtgaaggcattgccatcggcagtcagcgaacgtattcaact

SEQ ID NO: 864498 - DNA, 75 bp, synthetic construct
  source 1..75: mol_type = other DNA
gggtgaacaggctgtttccggtaagaagccccgcaagcgcaaactgaaaaatcactttacggaagagcaaatcat

SEQ ID NO: 864499 - DNA, 75 bp, synthetic construct
  source 1..75: mol_type = other DNA
gccacctggtactttgcccgcgaagcgctgttgcgtgcgctggaaaccggaaataatcagatattcctgtcagcc

SEQ ID NO: 864500 - DNA, 75 bp, synthetic construct
  source 1..75: mol_type = other DNA
ctggttgataccgatgaaatccgtaacgaaaactcccccgacgaatacgccaacctgtacggctgcatgttcgtt

SEQ ID NO: 864501 - DNA, 75 bp, synthetic construct
  source 1..75: mol_type = other DNA
tccggctgcgtgggacaggttgtttggtaccaggaatcaggagcagcgcgtatgtttgacgaagaacagcgagag

SEQ ID NO: 864502 - DNA, 75 bp, synthetic construct
  source 1..75: mol_type = other DNA
gcattctgactcatccagcgctgactaacgcctggggcgtggccgcgggtttccacaccatgaactttttcggct

SEQ ID NO: 864503 - DNA, 75 bp, synthetic construct
  source 1..75: mol_type = other DNA
tgcgccacgcgcctgcgcctggtgctggtcgatgattcgctggccgaccagcaggccatcggcaaagttgaaggg

SEQ ID NO: 864504 - DNA, 75 bp, synthetic construct
  source 1..75: mol_type = other DNA
cccggctatcgtcgcctccggcctgttgatgggccttctggggatggttaaaacgtacggctgggtcgacccggg

SEQ ID NO: 864505 - DNA, 75 bp, synthetic construct
  source 1..75: mol_type = other DNA
tgcgttcaccgatgccgaaaaagcgcaggggctgaccgatttcaatgacctggatgccagccggggacgggccgc

SEQ ID NO: 864506 - DNA, 75 bp, synthetic construct
  source 1..75: mol_type = other DNA
ttctgggccgctggttatcggaagagatgaaggtcattttgctggatgaacctacgcgcggcattgatgttggcg

SEQ ID NO: 864507 - DNA, 75 bp, synthetic construct
  source 1..75: mol_type = other DNA
agttcgctgttgaactacattatcgggatggttatcgcctttggcgtcgcctttacggtctccctggttttgaaa

SEQ ID NO: 864508 - DNA, 75 bp, synthetic construct
  source 1..75: mol_type = other DNA
atttggttgcccacatggtaaaaatataactcgttattggttcacaactgaaacagatgagtttcctgacctaaa

SEQ ID NO: 864509 - DNA, 75 bp, synthetic construct
  source 1..75: mol_type = other DNA
gcgatgcagaaaagcgcatgaccggcgctgactggctgacagcgattgagatgtacaaaccaacagtgcgcatcg

SEQ ID NO: 864510 - DNA, 75 bp, synthetic construct
  source 1..75: mol_type = other DNA
aaagcatatgaccggcgctgactggctgacagcgattgagatgtacaaaccaactgtgcgcatcgtggaagttaa

SEQ ID NO: 864511 - DNA, 75 bp, synthetic construct
  source 1..75: mol_type = other DNA
cctttccagcgcattgcccgcctgttgtcgaacatctttgtgccgatcatcccggctatcgtcgcctccggcctg

SEQ ID NO: 864512 - DNA, 75 bp, synthetic construct
  source 1..75: mol_type = other DNA
tatttgtttttgatgaagagagtgaaacagctaaaatagttcaaaatatagcaccggatgaagcttttatagagc

SEQ ID NO: 864513 - DNA, 75 bp, synthetic construct
  source 1..75: mol_type = other DNA
tgcctccaaaaaatgatgaccgcaagacttaaaaatgaattgcctgaatttataaaaataagaaaaataattact

SEQ ID NO: 864514 - DNA, 75 bp, synthetic construct
  source 1..75: mol_type = other DNA
acctgacgccggttcctatgcaggtcgccaaccagcaggggtacatagaaagtgtcaccacggatacgacggcca

SEQ ID NO: 864515 - DNA, 75 bp, synthetic construct
  source 1..75: mol_type = other DNA
gcgatgtgcgtcgcagtgtttccacttattgcagtaaagaacgcgtgaacgcctggcgggagcgccgcgagcgta

SEQ ID NO: 864516 - DNA, 75 bp, synthetic construct
  source 1..75: mol_type = other DNA
atgaacaaaaaacttcttgctattatgattgcagccactctgctgcagggctgtaccagtttccgacaggcagag

SEQ ID NO: 864517 - DNA, 75 bp, synthetic construct
  source 1..75: mol_type = other DNA
ggggtattcgtcaattccagttccttggtggtgcgcctgtttcagtctggcgcgagctacgtcgattccgcaatc

SEQ ID NO: 864518 - DNA, 75 bp, synthetic construct
  source 1..75: mol_type = other DNA
tgaagctggctcaggggggagaagtaatggcacttgatacgacatatcgggctaacccggtaacgggtgaattga

SEQ ID NO: 864519 - DNA, 75 bp, synthetic construct
  source 1..75: mol_type = other DNA
gctgtacttagccctgtagagtacagcaaacgaatgctgctggaaggctcaaggctgattgcttacttcgggcta

SEQ ID NO: 864520 - DNA, 75 bp, synthetic construct
  source 1..75: mol_type = other DNA
gggagagaaaaacagcggcgcgccgccaccgggagatcccgaacaggttctgatcggcaaattgacacgggaaca

SEQ ID NO: 864521 - DNA, 75 bp, synthetic construct
  source 1..75: mol_type = other DNA
agtaagcaaggtgtaataaccccctccttctttggacttgggggggcgttaacagtgaagacggcgacacgattc

SEQ ID NO: 864522 - DNA, 75 bp, synthetic construct
  source 1..75: mol_type = other DNA
gtcttggtggctcatttggtaatgccgccgagaatgttattaccagtggtgtatccatcgtggacggtaagctgg

SEQ ID NO: 864523 - DNA, 75 bp, synthetic construct
  source 1..75: mol_type = other DNA
gtcagtgtcgtaacgcaaaactccgctgtgactaaaaacctgacgcccgtccctatgcaaattgccaatcagcag

SEQ ID NO: 864524 - DNA, 75 bp, synthetic construct
  source 1..75: mol_type = other DNA
ctcaggtactggattgggcgaagttaagaaagatccaaatcacacctgtgcaagtgctaaagctggtacaaggga

SEQ ID NO: 864525 - DNA, 75 bp, synthetic construct
  source 1..75: mol_type = other DNA
ggcaacagatccgcgctgagttggcccgccgcgatattcaggtgtttgggcttcgcgtggctgaatctcaccacg

SEQ ID NO: 864526 - DNA, 75 bp, synthetic construct
  source 1..75: mol_type = other DNA
gcagtatggtttatgagcatagtggaaaaacagttacgcaggtttatccctgatgctctggatctcattctgacg

SEQ ID NO: 864527 - DNA, 75 bp, synthetic construct
  source 1..75: mol_type = other DNA
gaacacgctgaaagcggctaacattatcggtatccagatcgagttcccgaaagtgatcctggctggcgaagtaac

SEQ ID NO: 864528 - DNA, 75 bp, synthetic construct
  source 1..75: mol_type = other DNA
tttcatgactctgctgtggaaaaccatcaaggcgggacatatcgatgtcggtctctttcgggcggccagtgaagg

SEQ ID NO: 864529 - DNA, 75 bp, synthetic construct
  source 1..75: mol_type = other DNA
tttaaggccaaagtcttcagttatatcgaccgtgtcgtgttctggaagctggctcactggctggcccgcaaatac

SEQ ID NO: 864530 - DNA, 75 bp, synthetic construct
  source 1..75: mol_type = other DNA
ggaaagccagatgcagcaactgattggtattctggtgcgtgaggccggaaaaaccttcagtaacgccattgccga

SEQ ID NO: 864531 - DNA, 75 bp, synthetic construct
  source 1..75: mol_type = other DNA
aaatctgcgcataacgacaacatcaaaatcattggttttgacggcatgaaagaagcgcgtgatgccgttgacagt

SEQ ID NO: 864532 - DNA, 75 bp, synthetic construct
  source 1..75: mol_type = other DNA
atgccattattatctctccggtcgattcgaaaggcgtccaggcagcgataattaaagccgataaggccggtattc

SEQ ID NO: 864533 - DNA, 75 bp, synthetic construct
  source 1..75: mol_type = other DNA
ggtaatgactgacaacttcaacacagaagttaaatcattttcggtcaatgtttacgtgactaatactggttcaaa

SEQ ID NO: 864534 - DNA, 75 bp, synthetic construct
  source 1..75: mol_type = other DNA
ggggctaatggctttgatgaggatttagtagaggccaagaagtggatcgatctcgccgcagaaaaaggagataaa

SEQ ID NO: 864535 - DNA, 75 bp, synthetic construct
  source 1..75: mol_type = other DNA
cagcctttcctcgactttgccgagcaaatattgccccagtcggtttcccgcgccgccatcaccgccgcctatcgc

SEQ ID NO: 864536 - DNA, 75 bp, synthetic construct
  source 1..75: mol_type = other DNA
atgagcaaatcattacaaaaaccctccattctgaatgttgaaactgtagcctgttcccgattgtttactgtcgaa

SEQ ID NO: 864537 - DNA, 75 bp, synthetic construct
  source 1..75: mol_type = other DNA
cagcagcagactctttatgcaccattgttatgccgactggcaacatcgtatgacgcagcttgctgcgctcagtca

SEQ ID NO: 864538 - DNA, 75 bp, synthetic construct
  source 1..75: mol_type = other DNA
gcttgtttttgctcgtaaatttaaggacctgagtccagagcaactcgataagcttaataaaatgttaaaggactg

SEQ ID NO: 864539 - DNA, 75 bp, synthetic construct
  source 1..75: mol_type = other DNA
cacttgctggctacaatgttctgtatctctcgctggaggttcacaccaccattttatccgaccgttttgatgcaa

SEQ ID NO: 864540 - DNA, 75 bp, synthetic construct
  source 1..75: mol_type = other DNA
attttgtggttcgacgggcaaaccagcctcgctatctggtgctttgcgatgatcgccgccatcctgccatacatc

SEQ ID NO: 864541 - DNA, 75 bp, synthetic construct
  source 1..75: mol_type = other DNA
gttgtcttggctatacttcaccggacggtggtattaacgaaaacaacaactggtgtcacatcccgcaggcgaaag

SEQ ID NO: 864542 - DNA, 75 bp, synthetic construct
  source 1..75: mol_type = other DNA
aagcagttaggattcagttctgacctctacgctatgcagagcgaaatgtggttctacagcaacacgatggcagac

SEQ ID NO: 864543 - DNA, 75 bp, synthetic construct
  source 1..75: mol_type = other DNA
tcttccgggcggccagtgaaggtgtgtcacagggcggtgtgatctcgccgttgctgtcgaacatcatgctaaatg

SEQ ID NO: 864544 - DNA, 75 bp, synthetic construct
  source 1..75: mol_type = other DNA
ggaagccatcagggaggagtgtcggggtgtgctcgaaggcagtctgaaactcaggctgaacatggataagactaa

SEQ ID NO: 864545 - DNA, 75 bp, synthetic construct
  source 1..75: mol_type = other DNA
tcaaccgaaaactgaaaggctggccatgttctatcagttcgttgattttaaggccaaagtcttcagttatatcga

SEQ ID NO: 864546 - DNA, 75 bp, synthetic construct
  source 1..75: mol_type = other DNA
tacagtgaaagcaaagtcgatatggctgaacaactcaaccgaaaactgaaaggccatgttctatcagttcgttga

SEQ ID NO: 864547 - DNA, 75 bp, synthetic construct
  source 1..75: mol_type = other DNA
taatgatccccgctctggatacatcagcgcatacaacatctgctcttgggacgaatgtttatcacccagaaaagt

SEQ ID NO: 864548 - DNA, 75 bp, synthetic construct
  source 1..75: mol_type = other DNA
attcacagcgacaggattctgatggtaatgatccccgctctggatacatcagcgcatacaacgtctgctcttgga

SEQ ID NO: 864549 - DNA, 75 bp, synthetic construct
  source 1..75: mol_type = other DNA
ctcttatccttatctggaataaccgctgtcgttacaccttgctccgacagctgcgaacccctggacagcgtattc

SEQ ID NO: 864550 - DNA, 75 bp, synthetic construct
  source 1..75: mol_type = other DNA
aatctatattggcctttttatgaatggcgcggttttttaccgccgcttcggcagctatgcgcacgattttaccgt

SEQ ID NO: 864551 - DNA, 75 bp, synthetic construct
  source 1..75: mol_type = other DNA
aaggaaatagacctgctgacccggcagcttaaaaaactgcatgatggccagccagatgcgacggccacaggaaag

SEQ ID NO: 864552 - DNA, 75 bp, synthetic construct
  source 1..75: mol_type = other DNA
ccggacaggtgcgggatgatttcgctaacgaaacccaccgtccattagggcctgtggtatgtatcagtccgtgga

SEQ ID NO: 864553 - DNA, 75 bp, synthetic construct
  source 1..75: mol_type = other DNA
caaaattcgccatgctggttgcgcagggtaaaaacctcatcgaggcataccgcctagcgggttacgagggaacgg

SEQ ID NO: 864554 - DNA, 75 bp, synthetic construct
  source 1..75: mol_type = other DNA
tatcgggctatctcatggttccgcaatcagtaccagaaacgctataccgcagacctagatttactggtgagtcag

SEQ ID NO: 864555 - DNA, 75 bp, synthetic construct
  source 1..75: mol_type = other DNA
ctcggcgttcgacagtgcgggtcagcgttgttcggcactgcgcgtgctgtgcctgcaagatgagattgccgacca

SEQ ID NO: 864556 - DNA, 75 bp, synthetic construct
  source 1..75: mol_type = other DNA
gcagctatgcgcacgattttaccgtctggaaaggcatttctgctgttgttgaactggccgccaccgtactggtga

SEQ ID NO: 864557 - DNA, 75 bp, synthetic construct
  source 1..75: mol_type = other DNA
tttcttcattctaaatcctggagaaaatgactttgtgggcgtttctggctcaattgagcaggacgtaaacttatt

SEQ ID NO: 864558 - DNA, 75 bp, synthetic construct
  source 1..75: mol_type = other DNA
taagacaccgactggaaaccggggatgcctccgccagagaattgggcaaggagtatggagtcagtcatacaacga

SEQ ID NO: 864559 - DNA, 75 bp, synthetic construct
  source 1..75: mol_type = other DNA
aagggcgagaagtccacaatggccgtgatatacaaaagctggcataagcaggatgaggatgagaacggcaaccgg

SEQ ID NO: 864560 - DNA, 75 bp, synthetic construct
  source 1..75: mol_type = other DNA
cccgtcatggaggccatgaagcatatcaatgactggcttggcgaagaggtgatccgatttaacccttacgcactg

SEQ ID NO: 864561 - DNA, 75 bp, synthetic construct
  source 1..75: mol_type = other DNA
gagggggatcagccacggcgaccttgcgtgggcaaccatgcttgctgtcattaacgaaccgattggcggcgaagg

SEQ ID NO: 864562 - DNA, 75 bp, synthetic construct
  source 1..75: mol_type = other DNA
caaccatgcttgctgtcattaacgaaccgattggcggcgaaggggaaaacgagcgttttacggttatggagttct

SEQ ID NO: 864563 - DNA, 75 bp, synthetic construct
  source 1..75: mol_type = other DNA
cgtctgatgggaataaacccgaacacgatttatgcgtggaaaaaacgtgaccagtgggatgaaacgccacccgtg

SEQ ID NO: 864564 - DNA, 75 bp, synthetic construct
  source 1..75: mol_type = other DNA
atattcgacgcagagggtaaccccgttatggttgatgtaccggtgctgaaagcgaatcctctctttaacgttgaa

SEQ ID NO: 864565 - DNA, 75 bp, synthetic construct
  source 1..75: mol_type = other DNA
caattagccaccaatatcagcgccttcttggactttttcgtcaaacgctttagcagccaagaaagcctacaatcc

SEQ ID NO: 864566 - DNA, 75 bp, synthetic construct
  source 1..75: mol_type = other DNA
tggagggtaatgaacatcccctgcctgtggcgatcaatattaatgtagttgatgccagggtaaggagtgatgaag

SEQ ID NO: 864567 - DNA, 75 bp, synthetic construct
  source 1..75: mol_type = other DNA
tctcagaaaaaaaaggctgtatccgatgcactcctgattgagggggacacggaagaaatttcgttctgccccgat

SEQ ID NO: 864568 - DNA, 75 bp, synthetic construct
  source 1..75: mol_type = other DNA
ctgataccactctgcttgatggggatgcgcggcaattatatgcaggggcaaaactcggaaaattcggcgttgaga

SEQ ID NO: 864569 - DNA, 75 bp, synthetic construct
  source 1..75: mol_type = other DNA
ttgaggccgaaaagccacttatggcctttgtcatggatgatgtgaaacttcatactaaatcagtatatgagtctc

SEQ ID NO: 864570 - DNA, 75 bp, synthetic construct
  source 1..75: mol_type = other DNA
agtaccaatgagattatcgactattataaaaaagttacgaacgatttagagaaacaagtgaaaactcttgagggt

SEQ ID NO: 864571 - DNA, 75 bp, synthetic construct
  source 1..75: mol_type = other DNA
atggctgattcaacgtatgatgcagataaagaagcctacacttataatcattttgatataaagattcagttagca

SEQ ID NO: 864572 - DNA, 75 bp, synthetic construct
  source 1..75: mol_type = other DNA
gcagcagacgattcctcaatcattctctgaagccctacgtcttgcagctgaccttgcagaacaaaaacagcagtt

SEQ ID NO: 864573 - DNA, 75 bp, synthetic construct
  source 1..75: mol_type = other DNA
gttaagcagttagccctcgatgactttgggattgcaatgctatcaaactccgcctgcaaaaccgaactcgccaac

SEQ ID NO: 864574 - DNA, 75 bp, synthetic construct
  source 1..75: mol_type = other DNA
ggcacccccgcaacacctaaggagctgagcgatcatagtcgtattctgctaggaacatcccgctcagcacccata

SEQ ID NO: 864575 - DNA, 75 bp, synthetic construct
  source 1..75: mol_type = other DNA
tgttaactgccgttattgctggggcgagaatcatctctaccagtggcgcgatatagcggcccatcatcaccacat

SEQ ID NO: 864576 - DNA, 75 bp, synthetic construct
  source 1..75: mol_type = other DNA
gccattgtccaggccgaccccaatcagttggcacaatttcgccgtgttaactgccgttattgctggggcgagaat

SEQ ID NO: 864577 - DNA, 75 bp, synthetic construct
  source 1..75: mol_type = other DNA
ccacggcatcagcatattgatgcgggccgttttgaagtgaaaaccggcacatccgtaacctcaaatcatgcattc

SEQ ID NO: 864578 - DNA, 75 bp, synthetic construct
  source 1..75: mol_type = other DNA
agcctgggtcgaagaagttccaccaccaactgaccaacatgaggaaattctcgaagaactgggggaaatagaaaa

SEQ ID NO: 864579 - DNA, 75 bp, synthetic construct
  source 1..75: mol_type = other DNA
tctggtgatgacgctgttattagtgatggtgtttatcatccctattgccttgttggttaacagtattgtcgatgg

SEQ ID NO: 864580 - DNA, 75 bp, synthetic construct
  source 1..75: mol_type = other DNA
tacattgctaattgtgtggtgttagcattgtccactattgcttttggatatttattttatctacttcacagttaa

SEQ ID NO: 864581 - DNA, 75 bp, synthetic construct
  source 1..75: mol_type = other DNA
gccacaggcgggcggtgaagagggcacagagccggaaattctgcgttgtgcttctgagagtgatgaggcagtgca

SEQ ID NO: 864582 - DNA, 75 bp, synthetic construct
  source 1..75: mol_type = other DNA
ccgaaacgcattctgcactttgcttatgcattctctcgcgagtattttgaaaaacatcagaaccgtgaaatacca

SEQ ID NO: 864583 - DNA, 75 bp, synthetic construct
  source 1..75: mol_type = other DNA
atgttcgtcagcccagggatgtcgcacaaattctgctttcggtgctgttttttagccatcatgattgtggcatgt

SEQ ID NO: 864584 - DNA, 75 bp, synthetic construct
  source 1..75: mol_type = other DNA
gccatcaactacgaacataaatccgccgggattatgcagcagctgggactaccggagatggcaattgatatccgt

SEQ ID NO: 864585 - DNA, 75 bp, synthetic construct
  source 1..75: mol_type = other DNA
ctactctgcatagcggaataccggaactggtggaggctgacaaatccggctggctggtgcctgagaacgatgctc

SEQ ID NO: 864586 - DNA, 75 bp, synthetic construct
  source 1..75: mol_type = other DNA
aatgaactttgctactccggcgattgccatcaactatgaacataaatccgccgggatcatgcagcagctgggact

SEQ ID NO: 864587 - DNA, 75 bp, synthetic construct
  source 1..75: mol_type = other DNA
cggtagatttttacttagaaaaagcattttatttatttggattcataatgttaggtatggcatggcttacttttc

SEQ ID NO: 864588 - DNA, 75 bp, synthetic construct
  source 1..75: mol_type = other DNA
gaacatggcgtcgataccgcgtggctggtcgatcaccacacagaagacttcaccgccagctatgccgttcaacac

SEQ ID NO: 864589 - DNA, 75 bp, synthetic construct
  source 1..75: mol_type = other DNA
ctccacctgtacgggcatcgacagctataacaaagacgaccgcatggtggcgctcaacctgcgccagcacatcag

SEQ ID NO: 864590 - DNA, 75 bp, synthetic construct
  source 1..75: mol_type = other DNA
ccggcagagttttcagtgaaacaactgacagaggttatgacacagcgtgggataccttttgccacctgctttgac

SEQ ID NO: 864591 - DNA, 75 bp, synthetic construct
  source 1..75: mol_type = other DNA
tgctgggacaatatcacttataacttcgatcatgctgattttctctggtgtcccgtgcataaaggtacggacaga

SEQ ID NO: 864592 - DNA, 75 bp, synthetic construct
  source 1..75: mol_type = other DNA
tgctcattccggtcatggctttgtctggaatcatattccctggggagccgaagattttaccggagcactgcctct

SEQ ID NO: 864593 - DNA, 75 bp, synthetic construct
  source 1..75: mol_type = other DNA
ttcattatgctgagaaattccgtataaaacatcaatgtaaactggaatgctcagtcagtgaggagttcataacgc

SEQ ID NO: 864594 - DNA, 75 bp, synthetic construct
  source 1..75: mol_type = other DNA
tgtggcgttcacccgggcaacccgtgaattactggtgacctgttaccatgaaaacagcatcagtcgtcatcttga

SEQ ID NO: 864595 - DNA, 75 bp, synthetic construct
  source 1..75: mol_type = other DNA
ttttcccttcagcacagacaatctgtcaggatgaaatgacgcagtctgttttacctgaggtattccggcaaaaaa

SEQ ID NO: 864596 - DNA, 75 bp, synthetic construct
  source 1..75: mol_type = other DNA
atggcaaaactgataaatgtatcggcgtccactgtggaaagaatgacgcccggggagaggagagtggcttcacga

SEQ ID NO: 864597 - DNA, 75 bp, synthetic construct
  source 1..75: mol_type = other DNA
attacccgtcagcaactgaagacactggcagggaatgatgagaatgcggtggaaaagattttcccttcagcacag

SEQ ID NO: 864598 - DNA, 75 bp, synthetic construct
  source 1..75: mol_type = other DNA
aaatcagaaataaatccgctggtacaggttcgtcgttatgcctgtgatactgttaatgccttacctgcagacccg

SEQ ID NO: 864599 - DNA, 75 bp, synthetic construct
  source 1..75: mol_type = other DNA
ggcgtattgttaggttctattcccgtctttgtgcctgggttcccggccgcgttgaaactggggctggcgggcggt

SEQ ID NO: 864600 - DNA, 75 bp, synthetic construct
  source 1..75: mol_type = other DNA
agtggtggtcgataaagatcagctggttaccagtcggacaccggacgatttgcccgcgtttaaccgcgaggcgtt

SEQ ID NO: 864601 - DNA, 75 bp, synthetic construct
  source 1..75: mol_type = other DNA
agtcgtggtcgataaagatcagctggttaccagccggacaccggacgatctgccagcgtttaaccgcgaggcgtt

SEQ ID NO: 864602 - DNA, 75 bp, synthetic construct
  source 1..75: mol_type = other DNA
aagaaatcatcgcagctaaaaagtgcctagagcagatgaaatcatctacaaaccatgatgattttgaaatgcact

SEQ ID NO: 864603 - DNA, 75 bp, synthetic construct
  source 1..75: mol_type = other DNA
agcgaagccgtcagtcgtgagcgtcagataggaatgcagatggtgcaatctgtgcttgagcgcatcggggaggtg

SEQ ID NO: 864604 - DNA, 75 bp, synthetic construct
  source 1..75: mol_type = other DNA
cggagatggtcagcgatcatcaggagattacgactaaacccgtcacgctctcgatggatgaactgggcgaaaaac

SEQ ID NO: 864605 - DNA, 75 bp, synthetic construct
  source 1..75: mol_type = other DNA
caattgacgaaagcggtggtgcaaaacgcgccgcaacgcccgacacaacagcaggaactcacgccattgccgcca

SEQ ID NO: 864606 - DNA, 75 bp, synthetic construct
  source 1..75: mol_type = other DNA
ggccatcagcaggaagaggtgagtgccgccttacttcttgacgatgcgcctcaatttccacagaacgaatccgtt

SEQ ID NO: 864607 - DNA, 75 bp, synthetic construct
  source 1..75: mol_type = other DNA
aaggtcagatgttttgcgtcaggaaatgcttgcaaataaaattgctcaacttgaggaggagcttgagcaactcaa

SEQ ID NO: 864608 - DNA, 75 bp, synthetic construct
  source 1..75: mol_type = other DNA
gtgtcagaggggaatttgaaaatcgcttaaaatcgctcttaaccgaacttaattccctagatggtacagctattt

SEQ ID NO: 864609 - DNA, 75 bp, synthetic construct
  source 1..75: mol_type = other DNA
ccggtcgtgtgcctgatgcactgaggaatgtcaggatccttgcgcttgatatgggcgctttgcttgcaggtgcca

SEQ ID NO: 864610 - DNA, 75 bp, synthetic construct
  source 1..75: mol_type = other DNA
gttcgtcatgaagagcttgatggtgtgctcaaaaagcaacaacaggatgagcagttgcggcaggcacagcaggcg

SEQ ID NO: 864611 - DNA, 75 bp, synthetic construct
  source 1..75: mol_type = other DNA
gtgttcctgttgcttgtcgtactggctgctgatgtcgaattgcaatttaacgagctttacgctcaccgagtgcgc

SEQ ID NO: 864612 - DNA, 75 bp, synthetic construct
  source 1..75: mol_type = other DNA
tgagcttgagttcgggaaagagtgggatggtcatgaagcaaatgatgttcttggacgactcctgagtttgcgtcc

SEQ ID NO: 864613 - DNA, 75 bp, synthetic construct
  source 1..75: mol_type = other DNA
atgaatccggcattgcttgccacgcccggaacgcttgcggaaacagcgtcgctgaaagcggatattttaccgccg

SEQ ID NO: 864614 - DNA, 75 bp, synthetic construct
  source 1..75: mol_type = other DNA
cgttcagaatcatcagcttcatcagcaaatggcggatttacataacagtcgttcatggcgtattactcaaccact

SEQ ID NO: 864615 - DNA, 75 bp, synthetic construct
  source 1..75: mol_type = other DNA
ggatacccttaccgggagtcgtacactgttcccgcgccttgaaccggtgcatgttgacagtgcgctcgcctggca

SEQ ID NO: 864616 - DNA, 75 bp, synthetic construct
  source 1..75: mol_type = other DNA
tcatcacgattaatatgactgaatttcaggaagctcacactgtttccactctgaagggggcacctcctggatatg

SEQ ID NO: 864617 - DNA, 75 bp, synthetic construct
  source 1..75: mol_type = other DNA
cgatggttgcggataccttaggccaacttccggcgctgaacgcacgacttaacgaagctgtcagtcgtgagcgtt

SEQ ID NO: 864618 - DNA, 75 bp, synthetic construct
  source 1..75: mol_type = other DNA
attgctggcaataatgcaagaggaaactttcacgtaagcaggtatcaagggaaatttaatgcttaccagcgaacc

SEQ ID NO: 864619 - DNA, 75 bp, synthetic construct
  source 1..75: mol_type = other DNA
taaatgtgagattatatgccctgcttctgatgttgtagagttattcgagaataaaatgatgccaatttatagtaa

SEQ ID NO: 864620 - DNA, 75 bp, synthetic construct
  source 1..75: mol_type = other DNA
acatggcgtcgataccgcgtggctggtcgatcaccacaccgaagatttcaccgccagctatgccgttcaacactg

SEQ ID NO: 864621 - DNA, 75 bp, synthetic construct
  source 1..75: mol_type = other DNA
catttattagacggcagcctgcaagcgatggttgcggataccttaggccagcttccggcgctgaacgcacgactt

SEQ ID NO: 864622 - DNA, 75 bp, synthetic construct
  source 1..75: mol_type = other DNA
ctgtttatgattggtcacagcgtcggcccgttccaggataagcaatttaaccaactggcgaactacgtttttggt

SEQ ID NO: 864623 - DNA, 75 bp, synthetic construct
  source 1..75: mol_type = other DNA
ttatcactattaatatgactgaattccaggaggctcacacggtttccactctgaagggggctcctccaggatatg

SEQ ID NO: 864624 - DNA, 75 bp, synthetic construct
  source 1..75: mol_type = other DNA
gactgactctgaagataatagaacccccaagaaaataagaatatcagtaaggaaaaataacattacattacgtag

SEQ ID NO: 864625 - DNA, 75 bp, synthetic construct
  source 1..75: mol_type = other DNA
agtgaaaagataacgagcatatggaatgagggggagatcgataaagacaaaataaaagaaatggtgcttccttta

SEQ ID NO: 864626 - DNA, 75 bp, synthetic construct
  source 1..75: mol_type = other DNA
gaagaagcaataactgccacggtacatttatccgaccgttatctgcacgggcgtcgtcagcctgataaatcggtc

SEQ ID NO: 864627 - DNA, 75 bp, synthetic construct
  source 1..75: mol_type = other DNA
gggcgttatattgtgatgtggatgttgcagagaaattgctgctatctttgtctgtaaaaacagagcattcttctc

SEQ ID NO: 864628 - DNA, 75 bp, synthetic construct
  source 1..75: mol_type = other DNA
gttccactaggaatatgccttgatagtgagcaacaaaaaacatccagtctgttaagatgtctggaacagcgagtt

SEQ ID NO: 864629 - DNA, 75 bp, synthetic construct
  source 1..75: mol_type = other DNA
gtgagcaagattgactatcaggcactgcgtgacaaggcagagaaagcaacgtgtggcgtgtggtcgctcgaatat

SEQ ID NO: 864630 - DNA, 75 bp, synthetic construct
  source 1..75: mol_type = other DNA
aggcactgcgtgaggcggcggaacgtgcaattcaagcaatggaacgcctgttaatgttgccagctgctgatgatt

SEQ ID NO: 864631 - DNA, 75 bp, synthetic construct
  source 1..75: mol_type = other DNA
cattatgctcagccgctcatcaatgaagccgacgcgctggcaaaagtgatgccgtctgacatcccgcttaaacac

SEQ ID NO: 864632 - DNA, 75 bp, synthetic construct
  source 1..75: mol_type = other DNA
tgcgtgaggcggcggaacgtgcaattccagcaatggaactcctgttaatgttgccagctgatgatgatttgttaa

SEQ ID NO: 864633 - DNA, 75 bp, synthetic construct
  source 1..75: mol_type = other DNA
ttgctgaactggaagaagcgctacgcgataagcaggcgttacttgaagcctcagaaaagcgcatagcagaactgg

SEQ ID NO: 864634 - DNA, 75 bp, synthetic construct
  source 1..75: mol_type = other DNA
aaccatcctcaaactaatgaatatggtctgattagcaatgtcacacactggatgccgctaccagaaccgccgcag

SEQ ID NO: 864635 - DNA, 75 bp, synthetic construct
  source 1..75: mol_type = other DNA
acaaaccaactgtgcgcatcgtggaagttaatgtgccacgcgccgctggcattcgcatcaaaggagaggagcatg

SEQ ID NO: 864636 - DNA, 75 bp, synthetic construct
  source 1..75: mol_type = other DNA
gaaatcgcgatgaaggctattggtgtgccggttcagtggactaatggcgatgcggaaaaacgcatgacaggagct

SEQ ID NO: 864637 - DNA, 75 bp, synthetic construct
  source 1..75: mol_type = other DNA
acgaccttcgatatggacacccgataaatgcagatgagcgacatgtcatgatacctaaagaaaatggcagttggc

SEQ ID NO: 864638 - DNA, 75 bp, synthetic construct
  source 1..75: mol_type = other DNA
ttcaaatttctgaacggaccagaaaccgtgctggcactgctggatgaacgggaaagaaaccagcaatacatcaaa

SEQ ID NO: 864639 - DNA, 75 bp, synthetic construct
  source 1..75: mol_type = other DNA
tgcgtgagttagcaaaacaggcaacacagggcgaatgggtcgcatttatttcgccgggtactggtacgtatgcgg

SEQ ID NO: 864640 - DNA, 75 bp, synthetic construct
  source 1..75: mol_type = other DNA
gaattcaatccagcagaatttaacctcggagaagagctgtcaggcgcggtagatgaaacctggcaaagcctgaaa

SEQ ID NO: 864641 - DNA, 75 bp, synthetic construct
  source 1..75: mol_type = other DNA
tccacagagagctttcaaatatatcgaacagggactttcaaaagaacaaattctggaaaaaactggactatcgct

SEQ ID NO: 864642 - DNA, 75 bp, synthetic construct
  source 1..75: mol_type = other DNA
ggaaaaagcccttgatgcactgcgtcaggtcgggctggaaaattatgcccacagctacccggatgaactctctgg

SEQ ID NO: 864643 - DNA, 75 bp, synthetic construct
  source 1..75: mol_type = other DNA
aaattttttgtgagtttcaccggagtatcgtgaacagatgcgccgatgagattcgcaaggttggcgtcaaagtca

SEQ ID NO: 864644 - DNA, 75 bp, synthetic construct
  source 1..75: mol_type = other DNA
gcatagcagaactggaagctcgggaaataaaaccagccaaaggtgaagttcttgtcgttgtttctggttttactg

SEQ ID NO: 864645 - DNA, 75 bp, synthetic construct
  source 1..75: mol_type = other DNA
tccacaacgggctttcaaatatatcgaaaaaggactttcaaaagaacaaattctggaaaaaacaggtctatcgct

SEQ ID NO: 864646 - DNA, 75 bp, synthetic construct
  source 1..75: mol_type = other DNA
ggaaaaagcccttgatgcactgcgtcaggtcgggctggaaaattatgcccatagctacccggacgaactctctgg

SEQ ID NO: 864647 - DNA, 75 bp, synthetic construct
  source 1..75: mol_type = other DNA
ctggctgactgcgattgagatgtacaaaccaactgtgcgcatcgtggaagttaatgtgccacgcgccgctggcat

SEQ ID NO: 864648 - DNA, 75 bp, synthetic construct
  source 1..75: mol_type = other DNA
tttcaaccctgaagtagtgcaggcactactggatgaacgggaaagaaaccagcaatacatcaaactccgcgatca

SEQ ID NO: 864649 - DNA, 75 bp, synthetic construct
  source 1..75: mol_type = other DNA
caaccctgaagtagtgcaggcgttgctggatgaacgggaaagaaaccagcaatacattaaacgccgtgaccagga

SEQ ID NO: 864650 - DNA, 75 bp, synthetic construct
  source 1..75: mol_type = other DNA
tgcgtgagatagcaaaacaggcaacacaaggcgaatgggtcgcatttatttcgtcgggtactggtacatatgcgg

SEQ ID NO: 864651 - DNA, 75 bp, synthetic construct
  source 1..75: mol_type = other DNA
gaaaaagcgccattgccggggaaatagaaatcgcgatgaaggctattggtgtaccggttcagtggactaatggcg

SEQ ID NO: 864652 - DNA, 75 bp, synthetic construct
  source 1..75: mol_type = other DNA
acctcggtattcgatatgcagatgttgaggtcatgaaaattgctggagatgcccagctttctaccccatgcactg

SEQ ID NO: 864653 - DNA, 75 bp, synthetic construct
  source 1..75: mol_type = other DNA
gttatgcccgtttcaacatcgactctacccaggtcagtctgacgccagataaaaaaggtatttacgtcacggtga

SEQ ID NO: 864654 - DNA, 75 bp, synthetic construct
  source 1..75: mol_type = other DNA
ccgcagagaacaaccttattgatagtgagtgccatgttgctgaactggaagaagcgctacgcgataagcaggcgt

SEQ ID NO: 864655 - DNA, 75 bp, synthetic construct
  source 1..75: mol_type = other DNA
acaaaaacaggcgagctatgctataaaaaagacaggatattacaagtacttaaggaacttaagtacgatctggag

SEQ ID NO: 864656 - DNA, 75 bp, synthetic construct
  source 1..75: mol_type = other DNA
tgcaaacgctgaatttattgctgcctttaatccaaatgttgcgctggcgctggatttgcccctatatttccagac

SEQ ID NO: 864657 - DNA, 75 bp, synthetic construct
  source 1..75: mol_type = other DNA
tgggtgcaagcgtattgctgaactggaagcgcgggaagttcaattaccgactcgctacgaccttcgatatggaca

SEQ ID NO: 864658 - DNA, 75 bp, synthetic construct
  source 1..75: mol_type = other DNA
gctttctggcgttgaagtgagcggcaatcttgccgggcactccgctgaaattgagcaactgactaagatcgagcc

SEQ ID NO: 864659 - DNA, 75 bp, synthetic construct
  source 1..75: mol_type = other DNA
cacagctggtgtgcctcaatggtaaaacgccacggtattaaggtgacggccgacagaaaagaatatcctgagaaa

SEQ ID NO: 864660 - DNA, 75 bp, synthetic construct
  source 1..75: mol_type = other DNA
gtgttaccgaggagcggatgattgccggggaaaagcgggttgcatcccgtcttgaggcatttatgagtaatgagt

SEQ ID NO: 864661 - DNA, 75 bp, synthetic construct
  source 1..75: mol_type = other DNA
aatgataaaacgccacggtattcaagtgacggctgacagaaagaattacccggagaaatgcttcagcgcactgga

SEQ ID NO: 864662 - DNA, 75 bp, synthetic construct
  source 1..75: mol_type = other DNA
cagagacagattattgaccagatcgacaacgaagccggactcacagaacaggaacgcaaacttctccacgtactg

SEQ ID NO: 864663 - DNA, 75 bp, synthetic construct
  source 1..75: mol_type = other DNA
aaaaaagacaggatattacaggaacttaaggaacttaagtacgatctggatacatccccaaccccagacgcgtaa

SEQ ID NO: 864664 - DNA, 75 bp, synthetic construct
  source 1..75: mol_type = other DNA
ttcgttcactcaggtgctgcggatgagtctgaagttattccggcgctttatgttgcgttcacccgggctacacgg

SEQ ID NO: 864665 - DNA, 75 bp, synthetic construct
  source 1..75: mol_type = other DNA
ttatttccaccagcaggcggaggattatcaaatcaatatgtcccgcattggctttgccggtgattccgcaggtgc

SEQ ID NO: 864666 - DNA, 75 bp, synthetic construct
  source 1..75: mol_type = other DNA
cagcgtgagtattacgaaggtgttatctctgatgggtgcaagcgtattgctgaactggaagcgcgggaagttcaa

SEQ ID NO: 864667 - DNA, 75 bp, synthetic construct
  source 1..75: mol_type = other DNA
agcagaactggaagcacgggaaataaaaccagccaaaggcgaagttcttgtcgttgtatctggttttactggttg

SEQ ID NO: 864668 - DNA, 75 bp, synthetic construct
  source 1..75: mol_type = other DNA
ggaaacgcgtatcaacgatgtttgccgtattgcggaactaacaaaacaactggagttggcaaaatcaaaactcaa

SEQ ID NO: 864669 - DNA, 75 bp, synthetic construct
  source 1..75: mol_type = other DNA
tgcgtgagttagcaaaacaggcaacacagggtgaatgggtcgcatttatttcgccgggcaaatacggcacgtacg

SEQ ID NO: 864670 - DNA, 75 bp, synthetic construct
  source 1..75: mol_type = other DNA
tttgacgaccagaaaaatgcagagaacaacgcagaatttatcgcagctttcaaccctaaagtagtgcaggcactg

SEQ ID NO: 864671 - DNA, 75 bp, synthetic construct
  source 1..75: mol_type = other DNA
tgctgaactggaagcgcgggaaataaaaccagccaaaggtgaagttctggtcgttgtatctggttttactggttg

SEQ ID NO: 864672 - DNA, 75 bp, synthetic construct
  source 1..75: mol_type = other DNA
ccgtgctggcactactggatgagatcaacgcattagaggaaacgcgtatcaacgatgtttgccgtattgcggaac

SEQ ID NO: 864673 - DNA, 75 bp, synthetic construct
  source 1..75: mol_type = other DNA
caatagaggaaatcgtggcgtcctgttgtcacttccaccgacaggcaagcgattatcaaatcaatatgtcacgca

SEQ ID NO: 864674 - DNA, 75 bp, synthetic construct
  source 1..75: mol_type = other DNA
atgaaaccggaaaacaaattacccgttctggagctcatttctgctgaaatgaaggcagttgtgaatacttttcag

SEQ ID NO: 864675 - DNA, 75 bp, synthetic construct
  source 1..75: mol_type = other DNA
tctggttttactggttgcggaaaaagcgccattgccggggaaatagaaatcgcgatgaaggctattggtgtaccg

SEQ ID NO: 864676 - DNA, 75 bp, synthetic construct
  source 1..75: mol_type = other DNA
ctggcgcgtcagtacgatattggtattaacatcgatgccgaagaggccgatcgtctggagatctccctcgatctg

SEQ ID NO: 864677 - DNA, 75 bp, synthetic construct
  source 1..75: mol_type = other DNA
aagctgcgcgttgagctggaaggcaaagacagcaaaatagccaatcttaccgccgaacgcgatgctcttcgtgaa

SEQ ID NO: 864678 - DNA, 75 bp, synthetic construct
  source 1..75: mol_type = other DNA
tgatgcaactgatgatgagttactgatgctgtatttccgggctgcctgccgcaaggcagaaaattttatcaaccg

SEQ ID NO: 864679 - DNA, 75 bp, synthetic construct
  source 1..75: mol_type = other DNA
gtgatccgtactttcgatatggtagtcagtgcaccggaaaaattatccgggcaggctgctgacaagatgcaggca

SEQ ID NO: 864680 - DNA, 75 bp, synthetic construct
  source 1..75: mol_type = other DNA
tacgcgctctacaccgtcactggcgatcgccagtatgaaacctggtatcagacatggtgggagtactgcattaag

SEQ ID NO: 864681 - DNA, 75 bp, synthetic construct
  source 1..75: mol_type = other DNA
tgctgcattgcctggtgatcccgcgtatcccgttagcccctggtctggcaccggctgttgccgcaggcctgctgg

SEQ ID NO: 864682 - DNA, 75 bp, synthetic construct
  source 1..75: mol_type = other DNA
attaaccgatgccctgaaatccgttattacaccagaaattgaacaaaaaatgttacagcacacgccgatcagacg

SEQ ID NO: 864683 - DNA, 75 bp, synthetic construct
  source 1..75: mol_type = other DNA
ccagaaatggaaaaaaatggcggtggcgttattctgactatcacttctatggcggcagaaaataaaaatataaac

SEQ ID NO: 864684 - DNA, 75 bp, synthetic construct
  source 1..75: mol_type = other DNA
ggaatttgttgacgaaccgacgccggaagacatcgtgtttgaagacaaaggcgtgaaagtcgtggtcgatggcaa

SEQ ID NO: 864685 - DNA, 75 bp, synthetic construct
  source 1..75: mol_type = other DNA
agcctgtcagaagcttcaggaggctgttggcttaccgaatctggcaccgcgctatgccattgatgctcctgctga

SEQ ID NO: 864686 - DNA, 75 bp, synthetic construct
  source 1..75: mol_type = other DNA
taaatccccgaaagcaaagggcggtaagaaaggccgtcaggatgcggctccgtcgcagcaaccgcctcagccact

SEQ ID NO: 864687 - DNA, 75 bp, synthetic construct
  source 1..75: mol_type = other DNA
atggcagttcgtggaattaacaaggtcattcttgtcggtcgcctgggaaaagatccggaagtccgttacatcccc

SEQ ID NO: 864688 - DNA, 75 bp, synthetic construct
  source 1..75: mol_type = other DNA
atggctggatcgcgccattcgcgtggcttccgtgattatccacgatgtcgccagaaataatcattatcgcgttaa

SEQ ID NO: 864689 - DNA, 75 bp, synthetic construct
  source 1..75: mol_type = other DNA
acaaccgttggctggaacaggaaaccgatcgcatctttgattttggtaaacatgccgtagtaccaaccggctttg

SEQ ID NO: 864690 - DNA, 75 bp, synthetic construct
  source 1..75: mol_type = other DNA
cgaagaagagcagatgtgcctggagtcctgggacgaagccttcagcaaaaccgaagagtaccgcggcggcaatgc

SEQ ID NO: 864691 - DNA, 75 bp, synthetic construct
  source 1..75: mol_type = other DNA
aaaaaaatggcggtggtgttattttgaccatcacctctatggcggcagaaaataaaaataaaaacatgacctctt

SEQ ID NO: 864692 - DNA, 75 bp, synthetic construct
  source 1..75: mol_type = other DNA
gtaatgagatttatagtgcaattaaagacttacaacgcaaagcacctgataaaaatatcgttattttggtgatgc

SEQ ID NO: 864693 - DNA, 75 bp, synthetic construct
  source 1..75: mol_type = other DNA
ttcgccatgctgaacgttgcgatcgttcaaccaatcaatgcttgtcagataaaacaggtattacggttaaaggta

SEQ ID NO: 864694 - DNA, 75 bp, synthetic construct
  source 1..75: mol_type = other DNA
tgaagtcaaaaaaatatttcatcattttactggcgctcgctgcaattgccggactgggtactcatgccgcctgga

SEQ ID NO: 864695 - DNA, 75 bp, synthetic construct
  source 1..75: mol_type = other DNA
ccagattatctggatgggctggtaatgcatgtggaaaaaggcaacgttttactggatggtgagtttgttaatcgg

SEQ ID NO: 864696 - DNA, 75 bp, synthetic construct
  source 1..75: mol_type = other DNA
cctgattatcttgatggtctggtgatgcatgttgaaaaagggaaagtttttcttgatggcgaatttgttaatcat

SEQ ID NO: 864697 - DNA, 75 bp, synthetic construct
  source 1..75: mol_type = other DNA
tccggaccattcagtccgcgacctggttttcagcgggtaaaaaattgacggtagataaacgacttcttcagtgcg

SEQ ID NO: 864698 - DNA, 75 bp, synthetic construct
  source 1..75: mol_type = other DNA
ttaatactgacccagcttgttatggcgggtctggcagattatcagttcggttgttacagacgccttccgcagtga

SEQ ID NO: 864699 - DNA, 75 bp, synthetic construct
  source 1..75: mol_type = other DNA
tcttctgtgcgttagctgcgtttgaggctctggcgccggtgacaggtgcatttcagcatctggggcaagtcattg

SEQ ID NO: 864700 - DNA, 75 bp, synthetic construct
  source 1..75: mol_type = other DNA
tattaatgccgatgcagcaaatcatgttgttgatgagattcaacagcttggtggacaggcatttgcctggcgttg

SEQ ID NO: 864701 - DNA, 75 bp, synthetic construct
  source 1..75: mol_type = other DNA
gttaagtcttggtattgtgctggcaattgtcacactgctcgccagtatcggtctgttgacactttccggctggtt

SEQ ID NO: 864702 - DNA, 75 bp, synthetic construct
  source 1..75: mol_type = other DNA
tttcacgcgaacgctgtcagttaatactgacccagttggttatggcggggctggcagattaccagttcgtctgtt

SEQ ID NO: 864703 - DNA, 75 bp, synthetic construct
  source 1..75: mol_type = other DNA
atgctaaaacagcaagatatgacagaaacggcgaaagttgtttttaatgaattaagcatcgaaccgacaacggcc

SEQ ID NO: 864704 - DNA, 75 bp, synthetic construct
  source 1..75: mol_type = other DNA
cactgtataaacgccataagtggatgttaagcctcggtattgtgctggcgattattactctgctcgccagtatcg

SEQ ID NO: 864705 - DNA, 75 bp, synthetic construct
  source 1..75: mol_type = other DNA
aatcagaaatacattgaccggcttttaaaaaaacatcgttgttatcagtcaaagcattttatgactgcgcgcgaa

SEQ ID NO: 864706 - DNA, 75 bp, synthetic construct
  source 1..75: mol_type = other DNA
tgccgcgaatacgctgcgacccaggttgacggtcaacgcaaagactttatccgtctgggcgtgctgggcgactgg

SEQ ID NO: 864707 - DNA, 75 bp, synthetic construct
  source 1..75: mol_type = other DNA
ctggaaaccgctaacccggttggcccggacggcacttatctgccgggcacttacccgacgctggatggcgtgaac

SEQ ID NO: 864708 - DNA, 75 bp, synthetic construct
  source 1..75: mol_type = other DNA
gtcgttcacactatatggcgaggatgcaaaccctgcgcctcgacggttttctgctgcgtccgctgctgagtctgt

SEQ ID NO: 864709 - DNA, 75 bp, synthetic construct
  source 1..75: mol_type = other DNA
ctgtttgccgccgggctacattacgcgcagtcgctgctgtttaatcgggcggcagtaggcgtagtgcaacagttg

SEQ ID NO: 864710 - DNA, 75 bp, synthetic construct
  source 1..75: mol_type = other DNA
atgcgtagttttagccaactgtggccgactctcaagcgcctgttagcgtacggttcaccgtggcgtaaaccgctg

SEQ ID NO: 864711 - DNA, 75 bp, synthetic construct
  source 1..75: mol_type = other DNA
cgttgtatgactggaaagcccgtgatatctggatatataacgccagaacccgagctatctacaatcccctgtatg

SEQ ID NO: 864712 - DNA, 75 bp, synthetic construct
  source 1..75: mol_type = other DNA
agcgcaaactgagatatgcagatgataaaccctggaccacagcgtcgcctgaagggttttattacaccatgtatc

SEQ ID NO: 864713 - DNA, 75 bp, synthetic construct
  source 1..75: mol_type = other DNA
agaacccgtgccatctacaatcccctgtatgacctgatgtaccgtgccggcgtaccgttacgcaacatgcgtgtc

SEQ ID NO: 864714 - DNA, 75 bp, synthetic construct
  source 1..75: mol_type = other DNA
ttctgttgttgacgtgcgtccggaatttgctggtcacgcagcggacatgtatctggaaggttctgaccagcaccg

SEQ ID NO: 864715 - DNA, 75 bp, synthetic construct
  source 1..75: mol_type = other DNA
ctggaaaccgctaacccggttggcccggacggtacttatctgccgggtacttacccgacgctggatggtgttaac

SEQ ID NO: 864716 - DNA, 75 bp, synthetic construct
  source 1..75: mol_type = other DNA
ccgcgatatctggatatataacgccagaacctgtgccatctacaatcctctgtatgacctgatgtaccgtgccgg

SEQ ID NO: 864717 - DNA, 75 bp, synthetic construct
  source 1..75: mol_type = other DNA
agcggtaccattgaagtgggcgtactgtatgcgtttatcagctatcttgggcggcttaacgaacccttaatcgaa

SEQ ID NO: 864718 - DNA, 75 bp, synthetic construct
  source 1..75: mol_type = other DNA
tacgatttgtcctgttgacctccggcgctaccgttgcagactataacgacgcacctgctgatgcccagcagagcg

SEQ ID NO: 864719 - DNA, 75 bp, synthetic construct
  source 1..75: mol_type = other DNA
aaccgaaagatgccaccctgacggcgctggccgggcttgctactgcggcagacaggtttccgtattttacgggga

SEQ ID NO: 864720 - DNA, 75 bp, synthetic construct
  source 1..75: mol_type = other DNA
acatattgcgattctcgggcgaaccggatgcggcaaatcaactctgttacaactgctgactcgcgcatgggatcc

SEQ ID NO: 864721 - DNA, 75 bp, synthetic construct
  source 1..75: mol_type = other DNA
tacctgatgcaatgcgcaagaatttagaacgattggatatggggattactgattattgcgcatatagcccgaatg

SEQ ID NO: 864722 - DNA, 75 bp, synthetic construct
  source 1..75: mol_type = other DNA
tgccttgaacaatgtaaccataaccgaaactatgtttttgaacacaaagtttggttcaaatatctttgctatcac

SEQ ID NO: 864723 - DNA, 75 bp, synthetic construct
  source 1..75: mol_type = other DNA
gcaagtcccataaccgccatgtcgcagtcgtcagtctgctactcgaatggcgtaacgtagccatttttctggccc

SEQ ID NO: 864724 - DNA, 75 bp, synthetic construct
  source 1..75: mol_type = other DNA
gcaaaccctgcgactcgacggctttttactgcgaccactgcttagtctgttttcatcgctcattctttgcggttt

SEQ ID NO: 864725 - DNA, 75 bp, synthetic construct
  source 1..75: mol_type = other DNA
gcttatcgaccattgttgatgctgacaccattctggtgcttcatcgtggtcaggctgtggaacaggggactcacc

SEQ ID NO: 864726 - DNA, 75 bp, synthetic construct
  source 1..75: mol_type = other DNA
tgtatgcgtttatcagctatcttgggcggcttaacgaacccttaatcgaactgaccacgcaacaggcgatgctgc

SEQ ID NO: 864727 - DNA, 75 bp, synthetic construct
  source 1..75: mol_type = other DNA
tggcctgtacgatgatgcgggaacgttaattgccgtggcgaacatggccgaaagctataagccagcccttgccga

SEQ ID NO: 864728 - DNA, 75 bp, synthetic construct
  source 1..75: mol_type = other DNA
gctgaccggaacgccaacaacaccaactgcgcgacagggaacgaataatacccaaatcgcaagcacggctttcgt

SEQ ID NO: 864729 - DNA, 75 bp, synthetic construct
  source 1..75: mol_type = other DNA
tagggcgagatattcttgcgaaatcgaccgttgccgccgttatcgaatacctcggtttacaggaaacggtaaatc

SEQ ID NO: 864730 - DNA, 75 bp, synthetic construct
  source 1..75: mol_type = other DNA
gctcgaagagcagcagtccatgctgacactgcctccggagaaaaagagtatgaagtgcatcctggtgaaaatcag

SEQ ID NO: 864731 - DNA, 75 bp, synthetic construct
  source 1..75: mol_type = other DNA
atggggattaccgtacgcgcgttgctgcgtaaaaacgtcgagccgtatgaggaactgggccttgcagaagataaa

SEQ ID NO: 864732 - DNA, 75 bp, synthetic construct
  source 1..75: mol_type = other DNA
ttatgttgcaacacccgattctgattaaccgtccaattgtggtaacacagttgggaacccggctgtgccgccctt

SEQ ID NO: 864733 - DNA, 75 bp, synthetic construct
  source 1..75: mol_type = other DNA
tacgctggagatgatccgcaacagcggtacagaaccgaccattatctattatctggaaacaccgccaacgcgcga

SEQ ID NO: 864734 - DNA, 75 bp, synthetic construct
  source 1..75: mol_type = other DNA
gctcgaagagcagcagtccatgctgacactgctccggagaaaaaagagtatgaagtgcatcctggtgaaaatcag

SEQ ID NO: 864735 - DNA, 75 bp, synthetic construct
  source 1..75: mol_type = other DNA
ccccgtgctacctcagttctggatgagcaccgtaattatattcggatgcgtattcaggatgcccacccttataaa

SEQ ID NO: 864736 - DNA, 75 bp, synthetic construct
  source 1..75: mol_type = other DNA
atgggaatttctgttcgcgctctgctacgtaaaaacgttgaaccgtatgaggaactgggtctggcagaagataaa

SEQ ID NO: 864737 - DNA, 75 bp, synthetic construct
  source 1..75: mol_type = other DNA
gatagcaaagtaactgaggcgatttctgctatttctggcattccgacaaaaaaagtaggtgatttaacgatgttt

SEQ ID NO: 864738 - DNA, 75 bp, synthetic construct
  source 1..75: mol_type = other DNA
tattctcttgagacacaagtccaaagcgtctcctcatgcatatcatatgcaacattaaacatgggtacaataatg

SEQ ID NO: 864739 - DNA, 75 bp, synthetic construct
  source 1..75: mol_type = other DNA
gcgatgaccgtaaagttcgcgtgatggcagccgattatgaaaatcagctcgacgagttttccctcgatgcgccca

SEQ ID NO: 864740 - DNA, 75 bp, synthetic construct
  source 1..75: mol_type = other DNA
tgagagctgggtacgtcagctcaggcgagagcgccaaggtattgcgccctctgcagcacccattacccctgaaca

SEQ ID NO: 864741 - DNA, 75 bp, synthetic construct
  source 1..75: mol_type = other DNA
attactccagaccagcaacgtatccgcgagctggaaaagcaggttcgccgcctggaggaacaaaatacgatatta

SEQ ID NO: 864742 - DNA, 75 bp, synthetic construct
  source 1..75: mol_type = other DNA
caggttcgccgcctggaggaacacaatacgatattaaaaaaggctaccgacgctcttgatgtccgactcgctgaa

SEQ ID NO: 864743 - DNA, 75 bp, synthetic construct
  source 1..75: mol_type = other DNA
taaccgcccgatcgtggtgacgccactggggacccggctgtgtcgtccttcagaagtggtgctggatattcttcc

SEQ ID NO: 864744 - DNA, 75 bp, synthetic construct
  source 1..75: mol_type = other DNA
acccggcctgcggcacgtcgcgtaacacgctggagatgatccgcaacagcggtacagaaccgaccattatctatt

SEQ ID NO: 864745 - DNA, 75 bp, synthetic construct
  source 1..75: mol_type = other DNA
cctggttggcagcgaatacaacacccgtcgtgaacagtgcgaaaccggtgctcgtttcttccagcggccagccct

SEQ ID NO: 864746 - DNA, 75 bp, synthetic construct
  source 1..75: mol_type = other DNA
ctaatttccgcgctcggcaagaaagatcatgccttgctgatcgattgccgctcactgggcgccaaagcggtttct

SEQ ID NO: 864747 - DNA, 75 bp, synthetic construct
  source 1..75: mol_type = other DNA
agatacaacgcattgaaatggagaatgaaatattaaaaaaggttaccgcgctcttgatgtcagactccctgaaca

SEQ ID NO: 864748 - DNA, 75 bp, synthetic construct
  source 1..75: mol_type = other DNA
atgacgtgcatcctggtgaaaatctggtgagcttcgacaaccccgttactttattcgtaccccttataatggggt

SEQ ID NO: 864749 - DNA, 75 bp, synthetic construct
  source 1..75: mol_type = other DNA
attaagtgccaccgcaccggcgacagtcggggagattgcacagaatacgtacctttcacgcgaacgctgccagct

SEQ ID NO: 864750 - DNA, 75 bp, synthetic construct
  source 1..75: mol_type = other DNA
attgcgcagaatacttacctttcacgcgaacgctgtcagttaatactgacccagcttgttatggcgggtctggca

SEQ ID NO: 864751 - DNA, 75 bp, synthetic construct
  source 1..75: mol_type = other DNA
acctttcacgcgaacgctgtcagttaatactgacccagctggttatggcggggctggcagattaccagttcggct

SEQ ID NO: 864752 - DNA, 75 bp, synthetic construct
  source 1..75: mol_type = other DNA
caaccgtccgatcgtagtgacgccactgggaactaaactttgccgtccttcagaggttgttctcgatatccttcc

SEQ ID NO: 864753 - DNA, 75 bp, synthetic construct
  source 1..75: mol_type = other DNA
aaaccgccagagtgttatttaatgaattaagtgttaacgacccggcgacagtcggggagatggcgcagagtactt

SEQ ID NO: 864754 - DNA, 75 bp, synthetic construct
  source 1..75: mol_type = other DNA
atctttcacgcgaacgctgccagttaatactgacccagcttgttatggcgggtctggcagattatcagttcggtt

SEQ ID NO: 864755 - DNA, 75 bp, synthetic construct
  source 1..75: mol_type = other DNA
gttgccggactgtacagcttcaactatatgctacccgctgcgggcgtgcgtggtgcagcaatcacccgtactgcc

SEQ ID NO: 864756 - DNA, 75 bp, synthetic construct
  source 1..75: mol_type = other DNA
tcagccgcgaacgttgccagctcatacttacacagctggtgatggcggggttatctgattaccagttcggatgtt

SEQ ID NO: 864757 - DNA, 75 bp, synthetic construct
  source 1..75: mol_type = other DNA
gtaatgagatttatagtgcaattaaggacttacaaagcaaagcacctgataaaaatatcgttatttttacccata

SEQ ID NO: 864758 - DNA, 75 bp, synthetic construct
  source 1..75: mol_type = other DNA
acctttcacgcgaacgctgccagttaatactgacccagcttgttatggtgggtctggcagactatcagtgcggtt

SEQ ID NO: 864759 - DNA, 75 bp, synthetic construct
  source 1..75: mol_type = other DNA
gtcggggagattgcgcagaatacgtacctttcacgtgaacgctgccagttaatactgacccagcttgttatggcg

SEQ ID NO: 864760 - DNA, 75 bp, synthetic construct
  source 1..75: mol_type = other DNA
ttaatactgacccagcttgttatggcgggtctggcagactatcagttcggttgttacagacgccttcagtcctga

SEQ ID NO: 864761 - DNA, 75 bp, synthetic construct
  source 1..75: mol_type = other DNA
ttatgctgcagcatccgattctgatcaaccgtccgatcgtagtgacgccgcttggaactaaactctgccgtcctt

SEQ ID NO: 864762 - DNA, 75 bp, synthetic construct
  source 1..75: mol_type = other DNA
agggcacagactaaaggtaaggtggaacggatggaacagtttttacatcccactaatgactcgcctgcgcccgat

SEQ ID NO: 864763 - DNA, 75 bp, synthetic construct
  source 1..75: mol_type = other DNA
ggatgcggcaaatcaacactgttacaactgctgacccgcgcttgggacccgcaacagggcgagattttgcttaac

SEQ ID NO: 864764 - DNA, 75 bp, synthetic construct
  source 1..75: mol_type = other DNA
ggaaggccagaaaggagcgtttaccaaagaggatggcgagaaggtcattgacgaaacggggaagagggttaatta

SEQ ID NO: 864765 - DNA, 75 bp, synthetic construct
  source 1..75: mol_type = other DNA
ttgtcgccatcaatcgcatcaaatgcatgtgaagaagctggaaaaaataaaaacggtaataacataaagataaga

SEQ ID NO: 864766 - DNA, 75 bp, synthetic construct
  source 1..75: mol_type = other DNA
agactttttcacagctaaaaactggttgagggcgaacggtgcaaacggtgtcatacagtatcgttataaaatgaa

SEQ ID NO: 864767 - DNA, 75 bp, synthetic construct
  source 1..75: mol_type = other DNA
gacatactcagttattaaatcagacaaggttaattcatcgtgggttaaggttatccataatttcaggcctgaaaa

SEQ ID NO: 864768 - DNA, 75 bp, synthetic construct
  source 1..75: mol_type = other DNA
aaaagggtctggagtacattcctaacattgatcgtatgatccgtgagaaagaatgtcgggagctaaccactcttg

SEQ ID NO: 864769 - DNA, 75 bp, synthetic construct
  source 1..75: mol_type = other DNA
ggaaggtttccgggaaatgacaaaggcacagtgggccgccctgccccgggacataccgctaccgccgcacaatgg

SEQ ID NO: 864770 - DNA, 75 bp, synthetic construct
  source 1..75: mol_type = other DNA
tccacctgaaccgccacaggttgaatgggaaaaaaggcctgaagttatgaatacacaaataatgaactggacacc

SEQ ID NO: 864771 - DNA, 75 bp, synthetic construct
  source 1..75: mol_type = other DNA
caattgtgatgtcaggatgttcttcaccgccagaacctccgcaagtgaactggagcgataaaccagaaacaatga

SEQ ID NO: 864772 - DNA, 75 bp, synthetic construct
  source 1..75: mol_type = other DNA
acagcaacccggaagggggaatgtatctggtcgaatcgccagacgatgtgtggaaactgacggtcaaaaacgaag

SEQ ID NO: 864773 - DNA, 75 bp, synthetic construct
  source 1..75: mol_type = other DNA
atccaggaagagtgggtgaaagaagcgaaatgcgtcggtgtgactgcgggcgcatcagctccggatattctggta

SEQ ID NO: 864774 - DNA, 75 bp, synthetic construct
  source 1..75: mol_type = other DNA
tggcacagcgtatgggcaaacgcgcgtttttaattgacgatgcggcagatatccaggaagagtgggtgaaagaag

SEQ ID NO: 864775 - DNA, 75 bp, synthetic construct
  source 1..75: mol_type = other DNA
gggcgggcaggtttgcagccggggcgagtggctgaccatcatccgcgtgaacaaaagcaacggggcggtgagttc

SEQ ID NO: 864776 - DNA, 75 bp, synthetic construct
  source 1..75: mol_type = other DNA
ggttttcgctgggcaccagaacaggcgctgtttgttgcgccagcctggacaccgggccgggaagacgtgctcctc

SEQ ID NO: 864777 - DNA, 75 bp, synthetic construct
  source 1..75: mol_type = other DNA
cacgtcttgacccggagacgtataaaaaagtgcatgatgccggttttcgctgggcacccaaacaggcgctgtttg

SEQ ID NO: 864778 - DNA, 75 bp, synthetic construct
  source 1..75: mol_type = other DNA
cgctaccgccgcacaatggacaataatttccgtctggtgaatgtgtatatcaccgacatgaaaatcacggaaatc

SEQ ID NO: 864779 - DNA, 75 bp, synthetic construct
  source 1..75: mol_type = other DNA
atgcctgaagttgtttttcacgtatcttatttcgctcattttctcttacccgtttcacctctgccatttcgtttc

SEQ ID NO: 864780 - DNA, 75 bp, synthetic construct
  source 1..75: mol_type = other DNA
ggccacgccgctggaaaacttaactgatagctccagacatcagctttccgcgttggcggcgatgccgggaggacg

SEQ ID NO: 864781 - DNA, 75 bp, synthetic construct
  source 1..75: mol_type = other DNA
cagagagggaaaatacgcattacctgttgcgagggggcagtaacgatcgtcaggggagcaataaattgtgccacg

SEQ ID NO: 864782 - DNA, 75 bp, synthetic construct
  source 1..75: mol_type = other DNA
aagcgaagtacttaccctataaactcgttaataattgtacggttcctgtactgatcattgtgcttgctattgtgg

SEQ ID NO: 864783 - DNA, 75 bp, synthetic construct
  source 1..75: mol_type = other DNA
aacaaactggcggaggatggcgcgtacgcctggacgctgtggcggccctataaatgctgtccgcgccgggggcaa

SEQ ID NO: 864784 - DNA, 75 bp, synthetic construct
  source 1..75: mol_type = other DNA
gttcctgtttcatcaggcattagacgtgatttaaaaagtaatgcatgggaaaaaacaactcttaaagatatagca

SEQ ID NO: 864785 - DNA, 75 bp, synthetic construct
  source 1..75: mol_type = other DNA
gaaaatactgagctgggcgtgacgacgcagcaagcgcgcgatatcaatggctataccggatattccatcttcatt

SEQ ID NO: 864786 - DNA, 75 bp, synthetic construct
  source 1..75: mol_type = other DNA
tcacttgccggagagattgaggatgaagacagcacgcttgctgaacgtcaggaagcacgggcggagcggtttacc

SEQ ID NO: 864787 - DNA, 75 bp, synthetic construct
  source 1..75: mol_type = other DNA
gtgcatgatgccggtttccgctgggcaccaaaacaggcgctgtttgtcgcgccagcctggacaccgggccgggaa

SEQ ID NO: 864788 - DNA, 75 bp, synthetic construct
  source 1..75: mol_type = other DNA
ccaggggccagataaaaaaaacaaagggcagaaacgtgatcaactttggccacaaatacgcgatcgccattataa

SEQ ID NO: 864789 - DNA, 75 bp, synthetic construct
  source 1..75: mol_type = other DNA
tcagcccggcacactgtgcactgttagagaaagttattagccagttttctgtcctccctttaaaaaattccatcg

SEQ ID NO: 864790 - DNA, 75 bp, synthetic construct
  source 1..75: mol_type = other DNA
tttttttaaatgaaattattcctactctgctggagttttctccattaccgcaaacaagagaagagcagttaggac

SEQ ID NO: 864791 - DNA, 75 bp, synthetic construct
  source 1..75: mol_type = other DNA
aaggcccaacgttaaccggctttaattctgcttacagaacgtcatcaaccagcgacacggtatcgatgaattaca

SEQ ID NO: 864792 - DNA, 75 bp, synthetic construct
  source 1..75: mol_type = other DNA
actttcttacatttttgatgttatttctggtatcgttagttcttattagtgcaaaaataaagtcgaatggcctgt

SEQ ID NO: 864793 - DNA, 75 bp, synthetic construct
  source 1..75: mol_type = other DNA
actttcatacatttttgatgttttttctggtatcgttagttcttattagtgcaaaaataaagtcgaatggcctgt

SEQ ID NO: 864794 - DNA, 75 bp, synthetic construct
  source 1..75: mol_type = other DNA
gagggtgtctttttaactcttttaaactctggttccatgataatatttatatccctgcaattgtaacatcagtta

SEQ ID NO: 864795 - DNA, 75 bp, synthetic construct
  source 1..75: mol_type = other DNA
tctgcagggccaacaatctggcgccgagtatgagccgtcgtggcaactgctgggataatgcggtggcagaatcgt

SEQ ID NO: 864796 - DNA, 75 bp, synthetic construct
  source 1..75: mol_type = other DNA
actttcgtacatttttgatgatctttctggtatcgttagttcttattagtgcaaaaataaagtcgaatggcctgt

SEQ ID NO: 864797 - DNA, 75 bp, synthetic construct
  source 1..75: mol_type = other DNA
actttcctacatttttgatgatgtttctggtatcgttagttcttattagtgcaaaaataaagtcgaatggcctgt

SEQ ID NO: 864798 - DNA, 75 bp, synthetic construct
  source 1..75: mol_type = other DNA
accgcgagttacgcctcaatatatcgaaagcatcattcttgaagagcatttctttactgcttatgacggcattcg

SEQ ID NO: 864799 - DNA, 75 bp, synthetic construct
  source 1..75: mol_type = other DNA
atgctgtatttccgggctgcctgccgcaaggcagaaaattttatcaaccgtaagctttatgaggagacggtgccg

SEQ ID NO: 864800 - DNA, 75 bp, synthetic construct
  source 1..75: mol_type = other DNA
gaaaaccgggaaaattcctcagatgtcagcaaggcaccagtcccgtttggtttttcttctcttctggagccttat

SEQ ID NO: 864801 - DNA, 75 bp, synthetic construct
  source 1..75: mol_type = other DNA
agttgcgataaattctgtcaccactgcttgctcagctacgacagtcagcattatgtcaacagattagatcgtcac

SEQ ID NO: 864802 - DNA, 75 bp, synthetic construct
  source 1..75: mol_type = other DNA
gatatctggggcctgcgtggccgggagcaattagctggttaacgggggataaccagagtacggagcatggacgag

SEQ ID NO: 864803 - DNA, 75 bp, synthetic construct
  source 1..75: mol_type = other DNA
tcaactatccgggggaaggtttccgggaaatgacaaaggcgcagtgggccgccctgccccgggactgtaaggccg

SEQ ID NO: 864804 - DNA, 75 bp, synthetic construct
  source 1..75: mol_type = other DNA
ttcactgaaaaaagagcggatcagaaaacgcatctataaaacccgggatctggcccgggccgatatcttcgatta

SEQ ID NO: 864805 - DNA, 75 bp, synthetic construct
  source 1..75: mol_type = other DNA
gagcacagcgtgaagccgcgcaaaaaaatgcagtggcggagcagaatgtggagcaaattcaggatcctcaaaaaa

SEQ ID NO: 864806 - DNA, 75 bp, synthetic construct
  source 1..75: mol_type = other DNA
tggtcgttaattcaagcaaaggggttaatctgattattacctcaggtgacggacataccgggcgtcctgatggat

SEQ ID NO: 864807 - DNA, 75 bp, synthetic construct
  source 1..75: mol_type = other DNA
acctggcatttacttctgaccaggccggtcgtccgcaggtttataaagtgaatatcaacggcggtgcgccacaac

SEQ ID NO: 864808 - DNA, 75 bp, synthetic construct
  source 1..75: mol_type = other DNA
ggaagctcgggcggagcggtttaccggatacagcggaaagcgggccagtgaatccgcacaggcacttgatgaagt

SEQ ID NO: 864809 - DNA, 75 bp, synthetic construct
  source 1..75: mol_type = other DNA
gcgcgcagcgtgacgcggaaaagcttgcagctcagcagggtattgagctggtggtcatggtgcgtgacaccccag

SEQ ID NO: 864810 - DNA, 75 bp, synthetic construct
  source 1..75: mol_type = other DNA
atggccggattaactaaagagcaaagagcacagcgtgaagccgcacaaaaaacgcaaattgagttagtggttatg

SEQ ID NO: 864811 - DNA, 75 bp, synthetic construct
  source 1..75: mol_type = other DNA
tcttcgcccgtaacgtggtcggctggtcgatgaagcccactctctcacgcgaactggcactgaatgcgctgatga

SEQ ID NO: 864812 - DNA, 75 bp, synthetic construct
  source 1..75: mol_type = other DNA
gggcagcatgagccgtcgcggtaactgccatgataatgcggttgcagaaagctttttccagttgttgaaacgtga

SEQ ID NO: 864813 - DNA, 75 bp, synthetic construct
  source 1..75: mol_type = other DNA
atgaccgaactttgccatacaggacgcgggctgtccgaagagtttgatgaagattttcagaacagattgacggcc

SEQ ID NO: 864814 - DNA, 75 bp, synthetic construct
  source 1..75: mol_type = other DNA
ataagactatccgtgaggaactattcgccgatgttgttgctgcgtttaagcgcattcttgcagaaaaattgtccg

SEQ ID NO: 864815 - DNA, 75 bp, synthetic construct
  source 1..75: mol_type = other DNA
tcgcctgaagggttttactacactatgtatccgctgtatgactggaaaactcgtgatatctggatatatcacacc

SEQ ID NO: 864816 - DNA, 75 bp, synthetic construct
  source 1..75: mol_type = other DNA
tattttgccctgcgcaagcgcatatcaaaaccagcccatcatacctggcgcagctacgcgatgtttctgctggat

SEQ ID NO: 864817 - DNA, 75 bp, synthetic construct
  source 1..75: mol_type = other DNA
acgtatctgtaagacactcataaagaatgatttctggtgccggaccctctccttcagtccgaacaaaccccggca

SEQ ID NO: 864818 - DNA, 75 bp, synthetic construct
  source 1..75: mol_type = other DNA
tatcgccgggaacatcgcctggaagacggaagtgacgtcgctgatgattttcgttcgcttacaggagtttgatta

SEQ ID NO: 864819 - DNA, 75 bp, synthetic construct
  source 1..75: mol_type = other DNA
ccgcacgctgcttgatgcgctgatggatttaccctttgcgctgccaacggcagtcgccggtttaacgctggcctc

SEQ ID NO: 864820 - DNA, 75 bp, synthetic construct
  source 1..75: mol_type = other DNA
tggcccgcaggaaaaaacgttatttctcagtattgttcattgactgggaggcccagtttcagtgcaccattgaac

SEQ ID NO: 864821 - DNA, 75 bp, synthetic construct
  source 1..75: mol_type = other DNA
cggaaattgctgaactggcggaaacatatccggaagtgaaagcctttaccgatttctttgcacgctcaacgcgcg

SEQ ID NO: 864822 - DNA, 75 bp, synthetic construct
  source 1..75: mol_type = other DNA
ttcccggatgacatcccggatgaacaggaaaatgacctgggggccgggatatcccgtcctggcgacgtatctgta

SEQ ID NO: 864823 - DNA, 75 bp, synthetic construct
  source 1..75: mol_type = other DNA
atgtgtgagcgggtgtcaggcgctgccagcggggcgctttatgccaatgaaagcggtgcctattttgccctgcgt

SEQ ID NO: 864824 - DNA, 75 bp, synthetic construct
  source 1..75: mol_type = other DNA
ggttcatgggactggtgtcccagcgcaaactgagatacgccgatgataagccctggaccacggcatcgcctgaag

SEQ ID NO: 864825 - DNA, 75 bp, synthetic construct
  source 1..75: mol_type = other DNA
ttctcgccaacaacgcaacgctggcgggtcacgtatcggtagacgacttcgcgatcatcggcggcatgaccgcag

SEQ ID NO: 864826 - DNA, 75 bp, synthetic construct
  source 1..75: mol_type = other DNA
gtgattgataaatccgcctttgtgcatccaaccgccattgtggaagagggcgcgtcgattggtgccaacgttcac

SEQ ID NO: 864827 - DNA, 75 bp, synthetic construct
  source 1..75: mol_type = other DNA
gttttcggtttgctgatggcgtggattttaacccgctatcgctttccgggccgcacgctgcttgatgcgctgatg

SEQ ID NO: 864828 - DNA, 75 bp, synthetic construct
  source 1..75: mol_type = other DNA
ccagcggggcgctttatgccaatgaaagcggtgcctattttgccctgcgtaaacgtatatcaaaaccagcccatc

SEQ ID NO: 864829 - DNA, 75 bp, synthetic construct
  source 1..75: mol_type = other DNA
gtaagggactgtggctttaccatgttctggagccggaaacctgggccaggatgtgtgagcgggtgtcaggcgctg

SEQ ID NO: 864830 - DNA, 75 bp, synthetic construct
  source 1..75: mol_type = other DNA
cggaagaggccattacggatatggcgtattttcccttctaccggtatgccatgacctttgaagaatttgttccgg

SEQ ID NO: 864831 - DNA, 75 bp, synthetic construct
  source 1..75: mol_type = other DNA
atgaggaaagtaaaattagacaatgatgatttaattcagtgcatgaacaccattaaagcattaaaaaaatatcca

SEQ ID NO: 864832 - DNA, 75 bp, synthetic construct
  source 1..75: mol_type = other DNA
ctgggtggcactccccctgactacggtaaacggtgtctctcagtttcagccggaatggatatgctgggaaccagg

SEQ ID NO: 864833 - DNA, 75 bp, synthetic construct
  source 1..75: mol_type = other DNA
gagatgtatggatttaccatgcgagaacacgtgctgcctataactctctttatgacctgatgtacagggctggag

SEQ ID NO: 864834 - DNA, 75 bp, synthetic construct
  source 1..75: mol_type = other DNA
gttttcggcctgctgatggcgtggattttaacccgctatcgctttccgggccgcacgctgcttgatgcgctgatg

SEQ ID NO: 864835 - DNA, 75 bp, synthetic construct
  source 1..75: mol_type = other DNA
cctacaaagtgacgctgctgtcagcgtttgtggcatcaatttttaacggcgttttcggcctgctgatggcgtgga

SEQ ID NO: 864836 - DNA, 75 bp, synthetic construct
  source 1..75: mol_type = other DNA
aacgtcatttctctgttctgttcattgactgggaggcccagtatcagtgcaccattgaacatattcagaaaatgc

SEQ ID NO: 864837 - DNA, 75 bp, synthetic construct
  source 1..75: mol_type = other DNA
cccggcggcgagcgcgattgcttcggtgatcctcgcggcatccctgatactgctgttctcaattaacactctgca

SEQ ID NO: 864838 - DNA, 75 bp, synthetic construct
  source 1..75: mol_type = other DNA
acgcttggtgcaacgcgctggcagagtttctgcaaagtggtgctgccggagctttctccggcgctggtggcgggc

SEQ ID NO: 864839 - DNA, 75 bp, synthetic construct
  source 1..75: mol_type = other DNA
ccagcggggcgctttatgccaatgtgagtggtgcctattttgccctgcgtaagcgtatcacgaagccgcctcatc

SEQ ID NO: 864840 - DNA, 75 bp, synthetic construct
  source 1..75: mol_type = other DNA
gtctgtctgagaccgaaatgtccaggctggtggaacgtcgcgatgacgtccatcgcaaactggcggagctgggtg

SEQ ID NO: 864841 - DNA, 75 bp, synthetic construct
  source 1..75: mol_type = other DNA
ggagggatcagcattcgcgttaaacaaaacctcgaacaaatgcgcttcattgagcgaatcttagacgttacctaa

SEQ ID NO: 864842 - DNA, 75 bp, synthetic construct
  source 1..75: mol_type = other DNA
acggcgaatggggtgcggacgcagacattactgatcggcggcgcggaccaaacgtgtaatataatagactccctg

SEQ ID NO: 864843 - DNA, 75 bp, synthetic construct
  source 1..75: mol_type = other DNA
ccttataactcgaaatacagccagcaatacgctgatgcgtatggtcagatagtcaatctcctcgatatcaccagt

SEQ ID NO: 864844 - DNA, 75 bp, synthetic construct
  source 1..75: mol_type = other DNA
cggcgttttttcctttttatcggtatgccatgacatttgaggaatttgtcccggccttttcatcctggatgacaa

SEQ ID NO: 864845 - DNA, 75 bp, synthetic construct
  source 1..75: mol_type = other DNA
ttactgggtggcactccccctgactacggtaaacggtgtctctcagtttcagccggaatggatatgctgggaacc

SEQ ID NO: 864846 - DNA, 75 bp, synthetic construct
  source 1..75: mol_type = other DNA
ggggcattcaggaaagaccgcccccggggccgtaagtgtattaatgaattccttgagcagtcaggctggcatgcc

SEQ ID NO: 864847 - DNA, 75 bp, synthetic construct
  source 1..75: mol_type = other DNA
ccgtaactcagatctggttgttcctggtgtatatagaaataatcaacctcgtagccgtggttgcatcaacgagtt

SEQ ID NO: 864848 - DNA, 75 bp, synthetic construct
  source 1..75: mol_type = other DNA
ctggtgatcggtgtctatccggacatatcactggctcaggctcgtcagaagagggatgaagcacgtaaactcctg

SEQ ID NO: 864849 - DNA, 75 bp, synthetic construct
  source 1..75: mol_type = other DNA
tcttaattgtggagaaggtgttcgttttgctgccgacgtcaggcatgtctaccgtaattgtggggaacaaaccgt

SEQ ID NO: 864850 - DNA, 75 bp, synthetic construct
  source 1..75: mol_type = other DNA
cgatggtgatcacttcgctgtttccttatgatccacaactctgctttgaacacttctcgattcagatggcacctg

SEQ ID NO: 864851 - DNA, 75 bp, synthetic construct
  source 1..75: mol_type = other DNA
gcagcgcggctggagtctttcgcgactggcagaagcgacgggcgtttctaaagcgatgttagggcagattgagcg

SEQ ID NO: 864852 - DNA, 75 bp, synthetic construct
  source 1..75: mol_type = other DNA
ccagcgcaagactgaaagttattgcgtcgaaagaagggtacgacgatggcccttataactcgaaatacagccagc

SEQ ID NO: 864853 - DNA, 75 bp, synthetic construct
  source 1..75: mol_type = other DNA
agatgataaaccctggaccacagcgtcacctgaagggttttattacaccatgtatccgttgtatgactggaaagc

SEQ ID NO: 864854 - DNA, 75 bp, synthetic construct
  source 1..75: mol_type = other DNA
gggatatcccgtcctggcgacgtatctgtaagacactcataaagaatgatttttggtgccggaccctctccttca

SEQ ID NO: 864855 - DNA, 75 bp, synthetic construct
  source 1..75: mol_type = other DNA
ttactgggtggcgcttcccctgaccacggtcaatggtgtctcgcagtttcagccggagtggatatgctgggagcc

SEQ ID NO: 864856 - DNA, 75 bp, synthetic construct
  source 1..75: mol_type = other DNA
tttgtcaggctaaaggggattacacggaaaatcggcagattgcagagcaggagcgcaagcgttgcaaggcaatgg

SEQ ID NO: 864857 - DNA, 75 bp, synthetic construct
  source 1..75: mol_type = other DNA
gcgcaacgtggcgaaagcgttaggcaaaccgctggacaagctgcgcatggttacgctggataaaccgcgcctgag

SEQ ID NO: 864858 - DNA, 75 bp, synthetic construct
  source 1..75: mol_type = other DNA
ggctgcctggccgcaaaccggatgtggcgataaaaacaaaattgatggtctggcggtcaccgcgatgcgtcaggc

SEQ ID NO: 864859 - DNA, 75 bp, synthetic construct
  source 1..75: mol_type = other DNA
atcacgaagccgtcacatcatacctggcggagttatgccatgtttctgctgaatgtgatgccggaaaaaacagca

SEQ ID NO: 864860 - DNA, 75 bp, synthetic construct
  source 1..75: mol_type = other DNA
atacaggtgagaacgttctgtcagcagcgctccatcgtattgagtggatatttgaaacattctcatctgtctgcc

SEQ ID NO: 864861 - DNA, 75 bp, synthetic construct
  source 1..75: mol_type = other DNA
ttcctaaagtgatcgaatactgtaagaaaaacccgcagaaaaatttgtataccttcaaaaatcaagcatctaatg

SEQ ID NO: 864862 - DNA, 75 bp, synthetic construct
  source 1..75: mol_type = other DNA
aaattcttactggagaaaatgttctgcgcgcagcaattgctcgtattgagtggatttttgaaacatttccgtcgg

SEQ ID NO: 864863 - DNA, 75 bp, synthetic construct
  source 1..75: mol_type = other DNA
gcagtttcagcctgagtggatatgctgggaacccggtgtagagtgggttcgacagccaccggaagatgctattac

SEQ ID NO: 864864 - DNA, 75 bp, synthetic construct
  source 1..75: mol_type = other DNA
tatctggatatacagtggcagaactcacgccgcttataatcctctgtatgatctgatgtacagagcgggggttcc

SEQ ID NO: 864865 - DNA, 75 bp, synthetic construct
  source 1..75: mol_type = other DNA
ggagaggagattttctgcgacgaacatggtcgggtacgggtgaagtttcactgggaccgttatcacgggatgacg

SEQ ID NO: 864866 - DNA, 75 bp, synthetic construct
  source 1..75: mol_type = other DNA
cacggttatatcgaaacacacgttcaggaacatggtgcctatattctttccggtcagggggtttataacctcgac

SEQ ID NO: 864867 - DNA, 75 bp, synthetic construct
  source 1..75: mol_type = other DNA
ctttacaggctggttatggcgtagggcgtggtgaagcgttcagctatatttactcgaaagattgtaaccgcgacg

SEQ ID NO: 864868 - DNA, 75 bp, synthetic construct
  source 1..75: mol_type = other DNA
gttgacggccaggagccggacacctttgcagtggtgaatttcaggttaatccagaaccagtcttatccgtttgtg

SEQ ID NO: 864869 - DNA, 75 bp, synthetic construct
  source 1..75: mol_type = other DNA
taacagggaatgataccgaggctgtggataaatctcagtctgttactgtaggggaaactcttacagtgacagtag

SEQ ID NO: 864870 - DNA, 75 bp, synthetic construct
  source 1..75: mol_type = other DNA
cagcagcaggatatccggacgatatcggccacgttactgaacgagaacggcgtcacggagtggacgccgctgttt

SEQ ID NO: 864871 - DNA, 75 bp, synthetic construct
  source 1..75: mol_type = other DNA
gacgtttgttaacgcccaggccgaagacagccaaatctttttatataagcgtcgctatgttccggtagaaggcca

SEQ ID NO: 864872 - DNA, 75 bp, synthetic construct
  source 1..75: mol_type = other DNA
ctgcccaaagagttaggttttgatatgaacatgcatatcctctcttttgcaccaggtgccagccacggttatatc

SEQ ID NO: 864873 - DNA, 75 bp, synthetic construct
  source 1..75: mol_type = other DNA
ccggtggaggtaaaggtaaggggcgcttgccggaaccggtcgagcgcgtcatccacgagctactgcaaaagcggt

SEQ ID NO: 864874 - DNA, 75 bp, synthetic construct
  source 1..75: mol_type = other DNA
tttgccttaagcgaaggtggctatctttattgcccaccaggctccttaatgacgtttgttaacgcccagccaaat

SEQ ID NO: 864875 - DNA, 75 bp, synthetic construct
  source 1..75: mol_type = other DNA
ttgtcgattatctggtgacgctgcatcaaaatggcggtaatcagcagggattcggcggtgaaggaattgaaacgt

SEQ ID NO: 864876 - DNA, 75 bp, synthetic construct
  source 1..75: mol_type = other DNA
tcctgtatgtgatctctggaaatatcactgccaaagccgaagggaaaacatttgccttaagcgaaggtggctatc

SEQ ID NO: 864877 - DNA, 75 bp, synthetic construct
  source 1..75: mol_type = other DNA
taatgagcaggtgtatatccatgcgcagaagaacatggatacggaggtgctcaacgaccggacaacggatgtgaa

SEQ ID NO: 864878 - DNA, 75 bp, synthetic construct
  source 1..75: mol_type = other DNA
tctttttacccttaacaacgatttcgttttcaggcttgccagataataaatttgccaatgcctcgagtatgagta

SEQ ID NO: 864879 - DNA, 75 bp, synthetic construct
  source 1..75: mol_type = other DNA
taccaggactgaccctgttagtgctcggtgttggtggcttgcaaattatgcttgataaagggcgcgatctggatt

SEQ ID NO: 864880 - DNA, 75 bp, synthetic construct
  source 1..75: mol_type = other DNA
attatccaccagaaaaaagaacatttgctctggcattatggtcaatgaccgtgattatcgctccgatatgtgggc

SEQ ID NO: 864881 - DNA, 75 bp, synthetic construct
  source 1..75: mol_type = other DNA
gtgcatcacggtacgtaatgaccagacgctgcaggtgacgaatgaccggacggtgagcgtgagtaatgatgacgg

SEQ ID NO: 864882 - DNA, 75 bp, synthetic construct
  source 1..75: mol_type = other DNA
acctacattctgaccgggaagcaggttccacatggcgggcgttcatccgatatcggcgtattaatgcaaaacgtc

SEQ ID NO: 864883 - DNA, 75 bp, synthetic construct
  source 1..75: mol_type = other DNA
gtgcgtcactattgcattgtcattagcgacgtttatgcaaatgttggactccactatttctaacgtcgcaatacc

SEQ ID NO: 864884 - DNA, 75 bp, synthetic construct
  source 1..75: mol_type = other DNA
aggttaatccagaaccagtcttatccgtttgtgatgagtgtggatgttgccagcgactcttttatgcagacggcg

SEQ ID NO: 864885 - DNA, 75 bp, synthetic construct
  source 1..75: mol_type = other DNA
ggccggggcgctacaaggacgagcagcatggtcaggactttacccgctaccggctggaagggctgcgtaacagtg

SEQ ID NO: 864886 - DNA, 75 bp, synthetic construct
  source 1..75: mol_type = other DNA
aggggaaacacagcctggtggtgaagggggacctggcgaggaaggtgagtggcgcgctggggataaaagtggacg

SEQ ID NO: 864887 - DNA, 75 bp, synthetic construct
  source 1..75: mol_type = other DNA
tgtctgggctgggcgttatgtgcgactatggccggaatgctttttaatgtcgatccttctctggttttctggatg

SEQ ID NO: 864888 - DNA, 75 bp, synthetic construct
  source 1..75: mol_type = other DNA
tggtagacaccacaccgctgtctggtaatgccctcacaggcaacgccgcctatggatcaactgcgggtagcgtct

SEQ ID NO: 864889 - DNA, 75 bp, synthetic construct
  source 1..75: mol_type = other DNA
gacgatgaaatccattgtggcattataagggaacgaacaatagatcgagtaaatcgcagtcagggacaaggattg

SEQ ID NO: 864890 - DNA, 75 bp, synthetic construct
  source 1..75: mol_type = other DNA
aatgatgcaaatgtagaaattaaactgttaactaatgattattatatatttgaggtgaattgtaatgagcaccag

SEQ ID NO: 864891 - DNA, 75 bp, synthetic construct
  source 1..75: mol_type = other DNA
cgtatcgaccgtttctcaaaagtgctgatgagctacggtttcaccactattgtgcgtaaaactcgtggtgatgat

SEQ ID NO: 864892 - DNA, 75 bp, synthetic construct
  source 1..75: mol_type = other DNA
atgagaagagtggtgatggcagtgattccggagaagaaaatgaagactctggagggaactgcgtgaccggaagtg

SEQ ID NO: 864893 - DNA, 75 bp, synthetic construct
  source 1..75: mol_type = other DNA
gcagaccggacgtggcgtccacgggtgcaaagcaaaccgaaggtggacgggccacagagcgccattgtcaccggg

SEQ ID NO: 864894 - DNA, 75 bp, synthetic construct
  source 1..75: mol_type = other DNA
gagatccgcgcaccggaagtggttgaagaacagcgttcatctgacggcaccattaaatgggcgattgccgtgggt

SEQ ID NO: 864895 - DNA, 75 bp, synthetic construct
  source 1..75: mol_type = other DNA
atccaacgctaaccaggggcgcgtcactatcgagtatgtgatgctcgatcacgttaacgacggtacagaacatgc

SEQ ID NO: 864896 - DNA, 75 bp, synthetic construct
  source 1..75: mol_type = other DNA
tttggtctgtctaaacgtcgcgtgacgctttccacttccggtgtagttccggcgctggataaactgggcgatatg

SEQ ID NO: 864897 - DNA, 75 bp, synthetic construct
  source 1..75: mol_type = other DNA
acacggagaccattggtaacgaccagaagataacggtggtgaaggggcagacggttcaggtcgggaccagaaaag

SEQ ID NO: 864898 - DNA, 75 bp, synthetic construct
  source 1..75: mol_type = other DNA
acgcgactgcgcgtgcccagtgccgataactaccaactgcggctggccgctgagggggagggggcaggaaagcta

SEQ ID NO: 864899 - DNA, 75 bp, synthetic construct
  source 1..75: mol_type = other DNA
ctgcacccgaccgaagtacgattgatcgatatcgatgcgcagagcagtgatgagaatctgaacttgctaacccag

SEQ ID NO: 864900 - DNA, 75 bp, synthetic construct
  source 1..75: mol_type = other DNA
gaggattttctggagaaaagcgcgctgctgacggtctggcagggcgacactgcacagcgttacgtcagcggtatc

SEQ ID NO: 864901 - DNA, 75 bp, synthetic construct
  source 1..75: mol_type = other DNA
aggacgccacggataaggaacaggtctatattcacgcgcagaagaacatggacacggaggtgctcaacgaccgga

SEQ ID NO: 864902 - DNA, 75 bp, synthetic construct
  source 1..75: mol_type = other DNA
acttagcgtactggaagcagtaggcgatatcaccgccacggcaatggtttcccgccgacccattcagggggaaga

SEQ ID NO: 864903 - DNA, 75 bp, synthetic construct
  source 1..75: mol_type = other DNA
ctgcggtgcgccgttatctggagaaatccaacgctaaccagggccgtgttactatcgagtacgtgatgctcgacc

SEQ ID NO: 864904 - DNA, 75 bp, synthetic construct
  source 1..75: mol_type = other DNA
tacgtcgtaaagcgcaatctggagagacggcagctacgcgggcgcgctttctctttcagcggaatactgctggtg

SEQ ID NO: 864905 - DNA, 75 bp, synthetic construct
  source 1..75: mol_type = other DNA
gaaagtgacggttgaaggtaaacaggaccataaaaccaccaaagaccatgtcagcctgacagagggcaatcaggg

SEQ ID NO: 864906 - DNA, 75 bp, synthetic construct
  source 1..75: mol_type = other DNA
aaatatactctccagttccattttacagacgatgacgggataccgtattcagagacacgctacattgccttcttt

SEQ ID NO: 864907 - DNA, 75 bp, synthetic construct
  source 1..75: mol_type = other DNA
cgtggtggcgggttttggcatgcaggagaacaatggctggcagatgcgttatcacctgcgtattgagccgccgtt

SEQ ID NO: 864908 - DNA, 75 bp, synthetic construct
  source 1..75: mol_type = other DNA
tagacttcctgaacggcgacccggaccagccgataatcatggggcggacgtaccatgaggacaaccgttcgccgg

SEQ ID NO: 864909 - DNA, 75 bp, synthetic construct
  source 1..75: mol_type = other DNA
ggctggaggtgaaaggcgatctggcacagaaaataagcggcgcgctgggtatcagcggtaagcgactcgtcagaa

SEQ ID NO: 864910 - DNA, 75 bp, synthetic construct
  source 1..75: mol_type = other DNA
gccaggggagaggaaccacgctgggaaatcagttagaggtgataccggcggaccggacctggcgtccacgggtgc

SEQ ID NO: 864911 - DNA, 75 bp, synthetic construct
  source 1..75: mol_type = other DNA
gtgacctgccgggaacgaagacgcagatgaccatccggtcaaaaacctataaaggaagcggatttaacgagctgc

SEQ ID NO: 864912 - DNA, 75 bp, synthetic construct
  source 1..75: mol_type = other DNA
ctcaacgggcaactgaagcagtacaaaatcctggactggccggggcgctacaaggacgagcagcatggtcaggac

SEQ ID NO: 864913 - DNA, 75 bp, synthetic construct
  source 1..75: mol_type = other DNA
acgagcatggccgggtacgggtgaagtttcactgggaccgttatcacgggatgacggaggagagttcatgctgga

SEQ ID NO: 864914 - DNA, 75 bp, synthetic construct
  source 1..75: mol_type = other DNA
ggaagggaagcaggagcataagacgacggggaaccatatcagtctggtggagggaacgcacagtctggaggtgaa

SEQ ID NO: 864915 - DNA, 75 bp, synthetic construct
  source 1..75: mol_type = other DNA
aaccacgctgggaaatcagttagaggtgataccggcggaccggacctggcgtccacgggtgcagagcaaaccgaa

SEQ ID NO: 864916 - DNA, 75 bp, synthetic construct
  source 1..75: mol_type = other DNA
agctgcaaaaaatatggatacttttgtaacgcttgatggaacttatcgatactggatacagtatccggaagcatg

SEQ ID NO: 864917 - DNA, 75 bp, synthetic construct
  source 1..75: mol_type = other DNA
attacaattaccattaaaggttgcctatgaagaaaataaaggcagatactctggtcaatcaggaggaggctggcc

SEQ ID NO: 864918 - DNA, 75 bp, synthetic construct
  source 1..75: mol_type = other DNA
acacactccctgacgaagcggagattaataaggtgcctcttcgtcggcgtacgaaggataaagatttggatgtga

SEQ ID NO: 864919 - DNA, 75 bp, synthetic construct
  source 1..75: mol_type = other DNA
cagctatctgtcgctgaataacgttactgcgctgcgcgaacatcatgtggtgctcgacggctcgctgtacgggat

SEQ ID NO: 864920 - DNA, 75 bp, synthetic construct
  source 1..75: mol_type = other DNA
tacttcacatggaagaatatcttaagatgtaaccgtgtcggagaaagatataactttacacagacaaatatagaa

SEQ ID NO: 864921 - DNA, 75 bp, synthetic construct
  source 1..75: mol_type = other DNA
gtaacgcttgatggaacttatcgatactggatacagtatccggaagcatggcagacaacccctgacggactaaaa

SEQ ID NO: 864922 - DNA, 75 bp, synthetic construct
  source 1..75: mol_type = other DNA
tatctttgtgaaaatgattttgactctttgataattgatctcaaaagtgagagcacaatatatgattcactaccc

SEQ ID NO: 864923 - DNA, 75 bp, synthetic construct
  source 1..75: mol_type = other DNA
tcccttgataagaagaaaccaccgcacgaagaaacagaagattttgtaaaacgagcattagattcaaagaatatc

SEQ ID NO: 864924 - DNA, 75 bp, synthetic construct
  source 1..75: mol_type = other DNA
ctgaaaatgtggcttctaccgctgcaaaaacgctgactgatcctaatgcctcagccatccagaaaagccttgctg

SEQ ID NO: 864925 - DNA, 75 bp, synthetic construct
  source 1..75: mol_type = other DNA
acacactccctggcgaagcggagattaataaggtgtctcttcgtcggcgtacgaaggataaaattttggatgtga

SEQ ID NO: 864926 - DNA, 75 bp, synthetic construct
  source 1..75: mol_type = other DNA
gattggtcttatgattaaaatcggtcttttagaagaggtcggagaacgaatcccaaaacgtccattaaaattacg

SEQ ID NO: 864927 - DNA, 75 bp, synthetic construct
  source 1..75: mol_type = other DNA
attcaaagaatatctatctttgtgacaatgattttgactctttgataattgatctcaaaagtgagagcacaatat

SEQ ID NO: 864928 - DNA, 75 bp, synthetic construct
  source 1..75: mol_type = other DNA
aacgtatacgtctgtctatcatccaaaattttacatatgacgatatcgaaaatgaaacaggtatcagcgtcagta

SEQ ID NO: 864929 - DNA, 75 bp, synthetic construct
  source 1..75: mol_type = other DNA
aaaggtaaacaggcattagacgccctggaacgctacaagggggcgaaaaatgccggaaaaacgccaatccttgaa

SEQ ID NO: 864930 - DNA, 75 bp, synthetic construct
  source 1..75: mol_type = other DNA
aaagcgatctgcgtaacctgtccattgatgattttctggcgctgtccggcgtaccgaataccggatccggagaat

SEQ ID NO: 864931 - DNA, 75 bp, synthetic construct
  source 1..75: mol_type = other DNA
cgcgagggtatgccgccgcgtgaaggtggtgatgagttcagccaggcatggaaacagactgtgaaaattaaaggg

SEQ ID NO: 864932 - DNA, 75 bp, synthetic construct
  source 1..75: mol_type = other DNA
cacaggcgcacacaaataccgctataccatcaccgaaccctgtacaggaacggtgcgcacgtatttacaggaaga

SEQ ID NO: 864933 - DNA, 75 bp, synthetic construct
  source 1..75: mol_type = other DNA
ggcgctactgcatcactgacgcctacaccggaaacacccgcaactatttaccgtgggaggttctccaccttcgtt

SEQ ID NO: 864934 - DNA, 75 bp, synthetic construct
  source 1..75: mol_type = other DNA
gtggagcagacaggtgagcataactggcgctactgcatcactgacgcctacaccggaaacacccgcaactattta

SEQ ID NO: 864935 - DNA, 75 bp, synthetic construct
  source 1..75: mol_type = other DNA
tgattcagctgatttattacgcgccacccctaccgaacgttacgccacgtatgagaaagggattaagaacgggat

SEQ ID NO: 864936 - DNA, 75 bp, synthetic construct
  source 1..75: mol_type = other DNA
ggtatcggcctgcgtgtaagtcatggttgtgtgcgtctgcgtaacgaagacatcaaattcctgttcgagaaagtg

SEQ ID NO: 864937 - DNA, 75 bp, synthetic construct
  source 1..75: mol_type = other DNA
gatggaagcgaacccgggtgtggataccttcctgccgaaaggcggtactgtactgaacattccgcagcagctgat

SEQ ID NO: 864938 - DNA, 75 bp, synthetic construct
  source 1..75: mol_type = other DNA
aacaaaaaacacttgatggtattcgtcagcttgttgatgaaagactggctgaaggagccactccggctgatgtta

SEQ ID NO: 864939 - DNA, 75 bp, synthetic construct
  source 1..75: mol_type = other DNA
cgttactccaccgatgatggttttctggggcgttcgccgatcaccatctgccgtgaggcgctggggttaggtctg

SEQ ID NO: 864940 - DNA, 75 bp, synthetic construct
  source 1..75: mol_type = other DNA
gtcaggcgaatggctggacggcgtgaaaggtaaacaggcattggatgctctggaacgctacaagggggcgaaaaa

SEQ ID NO: 864941 - DNA, 75 bp, synthetic construct
  source 1..75: mol_type = other DNA
gtgaccattcgtactgatgatcaaagcgctaaagtggtcgcaaaccagattattcacatgctggaaagcaactaa

SEQ ID NO: 864942 - DNA, 75 bp, synthetic construct
  source 1..75: mol_type = other DNA
ctgaagcatggcgtgatgattatgaagcaggaaaaactccggtcgaagcatattgtgatgagtgggcgatgaatg

SEQ ID NO: 864943 - DNA, 75 bp, synthetic construct
  source 1..75: mol_type = other DNA
ctgaagcatggcgtgatgactacgaagcaggaaaaactccggtcgaagcatattgtgatgagtggggcgatgaat

SEQ ID NO: 864944 - DNA, 75 bp, synthetic construct
  source 1..75: mol_type = other DNA
ggttatttccagccatataaaagcttaagcgatattaccaaagcggatttcctctcagatccgaacaaaatcacc

SEQ ID NO: 864945 - DNA, 75 bp, synthetic construct
  source 1..75: mol_type = other DNA
ttttggtaatttggttggtgttgataattatgataagttaatttcttcattaagtatcagtcataatttatttca

SEQ ID NO: 864946 - DNA, 75 bp, synthetic construct
  source 1..75: mol_type = other DNA
caatcattatacgagcctgtagttacttataatcatgatattatttctcaggctgggttgcctaaagatacgaag

SEQ ID NO: 864947 - DNA, 75 bp, synthetic construct
  source 1..75: mol_type = other DNA
atgagcaattcagcaataatatgtgttttttggtaacgtctccatttatggagaaacattttaaagaacagctgg

SEQ ID NO: 864948 - DNA, 75 bp, synthetic construct
  source 1..75: mol_type = other DNA
catgccaaactgctctactcccgaatgggtgaagtgactgcggatgacggtacggtgttgcctatagccgctacc

SEQ ID NO: 864949 - DNA, 75 bp, synthetic construct
  source 1..75: mol_type = other DNA
cttccagcgtgatggcatgcaccgcatgggtatcgacactaacccggcgaattacgagcccaactcgatcaacga

SEQ ID NO: 864950 - DNA, 75 bp, synthetic construct
  source 1..75: mol_type = other DNA
aaaggaagcggctttaatgaactgcggtttgaagacgcaacgggcggtgaacaggtctatatccacgcgcagaag

SEQ ID NO: 864951 - DNA, 75 bp, synthetic construct
  source 1..75: mol_type = other DNA
cgctgacggtcgatgcggtcattgtcccttgcggcaatatcgcggatatcgctgacaacggcgatgccaactact

SEQ ID NO: 864952 - DNA, 75 bp, synthetic construct
  source 1..75: mol_type = other DNA
caatcaaggtcgctgaccagggtgaagaagggattgtggaagctgacagcgccgacggtagttttatggatgaac

SEQ ID NO: 864953 - DNA, 75 bp, synthetic construct
  source 1..75: mol_type = other DNA
atggggatcgacactaacccggcgaattacgaaccgaactcgatcaacgataactggccgcgcgaaacaccgccg

SEQ ID NO: 864954 - DNA, 75 bp, synthetic construct
  source 1..75: mol_type = other DNA
agaatgggctgaatggaaaaaaataattccaccattacttgataaaattaaccaattttttctcatatctaagcc

SEQ ID NO: 864955 - DNA, 75 bp, synthetic construct
  source 1..75: mol_type = other DNA
tatggacctgctgtgtctggcgaaaggggctcgggatttgctcaactcaaaaggtttggatgcggcgcaatactc

SEQ ID NO: 864956 - DNA, 75 bp, synthetic construct
  source 1..75: mol_type = other DNA
cagacgatgggagctggcgtaaatgtcagatgcctgattaatccaaatattaagctcggtgggcttattcgtctg

SEQ ID NO: 864957 - DNA, 75 bp, synthetic construct
  source 1..75: mol_type = other DNA
gaggtttcagttcatgtcctgcggagctctctgagcgaagcgggtttatcattaacgaatagtcttagtagtacc

SEQ ID NO: 864958 - DNA, 75 bp, synthetic construct
  source 1..75: mol_type = other DNA
tacgtcaggtaatcgaggcgcgaggggggatttccgaagctgccaggaaatctggccttgcccgtcagagtattt

SEQ ID NO: 864959 - DNA, 75 bp, synthetic construct
  source 1..75: mol_type = other DNA
ccgaccatcacaacacttgcacaacttacatctgtagccggattacagttcactctcagtaaatccagccactaa

SEQ ID NO: 864960 - DNA, 75 bp, synthetic construct
  source 1..75: mol_type = other DNA
gaacaattagttcatgagaatgaaacagtcgtgctgatttctgatatgtatcttcccaaagaaattataacaaat

SEQ ID NO: 864961 - DNA, 75 bp, synthetic construct
  source 1..75: mol_type = other DNA
atagcattatatgcgccaacatatcgtgaaaaaaatcctaaaaactttctttacttagcgattaaagatataaat

SEQ ID NO: 864962 - DNA, 75 bp, synthetic construct
  source 1..75: mol_type = other DNA
gaccacaaatttaacattaatgaaattagcaaatggaaaaatgatctcgataagagagaagattgggctattgat

SEQ ID NO: 864963 - DNA, 75 bp, synthetic construct
  source 1..75: mol_type = other DNA
cgcagaaaaatcattatccggcagccgttgagcacaacgccgccatgattgaagaactacgtgcagatcctgatt

SEQ ID NO: 864964 - DNA, 75 bp, synthetic construct
  source 1..75: mol_type = other DNA
tatccagttgtcactgctgggtattgctgcggaagtggtgacgggtaacacactcactatgcagtttaaccgggt

SEQ ID NO: 864965 - DNA, 75 bp, synthetic construct
  source 1..75: mol_type = other DNA
aatgcctttgaaaagcgactggcagatcttcgccggttcagggccatgcgggactttttgcgcggaatacaggag

SEQ ID NO: 864966 - DNA, 75 bp, synthetic construct
  source 1..75: mol_type = other DNA
tctgcggcttaaacgcctggggctgtcaaaaacgttccgtcgtctggttatcacactgaacctacgttatggcgt

SEQ ID NO: 864967 - DNA, 75 bp, synthetic construct
  source 1..75: mol_type = other DNA
ccgacgttatggcgtcagtctcattcatctggatgccagcgctgaatgcctgccgggtttacccactttcaactg

SEQ ID NO: 864968 - DNA, 75 bp, synthetic construct
  source 1..75: mol_type = other DNA
tgtactcgctgtcgcatcagacgaatgacacaggcgaatcagaatggattcattttacaggcagcggatatctgt

SEQ ID NO: 864969 - DNA, 75 bp, synthetic construct
  source 1..75: mol_type = other DNA
gtctggttatcacactaaacctacgttatggcgtcagtctcattcatctggatgccagcgctgaatgcctgccgg

SEQ ID NO: 864970 - DNA, 75 bp, synthetic construct
  source 1..75: mol_type = other DNA
tctgcggcttaaacgcctggggctgtcaaaaacgttccgtcgtctggttgtcacactaaacctacgttatggcgt

SEQ ID NO: 864971 - DNA, 75 bp, synthetic construct
  source 1..75: mol_type = other DNA
tctgcggcttaaacgcctggggctgtcaaaaacgttccgtcgtctggttttcacacttaacctacgttatggcgt

SEQ ID NO: 864972 - DNA, 75 bp, synthetic construct
  source 1..75: mol_type = other DNA
tcctgttgttgtttaaacaggggaaccgtgagctgaaacgtctggtgcatccgaatgctgtttatagcattaagc

SEQ ID NO: 864973 - DNA, 75 bp, synthetic construct
  source 1..75: mol_type = other DNA
ttttccaggtggtgtcgatggcgacgactgccggatttacgacagacagcattgcccgttggccgctcttcttgc

SEQ ID NO: 864974 - DNA, 75 bp, synthetic construct
  source 1..75: mol_type = other DNA
ttgccaatatgctgtttggtcgtctcgaggtctttacattgctggtgctctttaccccgactttctggcgtgaat

SEQ ID NO: 864975 - DNA, 75 bp, synthetic construct
  source 1..75: mol_type = other DNA
attgcccgctggccgctctttttgccggtactgcttttatgttcagcttttatcggcggttgtgccgggtcaacg

SEQ ID NO: 864976 - DNA, 75 bp, synthetic construct
  source 1..75: mol_type = other DNA
tgcaatggtttggcgggatggggatcatcgtgttggcggttgcgatactgcctatcctcggcgtgggtgggatgc

SEQ ID NO: 864977 - DNA, 75 bp, synthetic construct
  source 1..75: mol_type = other DNA
gccatcctcttttatcgccagatgctgcaatggtttggcgggatggggatcatcgtgttggcggttgcgatactg

SEQ ID NO: 864978 - DNA, 75 bp, synthetic construct
  source 1..75: mol_type = other DNA
gtctggttttcacactaaaccgacgttatggcgtcagtctcattcatctggatgccagcgctgaatgcctgccgg

SEQ ID NO: 864979 - DNA, 75 bp, synthetic construct
  source 1..75: mol_type = other DNA
catccaacgttatggcgtcagtctcattcatctggatgccagcgctgaatgtctgccggaccagcccactttcga

SEQ ID NO: 864980 - DNA, 75 bp, synthetic construct
  source 1..75: mol_type = other DNA
gtgttactcttgctgaactgattaacgtggtctgcgataacggttactcccttcgtgttgttgatgaatctgacc

SEQ ID NO: 864981 - DNA, 75 bp, synthetic construct
  source 1..75: mol_type = other DNA
cagaaccagatactggaagtttgcggcggagaaaacatctttaaagacagtcgagttccctggccgcaggttagc

SEQ ID NO: 864982 - DNA, 75 bp, synthetic construct
  source 1..75: mol_type = other DNA
cggtgcgtggtcgtacccggttctgcggcttaaacgcctggggctgtccagaacgttccgccgtctggttgtcac

SEQ ID NO: 864983 - DNA, 75 bp, synthetic construct
  source 1..75: mol_type = other DNA
tgattaacgtggtctgcgataacggtcactcccttcgtgttgttgatgaatctgaccgagcctcaacagactgca

SEQ ID NO: 864984 - DNA, 75 bp, synthetic construct
  source 1..75: mol_type = other DNA
aaagacacctatcagtatggttctacagctgtcggaagtaactcataccaggtacaaggggcggttggtctgggc

SEQ ID NO: 864985 - DNA, 75 bp, synthetic construct
  source 1..75: mol_type = other DNA
gtctggttgtcacactaagcctacgttatggcgtcagtctcattcatctggatgccagcgctgaatgcctgccgg

SEQ ID NO: 864986 - DNA, 75 bp, synthetic construct
  source 1..75: mol_type = other DNA
gtctggttctcacactaaccctacgttatggcgtcagtctcattcatctggatgccagcgctgaatgcctgccgg

SEQ ID NO: 864987 - DNA, 75 bp, synthetic construct
  source 1..75: mol_type = other DNA
gtctggttttcacactaagccaacgttatggcgtcagtctcattcatctggatgccagcgctgaatgcctgccgg

SEQ ID NO: 864988 - DNA, 75 bp, synthetic construct
  source 1..75: mol_type = other DNA
caccccggtgggagtcagtagttattccgactatccaccagaagcgcagaaaattgagcaagtttccacctggca

SEQ ID NO: 864989 - DNA, 75 bp, synthetic construct
  source 1..75: mol_type = other DNA
gcaggttgaccaccttgcttcgctgggaataaaagtcatgtgggtcgatgcgacaagcattgaacaaattgccga

SEQ ID NO: 864990 - DNA, 75 bp, synthetic construct
  source 1..75: mol_type = other DNA
aatttctcgccaacaagccggagcttcccccgcatcgtgatttcaacgataagtgggacgatgacgacgactggc

SEQ ID NO: 864991 - DNA, 75 bp, synthetic construct
  source 1..75: mol_type = other DNA
ccgtgagctgaaacgactggtgcatccgaacgccgtctatagcattaagctggggaatcgcgcactgccggaacg

SEQ ID NO: 864992 - DNA, 75 bp, synthetic construct
  source 1..75: mol_type = other DNA
atctacaccaacgtgacctatcccattacggtcaatccgccgtttgttcccacggagaatccgacgggttgttac

SEQ ID NO: 864993 - DNA, 75 bp, synthetic construct
  source 1..75: mol_type = other DNA
cggtgctgattacgactgtccatgcgtggcagcatcaggggaaaactttatttatcagccggaaaacctaccgga

SEQ ID NO: 864994 - DNA, 75 bp, synthetic construct
  source 1..75: mol_type = other DNA
gcggaagcctgtgatgttggcttccgtcaggtacacattgaaaatggtctgctgttactgaatggcaaaccgttg

SEQ ID NO: 864995 - DNA, 75 bp, synthetic construct
  source 1..75: mol_type = other DNA
caccagcgaaacggatttttgcatcgagctgggtaataagcgttggcaatttaaccgccagtcaggctttctttc

SEQ ID NO: 864996 - DNA, 75 bp, synthetic construct
  source 1..75: mol_type = other DNA
gcggaagaaggcacatggctgaatatcgacggtttccatatggggattggtggcgacgactcctggagcccgtca

SEQ ID NO: 864997 - DNA, 75 bp, synthetic construct
  source 1..75: mol_type = other DNA
cggattggcctgacctgccagctggcgcaggtagcagagcgggtaaactggctcggattagggccgcaagaaaac

SEQ ID NO: 864998 - DNA, 75 bp, synthetic construct
  source 1..75: mol_type = other DNA
cagtggcgcggcgacttccagttcaatatcagtcgctacagccaacaacaactgatggaaaccagccatcgccat

SEQ ID NO: 864999 - DNA, 75 bp, synthetic construct
  source 1..75: mol_type = other DNA
tgcgatcttcctgacgccgatactgtcgtcgtcccctcaaactggcagatgcacggttacgatgcgcctatctac

SEQ ID NO: 865000 - DNA, 75 bp, synthetic construct
  source 1..75: mol_type = other DNA
gcctcgcggtgatggtgctgcgctggagtgacggtagttatctggaagatcaggatatgtggcgaatgagcggca

SEQ ID NO: 865001 - DNA, 75 bp, synthetic construct
  source 1..75: mol_type = other DNA
ccggagaaaaccgcctcgcggtgatggtgctgcgctggagtgacggcagttatctggaagatcaggatatgtggc

SEQ ID NO: 865002 - DNA, 75 bp, synthetic construct
  source 1..75: mol_type = other DNA
cgtggtcggcttacggcggtgattttggcgatacgccgaacgatcgccagttctgcatgaacggtctggtctttg

SEQ ID NO: 865003 - DNA, 75 bp, synthetic construct
  source 1..75: mol_type = other DNA
agcagaacaactttaacgccgtgcgctgttcgcattatccgaaccatccgctgtggtacacgctgtgcgaccgct

SEQ ID NO: 865004 - DNA, 75 bp, synthetic construct
  source 1..75: mol_type = other DNA
ctttcggcggtgaaattatcgatgagcgtggtggttatgccgatcgcgtcacactacgtctgaacgtcgaaaacc

SEQ ID NO: 865005 - DNA, 75 bp, synthetic construct
  source 1..75: mol_type = other DNA
ggtggggccgctgttcgctacgccacgtacggcaaccgtctcctttgaagtcggtattgcgccgctgacgggtga

SEQ ID NO: 865006 - DNA, 75 bp, synthetic construct
  source 1..75: mol_type = other DNA
gtctggcgtggttaatgccaacagtggtgatggtggttctggccattatctgggatcgtgcggcaggtcgtcagg

SEQ ID NO: 865007 - DNA, 75 bp, synthetic construct
  source 1..75: mol_type = other DNA
cgtacagctaccgtttcctttgaagtggggattgcgccgctgactggtgattccgcgctgccgctgtttatctac

SEQ ID NO: 865008 - DNA, 75 bp, synthetic construct
  source 1..75: mol_type = other DNA
acttacaaaaatgcgaaagcaaaattaagcagaaaatgattaaaggcattattatgctaagttcgccagcggatg

SEQ ID NO: 865009 - DNA, 75 bp, synthetic construct
  source 1..75: mol_type = other DNA
atgtttattctgtcgataccgataattttggtgacagcattgcgctaaccgatgcattaattgagaatggacata

SEQ ID NO: 865010 - DNA, 75 bp, synthetic construct
  source 1..75: mol_type = other DNA
gcttgatgtccatgtttcagtggatcgggtaaatggttataagcaaagtctgtccgcgcataatattgcagtgcg

SEQ ID NO: 865011 - DNA, 75 bp, synthetic construct
  source 1..75: mol_type = other DNA
cgtctggcagtgggtgagactcagcaaccgacggatggggttaatgaaacattacgggatgatggattgtggttt

SEQ ID NO: 865012 - DNA, 75 bp, synthetic construct
  source 1..75: mol_type = other DNA
atgaaaaaccgtaaagcaaaaatcctattagttcgcagaaacggtcctggcgtctggcagtgggtgagactcagc

SEQ ID NO: 865013 - DNA, 75 bp, synthetic construct
  source 1..75: mol_type = other DNA
ccgaccgcacgccgcatccggcgctgacggaagcaaaacaccaacagcagtttttccagttccgtttatccgggc

SEQ ID NO: 865014 - DNA, 75 bp, synthetic construct
  source 1..75: mol_type = other DNA
aacattattttccctccaatggtcggcttgcaggcaggcgaacacgtctggactgcggcattcggcttcctcatt

SEQ ID NO: 865015 - DNA, 75 bp, synthetic construct
  source 1..75: mol_type = other DNA
actggagttaaagctgcgacaagcaggattgagcaccgattttttacgtggtgagtatgctgaaaaattgttgaa

SEQ ID NO: 865016 - DNA, 75 bp, synthetic construct
  source 1..75: mol_type = other DNA
agactgatatcaccgatgggataaggttgtctgattggtattataaatataagaagtcatcagagagtaacgtaa

SEQ ID NO: 865017 - DNA, 75 bp, synthetic construct
  source 1..75: mol_type = other DNA
tcgtctggttgtcacgcttagccggtgttatggcgtccgtctcattcatctggttgccagcgccgaatttctgcc

SEQ ID NO: 865018 - DNA, 75 bp, synthetic construct
  source 1..75: mol_type = other DNA
tcgtctggttgtcacgcttagccggagttatggcgtccgtctcattcatctggttgccagcgccgtatttctgcc

SEQ ID NO: 865019 - DNA, 75 bp, synthetic construct
  source 1..75: mol_type = other DNA
tcgtctggttgtcactcttagccggggttatggcgtccgtctcattcatctggttgccagcgccgcatttctgcc

SEQ ID NO: 865020 - DNA, 75 bp, synthetic construct
  source 1..75: mol_type = other DNA
caatggggttacgcccttaacccaaacagtggtgcacgcgtcgtaacgggtacgcagaaccgagaatatatggag

SEQ ID NO: 865021 - DNA, 75 bp, synthetic construct
  source 1..75: mol_type = other DNA
ctctcacccggcgttatggcgtcagtctcattcatctggacgccggcgcagaatgtctgccggggttccccactt

SEQ ID NO: 865022 - DNA, 75 bp, synthetic construct
  source 1..75: mol_type = other DNA
gtaccggtgcgtggtcgtacccggttctgcggcttaaacgcctggggctgtccaaaacgttccgccgtctggttg

SEQ ID NO: 865023 - DNA, 75 bp, synthetic construct
  source 1..75: mol_type = other DNA
atgatgaaactggccctgacactggaagccgacagcgttaacgtacaggcactgaacatggggcgcattgtcgtt

SEQ ID NO: 865024 - DNA, 75 bp, synthetic construct
  source 1..75: mol_type = other DNA
catgctggagcgttttgtgcgtgatacctgccagtgtgaagccctgtggacgccagcgaaaattatcgacgacgc

SEQ ID NO: 865025 - DNA, 75 bp, synthetic construct
  source 1..75: mol_type = other DNA
cctgccgtacgacatgctgtaccgtcacccgttcccgggaccaggcctcggcgttcgtgtactgggcgaagtgaa

SEQ ID NO: 865026 - DNA, 75 bp, synthetic construct
  source 1..75: mol_type = other DNA
tcgtctggttgtcactcttagccggcgttatggcgtccgtctcattcatctggttgccagcgccggatttctgcc

SEQ ID NO: 865027 - DNA, 75 bp, synthetic construct
  source 1..75: mol_type = other DNA
gtcacacttatccggcgttatggcgtcagtctcattcatctggatgccagtgctgaatgcctgccgggtttacct

SEQ ID NO: 865028 - DNA, 75 bp, synthetic construct
  source 1..75: mol_type = other DNA
tggttgtactcgctgtcacaccagaccagtgacttcggcgaatcagaatggattcattttaccggtagcggatat

SEQ ID NO: 865029 - DNA, 75 bp, synthetic construct
  source 1..75: mol_type = other DNA
gagatttgcaggaatgccattaaacgaggcggacaacgaggtgaacatctgagggctaatatcgacagagccagt

SEQ ID NO: 865030 - DNA, 75 bp, synthetic construct
  source 1..75: mol_type = other DNA
agggcaccatctaccctgacgttatcgaatctgcggcttctgcaaccggtaaagcacacgtcattaaatctcacc

SEQ ID NO: 865031 - DNA, 75 bp, synthetic construct
  source 1..75: mol_type = other DNA
caaagtcagccaggcgtttactgtcttcctgccggtacgttctgttggcgtaatgggcgatggtcgtaaatacga

SEQ ID NO: 865032 - DNA, 75 bp, synthetic construct
  source 1..75: mol_type = other DNA
gccgaatcgtgagcgaatcaatcaattgctcaatgagtcgctaatgctggtgactgcgctcaacacccacattgg

SEQ ID NO: 865033 - DNA, 75 bp, synthetic construct
  source 1..75: mol_type = other DNA
ggatccgcaaattcgcttattgcatcagtgctgctggcaaactctggaacacgctgggtgcgatcctgccacctt

SEQ ID NO: 865034 - DNA, 75 bp, synthetic construct
  source 1..75: mol_type = other DNA
aacatcgctcttgatcagaaaggttcaggtaatttttcagcgtgggttattgaagcctgcagaagaagattaatt

SEQ ID NO: 865035 - DNA, 75 bp, synthetic construct
  source 1..75: mol_type = other DNA
ctggaagacgtgaagtggctagcgcagggcaccatctaccctgacgttatcgaatctgccgcgtctgcaaccggt

SEQ ID NO: 865036 - DNA, 75 bp, synthetic construct
  source 1..75: mol_type = other DNA
ccttaaaagcggcgcccttgcgctggggtatcttagcgaagccgagtttgaccgctgggtacggccagaacagat

SEQ ID NO: 865037 - DNA, 75 bp, synthetic construct
  source 1..75: mol_type = other DNA
caatgacgtggcgatcaatatgggcggcgcatcgggtaacttcgaactgaatgtcttccgtccgatggttatcca

SEQ ID NO: 865038 - DNA, 75 bp, synthetic construct
  source 1..75: mol_type = other DNA
ggcagataagctgtggggcgcacaaactcaacgctcgctggagcatttccgcatttcgacggagaaaatgcccac

SEQ ID NO: 865039 - DNA, 75 bp, synthetic construct
  source 1..75: mol_type = other DNA
tgaacaaaagccaaagctccaatgatgtcttcccaactgctatgcacgtggcggcgttattggcactgcgtaagc

SEQ ID NO: 865040 - DNA, 75 bp, synthetic construct
  source 1..75: mol_type = other DNA
gcagtcattacctgtgcaccgtttgttaccgcgccgaacaaatttgaagcgcttgcgacctgtgatgccctggtt

SEQ ID NO: 865041 - DNA, 75 bp, synthetic construct
  source 1..75: mol_type = other DNA
gggatatcttagcgcaaccgagtttgatagctgggtacgaccagaggatatggtcggcagtatgaacatcgatcg

SEQ ID NO: 865042 - DNA, 75 bp, synthetic construct
  source 1..75: mol_type = other DNA
gcgttcgtgttctgggtgaagtgaagaaagagtactgtgacctgctgcgccgcgctgacgccatcttcattgaag

SEQ ID NO: 865043 - DNA, 75 bp, synthetic construct
  source 1..75: mol_type = other DNA
tgacgtcgatggtgttaatctcaatgaactgattaacaaagtcgctgaaaacggttattcactccgggtggtaga

SEQ ID NO: 865044 - DNA, 75 bp, synthetic construct
  source 1..75: mol_type = other DNA
tgacgtcgatggtgttaatctcaatgaactgattaacaaagtcactgaaaacggttattcactccgggtggtgga

SEQ ID NO: 865045 - DNA, 75 bp, synthetic construct
  source 1..75: mol_type = other DNA
aaacggcaatgtacagaatgaagcagttgttgggagattcactgacgcagcgtgactacgatggtcaggtagcgg

SEQ ID NO: 865046 - DNA, 75 bp, synthetic construct
  source 1..75: mol_type = other DNA
tgacgtcgatggtgttaatctcagtgaactgattaacaaagtcactgaaaacggttattcactccgggtggtaga

SEQ ID NO: 865047 - DNA, 75 bp, synthetic construct
  source 1..75: mol_type = other DNA
tgacgtcgatggtgttaatctcactgaactgattaacaaagtccctgaaaacggttattcactccgggtggtcga

SEQ ID NO: 865048 - DNA, 75 bp, synthetic construct
  source 1..75: mol_type = other DNA
tgacgtcgatggtgttaatctcattgaactgattaacaaagtctctgaaaacggttattcactccgggtggtaga

SEQ ID NO: 865049 - DNA, 75 bp, synthetic construct
  source 1..75: mol_type = other DNA
catacgctgcagtaccgcgcatatcacggcaaaggacaacgcctggctgtactcgctgtcgcatcagacgaatga

SEQ ID NO: 865050 - DNA, 75 bp, synthetic construct
  source 1..75: mol_type = other DNA
tgattaacgtggtctgcgataacggttactcccttcgtgttgttgatgaatctgaccgggcatcagcagagcgca

SEQ ID NO: 865051 - DNA, 75 bp, synthetic construct
  source 1..75: mol_type = other DNA
gcagcgccacgacggcatccacgaaggcgacagaggctgctggcagtgcggcagcggcagcacagagcaaaagta

SEQ ID NO: 865052 - DNA, 75 bp, synthetic construct
  source 1..75: mol_type = other DNA
tctcgctgtcgcatcagacaaatgacaccggcgaatcagaatggattcattttaccggcagcggatatctgttac

SEQ ID NO: 865053 - DNA, 75 bp, synthetic construct
  source 1..75: mol_type = other DNA
atgaaactggccctgacgctggaggcagacagcgttaacgtgcaggcgttgaacatggggcgcattgtcgttgac

SEQ ID NO: 865054 - DNA, 75 bp, synthetic construct
  source 1..75: mol_type = other DNA
tgtactcactgtcgcatcagaccagtgacgttggtgaatcagaatggattcatttcacaggcagcggctatctgt

SEQ ID NO: 865055 - DNA, 75 bp, synthetic construct
  source 1..75: mol_type = other DNA
caaccctttccagcatacgctgcagtaccgcacatatcacggaaacggacaacgcctggttgtactcgctgtcac

SEQ ID NO: 865056 - DNA, 75 bp, synthetic construct
  source 1..75: mol_type = other DNA
acggcaaaagacagcgcctggctgtactcgatgtcgcatcagacgaatgacaccggcgaatcagaatggattcat

SEQ ID NO: 865057 - DNA, 75 bp, synthetic construct
  source 1..75: mol_type = other DNA
tcatacccggttctgcggcttaaacgcctggggctgtcaaaaatgttccgccgtctggttgtcacacttatccgg

SEQ ID NO: 865058 - DNA, 75 bp, synthetic construct
  source 1..75: mol_type = other DNA
actcgctgtcacaccagaccaatgatttcggtgaatcagaatggattcattttacaggtaccggttatctgttac

SEQ ID NO: 865059 - DNA, 75 bp, synthetic construct
  source 1..75: mol_type = other DNA
ctggttgtactcgctgtcacaccagaccagtgacttcggtgaatcagaatggattcattttacaggtagcggata

SEQ ID NO: 865060 - DNA, 75 bp, synthetic construct
  source 1..75: mol_type = other DNA
ctgtcacaccagaccagtgacttcggtgaatcagaatggattcattttaccggtaacggctatctgttgcgtacc

SEQ ID NO: 865061 - DNA, 75 bp, synthetic construct
  source 1..75: mol_type = other DNA
tccagaacgttccgccgtctggttgtcactctcatccgccgttatggcgtcagtctcattcatctggatgccagt

SEQ ID NO: 865062 - DNA, 75 bp, synthetic construct
  source 1..75: mol_type = other DNA
cgatgaactgcgccgcaaaaaaatcagcgcgcttattcctccccgaaaaggagcaggttactggcccggtgagta

SEQ ID NO: 865063 - DNA, 75 bp, synthetic construct
  source 1..75: mol_type = other DNA
ttcacaggtagcggatatctgttacgtaccggtgcgtggtcatacccggttctgcggtttaagcgcctgggcctg

SEQ ID NO: 865064 - DNA, 75 bp, synthetic construct
  source 1..75: mol_type = other DNA
caaccctttcccgcatacgatgcagtaccgcacatatcacggaaacggacaacgcctggttgtactcgctgtcac

SEQ ID NO: 865065 - DNA, 75 bp, synthetic construct
  source 1..75: mol_type = other DNA
aattgttcgtgatgatgacgttgggcgatgaccgttcgatctaccgcacctacgttgatggtcgtctggtgtacg

SEQ ID NO: 865066 - DNA, 75 bp, synthetic construct
  source 1..75: mol_type = other DNA
ttatcgcctccgcagtcggttcattaccattaaccacctttgcgcaaaataacggtgttattcagatgaccggcg

SEQ ID NO: 865067 - DNA, 75 bp, synthetic construct
  source 1..75: mol_type = other DNA
tcacacttatccggcgttatggtgtcagtctcattcatctggatgccagtgctgaaggtctgccgggtttcccca

SEQ ID NO: 865068 - DNA, 75 bp, synthetic construct
  source 1..75: mol_type = other DNA
cccttacccgccgcagtcggtgaatgttgagcagacaggggaacataactggcgttaccgcatcactgacgctta

SEQ ID NO: 865069 - DNA, 75 bp, synthetic construct
  source 1..75: mol_type = other DNA
tgttatcggcggagattatcattacacagcagcggggcaactggctcaacatgaagacacttctacggtgcaact

SEQ ID NO: 865070 - DNA, 75 bp, synthetic construct
  source 1..75: mol_type = other DNA
cgcctgcttaccagccggtgttgaatgccaaagttggcggttatctcaataacctgcgggcggcaaatcaggcgt

SEQ ID NO: 865071 - DNA, 75 bp, synthetic construct
  source 1..75: mol_type = other DNA
ccgacatctacaggcattaaagtggttgatttcgcagctgatcccacgcagtttcaaaacaatgcgcagttcagt

SEQ ID NO: 865072 - DNA, 75 bp, synthetic construct
  source 1..75: mol_type = other DNA
ttcgatatatgttgatgcaccggaagacttacttcagacgtggtatatcaaccgttttctgaaattccgcgaagg

SEQ ID NO: 865073 - DNA, 75 bp, synthetic construct
  source 1..75: mol_type = other DNA
atgagtacgattaatacggacttaattgcgcatatctacgctgcctccgaatcgccgttgaccaacgacgagctt

SEQ ID NO: 865074 - DNA, 75 bp, synthetic construct
  source 1..75: mol_type = other DNA
ctgcgcggcagcgtggcgtggcagaaagggagtgatgattttgcccagacggcagggtttttgtcgatgacggtg

SEQ ID NO: 865075 - DNA, 75 bp, synthetic construct
  source 1..75: mol_type = other DNA
gtgcggtgataggcagccgctcgttggtgacaaaagatgtggagccttacgctatcgttggcggcaatcccgcta

SEQ ID NO: 865076 - DNA, 75 bp, synthetic construct
  source 1..75: mol_type = other DNA
acgactcctgacgaaagaagaggcagaagcatgtccggctgaaccgttagtcgcgtcattaatgctggctggcat

SEQ ID NO: 865077 - DNA, 75 bp, synthetic construct
  source 1..75: mol_type = other DNA
ggtgagccactgttctcgtcgaaggacaaatttgattcgggctgtggctggccggcattcagcaaaccagtggaa

SEQ ID NO: 865078 - DNA, 75 bp, synthetic construct
  source 1..75: mol_type = other DNA
cacgatccccatgcgacggaaattgaagaagatggcagcactatcagtgacgatgcggtgaagcaacggggtgaa

SEQ ID NO: 865079 - DNA, 75 bp, synthetic construct
  source 1..75: mol_type = other DNA
aaagatactctgatgctggcaggtgcagtcatgataatggcagattcggcgcgggaaattcttaaacaacgctga

SEQ ID NO: 865080 - DNA, 75 bp, synthetic construct
  source 1..75: mol_type = other DNA
ctggtaacactctcatttttaatcaccactcctgaagcctgggtgcctgctctgggggatgctcatcatggtttt

SEQ ID NO: 865081 - DNA, 75 bp, synthetic construct
  source 1..75: mol_type = other DNA
gacagcactatctaccatgtagtggaaggtagcggacaagtcaccatcggcaatgaaatcttcacctttagtgca

SEQ ID NO: 865082 - DNA, 75 bp, synthetic construct
  source 1..75: mol_type = other DNA
acatgcgtaaaaaacaatacaactactatcgcgaccagttgttgagttttaataccgaagatgttccacatttac

SEQ ID NO: 865083 - DNA, 75 bp, synthetic construct
  source 1..75: mol_type = other DNA
aaacataatttgaaccctaagtatgtctcatattattttcaaacagaacaattccaaaatcaaaaaagacagtat

SEQ ID NO: 865084 - DNA, 75 bp, synthetic construct
  source 1..75: mol_type = other DNA
ttaaatagtttggaagctatgagttataaatatgtttcattgacagagttaagttctgaaataaaattcaataac

SEQ ID NO: 865085 - DNA, 75 bp, synthetic construct
  source 1..75: mol_type = other DNA
gacttacttcaaacatggtatatcaaccgcttcctgaaattccgcgaaggggcttttacagacccggattcctat

SEQ ID NO: 865086 - DNA, 75 bp, synthetic construct
  source 1..75: mol_type = other DNA
ctgaacttaaagcaaaatattctacctactcgtgagcgcgccagtttaatcctgacgaaaagtgctaatcatgcg

SEQ ID NO: 865087 - DNA, 75 bp, synthetic construct
  source 1..75: mol_type = other DNA
cgtgaaatcgagttgcgccagaaacaatacgagtactaccgtgatttactgttcagtttcccgaaacctgaaact

SEQ ID NO: 865088 - DNA, 75 bp, synthetic construct
  source 1..75: mol_type = other DNA
aaatgggttgctcgtacagataatgattcgtctaaagttccaaggaaaaaagagtggcaatattcaggtttaaat

SEQ ID NO: 865089 - DNA, 75 bp, synthetic construct
  source 1..75: mol_type = other DNA
agcaagtgaagggtgttcagattgcataagtaatgcctggagtggaatgggatacaggatgagtatacttcctgc

SEQ ID NO: 865090 - DNA, 75 bp, synthetic construct
  source 1..75: mol_type = other DNA
atgagagaatcagagcttgagggcttcattcaggtagcgccatatccacttgaggcggtgccatatcaactattc

SEQ ID NO: 865091 - DNA, 75 bp, synthetic construct
  source 1..75: mol_type = other DNA
tgcattttacatcgggctgtttatgtttatatatataatagcaatggagaattatttttacagaaaaaagcactt

SEQ ID NO: 865092 - DNA, 75 bp, synthetic construct
  source 1..75: mol_type = other DNA
tacgaaaaaaatagccaccttgaacaggtggaactgcgttacgagaaaattacctggacttacaaggacggcaac

SEQ ID NO: 865093 - DNA, 75 bp, synthetic construct
  source 1..75: mol_type = other DNA
cgctgcgcgtgccgggactggaagcgggagcgcgctaccaggtcacgctgctcgaccatccgaatattcagatta

SEQ ID NO: 865094 - DNA, 75 bp, synthetic construct
  source 1..75: mol_type = other DNA
atcctcaagcgccacggcggatgcaatatcctctgcccgttttgctgctgtctcggcgcgcgttgccgcggattc

SEQ ID NO: 865095 - DNA, 75 bp, synthetic construct
  source 1..75: mol_type = other DNA
tggcattcgtctcggacgtttttgccgccttcacggaatttcctgccgccgttgccgaggaggctgcactgctgg

SEQ ID NO: 865096 - DNA, 75 bp, synthetic construct
  source 1..75: mol_type = other DNA
tctcggcgcgcgttgccgcggattccgccgtacttttgctctgtgctgccgccgtcgcactgccagcagcctctg

SEQ ID NO: 865097 - DNA, 75 bp, synthetic construct
  source 1..75: mol_type = other DNA
gggcttattaagcgttgccgctccggcccgtgaactcaagctcgcaactattgaacttgagcatagccatcctct

SEQ ID NO: 865098 - DNA, 75 bp, synthetic construct
  source 1..75: mol_type = other DNA
gtgttaatgttatatccgcagtcagtgctttcccgttaacttttcggttagatggtaccctgccattcgcattgt

SEQ ID NO: 865099 - DNA, 75 bp, synthetic construct
  source 1..75: mol_type = other DNA
cctgtctggtcgcctcatcttttgaagcagacgcagatgatgccgatgacgccgctgaactggctgacgatgcgg

SEQ ID NO: 865100 - DNA, 75 bp, synthetic construct
  source 1..75: mol_type = other DNA
gtggcgctgcccttcgctgctgacgcctgtctggtcgcctcatcttttaaagcagacgccgatgatgccgatgac

SEQ ID NO: 865101 - DNA, 75 bp, synthetic construct
  source 1..75: mol_type = other DNA
gacgccgaactggctgacgatgcggcagccgccttagaggaagcagcattgtctgctgaagtctttgcatttgtt

SEQ ID NO: 865102 - DNA, 75 bp, synthetic construct
  source 1..75: mol_type = other DNA
gccgcactttttgaggactctgcagcggcagcactttttgatgcctcagaggcttttgctgatgccgttcctgcg

SEQ ID NO: 865103 - DNA, 75 bp, synthetic construct
  source 1..75: mol_type = other DNA
ttattgatcacccggaaattcaactggttggtgaaggtggtcataccatgcgcagattaccagcctggatgaacc

SEQ ID NO: 865104 - DNA, 75 bp, synthetic construct
  source 1..75: mol_type = other DNA
tttctgccgattttccggcagcggtggcactggctgaggcctgcccggcacttgttgacgcggcactggcagacg

SEQ ID NO: 865105 - DNA, 75 bp, synthetic construct
  source 1..75: mol_type = other DNA
cctctgtcgccttcgtggatgctgtcgtggcgctgcccttcgctgctgacgcctgtctggtcgcctcatcttttg

SEQ ID NO: 865106 - DNA, 75 bp, synthetic construct
  source 1..75: mol_type = other DNA
gccgcattcgtttctgacgttttcgcggcactggcactggtagctgccgcgctttttgaggactctgcagcggca

SEQ ID NO: 865107 - DNA, 75 bp, synthetic construct
  source 1..75: mol_type = other DNA
gtggcgctgcccttcgctgcggacgcttgtctggtcgcctcatcttttgaagcagacgccgatgatgccgatgac

SEQ ID NO: 865108 - DNA, 75 bp, synthetic construct
  source 1..75: mol_type = other DNA
tggcagacgacgcagccgctgtttttgagcctgccgcagctgaggcgctctgtcccgctgccgtttcagaagact

SEQ ID NO: 865109 - DNA, 75 bp, synthetic construct
  source 1..75: mol_type = other DNA
gtgcatctggttcagcggattctgcagccagggggacggagcctgttttgaagggcgctggcactggcagccagc

SEQ ID NO: 865110 - DNA, 75 bp, synthetic construct
  source 1..75: mol_type = other DNA
cctgtctggtcgcctcatcttttgaagcagacgcagatgatgccgatgacgccgccgaactggcggacgatgcag

SEQ ID NO: 865111 - DNA, 75 bp, synthetic construct
  source 1..75: mol_type = other DNA
gccgccgttgccgaggaagctgcgctactggcgctcgaggatgcgttcgtttctgatgattttgccgcctctttt

SEQ ID NO: 865112 - DNA, 75 bp, synthetic construct
  source 1..75: mol_type = other DNA
tctgtcgccttcgtggatgccgtcgtggcgctgcccctcgctgctgacgcctgtctggtcgcctcatcttttgaa

SEQ ID NO: 865113 - DNA, 75 bp, synthetic construct
  source 1..75: mol_type = other DNA
atgcgttcgtttctgatgattttgccgcctcttttgaagccgacgcatcccgtgctgaagtggctgcttctgacg

SEQ ID NO: 865114 - DNA, 75 bp, synthetic construct
  source 1..75: mol_type = other DNA
gccgcgctttttgaggactctgcagcggcagcactttttgatgcttcagtggcctttgttgatgccgttcctgcg

SEQ ID NO: 865115 - DNA, 75 bp, synthetic construct
  source 1..75: mol_type = other DNA
agcagacgcagatgatgccgatgacgacgccgaactggctgacgatgcggcagccgtttttgaggattctgcgct

SEQ ID NO: 865116 - DNA, 75 bp, synthetic construct
  source 1..75: mol_type = other DNA
gaggctgcactgctggcgcttgtggaggcgttcgtttctgatgattttgccgcctctttggaggccgccgcatct

SEQ ID NO: 865117 - DNA, 75 bp, synthetic construct
  source 1..75: mol_type = other DNA
tcagaggtttttgctgcagaagcagacctcgctgctgcagtggcctgctcagtggcttcgccagccttcgttgtg

SEQ ID NO: 865118 - DNA, 75 bp, synthetic construct
  source 1..75: mol_type = other DNA
gcgggcagaaggtacccgaccattcgcattgtcattagctgctttcactgctttcggtgtcgcagcaagcgtttc

SEQ ID NO: 865119 - DNA, 75 bp, synthetic construct
  source 1..75: mol_type = other DNA
agtggctgcagatttttgtgacgctgccgcattcgtttctgacgttttcgcggcactggcgctggtagctgccgc

SEQ ID NO: 865120 - DNA, 75 bp, synthetic construct
  source 1..75: mol_type = other DNA
cgaaccagagaaagcagacaacaagacgattaaagacttagagtcaaaatcggttgaagacgaagatattattcg

SEQ ID NO: 865121 - DNA, 75 bp, synthetic construct
  source 1..75: mol_type = other DNA
cgaaccagagaaagcagacaacaagacgataaaagactgagagtcaaaatcggttgaagacgaagatattattcg

SEQ ID NO: 865122 - DNA, 75 bp, synthetic construct
  source 1..75: mol_type = other DNA
cgaaccagagaaagcagacaaaaagacgatgaaagactcagagtcaaaatcggttgaagacgaagatattattcg

SEQ ID NO: 865123 - DNA, 75 bp, synthetic construct
  source 1..75: mol_type = other DNA
cgaaccagagaaagcagacaagaagacgatcaaagactaagagtcaaaatcggttgaagacgaagatattattcg

SEQ ID NO: 865124 - DNA, 75 bp, synthetic construct
  source 1..75: mol_type = other DNA
cgaaccagagaaagcagacaagaagacgataaaagactcagagtcaaaatcggttgaagacgaagatattattcg

SEQ ID NO: 865125 - DNA, 75 bp, synthetic construct
  source 1..75: mol_type = other DNA
cgaaccagagaaagcagacaacaagacgatgaaagactaagagtcaaaatcggttgaagacgaagatattattcg

SEQ ID NO: 865126 - DNA, 75 bp, synthetic construct
  source 1..75: mol_type = other DNA
tttaattcatttagtaaggattactttcgtgaacaaaatagtgatatatataaaatattttttaaaattgcttct

SEQ ID NO: 865127 - DNA, 75 bp, synthetic construct
  source 1..75: mol_type = other DNA
aaagaaaaacgagggaatagcaaacaaccaatttaacacattaaatcaattacttacacaaaagtatggcaaacc

SEQ ID NO: 865128 - DNA, 75 bp, synthetic construct
  source 1..75: mol_type = other DNA
gtcgcgctgcgcattcgtgaaattggcgctgaaaataacgtcccgacgcttgaagcgccgccgctggcgcgagcg

SEQ ID NO: 865129 - DNA, 75 bp, synthetic construct
  source 1..75: mol_type = other DNA
cgaaccagagaaagcagacaaaaagacgatcaaagactgagagtcaaaatcggttgaagacgaagatattattcg

SEQ ID NO: 865130 - DNA, 75 bp, synthetic construct
  source 1..75: mol_type = other DNA
ttcacttctttttttgtgtgcaatttatatttttggtccagttttcatccaagccattagaaccccaccaaatag

SEQ ID NO: 865131 - DNA, 75 bp, synthetic construct
  source 1..75: mol_type = other DNA
atcttgtttgtgccggatttccgtattggcaatgtttgcactaataataaagttaaagatggtcgatttattaga

SEQ ID NO: 865132 - DNA, 75 bp, synthetic construct
  source 1..75: mol_type = other DNA
acgaacctgaacgcgatgcaccacaagaagccgaatgcgaagctggatacgttcggggtctttgataacggatgg

SEQ ID NO: 865133 - DNA, 75 bp, synthetic construct
  source 1..75: mol_type = other DNA
gtttctcgatatttttaaccatcgctttattactcagtactaccgcatctggcgcaaatataactacccggcgtc

SEQ ID NO: 865134 - DNA, 75 bp, synthetic construct
  source 1..75: mol_type = other DNA
cgctggctatcgtcctgcctgcgctatggaatgaaaaacgcgacaccaagcgcgcgaaactgctgcaatacgctg

SEQ ID NO: 865135 - DNA, 75 bp, synthetic construct
  source 1..75: mol_type = other DNA
acgccgccgcgtattgacgcccgcaccatcaatttcagtgtgctggcgcaacagcatggcgataacccaatgccg

SEQ ID NO: 865136 - DNA, 75 bp, synthetic construct
  source 1..75: mol_type = other DNA
tttacctgatgattacatcatattaattggggggggggggcgcattattaaaaaaattaaggaggcagatttatg

SEQ ID NO: 865137 - DNA, 75 bp, synthetic construct
  source 1..75: mol_type = other DNA
tgtatcctccattctgggggggaattgagactgtggtgtatgatatatcaacagtattgaagcaaaaagattatg

SEQ ID NO: 865138 - DNA, 75 bp, synthetic construct
  source 1..75: mol_type = other DNA
aaacgcgaacgctgctggggcgtaccggtaccgacgtcaacagccagttgctgctgaaactgtataccgaagatg

SEQ ID NO: 865139 - DNA, 75 bp, synthetic construct
  source 1..75: mol_type = other DNA
cgccgatgacgcggtaaaagcgcacgccaacattgtgattggtgataacacgacagcattgcccaattcatttat

SEQ ID NO: 865140 - DNA, 75 bp, synthetic construct
  source 1..75: mol_type = other DNA
ctcaacacagccagctcgcccgaaatctgaactaacccgtgtgaccgcgcgcccgcaggtcgagcgtaaaacgga

SEQ ID NO: 865141 - DNA, 75 bp, synthetic construct
  source 1..75: mol_type = other DNA
tttctatcatggtagctatatgcaaggttttaaacgtaatcttgccttaatatattcagttctttacacaaaaaa

SEQ ID NO: 865142 - DNA, 75 bp, synthetic construct
  source 1..75: mol_type = other DNA
catgcaggtattcagtttaggatactaaacgccagcaaggggccagcggttcgggctacccgggcacaggcggat

SEQ ID NO: 865143 - DNA, 75 bp, synthetic construct
  source 1..75: mol_type = other DNA
ggtgatcgaaggtgtcggcccacgctactgcccgtcgatcgaagacaaagtcatgcgcttcgccgacagaaatca

SEQ ID NO: 865144 - DNA, 75 bp, synthetic construct
  source 1..75: mol_type = other DNA
attgcagcattttggtaagcatgttgaacatgaattgggactggagtgcgaatggtcctggcacgatcaggttga

SEQ ID NO: 865145 - DNA, 75 bp, synthetic construct
  source 1..75: mol_type = other DNA
gcgtcgtgcctttatcggtctgtacgaagagaagcagctctctgataaccaggatttacatgaaaaatacttcct

SEQ ID NO: 865146 - DNA, 75 bp, synthetic construct
  source 1..75: mol_type = other DNA
tacgcacactggaaaaataaaatcaggcaaaagtcatctggagcttccgaatggtgcagtaatttattttaccga

SEQ ID NO: 865147 - DNA, 75 bp, synthetic construct
  source 1..75: mol_type = other DNA
atacaaataatttcaagcctattagcgataataaatctcaatcattgcgaatacactgtgtaagtgtacgattaa

SEQ ID NO: 865148 - DNA, 75 bp, synthetic construct
  source 1..75: mol_type = other DNA
taacagaaatgcatgtaatcaaacggcaggtgcagacacttcgcactcttctacttccctcaactttttggagta

SEQ ID NO: 865149 - DNA, 75 bp, synthetic construct
  source 1..75: mol_type = other DNA
gagacagactggcagcgattcatccgtatgtacgctcaggaaataggtccaacgccaacggcagagcaggcaatg

SEQ ID NO: 865150 - DNA, 75 bp, synthetic construct
  source 1..75: mol_type = other DNA
cctttatagatcaggccgcaacctggacacaccttgggaaaataaaatcaggtaaagcgcatctggaactaccta

SEQ ID NO: 865151 - DNA, 75 bp, synthetic construct
  source 1..75: mol_type = other DNA
tgaaaaaagaattatcagaagaggactggaaaatgctgtttatgtgcgaatggcctctcgctagcaaggaactgg

SEQ ID NO: 865152 - DNA, 75 bp, synthetic construct
  source 1..75: mol_type = other DNA
ctactatgatgcacatcagcaaaactacaattgaaaaaaggttagtccccatcccctgcccggataatccggaaa

SEQ ID NO: 865153 - DNA, 75 bp, synthetic construct
  source 1..75: mol_type = other DNA
aattgctggatggggttgaagttgagtggttgccattggctaaagtttgtcggttaataaacgggagagcatata

SEQ ID NO: 865154 - DNA, 75 bp, synthetic construct
  source 1..75: mol_type = other DNA
atgacgttatcggaagatgagatcgcccgtctcaaaggtattaatgaagatctctcgttagaagaagttgccgag

SEQ ID NO: 865155 - DNA, 75 bp, synthetic construct
  source 1..75: mol_type = other DNA
atggcatccctcaacaaactcccaccggtattacctgaaatcaatcgtgaagcatggattaaactcggcaacctt

SEQ ID NO: 865156 - DNA, 75 bp, synthetic construct
  source 1..75: mol_type = other DNA
aattgctggatggggttgaggttgagtggttgccattgggggaaataaccaaatatgaacagccaacaaaatatt

SEQ ID NO: 865157 - DNA, 75 bp, synthetic construct
  source 1..75: mol_type = other DNA
ctgaagatggtgcgaatcttattgcaagaaatacccctatagcttttagcattagcggtaaaacgtgggtgaata

SEQ ID NO: 865158 - DNA, 75 bp, synthetic construct
  source 1..75: mol_type = other DNA
cgtgcagtggcgtatcgatatgccagatgccacgacgctggcgcacggcgtggtaagcgaagatcggagccaggc

SEQ ID NO: 865159 - DNA, 75 bp, synthetic construct
  source 1..75: mol_type = other DNA
tgattgatctcgccacccgcagccgtcgccgtctgatgattcgcctggtgaaaggcgcgtactgggatagtgaaa

SEQ ID NO: 865160 - DNA, 75 bp, synthetic construct
  source 1..75: mol_type = other DNA
cgaaacggtataatggttcaggtgatcttaagaacggggctccatctcaatttcttttgaaacctgggttagatg

SEQ ID NO: 865161 - DNA, 75 bp, synthetic construct
  source 1..75: mol_type = other DNA
cgtagcaaaggccgtccggtgttccaggcggtacggaaaaacaacgaagatgcccgtgaatggcaaagcggcacc

SEQ ID NO: 865162 - DNA, 75 bp, synthetic construct
  source 1..75: mol_type = other DNA
ttatgcgctggcggcgcagggtgtggcggtgctgtttgcctccagcgacttacctgaagtcctcggcgttgccga

SEQ ID NO: 865163 - DNA, 75 bp, synthetic construct
  source 1..75: mol_type = other DNA
ggcagggcgtagcgaattaatgaaaggcatgtttggcgggacgcaaatcaccgccggtcaggtttatatcgacca

SEQ ID NO: 865164 - DNA, 75 bp, synthetic construct
  source 1..75: mol_type = other DNA
cgcgtaacgccaaaattatcgcctttgatgagccaaccagttccctgtcggcgcgtgaaatcgacaacctttttc

SEQ ID NO: 865165 - DNA, 75 bp, synthetic construct
  source 1..75: mol_type = other DNA
cgccccgcagctcgttccaggtgctgcgcgatgtaacgtttggcctgcttatacgtgaactgaaaacacgatttg

SEQ ID NO: 865166 - DNA, 75 bp, synthetic construct
  source 1..75: mol_type = other DNA
agttaccggctggggtatgcctgggcgctgttggatccgttgttgatgattggtctgtttagcgcgatttttggg

SEQ ID NO: 865167 - DNA, 75 bp, synthetic construct
  source 1..75: mol_type = other DNA
aaagcccggataaacctgcgcaacagttattgctgctttttcacggcgtcggtgataacccagtagcgatggggg

SEQ ID NO: 865168 - DNA, 75 bp, synthetic construct
  source 1..75: mol_type = other DNA
ttaacttcactctatctgttttagaaaaaacagaagcaagcaaattgataaaagagtatgaaaaacaagaatata

SEQ ID NO: 865169 - DNA, 75 bp, synthetic construct
  source 1..75: mol_type = other DNA
ttacaacccgctgactggcgcacagcaaggcgcaccaaatttctcctggagtgccgcgcatttgtatatgttgta

SEQ ID NO: 865170 - DNA, 75 bp, synthetic construct
  source 1..75: mol_type = other DNA
atgcgtacattcctttatgctcgtgtatcacttgatgacctcactacacaaaaccagatagaggccgttaaacgt

SEQ ID NO: 865171 - DNA, 75 bp, synthetic construct
  source 1..75: mol_type = other DNA
gaaggctactacagcgtcttcggtaagagcggggctcgtatcgagatcccgggctgttctctgtgtatgggtaac

SEQ ID NO: 865172 - DNA, 75 bp, synthetic construct
  source 1..75: mol_type = other DNA
ataaaacagccgttgatacttaccgttatctgaacttcaaccagctttctcagtacaccgagaaagcggacggcg

SEQ ID NO: 865173 - DNA, 75 bp, synthetic construct
  source 1..75: mol_type = other DNA
cttcccgaaccgtctgggtactggcgcgaatgtcttcctggcttctgcggaactggctgctgttgcggcgctgat

SEQ ID NO: 865174 - DNA, 75 bp, synthetic construct
  source 1..75: mol_type = other DNA
tggatgcagataaaaagcagatacagtgtgtggtaagaccgctgcaaattctgcgtgctgacgggacgtgggaaa

SEQ ID NO: 865175 - DNA, 75 bp, synthetic construct
  source 1..75: mol_type = other DNA
agcgtctgtgtggttgcggaaagcatgatgaccgtgaaaacggggagttacttacagcacagctgcggctgggac

SEQ ID NO: 865176 - DNA, 75 bp, synthetic construct
  source 1..75: mol_type = other DNA
ataaaactgccgttgatacttaccgttatctgaacttcaaccagctttctcagtacaccgaaaaagccgatgggg

SEQ ID NO: 865177 - DNA, 75 bp, synthetic construct
  source 1..75: mol_type = other DNA
ccagttgacgtgaacacgcaccacacgctgcctgacttcattatgaaccgtggcggtgtgtcgctgcgtccgggt

SEQ ID NO: 865178 - DNA, 75 bp, synthetic construct
  source 1..75: mol_type = other DNA
tcacgatatggtggaaacttttaatgtaacgtcaaaaccagaaacagatagaatttacatgtggctgcttcttct

SEQ ID NO: 865179 - DNA, 75 bp, synthetic construct
  source 1..75: mol_type = other DNA
cctgctctttggccttccggcgctggcggcgtttgatctcaccttcaagcgccgaaacgataaattgcccagtgc

SEQ ID NO: 865180 - DNA, 75 bp, synthetic construct
  source 1..75: mol_type = other DNA
cttgcatgaccaacatcggtcacttccgtgccgccggtaaactgctggatgcgcataaaggtcagctgccgaccc

SEQ ID NO: 865181 - DNA, 75 bp, synthetic construct
  source 1..75: mol_type = other DNA
gagcgttctgccgctggttgtactatcaagctgaacaaagaaccgatcatcgaataccttaactctaacatcgtc

SEQ ID NO: 865182 - DNA, 75 bp, synthetic construct
  source 1..75: mol_type = other DNA
ataaaactgccgttgatacttatcgttatctgaacttcaacgctttctccgtacaggatagcgtagacctcggtg

SEQ ID NO: 865183 - DNA, 75 bp, synthetic construct
  source 1..75: mol_type = other DNA
ggcaatatccgttaacgatgaaagtttcagaaataaacagtaaaaaagtcgcgattttgatgaaaattgacgata

SEQ ID NO: 865184 - DNA, 75 bp, synthetic construct
  source 1..75: mol_type = other DNA
ggaaaacggggtctggctgacaacaacggttgctgttgagtttcttgagtggccgttcatgccggcagggaaaca

SEQ ID NO: 865185 - DNA, 75 bp, synthetic construct
  source 1..75: mol_type = other DNA
ggcattcgacttcgcaggtcgccattggcttcatcgaaaaacaccgccacaatttctctaccatggtacggcaag

SEQ ID NO: 865186 - DNA, 75 bp, synthetic construct
  source 1..75: mol_type = other DNA
ttacgccagcaagctcggcggattgcttttcatcgccagttactgcgcctgcccgtgctggggcggatttcgcgc

SEQ ID NO: 865187 - DNA, 75 bp, synthetic construct
  source 1..75: mol_type = other DNA
gcctgcctgtgacggggcgggttgcgtgcgggctgaatacggcgcgtttttcccgcaccttaagcatcctcaccg

SEQ ID NO: 865188 - DNA, 75 bp, synthetic construct
  source 1..75: mol_type = other DNA
cggtgaacagagcggtgagctggaaaccatgcttgagcaggccgcagtcaatcaggaacgggagtttgatactca

SEQ ID NO: 865189 - DNA, 75 bp, synthetic construct
  source 1..75: mol_type = other DNA
agacacttttacgcctgccggtgacagggcgggttgcaaaggggctttacactgctcgtttctctcgtacgttga

SEQ ID NO: 865190 - DNA, 75 bp, synthetic construct
  source 1..75: mol_type = other DNA
aggaagtgaaagcgcttgataagcaaatggtggcggcgcagaaagcagcggatgcatattggggaaaagatgcaa

SEQ ID NO: 865191 - DNA, 75 bp, synthetic construct
  source 1..75: mol_type = other DNA
cggcgctgcttatgttgatgactggtaatgtccgggcagatggtgaaccgccaactgaaaatatcttaaaagatc

SEQ ID NO: 865192 - DNA, 75 bp, synthetic construct
  source 1..75: mol_type = other DNA
ttaaaaccaatgacaaatacctgattgtgaatagcgaagatttcaattatcgctttagtcagcttgagtcagagt

SEQ ID NO: 865193 - DNA, 75 bp, synthetic construct
  source 1..75: mol_type = other DNA
tattggggaaaagatgcaaacggtaagcaaatgacccgcgaagacgcctttaaaaaaattcaccaacagcgtgat

SEQ ID NO: 865194 - DNA, 75 bp, synthetic construct
  source 1..75: mol_type = other DNA
tgaaaattgacgatatcaaccaggctaatgaacgctggaaaaaagataccgaacaattgcggcgcaatggggtga

SEQ ID NO: 865195 - DNA, 75 bp, synthetic construct
  source 1..75: mol_type = other DNA
aacagtaaaaaagtcgcgattttgatgaaaattgacgatatcaaccaggctaatgaacgctggaaaaagataccg

SEQ ID NO: 865196 - DNA, 75 bp, synthetic construct
  source 1..75: mol_type = other DNA
tactacagcacgccagaaatgcagaatattttgctgcaaaatgtcgttgatcacactgtccgaaaagcaaaaaat

SEQ ID NO: 865197 - DNA, 75 bp, synthetic construct
  source 1..75: mol_type = other DNA
aacgaagctgtcagtcgtgagcgtcagacgggaatgcagatggtgcaatctgtgcttgagcgcatcggggaggtg

SEQ ID NO: 865198 - DNA, 75 bp, synthetic construct
  source 1..75: mol_type = other DNA
gcttccggcgctgaatgcgcgacttagtgaagccgtcagtcgtgagcgtcagacaggaatgcagatggtacagtc

SEQ ID NO: 865199 - DNA, 75 bp, synthetic construct
  source 1..75: mol_type = other DNA
cactgcgacgcgctgatcctgcgcgaatcggtcagccttgatttgatgaaacgcagcaatatcactaccgcaaaa

SEQ ID NO: 865200 - DNA, 75 bp, synthetic construct
  source 1..75: mol_type = other DNA
gccatcaactacgaacataaatccgccgggattatgcagcagctggggctgccagagatggcgattgatatccgt

SEQ ID NO: 865201 - DNA, 75 bp, synthetic construct
  source 1..75: mol_type = other DNA
acgcagcaatatcactaccgcaaaagtggaacatggcgtcgataccgcgtggctggtcgatcaccacacagaaga

SEQ ID NO: 865202 - DNA, 75 bp, synthetic construct
  source 1..75: mol_type = other DNA
gctgtcagtcgtgagcgtcatacaggaatgcagatggtgcaatctgtgcttgaacgcatcggggaggtgaaatga

SEQ ID NO: 865203 - DNA, 75 bp, synthetic construct
  source 1..75: mol_type = other DNA
gtgaagaaagtgttgcgtcgccgctaccagcatcaggtactgctttctcgcgtaaccgacaccggcaagctgcgc

SEQ ID NO: 865204 - DNA, 75 bp, synthetic construct
  source 1..75: mol_type = other DNA
aacgaggcggtggcgcgggagcgcgcggcggggctgtcgatggtggaatcggtcttaacgcgaatcgtggagggg

SEQ ID NO: 865205 - DNA, 75 bp, synthetic construct
  source 1..75: mol_type = other DNA
aagtaacagacctgatagaatcaaacatttcaaagaaatggacgttaagaaacttagctgaagaatttaacttat

SEQ ID NO: 865206 - DNA, 75 bp, synthetic construct
  source 1..75: mol_type = other DNA
gccattaactacgaacacaaatcggcgggcatcatgcagcaactgggaatgccggaactggctattgatacccgc

SEQ ID NO: 865207 - DNA, 75 bp, synthetic construct
  source 1..75: mol_type = other DNA
cccgatcagttcctcctggctgcaagggcgtgaaattattgctgacccgctgtaccaactgagccagaaacagca

SEQ ID NO: 865208 - DNA, 75 bp, synthetic construct
  source 1..75: mol_type = other DNA
caatggtgggcgacacccttgggcaactgcccgccgtgaatgagcgcctggccgtggtggtgaaagccgagcgcg

SEQ ID NO: 865209 - DNA, 75 bp, synthetic construct
  source 1..75: mol_type = other DNA
aacgaagccgtcagtcgcgaacgtcaggcaggaatgcagatggtgcaatctgtgcttgaacgcatcggggaggtg

SEQ ID NO: 865210 - DNA, 75 bp, synthetic construct
  source 1..75: mol_type = other DNA
gtcaccaatccggatgtaccacacgcagggcgtcgcgccctgctgtttggccgcaggagtggcgaaaatgcatga

SEQ ID NO: 865211 - DNA, 75 bp, synthetic construct
  source 1..75: mol_type = other DNA
ttactcctgttctttggccttgcggcgctggcggtattcaacttctcgctttaatgctgctgttacaaactgccc

SEQ ID NO: 865212 - DNA, 75 bp, synthetic construct
  source 1..75: mol_type = other DNA
acagagtgaaggcgctgatcaccgtttctacagcacgccggaaatgcagaatattttgctgcaaaatgccgttgg

SEQ ID NO: 865213 - DNA, 75 bp, synthetic construct
  source 1..75: mol_type = other DNA
aactgccctgtactttcgccttcttctttcacgttttccatgccttcaataatttcatgggcaatacgtgcagtt

SEQ ID NO: 865214 - DNA, 75 bp, synthetic construct
  source 1..75: mol_type = other DNA
caccagagaacaggaagcccgtcagcaatccccggctggctgcgtgatggtatttactgcccgcatccgtcagga

SEQ ID NO: 865215 - DNA, 75 bp, synthetic construct
  source 1..75: mol_type = other DNA
ccacacatcggcttaacgccgacggttgaagcaatgattgaacctgcgcttgagcaggttctggctgcgctgcgt

SEQ ID NO: 865216 - DNA, 75 bp, synthetic construct
  source 1..75: mol_type = other DNA
gcattagattcaaagaatatctatctttgtgaaaatgattttgactctttgataattgatctcaaaagtgagagc

SEQ ID NO: 865217 - DNA, 75 bp, synthetic construct
  source 1..75: mol_type = other DNA
tatagaatttgcaacatcgttagcctataagcacaggttaaagctaccaaatggtattgaggcatattttgctaa

SEQ ID NO: 865218 - DNA, 75 bp, synthetic construct
  source 1..75: mol_type = other DNA
gcagcacagcatcgcttttcgtgggctgacggcattgttcggccatatggggctggagctggatccggtggccgc

SEQ ID NO: 865219 - DNA, 75 bp, synthetic construct
  source 1..75: mol_type = other DNA
tgctcgcaacacatgcagggcgtctaaccaccaacgatagaaagcgtatcgaggtagctatgttaaatcatacca

SEQ ID NO: 865220 - DNA, 75 bp, synthetic construct
  source 1..75: mol_type = other DNA
cgtaccgcacaacatggtaatattgtcctagcattacccaaaggaacctctattcctgtcattcgaaaactggaa

SEQ ID NO: 865221 - DNA, 75 bp, synthetic construct
  source 1..75: mol_type = other DNA
gtgttcagctcgctggtgaaacttctgtcaatacatttgcagtagttctagagagcgatagtatgtctgccgcag

SEQ ID NO: 865222 - DNA, 75 bp, synthetic construct
  source 1..75: mol_type = other DNA
gcgtcggtaaaactgccatcgttgaaggtctggcgcagcgtattatcaacggagaagtgcccgaagggttgaaag

SEQ ID NO: 865223 - DNA, 75 bp, synthetic construct
  source 1..75: mol_type = other DNA
ctgaaagcagcaggagcgaccaccgccaacattactcaggctattgaacaaatgcgtggaggtgaaagcgtgaac

SEQ ID NO: 865224 - DNA, 75 bp, synthetic construct
  source 1..75: mol_type = other DNA
cgaatatcgccagtacatcgaaaaagatgctgcgctggaacgtcgtttccagaaagtgtttgttgccgagccttc

SEQ ID NO: 865225 - DNA, 75 bp, synthetic construct
  source 1..75: mol_type = other DNA
ctgcaatacggtaaaattccggagctcgaaaaacaactggaagcggctacgcagctcgaaggcaaaaccatgcgt

SEQ ID NO: 865226 - DNA, 75 bp, synthetic construct
  source 1..75: mol_type = other DNA
tggaaaagcaactggaagccgcaacgcagctcgaaggcaaaactatgcgtctgttgcgtaataaagtgaccgatg

SEQ ID NO: 865227 - DNA, 75 bp, synthetic construct
  source 1..75: mol_type = other DNA
caacaggcgttaatgaaagagtctgatgaagccagtaaaaaacgtctggatatgctcaacgaagaactgagcgac

SEQ ID NO: 865228 - DNA, 75 bp, synthetic construct
  source 1..75: mol_type = other DNA
atgaatatactaaaaaaacttatgcagtgtctgtgtggttgcggaaagcatgatgaccgtgaacacggggagtta

SEQ ID NO: 865229 - DNA, 75 bp, synthetic construct
  source 1..75: mol_type = other DNA
atgagaatggcattatcccggagcaggccagggtaatcacgcaggtggtgatactggatgcggataaaaagcaga

SEQ ID NO: 865230 - DNA, 75 bp, synthetic construct
  source 1..75: mol_type = other DNA
gaatggtattattccggagcaggccagggtaatcacgcaggtggtgatactggatgcagataaaaagcagataca

SEQ ID NO: 865231 - DNA, 75 bp, synthetic construct
  source 1..75: mol_type = other DNA
aacccggtactgattggtgaaccaggcgtcggtaaaactgccatcgttgaaggtctggcgcagcgtattatcaac

SEQ ID NO: 865232 - DNA, 75 bp, synthetic construct
  source 1..75: mol_type = other DNA
gccaccatgcggtgtcaattcccgagctgctcgtcagccgggatgaaaggcaagcacggcaacacgcctggctca

SEQ ID NO: 865233 - DNA, 75 bp, synthetic construct
  source 1..75: mol_type = other DNA
aacagttagaaaaattaaatccaccgcaagatttacgttctgcaatagaaaaaattgggtggaagaatagaccta

SEQ ID NO: 865234 - DNA, 75 bp, synthetic construct
  source 1..75: mol_type = other DNA
aatggacgccgggaacatgctgaaaccggcgcttgcgcgtggtgagctgcactgcgtgggtgccacgacgcttga

SEQ ID NO: 865235 - DNA, 75 bp, synthetic construct
  source 1..75: mol_type = other DNA
caaaaagttcgactgcagaactttgccaactgaccgaaacactctctctccaccctatttcactttcccttctcg

SEQ ID NO: 865236 - DNA, 75 bp, synthetic construct
  source 1..75: mol_type = other DNA
atgcactttcgagtcacaggtgaatggaatggagagccattcgacagagttatcgaagcagaggacatcaatgac

SEQ ID NO: 865237 - DNA, 75 bp, synthetic construct
  source 1..75: mol_type = other DNA
gcctgcctgtgacggggcgtgttgcgcgcgggctgaatacggcgcgtttttcccgcacattaagcatcctcaccg

SEQ ID NO: 865238 - DNA, 75 bp, synthetic construct
  source 1..75: mol_type = other DNA
ccgcaccggcactggtggccgccgcgctttttgaggactctgcagcggcagcactttttgatgcttcagtggcct

SEQ ID NO: 865239 - DNA, 75 bp, synthetic construct
  source 1..75: mol_type = other DNA
cagattattaatctgctggtatggagcgggctgtgtggctggataaatcgcttaaaaatcgcgttgggtgagaca

SEQ ID NO: 865240 - DNA, 75 bp, synthetic construct
  source 1..75: mol_type = other DNA
gccaactgaccgaaacactctctctccaccctatttcactttcccttctcgaaaagttgttaaacagcacacggg

SEQ ID NO: 865241 - DNA, 75 bp, synthetic construct
  source 1..75: mol_type = other DNA
cgaaggcaaaactatgcgtctgttgcgtaataaagtgaccgatgccgaaattgctgaagtgctggcgcgttggac

SEQ ID NO: 865242 - DNA, 75 bp, synthetic construct
  source 1..75: mol_type = other DNA
cgtctggaagaacgtggttatgaaatccacatttctgacgaggcgctgaaactgctgagcgagaacggttacgat

SEQ ID NO: 865243 - DNA, 75 bp, synthetic construct
  source 1..75: mol_type = other DNA
ttggcgcgggtaaagcggacggcgcaatggatgccgggaacatgctgaaaccggcgttggctcgtggtgagctgc

SEQ ID NO: 865244 - DNA, 75 bp, synthetic construct
  source 1..75: mol_type = other DNA
catgagcgacgcgttacaggccagcggcgtttactggctggcgggtttgctggggcttctggtgctggggcaacg

SEQ ID NO: 865245 - DNA, 75 bp, synthetic construct
  source 1..75: mol_type = other DNA
tcaggagcaggctgcactggtttccgccagcgggccggagggcatgttgagcattgccgccccggctcgcgacct

SEQ ID NO: 865246 - DNA, 75 bp, synthetic construct
  source 1..75: mol_type = other DNA
aacgttttgacaggcgttggaatactgagcgaacggttttacttcgcttgccacaggaggatatgtgtcagacat

SEQ ID NO: 865247 - DNA, 75 bp, synthetic construct
  source 1..75: mol_type = other DNA
accaggaacgggaatttgatacccaggtggggctggcgttagggctgtttgagccggcgctggtggtgatgatgg

SEQ ID NO: 865248 - DNA, 75 bp, synthetic construct
  source 1..75: mol_type = other DNA
ctttttcaaaagcagatttttcagcgaaagctcagaacagcgttattggttctcaaaatgcaggaaatattacct

SEQ ID NO: 865249 - DNA, 75 bp, synthetic construct
  source 1..75: mol_type = other DNA
gcggaggcgttgtgccgttgggtgtctgcggagcgggggattatttcaccgctgaagttcattaccattgctgaa

SEQ ID NO: 865250 - DNA, 75 bp, synthetic construct
  source 1..75: mol_type = other DNA
gcgatctcaaactggcaatggggcttaacgcatccaaaggcaaaaaaacggcaatcgataaaatttatccgcgac

SEQ ID NO: 865251 - DNA, 75 bp, synthetic construct
  source 1..75: mol_type = other DNA
ggcgtttactggctggcgggtttgctggggcttctggtgctggggcaacggctacttaaaaatcctgctatgcgc

SEQ ID NO: 865252 - DNA, 75 bp, synthetic construct
  source 1..75: mol_type = other DNA
tgaagcccggatgaatacttcgtcaggggggatgttgcagcgtcggcggcacgcacatcgtcgcgtggcggcggc

SEQ ID NO: 865253 - DNA, 75 bp, synthetic construct
  source 1..75: mol_type = other DNA
cgaacacgaaaaatcatcaacgcagattctgctggtatggagcgggctgtgtggctggataaatcgcttaaaaat

SEQ ID NO: 865254 - DNA, 75 bp, synthetic construct
  source 1..75: mol_type = other DNA
gacgcgtcactgtttgctgatgaatcaatacgctggcgaagcagctatgaggtggaaaaactccctgaagagcac

SEQ ID NO: 865255 - DNA, 75 bp, synthetic construct
  source 1..75: mol_type = other DNA
agtggtgccgaaaatcatcgaacagttcgatcacctcggacacgcgctacccgcctccacccgcgcgcttatcgc

SEQ ID NO: 865256 - DNA, 75 bp, synthetic construct
  source 1..75: mol_type = other DNA
gtctgttgacctttgtcaccggcgctgtggaagtcgtactggtggcaaattcggtgattgatatctcggtcggtt

SEQ ID NO: 865257 - DNA, 75 bp, synthetic construct
  source 1..75: mol_type = other DNA
tcggctgaaattccggacagccgtacgcgtaaccgttccggtcacagacggatggccagatgccattgcctgtac

SEQ ID NO: 865258 - DNA, 75 bp, synthetic construct
  source 1..75: mol_type = other DNA
atgaccagccgttttatgctgattttcgccgccattagcggcttcatttttgtggctctgggcgcttttggcgcg

SEQ ID NO: 865259 - DNA, 75 bp, synthetic construct
  source 1..75: mol_type = other DNA
tttcaggcgccagcaaaggtgctgaaattaccggaagtgcatattcatgaaatcgttagtcactctgcgagaatg

SEQ ID NO: 865260 - DNA, 75 bp, synthetic construct
  source 1..75: mol_type = other DNA
aaaacttatgcagcgtctgtgtggttgcggaaagcatgatggccgtgaacacgtgcagtcgcttacagcacaact

SEQ ID NO: 865261 - DNA, 75 bp, synthetic construct
  source 1..75: mol_type = other DNA
atactggatgcggataaaaagcagatacagtgtgtggtaagaccgctgcaaatcctgcgtgctgacgggacgtgg

SEQ ID NO: 865262 - DNA, 75 bp, synthetic construct
  source 1..75: mol_type = other DNA
agcgtctgtgcggttgcggaaagcatgatggccgtgaacacgggcagtcgcttacagcacaactgcgactggggc

SEQ ID NO: 865263 - DNA, 75 bp, synthetic construct
  source 1..75: mol_type = other DNA
gaagaagtattaacggcttataaagcagatatccctctgggcatgattagagaagaaaatgactttcgcatctcg

SEQ ID NO: 865264 - DNA, 75 bp, synthetic construct
  source 1..75: mol_type = other DNA
cgggtaaatacaccagcgtttccgcctttgcgccaattgtgaatccgtgcagcgtcccgtggggaatcaaagcgt

SEQ ID NO: 865265 - DNA, 75 bp, synthetic construct
  source 1..75: mol_type = other DNA
aaatgcatggctggaatgggacagttgcgcgttgatgtatgccagtaacgcgcaggatgcgatcccgacgcttat

SEQ ID NO: 865266 - DNA, 75 bp, synthetic construct
  source 1..75: mol_type = other DNA
tggatgaagtgggcagtgatacaggcagaacaggagaatgacatgaatatactaaaaaaacttatgcagcgtctg

SEQ ID NO: 865267 - DNA, 75 bp, synthetic construct
  source 1..75: mol_type = other DNA
tttcaggcgccagcaaaggtgctgaaattaccggaagtgcagattcatgatatcgttagtcactatgcgagaatg

SEQ ID NO: 865268 - DNA, 75 bp, synthetic construct
  source 1..75: mol_type = other DNA
tttcaggcgccagcaaaggtgctgaaattaccggaagtgcacattcatgacatcgttagtcactttgcgagaatg

SEQ ID NO: 865269 - DNA, 75 bp, synthetic construct
  source 1..75: mol_type = other DNA
aaaaatgatggacattatttttgtagagccggaggaaacagaccagacggtttaaatgagccggttacgaatgac

SEQ ID NO: 865270 - DNA, 75 bp, synthetic construct
  source 1..75: mol_type = other DNA
tgatgaccgtgaacacggggagttacttacagcacaactgcgactggggccggcagacatcctggagtccgatga

SEQ ID NO: 865271 - DNA, 75 bp, synthetic construct
  source 1..75: mol_type = other DNA
atgaacatactaaaaaaacttatagcagcgtctgtgcggtacggaaagcatgatgaccgtgaacacggggagtta

SEQ ID NO: 865272 - DNA, 75 bp, synthetic construct
  source 1..75: mol_type = other DNA
gcgatttccgcaacattgaaaccgcggatctcgctttatctcccggctttaactttctggtaggtgccaacggca

SEQ ID NO: 865273 - DNA, 75 bp, synthetic construct
  source 1..75: mol_type = other DNA
ttgaagatatcaatattgacgagtcagtgacggtttatgccagcgccagcaccgggacaattacgttaacggcaa

SEQ ID NO: 865274 - DNA, 75 bp, synthetic construct
  source 1..75: mol_type = other DNA
ggcatctgggcgactacgcccggcggtaaatggtacgaatatccacagcgtgaattcgagttctacgatgatcct

SEQ ID NO: 865275 - DNA, 75 bp, synthetic construct
  source 1..75: mol_type = other DNA
ggcggcggtgtctctacctgatagatgattttgcctctgagcttgatgatgagcgtcgcgggctgcttgccagcc

SEQ ID NO: 865276 - DNA, 75 bp, synthetic construct
  source 1..75: mol_type = other DNA
tggagcaatctcaagcgattgctcaagcagcgcaatgcggcgctgcgccaggtgacacgttacgaacagctacgt

SEQ ID NO: 865277 - DNA, 75 bp, synthetic construct
  source 1..75: mol_type = other DNA
ggtgactcgttatgaacagctacgcccgtgggacaaagaactgatcccgctggcagaacaaatcagtacctggcg

SEQ ID NO: 865278 - DNA, 75 bp, synthetic construct
  source 1..75: mol_type = other DNA
gattccattccgttatccatgcagcgacagttcccggatttaacgccacgtcatattgaccatctgaaaaccctt

SEQ ID NO: 865279 - DNA, 75 bp, synthetic construct
  source 1..75: mol_type = other DNA
tggtccggcggcgtttatcgaaaccaacattgtggggacttacacactgcttgaagcggcgcgggcttactggaa

SEQ ID NO: 865280 - DNA, 75 bp, synthetic construct
  source 1..75: mol_type = other DNA
agctgacctacgccggaaacctgatgtcgctggcaccggtcgcgcaaagcgagcgctttgcctttgagaaagttg

SEQ ID NO: 865281 - DNA, 75 bp, synthetic construct
  source 1..75: mol_type = other DNA
agccgtttatttaccagcgatgaagatgctttctttgttgattctggccttagctatgatggaagaaatacgtct

SEQ ID NO: 865282 - DNA, 75 bp, synthetic construct
  source 1..75: mol_type = other DNA
ctgcgcagattgacagccggacggtggaaggtactaacaaacagcagttgcagaaatgggttgatgactacgggg

SEQ ID NO: 865283 - DNA, 75 bp, synthetic construct
  source 1..75: mol_type = other DNA
aagtgatatggcctcctccattggtatctctgttcaggcatttgataaatggggcgttcctcctgttgagcgtcg

SEQ ID NO: 865284 - DNA, 75 bp, synthetic construct
  source 1..75: mol_type = other DNA
tgtatttttgccctcagtaagctggcaatggcgttatcaagtacgcttgattccatccctttatccatgcagcga

SEQ ID NO: 865285 - DNA, 75 bp, synthetic construct
  source 1..75: mol_type = other DNA
atagttcgtatcctgttttgagtaagtcagatattagcgggaataagatttacgctaatgatgaagttattgtcc

SEQ ID NO: 865286 - DNA, 75 bp, synthetic construct
  source 1..75: mol_type = other DNA
tgggatgtcgatagtctggaaagtgccattcgccttgggctaaacaaggtgtgtgaagaagggatccgtatcgat

SEQ ID NO: 865287 - DNA, 75 bp, synthetic construct
  source 1..75: mol_type = other DNA
acgccatcagagcagttttatccgcctggcgcaccaatcccgtggccatcagataccgttccgtctggctatgcc

SEQ ID NO: 865288 - DNA, 75 bp, synthetic construct
  source 1..75: mol_type = other DNA
tggagaaaatttccacgcgtaatcaggctgtggtttatcagggattacaggcctacagccgcgaccagcaaccgg

SEQ ID NO: 865289 - DNA, 75 bp, synthetic construct
  source 1..75: mol_type = other DNA
gtaaaagttgccgagccgggtcttggattcaaaattccctttatggaaagtgtcgagaaaatctccacacgtaac

SEQ ID NO: 865290 - DNA, 75 bp, synthetic construct
  source 1..75: mol_type = other DNA
cattccgcccacaaaaatcgcttgccatcgccattggcgtgcttgccgttattgtgctgccatttctgtcgtatt

SEQ ID NO: 865291 - DNA, 75 bp, synthetic construct
  source 1..75: mol_type = other DNA
accaggtgtaggtgaaaatgaagctaaagatatagaatatgaagagttgtataaaaatcttctcccagaattaga

SEQ ID NO: 865292 - DNA, 75 bp, synthetic construct
  source 1..75: mol_type = other DNA
ctccgggcgtttcagggaatgcttccgcaaatataaacaccgctgggttacgaagcagatcgacagccgtaccgt

SEQ ID NO: 865293 - DNA, 75 bp, synthetic construct
  source 1..75: mol_type = other DNA
cgacaacacaatcagagaacacctgatgacgggggagaactggaggaaaggctgcttcgggccagagctgaactg

SEQ ID NO: 865294 - DNA, 75 bp, synthetic construct
  source 1..75: mol_type = other DNA
ttcaaattagcaacggtaaccatgccacaggcgagttctgttgtttcaattacgttgattggtggcgctggattt

SEQ ID NO: 865295 - DNA, 75 bp, synthetic construct
  source 1..75: mol_type = other DNA
catagagatggccgtcgatttaaccccagtgtttttaaagatacttatcaatatggttatacaagctcaggtcaa

SEQ ID NO: 865296 - DNA, 75 bp, synthetic construct
  source 1..75: mol_type = other DNA
atgaaatggtctccagagcaaatatcaggatggttaaggcgaacaaaaccacgtcaaaaaacgctgcgaatatca

SEQ ID NO: 865297 - DNA, 75 bp, synthetic construct
  source 1..75: mol_type = other DNA
cattgccctgaccggcaccgaaggcggcaggaagagaatggcgtccctggaatccacctatgtgacgttgtcacg

SEQ ID NO: 865298 - DNA, 75 bp, synthetic construct
  source 1..75: mol_type = other DNA
cctgttcctgactgatgaaagctcgatggtgggtaaccgcgatatggctgagctttatcagctggttgctgcagg

SEQ ID NO: 865299 - DNA, 75 bp, synthetic construct
  source 1..75: mol_type = other DNA
agaataccgaccgctttatggccattcagggctacgccggggtggggaaaacaacccagttccgggcggtgatgg

SEQ ID NO: 865300 - DNA, 75 bp, synthetic construct
  source 1..75: mol_type = other DNA
agccggggcactgctgactgaaattcgtatcgaggatgacggaatgcgcgtggtgctcagcgaagagtcccggtt

SEQ ID NO: 865301 - DNA, 75 bp, synthetic construct
  source 1..75: mol_type = other DNA
ggcccgttctcagggacgggaagtgatggtgattgctgccgacggtcgcagtggccagttcctgtcagaaagccc

SEQ ID NO: 865302 - DNA, 75 bp, synthetic construct
  source 1..75: mol_type = other DNA
gatgatgagcgccgcctgcgtgacggtacagaacgggaaagccgggaactggatgaggctgtccgggaagcggtt

SEQ ID NO: 865303 - DNA, 75 bp, synthetic construct
  source 1..75: mol_type = other DNA
gtgagctgaagggcgccatcaaagcgaaggaacagttcaccgtggcaggactggaagacggcgcggtacggctgc

SEQ ID NO: 865304 - DNA, 75 bp, synthetic construct
  source 1..75: mol_type = other DNA
tggcccaggtgacggggagccgggatcagcagcagttgacggatgccatccgcgacgcacgtcgtgaggccgggg

SEQ ID NO: 865305 - DNA, 75 bp, synthetic construct
  source 1..75: mol_type = other DNA
tcaggccggggcatgggtgccggaaaagtccgttatggaaatccgtaagccggagaaagagccggagcagggccg

SEQ ID NO: 865306 - DNA, 75 bp, synthetic construct
  source 1..75: mol_type = other DNA
cggcatgagaagggagataccggcgcagaagaacgtacgttcaccgtgctggagccgctccgggtgccagacaac

SEQ ID NO: 865307 - DNA, 75 bp, synthetic construct
  source 1..75: mol_type = other DNA
gcccaccgaccgggccgtgaaactggctcatgactatgtggaaggaaccggcaccggcaccagtgcgtcgcgcac

SEQ ID NO: 865308 - DNA, 75 bp, synthetic construct
  source 1..75: mol_type = other DNA
gctggataaaacggcgctgggccgccgggtgctggcggaaaacggtctggagggtgaaacgatggcccgctttat

SEQ ID NO: 865309 - DNA, 75 bp, synthetic construct
  source 1..75: mol_type = other DNA
acgatgacacggcacaccattgaccgggtggccgaagccaccaacagcctggtattgcagggagaagacggcagt

SEQ ID NO: 865310 - DNA, 75 bp, synthetic construct
  source 1..75: mol_type = other DNA
tacgccgagcctgctttctggcccggcgatgcaaacgctgctggacggcgtgcgtgcgcgtttgccgctggcagc

SEQ ID NO: 865311 - DNA, 75 bp, synthetic construct
  source 1..75: mol_type = other DNA
atgtccgttttctcattgaagattgatatcgccgataacaaatttttcaacggcgaaacatcaccgctcttttcg

SEQ ID NO: 865312 - DNA, 75 bp, synthetic construct
  source 1..75: mol_type = other DNA
gctcgagaaggggaaatgtcattgctgaagccagggccattttcagcttcagccacaatggaattacggtatgag

SEQ ID NO: 865313 - DNA, 75 bp, synthetic construct
  source 1..75: mol_type = other DNA
tcttgcccaatacgggaggcatcgcgctgcccgtctcccgtcaccatctggcagacactgctcacccgactgctg

SEQ ID NO: 865314 - DNA, 75 bp, synthetic construct
  source 1..75: mol_type = other DNA
tggcggcatcttacatgtcagaaggcactaaagagagtatggcgagcggtgtattcactgttggtaactacttct

SEQ ID NO: 865315 - DNA, 75 bp, synthetic construct
  source 1..75: mol_type = other DNA
tttgacatccccccccacccctgcatcggtagggggcttgcaggtgaagtatttaaggatccagagaatcctgga

SEQ ID NO: 865316 - DNA, 75 bp, synthetic construct
  source 1..75: mol_type = other DNA
acgccgtggtcacgctgcgtaatgctgacggggagtcagtgctgatctctcctcagcagaacactgcacaggata

SEQ ID NO: 865317 - DNA, 75 bp, synthetic construct
  source 1..75: mol_type = other DNA
agcagcagaagctggcggaggtgcaggagaaagccgcccgtgaactggcggaacaggcccggcgtgaactgttgt

SEQ ID NO: 865318 - DNA, 75 bp, synthetic construct
  source 1..75: mol_type = other DNA
gcagcagcgcagtgccattgatacggtggtgatgcgggagattgtccgccagaccccggcgctgcgtccggcgat

SEQ ID NO: 865319 - DNA, 75 bp, synthetic construct
  source 1..75: mol_type = other DNA
acccgctcggacaccgaccgcggctacgtggccaacagcctgtgggaggtagccgggttcactgacgaaggggcc

SEQ ID NO: 865320 - DNA, 75 bp, synthetic construct
  source 1..75: mol_type = other DNA
acggttctgacctctcccgtatggtcaatggagtgaataaacaccgcagcggctatgacctgacgttctccgccc

SEQ ID NO: 865321 - DNA, 75 bp, synthetic construct
  source 1..75: mol_type = other DNA
gcggaggtgaatactcaggacgctgtggtcacgctgcggaatgctgacggggagtcggtactgatttcaccacag

SEQ ID NO: 865322 - DNA, 75 bp, synthetic construct
  source 1..75: mol_type = other DNA
acgtctgagacgaacgccaggtcttctgaaacggcagcggaacagagtgcctccgcagcagcagactcaaaaaca

SEQ ID NO: 865323 - DNA, 75 bp, synthetic construct
  source 1..75: mol_type = other DNA
aatctggctatcacgaaagagtggttcacctgcaccgccacggcgatgtacagcaatgacccaggccacgacaag

SEQ ID NO: 865324 - DNA, 75 bp, synthetic construct
  source 1..75: mol_type = other DNA
gtcaaagcgcctgcgacttcccgggcagcagaaccagcaaggcaaggccattacagattacgatccctatgctta

SEQ ID NO: 865325 - DNA, 75 bp, synthetic construct
  source 1..75: mol_type = other DNA
gcgcggtgaaccagttatcgccagtcaggactggcatccggctaatcacggcagttttgccagccagcatcaggt

SEQ ID NO: 865326 - DNA, 75 bp, synthetic construct
  source 1..75: mol_type = other DNA
agagccttatacgccaggccaactcgacggtttgccacaaaccttctggccagatcactgtgtgcagaacagtga

SEQ ID NO: 865327 - DNA, 75 bp, synthetic construct
  source 1..75: mol_type = other DNA
taccgggcgtttccgcgaatgtttccgcaaatataaacaccgctggaaaactgcgcagattgacagccggacggt

SEQ ID NO: 865328 - DNA, 75 bp, synthetic construct
  source 1..75: mol_type = other DNA
atacatggactcaaccacaaactattaatggcgatttgacggtaaccggaaacggctcatttaacgacgttcaga

SEQ ID NO: 865329 - DNA, 75 bp, synthetic construct
  source 1..75: mol_type = other DNA
attgctcaggatgcacaaaaagcattgcctgaactggtaactgaagacgcagacgttatatctggtgaaaaacgt

SEQ ID NO: 865330 - DNA, 75 bp, synthetic construct
  source 1..75: mol_type = other DNA
cgctacgtctcggaacgctgcgaactgggcgaacagcgtgaagcgttgctggcggtgaccatcccggaagaaaaa

SEQ ID NO: 865331 - DNA, 75 bp, synthetic construct
  source 1..75: mol_type = other DNA
acgaaaaccacatcgtcgtttgattacggcactaaatccacgaataacaccggggcgcatacgcacagtctgagc

SEQ ID NO: 865332 - DNA, 75 bp, synthetic construct
  source 1..75: mol_type = other DNA
tgagcgtgggcctcagggattacagggaccaccgggtcctgccggagagagagggccgacaggcgaaccgggagc

SEQ ID NO: 865333 - DNA, 75 bp, synthetic construct
  source 1..75: mol_type = other DNA
ccggccccgcggggccacggggtgaacgtggtgaacagggcatacaggggccagttggtgcaaccggaccggcgg

SEQ ID NO: 865334 - DNA, 75 bp, synthetic construct
  source 1..75: mol_type = other DNA
accgcctgattgactggtgccagtcgcgcggagaagcggttattgccagtcaggactggcacccggctgatcatg

SEQ ID NO: 865335 - DNA, 75 bp, synthetic construct
  source 1..75: mol_type = other DNA
ccagcactttctatcaaatggccaaactacaagtttttaattttgtcacaaaaggataagaacaacaaatttttc

SEQ ID NO: 865336 - DNA, 75 bp, synthetic construct
  source 1..75: mol_type = other DNA
aaagagaaaatatagttttatcggaaaaggatataaatcaacctaatttatcatatagcttctctctcaaacagt

SEQ ID NO: 865337 - DNA, 75 bp, synthetic construct
  source 1..75: mol_type = other DNA
acacagcgtgagcaccgcatcattggcattgacagccattaccgggtaaacccggtacaacacggagatatccat

SEQ ID NO: 865338 - DNA, 75 bp, synthetic construct
  source 1..75: mol_type = other DNA
ccagtattgaacattgactggccgatgaaagcaaatgagcttatcctatcagataaagataaaaatgctgaaaga

SEQ ID NO: 865339 - DNA, 75 bp, synthetic construct
  source 1..75: mol_type = other DNA
aacaattatggatacctgaaggttttgcacatggttttgtagtagtgagtgatgaggctgagtttttatataaaa

SEQ ID NO: 865340 - DNA, 75 bp, synthetic construct
  source 1..75: mol_type = other DNA
tgcacatggtttttatgtaaaagaagaaggttcagaaatattgtataagaccaataatttttactcaaaagaaca

SEQ ID NO: 865341 - DNA, 75 bp, synthetic construct
  source 1..75: mol_type = other DNA
acacaacgtgagcaccgcatcatcggcattgacagtcattaccgggtcaccccggtacaacacggagatatttat

SEQ ID NO: 865342 - DNA, 75 bp, synthetic construct
  source 1..75: mol_type = other DNA
gcgcggtgaagcggttatcgccagtcaggactggcatccggcgaatcacggcagttttgccagtcagcacggtgt

SEQ ID NO: 865343 - DNA, 75 bp, synthetic construct
  source 1..75: mol_type = other DNA
ctggactggcacccggctaatcacggcagctttgccagccagcacggtgtaaagagttatactcagggccaactt

SEQ ID NO: 865344 - DNA, 75 bp, synthetic construct
  source 1..75: mol_type = other DNA
tcgactggtttcgacaacagcaaacacaaccgcaaaacccgttcgatatcattccgatccacggcgcagtcacca

SEQ ID NO: 865345 - DNA, 75 bp, synthetic construct
  source 1..75: mol_type = other DNA
ccccggaatatgcacaggaaacgatacataacgccattctacccgacctgacacaacgtgagcaccgcatcatcg

SEQ ID NO: 865346 - DNA, 75 bp, synthetic construct
  source 1..75: mol_type = other DNA
ttatgctcaaggtaaattagttcgttgtgttgtcggtgaagtttttgatgtagcagttgatattcgtaaatcgtc

SEQ ID NO: 865347 - DNA, 75 bp, synthetic construct
  source 1..75: mol_type = other DNA
ggcagcttcctcaaattctgccagctgcttggcgggcgctcggtcaccgagttcaactaccgttttgccgatgcc

SEQ ID NO: 865348 - DNA, 75 bp, synthetic construct
  source 1..75: mol_type = other DNA
tatgcgtggctggacgattaagggcaagcccgccagtggtcgggccgtattgtctcaggaacaggacggcattaa

SEQ ID NO: 865349 - DNA, 75 bp, synthetic construct
  source 1..75: mol_type = other DNA
aatgaaagcagaagtcgccattccacgcgtaagcaaatctggaaacggagaaaatccaggcgcaatacggtactc

SEQ ID NO: 865350 - DNA, 75 bp, synthetic construct
  source 1..75: mol_type = other DNA
aactcaggcccaggcggaagcagacagtaaactggcggcagccaaagcagaagcggaaactattcgcgtaagagg

SEQ ID NO: 865351 - DNA, 75 bp, synthetic construct
  source 1..75: mol_type = other DNA
taacacttcttctgcaggcgctcatacgcactctgtatcgggtactgctgcaagcgcaggtgcacacgcgcatac

SEQ ID NO: 865352 - DNA, 75 bp, synthetic construct
  source 1..75: mol_type = other DNA
acatttgtttcaggtggttccagtggtgctccgggaagtggatcacctgattattctaaatacagtgttaacact

SEQ ID NO: 865353 - DNA, 75 bp, synthetic construct
  source 1..75: mol_type = other DNA
gggattaccggagctttgtggaagcgtacagccgtcggattaacgaatttcgcctggatcaacacatccggcgat

SEQ ID NO: 865354 - DNA, 75 bp, synthetic construct
  source 1..75: mol_type = other DNA
ccgtctggttatgccctgatgcaggggcagacttttgacaaatctgcctacccaaaacttgcagccgcttatccg

SEQ ID NO: 865355 - DNA, 75 bp, synthetic construct
  source 1..75: mol_type = other DNA
cacaaatgacagtatcagtcagcttccacattaaaccttcagaagcaggcgcggtttataccacctacaacacca

SEQ ID NO: 865356 - DNA, 75 bp, synthetic construct
  source 1..75: mol_type = other DNA
ggttaacgctcctgcaggtgcaatatctggaaaatattaccctgttgttgttatgcgttctgctggctcagtaag

SEQ ID NO: 865357 - DNA, 75 bp, synthetic construct
  source 1..75: mol_type = other DNA
cgggtgctgatctcgttgttaatgatacgacctataagtttggggcaataaatccggcgactgaatgtgtcgcgg

SEQ ID NO: 865358 - DNA, 75 bp, synthetic construct
  source 1..75: mol_type = other DNA
ggttaacgctcctgcaggtgcaacgtctggaaaatattaccctgttgttgttatgcgctctgctggatcagtaag

SEQ ID NO: 865359 - DNA, 75 bp, synthetic construct
  source 1..75: mol_type = other DNA
aggaaattccgcgaaggcggcaaaaacgtccgagacgaacgctaagtcttctgagacggcagcagcacagagtgc

SEQ ID NO: 865360 - DNA, 75 bp, synthetic construct
  source 1..75: mol_type = other DNA
tggaactgctccaacaggacgcccatctcgaccgcgtatttgtgccagtcggcggcggtggtctggctgcgggcg

SEQ ID NO: 865361 - DNA, 75 bp, synthetic construct
  source 1..75: mol_type = other DNA
ctcaacacgctgggtacgcactggaacatttctttgttccactatcgcagccatggcaccgactacgggcgcgta

SEQ ID NO: 865362 - DNA, 75 bp, synthetic construct
  source 1..75: mol_type = other DNA
atcatgaaccggattttgaaacccggctgaatgaactgggttacgattgccacgacgaaaccaataacccggcgt

SEQ ID NO: 865363 - DNA, 75 bp, synthetic construct
  source 1..75: mol_type = other DNA
caggacgcccatctcgaccgcgtatttgtgccagtcggcggcggcggtctggctgcgggcgtggcggtgctgatc

SEQ ID NO: 865364 - DNA, 75 bp, synthetic construct
  source 1..75: mol_type = other DNA
caacgtgaactttcacggtctgcgctacgtctcggaacgctgcgaactgggcgaacagcgtgaagcgttactggc

SEQ ID NO: 865365 - DNA, 75 bp, synthetic construct
  source 1..75: mol_type = other DNA
ttaggcgtgaaggcactgatcgtcatgccaaccgccaccgccgatatcaaagttgatgcggtgcgcggcttcggc

SEQ ID NO: 865366 - DNA, 75 bp, synthetic construct
  source 1..75: mol_type = other DNA
tcagctggtttaatcccgaagatcttgccactaagcgtaaagcgatggcccgtggactaaggaaaattttgctcg

SEQ ID NO: 865367 - DNA, 75 bp, synthetic construct
  source 1..75: mol_type = other DNA
tgctgagtcagtcagaaaaggggggaatattaatgttaaagggagccggcgggagcaacgccgtcgccgttgtct

SEQ ID NO: 865368 - DNA, 75 bp, synthetic construct
  source 1..75: mol_type = other DNA
atcgactgttgccgttgggtcagtgctgaagagattttacaggcaccaaatctgcgctcgccattagtggcagaa

SEQ ID NO: 865369 - DNA, 75 bp, synthetic construct
  source 1..75: mol_type = other DNA
ccgcttctgcgggtaaccacgcgcagggcgtggcgttctcctcggcgaggttaggtgtgaaggcgttgatcgtca

SEQ ID NO: 865370 - DNA, 75 bp, synthetic construct
  source 1..75: mol_type = other DNA
ttacacccgtggtgaagaggtaagccgtccgtccgacgatattctgtttgagattgcccagcttgcggctcaggg

SEQ ID NO: 865371 - DNA, 75 bp, synthetic construct
  source 1..75: mol_type = other DNA
tgcggtggtcagcggtgcggccgacatcaccaatgagatccagacaggagtggcacaccggatggcggcgggagg

SEQ ID NO: 865372 - DNA, 75 bp, synthetic construct
  source 1..75: mol_type = other DNA
atgtacggaacatgcgaaacgctatgccgggagctggcagcaaagtatgcgggagacacgcccctgatgctggtt

SEQ ID NO: 865373 - DNA, 75 bp, synthetic construct
  source 1..75: mol_type = other DNA
atgtacggaacatgcgaaacgctatgccggcagctggcagcaaagtatgcgggagacacgccgctgatgctggtt

SEQ ID NO: 865374 - DNA, 75 bp, synthetic construct
  source 1..75: mol_type = other DNA
atgtacggaacatgcgaaacgctatgccggcagctggcagcaaagtatccgggagacacgcccctgatgctggtt

SEQ ID NO: 865375 - DNA, 75 bp, synthetic construct
  source 1..75: mol_type = other DNA
gccgggcgctggcagcaaagtatccgggagacacgccgctgatgctggttatctggtccccggaagaaattcagg

SEQ ID NO: 865376 - DNA, 75 bp, synthetic construct
  source 1..75: mol_type = other DNA
gggagacacaccgctgatgctggttgtctggtccccggaagagattcaggccctcgctgacggaatggatatttc

SEQ ID NO: 865377 - DNA, 75 bp, synthetic construct
  source 1..75: mol_type = other DNA
tggcgggctgctcgggtagcaaatcatccgatacaggaacgtattccggctccgtttacaccgtgaaacgggggg

SEQ ID NO: 865378 - DNA, 75 bp, synthetic construct
  source 1..75: mol_type = other DNA
atgaacactaaagttattcgactactcctgctgggaagcctgttcagcttaagcgcctgtgtacagcaaagtgaa

SEQ ID NO: 865379 - DNA, 75 bp, synthetic construct
  source 1..75: mol_type = other DNA
gattgacggggttgaaattggcactctggtcgaactggcgcaatggacgctggcagccgataaagtgctcacatt

SEQ ID NO: 865380 - DNA, 75 bp, synthetic construct
  source 1..75: mol_type = other DNA
ttcctcttcaagattcggatgggtttgagcattattcagcgcgttttttactggatgaaataaacaaaattcgtg

SEQ ID NO: 865381 - DNA, 75 bp, synthetic construct
  source 1..75: mol_type = other DNA
atgtacggaacatgcgaaacgctatgccggcagctggcagcaaagtatacgggagacacgccactgatgctggtt

SEQ ID NO: 865382 - DNA, 75 bp, synthetic construct
  source 1..75: mol_type = other DNA
atgtacggaacatgcgaaacgctatgccggaagctggcagcaaagtatacgggagacacgcccctgatgctggtt

SEQ ID NO: 865383 - DNA, 75 bp, synthetic construct
  source 1..75: mol_type = other DNA
ttccagattcgttaccgtgcaacggcaattgatccgctacgttacttgccgcctcagggcagcaagccaaaatgc

SEQ ID NO: 865384 - DNA, 75 bp, synthetic construct
  source 1..75: mol_type = other DNA
tggtggcggaaaacttaggtcatctgaaggcggtagccgggatgaccggacgcaatatggatccatatatggggc

SEQ ID NO: 865385 - DNA, 75 bp, synthetic construct
  source 1..75: mol_type = other DNA
cggcacgttactgtttttctttattaccggcgggcgcgtgcccagttatctcggttccagcgcggcttttgtcgg

SEQ ID NO: 865386 - DNA, 75 bp, synthetic construct
  source 1..75: mol_type = other DNA
acaccgctttgccgccgcccgctggcagactggtgtgaccggatgcccgcaactggaagaagcactggtttcgtt

SEQ ID NO: 865387 - DNA, 75 bp, synthetic construct
  source 1..75: mol_type = other DNA
gtcgcagtaaccttagtgctgggtgcgggtgattttgctctcacgctgggcggttttacgttgggagggatcggt

SEQ ID NO: 865388 - DNA, 75 bp, synthetic construct
  source 1..75: mol_type = other DNA
gtgatggcgattggcctgaacttagcgcctatcgcggtaaaaagtgtatcggcttcaggctttgatagctggatg

SEQ ID NO: 865389 - DNA, 75 bp, synthetic construct
  source 1..75: mol_type = other DNA
caaggcggtcgccgggatgaccggacgcaatatggatccatatatggggcgggcattcgtgggcgatgggctggc

SEQ ID NO: 865390 - DNA, 75 bp, synthetic construct
  source 1..75: mol_type = other DNA
gatttaagccagaacggtaatttgattatggtcgcagtaaccttagtgctgggcgcgggtgattttgctctcacg

SEQ ID NO: 865391 - DNA, 75 bp, synthetic construct
  source 1..75: mol_type = other DNA
agtgctgggcgcgggtgattttgctctcacgctgggcggttttacgttgggaggaatcggtacagcaacctttgg

SEQ ID NO: 865392 - DNA, 75 bp, synthetic construct
  source 1..75: mol_type = other DNA
cgattgccgtttgctcagacggcagtaatgggcgttcaacacgcggtggcgatgtttggcgcgacggtgttaatg

SEQ ID NO: 865393 - DNA, 75 bp, synthetic construct
  source 1..75: mol_type = other DNA
accggcgggcgcgttcccagttatctcggttccagcgcggcttttgtcggcgtggtgatcgccgcaacgggcttt

SEQ ID NO: 865394 - DNA, 75 bp, synthetic construct
  source 1..75: mol_type = other DNA
aggcgcacgaatctgggtacaaaaccgtgtagatttgagccagaacggtaatttgattatggtcgcagtcacctt

SEQ ID NO: 865395 - DNA, 75 bp, synthetic construct
  source 1..75: mol_type = other DNA
ggcttcggcctttgatagctggatggcggtaatgacggtgctgtgtattgggctggtggcggtgtttacccgtgg

SEQ ID NO: 865396 - DNA, 75 bp, synthetic construct
  source 1..75: mol_type = other DNA
cgcactaatccataccattccggcaccggtgattggtggtgcgtcaattgttgtgttcgggttaattgccgtcgc

SEQ ID NO: 865397 - DNA, 75 bp, synthetic construct
  source 1..75: mol_type = other DNA
acacaggctaactggggctcggttatcgctggtattagtattgcactggaggaaaaagccgcccaggaatcagaa

SEQ ID NO: 865398 - DNA, 75 bp, synthetic construct
  source 1..75: mol_type = other DNA
aacagtttctactcaatcttcaggattcggtttgccagcaactcgccgccgtcgatggcgcagagtttgttgaag

SEQ ID NO: 865399 - DNA, 75 bp, synthetic construct
  source 1..75: mol_type = other DNA
tggtaagccgttaccggtgtatggcaatggcgagcaaattcgcgactggctatttgttgaagatcatgcacgcgc

SEQ ID NO: 865400 - DNA, 75 bp, synthetic construct
  source 1..75: mol_type = other DNA
gtttatggatttgctgtccggtcatgagattaagttgctgaaggcttttataggcccacgacatgccagcgatga

SEQ ID NO: 865401 - DNA, 75 bp, synthetic construct
  source 1..75: mol_type = other DNA
gtcgatggcgcagaatttgtcgaagatagctggcagcgcgaaggtggcggcggcgggcgtagtcgggtgttgcgt

SEQ ID NO: 865402 - DNA, 75 bp, synthetic construct
  source 1..75: mol_type = other DNA
ggcgagcgcgagcgcaatttccagctctaccgtcgcggtcgttatgtcgagttcaacctggtctgggatcgcggc

SEQ ID NO: 865403 - DNA, 75 bp, synthetic construct
  source 1..75: mol_type = other DNA
aatgccgccactggtacgctgggagtatgattatcagccaaaagatggcagcccagaagcggcgttaagtgagtt

SEQ ID NO: 865404 - DNA, 75 bp, synthetic construct
  source 1..75: mol_type = other DNA
tatccttgtggatgataaaggaaatgacttcttccagcagatacaactcacacagtgcacccgctgtgtgaaata

SEQ ID NO: 865405 - DNA, 75 bp, synthetic construct
  source 1..75: mol_type = other DNA
ggtacatcgactttaattcagttacaggaaggagagtttattacggaagatcaggcagggatggggtttggtgat

SEQ ID NO: 865406 - DNA, 75 bp, synthetic construct
  source 1..75: mol_type = other DNA
aaacaacttcaatataaggttctttttgtaggtagattaacacaccccaagcgtcctgaattgttagcgaatgta

SEQ ID NO: 865407 - DNA, 75 bp, synthetic construct
  source 1..75: mol_type = other DNA
caaaccagagccagaagttgaagcatttaccaatcaaccgaaaaagatggtcaaaaaatacgacggcctgattta

SEQ ID NO: 865408 - DNA, 75 bp, synthetic construct
  source 1..75: mol_type = other DNA
gctggcaaccgttgatgcgccagcacgactattttggctttgacgaggccacacaagggctacgtgccgttcttt

SEQ ID NO: 865409 - DNA, 75 bp, synthetic construct
  source 1..75: mol_type = other DNA
ctgagactatgaccggcgaggcgactcaggagcgtctcaaatttgctcgagataacctcatgacagccgaacgcc

SEQ ID NO: 865410 - DNA, 75 bp, synthetic construct
  source 1..75: mol_type = other DNA
cgaggcgatgcctgcttccgccaccgctcatcgcccggaacttgccgggcgcagtttcgaggcgatgggcgtttc

SEQ ID NO: 865411 - DNA, 75 bp, synthetic construct
  source 1..75: mol_type = other DNA
cccgcgtttcatgacgaccaaacgacgcttggcaagaaaatggcggaagagtttggcctacatggcggaatggaa

SEQ ID NO: 865412 - DNA, 75 bp, synthetic construct
  source 1..75: mol_type = other DNA
ctgaacagattgatgcgctcatcgcatatctggaaaaggtgaagccccgcacagtgcaatcagtaccaccggaag

SEQ ID NO: 865413 - DNA, 75 bp, synthetic construct
  source 1..75: mol_type = other DNA
aacgacaccgcgaattattcggccttgaacatccggcccacacgacaacggagcgttatcgccagcacctggcgg

SEQ ID NO: 865414 - DNA, 75 bp, synthetic construct
  source 1..75: mol_type = other DNA
gattgatggggtggaaatcggtactcttgtggaactggcgcaatggacgctgtcagccgataaagtgctcacatt

SEQ ID NO: 865415 - DNA, 75 bp, synthetic construct
  source 1..75: mol_type = other DNA
caggatattttaaatattctgttctttggtcattgtatttttattagcggcgattatgattgcttttatggcatt

SEQ ID NO: 865416 - DNA, 75 bp, synthetic construct
  source 1..75: mol_type = other DNA
attcggtctgtatggtggaatggaagtcaccgatgaagtctttgaatctccggcaagtattgtctttgaccaggc

SEQ ID NO: 865417 - DNA, 75 bp, synthetic construct
  source 1..75: mol_type = other DNA
cagaaaatatccccctggctggcacaagcggaatgagagcaacgcaacaggaagcgagaagccagttggttcaga

SEQ ID NO: 865418 - DNA, 75 bp, synthetic construct
  source 1..75: mol_type = other DNA
ccctgcagactttattgaaaccaatattgttggaacatatatcttactagaagaagctcgtaagtattggctagc

SEQ ID NO: 865419 - DNA, 75 bp, synthetic construct
  source 1..75: mol_type = other DNA
tgcgcttttttattgccgaaaaaccgggtgccgagcccgtctggtggtttggcggcggcttcgatttaacccctt

SEQ ID NO: 865420 - DNA, 75 bp, synthetic construct
  source 1..75: mol_type = other DNA
atgtggtacagggaaggtactatcacatttacacagggtagcaatactctcgttggtgttggaacagcctggaac

SEQ ID NO: 865421 - DNA, 75 bp, synthetic construct
  source 1..75: mol_type = other DNA
gctgcctatccattgccatctgtgcagccagtggagacacagcaaccagtagcacagcaacaaccacagcaaagt

SEQ ID NO: 865422 - DNA, 75 bp, synthetic construct
  source 1..75: mol_type = other DNA
gcgaaagatgatgcggaagcactcgctaccgatttaggcgttggcgttctggctggcggcgctattaacgctgcc

SEQ ID NO: 865423 - DNA, 75 bp, synthetic construct
  source 1..75: mol_type = other DNA
gcccaatgccaaagtggtttatatgcactccgaacgttttgtgcaggacatggtaaaagctctgcaaaacaacgc

SEQ ID NO: 865424 - DNA, 75 bp, synthetic construct
  source 1..75: mol_type = other DNA
cgcaaacgccacaagcggcagtgacgagcaacgtcgcggcccctgcacaggtggcgcaaacgcagccgcaacgtg

SEQ ID NO: 865425 - DNA, 75 bp, synthetic construct
  source 1..75: mol_type = other DNA
ttgttctggaaaagctggagatgaagtggtcgccagagcaaatatcaggatggttaagacgaacgaagccgcgtc

SEQ ID NO: 865426 - DNA, 75 bp, synthetic construct
  source 1..75: mol_type = other DNA
acaaatgagaatacaaatgggctaattcggcagtactttcctaaaaagacatgtcttgcccaatatactcaacat

SEQ ID NO: 865427 - DNA, 75 bp, synthetic construct
  source 1..75: mol_type = other DNA
ccgacctatcgttctaacgtaaacgtcaaacacacgtttgataacttcgttgaaggtaaatctaaccagctggcg

SEQ ID NO: 865428 - DNA, 75 bp, synthetic construct
  source 1..75: mol_type = other DNA
gttcctttatggcggcacggggctgggtaaaactcacctgctacatgcggtgggcaatggcattatggcgcgcaa

SEQ ID NO: 865429 - DNA, 75 bp, synthetic construct
  source 1..75: mol_type = other DNA
gccgcgaaggcagcaggttatcggacggcaggttataaaccggtcgcctctggcagcgaaaagaccccggaaggc

SEQ ID NO: 865430 - DNA, 75 bp, synthetic construct
  source 1..75: mol_type = other DNA
gggttatgcaggaacaattgccagtgatactggtggtaggggtaaaactcggctgtattaaccatgcgatgctga

SEQ ID NO: 865431 - DNA, 75 bp, synthetic construct
  source 1..75: mol_type = other DNA
tcatccttagactcaggggcaaagattctgtctcagtaaatcaggtggccaaattcagtaaaccacttcaccact

SEQ ID NO: 865432 - DNA, 75 bp, synthetic construct
  source 1..75: mol_type = other DNA
ctgaactccggcgatcactgacatgggacagaggaatggagctggccagacatctggaatttactggcagcacag

SEQ ID NO: 865433 - DNA, 75 bp, synthetic construct
  source 1..75: mol_type = other DNA
gtagaccgaaaatcacgttatacgatcatccttagactcaggggcaaagattctgtctcagtaaatcagtctctt

SEQ ID NO: 865434 - DNA, 75 bp, synthetic construct
  source 1..75: mol_type = other DNA
accctgcatactccggtgttgatgacgcggtgatatacctgcggcaggggctgcacagtaaggtgctgtggactg

SEQ ID NO: 865435 - DNA, 75 bp, synthetic construct
  source 1..75: mol_type = other DNA
aagacatgtcttgcccaatatactcaacatgaactagatgaaccgccccgggtttcctggagagtgttttatctg

SEQ ID NO: 865436 - DNA, 75 bp, synthetic construct
  source 1..75: mol_type = other DNA
tgcggggaggcgtggggacaacaaccatcaccgccgcattagcctggtcattacaaatgttgggagaaaatgttc

SEQ ID NO: 865437 - DNA, 75 bp, synthetic construct
  source 1..75: mol_type = other DNA
agaaaatccacagcactggcaaacccggctgagcgatatttgctccggcttacagcaaataaaagccagcgggcg

SEQ ID NO: 865438 - DNA, 75 bp, synthetic construct
  source 1..75: mol_type = other DNA
tttgattgttgtgtatgtgccattaaagaaattgcattactcacagctcgcattgaagaggctgacaagaaatac

SEQ ID NO: 865439 - DNA, 75 bp, synthetic construct
  source 1..75: mol_type = other DNA
tatgcagggaacggatacgcgttttgcctcctcacgaccgaatattttttccgcctttcctgataatggcccgat

SEQ ID NO: 865440 - DNA, 75 bp, synthetic construct
  source 1..75: mol_type = other DNA
gaatgaagcgcagctaatgcgtgatttcgtcgccgatggtggctcgctaattgggctggtgaaaaagcattgtga

SEQ ID NO: 865441 - DNA, 75 bp, synthetic construct
  source 1..75: mol_type = other DNA
aacgcacaacaccgcagggcgtggagttcctcgccaacagcctgttcaaacatcgtcaggccgagcgagtgatcg

SEQ ID NO: 865442 - DNA, 75 bp, synthetic construct
  source 1..75: mol_type = other DNA
ggaacgcgcttcgtcggcgaagccaaatacccgacgcgcaaatgccgtcttattcctttccagttctcgaccgtc

SEQ ID NO: 865443 - DNA, 75 bp, synthetic construct
  source 1..75: mol_type = other DNA
atggaagaatttaagcacgaaccattcggttctgaaacttcgcatatagttgaagtggctatcgaagggagaatg

SEQ ID NO: 865444 - DNA, 75 bp, synthetic construct
  source 1..75: mol_type = other DNA
ctggggcatgtctacctgtgaagactgcaaggtggtggtgaccgccaacaccgacaaccagctgcgcaccaaaac

SEQ ID NO: 865445 - DNA, 75 bp, synthetic construct
  source 1..75: mol_type = other DNA
aacttaatgtcattaacgattctctcgccgaattcaaatgtgggaatacattacatggttttattcagatttccc

SEQ ID NO: 865446 - DNA, 75 bp, synthetic construct
  source 1..75: mol_type = other DNA
aggcggggaatatacgatatctggggaccagaataaggttctcacgccgtcagcgttctcgttcagctctcaggg

SEQ ID NO: 865447 - DNA, 75 bp, synthetic construct
  source 1..75: mol_type = other DNA
agcaactactaccgtgccaatacttccggcaagaccgggaccctgcgcccttctcacacagaagggatgtcgtgg

SEQ ID NO: 865448 - DNA, 75 bp, synthetic construct
  source 1..75: mol_type = other DNA
ttaccattgcgaaagcttgttctggaaaagctggagatgaaatggtctccagagcaaatatcaggatggttaagg

SEQ ID NO: 865449 - DNA, 75 bp, synthetic construct
  source 1..75: mol_type = other DNA
cgatacatcaggtatcaaaattgcagcctggcagcaagaactgattctcgaagcactgggtattgttgtttatcc

SEQ ID NO: 865450 - DNA, 75 bp, synthetic construct
  source 1..75: mol_type = other DNA
aatctcagccaagcttaggttataccctatctatcaaaaacataactattcaaatttagaaatcaagcaagccga

SEQ ID NO: 865451 - DNA, 75 bp, synthetic construct
  source 1..75: mol_type = other DNA
agttttcaatatgagttttcagatgaagtttataaaatatcaaataattccatggataaaattaatctttctgaa

SEQ ID NO: 865452 - DNA, 75 bp, synthetic construct
  source 1..75: mol_type = other DNA
atggcgagaggcttatcggggggtacttggggagtctgcattctgtgtcagcccgttgatatttagccgccgtag

SEQ ID NO: 865453 - DNA, 75 bp, synthetic construct
  source 1..75: mol_type = other DNA
aaatcagcagattgtccgtcgttccgcgcacgaacggaaacaactgagtgcatggaactgtgatgcgcaggagaa

SEQ ID NO: 865454 - DNA, 75 bp, synthetic construct
  source 1..75: mol_type = other DNA
gacaccacagtttttcacatcaagatctaagtgatattactttcactgcttgcacctttatccgatgcgattttc

SEQ ID NO: 865455 - DNA, 75 bp, synthetic construct
  source 1..75: mol_type = other DNA
ctgatctcattaataaaatcgcgcaggattttgctcgagctaccagtctggctgttgtcgtggtcaatattcatg

SEQ ID NO: 865456 - DNA, 75 bp, synthetic construct
  source 1..75: mol_type = other DNA
cgtccctgctgaactgctggcgtccctgattcagaccgctgaacaggcattgtggaaacgtgaatgggccgcccg

SEQ ID NO: 865457 - DNA, 75 bp, synthetic construct
  source 1..75: mol_type = other DNA
cggaatgcgtcacccgccgtcaggcggtggttaatcaggtccgcatcctgctgaaaaacaacacacacgaaaacg

SEQ ID NO: 865458 - DNA, 75 bp, synthetic construct
  source 1..75: mol_type = other DNA
atgactgacgatccaattatgttctggcaggcagttatcgtactttcagcactggttatcagtattatttacaat

SEQ ID NO: 865459 - DNA, 75 bp, synthetic construct
  source 1..75: mol_type = other DNA
gcgaacagtgctttcggtggaaatgctggaggataaacacgatcagcaccagaccctgactgcggcggtactggc

SEQ ID NO: 865460 - DNA, 75 bp, synthetic construct
  source 1..75: mol_type = other DNA
gatattttcgacgcccgcgccaatatggaagcgatgctggtgagtctggcaattgcccgtggcggcgatgagtgg

SEQ ID NO: 865461 - DNA, 75 bp, synthetic construct
  source 1..75: mol_type = other DNA
cgtgagcgtcagtatgcagaggaagaaagagaaagacggttacagcaacagcagcaggaagagaattattcgtcg

SEQ ID NO: 865462 - DNA, 75 bp, synthetic construct
  source 1..75: mol_type = other DNA
cactggcattaaccgatgatcgtggcacagagagtcttgccagctatctccgttcgcttactgacagtcagttgt

SEQ ID NO: 865463 - DNA, 75 bp, synthetic construct
  source 1..75: mol_type = other DNA
atcgtaaatggcgccatcttgatacctgccagttcaccactattgttgaagccgatgttccacgaattatgtgtc

SEQ ID NO: 865464 - DNA, 75 bp, synthetic construct
  source 1..75: mol_type = other DNA
gcctgcgtaatgatgatgttgacttgatcgatattctgaatgtcgatgattgttggcaagccgacccagaattac

SEQ ID NO: 865465 - DNA, 75 bp, synthetic construct
  source 1..75: mol_type = other DNA
aaagaactggcaaaggatatctggagcagaccatggagcgaggaaagacgcaacgactggcagagatggctgtcg

SEQ ID NO: 865466 - DNA, 75 bp, synthetic construct
  source 1..75: mol_type = other DNA
atgaccgaatccaggcaggaaaagctgatatggctgcgtgcgcagatgaagctgacgagcctgtgctgggcgctg

SEQ ID NO: 865467 - DNA, 75 bp, synthetic construct
  source 1..75: mol_type = other DNA
ttcctgtggcagtacagcgacaaatggatgactgagtcccggcaggaaaagctgatgtggttgcgggaacagatg

SEQ ID NO: 865468 - DNA, 75 bp, synthetic construct
  source 1..75: mol_type = other DNA
gcggttgtcgtggtcaatatccacggtgatgaaatctccgagctgtttaacttcactccattttgtcagatgatg

SEQ ID NO: 865469 - DNA, 75 bp, synthetic construct
  source 1..75: mol_type = other DNA
agattgttgcttggcacaaccggaaggacccgcaacatatccgtattatcagcagaaaagatgccgatgattatc

SEQ ID NO: 865470 - DNA, 75 bp, synthetic construct
  source 1..75: mol_type = other DNA
cgcagcagagctgcggcgttatcaggccagaatgaacctgaaggacatgctgaaagaagaacgcgcacgtcttgc

SEQ ID NO: 865471 - DNA, 75 bp, synthetic construct
  source 1..75: mol_type = other DNA
tatattgatgcgcatttatcagacgatttgcgcctggaagatgttgcctcccatgtttatctcagcccttattac

SEQ ID NO: 865472 - DNA, 75 bp, synthetic construct
  source 1..75: mol_type = other DNA
ttcagtaagttattcaagaaataccatggaatcggttttaatgcgtgggtaaaccaacaacggatggccagcgct

SEQ ID NO: 865473 - DNA, 75 bp, synthetic construct
  source 1..75: mol_type = other DNA
ggctttgtgttgtgtggacaagttcgcctgcgtaatgatgatgttgatttgatcaatattctgaatgtcgatgat

SEQ ID NO: 865474 - DNA, 75 bp, synthetic construct
  source 1..75: mol_type = other DNA
ataacaccggggcgcatacccatagtattagcgggaccgcaaatagtgccggtgcgcaccaacacaagagttccg

SEQ ID NO: 865475 - DNA, 75 bp, synthetic construct
  source 1..75: mol_type = other DNA
agcgagcgccgcaaatgctgatacttcagcaggggatgcatcggagtcagcccggcaggcggcagaaagtgcagc

SEQ ID NO: 865476 - DNA, 75 bp, synthetic construct
  source 1..75: mol_type = other DNA
gaaagacggcagaaagtgcagccggtaatgcagccagggatgcaacgaccgcaacagaaaaagcccgggagtcag

SEQ ID NO: 865477 - DNA, 75 bp, synthetic construct
  source 1..75: mol_type = other DNA
gactgacgcaaccagctgttggcagggttattactccggcacaggtccagcatgctgctgtagttcttggagtcg

SEQ ID NO: 865478 - DNA, 75 bp, synthetic construct
  source 1..75: mol_type = other DNA
tgctggaacgccgcgaacttgatgccgggatctggcgaatggcgacagaaccaccgactggttttaccagcttac

SEQ ID NO: 865479 - DNA, 75 bp, synthetic construct
  source 1..75: mol_type = other DNA
atctggagaatggcgacagaaccaccgactggttttaccagcttacggttgcatgaatcggcgtttctggtggcg

SEQ ID NO: 865480 - DNA, 75 bp, synthetic construct
  source 1..75: mol_type = other DNA
catattccgacgttccgctggaagcactacgtgacgagtattttgtcacaatgccgcccgtgtacactgactggg

SEQ ID NO: 865481 - DNA, 75 bp, synthetic construct
  source 1..75: mol_type = other DNA
ggtctgccttcttcgcttactgcggataatgtatctcgttacctgagtatacgccgtttagggcaaccgggctac

SEQ ID NO: 865482 - DNA, 75 bp, synthetic construct
  source 1..75: mol_type = other DNA
cctcagcccgggatgcgtcggcttcaaaagtggcggcaaaatcatcagaaacgagcgcagcctcgagcgccggca

SEQ ID NO: 865483 - DNA, 75 bp, synthetic construct
  source 1..75: mol_type = other DNA
gagaccggtctgacgggaaatgcaggtccacagggtccaaagggagataccggtgcggcaggcccggcaggccca

SEQ ID NO: 865484 - DNA, 75 bp, synthetic construct
  source 1..75: mol_type = other DNA
atggcagtaaagatttcaggtgtgctgaaagacggcacaggaaaaccggtagagaactgcaccattcaactgaga

SEQ ID NO: 865485 - DNA, 75 bp, synthetic construct
  source 1..75: mol_type = other DNA
gccggaggcactgcgccgttttgaacagatggtggaagaggtggcgcgtcacgctgaggaggcgaagaagaatgc

SEQ ID NO: 865486 - DNA, 75 bp, synthetic construct
  source 1..75: mol_type = other DNA
gcgttattctgttggtggaagggttcccgccgtcacatgccgggaccatcaccgtgtatgaagattctcagccgg

SEQ ID NO: 865487 - DNA, 75 bp, synthetic construct
  source 1..75: mol_type = other DNA
atggaacgcatttacagaacagaccttaagttgctccgttattttcttgctgtagcggaagagttacattttggc

SEQ ID NO: 865488 - DNA, 75 bp, synthetic construct
  source 1..75: mol_type = other DNA
atgcaggtccacagggtccaaagggagataccggtgcggcaggcccggcaggcccacagggaccgaaaggagaaa

SEQ ID NO: 865489 - DNA, 75 bp, synthetic construct
  source 1..75: mol_type = other DNA
gggacctcccgggccaaagggggaaccggggcccgcgggtcctcaggggccgaagggagataaaggagagcgtgg

SEQ ID NO: 865490 - DNA, 75 bp, synthetic construct
  source 1..75: mol_type = other DNA
tgaccccaaagatgccacacaggttcaggggctgtttcagcatttgcaggtcaggtttggtgacgggccgtggca

SEQ ID NO: 865491 - DNA, 75 bp, synthetic construct
  source 1..75: mol_type = other DNA
tgagtacggtcagtacagcgttattctgttggtggaaggattcccgccgtcacatgccgggaccatcaccgtgta

SEQ ID NO: 865492 - DNA, 75 bp, synthetic construct
  source 1..75: mol_type = other DNA
gtaaacagaatccccaccgtggtgggacctcccgggccaaagggggaacaggggcccgcgggtcctcaggggccg

SEQ ID NO: 865493 - DNA, 75 bp, synthetic construct
  source 1..75: mol_type = other DNA
aaaggacggcagaaagtgcagccggtaatgcagccagggatgcaacgaccgcaacagaaaaagcccgggagtcag

SEQ ID NO: 865494 - DNA, 75 bp, synthetic construct
  source 1..75: mol_type = other DNA
acagccagcgcggatttgccccaacggtacgcggtatcgcaaacagtagtgcaatcgtgactatcaggcaaaatg

SEQ ID NO: 865495 - DNA, 75 bp, synthetic construct
  source 1..75: mol_type = other DNA
gaggcaatgcgtcgttttgaactgatggtggaagaagcggcgcgtcacgcagaggaggcgaagaagaatgccgga

SEQ ID NO: 865496 - DNA, 75 bp, synthetic construct
  source 1..75: mol_type = other DNA
cgtaaaccgatccccacgtggtgggacctcccgggccaaagggggaacaggggcccgctggccctcaggggccga

SEQ ID NO: 865497 - DNA, 75 bp, synthetic construct
  source 1..75: mol_type = other DNA
cggactgacctttcttgcccccaaagatgccacacgggttcagggtttttttcagcatttgcaggtcaggtttgg

SEQ ID NO: 865498 - DNA, 75 bp, synthetic construct
  source 1..75: mol_type = other DNA
cttatggcaccttcagtgccggatacagctacggtaatgtggatttgcccctatatttccagacacctgttatca

SEQ ID NO: 865499 - DNA, 75 bp, synthetic construct
  source 1..75: mol_type = other DNA
caatatcgctgtcagctactatcgctataccaacgatggctattttagttttgatgaagccaatacccgcaattg

SEQ ID NO: 865500 - DNA, 75 bp, synthetic construct
  source 1..75: mol_type = other DNA
aacattattgagacaaacagcaatggctggttcccggatacagatggtgcgctcatcaccggactgacctttctt

SEQ ID NO: 865501 - DNA, 75 bp, synthetic construct
  source 1..75: mol_type = other DNA
ctgccacatatcggccaggttcagtgtggtgtatggccagctgctgttcgcgagagcgtcccttctctgctgtaa

SEQ ID NO: 865502 - DNA, 75 bp, synthetic construct
  source 1..75: mol_type = other DNA
accatgctactgctgcaactgcagcatatcggccaggttcagtgcggtgtctggccaacgcaggtccgtgaaagc

SEQ ID NO: 865503 - DNA, 75 bp, synthetic construct
  source 1..75: mol_type = other DNA
tcttggcgcggtattccttgtcgggattggcggcaagttgagtgatggtcatcgtcacgacgtgcgcgcaccgga

SEQ ID NO: 865504 - DNA, 75 bp, synthetic construct
  source 1..75: mol_type = other DNA
ctggggcatgtccacctgcgaggactgcaaggtggtggtgaccgccaacacagacaaccagctgcgcaccaaaac

SEQ ID NO: 865505 - DNA, 75 bp, synthetic construct
  source 1..75: mol_type = other DNA
tcctcgtcctcggcctctgaggccgctcaaaaagccagtgagtcatcacaaagtgcagcagaagctgaattgtca

SEQ ID NO: 865506 - DNA, 75 bp, synthetic construct
  source 1..75: mol_type = other DNA
gcatttgcaggtcaggtttggtgacgggccgtggcaggatgttaaggggctgaatgaagtgggcagtgatacagg

SEQ ID NO: 865507 - DNA, 75 bp, synthetic construct
  source 1..75: mol_type = other DNA
atgcccgttgctcacgttgccttgcccgttccgcttccccgaacctttgactatctgctgcctgaaggcatgacg

SEQ ID NO: 865508 - DNA, 75 bp, synthetic construct
  source 1..75: mol_type = other DNA
tgatcctctccagtccgctggcggatgacaaactgtgggttctcggcccggttccggcactggcacccaaacgag

SEQ ID NO: 865509 - DNA, 75 bp, synthetic construct
  source 1..75: mol_type = other DNA
ctggtttgccactgaacaaggccaggcggtggatctgaacagcctgaaacgctcacccaagcaacaacaggcgct

SEQ ID NO: 865510 - DNA, 75 bp, synthetic construct
  source 1..75: mol_type = other DNA
attgagacaaacagcaatggctggttcccgggtacagatggtgcgctcatcaccggactgacctttcttgacccc

SEQ ID NO: 865511 - DNA, 75 bp, synthetic construct
  source 1..75: mol_type = other DNA
ttacagcacatcattaacggtacgctggcgcttattaatacaataccggattcacggaaagtgaaatgggtgctg

SEQ ID NO: 865512 - DNA, 75 bp, synthetic construct
  source 1..75: mol_type = other DNA
tgccgctcaatgagctaaaagcggtagtcgaagtgctggatagtgagccggtgtttactcactccgtctggcgat

SEQ ID NO: 865513 - DNA, 75 bp, synthetic construct
  source 1..75: mol_type = other DNA
ccatcacagtgtatgaagattctcaacccggtacgctgaatgattttctcggtgccatgacggaggatgatgccc

SEQ ID NO: 865514 - DNA, 75 bp, synthetic construct
  source 1..75: mol_type = other DNA
gaggcactgcgtcgttttgaactgatggtggaagaagcggcgcgtaacgcagaggaggcgaagaagaatgccgga

SEQ ID NO: 865515 - DNA, 75 bp, synthetic construct
  source 1..75: mol_type = other DNA
tttggcgacgggccgtggcaggatgttaaggggctggatgaagtgggcagtgatacaggcagaacaggagaatga

SEQ ID NO: 865516 - DNA, 75 bp, synthetic construct
  source 1..75: mol_type = other DNA
aaagtgcagccggtaatgcagccagggatgcaacgaccgcaacagaaaaagcccgggagtcagcagaaagcgcac

SEQ ID NO: 865517 - DNA, 75 bp, synthetic construct
  source 1..75: mol_type = other DNA
gctgatgcattccgcgagatacgggatcaccttcagaatcctgctacccgtcaccagccactgatgctggcccgc

SEQ ID NO: 865518 - DNA, 75 bp, synthetic construct
  source 1..75: mol_type = other DNA
accggtctgacgggaaatgcaggtccacagggtccaaagggagataccggtgcggcaggcccggcaggcccacag

SEQ ID NO: 865519 - DNA, 75 bp, synthetic construct
  source 1..75: mol_type = other DNA
agcgagcgcggcaaatgctgacacttcagcaggggaggcatcggagtcagcccggcaggcggcagaaagtgcagc

SEQ ID NO: 865520 - DNA, 75 bp, synthetic construct
  source 1..75: mol_type = other DNA
aggggcccgctggccctcaggggccgaagggagataagggagagcgtggtgacaccggccctgtcggggcaaccg

SEQ ID NO: 865521 - DNA, 75 bp, synthetic construct
  source 1..75: mol_type = other DNA
aaacaggtgcggctggcccggtgggggcaaccggacctcagggaccgaagggcgacccgggggagacacaaatac

SEQ ID NO: 865522 - DNA, 75 bp, synthetic construct
  source 1..75: mol_type = other DNA
acacttcagcaggatatgcatcggagtcagcccggcaggcggcagaaagtgcagcctcagcaaagcagtcagagg

SEQ ID NO: 865523 - DNA, 75 bp, synthetic construct
  source 1..75: mol_type = other DNA
agagagcgctgcacatgctgacacttcagcaggggatgcatcggagtcagcccggcaggcggcagaaagtgcagc

SEQ ID NO: 865524 - DNA, 75 bp, synthetic construct
  source 1..75: mol_type = other DNA
tcctcaggggccgaagggagataaaggagagcgtggcgacaccggcccggcaggggcaaccggtgaaagggggcc

SEQ ID NO: 865525 - DNA, 75 bp, synthetic construct
  source 1..75: mol_type = other DNA
taaccgtttcaatatgtccagttgccaggcggcaaaagcgatggtcgacagcgtggcgtcgctgtggggggaaag

SEQ ID NO: 865526 - DNA, 75 bp, synthetic construct
  source 1..75: mol_type = other DNA
attatggcgtttgtgaaacagacgatggctaacgcggcgggggactttttcgaccttgcactggaaactaccgtg

SEQ ID NO: 865527 - DNA, 75 bp, synthetic construct
  source 1..75: mol_type = other DNA
gaatccgctgccctggtgacaaaggtaaaaaacctgctgctctcaatgcagaacaaacttacagatgatgtggcg

SEQ ID NO: 865528 - DNA, 75 bp, synthetic construct
  source 1..75: mol_type = other DNA
ggtcaaaaatgttcagctgatttccatgacgctgccggatatcaatgccggatgtggcggcatcgacgcctatct

SEQ ID NO: 865529 - DNA, 75 bp, synthetic construct
  source 1..75: mol_type = other DNA
cagcgtgatggccgcaaacggtacgctggcccccaccgtggtgccaatggtgaacggtggtcaggccagtattgc

SEQ ID NO: 865530 - DNA, 75 bp, synthetic construct
  source 1..75: mol_type = other DNA
atgctgtgcgtaatggaggactggatgcgaattaaacttctgtcactcttctgcggtgccgtgcttggcctgtca

SEQ ID NO: 865531 - DNA, 75 bp, synthetic construct
  source 1..75: mol_type = other DNA
gccgacgcattccgcgagatacgcgatcacctccagaatccggcaacacgtcaccagccgataatgctggctcgc

SEQ ID NO: 865532 - DNA, 75 bp, synthetic construct
  source 1..75: mol_type = other DNA
gcaagcccgtttctaccagtccctgccgcgtatcgtggcggattaccctgatgcccgctggatgttcctgaccct

SEQ ID NO: 865533 - DNA, 75 bp, synthetic construct
  source 1..75: mol_type = other DNA
tactttaagtaagtcacaaaatcacatctctcccaaaacccgctccctcatcctctggacagaacgaggcgcagc

SEQ ID NO: 865534 - DNA, 75 bp, synthetic construct
  source 1..75: mol_type = other DNA
ggcgtgctttggctctcgctgttctttgtcttgctgattggcctgccggtgttggccgaactgatgccaagtcaa

SEQ ID NO: 865535 - DNA, 75 bp, synthetic construct
  source 1..75: mol_type = other DNA
caaccttcttggtttaaagggaagaactacgttaagcacgaacgttgggtagaactctggcgcgattgcttgcgg

SEQ ID NO: 865536 - DNA, 75 bp, synthetic construct
  source 1..75: mol_type = other DNA
actacagcccccgtgatgcgtcttgggatacccagcgcacgtttaccgattccgtgggcggtatctatcagaccg

SEQ ID NO: 865537 - DNA, 75 bp, synthetic construct
  source 1..75: mol_type = other DNA
atacagcaggcccgggcgatggtggccacaggaaattatgacgaagcagttatcgaacatattaacgacaacatg

SEQ ID NO: 865538 - DNA, 75 bp, synthetic construct
  source 1..75: mol_type = other DNA
gccgtctggcagggacaggctgcgggctatgccacgggcggtaacctgtttcttcgtaatcaggttaataatctg

SEQ ID NO: 865539 - DNA, 75 bp, synthetic construct
  source 1..75: mol_type = other DNA
attgccggtgaaagtaacatcttcgctgactgggctgcatcccgacagggatgcactgtgggcggaaagatggac

SEQ ID NO: 865540 - DNA, 75 bp, synthetic construct
  source 1..75: mol_type = other DNA
ccttgccctgcagacaacggtgccggaaatcaaaaccgcaaaagacttcctgcagaaaatggcaagcgacattaa

SEQ ID NO: 865541 - DNA, 75 bp, synthetic construct
  source 1..75: mol_type = other DNA
ccgggaactatccgcaggctgtgatggacaatgttctggagaatctgaatcaggcacagcaacagattgccattt

SEQ ID NO: 865542 - DNA, 75 bp, synthetic construct
  source 1..75: mol_type = other DNA
ggtgctgctcgatgaagtagaaaaagcgcacccggatgtactcaacctgttctaccaggcgtttgacaagggcga

SEQ ID NO: 865543 - DNA, 75 bp, synthetic construct
  source 1..75: mol_type = other DNA
gtgaaatccagtttatcggaccgcaggccaaccatcagggacttattcgtgccctgatgtacggggggcaggcca

SEQ ID NO: 865544 - DNA, 75 bp, synthetic construct
  source 1..75: mol_type = other DNA
cgacatgaatcagttctttaacaagctgggctttgcgtccaatgtcactcaggcgggcgtctggcaggggcaggc

SEQ ID NO: 865545 - DNA, 75 bp, synthetic construct
  source 1..75: mol_type = other DNA
aggacaaggagcgggtactgaaaaacatcaatatcatctgggattctctgtccaaaaacaggatgcttgatggta

SEQ ID NO: 865546 - DNA, 75 bp, synthetic construct
  source 1..75: mol_type = other DNA
cagctgcagcgttttgttaagcagattatgagtaacgcgatgggttacttttttgaccttgccctgcagacaacg

SEQ ID NO: 865547 - DNA, 75 bp, synthetic construct
  source 1..75: mol_type = other DNA
aatgcactgaagtctcagattactaaacttctggccagcattcagaacaaggcggtcagtgacacgcctctggat

SEQ ID NO: 865548 - DNA, 75 bp, synthetic construct
  source 1..75: mol_type = other DNA
gcccgggataaagccctgaaatcacagattacaaaactgctcactagtattcagaataaagcggtcagcgacacg

SEQ ID NO: 865549 - DNA, 75 bp, synthetic construct
  source 1..75: mol_type = other DNA
ccagaatatcatatgggaggcactgaaaaagaacaagatgcttgacggcaacaaagagctgaaagaattcatcat

SEQ ID NO: 865550 - DNA, 75 bp, synthetic construct
  source 1..75: mol_type = other DNA
gtgaggaattaaaaaatttgcgacttactttaagtaagtcacaaaaccccatatctcccaaagcccgctccctta

SEQ ID NO: 865551 - DNA, 75 bp, synthetic construct
  source 1..75: mol_type = other DNA
aactggagtaacgattatggctgtaagacagcataccccacgacttgcgcacacacaaacggcctttgtgtggcg

SEQ ID NO: 865552 - DNA, 75 bp, synthetic construct
  source 1..75: mol_type = other DNA
tgccggagcacccttgcgaacaattaacctgctgcgaaaaaaatggatcagtgcaggggaattatatcaaccgtg

SEQ ID NO: 865553 - DNA, 75 bp, synthetic construct
  source 1..75: mol_type = other DNA
aaagcaggatagcggcggaagaagccgtaaaccgaatccccacagtggtggggccacccgggccaaagggagaac

SEQ ID NO: 865554 - DNA, 75 bp, synthetic construct
  source 1..75: mol_type = other DNA
ctgacacttcagcaggggatgcatcggagtcagcccggcaggcggcagaaagtgcagcctcagcaaagcagtcag

SEQ ID NO: 865555 - DNA, 75 bp, synthetic construct
  source 1..75: mol_type = other DNA
ccgcatttttgcgttgttttttcctggatgaggataatttctttaatgatttgtcagtcatcgtagatacctgta

SEQ ID NO: 865556 - DNA, 75 bp, synthetic construct
  source 1..75: mol_type = other DNA
aaccgcgcgtgattaccattgaggccaccagcgaacaggaagcacgccagcaatctccggctggctgcgtgatgg

SEQ ID NO: 865557 - DNA, 75 bp, synthetic construct
  source 1..75: mol_type = other DNA
tttttcagcatttgcaggtcagatttggcgacgggccgtggcaggatgtcaaggggctggatgaagtgggcagtg

SEQ ID NO: 865558 - DNA, 75 bp, synthetic construct
  source 1..75: mol_type = other DNA
ggacctcccgggccaaagggggaacaggggcccgcgggtcctcaggggccgaagggtgataagggagaggcgcgg

SEQ ID NO: 865559 - DNA, 75 bp, synthetic construct
  source 1..75: mol_type = other DNA
cgggccaaagggggaacagggggccccgcggggtccctcgaggggcccgaggggtgataaggggagagcgcggtg

SEQ ID NO: 865560 - DNA, 75 bp, synthetic construct
  source 1..75: mol_type = other DNA
ggggcccgcgggtcctcaggggccgaagggtgataagggagagcgcggtgacaccggccctgtcggggcaaccgg

SEQ ID NO: 865561 - DNA, 75 bp, synthetic construct
  source 1..75: mol_type = other DNA
acccgggggagacgcaaatacggttccgtctggggccgggaaacattattgagacaaacagccatggctggttcc

SEQ ID NO: 865562 - DNA, 75 bp, synthetic construct
  source 1..75: mol_type = other DNA
gaccgcaacagaaaaagcccgggaatcagcagaaagcgcacagtcagcggaacaaagcagaatagcggcggaaga

SEQ ID NO: 865563 - DNA, 75 bp, synthetic construct
  source 1..75: mol_type = other DNA
gtggacatccacaaagtagcgaccctgatttaatcaaagtagtgaacctgattaatgattgtaataaatacgttc

SEQ ID NO: 865564 - DNA, 75 bp, synthetic construct
  source 1..75: mol_type = other DNA
gaagaggaaaaaatcgtaacccaattattaccattctcgagtttcgtccctgaagataatattgttgaatttgtt

SEQ ID NO: 865565 - DNA, 75 bp, synthetic construct
  source 1..75: mol_type = other DNA
tcaccggttcggcaggcgtggtcggtaatgaactgaccagcaacccgctggtacgcaaactgtcgtttaccggtt

SEQ ID NO: 865566 - DNA, 75 bp, synthetic construct
  source 1..75: mol_type = other DNA
aagattataaccgtcgagtgccgttagcgaagcaggggttatttcaaaagaaacgctggagcataccaaagatac

SEQ ID NO: 865567 - DNA, 75 bp, synthetic construct
  source 1..75: mol_type = other DNA
cagtttgtcgagaaactccttagatcgtttagccaccgactgaagggagacactgtccgtcctgccggtattgcg

SEQ ID NO: 865568 - DNA, 75 bp, synthetic construct
  source 1..75: mol_type = other DNA
ttacctgcaccgccacggcgatgtacagcaacgatccgggtcacgacaaacgctggcgcgctgacgcaatcccat

SEQ ID NO: 865569 - DNA, 75 bp, synthetic construct
  source 1..75: mol_type = other DNA
tgcggctggcccggtgggggcaaccggacctcagggaccgaagggcgacccgggggagacacaaatccgttttcg

SEQ ID NO: 865570 - DNA, 75 bp, synthetic construct
  source 1..75: mol_type = other DNA
gcgtcattctgttggtggagggatttcctccgtcacatgccgggaccatcaccgtgtatgaagattctcaacctg

SEQ ID NO: 865571 - DNA, 75 bp, synthetic construct
  source 1..75: mol_type = other DNA
aacgaccgcaacagaaaaagcccgggagtcagcagaaagcgcacagtcagcggaacaaagcaggatagcggcgga

SEQ ID NO: 865572 - DNA, 75 bp, synthetic construct
  source 1..75: mol_type = other DNA
tgtttactctcggttcactgttttgcgcgctttccggcacgctgaacgaactgttgctggcacgcgcgttacagg

SEQ ID NO: 865573 - DNA, 75 bp, synthetic construct
  source 1..75: mol_type = other DNA
accggggcaacaggtccggcaggaccgcagggaccgaaaggggaaacaggtgcggctggcccggtgggggctacc

SEQ ID NO: 865574 - DNA, 75 bp, synthetic construct
  source 1..75: mol_type = other DNA
tggtggaagaggtggcgcgtcacgcagaggaggcgaagaagaatgccggagaggcggagacgtcagcgaggaatg

SEQ ID NO: 865575 - DNA, 75 bp, synthetic construct
  source 1..75: mol_type = other DNA
catggaaaggcaaccagtccggctatggaggaactggagagcagggcgaagcaggccaaaacagggctttggtca

SEQ ID NO: 865576 - DNA, 75 bp, synthetic construct
  source 1..75: mol_type = other DNA
accttagcgaaggtctatgtaaaaaaatgccagccagcatgtctggcttattacgtaaatgctgaaatggtaaaa

SEQ ID NO: 865577 - DNA, 75 bp, synthetic construct
  source 1..75: mol_type = other DNA
gcattctggcattactgctacccgtcgcggcttccgctgcaactgtaacgcgtatcctggatggcgatacgctgg

SEQ ID NO: 865578 - DNA, 75 bp, synthetic construct
  source 1..75: mol_type = other DNA
cgctgctcactctccccgtctttgcggacacacatgtctatgagtgcgaaatgtttgtggtcgaagcgaaaaacg

SEQ ID NO: 865579 - DNA, 75 bp, synthetic construct
  source 1..75: mol_type = other DNA
tcgatgaagaacgttttgctaaacaacgccatgagattgctaattactctcaacttcttcttaatcgctacccaa

SEQ ID NO: 865580 - DNA, 75 bp, synthetic construct
  source 1..75: mol_type = other DNA
gctgaaagaggaatatcatgggaagagcctggctacggctggacacccaaattctgccgagaggttgacatgacc

SEQ ID NO: 865581 - DNA, 75 bp, synthetic construct
  source 1..75: mol_type = other DNA
gacgaagacaccgaaatcatctgggtggcgttcggtaacccgacgcgtaacaccgggcgtttccgtgaatgcttc

SEQ ID NO: 865582 - DNA, 75 bp, synthetic construct
  source 1..75: mol_type = other DNA
cggtcgattccgagagtgcttccgcaagttcaaacaccgatggcgtcgacgtcaaattgatagccgcctggcaaa

SEQ ID NO: 865583 - DNA, 75 bp, synthetic construct
  source 1..75: mol_type = other DNA
taccggacgtttccgtgaatgtttccgcaagtataaacaccgctggaaaactgcgcagattgacagtcggacggt

SEQ ID NO: 865584 - DNA, 75 bp, synthetic construct
  source 1..75: mol_type = other DNA
tgggggcgaaactggacgctgattcagttcggaagcggtaccgcggatcccgagatgggcaataagcgcggggag

SEQ ID NO: 865585 - DNA, 75 bp, synthetic construct
  source 1..75: mol_type = other DNA
gactggttttattatataaatacaggaaatgctgttctggcactgatactctccacatggatatatcattccagc

SEQ ID NO: 865586 - DNA, 75 bp, synthetic construct
  source 1..75: mol_type = other DNA
agcccgggtatacgatactgagtaccctttgcaggtatatatctgcatatatataccacccgttatgattctcac

SEQ ID NO: 865587 - DNA, 75 bp, synthetic construct
  source 1..75: mol_type = other DNA
acgagatcatcatcaccagcgcgccgtccgagcgcgcgggcgcggcctcggccttgtcggagacggtgtccgaat

SEQ ID NO: 865588 - DNA, 75 bp, synthetic construct
  source 1..75: mol_type = other DNA
aaaccgctttgggcaaaagcgggcatttattattggcatggggctgtgcaccatcggggctgctgcggtagctat

SEQ ID NO: 865589 - DNA, 75 bp, synthetic construct
  source 1..75: mol_type = other DNA
gggcgttaccaggaagcgtgcgacattctgggaaaacgttatggtgttcaggctcgcgttgcggcatcgggtaca

SEQ ID NO: 865590 - DNA, 75 bp, synthetic construct
  source 1..75: mol_type = other DNA
ttatttttattgctttgggcggcatattgattgatgcctaccaggcggcgatggtggggtttggtaataaataca

SEQ ID NO: 865591 - DNA, 75 bp, synthetic construct
  source 1..75: mol_type = other DNA
accggaggccatgatgcagcaggaaatgagtaaatattataccgttgccacattctccggtatcccggacagaca

SEQ ID NO: 865592 - DNA, 75 bp, synthetic construct
  source 1..75: mol_type = other DNA
cgctaacagccgcgcctattttaatcatgatccaagtgctgttattggtttagataaaaaagaggttaaaaatgt

SEQ ID NO: 865593 - DNA, 75 bp, synthetic construct
  source 1..75: mol_type = other DNA
cgatgccaaagggcgtgagcgggcgattgcgaaagatcttggcgcggtattcctcgtcgggattggcggcaagct

SEQ ID NO: 865594 - DNA, 75 bp, synthetic construct
  source 1..75: mol_type = other DNA
tcgggaaaccggcagatcctgggtatctatgccggagcgttcggcatccgaaattactctttgggaagatgagga

SEQ ID NO: 865595 - DNA, 75 bp, synthetic construct
  source 1..75: mol_type = other DNA
tatgacccccagaacagcacctggtgccgttaaagaggacagcggctattcagggtactccttcatcgctgaccc

SEQ ID NO: 865596 - DNA, 75 bp, synthetic construct
  source 1..75: mol_type = other DNA
gataacaatctgcataccgtcatccttcgcgctcacccccggcattacggggaatgggtaagcgttgaaatcgtc

SEQ ID NO: 865597 - DNA, 75 bp, synthetic construct
  source 1..75: mol_type = other DNA
caaagacgcggctgcagctgtgggtaaagctgtcgctgaacgcgctctggaaaaaggcatcacagatgtatcctt

SEQ ID NO: 865598 - DNA, 75 bp, synthetic construct
  source 1..75: mol_type = other DNA
agtctatataattccattattaacggcactattgataccaaaattgaaagacatgaagttcatagggtgctaatg

SEQ ID NO: 865599 - DNA, 75 bp, synthetic construct
  source 1..75: mol_type = other DNA
ttaccgcgtctttgagcgtgcggtatccgtgctgggtaacgtaagcctgtcgttgttcctggcgatggcgctgat

SEQ ID NO: 865600 - DNA, 75 bp, synthetic construct
  source 1..75: mol_type = other DNA
gcctactatcgggaactcgctgaagatgccgaattaaacgctgttgctgatgagcgcatgaaaaatccagaaatt

SEQ ID NO: 865601 - DNA, 75 bp, synthetic construct
  source 1..75: mol_type = other DNA
cggagttacttgatccattactgatgccaatggacagtccagcttcggactacccggtggtgaatcttccgttaa

SEQ ID NO: 865602 - DNA, 75 bp, synthetic construct
  source 1..75: mol_type = other DNA
gggcattgaagtcccacgcgaagcgcgtccgattaccgtttatgaattgctgtttattcgtcatgaaggcaatga

SEQ ID NO: 865603 - DNA, 75 bp, synthetic construct
  source 1..75: mol_type = other DNA
tctgaattgcagtttatccctaccggtcttactgatgaggcaatgaaacgggtggtaaccgctgcgcaggtggcg

SEQ ID NO: 865604 - DNA, 75 bp, synthetic construct
  source 1..75: mol_type = other DNA
attttgtctcgctgcatcttccggaggaataccgtcagttgtgtgatttatcgacgctgcggctggagccctgca

SEQ ID NO: 865605 - DNA, 75 bp, synthetic construct
  source 1..75: mol_type = other DNA
cagaaggtgagaacggcaagtttatcggtatgggcgaaattgacgatgaaggccgcgttgcgcctcgtcgcctgg

SEQ ID NO: 865606 - DNA, 75 bp, synthetic construct
  source 1..75: mol_type = other DNA
tttatcggtatgggcgaaattgacgatgaaggccgcgttgcgcctcgtcgcctggtggttgaatacccggcgtaa

SEQ ID NO: 865607 - DNA, 75 bp, synthetic construct
  source 1..75: mol_type = other DNA
gttatgccctgatgcagggcaggcttttgacaaatctgcatacccgaaacttgcagcggcttatccgtcaggcgt

SEQ ID NO: 865608 - DNA, 75 bp, synthetic construct
  source 1..75: mol_type = other DNA
ctgcttttgccagaagggcaacggatacatatgccgatgcggatgggggcgttccctggaatgccgaatcaggcg

SEQ ID NO: 865609 - DNA, 75 bp, synthetic construct
  source 1..75: mol_type = other DNA
attttaagagtgggcgtggtttttatgagtctcattcgttaatcgttaacgataacttgtcgtgcaaaaaacttt

SEQ ID NO: 865610 - DNA, 75 bp, synthetic construct
  source 1..75: mol_type = other DNA
tgataggggcattatatggaatgatccaagtttaaatataaagtggccattagcggaaaaacctatcctttccaa

SEQ ID NO: 865611 - DNA, 75 bp, synthetic construct
  source 1..75: mol_type = other DNA
tgatagagggattatttgggatgatcctgacattgacgtaaagtggcctttaagtatccataaaccgattttatc

SEQ ID NO: 865612 - DNA, 75 bp, synthetic construct
  source 1..75: mol_type = other DNA
gaaacggctgattttttgtataagacgactaattattatcatcctgagagtgaaagtgggcttctctggaatgat

SEQ ID NO: 865613 - DNA, 75 bp, synthetic construct
  source 1..75: mol_type = other DNA
atcagagatggggcttactgatcgctgggtggattggtacagcgaatgccaatgttacgacgacccacgtaaata

SEQ ID NO: 865614 - DNA, 75 bp, synthetic construct
  source 1..75: mol_type = other DNA
acaccgcgtcgtacacgattcttgttgccgggagggaaaaaaacaccggggaagagtgggacgtcctggaattca

SEQ ID NO: 865615 - DNA, 75 bp, synthetic construct
  source 1..75: mol_type = other DNA
atggcgattctggatatcgccgcgctgggttttctcgaccttggcgcacaactgccgtccccggaatggggggcc

SEQ ID NO: 865616 - DNA, 75 bp, synthetic construct
  source 1..75: mol_type = other DNA
agagttccggtgcatttggtggcacgaacacgagcattttccctaatggttataccgcgatttcaaatctaagcg

SEQ ID NO: 865617 - DNA, 75 bp, synthetic construct
  source 1..75: mol_type = other DNA
aatagatgcggctgggcagatcattgataccttaagaggttcaacaatatcttcaatttttaacccatctataag

SEQ ID NO: 865618 - DNA, 75 bp, synthetic construct
  source 1..75: mol_type = other DNA
tatggcgaagcgtatcgctgactttgaagaccagtatcaggctgacgcggtgttcatcgacttcggttacggaac

SEQ ID NO: 865619 - DNA, 75 bp, synthetic construct
  source 1..75: mol_type = other DNA
agcaagcgcgcaggagtagctaaaggcacggtatataactacttcccgacaaaggaattattgtttgaagcggtt

SEQ ID NO: 865620 - DNA, 75 bp, synthetic construct
  source 1..75: mol_type = other DNA
aagacgggtttctggggttgagtttgatggttccaaagatattactttaaccgccgcgcatgtggctgcttttgc

SEQ ID NO: 865621 - DNA, 75 bp, synthetic construct
  source 1..75: mol_type = other DNA
cgtcggccattctcgtggggggctttaaccgttttaccggcattctggatgtggttgaagccgatatccgccgac

SEQ ID NO: 865622 - DNA, 75 bp, synthetic construct
  source 1..75: mol_type = other DNA
gtggcaaaacgtaaacgtaaactttccattaaagagtttcagagaagcctgcaggagtacatcgccaacctccgc

SEQ ID NO: 865623 - DNA, 75 bp, synthetic construct
  source 1..75: mol_type = other DNA
tgctgctgctgcagagtcctcaaaaagcgcggcagctaccagtgccagtgccgcgaaaacgtcagaaacgaatgc

SEQ ID NO: 865624 - DNA, 75 bp, synthetic construct
  source 1..75: mol_type = other DNA
acgagcgcagcctcgagcgccagcagcgcagcttcctcggcaacggcgacagcaaattctgcgaaggcggccaaa

SEQ ID NO: 865625 - DNA, 75 bp, synthetic construct
  source 1..75: mol_type = other DNA
cagaaagaccagaacggcgctgatatacccgataagggacgcttcctgaacaacattaacgcggtcagtaaaaca

SEQ ID NO: 865626 - DNA, 75 bp, synthetic construct
  source 1..75: mol_type = other DNA
ctacaacacctgtattaatcaaaagggtgtcgataaatatgtctcggcgtatctggtcggcgatccgctggaatt

SEQ ID NO: 865627 - DNA, 75 bp, synthetic construct
  source 1..75: mol_type = other DNA
gtcagcgtccctgcgtatcagtatgtttgacaccccaaccggcaaactggtaagaaccagcgacaggttaagttt

SEQ ID NO: 865628 - DNA, 75 bp, synthetic construct
  source 1..75: mol_type = other DNA
tatgcttaagatggactttgaaggtttttttgattcaattaaggaaagtgatgttgagagatttataaacgacaa

SEQ ID NO: 865629 - DNA, 75 bp, synthetic construct
  source 1..75: mol_type = other DNA
tggtcaatatcaatagcgacgactgggacgagtcgctactggcgtggagcggggccaacaaagcctggtttggtc

SEQ ID NO: 865630 - DNA, 75 bp, synthetic construct
  source 1..75: mol_type = other DNA
aggcttgctttccctgataactgcacatctcaaagacctgcctgatgatggaagaaatgaagatgtgtttaaaat

SEQ ID NO: 865631 - DNA, 75 bp, synthetic construct
  source 1..75: mol_type = other DNA
taaaaaactgggtaacgctgccgccgattattttattgccaataaaattgaccagccgaaaattgccgtcatcaa

SEQ ID NO: 865632 - DNA, 75 bp, synthetic construct
  source 1..75: mol_type = other DNA
gcaatcattactattattatgctcaggattaacatcaacttttagagtttatattgatacgccattagataaatt

SEQ ID NO: 865633 - DNA, 75 bp, synthetic construct
  source 1..75: mol_type = other DNA
aagagattatctgggaacctaaaagatgtttcgatgacaatatcatcatggatttcaaaatggttaaatgaagga

SEQ ID NO: 865634 - DNA, 75 bp, synthetic construct
  source 1..75: mol_type = other DNA
ctcagttactcacaagtgcccgtgtcaaatcatccagtgtcaaggtggtgacagaaaacagcgaagtctttttac

SEQ ID NO: 865635 - DNA, 75 bp, synthetic construct
  source 1..75: mol_type = other DNA
ttattaattcctctcttagagaaaattcaggtggagaatttaaaaaatcagatgaatcatatttttttaaattac

SEQ ID NO: 865636 - DNA, 75 bp, synthetic construct
  source 1..75: mol_type = other DNA
tgaatggtctttcccatatagaaaacccggcagcgaagataaatacacacctctatatcctacccttcaacaaga

SEQ ID NO: 865637 - DNA, 75 bp, synthetic construct
  source 1..75: mol_type = other DNA
tcaatgaagattctggatataagaaattatacgataatggaatattgtggatgggctcattctccgccttagcac

SEQ ID NO: 865638 - DNA, 75 bp, synthetic construct
  source 1..75: mol_type = other DNA
gcttatcgccgcgacacaggcacttccggcctgccgcttcatcatcaatcccaatgacgatcgctttattaatcc

SEQ ID NO: 865639 - DNA, 75 bp, synthetic construct
  source 1..75: mol_type = other DNA
gcggcaagcatggaacaacgtattcggatgctgcaacagaccatagaacaagcactacttgaacaaggtcgtatc

SEQ ID NO: 865640 - DNA, 75 bp, synthetic construct
  source 1..75: mol_type = other DNA
tgaaccaacggttgcaagatctgaaagaacgcactagagtcacaaatactgagcagttggtcttcattgccgcat

SEQ ID NO: 865641 - DNA, 75 bp, synthetic construct
  source 1..75: mol_type = other DNA
tgaatatcagctatgagttagcgcaagaaaaagcgaagactcgtgactacgcggcaagtatggaacagcgtattc

SEQ ID NO: 865642 - DNA, 75 bp, synthetic construct
  source 1..75: mol_type = other DNA
ggcgaaaggtcaccactttccggatgtgacgctggtggcgttactggatgtggacggcgcgctgttttctgccga

SEQ ID NO: 865643 - DNA, 75 bp, synthetic construct
  source 1..75: mol_type = other DNA
attggtgcagcggttctggtttatttcgggattaaaaaactgaaaaaagggcggggcagttccctgaggaatccc

SEQ ID NO: 865644 - DNA, 75 bp, synthetic construct
  source 1..75: mol_type = other DNA
ctgatttactggtatatgccaacagccctgctgcgcggtatttttcataatgttcctgattcgtgtttccggcag

SEQ ID NO: 865645 - DNA, 75 bp, synthetic construct
  source 1..75: mol_type = other DNA
cgagtttcttactcgttaccccaaaacaaagatagaactcattatggatgacggtttatctaacattattgcgga

SEQ ID NO: 865646 - DNA, 75 bp, synthetic construct
  source 1..75: mol_type = other DNA
aaaagtagcggtgcactctcagcatgggagttttctaatgttgtggggggtaatgaagagttcgaaatagaggtt

SEQ ID NO: 865647 - DNA, 75 bp, synthetic construct
  source 1..75: mol_type = other DNA
catccgggtaatgtcataggtcactggatttgcccgcagggtaatgagattccagtggtcgccgttgccagccat

SEQ ID NO: 865648 - DNA, 75 bp, synthetic construct
  source 1..75: mol_type = other DNA
aattgaaaccatcgcgctgattgctatctgtctgacggtggggaaaattgttgcgcaacttttggctggcaccgc

SEQ ID NO: 865649 - DNA, 75 bp, synthetic construct
  source 1..75: mol_type = other DNA
tgtggtggggattttcctcatcgtggttgttggcttactggtgatgcaaaatgccatcggcattgggatggctag

SEQ ID NO: 865650 - DNA, 75 bp, synthetic construct
  source 1..75: mol_type = other DNA
cgttgttcctggcgatggcgttgatggggctgaaactgtgggagctggcttcgctggcgctgccgatgctggcga

SEQ ID NO: 865651 - DNA, 75 bp, synthetic construct
  source 1..75: mol_type = other DNA
gcgagcggcagcagatgttgccagtagggtgagtggcgtgaagcgggtcacgacggcattctcctatatccggtg

SEQ ID NO: 865652 - DNA, 75 bp, synthetic construct
  source 1..75: mol_type = other DNA
ttgaagtggatactaatctagttgaaattgaaaagggatttaatccccgagaggcggtaatcggagatttgtgtt

SEQ ID NO: 865653 - DNA, 75 bp, synthetic construct
  source 1..75: mol_type = other DNA
aagcgttcaaacatcatcaaacgatgagaaactagataacccggaaacactccctgttcatgttattcctaagga

SEQ ID NO: 865654 - DNA, 75 bp, synthetic construct
  source 1..75: mol_type = other DNA
aaaatactgctatcatcattccaaaatctaaggttacagaactgcatgaaattcgtgacctgttaacaagtgagt

SEQ ID NO: 865655 - DNA, 75 bp, synthetic construct
  source 1..75: mol_type = other DNA
aaagcctctgacttgtaacaaaaacaaagataaaaatgagaacgaggatgttgccagtgctgagaatatgaactg

SEQ ID NO: 865656 - DNA, 75 bp, synthetic construct
  source 1..75: mol_type = other DNA
aaaacgctcgccattgaaataatgttaaaatattccaacgatcacaaaatggttttaaaacatatagaaggtttc

SEQ ID NO: 865657 - DNA, 75 bp, synthetic construct
  source 1..75: mol_type = other DNA
attatctgttatcttaatcgattataaaaacgaaattgaagaataccttgagaacctcgatggtaacagaagcaa

SEQ ID NO: 865658 - DNA, 75 bp, synthetic construct
  source 1..75: mol_type = other DNA
atgagaaaatattatacagttgccacattttctggcattcctgacaggcaaaaaactttaacctgtaataaagac

SEQ ID NO: 865659 - DNA, 75 bp, synthetic construct
  source 1..75: mol_type = other DNA
atgatgcaacccgactggccccccgccgatattatcgcgggcctgagaaaaaagggaacatcgctggctgaggtt

SEQ ID NO: 865660 - DNA, 75 bp, synthetic construct
  source 1..75: mol_type = other DNA
attgctgatgcgctggaaatatcaccagaaatcatctggccttcaagatactttgataacaatggtgatcgcctg

SEQ ID NO: 865661 - DNA, 75 bp, synthetic construct
  source 1..75: mol_type = other DNA
acgctatcatgatccgcagacacatgagtttatcgacagaacgcagttgatgcgaagctacaccaaaccgcaaaa

SEQ ID NO: 865662 - DNA, 75 bp, synthetic construct
  source 1..75: mol_type = other DNA
atgaaaaactcactgacgctatctcctgcgctacctggtacgtttcacgctggtggatgtggcaacaggtgagtg

SEQ ID NO: 865663 - DNA, 75 bp, synthetic construct
  source 1..75: mol_type = other DNA
aaaaacaaagatgaaagcctagatattgtagatgccgaaaatatgaactggatgcaggcattgcgttttgttgca

SEQ ID NO: 865664 - DNA, 75 bp, synthetic construct
  source 1..75: mol_type = other DNA
accagaaaccatcatgcaggaggaaatgagaaaatattatactgtagccacattttctggcatcccagacaggca

SEQ ID NO: 865665 - DNA, 75 bp, synthetic construct
  source 1..75: mol_type = other DNA
gacgcgatgttttaagccgtttactgagcggagctgcgccaaccgtgggtggcgcatttgtggtgacgcttgccg

SEQ ID NO: 865666 - DNA, 75 bp, synthetic construct
  source 1..75: mol_type = other DNA
gcaattctcgatatcgccgcgctgggctttctcgatctcggcgcacaactcccctcgcctgaatggggagcgatg

SEQ ID NO: 865667 - DNA, 75 bp, synthetic construct
  source 1..75: mol_type = other DNA
tcattttccgtccgctcaaacagcgcatccctgcagatttatatattgtttatgaaacacagcaggtgacgcccg

SEQ ID NO: 865668 - DNA, 75 bp, synthetic construct
  source 1..75: mol_type = other DNA
actcactatgtggtgctcggttttcgcttcagggtagcggaagaagagctgttactgccggatgagcagcatgac

SEQ ID NO: 865669 - DNA, 75 bp, synthetic construct
  source 1..75: mol_type = other DNA
atagcttaggttgtaaagttaaggctattattcactcggatatctctgcgtcatggagactttgtgatatatctt

SEQ ID NO: 865670 - DNA, 75 bp, synthetic construct
  source 1..75: mol_type = other DNA
gtcgcgatgttttaagccgtttactgagcggtgctgcgcctaccgtcggcggcgcatttgtggtgacgcttgccg

SEQ ID NO: 865671 - DNA, 75 bp, synthetic construct
  source 1..75: mol_type = other DNA
tcgttgcacactacatgacgctctgggcggcagacatccgggcgatgctggctggcgggccgggcggttcaacca

SEQ ID NO: 865672 - DNA, 75 bp, synthetic construct
  source 1..75: mol_type = other DNA
cagtaagtgattttcgccgcgacttcccgcagtttgctgaccctgccaaatatcccgaagcgcaaatccagtttc

SEQ ID NO: 865673 - DNA, 75 bp, synthetic construct
  source 1..75: mol_type = other DNA
gcggcagacagccgggcgatgctggctggcgggccgggcggttcaaccaatggtgttcagtcctcaaagtctgtt

SEQ ID NO: 865674 - DNA, 75 bp, synthetic construct
  source 1..75: mol_type = other DNA
tgacaagaagacgctgggagctatcggtgaagacctgcgcaaggtcgccgtaacagctatcggtgttggtattgt

SEQ ID NO: 865675 - DNA, 75 bp, synthetic construct
  source 1..75: mol_type = other DNA
caagtgatcagttccgcatcgacttccctgagttttccgacgctactcgttatcctgacgcatccgtcaacttct

SEQ ID NO: 865676 - DNA, 75 bp, synthetic construct
  source 1..75: mol_type = other DNA
tcgtggctcactacatgacgctatgggcggcagatagtcgggcaatgctggttggcggcccgggcggttcaacca

SEQ ID NO: 865677 - DNA, 75 bp, synthetic construct
  source 1..75: mol_type = other DNA
cccgcaggaaatcctggaagagcgcgtacgcgcggcgtttgccttcccggctccggtcgccaatgttgaaagcga

SEQ ID NO: 865678 - DNA, 75 bp, synthetic construct
  source 1..75: mol_type = other DNA
cgtggatgatgaaaccacgcaacagacaatgcgtgagttaaaagaactgggctacacctcggagccgcacgctgc

SEQ ID NO: 865679 - DNA, 75 bp, synthetic construct
  source 1..75: mol_type = other DNA
cccgcagaacgtactggaagagcgcgtacgcgcggcgtttgcgttcccggctccagttgccaaagttgaaggcga

SEQ ID NO: 865680 - DNA, 75 bp, synthetic construct
  source 1..75: mol_type = other DNA
ctgtagatcgttacaggaaacatcttccggtacaaaattatggcaccaccaacctcaaatcacgtagccgcttca

SEQ ID NO: 865681 - DNA, 75 bp, synthetic construct
  source 1..75: mol_type = other DNA
atttgaaaatttagcttcgctattacctgttgagtttctgattaaactgaataagaaaaacggtgaagatgtgga

SEQ ID NO: 865682 - DNA, 75 bp, synthetic construct
  source 1..75: mol_type = other DNA
gctgtagttcgcatgagatggtgcagctcccaatagagatagaggttagctacggtgtttctgctgggagcattg

SEQ ID NO: 865683 - DNA, 75 bp, synthetic construct
  source 1..75: mol_type = other DNA
gccgtccggctaccagtttatgcagcgtcgtcacgggcagtggctacccgtttctgcgacccggttatcggcaca

SEQ ID NO: 865684 - DNA, 75 bp, synthetic construct
  source 1..75: mol_type = other DNA
cagataaaagattttggtgatgaactggcaatcaaaatcggagattttgaaactgcatataaaactcttccagat

SEQ ID NO: 865685 - DNA, 75 bp, synthetic construct
  source 1..75: mol_type = other DNA
tttatgccaaagggaagtcgttcacaggcgagtttgatgacacggggataactgtcagtgtgtatgtcttcaaac

SEQ ID NO: 865686 - DNA, 75 bp, synthetic construct
  source 1..75: mol_type = other DNA
gttcaaaggttctggtatcagagaataacctgacggcaacaacgaaagaggtcgctgctgcaaccaatattgacc

SEQ ID NO: 865687 - DNA, 75 bp, synthetic construct
  source 1..75: mol_type = other DNA
cagccttcccagcaatcgtcgattgttataccagtccacccacgttagtgtggccagttccacttctgcacggtt

SEQ ID NO: 865688 - DNA, 75 bp, synthetic construct
  source 1..75: mol_type = other DNA
atgcgtacgctttttgaaaacggctgcctggccgtggagcaaggcttaaccacctttgaagagttaatccgcgta

SEQ ID NO: 865689 - DNA, 75 bp, synthetic construct
  source 1..75: mol_type = other DNA
cgcaaatattacaggggcttaacgctcggtcattcaacctgaaggaagataaatactcgggtgtctttttacctg

SEQ ID NO: 865690 - DNA, 75 bp, synthetic construct
  source 1..75: mol_type = other DNA
cccgctgttcattctatgcattgctaacctctgcacgttaggggcgtttaacgtcaagctcgctatacaggtcta

SEQ ID NO: 865691 - DNA, 75 bp, synthetic construct
  source 1..75: mol_type = other DNA
ttttgatctcgaaattctttaccgcctttaccgatatgggaaccggcatcatgttggattcccggcgtaagattg

SEQ ID NO: 865692 - DNA, 75 bp, synthetic construct
  source 1..75: mol_type = other DNA
tcggcacaccgtttgatgtcaccggtaaaacggtgatggccactattctgtttatgctctacgggctgtttttca

SEQ ID NO: 865693 - DNA, 75 bp, synthetic construct
  source 1..75: mol_type = other DNA
cctctgtgccgtggtttacaccttcttcgccacgccgatttatagtgccgacgcactggtacaaatcgagcaaaa

SEQ ID NO: 865694 - DNA, 75 bp, synthetic construct
  source 1..75: mol_type = other DNA
gcgtcacgctgatggttgaaaccattcacgccagccgggcagtgagtttaccgtcaccaaatactccacgctggg

SEQ ID NO: 865695 - DNA, 75 bp, synthetic construct
  source 1..75: mol_type = other DNA
catctacccaagcgcactggcggtagtcaccattgtggcgatgggttgcttctacagcctgaacgagaagatgta

SEQ ID NO: 865696 - DNA, 75 bp, synthetic construct
  source 1..75: mol_type = other DNA
gcgttattaacgcaccttatctgcctgggcgatgatgagccgcaggtgacggcatatggcctggaagaagaggtt

SEQ ID NO: 865697 - DNA, 75 bp, synthetic construct
  source 1..75: mol_type = other DNA
cacgatattgaactggagctgcaaaaagaggcgaaaaagaagacaccgcagatccgtttttcgccttttgaaccc

SEQ ID NO: 865698 - DNA, 75 bp, synthetic construct
  source 1..75: mol_type = other DNA
tttaaggacagggcagtgatcgaagggcaaacactcggtgtactaatcgacccgcctggctatcagtttatgcag

SEQ ID NO: 865699 - DNA, 75 bp, synthetic construct
  source 1..75: mol_type = other DNA
atgaatgctaaaattcaaacgatacctgaattactgatctgcaccaggggaaatcagaccgaagtggcccgaata

SEQ ID NO: 865700 - DNA, 75 bp, synthetic construct
  source 1..75: mol_type = other DNA
ctttccttactgtttgattttgcgaacatgatcaatgcaaatgagcatcccatcgacgctttaaaaacgatggca

SEQ ID NO: 865701 - DNA, 75 bp, synthetic construct
  source 1..75: mol_type = other DNA
agatgagggggataatccatggattccttatcgccagatgagtgaaacgccattgccagaagaacatttgctgga

SEQ ID NO: 865702 - DNA, 75 bp, synthetic construct
  source 1..75: mol_type = other DNA
ggaagacgttacctgcatagaagtcgcgcctctctttgctgatatccttcgtggtaaagggtacaaaagcacgat

SEQ ID NO: 865703 - DNA, 75 bp, synthetic construct
  source 1..75: mol_type = other DNA
aatacggcattatcagccggactatgatgaatattcgttcattgcgtgtgttttcccgtgagattgattttgagc

SEQ ID NO: 865704 - DNA, 75 bp, synthetic construct
  source 1..75: mol_type = other DNA
taataaaaaaacattacacaacaatgtcggatcaacgcggaaatattttactcgaagacatcgcaatacacttca

SEQ ID NO: 865705 - DNA, 75 bp, synthetic construct
  source 1..75: mol_type = other DNA
aacccggggcggttcactctgacagcgagaatcaacagtgataattccgttacgttacattcatggcttgatcgc

SEQ ID NO: 865706 - DNA, 75 bp, synthetic construct
  source 1..75: mol_type = other DNA
gaagatgctgaacgaaaagcggctgaacgtaaggaactggaagctaaataccaacaggcagttgaatacattact

SEQ ID NO: 865707 - DNA, 75 bp, synthetic construct
  source 1..75: mol_type = other DNA
agcaattactcgacatgcaggaaaagctcaacactgttattgaagaacgccgtaaagatgctgaacgtgaagctg

SEQ ID NO: 865708 - DNA, 75 bp, synthetic construct
  source 1..75: mol_type = other DNA
catagaagcgcgtgtgcgcatttgtattaatcagttgatacgcccaaacacaccgcacgcttattacaggtgctg

SEQ ID NO: 865709 - DNA, 75 bp, synthetic construct
  source 1..75: mol_type = other DNA
atcctagcgcctcatggccgattattgagaagtacaggattagcattatcaatctcgatgaagacgagtggggtg

SEQ ID NO: 865710 - DNA, 75 bp, synthetic construct
  source 1..75: mol_type = other DNA
aagcgaaaaatcgctgatgtcccgaactggtggcctgggtgcgccgcgtggtcaggcattctggccggttcgcgg

SEQ ID NO: 865711 - DNA, 75 bp, synthetic construct
  source 1..75: mol_type = other DNA
tttttcgtgaggcaatagccgaggggcatgtggctacgaatccggtaacagcaacccgcacagcaaaatcagaag

SEQ ID NO: 865712 - DNA, 75 bp, synthetic construct
  source 1..75: mol_type = other DNA
aagaaaattgccggacaaaccgctcgctgacatatcaacgaaagaggtggcagcaatgctaaacacctacgtagc

SEQ ID NO: 865713 - DNA, 75 bp, synthetic construct
  source 1..75: mol_type = other DNA
agtagaagaagcgttatcacaaaccgtcagcggtttaggtcgcttattaaattatacgctttgtgaaatgaccaa

SEQ ID NO: 865714 - DNA, 75 bp, synthetic construct
  source 1..75: mol_type = other DNA
agaccaataagacgaacggcttcagcgagcgtctgatcatcgccgactgcatttccgatttctggcgggacagcg

SEQ ID NO: 865715 - DNA, 75 bp, synthetic construct
  source 1..75: mol_type = other DNA
gctgaagccaggtgagaagctgctggagcctgaagccgggcgcggagatctgctggcctgcatcgacgccaatcc

SEQ ID NO: 865716 - DNA, 75 bp, synthetic construct
  source 1..75: mol_type = other DNA
tactgcgacttaaccaccggccggacgacgagcgcacacgctttaacagaacctggctggacaaagtcgacctgg

SEQ ID NO: 865717 - DNA, 75 bp, synthetic construct
  source 1..75: mol_type = other DNA
tttaaggcgctgagtcctgcgcacaagacaaataagacaaacggtttcagcgagcggctgataatcgctgactgc

SEQ ID NO: 865718 - DNA, 75 bp, synthetic construct
  source 1..75: mol_type = other DNA
tttgccgggggactcaacaacactgaactggatgatgctggataatttcgtctacgccaaaggtaagtcgttcac

SEQ ID NO: 865719 - DNA, 75 bp, synthetic construct
  source 1..75: mol_type = other DNA
ggcgatctggcaatgacaaacgcgtatggtacttctctgattccggtctccagaagtcacaggtggaagagctgg

SEQ ID NO: 865720 - DNA, 75 bp, synthetic construct
  source 1..75: mol_type = other DNA
tttatacaaaataaaagaagaaaatctattgttgtacatattaataaaatcacttatccgcctgtaaattcacta

SEQ ID NO: 865721 - DNA, 75 bp, synthetic construct
  source 1..75: mol_type = other DNA
atgacgcatcctcacgataatatccgggtaggcgcaatcactttcgtctactccgttaacctttatataagaaac

SEQ ID NO: 865722 - DNA, 75 bp, synthetic construct
  source 1..75: mol_type = other DNA
aaaatcacgtaaaaaaacgttaccaaaagcgccacccaagtatcaatttgaagaaaatggtgaaacgaaatactg

SEQ ID NO: 865723 - DNA, 75 bp, synthetic construct
  source 1..75: mol_type = other DNA
ggcttacagtatgcctgctgcaatccccgcgccatgccgcactgcgccaaaaacacgggcaccaaagcagttcgg

SEQ ID NO: 865724 - DNA, 75 bp, synthetic construct
  source 1..75: mol_type = other DNA
atgaatacagccctttccatcatccacgatgccagctcaaacacggctatcgactatcgtcaggaaatgaatgtc

SEQ ID NO: 865725 - DNA, 75 bp, synthetic construct
  source 1..75: mol_type = other DNA
cggcagccgggcgtaggaacccgtgttatctgaaggcgatactacacgcgctaggcgtgtttttttgtgtcgcag

SEQ ID NO: 865726 - DNA, 75 bp, synthetic construct
  source 1..75: mol_type = other DNA
tttaataaaggatgaaataaaaataataaaaaggatacataaagataaatatccaggttcggatttattcaaata

SEQ ID NO: 865727 - DNA, 75 bp, synthetic construct
  source 1..75: mol_type = other DNA
tttaataaaacaggaaataaaaataataaaaagagatcacaaaaataaatacccaggctctaatttatttaatag

SEQ ID NO: 865728 - DNA, 75 bp, synthetic construct
  source 1..75: mol_type = other DNA
gcataaaataatttcactttgcggtgagatgaaaacagtaacgcagcgaatttctgatatatataatgaaatgga

SEQ ID NO: 865729 - DNA, 75 bp, synthetic construct
  source 1..75: mol_type = other DNA
aggcagaaatcctaaaacaggagatttacaaaagcatttacaaaatggttatgagcgtgttcaaacgggagagtt

SEQ ID NO: 865730 - DNA, 75 bp, synthetic construct
  source 1..75: mol_type = other DNA
tttgtactcgctcagctccgtgcgctagctttaggcaatgagcgtattaccgctggtttattgcggcaagtgtat

SEQ ID NO: 865731 - DNA, 75 bp, synthetic construct
  source 1..75: mol_type = other DNA
tttatcgtgatacgggggtagaggcttatcgtgataatccttttatcgaggccttaccaccattacaagagtcag

SEQ ID NO: 865732 - DNA, 75 bp, synthetic construct
  source 1..75: mol_type = other DNA
atctgcatgcagtattctcggaaatgaagcggctgggggaatgggaaggagataacccgctgtctggaatcaggc

SEQ ID NO: 865733 - DNA, 75 bp, synthetic construct
  source 1..75: mol_type = other DNA
cgattttctggcaacattgggctttttgagcaacagagttccgatattcaacctacacagcatcaaaccaagcca

SEQ ID NO: 865734 - DNA, 75 bp, synthetic construct
  source 1..75: mol_type = other DNA
gtggctggtagcaaatgggatggaaaaatatctaatctgaacatatcggagcaagcctttccggagctctatcgt

SEQ ID NO: 865735 - DNA, 75 bp, synthetic construct
  source 1..75: mol_type = other DNA
aataatgaaataaaacagcgcgtgccttccagatatctgggtgaattaattaaacttggtcggatgcagaagaat

SEQ ID NO: 865736 - DNA, 75 bp, synthetic construct
  source 1..75: mol_type = other DNA
ttctgatatatataatgaaatggatttaataaaggatgaaataaaaataataaaaaggctacataaaaataaata

SEQ ID NO: 865737 - DNA, 75 bp, synthetic construct
  source 1..75: mol_type = other DNA
aggcagctctcgcacgcgcaggtatagagctgcccaaaggacagcgtacccatgtactacgtcatacattcgcga

SEQ ID NO: 865738 - DNA, 75 bp, synthetic construct
  source 1..75: mol_type = other DNA
gaagaaatcaaatcaaaagtagagttcaacacagagctgtacaaactgaccctgacctccattgaaaagacccgt

SEQ ID NO: 865739 - DNA, 75 bp, synthetic construct
  source 1..75: mol_type = other DNA
acgaatcgctggatgatattcgccgtaaagtccacgcaggtgtgcgcagtgcgatgatcgacggcagccacttcc

SEQ ID NO: 865740 - DNA, 75 bp, synthetic construct
  source 1..75: mol_type = other DNA
aaacgctgttaaaaatgagtttggcgattacggtgtgttatacgctggcactcctggttgcgctcatcggaacgg

SEQ ID NO: 865741 - DNA, 75 bp, synthetic construct
  source 1..75: mol_type = other DNA
gcactggtggcattatttttcaccatcgcattttgtagcggcataggcactgttggtggggctgaggcaatgagt

SEQ ID NO: 865742 - DNA, 75 bp, synthetic construct
  source 1..75: mol_type = other DNA
atttcattgtgtatatgggaattatatttttatggtcttttttaggtggagggattatatacggttttggtgcaa

SEQ ID NO: 865743 - DNA, 75 bp, synthetic construct
  source 1..75: mol_type = other DNA
atatgcgcgtcggcatggatgcaatgaaagacgttgtcaggaataaaattaatgtctgtggttcggcgaatcgaa

SEQ ID NO: 865744 - DNA, 75 bp, synthetic construct
  source 1..75: mol_type = other DNA
tgtccgtcgcactattgaacttggcgtcacaaaagtgaacgttgccacagaattaaaaatagccttcgccggcgc

SEQ ID NO: 865745 - DNA, 75 bp, synthetic construct
  source 1..75: mol_type = other DNA
atgaccgatctcttttccagtcccgaccatactcttgatgcgcttggcctgcgttgcccggaaccggtgatgatg

SEQ ID NO: 865746 - DNA, 75 bp, synthetic construct
  source 1..75: mol_type = other DNA
acatatctcaggtaaccaaaaatttgagtggcgatttatgattgataacattctggaagacactaaagaagtggt

SEQ ID NO: 865747 - DNA, 75 bp, synthetic construct
  source 1..75: mol_type = other DNA
cctgctggttactggtgtgctgcctgctgttcggcaccctgaaactgttgctggctgttattgaagatcaccgag

SEQ ID NO: 865748 - DNA, 75 bp, synthetic construct
  source 1..75: mol_type = other DNA
ttgcattttgtagcggcatcggcactgttggcggggcagaggctatgagtgcagtagggacgcaggaatctggaa

SEQ ID NO: 865749 - DNA, 75 bp, synthetic construct
  source 1..75: mol_type = other DNA
ttaccgacgaggaaccgcctgccgccttaaaatcgcgcttacaggacagccaaatcgaaatcatccttccccagg

SEQ ID NO: 865750 - DNA, 75 bp, synthetic construct
  source 1..75: mol_type = other DNA
gtgtatacaccagataatgtgccgcgcaatgagagcggcaaaaaaatctggcgagaagatgatctgccaattatc

SEQ ID NO: 865751 - DNA, 75 bp, synthetic construct
  source 1..75: mol_type = other DNA
agggtgatgacggtgccggaactcactggtgaagccagtcaactctatgcgcgagaaggctttaacattattgcc

SEQ ID NO: 865752 - DNA, 75 bp, synthetic construct
  source 1..75: mol_type = other DNA
ttcgaacagcgtgtcgccacacataaagaagctcactggcaggcttattatcaagctcgccaccgcctgccgtga

SEQ ID NO: 865753 - DNA, 75 bp, synthetic construct
  source 1..75: mol_type = other DNA
caccgctgaagccgtgaacgtggcccacgcagtgggcgtccgcgcctggtttttagcgaatcgcgcaggtgagcc

SEQ ID NO: 865754 - DNA, 75 bp, synthetic construct
  source 1..75: mol_type = other DNA
cattcgattctcgccatcaatacgatcctgcaactgaatcaacgcggacaaaacgtaacggttatcagcaacttg

SEQ ID NO: 865755 - DNA, 75 bp, synthetic construct
  source 1..75: mol_type = other DNA
tgcttgccgtgggtaagaacgacgtacctaaagctggtggcgggttgtatagcagtgatgattttgataacgatc

SEQ ID NO: 865756 - DNA, 75 bp, synthetic construct
  source 1..75: mol_type = other DNA
gatattgccaataaacttcgtaaacattacaaaaaaaatgagttgcttgcagaagctgctattgcagcaatcgca

SEQ ID NO: 865757 - DNA, 75 bp, synthetic construct
  source 1..75: mol_type = other DNA
gttcgcaatagtgaaaaaatatcgttaagtgacagcgaacttgatgcggcattttattcaatagtcgttatgctt

SEQ ID NO: 865758 - DNA, 75 bp, synthetic construct
  source 1..75: mol_type = other DNA
gaataagtcatcttggtttgatttttatttatcacttgcaggtatcattattatttattttgcattgttgttttt

SEQ ID NO: 865759 - DNA, 75 bp, synthetic construct
  source 1..75: mol_type = other DNA
acctcatgaaggggcgcggcgtatctcaggagacgctggcagaacacctcggcattacaaagggggcagttagcc

SEQ ID NO: 865760 - DNA, 75 bp, synthetic construct
  source 1..75: mol_type = other DNA
gcgcaatagtgaaaaaatatctttaagtgacagtgaactggatgcggcattttattcaatagttgttatgcttga

SEQ ID NO: 865761 - DNA, 75 bp, synthetic construct
  source 1..75: mol_type = other DNA
ttcagggggaaatattctgttagcaataatgatgaaatcaatgattatatatcaaaactaaaaaaacaatgtgaa

SEQ ID NO: 865762 - DNA, 75 bp, synthetic construct
  source 1..75: mol_type = other DNA
gagaaaatcatcatggtttaatttttatttgtcatttgcatgtattattgttatttattttgtgttgttgttggt

SEQ ID NO: 865763 - DNA, 75 bp, synthetic construct
  source 1..75: mol_type = other DNA
tgttatccccggtgacagtaatgacagttcagtattaaagaaagcgggaatcgatcgttgccgggccattctggc

SEQ ID NO: 865764 - DNA, 75 bp, synthetic construct
  source 1..75: mol_type = other DNA
acccggatcgcgaagggcaactgctggttgatgagattctggatgatgtgggctgtactaaaccggtactgcgtt

SEQ ID NO: 865765 - DNA, 75 bp, synthetic construct
  source 1..75: mol_type = other DNA
ggctttaaccgggaaaaccggtaaggttgtggaatataagcaagagcctaagaaaaaatttcaccctaaagccta

SEQ ID NO: 865766 - DNA, 75 bp, synthetic construct
  source 1..75: mol_type = other DNA
gtgaagatgctgagaaacagctgaaaaccatccggcatttggtagaacgggctgacactattgttaatgctggcg

SEQ ID NO: 865767 - DNA, 75 bp, synthetic construct
  source 1..75: mol_type = other DNA
atccagatcgcgaggggcagttactggttgatgaaatccttgatgacatgggatgtactaaaccggttctgcgtt

SEQ ID NO: 865768 - DNA, 75 bp, synthetic construct
  source 1..75: mol_type = other DNA
ctcgccacgcgcaaattccacccgtgggaaggcggggaagggaaggtcaccagtcagtttatcctcaaccagtta

SEQ ID NO: 865769 - DNA, 75 bp, synthetic construct
  source 1..75: mol_type = other DNA
tgtagcggttatccgacctgcaaggagtcatacccggatatcaaaggcagtccgaactataaccccgtaaaacgt

SEQ ID NO: 865770 - DNA, 75 bp, synthetic construct
  source 1..75: mol_type = other DNA
ctctgacggcagcagcaatgtaccgctgatgacgccgctgcgcttaacgcttgaagataaccacctgttggttac

SEQ ID NO: 865771 - DNA, 75 bp, synthetic construct
  source 1..75: mol_type = other DNA
gtagtgccgcagccggaacaattttcgcttttattagttttacgacgttactgttttattccacctatggcgcgc

SEQ ID NO: 865772 - DNA, 75 bp, synthetic construct
  source 1..75: mol_type = other DNA
gtttggcagcgaaattctggcgcgagttttaaatggtgaagagattaataatgatatgctcgtttcaatgttgtt

SEQ ID NO: 865773 - DNA, 75 bp, synthetic construct
  source 1..75: mol_type = other DNA
catgtatgaacaggccgaaccggatgtgtatacaccagataatgtaccgcgcaatgagagcggcaaaaaaatctg

SEQ ID NO: 865774 - DNA, 75 bp, synthetic construct
  source 1..75: mol_type = other DNA
gacattatcagtaccaggctgggaagggggctgatagccattctgccagaactggttaaaagcccggtcatgaca

SEQ ID NO: 865775 - DNA, 75 bp, synthetic construct
  source 1..75: mol_type = other DNA
tgaagcgttagtcgcaagaacgatgattaaacatgcgcggaatacattgttagtggccgatcatacgaagtttgc

SEQ ID NO: 865776 - DNA, 75 bp, synthetic construct
  source 1..75: mol_type = other DNA
ttcacggtgcgcgaatcctggcaatgttgggggattcggttaccactgaccatatttctccggcaggcagtatta

SEQ ID NO: 865777 - DNA, 75 bp, synthetic construct
  source 1..75: mol_type = other DNA
gtgactatcatcacggcgtgcaggtgctggagattaacgacggcacccgcgtcatttccaccgtatccacagcca

SEQ ID NO: 865778 - DNA, 75 bp, synthetic construct
  source 1..75: mol_type = other DNA
cagcaagacgcgcagcagcggcaaagtggcagcagctacaacgcggagccgcagcgttctccatcacactggcac

SEQ ID NO: 865779 - DNA, 75 bp, synthetic construct
  source 1..75: mol_type = other DNA
aaacttaccggaaaattacgtgaaggtattaccgccacagacctggttctcactgttacccaaatgctgcgcaaa

SEQ ID NO: 865780 - DNA, 75 bp, synthetic construct
  source 1..75: mol_type = other DNA
gcttatccggatacactcgttggtactgactcgcacaccaccatgatcaacggccttggcgtgctggggtggggc

SEQ ID NO: 865781 - DNA, 75 bp, synthetic construct
  source 1..75: mol_type = other DNA
gcggcgatactgcaaaggttaacccgctctcaccggtcgacctggtcattgaccactcggtgaccgtcgatcgtt

SEQ ID NO: 865782 - DNA, 75 bp, synthetic construct
  source 1..75: mol_type = other DNA
cgcaggagtctgatgcgaaattcctgacccgtcttgctgaacgcaacggcggtgaggtgtcggtaaaaatgggaa

SEQ ID NO: 865783 - DNA, 75 bp, synthetic construct
  source 1..75: mol_type = other DNA
attttcgtgaaacgctgaatacccgtcgtgaaaagtcgtggcacaagaccactgtcggggaagtggtgaaggaaa

SEQ ID NO: 865784 - DNA, 75 bp, synthetic construct
  source 1..75: mol_type = other DNA
gcctgatgagtttgacgctgacggataaccggggctttgaagcggaccagcttgatctggagctggatgacgctg

SEQ ID NO: 865785 - DNA, 75 bp, synthetic construct
  source 1..75: mol_type = other DNA
cctgaccacggtatatgccacaaaagcgcaggccatgcgcgccgctcaggcgaagtgggataaactgcaacgggg

SEQ ID NO: 865786 - DNA, 75 bp, synthetic construct
  source 1..75: mol_type = other DNA
ggaaatgcctgtgaaggtcagtggttttaaacagccaatagatgatgcggaatggaccattacgactctgacaca

SEQ ID NO: 865787 - DNA, 75 bp, synthetic construct
  source 1..75: mol_type = other DNA
ggctcctggcatgacaccacgctcggtgcgattgttgaggcgatagcctcccgtaacaggctggaagccagtgtc

SEQ ID NO: 865788 - DNA, 75 bp, synthetic construct
  source 1..75: mol_type = other DNA
ctctaacccaagtgtgctgatggccgcaggcttgctggcgaaaaaagccgtaactctgggcctcaagcggcaacc

SEQ ID NO: 865789 - DNA, 75 bp, synthetic construct
  source 1..75: mol_type = other DNA
cctgatttatatctcaaaatgatgctgcacctcacggtcggtatgattatcgatcaacgggctatcctgcgccgc

SEQ ID NO: 865790 - DNA, 75 bp, synthetic construct
  source 1..75: mol_type = other DNA
aatgtcattgctgatcttcagcgccctaccatggtacttgcgcccaacaaaacgctggcggcccagctgtatggc

SEQ ID NO: 865791 - DNA, 75 bp, synthetic construct
  source 1..75: mol_type = other DNA
tgtggttcagcgctctcccttaaggcgaggcatggcaacatactggtttctgaaaggagagaggcaggcggggca

SEQ ID NO: 865792 - DNA, 75 bp, synthetic construct
  source 1..75: mol_type = other DNA
cattagcgccgcaaaccatctatgtttcggcgacgccgggtaattacgagctggaaaaatccggtggtgatgtgg

SEQ ID NO: 865793 - DNA, 75 bp, synthetic construct
  source 1..75: mol_type = other DNA
tccatctcacggtcggtatgattatcgatcagcgcgcgatcctgcgccgactggcggagctgcaatacgctcgta

SEQ ID NO: 865794 - DNA, 75 bp, synthetic construct
  source 1..75: mol_type = other DNA
acgccgcgcgagcgcatcgtacaggcgatggaagagatcaaagaagaactggccgccagacgcaaagtgctgttg

SEQ ID NO: 865795 - DNA, 75 bp, synthetic construct
  source 1..75: mol_type = other DNA
tatctaattgataaaattaatgatttcaagcctgaagatgataggacaaggtttctaagactgttctacaatggt

SEQ ID NO: 865796 - DNA, 75 bp, synthetic construct
  source 1..75: mol_type = other DNA
tacaaaatacaacatgatgggaatattttattaattgttgattcggtggatgaagtaaaggaatcacttgaggaa

SEQ ID NO: 865797 - DNA, 75 bp, synthetic construct
  source 1..75: mol_type = other DNA
ggtacagggatttgccatcaggttaacctcgaatatctcggcaaggcggtgtggagtgaacaacagaacggtgaa

SEQ ID NO: 865798 - DNA, 75 bp, synthetic construct
  source 1..75: mol_type = other DNA
tgtggttcagcgctctcccttaagtcgaggcatggcaacatactggcttctgaaaggagagaggcaggcgggaca

SEQ ID NO: 865799 - DNA, 75 bp, synthetic construct
  source 1..75: mol_type = other DNA
tgtggttcagcgctctcccttaagacgaggcatggcaacatactggcttctgaaaggagagaggcaggcgggtca

SEQ ID NO: 865800 - DNA, 75 bp, synthetic construct
  source 1..75: mol_type = other DNA
aacatatcttgcaaaaagaaaccttaatgtcgatgaagaaaagttattcaaaagattaatatatcgtagtgaggt

SEQ ID NO: 865801 - DNA, 75 bp, synthetic construct
  source 1..75: mol_type = other DNA
taaaactctctgccgaagtgtgcgatctgtcagaagatatgcgcagcgcgatggataaaggcgctcgcggcgtga

SEQ ID NO: 865802 - DNA, 75 bp, synthetic construct
  source 1..75: mol_type = other DNA
agagattaccggcccggttgagcgcaagatggtgatcaacgcgctcaacgccaatgtgaaagtctttatggccga

SEQ ID NO: 865803 - DNA, 75 bp, synthetic construct
  source 1..75: mol_type = other DNA
tcaaaacgttgaaaaactatcccgatcgcgtcctgccagacagacaggcagtgacgatggataaaccgttcctta

SEQ ID NO: 865804 - DNA, 75 bp, synthetic construct
  source 1..75: mol_type = other DNA
atcgctttaatctgccgcgcggcaccatcaaggcgacgttgctgattgaaacgctgcctgctgtgttccagatgg

SEQ ID NO: 865805 - DNA, 75 bp, synthetic construct
  source 1..75: mol_type = other DNA
ccggtttcagcgacgctgaccttctatcaactggtacagcctttgctggcaaaactaagcggcaacaccgccagc

SEQ ID NO: 865806 - DNA, 75 bp, synthetic construct
  source 1..75: mol_type = other DNA
ccgtttaacgcgttgttcggaggcctgtaatggcagaactcagcgatcaggagatgctgcgctacaaccggcaaa

SEQ ID NO: 865807 - DNA, 75 bp, synthetic construct
  source 1..75: mol_type = other DNA
acgctgcccgccgtgttccagatggacgaaatccttcacgcgctgcgtgaccatattgttggtctgaactgcggt

SEQ ID NO: 865808 - DNA, 75 bp, synthetic construct
  source 1..75: mol_type = other DNA
gacccgtcttgctgaacgcaacggcagtgaggtgtcggtaaaaatgggaaaactgctgtttctcaaagcggggca

SEQ ID NO: 865809 - DNA, 75 bp, synthetic construct
  source 1..75: mol_type = other DNA
caggcagtacgctgacgccggattacatgctgatgctcgacagcagggatattaccggcaatatcagtgaccgtc

SEQ ID NO: 865810 - DNA, 75 bp, synthetic construct
  source 1..75: mol_type = other DNA
ccttgaacgcgcccgccaggccggtattgcaacacatacacttgtcgccagcgagtttgacagccgtgaagctta

SEQ ID NO: 865811 - DNA, 75 bp, synthetic construct
  source 1..75: mol_type = other DNA
atggcggtatttaacgacatcctcggctctcgtaaaaaccagttagaagtcctgcgcgagcaagatgcaccggtt

SEQ ID NO: 865812 - DNA, 75 bp, synthetic construct
  source 1..75: mol_type = other DNA
cagcagttaatgatgatgaccatgttgggtaggtctgatgctggcagtgagtttgtattacaatattacccgcag

SEQ ID NO: 865813 - DNA, 75 bp, synthetic construct
  source 1..75: mol_type = other DNA
ccatggtataacctatagtaaatggatgccattactgggtaataacacgacttttggtgtccatcaattttccat

SEQ ID NO: 865814 - DNA, 75 bp, synthetic construct
  source 1..75: mol_type = other DNA
caaaactaagcggcaacaccgccagcggcctgcccgcgcgccagcgcgtacgcacagcgtcccgcctgaaaaaaa

SEQ ID NO: 865815 - DNA, 75 bp, synthetic construct
  source 1..75: mol_type = other DNA
cctgaccacggtatatgccacgaaagcgcaggccatgcgcgccgctcaggcgaagtgggataagctgcaacgggg

SEQ ID NO: 865816 - DNA, 75 bp, synthetic construct
  source 1..75: mol_type = other DNA
aatggaccattacgactctgacacataccgtcagcccagataacggttttacaaccagtattgaactcgaagtga

SEQ ID NO: 865817 - DNA, 75 bp, synthetic construct
  source 1..75: mol_type = other DNA
cagcatcagtattgaaggcagggatataaccactgtgctggacaaccgcctgatggggcttacgctgacggataa

SEQ ID NO: 865818 - DNA, 75 bp, synthetic construct
  source 1..75: mol_type = other DNA
tgacacattttctgaataatagcggcttcacgacgtccttagagcttgaggtcaggctttctgatgtggagtacg

SEQ ID NO: 865819 - DNA, 75 bp, synthetic construct
  source 1..75: mol_type = other DNA
tgcaacggggcgttgcggagttctccatcagtctggctactggtcgggcagatatttacacggaaacgccggtca

SEQ ID NO: 865820 - DNA, 75 bp, synthetic construct
  source 1..75: mol_type = other DNA
aagcggggcagggggtgacggccagaggtaaaaaaatcccgcagattaccatcacccgcagcgatggtgaccgtc

SEQ ID NO: 865821 - DNA, 75 bp, synthetic construct
  source 1..75: mol_type = other DNA
agccgtatcatggtgaatggcctgctggcacctgtattcgcattatgaccggtgctccggtgccggaaggctgtg

SEQ ID NO: 865822 - DNA, 75 bp, synthetic construct
  source 1..75: mol_type = other DNA
aaaatattcgccgtcgcggtgaagatatctctgcgggtgcggttgttttcccggcggggactcgcctgactaccg

SEQ ID NO: 865823 - DNA, 75 bp, synthetic construct
  source 1..75: mol_type = other DNA
gcccaggaaacgctgccactggttcagtgttttggtcgtattctggcgagcgatgtcgtttcgccgcttgatgtc

SEQ ID NO: 865824 - DNA, 75 bp, synthetic construct
  source 1..75: mol_type = other DNA
tcgtgctggaacgcgatcgcggcaatgttgaagcgggcgaatgggtggaagtcgagccgtttaacgcgttgttcg

SEQ ID NO: 865825 - DNA, 75 bp, synthetic construct
  source 1..75: mol_type = other DNA
gcacggcttctcgcctcaagaaaacgcctggtcgtcttgatttccagcgtggtgtgctgcaacgcaatgccgacg

SEQ ID NO: 865826 - DNA, 75 bp, synthetic construct
  source 1..75: mol_type = other DNA
ttgcgaggtgatcaacttagggattatccgcgacgatccccacgccttgcgcacagcatttattgaagccgacag

SEQ ID NO: 865827 - DNA, 75 bp, synthetic construct
  source 1..75: mol_type = other DNA
ggtcgcttttcttaccagataaacccgatgccgttcgggtgtggcaatccacttaccaacatgtttaaccagcta

SEQ ID NO: 865828 - DNA, 75 bp, synthetic construct
  source 1..75: mol_type = other DNA
ggtcgggatgaaaaggatatccggcgtctctggcaggagaaagtggatgcaatgcaggagtctgccacccgtcag

SEQ ID NO: 865829 - DNA, 75 bp, synthetic construct
  source 1..75: mol_type = other DNA
tcgggatgaaaaggatatccggcgtctctggcaggagaaagtggatgcaatgcaggagtctgccacccgtcagca

SEQ ID NO: 865830 - DNA, 75 bp, synthetic construct
  source 1..75: mol_type = other DNA
acctggggcgcactggcgtgtgtaggactggtactgatgatttggctgtatcaggcgcttaagttcagaaaccgc

SEQ ID NO: 865831 - DNA, 75 bp, synthetic construct
  source 1..75: mol_type = other DNA
tcaacccgcaaaaagctctgatctggcgtatcgtccatcgggacaatatcccgtggattctggataacgggctgc

SEQ ID NO: 865832 - DNA, 75 bp, synthetic construct
  source 1..75: mol_type = other DNA
aggcttcttaccacgtaaacccgatgccgttcgggtgtggcaacccactaacccacatgtttaaccagctactga

SEQ ID NO: 865833 - DNA, 75 bp, synthetic construct
  source 1..75: mol_type = other DNA
aacatattccattaattatttcttctattccgaatattcctgaccgtaccgatgcattaatgcatcatgggcgct

SEQ ID NO: 865834 - DNA, 75 bp, synthetic construct
  source 1..75: mol_type = other DNA
actaaaagatgcttgccatattgatatactaagtatcatagatactacggtcgatgaagttcgcgtctgtggtaa

SEQ ID NO: 865835 - DNA, 75 bp, synthetic construct
  source 1..75: mol_type = other DNA
atcagaaaggaattgagtcactgggatttacctgtgtcagtcctgatgcagatgaccagaaaaacgtgatgaaaa

SEQ ID NO: 865836 - DNA, 75 bp, synthetic construct
  source 1..75: mol_type = other DNA
aaaaaactgactggtcgggatgaacaggatatccggcgtctctggcaggagaaagtggatgcaacgcaggagtct

SEQ ID NO: 865837 - DNA, 75 bp, synthetic construct
  source 1..75: mol_type = other DNA
ttgtgtatggcactgggtaagggatttttagttatagctattctttgtggtgttgccacattctgtgtttctggc

SEQ ID NO: 865838 - DNA, 75 bp, synthetic construct
  source 1..75: mol_type = other DNA
gcggatatccagaaaacagggttctttgtgtatggcactgggtaagggatttttagttatagctattctttgtgg

SEQ ID NO: 865839 - DNA, 75 bp, synthetic construct
  source 1..75: mol_type = other DNA
acgccttattgatgagtgccccgaaccactgaaatctgtcgtcaagtttgcgctggcaactggtctgagaaagtc

SEQ ID NO: 865840 - DNA, 75 bp, synthetic construct
  source 1..75: mol_type = other DNA
cagccggtactgccagcgcaaaaccaggccttaccgccggaagttcgcgcgttcctcaatgccgggagaacgcgt

SEQ ID NO: 865841 - DNA, 75 bp, synthetic construct
  source 1..75: mol_type = other DNA
tgcttaccggacgtgcctcggtcgtggaacggctgacggaagtgatccagcgcgtggatcatgcgggaaaccgca

SEQ ID NO: 865842 - DNA, 75 bp, synthetic construct
  source 1..75: mol_type = other DNA
gagcaaggcttaagcctgatgccgcacactgcgcagccggtactgccagcgcaaaaccaggcattgccgccggaa

SEQ ID NO: 865843 - DNA, 75 bp, synthetic construct
  source 1..75: mol_type = other DNA
ttgatgagatgaacgcgtcgattgccaaactggagcagcaaaaagccgcccaggagcgcagcctcgccgcacaac

SEQ ID NO: 865844 - DNA, 75 bp, synthetic construct
  source 1..75: mol_type = other DNA
gagcgcgcggtacgccaaaagcaacaacaacgctccagcctgcttgctcagttgaaaaagcaggaagaagcgatc

SEQ ID NO: 865845 - DNA, 75 bp, synthetic construct
  source 1..75: mol_type = other DNA
acactgcgcagccggtactaccagcgcaaaaccaggccttaccgccggaagttcgcgcgttcctcaatgccggga

SEQ ID NO: 865846 - DNA, 75 bp, synthetic construct
  source 1..75: mol_type = other DNA
cgttcctccggaaatactggctattttgccgcaaacccagggatttcatgacaccgtgacttttgagttaaacgg

SEQ ID NO: 865847 - DNA, 75 bp, synthetic construct
  source 1..75: mol_type = other DNA
gtgcgcgggttgagttgctattattccggcaatcccgaaacaggagtaaaactagaacctgaatttaataataca

SEQ ID NO: 865848 - DNA, 75 bp, synthetic construct
  source 1..75: mol_type = other DNA
ttgtgcgtaagtggctggaagagcgcaaactggatgaggtacgcaccagcgaacttttcgatgtttggtgggact

SEQ ID NO: 865849 - DNA, 75 bp, synthetic construct
  source 1..75: mol_type = other DNA
tttctcaggcgaaaccgcagaaaggctccacggtgatcagtgaaaacggcgctaccaccataaatccggatacta

SEQ ID NO: 865850 - DNA, 75 bp, synthetic construct
  source 1..75: mol_type = other DNA
acaccgcgcagccggtactgccagcgcaaaatcaggctctaccgccggaagttcgtgcgttccttaatgccggga

SEQ ID NO: 865851 - DNA, 75 bp, synthetic construct
  source 1..75: mol_type = other DNA
gcgccgcctgatccgtcggctggactcagaaatggaacgcagcggcaacagccaggtgttctatctcaaatacag

SEQ ID NO: 865852 - DNA, 75 bp, synthetic construct
  source 1..75: mol_type = other DNA
gatgcattaatgcataacggcccttcacctttacccactatgcgtgactatatgcataaactggaagatgcaggg

SEQ ID NO: 865853 - DNA, 75 bp, synthetic construct
  source 1..75: mol_type = other DNA
ggcatcgcagatgaacgccgattttggctggatgatcctgattggcctgtgtgcggcaattccgggaatgattat

SEQ ID NO: 865854 - DNA, 75 bp, synthetic construct
  source 1..75: mol_type = other DNA
gcgttaaccggcatgggcctgccgattgctatcacctgcttcgtgctggcagctgcagtgcgcatcattcagggt

SEQ ID NO: 865855 - DNA, 75 bp, synthetic construct
  source 1..75: mol_type = other DNA
tctggtgatgcctgtgattgaacaactgaacttctctggtgcgcaaatggctgcgctgtcgatttgtatcgccgg

SEQ ID NO: 865856 - DNA, 75 bp, synthetic construct
  source 1..75: mol_type = other DNA
gctggtaatcccattattcgcaggcgtggcggcagcggctgcgttcctggtgcctgggccagcgccaatgctgct

SEQ ID NO: 865857 - DNA, 75 bp, synthetic construct
  source 1..75: mol_type = other DNA
aatggtcaaaggcggtgaaagagagaagcggcgcgaaggaatgccgcagggcggcccgctctcgccgctgctgtc

SEQ ID NO: 865858 - DNA, 75 bp, synthetic construct
  source 1..75: mol_type = other DNA
tggtcaactggacggggctacacccgttcatcatcacccttggcaccaacgcgattttccgtgggatcacgctgg

SEQ ID NO: 865859 - DNA, 75 bp, synthetic construct
  source 1..75: mol_type = other DNA
gagttcgaagaagcggcacaaattcgtgaccagttgcatcagttgcatcagttgcgtgagttgtttattgccgca

SEQ ID NO: 865860 - DNA, 75 bp, synthetic construct
  source 1..75: mol_type = other DNA
atgatatgctcgtctccatgttgcttaactccgggcacggaatattcagtgaaaaaggcgacgatgacagcaaca

SEQ ID NO: 865861 - DNA, 75 bp, synthetic construct
  source 1..75: mol_type = other DNA
gcagtgcggcggccgggaccatttttgcctttattagtttcacgacgttattgttttactctacctacggcgcac

SEQ ID NO: 865862 - DNA, 75 bp, synthetic construct
  source 1..75: mol_type = other DNA
ctgcaacatctacgtaagcagccggaaagcgggcgaccatctgctgaagaacatcagggcgttcgtggagaacaa

SEQ ID NO: 865863 - DNA, 75 bp, synthetic construct
  source 1..75: mol_type = other DNA
tgcgcttttagcctggcccctgagtgaagcaaccggacgcatgtttgggttaggaatcacttccccaacggccaa

SEQ ID NO: 865864 - DNA, 75 bp, synthetic construct
  source 1..75: mol_type = other DNA
tccagataaactgatcatcaccgccagcagcgcagattttcgggaagagttcaacgtgaggcgggaggtatcctg

SEQ ID NO: 865865 - DNA, 75 bp, synthetic construct
  source 1..75: mol_type = other DNA
aacaggggatttgaagctgatcagatatccctgacactggatgatacagacggacaattaatcctgccggaacgg

SEQ ID NO: 865866 - DNA, 75 bp, synthetic construct
  source 1..75: mol_type = other DNA
acattcagccgacagtcgagtcgctgaaaggcaaacgggtaggcgtattgcagggcaccacccaggagacgttcg

SEQ ID NO: 865867 - DNA, 75 bp, synthetic construct
  source 1..75: mol_type = other DNA
gtggaatggggccggcagctaccgtcgacctgtttaataaatttgtaacttttaccgctgcacaatgtgatcagg

SEQ ID NO: 865868 - DNA, 75 bp, synthetic construct
  source 1..75: mol_type = other DNA
atattggcaagctgtctggaaaatctcagaagtatatctaggtataattactattgcgctaactacttacttgtt

SEQ ID NO: 865869 - DNA, 75 bp, synthetic construct
  source 1..75: mol_type = other DNA
attatctgtaatcgggataataatatcatctgtaattaatggacaacaaaattatcgacagtacatattattagg

SEQ ID NO: 865870 - DNA, 75 bp, synthetic construct
  source 1..75: mol_type = other DNA
tgaaaaagcacctgtaatcaaaatccctgccgtaaaaaacaaacgcgtgagatggctggaaaaagaagaagctag

SEQ ID NO: 865871 - DNA, 75 bp, synthetic construct
  source 1..75: mol_type = other DNA
cattctggattgagcatttcgagggaataaggattaaggatatatcggaggcaatgatctactcagttatcagca

SEQ ID NO: 865872 - DNA, 75 bp, synthetic construct
  source 1..75: mol_type = other DNA
atcgcgaaaaataatcgcatgttttacgccttgctgattgcaatttcggtacaaagcgtgggggtttttgcgtta

SEQ ID NO: 865873 - DNA, 75 bp, synthetic construct
  source 1..75: mol_type = other DNA
aagtggccgccagcgaaggtttcctcaagcagccagtgggtaaagattacaaattcggcggcccgtctgttaaag

SEQ ID NO: 865874 - DNA, 75 bp, synthetic construct
  source 1..75: mol_type = other DNA
ctgaatgacactgcctgcaaggtgttgcgtgatcaaataggcaaacatcaccgctgggtgtttgtttataccact

SEQ ID NO: 865875 - DNA, 75 bp, synthetic construct
  source 1..75: mol_type = other DNA
tcaattatgagcatcttccgacttcgttaaaggaagtgagtaagccaattggtgatctggcaagagtaatggatg

SEQ ID NO: 865876 - DNA, 75 bp, synthetic construct
  source 1..75: mol_type = other DNA
ggagccagatatggagcagtctgtaggtaacggaatgacgcccggaacatacgtatatggttatgtgaatgatcg

SEQ ID NO: 865877 - DNA, 75 bp, synthetic construct
  source 1..75: mol_type = other DNA
ggctggttatcaggttgataccgtcgacagcgtctgacagtcgtaacaggctgaccattccgattgtgctgagac

SEQ ID NO: 865878 - DNA, 75 bp, synthetic construct
  source 1..75: mol_type = other DNA
ctggcctttctcgcgccaaatcacgttgagcgtcggtacgctgctgttgctgctggcggtgtggtgggcggttgc

SEQ ID NO: 865879 - DNA, 75 bp, synthetic construct
  source 1..75: mol_type = other DNA
ttggcatcgttctggcgtttttatccgacacggcattcagctatagcggtaactggcgtgcgatgttaggtgttc

SEQ ID NO: 865880 - DNA, 75 bp, synthetic construct
  source 1..75: mol_type = other DNA
acagggcggttgggcgctgtttaagatcaaccgtaatgtccgtcgagcagtgttcctcggtatgttgttgcaggc

SEQ ID NO: 865881 - DNA, 75 bp, synthetic construct
  source 1..75: mol_type = other DNA
gatttatggcattcacgtcgggcaaatgctgctgacccgtgctgatatggaagaccgagaacgcttcctgaacgc

SEQ ID NO: 865882 - DNA, 75 bp, synthetic construct
  source 1..75: mol_type = other DNA
taaattacggcaactttataaaggtgttgatcatgttctaaaaaacaaaaattcaacttttgaagttgaactatc

SEQ ID NO: 865883 - DNA, 75 bp, synthetic construct
  source 1..75: mol_type = other DNA
cggcgagcatcgtgttcgaccaggcggaaaaccggatgcatacgattaaggcggtgatgatggcaacgcttgggg

SEQ ID NO: 865884 - DNA, 75 bp, synthetic construct
  source 1..75: mol_type = other DNA
cgtcgccatcacatgtatgaccagacctttcagcgcgccttcaaacgtgccgtagaaggcactgttgcaaagtta

SEQ ID NO: 865885 - DNA, 75 bp, synthetic construct
  source 1..75: mol_type = other DNA
atctgtggacacgcgacgccctctcaccgagggatcgtagtgtggtgaccgtcgccatgctgattgcccgcaacc

SEQ ID NO: 865886 - DNA, 75 bp, synthetic construct
  source 1..75: mol_type = other DNA
tgctaatgctgaggaaacaagaggtaaagctatgatgaaaatagaaccgtcagcgatttcggaagctgatattcg

SEQ ID NO: 865887 - DNA, 75 bp, synthetic construct
  source 1..75: mol_type = other DNA
tcaaagtttttcccttatgaagacaaaagacaaaatgatattcaattaaatatatccaatcttctgaaatcaaag

SEQ ID NO: 865888 - DNA, 75 bp, synthetic construct
  source 1..75: mol_type = other DNA
acctgggttacccggaactaccagcgactatcgcctcgaaacaattgctggcggcggtagggcagagtcgactga

SEQ ID NO: 865889 - DNA, 75 bp, synthetic construct
  source 1..75: mol_type = other DNA
gtggctgcccaccaccagcaccaacaattaccgcatcgcattacggaagtatcaacactatcagcgtcaaacgtg

SEQ ID NO: 865890 - DNA, 75 bp, synthetic construct
  source 1..75: mol_type = other DNA
gtgtcttcgaacaatggctctacactgcaaaccaacataacaacattcggggtgaatatgaaattagtacatctg

SEQ ID NO: 865891 - DNA, 75 bp, synthetic construct
  source 1..75: mol_type = other DNA
tggcgttgcgttacttgtgggtgtactttcaggcattatttcagcatttgttaaatggggagcggaagtcccctt

SEQ ID NO: 865892 - DNA, 75 bp, synthetic construct
  source 1..75: mol_type = other DNA
actggtttttgcgatagggtattgtgttgtcgcggaaattttcccgaaagtgaaattatggcaggggatattagc

SEQ ID NO: 865893 - DNA, 75 bp, synthetic construct
  source 1..75: mol_type = other DNA
ggataatagaaattatgcgccgcgacttacgtaatcgcattactcatgagccggatccggaagtcgttattcgtt

SEQ ID NO: 865894 - DNA, 75 bp, synthetic construct
  source 1..75: mol_type = other DNA
accgcagggatttatggacgccacgctgtggcagcatctggcagccagcctgacgcgcattgtgctggcgctact

SEQ ID NO: 865895 - DNA, 75 bp, synthetic construct
  source 1..75: mol_type = other DNA
gactgatggaagttgatggtcaggttttaatcgcccgatttgcactggaaaaattctgggatacgcattttattg

SEQ ID NO: 865896 - DNA, 75 bp, synthetic construct
  source 1..75: mol_type = other DNA
gactatcgcctcgaaacaactcctggcggcggtagggcagagccgactgattcaattgtgggaacaactgttttc

SEQ ID NO: 865897 - DNA, 75 bp, synthetic construct
  source 1..75: mol_type = other DNA
cagggagatgacggtaaattaaccggctttgaagtggagtttgctcaacaactggcaaaacatcttggcgtagaa

SEQ ID NO: 865898 - DNA, 75 bp, synthetic construct
  source 1..75: mol_type = other DNA
caagtcaccatctctgatgaacgtaagaaaaaatacgatttctctaccccgtacaccatttccggtattcaggcg

SEQ ID NO: 865899 - DNA, 75 bp, synthetic construct
  source 1..75: mol_type = other DNA
tggcaaaactgctcaccattgccgggccgcagggatttatggacgccacgctgtggcagcatctggcagccagcc

SEQ ID NO: 865900 - DNA, 75 bp, synthetic construct
  source 1..75: mol_type = other DNA
tggcggccttgctgttcttctacggcaaggtgctgtgcacggatctgccctggcttcaggagatcggaagacctc

SEQ ID NO: 865901 - DNA, 75 bp, synthetic construct
  source 1..75: mol_type = other DNA
attatgttgccctgcttgtggtaaacaactgaaaaaacttaagcgttcattttttggaaaactcattaaatggac

SEQ ID NO: 865902 - DNA, 75 bp, synthetic construct
  source 1..75: mol_type = other DNA
ctgttgtgggtagcgtggatacacataaagatctgcacgttgccgctgtcgtagatcagaacaataaagttctta

SEQ ID NO: 865903 - DNA, 75 bp, synthetic construct
  source 1..75: mol_type = other DNA
ttgccgctgtcgtagatcagaacaataaaattatggggactcagtttttctccacaacacggcaaggttaccggc

SEQ ID NO: 865904 - DNA, 75 bp, synthetic construct
  source 1..75: mol_type = other DNA
ctatcgccgttgacctggttgcagctcagctggtcatgagctggtggttcccggatacaccgggctggatctgga

SEQ ID NO: 865905 - DNA, 75 bp, synthetic construct
  source 1..75: mol_type = other DNA
aaaacagaaaaatgtggcactttccattcttttaaagggaaagcgccaaatgttaaatctgtgcttgaaaaacag

SEQ ID NO: 865906 - DNA, 75 bp, synthetic construct
  source 1..75: mol_type = other DNA
actgaatctgacgtaatgagctatgtgttccaggagtatgcggagatggggggaacttacacgctgtactcgctg

SEQ ID NO: 865907 - DNA, 75 bp, synthetic construct
  source 1..75: mol_type = other DNA
gcaacagccgcaacagccgcaacagccgcaacagccggtgtctcctgccatcaacgataagaagtcagattcagg

SEQ ID NO: 865908 - DNA, 75 bp, synthetic construct
  source 1..75: mol_type = other DNA
acagcaactgccacccgggatcagtgaatccggtgaagtggtggatatggccgcttatgaggcatggcaacagga

SEQ ID NO: 865909 - DNA, 75 bp, synthetic construct
  source 1..75: mol_type = other DNA
cgggttattcgcgaaataaacgaccgggataagcactattattacaaagattataaagttgagccttcagtttaa

SEQ ID NO: 865910 - DNA, 75 bp, synthetic construct
  source 1..75: mol_type = other DNA
ggggtatcgaccggtaaggatatggagcgtcagacgctggtcagttattccgacattcagtctctgccggatctg

SEQ ID NO: 865911 - DNA, 75 bp, synthetic construct
  source 1..75: mol_type = other DNA
acagccagtgtcttctgtcatcaatgataagaagtcagatgcaggtgtgagtgttccggcaggggggatcgagca

SEQ ID NO: 865912 - DNA, 75 bp, synthetic construct
  source 1..75: mol_type = other DNA
cagccacaacagccacaacagccacaacagccacaacagccacaacagccacaacagccacaacagccggtgtct

SEQ ID NO: 865913 - DNA, 75 bp, synthetic construct
  source 1..75: mol_type = other DNA
tgtcggcgggtaactccggtatgtacgcatctacccgtatgctttacaccctggcgtgtgacggaaaagcgccgc

SEQ ID NO: 865914 - DNA, 75 bp, synthetic construct
  source 1..75: mol_type = other DNA
actgaccgatattcgtcgtattaccgacgtttgctcgctgccgttgctggtcgatgctgatattggttttggctc

SEQ ID NO: 865915 - DNA, 75 bp, synthetic construct
  source 1..75: mol_type = other DNA
ttatctctccggcggtggcgtggcggcaggttcgctggggctgcccgatctcggtatttctacccttgatgatgt

SEQ ID NO: 865916 - DNA, 75 bp, synthetic construct
  source 1..75: mol_type = other DNA
atcaggttggtgcgaaacgctgcggtcatcgcccgaacaaagcgatcgtctcgaaagaggagatggtggatcgga

SEQ ID NO: 865917 - DNA, 75 bp, synthetic construct
  source 1..75: mol_type = other DNA
aacgggcatgcggatcagtgagggtttgcaactgcgggtcaaggatctggatttcgatcacggcacgatcatcgt

SEQ ID NO: 865918 - DNA, 75 bp, synthetic construct
  source 1..75: mol_type = other DNA
gcgccttcaaacgtgccgtagaacaagcaggggcactgttgcaaatagtcggtggtgataaacttatcatcccct

SEQ ID NO: 865919 - DNA, 75 bp, synthetic construct
  source 1..75: mol_type = other DNA
gcgtcgccatcacatgtatgaccagacctttcagcgcgccttcaaacgtgccgtagaacaagcaggcatcacgaa

SEQ ID NO: 865920 - DNA, 75 bp, synthetic construct
  source 1..75: mol_type = other DNA
tgcgggagggggcactgttgcaaagttagcgatgaggcagccttttgtcttattcaaaggccttacatttcaaaa

SEQ ID NO: 865921 - DNA, 75 bp, synthetic construct
  source 1..75: mol_type = other DNA
ttgttctatgtgttcgcgatcctgatcatcagcctgattattccgtacaccgatccgagcctgctgcgtaatgat

SEQ ID NO: 865922 - DNA, 75 bp, synthetic construct
  source 1..75: mol_type = other DNA
cggggaaaaatattccgcgtgcggtacgtcaggtgttctggcgaattctgctgttctatgtattcgcgatcctga

SEQ ID NO: 865923 - DNA, 75 bp, synthetic construct
  source 1..75: mol_type = other DNA
aaatccattgcagattgtcggcaccatcaacgctaaccatgcgctgctggcacagcgtgccgggtatcaggcgat

SEQ ID NO: 865924 - DNA, 75 bp, synthetic construct
  source 1..75: mol_type = other DNA
gcagacccgcaacgagctgtatgaaagcattaactactaccagtacgaagaaaagctcgacgacctgtttgcccg

SEQ ID NO: 865925 - DNA, 75 bp, synthetic construct
  source 1..75: mol_type = other DNA
gcagacccgcaacgagctgtacgaaagcatcaactactaccagtacgaagagaagctcgacgacctgtttgcccg

SEQ ID NO: 865926 - DNA, 75 bp, synthetic construct
  source 1..75: mol_type = other DNA
ctcgttgagcgtgaagggcagaagaagatggttattggcaacaaaggggccaagatcaaaaccatcgggattgaa

SEQ ID NO: 865927 - DNA, 75 bp, synthetic construct
  source 1..75: mol_type = other DNA
cgtctgatgaacaaagcggcgagcagctccattggcgacgttgagctggtgatttttgtcgtagaaggcacccgc

SEQ ID NO: 865928 - DNA, 75 bp, synthetic construct
  source 1..75: mol_type = other DNA
aaactgatgcgtttcctcggcgctgaactgccgtactccgtgaccgtggagatcgaacgtttcgtctctaacgaa

SEQ ID NO: 865929 - DNA, 75 bp, synthetic construct
  source 1..75: mol_type = other DNA
tatttttatgctcgctgctgggaccgataccctttgtgtggtttattactgcaaagtttgtttatggtattaata

SEQ ID NO: 865930 - DNA, 75 bp, synthetic construct
  source 1..75: mol_type = other DNA
cgatccgcaaaagccctggattatccgtaaacgccgcgacgttaaagtcgttcgtgccgtaacgcctaccgaaat

SEQ ID NO: 865931 - DNA, 75 bp, synthetic construct
  source 1..75: mol_type = other DNA
cttaatccgctaatttcctgctggctggattcgattttttctatcgtgctgggtatgggtgaaaaagaaagccgc

SEQ ID NO: 865932 - DNA, 75 bp, synthetic construct
  source 1..75: mol_type = other DNA
gtggcggaacggctggtcacggtggtgaatcaaaaagggtatcgggtggcgtctatgtcagagcaggagctgctc

SEQ ID NO: 865933 - DNA, 75 bp, synthetic construct
  source 1..75: mol_type = other DNA
aaagagcaagccagaatagcagaagaaaaaagaatcaaggacgaagaagagcgtagagcaaaggataaagctcac

SEQ ID NO: 865934 - DNA, 75 bp, synthetic construct
  source 1..75: mol_type = other DNA
aagccagaatagcagaagaaaaaagaatcaaggaagaagaagagcgtagagcaaaggataaagctcaccggaaag

SEQ ID NO: 865935 - DNA, 75 bp, synthetic construct
  source 1..75: mol_type = other DNA
catcacgttaactacactcgttctaaccctgtaccgggcgtggtcttacgtgaaagcaccgcatttgcaggaatg

SEQ ID NO: 865936 - DNA, 75 bp, synthetic construct
  source 1..75: mol_type = other DNA
ttatctcaactttaatgatcatgttcgagaaactgtacctcgcttaatccagcgccttaaacaggccggtttcac

SEQ ID NO: 865937 - DNA, 75 bp, synthetic construct
  source 1..75: mol_type = other DNA
ttcatacagcaattgtggcgggctgtggttctcactatttgctgcaaatgcgtgaacggttgtttgatctggcgg

SEQ ID NO: 865938 - DNA, 75 bp, synthetic construct
  source 1..75: mol_type = other DNA
acagttgttgaactaaatgtacagattgaccacgtacatctggtagtacggacgccaccgagtttaagcgtgtcg

SEQ ID NO: 865939 - DNA, 75 bp, synthetic construct
  source 1..75: mol_type = other DNA
gacagtacctcgacagggaaacgggactgcattacaatctgcacaggtactatgatccggatgtcgggcggttca

SEQ ID NO: 865940 - DNA, 75 bp, synthetic construct
  source 1..75: mol_type = other DNA
attatcgcttttcttttagaactgggtttgcgcgcgttacagcgccgcctgacgccctggcatggagaagtacaa

SEQ ID NO: 865941 - DNA, 75 bp, synthetic construct
  source 1..75: mol_type = other DNA
actggcggggattgcggtgatcgcgattatcgcctttcttttagaactggggttgcgcgcgttacagcaccgcct

SEQ ID NO: 865942 - DNA, 75 bp, synthetic construct
  source 1..75: mol_type = other DNA
caaaatcagaaattggtggtgcacagacatgggtaaatgaaatagctaatctgatacaagatgagtgcaaaatat

SEQ ID NO: 865943 - DNA, 75 bp, synthetic construct
  source 1..75: mol_type = other DNA
acaatgggaaatgtcgataggatcaccacattctttgatgtcgaggaaggtgattttgccgtttcaatgcctgat

SEQ ID NO: 865944 - DNA, 75 bp, synthetic construct
  source 1..75: mol_type = other DNA
gcacctaatccactgtcatggatcgacccacttggattgtgtcctaaatctgacttcaaatggggaaatccaaaa

SEQ ID NO: 865945 - DNA, 75 bp, synthetic construct
  source 1..75: mol_type = other DNA
aacaaaattgattgatgcatgtaaaaattatcctgataagttgaaagagcatcttagggatgctgttcagcaacg

SEQ ID NO: 865946 - DNA, 75 bp, synthetic construct
  source 1..75: mol_type = other DNA
caaaatcccttcgtggtgcattggccgtgttccggttggttcaagaattatttgtgaggatggtgattatcattg

SEQ ID NO: 865947 - DNA, 75 bp, synthetic construct
  source 1..75: mol_type = other DNA
caaaattccttcgtggtgcattgaccgtattccggttggttcaagaattattcgtgaagatggtgattatcattg

SEQ ID NO: 865948 - DNA, 75 bp, synthetic construct
  source 1..75: mol_type = other DNA
tttttgccgccgccgcaacaagtactggcaaaactgctcaccattgccggaccgcagggatttatggacgccacg

SEQ ID NO: 865949 - DNA, 75 bp, synthetic construct
  source 1..75: mol_type = other DNA
ctgtggcagcatctggcagccagcctgacgcgcattttgctggcgctactcgcggcggtgttgatcggtattccg

SEQ ID NO: 865950 - DNA, 75 bp, synthetic construct
  source 1..75: mol_type = other DNA
cggagattatccgtttcagttacgacagactggggcggatgctgagcgaggagacggcgcagggcatcctgaccc

SEQ ID NO: 865951 - DNA, 75 bp, synthetic construct
  source 1..75: mol_type = other DNA
ctggtggtggggttgacctttatgttcgccacatttattgccgtctttacggtcgataaagcggggcgtaaaccg

SEQ ID NO: 865952 - DNA, 75 bp, synthetic construct
  source 1..75: mol_type = other DNA
ttagtcatcctgtttacctctttctcagggagtttagtctccaggattcccggggcggttcatagcgagattaca

SEQ ID NO: 865953 - DNA, 75 bp, synthetic construct
  source 1..75: mol_type = other DNA
cagcgccagtgagattcgtcaggcggcgcggatgtatgcccaggcgaaaagcgccgccatcctgtggggcatggg

SEQ ID NO: 865954 - DNA, 75 bp, synthetic construct
  source 1..75: mol_type = other DNA
tctttaaagccgttgaaccgaagtgggatctgaaaacggactggcaaatcatcagtgagattgccacccgtatgg

SEQ ID NO: 865955 - DNA, 75 bp, synthetic construct
  source 1..75: mol_type = other DNA
gtgcctgcgatatgggcgcgctgccggatacgtatccgggataccagtacgtgaaagatccggctaaccgcgaga

SEQ ID NO: 865956 - DNA, 75 bp, synthetic construct
  source 1..75: mol_type = other DNA
gagcctgcctgcacataccggttatcgcatcagcgagctaccgcatcgcgcagcgcatggcgaagtgcgcgccgc

SEQ ID NO: 865957 - DNA, 75 bp, synthetic construct
  source 1..75: mol_type = other DNA
gccgtgcgcgtcgagccgatcgccgatcagcgcgccgccgagcagtacgtgattgacgagtacaacaagttgaaa

SEQ ID NO: 865958 - DNA, 75 bp, synthetic construct
  source 1..75: mol_type = other DNA
cttgtagattactttaataatgatgttttctttaaaggctatggtttacttaggaaaagtgacttcaacggtgca

SEQ ID NO: 865959 - DNA, 75 bp, synthetic construct
  source 1..75: mol_type = other DNA
gtggcctgaaagcctatgatgcaggcaatggctgggcaccttaccttgaagtcagtgctaattacacctttgcag

SEQ ID NO: 865960 - DNA, 75 bp, synthetic construct
  source 1..75: mol_type = other DNA
gtgggctgaaacgatataaagccgatgatggctgggcaccttaccttgaagtcagtgctaattacacctttgccg

SEQ ID NO: 865961 - DNA, 75 bp, synthetic construct
  source 1..75: mol_type = other DNA
ttcatacccagatgaatataataagagcatcattttcaatttatttgtttgcaatatcaattctctataagttta

SEQ ID NO: 865962 - DNA, 75 bp, synthetic construct
  source 1..75: mol_type = other DNA
tggcttcccaattggcctgcttcttattataccactactttataaaatcataactatggactatgggataaggca

SEQ ID NO: 865963 - DNA, 75 bp, synthetic construct
  source 1..75: mol_type = other DNA
tttttaagttttttaataccagtaattttatctagttttgctctcctcgttggatgggaaaagaaacttattggg

SEQ ID NO: 865964 - DNA, 75 bp, synthetic construct
  source 1..75: mol_type = other DNA
tggcagcctgagttcacagataaaatactctccaggaaacccggggcggttcacaccgattctcaacttagcgag

SEQ ID NO: 865965 - DNA, 75 bp, synthetic construct
  source 1..75: mol_type = other DNA
tgatgactgggcgccttaccttgaagtcagcgcaaattacacatttgccagcaactgggggatctacggaactgc

SEQ ID NO: 865966 - DNA, 75 bp, synthetic construct
  source 1..75: mol_type = other DNA
gataccctgtcggtgatggcctactggtcgccgatgtatttcaaaccggatgacagcaatgatcatcagttacgc

SEQ ID NO: 865967 - DNA, 75 bp, synthetic construct
  source 1..75: mol_type = other DNA
caatcgccttttcgattctgcaattacgcagacatttatttatcgatttagtaggcggcgcgttgctggcgtcga

SEQ ID NO: 865968 - DNA, 75 bp, synthetic construct
  source 1..75: mol_type = other DNA
ccggccgctcaggcaatggccaatgccgatgatttgattaaaagctacgttgcggcaggattcaaaaaaaatcca

SEQ ID NO: 865969 - DNA, 75 bp, synthetic construct
  source 1..75: mol_type = other DNA
atgtatgcagaagatttagctgatcttattttttatgttattcctaaaatagaattcatgcctaatatggtaaat

SEQ ID NO: 865970 - DNA, 75 bp, synthetic construct
  source 1..75: mol_type = other DNA
gatccgcgcgccgccaaacgctacgtccggctggcaaaaacgtgtcatttatgccctgataacgccaatgacacc

SEQ ID NO: 865971 - DNA, 75 bp, synthetic construct
  source 1..75: mol_type = other DNA
accttcaggcaacaacacatccaaagtgaaatgtttttcttttgtcgcaatgacaaaatggataagggatggttg

SEQ ID NO: 865972 - DNA, 75 bp, synthetic construct
  source 1..75: mol_type = other DNA
gaagggattaaatactcgtgttcattttccaatatccgtttaggctttttgcgtcgggcaaaacatattcatgct

SEQ ID NO: 865973 - DNA, 75 bp, synthetic construct
  source 1..75: mol_type = other DNA
agctacgttgcggcaggattcaaaaaatccaccttgattgcagcatgtcctgtcaggacgatccgattcccttaa

SEQ ID NO: 865974 - DNA, 75 bp, synthetic construct
  source 1..75: mol_type = other DNA
aagtactgcgtgcgacaaactttctcctgcctaactggggatggctgctggttctgctggtggcaacgcctgcgc

SEQ ID NO: 865975 - DNA, 75 bp, synthetic construct
  source 1..75: mol_type = other DNA
cacagcagggcggcagttcaatcagcctttatatcgaccgtttcgttaaccgcgatatttttggttacaccgttc

SEQ ID NO: 865976 - DNA, 75 bp, synthetic construct
  source 1..75: mol_type = other DNA
ggcctgcgtcggcctggtattgatgatttggttatatcaggcgctgaaattcagaaaccgtgcgctggtactgga

SEQ ID NO: 865977 - DNA, 75 bp, synthetic construct
  source 1..75: mol_type = other DNA
cgctggtcgtcagcgtgcctcccgcgataactgccaataccggaatggatgttttaacccatgcgctagaagcct

SEQ ID NO: 865978 - DNA, 75 bp, synthetic construct
  source 1..75: mol_type = other DNA
ctcctgcgacgaccagaccatccgcgagcgagtacaagcagcaggtgtcgtgggtgctggcggcgcaggttttcc

SEQ ID NO: 865979 - DNA, 75 bp, synthetic construct
  source 1..75: mol_type = other DNA
ggacaactgctggccctcaccgcacgcgattcctacgcggcacgactgggcgcgcttgaagacaaaatcaataac

SEQ ID NO: 865980 - DNA, 75 bp, synthetic construct
  source 1..75: mol_type = other DNA
atgtacctgtattttcatggccgcatttttctttagatcataaaaaacatgctgaatatatcacctgtgccgact

SEQ ID NO: 865981 - DNA, 75 bp, synthetic construct
  source 1..75: mol_type = other DNA
gtgggtaggatcattgatgataatcaacccttaccggggcagtatgacatcgatatttatgtcaataagcaatgg

SEQ ID NO: 865982 - DNA, 75 bp, synthetic construct
  source 1..75: mol_type = other DNA
ttgtcgggaagatacgtgatctgatccttcaactcagcaaaagttcgatttattcaacaaagcccatcgatattt

SEQ ID NO: 865983 - DNA, 75 bp, synthetic construct
  source 1..75: mol_type = other DNA
cctttgactggggcgatgacgttacgacgccgcgacggcaaatatatatgtctaactcaacgacctttgatgatc

SEQ ID NO: 865984 - DNA, 75 bp, synthetic construct
  source 1..75: mol_type = other DNA
aatgtatcaaaacgcgggtgaattcgcctggcgggtagggcttccggcaaaatctggtgttggcggcggtattgt

SEQ ID NO: 865985 - DNA, 75 bp, synthetic construct
  source 1..75: mol_type = other DNA
caaatactgtaatcgacagttggtccagcatggtgtttttgaagttcaacggcgcgaaattctctgccactgatt

SEQ ID NO: 865986 - DNA, 75 bp, synthetic construct
  source 1..75: mol_type = other DNA
tatgaagtcaatgatatccatggtcataatattggcgttgtcggccagggaagccagttatttattcgcaccaat

SEQ ID NO: 865987 - DNA, 75 bp, synthetic construct
  source 1..75: mol_type = other DNA
gttaagcttagtacatttctctgcggtcttgaaaataaagatgttttaattttcaatttcccgatggccaaacca

SEQ ID NO: 865988 - DNA, 75 bp, synthetic construct
  source 1..75: mol_type = other DNA
ttccggatgtcctggatccggagctcgacccaatggcccgagacgatgaaataaacctgctctacgtcgcatcca

SEQ ID NO: 865989 - DNA, 75 bp, synthetic construct
  source 1..75: mol_type = other DNA
ggggcgttaatctggcgaaccgtctttccgaaacgtttgctgtgatgaatgcgccaggaattaaagatgcttatg

SEQ ID NO: 865990 - DNA, 75 bp, synthetic construct
  source 1..75: mol_type = other DNA
ccgccatcggttaatgtggcaattgataagcaacaaggactttcatgcacaatcaccttcggtaaagagattgat

SEQ ID NO: 865991 - DNA, 75 bp, synthetic construct
  source 1..75: mol_type = other DNA
gttatcttccacgagctaggtcatttgcttcttggacacaaagcagttttacacttttctgaaccgccccgggtt

SEQ ID NO: 865992 - DNA, 75 bp, synthetic construct
  source 1..75: mol_type = other DNA
aaaaccagaaacagcgtaaagagctggggctgattgtgaccctcactttcttcagcatgttgttctgggcgtttg

SEQ ID NO: 865993 - DNA, 75 bp, synthetic construct
  source 1..75: mol_type = other DNA
gttgctgaatgtgagagaataatttcgtcctggctggatgcagggcaagaaaatgagagctacacgccattcatt

SEQ ID NO: 865994 - DNA, 75 bp, synthetic construct
  source 1..75: mol_type = other DNA
aactcgatacagcactgcgtaatcgcgtcgaaggtctacgcctgggcggttcaatgctgatgcaggggctgatta

SEQ ID NO: 865995 - DNA, 75 bp, synthetic construct
  source 1..75: mol_type = other DNA
caattaacgtgttgttattgcgccatgaacgcagttctctgccgctcggcaagtttttggtcaccgaaggcgtta

SEQ ID NO: 865996 - DNA, 75 bp, synthetic construct
  source 1..75: mol_type = other DNA
tttttgcgtttcctttcaaatgaaaacgatcgtcgtctaaaatcagcagtacccccgacaaactcagggattttg

SEQ ID NO: 865997 - DNA, 75 bp, synthetic construct
  source 1..75: mol_type = other DNA
ccggactgctgggtattcttatggctctggcagtcattgttatcacaggcgtaccactgataatcatggatatca

SEQ ID NO: 865998 - DNA, 75 bp, synthetic construct
  source 1..75: mol_type = other DNA
cgtgaccaactattccggcatgtccaccacgttggcgctggtactggctggtacaggcgtgatgttcccgttctt

SEQ ID NO: 865999 - DNA, 75 bp, synthetic construct
  source 1..75: mol_type = other DNA
ctgttcgacaattaccccagcacaagcaaaaagtcgcttctgtttgctgatgttcgacaccgagccaatgaagcc

SEQ ID NO: 866000 - DNA, 75 bp, synthetic construct
  source 1..75: mol_type = other DNA
tatatttctctctgccggaagaattcctaaagacatcatcagtaatgaggattatatcatcaaaacttaaaacat

SEQ ID NO: 866001 - DNA, 75 bp, synthetic construct
  source 1..75: mol_type = other DNA
aatcactgccggacagtgctgaaaagtcagcaggtctccgcaagctgctcgaagctaaagatgcgctggtgcgag

SEQ ID NO: 866002 - DNA, 75 bp, synthetic construct
  source 1..75: mol_type = other DNA
tggaactttgctaccaagcgcgttgcgctagctgataccaataatccacctcctgactggcaatacgcctaccag

SEQ ID NO: 866003 - DNA, 75 bp, synthetic construct
  source 1..75: mol_type = other DNA
gggcttaggcgagcatttcactcgttttaaaacgcgctatctggcaggaaaaacgcaacatctgggtagcatcac

SEQ ID NO: 866004 - DNA, 75 bp, synthetic construct
  source 1..75: mol_type = other DNA
ctgcctatcgcctgcgtgaagcccaggctgaaggccaatattgtactgccgaggtagccatcgcactgttagata

SEQ ID NO: 866005 - DNA, 75 bp, synthetic construct
  source 1..75: mol_type = other DNA
tgaagttgtcaaaatgctgggaatgtatatcccttatctatgtgcttttgcctttttatcccttctttttttttg

SEQ ID NO: 866006 - DNA, 75 bp, synthetic construct
  source 1..75: mol_type = other DNA
gggcctgcagaatgaatacaacggcatcatcgatgccgcctctcatccgcaactgtcactgatagctgacagtac

SEQ ID NO: 866007 - DNA, 75 bp, synthetic construct
  source 1..75: mol_type = other DNA
atgcgtttttctcaccggctatttttactgctgatttccctcctgccgagcgcaccattacttgctcaggaaacc

SEQ ID NO: 866008 - DNA, 75 bp, synthetic construct
  source 1..75: mol_type = other DNA
cgccagcgaactggcaaagcgtattggctcgccagagcaaagtggcattgccgatgtggccgagtttatgatgtt

SEQ ID NO: 866009 - DNA, 75 bp, synthetic construct
  source 1..75: mol_type = other DNA
gctactgctggtcgcaacccctgcgctaattaccatactgttctggaaagagtggtcggtttacgccttgattat

SEQ ID NO: 866010 - DNA, 75 bp, synthetic construct
  source 1..75: mol_type = other DNA
cgcgatattttcggttataccgttcctacggcgatgttccagtcgattaatgccttcgcggtcatgctgtgtggg

SEQ ID NO: 866011 - DNA, 75 bp, synthetic construct
  source 1..75: mol_type = other DNA
gaactgtttatcgacccggttgccatgtcgcaaattacgcgcattgaaatccccggtgtgaccggcgtattaacc

SEQ ID NO: 866012 - DNA, 75 bp, synthetic construct
  source 1..75: mol_type = other DNA
gtactgacgcatgcacttgaggcatatgtggccaaaggcgctacggactttactgatgcactggcggaaaaagca

SEQ ID NO: 866013 - DNA, 75 bp, synthetic construct
  source 1..75: mol_type = other DNA
agctgaagaactagcgagcattgaatatatcgcaaagagaatttacgatgggggggggagtatcgagttaaaaaa

SEQ ID NO: 866014 - DNA, 75 bp, synthetic construct
  source 1..75: mol_type = other DNA
gaatctattcctgtagcgatagagttttatgtagagccacctgaagattgccccccacttttagctaaccgtatg

SEQ ID NO: 866015 - DNA, 75 bp, synthetic construct
  source 1..75: mol_type = other DNA
ggggcgtgtcgggacagcggaggatgtagccaataccatgctgttcctgctgtctgataaagcatcatgggtcac

SEQ ID NO: 866016 - DNA, 75 bp, synthetic construct
  source 1..75: mol_type = other DNA
atggtactggaagcgggcggcagtgtcgtgctgaccgggaataaaaaagacaaagccgaagcggtgcaaaaagaa

SEQ ID NO: 866017 - DNA, 75 bp, synthetic construct
  source 1..75: mol_type = other DNA
aaaaaagaaatagactactatgcattctttagtaataacgagatctcaagacctattagagatgatttatatatc

SEQ ID NO: 866018 - DNA, 75 bp, synthetic construct
  source 1..75: mol_type = other DNA
cgggtaatgaccgtaccggaactcactggtgaagccagccagctctacgcgcaggaaggttttaatattattgcc

SEQ ID NO: 866019 - DNA, 75 bp, synthetic construct
  source 1..75: mol_type = other DNA
ttattgccactgccaatacccgcgatcgcggcgtcaatgaaatgagtgccgcgctaaagcgtcgcttcgattttg

SEQ ID NO: 866020 - DNA, 75 bp, synthetic construct
  source 1..75: mol_type = other DNA
tgctgaataattttctgctgtggctgggggttatcgatcaaccgctgaccattctgcataccaatctggccgttt

SEQ ID NO: 866021 - DNA, 75 bp, synthetic construct
  source 1..75: mol_type = other DNA
gcgttcgccgagttcgagcgcgccctgatccgcgagcgtcagcgcgagggtattgcgctcgccaagcaacgcggg

SEQ ID NO: 866022 - DNA, 75 bp, synthetic construct
  source 1..75: mol_type = other DNA
ggcgattgttccgcatgaaatggccatcgcagtctggagtccggaactggatgatgcaggtaactcgcttgcggg

SEQ ID NO: 866023 - DNA, 75 bp, synthetic construct
  source 1..75: mol_type = other DNA
agctgtgtagagctggcccggacgtttgtctttctggctaatcaggggaaagctattcatattgatgaacctgtg

SEQ ID NO: 866024 - DNA, 75 bp, synthetic construct
  source 1..75: mol_type = other DNA
ggtctgatcgaagcatggaaagaagatctgtttattaactggctatttgaagtgattgcagagtgccaccgcatc

SEQ ID NO: 866025 - DNA, 75 bp, synthetic construct
  source 1..75: mol_type = other DNA
cctggtaacgtctgggatttttcacgtgtgcgctatttgatggatgaatatgaaaaccacccgacacaaaagccg

SEQ ID NO: 866026 - DNA, 75 bp, synthetic construct
  source 1..75: mol_type = other DNA
tgatcgattatcgcaaaaatcctccacagccttacaatcatcaaaaagtaccgggtaacgtctgggattttccgc

SEQ ID NO: 866027 - DNA, 75 bp, synthetic construct
  source 1..75: mol_type = other DNA
gatgctggtgtttatcccggctgtgggcgagtttgtgatccctgaactgctcggtggcccggacagcatcatgat

SEQ ID NO: 866028 - DNA, 75 bp, synthetic construct
  source 1..75: mol_type = other DNA
tggatgggaatattaaaaaataacggcgtgctgaataattttctgctgtggctgggggttatcgatcaacctctg

SEQ ID NO: 866029 - DNA, 75 bp, synthetic construct
  source 1..75: mol_type = other DNA
tgccggttcgatgttggtctttattcctgcggtaggcgagtttgtgatcccggaactgctcggcggtccggatag

SEQ ID NO: 866030 - DNA, 75 bp, synthetic construct
  source 1..75: mol_type = other DNA
ctggcgaagcctcttacacttgaccagctggcaaagcgattgatactcgccccagcgcgttttataacggctggc

SEQ ID NO: 866031 - DNA, 75 bp, synthetic construct
  source 1..75: mol_type = other DNA
agtacggaatataaggatgtggtttcatttgccctgctgattctggtgctgctggtgatgccgaccggtattctg

SEQ ID NO: 866032 - DNA, 75 bp, synthetic construct
  source 1..75: mol_type = other DNA
cctgcaaaactacgtcagcctgaccgaaggttcgcgcgacgtggcgctgccgagcctgtttaacggtcagtgggt

SEQ ID NO: 866033 - DNA, 75 bp, synthetic construct
  source 1..75: mol_type = other DNA
ggcgggctttacgaccacagaacaacagatgattgcgactctggtcgtgggactgacctttatgttcgcgacctt

SEQ ID NO: 866034 - DNA, 75 bp, synthetic construct
  source 1..75: mol_type = other DNA
tgacggcctgcccgccgccagaaccggtgatgctgttgactgcggcggcgtggttattggtggcggcacggtaaa

SEQ ID NO: 866035 - DNA, 75 bp, synthetic construct
  source 1..75: mol_type = other DNA
ccacggcgaggtttacatgattggcagctacgtctcctttatgatcatcgccgcactgatgatgctgggcattga

SEQ ID NO: 866036 - DNA, 75 bp, synthetic construct
  source 1..75: mol_type = other DNA
cattcgccctgctgattctggtgctgctggtgatgccgaccggtattctggggcgcccggaggtagagaaagtat

SEQ ID NO: 866037 - DNA, 75 bp, synthetic construct
  source 1..75: mol_type = other DNA
caaaaaatcgatgctgttatcggtgtgtatgatgtgtttcggctcactggttatcgcctgtttgccaggctacga

SEQ ID NO: 866038 - DNA, 75 bp, synthetic construct
  source 1..75: mol_type = other DNA
cgatagtgtgggcaactattcaacaggtattcgtgattaccgtgaaatcgaagctaaccagtttgccgcagaact

SEQ ID NO: 866039 - DNA, 75 bp, synthetic construct
  source 1..75: mol_type = other DNA
accgcctgcgccagcgccggtgattgtggtcagcggatgcccgagggtgagcctttgcccgatgccgggaagtga

SEQ ID NO: 866040 - DNA, 75 bp, synthetic construct
  source 1..75: mol_type = other DNA
gtgagcaaaattaactatcaagaactgcgcgaggcggcggaacaggcaacgcaagatgaatgggtagcatatatt

SEQ ID NO: 866041 - DNA, 75 bp, synthetic construct
  source 1..75: mol_type = other DNA
ttatcgcctgtttgccaggctacgaaacaatcggtacctgggctccggcattattgcttcttgctcgtttattct

SEQ ID NO: 866042 - DNA, 75 bp, synthetic construct
  source 1..75: mol_type = other DNA
acagcaaactgacaagtagtgatactcgtcgccgcatttgggcgattgtgggggcctcttcaggtaatctggtcg

SEQ ID NO: 866043 - DNA, 75 bp, synthetic construct
  source 1..75: mol_type = other DNA
tgcaggtctgtgttaatgagatcaacagcagaactccaatgcgcctctcatacattgagaaaaagaaaggccgcc

SEQ ID NO: 866044 - DNA, 75 bp, synthetic construct
  source 1..75: mol_type = other DNA
cacgctttccatttggcgcaaggctgtgaaaataaaaacgtcattattattggtgccggaactatcggcctgctg

SEQ ID NO: 866045 - DNA, 75 bp, synthetic construct
  source 1..75: mol_type = other DNA
atgaaatcagtggtgaatgatactgatggtatcgtgcgcgttgaagaacgagtcattcctgaaattaatcatcag

SEQ ID NO: 866046 - DNA, 75 bp, synthetic construct
  source 1..75: mol_type = other DNA
acggcgagccggttgctgacagaacgtaagttaagcctggagccattaatcgctcaccgtggaagctttgaaagc

SEQ ID NO: 866047 - DNA, 75 bp, synthetic construct
  source 1..75: mol_type = other DNA
gtcgaactggcggtagagattgccggtcctcatgcccaactggcgctggtgggcacgttgcatcaggatctgcat

SEQ ID NO: 866048 - DNA, 75 bp, synthetic construct
  source 1..75: mol_type = other DNA
tggtccacttcgtccgttcactattaatctgcggacgggtgaaatatccatgtcgcataaagtgtctgttggcgg

SEQ ID NO: 866049 - DNA, 75 bp, synthetic construct
  source 1..75: mol_type = other DNA
gataaataatagccgtacggataatggtacggacggtcaggcgtatatggatgatgcgggaaactggcgatgcgg

SEQ ID NO: 866050 - DNA, 75 bp, synthetic construct
  source 1..75: mol_type = other DNA
agggttcttggtacgttcccgctttataaggggaacaagtccgggctggtagcgaacgatatcattaaaggtatt

SEQ ID NO: 866051 - DNA, 75 bp, synthetic construct
  source 1..75: mol_type = other DNA
cggaacttatggtgctgcattaacacgttttcttattaaaaatagtatttatgttgttgaagttaaccgaccaga

SEQ ID NO: 866052 - DNA, 75 bp, synthetic construct
  source 1..75: mol_type = other DNA
aagtcgtttggtaatttccatcatgatgtaactaccgttctgcaaaactactttcattactgcgcactgaaaatg

SEQ ID NO: 866053 - DNA, 75 bp, synthetic construct
  source 1..75: mol_type = other DNA
tggttccgaaatgtattacaacccgggaggtaaccaggtatcctggacatttcgctcaccttcaggccacgggtt

SEQ ID NO: 866054 - DNA, 75 bp, synthetic construct
  source 1..75: mol_type = other DNA
gctggcatttctacagtcagagaaatactgatggtagtatcacattcgctgtaaacggacagatgactccatcaa

SEQ ID NO: 866055 - DNA, 75 bp, synthetic construct
  source 1..75: mol_type = other DNA
ttgtcacctggtatcggtaagcggtgatgtgctgaaagtcattcgtgggcaggaaggaacaaccgcgaaaggttg

SEQ ID NO: 866056 - DNA, 75 bp, synthetic construct
  source 1..75: mol_type = other DNA
gagcggtcattatattgcgggtgttgctggcggcactgcaaacgcactgacgctggaacttccctcgacgttttt

SEQ ID NO: 866057 - DNA, 75 bp, synthetic construct
  source 1..75: mol_type = other DNA
cgggctgctgggagaactaatgacctttaccgagccgtcccgcctgccatgcccgcttgatgtgtatgatcatta

SEQ ID NO: 866058 - DNA, 75 bp, synthetic construct
  source 1..75: mol_type = other DNA
gcgcgcactgatggtggctccccgccagcttccttaccattccgggttcagctatttcgaactcgacaagagcgg

SEQ ID NO: 866059 - DNA, 75 bp, synthetic construct
  source 1..75: mol_type = other DNA
tacatcgagaaaaagaaaggccgccagacaactcatatcgtattctctttccgtgatatcacctccctgacaacg

SEQ ID NO: 866060 - DNA, 75 bp, synthetic construct
  source 1..75: mol_type = other DNA
ggcaccctacaggaacatgacggtatctgcgagatccatgttgttaaatatgctgaaatattcggattgacctct

SEQ ID NO: 866061 - DNA, 75 bp, synthetic construct
  source 1..75: mol_type = other DNA
gaggatgccggcgatgaaaaaggctatgaatcttttccctggtttatcaaacgtgcgcacagtccatccagagga

SEQ ID NO: 866062 - DNA, 75 bp, synthetic construct
  source 1..75: mol_type = other DNA
atgccggactttcgccgccgtttcctgcaggcaagtgttgacgagatcaacagccggacaccaatgcgcctttct

SEQ ID NO: 866063 - DNA, 75 bp, synthetic construct
  source 1..75: mol_type = other DNA
gtcccttaatgacgttgtggctaactttgccacgcgtggatcggaaaactatttcgtacagatagcgcagcttca

SEQ ID NO: 866064 - DNA, 75 bp, synthetic construct
  source 1..75: mol_type = other DNA
atttcgtacagattgcgcagcttcagagcggtcattatattgcgggtgttgctggtggcactgcaaacacactga

SEQ ID NO: 866065 - DNA, 75 bp, synthetic construct
  source 1..75: mol_type = other DNA
tgttaatggaggtacagattggacgctacgaactccgattatcgttttccccgttcagaacaataccaacgccgc

SEQ ID NO: 866066 - DNA, 75 bp, synthetic construct
  source 1..75: mol_type = other DNA
acctgatccctttcttcataggcctgcaaaaccgcttcacacaattccggcttagtgaaacgaaagagattacta

SEQ ID NO: 866067 - DNA, 75 bp, synthetic construct
  source 1..75: mol_type = other DNA
tcctgccgccacatcaccggaaacattgtcatcatcgctgcatcagttcatgaatgcgagagataaagccttaca

SEQ ID NO: 866068 - DNA, 75 bp, synthetic construct
  source 1..75: mol_type = other DNA
cacccaggaaaaccagggtgaaaacggcgatattggcccactgcgaccgttcagcattaacctgcggacgggtga

SEQ ID NO: 866069 - DNA, 75 bp, synthetic construct
  source 1..75: mol_type = other DNA
cttttcccgcagacgcaggtatctcagcagaaggtctgccaggacattgccggcgagagcaatatctttgctgac

SEQ ID NO: 866070 - DNA, 75 bp, synthetic construct
  source 1..75: mol_type = other DNA
cttcgctaacaacgaaggactggcgtccgaaggcgataatgtctggtctgcgacgcaatcttctggcgtggcgct

SEQ ID NO: 866071 - DNA, 75 bp, synthetic construct
  source 1..75: mol_type = other DNA
tggaagcgtccaacgtcgatctcagcaaagaactggtcaatatgattgtcgcccagcgtaactatcagtccaatg

SEQ ID NO: 866072 - DNA, 75 bp, synthetic construct
  source 1..75: mol_type = other DNA
ggggtaaaagttgccggtatcactcaggactttaccgatggcacgaccaccaacaccgggcgtggtctggacgtt

SEQ ID NO: 866073 - DNA, 75 bp, synthetic construct
  source 1..75: mol_type = other DNA
acaagaagccttgcccatcacgaattacttcgcagcgagtgagctggctcctgccgtcgcccgtgccttcaacaa

SEQ ID NO: 866074 - DNA, 75 bp, synthetic construct
  source 1..75: mol_type = other DNA
tggctgctgaaatacccggaacacgccattaccggcctgctgcctgcagcgctcggcaaaaccggtgaagcacag

SEQ ID NO: 866075 - DNA, 75 bp, synthetic construct
  source 1..75: mol_type = other DNA
caactcttaagcaagctgtggctatgggaaggcaaagcggaaagctatggctgggggagtaattcaacacaggaa

SEQ ID NO: 866076 - DNA, 75 bp, synthetic construct
  source 1..75: mol_type = other DNA
agaagtgagctataacgcaccgcttccggcgttgaacgtgctctatcacctgactgacagctggaatctttatgc

SEQ ID NO: 866077 - DNA, 75 bp, synthetic construct
  source 1..75: mol_type = other DNA
aggacaacgagtacagtcgaagagccatcggcaagtatattgatgtctggcattatcctgacggacataaggagc

SEQ ID NO: 866078 - DNA, 75 bp, synthetic construct
  source 1..75: mol_type = other DNA
ttctaatccgattttagcttcagataaactgtcgctatccgacttgtattcagttggcagtacagtgaatacaga

SEQ ID NO: 866079 - DNA, 75 bp, synthetic construct
  source 1..75: mol_type = other DNA
aagttacggccaccatcaccgataaaaatggcgcggttgtgcgcaccattgatattggtgaactgaccgccggag

SEQ ID NO: 866080 - DNA, 75 bp, synthetic construct
  source 1..75: mol_type = other DNA
acgacgctggtgtttaatgccaatggcgttctgacctcagatccaacaaaggatattaccaccggcgcaattaac

SEQ ID NO: 866081 - DNA, 75 bp, synthetic construct
  source 1..75: mol_type = other DNA
atgaatcaggaagtgaaagtggtgccggactcggaatcgaagatttcatttatcatattgatattaatctcgttt

SEQ ID NO: 866082 - DNA, 75 bp, synthetic construct
  source 1..75: mol_type = other DNA
ctggagaaagcagtaagagcatggaatgcccttactctatctccacataccgataccgaatacgccatgttacat

SEQ ID NO: 866083 - DNA, 75 bp, synthetic construct
  source 1..75: mol_type = other DNA
gactggaaaagacgtgccgagcgtctggtcagggccactggtcacccctataccatcgtcaggcccggctggttt

SEQ ID NO: 866084 - DNA, 75 bp, synthetic construct
  source 1..75: mol_type = other DNA
atatagacaatatgccccttactgaagaacctgagtgcgttattaacgacctgaatctgtattcgaaaaattcaa

SEQ ID NO: 866085 - DNA, 75 bp, synthetic construct
  source 1..75: mol_type = other DNA
catcttcactctcggttccgatggccaggggcgtattggggccagagcgatagattacggtggtgtacgtaacat

SEQ ID NO: 866086 - DNA, 75 bp, synthetic construct
  source 1..75: mol_type = other DNA
tgatgtgaacacgctggagcaggccgacgcccttttggcccaggcggcggcgtacaacaaaaacgccggagttaa

SEQ ID NO: 866087 - DNA, 75 bp, synthetic construct
  source 1..75: mol_type = other DNA
ttcaaatgctggagctggaaagggatgttgaacggcttcgcagtctgacgcgtgcagaacgcatggacatgaagc

SEQ ID NO: 866088 - DNA, 75 bp, synthetic construct
  source 1..75: mol_type = other DNA
aagggctcctagagcagcaaaccgggctaaatccggtagaaattatgacagacacggcaggatccagcgatatca

SEQ ID NO: 866089 - DNA, 75 bp, synthetic construct
  source 1..75: mol_type = other DNA
acaggtgaaagacgcctgtactgccgactcactggctgagtttgcctgggatctgtttaccgcctggcagaccgc

SEQ ID NO: 866090 - DNA, 75 bp, synthetic construct
  source 1..75: mol_type = other DNA
atgcgtggtgaaccgcaggacggtggctggatcggctggatgatcaaacctctgggccgctggtcgttaatcatg

SEQ ID NO: 866091 - DNA, 75 bp, synthetic construct
  source 1..75: mol_type = other DNA
acacccgcagttgcagtgctgaaatcatgccagcaacaactgacacagccctcaaaccatgccagcgccgatcta

SEQ ID NO: 866092 - DNA, 75 bp, synthetic construct
  source 1..75: mol_type = other DNA
acgagatagaaccaatgcagatactggaagtgatccgcaggtttgaagaccgtggagcaatggagagggctaata

SEQ ID NO: 866093 - DNA, 75 bp, synthetic construct
  source 1..75: mol_type = other DNA
aaacgaactaaaggcacaaaaataaccgctgggcagatgaaagctcttcacaaagataatgcgccgcttaaaatt

SEQ ID NO: 866094 - DNA, 75 bp, synthetic construct
  source 1..75: mol_type = other DNA
tgggctggtcgccaggcagcgagtgggcgcgtcgccgggctgatgaataaaggctggcaacggggcgatgttctg

SEQ ID NO: 866095 - DNA, 75 bp, synthetic construct
  source 1..75: mol_type = other DNA
tggcactttcagcggtcaggtaaaaggcaatagcggaaactttgacgtaaatgtcaccgctggcggtgatatcag

SEQ ID NO: 866096 - DNA, 75 bp, synthetic construct
  source 1..75: mol_type = other DNA
caccaagggcgttacagctttgataatcaacctgccgtcgcgttgtggaatttacagcgtctggcgcagacattg

SEQ ID NO: 866097 - DNA, 75 bp, synthetic construct
  source 1..75: mol_type = other DNA
acaggatgaactgaaggcaacgaaagacgcaattaatttcacaacagagttcctgaaatcagtttcagaaaaata

SEQ ID NO: 866098 - DNA, 75 bp, synthetic construct
  source 1..75: mol_type = other DNA
ttgcactggtcttcagtattcttaccggaagcgctttaggcattatcgggtatggttttactgatggctgtcacc

SEQ ID NO: 866099 - DNA, 75 bp, synthetic construct
  source 1..75: mol_type = other DNA
ggaaatgccccagcctatgatattgaaatcggatttaatcccccactggtaaatgctgaacatagaaaaaataaa

SEQ ID NO: 866100 - DNA, 75 bp, synthetic construct
  source 1..75: mol_type = other DNA
agtttatgcaagagcaacacgatttggcaataaaaaggcgggatgagaaaagagctaaaagattagagtctggtg

SEQ ID NO: 866101 - DNA, 75 bp, synthetic construct
  source 1..75: mol_type = other DNA
catcggcaagtatattgatgtctggcattatcctgacggacataaggagctgcgactaaatggcgtgctgctgcc

SEQ ID NO: 866102 - DNA, 75 bp, synthetic construct
  source 1..75: mol_type = other DNA
gattcagtcggggattgggatatgcaggaaaatttacaagtcttgccgactggatcactgagtttggtaaggctg

SEQ ID NO: 866103 - DNA, 75 bp, synthetic construct
  source 1..75: mol_type = other DNA
aacaaaaccatctggggtggaaacgagtgggtcgatgattccccaacccgaagtgatatcgaaaaaagggacaag

SEQ ID NO: 866104 - DNA, 75 bp, synthetic construct
  source 1..75: mol_type = other DNA
gaaaatgattatcggtggcttctctgcatattccggcgtggtggactgggcgaaaatgcgtgaaatcgctgacag

SEQ ID NO: 866105 - DNA, 75 bp, synthetic construct
  source 1..75: mol_type = other DNA
agcatgcaaatgacgctcttaatgccctgttgaaggaaaaagagaatatccgtagccagcttgctgacatcaatc

SEQ ID NO: 866106 - DNA, 75 bp, synthetic construct
  source 1..75: mol_type = other DNA
cagaaaaacacgcctgacggcaaaacgatagtttcccctgaaaaattcccggggcgttcatcaacaaatcattct

SEQ ID NO: 866107 - DNA, 75 bp, synthetic construct
  source 1..75: mol_type = other DNA
gatgtggaaggtgacaagaaaatttataatgctgaagttgctgaatgggataagttacggcaacgattgcttgat

SEQ ID NO: 866108 - DNA, 75 bp, synthetic construct
  source 1..75: mol_type = other DNA
gtggaaagcagtccagaacgtgctggagtggagttgcggcgtgtctgattatctcgctcaaatgttgatgctgct

SEQ ID NO: 866109 - DNA, 75 bp, synthetic construct
  source 1..75: mol_type = other DNA
ctctgtaagtatgaacaaatcaaagatcaaatttataatattaatataagctgggcaagcaaacctaaatcaaac

SEQ ID NO: 866110 - DNA, 75 bp, synthetic construct
  source 1..75: mol_type = other DNA
cacctgcctataatgttgaggttgtgtttgatcctccactagtaaatgcggagcatagagaaaaaagtgagattc

SEQ ID NO: 866111 - DNA, 75 bp, synthetic construct
  source 1..75: mol_type = other DNA
aaatgggcaatcacttaccagcaatctctgtaagtatgaacaaatcaaagatcaaatttataatattaatataag

SEQ ID NO: 866112 - DNA, 75 bp, synthetic construct
  source 1..75: mol_type = other DNA
tcagtgctcatggagtgtgagcaatgcagaaaaccctcaaggctggaagccgaattactttgcgggatcagttgc

SEQ ID NO: 866113 - DNA, 75 bp, synthetic construct
  source 1..75: mol_type = other DNA
cgggcgcttaattgacaaaatctacctgaacagtattggttggcgcggtattcgccagcgtaaaacccatttaca

SEQ ID NO: 866114 - DNA, 75 bp, synthetic construct
  source 1..75: mol_type = other DNA
tcccctaacgggcttgtaggccgcgacagtacaggggcgatactttcgtgccaatccggtgtgtggaaaaaagga

SEQ ID NO: 866115 - DNA, 75 bp, synthetic construct
  source 1..75: mol_type = other DNA
ccaaaataacaaatagtaaaaaaacgtatgagaaagaattaacaacttttgttgtaaaacttcctgaaaaggaca

SEQ ID NO: 866116 - DNA, 75 bp, synthetic construct
  source 1..75: mol_type = other DNA
aaggagttgagtttgggactgtaacggaaaaagacggtgtctacagcgctacagtaacttcaaaacgagcaggta

SEQ ID NO: 866117 - DNA, 75 bp, synthetic construct
  source 1..75: mol_type = other DNA
aaaaaactgcatctggcgcgattacatggtcagtaattgttacccagatattatctccagtttctctttctttga

SEQ ID NO: 866118 - DNA, 75 bp, synthetic construct
  source 1..75: mol_type = other DNA
ctatgaaagtggttatcactggattaaggccaaaataacgaatagcaaaaatacatatgagaaaacaataaggac

SEQ ID NO: 866119 - DNA, 75 bp, synthetic construct
  source 1..75: mol_type = other DNA
ctcgtattgaagccagtaaaaataatgcattggctgacggcaaacaacagaatacggtgactttaagccttgcag

SEQ ID NO: 866120 - DNA, 75 bp, synthetic construct
  source 1..75: mol_type = other DNA
tctcagtattaagcaaacagcagcaacagaacctgattctgaggtcagtgctgttttaaccgctgcaccagcaga

SEQ ID NO: 866121 - DNA, 75 bp, synthetic construct
  source 1..75: mol_type = other DNA
ctttgcaggaggcaagggataaagcatggactgcgaggaaagacatctcggttggcatcgatccggtaaaagcga

SEQ ID NO: 866122 - DNA, 75 bp, synthetic construct
  source 1..75: mol_type = other DNA
tttacaaccatgctcagtatctcgataagcgcagagaaatgatgcaatggtgggcggactggcttgatgaaaagg

SEQ ID NO: 866123 - DNA, 75 bp, synthetic construct
  source 1..75: mol_type = other DNA
gttggcatcgatccggtaaaggcgaaaaaggcttcgtctaacaacaattcctttagtgcaatttacaaggaatgg

SEQ ID NO: 866124 - DNA, 75 bp, synthetic construct
  source 1..75: mol_type = other DNA
caactgaatatctcgctgtcggagtcggtatcccggcatgttcctgtctggatgcaccaggtacacataaagctg

SEQ ID NO: 866125 - DNA, 75 bp, synthetic construct
  source 1..75: mol_type = other DNA
atgagtaacactgcagttctggatgaaaacggtatcgccactgtagcgggcgatatcactgtatatcactatgac

SEQ ID NO: 866126 - DNA, 75 bp, synthetic construct
  source 1..75: mol_type = other DNA
tttacaaccatgctcagtatctcgataagcgcagagaaatgatgcagtggtgggcggactggcttgatgaaaaag

SEQ ID NO: 866127 - DNA, 75 bp, synthetic construct
  source 1..75: mol_type = other DNA
ccggcagttgtcctgggactgttattccacgatacgattaagtcattgtttaacccgataaatgtcatgtacgcg

SEQ ID NO: 866128 - DNA, 75 bp, synthetic construct
  source 1..75: mol_type = other DNA
ctgtggttgtcatgttctggcggcgtttgtttggcctgattggcattcattttggccgtccattgcagcgcgaag

SEQ ID NO: 866129 - DNA, 75 bp, synthetic construct
  source 1..75: mol_type = other DNA
agaattcggtatgtgtatatcagttaagggataaatttgatggtgatgatctaagaaaattaaggagagaagttg

SEQ ID NO: 866130 - DNA, 75 bp, synthetic construct
  source 1..75: mol_type = other DNA
ccgcaagaagaactcttatgacctttgtcaaatattaagcccaaaaagacctacgcagctccgggagcttcgtta

SEQ ID NO: 866131 - DNA, 75 bp, synthetic construct
  source 1..75: mol_type = other DNA
acctgcgtgaaatgtctcgcctcggcgtaccggtagtttgtacggttatcggtgaaggtggttctggcggtgcgc

SEQ ID NO: 866132 - DNA, 75 bp, synthetic construct
  source 1..75: mol_type = other DNA
aacagccgattgcagagctagaagcgaaaatcgattctctgactgcggttagccgtcaggatgagaaactggata

SEQ ID NO: 866133 - DNA, 75 bp, synthetic construct
  source 1..75: mol_type = other DNA
ttccatcaattacatcatcttttatcgatgcgaaaatgttactgaggaaacgatatagaaaactcaatgccaaac

SEQ ID NO: 866134 - DNA, 75 bp, synthetic construct
  source 1..75: mol_type = other DNA
tctgcgggcgcggcggcgtcggcggagtcgctgaaaaacgtcagcggctacaaaggcacattgcgcaaggtgatc

SEQ ID NO: 866135 - DNA, 75 bp, synthetic construct
  source 1..75: mol_type = other DNA
cccttattgcaccgattattggtgcatgtattggtgctgcgatttatcgctatctgattggtaaaaatttatcca

SEQ ID NO: 866136 - DNA, 75 bp, synthetic construct
  source 1..75: mol_type = other DNA
agtggctggcgctggacgagaccgcagaagtcatcctacagcacagcatcacgttgcaatccgccgaccttatcc

SEQ ID NO: 866137 - DNA, 75 bp, synthetic construct
  source 1..75: mol_type = other DNA
acgtctgaacgtattattagagatgcggcggcgattacgctccccacgcaacttctgatatcaggcgatgactat

SEQ ID NO: 866138 - DNA, 75 bp, synthetic construct
  source 1..75: mol_type = other DNA
gtcgtgtagttggaaggggtaacggtaaagcggttgacagagaaggtatcaaggctgctcttgctgctggtgact

SEQ ID NO: 866139 - DNA, 75 bp, synthetic construct
  source 1..75: mol_type = other DNA
gataactggtgacgataaccccacgtctaagatgattctcacaatcttttcagcggtagctgaagctgaacgtaa

SEQ ID NO: 866140 - DNA, 75 bp, synthetic construct
  source 1..75: mol_type = other DNA
cctgggtggacattccgatcggggaaaaaattgagttacgcgttctcatacaaaactcaattgctgtcttttata

SEQ ID NO: 866141 - DNA, 75 bp, synthetic construct
  source 1..75: mol_type = other DNA
ttttcttaggatgtcctatgcaagcgatttaataagaggatttttatctgaagatttgataccgaataattcatg

SEQ ID NO: 866142 - DNA, 75 bp, synthetic construct
  source 1..75: mol_type = other DNA
cgagtttttatatggtcgaggtcttcgatatattactacgggggctatagtaatgaattcatgttttaagagtgt

SEQ ID NO: 866143 - DNA, 75 bp, synthetic construct
  source 1..75: mol_type = other DNA
atcgtgatagacggttgtgtcgcacggttacgtaaatataaacaagaagaatatgagctaataattgcccacttt

SEQ ID NO: 866144 - DNA, 75 bp, synthetic construct
  source 1..75: mol_type = other DNA
atgcgtgatattcagatggttcttgagcgttggggagcgtgggctgcaagtggtaacaccggggtggactattct

SEQ ID NO: 866145 - DNA, 75 bp, synthetic construct
  source 1..75: mol_type = other DNA
aatgccaacctcgaatgcccgacactggtttacttcaacggacgctggtatctcagctttagcgaccaatggccg

SEQ ID NO: 866146 - DNA, 75 bp, synthetic construct
  source 1..75: mol_type = other DNA
gagatgatcaatatagtgaaaatggtgatggagccgggctgccttatagcatattacgcgatcagatatttactc

SEQ ID NO: 866147 - DNA, 75 bp, synthetic construct
  source 1..75: mol_type = other DNA
gccatatcattctgcgcggcggtaaagagcctaactacagcgcgaagcacgttgctgaagtgaaagaagggctga

SEQ ID NO: 866148 - DNA, 75 bp, synthetic construct
  source 1..75: mol_type = other DNA
aaaaagcagatggatgtttgtgctgacgtttgccagcagattgccggtggcgaaaaggccattattggcgtgatg

SEQ ID NO: 866149 - DNA, 75 bp, synthetic construct
  source 1..75: mol_type = other DNA
gatgatcgcctgttggttgtgattggtccgtgctcaattcatgatcctgtcgcggctaaagagtatgccactcgc

SEQ ID NO: 866150 - DNA, 75 bp, synthetic construct
  source 1..75: mol_type = other DNA
ccagatcaacgacggtctgcgtattgcccgtaaattgctgcttgatattaacgacagcggtctgccagcggcggg

SEQ ID NO: 866151 - DNA, 75 bp, synthetic construct
  source 1..75: mol_type = other DNA
gcttcaaaaatggcaccgatggtacgattaaagtggctatcgatgccattaatgccgccggtgcgccgcactgct

SEQ ID NO: 866152 - DNA, 75 bp, synthetic construct
  source 1..75: mol_type = other DNA
gtggaaagccatctggtggaaggcaatcagagcctcgagagtggggaaccgctggcctatggcaagagcatcacc

SEQ ID NO: 866153 - DNA, 75 bp, synthetic construct
  source 1..75: mol_type = other DNA
aacactactcaaaaattggcgtcagaacggcacggcagacgattgccgctcgcatccgaaaattgacaacacaag

SEQ ID NO: 866154 - DNA, 75 bp, synthetic construct
  source 1..75: mol_type = other DNA
atggcactttcccccgcgcagcgtcacagccagcgtattgcaatggaacaaaagctgaagcgcagccaggcactg

SEQ ID NO: 866155 - DNA, 75 bp, synthetic construct
  source 1..75: mol_type = other DNA
aacactactcaaaaattggcgtcagaacggcgcggcagacaattgccgcccgtatccgaaaactgacaactcaag

SEQ ID NO: 866156 - DNA, 75 bp, synthetic construct
  source 1..75: mol_type = other DNA
ggaatttctcgatatgatcaccccgcagtatctcgctgacctgatgagttggggcgcaattggtgcacgtacaac

SEQ ID NO: 866157 - DNA, 75 bp, synthetic construct
  source 1..75: mol_type = other DNA
ggactgcagctgctgcgtgatgaagatggtatgccatctatcaccgcaatttctgatgttgaaaaactgaaagaa

SEQ ID NO: 866158 - DNA, 75 bp, synthetic construct
  source 1..75: mol_type = other DNA
tccagcgggggcaggaaaccccggccgcgttcggcagtacgttcccggtgtttgtggcggatacggtgttgtcct

SEQ ID NO: 866159 - DNA, 75 bp, synthetic construct
  source 1..75: mol_type = other DNA
cagggctggcggacaaaaactgtacctgtccccgatacttgatttgtttaacggggaaatcgtggcgtgggaaac

SEQ ID NO: 866160 - DNA, 75 bp, synthetic construct
  source 1..75: mol_type = other DNA
aaaaatgtgccttattccgtatttatgacaccgcccctgtccagggttggtatgacagaagaacaggccagagag

SEQ ID NO: 866161 - DNA, 75 bp, synthetic construct
  source 1..75: mol_type = other DNA
tatatttcactggatgattaccgcattgtgcgtgatgagttgctgggagaaggcagacgtagtactgagagatcc

SEQ ID NO: 866162 - DNA, 75 bp, synthetic construct
  source 1..75: mol_type = other DNA
ttggttttggtaaggcaggaaaaacattagccgtcacgctggctaaagcgggttggcgtgtggctctcatcgaac

SEQ ID NO: 866163 - DNA, 75 bp, synthetic construct
  source 1..75: mol_type = other DNA
aaaccgccagtggagatccaaaccaaccacaaccattgccaaaatccgtccgacaactgatgggcgacacaatgg

SEQ ID NO: 866164 - DNA, 75 bp, synthetic construct
  source 1..75: mol_type = other DNA
ggggtattaaaagcgattgttgataataaaacccaacgtatgttagggaaggtgcgaataagcaggtcatttctt

SEQ ID NO: 866165 - DNA, 75 bp, synthetic construct
  source 1..75: mol_type = other DNA
aaacatatcagcgtctcgtcagtatcagcatcaccgacagttctggaggatgccattgctgatatagccagaaaa

SEQ ID NO: 866166 - DNA, 75 bp, synthetic construct
  source 1..75: mol_type = other DNA
cctttaaggttaaattgtatgtgccgctggcacgtcctgcgctggcgttatggcatcgtctgcgtggtctgtttt

SEQ ID NO: 866167 - DNA, 75 bp, synthetic construct
  source 1..75: mol_type = other DNA
cgagtttcaataatgatccgctgatcacacgggcgattgccgtcaatatcttgctcgatctctacaaaacgtctg

SEQ ID NO: 866168 - DNA, 75 bp, synthetic construct
  source 1..75: mol_type = other DNA
gaaccctctcgcttaaggcagcgattaaggtcaagcgatacagctcctacagaggagaggtagggcaaaccgccc

SEQ ID NO: 866169 - DNA, 75 bp, synthetic construct
  source 1..75: mol_type = other DNA
accaagacgttggttcatgatgcacaacagcacgtagattttgccagtgccatgcagcgtaaagatgaggtcgtc

SEQ ID NO: 866170 - DNA, 75 bp, synthetic construct
  source 1..75: mol_type = other DNA
tatgacagaagaacaagccagagagtgtggtgcagatattcaggtggttacattgcctgtagcggcaattccgcg

SEQ ID NO: 866171 - DNA, 75 bp, synthetic construct
  source 1..75: mol_type = other DNA
atgcttttatctcaataaattcaacaatattgaggaactaaagacagctctttcggattatattcactattataa

SEQ ID NO: 866172 - DNA, 75 bp, synthetic construct
  source 1..75: mol_type = other DNA
gcgattcattgccgacgcgctgagatagaaatgtggctcaacaagaagcctgctcggtatgctgacccgctgccg

SEQ ID NO: 866173 - DNA, 75 bp, synthetic construct
  source 1..75: mol_type = other DNA
gcggcaagtcatccagcccggcgacgcgattcactgccgacgcgctgagattgagcaatggctaaataaaaagcc

SEQ ID NO: 866174 - DNA, 75 bp, synthetic construct
  source 1..75: mol_type = other DNA
gctggttcgctgtgaccgaaacgcacgcgttagcctgttgccacccgatgggctggagtggaggccggggcagtt

SEQ ID NO: 866175 - DNA, 75 bp, synthetic construct
  source 1..75: mol_type = other DNA
ggtttgtaatattcctgtcctgcactggttacatcgtaatctggtcaatttcgaacattgaccgtggcgggaaat

SEQ ID NO: 866176 - DNA, 75 bp, synthetic construct
  source 1..75: mol_type = other DNA
cctcggcacaatgttgagctttccacgcgacattacctcctacgctgggctggcgatcatcaaagagaccttcac

SEQ ID NO: 866177 - DNA, 75 bp, synthetic construct
  source 1..75: mol_type = other DNA
tcaggtgagaaagagattctggcggtttttggtagtacggccattcctgcgtttatgacctgcttgcaacgagat

SEQ ID NO: 866178 - DNA, 75 bp, synthetic construct
  source 1..75: mol_type = other DNA
ccgtgtatccgtcttacctggtaccgcagaaccttcgccctccgtatatcgcggtggatgttcgcaacagtattc

SEQ ID NO: 866179 - DNA, 75 bp, synthetic construct
  source 1..75: mol_type = other DNA
tactaccagagcaccgcccgggaaatatcccggcagttgattgaaaaagttatttgtaaatatgaggttaaataa

SEQ ID NO: 866180 - DNA, 75 bp, synthetic construct
  source 1..75: mol_type = other DNA
aacagcacagttcgcagctctcgtccgttcttaaatccgcagttgaaaccatctcgtcagaccaggaaatcacgt

SEQ ID NO: 866181 - DNA, 75 bp, synthetic construct
  source 1..75: mol_type = other DNA
catggccttgtgggttttcagttatgtggcctcagcgtcgtgtgcgggctgtgccgtgcctccatcttagccggg

SEQ ID NO: 866182 - DNA, 75 bp, synthetic construct
  source 1..75: mol_type = other DNA
atgaaatccgcagcatggcggatgccctggcaaaaatcaggggctgatgatggcggggaaaatccccgccttttt

SEQ ID NO: 866183 - DNA, 75 bp, synthetic construct
  source 1..75: mol_type = other DNA
aacattacgcaatgcagcaatacgcgtagagaaagaaatgggaatacatcgcaatcgcaaggttgcacatgatga

SEQ ID NO: 866184 - DNA, 75 bp, synthetic construct
  source 1..75: mol_type = other DNA
agatgcctgtaccgccgactcactggctgaatttgtctgggatctgtttaccgcctggctgactgcgggcgcgcc

SEQ ID NO: 866185 - DNA, 75 bp, synthetic construct
  source 1..75: mol_type = other DNA
ggaaaaagagaacggcggtattggaacagccgccacgcgtgccgggcatatccagcttctcaggcgtcgcggcct

SEQ ID NO: 866186 - DNA, 75 bp, synthetic construct
  source 1..75: mol_type = other DNA
gcctcgtctggcagaccattgcggaatacttcctggtgcagttcatgcagccccgccagcgggaggtggtgaccg

SEQ ID NO: 866187 - DNA, 75 bp, synthetic construct
  source 1..75: mol_type = other DNA
ccccactcttccgaccttttatcagccatcgctctggacgcgcccgttattaaaagcaaacgcccaatcactgcc

SEQ ID NO: 866188 - DNA, 75 bp, synthetic construct
  source 1..75: mol_type = other DNA
ctctgacccaacaaatggaaattgcgcggcattgtgcccgccttatcagcgatcgtgacacgctatttcttggac

SEQ ID NO: 866189 - DNA, 75 bp, synthetic construct
  source 1..75: mol_type = other DNA
aaatggaaatagcacgacattgcgcacgattaattcgcgatcgtgacacgctatttcttggacatgggacaatct

SEQ ID NO: 866190 - DNA, 75 bp, synthetic construct
  source 1..75: mol_type = other DNA
gcgtatctggtgttccgggatatcaggaaaggcgacatcggctttgtgttcccggagagaaagaaaaaacgttaa

SEQ ID NO: 866191 - DNA, 75 bp, synthetic construct
  source 1..75: mol_type = other DNA
cagacctacctgacaagtctgggtttcaatcgctggaataatggccactctatgaaagcgtctgatgctgttgta

SEQ ID NO: 866192 - DNA, 75 bp, synthetic construct
  source 1..75: mol_type = other DNA
cgcctggcctggcgaatctcagcataaacgtgccaccgttgggttggatattctcgctgctatcggcagcgatat

SEQ ID NO: 866193 - DNA, 75 bp, synthetic construct
  source 1..75: mol_type = other DNA
gacctttttaatgactattaccatggttgcatctggaatgtcaccgttttgcaggagcaagggattgccggaatc

SEQ ID NO: 866194 - DNA, 75 bp, synthetic construct
  source 1..75: mol_type = other DNA
cattacgacaagacgcccgtatctggctgctgaaatacccggaacacgccattaccggcctgctgcctgcagcgc

SEQ ID NO: 866195 - DNA, 75 bp, synthetic construct
  source 1..75: mol_type = other DNA
gcatatcaaccacccgcaggcacttacactacttatccatgcaagcgagcagggaaagcgttgccacgatcgcat

SEQ ID NO: 866196 - DNA, 75 bp, synthetic construct
  source 1..75: mol_type = other DNA
gcccagaaactgaaattcaaagccttacaggagcgggcgaaagagaaaattgccgacattgccgagagccgcgaa

SEQ ID NO: 866197 - DNA, 75 bp, synthetic construct
  source 1..75: mol_type = other DNA
ttgaacaactcgattcaaatttaagagatattgacgccattctggatctggttagcgtcaccctggcttctccag

SEQ ID NO: 866198 - DNA, 75 bp, synthetic construct
  source 1..75: mol_type = other DNA
ggggtatggtgtccggtcagcacaatggaacttagccgcgaaatggtggcgatctattcagagcacagggccact

SEQ ID NO: 866199 - DNA, 75 bp, synthetic construct
  source 1..75: mol_type = other DNA
aataatcgctcacaatcgttaccttgttctggtgatgagccttcccgcagacggcacgcccctagcatcaacaaa

SEQ ID NO: 866200 - DNA, 75 bp, synthetic construct
  source 1..75: mol_type = other DNA
gagggcgatgtgcgtcactgggcatgtcaaatggtacgtggtttaccctccttgatattccgggggtggaaaccc

SEQ ID NO: 866201 - DNA, 75 bp, synthetic construct
  source 1..75: mol_type = other DNA
gttatttttcgctttgacaatatcgttagcgaggcagaaaaggacaaggatttgccggagaaggtcgcggctgaa

SEQ ID NO: 866202 - DNA, 75 bp, synthetic construct
  source 1..75: mol_type = other DNA
agggccggatatcttgcgccagtaatgataaaggcgattggtcagaagctggcggcggcaggcgtacaggatgca

SEQ ID NO: 866203 - DNA, 75 bp, synthetic construct
  source 1..75: mol_type = other DNA
ggtgatgaagcactggcaataaagcaacagacggatccggttattgagttttgccagttcctgaattttctggag

SEQ ID NO: 866204 - DNA, 75 bp, synthetic construct
  source 1..75: mol_type = other DNA
atggcgaaccggtacgactggcagatgtttattgaggccaccggagacggcgggagcggtaaaagtacattcaca

SEQ ID NO: 866205 - DNA, 75 bp, synthetic construct
  source 1..75: mol_type = other DNA
gcggtggtgctggctaccaacaataacccgatgatattcaccgaacgggccggaggtgtgtcacgtcgtcgcgta

SEQ ID NO: 866206 - DNA, 75 bp, synthetic construct
  source 1..75: mol_type = other DNA
cagaatctttctgatggtctggtgattgagcttccggtaacgcaaaaggcgcaactttcgcagatggcagacagt

SEQ ID NO: 866207 - DNA, 75 bp, synthetic construct
  source 1..75: mol_type = other DNA
tttttaatacccgtaaaaccaatgacccgattgactgcacacgttcaaaggcccgcaaactggcggatttgattg

SEQ ID NO: 866208 - DNA, 75 bp, synthetic construct
  source 1..75: mol_type = other DNA
gttcaccggcatcggcaaatctgaaggaaaggcacttctcatcgccttcctgcgtaactgcaaaggctttcgcac

SEQ ID NO: 866209 - DNA, 75 bp, synthetic construct
  source 1..75: mol_type = other DNA
gcggcaaaagtttacggacatgaatatattacgcggaaagttaagggagtaacgcagaccaacgcaattacaacg

SEQ ID NO: 866210 - DNA, 75 bp, synthetic construct
  source 1..75: mol_type = other DNA
ggtgatgcttacgctcctggctggcgacgagactacaacacgaaaaaccagcagcctgcatttgctttagggcaa

SEQ ID NO: 866211 - DNA, 75 bp, synthetic construct
  source 1..75: mol_type = other DNA
taaacctggcgaggacgttacttgcgtggcgggtaacacgacaattgccaccttcaacactcagtcagaagctgc

SEQ ID NO: 866212 - DNA, 75 bp, synthetic construct
  source 1..75: mol_type = other DNA
gacgcgcaatgttaatgacggccagattcagggcgttatcaacaagctgtggggcgtggatacgaactacaaatc

SEQ ID NO: 866213 - DNA, 75 bp, synthetic construct
  source 1..75: mol_type = other DNA
gcaagctagggagtgagatattatatatacctagctataacccagcccctataacgttaaataaaattaaaatag

SEQ ID NO: 866214 - DNA, 75 bp, synthetic construct
  source 1..75: mol_type = other DNA
gccgaacggcgttctgcgtaccactggtgagcacgaagtgagcttccaggttcacagcgaagtattcgcgaaagt

SEQ ID NO: 866215 - DNA, 75 bp, synthetic construct
  source 1..75: mol_type = other DNA
agctggaatcaggatttctccggctgtttctgtggcatgtatgtgcgaaaggccatgcgctgggtgctcttatag

SEQ ID NO: 866216 - DNA, 75 bp, synthetic construct
  source 1..75: mol_type = other DNA
caagttccatgtattccatgactccaccaacttctatggcagcacgggtaatgcgcgcggtcaggcggtggtgaa

SEQ ID NO: 866217 - DNA, 75 bp, synthetic construct
  source 1..75: mol_type = other DNA
acaggaagcactgttggaaatgacaaagctgttggatggaactcaaatagcggcgtttataatgcgactattagt

SEQ ID NO: 866218 - DNA, 75 bp, synthetic construct
  source 1..75: mol_type = other DNA
cgcatccggcgataatgtgccgcctgtgtggcttgggccaaatcagcttgccgaacttgatgcactgaaaattgt

SEQ ID NO: 866219 - DNA, 75 bp, synthetic construct
  source 1..75: mol_type = other DNA
gccggaaggcagaaaatccgtgcgcatattcagggccggatatcttgcgccagtaatgataaaggcgattggtca

SEQ ID NO: 866220 - DNA, 75 bp, synthetic construct
  source 1..75: mol_type = other DNA
gacgctgtaactgcagctggcgttgaagtggctaagagcgaagttcgcctgccgaacggtgttctgcgtaccact

SEQ ID NO: 866221 - DNA, 75 bp, synthetic construct
  source 1..75: mol_type = other DNA
gacgctgtaactgcagctggcgttgaagtggctaagagcgaagttcgtctgccgaacggcgttctgcgtaccact

SEQ ID NO: 866222 - DNA, 75 bp, synthetic construct
  source 1..75: mol_type = other DNA
ggcggttcagttccgtgtgaattataagaacggcggtatttattatcgttcagcgcgagatggttatggctttga

SEQ ID NO: 866223 - DNA, 75 bp, synthetic construct
  source 1..75: mol_type = other DNA
cagcgctggaagcgaaaaccatatcgccctgagcgagcaggagttttttacccgcgcggggcaaaatctgctggc

SEQ ID NO: 866224 - DNA, 75 bp, synthetic construct
  source 1..75: mol_type = other DNA
cagcgggtgttgaatctgttaaagcagggctaccagagtcgcgtgccgttggacgattgcaccatcaaaactatc

SEQ ID NO: 866225 - DNA, 75 bp, synthetic construct
  source 1..75: mol_type = other DNA
accctgtttgatctcagcagcaaagtgctggcagaagaacattacccgctgccggaacgtacccagcaaacgctg

SEQ ID NO: 866226 - DNA, 75 bp, synthetic construct
  source 1..75: mol_type = other DNA
catctgccgcaggcgcgggcacgctatgcatcggcgctgctgcccatctgcttacaggtgtcgccagagatcctg

SEQ ID NO: 866227 - DNA, 75 bp, synthetic construct
  source 1..75: mol_type = other DNA
atacgctcaataatgacggcagcctgcgccagtcggtcgacacgctgctgacgctgattcatcagaaggagaaac

SEQ ID NO: 866228 - DNA, 75 bp, synthetic construct
  source 1..75: mol_type = other DNA
acaatgacggcagcctgcgccagtcggtcgacacgctgctgacgctgatccatcagaaggagaaacaccatgcct

SEQ ID NO: 866229 - DNA, 75 bp, synthetic construct
  source 1..75: mol_type = other DNA
tgtgtgactcggtaggcagggaacatacgccagccctgagcgaagccgcagagcaatatctgaatacagttgcga

SEQ ID NO: 866230 - DNA, 75 bp, synthetic construct
  source 1..75: mol_type = other DNA
atccgtactgaatgtgctttggaactggatcctgttccgtaaattttcctctccggaacaattcgaaaatgttgc

SEQ ID NO: 866231 - DNA, 75 bp, synthetic construct
  source 1..75: mol_type = other DNA
aaaccgagtttcagcaggtttataaatctgtactgaatgaaccgccccgggaatcctggagactaaactccctga

SEQ ID NO: 866232 - DNA, 75 bp, synthetic construct
  source 1..75: mol_type = other DNA
ctgctgtctggtttcgtggattacctgtgcgaatcagttggtcgggaacacacaccagccctgagtgatgccgca

SEQ ID NO: 866233 - DNA, 75 bp, synthetic construct
  source 1..75: mol_type = other DNA
actcaagtcatttgacgcttttcgcgaatgggtaaccattcaggccggattttacaccgagcatatttatcctga

SEQ ID NO: 866234 - DNA, 75 bp, synthetic construct
  source 1..75: mol_type = other DNA
actcaagtcatttgacgccttccgtgaatgggtaaccattcaggccggattttacactgagcatttttatccgga

SEQ ID NO: 866235 - DNA, 75 bp, synthetic construct
  source 1..75: mol_type = other DNA
ataatgacggcagcctgcgccagtcggtcgacaagctgctgacgctgattcatcagaaggagaaacaccatgcct

SEQ ID NO: 866236 - DNA, 75 bp, synthetic construct
  source 1..75: mol_type = other DNA
tttgcatcaaatatgaccggagcttcactgtcactgatgcctgaaagcagtagtttaatttccaatattcctgct

SEQ ID NO: 866237 - DNA, 75 bp, synthetic construct
  source 1..75: mol_type = other DNA
ggccgtctaaatatggtgcgttggtggttgataaaaccacagtaacgactgatgagaacggtcaggctacggtaa

SEQ ID NO: 866238 - DNA, 75 bp, synthetic construct
  source 1..75: mol_type = other DNA
gcgccgggaaagcaaccagcgtatggcggactttgccgtcgccgatgtctccctgttctggctgcttaacgcgct

SEQ ID NO: 866239 - DNA, 75 bp, synthetic construct
  source 1..75: mol_type = other DNA
acttctccggtaaactgtacaacatcgttccttacggtatcgatgctaccggtcatatcgactacgccgatctgg

SEQ ID NO: 866240 - DNA, 75 bp, synthetic construct
  source 1..75: mol_type = other DNA
cgaacttggcagtgatgttagcgcggtgaaatcattctccctgtacgctgatgacgcaaatggagtattgactct

SEQ ID NO: 866241 - DNA, 75 bp, synthetic construct
  source 1..75: mol_type = other DNA
cactgtcactgatgcctgaaagcagtagtttaatttccaatattcctgctaatggtaaggatgcagcggtattag

SEQ ID NO: 866242 - DNA, 75 bp, synthetic construct
  source 1..75: mol_type = other DNA
gatgcagaacttaaagatgcagggctggttcgctacggaacaacatttatgccggagggcagggtgttgttgcgc

SEQ ID NO: 866243 - DNA, 75 bp, synthetic construct
  source 1..75: mol_type = other DNA
gtgggcggagctcgcccgtctggcaggcagtatgctgactttttccctggagcatgatcctgacgccataccggg

SEQ ID NO: 866244 - DNA, 75 bp, synthetic construct
  source 1..75: mol_type = other DNA
gctcaaaggagcgatctgcctccggcgccgcgtgagttagatgccggccagctggctgaccgcgatgcggtaact

SEQ ID NO: 866245 - DNA, 75 bp, synthetic construct
  source 1..75: mol_type = other DNA
ctggagaaccagtattttgcgctggatatgcacagtgacgcggctaaatcgatgctggagtccgggagctgcatg

SEQ ID NO: 866246 - DNA, 75 bp, synthetic construct
  source 1..75: mol_type = other DNA
tctttgatggtctggttgagttcatgacctctggtccgatcgtcgtttccgtgctggaaggtgaaaacgccgttc

SEQ ID NO: 866247 - DNA, 75 bp, synthetic construct
  source 1..75: mol_type = other DNA
gtgctggaaggcgaaaatgcggttcagcgtcaccgcgatctgctcggcgcaaccaacccggcaaatgcgctggcg

SEQ ID NO: 866248 - DNA, 75 bp, synthetic construct
  source 1..75: mol_type = other DNA
aaaccgagtttcagcaggtttataaatctgaaccgccccgggaatcctggagactaaactccctgagaaagaggt

SEQ ID NO: 866249 - DNA, 75 bp, synthetic construct
  source 1..75: mol_type = other DNA
cgccctgatgcagcttaacggcatcgcccagaaactgaaattcaaagcattacaggagcgggcaaaagaaaaaat

SEQ ID NO: 866250 - DNA, 75 bp, synthetic construct
  source 1..75: mol_type = other DNA
cccgtaccgtcgcagcccagcaggtagcgaggctggaatccgccatgtgcctgcgccgtcgctggtcagaggaaa

SEQ ID NO: 866251 - DNA, 75 bp, synthetic construct
  source 1..75: mol_type = other DNA
cagaacgggtaattccctggctaacgtcgccagcagctacagtgctgaaatcatgccagcaacaactgacacaat

SEQ ID NO: 866252 - DNA, 75 bp, synthetic construct
  source 1..75: mol_type = other DNA
cagaggatgcagaatttgacccgagttttctgagccgcacgccagggagcagtgtgattgatgtccgtcgtttca

SEQ ID NO: 866253 - DNA, 75 bp, synthetic construct
  source 1..75: mol_type = other DNA
accgttcgtgcgcgatgcctccggcagccgcctgaaagacttacctaaaccgaacaaaagtgatgatgaatcaca

SEQ ID NO: 866254 - DNA, 75 bp, synthetic construct
  source 1..75: mol_type = other DNA
ctgaaaaaagatgcgcgtaccgtcgccgcccagcaggtggcaaggcttgaatccgccatgtgcctgcgccgccgc

SEQ ID NO: 866255 - DNA, 75 bp, synthetic construct
  source 1..75: mol_type = other DNA
gggagagtttgttatttaatatcagaatgccagatggtaataccccaccaatggctgctgaggttctggatcagg

SEQ ID NO: 866256 - DNA, 75 bp, synthetic construct
  source 1..75: mol_type = other DNA
cgtatcaatatgggcttacgaatgatattaccttaaatggtggaataacaacaagttcaaaatatacagcgggtt

SEQ ID NO: 866257 - DNA, 75 bp, synthetic construct
  source 1..75: mol_type = other DNA
aacgtttaccgtaccttttgcagctgtagctcagcttgtccggcctggattcagtcgttggcagatgtcagtagg

SEQ ID NO: 866258 - DNA, 75 bp, synthetic construct
  source 1..75: mol_type = other DNA
tggatcaaattgtccaggaaggtggtctggaatatgccactgaagtgatcattgcgtggcaatccatctgtttta

SEQ ID NO: 866259 - DNA, 75 bp, synthetic construct
  source 1..75: mol_type = other DNA
tatcgaattagcgccactgattgcccgtgccttcaacaaactcaaaacgctacgcgaaaacgcccgtagctggct

SEQ ID NO: 866260 - DNA, 75 bp, synthetic construct
  source 1..75: mol_type = other DNA
accattatccctagaatccttctgtacaataaatgaaacaaaaagcaaaacactgcaagtgcagcataactggca

SEQ ID NO: 866261 - DNA, 75 bp, synthetic construct
  source 1..75: mol_type = other DNA
aacggtgaatggaaaggaaatgcggaattgtcattccgtgatatgtcctcttcacaggaggagagtgttctgtgt

SEQ ID NO: 866262 - DNA, 75 bp, synthetic construct
  source 1..75: mol_type = other DNA
acgacaccatacagctgcctgacggcatcctccggaagcatccccgcagcatcgccttcgccaatatggacgaga

SEQ ID NO: 866263 - DNA, 75 bp, synthetic construct
  source 1..75: mol_type = other DNA
ggatttagtcgctggcaaatgtcagtgggaaagtatcgttatgcgaataaaacatataatgatttaatagcacaa

SEQ ID NO: 866264 - DNA, 75 bp, synthetic construct
  source 1..75: mol_type = other DNA
tgctctcgcgccgcccgtacagataaaacgttatgcccgcagtgtggattaccggcaacatactcacatcttccc

SEQ ID NO: 866265 - DNA, 75 bp, synthetic construct
  source 1..75: mol_type = other DNA
tccatcgcttttgcgaatatggacgaagtcgagtttcagcaggtttataaatctgttctgaatgtgctgtggaac

SEQ ID NO: 866266 - DNA, 75 bp, synthetic construct
  source 1..75: mol_type = other DNA
ataccgagtttcagcaggtttataaatccgtactgaatgtgctttggaactggattctgttccgaaaattttcct

SEQ ID NO: 866267 - DNA, 75 bp, synthetic construct
  source 1..75: mol_type = other DNA
aaaccgagtttcagcaggtttataactctgtactgaatgtgctgtggaactggattctgttccgtaaattttcct

SEQ ID NO: 866268 - DNA, 75 bp, synthetic construct
  source 1..75: mol_type = other DNA
gttctgacacgacacatcgcggctacagcctgcatgccggttacagtgcacgaataccggaaaccagtacaaatg

SEQ ID NO: 866269 - DNA, 75 bp, synthetic construct
  source 1..75: mol_type = other DNA
gaagcattaacagcagacgggaaatctgcaggctacattgctcagggaggccggttatttgtacgtaacctggat

SEQ ID NO: 866270 - DNA, 75 bp, synthetic construct
  source 1..75: mol_type = other DNA
cctgtcactgctgcggctgaatgttgaaattccgcaggccatgctggtttcccgtccacggggatacatatcacc

SEQ ID NO: 866271 - DNA, 75 bp, synthetic construct
  source 1..75: mol_type = other DNA
accagctacacactcgtatctcccctgtggtcgttgcctgcaaaaaccaccgccgtggcaaagactggtaaccat

SEQ ID NO: 866272 - DNA, 75 bp, synthetic construct
  source 1..75: mol_type = other DNA
ggctatgccgaatgccactggcgttaggtcattgggggatttgttcggtctgttcacgcgccacccgcacagata

SEQ ID NO: 866273 - DNA, 75 bp, synthetic construct
  source 1..75: mol_type = other DNA
tgacagttgtgtcattcactatagtgcgtccggagaaaatgccaggggaaatactgctccggttattcatcctgc

SEQ ID NO: 866274 - DNA, 75 bp, synthetic construct
  source 1..75: mol_type = other DNA
tagttttatccgtcctgaagtgagtggggtgacgggatggctattttcgcaacttgaactgtttgatctgcctta

SEQ ID NO: 866275 - DNA, 75 bp, synthetic construct
  source 1..75: mol_type = other DNA
ctgatcggtaaagtccgattttctcggttggggattaaacttgccgaaacgcacaacaaaggttatcgctggcag

SEQ ID NO: 866276 - DNA, 75 bp, synthetic construct
  source 1..75: mol_type = other DNA
gcataacaaaggttatcgctggcagcatgaagcggttattgcccttgcctcccccgacaatgtgaacgcttttga

SEQ ID NO: 866277 - DNA, 75 bp, synthetic construct
  source 1..75: mol_type = other DNA
atcagccgctgcggtatcagtaacgtagctttaacgcattttgatggccgcgtgtttggtgcagcattgccagaa

SEQ ID NO: 866278 - DNA, 75 bp, synthetic construct
  source 1..75: mol_type = other DNA
cggcagacagtggaatggcagacatcgtgcatatcatcgaacagtcgcgtaacgcgctggtatccggcggctttc

SEQ ID NO: 866279 - DNA, 75 bp, synthetic construct
  source 1..75: mol_type = other DNA
cgtaatgcccagcatctggcgatcaaaaatatccgcattctgcaaagcgactggtttagcgcgctagccgggcag

SEQ ID NO: 866280 - DNA, 75 bp, synthetic construct
  source 1..75: mol_type = other DNA
cagcgccttatggctggacgttaacgccgattccgtggtgtgaagaaggtttctggattgaacgtagcgatgacg

SEQ ID NO: 866281 - DNA, 75 bp, synthetic construct
  source 1..75: mol_type = other DNA
gttaactgtgtaagtgtcagtggtaaaaattacccaccattcattaaacttgcaagtaatttaggtatccctgtc

SEQ ID NO: 866282 - DNA, 75 bp, synthetic construct
  source 1..75: mol_type = other DNA
taatatcccatgcacgcgaaagcgttagttatctggaagacttgaaaggacgtgccagcaaagaaggtgaggact

SEQ ID NO: 866283 - DNA, 75 bp, synthetic construct
  source 1..75: mol_type = other DNA
tcttggcaagctatctgggatgccgaaatcgcgccccaaatggaggctttgataaagaaacctggttacagcatg

SEQ ID NO: 866284 - DNA, 75 bp, synthetic construct
  source 1..75: mol_type = other DNA
ctgacctttccggatttaacgcgcagtgccatggcggcagtgctgcagttgtaccgtggatttgtggcgacacga

SEQ ID NO: 866285 - DNA, 75 bp, synthetic construct
  source 1..75: mol_type = other DNA
tggtcacactattacatgcaatgcaggcacgcgataaaacgctgggtctggcaacgttgtgcattggcggcggtc

SEQ ID NO: 866286 - DNA, 75 bp, synthetic construct
  source 1..75: mol_type = other DNA
gtgattatgggtaacgtgttgcaagccgggctggggcaaaatccggcgcgtcaggcactgttaaaaagcgggctg

SEQ ID NO: 866287 - DNA, 75 bp, synthetic construct
  source 1..75: mol_type = other DNA
atggaatatcaatactggttacgtgaagcaataagccaacttcaggcgagcgaaagcccacgccgtgacgctgaa

SEQ ID NO: 866288 - DNA, 75 bp, synthetic construct
  source 1..75: mol_type = other DNA
atctgaacaccatccagcagactcacagtgatatcgggctgatggcagcctggctgtcaaattcgattccgttta

SEQ ID NO: 866289 - DNA, 75 bp, synthetic construct
  source 1..75: mol_type = other DNA
gcaacagcctggcacaggcaggattccagacctgcgaggcgctggccaacaacgtgctgaagcgtgaactgaaag

SEQ ID NO: 866290 - DNA, 75 bp, synthetic construct
  source 1..75: mol_type = other DNA
gcagcatccggcgggctggcggccacatttgtgccggtgatgcatactgtcctgatggccatgctggtcgggatg

SEQ ID NO: 866291 - DNA, 75 bp, synthetic construct
  source 1..75: mol_type = other DNA
gaacttctctttgtcgaacctgaacaccattcagcagacacacagtgatatcgggctgatggcggcctggttgtc

SEQ ID NO: 866292 - DNA, 75 bp, synthetic construct
  source 1..75: mol_type = other DNA
gcaggtgctgaaaaatgagcaggaaatggcatcatctcagcaggaactgaatatgcaacggaacacgctcgcggg

SEQ ID NO: 866293 - DNA, 75 bp, synthetic construct
  source 1..75: mol_type = other DNA
gcagagccagattaagcagtataatgatgcacttaatcgcagtcatgaatatgcacagatggccagctacgcaga

SEQ ID NO: 866294 - DNA, 75 bp, synthetic construct
  source 1..75: mol_type = other DNA
tggagcgcgatcagcccttcccggcggtacccaaatggtcgatcaaaaagtggatcagcctgcccggcgaacagc

SEQ ID NO: 866295 - DNA, 75 bp, synthetic construct
  source 1..75: mol_type = other DNA
atggtgtgaatgtgccgacaaacgagccgtcagaagatccggacattatcccggcgggatactatggcgctgcgt

SEQ ID NO: 866296 - DNA, 75 bp, synthetic construct
  source 1..75: mol_type = other DNA
ctggtttagtgcgcttgtcggacagcagtttacgatgattgtcagcaatccaccgtatattgacgagcaggatcc

SEQ ID NO: 866297 - DNA, 75 bp, synthetic construct
  source 1..75: mol_type = other DNA
tgagtacaacatctccttgggtgagcgtcgtgcgaacgctgttaagatgtatctgcagggtaaaggcgtttctgc

SEQ ID NO: 866298 - DNA, 75 bp, synthetic construct
  source 1..75: mol_type = other DNA
ctgttgtggttttttctggtgctcctctatcatcagatttaagtgagttggcctgtatattgagtcaaaagggag

SEQ ID NO: 866299 - DNA, 75 bp, synthetic construct
  source 1..75: mol_type = other DNA
ccccgctggcacgcatcgggctgcgcttccaggtcgccgaccaacacactgaggtcagctggctgggattaggtc

SEQ ID NO: 866300 - DNA, 75 bp, synthetic construct
  source 1..75: mol_type = other DNA
aactcctggcggtggtgccactgtcatggagcactatcgaccgcatggagcgcgcaggggaatttcctaaacgct

SEQ ID NO: 866301 - DNA, 75 bp, synthetic construct
  source 1..75: mol_type = other DNA
tgggcaaatccaccaaggagtttgcattcaagtttgcggcttgcctcactggacgtttaaagggcgctactattg

SEQ ID NO: 866302 - DNA, 75 bp, synthetic construct
  source 1..75: mol_type = other DNA
atgatgacattgactaccgtctcgaagaaaacttcaaataattcagcccttgtattctggcgcgttggtacaaaa

SEQ ID NO: 866303 - DNA, 75 bp, synthetic construct
  source 1..75: mol_type = other DNA
gattcccgcctccggttaatcgtgagtggtctgttcaggggcatgcatgggatgattacgttgataatttcttcc

SEQ ID NO: 866304 - DNA, 75 bp, synthetic construct
  source 1..75: mol_type = other DNA
atgtaccatcatgaaaataaagactttttagtcaaaaggaaggtctataatggtcgcgaagtcattgatgaaata

SEQ ID NO: 866305 - DNA, 75 bp, synthetic construct
  source 1..75: mol_type = other DNA
tgccgctgaacgaagcgctacagtggcactttgaactcaccgtcaacaccgcgaatattgttgagaactacgcca

SEQ ID NO: 866306 - DNA, 75 bp, synthetic construct
  source 1..75: mol_type = other DNA
ctgattaatctgctgcgcccgctgaccccgcgcctgtattccatcgcctcctcgcaggcggaagtcgagaacgaa

SEQ ID NO: 866307 - DNA, 75 bp, synthetic construct
  source 1..75: mol_type = other DNA
tggccaccattaatattggcgaactgatatgccaggatgaagacctgtccggagagctctggcttgccgggatgc

SEQ ID NO: 866308 - DNA, 75 bp, synthetic construct
  source 1..75: mol_type = other DNA
gctgatttagttaatggtctgtcagtaggtgcagcaacctctttatctgatagttgggaaagatgttcttacagt

SEQ ID NO: 866309 - DNA, 75 bp, synthetic construct
  source 1..75: mol_type = other DNA
acatgtttatacctgtggccccgaggcgctaaatgaagcggtaagaagtgaagctgcgcgtctggacatcgccgc

SEQ ID NO: 866310 - DNA, 75 bp, synthetic construct
  source 1..75: mol_type = other DNA
ctgtcagatagtgaagcgcaaagggcgattgtatgtaatttgtaaatccaatcctcgttttaaggctgttcaggg

SEQ ID NO: 866311 - DNA, 75 bp, synthetic construct
  source 1..75: mol_type = other DNA
ccgactcagactgaaatcgtgctgaaaggcgctaataagcaggtgatcggccaggttgcagcggatctgcgcgcc

SEQ ID NO: 866312 - DNA, 75 bp, synthetic construct
  source 1..75: mol_type = other DNA
taccgtcgtcctgagccttataaaggcaagggtgttcgttacgccgatgaagtcgtgcgtaccaaagaggctaag

SEQ ID NO: 866313 - DNA, 75 bp, synthetic construct
  source 1..75: mol_type = other DNA
gcaggcgacaacgcgccgatggcttacatcgagctgcttgatcgttcagagaaagcagaagctgctgcagagtaa

SEQ ID NO: 866314 - DNA, 75 bp, synthetic construct
  source 1..75: mol_type = other DNA
gaaagaattctggcaaaaagacttctttacaaatccagttggcggaagcttaactgcaatatttgaattattctg

SEQ ID NO: 866315 - DNA, 75 bp, synthetic construct
  source 1..75: mol_type = other DNA
atatgacaccacgcgctcaaagcagtgcggcatgtcggtgccgcagcccgccgataccggctatcaaccaattat

SEQ ID NO: 866316 - DNA, 75 bp, synthetic construct
  source 1..75: mol_type = other DNA
ggggccgatgaaggcaacaaagctgcgctgtccctggtttggaccgagcacctgatgtacacctcgctgctggtg

SEQ ID NO: 866317 - DNA, 75 bp, synthetic construct
  source 1..75: mol_type = other DNA
tggctcaaggcacggcaggaaaataaccatcaccatattgataacgcggtacagaagaatctggccaaagcccca

SEQ ID NO: 866318 - DNA, 75 bp, synthetic construct
  source 1..75: mol_type = other DNA
ttacgggaacagcgatgaatgcactatgtatttttattatcagacttctggataaagattttattgaagtctaca

SEQ ID NO: 866319 - DNA, 75 bp, synthetic construct
  source 1..75: mol_type = other DNA
gccagcacctggctgaatcattttgacgccgacagcctgcgttactactacactgcgaaactctcttcgcgcatt

SEQ ID NO: 866320 - DNA, 75 bp, synthetic construct
  source 1..75: mol_type = other DNA
ttgtctgccttatctgctttgcgcaatgattgtctgccttatctgctttgcgcaatattactggctgcggcggtg

SEQ ID NO: 866321 - DNA, 75 bp, synthetic construct
  source 1..75: mol_type = other DNA
ataagctggccgacggcgcaggcgcgggctggctcgcttgcagtcacacaattggctatgggctttgcgcgttgt

SEQ ID NO: 866322 - DNA, 75 bp, synthetic construct
  source 1..75: mol_type = other DNA
gtggcaaaactgtttaatgaactgggcccgcgtttcgcgagccgtgccggtggttacactcgtattctgaagtgt

SEQ ID NO: 866323 - DNA, 75 bp, synthetic construct
  source 1..75: mol_type = other DNA
actttctaacgctgctcggttgggtgatcaataacggcttatggaatgcgattagcgccaccggattattcgccc

SEQ ID NO: 866324 - DNA, 75 bp, synthetic construct
  source 1..75: mol_type = other DNA
agatggagaagttttttggtaatgccgatggcgaacacgaagtatccaagcgcctgctgggctctttcctctact

SEQ ID NO: 866325 - DNA, 75 bp, synthetic construct
  source 1..75: mol_type = other DNA
tgattggcaaaatctggccgggatttttgactctcggtggcgatttgggcgatttcgctggtcgggatcggtcca

SEQ ID NO: 866326 - DNA, 75 bp, synthetic construct
  source 1..75: mol_type = other DNA
gcacgatgatgtcgtaggcctgtgcttccagggggcggttagccgcattggcggggcgagctttgaagacttcca

SEQ ID NO: 866327 - DNA, 75 bp, synthetic construct
  source 1..75: mol_type = other DNA
gcaggtaaggcactctactgcaccgaaaacaacccgccgtttgataacggcctgctgaacgcgcagttgctgcaa

SEQ ID NO: 866328 - DNA, 75 bp, synthetic construct
  source 1..75: mol_type = other DNA
ctggcgcataacggtgaaatcaacaccatcaccggtaaccgccaatgggcgcgtgcgcgtacctataaattccag

SEQ ID NO: 866329 - DNA, 75 bp, synthetic construct
  source 1..75: mol_type = other DNA
gaactgatggtgatcgacactcgcagtgggcgcattctgcactcggcagaaaccgatgatgacctgaaaagccgc

SEQ ID NO: 866330 - DNA, 75 bp, synthetic construct
  source 1..75: mol_type = other DNA
gtaacggtctgcgtccggcacgctacgtcatcaccaaagataagttgatcacctgcgcctctgaagtcggcatct

SEQ ID NO: 866331 - DNA, 75 bp, synthetic construct
  source 1..75: mol_type = other DNA
gcgtcataaaatccgtttgcaggtcgatggcggcctgaaaaccggcgttgatatcatcaaagcggcgattctcgg

SEQ ID NO: 866332 - DNA, 75 bp, synthetic construct
  source 1..75: mol_type = other DNA
ggcgggcatcgtgatgtccgatggtcgcttcgctgcctgtaacctcgaccgtaacggtctgcgtccggcgcgcta

SEQ ID NO: 866333 - DNA, 75 bp, synthetic construct
  source 1..75: mol_type = other DNA
tgggagctggggcttgttgaaacacagcaagcgctggtcgctaatggtctgcgtcacaagatccgtttacaggtt

SEQ ID NO: 866334 - DNA, 75 bp, synthetic construct
  source 1..75: mol_type = other DNA
ggtcgaggtcttaagcgttgacgatctggcgatccatgaagagcatctgcgtggtcttatcaccgagcatgtgca

SEQ ID NO: 866335 - DNA, 75 bp, synthetic construct
  source 1..75: mol_type = other DNA
tttcgccgtgttgctgggcttcggtgcgacggctatttatccgtaccttgcctatgaaacgctgggccgcctggt

SEQ ID NO: 866336 - DNA, 75 bp, synthetic construct
  source 1..75: mol_type = other DNA
agttgccgggtgataaagtcactccttacattgccaaactgcgctattcggtgccgggcgtgacgctgatctccc

SEQ ID NO: 866337 - DNA, 75 bp, synthetic construct
  source 1..75: mol_type = other DNA
gggcgacgacaccccattcgccgtgctctccagtcagccgcgcattatttacgactacttccgccagcagtttgc

SEQ ID NO: 866338 - DNA, 75 bp, synthetic construct
  source 1..75: mol_type = other DNA
ccgccagcgcccgcgatccgcaccacttcgctgtgctgctgggcttcggtgcaaccgccatttatccgtaccttg

SEQ ID NO: 866339 - DNA, 75 bp, synthetic construct
  source 1..75: mol_type = other DNA
agctggacgacgcgacgcgtgagcgtattaagtctgccgcgacacgtatcgatcgcacaccacactggttaatta

SEQ ID NO: 866340 - DNA, 75 bp, synthetic construct
  source 1..75: mol_type = other DNA
gataacggccagttactacgtctacgatacaaacaaagttaaatctggcgcactggaggcaaccgcattaatcaa

SEQ ID NO: 866341 - DNA, 75 bp, synthetic construct
  source 1..75: mol_type = other DNA
cccagcctgccggaactggcgcacgacccggatcaaattgaacaggtcttgctgaatattgtgcgcaatgcgcta

SEQ ID NO: 866342 - DNA, 75 bp, synthetic construct
  source 1..75: mol_type = other DNA
gcaatgatctgattatcgaatgggaaaatcagcaacaattagatgtgatgatcaacggtgaagctaacaagttta

SEQ ID NO: 866343 - DNA, 75 bp, synthetic construct
  source 1..75: mol_type = other DNA
aaacgatgctactattcgtcaagatggtcgaattatcgctaaagatattgaatatcgttttgttaagtctaaagc

SEQ ID NO: 866344 - DNA, 75 bp, synthetic construct
  source 1..75: mol_type = other DNA
acgccagatggatttgcattcaaacggtgcatgtgatccgaacgccagctttaaagagaacttaactagccttat

SEQ ID NO: 866345 - DNA, 75 bp, synthetic construct
  source 1..75: mol_type = other DNA
aggtcgatggcggcctgaaaacgggtgtcgatatcatcaaggcggcgattctcggcgcagaaagcttcggcttcg

SEQ ID NO: 866346 - DNA, 75 bp, synthetic construct
  source 1..75: mol_type = other DNA
aacaacagaaactggaactgtctcgcctgctggagaccgccgagccacatccgggtaaagcgctctattgcactg

SEQ ID NO: 866347 - DNA, 75 bp, synthetic construct
  source 1..75: mol_type = other DNA
actatcacggcttaccgttcaaagtgactaactactttgagtttatcgcccgtgaaacccgcgagctgatggcgc

SEQ ID NO: 866348 - DNA, 75 bp, synthetic construct
  source 1..75: mol_type = other DNA
cagcaggttgctgcccgtgatttagtgcgcggcctggcacatgagattaaaaatccgcttggcggtttacgtggc

SEQ ID NO: 866349 - DNA, 75 bp, synthetic construct
  source 1..75: mol_type = other DNA
ctgctgactactgtcagcgtcagtcagtgtgtatactgtgtagctggtgagataacggttcatgtatcccctgag

SEQ ID NO: 866350 - DNA, 75 bp, synthetic construct
  source 1..75: mol_type = other DNA
aaagatcgcctgccggttccggccccaatggcggttggcgcgatccagactcgtctggtcgatcaaagcctgcgt

SEQ ID NO: 866351 - DNA, 75 bp, synthetic construct
  source 1..75: mol_type = other DNA
gaggatcactaccgcgcagatacgctggatatcacctttgacgtcactaaaaccacactcgaagcgacggtgaaa

SEQ ID NO: 866352 - DNA, 75 bp, synthetic construct
  source 1..75: mol_type = other DNA
cactagcaccaggtatagaaaaactaaaacagacctctattgaaatggtcactttacttaacgcgttacaaccag

SEQ ID NO: 866353 - DNA, 75 bp, synthetic construct
  source 1..75: mol_type = other DNA
agccccataggaaataacctcgaagcactagcaccaggtatagaaaaactaaaacagacctctattgaaatggtc

SEQ ID NO: 866354 - DNA, 75 bp, synthetic construct
  source 1..75: mol_type = other DNA
tctataccaagagcaactcttacagataaattagaaaatgaattaacaaaagaaatatataaaagctcatcgaaa

SEQ ID NO: 866355 - DNA, 75 bp, synthetic construct
  source 1..75: mol_type = other DNA
gtgagcggggcgatgatgtcattctgctggcggggtatttctgcgagcagtgtcgtttgcggctggggctctccc

SEQ ID NO: 866356 - DNA, 75 bp, synthetic construct
  source 1..75: mol_type = other DNA
cctgcccgtgcggggatccttcttgtcccgtgtggacgtggcgattcgggatttactgcgggagcagagggcgcg

SEQ ID NO: 866357 - DNA, 75 bp, synthetic construct
  source 1..75: mol_type = other DNA
ttttcaaaaagaattagcgtacttacaaaatgtaattctttataatgactcgtctcttcgtatggattttttagg

SEQ ID NO: 866358 - DNA, 75 bp, synthetic construct
  source 1..75: mol_type = other DNA
gacgaaatccgcaaaaaaaatcttctttgtgccgttgatgacggatgagcatggtgtgaatgtgccgacaaacga

SEQ ID NO: 866359 - DNA, 75 bp, synthetic construct
  source 1..75: mol_type = other DNA
atgcagagtgacctgaagcgagcgtatgcagagaattttgctgatatgcagcaacgggcttccggcgcatcggtt

SEQ ID NO: 866360 - DNA, 75 bp, synthetic construct
  source 1..75: mol_type = other DNA
catttgtgccggtgatgcatactgtcctgatggccatgctggtcgggatgttcccgataatcattctgctggcca

SEQ ID NO: 866361 - DNA, 75 bp, synthetic construct
  source 1..75: mol_type = other DNA
tattctgaagaaaaaattaagtttgtcgaaagttgtttaaatgagcttggagatattaccgaagaacaattaaaa

SEQ ID NO: 866362 - DNA, 75 bp, synthetic construct
  source 1..75: mol_type = other DNA
gataaacatatggctaatactattttaaatccttttaaattggattcaacaaattttactaatgccaacatgttt

SEQ ID NO: 866363 - DNA, 75 bp, synthetic construct
  source 1..75: mol_type = other DNA
ttttttatttttcttttatttgtcaattgcatggtgctgatgtgaaaataaaagaaaacgaaagtgtgatgggat

SEQ ID NO: 866364 - DNA, 75 bp, synthetic construct
  source 1..75: mol_type = other DNA
gggcggtgaatccgctggtctatctcaactgtgccgcactgccggaaagtgtggcggaaagtgaattgttcgggc

SEQ ID NO: 866365 - DNA, 75 bp, synthetic construct
  source 1..75: mol_type = other DNA
tctgtcgcccccttcggctattaccggaatacagaccgtatcgttaccatactgctggcactgattattgtggtc

SEQ ID NO: 866366 - DNA, 75 bp, synthetic construct
  source 1..75: mol_type = other DNA
gtcggtggataaaaacaccattgccttctttagccctaactatctacaaggctggcagcgggcgttggcgattgc

SEQ ID NO: 866367 - DNA, 75 bp, synthetic construct
  source 1..75: mol_type = other DNA
gatcggatatccctcaccataaccgaaccgttttgcggtttttcaacgacgcgctggccgcgacgagcgagcacg

SEQ ID NO: 866368 - DNA, 75 bp, synthetic construct
  source 1..75: mol_type = other DNA
tcgtctggtcgatcaaagcctgcgttgcgatgccaacatcatcgtcgaaaccgccagcgcccgcgatccgcacca

SEQ ID NO: 866369 - DNA, 75 bp, synthetic construct
  source 1..75: mol_type = other DNA
tgcatatggagccgtgggatggtccggcgggcatcgtgatgtccgatggtcgttttgccgcctgtaacctcgacc

SEQ ID NO: 866370 - DNA, 75 bp, synthetic construct
  source 1..75: mol_type = other DNA
cgcaggctatgacggcggcaccggcgcaagtccgctttcatcggtgaaatacgcaggctgtccgtgggagctggg

SEQ ID NO: 866371 - DNA, 75 bp, synthetic construct
  source 1..75: mol_type = other DNA
atggttgctggcaaggacgacggcttaagtgacagctgtccggcactttctgtgcaattttacccaggtaaaaaa

SEQ ID NO: 866372 - DNA, 75 bp, synthetic construct
  source 1..75: mol_type = other DNA
tgaaacccgccgggttgcgcctatcacgctggatgtcatgtgggatcattttctttcccgccactggtcgcagct

SEQ ID NO: 866373 - DNA, 75 bp, synthetic construct
  source 1..75: mol_type = other DNA
tgcgtgactcctggtacgatttagacgcccattacgacgccctcgaaacccgcttctggcagttttatccgcgga

SEQ ID NO: 866374 - DNA, 75 bp, synthetic construct
  source 1..75: mol_type = other DNA
acaccattgccttctttagcccgaactatctgcaaggctggcagcgggcgctggctattgccgccggggaggttg

SEQ ID NO: 866375 - DNA, 75 bp, synthetic construct
  source 1..75: mol_type = other DNA
cgctacttcgtcagtgcgatctcggttactttatttttgcccgccagcagggcattggtacgctgtgcttactga

SEQ ID NO: 866376 - DNA, 75 bp, synthetic construct
  source 1..75: mol_type = other DNA
agaaaatctgcaaattttgagcgaaaaactggaatttgacgcctatctggcgctacttcgtcagtgcgatcttgg

SEQ ID NO: 866377 - DNA, 75 bp, synthetic construct
  source 1..75: mol_type = other DNA
gcaccggggaaatgtggtggacatagtgattgaaggggcttacgaggtggtgggcgtgtttgaccggattgagga

SEQ ID NO: 866378 - DNA, 75 bp, synthetic construct
  source 1..75: mol_type = other DNA
gcaccggggaaatgtggtggatacagtaattgaaggggcttacgaggtggtgggcgtgtttgaccggattgagga

SEQ ID NO: 866379 - DNA, 75 bp, synthetic construct
  source 1..75: mol_type = other DNA
gcaccggggaaatgtggtggataaagtcattgaaggggcttacgaggtggtgggcgtgtttgaccggattgagga

SEQ ID NO: 866380 - DNA, 75 bp, synthetic construct
  source 1..75: mol_type = other DNA
gtgataaacatgagtcccggagtgaacgttatacgtatattccaacaatcaatatcatcaataagttacgtgatg

SEQ ID NO: 866381 - DNA, 75 bp, synthetic construct
  source 1..75: mol_type = other DNA
gtaaaaaacatggtgatctggcggccgttgcgccattgccacgagcgcactttaccaaaccgaatattgtgatca

SEQ ID NO: 866382 - DNA, 75 bp, synthetic construct
  source 1..75: mol_type = other DNA
gcaccggggaaatgtggtggacagagttattgaaggggcttacgaggtggtgggcgtgtttgaccggattgagga

SEQ ID NO: 866383 - DNA, 75 bp, synthetic construct
  source 1..75: mol_type = other DNA
aagttccggcagataaagttcacgaactgcgtctgcgcctggcgcaacaaggtttgcccaaaggcggcgcggtcg

SEQ ID NO: 866384 - DNA, 75 bp, synthetic construct
  source 1..75: mol_type = other DNA
ccattacaggcattgacggtgatatccgaatcaacaaagcattatggatgattgccgaacagttcagggagtgga

SEQ ID NO: 866385 - DNA, 75 bp, synthetic construct
  source 1..75: mol_type = other DNA
ctggacgacctggcagcgggtccaggagaatatgataaagggtggattatcgggaagaagtgcctccggtaaaaa

SEQ ID NO: 866386 - DNA, 75 bp, synthetic construct
  source 1..75: mol_type = other DNA
ccacataaaggtgatattgtcgggcaggttatcgagggagcgtatgaagtgctcggtgtctttgataaggtcact

SEQ ID NO: 866387 - DNA, 75 bp, synthetic construct
  source 1..75: mol_type = other DNA
atgaatgcgactgcagcccagacaaaatctcttgagtggcttaatcgcctgcgcgcaaatccgaaaatacctttg

SEQ ID NO: 866388 - DNA, 75 bp, synthetic construct
  source 1..75: mol_type = other DNA
acgtctgggggctgaggtaatgagccagcgtatccgtgacatgtctgataacgatccgcgcgtggtggcgctggt

SEQ ID NO: 866389 - DNA, 75 bp, synthetic construct
  source 1..75: mol_type = other DNA
gtgataaacatgagtcccggagtgaacgttatacgtatattccaacaatcaatatcatcaataagtgtaaccggc

SEQ ID NO: 866390 - DNA, 75 bp, synthetic construct
  source 1..75: mol_type = other DNA
agtgacgagcaacatttatttggcagagctgcattgatggacaggtaggaagatgaaaataaaacgccagtgacg

SEQ ID NO: 866391 - DNA, 75 bp, synthetic construct
  source 1..75: mol_type = other DNA
agtgacgaccaacatttatttggcagagctgcactgatggtcaggtaggaagatgaaaataaaacgccagtgacg

SEQ ID NO: 866392 - DNA, 75 bp, synthetic construct
  source 1..75: mol_type = other DNA
agtgacgatcaacatttatttggcagagctgcagtgatgggcaggtaggaagatgaaaataaaacgccagtgacg

SEQ ID NO: 866393 - DNA, 75 bp, synthetic construct
  source 1..75: mol_type = other DNA
atctctggacaacctggcagcgggttcaggagaatatgataaacggtggattatcggggcgaagtgcctccggga

SEQ ID NO: 866394 - DNA, 75 bp, synthetic construct
  source 1..75: mol_type = other DNA
taacagtgacgagcaacatttatttggcagagctgcactgatggtcaggtatgaagatgaaaataaaacgccagt

SEQ ID NO: 866395 - DNA, 75 bp, synthetic construct
  source 1..75: mol_type = other DNA
agtgacgagcaacatttatttggcagagctgcagtgatggtcaggtaggaagatgaaaataaaacgccagtgacg

SEQ ID NO: 866396 - DNA, 75 bp, synthetic construct
  source 1..75: mol_type = other DNA
agtgacgaacaacatttatttggcagagctgcattgatgggcaggtaggaagatgaaaataaaacgccagtgacg

SEQ ID NO: 866397 - DNA, 75 bp, synthetic construct
  source 1..75: mol_type = other DNA
agtgacgaacaacatttatttggcagagctgcaatgatggtcaggtaggaagatgaaaataaaacgccagtgacg

SEQ ID NO: 866398 - DNA, 75 bp, synthetic construct
  source 1..75: mol_type = other DNA
cctgaacaaataattactccccgccgttggggggataaacagaacgatctctggacgacatggcaacgggtccag

SEQ ID NO: 866399 - DNA, 75 bp, synthetic construct
  source 1..75: mol_type = other DNA
agtgacgatcaacatttatttggcagagctgcactgatggccaggtaggaagatgaaaataaaacgccagtgacg

SEQ ID NO: 866400 - DNA, 75 bp, synthetic construct
  source 1..75: mol_type = other DNA
agtgacgatcaacatttatttggcagagctgcattgatggtcaggtaggaagatgaaaataaaacgccagtgacg

SEQ ID NO: 866401 - DNA, 75 bp, synthetic construct
  source 1..75: mol_type = other DNA
agtgacgatcaacatttatttggcagagctgcaatgatggacaggtaggaagatgaaaataaaacgccagtgacg

SEQ ID NO: 866402 - DNA, 75 bp, synthetic construct
  source 1..75: mol_type = other DNA
atgttgggtggagcggacaatccaaatggtgaattactgtcttatatcattggcgctgacaaatacagtaaacat

SEQ ID NO: 866403 - DNA, 75 bp, synthetic construct
  source 1..75: mol_type = other DNA
agatttatcaagatcatggcagataaaagatgtgagtgcattgatgcatgttagtgatagtttattaaagaaaag

SEQ ID NO: 866404 - DNA, 75 bp, synthetic construct
  source 1..75: mol_type = other DNA
atgtgttggtgcggcgatttatcgctatctcattgcaaagaatttacctgtcaatagtgttacacctaaagaaat

SEQ ID NO: 866405 - DNA, 75 bp, synthetic construct
  source 1..75: mol_type = other DNA
ctgcctgtacggcagtgaaccttatttagatttgtcatatcattcgaaactctttctaagctgcctgtacggcag

SEQ ID NO: 866406 - DNA, 75 bp, synthetic construct
  source 1..75: mol_type = other DNA
ccgcgctggcagaaagagcagccgccactgctaccggttgaaacgaactggtgtgcatttggggttatcggatgg

SEQ ID NO: 866407 - DNA, 75 bp, synthetic construct
  source 1..75: mol_type = other DNA
tggagtcttatccccggcagcgccctgcccggcggtgcgctggcgatcctctgcggcggacgctggctggcgcgg

SEQ ID NO: 866408 - DNA, 75 bp, synthetic construct
  source 1..75: mol_type = other DNA
tcgtgacggtatatctgtaccgcagaacaatgcagcactgaatgcgttggggctgtctcttggcgattacacagg

SEQ ID NO: 866409 - DNA, 75 bp, synthetic construct
  source 1..75: mol_type = other DNA
ctggtaaacgagcctgccgtaagcgatattttgttacgtgattacagtgaggtaaatgttgcacaagggcaagag

SEQ ID NO: 866410 - DNA, 75 bp, synthetic construct
  source 1..75: mol_type = other DNA
gatcgactctatttttgtgtaccgatgctggatctggtggttccggaagagggggagctccgacaggccgtggcg

SEQ ID NO: 866411 - DNA, 75 bp, synthetic construct
  source 1..75: mol_type = other DNA
cgcagtgatggttgccacatgggttcatgattatgcgcctgctattcgcggactagtgctggtatctccggcctt

SEQ ID NO: 866412 - DNA, 75 bp, synthetic construct
  source 1..75: mol_type = other DNA
tactacacgtttagcccgttgttaataaagcaaaaccatctcaatctcctgctgccacccttttttatccttacc

SEQ ID NO: 866413 - DNA, 75 bp, synthetic construct
  source 1..75: mol_type = other DNA
tgacggcactaatcagtatggccgctcaggccattgtggcaaccaacggaaaggcggctgccctgcaggtactgg

SEQ ID NO: 866414 - DNA, 75 bp, synthetic construct
  source 1..75: mol_type = other DNA
cctttatcgacaccccgggggcttatccgggcgtgggcgcagaagagcgcggtcagtctgaagccattgcacgca

SEQ ID NO: 866415 - DNA, 75 bp, synthetic construct
  source 1..75: mol_type = other DNA
tcgtgacggtatatctgtgccgcagaacaatgcagcactgaatgcgcttgggctgtctcttggcgattacacagg

SEQ ID NO: 866416 - DNA, 75 bp, synthetic construct
  source 1..75: mol_type = other DNA
ccagcctggttaatcccgttgtaggcgctaacgtaatcccgctaccgatgattaatgaacattactattcggcgt

SEQ ID NO: 866417 - DNA, 75 bp, synthetic construct
  source 1..75: mol_type = other DNA
gctcacggcgaatctcccaggacatcagtacccgtgatgaaggcggtgacgggaaggtggtggttatcgggcggc

SEQ ID NO: 866418 - DNA, 75 bp, synthetic construct
  source 1..75: mol_type = other DNA
gcagtttgatgaaatcaatattgtgcgcggtcagctcgttcctggtgagcggctggggataaaaatcacagaact

SEQ ID NO: 866419 - DNA, 75 bp, synthetic construct
  source 1..75: mol_type = other DNA
ggtgatgtggacaaatgatggttttactgcggacagcgtgacgctgacggatatcacgggggcaaaagcgacgta

SEQ ID NO: 866420 - DNA, 75 bp, synthetic construct
  source 1..75: mol_type = other DNA
aggaaggctttcagccgttcttcgcctgccagacccgtgtgcgcgaccagagccgccgggaatacacaaaacaca

SEQ ID NO: 866421 - DNA, 75 bp, synthetic construct
  source 1..75: mol_type = other DNA
ggcctggtgtgcggaaataattttggcgaaattcgcgttccacataaaggtgatattgtcgggcaggttatcgag

SEQ ID NO: 866422 - DNA, 75 bp, synthetic construct
  source 1..75: mol_type = other DNA
cggcttgcctgcggggatggttcgcccgcgctggcagaaagaacagccatcactaccgtcagttgaaacgaactg

SEQ ID NO: 866423 - DNA, 75 bp, synthetic construct
  source 1..75: mol_type = other DNA
acatgacggtgcgactgcgccggaaggttgtccgcgagtatggcatcaaatcgctggtggaagtgccagtcacct

SEQ ID NO: 866424 - DNA, 75 bp, synthetic construct
  source 1..75: mol_type = other DNA
gtcttatgcgtcccgttttcgcgatggcatatctgtcccgcaaaacaatgctgagctgaacgcgcttggtttgtc

SEQ ID NO: 866425 - DNA, 75 bp, synthetic construct
  source 1..75: mol_type = other DNA
gtagtcgggaatgccaagtaagaatccctggcgtatgtaatggcaaccctgaaacgtctgtactggcacatatcc

SEQ ID NO: 866426 - DNA, 75 bp, synthetic construct
  source 1..75: mol_type = other DNA
accgcgataacgtcgcccgaatcatcaaaggctccatgctggatatcggcctggctatgccagtgaaaatccgta

SEQ ID NO: 866427 - DNA, 75 bp, synthetic construct
  source 1..75: mol_type = other DNA
atgagtttaattacgcaattaaatgacgtaatggcccgtcgcggctatacgcagacccacgtcgcccgtgctatt

SEQ ID NO: 866428 - DNA, 75 bp, synthetic construct
  source 1..75: mol_type = other DNA
ggtctgggtaaaagcatgattctgagtgaatatgccgccagaaaccgggatgtagtgctcattgaagccgatatt

SEQ ID NO: 866429 - DNA, 75 bp, synthetic construct
  source 1..75: mol_type = other DNA
tatcgtgcgctggaagttctgcgtcgtctgcatgacaaggcgggcgtcggtgttgccctggctggtatgccgcgc

SEQ ID NO: 866430 - DNA, 75 bp, synthetic construct
  source 1..75: mol_type = other DNA
cgccccaagtcatgacttagaagatgtctgccagctgatggcccacgatatcaaccaacgtcatggcgttgaaac

SEQ ID NO: 866431 - DNA, 75 bp, synthetic construct
  source 1..75: mol_type = other DNA
tgggcggtaacctggtggtcggaaaacatgacttcgctgacgtggaaaccaagttcaaagagatgggatttgatc

SEQ ID NO: 866432 - DNA, 75 bp, synthetic construct
  source 1..75: mol_type = other DNA
tatcgcgcactggaggttctgcgccgtctgcatgacaaagcgggtatcgggattgtcctggcgggtatgccacgc

SEQ ID NO: 866433 - DNA, 75 bp, synthetic construct
  source 1..75: mol_type = other DNA
gattgtgaatgtttcctcagaaagtgggctggaaggctcagaaggccaaagctgttacgccgctaccaaagccgc

SEQ ID NO: 866434 - DNA, 75 bp, synthetic construct
  source 1..75: mol_type = other DNA
gtagaggaattattagcacaaggcgcgaatgtacagatggtcgatattcacggtggcgatggacaatatgaaggt

SEQ ID NO: 866435 - DNA, 75 bp, synthetic construct
  source 1..75: mol_type = other DNA
ttgttgcccggggatggggaataagcttagtcagccgttgtctccgggtgtcgcgtgcgcagttgcacgtcattc

SEQ ID NO: 866436 - DNA, 75 bp, synthetic construct
  source 1..75: mol_type = other DNA
atacacgacgcgtaccgctcaaggaagggaccgaatggatagcaaaaaatatcatcagtccactcagggaaacta

SEQ ID NO: 866437 - DNA, 75 bp, synthetic construct
  source 1..75: mol_type = other DNA
aacccggcataccatgaaggtttaggcattgaagatgcgatcccggttggtcattccgtggttgctgactacgca

SEQ ID NO: 866438 - DNA, 75 bp, synthetic construct
  source 1..75: mol_type = other DNA
tgtttgttatctgctgtctgaacgcgccagctacatcaccggagtaaccactaacattgcgggcggcaaaacgcg

SEQ ID NO: 866439 - DNA, 75 bp, synthetic construct
  source 1..75: mol_type = other DNA
attataccgaccagacatagttaaagtatgccaggaaactgttaaaaatattcattatgatatggattttattag

SEQ ID NO: 866440 - DNA, 75 bp, synthetic construct
  source 1..75: mol_type = other DNA
ccgcgctggttgcgggtattgcctgggtattgattaacgaaaatctcgttgatcaaccttttctcgataaatact

SEQ ID NO: 866441 - DNA, 75 bp, synthetic construct
  source 1..75: mol_type = other DNA
gtgatcgccacgccgaacagacaattcgaactggtaggcaccggtgatttatgggccggacaatgcaaaccacct

SEQ ID NO: 866442 - DNA, 75 bp, synthetic construct
  source 1..75: mol_type = other DNA
gtgatcgccacgccgaacagacactttgaactggtaggcaccggtgacttatgggccggacaatgcaaaccacct

SEQ ID NO: 866443 - DNA, 75 bp, synthetic construct
  source 1..75: mol_type = other DNA
gatattcgtgcccggcggcccggcgaaccgcgcgcggcaggcacagacgctccagagccgggaggccctgaatga

SEQ ID NO: 866444 - DNA, 75 bp, synthetic construct
  source 1..75: mol_type = other DNA
gcacgcaggaacaatggttacaacatctgtacgccaaaatgcttgccaaagatccggcgttaccgtcttacgacg

SEQ ID NO: 866445 - DNA, 75 bp, synthetic construct
  source 1..75: mol_type = other DNA
gaagatattattcctaacgactacgccggtaacatgggatatctcattttccttcagccagtcaccagcgaaaaa

SEQ ID NO: 866446 - DNA, 75 bp, synthetic construct
  source 1..75: mol_type = other DNA
atcatcgacgaagacgaagccaaagccacattagacgcactgcgccaaatggattacgacattaccagcgcgtga

SEQ ID NO: 866447 - DNA, 75 bp, synthetic construct
  source 1..75: mol_type = other DNA
gatgaagttactgacagcccgatggtggataaatcctggactggcctgatttctaccgggatcacctacaaattc

SEQ ID NO: 866448 - DNA, 75 bp, synthetic construct
  source 1..75: mol_type = other DNA
ggtagcacgtttagttcgtgaagatggcctcgtattgaatcctgattgtttctccttagagttcctcaaagaaac

SEQ ID NO: 866449 - DNA, 75 bp, synthetic construct
  source 1..75: mol_type = other DNA
cagcaaagaagtcatgcgtaatgaaaagtgggatctgatgctctgtggtcacacccacggcgggcagttacgcat

SEQ ID NO: 866450 - DNA, 75 bp, synthetic construct
  source 1..75: mol_type = other DNA
catcactgaaagcgcagcaggtcgaagtaatcagccgcatgattgagcgcatgatagaacgtaaccacgaagaaa

SEQ ID NO: 866451 - DNA, 75 bp, synthetic construct
  source 1..75: mol_type = other DNA
atgcaggaaatgacactggcagaagcctcactgcaggcgcagcaggtcgaagtaatcagccgcatgattgagcgc

SEQ ID NO: 866452 - DNA, 75 bp, synthetic construct
  source 1..75: mol_type = other DNA
ttgatactcaattttcgtctaatcaggcactattgataaatagtgtggatcatgtactagcaatagcaagagggc

SEQ ID NO: 866453 - DNA, 75 bp, synthetic construct
  source 1..75: mol_type = other DNA
gcgcgccagtgctggcgttggcgggggttccagtatcggtaaaacgcatgcaaaaccatgcaccttatgcatgca

SEQ ID NO: 866454 - DNA, 75 bp, synthetic construct
  source 1..75: mol_type = other DNA
ggccgccgaatgtgacggcgaggtggttcgtcccaaagaaccgaactggacagcctgggcaaacgaaattcgcct

SEQ ID NO: 866455 - DNA, 75 bp, synthetic construct
  source 1..75: mol_type = other DNA
tatggaggcgatgaaagaaattcatcttaacagtgacgagcaacatttatttggcagagctgcactgatggtcag

SEQ ID NO: 866456 - DNA, 75 bp, synthetic construct
  source 1..75: mol_type = other DNA
gtcagttggctactcaatatccagaccagattgaatccgttcgtaaaggcatgggattcattgatgaagaccagc

SEQ ID NO: 866457 - DNA, 75 bp, synthetic construct
  source 1..75: mol_type = other DNA
tgctgactggatgattcagacaggtatccagaatccagagcagctatcacacatgctgactactatgtctctcgg

SEQ ID NO: 866458 - DNA, 75 bp, synthetic construct
  source 1..75: mol_type = other DNA
ttgctcagatgtatcagcagaatccttcaggatttggtgagtttgttgatcaccttgggatggctgctcttggtc

SEQ ID NO: 866459 - DNA, 75 bp, synthetic construct
  source 1..75: mol_type = other DNA
ttgaagagttgctgacttatgcccgactcgatcgcccgcaaaatgagctccatcttagcgaaccagacctgccgt

SEQ ID NO: 866460 - DNA, 75 bp, synthetic construct
  source 1..75: mol_type = other DNA
taattgaatcattagtgttaagtgaaaccaaagctagtcctaatgaacggtatcgagatgccaagaaaagagaaa

SEQ ID NO: 866461 - DNA, 75 bp, synthetic construct
  source 1..75: mol_type = other DNA
gatgcgaacagtggcagtggtgtatggtcagagcagcagtggaatgcgtccggtggtaaaggcactgtgacggat

SEQ ID NO: 866462 - DNA, 75 bp, synthetic construct
  source 1..75: mol_type = other DNA
tgatattgtcgggcaggttatagagggcgcgtatgaagtgctcggtgtctttgataaggtcactgataatatgga

SEQ ID NO: 866463 - DNA, 75 bp, synthetic construct
  source 1..75: mol_type = other DNA
tactccccgtcgttgggaggataaacagaacgatctctggacaacctggcagcgggttcaggagaatatgataaa

SEQ ID NO: 866464 - DNA, 75 bp, synthetic construct
  source 1..75: mol_type = other DNA
cagattctaaagaaataacggcagaacactggcagtcattattaaaatctcaagctgaaggaggcgtgatcgatt

SEQ ID NO: 866465 - DNA, 75 bp, synthetic construct
  source 1..75: mol_type = other DNA
agatatttaacttaatgcaaaatggatggcttaatggagctgcgaatattagaaatcctacacagctccaagaag

SEQ ID NO: 866466 - DNA, 75 bp, synthetic construct
  source 1..75: mol_type = other DNA
cctgcgtcttctaagtaaaggaatgtctcgggaagacgttgcagagatggcaaatttacctcttgctgagattga

SEQ ID NO: 866467 - DNA, 75 bp, synthetic construct
  source 1..75: mol_type = other DNA
ttaaggatgttaagaaaagcacgagtgagagcatccagagccagaagagaaagcggaggttatgaccattactac

SEQ ID NO: 866468 - DNA, 75 bp, synthetic construct
  source 1..75: mol_type = other DNA
ggcaagctggcaaaattgtcagcaaatgggtaacactggcaaacaatgcaatcccatcaaatgttcctccccagt

SEQ ID NO: 866469 - DNA, 75 bp, synthetic construct
  source 1..75: mol_type = other DNA
gccctgaatttatctggcgcttttactcctgccaaaaacgtcactatcacttcgttatcgcaccaacagaagatg

SEQ ID NO: 866470 - DNA, 75 bp, synthetic construct
  source 1..75: mol_type = other DNA
ttcgttatcgctgcaacagaagacgaagcacgctctcaattgcctgatggcccctgcatttttactgcccgtttt

SEQ ID NO: 866471 - DNA, 75 bp, synthetic construct
  source 1..75: mol_type = other DNA
gggcagcataccggcgatacagggattgctggcatggctactgaccctgttattatcggggaatatgcaacactg

SEQ ID NO: 866472 - DNA, 75 bp, synthetic construct
  source 1..75: mol_type = other DNA
ttggcgggctaatcaccgggatgaacaacgatttcaacgacctgcgaggaatgaaggttacgcgccgccaggtgg

SEQ ID NO: 866473 - DNA, 75 bp, synthetic construct
  source 1..75: mol_type = other DNA
aagattaaaaagaataagatttttaatgatccatatatacaaagaggaagtgaacaatattctcacatcttaaaa

SEQ ID NO: 866474 - DNA, 75 bp, synthetic construct
  source 1..75: mol_type = other DNA
tagggaactgcatcgtaaataggctgatcaaccttggatacgatccaaaacttatccatagatcagataagttag

SEQ ID NO: 866475 - DNA, 75 bp, synthetic construct
  source 1..75: mol_type = other DNA
ccaggcagacgttagcgcagtggtttgaagagaagggattccagaaggcgtatcaagaagcgtatcaagaagtaa

SEQ ID NO: 866476 - DNA, 75 bp, synthetic construct
  source 1..75: mol_type = other DNA
gactggcccagcgtcttctgagtaaaggaatgtctcgggaagacgttgcagagatggcaaatttacctcttgctg

SEQ ID NO: 866477 - DNA, 75 bp, synthetic construct
  source 1..75: mol_type = other DNA
ggggcgatgccgggtgaaaaaagtgcgtttggtgatgtggagaaggccgcgcgggtttacgcaattaacgagctg

SEQ ID NO: 866478 - DNA, 75 bp, synthetic construct
  source 1..75: mol_type = other DNA
atgaagtttacttcaaaaaatcgttgcacttggtttgacaattcaagggataaaacccgtaaaatccatatcgac

SEQ ID NO: 866479 - DNA, 75 bp, synthetic construct
  source 1..75: mol_type = other DNA
cggacctggaacgggaactgattcaggacctgcgaaatcagggctatgaatttatatccgtaaaatctcagtcgg

SEQ ID NO: 866480 - DNA, 75 bp, synthetic construct
  source 1..75: mol_type = other DNA
gttgatcaaagaagaaaatctcaatgaagaagcggccaaacgctatattcgcacgtctttaaaacgcgaatacgc

SEQ ID NO: 866481 - DNA, 75 bp, synthetic construct
  source 1..75: mol_type = other DNA
aacagagagaaaaaaggtaaagaagccctgactgaagaggtcagacgcttaatccgctcaagtctgggcaaccgt

SEQ ID NO: 866482 - DNA, 75 bp, synthetic construct
  source 1..75: mol_type = other DNA
aaagccttcgtcaaactgtttggtgaatatctgcgggcagaaaacatcctgcaaaactatgatgaatttgccacg

SEQ ID NO: 866483 - DNA, 75 bp, synthetic construct
  source 1..75: mol_type = other DNA
taaacccgcaatataaaacaaaaaaacagaatgtttttcaaaagattagcgcatttattgaaaaatttaaggggg

SEQ ID NO: 866484 - DNA, 75 bp, synthetic construct
  source 1..75: mol_type = other DNA
aacgctcaaccattgatgccataacgctgtttggtgataaaaatactaaaaatgtggtgttagaaaagagttatg

SEQ ID NO: 866485 - DNA, 75 bp, synthetic construct
  source 1..75: mol_type = other DNA
ctggtccttccgtacgggaaatcagcagaggtgacgcactatcaggggaaggactggatacaactgacggagtga

SEQ ID NO: 866486 - DNA, 75 bp, synthetic construct
  source 1..75: mol_type = other DNA
gagtgatggtattctggataaaacccgtaaaatccatatcgactatatctgcgactttatttttgacgacgggcg

SEQ ID NO: 866487 - DNA, 75 bp, synthetic construct
  source 1..75: mol_type = other DNA
ctaatgaagaacaaaatgccattggtgaagtttccgatgaaacttttgataccagtgcaatggacagcagtgcta

SEQ ID NO: 866488 - DNA, 75 bp, synthetic construct
  source 1..75: mol_type = other DNA
aaaaagaacctgctgcgcaataaggtgcaggtcattcagcagtttgagcagaccggctcacacgctaaccgttat

SEQ ID NO: 866489 - DNA, 75 bp, synthetic construct
  source 1..75: mol_type = other DNA
cgattaccagaccatgaaggagtatcagcgcttctctccggacagtgtcaatggttcggataatacagcaggcct

SEQ ID NO: 866490 - DNA, 75 bp, synthetic construct
  source 1..75: mol_type = other DNA
cgatgctggccaatgttcgggaacagcttcagaacctcaatggtgtggtgtttaatgacagcgagtggcggcgtt

SEQ ID NO: 866491 - DNA, 75 bp, synthetic construct
  source 1..75: mol_type = other DNA
atgccattagccacagaaacggcgctggatattctgattgtgtggctgcaggacaatatcgactgcgaatcgggg

SEQ ID NO: 866492 - DNA, 75 bp, synthetic construct
  source 1..75: mol_type = other DNA
acggctcggaaaataccgcaggccttaaacgaaatctggataaggacgataacaaaattatcgtcaccactattc

SEQ ID NO: 866493 - DNA, 75 bp, synthetic construct
  source 1..75: mol_type = other DNA
attgataaaagaagaaaatctcaatgaagaagcagcaaaacgctatattcgcacgtctttaaaacgcgaatacgc

SEQ ID NO: 866494 - DNA, 75 bp, synthetic construct
  source 1..75: mol_type = other DNA
aagaaggtcagcgcgtgaaagttggcgatactgtcattgaattcgatctgcctctgctggaagagaaagccaagt

SEQ ID NO: 866495 - DNA, 75 bp, synthetic construct
  source 1..75: mol_type = other DNA
tcgaagacgtgccggatgtcgtttttgcggaaaaaatcgttggtgatggtattgctatcaaaccaactggtaaca

SEQ ID NO: 866496 - DNA, 75 bp, synthetic construct
  source 1..75: mol_type = other DNA
tacagagtatagtaatacccttgaacaaaaaaatgaacatcttattgagtatgttactaatattatagggaatga

SEQ ID NO: 866497 - DNA, 75 bp, synthetic construct
  source 1..75: mol_type = other DNA
gctggaagcaaaaccaataggtgctttccacattgcagaacagcaggtcgatggcacaagtgactacatcaagga

SEQ ID NO: 866498 - DNA, 75 bp, synthetic construct
  source 1..75: mol_type = other DNA
gattcctatctctgcgttctactcgacggacaccataaggctactgccgccgcgctggaagggcgaccgctcaaa

SEQ ID NO: 866499 - DNA, 75 bp, synthetic construct
  source 1..75: mol_type = other DNA
cggcaggccgtccggggtgattgagatccccggcagtattacggaagaaaatgcgaaaaaactgaagagcaactg

SEQ ID NO: 866500 - DNA, 75 bp, synthetic construct
  source 1..75: mol_type = other DNA
tgcagattatccggcagtttgaacaggcaggttctcacagtaaccgttatgacgtcactatcctggttaatggtt

SEQ ID NO: 866501 - DNA, 75 bp, synthetic construct
  source 1..75: mol_type = other DNA
acacgctgattaaagacctcaaagactttaccgctacctttttccagaaacatactctgcttaatgttctggtga

SEQ ID NO: 866502 - DNA, 75 bp, synthetic construct
  source 1..75: mol_type = other DNA
tacgcggttgatgctgttgccgctattgcagaggtaagaggctggaatgcctgccgcgcggctatgcttcatggg

SEQ ID NO: 866503 - DNA, 75 bp, synthetic construct
  source 1..75: mol_type = other DNA
ttatgacgccactaaaaccttcggtaatatcgtcactttccgggatctggaacgctcaactattgatgccataac

SEQ ID NO: 866504 - DNA, 75 bp, synthetic construct
  source 1..75: mol_type = other DNA
gcaggttatcgcagacagcgtaatcagtgcgcgaacggcacatcctgtcgggaacagacgcaaaaccacagagca

SEQ ID NO: 866505 - DNA, 75 bp, synthetic construct
  source 1..75: mol_type = other DNA
atgttttccactttgactgtttctggatgaaagccttccagtggtgcgattttgagtgggacccgctgactttcc

SEQ ID NO: 866506 - DNA, 75 bp, synthetic construct
  source 1..75: mol_type = other DNA
tcagcaagacgggcatgaagccgtctgtgaagtgcccgctgctgacggttcggtgatctttactctaaaagcaac

SEQ ID NO: 866507 - DNA, 75 bp, synthetic construct
  source 1..75: mol_type = other DNA
tactgacgcactgaacaggacaaagcagcagacgggccagcaggatgacccgtatgaggacgaaataccatttta

SEQ ID NO: 866508 - DNA, 75 bp, synthetic construct
  source 1..75: mol_type = other DNA
cattagatgatatatacagtaccttgaaagaaaatacaggtttttctaaagatataatagacaaattaaaaaagc

SEQ ID NO: 866509 - DNA, 75 bp, synthetic construct
  source 1..75: mol_type = other DNA
gtcctggcgtttggcagacaagccgacgcgctggcaaagcatcacaaaggcgaactcctgagcgtggcgggtaac

SEQ ID NO: 866510 - DNA, 75 bp, synthetic construct
  source 1..75: mol_type = other DNA
gtcatcgcatttggcaaacaggctgacttcctggctaaacaccacaaaggcgatgttgccagcgtatccggcaca

SEQ ID NO: 866511 - DNA, 75 bp, synthetic construct
  source 1..75: mol_type = other DNA
tcgcgaaagcggctggattggctttgtagaagcggcaatttttatttttgtgttactggcaggtctggtttatct

SEQ ID NO: 866512 - DNA, 75 bp, synthetic construct
  source 1..75: mol_type = other DNA
aacaggtaatactaatatcctcgctttcttttatttccaccggaatttacgccgctaatattgcaaaaacagcag

SEQ ID NO: 866513 - DNA, 75 bp, synthetic construct
  source 1..75: mol_type = other DNA
cggtcggctccgcccgcttacgcctgtccgccaagttttatctggtggccatgttcttcgttatcttcgacgttg

SEQ ID NO: 866514 - DNA, 75 bp, synthetic construct
  source 1..75: mol_type = other DNA
atgacagcacagattgcagcttacgggcggctggtggacgacccgcaggaaaaacagaccagcaaaggaacacca

SEQ ID NO: 866515 - DNA, 75 bp, synthetic construct
  source 1..75: mol_type = other DNA
gtggtcagagaaaatatacaggccacccacaaaacacaggagcacagaccgcatcacgggggcagccaccgcaga

SEQ ID NO: 866516 - DNA, 75 bp, synthetic construct
  source 1..75: mol_type = other DNA
gcaggttatcgcagacagtgtaatcagtgccagaacggcgcgaccaggtggtaaaaaaggccaacaggggcaggc

SEQ ID NO: 866517 - DNA, 75 bp, synthetic construct
  source 1..75: mol_type = other DNA
tgctgcaccctatgcggattgcggaggttacaaactacatccttcagcacttccggcaaaagacccatcgggctt

SEQ ID NO: 866518 - DNA, 75 bp, synthetic construct
  source 1..75: mol_type = other DNA
gacgggggtgggtttatctggcatacgacaggctcaggaaaaaccctgaccagctttaaagccgcccgactcgca

SEQ ID NO: 866519 - DNA, 75 bp, synthetic construct
  source 1..75: mol_type = other DNA
ccgaatccaataacttcgtcgtgctggataaatacgtcacggaatgggaagcgagtgaccgctaccagagtgaat

SEQ ID NO: 866520 - DNA, 75 bp, synthetic construct
  source 1..75: mol_type = other DNA
tatgttgatgctgtagtaaatgtttattcaaatttttttatgccagcgatgctattagggaaaccaatttttagc

SEQ ID NO: 866521 - DNA, 75 bp, synthetic construct
  source 1..75: mol_type = other DNA
tgcagattatccagcagtttgaacagacgggttctcatgctaaccgttatgacgtcacgatcctggttaatggtt

SEQ ID NO: 866522 - DNA, 75 bp, synthetic construct
  source 1..75: mol_type = other DNA
gccgccaaagcctactatgaatccttcagacacatccagaagttaagggctgagcaggacagcagttataagccc

SEQ ID NO: 866523 - DNA, 75 bp, synthetic construct
  source 1..75: mol_type = other DNA
ctgggcatggccttctggcatgatttagcggctccggtcattgctggcattcttgccagtatgatcgtgagctgg

SEQ ID NO: 866524 - DNA, 75 bp, synthetic construct
  source 1..75: mol_type = other DNA
agaacggcgaaacgcggcagggctggcaggttatcgcagacagcgtaatcagtgcgcgatcggtgcgaccgggcg

SEQ ID NO: 866525 - DNA, 75 bp, synthetic construct
  source 1..75: mol_type = other DNA
atgcaggtaagccagtggacaggccagaacggcgaaacgcggcaaggctggcaggttatcgcagacagcgtaatc

SEQ ID NO: 866526 - DNA, 75 bp, synthetic construct
  source 1..75: mol_type = other DNA
atgacagcacagatagccgcttacgggcggctggtggctgacccgcagttaaagaccaccagcaagggcacacaa

SEQ ID NO: 866527 - DNA, 75 bp, synthetic construct
  source 1..75: mol_type = other DNA
acatgaccgcatagcggaggaactggaggcgaaaggcttttaccggagggcggcggcgcgatggggtgaagtcat

SEQ ID NO: 866528 - DNA, 75 bp, synthetic construct
  source 1..75: mol_type = other DNA
ccgattctggaaatggatctggattacctgaacgctaacgcccgctcgatgattagcccggtggtttgcagcaat

SEQ ID NO: 866529 - DNA, 75 bp, synthetic construct
  source 1..75: mol_type = other DNA
atgaaatcattaacgacagaaacggcgctggatattctgattgcgtggctgcaggacaatattgactgtgaatcc

SEQ ID NO: 866530 - DNA, 75 bp, synthetic construct
  source 1..75: mol_type = other DNA
gcaggacaatatcgactgcaaatcgggaattatctttgacaacaatgaggataaaacggattcagcagcactgtt

SEQ ID NO: 866531 - DNA, 75 bp, synthetic construct
  source 1..75: mol_type = other DNA
ctgccctgcattgaacaggccagggaggatatccgtaccctgcgccagttgcagtttctgcaacagaaccagtga

SEQ ID NO: 866532 - DNA, 75 bp, synthetic construct
  source 1..75: mol_type = other DNA
aacaggccagcatgatgcttggtaaagccgaaggggtgattagtcgcattgacgccattatccgttcactacggc

SEQ ID NO: 866533 - DNA, 75 bp, synthetic construct
  source 1..75: mol_type = other DNA
atgagaatcttcgtttgcaccccgaactgggggctttttctgattcctctattcaaaaaatgggcaataacctga

SEQ ID NO: 866534 - DNA, 75 bp, synthetic construct
  source 1..75: mol_type = other DNA
tgatgcgtggtcgtatccggttctgcggcttaaacgtcttggcctgtcaaaaacgttccgtcgtctggtcgtcac

SEQ ID NO: 866535 - DNA, 75 bp, synthetic construct
  source 1..75: mol_type = other DNA
aaaaaattcgaatatggtggaaaaacactcaaggaatatcggaacgagccaaagaaaactcgacacgatattgtg

SEQ ID NO: 866536 - DNA, 75 bp, synthetic construct
  source 1..75: mol_type = other DNA
gcgcgaactggcaaaactggttggtgaggccgtccgcgaagagatgcgcagacaggcgcgtacaggcatgaacag

SEQ ID NO: 866537 - DNA, 75 bp, synthetic construct
  source 1..75: mol_type = other DNA
aaactcaccggaagacagactatttcgcccgttccggcagtgaatgtgccagcaccggtggtgaatgtggcgcgt

SEQ ID NO: 866538 - DNA, 75 bp, synthetic construct
  source 1..75: mol_type = other DNA
gcaggacaatatcgcctacgaatcggggattatcttcgacaacgatgaagataaaacggattcggcagcgctgct

SEQ ID NO: 866539 - DNA, 75 bp, synthetic construct
  source 1..75: mol_type = other DNA
ctgccctgcattgaacaggccagggaggatatccataccctgcgccagttgcagtttctgcaacagaaccggtga

SEQ ID NO: 866540 - DNA, 75 bp, synthetic construct
  source 1..75: mol_type = other DNA
ccctcaaagaatatcgcaacgagccaaaagaaacccggcacgaaatcgttaaagactatgttggattcaaaagtg

SEQ ID NO: 866541 - DNA, 75 bp, synthetic construct
  source 1..75: mol_type = other DNA
ccgttatgcagcatggattaagccagaatttgaaattgaagtttatgaggtattccgaacggctgttcgtctcgg

SEQ ID NO: 866542 - DNA, 75 bp, synthetic construct
  source 1..75: mol_type = other DNA
tgggatatacagaagatggggttggctttaagcttcacctgcgcattaagcagtcagttgatcgctttttcgaac

SEQ ID NO: 866543 - DNA, 75 bp, synthetic construct
  source 1..75: mol_type = other DNA
tgatggaaaaacagctgatgagccaactgcgtccactcgatctggacgatatccgcccgtttatggacgatgagt

SEQ ID NO: 866544 - DNA, 75 bp, synthetic construct
  source 1..75: mol_type = other DNA
cctcgatgaactgaatacctttgtcgagaagaatgacgaggatatgcaccgttttagtaacgacataaagcaaag

SEQ ID NO: 866545 - DNA, 75 bp, synthetic construct
  source 1..75: mol_type = other DNA
cgtggaatttaccggtaaagtacaacggatggcgaatgtgcatcagtacggcctcaaggataagcccgggcgaaa

SEQ ID NO: 866546 - DNA, 75 bp, synthetic construct
  source 1..75: mol_type = other DNA
agccgtttgaagatatctatgacgtgctgagctctgatgagaaaatgttcgccttttttgctccgcagatccaac

SEQ ID NO: 866547 - DNA, 75 bp, synthetic construct
  source 1..75: mol_type = other DNA
atgaaacccgcctcctggttgctgctattgaaaaagaacttgagagtgggctgctgcaaaaagtcaacgatatgc

SEQ ID NO: 866548 - DNA, 75 bp, synthetic construct
  source 1..75: mol_type = other DNA
attgcaggattattacgccatactctcgggcagctcaatgtgcaaaaacagcaacttgaacaagaaattaccgat

SEQ ID NO: 866549 - DNA, 75 bp, synthetic construct
  source 1..75: mol_type = other DNA
cgcccaaaaagccttagaggatgccagtcgcaccagggaagcgacactgggtcgcttcagaacgttactggaagc

SEQ ID NO: 866550 - DNA, 75 bp, synthetic construct
  source 1..75: mol_type = other DNA
gatgaaaatatacgtatgctggatgactggcctggcaccattaccctgaggcagactatcgatgaattgctggat

SEQ ID NO: 866551 - DNA, 75 bp, synthetic construct
  source 1..75: mol_type = other DNA
tgtcgaagataattttggtgataacagtgctatttccacacggatccgtcgtgagtatgaaaagcgccgtgaaat

SEQ ID NO: 866552 - DNA, 75 bp, synthetic construct
  source 1..75: mol_type = other DNA
cgaattgcgcgagtgcatcagtatggtttaaaagatagacccaatcccgacgttaaacctattaagtatgatgaa

SEQ ID NO: 866553 - DNA, 75 bp, synthetic construct
  source 1..75: mol_type = other DNA
atggctggactgaatgtctggatcaacgtatagccggtctcctgaaggcggtctgtattgacttttccgacgccg

SEQ ID NO: 866554 - DNA, 75 bp, synthetic construct
  source 1..75: mol_type = other DNA
cggcaaacccggtagtaaatccccgctggatgaggcgtggttccggcaggggatacagaaaaccgccagcaacac

SEQ ID NO: 866555 - DNA, 75 bp, synthetic construct
  source 1..75: mol_type = other DNA
atgcctgccgggtttacccactttctactggtaaccaggaacaacatgaaatcattaaccacggaaacggctctg

SEQ ID NO: 866556 - DNA, 75 bp, synthetic construct
  source 1..75: mol_type = other DNA
atgcctgccgggtttacccactttctactggtaaccagcaacaacatgaaatcattaaccacggaaaccgctctg

SEQ ID NO: 866557 - DNA, 75 bp, synthetic construct
  source 1..75: mol_type = other DNA
atgcctgccgggtttacccactttctactggtaaccagaaacaacatgaaatcattaaccacggaaacagctctg

SEQ ID NO: 866558 - DNA, 75 bp, synthetic construct
  source 1..75: mol_type = other DNA
cactggatattctgattgcgtggctgcaggacaatattgactgcgaatcggaaattatctttgacaacgatgagg

SEQ ID NO: 866559 - DNA, 75 bp, synthetic construct
  source 1..75: mol_type = other DNA
acggattcggcaacactgctgccctgcattgaacaggccagggaagatatccgtacactgcgccagttgcagctt

SEQ ID NO: 866560 - DNA, 75 bp, synthetic construct
  source 1..75: mol_type = other DNA
atgcctgccgggtttacccactttcgactggtaaccagaaacaacatgaaatcattaaccacggaaactgctctg

SEQ ID NO: 866561 - DNA, 75 bp, synthetic construct
  source 1..75: mol_type = other DNA
tgaaattattaaccacagaaacggcgctggatattctgattgcgtggctgcaggacaatattgactgcgaatcag

SEQ ID NO: 866562 - DNA, 75 bp, synthetic construct
  source 1..75: mol_type = other DNA
gcaggacaatatcgactgcgaatctggagttatctttgacaatgatgaagataaaacggattcggcagcactgcc

SEQ ID NO: 866563 - DNA, 75 bp, synthetic construct
  source 1..75: mol_type = other DNA
gcggcgttgaactgttcgtccacttcggtatcgacaccgttgaactaaaaggcgaaggcttcaagcgtattgctg

SEQ ID NO: 866564 - DNA, 75 bp, synthetic construct
  source 1..75: mol_type = other DNA
atgcctgccgggtttacccactttcaactggtaaccaggaacaacatgaaatcattaaccacggaaactgctctg

SEQ ID NO: 866565 - DNA, 75 bp, synthetic construct
  source 1..75: mol_type = other DNA
tggatgaacatgacgctaccgaaacaccggcaacttctgccagccctcatcagttgccggaagacaatacagtga

SEQ ID NO: 866566 - DNA, 75 bp, synthetic construct
  source 1..75: mol_type = other DNA
gcttatacaaaatacaaaaaatagcaattatgagaaaatacttttttcttcaagagattccagagtcgtttttga

SEQ ID NO: 866567 - DNA, 75 bp, synthetic construct
  source 1..75: mol_type = other DNA
atggcaactttgacaaaaaaagaacaggcatggttgaacgaattacaggacgttattgatcgctgtccatcaccg

SEQ ID NO: 866568 - DNA, 75 bp, synthetic construct
  source 1..75: mol_type = other DNA
ttgcaacaggcaaatggatttatggctcaccaaaactggagcaatataatggtatttctgctgtcgaaatcctgg

SEQ ID NO: 866569 - DNA, 75 bp, synthetic construct
  source 1..75: mol_type = other DNA
agggcaagctctccctgcttcagggggatgttaatgccattatctcgcccgctaagccagttgatggcaatgata

SEQ ID NO: 866570 - DNA, 75 bp, synthetic construct
  source 1..75: mol_type = other DNA
ttgaagcctatgagctgattggccttaacgctgaaagaatgtcgtcagcgatcgccagtggcggcgcggccgcgc

SEQ ID NO: 866571 - DNA, 75 bp, synthetic construct
  source 1..75: mol_type = other DNA
ggctggcgaaatgcgtaaacatggcattctgctttccggcagcagccgcaccatcgaaagtgccgttcgtcgcac

SEQ ID NO: 866572 - DNA, 75 bp, synthetic construct
  source 1..75: mol_type = other DNA
agaccgcatggggcagacgctgcgcggtaatctttccggcgatgttcaggcgctgagtggtgcgttctcagggct

SEQ ID NO: 866573 - DNA, 75 bp, synthetic construct
  source 1..75: mol_type = other DNA
tgacgcaggcacagagccgttatgaggccgcgaaggcacaggcggaaaaactgcgcaacacaggggctgtggcga

SEQ ID NO: 866574 - DNA, 75 bp, synthetic construct
  source 1..75: mol_type = other DNA
agatggggaggagcattatacaacagagattgttgttgatcagaagggaactatgcaaatgcttggtaataatac

SEQ ID NO: 866575 - DNA, 75 bp, synthetic construct
  source 1..75: mol_type = other DNA
tgtcgcatcaatgctctttacattaccttttagatttattcttttttattctttcttcatgtttcagtgttatat

SEQ ID NO: 866576 - DNA, 75 bp, synthetic construct
  source 1..75: mol_type = other DNA
tgataatcgttcgtcgatggattggtgtgttgctgtccatgatatgaatgccggatttgatgaaaagattttgtt

SEQ ID NO: 866577 - DNA, 75 bp, synthetic construct
  source 1..75: mol_type = other DNA
agataaaaatttaactgacaatactattcctgatattaaaaaagatgaagaaacatattctccgccacgtcgaag

SEQ ID NO: 866578 - DNA, 75 bp, synthetic construct
  source 1..75: mol_type = other DNA
cctgggcgttttccgttgaccgctgggatcgcaactggccggaagagacaaagcgacaggttattcgtgatgcat

SEQ ID NO: 866579 - DNA, 75 bp, synthetic construct
  source 1..75: mol_type = other DNA
cactatctctcgccatgcccgtcaagcgaattttccgcaatgggcgatgtcaccgcactgagtacggaagacatt

SEQ ID NO: 866580 - DNA, 75 bp, synthetic construct
  source 1..75: mol_type = other DNA
ggataaccgggcgacgcagggtgagcgggtgaccacggatgaaggatggcagagacggtggtggccgaagaaaaa

SEQ ID NO: 866581 - DNA, 75 bp, synthetic construct
  source 1..75: mol_type = other DNA
taaagggcgtctgattgccgggcggaatattttgctggatacggcagcgctgaccagccgggaaggactgatttc

SEQ ID NO: 866582 - DNA, 75 bp, synthetic construct
  source 1..75: mol_type = other DNA
atcatccagtcgccgcatttcaacgacgccgtggatattctgatcccggattatcagcgttatctcgcggaacgc

SEQ ID NO: 866583 - DNA, 75 bp, synthetic construct
  source 1..75: mol_type = other DNA
gtaagccatatccctgctccgcgtgatggtcgtgattacgatccggaagtactgaagcaggcggttctggaggcg

SEQ ID NO: 866584 - DNA, 75 bp, synthetic construct
  source 1..75: mol_type = other DNA
cgatgatgtgcgtccgatgcttgaacagatggtgaaagaggcggtaagccatattcctgttccgcgtgatggtcg

SEQ ID NO: 866585 - DNA, 75 bp, synthetic construct
  source 1..75: mol_type = other DNA
gtgaaacctaccaccccggcgatacggtgacgtgggggggctcgctgtggcactgcaacagtatgaccggtgata

SEQ ID NO: 866586 - DNA, 75 bp, synthetic construct
  source 1..75: mol_type = other DNA
tatgcctaatgcgctggttgaagtgttacgcgaaaaactgactatttcccgctacgactccatcgtccccggcgg

SEQ ID NO: 866587 - DNA, 75 bp, synthetic construct
  source 1..75: mol_type = other DNA
aaagatgattacacctatctggcagtagaaattatccgtggcgatactatccgctatgcgctgctggaaatcccg

SEQ ID NO: 866588 - DNA, 75 bp, synthetic construct
  source 1..75: mol_type = other DNA
aaagtccgcttcgctgaactgaagcgacgcatcattattagcgaagaacaaggttccaactctcattcccgccat

SEQ ID NO: 866589 - DNA, 75 bp, synthetic construct
  source 1..75: mol_type = other DNA
ttaatttcccgcgctaccggtatgaatgttaacgccatgttgagcggcccaatgggcggtgaccagcaggtgggc

SEQ ID NO: 866590 - DNA, 75 bp, synthetic construct
  source 1..75: mol_type = other DNA
ctgattcagtcaccccatttcaacgatgcagtggacatcctgatcccggactatcagcgttatcttgctgaacgt

SEQ ID NO: 866591 - DNA, 75 bp, synthetic construct
  source 1..75: mol_type = other DNA
atgccattcgcgaacgcgatgtgttgctctattatccttatcatacctttgagcatgtgctggaactgctgcgtc

SEQ ID NO: 866592 - DNA, 75 bp, synthetic construct
  source 1..75: mol_type = other DNA
aaagtctcaccccggatgatgtgcgtccgatgcttgaacagatggtgaaggaggcggtaagccatatccctgttc

SEQ ID NO: 866593 - DNA, 75 bp, synthetic construct
  source 1..75: mol_type = other DNA
tccctgccggtgatgctctaccgcggtgtgttcagagccggtgaaacctaccaccccggcgatacggtgacgtgg

SEQ ID NO: 866594 - DNA, 75 bp, synthetic construct
  source 1..75: mol_type = other DNA
acgatcaaaaatcctttccccggggcacgtatgccacacacccgggaggactctggcgggcgtatgaaaaaacgc

SEQ ID NO: 866595 - DNA, 75 bp, synthetic construct
  source 1..75: mol_type = other DNA
acgatcaaaaatcctttccccggggcacgtatgccacacaccagggcggactctggcgggcgtatgaaaaaacgc

SEQ ID NO: 866596 - DNA, 75 bp, synthetic construct
  source 1..75: mol_type = other DNA
gcccttccggctccgcaggacgggcgtgatgccacggcactggaagtgctccccgctattgacgatcaaaaatcc

SEQ ID NO: 866597 - DNA, 75 bp, synthetic construct
  source 1..75: mol_type = other DNA
accccggcgatacggtgacgtgggggggctcgttgtggcactgcaacagcatgaccggtgataaacccggagaag

SEQ ID NO: 866598 - DNA, 75 bp, synthetic construct
  source 1..75: mol_type = other DNA
gaggcggtaagccatattcctgttccgcgtgatggtcgtgactacgatccggaagtactgaagcaggcggtgaat

SEQ ID NO: 866599 - DNA, 75 bp, synthetic construct
  source 1..75: mol_type = other DNA
gtgaatgatgcggttgcgaatattccggtaccggcggacggcaaaagtattacccccgatgatgtgcgtccgatg

SEQ ID NO: 866600 - DNA, 75 bp, synthetic construct
  source 1..75: mol_type = other DNA
ccgcgtgatggtcgtgactatgatcccgatgttctgcagaaggcggttctggatgcggtgagtgccctgccggct

SEQ ID NO: 866601 - DNA, 75 bp, synthetic construct
  source 1..75: mol_type = other DNA
gggaatgcctggttgacggggtggcggatatcgacgtcagcatgacggatgagcggttgttctctgtggtgatcc

SEQ ID NO: 866602 - DNA, 75 bp, synthetic construct
  source 1..75: mol_type = other DNA
aggcacaagcgtttgaagagaaactggcttccctgtcggcggtattacagaagcatgtgacggtggatgatgtgc

SEQ ID NO: 866603 - DNA, 75 bp, synthetic construct
  source 1..75: mol_type = other DNA
tgatgccacggcactggaagtgctccccgctattgacgatcaaaaatcctttccccggggcacgtatgccacaca

SEQ ID NO: 866604 - DNA, 75 bp, synthetic construct
  source 1..75: mol_type = other DNA
cagtggccagtgtacggaaaaaacattttccctgccggtgatgctctaccgcggtgtgttcagagccggtgaaac

SEQ ID NO: 866605 - DNA, 75 bp, synthetic construct
  source 1..75: mol_type = other DNA
tggaaattatccgtggcgataccatccgttacgcgctgctggagatcccatcagataaagtgccgcgctttgtga

SEQ ID NO: 866606 - DNA, 75 bp, synthetic construct
  source 1..75: mol_type = other DNA
ctcattcagttttattaatggcgagcagctgcagcgttttgttaagcagattatgagtaacgcgatggggtactt

SEQ ID NO: 866607 - DNA, 75 bp, synthetic construct
  source 1..75: mol_type = other DNA
tggttctttgtgccgctttactgacggtcacacccgcagcgtcagcggatgtgaacagcgacatgaaccagttct

SEQ ID NO: 866608 - DNA, 75 bp, synthetic construct
  source 1..75: mol_type = other DNA
ggctggccaggggagcgaatatgctggaagatgattatctggctgcatacccgactcctggctccgacacttttt

SEQ ID NO: 866609 - DNA, 75 bp, synthetic construct
  source 1..75: mol_type = other DNA
ggcccggtgctgggcatcgtgcagcgcgtgatcgccggctggttggccgatcaagccggcatcgaccgcgccagc

SEQ ID NO: 866610 - DNA, 75 bp, synthetic construct
  source 1..75: mol_type = other DNA
cctgaggcagcgaaagccatgaccgtggcgatacgcacttttttacagcaaaacgccaatcgggaaggcgattgc

SEQ ID NO: 866611 - DNA, 75 bp, synthetic construct
  source 1..75: mol_type = other DNA
cagatgagctacatgcgccagcagctttccgcccgtatgctcagccgttaccagaacaactatcacttcggaggg

SEQ ID NO: 866612 - DNA, 75 bp, synthetic construct
  source 1..75: mol_type = other DNA
aattatccgggccatgatggaaggcggcacagcaaaaatttatcactgcaacgattctgataaatgcctgaaagt

SEQ ID NO: 866613 - DNA, 75 bp, synthetic construct
  source 1..75: mol_type = other DNA
ggtctgagcacaacactgaggcgttcgccgggctgcacaacgagcgtaagcgcatcatagttgtattcgatgaag

SEQ ID NO: 866614 - DNA, 75 bp, synthetic construct
  source 1..75: mol_type = other DNA
actatatcggttacgacatcctgctgcagtacattcaggagctgatacagcaggcccgggcgatggtggccacag

SEQ ID NO: 866615 - DNA, 75 bp, synthetic construct
  source 1..75: mol_type = other DNA
gcatacgatctctttatggtccagtctcctgcccggtttcgtgtttttgggcagggagagattatgggggatttt

SEQ ID NO: 866616 - DNA, 75 bp, synthetic construct
  source 1..75: mol_type = other DNA
ccagaatatcatatgggaggcgctgaaaaaaaacagaatgtttgacggcaacaaagagctgaaagaatttatcat

SEQ ID NO: 866617 - DNA, 75 bp, synthetic construct
  source 1..75: mol_type = other DNA
gcaggtacagcaggatgcgctgctggttgtcgatcgtcagatgagctacatgcgtcagcagctttccgcccgcat

SEQ ID NO: 866618 - DNA, 75 bp, synthetic construct
  source 1..75: mol_type = other DNA
aacgattgtccagctgattgaagatgcggaaaacaaagagaaatatgcaaataaaatgtcttcgctaaagcaaga

SEQ ID NO: 866619 - DNA, 75 bp, synthetic construct
  source 1..75: mol_type = other DNA
atgtcacgtattcgtgtcgtagcggcccgtctgtacgccgcatttatccacgcacaactgtttgtaatgtcatgc

SEQ ID NO: 866620 - DNA, 75 bp, synthetic construct
  source 1..75: mol_type = other DNA
ggttgcattgtatctatcgtcattggggcggtacttgtcgccggacctgaaatgatgagtcgcagccagaaacag

SEQ ID NO: 866621 - DNA, 75 bp, synthetic construct
  source 1..75: mol_type = other DNA
aaggcacggcattccacctctttaatctgcaagacgggcatgaagccgtctgtgaagtgcccgctgctgacggtt

SEQ ID NO: 866622 - DNA, 75 bp, synthetic construct
  source 1..75: mol_type = other DNA
cgttacgcgcatatcggaaccgggaactttaatgaaaaaaccgcgcgtctttataccgactactcactgctgacc

SEQ ID NO: 866623 - DNA, 75 bp, synthetic construct
  source 1..75: mol_type = other DNA
aactactaatttccagtctaatggctatgtttatcctgctctaaacgaggctaccggtaatcaacaaaaggattt

SEQ ID NO: 866624 - DNA, 75 bp, synthetic construct
  source 1..75: mol_type = other DNA
acagacaaaaaagaagagagaatttcaattcattttctttaaatgattttttttcagattatagtgtctgttttc

SEQ ID NO: 866625 - DNA, 75 bp, synthetic construct
  source 1..75: mol_type = other DNA
tcatggcgatataagcatgatgcaatataaaggttattgcccgcctgtaccgggattagagattcgaaactcaga

SEQ ID NO: 866626 - DNA, 75 bp, synthetic construct
  source 1..75: mol_type = other DNA
tcattttgcgccagagtaccttcaggacgccatttctcttaatccgctaagaggtggtactgaggccgagagtgt

SEQ ID NO: 866627 - DNA, 75 bp, synthetic construct
  source 1..75: mol_type = other DNA
acactgtgcttgcgcaatgttgtgaaagtaaatggtctgcaaggcggttcgcaggctgaaagtgagcaggggctg

SEQ ID NO: 866628 - DNA, 75 bp, synthetic construct
  source 1..75: mol_type = other DNA
gaaagtaaatggtctgcaaggcggttcgcaggctgaaagtgagttgggggtagtggtgatgccagcggctaactt

SEQ ID NO: 866629 - DNA, 75 bp, synthetic construct
  source 1..75: mol_type = other DNA
gcggaaaacaaagagaaatatgcaaataaaatgtcttctttgaagcaggatttgcaggccttactgggtaaggaa

SEQ ID NO: 866630 - DNA, 75 bp, synthetic construct
  source 1..75: mol_type = other DNA
gagcgagatatattaactgtagattcaatctgtcaatgcaacaccctagactggccccctgaatctccagacaac

SEQ ID NO: 866631 - DNA, 75 bp, synthetic construct
  source 1..75: mol_type = other DNA
gtggaaatttacgagaacgaaaacgaccaggttgaagcggttaaacgcttttttgctgaaaatggcaaagcactg

SEQ ID NO: 866632 - DNA, 75 bp, synthetic construct
  source 1..75: mol_type = other DNA
gaagctcgccttgagcgagatattttaaaaaaagcaacagcgtattttgcacaggagtcgctgaaaaatacgcgt

SEQ ID NO: 866633 - DNA, 75 bp, synthetic construct
  source 1..75: mol_type = other DNA
gataaccaggagccagaacgcaactgccgcacggcgggcgtggttggcccggtggtcggggtcatgggcacgtta

SEQ ID NO: 866634 - DNA, 75 bp, synthetic construct
  source 1..75: mol_type = other DNA
aggagcggttattacaactgggtacagcatgaaccctcagacagaaaacaaagtgatgagcggctaaaactgtag

SEQ ID NO: 866635 - DNA, 75 bp, synthetic construct
  source 1..75: mol_type = other DNA
cctgaaggcactttaggacaatgggttaccgccgccagaaaagggctcggtactcctggttcccgcacggtggct

SEQ ID NO: 866636 - DNA, 75 bp, synthetic construct
  source 1..75: mol_type = other DNA
cagactctgggcctgactcaagggaccgttgtgactatctccgctgaaggcgaagacgagcagaaagcggttgaa

SEQ ID NO: 866637 - DNA, 75 bp, synthetic construct
  source 1..75: mol_type = other DNA
gggcatcgcgacgattacgcgtggatctaacagcctgaaagccgcgcccgtggagctgcgccagtggctggaaga

SEQ ID NO: 866638 - DNA, 75 bp, synthetic construct
  source 1..75: mol_type = other DNA
atgttgagtctcagctttatagaatttacaaggtaagaaataaaataacccatagagcatactacggaaatatta

SEQ ID NO: 866639 - DNA, 75 bp, synthetic construct
  source 1..75: mol_type = other DNA
gggatcgactttaaacagtttgccgttactctgcgcgatgcacagggagatgtacccgcagttgtgatgcattat

SEQ ID NO: 866640 - DNA, 75 bp, synthetic construct
  source 1..75: mol_type = other DNA
ctttatggcgattaagctaatcaacaaactgaatcggaaaaaaagaagaaccagcagccgcaccagcaccaacta

SEQ ID NO: 866641 - DNA, 75 bp, synthetic construct
  source 1..75: mol_type = other DNA
gaagctcgccttgagcgagatatattaaaaaaagtgaggtgtactggcaatagcggacactaccatttgttcttt

SEQ ID NO: 866642 - DNA, 75 bp, synthetic construct
  source 1..75: mol_type = other DNA
tcgagccagtggcgcagcctggcgttgcgccgcgccagtggttgcccggtatgcggaggaagcaatgcagatcct

SEQ ID NO: 866643 - DNA, 75 bp, synthetic construct
  source 1..75: mol_type = other DNA
aaagctgtcgaggagatcgggcagctcgtcaccgtcgcacgtgaagaactccagcgtcgcaaggccaaagagcag

SEQ ID NO: 866644 - DNA, 75 bp, synthetic construct
  source 1..75: mol_type = other DNA
aaccattgcggcccgtgggtaattccgatcaccacggtagccgccgtgtgtgtcaatatgatgatccgtgacttc

SEQ ID NO: 866645 - DNA, 75 bp, synthetic construct
  source 1..75: mol_type = other DNA
gctgtcgacggaaagatccaagcgtatgaatttcggccagacctaccagagctttttccacatccaagcttagcg

SEQ ID NO: 866646 - DNA, 75 bp, synthetic construct
  source 1..75: mol_type = other DNA
gccaacactaaatattacgttgccattctgaaccgaaaatccgcgcacagttgcgcttttggcgacttctatgtg

SEQ ID NO: 866647 - DNA, 75 bp, synthetic construct
  source 1..75: mol_type = other DNA
aatcacaaaccgttgcggcaagggttccgcatgaagttatgaacaatgttgaggcggtaaaaatgcctggagaaa

SEQ ID NO: 866648 - DNA, 75 bp, synthetic construct
  source 1..75: mol_type = other DNA
cacataacatcgtgctgctgcaaaccatgcgcggtttcttcgatgtcctgcaatcctcagtgaagcatagccgtc

SEQ ID NO: 866649 - DNA, 75 bp, synthetic construct
  source 1..75: mol_type = other DNA
acgcaatccgcgcccgatccagcagtgttttaagttcacgctgctcgcgttcagtcatctctttttgggtaatac

SEQ ID NO: 866650 - DNA, 75 bp, synthetic construct
  source 1..75: mol_type = other DNA
gggctcagtactcctggttcccgcacggtggctgaactggaatctgaaattctgcaactgcgtaaggcgttaaat

SEQ ID NO: 866651 - DNA, 75 bp, synthetic construct
  source 1..75: mol_type = other DNA
tcgagccagtggcgcagcctggctttgcgccgcgccagcggttgcccggtatgtggaggatgcaatgcagatcct

SEQ ID NO: 866652 - DNA, 75 bp, synthetic construct
  source 1..75: mol_type = other DNA
cctgttacacctcactattagcagcagcaaaaatgccggtgatacagcttcaattccaaccatcgaagcgatttt

SEQ ID NO: 866653 - DNA, 75 bp, synthetic construct
  source 1..75: mol_type = other DNA
aatcggtggtatattcccttctgatgaaatagtcaaaggctctattagcggatatgtcttcgagcaatttgaaat

SEQ ID NO: 866654 - DNA, 75 bp, synthetic construct
  source 1..75: mol_type = other DNA
ctaaagagttcaaagccgaagctgtcagaacggttcttgaaaatcaactttcgatcagtgaaggcgcctcccgat

SEQ ID NO: 866655 - DNA, 75 bp, synthetic construct
  source 1..75: mol_type = other DNA
ttattttcttattacccctttgtctaaatatctgattgaattgaataatatccttgatgttagctttatcaatcg

SEQ ID NO: 866656 - DNA, 75 bp, synthetic construct
  source 1..75: mol_type = other DNA
catctgtctgaatcagtgggagactgccgggtgagaactgtgaaaaattactcatatccttatttaacttttgtc

SEQ ID NO: 866657 - DNA, 75 bp, synthetic construct
  source 1..75: mol_type = other DNA
tcatgaaaacattgaagattggttcagagttctcgaaagttcccagaggccgctatcgtactgacgggacagcaa

SEQ ID NO: 866658 - DNA, 75 bp, synthetic construct
  source 1..75: mol_type = other DNA
ggaaagagttttcttctactccttcaggacgtttctattctgatatgacagatagcagcggcgaacagtttagag

SEQ ID NO: 866659 - DNA, 75 bp, synthetic construct
  source 1..75: mol_type = other DNA
gctggattatctggaagcactggaactggtggatacatccagtgcgccagatattgaatggcctacacctccggc

SEQ ID NO: 866660 - DNA, 75 bp, synthetic construct
  source 1..75: mol_type = other DNA
gcaacggaaaattgatagggctgatcgcaattggtgaccctgtgttcaaccttgcagtccgagataatttgattg

SEQ ID NO: 866661 - DNA, 75 bp, synthetic construct
  source 1..75: mol_type = other DNA
gcgaagcgtttctgcatgcctttaccgggcaacctttgccggatgatgccgacctgcgtaaagagcgcagcgacg

SEQ ID NO: 866662 - DNA, 75 bp, synthetic construct
  source 1..75: mol_type = other DNA
cacatacatatcgctttccatacagaataaatatgccgttactaattctattctgggatgcaaagcaattgggta

SEQ ID NO: 866663 - DNA, 75 bp, synthetic construct
  source 1..75: mol_type = other DNA
ttaatacctgtgcggcaaacggtggcagccagttggatcactctgcgttagtgcaggcgctggaattaatggcta

SEQ ID NO: 866664 - DNA, 75 bp, synthetic construct
  source 1..75: mol_type = other DNA
tccgatgcttgagcagatggtgaaagaggctgtaagccatatccctgctccgcgtgacggtcgtgattatgatcc

SEQ ID NO: 866665 - DNA, 75 bp, synthetic construct
  source 1..75: mol_type = other DNA
ggctgatgctgcagtggtgggcggattatctggatgctaatcgggagaaggcggtaagtccgttcaattttggta

SEQ ID NO: 866666 - DNA, 75 bp, synthetic construct
  source 1..75: mol_type = other DNA
cctacatccataaggcggagcatctgggggagaggaggttgatgctgcagtggtgggctgattaccttgatgcga

SEQ ID NO: 866667 - DNA, 75 bp, synthetic construct
  source 1..75: mol_type = other DNA
atgccaaaaaattagggcttgcattcattctggttgcatttgggaatatcttcgaatgcttcgggttttctgttg

SEQ ID NO: 866668 - DNA, 75 bp, synthetic construct
  source 1..75: mol_type = other DNA
gctggattatctggaagcactggaactggtggatacctccagtgcgccagatattgaatggcctacccctccggc

SEQ ID NO: 866669 - DNA, 75 bp, synthetic construct
  source 1..75: mol_type = other DNA
atgaaaaaaatactcacagcagtactactttgctttggtgttctttctgctaatcaggcaatagcagttgttacc

SEQ ID NO: 866670 - DNA, 75 bp, synthetic construct
  source 1..75: mol_type = other DNA
tctatggggtggaccagtggagttgcgcatgtcaaagtttatgtaaaaggcaatctttacgatctttggactaac

SEQ ID NO: 866671 - DNA, 75 bp, synthetic construct
  source 1..75: mol_type = other DNA
gttatgctgagtttaaaagtggcaacttaagcgcgcgtgtcagcaaaggtgagttctggtcactggattttctgc

SEQ ID NO: 866672 - DNA, 75 bp, synthetic construct
  source 1..75: mol_type = other DNA
acccactatcgccgtgccggtggtgttgatgggaaccttctccgtgctttacgccttcggttacagtgtcaacac

SEQ ID NO: 866673 - DNA, 75 bp, synthetic construct
  source 1..75: mol_type = other DNA
aagcctccattgaagacgtggtgaaaacgctgctggaagctatcgccctggttttcctcgttatgtatctgttcc

SEQ ID NO: 866674 - DNA, 75 bp, synthetic construct
  source 1..75: mol_type = other DNA
tatctgctaatgaattcgagcgattaagttcaattttgcaacacgaagatcaagaagcatttgaagagatcttta

SEQ ID NO: 866675 - DNA, 75 bp, synthetic construct
  source 1..75: mol_type = other DNA
gctggattatctggaagcactggacctggtggatacatccagtgcgccagatattgaatggcctacccctccggc

SEQ ID NO: 866676 - DNA, 75 bp, synthetic construct
  source 1..75: mol_type = other DNA
gctggattatctggaagcactggatctggtggatacttccagtgcgccagatattgaatggcctacgcctccggc

SEQ ID NO: 866677 - DNA, 75 bp, synthetic construct
  source 1..75: mol_type = other DNA
gctggattatctggaagcactggaactggtggatacgtccagtgcgccagatattgaatggcctacgcctccggc

SEQ ID NO: 866678 - DNA, 75 bp, synthetic construct
  source 1..75: mol_type = other DNA
gtcctgaaagacactgtcggtgaggaagaggccgtcctgtttgcccgttccgcttctgtgggcgcacagcaattt

SEQ ID NO: 866679 - DNA, 75 bp, synthetic construct
  source 1..75: mol_type = other DNA
caaacgcccggacggttcgctatggcagtgggataaatggcagccaggtctggcgatttatgactttaccaatcc

SEQ ID NO: 866680 - DNA, 75 bp, synthetic construct
  source 1..75: mol_type = other DNA
gctggattatctggaagcactggagctggtggatacatccagtgcgccagatattgaatggcctacgcctccggc

SEQ ID NO: 866681 - DNA, 75 bp, synthetic construct
  source 1..75: mol_type = other DNA
aatgggctgctgaaaaatacagaagtaatcctccaagtgtgtccacattgcgtcgttatgctaagcagaatttat

SEQ ID NO: 866682 - DNA, 75 bp, synthetic construct
  source 1..75: mol_type = other DNA
gctggcggacttctttaaaccagccctgctggcgcgtatggaagtggtgccgtacctgcctctgtcgaaagagac

SEQ ID NO: 866683 - DNA, 75 bp, synthetic construct
  source 1..75: mol_type = other DNA
gatgaactggaagcggcctggcaccagcagcagacgctggtacgggaaattatcgcgctgcgccagctattgctg

SEQ ID NO: 866684 - DNA, 75 bp, synthetic construct
  source 1..75: mol_type = other DNA
cggatgaccgaggtgctggtgcagtatgatgaaacgctgacggcgctggatgaactggaagccgcctggcatcag

SEQ ID NO: 866685 - DNA, 75 bp, synthetic construct
  source 1..75: mol_type = other DNA
ggtcagcgaacccaacgctgccgaagccaccattattctgcgcggtctgtcggcggtctatgaacagtctcacgg

SEQ ID NO: 866686 - DNA, 75 bp, synthetic construct
  source 1..75: mol_type = other DNA
ggaaattatcgcgctgcgccagcagttactgggcgtggcagaggacgatgcggcagctttgccggatgtggatgc

SEQ ID NO: 866687 - DNA, 75 bp, synthetic construct
  source 1..75: mol_type = other DNA
tttaagggactaatggcggaagttatctcgtctcctgtgccggtcattctgtttatcgacgaagcgcataccctg

SEQ ID NO: 866688 - DNA, 75 bp, synthetic construct
  source 1..75: mol_type = other DNA
tccatcgatactatcaatgacatgttggctgatggacgccttatccgtcaccgtttgcgcaaagataaaaaacgc

SEQ ID NO: 866689 - DNA, 75 bp, synthetic construct
  source 1..75: mol_type = other DNA
gcaaaccgcgacctcgcgaagtgtcagaggattggcttccccttatcagctcgttttttgagcgagaatcagaat

SEQ ID NO: 866690 - DNA, 75 bp, synthetic construct
  source 1..75: mol_type = other DNA
atctggagtgcattctggcaagatccggaaggttggattgctcgttgtgttactactgaatgctggggtgatcag

SEQ ID NO: 866691 - DNA, 75 bp, synthetic construct
  source 1..75: mol_type = other DNA
atcaggtgattgtcgaacacgccgatgacccggaaaccatgcaggaagccctgtatccggtgctggcagacttct

SEQ ID NO: 866692 - DNA, 75 bp, synthetic construct
  source 1..75: mol_type = other DNA
ttgctgatgcaaaggctgaaataaaacaattcgagcgatttgcccgagaaccaatggctgctggtcacagaatgt

SEQ ID NO: 866693 - DNA, 75 bp, synthetic construct
  source 1..75: mol_type = other DNA
gcattgagttctgctatggaaagcaggaagaagaaagaagataagaaaaggagtgctgaaaataatttaaacgat

SEQ ID NO: 866694 - DNA, 75 bp, synthetic construct
  source 1..75: mol_type = other DNA
tacacaactgcccgttctgcggacagctacccggcgttttccccgatgctggttgagtggctgaaagagggctgg

SEQ ID NO: 866695 - DNA, 75 bp, synthetic construct
  source 1..75: mol_type = other DNA
ctctctggaaaagatacttttgattacgctgaatacctcttagcatataaacaacttgaaactcatattagttcc

SEQ ID NO: 866696 - DNA, 75 bp, synthetic construct
  source 1..75: mol_type = other DNA
gcaacggtcttggtatggctttagatcctgctcatttttccttagacagggcgttggcagaaatttggcatcgat

SEQ ID NO: 866697 - DNA, 75 bp, synthetic construct
  source 1..75: mol_type = other DNA
tccatcgataccatcaatgacatgttggctgatggacgccttatccgtcaccgtctgcgcaaagataaaaaacgc

SEQ ID NO: 866698 - DNA, 75 bp, synthetic construct
  source 1..75: mol_type = other DNA
tcgcgcttacgatgcaggcgttgcgcatcagtttaaaagcgcgcgtctgtatgagatcgagtttgaggggcgtcg

SEQ ID NO: 866699 - DNA, 75 bp, synthetic construct
  source 1..75: mol_type = other DNA
gatgctgcaccgacgcaaaccaccgtttacgccggaggagttaaaagcgttgatggatgcgaataaatcaaatta

SEQ ID NO: 866700 - DNA, 75 bp, synthetic construct
  source 1..75: mol_type = other DNA
tcaccaaaaataaaaacaggaatgaaatatcaaatattttatggcttggaaaaagccttaaacgtcggaaaggct

SEQ ID NO: 866701 - DNA, 75 bp, synthetic construct
  source 1..75: mol_type = other DNA
ctgcacaaacacctgctgaccgcacgcgccgacctgcgccgtccgggacgcccgctgggcgcgttcctgctggct

SEQ ID NO: 866702 - DNA, 75 bp, synthetic construct
  source 1..75: mol_type = other DNA
cgtaccggctgatgaggccgacagagaacaaccggaagagaccgctgaaacagtttccccggtacagcggctggc

SEQ ID NO: 866703 - DNA, 75 bp, synthetic construct
  source 1..75: mol_type = other DNA
ctttaaacctgccctgctggcgcgtatggaagtggtgccgttcctgccgttgtcgaaagagacccttgccaccat

SEQ ID NO: 866704 - DNA, 75 bp, synthetic construct
  source 1..75: mol_type = other DNA
tgaatacgccacacgtcacaattgagcgttatagcgaacttactggtctttcgatcgacacaatcaacgatatgc

SEQ ID NO: 866705 - DNA, 75 bp, synthetic construct
  source 1..75: mol_type = other DNA
gctgcgcagccgctttggcgcggacgtgattattgagccggaagtgacggacgaaatcatgagccgcgtcacccg

SEQ ID NO: 866706 - DNA, 75 bp, synthetic construct
  source 1..75: mol_type = other DNA
cccggctgttgaccggcattaaccgtgaccgtctgcaacaggactttgtgcaatggacacaggagtcggcggaat

SEQ ID NO: 866707 - DNA, 75 bp, synthetic construct
  source 1..75: mol_type = other DNA
atgatacaccagcatttcaggatctgtatccaggatggtttgtaagttacaaggccgatgttgtggaacctggtt

SEQ ID NO: 866708 - DNA, 75 bp, synthetic construct
  source 1..75: mol_type = other DNA
ttaggtactgattcactggctaatgtagcaaaagttcttaacaggccgaccagccagattcaaaagagaatgaaa

SEQ ID NO: 866709 - DNA, 75 bp, synthetic construct
  source 1..75: mol_type = other DNA
gttgatggcaacggtgctgaaaaaacgcattcgcttgcaagggtttattattggtcaggattatggtcaccgtat

SEQ ID NO: 866710 - DNA, 75 bp, synthetic construct
  source 1..75: mol_type = other DNA
caggaccagtgggggcgacggtggggcaaatcggcaaacttaaaggttgcagagtggtgggggtagccggtggcg

SEQ ID NO: 866711 - DNA, 75 bp, synthetic construct
  source 1..75: mol_type = other DNA
attacccgaaaaaaagcggtaatacgctattaccgcaaattaattatgttctgcaaggtcagatttggccaaaca

SEQ ID NO: 866712 - DNA, 75 bp, synthetic construct
  source 1..75: mol_type = other DNA
attgcaggatgtttatgcccgtcagtttccttcttccggtgatgaagttgtggccggctccacgacgctacgttt

SEQ ID NO: 866713 - DNA, 75 bp, synthetic construct
  source 1..75: mol_type = other DNA
tatttataattagtctgttttattatggtcttgctgccggagcttttaatattacatttgtcggtaatacagagc

SEQ ID NO: 866714 - DNA, 75 bp, synthetic construct
  source 1..75: mol_type = other DNA
ggagaggcaagacgtgaacagctacgcaacgatattgcaaaagatgaatgcgcccacgctttgcctgacgctcgt

SEQ ID NO: 866715 - DNA, 75 bp, synthetic construct
  source 1..75: mol_type = other DNA
gagaacgccagaaacgaagcgcaggccagcaccctgaaaagtaccgtcgacacactgaatatcatcagcgccggg

SEQ ID NO: 866716 - DNA, 75 bp, synthetic construct
  source 1..75: mol_type = other DNA
gccacggccagcgccgtcagtccggcttataccgcagacgctgaccataccggtaacgccgccccccttccctga

SEQ ID NO: 866717 - DNA, 75 bp, synthetic construct
  source 1..75: mol_type = other DNA
gacccatatatgcgcgggcgcatgagcgatgaaccgtcttattcaccgcctgttgaaattggcagtgtgatggtg

SEQ ID NO: 866718 - DNA, 75 bp, synthetic construct
  source 1..75: mol_type = other DNA
acttatggctacggtgctgaaaaaacgtattcgcctgcaagggtttattattagccaggattatggtcatcgcat

SEQ ID NO: 866719 - DNA, 75 bp, synthetic construct
  source 1..75: mol_type = other DNA
cgatcatccggaaaatccttcgtggtcactgggtgtgctggggatgccaggctttacggcttatatggggctgct

SEQ ID NO: 866720 - DNA, 75 bp, synthetic construct
  source 1..75: mol_type = other DNA
gcctgcccttctatgccggttggggtttaaccgttgatgaacatcgctgcccgcgtcgcgagcgaaaattaacgt

SEQ ID NO: 866721 - DNA, 75 bp, synthetic construct
  source 1..75: mol_type = other DNA
tggtgctacttttccactgcgcggcagggggcgatttttcgctactcaatgtcattcagaccgtgccttcggtgg

SEQ ID NO: 866722 - DNA, 75 bp, synthetic construct
  source 1..75: mol_type = other DNA
atagcgcggctattaaataatcatcagaagttaaataatctacagaagttaaataatctacagaagttaaataat

SEQ ID NO: 866723 - DNA, 75 bp, synthetic construct
  source 1..75: mol_type = other DNA
aagaggcgaatagatttcgagaactactcgaaaaatgcgatccctcaacaacatacctcatccctcatggctttc

SEQ ID NO: 866724 - DNA, 75 bp, synthetic construct
  source 1..75: mol_type = other DNA
atgtgctggaaagcgccagcgcgatgggcatgagcgaggggcagcgtttcttgtgtgtccagttaccgctggcgt

SEQ ID NO: 866725 - DNA, 75 bp, synthetic construct
  source 1..75: mol_type = other DNA
tcaggatgtgtttgacgacgcgctggcacaacatctgacgttgctgtttggtgcggtgctgcctgcgttagtgat

SEQ ID NO: 866726 - DNA, 75 bp, synthetic construct
  source 1..75: mol_type = other DNA
atcctggcgcaattcgtcttcgtgttgctggtgtggggcgcgggaaaagccgcaacacaactggcgcaaaatggc

SEQ ID NO: 866727 - DNA, 75 bp, synthetic construct
  source 1..75: mol_type = other DNA
cacatcaaagaaacaagccgcagcggaagggggcagtacaggaaactcgacgaagaacagggaaacatgaagatg

SEQ ID NO: 866728 - DNA, 75 bp, synthetic construct
  source 1..75: mol_type = other DNA
gacgtgggcagcatagaaagcaggatgaggaaaacgggacaatgaaaatgatggggttgatagtacatctgctga

SEQ ID NO: 866729 - DNA, 75 bp, synthetic construct
  source 1..75: mol_type = other DNA
atcgtgaccggggatatgtcgaaatataatctggcgcctgcgtttgtggctgatgagtcagaacgtacaaacatc

SEQ ID NO: 866730 - DNA, 75 bp, synthetic construct
  source 1..75: mol_type = other DNA
aaattcaagggagagaactcttaacaaatggttttccgacaatcggtaatgattttattgaagaaatggaatgcg

SEQ ID NO: 866731 - DNA, 75 bp, synthetic construct
  source 1..75: mol_type = other DNA
gattattatgtgaagtatgtcatctggtttttgcatcatgaagttcaggcaactaaaaagattatcttcagggat

SEQ ID NO: 866732 - DNA, 75 bp, synthetic construct
  source 1..75: mol_type = other DNA
ggtttttgcatcatgaagttcaggcaactaagaggattatcttcaaggatggcaataagagaaattgccacccaa

SEQ ID NO: 866733 - DNA, 75 bp, synthetic construct
  source 1..75: mol_type = other DNA
gcagtaagggtgggatagtttcagttgctgactactggtcacatatgaatgccacctgtccggcgaagatcaata

SEQ ID NO: 866734 - DNA, 75 bp, synthetic construct
  source 1..75: mol_type = other DNA
gtctggatagcagtaccgtcaccggcgatatccaccgtcagtcaaccgcagaaacagcgccgacagccacattac

SEQ ID NO: 866735 - DNA, 75 bp, synthetic construct
  source 1..75: mol_type = other DNA
agcaactcagcgataaagataaatccactattggcaacgtgattatcagcgtcgcctgcgcagatggaaaaatcg

SEQ ID NO: 866736 - DNA, 75 bp, synthetic construct
  source 1..75: mol_type = other DNA
accctggtcttttatctactgaccgttattgccttctggatcacccgtaatcagatggcgcaacaggtagcagca

SEQ ID NO: 866737 - DNA, 75 bp, synthetic construct
  source 1..75: mol_type = other DNA
agaacagtggtcccgaaaagaggcgacagaattgtgcggaaatttgaatttgatgctcggcggtgcgcttgaggt

SEQ ID NO: 866738 - DNA, 75 bp, synthetic construct
  source 1..75: mol_type = other DNA
gcccgaacatgggcttagccactgagctcgatagcaattcaggtttcagcaacagcatgcaatttaagctggctc

SEQ ID NO: 866739 - DNA, 75 bp, synthetic construct
  source 1..75: mol_type = other DNA
aaaacagctgaagagtgtggcggaacgtatttctcagctggaaaagcgtcctgcactgacggaggaagagcatgc

SEQ ID NO: 866740 - DNA, 75 bp, synthetic construct
  source 1..75: mol_type = other DNA
attattcgggaagcagaatcgaaaaaaccatcccgccgttcttcctctaaacagcacctaaaaagacagattcag

SEQ ID NO: 866741 - DNA, 75 bp, synthetic construct
  source 1..75: mol_type = other DNA
ttaaaatagctgagaccttattttttaatctcgataaagaaccctatgacaatagccataaattacaggaattga

SEQ ID NO: 866742 - DNA, 75 bp, synthetic construct
  source 1..75: mol_type = other DNA
tggcaagcgatcgcagcgatgcgagctgccccgttggttatgtgtttatctatttttacggtcttgaacgccgcg

SEQ ID NO: 866743 - DNA, 75 bp, synthetic construct
  source 1..75: mol_type = other DNA
aaacgaatatttctcatcgaggagttcattactgttcagattaaatctagcgactgtggtcgataaaggacaacc

SEQ ID NO: 866744 - DNA, 75 bp, synthetic construct
  source 1..75: mol_type = other DNA
aaaatttgatgttttcgtatctacccaaatggagaaatttggtatgaatatttgtcatcaggatttaaatcatgt

SEQ ID NO: 866745 - DNA, 75 bp, synthetic construct
  source 1..75: mol_type = other DNA
agcgtccgggggctgcacttcaactagttggcaaagtaaatgatatttatgcgcctgaactggaaattgaagtaa

SEQ ID NO: 866746 - DNA, 75 bp, synthetic construct
  source 1..75: mol_type = other DNA
gggcgtgctcaggttgtcgggagtcgtcttatcgtcctggctgaccagccgaaatatacaggcgaaggcacgggc

SEQ ID NO: 866747 - DNA, 75 bp, synthetic construct
  source 1..75: mol_type = other DNA
ccccggcagatgctttgcagccgttgattccggcggcacaaaccttcacacaacaactggtgatggttggggatt

SEQ ID NO: 866748 - DNA, 75 bp, synthetic construct
  source 1..75: mol_type = other DNA
gtccgcgagaaaatgcagactaacccacagatccagcagcgaagagacgcagcgcgtgagcgtattcagtcagcc

SEQ ID NO: 866749 - DNA, 75 bp, synthetic construct
  source 1..75: mol_type = other DNA
cgcttgacctgaaaacgggggaattttccccgcacacgccggagaactggatcaccacgcacaacggtattgagt

SEQ ID NO: 866750 - DNA, 75 bp, synthetic construct
  source 1..75: mol_type = other DNA
cacatcgccagccttctggcagggaaacagaacacggtgagcgcggagatgacatcgcttgatgatgctggtggg

SEQ ID NO: 866751 - DNA, 75 bp, synthetic construct
  source 1..75: mol_type = other DNA
atggaaagagtccccctaaagcagactgacagacatcacaaatccccgggtggggatttgtgtataagagacaga

SEQ ID NO: 866752 - DNA, 75 bp, synthetic construct
  source 1..75: mol_type = other DNA
gcccgctctggcaggagttgagggcatctttactgaagacaattacccgaaaagaaaacgtatttatcagctggg

SEQ ID NO: 866753 - DNA, 75 bp, synthetic construct
  source 1..75: mol_type = other DNA
ctgtagtgctgaatgtgccgtcagattatacggggcgcgtactggtgtatctggaaaaaggccgggttaaatgcc

SEQ ID NO: 866754 - DNA, 75 bp, synthetic construct
  source 1..75: mol_type = other DNA
aaagaagcactggttgatgtattaaaacgtccgggtgcagcgttgcaactggtcagtaaggttaatgatatttac

SEQ ID NO: 866755 - DNA, 75 bp, synthetic construct
  source 1..75: mol_type = other DNA
gccagcattgatagcgataagggctaccacactgcaagcgtctatatgcctagcattgatgcgccagggctaacc

SEQ ID NO: 866756 - DNA, 75 bp, synthetic construct
  source 1..75: mol_type = other DNA
caggggatttttccggtactggcagcatccggcgtttgggtagcctgtctgctgacatgggcggtaattccggta

SEQ ID NO: 866757 - DNA, 75 bp, synthetic construct
  source 1..75: mol_type = other DNA
tgtttctgatgttatggatagcgctgttaatcgccgcaatggtgtatccgcaggggatttttccagtactggcag

SEQ ID NO: 866758 - DNA, 75 bp, synthetic construct
  source 1..75: mol_type = other DNA
aatacactaaatcctccggaaaatttacgtatagcaatagaaaaatttggctggaagaaaaaaactatcactgca

SEQ ID NO: 866759 - DNA, 75 bp, synthetic construct
  source 1..75: mol_type = other DNA
tttgctcattaccaacaaaacacgacatcagaaaaaatagcacaatctattattcttaacgggcttcgttgtcag

SEQ ID NO: 866760 - DNA, 75 bp, synthetic construct
  source 1..75: mol_type = other DNA
atcgcactggacattaacgatctggaaaacgatgttgaattgaaaagcaccagtactgtcgccgtcccgcgccag

SEQ ID NO: 866761 - DNA, 75 bp, synthetic construct
  source 1..75: mol_type = other DNA
gttatgttgggggttatgccagctatgaatcaccgtggggaagcctggcaggttcagtttctgcaaatagcgata

SEQ ID NO: 866762 - DNA, 75 bp, synthetic construct
  source 1..75: mol_type = other DNA
cgggtatgaaacactgaccgtcagccaggcatcggtacttgatgcaaaaaactgcaatgtattcgtgtactacca

SEQ ID NO: 866763 - DNA, 75 bp, synthetic construct
  source 1..75: mol_type = other DNA
ggcggttatgccagttatgaatcgccgtggggaacgctgtcaggttcagcctcagcaagcagtgataatagtcgc

SEQ ID NO: 866764 - DNA, 75 bp, synthetic construct
  source 1..75: mol_type = other DNA
ttgttttgctcattatcaacaaaacacgacatcagaaaaaatagcacaatctattattctgaacggacttcgttg

SEQ ID NO: 866765 - DNA, 75 bp, synthetic construct
  source 1..75: mol_type = other DNA
cgcggcggtatatcatcgaagctatccatttatgggatgcgggagaaactcatcagttccagcctgcacggttgt

SEQ ID NO: 866766 - DNA, 75 bp, synthetic construct
  source 1..75: mol_type = other DNA
atgcacgttatcgcggcgaaagcggtggcgcttggcgaggcattacaaccagaatttaaacgttacgccgggtag

SEQ ID NO: 866767 - DNA, 75 bp, synthetic construct
  source 1..75: mol_type = other DNA
caccaccacgcataaaacgttgcgcgggccgcgcggcggcatgatcctcaccaatgacgccaggcttgcgaaaaa

SEQ ID NO: 866768 - DNA, 75 bp, synthetic construct
  source 1..75: mol_type = other DNA
ttatccatgtgcatcacctggtgccgctttcagccattaaagaggattaccagctggatccagttaatgatttgc

SEQ ID NO: 866769 - DNA, 75 bp, synthetic construct
  source 1..75: mol_type = other DNA
ggtgacagtaaaccgctatgaacgcgataaaaaggcccgagataaagcggtcgaacatcatggatgccagtgcaa

SEQ ID NO: 866770 - DNA, 75 bp, synthetic construct
  source 1..75: mol_type = other DNA
ttatgattgcacagaaaccgacgaaaaaaacacgccaaaattggcgtgtcttatttaacatttacttaacgctat

SEQ ID NO: 866771 - DNA, 75 bp, synthetic construct
  source 1..75: mol_type = other DNA
gttacagaattatgtgcagaccaacctctataacttgctttataccagcaccacgaaagtaccccagactgaagc

SEQ ID NO: 866772 - DNA, 75 bp, synthetic construct
  source 1..75: mol_type = other DNA
atggttagcaggaaacgtaatagcgttatttaccggtttacccgtttattattggtattgatgttaagtgcctgt

SEQ ID NO: 866773 - DNA, 75 bp, synthetic construct
  source 1..75: mol_type = other DNA
gttaccgacgtggtgctgatcacgcgtgacaactttaaagaagaactggagaaaaaagggttaggcggtaagtaa

SEQ ID NO: 866774 - DNA, 75 bp, synthetic construct
  source 1..75: mol_type = other DNA
aatgctggttcaacatccggaagttaaacattggctgatcgtcggtatgaacgacagcaccgtgctgggcggcgt

SEQ ID NO: 866775 - DNA, 75 bp, synthetic construct
  source 1..75: mol_type = other DNA
cctgtctcatattcttattgaatccttagatgatgcaaaggttaaccttacaccggtcatcgattcgatgctgga

SEQ ID NO: 866776 - DNA, 75 bp, synthetic construct
  source 1..75: mol_type = other DNA
aaataccgacgtcagatttttgaccatgacgcgacagaaaaactacgcacttacttttcaaatgtatgtgctgat

SEQ ID NO: 866777 - DNA, 75 bp, synthetic construct
  source 1..75: mol_type = other DNA
atgaaaaaagaaaccgatatccgacgcggaaggcattgtgttttcctgaagcatgttcacctggtcttcgttact

SEQ ID NO: 866778 - DNA, 75 bp, synthetic construct
  source 1..75: mol_type = other DNA
acaaagaaagagtgtgatgtcatcacatctatgggagaaagaataagggtgtgtatggctgttgatgaattgtat

SEQ ID NO: 866779 - DNA, 75 bp, synthetic construct
  source 1..75: mol_type = other DNA
gtcgttgggtgaaaacgaagggtgacagcgaacaggccacgcctgagacactggagcaggctgtgaatgccatgc

SEQ ID NO: 866780 - DNA, 75 bp, synthetic construct
  source 1..75: mol_type = other DNA
gccactgatgatgaacaggcacaaatcagaacgtgaagcccgtaaggctccggtgattcaggctgcaataaaact

SEQ ID NO: 866781 - DNA, 75 bp, synthetic construct
  source 1..75: mol_type = other DNA
gcggtgtacgtgcaacggaaggtcagggctttaaagcggcggacatcattggtatcggtatcaatggggtggatg

SEQ ID NO: 866782 - DNA, 75 bp, synthetic construct
  source 1..75: mol_type = other DNA
ttaagattgccgtaccggatggtgaaaaaacgctgaacgctatcgacagcctggcggccagtggcgcgaaaggat

SEQ ID NO: 866783 - DNA, 75 bp, synthetic construct
  source 1..75: mol_type = other DNA
atatcaggttcccaccaaatctaacgacatccctggggcatttgacgccgccaactccatgctggttcagcatcc

SEQ ID NO: 866784 - DNA, 75 bp, synthetic construct
  source 1..75: mol_type = other DNA
gaaaacacgcaacttcagtcgcgcaccgacgcgctggggcgtaaaacagcgtatgaatataacgatgagggcgat

SEQ ID NO: 866785 - DNA, 75 bp, synthetic construct
  source 1..75: mol_type = other DNA
ttccggttggcgctgacggcacaccggaagacgaaaacgccattcgctggatatacgagccgggagatttcacgc

SEQ ID NO: 866786 - DNA, 75 bp, synthetic construct
  source 1..75: mol_type = other DNA
accccattccgcaggacggcatttttgagggtgcagcgaactcccgccaggcacactaccggctgacgggcgaca

SEQ ID NO: 866787 - DNA, 75 bp, synthetic construct
  source 1..75: mol_type = other DNA
atgacgtcaatgattttttgaatgtaggggatgtttctggcagccatacatttacgatcaatctggaaggatgtc

SEQ ID NO: 866788 - DNA, 75 bp, synthetic construct
  source 1..75: mol_type = other DNA
gcgggtaaaatcggaatgcctcttactcctcccgcaagaacacaaagcagtaaaggccattcaggctgaaccgta

SEQ ID NO: 866789 - DNA, 75 bp, synthetic construct
  source 1..75: mol_type = other DNA
aaaaggccagtgcaggattgttataattggcttccttatttaaatgattatgggaattataaagcattacaggta

SEQ ID NO: 866790 - DNA, 75 bp, synthetic construct
  source 1..75: mol_type = other DNA
cgcgtttatgtctgtggcggcctcacttccggggataggtgatgcggcagcggctggcaggatggcagttaaagg

SEQ ID NO: 866791 - DNA, 75 bp, synthetic construct
  source 1..75: mol_type = other DNA
acgctgacctacagctacgatgcggcaggtcgctgtatccgcaccaccttcccggacggcacgcacctgaaccga

SEQ ID NO: 866792 - DNA, 75 bp, synthetic construct
  source 1..75: mol_type = other DNA
ggatgcggagcggtccctggcacaggcccgcctgtcggccaggcgactggccctgcgtcatgtggaaaagtcgca

SEQ ID NO: 866793 - DNA, 75 bp, synthetic construct
  source 1..75: mol_type = other DNA
ccgttctcaggcacaacatggcggcatctttggtcccaaatggaccgatgaatggtccgtatccctgaaggtaca

SEQ ID NO: 866794 - DNA, 75 bp, synthetic construct
  source 1..75: mol_type = other DNA
tcacggcaaacgaccagataagccacgccacctggacgggcgactccggccagtttccactgtgcgaggaactgt

SEQ ID NO: 866795 - DNA, 75 bp, synthetic construct
  source 1..75: mol_type = other DNA
ggggcagtacgaggatgtggaatcagggttgtactataaccggttccggtactatgattgcgagacaggacaata

SEQ ID NO: 866796 - DNA, 75 bp, synthetic construct
  source 1..75: mol_type = other DNA
aaagcaggctcagcggcagaaagaatttcagcaggcatacgctaatgcttatgcgtctggtgatcgcggagcttt

SEQ ID NO: 866797 - DNA, 75 bp, synthetic construct
  source 1..75: mol_type = other DNA
ttctgttaccatctccacaatttcaagatttattgttaacaaaaactggtgaaaatattatttctgattttgata

SEQ ID NO: 866798 - DNA, 75 bp, synthetic construct
  source 1..75: mol_type = other DNA
gcgcaaaaaccggctgcgctggcgcaggctgcaggcctgcctgttattcgcctggaagatgggtttattcgttct

SEQ ID NO: 866799 - DNA, 75 bp, synthetic construct
  source 1..75: mol_type = other DNA
ctggcggcatctggcgtattccttatctggacagtttcctgcccggcgagcgtgtccgactctcgccctttaaag

SEQ ID NO: 866800 - DNA, 75 bp, synthetic construct
  source 1..75: mol_type = other DNA
gcatgaccgcgcctacgcggagaagttgcgcgagcagcagccagagccgcagaaaaaaccgacccgctactatgg

SEQ ID NO: 866801 - DNA, 75 bp, synthetic construct
  source 1..75: mol_type = other DNA
ttgctgtcgatgaccagttcgtcaacgccaaaggcaagccaatggatactgttccgctggtgatgatggcggcga

SEQ ID NO: 866802 - DNA, 75 bp, synthetic construct
  source 1..75: mol_type = other DNA
ctgaagctcggtttcctggtgaagcaaccggaagagccgtggttccagaccgaatggaagtttgccgataaagcc

SEQ ID NO: 866803 - DNA, 75 bp, synthetic construct
  source 1..75: mol_type = other DNA
cgctggtcccgccacctcgcgcgcatctcacccgcttccacggcgtattcgccccgaatgcaaacctgcgtgcgc

SEQ ID NO: 866804 - DNA, 75 bp, synthetic construct
  source 1..75: mol_type = other DNA
tcgcagagcgaggagtcatttcgtcgcaacgctggcgtcatcctgaacacgctcaaccagaagcgtaatgaggcg

SEQ ID NO: 866805 - DNA, 75 bp, synthetic construct
  source 1..75: mol_type = other DNA
atctttgcagtaacactacagatcaattgttattaaatcagtatgttgcggatgatcccttatatgaggataaac

SEQ ID NO: 866806 - DNA, 75 bp, synthetic construct
  source 1..75: mol_type = other DNA
atgcatggaaagaaaggaaatgacctgaacgcaggaaaaaacctcctgttcaccggcaataatggcgaggtcgtt

SEQ ID NO: 866807 - DNA, 75 bp, synthetic construct
  source 1..75: mol_type = other DNA
aattgaaaatctcaagcagaagttagtggaatgcaatcgctataactactgcgcagatgcagttaaaagtgttga

SEQ ID NO: 866808 - DNA, 75 bp, synthetic construct
  source 1..75: mol_type = other DNA
tcaatataaaggatgcaaaaagtttttgtcgatttaatttgaataacaatcattattatatatcaagagagaaac

SEQ ID NO: 866809 - DNA, 75 bp, synthetic construct
  source 1..75: mol_type = other DNA
gatccgcaggggcgcgctgtcagcacactgtcaacggaaggctacttcgatgaccgctttatctataacgatgat

SEQ ID NO: 866810 - DNA, 75 bp, synthetic construct
  source 1..75: mol_type = other DNA
gctgggcgacaaagttattccggctaccattctgggtattcagtccgatcgcgtgattcgcggccaccgctttat

SEQ ID NO: 866811 - DNA, 75 bp, synthetic construct
  source 1..75: mol_type = other DNA
ataccctggcggtatattcggtatcggtcagcatccgaaaggcgacaaagacccgtttgcgttgcgtcgtgccgc

SEQ ID NO: 866812 - DNA, 75 bp, synthetic construct
  source 1..75: mol_type = other DNA
gcgattgcccaggcgttcgacgctgaaggcaaaccgagcaaagcggcagaaggttgggcgcgtggttgcggtatt

SEQ ID NO: 866813 - DNA, 75 bp, synthetic construct
  source 1..75: mol_type = other DNA
gtggcttcgctggtggaatggccggttgtattgacggcgaaattcgaagagaaattcctcgcagtgccgtctgaa

SEQ ID NO: 866814 - DNA, 75 bp, synthetic construct
  source 1..75: mol_type = other DNA
cgaaagatccgcagcaaattatctctggtaacgagaaagtcgttcgtccacgtctggcggatgccgagttcttct

SEQ ID NO: 866815 - DNA, 75 bp, synthetic construct
  source 1..75: mol_type = other DNA
gcgcgtcgtccgactcgtccggctgatttcgatgcccgtatgaaagcggtatcgcacttccgtaccctggaagca

SEQ ID NO: 866816 - DNA, 75 bp, synthetic construct
  source 1..75: mol_type = other DNA
atgaaagtcggtaaggatattgtgacggtcgcgttttgcattatttgcttcctgtttgtggttgttttttgtggc

SEQ ID NO: 866817 - DNA, 75 bp, synthetic construct
  source 1..75: mol_type = other DNA
acagcaattctttacaacgggcgttattacatggcgtcagcgaacgttaataatgcactttacgcacattcactg

SEQ ID NO: 866818 - DNA, 75 bp, synthetic construct
  source 1..75: mol_type = other DNA
cacattatcaatggtgacacccaccgggataaagtgatagttgagagtccctggcttccccgcgagtcaatctag

SEQ ID NO: 866819 - DNA, 75 bp, synthetic construct
  source 1..75: mol_type = other DNA
aggactttaccgatggcacgaccaccaacaccgggcgaggtctggacgttgctatcagccagaacggtttttccg

SEQ ID NO: 866820 - DNA, 75 bp, synthetic construct
  source 1..75: mol_type = other DNA
attgcatattattgaaggtcgtgaagggggaagggtaacgcagatcccttgcccgctgttgatccgttgttccac

SEQ ID NO: 866821 - DNA, 75 bp, synthetic construct
  source 1..75: mol_type = other DNA
ataatgcagaatctgtgcgtcctgcaacgcgtgaccgcgtattgcaggcaatccagaccctgaattatgttcctg

SEQ ID NO: 866822 - DNA, 75 bp, synthetic construct
  source 1..75: mol_type = other DNA
gagccgtacttcgcggaaggtcgttaccaggatgcactggtcgagctggctgaactgcgtgagccggttgatgct

SEQ ID NO: 866823 - DNA, 75 bp, synthetic construct
  source 1..75: mol_type = other DNA
gcgtgattcgcggccaccgctttatgggcgagccggaattcaccatcgataatgccgatcagtatccggaaattc

SEQ ID NO: 866824 - DNA, 75 bp, synthetic construct
  source 1..75: mol_type = other DNA
tcgatgacaaagaactacgtatcaaccgtctgaccatgctggaaaaactgcgcgaattattcctgcgtgtagcgg

SEQ ID NO: 866825 - DNA, 75 bp, synthetic construct
  source 1..75: mol_type = other DNA
accattctgggtattcagtccgatcgcgtaattcgtggacatcgctttatgggtgagccggaaattaccatcgac

SEQ ID NO: 866826 - DNA, 75 bp, synthetic construct
  source 1..75: mol_type = other DNA
accttccagttctcacatctgtggcatgaatattcgccggaaggatttatgacccgcgggcgggatacggacaaa

SEQ ID NO: 866827 - DNA, 75 bp, synthetic construct
  source 1..75: mol_type = other DNA
actggttagtgagacctgccctaatgcattgcaaagaagatacattgctgatttacgtaatggtaaagatgttat

SEQ ID NO: 866828 - DNA, 75 bp, synthetic construct
  source 1..75: mol_type = other DNA
ggtgtggcgaaagggattaaaagcggtacggtgggcgatatctgcgaaccacaggaattcagtaaatcggttttc

SEQ ID NO: 866829 - DNA, 75 bp, synthetic construct
  source 1..75: mol_type = other DNA
accgtgttgttccagcaacagttggggacgctgcgcgacaaaactgaccgcatccaggcgctggctggctggatt

SEQ ID NO: 866830 - DNA, 75 bp, synthetic construct
  source 1..75: mol_type = other DNA
ctaaccttgcggaagcacagcctgatcgtgaaatcgaaaaacgtggcccggcaattgcccaggcatttgacgccg

SEQ ID NO: 866831 - DNA, 75 bp, synthetic construct
  source 1..75: mol_type = other DNA
aaaagcactgcgcagcctggttgagtcctttgctgcgaattttactgtggagctggataacgctggcctcgcaca

SEQ ID NO: 866832 - DNA, 75 bp, synthetic construct
  source 1..75: mol_type = other DNA
cggaagaaattaaactggcgatgcaggtggttgtgctgcgcgataaactggagccgtactttgctgaaggtcgtt

SEQ ID NO: 866833 - DNA, 75 bp, synthetic construct
  source 1..75: mol_type = other DNA
catccaggcactggctggctggattgctgaacagattggcgctgacgttaaccatgctacccgtgcgggcctgct

SEQ ID NO: 866834 - DNA, 75 bp, synthetic construct
  source 1..75: mol_type = other DNA
tgcgtgagcgcggtaaagtcatcgccgattacgaagaacgtaaagcgaagattaaagccgatgccgaagaagcag

SEQ ID NO: 866835 - DNA, 75 bp, synthetic construct
  source 1..75: mol_type = other DNA
aagcggtgctggcactggtgaaggacggtgcgactgatggtgtccagatcgacccgacgctgttttcacagtatg

SEQ ID NO: 866836 - DNA, 75 bp, synthetic construct
  source 1..75: mol_type = other DNA
gcggagacacgatgcctcttcccggcaacctgaccatccgcaacgcagagttcagggcggcatccggtggcctgg

SEQ ID NO: 866837 - DNA, 75 bp, synthetic construct
  source 1..75: mol_type = other DNA
cagcgtggtgaaggtaacccgcacaccgacagatccggtgctgtaccggagtggagacacgacgcctcttcccga

SEQ ID NO: 866838 - DNA, 75 bp, synthetic construct
  source 1..75: mol_type = other DNA
atggctaaaatctatcaattccctcagggggaagaacgtgctaaattcaggaaagaaattgccagagaacgtaaa

SEQ ID NO: 866839 - DNA, 75 bp, synthetic construct
  source 1..75: mol_type = other DNA
agcgagaaaacgcagtatctgggcgtggtgaacggtcaggtggtgggtaacagtgtggtgaaggtgacccgcaca

SEQ ID NO: 866840 - DNA, 75 bp, synthetic construct
  source 1..75: mol_type = other DNA
ggcaggcgctggagaaagtggccgccacgggtgactgccggcaggtggctcatgatttactggcagggaaaggag

SEQ ID NO: 866841 - DNA, 75 bp, synthetic construct
  source 1..75: mol_type = other DNA
cgcttatctgtggacgcaaatgttggccgatgatggttaccagtggtttgttgagcagggcggattaacgcgtga

SEQ ID NO: 866842 - DNA, 75 bp, synthetic construct
  source 1..75: mol_type = other DNA
aagatctggaacgcctgtatcgacaatggcgcggtaaggctcctcagattatgccgatgctgcaacatcgtggct

SEQ ID NO: 866843 - DNA, 75 bp, synthetic construct
  source 1..75: mol_type = other DNA
atgaaggtcatattcacttctaatcgtattgttgattttattatccggcttttgattacagcgattgtcatttcc

SEQ ID NO: 866844 - DNA, 75 bp, synthetic construct
  source 1..75: mol_type = other DNA
caacctgaccatccgcaacgcagagttcagggcggcatccggtggcctggcgtatatcacggtgaaacaggtgct

SEQ ID NO: 866845 - DNA, 75 bp, synthetic construct
  source 1..75: mol_type = other DNA
gtgatgatgcattgccggtacagttacgggttcgtgatgcagaagtccgtccggcatccggtggtatggcttata

SEQ ID NO: 866846 - DNA, 75 bp, synthetic construct
  source 1..75: mol_type = other DNA
aaaacgtccctagtggtggatgggcaaaaggctgtactgaatgccagtcagcagggcgaggatgttctgataacg

SEQ ID NO: 866847 - DNA, 75 bp, synthetic construct
  source 1..75: mol_type = other DNA
cggcaggttataaaccggtggcctctggcagcgaaaagaccccgaaaggcttacgtaatagtgacgcgctggcgt

SEQ ID NO: 866848 - DNA, 75 bp, synthetic construct
  source 1..75: mol_type = other DNA
cagctgcaggcatgggctgaacagcaggtcagggcgaatccccttcagcattccgataaccagtttctcgatgaa

SEQ ID NO: 866849 - DNA, 75 bp, synthetic construct
  source 1..75: mol_type = other DNA
ctgtgctgttgttgatgctgaacggggcggttatggcgtcagataaagtgaatacgcccgaaaaccgccagtttc

SEQ ID NO: 866850 - DNA, 75 bp, synthetic construct
  source 1..75: mol_type = other DNA
ggttacgccagtaccagcgcagccgtttttccatttcaggaatgcatatcactgttcatgcctcagacaatgtga

SEQ ID NO: 866851 - DNA, 75 bp, synthetic construct
  source 1..75: mol_type = other DNA
atcagcgccggggtacaggatatgcagcaggtgctggcacaactccgcgcggaaaatcagcaacgcaatcaggac

SEQ ID NO: 866852 - DNA, 75 bp, synthetic construct
  source 1..75: mol_type = other DNA
ggcaggcgctggagaaagtggccaccgcaggagactgccggcaggtggctcagggactgctggacggcaccgggg

SEQ ID NO: 866853 - DNA, 75 bp, synthetic construct
  source 1..75: mol_type = other DNA
tgggagaaacccggcactacggcattccggccacactgcggggcatggtgaacaatgacctgaagactaccgctg

SEQ ID NO: 866854 - DNA, 75 bp, synthetic construct
  source 1..75: mol_type = other DNA
cctgccggtatgacacggaagggtatgtgacggagcatatttctcaggaggaggaagtgtatgcggcagcgcgtc

SEQ ID NO: 866855 - DNA, 75 bp, synthetic construct
  source 1..75: mol_type = other DNA
ttctgcccatgcttctgaaaatatgaatacgcccgaaaaccgccagttcctgaaacagcaggaaacactgagtca

SEQ ID NO: 866856 - DNA, 75 bp, synthetic construct
  source 1..75: mol_type = other DNA
tccgaaaactgagaatattaaagggcttggtgatcttaagcctgggataccaaaaacaccaaagcagaatggtgg

SEQ ID NO: 866857 - DNA, 75 bp, synthetic construct
  source 1..75: mol_type = other DNA
cgtgtactttgtgtccttctccattccggaagaggggctgaaacggatgctgggtgaaacccggcactacggtat

SEQ ID NO: 866858 - DNA, 75 bp, synthetic construct
  source 1..75: mol_type = other DNA
gacaggcactggagaaagtggccagcgcgggggactgccggcaggtggctcagggactgctggacggcaccgggg

SEQ ID NO: 866859 - DNA, 75 bp, synthetic construct
  source 1..75: mol_type = other DNA
tccggccacactgcggggtatggtgaacaatgacctgaagactaccgctgaagccgtgttgtccctggtaaaaga

SEQ ID NO: 866860 - DNA, 75 bp, synthetic construct
  source 1..75: mol_type = other DNA
ggaaaacgcaggaacgcctgaaaaaattaatctggctggcggcgcaggcagtaaaagcagaactttttggtgggg

SEQ ID NO: 866861 - DNA, 75 bp, synthetic construct
  source 1..75: mol_type = other DNA
aatgatggttttggtacttttccagaaaacgtcacagccgtgattagtagtcttcctgctggacatcgaattgtg

SEQ ID NO: 866862 - DNA, 75 bp, synthetic construct
  source 1..75: mol_type = other DNA
ctggtcaccacagactgaacatccagctatcgctattcagcgtaaagagcacgatgcgagaattgcacttgagca

SEQ ID NO: 866863 - DNA, 75 bp, synthetic construct
  source 1..75: mol_type = other DNA
atgacaaacgatttatatattaacggtaaaaaggttgatagcttcggtgactggtcgccacagactgaacatcca

SEQ ID NO: 866864 - DNA, 75 bp, synthetic construct
  source 1..75: mol_type = other DNA
atgacaagcgtatcgagcttgagcaagagttaaagaggtcgccaaaagaaatcatctttgtggctcctgaacctc

SEQ ID NO: 866865 - DNA, 75 bp, synthetic construct
  source 1..75: mol_type = other DNA
gatagcatgaaagcgattattagtgactatgaaacgcagaagaagattgctatgcaggctgatattgagcagtta

SEQ ID NO: 866866 - DNA, 75 bp, synthetic construct
  source 1..75: mol_type = other DNA
atggaaaatctatatattaacggtaaaaagattgatagcttcggtgactggtcaccacagactgaacatccagct

SEQ ID NO: 866867 - DNA, 75 bp, synthetic construct
  source 1..75: mol_type = other DNA
catggcaaaccctcaccaatgaccggcttgggttacgcgacccgaatgaccctgctaatcgccgagcattaaccc

SEQ ID NO: 866868 - DNA, 75 bp, synthetic construct
  source 1..75: mol_type = other DNA
attacccgaaaaaaagcggggcgagtcatacgctattaccgcaaattaattatgttctgcaaagtcagatttggc

SEQ ID NO: 866869 - DNA, 75 bp, synthetic construct
  source 1..75: mol_type = other DNA
taatctggtttcagggcacgatcatcacctcgcgcctgagcgagatggacagctacagccagcagctggcgaacc

SEQ ID NO: 866870 - DNA, 75 bp, synthetic construct
  source 1..75: mol_type = other DNA
atggcaaacgatatttacattaatggcagaaagattgacagcttcggtgactggtcaccacaaactgaacatcca

SEQ ID NO: 866871 - DNA, 75 bp, synthetic construct
  source 1..75: mol_type = other DNA
ttcaggatgaattgtcacagaaaccatttgtctattaccaatacgaagacaatgatggttttggtatttatccag

SEQ ID NO: 866872 - DNA, 75 bp, synthetic construct
  source 1..75: mol_type = other DNA
tgagtcgacccgactgaatactgaagttgtttcactcagaaaagacgccggacactgggtgatccgctgcgcttc

SEQ ID NO: 866873 - DNA, 75 bp, synthetic construct
  source 1..75: mol_type = other DNA
tgagtaaggcggtaaaaagatatcaggatgtgctgtcgtggagtcgttcagacagacacagtccgggcgctgagc

SEQ ID NO: 866874 - DNA, 75 bp, synthetic construct
  source 1..75: mol_type = other DNA
tcagagattgctaactttcgcggtcatgctgctggttacagggctgctcttgaggcagcaccacaggaggttaac

SEQ ID NO: 866875 - DNA, 75 bp, synthetic construct
  source 1..75: mol_type = other DNA
aacgcctgtatcgacaatggcgcggtaaggcacctaagattatgccgatgctgcaacatcgtggcttgaacatat

SEQ ID NO: 866876 - DNA, 75 bp, synthetic construct
  source 1..75: mol_type = other DNA
agaggcggaagagcagtccacctccagcagtagcgaactgcagcagcgtcactatctgcgccgcgagttctggac

SEQ ID NO: 866877 - DNA, 75 bp, synthetic construct
  source 1..75: mol_type = other DNA
gttctgtctctcgaagaacatcagaaagcgtggttgctgtggagttacagcgaaagtgttcgctgggaacatcag

SEQ ID NO: 866878 - DNA, 75 bp, synthetic construct
  source 1..75: mol_type = other DNA
cagaaagcatggttgctgtggagttacagtgaaaatattcgctgggagcatcaggttgccataacgcagtggaca

SEQ ID NO: 866879 - DNA, 75 bp, synthetic construct
  source 1..75: mol_type = other DNA
atgaacgcgaagaactttaatcagctatatccggtagggactcgcttcatgcatattgcacatcgggcagtgcgt

SEQ ID NO: 866880 - DNA, 75 bp, synthetic construct
  source 1..75: mol_type = other DNA
agagctgggtacgtcagctcagacgagagcgccaggggattgccccctctgccacaccgattactccagaccagc

SEQ ID NO: 866881 - DNA, 75 bp, synthetic construct
  source 1..75: mol_type = other DNA
ggccagcatgatcgtgatgagccattccgcccccgatagccgcgccgcaatcactcatacggcccgcatggccga

SEQ ID NO: 866882 - DNA, 75 bp, synthetic construct
  source 1..75: mol_type = other DNA
aactttggcccgctcaaggtattttaccccggccccggccacaccagtgacaatatcaccgttgggatcgacggc

SEQ ID NO: 866883 - DNA, 75 bp, synthetic construct
  source 1..75: mol_type = other DNA
ggatcgctacattgccttccactacgagcagcagttgaaagaggaaggtttcagcgtgacggtgaagcagcatca

SEQ ID NO: 866884 - DNA, 75 bp, synthetic construct
  source 1..75: mol_type = other DNA
tttggcagggaaatgtgtggtgtgtagatcggataaggcggtcgcgctgcatccgacaatgggccggtacatttg

SEQ ID NO: 866885 - DNA, 75 bp, synthetic construct
  source 1..75: mol_type = other DNA
atggtttctgtcacaaatccgttaatggatagtgagatatggggcgcaaatttggcagggaaatgtgtggtgtgt

SEQ ID NO: 866886 - DNA, 75 bp, synthetic construct
  source 1..75: mol_type = other DNA
tcatttgcacgcccttatattttcactgaaggcagcaacagcgtgcaggtcatcagcccggatgggcaaagccga

SEQ ID NO: 866887 - DNA, 75 bp, synthetic construct
  source 1..75: mol_type = other DNA
aatgtgtgaagattgcaacagcggcagcaggtaatttctacattaccacggttggaaccaaggttgttaaagccg

SEQ ID NO: 866888 - DNA, 75 bp, synthetic construct
  source 1..75: mol_type = other DNA
acactcgatgtggcagctacggcagcggcctgtaataacgccacaagtaatacattagttttcacgtctatttaa

SEQ ID NO: 866889 - DNA, 75 bp, synthetic construct
  source 1..75: mol_type = other DNA
atacctcctgggtaagtgagcagatactttcagcgcctccgaaagatgtaaatattcgacttggagtcggttctt

SEQ ID NO: 866890 - DNA, 75 bp, synthetic construct
  source 1..75: mol_type = other DNA
acaaaaaaagtaaaaaaggtttctctcttttagagctattacttgttttaggtattatcgcagccttagttgtag

SEQ ID NO: 866891 - DNA, 75 bp, synthetic construct
  source 1..75: mol_type = other DNA
agttaactaaaggagatataacagaaatgaaaaagatagttctattaaaaaacagaaagagtaaaaaaggttttt

SEQ ID NO: 866892 - DNA, 75 bp, synthetic construct
  source 1..75: mol_type = other DNA
ctggtttgttcggtaacgctgaaaatatgttcactaagcttacggggcaagataactacctccgagatatgcgga

SEQ ID NO: 866893 - DNA, 75 bp, synthetic construct
  source 1..75: mol_type = other DNA
ttgctcagatgtatcagcagaatccttcaggatttggtgagtttgttgatcaccttgggatggctgctctcggtc

SEQ ID NO: 866894 - DNA, 75 bp, synthetic construct
  source 1..75: mol_type = other DNA
tcaggatttagcgatgcagagagcatcaatgaaaggggcggttgggaataatgagcgcacagttcaactagcaga

SEQ ID NO: 866895 - DNA, 75 bp, synthetic construct
  source 1..75: mol_type = other DNA
cttgttcacggtgatacagcaactacatttgcagttagcttggctgcatattatgaacaaatagtcattgggcat

SEQ ID NO: 866896 - DNA, 75 bp, synthetic construct
  source 1..75: mol_type = other DNA
agattcgacaccttcaggagaaccacggaatcaggttggatcatatacctcaaaatcaggcattcaatttacggt

SEQ ID NO: 866897 - DNA, 75 bp, synthetic construct
  source 1..75: mol_type = other DNA
gtattgcgggggtgtttcagcaggaaaagcaggctcagcggcagaaagaatttcagcaggcatacgctaatgctt

SEQ ID NO: 866898 - DNA, 75 bp, synthetic construct
  source 1..75: mol_type = other DNA
tgctgtcggcaatgggatggtggagttatgccatcatccttgtcgtctgcgtgctcgggatgctgtttggtctgt

SEQ ID NO: 866899 - DNA, 75 bp, synthetic construct
  source 1..75: mol_type = other DNA
cgctgcatgcgtttgaaattacgatcccgcctttgcgtatgcgacgcggcagtattccggcgttggtaggtagca

SEQ ID NO: 866900 - DNA, 75 bp, synthetic construct
  source 1..75: mol_type = other DNA
ggcgattgaggattctctcaagagcttacagagagccagtaatacccttgcaaaatgctttgaagtttcgtccaa

SEQ ID NO: 866901 - DNA, 75 bp, synthetic construct
  source 1..75: mol_type = other DNA
gccgttaccagtggtgcagctgttgccacacaattgctgtttagcccgattacgttaatcatcctggcactggct

SEQ ID NO: 866902 - DNA, 75 bp, synthetic construct
  source 1..75: mol_type = other DNA
gacttgagttggacttccaaaattatcgtgttgctggagagcattctgctagggctataggcaaatactctgctt

SEQ ID NO: 866903 - DNA, 75 bp, synthetic construct
  source 1..75: mol_type = other DNA
gaacaagattactatgaggccgccggtaagcgttttgaccccgattatgacgacgaaggggctatctgtgaacag

SEQ ID NO: 866904 - DNA, 75 bp, synthetic construct
  source 1..75: mol_type = other DNA
aatagactccttaaaaaaactagatcaggagatcacatctttatcgcaagaatctactctagatattgttcatac

SEQ ID NO: 866905 - DNA, 75 bp, synthetic construct
  source 1..75: mol_type = other DNA
atgaaaaaaaacgacgatttaatcactttaccatctcataacagccacgctctcgattacatcattaaaaaagcg

SEQ ID NO: 866906 - DNA, 75 bp, synthetic construct
  source 1..75: mol_type = other DNA
tcttcggccgctccggcagcgaagcgtccaacctgacccagctggccaccgccacgcagcgtgtcgcccgtacac

SEQ ID NO: 866907 - DNA, 75 bp, synthetic construct
  source 1..75: mol_type = other DNA
ttatgcgatcatcatcgtcgtgtgcgtactcggaatgctgtttggtctgtacatcttcggccgctccggcagtga

SEQ ID NO: 866908 - DNA, 75 bp, synthetic construct
  source 1..75: mol_type = other DNA
atctttctgtatcgtgccctgaaagtggttatgctggcgttctgtgctactgcccgcatggtcagggcattatat

SEQ ID NO: 866909 - DNA, 75 bp, synthetic construct
  source 1..75: mol_type = other DNA
ggcaaacacattccgaaagccgtgctgaccatgcgcaaagcaggcggcaacccactggaatacctcaaatacagt

SEQ ID NO: 866910 - DNA, 75 bp, synthetic construct
  source 1..75: mol_type = other DNA
tccatcaggagtccaccatgcacgcaggcagcggtctgggatccggtaaagtctccgtgactaacctggagtttg

SEQ ID NO: 866911 - DNA, 75 bp, synthetic construct
  source 1..75: mol_type = other DNA
cgaaaccattgtgccgtggcagacgtggctacaaccgctggaattaccggcggggctgggaagtgtacagcttac

SEQ ID NO: 866912 - DNA, 75 bp, synthetic construct
  source 1..75: mol_type = other DNA
atgaagcggcgctcaaactggcacgtaaattcgcccacgaccgcttcggcagccataagagcgggatcgtggcgt

SEQ ID NO: 866913 - DNA, 75 bp, synthetic construct
  source 1..75: mol_type = other DNA
cgccgcgtataacgatattaattctgccagtgcgctgattgacgactccacctgcgcggtgatcgtcgagccagt

SEQ ID NO: 866914 - DNA, 75 bp, synthetic construct
  source 1..75: mol_type = other DNA
caaatacgctcacgaccgctacggtagccataagagcggcatcgtggcgtttaaaaatgctttccacgggcgcac

SEQ ID NO: 866915 - DNA, 75 bp, synthetic construct
  source 1..75: mol_type = other DNA
gtgaatataaagaaagataagtttataaatggagtgctttttttttggttaattatttcttcgttatattattta

SEQ ID NO: 866916 - DNA, 75 bp, synthetic construct
  source 1..75: mol_type = other DNA
cctgcgctcaatgtcagcgaagaagaggtgacgaccggactggatcgctttgcagctgcttgcgaacactttgtt

SEQ ID NO: 866917 - DNA, 75 bp, synthetic construct
  source 1..75: mol_type = other DNA
tgctgcatataacgatattaactctgccagtgcgctgattgacgactctacctgtgcggtgattgtcgaacccat

SEQ ID NO: 866918 - DNA, 75 bp, synthetic construct
  source 1..75: mol_type = other DNA
cgggatcacctctcgcatgttgtcggtgatcccggtgttgttcttttggggatgagtcgccagatagcccctcaa

SEQ ID NO: 866919 - DNA, 75 bp, synthetic construct
  source 1..75: mol_type = other DNA
tccggttctcttccgcttcctcgtcgattcgctcgctacgctcggtcatcgacttgcggcgagcggaattacctc

SEQ ID NO: 866920 - DNA, 75 bp, synthetic construct
  source 1..75: mol_type = other DNA
gcttatcgctatgtaatgaaaccgacgttacctattcgtcgcgatagcccgaaaaaggcaatcaccttgattctg

SEQ ID NO: 866921 - DNA, 75 bp, synthetic construct
  source 1..75: mol_type = other DNA
tgcgttttgcgcctgcgctcaatgtcagcgaagaagaggtgacgaccggactggatcgctttgcagctgcttgcg

SEQ ID NO: 866922 - DNA, 75 bp, synthetic construct
  source 1..75: mol_type = other DNA
atgtctcagccaattacgcgtgaaaactttgatgaatggatgatacctgtttacgctccggcaccgtttataccg

SEQ ID NO: 866923 - DNA, 75 bp, synthetic construct
  source 1..75: mol_type = other DNA
gcgaaacagatctctcaggaagcggcgaaagcaggcgtgatggtactgattgcgggtggcaacgtggtgcgtttt

SEQ ID NO: 866924 - DNA, 75 bp, synthetic construct
  source 1..75: mol_type = other DNA
tcggcatgtatggccccctttccaccatcagccgcgcgcagatggaacagcagttttccgccaactttttcggcg

SEQ ID NO: 866925 - DNA, 75 bp, synthetic construct
  source 1..75: mol_type = other DNA
cagaactgtaacggttggcgggaaacttcacggcgctggggcaaatgcgttctacgaaggcatcgacaacgaggg

SEQ ID NO: 866926 - DNA, 75 bp, synthetic construct
  source 1..75: mol_type = other DNA
attgatcgcggaaaacttgcagagacaatccgcagcaatcaggctggagaggcgctaacagcacgaggtcagaac

SEQ ID NO: 866927 - DNA, 75 bp, synthetic construct
  source 1..75: mol_type = other DNA
gaaattgaccgaggcaggctggcagagacaatccgcagcaatcaggctggcgaggcacttcaggcgagagggcaa

SEQ ID NO: 866928 - DNA, 75 bp, synthetic construct
  source 1..75: mol_type = other DNA
gctacgatcgtaactttctgcgcctgcgcgtagtgccgttattgcagcagcgttggccgcattttgccgaagcaa

SEQ ID NO: 866929 - DNA, 75 bp, synthetic construct
  source 1..75: mol_type = other DNA
catggctcgatggttaagggggatggcaaaaatggaaagtaataacgcgaagttcaacgagtttaggtcagagtg

SEQ ID NO: 866930 - DNA, 75 bp, synthetic construct
  source 1..75: mol_type = other DNA
cggattagattcaaccaactagccaatgcgcaggcaaccaagcttctccctcccggccctgcatcagataaggat

SEQ ID NO: 866931 - DNA, 75 bp, synthetic construct
  source 1..75: mol_type = other DNA
atctccacgccgggtcgtggcgcttacgcggccagtaaatatgcgctggaggcgtggtcagacgcgctgcgcatg

SEQ ID NO: 866932 - DNA, 75 bp, synthetic construct
  source 1..75: mol_type = other DNA
cacaccagctcaccatgcgcctgttacccgcgatgttaccgcacggtgaagggcgtattgtgatgacctcatcgg

SEQ ID NO: 866933 - DNA, 75 bp, synthetic construct
  source 1..75: mol_type = other DNA
ccgacaacgtcaaccagacgcaaagtgataaaccagtcgaaaatcctggcatcgccgcccgctttacgttgggac

SEQ ID NO: 866934 - DNA, 75 bp, synthetic construct
  source 1..75: mol_type = other DNA
ctccagaagcaatgcaatcatggctgcaaaacaacgccaaggaactggcgcgcgtcggcgttgaccctaacaacg

SEQ ID NO: 866935 - DNA, 75 bp, synthetic construct
  source 1..75: mol_type = other DNA
catcatctccaaaagcaatgcaatcctggctgcaaaaaaacgccaaggagctggcgcgcgtcggtgttgatccta

SEQ ID NO: 866936 - DNA, 75 bp, synthetic construct
  source 1..75: mol_type = other DNA
gttaaaaaacagtttgattatcaggagccagtacagaatacgccagggcaacaatctactactggcagtaacttt

SEQ ID NO: 866937 - DNA, 75 bp, synthetic construct
  source 1..75: mol_type = other DNA
cacaaagaagctacacggtaacgagagaacctaacgtttctgtgattaaacttggcgacaactatgaacaaaggc

SEQ ID NO: 866938 - DNA, 75 bp, synthetic construct
  source 1..75: mol_type = other DNA
tgtttgccgtagctggagtatgacaaaggacgggcctgtatacacgctaaacgcaacatttgagcaagttgtcag

SEQ ID NO: 866939 - DNA, 75 bp, synthetic construct
  source 1..75: mol_type = other DNA
gtcgaggctttttactggtcgccgtcgatggataacgtgcaaaggctttttgtttgccgtagctggagcatgact

SEQ ID NO: 866940 - DNA, 75 bp, synthetic construct
  source 1..75: mol_type = other DNA
ctcgcagccggatgtgaatatcaacctcgtcactctgaacgcgaaaggcagcgaaaagcagcacgagttacaact

SEQ ID NO: 866941 - DNA, 75 bp, synthetic construct
  source 1..75: mol_type = other DNA
ggtgccaggactggatattggcaaggtcaccggcggctggcgcgatctcaccttgtctgacgttcgttatgagca

SEQ ID NO: 866942 - DNA, 75 bp, synthetic construct
  source 1..75: mol_type = other DNA
ggcagtagtgcgggatgcggtgatgatgggaatgtagcgatccaggctgaagcatttttgagggcgcgcggcgct

SEQ ID NO: 866943 - DNA, 75 bp, synthetic construct
  source 1..75: mol_type = other DNA
tgcagatggtgccagagcgcgaacagcaccgtccggcaacgccgtatgaacgtatcccggtaactctggtggagg

SEQ ID NO: 866944 - DNA, 75 bp, synthetic construct
  source 1..75: mol_type = other DNA
gttctccgggcggtgaaatcaccccggaagggctgatggcagtgggtcgtatcgcgcgtgaatttaatctctaca

SEQ ID NO: 866945 - DNA, 75 bp, synthetic construct
  source 1..75: mol_type = other DNA
gctggaacaaccgtgtgtttggtctggtagcaccgggctacaaaatggctcaggtggctgttgaccacattcttg

SEQ ID NO: 866946 - DNA, 75 bp, synthetic construct
  source 1..75: mol_type = other DNA
agcattcttgagggcgcgcggcgcggtcgaggctttttactggtcgccgtcgatggataacgtgcaaaggctttt

SEQ ID NO: 866947 - DNA, 75 bp, synthetic construct
  source 1..75: mol_type = other DNA
cgcaaagaagctacagcgtgaccagggagccaaacgtatctgtcattaaacttggtgatgggtatgaacagcgcc

SEQ ID NO: 866948 - DNA, 75 bp, synthetic construct
  source 1..75: mol_type = other DNA
tgcttttagctggagaacaccctgattatatactttgtaaaaggaataaaaagaattctgattcaggaagtaatt

SEQ ID NO: 866949 - DNA, 75 bp, synthetic construct
  source 1..75: mol_type = other DNA
atgagtttatggaaaaaaatcagcctcggcgcggttgtcgtcctcttactgttgctgggatcggtggcatttctg

SEQ ID NO: 866950 - DNA, 75 bp, synthetic construct
  source 1..75: mol_type = other DNA
atgagtttatggaaaaaaatcagcctcggcgtagttatcgttattttactgttgctgggttcggtggcgtttctg

SEQ ID NO: 866951 - DNA, 75 bp, synthetic construct
  source 1..75: mol_type = other DNA
cgaaaattgaaaatccgcagccggaggaaaagccgctcggcgaaacgctgaaagatctcttttctcgcccggtat

SEQ ID NO: 866952 - DNA, 75 bp, synthetic construct
  source 1..75: mol_type = other DNA
acgtaccggaactgaagctgactggcaacgttaaacaaaacaaagtgaacgttgacggaacgctgaaaggcaaca

SEQ ID NO: 866953 - DNA, 75 bp, synthetic construct
  source 1..75: mol_type = other DNA
aatctgcatctggcagtcgggctggagtgcctgtgggacagcagtgtttgcattaacgatttggcgctgaaggat

SEQ ID NO: 866954 - DNA, 75 bp, synthetic construct
  source 1..75: mol_type = other DNA
gtgggcaccaccagcggcttgcatctggtatttaaagcggcggatcgctgggtgccggggctggatattggcaag

SEQ ID NO: 866955 - DNA, 75 bp, synthetic construct
  source 1..75: mol_type = other DNA
gtgggcactaccagtggtttgcatctggtatttaaagcggcagatcgctgggtgccagggctggacatcggtaag

SEQ ID NO: 866956 - DNA, 75 bp, synthetic construct
  source 1..75: mol_type = other DNA
gatcaacatccctgaagggcgcttccatgcctatggtcaggatctgattgtgcgtaagggtgagttactgttctc

SEQ ID NO: 866957 - DNA, 75 bp, synthetic construct
  source 1..75: mol_type = other DNA
gacgcggctggcggaggctggactgccgcttaacgtcgaagtgaacagcaaacagctttactggccgtttaccgg

SEQ ID NO: 866958 - DNA, 75 bp, synthetic construct
  source 1..75: mol_type = other DNA
atgaacagcaggtcaatctcgacaaactcaccgtcgcggcgctggaagggaaaactgaactcaaggcgttgctcg

SEQ ID NO: 866959 - DNA, 75 bp, synthetic construct
  source 1..75: mol_type = other DNA
cagcgaaagggctggtgaaagtacgcggcacggtggaagcgccacaactactggcggatatcaccgcgcgcggcc

SEQ ID NO: 866960 - DNA, 75 bp, synthetic construct
  source 1..75: mol_type = other DNA
agcacactgaacgtggagccgttgaaaggtgaaaaagtgaagctgaaagtgggcggcgcgctgcgcgaacagctg

SEQ ID NO: 866961 - DNA, 75 bp, synthetic construct
  source 1..75: mol_type = other DNA
gtcggcaccaccagcggcctgcatttgctatttaaagcggcagatcgttgggtgccagggctggatataggcaag

SEQ ID NO: 866962 - DNA, 75 bp, synthetic construct
  source 1..75: mol_type = other DNA
cgcgcctgcgtgaagcggtagtgtgtgagtggactgaaacggtcaatacaccgtccgcgcagactcgcttcaaac

SEQ ID NO: 866963 - DNA, 75 bp, synthetic construct
  source 1..75: mol_type = other DNA
ccgcggcaaaataaaaaattatgctgcggcgggcaaaacccagcaggggcgattggtggtcaacggtgccagtat

SEQ ID NO: 866964 - DNA, 75 bp, synthetic construct
  source 1..75: mol_type = other DNA
tttactcaacgccgggcgctggagtgatccgcgcgcgtttacggctggttctctcctgggatacggacaataccg

SEQ ID NO: 866965 - DNA, 75 bp, synthetic construct
  source 1..75: mol_type = other DNA
acgacattctcacagattcttttagatgccagaatgcagcacgcaaaaaatttgagttcagtcaataaaattgcc

SEQ ID NO: 866966 - DNA, 75 bp, synthetic construct
  source 1..75: mol_type = other DNA
ctggcttatatacctacagggattgcttatgctatttggtcaggagtcggtatcgttctgattagtttgctttcc

SEQ ID NO: 866967 - DNA, 75 bp, synthetic construct
  source 1..75: mol_type = other DNA
tcagccgcgcgtgggcgtgggatgcatggcacggccccggcacggtcgggctggcatggctttatgatgaccgtg

SEQ ID NO: 866968 - DNA, 75 bp, synthetic construct
  source 1..75: mol_type = other DNA
gcagaaacccggatgcagtccgacacgaatcaggtgtatcaggtactcacatccggcgaggtacaggacggcgag

SEQ ID NO: 866969 - DNA, 75 bp, synthetic construct
  source 1..75: mol_type = other DNA
cggcaccaaagcgccgccgtaccggtattgcagcggcacgacgtgcagcaaagaaacgcaggagagcaaaacgat

SEQ ID NO: 866970 - DNA, 75 bp, synthetic construct
  source 1..75: mol_type = other DNA
ttttatgacgctccagaacttctggactgaccgggcgactgattttacccagacgtcaaagctggcgcgcctgaa

SEQ ID NO: 866971 - DNA, 75 bp, synthetic construct
  source 1..75: mol_type = other DNA
attggtgattctctcgttactttaatcggagggcataaatcaagtgagcgacaaatacatcaggtacatctcgat

SEQ ID NO: 866972 - DNA, 75 bp, synthetic construct
  source 1..75: mol_type = other DNA
gtcagtgggatcgtgggatctgagacggtatcacaaaagcattactggcgccgccttgatgtggaagtcggtgat

SEQ ID NO: 866973 - DNA, 75 bp, synthetic construct
  source 1..75: mol_type = other DNA
aaaagccatcagctttgtcggctcgacgcctgtcgccgagtatatctacagcgaaggaacccggcgcggaaaacg

SEQ ID NO: 866974 - DNA, 75 bp, synthetic construct
  source 1..75: mol_type = other DNA
atgctgaccttgatgctaccgttaacgctattatgggtggggcttttggttccgcaggcgaacgttgtatggcat

SEQ ID NO: 866975 - DNA, 75 bp, synthetic construct
  source 1..75: mol_type = other DNA
cccgtctgcaaaaactgccgcactttgaacagctggtatatccgcagtggatcccggcacaaccgcaactgatgc

SEQ ID NO: 866976 - DNA, 75 bp, synthetic construct
  source 1..75: mol_type = other DNA
gactcagtctgttctgaccatcacttctaacgttgtgtatggtaagaaaactggtaacaccccagacggtcgtcg

SEQ ID NO: 866977 - DNA, 75 bp, synthetic construct
  source 1..75: mol_type = other DNA
atcgcaccatggcgtgcggcatcgcgggcctgtcggtggcaacggactccctgtctgccatcaaatatgctcgtg

SEQ ID NO: 866978 - DNA, 75 bp, synthetic construct
  source 1..75: mol_type = other DNA
atggcgctacatgatcgtgatgtctatcgcaccatggcgtgcggcatcgcgggcctgtcggtggcaacggactcc

SEQ ID NO: 866979 - DNA, 75 bp, synthetic construct
  source 1..75: mol_type = other DNA
catccgtacgccgcacaaaatgaagttcggtgtctccggctgtacccgtgaatgttcagaagctcagggtaaaga

SEQ ID NO: 866980 - DNA, 75 bp, synthetic construct
  source 1..75: mol_type = other DNA
aggctacggttgtgaagtttgtaaaccgaccgtcggttcgctgctggcctcctgctggaacgaatacattctgaa

SEQ ID NO: 866981 - DNA, 75 bp, synthetic construct
  source 1..75: mol_type = other DNA
atcaccccggaaggattgatggcagtgggtcgtatcgcgcgtgaatttaatctctacaccaagattaccggttct

SEQ ID NO: 866982 - DNA, 75 bp, synthetic construct
  source 1..75: mol_type = other DNA
taggaaaagagttagatacttctctacatggtgcggtagctctttataagcgttatttgaagttagatttaaacc

SEQ ID NO: 866983 - DNA, 75 bp, synthetic construct
  source 1..75: mol_type = other DNA
cctgacgctaatgatggatggataattcctggtgcgtcgtggaaaccgtcacactggatgccgctaccagaaccg

SEQ ID NO: 866984 - DNA, 75 bp, synthetic construct
  source 1..75: mol_type = other DNA
atgtcgggcaactatccggtaactccggatggctggataagctgtagtgagcgaatgccggataccaaaacagcc

SEQ ID NO: 866985 - DNA, 75 bp, synthetic construct
  source 1..75: mol_type = other DNA
tggcaacggactccctgtctgccatcaaatatgctcgtgtgaaaccaatccgtgatgaaaacggcctggcggtgg

SEQ ID NO: 866986 - DNA, 75 bp, synthetic construct
  source 1..75: mol_type = other DNA
ggcgatattgttgtctttgctgatctttattggtgaagccgtccgcgacgcatttgatcctaataaggcggtgta

SEQ ID NO: 866987 - DNA, 75 bp, synthetic construct
  source 1..75: mol_type = other DNA
accctctgctccagcgtgatgggcgtgctggcgggggcgctacaaggctattacggcggtaaagtcgatctctgg

SEQ ID NO: 866988 - DNA, 75 bp, synthetic construct
  source 1..75: mol_type = other DNA
tggcggcagaccggacccggacctgttattcagacaactggtcagtgacagttacagttatttctacggctccag

SEQ ID NO: 866989 - DNA, 75 bp, synthetic construct
  source 1..75: mol_type = other DNA
ctttaaagaggccagcgattactttaccagtcgcaaagtcagtgaatccggcagccatactgacaataatgccga

SEQ ID NO: 866990 - DNA, 75 bp, synthetic construct
  source 1..75: mol_type = other DNA
cataatatcagtaatgagcaggcaacaagagaactggcatcaagaagtacgagaggttctgcggggatgtatggc

SEQ ID NO: 866991 - DNA, 75 bp, synthetic construct
  source 1..75: mol_type = other DNA
tggtggaagagtcgcaggaactggcgttaaaagatgactcgccattgctggatcgtatcatttcccatatcgatc

SEQ ID NO: 866992 - DNA, 75 bp, synthetic construct
  source 1..75: mol_type = other DNA
atcattggtacgccaaaaggcttctcggaatttcacaaactgtggactataggccagaacgtagagctgcaaaga

SEQ ID NO: 866993 - DNA, 75 bp, synthetic construct
  source 1..75: mol_type = other DNA
aatacctgagccatcaggagaggctgtgaaaaaaatgattgatggtaaaaaggaacgactgaaggggccattatg

SEQ ID NO: 866994 - DNA, 75 bp, synthetic construct
  source 1..75: mol_type = other DNA
gctattctgacaaataccagttcgccggagattgcagaacgccgtcgggcaatggcgtggtcttttgtgcaggaa

SEQ ID NO: 866995 - DNA, 75 bp, synthetic construct
  source 1..75: mol_type = other DNA
tgtggaactggacgctatcgcctccgtggtgattggcggtacacttttaagcggcggtgttgggacagtattagg

SEQ ID NO: 866996 - DNA, 75 bp, synthetic construct
  source 1..75: mol_type = other DNA
caataaatgcactgaaagagggtatcaccagtaatgcggcccgtaacggtgatacggccagcctggtgagtctgg

SEQ ID NO: 866997 - DNA, 75 bp, synthetic construct
  source 1..75: mol_type = other DNA
cctggcgtgaatcccgtggggacatcggtaaaggaatggagagcgtaccttcggggggggggggggggcagccag

SEQ ID NO: 866998 - DNA, 75 bp, synthetic construct
  source 1..75: mol_type = other DNA
gcagacctggccgttgttgtatgccattctgaacagtgccatgacattctatgcgaagatgaatggtgcgccggt

SEQ ID NO: 866999 - DNA, 75 bp, synthetic construct
  source 1..75: mol_type = other DNA
gatgttcatgctggatggcagtttgagccgaagtttatgggggttggcggaggtgtaggaggtagacttggcgga

SEQ ID NO: 867000 - DNA, 75 bp, synthetic construct
  source 1..75: mol_type = other DNA
actcagttttctaatcaggggacgatggcgggagccgcattggtaaaagacgctatgtataacggttctttgttg

SEQ ID NO: 867001 - DNA, 75 bp, synthetic construct
  source 1..75: mol_type = other DNA
gcgtgtgaaaacgcgctgccggtcacctactcaaacgtggaaccgagcgatttcgttcagaccttctcacgccgt

SEQ ID NO: 867002 - DNA, 75 bp, synthetic construct
  source 1..75: mol_type = other DNA
gctggctggaaactggcgcttctgtatttccggtgctggctgttgtgttaattgtgcgttcatttatttatgaac

SEQ ID NO: 867003 - DNA, 75 bp, synthetic construct
  source 1..75: mol_type = other DNA
tgatctgcaatatcctgactgataacgcttttctggggatcatcgccgttggcatgacctttgtgatcctctccg

SEQ ID NO: 867004 - DNA, 75 bp, synthetic construct
  source 1..75: mol_type = other DNA
aaagcaaagtgtcagccgacggggaaactgctgggataacagtcctatggaacgcttcttccgcagtctgaaaac

SEQ ID NO: 867005 - DNA, 75 bp, synthetic construct
  source 1..75: mol_type = other DNA
gaaaacgctgatcgaaaccggtcatccgaaacgcggcgatatcgtggtctttaaatacccggaagatccaaagct

SEQ ID NO: 867006 - DNA, 75 bp, synthetic construct
  source 1..75: mol_type = other DNA
tctttgaagtgccgaaaaacgaaaccaaagaaaatggaattcgtctttccgagcgtaaagagacactgggtgatg

SEQ ID NO: 867007 - DNA, 75 bp, synthetic construct
  source 1..75: mol_type = other DNA
gcaaccgttaaccgtggactcattgtgtcaggcggcattgcgcggcgatctgctggcaaaagcatcattaccggg

SEQ ID NO: 867008 - DNA, 75 bp, synthetic construct
  source 1..75: mol_type = other DNA
tccgtcagcaggcgcttcccgcctacagccagcatattagcgtcgagagcacccagttctctaatcaggggacga

SEQ ID NO: 867009 - DNA, 75 bp, synthetic construct
  source 1..75: mol_type = other DNA
gtccgcgaaatgcttgaagcgcatctggtgcaagagctggaaataaaagaggcgggaaaccgtgggcgcccggca

SEQ ID NO: 867010 - DNA, 75 bp, synthetic construct
  source 1..75: mol_type = other DNA
tgatcaccatcggcgtctttgtgttgggttatctttactgcctgacccagtttcccggttttgcttccacaagag

SEQ ID NO: 867011 - DNA, 75 bp, synthetic construct
  source 1..75: mol_type = other DNA
tttcggaagagtcgatcccgataaaccatcctgtttatgacacgctctcaagccttgcgtggaaaatccctggcg

SEQ ID NO: 867012 - DNA, 75 bp, synthetic construct
  source 1..75: mol_type = other DNA
ccgcacatgccgatactgcactgataagcgatgccctgcggatggcctatgagacgcgtggtcaaccacatgatg

SEQ ID NO: 867013 - DNA, 75 bp, synthetic construct
  source 1..75: mol_type = other DNA
gtgaatgaagtttatgtgattgccggtggtgagtggttgcgtaacaacctgaatgccattgcagcatttatgagt

SEQ ID NO: 867014 - DNA, 75 bp, synthetic construct
  source 1..75: mol_type = other DNA
gccagtaaggactttagagaggccagcgattactttaccagtcgcaaggtcagtgaatccggcagccatacggac

SEQ ID NO: 867015 - DNA, 75 bp, synthetic construct
  source 1..75: mol_type = other DNA
agtaatatccgtaacgatgtgaagcagcaggttgataatatggtcacagaatatcggggcaatatcggggatact

SEQ ID NO: 867016 - DNA, 75 bp, synthetic construct
  source 1..75: mol_type = other DNA
gtctgcagccctgaactcagcgaaacagagttacgaccagtacacgacgaatatgacccgcagccatgaatatgc

SEQ ID NO: 867017 - DNA, 75 bp, synthetic construct
  source 1..75: mol_type = other DNA
ataaggaaaaggagtctcaagaacgagtgccgggggctgacagtcctgaagaactgatgaagaaggcaaaaaaat

SEQ ID NO: 867018 - DNA, 75 bp, synthetic construct
  source 1..75: mol_type = other DNA
tactatcgaacaacgtacacaggacagcggaattcagaataatgtaaaagaccaagttgataatatgttcacaac

SEQ ID NO: 867019 - DNA, 75 bp, synthetic construct
  source 1..75: mol_type = other DNA
atgaagaaaagtcggttcaggaaagaatgcccggggctgacagtccacaggaactgatgaaaagagcaaaggagt

SEQ ID NO: 867020 - DNA, 75 bp, synthetic construct
  source 1..75: mol_type = other DNA
ggcgcaactgccacacagacccgtgacggtaatatggtgatggatgcaagcggagcgatgtcccggttaccggtt

SEQ ID NO: 867021 - DNA, 75 bp, synthetic construct
  source 1..75: mol_type = other DNA
agttttctggagcgaaacaggcgtgtgaagaaatagaaggttacgaaacatgctgtccagaatgcaaccatgaat

SEQ ID NO: 867022 - DNA, 75 bp, synthetic construct
  source 1..75: mol_type = other DNA
cgtcgtgctgcaacggtgtggatggtggcattccgtgaaagccactcccagccagaacgaaacaattttctggcg

SEQ ID NO: 867023 - DNA, 75 bp, synthetic construct
  source 1..75: mol_type = other DNA
cagctgcgtagccagcttatcagtctgtttacggcttacggcgcacgagtaaaaatcgtttatctggaagtgcca

SEQ ID NO: 867024 - DNA, 75 bp, synthetic construct
  source 1..75: mol_type = other DNA
gttgaaaagcgcagcactaccgtgcaggaaaacggacgtattcagtcgccgggccatgctcgtcggggcgaactg

SEQ ID NO: 867025 - DNA, 75 bp, synthetic construct
  source 1..75: mol_type = other DNA
gttacactgccagaattccagcaacttcccgctcaacagcaggaagttttatgggcggcggcgttattacatgac

SEQ ID NO: 867026 - DNA, 75 bp, synthetic construct
  source 1..75: mol_type = other DNA
gttgcggcctcaattctcacctgtatgccagacagcgaagttgacgtgctgtacggtattggtggcgcgccggaa

SEQ ID NO: 867027 - DNA, 75 bp, synthetic construct
  source 1..75: mol_type = other DNA
gcctctcgccgttgctggcgtttccgctagtgctggtgatgggctgtgccttcggcgcatttatggggcttttga

SEQ ID NO: 867028 - DNA, 75 bp, synthetic construct
  source 1..75: mol_type = other DNA
cagaccggacccggacctgttattcaggcaactggtgagtgacagttacagttatttctacggctccagccagtc

SEQ ID NO: 867029 - DNA, 75 bp, synthetic construct
  source 1..75: mol_type = other DNA
aagaggccagcgattactttaccagtcgcaaggtcagtgagtccggcagccatactgacaataatgctgattccc

SEQ ID NO: 867030 - DNA, 75 bp, synthetic construct
  source 1..75: mol_type = other DNA
gacagcacgatgagcgcacaggactccatgatggccagccgtatgcgcagtgcagtggaaagctatgcgaaggcg

SEQ ID NO: 867031 - DNA, 75 bp, synthetic construct
  source 1..75: mol_type = other DNA
ggatcaccagttatgccgcacgtaatggtgattcggccagcctggtgaatctggccaccacgtcatcgatggaga

SEQ ID NO: 867032 - DNA, 75 bp, synthetic construct
  source 1..75: mol_type = other DNA
ggaaaacgtgaacggcttcagctggagcaccaacagcaccacgtcgtttggtcagatgatgtaccagaccggcag

SEQ ID NO: 867033 - DNA, 75 bp, synthetic construct
  source 1..75: mol_type = other DNA
attctgaacagtgccatgacattctatgcaaagcagaatggtgcaccggtcgtgctctctgaactctctcagata

SEQ ID NO: 867034 - DNA, 75 bp, synthetic construct
  source 1..75: mol_type = other DNA
gctttggtaatcaggtgtacgccattggcggcaatgcgacgtcggcaaacctgatggggatttctacccgcagca

SEQ ID NO: 867035 - DNA, 75 bp, synthetic construct
  source 1..75: mol_type = other DNA
acctgaatctgccgctggcggataacctgcgcaatgttgcggcggcactcggtaaaccgttaagcgaactgacgg

SEQ ID NO: 867036 - DNA, 75 bp, synthetic construct
  source 1..75: mol_type = other DNA
ccgtatgcgcagtgcaatggaaagctatccggattggcgacctgccgattatccgggattccgaaatccagaact

SEQ ID NO: 867037 - DNA, 75 bp, synthetic construct
  source 1..75: mol_type = other DNA
gggttatctctactgcctgacgcagtttcccggttttgcttccacaagagtgatctgcaatatcctgaccgataa

SEQ ID NO: 867038 - DNA, 75 bp, synthetic construct
  source 1..75: mol_type = other DNA
tgacgctgtccgtcctgaaaggctatgtgtttgccctgatgtggttgcagtcatggccaatgttgtacgccattc

SEQ ID NO: 867039 - DNA, 75 bp, synthetic construct
  source 1..75: mol_type = other DNA
gatgagccgttaccgtgccggacgtctgatgaaatatctgaacctgagcagttgtcagcccggaaaacatcagta

SEQ ID NO: 867040 - DNA, 75 bp, synthetic construct
  source 1..75: mol_type = other DNA
aacagcgtctggcgcatgtagccattggtcatgtgctgatgcgaaacctgccgatggtacagaccattctggtgg

SEQ ID NO: 867041 - DNA, 75 bp, synthetic construct
  source 1..75: mol_type = other DNA
aagcaccgattttctctcccggaatcccgaaattatcaacctgtttcaggactacgttcagaactgcgtgctggg

SEQ ID NO: 867042 - DNA, 75 bp, synthetic construct
  source 1..75: mol_type = other DNA
gatgtcgcaggaaaaggtgagtggcgtgacagcacgattacgctgaccgatctctccaccggctttgacaaattg

SEQ ID NO: 867043 - DNA, 75 bp, synthetic construct
  source 1..75: mol_type = other DNA
atgggcaaagaatataaaactctcattaacaaagcacttgagtgtttttattttcgcttaagtgcatcaggcgct

SEQ ID NO: 867044 - DNA, 75 bp, synthetic construct
  source 1..75: mol_type = other DNA
taacccattacaagcccgctgccgcagatattcccgtggcgagcgataacccagcgcactatgcggatgccattc

SEQ ID NO: 867045 - DNA, 75 bp, synthetic construct
  source 1..75: mol_type = other DNA
aacaggccttttgtatatacgcaaaaaataaacaggggcgtaatagccgcattgattaaattaattaaacgctat

SEQ ID NO: 867046 - DNA, 75 bp, synthetic construct
  source 1..75: mol_type = other DNA
ccggcaaaggttcagtttattaagggcagaagcaagccttttgtatatacgaaaaaaataaataggggcgtaata

SEQ ID NO: 867047 - DNA, 75 bp, synthetic construct
  source 1..75: mol_type = other DNA
cggactatatcgttagatattacagcgcactaagaccgcacgaatataacggtgggttaccctcaacgaatcgga

SEQ ID NO: 867048 - DNA, 75 bp, synthetic construct
  source 1..75: mol_type = other DNA
gatgttcatgctggatggcagtttgagccgaagtttatgggtgttggcggaggtatgggaggaaaagttggcgga

SEQ ID NO: 867049 - DNA, 75 bp, synthetic construct
  source 1..75: mol_type = other DNA
gttaaaaaataatcacaaacaggaagaaattcaacaaaacaacagatataatgaagaaaataaacgacagaaatt

SEQ ID NO: 867050 - DNA, 75 bp, synthetic construct
  source 1..75: mol_type = other DNA
tattgcccatcaatatactggtctacagagctcacatagggcagaagaatcatctcaggagcgtaagtataatga

SEQ ID NO: 867051 - DNA, 75 bp, synthetic construct
  source 1..75: mol_type = other DNA
agtggccgactgggtgtcaaagtcgacaactggcaggcagggctcgagaacgctctggtcagcgggcgactgagt

SEQ ID NO: 867052 - DNA, 75 bp, synthetic construct
  source 1..75: mol_type = other DNA
gcagtcttgctcggtgcgattatcggttctggtgtggttctcggccgcaacgcgttgcgtaactacaaaccaaaa

SEQ ID NO: 867053 - DNA, 75 bp, synthetic construct
  source 1..75: mol_type = other DNA
ggccgagcgccacgatctcgctgtcgggcatatctcccgcaacatgaagactatggccatgcgtctgcatacccc

SEQ ID NO: 867054 - DNA, 75 bp, synthetic construct
  source 1..75: mol_type = other DNA
gatttagatgcactcaatgagctggctgagcttgttcgtgatgctgaatgtggagtgcatatcaaaccatacgta

SEQ ID NO: 867055 - DNA, 75 bp, synthetic construct
  source 1..75: mol_type = other DNA
taaatgaagaactggaaaaagacctgaaagacaacatcgcgctgcgtatgaaaaacttgcaggattcaggattcg

SEQ ID NO: 867056 - DNA, 75 bp, synthetic construct
  source 1..75: mol_type = other DNA
acctgcttgatatcgaaaaactgaaagtcgatccgaaaaccattcacgtctatcgctacgtgatgaagccgacgc

SEQ ID NO: 867057 - DNA, 75 bp, synthetic construct
  source 1..75: mol_type = other DNA
cttacgttagcgatacagctcagtccgctcagcgcggcgtagccgaatacatccagaaaatcgacgaacaaatct

SEQ ID NO: 867058 - DNA, 75 bp, synthetic construct
  source 1..75: mol_type = other DNA
ttacaggccattttgcaggcacatgaaaatgaactgggcgactttgtgctgcatatggatggtcaggcgaatgat

SEQ ID NO: 867059 - DNA, 75 bp, synthetic construct
  source 1..75: mol_type = other DNA
gatatccagcaactgcgttatcagggcgaaaaagttaaatttcaaggccagcttaaagggcaacaacttacagtc

SEQ ID NO: 867060 - DNA, 75 bp, synthetic construct
  source 1..75: mol_type = other DNA
aacgagctggctgtttctgcgtttgaaaatcagccgcctgtcaaactggtcggtgaattcaccatgccgctggtg

SEQ ID NO: 867061 - DNA, 75 bp, synthetic construct
  source 1..75: mol_type = other DNA
cgtcgtcgtaaacactatcgtaagcagcagggccatcgtcagtggttcactgatgtgaaaattactaagacctga

SEQ ID NO: 867062 - DNA, 75 bp, synthetic construct
  source 1..75: mol_type = other DNA
catgctgaacgtgcggcccgtgactcattgaccagggcaatccggagtctgtatgacgtggctttttacgctgat

SEQ ID NO: 867063 - DNA, 75 bp, synthetic construct
  source 1..75: mol_type = other DNA
attttgtcctgcctttccgttttgccgatggagcctggcatctggggactcgcggcccgttacgttgcgaattgc

SEQ ID NO: 867064 - DNA, 75 bp, synthetic construct
  source 1..75: mol_type = other DNA
gagtatgagtcggtgcggaaactgctgggataatagcccaatggaacgcttcttcaggagtctgaagaacgaatg

SEQ ID NO: 867065 - DNA, 75 bp, synthetic construct
  source 1..75: mol_type = other DNA
agtcagattatgcgtaagaatgtgacaataaatgcactgaaagagggtatcaccagtaatgcggcccgtaacggt

SEQ ID NO: 867066 - DNA, 75 bp, synthetic construct
  source 1..75: mol_type = other DNA
ttcctctgctatcagcccgactgccagtgcggcaggcagtgtggttgacggtaattactcctacggcaacatgca

SEQ ID NO: 867067 - DNA, 75 bp, synthetic construct
  source 1..75: mol_type = other DNA
tattattgagcaaagaacgcaggacagtaatatccgtaacgatgtgaagcagcaggttgataatatggtcatgga

SEQ ID NO: 867068 - DNA, 75 bp, synthetic construct
  source 1..75: mol_type = other DNA
atgaagaaaagtcggttcgggaaagaatgcccggggctgacagtccacaggaactgatgaaaagggcaaaggagt

SEQ ID NO: 867069 - DNA, 75 bp, synthetic construct
  source 1..75: mol_type = other DNA
accggaggcaagacctggcattattatgtgcagcagttatttggcggcagaccggaccctgacctgttattcagg

SEQ ID NO: 867070 - DNA, 75 bp, synthetic construct
  source 1..75: mol_type = other DNA
ccgccagaatgtcaccatcaatgcgctgaaggaggggatcaccagttatgccgcgcgtaatggtgattcagccag

SEQ ID NO: 867071 - DNA, 75 bp, synthetic construct
  source 1..75: mol_type = other DNA
tgaacagtgccatgacattctatgcgaagcagaatggggctccggtcgtgctctctgaactctctcagatacagc

SEQ ID NO: 867072 - DNA, 75 bp, synthetic construct
  source 1..75: mol_type = other DNA
cagcctgctggttaatgtccgtacatcggtgcagattattgataacagtgacctggtccaggttcaccgggtgga

SEQ ID NO: 867073 - DNA, 75 bp, synthetic construct
  source 1..75: mol_type = other DNA
atgacaagccgcagccgccaggctgcctactcgagcgaaatacgccgggcatggaaccagagccggggctctgca

SEQ ID NO: 867074 - DNA, 75 bp, synthetic construct
  source 1..75: mol_type = other DNA
actacgtccagaactgcgtgctgggtgatatttacctgaaccataaatacacgctggaagacctgatggcctcct

SEQ ID NO: 867075 - DNA, 75 bp, synthetic construct
  source 1..75: mol_type = other DNA
agccgaagtttatgggtgttggcggaggtatgggaggaaaagttggcggaagagctagcattgactggagcgatg

SEQ ID NO: 867076 - DNA, 75 bp, synthetic construct
  source 1..75: mol_type = other DNA
cagtctttttggtgttcgtgttgatgtcggagctaaagtgggtgggcgagccagtattgactggagtgatgatga

SEQ ID NO: 867077 - DNA, 75 bp, synthetic construct
  source 1..75: mol_type = other DNA
caggtgcagcctggtgttgataatgcctggcgtgaatcccgtggggacatcggtaaaggaatggagagcgtacct

SEQ ID NO: 867078 - DNA, 75 bp, synthetic construct
  source 1..75: mol_type = other DNA
aggataaagcaaagtgtcagccgacggggaaactgctgggataacagtccaatggaacgcttcttccgcagtatg

SEQ ID NO: 867079 - DNA, 75 bp, synthetic construct
  source 1..75: mol_type = other DNA
gaatgggtgccgacggatggttacgtaggcaaggacgaggcccggcaacaaattagcggttatatcctgaattat

SEQ ID NO: 867080 - DNA, 75 bp, synthetic construct
  source 1..75: mol_type = other DNA
tatggtgtggagatattacgtatctctgggcaggaaatcgctggtgctatctggcggttgttatggatctttttg

SEQ ID NO: 867081 - DNA, 75 bp, synthetic construct
  source 1..75: mol_type = other DNA
cttcttccgcagtctgaaaacagaatgggtgccaaccgatggctacacaggcaaagacgtggcccggcagcaaat

SEQ ID NO: 867082 - DNA, 75 bp, synthetic construct
  source 1..75: mol_type = other DNA
aagcgatgccctgcggatggcctatgagacgcgtggtcaaccacatgatgttatgttccatagcgtccagggcag

SEQ ID NO: 867083 - DNA, 75 bp, synthetic construct
  source 1..75: mol_type = other DNA
actgcactcttgatgtccgactcgctgaacggttcacgatagttgccagactcagtggcagccacaccgttgtca

SEQ ID NO: 867084 - DNA, 75 bp, synthetic construct
  source 1..75: mol_type = other DNA
aaaggaatggagagcgtaccttcgggtggtggcagccaggatattattgctgaccatcagggacatcaggccatt

SEQ ID NO: 867085 - DNA, 75 bp, synthetic construct
  source 1..75: mol_type = other DNA
gatggccagccgtatgcgcagtgcagtggaaagctatgcgaaggcgcataatatcagtaatgaccaggcaacaag

SEQ ID NO: 867086 - DNA, 75 bp, synthetic construct
  source 1..75: mol_type = other DNA
ggatatttacctgaaccacaaatacacgctggaggagctgatggcctccgctgatccctacacgctgattttttc

SEQ ID NO: 867087 - DNA, 75 bp, synthetic construct
  source 1..75: mol_type = other DNA
tgtcagcccggaaaacatcagtataaaaatgcccgtcaggagcataccagcctgccgaatctgcttgagcgtcag

SEQ ID NO: 867088 - DNA, 75 bp, synthetic construct
  source 1..75: mol_type = other DNA
agaacgagaaagtcaaaagataatacctgagccatcagaagaggctgtgaaaaagatgattgatgataaaaagga

SEQ ID NO: 867089 - DNA, 75 bp, synthetic construct
  source 1..75: mol_type = other DNA
ggaatgcccggtgctgacagcccacaggaacttatgaacagggcaaaagagtatcaggataagtataagcaataa

SEQ ID NO: 867090 - DNA, 75 bp, synthetic construct
  source 1..75: mol_type = other DNA
taaactggacgccctggatatcgattccaatcaagggatcgtcaacgccagcggcacggcgcagctgtcagacaa

SEQ ID NO: 867091 - DNA, 75 bp, synthetic construct
  source 1..75: mol_type = other DNA
gaagctgaataatgcggttaactgggtccagcgtcgctgggatggatatactgccagtgtcgcccgctcgtccat

SEQ ID NO: 867092 - DNA, 75 bp, synthetic construct
  source 1..75: mol_type = other DNA
tctggacctgcagactgagtctgttgttctgaaaggtctgagccactggagccggggacgcacaatggtggtggt

SEQ ID NO: 867093 - DNA, 75 bp, synthetic construct
  source 1..75: mol_type = other DNA
gggtgatggcggtgaaaatgtcggacagaccagcatcctccggttcatacgccagcaatttgcgggaatatgagt

SEQ ID NO: 867094 - DNA, 75 bp, synthetic construct
  source 1..75: mol_type = other DNA
actgttctgctggtcattctgggaacgtaccttattcacagtgatgacccacataaccgtatcaccatgggggca

SEQ ID NO: 867095 - DNA, 75 bp, synthetic construct
  source 1..75: mol_type = other DNA
tttcttcttgaacagaatccccggctttttctgggaactctgcgtgaaaatctgcagctttcgcgtctaccggga

SEQ ID NO: 867096 - DNA, 75 bp, synthetic construct
  source 1..75: mol_type = other DNA
atgaagggcgggtaatgatggacggtccccgtgatgaaatactgaaaaaactgtcagggaaacagcagatgggga

SEQ ID NO: 867097 - DNA, 75 bp, synthetic construct
  source 1..75: mol_type = other DNA
ggcgagcattgcctgcagccagtacccaacgcaccagataattattgctgctgaccgcgatctcaatggtgcagg

SEQ ID NO: 867098 - DNA, 75 bp, synthetic construct
  source 1..75: mol_type = other DNA
cttctggcaagcgctgcaccgccgtgatgttcaggttcctgaccttttttctctgcgaggtaatgtccatgcgta

SEQ ID NO: 867099 - DNA, 75 bp, synthetic construct
  source 1..75: mol_type = other DNA
tgcacggtgtgtttgccgatgactcgcagatgattgatttccagcataagccgcaattcacgccgaatctgcaat

SEQ ID NO: 867100 - DNA, 75 bp, synthetic construct
  source 1..75: mol_type = other DNA
ccatgggggcactgattgcagccgttattctttccggccgcgcgcttgcaccgcttggccagatagcatcactgg

SEQ ID NO: 867101 - DNA, 75 bp, synthetic construct
  source 1..75: mol_type = other DNA
gaaaatgatggtggggctgtaccgtcagaacaggggacaaattactcttgacggtgttgccatgcagcaactgga

SEQ ID NO: 867102 - DNA, 75 bp, synthetic construct
  source 1..75: mol_type = other DNA
caaggaatgcagactaatctggccctaagagaggaaagcaatgctgactggttgccaaaatgcgatgagtttgca

SEQ ID NO: 867103 - DNA, 75 bp, synthetic construct
  source 1..75: mol_type = other DNA
ttatcgggctcgtgggaggctggcttgcggttgtacctcttacgctggtcccgctggttattctggcaggaatat

SEQ ID NO: 867104 - DNA, 75 bp, synthetic construct
  source 1..75: mol_type = other DNA
attttgtgaaacgattacaggatgcaacagagtcaatgttgattgccctgaataattattcttacgaagaggccg

SEQ ID NO: 867105 - DNA, 75 bp, synthetic construct
  source 1..75: mol_type = other DNA
agttgtattaatggcaaggttgaaattgttcatgttgattctaataaagaaataaaacacttgcgaaataattat

SEQ ID NO: 867106 - DNA, 75 bp, synthetic construct
  source 1..75: mol_type = other DNA
cgccatatattgatcagatggagggcttcagtgtggatggcgtgacaacgaaagtgcgtattgacgccggtgtcg

SEQ ID NO: 867107 - DNA, 75 bp, synthetic construct
  source 1..75: mol_type = other DNA
tggaatatcaccgaccatgtactgcgttatctcattcttgattgttctccggctcccgcagcggtgcaggaggtg

SEQ ID NO: 867108 - DNA, 75 bp, synthetic construct
  source 1..75: mol_type = other DNA
gctatctcattcttgactgttctgacgcaccagttatggcactggaacaggcgggggtaaacaatggaaaacaat

SEQ ID NO: 867109 - DNA, 75 bp, synthetic construct
  source 1..75: mol_type = other DNA
gaacagggaatgccccgttttgtgatggcttatattgatatccggccagggcgttttatttgcagctcaaacgca

SEQ ID NO: 867110 - DNA, 75 bp, synthetic construct
  source 1..75: mol_type = other DNA
ctaatcgttcctgggaaacgttatggatgctgagtatcggggtgattgcagccattctgtttgagtgtgctgcaa

SEQ ID NO: 867111 - DNA, 75 bp, synthetic construct
  source 1..75: mol_type = other DNA
tcgggagtggaaaatccacactgctgaaaatgatggtgggactgtaccgtcagaacagcggggaaatcacccttg

SEQ ID NO: 867112 - DNA, 75 bp, synthetic construct
  source 1..75: mol_type = other DNA
gataatcatctctcccgtcgggcgccggaagacattccctcacttgccgtaccggtattgctgctactgaattcc

SEQ ID NO: 867113 - DNA, 75 bp, synthetic construct
  source 1..75: mol_type = other DNA
agttatggatgcgtctggtctggtggtttcgccaggcatggttgatgcgcacacccatatttctgaaccgggtcg

SEQ ID NO: 867114 - DNA, 75 bp, synthetic construct
  source 1..75: mol_type = other DNA
tggtgtcttacaacatcgaccgtctgcatgagctggatgaagtgggcgttgtcggcttcaaatgcttcgttgcga

SEQ ID NO: 867115 - DNA, 75 bp, synthetic construct
  source 1..75: mol_type = other DNA
acacccatatttctgaaccgggtctagccactgggaaggttatgaaaccggtactcgcgcagcggcaaaaggtgg

SEQ ID NO: 867116 - DNA, 75 bp, synthetic construct
  source 1..75: mol_type = other DNA
tgatgggctgattgtcgccactcccgtctacaaagccgcctattccggcgcactgaaaacgcttctcgacctgct

SEQ ID NO: 867117 - DNA, 75 bp, synthetic construct
  source 1..75: mol_type = other DNA
ccaaatcgataagctggaagatgtcgtgaaagtgcagcgtaatcagtccgatccgacgatgtttaacaagatcgc

SEQ ID NO: 867118 - DNA, 75 bp, synthetic construct
  source 1..75: mol_type = other DNA
gaagatgtggtgaaagtgcagcgtaatcagtccgatccgacgatgtttaacaagattgcggtgttttttcagtaa

SEQ ID NO: 867119 - DNA, 75 bp, synthetic construct
  source 1..75: mol_type = other DNA
ttaacgttgagggtattctctgcctgccgatccaggatagcgacaaaagccacatctggctactggtcaatgacg

SEQ ID NO: 867120 - DNA, 75 bp, synthetic construct
  source 1..75: mol_type = other DNA
tcatctgatggtatatcaaaaacaaatgtcgataattttgtaaattggtatgggattagattaagtataaacggt

SEQ ID NO: 867121 - DNA, 75 bp, synthetic construct
  source 1..75: mol_type = other DNA
cgttgagcgcggtacgccaccgaaagtgaagccggaacctgacttcggcgtgaagatcccggcgcaaccgcaact

SEQ ID NO: 867122 - DNA, 75 bp, synthetic construct
  source 1..75: mol_type = other DNA
ggctgggcttcacgctggcggtgaaagaaagcgcatttctgctgtggatcttagcagcggtattgagtgaaaaac

SEQ ID NO: 867123 - DNA, 75 bp, synthetic construct
  source 1..75: mol_type = other DNA
tgattctggaactcaccgttcgcaaccatccgggcgtaatgacccacgtttgtggcctttttgcccgtcgcgctt

SEQ ID NO: 867124 - DNA, 75 bp, synthetic construct
  source 1..75: mol_type = other DNA
tgtggcctttttgcccgccgcgcttttaacgttgaaggcattctttgtctgccgattcaggacagcgacaaaagc

SEQ ID NO: 867125 - DNA, 75 bp, synthetic construct
  source 1..75: mol_type = other DNA
acaacctgctggacgccgccagcaaaaccgggttgtttgccaaaagcggcgtcgcgacagaggctgtaaacgttc

SEQ ID NO: 867126 - DNA, 75 bp, synthetic construct
  source 1..75: mol_type = other DNA
ctcgtcttgataccgcgctagaaactttctggcaggcgttgcaccgccgcgatgttcaggttcctgaccttctgt

SEQ ID NO: 867127 - DNA, 75 bp, synthetic construct
  source 1..75: mol_type = other DNA
tgcacggcgtgtttgccgatgactcacaagtaattgattaccaacacaaaccccagttcacgccaaatctgcaaa

SEQ ID NO: 867128 - DNA, 75 bp, synthetic construct
  source 1..75: mol_type = other DNA
gtggtactgccgctggcaacgggcggtacagtggctcaccttctggcggtcgattacgcgcttaaaccggtatta

SEQ ID NO: 867129 - DNA, 75 bp, synthetic construct
  source 1..75: mol_type = other DNA
cgccgcctgttgagcgccgacctcgatcagatgcacaagctggagcgcttcggctggaaacaaaccgagatcgct

SEQ ID NO: 867130 - DNA, 75 bp, synthetic construct
  source 1..75: mol_type = other DNA
aatcagtaccaacactcttggtatcagggagaatacacaacggatccgggatgagggacaggctcgaatccgggg

SEQ ID NO: 867131 - DNA, 75 bp, synthetic construct
  source 1..75: mol_type = other DNA
ccactgcttcggtatccagtacagtcgcagttggtgataacagcagtgctgccggcgtggcatccgtcgctgtcg

SEQ ID NO: 867132 - DNA, 75 bp, synthetic construct
  source 1..75: mol_type = other DNA
caataggtaaatcttcctctatcggctatggcaataacagcattgctgtcgggagctcttcctatgtaaccagta

SEQ ID NO: 867133 - DNA, 75 bp, synthetic construct
  source 1..75: mol_type = other DNA
tttctggcaggcattgcaccgccgcgatgttcaggttcctgaccttctgtctctgcgaggtaatgcccatgcgta

SEQ ID NO: 867134 - DNA, 75 bp, synthetic construct
  source 1..75: mol_type = other DNA
agcgcactgaaagcccaggagatcctgcacggcgtgtttgccgatgactcgcaggtgattgattaccagcacaag

SEQ ID NO: 867135 - DNA, 75 bp, synthetic construct
  source 1..75: mol_type = other DNA
cgccccggaagatctgctttatgctcgtttcgatagtccggcactcaagaccttcaccgaacagctgcaacaggc

SEQ ID NO: 867136 - DNA, 75 bp, synthetic construct
  source 1..75: mol_type = other DNA
tggaaatatattaatggcatttattgaaaattggataaaggttaatggtggatggaaaatgcagtttatatcgta

SEQ ID NO: 867137 - DNA, 75 bp, synthetic construct
  source 1..75: mol_type = other DNA
gcagcggagacaggtcataccctgaccgatattgatgctgtaatccgtggcgtctatgtcgatgacttggccgaa

SEQ ID NO: 867138 - DNA, 75 bp, synthetic construct
  source 1..75: mol_type = other DNA
gcatacgtagacggaaaaaaaattgcaacatttacgctacgtaaggccgcagagcttttcaacgcggcacctgaa

SEQ ID NO: 867139 - DNA, 75 bp, synthetic construct
  source 1..75: mol_type = other DNA
ttttggtacacaaaaccagcccttgacttcatgcagtacttgattcactgcatgaagtcttactattcggtcaaa

SEQ ID NO: 867140 - DNA, 75 bp, synthetic construct
  source 1..75: mol_type = other DNA
atttagcagtatttctgcgcgactagacacgcagaaacgtacgttctggattatacgtggtgttctagttatggg

SEQ ID NO: 867141 - DNA, 75 bp, synthetic construct
  source 1..75: mol_type = other DNA
cagctctgtatcgtcgtatggaattccaagaggggtttcgtgtcggttcgctgttgctcttagatcagtccgatt

SEQ ID NO: 867142 - DNA, 75 bp, synthetic construct
  source 1..75: mol_type = other DNA
atgtgggactgccaccctgttttattgcccgaaggccctttctcacgcgaacaggcggttggcgtcacaacagct

SEQ ID NO: 867143 - DNA, 75 bp, synthetic construct
  source 1..75: mol_type = other DNA
atgtcggactggcaccctgttttattgcccgaaggccctttctcacgcgaacaggcggttggcgtcacaacagct

SEQ ID NO: 867144 - DNA, 75 bp, synthetic construct
  source 1..75: mol_type = other DNA
atgttggactgtcgccctgttttattgcccgaaggccctttctcacgcgaacaggcggttggcgtcacaacagct

SEQ ID NO: 867145 - DNA, 75 bp, synthetic construct
  source 1..75: mol_type = other DNA
acaagcggagctgcctgccagtgctgaatttatcaataacccggtaggcaccgcctgtggttttgccgtgcagct

SEQ ID NO: 867146 - DNA, 75 bp, synthetic construct
  source 1..75: mol_type = other DNA
atgcagccagcgctatggatgtcgctactgggcgatctggttatctgccgtcaggtggttgagaaggaagctcag

SEQ ID NO: 867147 - DNA, 75 bp, synthetic construct
  source 1..75: mol_type = other DNA
gaagatgacgaagcagaagaaatggaagccctcgaaacagagattatgcttgctctgggctatgaggatccgtac

SEQ ID NO: 867148 - DNA, 75 bp, synthetic construct
  source 1..75: mol_type = other DNA
ttctcacgcaaccaggctcttgccgtcacaacggcttaccttaatgtgcttattgaagatgaccagggaacatat

SEQ ID NO: 867149 - DNA, 75 bp, synthetic construct
  source 1..75: mol_type = other DNA
aaatatatcaacaagctattcttcgcaatgtgtgtgtgtttacttatactcatttagctgttctggtaaagtatg

SEQ ID NO: 867150 - DNA, 75 bp, synthetic construct
  source 1..75: mol_type = other DNA
ttaatcccattatctgatataattcagggacctgtagtttggtccgtatattacgcaactccaatatacaggtta

SEQ ID NO: 867151 - DNA, 75 bp, synthetic construct
  source 1..75: mol_type = other DNA
atgtaggactgtctccctgttttattgcccgaaggccctttctcacgcgaacaggcggttggcgtcacaacagct

SEQ ID NO: 867152 - DNA, 75 bp, synthetic construct
  source 1..75: mol_type = other DNA
attgctccgctggccctgacgatcttcgtctgggtattcctgatgaacctgatggatttactgcctatcgacctg

SEQ ID NO: 867153 - DNA, 75 bp, synthetic construct
  source 1..75: mol_type = other DNA
cgcaatgtgtttatccaggatgacccgggaatgcatttccgtcgggttatccgcaacgcggaaggtcagcgacgc

SEQ ID NO: 867154 - DNA, 75 bp, synthetic construct
  source 1..75: mol_type = other DNA
agcacgccgatgtgctgatcgtcaacggtggtctggggccgaccagcgatgatttaagcgcactggccgctgcga

SEQ ID NO: 867155 - DNA, 75 bp, synthetic construct
  source 1..75: mol_type = other DNA
ggtgaaatccggtgcactggcgggcaccgtattgaacgacgctaacaaccaggcgaaagcgacttttgatctggc

SEQ ID NO: 867156 - DNA, 75 bp, synthetic construct
  source 1..75: mol_type = other DNA
tgaaaggtgaaccgggccatccggatgcagaagcacgtaccacttacgtgattaaagaattgaacgacaaaggca

SEQ ID NO: 867157 - DNA, 75 bp, synthetic construct
  source 1..75: mol_type = other DNA
gggacagccgtgaacaggactgcgctttcagggaaacggtatcagcgcaggctctccagcagcgtttctgccatc

SEQ ID NO: 867158 - DNA, 75 bp, synthetic construct
  source 1..75: mol_type = other DNA
cacagctgcggttatggagatgatgcaggcactgcgagcagatggtttaggaacggcggatcatagcgccctggc

SEQ ID NO: 867159 - DNA, 75 bp, synthetic construct
  source 1..75: mol_type = other DNA
gcaggtaacgtcaccaaactggcaaatcaggtcattgtggcgctgaatattgccgcgatgtcagaagcgttaacg

SEQ ID NO: 867160 - DNA, 75 bp, synthetic construct
  source 1..75: mol_type = other DNA
gtgaaccgaaagccatcgacggtacgctgtcagtgatggtgggcggcgacaaggctattttcgacaaatactatg

SEQ ID NO: 867161 - DNA, 75 bp, synthetic construct
  source 1..75: mol_type = other DNA
gcgatctggtactgagttacaccacctctccggcttatcacattctcgaagagaagaaagataactacgccgccg

SEQ ID NO: 867162 - DNA, 75 bp, synthetic construct
  source 1..75: mol_type = other DNA
gtttgaacaattgaccaaaccggccaccacgctggagttcacaccagctgaagtggcggcacaacgtcaggcatg

SEQ ID NO: 867163 - DNA, 75 bp, synthetic construct
  source 1..75: mol_type = other DNA
cgatgccggaaaggtgcttaatacgcggctcgccagtgacggtcttctcagacaataaacgtcattcatttcacc

SEQ ID NO: 867164 - DNA, 75 bp, synthetic construct
  source 1..75: mol_type = other DNA
gagaaagcgcgcggacaaaacgtaccaatcgttttcttcaacaaagagccttcccgtaaggcgctggatagctac

SEQ ID NO: 867165 - DNA, 75 bp, synthetic construct
  source 1..75: mol_type = other DNA
ctgctgtgatggccagcatgttattcggtgccgctgcacacgctgctgatactcgcattggtgtaacaatctata

SEQ ID NO: 867166 - DNA, 75 bp, synthetic construct
  source 1..75: mol_type = other DNA
ccggcggctggaataatgacactttcgtaccgtttgattacggctacttcgccttcgtctatgacaagaacaaac

SEQ ID NO: 867167 - DNA, 75 bp, synthetic construct
  source 1..75: mol_type = other DNA
taatactgcaatggcatcattatcttatcactttctggagaagaacgataaaatcagaaaaataattacatcctg

SEQ ID NO: 867168 - DNA, 75 bp, synthetic construct
  source 1..75: mol_type = other DNA
catccatctgtttctgctatatacagagtgaaaaatggagctcaatttattgaactatctattctttcaatagct

SEQ ID NO: 867169 - DNA, 75 bp, synthetic construct
  source 1..75: mol_type = other DNA
tcttgatggcgaaccgttaagcggacaacattttcatatcgaaatacttccggcagcattgcgttgccggctacc

SEQ ID NO: 867170 - DNA, 75 bp, synthetic construct
  source 1..75: mol_type = other DNA
caaccggatcgctgtgaaatccgtggtgaaaattttcactggcaaggcgatgcgctggttattggtattggcaac

SEQ ID NO: 867171 - DNA, 75 bp, synthetic construct
  source 1..75: mol_type = other DNA
gtatcgttccgaccactaatccgacttctacggctattttcaaatcgctgatcagcctgaaaacccgtaacgcta

SEQ ID NO: 867172 - DNA, 75 bp, synthetic construct
  source 1..75: mol_type = other DNA
tggatacctactatggtcgtgattatgtagaaggtgcaacagtagccaaagaagcagctccggctaaagctgaga

SEQ ID NO: 867173 - DNA, 75 bp, synthetic construct
  source 1..75: mol_type = other DNA
gccgaagtccctgtgtgctttcggtggtctggacgcagtaactcacgccatggaagcttatgtttctgtactggc

SEQ ID NO: 867174 - DNA, 75 bp, synthetic construct
  source 1..75: mol_type = other DNA
tggaatatcacctcgcgcgttctgcgttacctgattgttgaccggacagcggcaccggccgcgatttctgcggag

SEQ ID NO: 867175 - DNA, 75 bp, synthetic construct
  source 1..75: mol_type = other DNA
cgttgctgaagtggatgacgagatgtgcaaacagggaatgccccgttttgtgatggcgtatatcgatatccggct

SEQ ID NO: 867176 - DNA, 75 bp, synthetic construct
  source 1..75: mol_type = other DNA
atggttgatgcaaaagttctgaacggtgtcagcacattattacgggcttacgggcgtctgacctgtggcgttctg

SEQ ID NO: 867177 - DNA, 75 bp, synthetic construct
  source 1..75: mol_type = other DNA
tgctggtaacgctattgcgattgatatggcgcaggtcaacaaacaaacctgttttatcaacatggcgacgggcgg

SEQ ID NO: 867178 - DNA, 75 bp, synthetic construct
  source 1..75: mol_type = other DNA
gctaggtacagcgaacgattttgccaccagtgtgggtattcctgaggcgctggataaggcacttaaactggcaat

SEQ ID NO: 867179 - DNA, 75 bp, synthetic construct
  source 1..75: mol_type = other DNA
aaagaaggcgtgccccagtttgtgatggcgtatatcgacatacgcctgggtgtcattatctgcggtttaagcggc

SEQ ID NO: 867180 - DNA, 75 bp, synthetic construct
  source 1..75: mol_type = other DNA
tactgatgtccaagacctttgacaacggcgtaatctgtgcttccgagcagtccgttgtggtggttgattctgttt

SEQ ID NO: 867181 - DNA, 75 bp, synthetic construct
  source 1..75: mol_type = other DNA
tgctgtatcgcatggtaaaccattttgccaacctcgacttgcatcctgatgtagtgtctgaccgcgtattatcag

SEQ ID NO: 867182 - DNA, 75 bp, synthetic construct
  source 1..75: mol_type = other DNA
gctggatatgatgccggaaaacttctccgacacccgttgggcggctgatattcatatcaccccggatggtcgtca

SEQ ID NO: 867183 - DNA, 75 bp, synthetic construct
  source 1..75: mol_type = other DNA
cggcgtgtggtgactttcagacccgggcagaagttaaaaagccgggtcgaaaacgcttcgcccaaagacgagtaa

SEQ ID NO: 867184 - DNA, 75 bp, synthetic construct
  source 1..75: mol_type = other DNA
atgtctaagattaaaggtaacgttaagtggtttaatgagtccaaaggattcggtttcattactccggaagacggc

SEQ ID NO: 867185 - DNA, 75 bp, synthetic construct
  source 1..75: mol_type = other DNA
gcggttttgatgccaataacatcaagcaaggcaacaccttatcagacgatcagttacgtgccgacaagtttcact

SEQ ID NO: 867186 - DNA, 75 bp, synthetic construct
  source 1..75: mol_type = other DNA
cgtaaatcgcaaggcgataagcgcaagtacctgagtgatgaacagattgacgatattgtccgtgcgtacgatggc

SEQ ID NO: 867187 - DNA, 75 bp, synthetic construct
  source 1..75: mol_type = other DNA
tggctggatcgatcaaccttctgttgaactgtccaacgcgctgatgcaccaccctgacattaacctgattctcgc

SEQ ID NO: 867188 - DNA, 75 bp, synthetic construct
  source 1..75: mol_type = other DNA
ctggacagactgaggattcatcattatccaaaaatgagtacacagcaagtatagtatcgcttaatgatttagtta

SEQ ID NO: 867189 - DNA, 75 bp, synthetic construct
  source 1..75: mol_type = other DNA
ttcactcaagagcaagtagacaaaatcttccgcgccgccgctctggctgccgcagatgctcgaatcccactcgcg

SEQ ID NO: 867190 - DNA, 75 bp, synthetic construct
  source 1..75: mol_type = other DNA
cccttccggctcaggcactccggtctgatgctcgggacgtacaggaacatcagcccctgccgcactcccgtctgg

SEQ ID NO: 867191 - DNA, 75 bp, synthetic construct
  source 1..75: mol_type = other DNA
tggatacctactatggtcgtgattacgtagaaggagcaccagcagcaaaggaagcagctccagctaaagcagaga

SEQ ID NO: 867192 - DNA, 75 bp, synthetic construct
  source 1..75: mol_type = other DNA
gatcgccgtcaccaccacttccggtacaggttctgaagtgactccgtttgcggttgtaaccgacgacgcaacagg

SEQ ID NO: 867193 - DNA, 75 bp, synthetic construct
  source 1..75: mol_type = other DNA
tggcgcgtcatcagggagtctggtccggcgaggcggagcagtacctgctcgcccatgcagaggcgatttcccatg

SEQ ID NO: 867194 - DNA, 75 bp, synthetic construct
  source 1..75: mol_type = other DNA
ttgatcaggagatctgatcaagagacagcttcctggaaagaggccaatctgggtgaaaaccataaaaaagtaccc

SEQ ID NO: 867195 - DNA, 75 bp, synthetic construct
  source 1..75: mol_type = other DNA
gagaaaaaagtgcaggccgcaaaagtggtaacacatattcttgggctgaatgccgcgggcgaaaccacgcttgaa

SEQ ID NO: 867196 - DNA, 75 bp, synthetic construct
  source 1..75: mol_type = other DNA
gggtgaatatcatttgaaccgtgtcgttacagatgtaaggttccctctgttgaccgtttttaagcctgaaaaaag

SEQ ID NO: 867197 - DNA, 75 bp, synthetic construct
  source 1..75: mol_type = other DNA
gaatacgcccgtattacaaaaggaagaaacatcaaaaatattgtatcaatatcaaggtgccatgaaaaaaaaaca

SEQ ID NO: 867198 - DNA, 75 bp, synthetic construct
  source 1..75: mol_type = other DNA
atggagtgcgtagcgagcagcaatagtgcaatacctaatgtcgttgaggtaatacgtcgcatcaatgaaggttcc

SEQ ID NO: 867199 - DNA, 75 bp, synthetic construct
  source 1..75: mol_type = other DNA
ttatcgaggtcgatgctggccgtcaggtagacatcatcgtgaccaaaggaaccaagctacaaattcgttccaccg

SEQ ID NO: 867200 - DNA, 75 bp, synthetic construct
  source 1..75: mol_type = other DNA
gcaccgcttcctgactcgaagggtggggctcctgcaactggcaagggagacggtcgtgatgcaactaaaccaggc

SEQ ID NO: 867201 - DNA, 75 bp, synthetic construct
  source 1..75: mol_type = other DNA
aaaggcaattaccttgattctggcagtgctgctgggcggcatggttggcgcggggattgtgctggggcgtaacgc

SEQ ID NO: 867202 - DNA, 75 bp, synthetic construct
  source 1..75: mol_type = other DNA
ggccgtgggtaaaaagtggcagcacaaattccagccgggtcagcgttatgtgattcaggccaacctgcaactccc

SEQ ID NO: 867203 - DNA, 75 bp, synthetic construct
  source 1..75: mol_type = other DNA
agcatcggttatctaagaaaggcattgagtaaaggtcaagtgttaggggcatcgttatgtgtccttattgagcga

SEQ ID NO: 867204 - DNA, 75 bp, synthetic construct
  source 1..75: mol_type = other DNA
cggatatcaaagagtgtttcttgatcgcggcaggttacggtgatttgagctctgagcgtgcctatttgcgaggcg

SEQ ID NO: 867205 - DNA, 75 bp, synthetic construct
  source 1..75: mol_type = other DNA
gcagtacaggcattgtctcttatcaaaagaaatgctgaacaatgggcgctgaaaaaagataaaattggtgtactg

SEQ ID NO: 867206 - DNA, 75 bp, synthetic construct
  source 1..75: mol_type = other DNA
ataacgctgttcgtacgcattttgaaccttatgagcggcattttaaagagatcggatttactgaaaataccatta

SEQ ID NO: 867207 - DNA, 75 bp, synthetic construct
  source 1..75: mol_type = other DNA
ctgaaagcaaacccgcaaccagagctgttgaagcacaaagtcattgccagctgtttcttcgaagcctctacccgt

SEQ ID NO: 867208 - DNA, 75 bp, synthetic construct
  source 1..75: mol_type = other DNA
taacaccggttctcgccgccagtctgcgtgctaaccgctccacaacggaacgcgatgtaaaccagttaactccgc

SEQ ID NO: 867209 - DNA, 75 bp, synthetic construct
  source 1..75: mol_type = other DNA
accaatgcaacagccccagccgcgcagatacagcaacaaacgaactgacagcagtaagatggagcgtttcttttg

SEQ ID NO: 867210 - DNA, 75 bp, synthetic construct
  source 1..75: mol_type = other DNA
catggcgtgcttctgttcaccatggagatggcgaacatccagattggtgaacgtatggtgtctgctgccggtgga

SEQ ID NO: 867211 - DNA, 75 bp, synthetic construct
  source 1..75: mol_type = other DNA
agctggcaacaagctttcgacgaaattggcgctcgccttcaaagctatagtgatcccaatcaggttgaattctat

SEQ ID NO: 867212 - DNA, 75 bp, synthetic construct
  source 1..75: mol_type = other DNA
ttttctgctggggggcatatcgcctcaacgggtggggaatcagattcgtgatttcaaacgtacttctgacagtaa

SEQ ID NO: 867213 - DNA, 75 bp, synthetic construct
  source 1..75: mol_type = other DNA
ttttctgctggggggcatatcgcctcaacgggtggggaatcagattagtgatttcaaacgtccttctgacagtaa

SEQ ID NO: 867214 - DNA, 75 bp, synthetic construct
  source 1..75: mol_type = other DNA
aaaaaccggtgacagcgcataacgaaacgctgcatgtgctggagttgcgtgaacccacgtatgacgaaatcgagg

SEQ ID NO: 867215 - DNA, 75 bp, synthetic construct
  source 1..75: mol_type = other DNA
cacatgctgaagaaaatgaagctcaagtctcgcgtggaagcagcggtatgggtgcatcaggagcgcattttctga

SEQ ID NO: 867216 - DNA, 75 bp, synthetic construct
  source 1..75: mol_type = other DNA
gtgatcttgcgcacattatgaatggcataaaaaaagccggcatcatgccggcccaaaaatataaacaagacgata

SEQ ID NO: 867217 - DNA, 75 bp, synthetic construct
  source 1..75: mol_type = other DNA
ctaatcgctttggttatgaacaatatggtaaacatagtgaggatattctgatcttacccagcaatagtggacacg

SEQ ID NO: 867218 - DNA, 75 bp, synthetic construct
  source 1..75: mol_type = other DNA
gctgtgctgctgggcggtatggttggcgcggggattgtgctgggacgtaatgcgctgcgtaattacaacgcgaag

SEQ ID NO: 867219 - DNA, 75 bp, synthetic construct
  source 1..75: mol_type = other DNA
cgcggggagaactggagctgtgggcgcgtgagcatgatttacgctggattgaagacgaaagtaatcaggatgatt

SEQ ID NO: 867220 - DNA, 75 bp, synthetic construct
  source 1..75: mol_type = other DNA
tgggcgtgccgccgtggctgcgtgatactacgccactgctgttttatggcgaaacgttgattgcggcagcgggaa

SEQ ID NO: 867221 - DNA, 75 bp, synthetic construct
  source 1..75: mol_type = other DNA
cgtcgctatctgtcgcaactgtggtggattaaatccgttgccgggcaaagcgaaaccattgtgccgtggctggcg

SEQ ID NO: 867222 - DNA, 75 bp, synthetic construct
  source 1..75: mol_type = other DNA
gccgccgtggctacgtgacaccacgccactgctgttttatggcgaaacgctgattgcggcggcaggggtatttgt

SEQ ID NO: 867223 - DNA, 75 bp, synthetic construct
  source 1..75: mol_type = other DNA
gaaacgctgattgcggcggcggggatttttgtgacgcaagacggtgtggcagaagatgagaatggcgtaagtttt

SEQ ID NO: 867224 - DNA, 75 bp, synthetic construct
  source 1..75: mol_type = other DNA
gaaacgctgattgcggcggcggaggtttttgtgacgcaagacggtgtggccgaaggtgagaatggcgtaagtttt

SEQ ID NO: 867225 - DNA, 75 bp, synthetic construct
  source 1..75: mol_type = other DNA
ttgatgaagcagcaaaaagcgcaatgcaggcagaacttatttgttctctgatgatgggtaacacaggtgaaatga

SEQ ID NO: 867226 - DNA, 75 bp, synthetic construct
  source 1..75: mol_type = other DNA
gacgcgactggcagaagctggattgccgctcaacgtggaagtgaacagcaaacagctttactggccgttcactgg

SEQ ID NO: 867227 - DNA, 75 bp, synthetic construct
  source 1..75: mol_type = other DNA
cggcaactttatgccgtttgatatgcaaccgagccagcttgcggtcaactttaacggtatgcgctcgacgcttgc

SEQ ID NO: 867228 - DNA, 75 bp, synthetic construct
  source 1..75: mol_type = other DNA
gatgcccgtcgcgcggcgattatccgccgctggctggcagggcagaatgcaccgatgccttcccgcgacgcgctg

SEQ ID NO: 867229 - DNA, 75 bp, synthetic construct
  source 1..75: mol_type = other DNA
cgacgatcaatgtgaaacctttctgctggcgctaaaacgcggtagcggccctgccgggctttcggctatggggga

SEQ ID NO: 867230 - DNA, 75 bp, synthetic construct
  source 1..75: mol_type = other DNA
ctgagggtgagattgagtcattgctcgccctgattaagcagcttacaggtaaggctggtagctggctgattgcgg

SEQ ID NO: 867231 - DNA, 75 bp, synthetic construct
  source 1..75: mol_type = other DNA
ctttggctaaaaacctgatgtttgctcagaccaccaaaggtgtactggaaaccggtatttaccgtggcgtggtaa

SEQ ID NO: 867232 - DNA, 75 bp, synthetic construct
  source 1..75: mol_type = other DNA
agtatgcgaatcaggcgcaggtgacaaagccacaggttcagcagactgaagatgtgacgcaagatacgttgttcc

SEQ ID NO: 867233 - DNA, 75 bp, synthetic construct
  source 1..75: mol_type = other DNA
atttgcaggagacgttaattggtcgcttcagttctgccttctctgcattagcagaaacgctggataatcaggaag

SEQ ID NO: 867234 - DNA, 75 bp, synthetic construct
  source 1..75: mol_type = other DNA
tcatcatctctgtcattgttgctattgccctggctatagggtatctggccgttgccaaagaaaagtggacttcca

SEQ ID NO: 867235 - DNA, 75 bp, synthetic construct
  source 1..75: mol_type = other DNA
aaaaaccagccgttaccgttagctgtttcttatgttgggaaaacggcggcggatgcacagaaaaagctggctgaa

SEQ ID NO: 867236 - DNA, 75 bp, synthetic construct
  source 1..75: mol_type = other DNA
aaagctgaccattgagcctaccgttaaaaaccagtcgttaccattggcggtgtcttatgttggtgaaacacctga

SEQ ID NO: 867237 - DNA, 75 bp, synthetic construct
  source 1..75: mol_type = other DNA
actgcattctcagcattagcggaaacgctggataaccaggaagaagcagaaaagctgaccattgagcctaccgtt

SEQ ID NO: 867238 - DNA, 75 bp, synthetic construct
  source 1..75: mol_type = other DNA
ggcagaatatttaattgcggattcgcttgagagttcagggacttttgaaaatgatggtggtgggggaaggattac

SEQ ID NO: 867239 - DNA, 75 bp, synthetic construct
  source 1..75: mol_type = other DNA
cgttgcctgcggcaacgctctctcgctgacgctcgagccgaaccttagtcgaagcttctcatccttccccgcatg

SEQ ID NO: 867240 - DNA, 75 bp, synthetic construct
  source 1..75: mol_type = other DNA
ccgctgaccgtaacctggggtggtgaagtgattgctgctgatgcggcaaccacgtttaccgcaacgaaaatcttt

SEQ ID NO: 867241 - DNA, 75 bp, synthetic construct
  source 1..75: mol_type = other DNA
ctgggcaaaaccatgacccggaacagattgatttactggtgcagttgtggcgcggcaagatgacaattatcatct

SEQ ID NO: 867242 - DNA, 75 bp, synthetic construct
  source 1..75: mol_type = other DNA
gttttgatgagtggtttgatacacaaggtgaagatttacaggatgaaattttatctgtgttgcagatcctgaaag

SEQ ID NO: 867243 - DNA, 75 bp, synthetic construct
  source 1..75: mol_type = other DNA
ttttacaggagtgctgtctaagattctcaaaacacaggtctctacgtccgtttgctggggagagcggtcaattgc

SEQ ID NO: 867244 - DNA, 75 bp, synthetic construct
  source 1..75: mol_type = other DNA
cttcggtcgtggctttgaagaaatttgccacgcactggcagaaatcgccaccactcatcaggacatccagattgt

SEQ ID NO: 867245 - DNA, 75 bp, synthetic construct
  source 1..75: mol_type = other DNA
gaagggctaaaacctattcttgccgagtttaaaccagacgtcgtgctggttcacggtgataccactaccacactg

SEQ ID NO: 867246 - DNA, 75 bp, synthetic construct
  source 1..75: mol_type = other DNA
tataaagatgtggttttgtattttggctggtatttaattgtgtcatttctatttgtttttatttttagatggtgt

SEQ ID NO: 867247 - DNA, 75 bp, synthetic construct
  source 1..75: mol_type = other DNA
gtaggggtattattaactggcggatttatcgtatggctggcgatgttgtactggttatcgccaatactcgttgaa

SEQ ID NO: 867248 - DNA, 75 bp, synthetic construct
  source 1..75: mol_type = other DNA
tacagcgtgatgttgctggtgagcattatttttgcgttgctgtgctggcggcgctccccacaaccgggccgtggt

SEQ ID NO: 867249 - DNA, 75 bp, synthetic construct
  source 1..75: mol_type = other DNA
cagcgtcaggggattgagccggtactggccggcaaactggcacgcaaggtggctgcggctcaggcagcctatatg

SEQ ID NO: 867250 - DNA, 75 bp, synthetic construct
  source 1..75: mol_type = other DNA
tcgtcatcaatactggtatcgttacatcgccactgcgggtaactttgccctggcaccgccaaaagaatacgccta

SEQ ID NO: 867251 - DNA, 75 bp, synthetic construct
  source 1..75: mol_type = other DNA
atcgcaacagtaaaacaaacgttgacgctgccaagcgcgaatggaggctctatcagaagcgccaggccgctttaa

SEQ ID NO: 867252 - DNA, 75 bp, synthetic construct
  source 1..75: mol_type = other DNA
gaagaagcaagcgttcattgatgcactggtcatggcaggaacgtcacctgagcaagctgaaaaaatgtttatgga

SEQ ID NO: 867253 - DNA, 75 bp, synthetic construct
  source 1..75: mol_type = other DNA
gacgtggaaaacgctgaatataatcctgaaaatgctgggtttcccatcgagatggaaaacccgttcactgttcgc

SEQ ID NO: 867254 - DNA, 75 bp, synthetic construct
  source 1..75: mol_type = other DNA
gtgctcaaccagtggtagccgccagccgccccgacgtgaactcattgaatataatgtcgctggtggatttgatgc

SEQ ID NO: 867255 - DNA, 75 bp, synthetic construct
  source 1..75: mol_type = other DNA
agagatggaggctcgctttatctggcagacaaaaaatccctgacggtcagatacattgatataaaaccccgtgac

SEQ ID NO: 867256 - DNA, 75 bp, synthetic construct
  source 1..75: mol_type = other DNA
tttagccgtcggtacggcgcttggctcaaacattatcaatatcttgctgatcctcggtctgaccgcactggtgcg

SEQ ID NO: 867257 - DNA, 75 bp, synthetic construct
  source 1..75: mol_type = other DNA
gtgaacggcggcagcataatcatgcatctttgtccaaaatgttttggacaaaagatagtatcgatacttcaacca

SEQ ID NO: 867258 - DNA, 75 bp, synthetic construct
  source 1..75: mol_type = other DNA
atcaagaaataaatgcttctctcaaagctaaaattgcagaatttgaaaactttgaggctcagacggaaggttata

SEQ ID NO: 867259 - DNA, 75 bp, synthetic construct
  source 1..75: mol_type = other DNA
gcggcattaatgccgttaattgcacctttttgcgaacatttattcagtgagatgtttaatttgctggctgatatt

SEQ ID NO: 867260 - DNA, 75 bp, synthetic construct
  source 1..75: mol_type = other DNA
attggctaccgccagctggcggcgaaatgtggcctgactgaagccaaatgccgcaaccttgtcaacgcttaccgg

SEQ ID NO: 867261 - DNA, 75 bp, synthetic construct
  source 1..75: mol_type = other DNA
tccagccctagtgcaactatccttagccgcctggccaacgccatgaatgtaacgctatctaaactctttgcagag

SEQ ID NO: 867262 - DNA, 75 bp, synthetic construct
  source 1..75: mol_type = other DNA
atcaagaaataaatgcttctctcaaagctaaaattgcagaattcgaaaactttgaggctcagacggaaggctata

SEQ ID NO: 867263 - DNA, 75 bp, synthetic construct
  source 1..75: mol_type = other DNA
gtctcaagatcgccaagctgatcgagtccggcgcgaaagtctgggctgccgacgaatttggcgctgttctcgacc

SEQ ID NO: 867264 - DNA, 75 bp, synthetic construct
  source 1..75: mol_type = other DNA
gtctcaagatcgccaagctgatcgagtccggcgccaaagtctgggcagcagacgaatttggtgctgttctcgacc

SEQ ID NO: 867265 - DNA, 75 bp, synthetic construct
  source 1..75: mol_type = other DNA
tgactattggtctgacggcaatcgctatcggcacgagtctgccagaactggcaaccgcgatagccggtgttcgca

SEQ ID NO: 867266 - DNA, 75 bp, synthetic construct
  source 1..75: mol_type = other DNA
ggctttcctggctaagtctgtacttctggccgttactgcgcgtgctggcgctcatttctaccgcgccaattctga

SEQ ID NO: 867267 - DNA, 75 bp, synthetic construct
  source 1..75: mol_type = other DNA
cgagctacaacgccagatgaaagatgaagggctttctgtggcctccatcgataattttaatttcgacaatgaggt

SEQ ID NO: 867268 - DNA, 75 bp, synthetic construct
  source 1..75: mol_type = other DNA
gttccggcaaatccgttgtgctgcgcgagctgcaacaccagatgaaggatgaagggctatctgtggcctccatcg

SEQ ID NO: 867269 - DNA, 75 bp, synthetic construct
  source 1..75: mol_type = other DNA
aaaataaacaaatcatcttcactacccatagagaaatggtaaccactttattagacaagataaattataagacac

SEQ ID NO: 867270 - DNA, 75 bp, synthetic construct
  source 1..75: mol_type = other DNA
aacgtaacggttctctggggacgatttaccggcgtttttataacggacattttctgcctgtggatcaggaaagcg

SEQ ID NO: 867271 - DNA, 75 bp, synthetic construct
  source 1..75: mol_type = other DNA
tgatgctttacagggatgaagtatacaacccggatacgcaggccagaggtatcgcggaaatcaatataacgaaac

SEQ ID NO: 867272 - DNA, 75 bp, synthetic construct
  source 1..75: mol_type = other DNA
tccggagaaatagaggcggatgctgacatcattctgatgctttacagggatgaagtgtacaacccggatacgcag

SEQ ID NO: 867273 - DNA, 75 bp, synthetic construct
  source 1..75: mol_type = other DNA
tttaatgtttgattttgtctgcaaccatatgtcggcaaaaagtgaatggtttaaaaactatttacaacagcatcc

SEQ ID NO: 867274 - DNA, 75 bp, synthetic construct
  source 1..75: mol_type = other DNA
gattattactgagacgaatgttccgcataaagataacattgcttactttggcgaaggcgatgacgaagcgcatat

SEQ ID NO: 867275 - DNA, 75 bp, synthetic construct
  source 1..75: mol_type = other DNA
ccatgcgattttgttaagtttccccggtgtgccagcgatatatattcaaagtattctgggctcgcgtaatgatta

SEQ ID NO: 867276 - DNA, 75 bp, synthetic construct
  source 1..75: mol_type = other DNA
atgacctggaaggcgctgttattggcgcgttctttctgcgtggggcagatcctgaagtgatggatattctggcca

SEQ ID NO: 867277 - DNA, 75 bp, synthetic construct
  source 1..75: mol_type = other DNA
tgtcatcggtgcgttttttctgcgtggggctgatccggaagtgatggatattctggccacgcttccggcggatgt

SEQ ID NO: 867278 - DNA, 75 bp, synthetic construct
  source 1..75: mol_type = other DNA
cccggaaccggtaacgcctacctgacccgcaagggctttcccggccgggaatgccggatgctgaccggcacacac

SEQ ID NO: 867279 - DNA, 75 bp, synthetic construct
  source 1..75: mol_type = other DNA
ttcactggagcactatgtcgcagcgttgcggcgcaatgccgcactgcgtgatgcagaaaaaacactgactgaagc

SEQ ID NO: 867280 - DNA, 75 bp, synthetic construct
  source 1..75: mol_type = other DNA
cttctgttcacaatggaaatggcgaacatccagattggtgagcgcatggtatctgcggctggaggaatgccggta

SEQ ID NO: 867281 - DNA, 75 bp, synthetic construct
  source 1..75: mol_type = other DNA
acccggcgacctggtatttattgcggctcgtccttcgatgggtaaaaccgaactggcgctggatatcatcgacaa

SEQ ID NO: 867282 - DNA, 75 bp, synthetic construct
  source 1..75: mol_type = other DNA
gtggaaagagccgggaacaagctgcatccatctggaaaaacacatctgattatcaaactgttacggtcgattatt

SEQ ID NO: 867283 - DNA, 75 bp, synthetic construct
  source 1..75: mol_type = other DNA
ctcacgatggattcagatttatgctcgtcgtcctttaagagaagtttactatcttggcattgataaatgtgttcc

SEQ ID NO: 867284 - DNA, 75 bp, synthetic construct
  source 1..75: mol_type = other DNA
caaaaccagtattcattggtaataacgtttggttatgtgaaggtgttactgttaataaaggcagcatcattccag

SEQ ID NO: 867285 - DNA, 75 bp, synthetic construct
  source 1..75: mol_type = other DNA
aagcaccgttcggtgtatattgcagagcaactggctgactacttccgctcgcgcggtaaaaacgtccagtcacgc

SEQ ID NO: 867286 - DNA, 75 bp, synthetic construct
  source 1..75: mol_type = other DNA
aatagaagcagcaagggatatcagagttgaacttgatgctcataattatatctcgaacattttaactaaattggg

SEQ ID NO: 867287 - DNA, 75 bp, synthetic construct
  source 1..75: mol_type = other DNA
aaacattcaaggccgtagttattcatttgaagaaacaaaacctgatgctataaacagattaacaggtaaatcaac

SEQ ID NO: 867288 - DNA, 75 bp, synthetic construct
  source 1..75: mol_type = other DNA
tcagtaatgatttaataacaaacattcttcattacgcctcctatatacttaataaaccatatacaagtttcaatc

SEQ ID NO: 867289 - DNA, 75 bp, synthetic construct
  source 1..75: mol_type = other DNA
atctacagaggcatctgcagacaggcacgtgtttctggagtgattgaccctgtgctgctgtgtaatgagatgccg

SEQ ID NO: 867290 - DNA, 75 bp, synthetic construct
  source 1..75: mol_type = other DNA
caatggctgcaaagcattttttcacatgttcatttattacctttttatccatggtcatctgatgatggcttttcg

SEQ ID NO: 867291 - DNA, 75 bp, synthetic construct
  source 1..75: mol_type = other DNA
ggcgatgacgaagcgcatatggtgtaccagttctcgctgccgccgctggtgctgcatgcggtgcaaaaacagaac

SEQ ID NO: 867292 - DNA, 75 bp, synthetic construct
  source 1..75: mol_type = other DNA
aggcgaacctgaccattgatgagatatgcgcaacaacgaaacatcacctgattaaacatccggaaacggcgctgg

SEQ ID NO: 867293 - DNA, 75 bp, synthetic construct
  source 1..75: mol_type = other DNA
tggtggaccaggcaaacctgaccattgatgagatatgtgcaaccacgaagcaccaccggatcaaacacccggaaa

SEQ ID NO: 867294 - DNA, 75 bp, synthetic construct
  source 1..75: mol_type = other DNA
ggcgtaacgatgacctggaaggtgcggtgattggcgcgttttttctgcgtggggctgatccggaagtgatggata

SEQ ID NO: 867295 - DNA, 75 bp, synthetic construct
  source 1..75: mol_type = other DNA
tgcaggaagagaagaagaaaaaaggcgctaaaggggtaaccgcccgttggcaacgtcgaatgaaactcactccat

SEQ ID NO: 867296 - DNA, 75 bp, synthetic construct
  source 1..75: mol_type = other DNA
atggctcaaatcgaagcacgagcggaaaaagagttaaccaaaagactatttgacagtttaatgaatatctacatg

SEQ ID NO: 867297 - DNA, 75 bp, synthetic construct
  source 1..75: mol_type = other DNA
atgcaagacatggcgatatccttgctgttaatggccctccgggaaccggaaaaaccacgctggtgctttctatca

SEQ ID NO: 867298 - DNA, 75 bp, synthetic construct
  source 1..75: mol_type = other DNA
tctcgaaaaatctgagcctccggttattatcgcgacttcaacgaataaccaggctgtaacgaacattatcgaagc

SEQ ID NO: 867299 - DNA, 75 bp, synthetic construct
  source 1..75: mol_type = other DNA
aaaatagcgcagtttgcttcgcgctatcaatatgatcccgaactggctcgtggtatgtacctatatgaacaccgc

SEQ ID NO: 867300 - DNA, 75 bp, synthetic construct
  source 1..75: mol_type = other DNA
cacaagggacaacgtaaattcgagaaaagttatttgtatgattttgccgatttactcattgtcgatgaagccggg

SEQ ID NO: 867301 - DNA, 75 bp, synthetic construct
  source 1..75: mol_type = other DNA
aagatcaacggtcaggcgcagattctggaagggcagaaagtgaatctgttgcttaaacgcggtcagcaggaatac

SEQ ID NO: 867302 - DNA, 75 bp, synthetic construct
  source 1..75: mol_type = other DNA
tttatcgctgtcactaatcccccggtgtatgattttgctgattttcttaacgataatctggcaaaaatcgttggc

SEQ ID NO: 867303 - DNA, 75 bp, synthetic construct
  source 1..75: mol_type = other DNA
gctcacttatcatcacgtcagtcagttgagtaacagccaggatgcgctggctcgccgttggttattacgctgggg

SEQ ID NO: 867304 - DNA, 75 bp, synthetic construct
  source 1..75: mol_type = other DNA
ccagataaccatacaacgtgatgaacttctgaggttgattcacactaatacccttcaggatgcagtaatttatct

SEQ ID NO: 867305 - DNA, 75 bp, synthetic construct
  source 1..75: mol_type = other DNA
atccaggaatagcccctaatgctgaagaaaagaaaatgaaacacacagattctattgaattttctggaattcgga

SEQ ID NO: 867306 - DNA, 75 bp, synthetic construct
  source 1..75: mol_type = other DNA
cggtttttttgtgcgtactgtatcgccacgtctttttcgcacacgaattatggtggggcgtacggggccgacttc

SEQ ID NO: 867307 - DNA, 75 bp, synthetic construct
  source 1..75: mol_type = other DNA
tcgtttctgcggtgcggaaggtctgaacaatgtaatcaccctttccactttccgtaatagcgaattcctgaaagc

SEQ ID NO: 867308 - DNA, 75 bp, synthetic construct
  source 1..75: mol_type = other DNA
ctgaagatttcttcaaccaggttgagtcaaaagagtatgtagaagatgcactgctgttttatctcgagaaagcta

SEQ ID NO: 867309 - DNA, 75 bp, synthetic construct
  source 1..75: mol_type = other DNA
ctgaatcagacatttgaaaataccagtaaacacatcatgatagtttctccatggctgacctggcaaaggctggag

SEQ ID NO: 867310 - DNA, 75 bp, synthetic construct
  source 1..75: mol_type = other DNA
ccagcctcatctccacggggattactggcaaaatacctctttgagtcagagaagaatgcgctctcttttgattat

SEQ ID NO: 867311 - DNA, 75 bp, synthetic construct
  source 1..75: mol_type = other DNA
aacattttcccgagtattgataccgatgtttgcgccgcatcagtacgcaagtttaaccaactggcaactgagatc

SEQ ID NO: 867312 - DNA, 75 bp, synthetic construct
  source 1..75: mol_type = other DNA
cgatataatttgcttgaggctgaaacgatagcggtctggttggcagagaaccagcaaaatattgaagcgcattac

SEQ ID NO: 867313 - DNA, 75 bp, synthetic construct
  source 1..75: mol_type = other DNA
ttactgcagcatggtaaggaccgttccgcaggcgcgcctgatattgttaccccgatagtgacgccagccttgcta

SEQ ID NO: 867314 - DNA, 75 bp, synthetic construct
  source 1..75: mol_type = other DNA
atgctcggtacggcgatggataaagcggcggatgcacgcaccaaactggcgcgcctgctggcgaccaaaggcatc

SEQ ID NO: 867315 - DNA, 75 bp, synthetic construct
  source 1..75: mol_type = other DNA
aggacgatatccgtcatgcccagtggcgttgggatctggcgatcgcttcccacggcattcatatgcacgcaccgg

SEQ ID NO: 867316 - DNA, 75 bp, synthetic construct
  source 1..75: mol_type = other DNA
tccgctgagcgcgagcaaacaacataccggcagcagattgactccgcccatgaaatcattcttaaagaacagcag

SEQ ID NO: 867317 - DNA, 75 bp, synthetic construct
  source 1..75: mol_type = other DNA
aatacaactgtttctcgaagataaattaggggcgctgattgcaggaaatcagtggtctgatcctgaaactatcga

SEQ ID NO: 867318 - DNA, 75 bp, synthetic construct
  source 1..75: mol_type = other DNA
tcaacaaaaactggccaccgagttagagttttttccagtatcgattttccgattcgtttggtggtaacccaccat

SEQ ID NO: 867319 - DNA, 75 bp, synthetic construct
  source 1..75: mol_type = other DNA
cgatcgcttcccacggcattcatatgcacgcaccggaagaaggtctacggatgctcggtacggcgatggataaag

SEQ ID NO: 867320 - DNA, 75 bp, synthetic construct
  source 1..75: mol_type = other DNA
gcgttcgccattctgcgtccaggatcggatgctcgtaaaagccgccgccatattcgcgcgctgcgccgggatttt

SEQ ID NO: 867321 - DNA, 75 bp, synthetic construct
  source 1..75: mol_type = other DNA
gaaattgatgaggagaaggtcattgccctcagcaaaaatgccccggactggcgcaacccgctgtggcgacatacc

SEQ ID NO: 867322 - DNA, 75 bp, synthetic construct
  source 1..75: mol_type = other DNA
ttcgtttcccacaatgcggtgttccaggaacaaagcatggggatccactacaacaaaggggccgagctgctcgac

SEQ ID NO: 867323 - DNA, 75 bp, synthetic construct
  source 1..75: mol_type = other DNA
ttaactggctcactcgctgcggcgaaattttcaacaaagagagcgattatcttaccgggttggatcgtgaaatcg

SEQ ID NO: 867324 - DNA, 75 bp, synthetic construct
  source 1..75: mol_type = other DNA
tggtctggacagcagctacaccctgattcttgtcgacggtaaacgcgttaactcccgcaatgccgtcttccgcca

SEQ ID NO: 867325 - DNA, 75 bp, synthetic construct
  source 1..75: mol_type = other DNA
gctgtacggctccgatgcgctcggcggtgtagtgaatatcatcaccaaaaaaatcggtcagaaatggtcgggtac

SEQ ID NO: 867326 - DNA, 75 bp, synthetic construct
  source 1..75: mol_type = other DNA
tatcaagggcaaggtgctcaatgcgccggtctggcagctgatgggcgggctggtacgcgataaaatcaaagccta

SEQ ID NO: 867327 - DNA, 75 bp, synthetic construct
  source 1..75: mol_type = other DNA
ctgcataaactccgtaagatcaccggacctaccggagcgcctcgctttgtggcggaaagtgatgcagcaggtcac

SEQ ID NO: 867328 - DNA, 75 bp, synthetic construct
  source 1..75: mol_type = other DNA
ccatgccaggcgcagcatcggcactaacgctgcccgcctggtaaaaggaattcccttccgggaattccactcata

SEQ ID NO: 867329 - DNA, 75 bp, synthetic construct
  source 1..75: mol_type = other DNA
attaaacacatctttaaaattcgttattgaacgtgcaaagcaggcacaagttccaaagcacgttattgataaagc

SEQ ID NO: 867330 - DNA, 75 bp, synthetic construct
  source 1..75: mol_type = other DNA
aagtacgattacgatgcaagcccgcaaaggccgcgccagttatctcggtgaacgcagtattggtcaccaggatcc

SEQ ID NO: 867331 - DNA, 75 bp, synthetic construct
  source 1..75: mol_type = other DNA
gaaaaactccctgctatcgcagataaagatatcggtttcattctcaagaataccggtatgacgctgctttccagc

SEQ ID NO: 867332 - DNA, 75 bp, synthetic construct
  source 1..75: mol_type = other DNA
cgtgacattgcacagatgcgacaggcgctcaacgatgatgacgcctgggcacaggagtttgaactgaagtggctg

SEQ ID NO: 867333 - DNA, 75 bp, synthetic construct
  source 1..75: mol_type = other DNA
aaacaactaggtgtcgttaatggaatgccttcttgggtagacaggttagctccacctaattctgaactgagaaaa

SEQ ID NO: 867334 - DNA, 75 bp, synthetic construct
  source 1..75: mol_type = other DNA
aaacacaatattatgatgatcctcaacctcaggcggatcaacgaactggtacgtcatcaacatattgattatctg

SEQ ID NO: 867335 - DNA, 75 bp, synthetic construct
  source 1..75: mol_type = other DNA
aaacacaatatcatgatgatccttcatctccgacggatcaatgagctggttcgccatcaacatattcattatctg

SEQ ID NO: 867336 - DNA, 75 bp, synthetic construct
  source 1..75: mol_type = other DNA
acgggcattggtacgggggctgctgtgggtgcatctgtggcaggctccagcgctgcaatgggggccacgctcgga

SEQ ID NO: 867337 - DNA, 75 bp, synthetic construct
  source 1..75: mol_type = other DNA
gctagccaacaaaaatgcaacaaagataatatatgatggatacgttaaactttatgctctggaaatatatgaatg

SEQ ID NO: 867338 - DNA, 75 bp, synthetic construct
  source 1..75: mol_type = other DNA
atggtatgaaactaataaagttttgttggtaagtaataaaaaaatacgaacagagaagattgacgttgttgtacg

SEQ ID NO: 867339 - DNA, 75 bp, synthetic construct
  source 1..75: mol_type = other DNA
gtgggcggggattcgttcgccctggtgaaactgaaaaacaacaaaattggggtttttcaggaataaaaaaagcgg

SEQ ID NO: 867340 - DNA, 75 bp, synthetic construct
  source 1..75: mol_type = other DNA
attctctgttcgcctttgctcgtgaaaaaggagtggagttagatatttactatcccgtcctttcacattgcggag

SEQ ID NO: 867341 - DNA, 75 bp, synthetic construct
  source 1..75: mol_type = other DNA
ctgccttcttgcagcccgttaccatcttttactgtctgacctgtcacataacataatacttccgacagagaccca

SEQ ID NO: 867342 - DNA, 75 bp, synthetic construct
  source 1..75: mol_type = other DNA
acaagcagatggcggcgcaacagaaagcgcagaacaagcagaatatcggtacgggcattggtacgggggcggcta

SEQ ID NO: 867343 - DNA, 75 bp, synthetic construct
  source 1..75: mol_type = other DNA
gcgtggtggagagtccggcggacatctacgccattgagcagacggggcagttttcaggccgttattttgtgttga

SEQ ID NO: 867344 - DNA, 75 bp, synthetic construct
  source 1..75: mol_type = other DNA
gatcgtctggaacagcgtctggcagaggaaaaaatcactgaagtgatcctcgccaccaatcccacggttgaaggt

SEQ ID NO: 867345 - DNA, 75 bp, synthetic construct
  source 1..75: mol_type = other DNA
ttggcgcatccgttggtggtcctgttggtgctgttgctggagcagtaattggcggcattgctggttctttgtttt

SEQ ID NO: 867346 - DNA, 75 bp, synthetic construct
  source 1..75: mol_type = other DNA
cggcgttgccggcaccgactttatgctgaaaggtgaaaccgatgaactggcagcgctggtcgctcaacaacgcgt

SEQ ID NO: 867347 - DNA, 75 bp, synthetic construct
  source 1..75: mol_type = other DNA
aacgcgctggcggctaaacaagctgtgaccgaaccagaaatcgccagctactacgagcaaaacaaaaacaatttc

SEQ ID NO: 867348 - DNA, 75 bp, synthetic construct
  source 1..75: mol_type = other DNA
tgattggcggaggcaataactacgccgcaaaagtgaatgacctggaaatcagccgcgggcagtttgagaacgctt

SEQ ID NO: 867349 - DNA, 75 bp, synthetic construct
  source 1..75: mol_type = other DNA
taagctgtatgaatgctgttacggaaaaacgggttgtcgctgcttctgtacctggatggatgccagaatcagttg

SEQ ID NO: 867350 - DNA, 75 bp, synthetic construct
  source 1..75: mol_type = other DNA
tatttcatggtatctggaatataaagaaagtgaaataactgttaacgaggtgcctgtactggagaaaaagctgga

SEQ ID NO: 867351 - DNA, 75 bp, synthetic construct
  source 1..75: mol_type = other DNA
cgggaacagtagacattgatggtaatgtctatgctgtaaatttattatggggggattctttctctggtagtgaag

SEQ ID NO: 867352 - DNA, 75 bp, synthetic construct
  source 1..75: mol_type = other DNA
tcaggtctcgacttattattactggaaccagggaaaacgcaccgcctgttttttaatatttacgggcaacacaat

SEQ ID NO: 867353 - DNA, 75 bp, synthetic construct
  source 1..75: mol_type = other DNA
gacaacgcttcaccacgttgatgagctggatttaaatttcacgcaggcgaaaaaaatagccgcgacaaaaatcga

SEQ ID NO: 867354 - DNA, 75 bp, synthetic construct
  source 1..75: mol_type = other DNA
acaacaggcgctttcggttagcctttgttgcgatcaaccctgggtacaaatttatagcggtgaaaatttcagcgt

SEQ ID NO: 867355 - DNA, 75 bp, synthetic construct
  source 1..75: mol_type = other DNA
tgatccgcgggccaggtgcagggcgcgacgtcaccgccggggcgattcagtcggatattaaccgactggcgcagt

SEQ ID NO: 867356 - DNA, 75 bp, synthetic construct
  source 1..75: mol_type = other DNA
aagctggtgattctggcgcgtgaagcgggttacaacattgaaccggaccaggtacgtgttgaatcactggtgcct

SEQ ID NO: 867357 - DNA, 75 bp, synthetic construct
  source 1..75: mol_type = other DNA
caatatcggttcccgctggctggaactgttcgcccgtgagcagagtacgctttcggcacgtaccggctttgaatt

SEQ ID NO: 867358 - DNA, 75 bp, synthetic construct
  source 1..75: mol_type = other DNA
gattttcgtttttgttgtcgaatatattgcaggcgatataggttacaaatctatttataacgcagcgttattatt

SEQ ID NO: 867359 - DNA, 75 bp, synthetic construct
  source 1..75: mol_type = other DNA
tggcggcgctgctcgacagcggtattaacgacgcggtgtatgcggaagtggtgggccacggggaagtatggtcgg

SEQ ID NO: 867360 - DNA, 75 bp, synthetic construct
  source 1..75: mol_type = other DNA
tccgtcttccgcgcagaaaaacgcatcggcctggtattgttcggcaaaggcaatatcggttcccgttggctggaa

SEQ ID NO: 867361 - DNA, 75 bp, synthetic construct
  source 1..75: mol_type = other DNA
caaacgctgcgtcgctatcagtgcgatctgattagcggtctgctacccgccgaagaagccgatagcctcattagc

SEQ ID NO: 867362 - DNA, 75 bp, synthetic construct
  source 1..75: mol_type = other DNA
ttttatacatttgcttatcgtccctgctttttttctatgatgcaaaacatggcttgctgcctgacaggtttacct

SEQ ID NO: 867363 - DNA, 75 bp, synthetic construct
  source 1..75: mol_type = other DNA
tgtatcaattacggcgatgttcatcagtcaatacgctggaaaaaattattcataaaaacagagacagtttattga

SEQ ID NO: 867364 - DNA, 75 bp, synthetic construct
  source 1..75: mol_type = other DNA
tgatgaagggctttcttacccgttgctgcaacagctactggtgcaacatccgggcaaacgtctggtggtgaccgg

SEQ ID NO: 867365 - DNA, 75 bp, synthetic construct
  source 1..75: mol_type = other DNA
gacactcttggtgagcaagaagaacaaactttacaattatcagtggttaagttattaggtcaaaaaaatgatgaa

SEQ ID NO: 867366 - DNA, 75 bp, synthetic construct
  source 1..75: mol_type = other DNA
tctaaacttgtgtcaatatcagaagataattacttacctactagggaaggatatgatataggttttgacacatca

SEQ ID NO: 867367 - DNA, 75 bp, synthetic construct
  source 1..75: mol_type = other DNA
tttctgttactcacaaggttagtgacacttatattgacaaagactttcgtgggaaagaagtgttacctattggat

SEQ ID NO: 867368 - DNA, 75 bp, synthetic construct
  source 1..75: mol_type = other DNA
cacggaaaatgtttgctggaaccattataaaatataaagaaaaaataccatatacatctactagctcaaaaataa

SEQ ID NO: 867369 - DNA, 75 bp, synthetic construct
  source 1..75: mol_type = other DNA
aagcctgatccaggggttgcatcagtccgtatttcgcgcggaaaaacgcattggcctggttctgttcggcaaggg

SEQ ID NO: 867370 - DNA, 75 bp, synthetic construct
  source 1..75: mol_type = other DNA
ccatactaaactatattgacgagcgtatagaaaaacacccaataaatattaatgaccttgttcaattctcaggtt

SEQ ID NO: 867371 - DNA, 75 bp, synthetic construct
  source 1..75: mol_type = other DNA
tggcttcacaagttgtttattcgctcaacgcacacacgggtctttccgttgagatcgcaagccagaatatcggca

SEQ ID NO: 867372 - DNA, 75 bp, synthetic construct
  source 1..75: mol_type = other DNA
cctgaatggctggtttaaccgcatggaaaaactgaccgacgcctgtctggaaatcatcgacaacgcgccgtccac

SEQ ID NO: 867373 - DNA, 75 bp, synthetic construct
  source 1..75: mol_type = other DNA
atcggcccgcgtacccgtaaggccgtgagcctgtccaccccggactggttgctgacccgctgcattgtccgtcgt

SEQ ID NO: 867374 - DNA, 75 bp, synthetic construct
  source 1..75: mol_type = other DNA
tgagtctgtccaccccggactggttgctggcccgctgcattgtccgtcgttcccgcttttatgccgacatcatca

SEQ ID NO: 867375 - DNA, 75 bp, synthetic construct
  source 1..75: mol_type = other DNA
aagcctgattcaggggctgcatcagtccgtcttccgcgcggaaaaacgcatcggcctggtattgttcggcaaggg

SEQ ID NO: 867376 - DNA, 75 bp, synthetic construct
  source 1..75: mol_type = other DNA
aaaccaaatacggcatttctgaccgtcgcgatggcgttattgatggcaaaaccgatgttaacggtgacgggaagc

SEQ ID NO: 867377 - DNA, 75 bp, synthetic construct
  source 1..75: mol_type = other DNA
tatgtcaatgaccccactgaccgtggcggtgaaaccaaatacggcatttctgaccgccgcgacggtgtgattgac

SEQ ID NO: 867378 - DNA, 75 bp, synthetic construct
  source 1..75: mol_type = other DNA
tggaacatgcaatgtcacttggaacaaaattgcatgacagtctgcataatgcaatacaggaaaaaatttgcatag

SEQ ID NO: 867379 - DNA, 75 bp, synthetic construct
  source 1..75: mol_type = other DNA
aacaacgttatcaccctctccactttccgtaacgctgaattcctgcaagcctacggtgtggcaattgctgatggc

SEQ ID NO: 867380 - DNA, 75 bp, synthetic construct
  source 1..75: mol_type = other DNA
caatgtgattttcagccagctggttgatgaaatcaccaccgagccggattacgaagcagctctggctgtactgaa

SEQ ID NO: 867381 - DNA, 75 bp, synthetic construct
  source 1..75: mol_type = other DNA
ccagattcgttaccgtgcaacggcaattgatccgctacgttacttaccgcctcagggcagcaagccaaaatgctg

SEQ ID NO: 867382 - DNA, 75 bp, synthetic construct
  source 1..75: mol_type = other DNA
gagcatgggcgtgaaattcatgaaagcgattttcgtaagctggtaacagctggcaaggtaataagccagcatgag

SEQ ID NO: 867383 - DNA, 75 bp, synthetic construct
  source 1..75: mol_type = other DNA
ggaggttaccattacatttatggtggtccatacgatgcaagtgaagaactacaagcgatgtttgaaccatacgta

SEQ ID NO: 867384 - DNA, 75 bp, synthetic construct
  source 1..75: mol_type = other DNA
ggaccaggcgcagggcgcgatgtcaccgccggggcgattcagtcggatattaatcgtctggcgcagttgttgtaa

SEQ ID NO: 867385 - DNA, 75 bp, synthetic construct
  source 1..75: mol_type = other DNA
ccagcctgtttataaccagttccgctctcgccgcccccctctccgagcgcgaagagctaatcctgtccctcaacc

SEQ ID NO: 867386 - DNA, 75 bp, synthetic construct
  source 1..75: mol_type = other DNA
agcagcattccggctgttacagctgcacgccggagagctgaccgtacctgattatattcaggaggcactggcatg

SEQ ID NO: 867387 - DNA, 75 bp, synthetic construct
  source 1..75: mol_type = other DNA
cattaccgaggacggtatttccattcgtcaccgtggaaaaggaaggcagtgcttcatcaaaacggagtttgcgct

SEQ ID NO: 867388 - DNA, 75 bp, synthetic construct
  source 1..75: mol_type = other DNA
aggaatatcagttacccattaatgaacatagttcaaaagccgctattcacgggctgcttgcctggcgagactggc

SEQ ID NO: 867389 - DNA, 75 bp, synthetic construct
  source 1..75: mol_type = other DNA
gaacattacctcacccccgctcgcgctcagccgcgagatacggcgacactagtcggacaataccgtgaggagaaa

SEQ ID NO: 867390 - DNA, 75 bp, synthetic construct
  source 1..75: mol_type = other DNA
actggtctcaacgaacgctactacttcgattatccgcgtatccacagcgatatagccgccctgcgtagcgggatt

SEQ ID NO: 867391 - DNA, 75 bp, synthetic construct
  source 1..75: mol_type = other DNA
aatagtccttcatttactgtttcagcagcattctgcacttactcggatgttgatataaattttggggagttttca

SEQ ID NO: 867392 - DNA, 75 bp, synthetic construct
  source 1..75: mol_type = other DNA
ataaagagatcgaccaaatcctgaaacgtgctcaggtgcgcccactggcggttggcgtgcataacgatcgccagt

SEQ ID NO: 867393 - DNA, 75 bp, synthetic construct
  source 1..75: mol_type = other DNA
aacaccaccactaaacaacatcctgaagccatcccgcacccgtgcgcgggaggcttccgcacgtctgttaccgga

SEQ ID NO: 867394 - DNA, 75 bp, synthetic construct
  source 1..75: mol_type = other DNA
ggcgaaacgctggaaacccacgccccggatttctggcgctggcttgaccgcgccgccggtggcagaccggaaaag

SEQ ID NO: 867395 - DNA, 75 bp, synthetic construct
  source 1..75: mol_type = other DNA
ctgttagcgcgtgttcgtgctcagttagccgtgcagttgccgtattacctgctgccccaacatttctttcttctc

SEQ ID NO: 867396 - DNA, 75 bp, synthetic construct
  source 1..75: mol_type = other DNA
ggtagttccaaccctgtacgtctcaccaccccgagcttggaacctctggatggtgagttttcaaaactaactaac

SEQ ID NO: 867397 - DNA, 75 bp, synthetic construct
  source 1..75: mol_type = other DNA
agttaccgatgcgttggcgcattatcgcctggtcgccgggcgcgggaatatccgtggaagcgaaggtccgcgcaa

SEQ ID NO: 867398 - DNA, 75 bp, synthetic construct
  source 1..75: mol_type = other DNA
ccctactcccctatcccctcatgtatttgcccgcgtttgtgtggtgaaacctgacgaactggtgcctattcccgg

SEQ ID NO: 867399 - DNA, 75 bp, synthetic construct
  source 1..75: mol_type = other DNA
cccctggaacgacacgtccactggcaattctggacttaggtgcaggctctaccgatgcctccatcatcaatcaga

SEQ ID NO: 867400 - DNA, 75 bp, synthetic construct
  source 1..75: mol_type = other DNA
aaaactggaaaatgtgacgggcgaaccgggcaccaacatcggcggaatgctggaacatgttcgccagaccatggc

SEQ ID NO: 867401 - DNA, 75 bp, synthetic construct
  source 1..75: mol_type = other DNA
tgtctttgcccgcgtttgtgtggtgaaacccgacgagctggtgccgcttcccggcgatttaacactggaaaaagt

SEQ ID NO: 867402 - DNA, 75 bp, synthetic construct
  source 1..75: mol_type = other DNA
tctggtgacgttaaagctcgttcgatacccgccggaaacattgagctgctttctgccgggcgcacaatgcgggtc

SEQ ID NO: 867403 - DNA, 75 bp, synthetic construct
  source 1..75: mol_type = other DNA
gtaaaaatcttcaatttacaggaaataatggagaggttattttacacgactctatagatcaaggggctggctatc

SEQ ID NO: 867404 - DNA, 75 bp, synthetic construct
  source 1..75: mol_type = other DNA
agctgggccgggtcctctgttagccggtagttccaaccctgtacgtctcaccaccccgagcttggaacctctgga

SEQ ID NO: 867405 - DNA, 75 bp, synthetic construct
  source 1..75: mol_type = other DNA
gattacattgacgctatggatgcaccatatgctgacttaccagatgaactgcgttcttacattgaacttctcaat

SEQ ID NO: 867406 - DNA, 75 bp, synthetic construct
  source 1..75: mol_type = other DNA
gaattgtcgttcgtgagcagcgccctggcagaaaccaccggaatcaaaggtacgttgcgtaacgtacatggcatt

SEQ ID NO: 867407 - DNA, 75 bp, synthetic construct
  source 1..75: mol_type = other DNA
tgaacggtaccggttcggcagacggtggttacagcgataactacacgcacgttcagattggtgcagacagaaagc

SEQ ID NO: 867408 - DNA, 75 bp, synthetic construct
  source 1..75: mol_type = other DNA
gtccaggtgacttatattatgtttctgcatcaaatacttactttatcctgaaatcaaaggcgtacggtccatttt

SEQ ID NO: 867409 - DNA, 75 bp, synthetic construct
  source 1..75: mol_type = other DNA
gcttgccggtgctgagcgatttgaacattgccgctatgtgcaatgcagcatctacgctttcctgcgtgagccgca

SEQ ID NO: 867410 - DNA, 75 bp, synthetic construct
  source 1..75: mol_type = other DNA
gtggttcttattctgttgatgatattcatgatgacggctgtttaacatatgccgcaaatcaggacgatagtcact

SEQ ID NO: 867411 - DNA, 75 bp, synthetic construct
  source 1..75: mol_type = other DNA
aaaatcgtcagtttacaatggataaactgaggcttgatgcagcaacattccatctctccagaaatgctcatatgc

SEQ ID NO: 867412 - DNA, 75 bp, synthetic construct
  source 1..75: mol_type = other DNA
cttgatttaaatggaaataatgtaacctttactcgtcttcaggctgcagattatggtgctattatttctaataat

SEQ ID NO: 867413 - DNA, 75 bp, synthetic construct
  source 1..75: mol_type = other DNA
aaaattttatttctgccgaagaactcgataccgctaacctcaatgttaaagcgatgcaggccagtgttgatgccg

SEQ ID NO: 867414 - DNA, 75 bp, synthetic construct
  source 1..75: mol_type = other DNA
tgggttcgtctcgcccaacgcgttcccgtccgctttgcgctggataagttccaggcgatgtcacgctggtgtcgg

SEQ ID NO: 867415 - DNA, 75 bp, synthetic construct
  source 1..75: mol_type = other DNA
caccgaaagatgatcagactgcatacggcatcactgttccggcttttgattgttttggttttggatgtgtttctg

SEQ ID NO: 867416 - DNA, 75 bp, synthetic construct
  source 1..75: mol_type = other DNA
taaatatctccatcatgataatcggtatacgttgaattttgcctccctgggggaaagaagctataccacccattc

SEQ ID NO: 867417 - DNA, 75 bp, synthetic construct
  source 1..75: mol_type = other DNA
aaattcggaaatcaaagagctgaaagccaacgactcccaaatagagttaggtggaagagggcattttgcaaaact

SEQ ID NO: 867418 - DNA, 75 bp, synthetic construct
  source 1..75: mol_type = other DNA
ttcaaatcgtgaaacagcagaagattgaggaaagctctcaaccttatatgtttcatggacaacttaatggttata

SEQ ID NO: 867419 - DNA, 75 bp, synthetic construct
  source 1..75: mol_type = other DNA
ttacaatggagatataataaaaattcaggagtgggaacattaagtcaagagaacgttgtgtgggacatgcatgga

SEQ ID NO: 867420 - DNA, 75 bp, synthetic construct
  source 1..75: mol_type = other DNA
agatggaactggtttatggttcggtatcaggaaagtcatttaactggaaagaccagggaatgcaattgagtatga

SEQ ID NO: 867421 - DNA, 75 bp, synthetic construct
  source 1..75: mol_type = other DNA
tatgggagatttacgggatagtcagggagatgctggagggtgggcgcgtatcatgaatggtaccggttcaggtga

SEQ ID NO: 867422 - DNA, 75 bp, synthetic construct
  source 1..75: mol_type = other DNA
gatccgttgcattcatcccccatcgtcagcgcaccggcgaagctttcggtgctggatgccaacggcagtctgttg

SEQ ID NO: 867423 - DNA, 75 bp, synthetic construct
  source 1..75: mol_type = other DNA
gcttataccgcacaggaagcgatcgagcatctgcatttacagggcgatcatgtgcagaatattgcagccgcagtc

SEQ ID NO: 867424 - DNA, 75 bp, synthetic construct
  source 1..75: mol_type = other DNA
attatcgcgaagtacattgttcggctggctaatgtgccgctgagtacggtagatcagatgaaacccggcgacctg

SEQ ID NO: 867425 - DNA, 75 bp, synthetic construct
  source 1..75: mol_type = other DNA
taacttttcccgggaatattattcaggacagcactattaatatgctgcgcctcagcgatcccgacgctgcactca

SEQ ID NO: 867426 - DNA, 75 bp, synthetic construct
  source 1..75: mol_type = other DNA
gtaaatcagcagctggccgctgcggcaaatgaagtatggctggtggtttcgggtattggagtaaaaatcaaatga

SEQ ID NO: 867427 - DNA, 75 bp, synthetic construct
  source 1..75: mol_type = other DNA
caggcgctggataaaacgccgtggtcgctgcaggacgtggcaaaaatctgcatcaacgaggccgcaccggtgatt

SEQ ID NO: 867428 - DNA, 75 bp, synthetic construct
  source 1..75: mol_type = other DNA
gccgcgctggagcaggccctggcgaaaacaccgtggtcgatgagcgatgtctctcgcatctatcttaacgaagcc

SEQ ID NO: 867429 - DNA, 75 bp, synthetic construct
  source 1..75: mol_type = other DNA
atgcaagaatggcccccgtggtgttgtcaggtgcatacctgcaacgtgcgggggttttctctctccagcaaccaa

SEQ ID NO: 867430 - DNA, 75 bp, synthetic construct
  source 1..75: mol_type = other DNA
gtaataattttatggttgagacactcaacaaaaacaacccgtggacgcgttactacctggcgcgtgaactgcggt

SEQ ID NO: 867431 - DNA, 75 bp, synthetic construct
  source 1..75: mol_type = other DNA
cgccctggttttatggcacgtatagcccctaaccagcgtaatggagagggaaaccgccgtatcaccggtgatttt

SEQ ID NO: 867432 - DNA, 75 bp, synthetic construct
  source 1..75: mol_type = other DNA
atgaagaggtgctgcggtgcgactggtccgtgggcacaggtgacattgtctgcggaaatgatttgcagacggcca

SEQ ID NO: 867433 - DNA, 75 bp, synthetic construct
  source 1..75: mol_type = other DNA
tatttgccgccgacgggggactggcaggagttcaaattcttctggctatgggagcaactgaataatgccatttaa

SEQ ID NO: 867434 - DNA, 75 bp, synthetic construct
  source 1..75: mol_type = other DNA
ttgcgtttcgtttgatgaaaaacaacacgccgggcaactataccttcatcctgaaggggacgaaggaagtgccac

SEQ ID NO: 867435 - DNA, 75 bp, synthetic construct
  source 1..75: mol_type = other DNA
acgaagtgggaatggggattgtgccggagagtcgtctggcacgacattttcgtgatattgccgggcgggtaaatc

SEQ ID NO: 867436 - DNA, 75 bp, synthetic construct
  source 1..75: mol_type = other DNA
agattaaagatcgcctggaaaaacaggtggatttgatcattcacggtggctacctcggccagaaaccgacgacgg

SEQ ID NO: 867437 - DNA, 75 bp, synthetic construct
  source 1..75: mol_type = other DNA
tcactttttcggtgctgtatacccgtaacggtcagtacagttttcagaacgccgggatcaaagttgccgttcccc

SEQ ID NO: 867438 - DNA, 75 bp, synthetic construct
  source 1..75: mol_type = other DNA
aaagggcaattcgttctgcctcctgctcgttatgtgcgttcctatgcacctgcacagcaaagtgttgcgccaggg

SEQ ID NO: 867439 - DNA, 75 bp, synthetic construct
  source 1..75: mol_type = other DNA
actggctggcgaaatatatggcgacaatgcctccggttgtgttgcctgcgcctgcgggcgcatgggccaaacata

SEQ ID NO: 867440 - DNA, 75 bp, synthetic construct
  source 1..75: mol_type = other DNA
agattgacagcgatgcgctgtatctcgatgaaatcacgctgaccagcgagcaggatgccgttctgcgctacggtc

SEQ ID NO: 867441 - DNA, 75 bp, synthetic construct
  source 1..75: mol_type = other DNA
caaaaagccggggtttcaatctcttttttgtcggacctaacaaatggaaaagcgaacccatctttaagggtgatg

SEQ ID NO: 867442 - DNA, 75 bp, synthetic construct
  source 1..75: mol_type = other DNA
ggagtgaatcgacacgccataagctggggcaggaagcaaaagaattacttgcagaactccagcaactccagcaaa

SEQ ID NO: 867443 - DNA, 75 bp, synthetic construct
  source 1..75: mol_type = other DNA
ggcacgacattttcgtgatattgccgggcgggtaaatcagcagttggccgctgcggcaaatgaagtatggctggt

SEQ ID NO: 867444 - DNA, 75 bp, synthetic construct
  source 1..75: mol_type = other DNA
cgacgggctggtcgggcaggggcgtgcttatctgcgttcggaaaaaaatctctacatgaagtggagtatgccaac

SEQ ID NO: 867445 - DNA, 75 bp, synthetic construct
  source 1..75: mol_type = other DNA
ccagtgggggcatgggccaaacagaaagctgtcggagggggcgaatactggcgctgggtcggtcagggtgtgcct

SEQ ID NO: 867446 - DNA, 75 bp, synthetic construct
  source 1..75: mol_type = other DNA
atgctcggcggtggcgagaacgcgctgatgttgcccgagcaggctagcaatatccggctacaaagtagcgaaacg

SEQ ID NO: 867447 - DNA, 75 bp, synthetic construct
  source 1..75: mol_type = other DNA
tcattttgaagctggcccagtgcaatctgttatcacaactgccagtggtttttaatcaaccccccgaacagatct

SEQ ID NO: 867448 - DNA, 75 bp, synthetic construct
  source 1..75: mol_type = other DNA
ggtgaattttatttcaccatgttgttactttgggtgctgcttatcggtctggccatcgtttatgtcggcccctgc

SEQ ID NO: 867449 - DNA, 75 bp, synthetic construct
  source 1..75: mol_type = other DNA
atggaggatcaagaacgtgttgtcaatgggttgcaaggcgtcctgcgcggcgaatgctactttacgcaaaagctt

SEQ ID NO: 867450 - DNA, 75 bp, synthetic construct
  source 1..75: mol_type = other DNA
tattgcgaaagcgtgtgaagaagccgcagaaggtcaggtcgtttctccggtaaactttaactctccgggacaggt

SEQ ID NO: 867451 - DNA, 75 bp, synthetic construct
  source 1..75: mol_type = other DNA
gccgaaaccgtacaggatgctccccggaaaaagaccggcaataacgccagacaggcgaaaaaggctcgcgcatga

SEQ ID NO: 867452 - DNA, 75 bp, synthetic construct
  source 1..75: mol_type = other DNA
ctggcagaagtgcgttgcagtcgtatgcagtttcgtcgtgcggggttcctgttcatgcggggacgccagcaggtt

SEQ ID NO: 867453 - DNA, 75 bp, synthetic construct
  source 1..75: mol_type = other DNA
agtctcactctctggaaatcctcggtaaagtgttcgttgtcgctgaagctgctacgaccgtcaagatgggcactg

SEQ ID NO: 867454 - DNA, 75 bp, synthetic construct
  source 1..75: mol_type = other DNA
ttacggctctgagcttcggttgcttccgtcatgatggcgaacatatcaccgtcgtcctttcccgtgatggcgatt

SEQ ID NO: 867455 - DNA, 75 bp, synthetic construct
  source 1..75: mol_type = other DNA
gtggtccgtaccatcaacgctcgcatggtcgacgttctggagtcctccaagctgctgaagaccgtagagctgcca

SEQ ID NO: 867456 - DNA, 75 bp, synthetic construct
  source 1..75: mol_type = other DNA
cgcttactataatgggactgaccgcggcctgttcatgttggctaaacagttcacctgtctgtcttttggctgtct

SEQ ID NO: 867457 - DNA, 75 bp, synthetic construct
  source 1..75: mol_type = other DNA
ctgaccgctctgtagtcgttcctgtcggtggcggtaaggctccggttgcagtcactgctgccgctggtagtgaaa

SEQ ID NO: 867458 - DNA, 75 bp, synthetic construct
  source 1..75: mol_type = other DNA
gctacgaccatcaagatgaccagtgggtccgctactgcggtcctgcctgtggtcaagcgtcttaagtttgccacc

SEQ ID NO: 867459 - DNA, 75 bp, synthetic construct
  source 1..75: mol_type = other DNA
atgacgcaatttgcatttgtgttccctggacagggctctcaaaccgttgggatgctggctgatatagcggcgagc

SEQ ID NO: 867460 - DNA, 75 bp, synthetic construct
  source 1..75: mol_type = other DNA
aatgaccggacatggcctgcatcacagcgacattggcggttataccaccctgtttgagatgaagcgcagcaaaga

SEQ ID NO: 867461 - DNA, 75 bp, synthetic construct
  source 1..75: mol_type = other DNA
tatgacctcttttggcaaacgcgtaatgtggaactggaagtggaacagcgaaaactacccgcaactggattcacg

SEQ ID NO: 867462 - DNA, 75 bp, synthetic construct
  source 1..75: mol_type = other DNA
cgtcggtcgtcccggcagcgctgtcgctggcaatgaccggacatggtttgcatcacagtgacattggcggttata

SEQ ID NO: 867463 - DNA, 75 bp, synthetic construct
  source 1..75: mol_type = other DNA
gctgggacgccagccagaactgccggactgggtttatgacggggtgacgctcggcattcagggcggcaccgaggt

SEQ ID NO: 867464 - DNA, 75 bp, synthetic construct
  source 1..75: mol_type = other DNA
taggtcgcgacattctggttgctccggtacacgaagaaggtcgcagcgactggacgctctatctgccggaggata

SEQ ID NO: 867465 - DNA, 75 bp, synthetic construct
  source 1..75: mol_type = other DNA
atggatacgccacgcccacaattaccagattttcaatttcatcagaataacgacagttttaccctacattttcaa

SEQ ID NO: 867466 - DNA, 75 bp, synthetic construct
  source 1..75: mol_type = other DNA
caggagaaactgcatcagccgattatcatcaccgaatacggtgtggatacgttagccgggctgcactcaatgtac

SEQ ID NO: 867467 - DNA, 75 bp, synthetic construct
  source 1..75: mol_type = other DNA
tgcgctggcgtgattgatttcgctgatgcggtgcgtctggttgagatgcgcggtaagtttatgcaagaagccgta

SEQ ID NO: 867468 - DNA, 75 bp, synthetic construct
  source 1..75: mol_type = other DNA
gttgagcgtgcgggtgctgcttgtaaagctgcgggcgcaaaacgcgctctgccgctaccagtgagcgtaccgtct

SEQ ID NO: 867469 - DNA, 75 bp, synthetic construct
  source 1..75: mol_type = other DNA
cgaaatgtaactacgaagcccttgaagaaacgggcaagctcggcgagatccttttctttatgcgcgccggttcta

SEQ ID NO: 867470 - DNA, 75 bp, synthetic construct
  source 1..75: mol_type = other DNA
gggcgacaactggcagttcgatggcgacgcggagaccattgcgcattttgcccgcatgacgaccgtcttcaccac

SEQ ID NO: 867471 - DNA, 75 bp, synthetic construct
  source 1..75: mol_type = other DNA
cggcgatttggaaacggcagagaaggtactggaaaaagaacttctggcctggcaggagaaactgcatcagccgat

SEQ ID NO: 867472 - DNA, 75 bp, synthetic construct
  source 1..75: mol_type = other DNA
agtcccacgacttggaaatcctcggtaaagtgttcgttgtcgctgaagctgctacgaccatcaagatgggcactg

SEQ ID NO: 867473 - DNA, 75 bp, synthetic construct
  source 1..75: mol_type = other DNA
caaaccaggaatgcgttttcagggcgatctccgccgcaatgtgcaaatggtgtttcaggatccctatgcctcgtt

SEQ ID NO: 867474 - DNA, 75 bp, synthetic construct
  source 1..75: mol_type = other DNA
tcaaatgttaaccgtacgattgctaacgttcgcacaattttcaataaaaaaggcggcaatatcggagcggcaggt

SEQ ID NO: 867475 - DNA, 75 bp, synthetic construct
  source 1..75: mol_type = other DNA
ttacagcaggacttgcaggcactgacaccggaaaactgtcagacacggttcccgaccactgagggctttttcttt

SEQ ID NO: 867476 - DNA, 75 bp, synthetic construct
  source 1..75: mol_type = other DNA
gtggaattagtggtgcggaaaaatacaggcgtaacgttaacacccgctggtcaattattgctctcacgctccgaa

SEQ ID NO: 867477 - DNA, 75 bp, synthetic construct
  source 1..75: mol_type = other DNA
tgggatcatctgaagcccatgccgtcagcgaactgtctgacattatggtcaagatttccggagaacgtttcaata

SEQ ID NO: 867478 - DNA, 75 bp, synthetic construct
  source 1..75: mol_type = other DNA
cggcaatgatgaccggggggaaaattcaacgatttttcgatcgcaacgccctggaaaaggtgagcatcggatgga

SEQ ID NO: 867479 - DNA, 75 bp, synthetic construct
  source 1..75: mol_type = other DNA
ttgtaatatctttatcacgccaacaatttaccttctgctcaacgtctttatgctgacgctgggggcgataataat

SEQ ID NO: 867480 - DNA, 75 bp, synthetic construct
  source 1..75: mol_type = other DNA
ttgtaatatctttatcacgccaacaatttaccttctgctcaacatttttatgctggcgctgggcgcattaatgct

SEQ ID NO: 867481 - DNA, 75 bp, synthetic construct
  source 1..75: mol_type = other DNA
acagccactcgttttacgccattggttattttgaagaaaccaaattgcgccatatccggggcggtgcgccagcac

SEQ ID NO: 867482 - DNA, 75 bp, synthetic construct
  source 1..75: mol_type = other DNA
agctggggatcaactgggacacgctggcgtgtgcgttatcgtgtgtcagagatgctgagcagaagggactcgata

SEQ ID NO: 867483 - DNA, 75 bp, synthetic construct
  source 1..75: mol_type = other DNA
gaaccggagccggatgggggtgaagagaacctacttcgcaccttgttttctcgtcacaaagccaggctacggcaa

SEQ ID NO: 867484 - DNA, 75 bp, synthetic construct
  source 1..75: mol_type = other DNA
gaacccatgacgccggtttcgtcgggttccgtgtcgcacgaacagttggggtggcggatgattaccggcaggaat

SEQ ID NO: 867485 - DNA, 75 bp, synthetic construct
  source 1..75: mol_type = other DNA
tgaaagatgaggttattgctcgtatcgcagctaaacacaatgcgactccggcacaagtgattctggcgtgggcta

SEQ ID NO: 867486 - DNA, 75 bp, synthetic construct
  source 1..75: mol_type = other DNA
tggtgacggaccgcttcctacaaggctctgttagccaggaagcgtatcaacagtccggtgccatgctggaactga

SEQ ID NO: 867487 - DNA, 75 bp, synthetic construct
  source 1..75: mol_type = other DNA
aggcgggtaagttagagaagtgggacacactgctgaatcacgattctcttgctgatttggttcggggacgcattc

SEQ ID NO: 867488 - DNA, 75 bp, synthetic construct
  source 1..75: mol_type = other DNA
ctttcgataacacgcgaacaaggtgttatcgagagagacgtggataatcaagagtcaaatcacaattttatacca

SEQ ID NO: 867489 - DNA, 75 bp, synthetic construct
  source 1..75: mol_type = other DNA
tgcccgccgccggacaccgtttatgcctatgccaatagtctgcaacgtaccgttgcgaccgcacagttctttatt

SEQ ID NO: 867490 - DNA, 75 bp, synthetic construct
  source 1..75: mol_type = other DNA
accacggttccccagatttttattgacgcacagcacattggcggctgtgatgacttgtatgcattggatgcacgt

SEQ ID NO: 867491 - DNA, 75 bp, synthetic construct
  source 1..75: mol_type = other DNA
gctgtggctcagcgttcagtcttttgtgagcggaatatggacgcgactggatccgactgctcgtaccgtgatgcg

SEQ ID NO: 867492 - DNA, 75 bp, synthetic construct
  source 1..75: mol_type = other DNA
aggggctaatgatgctgtaaacctaatcagggagagcgaatattcgactctttgcgacatgtgcaaaagccagtt

SEQ ID NO: 867493 - DNA, 75 bp, synthetic construct
  source 1..75: mol_type = other DNA
atcatgtcacagagcttcttgccccttatcgcttagaaagcgatcagcgcaagatgattagctggggaagttggt

SEQ ID NO: 867494 - DNA, 75 bp, synthetic construct
  source 1..75: mol_type = other DNA
tacacgtatggggtgaaccttcttgtgcacggcgttctgcattagttgtttttattagcaaagaaaacccgctca

SEQ ID NO: 867495 - DNA, 75 bp, synthetic construct
  source 1..75: mol_type = other DNA
gtatatccggaggccagcatccagttatgcatcgtgcatatggtgcgcaacagcctgcgcttcgtgtcatggaag

SEQ ID NO: 867496 - DNA, 75 bp, synthetic construct
  source 1..75: mol_type = other DNA
ggcctgaaagaattcccggaggcccgcatccagttatgcatcgtgcatatggtgcgcaacagcatgcgcttcgtg

SEQ ID NO: 867497 - DNA, 75 bp, synthetic construct
  source 1..75: mol_type = other DNA
cgatatcctcatcgcctgtgtgtatggcctgaaagaattcccggaggcccgcatccagttatgcatcgtgcatat

SEQ ID NO: 867498 - DNA, 75 bp, synthetic construct
  source 1..75: mol_type = other DNA
ttcttaccacgactggttttccttgctgcctcattcgcttgcggagccgtagttattggtctgctcatgagagga

SEQ ID NO: 867499 - DNA, 75 bp, synthetic construct
  source 1..75: mol_type = other DNA
gggtgcgattgaagggttaaaagaaattaaactctttaaccgtcgggatgagtttttcgataaagccctcgcctt

SEQ ID NO: 867500 - DNA, 75 bp, synthetic construct
  source 1..75: mol_type = other DNA
atggatgttaccgcaaaatacgaattgattgggttgatggcctatcctatccgccacagtttatcgcctgaaatg

SEQ ID NO: 867501 - DNA, 75 bp, synthetic construct
  source 1..75: mol_type = other DNA
ccctgggttatccctgcactgatgtgctcgctcgctgggttaatgaacgttatcccgacagacgacgtatattta

SEQ ID NO: 867502 - DNA, 75 bp, synthetic construct
  source 1..75: mol_type = other DNA
taagctactcacacaggaagaatgggagaagacattcaatcttgataatctgattgctccgaagttcgaacaata

SEQ ID NO: 867503 - DNA, 75 bp, synthetic construct
  source 1..75: mol_type = other DNA
gcttgcgaccaattaattgatggtaagtaccgggaacagtttgtgaccgactggcttcagggaggagccggaacg

SEQ ID NO: 867504 - DNA, 75 bp, synthetic construct
  source 1..75: mol_type = other DNA
ttaaaaatgcgtttcatggtcgcacgctgtttaccgtcagtgcgggcggtcagccagcctattcacaggattttg

SEQ ID NO: 867505 - DNA, 75 bp, synthetic construct
  source 1..75: mol_type = other DNA
acaaataataacacccgcaaaagaaatatatgttaaagctgatggattgcttaatgtaaaggctaacagcgcaga

SEQ ID NO: 867506 - DNA, 75 bp, synthetic construct
  source 1..75: mol_type = other DNA
gtggtgacagctggacttactctgataactatatgaccggcagaacaaccggagttctgacctggcgcaatacag

SEQ ID NO: 867507 - DNA, 75 bp, synthetic construct
  source 1..75: mol_type = other DNA
atgcgaaaattaagtatggttgtgtgctctgtcgtttctgcattaatgctgtgtgaggcaacacaggcagcagaa

SEQ ID NO: 867508 - DNA, 75 bp, synthetic construct
  source 1..75: mol_type = other DNA
tgctgcctggcgtttaccagcagaactctgggttatccctgtaccgatgtgctcgtttgctgggttaatgaacgt

SEQ ID NO: 867509 - DNA, 75 bp, synthetic construct
  source 1..75: mol_type = other DNA
aatacgccgccggcagatggagctggatattctgaaaaaggcggaggaaatcataaaaaaagaacccgggacatc

SEQ ID NO: 867510 - DNA, 75 bp, synthetic construct
  source 1..75: mol_type = other DNA
taaacatcaataaaccacccccatcaaagaaaacaaccaatcttcaggccagagttatcaaaagactaatcaccg

SEQ ID NO: 867511 - DNA, 75 bp, synthetic construct
  source 1..75: mol_type = other DNA
tgtgaaaaaagcagctgcgatggctaataaggagttaggtacaattcctgctgatgttgcggatgctttaatctg

SEQ ID NO: 867512 - DNA, 75 bp, synthetic construct
  source 1..75: mol_type = other DNA
tcatccccagttacaacggcgcgcgtaaacaggctaacttgacgccattattggcgattctgctgcataaactcg

SEQ ID NO: 867513 - DNA, 75 bp, synthetic construct
  source 1..75: mol_type = other DNA
gcgcgatctggatcaggatacggcgcgcggtctgtatgcccatatgctcaatggcgaagtgcctgaccttgagtt

SEQ ID NO: 867514 - DNA, 75 bp, synthetic construct
  source 1..75: mol_type = other DNA
cgaaggtgaggcactgcgtctttccagcgtttcgcatccggaatacatcgggcgagtcgcgaagttctttagcga

SEQ ID NO: 867515 - DNA, 75 bp, synthetic construct
  source 1..75: mol_type = other DNA
gttctactttgtggggaagagggcgttggtaaagccctgttaagtcaggcaattcataatgaaagcgagcgggca

SEQ ID NO: 867516 - DNA, 75 bp, synthetic construct
  source 1..75: mol_type = other DNA
tgcggcaattgatgaccagtcaattaggcaaagttagtcatacttttgctcatatgccacaggatgatccgcaaa

SEQ ID NO: 867517 - DNA, 75 bp, synthetic construct
  source 1..75: mol_type = other DNA
tgtgaaggagatacacgcagacatttcccgcgcctgactgagagagcgcaggaaccggaaccacaaccagttcga

SEQ ID NO: 867518 - DNA, 75 bp, synthetic construct
  source 1..75: mol_type = other DNA
ttgatttcgctcgatcgtcaggagcgtggtcgcggcgagatttcggcaattcaggaagttgagcgtgattacaac

SEQ ID NO: 867519 - DNA, 75 bp, synthetic construct
  source 1..75: mol_type = other DNA
cggcacgctgtttcttgaaaagattgaatatctggcggtggagttacagtctgctttgcttcaggttatcaagca

SEQ ID NO: 867520 - DNA, 75 bp, synthetic construct
  source 1..75: mol_type = other DNA
gcggggccttatatcgccgtcaattgtgagttatatggtgatgcggcgctggcggaagaatttattggtggcgat

SEQ ID NO: 867521 - DNA, 75 bp, synthetic construct
  source 1..75: mol_type = other DNA
tgatgggtattacgccaacgttgcacggcgggcaggcgcaggcgaagctcgacgaacatcaaccggtgtttatgc

SEQ ID NO: 867522 - DNA, 75 bp, synthetic construct
  source 1..75: mol_type = other DNA
tggcgaaactggcgacgccatttgccgaaggtgaggcgctgcgtctttccagcgtttcgcatccggaatacattg

SEQ ID NO: 867523 - DNA, 75 bp, synthetic construct
  source 1..75: mol_type = other DNA
cgctggcggagcatcatgaccttgacctgccgtactgctttaaccgcaaagaagcaaaagaccacggtgaaggcg

SEQ ID NO: 867524 - DNA, 75 bp, synthetic construct
  source 1..75: mol_type = other DNA
tttacaatcaaaactttactactgttaataaagacaactttgtcaaagcattctttgattccttagaagatattg

SEQ ID NO: 867525 - DNA, 75 bp, synthetic construct
  source 1..75: mol_type = other DNA
ctggcaacgttatctggataaaaaagagcacatctctcatgaaatgttagatgtcagtgaaatcaccaccactgc

SEQ ID NO: 867526 - DNA, 75 bp, synthetic construct
  source 1..75: mol_type = other DNA
ctgcctatctcaattgctgcaattatcggcatggcgatcgcccacttcttctggcaacgttatctggataaaaaa

SEQ ID NO: 867527 - DNA, 75 bp, synthetic construct
  source 1..75: mol_type = other DNA
gcgaccgcgccagctgcgacagaaatatcatcagatgaaagatctgattcgcgaaacgcgcaaaaaactggggca

SEQ ID NO: 867528 - DNA, 75 bp, synthetic construct
  source 1..75: mol_type = other DNA
aataaaaaagtcatagatatgactcgtcctcgtaatgactcacctgaagacgttcattacaaacgtgttcttttt

SEQ ID NO: 867529 - DNA, 75 bp, synthetic construct
  source 1..75: mol_type = other DNA
tgctggcggcggtgactacgggttccggcaatgcgccattctatgcattcgttgagatgatcccgaaactggcgc

SEQ ID NO: 867530 - DNA, 75 bp, synthetic construct
  source 1..75: mol_type = other DNA
attacacatcatcactattctggtgatttgtatgctgattgcctccattctggagttcctccgcagctttaatac

SEQ ID NO: 867531 - DNA, 75 bp, synthetic construct
  source 1..75: mol_type = other DNA
ctgggcgtgaaggtttttgccctgccggatggcgatgtcgccgccagcgtgctgacctgctggcaggataatcct

SEQ ID NO: 867532 - DNA, 75 bp, synthetic construct
  source 1..75: mol_type = other DNA
aacagttgcaggaaggtttacgccatccggtttttccgctttatctggggcgaaaaagccatccgctggcattac

SEQ ID NO: 867533 - DNA, 75 bp, synthetic construct
  source 1..75: mol_type = other DNA
cagccgtaacccgcgctgggcacgggattatcacacggtccagatgccaaaagaggtgcgtaaagcgcgttattt

SEQ ID NO: 867534 - DNA, 75 bp, synthetic construct
  source 1..75: mol_type = other DNA
tttgtcacccagcaaatgctgcaacacgcgctttcacaattaagcgaaaaagagcaactgatcctctccatgtat

SEQ ID NO: 867535 - DNA, 75 bp, synthetic construct
  source 1..75: mol_type = other DNA
tgaaagatctgattcgcgaaacgcgcaaaaaactggggcacgaaccggagtggtcagaactggccgtggaaggga

SEQ ID NO: 867536 - DNA, 75 bp, synthetic construct
  source 1..75: mol_type = other DNA
agcagggttataagaatatcggatttatcggtgcgcatatggacaaccgcctgcaacgtcagcaactgaacggct

SEQ ID NO: 867537 - DNA, 75 bp, synthetic construct
  source 1..75: mol_type = other DNA
acagattgcgatgcttaatggttgcacctggctacccgtcagctgggcgcgtaaaaaaggcggcctgcataccgt

SEQ ID NO: 867538 - DNA, 75 bp, synthetic construct
  source 1..75: mol_type = other DNA
acagcgattgcagaagataatgaggactgggcgcaatttacccaaactcaggcgacaagcacatcctctaatggt

SEQ ID NO: 867539 - DNA, 75 bp, synthetic construct
  source 1..75: mol_type = other DNA
agccctcaacgatggcgcgcggaccattggcggtagcacggcggtttatgtcagttgcctgacgacggctaacaa

SEQ ID NO: 867540 - DNA, 75 bp, synthetic construct
  source 1..75: mol_type = other DNA
cttatgggctggcaactccgctcactgcaacattgatgcgcgacaccacaaaaagtgccacgatggatgttattt

SEQ ID NO: 867541 - DNA, 75 bp, synthetic construct
  source 1..75: mol_type = other DNA
gacggtacacgtccgcagtttggccgcaacgatccctgcccttgtggttcaggtaaaaatttaaaaagtgctgcg

SEQ ID NO: 867542 - DNA, 75 bp, synthetic construct
  source 1..75: mol_type = other DNA
aatgaattagagttgttgcacactgtttttaattcactgggatggccgtcttcaccaagttttccttatttgtcc

SEQ ID NO: 867543 - DNA, 75 bp, synthetic construct
  source 1..75: mol_type = other DNA
tctcaaacgtgaaggatcgacaaatcgccagaatgtacagttgtcgaacagaactatcactgtaatcaacgctgc

SEQ ID NO: 867544 - DNA, 75 bp, synthetic construct
  source 1..75: mol_type = other DNA
attcaaccgactgctcgcgcatttcaactttttggttcagttcgtcaggcattgcaactagtacaaaatgaattg

SEQ ID NO: 867545 - DNA, 75 bp, synthetic construct
  source 1..75: mol_type = other DNA
ctacacgctttccttggggttggtaaacgctttgcatcgtggataacagaacgtattgctgaatatggtttcgtt

SEQ ID NO: 867546 - DNA, 75 bp, synthetic construct
  source 1..75: mol_type = other DNA
ccagctcccgctttatgcagtcgttgcagcaggtgcttaataaaaatgaattccagctactgcttgggtgtcatg

SEQ ID NO: 867547 - DNA, 75 bp, synthetic construct
  source 1..75: mol_type = other DNA
attttaaagcggtttctttgaagactggttataaatcggagatcatgccaagcagtataggtctgctaagctgtc

SEQ ID NO: 867548 - DNA, 75 bp, synthetic construct
  source 1..75: mol_type = other DNA
catttgtgtcctgtctggtaaaccctcatgcagtggcagcttctatagagatgacctccacggcactggatgcgg

SEQ ID NO: 867549 - DNA, 75 bp, synthetic construct
  source 1..75: mol_type = other DNA
atgttcaagtcttcattaaatcagaacactgaacatcagctgcgttatcaggaaacggagtttgtgattagttat

SEQ ID NO: 867550 - DNA, 75 bp, synthetic construct
  source 1..75: mol_type = other DNA
acattgcaaaatttaacgcaatggaagaagaactccacaaacaaccaccagaagcaccaaactccccaacccaaa

SEQ ID NO: 867551 - DNA, 75 bp, synthetic construct
  source 1..75: mol_type = other DNA
agcgttttaagttttatctggaacagcaaggctggatagttgcccgtaaggagcaactgttggaaaggttaatgt

SEQ ID NO: 867552 - DNA, 75 bp, synthetic construct
  source 1..75: mol_type = other DNA
taaattttatctggagcaacacgggtggatcgttgcccgtaaagaacaactagtggaaaggctgatgcgtattta

SEQ ID NO: 867553 - DNA, 75 bp, synthetic construct
  source 1..75: mol_type = other DNA
agttactggggcattttactttagcactctataccagtgccccttctaagctaaaaggtgagcttaactatctcc

SEQ ID NO: 867554 - DNA, 75 bp, synthetic construct
  source 1..75: mol_type = other DNA
tcctggaagttagccgaacgcgtcactttggtcgagcggctgaatcgctctatctgacccaatcagccgtgagct

SEQ ID NO: 867555 - DNA, 75 bp, synthetic construct
  source 1..75: mol_type = other DNA
actgggtgtgaaccttttcacccgccacaggaataatatccgtttgaccgctgcaggagaaaagctcctgcctta

SEQ ID NO: 867556 - DNA, 75 bp, synthetic construct
  source 1..75: mol_type = other DNA
ggctcggttttttctggagaacggggagcaaaaacacgcaaaggattttgaggcggcaaaagagcaatgcaggat

SEQ ID NO: 867557 - DNA, 75 bp, synthetic construct
  source 1..75: mol_type = other DNA
gcagaaatcgggacaggatgtgcaaatgtaataccgtcacccgcgacgatattccgtttgccatctggtcagggc

SEQ ID NO: 867558 - DNA, 75 bp, synthetic construct
  source 1..75: mol_type = other DNA
cggtgatcccggtgttgttcttttggggatgagtcgccagatagcccctcaaacgcgctcaaaagctctcagacg

SEQ ID NO: 867559 - DNA, 75 bp, synthetic construct
  source 1..75: mol_type = other DNA
attaccgtcgcagcgtcgggtaacacagaaacgaccgttaagaatattgcattcaactacatagtgagactcgca

SEQ ID NO: 867560 - DNA, 75 bp, synthetic construct
  source 1..75: mol_type = other DNA
ccattaccgtcgccgcgtcgggcaacgcagaaacgaccgttaagaatattgcatttaactacatagtgagactcg

SEQ ID NO: 867561 - DNA, 75 bp, synthetic construct
  source 1..75: mol_type = other DNA
atgagcgccagcgcctggaaaatatggatatttatggcgcggcggcgttttttggtaacgggtatctggtagcca

SEQ ID NO: 867562 - DNA, 75 bp, synthetic construct
  source 1..75: mol_type = other DNA
gtgagaacccgtgtaactcgaaggcgacatatgacgcgccatgcgtctttttttgtgtcgcaatcaacgccacag

SEQ ID NO: 867563 - DNA, 75 bp, synthetic construct
  source 1..75: mol_type = other DNA
gagacagcaacactgtgctggcgagaggccctgacagaagaggaagtcagaacgacaagctatgtcgatctcgaa

SEQ ID NO: 867564 - DNA, 75 bp, synthetic construct
  source 1..75: mol_type = other DNA
ttcgaaagtttgacgagattgcttcaagagccagaacagcagcagaacagacttttaggtgggccaatgttgctg

SEQ ID NO: 867565 - DNA, 75 bp, synthetic construct
  source 1..75: mol_type = other DNA
attacacaacaagagaagcttcaatcgtctggggtgtgattatctgttgttgaccgttctgacgggggccagaaa

SEQ ID NO: 867566 - DNA, 75 bp, synthetic construct
  source 1..75: mol_type = other DNA
tcataaaccggggcagatgattgtggatgagtgcttcggtgcaggcactgacgtccgttcgctgaccggcgcgca

SEQ ID NO: 867567 - DNA, 75 bp, synthetic construct
  source 1..75: mol_type = other DNA
ttactctttctggcggcgtgggcgaatgttatcgccatcagcccgctgacccgttctgttttgccgatattgggc

SEQ ID NO: 867568 - DNA, 75 bp, synthetic construct
  source 1..75: mol_type = other DNA
aaagcgttgattctggtgccatcatcatcaccggtgaaagcgcgaaaacccgcaatgctcgcccggcggtgatga

SEQ ID NO: 867569 - DNA, 75 bp, synthetic construct
  source 1..75: mol_type = other DNA
tcgtcaacaccttcttggcaggtctaaaccagctaaacccaacacacttaatgtcctgaacaaagcagaaaacag

SEQ ID NO: 867570 - DNA, 75 bp, synthetic construct
  source 1..75: mol_type = other DNA
gatcaagcccgcgaggttgctcgcaatttagttcaaaccatgaagttgaccaaaaggaaccctaacaagataaaa

SEQ ID NO: 867571 - DNA, 75 bp, synthetic construct
  source 1..75: mol_type = other DNA
agacccagcaacgacaaccttctctatcttacaaccctttcagtatcttaaaggtacagaaaaagtttaggacac

SEQ ID NO: 867572 - DNA, 75 bp, synthetic construct
  source 1..75: mol_type = other DNA
ctcaacaaagacaaccatcactgtcatacaatccattttcaattctaaaagtgcagaaaaaattcaggactcgat

SEQ ID NO: 867573 - DNA, 75 bp, synthetic construct
  source 1..75: mol_type = other DNA
tgcgacgaactttcggcaggattgcagaagagcttacttcttatgctgtcgttaagagactgctcaaccaccgta

SEQ ID NO: 867574 - DNA, 75 bp, synthetic construct
  source 1..75: mol_type = other DNA
taggctgtgattacctgctgttgacggttctcttaggtgcccgtaaggaagaaacagcttctctgtgctggcgag

SEQ ID NO: 867575 - DNA, 75 bp, synthetic construct
  source 1..75: mol_type = other DNA
caaaggttgcgaatgacgtcaatgacgtcattttgcggcgtttgccctatcctgcatcgcatcgaactgacatgc

SEQ ID NO: 867576 - DNA, 75 bp, synthetic construct
  source 1..75: mol_type = other DNA
atgagtcttttcaatgacgttcagaaattcattgaagcccatccggggtgtacttccggggacattgcggatgct

SEQ ID NO: 867577 - DNA, 75 bp, synthetic construct
  source 1..75: mol_type = other DNA
atgagtctatttaatgacgttcagaaattcattgaagcccatccggggtgtacttccggagacattgcggatgct

SEQ ID NO: 867578 - DNA, 75 bp, synthetic construct
  source 1..75: mol_type = other DNA
atgagtctattaaatgacgttcagaaattcattgaagcccatccggggtgtacttccggtgacattgcggatgct

SEQ ID NO: 867579 - DNA, 75 bp, synthetic construct
  source 1..75: mol_type = other DNA
cgcgtcgtgaacggtgtttacggaaaagcagcaagcgcgctgtatcgggtgatgagtggtatctgtcagggaatt

SEQ ID NO: 867580 - DNA, 75 bp, synthetic construct
  source 1..75: mol_type = other DNA
agttttccattttgagaaaaagagtaaagcattctcaaaagaaagttatggattgtattattgctgaccataatg

SEQ ID NO: 867581 - DNA, 75 bp, synthetic construct
  source 1..75: mol_type = other DNA
atgagtcttttgaatgacgttcagaaattcattgaagcccatccggggtgtacttccggcgacattgcggatgct

SEQ ID NO: 867582 - DNA, 75 bp, synthetic construct
  source 1..75: mol_type = other DNA
ctctggtgcgggaaaaaccacactgcttaaaacattatcccactgctggccgtggtttaaaggtgatatttcttc

SEQ ID NO: 867583 - DNA, 75 bp, synthetic construct
  source 1..75: mol_type = other DNA
atcgcttgtatgagttccatcaactcaccgaacagcgccctacgaataagcctaaaaattgccaacatgcggtac

SEQ ID NO: 867584 - DNA, 75 bp, synthetic construct
  source 1..75: mol_type = other DNA
cgctttagccggcaactttattacgcgctgcatgcgtttgaaattactatcccgccgctgcgtatgcggcgcggc

SEQ ID NO: 867585 - DNA, 75 bp, synthetic construct
  source 1..75: mol_type = other DNA
cctttcatttggcttcatccagtcacttagcatgctgatcacctttaccgttattctttggcaaagcgcgggtac

SEQ ID NO: 867586 - DNA, 75 bp, synthetic construct
  source 1..75: mol_type = other DNA
atgctaattgcaaagtacctctgcttgctgaagcctttttggctacgtaagaataataaaacttcagtattatta

SEQ ID NO: 867587 - DNA, 75 bp, synthetic construct
  source 1..75: mol_type = other DNA
atgaatcgtcagcggtggcttgattactggcaaaatatttattcgcgctcgcttagcgctgagagatcccctcat

SEQ ID NO: 867588 - DNA, 75 bp, synthetic construct
  source 1..75: mol_type = other DNA
cgcgtcgtgagcggtgtttacggaaaagcagcaagcgcgctgcatcgggtgaagagtggtatctgtcagggaatt

SEQ ID NO: 867589 - DNA, 75 bp, synthetic construct
  source 1..75: mol_type = other DNA
gaaatgacgctggttgatacgccgaacgcgaaaaccatcgctgaactggttgaacagttcaatctgccgattgag

SEQ ID NO: 867590 - DNA, 75 bp, synthetic construct
  source 1..75: mol_type = other DNA
ggccgagaaactttacagcgaactgcgtgcgcagggaatcgaagtcctgctggatgaccgtaaagaacgtccggg

SEQ ID NO: 867591 - DNA, 75 bp, synthetic construct
  source 1..75: mol_type = other DNA
cgtaccgttgcggcgatgagtgatttcgctgctggtgctaacatcgatggtaaacactacttcggcatcaactgg

SEQ ID NO: 867592 - DNA, 75 bp, synthetic construct
  source 1..75: mol_type = other DNA
cgatattgaatacaaatatcgtcgtaatggcgagaaacagttaatcaagaccggtgatatcgtcgattttctgct

SEQ ID NO: 867593 - DNA, 75 bp, synthetic construct
  source 1..75: mol_type = other DNA
ttgggaatcccataagttctactggaggatttttattccgttcttagctgctttagtggctttttgttcttatac

SEQ ID NO: 867594 - DNA, 75 bp, synthetic construct
  source 1..75: mol_type = other DNA
acgttgctggtgtggatattctgcgtgctaatcgcgggccgttggtgatggaggtgaatgcgtcgccggggctgg

SEQ ID NO: 867595 - DNA, 75 bp, synthetic construct
  source 1..75: mol_type = other DNA
gtgcaggaatatatcaaagaggcgcaagggtgcgatatccgctgtctggttgttggcgatgaagtggtcgctgcg

SEQ ID NO: 867596 - DNA, 75 bp, synthetic construct
  source 1..75: mol_type = other DNA
actacgacgaacgcggcatcgtatggcctgacgcgatcgcaccgttccaggtagcgattctgcctatgaatatgc

SEQ ID NO: 867597 - DNA, 75 bp, synthetic construct
  source 1..75: mol_type = other DNA
taaaatggcagtggtgtaaaaaacgcgaagtacaaggtaaatcaaccgaacctgatttgcggtcctgtgcaaata

SEQ ID NO: 867598 - DNA, 75 bp, synthetic construct
  source 1..75: mol_type = other DNA
tgataatgatgcttgtcttgtgtatgtccaaggtgagctttatgagaataaatattcactcattgctattatgta

SEQ ID NO: 867599 - DNA, 75 bp, synthetic construct
  source 1..75: mol_type = other DNA
atctgaagaaaaagctcttgagtgggccgactcttttatcacagaagaagtggaagaagcccgcgctggacagaa

SEQ ID NO: 867600 - DNA, 75 bp, synthetic construct
  source 1..75: mol_type = other DNA
aggcgataaaaaacggagatatgccaccagctattgactggttttccattcgcccaaccagggtgaaagcattcc

SEQ ID NO: 867601 - DNA, 75 bp, synthetic construct
  source 1..75: mol_type = other DNA
acagtatcaagatagataaaccccgcagggtatataaacgaacaaaagaaaatgaagcaaatagacaagatttag

SEQ ID NO: 867602 - DNA, 75 bp, synthetic construct
  source 1..75: mol_type = other DNA
caaaggatgccgttcttgtctcagagagaaataaagttcaggatgtaaagaaaatagtcgaacaaattaaaaatt

SEQ ID NO: 867603 - DNA, 75 bp, synthetic construct
  source 1..75: mol_type = other DNA
ctatcattatggcaggtggttcaggcagtcggttgtggccactatcaagaattctctatccgaaacaatttctta

SEQ ID NO: 867604 - DNA, 75 bp, synthetic construct
  source 1..75: mol_type = other DNA
gcacaaaaccaattattacaccggcctcaccgaatctgatcttgcagctcttaacaccaggtatcatctgcttat

SEQ ID NO: 867605 - DNA, 75 bp, synthetic construct
  source 1..75: mol_type = other DNA
tgtttccacgatgattatcggcaccctgccagtggtgatacccgtctttgccaatctgctttatagccagcgcga

SEQ ID NO: 867606 - DNA, 75 bp, synthetic construct
  source 1..75: mol_type = other DNA
aagttatgagaagcgccgaaaaaatcagggcatacaaaccaatctcacgctaagagaggaaagcaacgccgactg

SEQ ID NO: 867607 - DNA, 75 bp, synthetic construct
  source 1..75: mol_type = other DNA
agcacggcataacgccagagtttattgatgagatcaggacggatatgcagcgtgaggtcgtatcgtccctgcaaa

SEQ ID NO: 867608 - DNA, 75 bp, synthetic construct
  source 1..75: mol_type = other DNA
aataaccgtagcgcgaagcgtatggccaccgcctttaagttgatggcgcaacgtatcaatgatgagttacagcac

SEQ ID NO: 867609 - DNA, 75 bp, synthetic construct
  source 1..75: mol_type = other DNA
ctacccttcgcgaagacccttcagaggctgaaacagttagtcataagttgcttttaagggccggaatgataagaa

SEQ ID NO: 867610 - DNA, 75 bp, synthetic construct
  source 1..75: mol_type = other DNA
ctgaatataaataggctaaatgatagaaccattttaaacagttatgatattgttcactctcatggcttaagaccc

SEQ ID NO: 867611 - DNA, 75 bp, synthetic construct
  source 1..75: mol_type = other DNA
tgagctgatggcgcatacctattcccatctgtacagcatcccgaccaccgggctgcgcttctttacggtctatgg

SEQ ID NO: 867612 - DNA, 75 bp, synthetic construct
  source 1..75: mol_type = other DNA
gacacccagccgctgtatgacctggtgggtttcaagccacagacgtcagtgaaggaaggggtgaaaaacttcgtc

SEQ ID NO: 867613 - DNA, 75 bp, synthetic construct
  source 1..75: mol_type = other DNA
tggatctggccgaccgggaaggtatggcaaagctgttcgccgtagagcaatttgatcgcgtgatccacctggcgg

SEQ ID NO: 867614 - DNA, 75 bp, synthetic construct
  source 1..75: mol_type = other DNA
agctgatgtcgtatacttattcccatctgtataacctgccgaccactggtctgcgtttctttaccgtgtatggcc

SEQ ID NO: 867615 - DNA, 75 bp, synthetic construct
  source 1..75: mol_type = other DNA
gaagaagcactcggcaaagaagcagagaaaaacatgatgccgattcaaccgggtgacgtgctggaaaccagcgcg

SEQ ID NO: 867616 - DNA, 75 bp, synthetic construct
  source 1..75: mol_type = other DNA
tggaagggaaaagtattgacgtctacaactacggcaaaatgaagcgcgactttacctatatcgacgacatcgtcg

SEQ ID NO: 867617 - DNA, 75 bp, synthetic construct
  source 1..75: mol_type = other DNA
tacacttatttgaatcattaactaccgagcaaaagattgatatcgcaagacgcttgctacaaaacaaagaaataa

SEQ ID NO: 867618 - DNA, 75 bp, synthetic construct
  source 1..75: mol_type = other DNA
ttgagcaacgctcgcaatctttgcgcagaaatagaacagtatccagaaagttattcagctatgtcaaaaagtgaa

SEQ ID NO: 867619 - DNA, 75 bp, synthetic construct
  source 1..75: mol_type = other DNA
caaccttatgtatttgcttttacttccaactttcgtgttttctctgatcttgacatatccaagaatgaattccgt

SEQ ID NO: 867620 - DNA, 75 bp, synthetic construct
  source 1..75: mol_type = other DNA
acattggcaacagctcgccagtggaactgatggactacatcaccgctctggaagaggcgctggggatggaagcga

SEQ ID NO: 867621 - DNA, 75 bp, synthetic construct
  source 1..75: mol_type = other DNA
accgttgagcatctgaacgctgctttggcgggcttgggtattgataacattgttatcgaagttaatgcgccggaa

SEQ ID NO: 867622 - DNA, 75 bp, synthetic construct
  source 1..75: mol_type = other DNA
ccggctgatgccaaatctgtgcgtgataccatgctttgcacgtgtctggtcaatgagcatgatgtacggatttca

SEQ ID NO: 867623 - DNA, 75 bp, synthetic construct
  source 1..75: mol_type = other DNA
ccgtattgtcaaaccggtcaacatttatgaatgtgaactcagggacaacgtgtttgtcggccccttcgttgagat

SEQ ID NO: 867624 - DNA, 75 bp, synthetic construct
  source 1..75: mol_type = other DNA
gcatggtcggtgtagattcaatctgtcaatgcaacacccctttcaattatctctttcggtgttttgaacttcagt

SEQ ID NO: 867625 - DNA, 75 bp, synthetic construct
  source 1..75: mol_type = other DNA
gggagcgcatgttctcacgcttcgattttaaacgcgtgctggaggcgggcggtatttcgattctgcaaccggatc

SEQ ID NO: 867626 - DNA, 75 bp, synthetic construct
  source 1..75: mol_type = other DNA
atgcagccagatccttaatcccgatagcccttatgtcgcactctcctgcgccggtgggatctggatcaccgctga

SEQ ID NO: 867627 - DNA, 75 bp, synthetic construct
  source 1..75: mol_type = other DNA
ttatttacgcgatgaccacgttcttgatgcggttctgccgcccgatattcctattccgagcattgctgaagtgca

SEQ ID NO: 867628 - DNA, 75 bp, synthetic construct
  source 1..75: mol_type = other DNA
atgaaccgcagcagacgcgcctgcgcattgccattgagtgccatagctgtattcagtggctgacgcccgcgttag

SEQ ID NO: 867629 - DNA, 75 bp, synthetic construct
  source 1..75: mol_type = other DNA
atgaagaaacgcattatatcggcggttctcgcttcgctctcggttatttccggcgctcaggcggggatacctgtt

SEQ ID NO: 867630 - DNA, 75 bp, synthetic construct
  source 1..75: mol_type = other DNA
gtgaccttgtgcggggctgtgaagcctcgttcctgtcccaactggcggggatcgagtacggcaataagctggaaa

SEQ ID NO: 867631 - DNA, 75 bp, synthetic construct
  source 1..75: mol_type = other DNA
caccggttagcggaattaatcaccggaaagttatatgacaggataccaaaagaaatatggaaatatgtaaggtaa

SEQ ID NO: 867632 - DNA, 75 bp, synthetic construct
  source 1..75: mol_type = other DNA
attaaacctgagccagagcaacaggttttaattcagtcgctttatgaccgggcatcaggaagcgcctctgcaact

SEQ ID NO: 867633 - DNA, 75 bp, synthetic construct
  source 1..75: mol_type = other DNA
tggtgcttctgatgacagcaccagaatacgcttgttatgatagtcagtattgttatgaagacaaagtcagcgcat

SEQ ID NO: 867634 - DNA, 75 bp, synthetic construct
  source 1..75: mol_type = other DNA
cgttatcggaacaggccaaatcgttattgtcagattacaaagtaacggatacctgccagaacctgggatattccg

SEQ ID NO: 867635 - DNA, 75 bp, synthetic construct
  source 1..75: mol_type = other DNA
ctaacgttactgtatcaagattatggtgcgcacatctccgtgcaaccctcgcagcatgaaatcccctatccctat

SEQ ID NO: 867636 - DNA, 75 bp, synthetic construct
  source 1..75: mol_type = other DNA
cattgtcgcgcgcctgttcgataatcagcctctggagccactggtgccgcggagacccgacgtcgaatcgccggg

SEQ ID NO: 867637 - DNA, 75 bp, synthetic construct
  source 1..75: mol_type = other DNA
ggctcgtggcacagggtggcgattatataaaaccagctacgctccggcgtttgctggcgctctttccctcgccgc

SEQ ID NO: 867638 - DNA, 75 bp, synthetic construct
  source 1..75: mol_type = other DNA
gcgtgttaatgatattgcaactttgcttattggtagggtgtgactatattgaaaaagcgagtaaggtcgacgatc

SEQ ID NO: 867639 - DNA, 75 bp, synthetic construct
  source 1..75: mol_type = other DNA
cgattcatttggtggcaacccaccgttatattcgtgctgtcaacgacggatgaaaagtgatccacttatatctcc

SEQ ID NO: 867640 - DNA, 75 bp, synthetic construct
  source 1..75: mol_type = other DNA
gataagcaaacgtggtgactgtagtggtcaacaaaaactggccaccgctttagagtttttccagtatcggttttc

SEQ ID NO: 867641 - DNA, 75 bp, synthetic construct
  source 1..75: mol_type = other DNA
ctcattatggttctggaaaaccagtacaaccgactgaatgagttggactcactgatagaggatattgaaaaacag

SEQ ID NO: 867642 - DNA, 75 bp, synthetic construct
  source 1..75: mol_type = other DNA
tgtcagcgggtacggcgcaggggccgtttaccggacgccggcagggcgtggccacacatctcttggcactgttgc

SEQ ID NO: 867643 - DNA, 75 bp, synthetic construct
  source 1..75: mol_type = other DNA
ctaatccgaagagtgcggccattgttaaccgggttattggtgatattgaagcatcggagggcatgggggcgctga

SEQ ID NO: 867644 - DNA, 75 bp, synthetic construct
  source 1..75: mol_type = other DNA
cattggcagaaatggttcagaggttgtcgctcatattcacagaccataccgcgttgggtgatctgactctggacg

SEQ ID NO: 867645 - DNA, 75 bp, synthetic construct
  source 1..75: mol_type = other DNA
atgctactgcgacgttaaacttgccgcaggaaccgtcactggtggatgccgagctggactggcaggaaaatagcg

SEQ ID NO: 867646 - DNA, 75 bp, synthetic construct
  source 1..75: mol_type = other DNA
ggcgataatctccaggcatggctggagcagaacgcgcgtctgccggaaaatgactgtccgcaaggaaaagagtgt

SEQ ID NO: 867647 - DNA, 75 bp, synthetic construct
  source 1..75: mol_type = other DNA
tcttactcgttggaaatcaacacagtgtatgggtccaccacatattgcaatttttattctcttttaaaatatatt

SEQ ID NO: 867648 - DNA, 75 bp, synthetic construct
  source 1..75: mol_type = other DNA
gcggaaaacggcgtggtctttgaacggcctaaattgttgaaagagctgccgtcgagcgctggagtcagtcaggtg

SEQ ID NO: 867649 - DNA, 75 bp, synthetic construct
  source 1..75: mol_type = other DNA
ggtttgatgacccgagcagcggcgcaatcacgatgaatgacacacaatacggcacatcccagccatcgatggttt

SEQ ID NO: 867650 - DNA, 75 bp, synthetic construct
  source 1..75: mol_type = other DNA
aacgggagcgtcgacagctactccggctttaagcagaattacctctcctgctcgggcaatgagatggtggcgaat

SEQ ID NO: 867651 - DNA, 75 bp, synthetic construct
  source 1..75: mol_type = other DNA
cggatacccacggcaccaaaacggcgctgacggcaacgctttactccgatgcgacgaaaaaagacagcctggaca

SEQ ID NO: 867652 - DNA, 75 bp, synthetic construct
  source 1..75: mol_type = other DNA
agtggtgggcttatgatatggtcatgccggatttatatacgtggcagtatcaaactgtcagcctgagcgcaggag

SEQ ID NO: 867653 - DNA, 75 bp, synthetic construct
  source 1..75: mol_type = other DNA
aaaaacgaagtctgggcgcgcgttagccaggccagtacggccattaccagtaaaggcggttgcggagccaatatg

SEQ ID NO: 867654 - DNA, 75 bp, synthetic construct
  source 1..75: mol_type = other DNA
tggcggtacggccataacggtcaataatgaagtctggtcgcgcctgacagcgactgagaaagcggatgccagcaa

SEQ ID NO: 867655 - DNA, 75 bp, synthetic construct
  source 1..75: mol_type = other DNA
atcgcagccctctatggtctacacgggtacgacagatgcacaaggtgtagcaacggtcgaaatagagcaacccca

SEQ ID NO: 867656 - DNA, 75 bp, synthetic construct
  source 1..75: mol_type = other DNA
gtcggcaacattcactctcgcctcacacggcacgcaatggcttggttttaccggcagcgatggtacggcgatatt

SEQ ID NO: 867657 - DNA, 75 bp, synthetic construct
  source 1..75: mol_type = other DNA
aataatgaaacctgggcgctggcgcatgttatggattcctctaaatgggatgtcgcgcagcagtgcggcagtatg

SEQ ID NO: 867658 - DNA, 75 bp, synthetic construct
  source 1..75: mol_type = other DNA
accgtaaaagacagcgccgggaagccggtaccgaatgtcgctttcaccttaaaacgtggtgatgccgtgccgcgt

SEQ ID NO: 867659 - DNA, 75 bp, synthetic construct
  source 1..75: mol_type = other DNA
tgacgatacactgagtgtagttaaagccaaaaaaggcgaagagtcggtagtgcgcgtcaccacgaaagatgcgca

SEQ ID NO: 867660 - DNA, 75 bp, synthetic construct
  source 1..75: mol_type = other DNA
atggaacgacgctggatcgctcgaaagcaaccgttagctcgagtgcggacgatcttaccgtgaagtcattgatac

SEQ ID NO: 867661 - DNA, 75 bp, synthetic construct
  source 1..75: mol_type = other DNA
ttccgttgacggtgaccgtgcgtgatagcgccgggaacccgatgccatatgccgactttaccctttcgcgtgaaa

SEQ ID NO: 867662 - DNA, 75 bp, synthetic construct
  source 1..75: mol_type = other DNA
ggcctaagctggcagcagaaatcaccagtccggatggcacactaacggaaaaaaacgaagtctgggcgcgcgtta

SEQ ID NO: 867663 - DNA, 75 bp, synthetic construct
  source 1..75: mol_type = other DNA
acagggatggccggtaaatatgagttatctcaccaataccccgagtaatacacaaacagggagccgttactacaa

SEQ ID NO: 867664 - DNA, 75 bp, synthetic construct
  source 1..75: mol_type = other DNA
aatcacgcattgaaatggcgaagctaaagaacaaggttaatgacctcgatgactttgatgatggtgacgatgatg

SEQ ID NO: 867665 - DNA, 75 bp, synthetic construct
  source 1..75: mol_type = other DNA
tgcgcccgaaaaacgcgtcaatatgagttccccggaagcttacaatgttattacccgatctcgatggaagttatt

SEQ ID NO: 867666 - DNA, 75 bp, synthetic construct
  source 1..75: mol_type = other DNA
accgtaacggcattggttccggtgagtagggatagcgtgttgacagcaagtggagcaaaaactctcgcaacgacg

SEQ ID NO: 867667 - DNA, 75 bp, synthetic construct
  source 1..75: mol_type = other DNA
gtcaccaccaaagattgtcagggcaacgtcgcgggtaatattccgtttattatcaaacgtaaagatgccgaaaat

SEQ ID NO: 867668 - DNA, 75 bp, synthetic construct
  source 1..75: mol_type = other DNA
cagcccggacggaaccctgaccgaaaataacgaaatctgggcgcgcgtgagccaggccaatacgtccagtaccag

SEQ ID NO: 867669 - DNA, 75 bp, synthetic construct
  source 1..75: mol_type = other DNA
tactctggatctgatttttaccgtcctcaccagcccggatgccgcattagcaacttactggggccatatgccgga

SEQ ID NO: 867670 - DNA, 75 bp, synthetic construct
  source 1..75: mol_type = other DNA
tttggggacatatggccgaaacggtgacggcctccgatggttcggtttataagcgaccgttgctgtttggcgagc

SEQ ID NO: 867671 - DNA, 75 bp, synthetic construct
  source 1..75: mol_type = other DNA
catgcggcggatgtctctaaccgtggtgaaacccaaaagccggatagcaccgcgtttcttgtgagctgtgtggat

SEQ ID NO: 867672 - DNA, 75 bp, synthetic construct
  source 1..75: mol_type = other DNA
cggatactcacggcaccaaaacggcgctgacggcaatgctttactctgatgcgacgaaaaaatccagcatcgaca

SEQ ID NO: 867673 - DNA, 75 bp, synthetic construct
  source 1..75: mol_type = other DNA
ctacctgccgaataccgttaattacagcgttattttcaccaccccaaccagcccggacgttattggcgcgcagat

SEQ ID NO: 867674 - DNA, 75 bp, synthetic construct
  source 1..75: mol_type = other DNA
agattgcaaagcagatcgggaatgctgttccaccgctatttgcggcaaaaatcgcacaatatgtgtatggagttt

SEQ ID NO: 867675 - DNA, 75 bp, synthetic construct
  source 1..75: mol_type = other DNA
aactacgaaaactgggcttctgcgcatattactgatgccagcaaatgggatatctcgaagcagtgtggaaatata

SEQ ID NO: 867676 - DNA, 75 bp, synthetic construct
  source 1..75: mol_type = other DNA
tatggctggccaaccgcagtaaaggactatttaactgccgcggagcagacaacgcattcatcggtaaacctcgga

SEQ ID NO: 867677 - DNA, 75 bp, synthetic construct
  source 1..75: mol_type = other DNA
aagaggggagcagagtaaaacgcaagccaaccatgaaaaaagcagtatgtcccgcgtttacagttgggggtatga

SEQ ID NO: 867678 - DNA, 75 bp, synthetic construct
  source 1..75: mol_type = other DNA
gaggaaactgtaaataatcacgatcgtgcaatgacattcggtcgcttgtgggaaaaattcctcgccagcgcctat

SEQ ID NO: 867679 - DNA, 75 bp, synthetic construct
  source 1..75: mol_type = other DNA
agcaagaaatcgcgcaggcaaaatttcaggtattttaaccgacttcacctttcatgatctgaaggcgaaaggaat

SEQ ID NO: 867680 - DNA, 75 bp, synthetic construct
  source 1..75: mol_type = other DNA
cgctcaaatgaaaaacatattgctggcagcggggatgcgctggttgcgccagtcatcgtcaacggaggcctggcg

SEQ ID NO: 867681 - DNA, 75 bp, synthetic construct
  source 1..75: mol_type = other DNA
gatcccgttcagttaaccccaggcttactgcagacacctcgcttttgtgtggctctcgataacgcaacgctctgg

SEQ ID NO: 867682 - DNA, 75 bp, synthetic construct
  source 1..75: mol_type = other DNA
gtatctctgactttttcgggtgtcccaagtggtccgcagagtgacatgttacagaccgtcggtgcaacaaataca

SEQ ID NO: 867683 - DNA, 75 bp, synthetic construct
  source 1..75: mol_type = other DNA
cccggcaatggacgtaaaagcccggaagaggataacgaaatttgggcgctgtttactgaagcgcaggcaagtaag

SEQ ID NO: 867684 - DNA, 75 bp, synthetic construct
  source 1..75: mol_type = other DNA
tgatggtaaagtgacctttgatgtgacgcaaaacgggacttatgggctcgcaaccccgctcactgcaacattgct

SEQ ID NO: 867685 - DNA, 75 bp, synthetic construct
  source 1..75: mol_type = other DNA
accagtctaccggcttaaaaacggaactcacggcagcgctggactcctccagcagcattacatcgtcgcttcccg

SEQ ID NO: 867686 - DNA, 75 bp, synthetic construct
  source 1..75: mol_type = other DNA
gtctgagccgtatatacggatggggatacgagcgtgggtatgtaaaaaataatccatgcaaaggagtcagaaaat

SEQ ID NO: 867687 - DNA, 75 bp, synthetic construct
  source 1..75: mol_type = other DNA
aacagggaaaaaacagataaaagcatggagtccacgattacaggcggcgatcgaaaaagcaaaacagttaccaac

SEQ ID NO: 867688 - DNA, 75 bp, synthetic construct
  source 1..75: mol_type = other DNA
gacaaccgtttgatttattgtcagaaatagggcgagacagcgttggtgccgtgacgttaatccccgaagatgaaa

SEQ ID NO: 867689 - DNA, 75 bp, synthetic construct
  source 1..75: mol_type = other DNA
acgacgggatctttatccagcaagggaaaacaggaaaaaaacagataaaagcatggagtccacgattacaggcgg

SEQ ID NO: 867690 - DNA, 75 bp, synthetic construct
  source 1..75: mol_type = other DNA
ggcttatgatatggccatactgggtacaacaacgtggtcttatcagactgtcagcctgagaacaggagctatcgc

SEQ ID NO: 867691 - DNA, 75 bp, synthetic construct
  source 1..75: mol_type = other DNA
caatcgcagcagaacgtggttcgagaattatttctgttaacggtgcggcggcccactgcgccagcgtcggcgata

SEQ ID NO: 867692 - DNA, 75 bp, synthetic construct
  source 1..75: mol_type = other DNA
gaggaaactgtaaataatcgcgatcgtgcaatgacattcggtcgcttgtgggaaaaattcctcgccagcgcctgt

SEQ ID NO: 867693 - DNA, 75 bp, synthetic construct
  source 1..75: mol_type = other DNA
atatatgcggaagcaataccacagttacgcattgcaatggagatatcctatctttgtgcggcaagactcggtgat

SEQ ID NO: 867694 - DNA, 75 bp, synthetic construct
  source 1..75: mol_type = other DNA
tagatcgaatggttacagttacgtatggaagcccaaaggaagcacaagaacgataaagctcggaagagtgcggga

SEQ ID NO: 867695 - DNA, 75 bp, synthetic construct
  source 1..75: mol_type = other DNA
aagataatgtactgccaccgcgcgttagatcgaatggttacagttacgtatggaagcccaaaggaagcacaagaa

SEQ ID NO: 867696 - DNA, 75 bp, synthetic construct
  source 1..75: mol_type = other DNA
acgagtggatgccaaagggcgtattctttcgcccttctggttactactggaaacccggaggaactacagaaaaac

SEQ ID NO: 867697 - DNA, 75 bp, synthetic construct
  source 1..75: mol_type = other DNA
gccgcgatggaaattgcgtatctttgcgctgcaagggtatctgatgttcttaaaatgaactggaatcagattctt

SEQ ID NO: 867698 - DNA, 75 bp, synthetic construct
  source 1..75: mol_type = other DNA
cagcaagggaaaacaggaaaaaaacagataaaagcatggagtccacgattacaggcggcgatcgaaaaagcaaaa

SEQ ID NO: 867699 - DNA, 75 bp, synthetic construct
  source 1..75: mol_type = other DNA
tgccgcaggcgcagaaacagcgtctacggctaaagctgtcgctgaacagtgcgatgtcatcataaccatgctgcc

SEQ ID NO: 867700 - DNA, 75 bp, synthetic construct
  source 1..75: mol_type = other DNA
ccccagaagccatcgaaaataaggcagttcagccgggggattatagttccacagcaacatttgaacttttgtata

SEQ ID NO: 867701 - DNA, 75 bp, synthetic construct
  source 1..75: mol_type = other DNA
tgttattcagtgttctgttatcggtgatattcctgcctgtatccggttatgcctcagaactgggatttaagggca

SEQ ID NO: 867702 - DNA, 75 bp, synthetic construct
  source 1..75: mol_type = other DNA
ccgtgattttctggcacgacctggcagcaccgatccttgcgggaattattaccgcagcgattgttggctggtggc

SEQ ID NO: 867703 - DNA, 75 bp, synthetic construct
  source 1..75: mol_type = other DNA
ctcggggttagtaccttccgtctcaaacgtcagcttacgtcgtaatctggaaacactgcagcagcagttcccaga

SEQ ID NO: 867704 - DNA, 75 bp, synthetic construct
  source 1..75: mol_type = other DNA
aatgctgaattgtattgatgcaccacgccgggtagatcaagcggttattggtttttttgattttatgaatggtgg

SEQ ID NO: 867705 - DNA, 75 bp, synthetic construct
  source 1..75: mol_type = other DNA
tgttatcgatgttaccagcgacattattggtgagattaatcgccgtatcgttattccattaacacctattgaacg

SEQ ID NO: 867706 - DNA, 75 bp, synthetic construct
  source 1..75: mol_type = other DNA
atgagcaacaaacaatcgatgggagaagattctgggaaagaatgatttcttgggctataaacaccccaggatata

SEQ ID NO: 867707 - DNA, 75 bp, synthetic construct
  source 1..75: mol_type = other DNA
ttacaccctcagaattgtgagaaacggaaaaaaacttgaagccggaaattattttgctgtactgggattccgggt

SEQ ID NO: 867708 - DNA, 75 bp, synthetic construct
  source 1..75: mol_type = other DNA
caacccgggtgcgtgtgacttttgatggcattcccggagaaacatcggacaaattctcgctgacaggtcaggcgg

SEQ ID NO: 867709 - DNA, 75 bp, synthetic construct
  source 1..75: mol_type = other DNA
tgaacaatcaatgattgataaccagaatgaaaaagcattaatcctctttattaaatacaaaactaagatagctgg

SEQ ID NO: 867710 - DNA, 75 bp, synthetic construct
  source 1..75: mol_type = other DNA
atgagaaataaaattcttttcgctttattaattatagtggtggctgctttgtcattctatttcggccgaagctgg

SEQ ID NO: 867711 - DNA, 75 bp, synthetic construct
  source 1..75: mol_type = other DNA
atttcaaatgccaaaggacaaactaccacttctgaaacatataaaaaatatttagacattattgaaacaagacaa

SEQ ID NO: 867712 - DNA, 75 bp, synthetic construct
  source 1..75: mol_type = other DNA
gggttgcgctcttgtgtctatgtaccggagcccgctggagtgaggccagcagattgcatggagagcaaatagttc

SEQ ID NO: 867713 - DNA, 75 bp, synthetic construct
  source 1..75: mol_type = other DNA
atgaaaaatattgcggcaggcggcattcttgaacgtatccgtagactggccccgccacatgtaaccgccccattc

SEQ ID NO: 867714 - DNA, 75 bp, synthetic construct
  source 1..75: mol_type = other DNA
tgaaccgtgcgggcatccagccgcttcacaggaagtgctcattagggaactaccgggtgcagaacgacggtcagc

SEQ ID NO: 867715 - DNA, 75 bp, synthetic construct
  source 1..75: mol_type = other DNA
gacagcatcactgtgcagtgtcgggatgttaacaaacctgaatcatgccgcaatgagtacacttcttggtgagag

SEQ ID NO: 867716 - DNA, 75 bp, synthetic construct
  source 1..75: mol_type = other DNA
acatataccttctatgccaaaaaaggtcagaaagtgcatgtgagtatctctaatgaaggcgctgatacttacctc

SEQ ID NO: 867717 - DNA, 75 bp, synthetic construct
  source 1..75: mol_type = other DNA
cgtgatggaccgcatgaccatgaacggtgggcgctgggtgaattttaactgggagagctggcgtccgaatgtcgg

SEQ ID NO: 867718 - DNA, 75 bp, synthetic construct
  source 1..75: mol_type = other DNA
tggtcacggtggctgatgtgatgctggcgctacacggcagctacgacaacaaaaactcaggcgaaaaatttttgc

SEQ ID NO: 867719 - DNA, 75 bp, synthetic construct
  source 1..75: mol_type = other DNA
tacatgtggagcgaccacaaatacatgtggtttacatatcttttctcaagagttggaagttttatttgtatcaat

SEQ ID NO: 867720 - DNA, 75 bp, synthetic construct
  source 1..75: mol_type = other DNA
tttctctggcactgtcatcaactccgatccagtcaatggtcagatctgggtaaaaaccaacgctggggatgagaa

SEQ ID NO: 867721 - DNA, 75 bp, synthetic construct
  source 1..75: mol_type = other DNA
cctgtgtcgcaggaaatatgcgatgccgtaaaaacaaaagaaaccgggcgactgtttgatgtgaagtacagagag

SEQ ID NO: 867722 - DNA, 75 bp, synthetic construct
  source 1..75: mol_type = other DNA
tatgcagaaattcagcgcccctatgaccgcccgcgcactgctccagtcgcagcagaactccgacgaggcgctcag

SEQ ID NO: 867723 - DNA, 75 bp, synthetic construct
  source 1..75: mol_type = other DNA
agtgatggaccgcatgaccatgaacggtggtcgctgggtgaattttaactgggaaagctggcgttcgaatgtcgg

SEQ ID NO: 867724 - DNA, 75 bp, synthetic construct
  source 1..75: mol_type = other DNA
tggtgacggtggcggatgtgatgctggcgttacacggcaactacgacaacaaaaactcgggcgaaaagtttttac

SEQ ID NO: 867725 - DNA, 75 bp, synthetic construct
  source 1..75: mol_type = other DNA
gcctgtactctggcgatggaagacgcctggcagattattgatatgggggaaagcccggttcgggatttacagaat

SEQ ID NO: 867726 - DNA, 75 bp, synthetic construct
  source 1..75: mol_type = other DNA
cgtgaaaatgcgtggcgatgaggccctgcgtgaatacagcgcgaagtttgataaaaccacggttaccgcgctgaa

SEQ ID NO: 867727 - DNA, 75 bp, synthetic construct
  source 1..75: mol_type = other DNA
ggtgattttactgacgcccgatgctgatatggcgcgtcgcgtagccgaagctgtcgaacgccaactggcagaact

SEQ ID NO: 867728 - DNA, 75 bp, synthetic construct
  source 1..75: mol_type = other DNA
aattgctttgcgcatgctggagcagggcattgatcgtgaccaggttgctcgcggccactcagctaagcgaaaccg

SEQ ID NO: 867729 - DNA, 75 bp, synthetic construct
  source 1..75: mol_type = other DNA
acaccgttgatctgctctgttttcgtcactacggcagtacacagggcgtcacagagcaggtgcttgaagccaatc

SEQ ID NO: 867730 - DNA, 75 bp, synthetic construct
  source 1..75: mol_type = other DNA
tttacctcacgggctgcagggggagctgccggacattccgaccaccaccaccgtgcagaccgtccagctatggga

SEQ ID NO: 867731 - DNA, 75 bp, synthetic construct
  source 1..75: mol_type = other DNA
gtgattacgcctccggaaccaaccatgttctaccgacttacggctacaccgccacctgttccagcctcggactgg

SEQ ID NO: 867732 - DNA, 75 bp, synthetic construct
  source 1..75: mol_type = other DNA
cgccgatacgctggatggcaaagtgcatctcaccgttgccaacctgaacaataaatttcaccgttcgctggaagc

SEQ ID NO: 867733 - DNA, 75 bp, synthetic construct
  source 1..75: mol_type = other DNA
aggcggtgatcccgccgcacgagcgtccgtttattccggtgctgcgtcagttgggattcagtggtagcgatgagc

SEQ ID NO: 867734 - DNA, 75 bp, synthetic construct
  source 1..75: mol_type = other DNA
ttacgcgggcctgtcgtttggtaatgaagcttctacccgtcatcgttttcaggtgtctaacccgcgactggcagc

SEQ ID NO: 867735 - DNA, 75 bp, synthetic construct
  source 1..75: mol_type = other DNA
aaacggggtatgcctgttatcagggactgccggcgttgtggcggtcgtggctatgaaagactgccatcaacggag

SEQ ID NO: 867736 - DNA, 75 bp, synthetic construct
  source 1..75: mol_type = other DNA
atgaaactggaagatttaccgaaatactactccccaaaatcccccggcctgaccgatgcatcggcctcaacgtca

SEQ ID NO: 867737 - DNA, 75 bp, synthetic construct
  source 1..75: mol_type = other DNA
tcaggtctccgtgtctgatgcggtgtctacgtatctgtttaatagccagctacttagccgcgatgacggttccat

SEQ ID NO: 867738 - DNA, 75 bp, synthetic construct
  source 1..75: mol_type = other DNA
acctggtagggaaggttgaaatgacagagtggttagttgactttgcttcccagcttcgcaaaggaggcaaccagt

SEQ ID NO: 867739 - DNA, 75 bp, synthetic construct
  source 1..75: mol_type = other DNA
actgaaacagcagctaatacggcagcagcaatagcttgtgctacaggtaatgccagtaaggataccgggaatgat

SEQ ID NO: 867740 - DNA, 75 bp, synthetic construct
  source 1..75: mol_type = other DNA
tacaccgctgaaagaggttcggccggggatctatactgcaaagctggataacggaacatcgatcacgttgcggaa

SEQ ID NO: 867741 - DNA, 75 bp, synthetic construct
  source 1..75: mol_type = other DNA
gcagagttcggtaagtaaccgttatggtacgacgaaagtgtttgaaagccagaatctgacggataaacagatcca

SEQ ID NO: 867742 - DNA, 75 bp, synthetic construct
  source 1..75: mol_type = other DNA
cgggaacagtgtgctgtacgtgacccgagtcgcgatggtagccgggggccggggcatgtgctgaatggtgacaat

SEQ ID NO: 867743 - DNA, 75 bp, synthetic construct
  source 1..75: mol_type = other DNA
tacgtgatccgagtcgcgatggcgcccggggaccggggcatgtgctgaatggcgacaatacagacgaaaacaaac

SEQ ID NO: 867744 - DNA, 75 bp, synthetic construct
  source 1..75: mol_type = other DNA
ggacaaggagaaagctgagcttggtggtgcaggtgctggaacaccggggggatggggaccggataatgaagaaaa

SEQ ID NO: 867745 - DNA, 75 bp, synthetic construct
  source 1..75: mol_type = other DNA
ttcctttgccgatgatcaagatgctttgttaatcgtcaaaaaagagggctattctaatctggtggtcaaatgccc

SEQ ID NO: 867746 - DNA, 75 bp, synthetic construct
  source 1..75: mol_type = other DNA
agaattagacggcaattacggacaggcatttagtaacctggggctggcgtatcagaaaaatggcaacatagcgga

SEQ ID NO: 867747 - DNA, 75 bp, synthetic construct
  source 1..75: mol_type = other DNA
aatttatgaaacctcgggccagaatgctgaagcattgcagcattatcaactcgctcttcacgatgccattttata

SEQ ID NO: 867748 - DNA, 75 bp, synthetic construct
  source 1..75: mol_type = other DNA
gttggactatagatattcgtaataaccaaaagcttactgaactggggaataaatattcacgtgtggagattaagt

SEQ ID NO: 867749 - DNA, 75 bp, synthetic construct
  source 1..75: mol_type = other DNA
cgacaatacagacgaaaacaaacagccgaatctgggcaaagacgtagcgagcgctacggataaggataaagctga

SEQ ID NO: 867750 - DNA, 75 bp, synthetic construct
  source 1..75: mol_type = other DNA
tgctgaatggtgacaatacagacgaaaacaaacagcctaatctgggcaaggacgtggcgagcgctacggacaagg

SEQ ID NO: 867751 - DNA, 75 bp, synthetic construct
  source 1..75: mol_type = other DNA
ttggaaagaactgtgggcgcaacgcaatatcttcaacgagcagcacaacgccatgattgcagcaaatcaggcaaa

SEQ ID NO: 867752 - DNA, 75 bp, synthetic construct
  source 1..75: mol_type = other DNA
gggaaacacctgaacatattcgtgttgctgaacgctggcaggtgccaaataagctggctgatcggagtggtgtat

SEQ ID NO: 867753 - DNA, 75 bp, synthetic construct
  source 1..75: mol_type = other DNA
acgcgcaacgagcaggtcacgctgaaccagatagtcgaccgcagaacggcttcgatgcgtagtgtcggaatgctg

SEQ ID NO: 867754 - DNA, 75 bp, synthetic construct
  source 1..75: mol_type = other DNA
ccacaaacgcccgtatgcaagcgcactggagcgaactgtgggcgcagcgcaatatctttaatgcgcagcataacg

SEQ ID NO: 867755 - DNA, 75 bp, synthetic construct
  source 1..75: mol_type = other DNA
atcatgtctgccgaaggtttacaaatcacctgcgacatgttgggccgttccggagtcgtttacggcaaacaatct

SEQ ID NO: 867756 - DNA, 75 bp, synthetic construct
  source 1..75: mol_type = other DNA
ggttttcgacaagatcattgacttcttcaccgttggtgagttcggcaagctggctcgcgccaacttcgtagctaa

SEQ ID NO: 867757 - DNA, 75 bp, synthetic construct
  source 1..75: mol_type = other DNA
cgtgatggatcgcatgaccatgaacggtggtcgctgggtgaattttaactgggagagctggcgcacgaatgtcat

SEQ ID NO: 867758 - DNA, 75 bp, synthetic construct
  source 1..75: mol_type = other DNA
atgctgacaaacctgaactatgaggctatgaaaacattgctcggcgagcggattatggatcgcatgaccatgaac

SEQ ID NO: 867759 - DNA, 75 bp, synthetic construct
  source 1..75: mol_type = other DNA
gttacatgctgatggcacgctgaccaccgaggtgcatcgcctggcggacacacgtttccaacctgataccgcttc

SEQ ID NO: 867760 - DNA, 75 bp, synthetic construct
  source 1..75: mol_type = other DNA
accacaggcgtcggttccaccgtaccggacggtggaggagtggcgggaatggcaacttgctgaaggacgaaaacg

SEQ ID NO: 867761 - DNA, 75 bp, synthetic construct
  source 1..75: mol_type = other DNA
cccgcagcatgtagccgcgccgtaccggacagtggacgagtggcgagagtggcagcttgcagaagggcgaaagcg

SEQ ID NO: 867762 - DNA, 75 bp, synthetic construct
  source 1..75: mol_type = other DNA
gattatggaccgcatgaccatgaacggtggtcggtgggtgacgtttaactgggatagctggcgtccaaatgtcag

SEQ ID NO: 867763 - DNA, 75 bp, synthetic construct
  source 1..75: mol_type = other DNA
agcgccacacggctttgatcacaccgaatacggtagcgatggcgacccgattccaatgttcaccgcaggttacgg

SEQ ID NO: 867764 - DNA, 75 bp, synthetic construct
  source 1..75: mol_type = other DNA
agctccgtctggcaaactgatgaagaagtgcataactggctggcgctgcacggtcgcggccaggattactgccag

SEQ ID NO: 867765 - DNA, 75 bp, synthetic construct
  source 1..75: mol_type = other DNA
gactgcggcaaacggtggctatttaacctctgccagcgaactcgattgctgggacaacgtgccggagtacgcctt

SEQ ID NO: 867766 - DNA, 75 bp, synthetic construct
  source 1..75: mol_type = other DNA
acggtttgagtattcgccacaccacgcgtaacttcccgaaccgcgaaggctctaagccagccaacggtcagatgt

SEQ ID NO: 867767 - DNA, 75 bp, synthetic construct
  source 1..75: mol_type = other DNA
caccaactcaaacgtcccgtaccgtctgatgaactcttgcggtggttttctcagtcgctatggcagctacagtac

SEQ ID NO: 867768 - DNA, 75 bp, synthetic construct
  source 1..75: mol_type = other DNA
atcatcaggttcgggcgtgtttacgcgggcgctctatccgccgacggatgaatcatcctgataggttgaaatatc

SEQ ID NO: 867769 - DNA, 75 bp, synthetic construct
  source 1..75: mol_type = other DNA
gttgcttagcgttacaccaggtgtaacaggaatgtccgatccagggcgagcagaagcgcttttgtaccgggtact

SEQ ID NO: 867770 - DNA, 75 bp, synthetic construct
  source 1..75: mol_type = other DNA
gtgataccggcaccggaaaagatctctttgcgtatgcctgtcatcaggcaagcccacgcgcgggcaaaccctatc

SEQ ID NO: 867771 - DNA, 75 bp, synthetic construct
  source 1..75: mol_type = other DNA
ctttatcgcaattatcccagcacgcgcaaactggcaaaacgcctcggcgtttcgcataccgcgattgccaataag

SEQ ID NO: 867772 - DNA, 75 bp, synthetic construct
  source 1..75: mol_type = other DNA
tgcttaccaacgccgccgcaacgtcattaccccgctggttggtatgactactggcgttgtaccgttaccgcgctt

SEQ ID NO: 867773 - DNA, 75 bp, synthetic construct
  source 1..75: mol_type = other DNA
cgtatgtggggccgcaggatgtggcgctggctatcatcggtgccgtgttcaaaaacggttacgtcaaaaacaaag

SEQ ID NO: 867774 - DNA, 75 bp, synthetic construct
  source 1..75: mol_type = other DNA
tgtaaccagttaccagacagatcgggaagtcaggggggaatgatgaagaaattatttattgctacatgtttattg

SEQ ID NO: 867775 - DNA, 75 bp, synthetic construct
  source 1..75: mol_type = other DNA
gttattgaaagaaaaggataaaagtttaataggtaagggggctgcaaaattacagcagtacaatcaacaagataa

SEQ ID NO: 867776 - DNA, 75 bp, synthetic construct
  source 1..75: mol_type = other DNA
tcgcgcccggctggcgtactctcgagttacatgctgatggcacgctgaccaccgaggtgcatcgcctggcggaca

SEQ ID NO: 867777 - DNA, 75 bp, synthetic construct
  source 1..75: mol_type = other DNA
tctacgccgtctcccgtcatccgtattggtcattttgaactgaatgaacctgcggcgcagatcagctggtttgac

SEQ ID NO: 867778 - DNA, 75 bp, synthetic construct
  source 1..75: mol_type = other DNA
cacgctggtctacatgttgcagcaggaaggttttgccgtcgaggtctttgagcgaggcttgccggtgctggataa

SEQ ID NO: 867779 - DNA, 75 bp, synthetic construct
  source 1..75: mol_type = other DNA
tggaagatgagcaagggatagccgacacgctggtctacatgttgcagcaggaaggttttgccgtcgaggtctttg

SEQ ID NO: 867780 - DNA, 75 bp, synthetic construct
  source 1..75: mol_type = other DNA
agagataaagggatacgattacgacacatataacttctatgcccaaaaaggccagaaggtgcacgtcagcatctc

SEQ ID NO: 867781 - DNA, 75 bp, synthetic construct
  source 1..75: mol_type = other DNA
tgcacgaattttgtgttcagcggtaaaaccggcaccgggaaaaatcaccttgcagcggcgatgggcaaccggctg

SEQ ID NO: 867782 - DNA, 75 bp, synthetic construct
  source 1..75: mol_type = other DNA
acgctgcgtgccaagttgcgcgccatcaaccccgagctttcaccgatcaatacccatcgcggtatgggatacagc

SEQ ID NO: 867783 - DNA, 75 bp, synthetic construct
  source 1..75: mol_type = other DNA
tcgacgccttagcgcaggaaactgccgatatgccgctgcatgtacagactgaccgggtaattaaagactccggcc

SEQ ID NO: 867784 - DNA, 75 bp, synthetic construct
  source 1..75: mol_type = other DNA
ggaccgatggcgcggacggtgagccgatttccctctattgcgcttttaacgaactcgatgaagcgcgttttgtgg

SEQ ID NO: 867785 - DNA, 75 bp, synthetic construct
  source 1..75: mol_type = other DNA
ccgttttcgctttgacgataaagaggggcgcgggacgtggttctgcaatcagtgcggcgcgggtgacgggcttaa

SEQ ID NO: 867786 - DNA, 75 bp, synthetic construct
  source 1..75: mol_type = other DNA
tgggtacgccgatggtcgagaacgacagcggctacaagctcggccagcgcgtacgccacgctaagtttggtgaag

SEQ ID NO: 867787 - DNA, 75 bp, synthetic construct
  source 1..75: mol_type = other DNA
tattggtgaccggacgctggacgtggtacgtcagacatcgcgcgatcgccagttaacactctggcaggcatgtcg

SEQ ID NO: 867788 - DNA, 75 bp, synthetic construct
  source 1..75: mol_type = other DNA
ggaccagctacgcctgctcaaacgcctaatcaaggcgatgaacctcgacgagaagcagtggccgccgcgccaggc

SEQ ID NO: 867789 - DNA, 75 bp, synthetic construct
  source 1..75: mol_type = other DNA
atgctgacgaacctgaatcacgcagcgatgagcacactcctcggagatcgggtgatggaccgtatgaccatgaat

SEQ ID NO: 867790 - DNA, 75 bp, synthetic construct
  source 1..75: mol_type = other DNA
atctcccgtctgcataaacgcctgggccgcacaatgatttatgtcacccacgatcaggtcgaagcgatgacgctg

SEQ ID NO: 867791 - DNA, 75 bp, synthetic construct
  source 1..75: mol_type = other DNA
ttggtgttctggaacgcatccgcagactggctcctgagcacgttcccgtgccgtacagtacgacggaggagtggc

SEQ ID NO: 867792 - DNA, 75 bp, synthetic construct
  source 1..75: mol_type = other DNA
ggactgtcaggggaaaaatttttgcgtgaactgtgcgaagtggacctcctggttcttgacgaaattggcatccag

SEQ ID NO: 867793 - DNA, 75 bp, synthetic construct
  source 1..75: mol_type = other DNA
gccgacaaaatcgtggtgctggatgccggtcgcgtggcgcaagtcgggaagcctcttgaactgtatcactatccg

SEQ ID NO: 867794 - DNA, 75 bp, synthetic construct
  source 1..75: mol_type = other DNA
gagccaagcgtgtttttactcgatgaaccactttccaacctcgatgcagcgctgcgcgtacagatgcgtatcgaa

SEQ ID NO: 867795 - DNA, 75 bp, synthetic construct
  source 1..75: mol_type = other DNA
tcggttcaccgaagatgaactttttgccggtgaaagtaactgccgttgcaatcgatcaagtccaggttgagctgc

SEQ ID NO: 867796 - DNA, 75 bp, synthetic construct
  source 1..75: mol_type = other DNA
caccagacgcgggttgaaaaaatcctgaatcgttcgggcatccagccgcttcacaggaagtgctcattcgggagc

SEQ ID NO: 867797 - DNA, 75 bp, synthetic construct
  source 1..75: mol_type = other DNA
ggcaaatcgggtgaaaaatttttacaggagctttgcggggtggatttgctggtcctggatgaaatcggcatgcag

SEQ ID NO: 867798 - DNA, 75 bp, synthetic construct
  source 1..75: mol_type = other DNA
ttctggcaagagtcagcagatttgtgccgcaggatgcaatccctccgtaccgtacggtggaggagtggcgggaat

SEQ ID NO: 867799 - DNA, 75 bp, synthetic construct
  source 1..75: mol_type = other DNA
tgaatcacgcagcgatgagcacactcctcggagatcgggtgatggaccgtatgaccatgaatggtggtcgttggg

SEQ ID NO: 867800 - DNA, 75 bp, synthetic construct
  source 1..75: mol_type = other DNA
aggagctttgtggagttgaccttctggtccttgatgaaattggcatgcagcgggatacgcgcaacgagcaggtca

SEQ ID NO: 867801 - DNA, 75 bp, synthetic construct
  source 1..75: mol_type = other DNA
cgggatacgcgcaatgagctggtcacgcttaatcagatcgtcgaccgcagaacggcttcactgcgcagtgtcggg

SEQ ID NO: 867802 - DNA, 75 bp, synthetic construct
  source 1..75: mol_type = other DNA
ctgtgcgcgtgaatgaatggttcagcgcgtatgcgatggcgggtgtggcttacagccgtatttcgactttctccg

SEQ ID NO: 867803 - DNA, 75 bp, synthetic construct
  source 1..75: mol_type = other DNA
attccgtgcgtaaccgctggttcagcgtgatggtggggccgtctgtgcgcgtgaatgaatggttcagcgcgtatg

SEQ ID NO: 867804 - DNA, 75 bp, synthetic construct
  source 1..75: mol_type = other DNA
agcgataatctgaacgggattaacgtgaaataccgttatgagtttacggacgcgctggggctgattacgtccttc

SEQ ID NO: 867805 - DNA, 75 bp, synthetic construct
  source 1..75: mol_type = other DNA
tcctgacctgggccggatttaacgatccgcaggaaatcaacggcaccttaagcgccgatgccacacctgccgaag

SEQ ID NO: 867806 - DNA, 75 bp, synthetic construct
  source 1..75: mol_type = other DNA
tgtccgcagccatttgtctggccgtatccggcgcgcctgcatgggcgtctgagcagcaggccacgctgagcgcgg

SEQ ID NO: 867807 - DNA, 75 bp, synthetic construct
  source 1..75: mol_type = other DNA
tgtccgcagccatttgtctgcccgtatccggggcgcctgcatgggcgtctgagcagcaggccacgctgagcgcgg

SEQ ID NO: 867808 - DNA, 75 bp, synthetic construct
  source 1..75: mol_type = other DNA
tgtcgcttatgaaggctccggcagcggtgactggcgtaccaacagtttcatcgtgggtgtcggttataagttctg

SEQ ID NO: 867809 - DNA, 75 bp, synthetic construct
  source 1..75: mol_type = other DNA
cgctggtacgccagcgagcgcagcagagcatcagtccacactaagcggcgggtatcttcagtcccatactgatat

SEQ ID NO: 867810 - DNA, 75 bp, synthetic construct
  source 1..75: mol_type = other DNA
cattgatgtcgcttatgaaggctccggcagtggtgactggcgcactgacgggttcatcgtgggtgttggttataa

SEQ ID NO: 867811 - DNA, 75 bp, synthetic construct
  source 1..75: mol_type = other DNA
atgaatggttcagcgcgtatgcgatcgcgggtgtggcttacagccgtgtgtcgactttctccggggattatctcc

SEQ ID NO: 867812 - DNA, 75 bp, synthetic construct
  source 1..75: mol_type = other DNA
acccgctggcatgaagattccgtgcgtaaccgctggttcagcgtgatggcggggccgtctgtgcgcgtgaatgaa

SEQ ID NO: 867813 - DNA, 75 bp, synthetic construct
  source 1..75: mol_type = other DNA
tcttaacgggattaacgtgaaataccgttatgagtttacggatacgctggggctggtgacgtcattcagctatgc

SEQ ID NO: 867814 - DNA, 75 bp, synthetic construct
  source 1..75: mol_type = other DNA
gtctgacgaacacacctttacctttaactcgccaaactcgtgggcaccagcggcctatgacgcgaagctggatct

SEQ ID NO: 867815 - DNA, 75 bp, synthetic construct
  source 1..75: mol_type = other DNA
tgtccacagccatctgtctggccgtatccggtgcgcctgcatgggcgtctgagcagcaggccacactgagcgcag

SEQ ID NO: 867816 - DNA, 75 bp, synthetic construct
  source 1..75: mol_type = other DNA
gttcagcgtgatggcggggccgtctgtacgcgtgaatgaatggttcagcgcgtatgcgatggtgggtgtggctta

SEQ ID NO: 867817 - DNA, 75 bp, synthetic construct
  source 1..75: mol_type = other DNA
tggggctgattacgtccttcagttatgccaatgctgaggatgagcaaaaaacgcactacagcgatacccgctggc

SEQ ID NO: 867818 - DNA, 75 bp, synthetic construct
  source 1..75: mol_type = other DNA
ggccgtctgtgcgcgtgaatgaattgttcagcgcgtatgcgatggcgggtgtgtcttacagccgtgtgtcgactt

SEQ ID NO: 867819 - DNA, 75 bp, synthetic construct
  source 1..75: mol_type = other DNA
tggcgtggggagctggcgtgcagtttaacccgaccgaatccgtggccattgatattgcttatgaaggctccggca

SEQ ID NO: 867820 - DNA, 75 bp, synthetic construct
  source 1..75: mol_type = other DNA
acggtcgccacagcaacacgtctctggcgtggggagctggcgtgcagtttaacccgaccgaatccgtggccattg

SEQ ID NO: 867821 - DNA, 75 bp, synthetic construct
  source 1..75: mol_type = other DNA
ttcctgccccggaaaaaccagtgccacaaggcgcagcgaaaggcgattacgttacccctactcaaccgttctctg

SEQ ID NO: 867822 - DNA, 75 bp, synthetic construct
  source 1..75: mol_type = other DNA
gatatctggggcggtaaccgcacactagaacaggaacgttatgccagctcaattctggcgctgaatgccacaacc

SEQ ID NO: 867823 - DNA, 75 bp, synthetic construct
  source 1..75: mol_type = other DNA
gcacaggtacggaatccggcattcagccgcaatatggcgtgccgtatggcgtaacgctcaacccgttcctttcgc

SEQ ID NO: 867824 - DNA, 75 bp, synthetic construct
  source 1..75: mol_type = other DNA
atgcgtaaactttatgctgccattttgtccgcagccatctgtctggctgtatccggtgcgcctgcatgggcgtct

SEQ ID NO: 867825 - DNA, 75 bp, synthetic construct
  source 1..75: mol_type = other DNA
ttggcggaggctggctggtcgcgattggcggctcctggtactaccctatcgctggccttgtgatgctcggcgtcg

SEQ ID NO: 867826 - DNA, 75 bp, synthetic construct
  source 1..75: mol_type = other DNA
cgtttggtctgccgtgtaaacagccagcatggggttatatttcggcgctggatctgaaaaccaacgaagtggtgt

SEQ ID NO: 867827 - DNA, 75 bp, synthetic construct
  source 1..75: mol_type = other DNA
taccggtagtgatgatctgaacgggattaacgtgaaataccgttatgaatttacggacacgctggggctgattac

SEQ ID NO: 867828 - DNA, 75 bp, synthetic construct
  source 1..75: mol_type = other DNA
cgcacgacgtgctgaccggaagtgatgacggtcgccacagcaacacgtctctggcgtggggggctggcgtgcagt

SEQ ID NO: 867829 - DNA, 75 bp, synthetic construct
  source 1..75: mol_type = other DNA
attgatattgcttatgaaggttccggcagtggtgactggcgcactgacggtttcatcgtgggtgtcggttataaa

SEQ ID NO: 867830 - DNA, 75 bp, synthetic construct
  source 1..75: mol_type = other DNA
ctctggcgtggggagctggcgtgcagtttaacccgaccgaatccgtggccattgatattgcttatgaaggttccg

SEQ ID NO: 867831 - DNA, 75 bp, synthetic construct
  source 1..75: mol_type = other DNA
gtggtgatatcaccgaagggattacttacgatccggcctctgcaggttacgcactcgcagccgtcgccagcacgt

SEQ ID NO: 867832 - DNA, 75 bp, synthetic construct
  source 1..75: mol_type = other DNA
gttaaaattattgaggatttaatcgcccgtaaggttaatgcaattactatcgtgccaaacgatgccaacgtgctg

SEQ ID NO: 867833 - DNA, 75 bp, synthetic construct
  source 1..75: mol_type = other DNA
tgtccgcagccatttgtctggccgtatcctgtgcgcctgcatgggcgtctgaacatcagtccacgctgagcgcgg

SEQ ID NO: 867834 - DNA, 75 bp, synthetic construct
  source 1..75: mol_type = other DNA
gaacatcagtccacgctgagcgcggggtatcttcatgtctcgacgaacgttcctggcagcgatgatctgaacggg

SEQ ID NO: 867835 - DNA, 75 bp, synthetic construct
  source 1..75: mol_type = other DNA
ccacaccgcgtcgcttggcgcctgcgaaattccccgccgggattacctcaatcatctcaatcaaatgcgccccga

SEQ ID NO: 867836 - DNA, 75 bp, synthetic construct
  source 1..75: mol_type = other DNA
atggcttaccagcgtggtatttttccgtggttttctccaggcgaccccatcctctggtggtcgcccgatccccgc

SEQ ID NO: 867837 - DNA, 75 bp, synthetic construct
  source 1..75: mol_type = other DNA
tactactgccaaacacccgtcgcggcaaattactggcggcgaaactgggttatcgcctgaaagcggcggtttcta

SEQ ID NO: 867838 - DNA, 75 bp, synthetic construct
  source 1..75: mol_type = other DNA
atgcggtactgaccatcagcagcggcacgttcgatgcggctcagccagacgcgtcacgcactggcgaaacgcaca

SEQ ID NO: 867839 - DNA, 75 bp, synthetic construct
  source 1..75: mol_type = other DNA
actggcaatccagctcggcgctaatcatgtctggaaattaagtggcaagccggacgatcggatgatcgaagatta

SEQ ID NO: 867840 - DNA, 75 bp, synthetic construct
  source 1..75: mol_type = other DNA
atttacgtgggtagtttgaccgtgccgcagcataacttatgggctgacttgctggtgaaataccagaaagagcat

SEQ ID NO: 867841 - DNA, 75 bp, synthetic construct
  source 1..75: mol_type = other DNA
ttaacgcgccgacggtatttaactcagtatttaacgttgagcagttctgggaggctttgttgaataaatcgaact

SEQ ID NO: 867842 - DNA, 75 bp, synthetic construct
  source 1..75: mol_type = other DNA
ctgggttttctcagcgagaagggatgcgattattgtcatacgccttcagcggaattacctgcctattattatatt

SEQ ID NO: 867843 - DNA, 75 bp, synthetic construct
  source 1..75: mol_type = other DNA
agaattacccgcctattattatattcctggcgcgaaacagttgatggattacgacataaagcttggatataaatc

SEQ ID NO: 867844 - DNA, 75 bp, synthetic construct
  source 1..75: mol_type = other DNA
tgtccgcagccatctgtctggccgtatccggtgcgcctgcgtgggcgtctgagcagcaggccacactgagcgcag

SEQ ID NO: 867845 - DNA, 75 bp, synthetic construct
  source 1..75: mol_type = other DNA
gatgtggatgatatcgtggctttcttgcacagcctgaacggagtttacacaccgtatatgcaggataaacaataa

SEQ ID NO: 867846 - DNA, 75 bp, synthetic construct
  source 1..75: mol_type = other DNA
aattacgccagattcaccgtttgataaatggttgcgtggtgatgaaaatgcgctgacggcacaacagaaaaaagg

SEQ ID NO: 867847 - DNA, 75 bp, synthetic construct
  source 1..75: mol_type = other DNA
acaagaatcgccagctgacccgttacagcgatacccgctggcatgaagattccgtgcgtaaccgctggttcagcg

SEQ ID NO: 867848 - DNA, 75 bp, synthetic construct
  source 1..75: mol_type = other DNA
atggcgggagtggcttacagccgtgtgtcgactttctccggggattatcttcgcgtaactgacaacaaggggaaa

SEQ ID NO: 867849 - DNA, 75 bp, synthetic construct
  source 1..75: mol_type = other DNA
gcgtaaccgttggttcagcatgatggcgggaccgtctgtacgcgtgaatgaagggttcagcgtgtatgcgatggc

SEQ ID NO: 867850 - DNA, 75 bp, synthetic construct
  source 1..75: mol_type = other DNA
gtgttggtggcgcagttgggccgattaacgcgccgacggtatttaactcagtatttaacgttgagcagttctggg

SEQ ID NO: 867851 - DNA, 75 bp, synthetic construct
  source 1..75: mol_type = other DNA
cggggtatcttcatgcctcgacgaacgttcccggcagcgatgatctgaacgggattaacgtgaaataccgttatg

SEQ ID NO: 867852 - DNA, 75 bp, synthetic construct
  source 1..75: mol_type = other DNA
tcgacgaacgtttccggcagcgatgatctgaacgggattaacgtgaaataccgttatgagtttacggacacactg

SEQ ID NO: 867853 - DNA, 75 bp, synthetic construct
  source 1..75: mol_type = other DNA
gaaagtttcctgtcctgaatgtaaagggaagggagagatctccactgcctgtaaagactgccgtgggcgtggtgt

SEQ ID NO: 867854 - DNA, 75 bp, synthetic construct
  source 1..75: mol_type = other DNA
cgagcgctatcactcttgatacgtggaaaaaatcagtgaagcgtttttacgatacgctggtggttcggtttgaca

SEQ ID NO: 867855 - DNA, 75 bp, synthetic construct
  source 1..75: mol_type = other DNA
aaaagttgcctgtccggagtgtggcggaaagggtgaggtttccaccgcctgtaaggattgccgtgggcgtggtgt

SEQ ID NO: 867856 - DNA, 75 bp, synthetic construct
  source 1..75: mol_type = other DNA
gcgcattctcccggcgctgggtgtgaaggtcattaaaaaccgccatcaggcctgcccggtatgcggcggctctga

SEQ ID NO: 867857 - DNA, 75 bp, synthetic construct
  source 1..75: mol_type = other DNA
gtgatgcgcattatggcttcgtacgcttttgaggattatgcccgcagcgcagcgagtaaaaagcagtgcccttgt

SEQ ID NO: 867858 - DNA, 75 bp, synthetic construct
  source 1..75: mol_type = other DNA
aaacagggcgtgccggttttcagaaactgtcagcgttgtggtgggcgtggctatgaaagattaccttcaacggag

SEQ ID NO: 867859 - DNA, 75 bp, synthetic construct
  source 1..75: mol_type = other DNA
agctggcgtgcagtttaacccgaccgaatccgtggccattgatattgcttatgaaggctccggcagtggcgactg

SEQ ID NO: 867860 - DNA, 75 bp, synthetic construct
  source 1..75: mol_type = other DNA
agcaacacgtctctggcgtggggagctggcgtgcagtttaacccgaccgaatccgtggccattgatgtcgcttat

SEQ ID NO: 867861 - DNA, 75 bp, synthetic construct
  source 1..75: mol_type = other DNA
gatgagcaaaaaacgcactacagcgatacccgctggcatgaagattcagtgcgtaaccgctggttcagcgtgatg

SEQ ID NO: 867862 - DNA, 75 bp, synthetic construct
  source 1..75: mol_type = other DNA
tgctgccgcagaccagcgggatgtttatgggtaacgccagcatcgtcccgcgcaattaccgtaaatatctttatc

SEQ ID NO: 867863 - DNA, 75 bp, synthetic construct
  source 1..75: mol_type = other DNA
cggataaatatggaattaagccatctggcgcttcacacctgcatgttgaaatcgcgacgaccttcttgctacatg

SEQ ID NO: 867864 - DNA, 75 bp, synthetic construct
  source 1..75: mol_type = other DNA
ttcattcacacatgggctccatcagttaaaacaatattgtgcttctcttcttaacagccacacgccttcagatct

SEQ ID NO: 867865 - DNA, 75 bp, synthetic construct
  source 1..75: mol_type = other DNA
tgatggccgcgcagggcatgacacagaatcgggctgagatggggttttctgcgttcctggggaaaatgggcatca

SEQ ID NO: 867866 - DNA, 75 bp, synthetic construct
  source 1..75: mol_type = other DNA
tcagggtaatcaacagacaggaagtgcgcaatctgatgcggcattgctctggagtttctggaactcttactctac

SEQ ID NO: 867867 - DNA, 75 bp, synthetic construct
  source 1..75: mol_type = other DNA
gagcaagccattaaaattgccttgcgcatgctggagcagggctttgaacgtgagattgtgctggcggcaacccaa

SEQ ID NO: 867868 - DNA, 75 bp, synthetic construct
  source 1..75: mol_type = other DNA
gtaaagattgtcgtgggcgcggtgttgccattcatcgtgaagagtctgaaaaacggggtatgcctgttatcaggg

SEQ ID NO: 867869 - DNA, 75 bp, synthetic construct
  source 1..75: mol_type = other DNA
gcggcaaaccacaatcgtctcggcggtcattacggtgaaccgggtatgcaactttttgtctacgggcgagaagag

SEQ ID NO: 867870 - DNA, 75 bp, synthetic construct
  source 1..75: mol_type = other DNA
caggtgaatccacagcaggtgattttcgcccagcaaaacccggacgttatcgaccagggcgtttttcataatgat

SEQ ID NO: 867871 - DNA, 75 bp, synthetic construct
  source 1..75: mol_type = other DNA
aaataacccgcgccatgccgccgccgggctactgcctttggcgctgggcaaaccgtgccaaaatcgggaatatgc

SEQ ID NO: 867872 - DNA, 75 bp, synthetic construct
  source 1..75: mol_type = other DNA
taaaattgccttgcgcatgctggaacagggctttgaacgtgagattgtgctggcgacaacccaactcactgatgc

SEQ ID NO: 867873 - DNA, 75 bp, synthetic construct
  source 1..75: mol_type = other DNA
ttggaggggttgcagaaaggcaaagtagaaggtatgcatgaacaagccattaaaattgccttgcgcatgctggaa

SEQ ID NO: 867874 - DNA, 75 bp, synthetic construct
  source 1..75: mol_type = other DNA
gaaaaaaacggttaaacgtttttacgatacgctggtggtgcagtttgatattgaagaggcatgggcagagcaaca

SEQ ID NO: 867875 - DNA, 75 bp, synthetic construct
  source 1..75: mol_type = other DNA
tatctcttgatacatggaaaaaaacagttaaacgtttttacgatacgctggtggtgcagtttgatattgaagaag

SEQ ID NO: 867876 - DNA, 75 bp, synthetic construct
  source 1..75: mol_type = other DNA
cgtggtgttgccattcatcgtgaagagtcggtaaaacgtggtatgcctgttatcagagactgccagcgttgtggt

SEQ ID NO: 867877 - DNA, 75 bp, synthetic construct
  source 1..75: mol_type = other DNA
catgaacaagccattaaaattgccttgcgcatgctggaacagggcattgatcgtgaccaggtgctcgcggccact

SEQ ID NO: 867878 - DNA, 75 bp, synthetic construct
  source 1..75: mol_type = other DNA
ccgaatgcgtggccattgatattgcttatgaagggtccgggagtggtgactggcgcactgacggtttcatcgtgg

SEQ ID NO: 867879 - DNA, 75 bp, synthetic construct
  source 1..75: mol_type = other DNA
gacggtcgccacagcgacacgtctctggcatggggggctggcgtgcagtttaacccgaccgaatccgtggccatt

SEQ ID NO: 867880 - DNA, 75 bp, synthetic construct
  source 1..75: mol_type = other DNA
tgtccgcagccatttgtctggccgtatccggtgcgcctgcatgggcgtctgaacatcagtccacgctgagcgctg

SEQ ID NO: 867881 - DNA, 75 bp, synthetic construct
  source 1..75: mol_type = other DNA
gccagctgactcattacagcgatacccgctggcatgaagattccgtgcgtaaccgctggttcagcgtgatggcgg

SEQ ID NO: 867882 - DNA, 75 bp, synthetic construct
  source 1..75: mol_type = other DNA
cttcatgcctcgacgaacgtttccggcagcgatgatctgaacgggattaacgtgaaataccgttatgagtttacg

SEQ ID NO: 867883 - DNA, 75 bp, synthetic construct
  source 1..75: mol_type = other DNA
gcgtaaccgctggttcagcgtgatggcggggccgtctgtgcgcgtgaatgaattgttcagcgcgtatgcgatggc

SEQ ID NO: 867884 - DNA, 75 bp, synthetic construct
  source 1..75: mol_type = other DNA
gatattgcttatgaaggttccggcagtggcgactggcgcactgacggtttcatcgttggtgtcggttataaattc

SEQ ID NO: 867885 - DNA, 75 bp, synthetic construct
  source 1..75: mol_type = other DNA
ccgtctgtgcgcgtgaatgaatggttcagtgcgtatgcgatggcgggcgtggcttacagccgtgtgtcgactttt

SEQ ID NO: 867886 - DNA, 75 bp, synthetic construct
  source 1..75: mol_type = other DNA
attaacgtgaaataccgttatgagtttacggacacactggggctggtgacgtccttcagctatgccaatgctgag

SEQ ID NO: 867887 - DNA, 75 bp, synthetic construct
  source 1..75: mol_type = other DNA
ctggttcagcgtgatggcggggccgtctgtgcgcgtgaatgaatggttcagcgcgtatgcgatggcgggtgtggc

SEQ ID NO: 867888 - DNA, 75 bp, synthetic construct
  source 1..75: mol_type = other DNA
cgaatccgtaaccattgaccttgcttatgaaggttccggtagtggcgactggcgaacggatgcatttattgttgg

SEQ ID NO: 867889 - DNA, 75 bp, synthetic construct
  source 1..75: mol_type = other DNA
tcacgtcagatgagggtaaaaagcaggagcacctgacccgctcggacagcggacgccgcagccataccgcactga

SEQ ID NO: 867890 - DNA, 75 bp, synthetic construct
  source 1..75: mol_type = other DNA
cgtgaccattgaccttgcttatgacggttccggtagtggcgactggcgatcggatgcatttattgttggtatcgg

SEQ ID NO: 867891 - DNA, 75 bp, synthetic construct
  source 1..75: mol_type = other DNA
taccggcagcgatgatcttaacgggattaacgtgaaataccgttatgagtttacggacacactggggatggtgac

SEQ ID NO: 867892 - DNA, 75 bp, synthetic construct
  source 1..75: mol_type = other DNA
ccgaattcgtggccattgatattgcttatgaagggtccggaagtggagactggcgcactgacggtttcatcgtgg

SEQ ID NO: 867893 - DNA, 75 bp, synthetic construct
  source 1..75: mol_type = other DNA
ccgaatacgtggccattgatattgcttatgaagggtccggaagtggtgactggcgcactgacggtttcatcgtgg

SEQ ID NO: 867894 - DNA, 75 bp, synthetic construct
  source 1..75: mol_type = other DNA
cgtgcagtttaacccgaccgaatccgtggccattgacattgcttatgaaggctccggcagtggcgactggcgcac

SEQ ID NO: 867895 - DNA, 75 bp, synthetic construct
  source 1..75: mol_type = other DNA
ccgaatccgtggccattgatattgcttatgaagggtccggcagtggtgactggcgcactgacggtttcatcgtgg

SEQ ID NO: 867896 - DNA, 75 bp, synthetic construct
  source 1..75: mol_type = other DNA
ccgaattcgtggccattgatattgcttatgaagggtccgggagtggggactggcgcactgacggtttcatcgtgg

SEQ ID NO: 867897 - DNA, 75 bp, synthetic construct
  source 1..75: mol_type = other DNA
ccgaattcgtggccattgatattgcttatgaagggtccggcagtggcgactggcgcactgacggtttcatcgtgg

SEQ ID NO: 867898 - DNA, 75 bp, synthetic construct
  source 1..75: mol_type = other DNA
atgcgatggcgggtatggcttacagccgtgtttcgactttctccggagattatatccgcgtaactgacaacaagg

SEQ ID NO: 867899 - DNA, 75 bp, synthetic construct
  source 1..75: mol_type = other DNA
gcggggccgtctgtgcgcgtgaatgaaaggatcagcgcgtatgcgatggcgggtatggcttacagccgtgtatcg

SEQ ID NO: 867900 - DNA, 75 bp, synthetic construct
  source 1..75: mol_type = other DNA
accgaatccgtggccattgatgtcgcttatgaaggttccggcagtggtgactggcgcactgacggtttcatcgtg

SEQ ID NO: 867901 - DNA, 75 bp, synthetic construct
  source 1..75: mol_type = other DNA
cccattacagcgatacccgctggcatgaagattcagtgcgtaaccgctggttcagcatgatggcggggccgtctg

SEQ ID NO: 867902 - DNA, 75 bp, synthetic construct
  source 1..75: mol_type = other DNA
gcttacagccgtgtgtcgactttctccggggattatcttcgcgtaactgacaacaaggggaaaacgcacgatgtg

SEQ ID NO: 867903 - DNA, 75 bp, synthetic construct
  source 1..75: mol_type = other DNA
cgcgtaactgacaacaaggggaaaacgcacgacgtgctgaccggaagtgatgacgctcgccacagtaacacctct

SEQ ID NO: 867904 - DNA, 75 bp, synthetic construct
  source 1..75: mol_type = other DNA
ccgggtcgatcacggcggcagtatcaatattctgacctctcaccgcccttcaccgctggcaaagggaaacccgtc

SEQ ID NO: 867905 - DNA, 75 bp, synthetic construct
  source 1..75: mol_type = other DNA
tatcgtgaagaggcaattattaaatccggtatgaacccgttcctgctggatagcgaagatgtttttatcgattgg

SEQ ID NO: 867906 - DNA, 75 bp, synthetic construct
  source 1..75: mol_type = other DNA
ggcagccgcagttactacgcgttagccgagtcagtgaaaaatatctttggttatcaatacactattccgactcac

SEQ ID NO: 867907 - DNA, 75 bp, synthetic construct
  source 1..75: mol_type = other DNA
aagaactaacagaaatagttaccagcaaagattgggtagattacgtgacctccatagggagtttaattagctccg

SEQ ID NO: 867908 - DNA, 75 bp, synthetic construct
  source 1..75: mol_type = other DNA
gagtggctagtcaatggttatggtgatgagccaagcatgaaaaaagaaccaattgaacaaacaaaaagaacaaaa

SEQ ID NO: 867909 - DNA, 75 bp, synthetic construct
  source 1..75: mol_type = other DNA
agaaacaatcagccgccaccacaaccaagaaagcaccatctccagaacattgcagaaagagaacatgtatctatg

SEQ ID NO: 867910 - DNA, 75 bp, synthetic construct
  source 1..75: mol_type = other DNA
tccaggccgccagtctagtcaagcccgatgccgtcagcctggtgatgctcggcctgttcagttcctttctgctgc

SEQ ID NO: 867911 - DNA, 75 bp, synthetic construct
  source 1..75: mol_type = other DNA
cccatcgagcagaaaacggtggtggatggcgaacctgttttacgggtgcgtaatctggtcacccgtttccctttg

SEQ ID NO: 867912 - DNA, 75 bp, synthetic construct
  source 1..75: mol_type = other DNA
ttgccacacagtgatgaacttgatgccggtgatgtgctggcggttgaaaatctgaatattgcctttatgcaggac

SEQ ID NO: 867913 - DNA, 75 bp, synthetic construct
  source 1..75: mol_type = other DNA
gaaacgctatcgctggtgggcgagtctggcagcggtaaatccactaccgggcgggcgttgctgcgcctggtcgaa

SEQ ID NO: 867914 - DNA, 75 bp, synthetic construct
  source 1..75: mol_type = other DNA
tttcaaaacatgcttgggctgggcggcgaatccgcagcaactgtggcaggcgatggcactgctggcgcggtggtt

SEQ ID NO: 867915 - DNA, 75 bp, synthetic construct
  source 1..75: mol_type = other DNA
aattaatcaaagtattgcaaaaagagatgtcgatgggagtcatcttcatcacccacgatatgggggtggtggcag

SEQ ID NO: 867916 - DNA, 75 bp, synthetic construct
  source 1..75: mol_type = other DNA
cagattatcaacttgttgctcgatctccagcgtgatttcggcattgcgtatctgtttatctcccacgatatggcg

SEQ ID NO: 867917 - DNA, 75 bp, synthetic construct
  source 1..75: mol_type = other DNA
ttgacgaaggaaaagaaccagtaatcgagcgaatatttcgccttgcagagcgttacaaatcgagaagtgaggcgg

SEQ ID NO: 867918 - DNA, 75 bp, synthetic construct
  source 1..75: mol_type = other DNA
aagttcaaagggattgtaacgttacatggttttcgttcgatgtggagtacgcttttaaatgaggagggttttaac

SEQ ID NO: 867919 - DNA, 75 bp, synthetic construct
  source 1..75: mol_type = other DNA
attttgattctggcttgtggattatccccgcgcataaaatgaaatgccatcgtgaacatgttgtgcctctctcat

SEQ ID NO: 867920 - DNA, 75 bp, synthetic construct
  source 1..75: mol_type = other DNA
ttattacaatcacgcttcgggcaggcattcaaagtggaagaagggaggatcgttgcttatgacgcttccggcaac

SEQ ID NO: 867921 - DNA, 75 bp, synthetic construct
  source 1..75: mol_type = other DNA
acgctaggtgcagagcagatggctgaaccgctggctctctttggtgatgatgaggacatgggcccaaaaccagcg

SEQ ID NO: 867922 - DNA, 75 bp, synthetic construct
  source 1..75: mol_type = other DNA
atggttgtgaaactgtctgatatatcgtctaatctgaacaggttccgtcgcggactgggatatgcaggaaaaatt

SEQ ID NO: 867923 - DNA, 75 bp, synthetic construct
  source 1..75: mol_type = other DNA
atgagtacctgtaatttccatgctgtggagcgtgtcgctgacgtgcgcccggatttcgccttgccgttgggtaga

SEQ ID NO: 867924 - DNA, 75 bp, synthetic construct
  source 1..75: mol_type = other DNA
accaaggtattccagcagcagctggatgaagcgaacggcaagaccaaacagctcgaaagccagctctacgacgag

SEQ ID NO: 867925 - DNA, 75 bp, synthetic construct
  source 1..75: mol_type = other DNA
gaaagtgaggtcgaggcaatagactttacaaaaaatggtttaagacctgttgataagaatattctcttaactatg

SEQ ID NO: 867926 - DNA, 75 bp, synthetic construct
  source 1..75: mol_type = other DNA
aaagcatttaattgttgaaggtcgggatgacgaatcgatagaacagatatttggtggacataatgaaaagtttat

SEQ ID NO: 867927 - DNA, 75 bp, synthetic construct
  source 1..75: mol_type = other DNA
tacgctgcccgcgtgaacgttgagcactatctctcgccatgcccgtcaagcgaattttccgcaatgggcgatgtc

SEQ ID NO: 867928 - DNA, 75 bp, synthetic construct
  source 1..75: mol_type = other DNA
ttgttattcaaaatttcgacggggatggtgcttgaccaagctgctggtggtcgcggcgctgggcgtgtcgatggt

SEQ ID NO: 867929 - DNA, 75 bp, synthetic construct
  source 1..75: mol_type = other DNA
cgttggcattgatgcgcctgttggaacaggcgggcggtttagtacagtgcgataaaatgctgttgcagcggcgca

SEQ ID NO: 867930 - DNA, 75 bp, synthetic construct
  source 1..75: mol_type = other DNA
cgtgtgtttcatgcgggacgttcgattcagcccagtgggatgcaggccattaccgtacaacagttgcggcacctc

SEQ ID NO: 867931 - DNA, 75 bp, synthetic construct
  source 1..75: mol_type = other DNA
ttgttgaggtggtcaatcataacctgaatgtctcatcaacggcggaaggactttacacatcacaacccgggatca

SEQ ID NO: 867932 - DNA, 75 bp, synthetic construct
  source 1..75: mol_type = other DNA
gcggacggcaagaaaatctattccagtatcgaactgcacccgcagttctccgttaacgggcgcgcctatctggtc

SEQ ID NO: 867933 - DNA, 75 bp, synthetic construct
  source 1..75: mol_type = other DNA
agctcagatttgatgaacgcaatatccataagcaatgcgtggtgtgtaaccagtacaaaagcggaaatctcgttc

SEQ ID NO: 867934 - DNA, 75 bp, synthetic construct
  source 1..75: mol_type = other DNA
tggacgttaatacctgtggtctgctgctgttcaccaccgacggtgaactggcaaaccgtttaatgcacccaagcc

SEQ ID NO: 867935 - DNA, 75 bp, synthetic construct
  source 1..75: mol_type = other DNA
agtgcggcgcgggtgacgggcttaagctggtagaaaaagtgttcggcgtgaccccgtcagaggccgccgggaagg

SEQ ID NO: 867936 - DNA, 75 bp, synthetic construct
  source 1..75: mol_type = other DNA
ggcacccatttctttaccaacgatatgggtggcaacatgatgatgtatatcaacctgatttgggcctggggccac

SEQ ID NO: 867937 - DNA, 75 bp, synthetic construct
  source 1..75: mol_type = other DNA
gatgctgacgtcattaaaacttacgtccggttagggctgggggtaggggtcattgccagcatggcggtggatccg

SEQ ID NO: 867938 - DNA, 75 bp, synthetic construct
  source 1..75: mol_type = other DNA
tagcacaaccaaaattggttttcgccgcagtacgtttttgcgcagttatatgtatgatttcattcagcgttttgc

SEQ ID NO: 867939 - DNA, 75 bp, synthetic construct
  source 1..75: mol_type = other DNA
taacgccagcaggacaagaaataattcgtatcgctcgcgaagtcctgtcgaaagtcgatgccataaaatcggttg

SEQ ID NO: 867940 - DNA, 75 bp, synthetic construct
  source 1..75: mol_type = other DNA
atcatgcagttcaacagccgcaacggtgagccagtcatgttcaccgaatgtatggaagcggaactcgcggcctcc

SEQ ID NO: 867941 - DNA, 75 bp, synthetic construct
  source 1..75: mol_type = other DNA
acgggttaggtgcggtggggttatatctggcggcgatggctggcttgaccttaatcgccctactgctgacccatg

SEQ ID NO: 867942 - DNA, 75 bp, synthetic construct
  source 1..75: mol_type = other DNA
ctgctgctggcgctggctcgatttggtcagggcctgggcttaggcggtgaatggggcggcgcggcgctgctggcg

SEQ ID NO: 867943 - DNA, 75 bp, synthetic construct
  source 1..75: mol_type = other DNA
tcgccggtgtttgagaaagtcgctaaagcgaaaaaacaggtgaagatcccgctgggtacgctgctgaccaaacat

SEQ ID NO: 867944 - DNA, 75 bp, synthetic construct
  source 1..75: mol_type = other DNA
tctatgcacctgatgagggaacttgtactaatatcaacattgaattatgcgctgtatcagctattgatgttctga

SEQ ID NO: 867945 - DNA, 75 bp, synthetic construct
  source 1..75: mol_type = other DNA
ggctccttcccacagctgggcgcaccgattggcttcttctttgccaacggcactttcttgctgctttcctggcta

SEQ ID NO: 867946 - DNA, 75 bp, synthetic construct
  source 1..75: mol_type = other DNA
gttattggttttggcgtgatggtgccagtcgccggattactggctgatgcctttggtcgccgtaaaagcatggta

SEQ ID NO: 867947 - DNA, 75 bp, synthetic construct
  source 1..75: mol_type = other DNA
acgctgatcatcctgttcgcgctgttcgcctttaacccgttgctcggttctggcaacccgattctggtttttgcc

SEQ ID NO: 867948 - DNA, 75 bp, synthetic construct
  source 1..75: mol_type = other DNA
ccatcatgcagttttttaagctgccgggtcagcaggtctatttccttgaagtcaccacctgttttattctgtttt

SEQ ID NO: 867949 - DNA, 75 bp, synthetic construct
  source 1..75: mol_type = other DNA
tatctctctatgttcccgaatagcgattttggggcgatgggggatgtggtagccctcagcactgaagacatcacc

SEQ ID NO: 867950 - DNA, 75 bp, synthetic construct
  source 1..75: mol_type = other DNA
gtcagggtctgggcttaggcggcgaatggggcggagcggcgctgctggcaaccgagaacgcaccaccgcgcaaac

SEQ ID NO: 867951 - DNA, 75 bp, synthetic construct
  source 1..75: mol_type = other DNA
accgccaccgcgcctgtcgggcttggccttccgcgtaacgaagtgctgtggatgctgatgatggcagtaattggt

SEQ ID NO: 867952 - DNA, 75 bp, synthetic construct
  source 1..75: mol_type = other DNA
cgccaccttcgccattgccttcgtcgcgcgccccatcggctctgccgtatttggtcattttggcgatcgcgttgg

SEQ ID NO: 867953 - DNA, 75 bp, synthetic construct
  source 1..75: mol_type = other DNA
cagtattcgtttcgcccgttgtgattgtattgaaggcacactttgcgaacatgtcgtactggcggtacaggcctt

SEQ ID NO: 867954 - DNA, 75 bp, synthetic construct
  source 1..75: mol_type = other DNA
cagcctctgccagctcaccctttgccgttgaacgcatggcgtccctgttacgacagcaagatgatcccgtgtgtc

SEQ ID NO: 867955 - DNA, 75 bp, synthetic construct
  source 1..75: mol_type = other DNA
gcgctattagtcaggcagagttgctggcgaatgacctctccgcggtcggtttttatcggctggcacatgtgttgg

SEQ ID NO: 867956 - DNA, 75 bp, synthetic construct
  source 1..75: mol_type = other DNA
tggagctgacaccacaagcgctcaccgcattaagcaatgtgggttttgttaagcgcagccttaaggaactggaag

SEQ ID NO: 867957 - DNA, 75 bp, synthetic construct
  source 1..75: mol_type = other DNA
gcgaggcacgggtagaagcaatgaataacggtgttttgctttgcgaacaattattccccatgcttcagcaacaag

SEQ ID NO: 867958 - DNA, 75 bp, synthetic construct
  source 1..75: mol_type = other DNA
tgctaccgcccagcctacgggaaaagaagaggaatgggatccggcaatctggctggaagaactggctacccttcc

SEQ ID NO: 867959 - DNA, 75 bp, synthetic construct
  source 1..75: mol_type = other DNA
aaatgatcacggaattgataatgacaaagaaggtaacaatgaaattaatgacatcatgattaacctgtctcatat

SEQ ID NO: 867960 - DNA, 75 bp, synthetic construct
  source 1..75: mol_type = other DNA
ggttatttgatgatgttaagttgctatttaatgaagtgcctgtcagcattttagtaaatgacatttttttgaagg

SEQ ID NO: 867961 - DNA, 75 bp, synthetic construct
  source 1..75: mol_type = other DNA
tgttattgaagaaaaacttaataatgaattaaaacttaggtttagaatgatgcaaactatcttgaaatcggaggt

SEQ ID NO: 867962 - DNA, 75 bp, synthetic construct
  source 1..75: mol_type = other DNA
tgctacccctcagcccacggaaaaagcagaggaatggcccccggcaatctggctggaagaactgactaccctgcc

SEQ ID NO: 867963 - DNA, 75 bp, synthetic construct
  source 1..75: mol_type = other DNA
ccaggcgttgctcattcaactgctgcataacggctggcgttaccaggaacaaagcatcattaatcaggcagagat

SEQ ID NO: 867964 - DNA, 75 bp, synthetic construct
  source 1..75: mol_type = other DNA
agtactgagtttgaattcgattttgctaaattttgctacgaatttataaatatgatccgaaggggagatgcaaat

SEQ ID NO: 867965 - DNA, 75 bp, synthetic construct
  source 1..75: mol_type = other DNA
aaggggaaatgcctgtcgccatgatgtccagcagttaagccaggcattatggctgggcgggatcagtcagccgtt

SEQ ID NO: 867966 - DNA, 75 bp, synthetic construct
  source 1..75: mol_type = other DNA
accattttcgtggagagcggcaacattgaaacgaccggagaaaccccatcgtttgtttaccgctatcagatggtg

SEQ ID NO: 867967 - DNA, 75 bp, synthetic construct
  source 1..75: mol_type = other DNA
gtgtcaggccaacccggaaaaattcaccattttcgtggagagcggcaacattgaaacgaccggagaaacgccctc

SEQ ID NO: 867968 - DNA, 75 bp, synthetic construct
  source 1..75: mol_type = other DNA
gtgtcatggcgacatgctgcgcattgtggcagacgacggtttacagattcggcggatagaaatagaccaggagtg

SEQ ID NO: 867969 - DNA, 75 bp, synthetic construct
  source 1..75: mol_type = other DNA
gtgaaggtattgatcaatcaaccttccacaaacttttaaagaagtatgacattaaagtgaagattgaagctaccg

SEQ ID NO: 867970 - DNA, 75 bp, synthetic construct
  source 1..75: mol_type = other DNA
gtgaaatcgttttagaaatggcaaagcgttattttgaactgacacctgatgtagtgatgggtgaatggtttaaag

SEQ ID NO: 867971 - DNA, 75 bp, synthetic construct
  source 1..75: mol_type = other DNA
agtccatgcttcatgggtgtcggtggtgccaggctaatcccgagaaattcaccattttcgtggagagcggcaaca

SEQ ID NO: 867972 - DNA, 75 bp, synthetic construct
  source 1..75: mol_type = other DNA
gctctctctgactggtcggcattgcctgaatccttaaaaccggcgcttgaggcgattgcgctgcacggtacggaa

SEQ ID NO: 867973 - DNA, 75 bp, synthetic construct
  source 1..75: mol_type = other DNA
gaaaactttgcgcgggtagagaagttgtcgccagaagcatttgaagaaagcgtagaagccattcgactggcagcg

SEQ ID NO: 867974 - DNA, 75 bp, synthetic construct
  source 1..75: mol_type = other DNA
gcgagctgacgattgttgaggagtggtgctttggctatatgcgtggcgttgccctcgctgactggtcggcattgc

SEQ ID NO: 867975 - DNA, 75 bp, synthetic construct
  source 1..75: mol_type = other DNA
cagtcagggcacaccgcaggcagaacacctgccggagccaaaaccccgcctgccctcttccgaaggcgactggtc

SEQ ID NO: 867976 - DNA, 75 bp, synthetic construct
  source 1..75: mol_type = other DNA
agggcatggctggcttttgaaatacagagataaactaccaatgacaatgatacttctcagaaaaatggaactaat

SEQ ID NO: 867977 - DNA, 75 bp, synthetic construct
  source 1..75: mol_type = other DNA
tgtggatgccattcgactggcggcacttgatttgcacgcttactggatggctcatcagcaggaaaagcctgttca

SEQ ID NO: 867978 - DNA, 75 bp, synthetic construct
  source 1..75: mol_type = other DNA
gcagatccgttatgtactatcagcagcgagactgtgatgaatcgcatttattgtgtgattggcacagtgcatatt

SEQ ID NO: 867979 - DNA, 75 bp, synthetic construct
  source 1..75: mol_type = other DNA
tggcgaacagtcaggcactgaaagaggctcagtgcacctgcggggccagcggcatgtgccgtcatcgcgtgatgc

SEQ ID NO: 867980 - DNA, 75 bp, synthetic construct
  source 1..75: mol_type = other DNA
tcaggctggcgcactggcaggtgggcaaattgtttcacaagcagcgcgtcgcagtgccgatggcgagctgctgtt

SEQ ID NO: 867981 - DNA, 75 bp, synthetic construct
  source 1..75: mol_type = other DNA
aagaatgatggaagtcctccgggatgggaaaatcaatatatataattatattaatgaaaaacagttagaaaaatt

SEQ ID NO: 867982 - DNA, 75 bp, synthetic construct
  source 1..75: mol_type = other DNA
cagctggataagtgctcatccgctggaagtgatgtagttgaaaaaattaataacaagtttggccgcctgcgcggg

SEQ ID NO: 867983 - DNA, 75 bp, synthetic construct
  source 1..75: mol_type = other DNA
cagctaatacgcaataatacgactatagcatacgggagcattgtaaaaatcaacgaagatttttattttaccgtt

SEQ ID NO: 867984 - DNA, 75 bp, synthetic construct
  source 1..75: mol_type = other DNA
ataacttatttattctgccggtcgctgagtgtatttcgctcggttgggatagcagccgccagacactggatgcgc

SEQ ID NO: 867985 - DNA, 75 bp, synthetic construct
  source 1..75: mol_type = other DNA
tattacacgctccctcatttcgttcaggagttttatcgcggtagccaacttgtcggattcagcggtgattacatt

SEQ ID NO: 867986 - DNA, 75 bp, synthetic construct
  source 1..75: mol_type = other DNA
ctcgccgcgctgaaatcaacgcgaaataatgcagccaaaattgaccgcctgattgctcttacgacgaacacactg

SEQ ID NO: 867987 - DNA, 75 bp, synthetic construct
  source 1..75: mol_type = other DNA
aattccctctgcccgcttaccgatgagcgatgtacgtttttattcccgcagcagcattcgcttcgcacgctgtga

SEQ ID NO: 867988 - DNA, 75 bp, synthetic construct
  source 1..75: mol_type = other DNA
caccggtcatccattcgatgttggtgacttttttagaattgccatataataatgatgtaaaaatactggaatggt

SEQ ID NO: 867989 - DNA, 75 bp, synthetic construct
  source 1..75: mol_type = other DNA
gagttaaataattctcaggacttaaataactcgcaggtgagttgtaaaggttcagttgattctacgattacggat

SEQ ID NO: 867990 - DNA, 75 bp, synthetic construct
  source 1..75: mol_type = other DNA
gaaaagatttattttgataatttaaaatatgattttaataatgaggaatctaataaggaaatattgaggagtcaa

SEQ ID NO: 867991 - DNA, 75 bp, synthetic construct
  source 1..75: mol_type = other DNA
gttatgtggattttagcaaacgctccaacgaagcgggtagaaatatgatggctcatattgagtcctcatcttatt

SEQ ID NO: 867992 - DNA, 75 bp, synthetic construct
  source 1..75: mol_type = other DNA
gtagtgccgcgacaccgggcgcaagatgcagagattgccacggtactggccgggccgttgatattgccaaaacag

SEQ ID NO: 867993 - DNA, 75 bp, synthetic construct
  source 1..75: mol_type = other DNA
ctttatgaaaaatcctgagatgattaattggtacttccctcagttacttaagagttatgagggtgaaaagattta

SEQ ID NO: 867994 - DNA, 75 bp, synthetic construct
  source 1..75: mol_type = other DNA
agttaaataatatacaggggttaaataatcctcaggagttaaataatccgcagaatttaaatgattctcaggagt

SEQ ID NO: 867995 - DNA, 75 bp, synthetic construct
  source 1..75: mol_type = other DNA
atgcgttgctggttggcggcggagcggtagcgggtacggtgctgtggaacaaatacaaagataaaattcgtgcgg

SEQ ID NO: 867996 - DNA, 75 bp, synthetic construct
  source 1..75: mol_type = other DNA
tcaaaatacgccgctggatgaacgtacagaacgtttgatcctcgcactggtatttgccgctaaaagtgatggaca

SEQ ID NO: 867997 - DNA, 75 bp, synthetic construct
  source 1..75: mol_type = other DNA
atatataattatattaatgaaaaacagttagaaaaattaaatcctccggaagatttacgaacagtaatagaaaaa

SEQ ID NO: 867998 - DNA, 75 bp, synthetic construct
  source 1..75: mol_type = other DNA
ttaaatgattctcaggagttaaataactcgcaggacttaaataattcgcaggtgagttgtaaaggttcagttgat

SEQ ID NO: 867999 - DNA, 75 bp, synthetic construct
  source 1..75: mol_type = other DNA
cagtttgttatgaataatcctgaaggtgagcgagcggatttatctaaggtggaaatagaaattacacttgcctca

SEQ ID NO: 868000 - DNA, 75 bp, synthetic construct
  source 1..75: mol_type = other DNA
atcactactatggggactcgtcaaggacatacggctattatatttccacaacctgatggttcgactaaccgttat

SEQ ID NO: 868001 - DNA, 75 bp, synthetic construct
  source 1..75: mol_type = other DNA
agtctcctgccgataagtatgatctcatcaataaaacgtcccatgtttctcctgacagtggccgtttttatgaac

SEQ ID NO: 868002 - DNA, 75 bp, synthetic construct
  source 1..75: mol_type = other DNA
cctgacagtggccacttttatgaaccgggcacggctctgaattatcgtgagcgggtacgtcttttcattcagatc

SEQ ID NO: 868003 - DNA, 75 bp, synthetic construct
  source 1..75: mol_type = other DNA
gagatcatcgtggcgagtgcgcaggaaattgcatggacgccggggagcagtcgtattgatggtcatcagggcgaa

SEQ ID NO: 868004 - DNA, 75 bp, synthetic construct
  source 1..75: mol_type = other DNA
agaccaactgcgcctgctcaagcgtttgatcaaagcgatgaacctcgacgagaagcagtggccgccgcgccaggc

SEQ ID NO: 868005 - DNA, 75 bp, synthetic construct
  source 1..75: mol_type = other DNA
ggaccgatggcgcggacggtgagccgatttctctttattgcgcctttaacgaactcgacgaagcgcgttttgtgg

SEQ ID NO: 868006 - DNA, 75 bp, synthetic construct
  source 1..75: mol_type = other DNA
ctgatcaaagccatgaacctcgacgagaagcagtggccgccgcgccaggcaatgcggtacatcaacagccagaaa

SEQ ID NO: 868007 - DNA, 75 bp, synthetic construct
  source 1..75: mol_type = other DNA
tctggcgctcggggatattatcgggcggctgttcttcagactgattgaaggaacatcaggcctcatcacctggtg

SEQ ID NO: 868008 - DNA, 75 bp, synthetic construct
  source 1..75: mol_type = other DNA
gccagcggcaacatgcgcgacatggccgctatctttacgggtgtcggacagaagctcagcagcatgccgtattac

SEQ ID NO: 868009 - DNA, 75 bp, synthetic construct
  source 1..75: mol_type = other DNA
tgcgcaaaaagataattgaaaattttcccaaaattgaagtcaccatcacaaaggtcataaaggggagcctctggc

SEQ ID NO: 868010 - DNA, 75 bp, synthetic construct
  source 1..75: mol_type = other DNA
cttcagactgattgaggggacatcaggcctcatcacctggtggcaatcgctggataagcaaacgcgggagttgat

SEQ ID NO: 868011 - DNA, 75 bp, synthetic construct
  source 1..75: mol_type = other DNA
caaaatcggctctaatcttgcgggtgggcttgcgggttcgctggacaccctgcgccgccatatcctggacaactt

SEQ ID NO: 868012 - DNA, 75 bp, synthetic construct
  source 1..75: mol_type = other DNA
gactggattaaagagcactggggatttgatccccgcagtgtgggccggacggtaagcggctggtttggtgatgat

SEQ ID NO: 868013 - DNA, 75 bp, synthetic construct
  source 1..75: mol_type = other DNA
gtgcttctccgcccaacctatttttacgcggcggtgccaatggacgtttcttacctgctcgacagccttaatgac

SEQ ID NO: 868014 - DNA, 75 bp, synthetic construct
  source 1..75: mol_type = other DNA
gctaaagcaaacaaagaccaaattgatcttatcagtgaggaacatgataaacgtattgctgaaaactatgtcttt

SEQ ID NO: 868015 - DNA, 75 bp, synthetic construct
  source 1..75: mol_type = other DNA
gctagatcaagcagagttaagcatgatcctgtcagtacagaacatgataaacgtattactgaaaactttgtcttt

SEQ ID NO: 868016 - DNA, 75 bp, synthetic construct
  source 1..75: mol_type = other DNA
tcctctcccatgcggcgctggaagcgggcgaagggcaggcggatacctggcaggatgcggtgcagttgatgacgc

SEQ ID NO: 868017 - DNA, 75 bp, synthetic construct
  source 1..75: mol_type = other DNA
ccaacacctgatgagatcacccgtttcccaagccgtccgaagcaggaacaaccagaaatcgatcacagcaaggat

SEQ ID NO: 868018 - DNA, 75 bp, synthetic construct
  source 1..75: mol_type = other DNA
caaacagggcatccagaagcgcccctgaccgtgcaagaaagcataagactactccacgtcaggataatattttta

SEQ ID NO: 868019 - DNA, 75 bp, synthetic construct
  source 1..75: mol_type = other DNA
ctgaaaacatcctcctctcaacccctaaacagggcatccagaagcgcccctaaacgtcttaaaaggaaacaggct

SEQ ID NO: 868020 - DNA, 75 bp, synthetic construct
  source 1..75: mol_type = other DNA
tattggtgaccggacgctggacgtagtgcgccagacatcgcgcgatcgccagttaactctctggcaggcgtgtcg

SEQ ID NO: 868021 - DNA, 75 bp, synthetic construct
  source 1..75: mol_type = other DNA
tcttcgaacgccaggaaatcaaagatgcgctctcgtatctgcgcctgattgccaaccgcaacgacgacgcggcct

SEQ ID NO: 868022 - DNA, 75 bp, synthetic construct
  source 1..75: mol_type = other DNA
tgcactcggcgaaaggcctggagttcccgcaggtgtttatcgtcggtatggaagagggcatgttcccaagccaga

SEQ ID NO: 868023 - DNA, 75 bp, synthetic construct
  source 1..75: mol_type = other DNA
ggcggaaatgcgccatcgtatcgggcaactgatgggtaccagccagggcggtatgtgggtcggcactttccacgg

SEQ ID NO: 868024 - DNA, 75 bp, synthetic construct
  source 1..75: mol_type = other DNA
aggatttccagatcctcgacagtgaagaccagctacgcttgcttaagcgtctgatcaaggcgatgaacctcgacg

SEQ ID NO: 868025 - DNA, 75 bp, synthetic construct
  source 1..75: mol_type = other DNA
actgccgatatgccgctgcatgtacagactgaccgggtaattaaagactccggcctgcgcaccatgtacgagcag

SEQ ID NO: 868026 - DNA, 75 bp, synthetic construct
  source 1..75: mol_type = other DNA
tcgtattgatggccaccaggcggagaatatcacctgggcgatttcatcgcagtctcctgccgataagtatgatct

SEQ ID NO: 868027 - DNA, 75 bp, synthetic construct
  source 1..75: mol_type = other DNA
tgcggcgtgcaggaagtgtttaaagtcggcggcgcgcaggcgatttctgccctcgcgtttggcacagaatctatc

SEQ ID NO: 868028 - DNA, 75 bp, synthetic construct
  source 1..75: mol_type = other DNA
cgtgaaaacacgcggcgatgatgccttacgggaatacagcgcgaaatttgataaaaccacggtgaccgcgctaaa

SEQ ID NO: 868029 - DNA, 75 bp, synthetic construct
  source 1..75: mol_type = other DNA
ataaaaccacggttaccgcgctgaaggtgtctgctgaggagatcgccgccgccagcgaacgcctgagcgacgagc

SEQ ID NO: 868030 - DNA, 75 bp, synthetic construct
  source 1..75: mol_type = other DNA
gagcacctgatcatccagacccgcaacgcccgcgatctggtcgatggcatcaccagcgccggttcggtatttctt

SEQ ID NO: 868031 - DNA, 75 bp, synthetic construct
  source 1..75: mol_type = other DNA
caccagtgcaggttcggttttcctcggcgactggtccccggagtccgcgggcgattacgcctccggcaccaacca

SEQ ID NO: 868032 - DNA, 75 bp, synthetic construct
  source 1..75: mol_type = other DNA
taaccaacgatttagcgcagtgcgtagagatctccaatcagtacggcccggagcacctgatcattcagacccgca

SEQ ID NO: 868033 - DNA, 75 bp, synthetic construct
  source 1..75: mol_type = other DNA
gtctgatgaaaacctccgctcttggtagccttgcactggcaagcagtgccttcactctgccattctcccgaatag

SEQ ID NO: 868034 - DNA, 75 bp, synthetic construct
  source 1..75: mol_type = other DNA
catgaatctgcagggaatatgggctatgtgatcctcgcccaacccgcaacctcagcaaaatttgaacgcaaaccc

SEQ ID NO: 868035 - DNA, 75 bp, synthetic construct
  source 1..75: mol_type = other DNA
cgtgaagatgaatggctgcccattcgccctggcaccgatggcgcactggcctgtgcgattgcctgggtactgatt

SEQ ID NO: 868036 - DNA, 75 bp, synthetic construct
  source 1..75: mol_type = other DNA
taattctactaatgtcatttcataccaaaattttgtgctcgcgagtgatgatttctcttcttattataataacta

SEQ ID NO: 868037 - DNA, 75 bp, synthetic construct
  source 1..75: mol_type = other DNA
cagtctcgcgctggcaagcagtgctttcactctgccattttcccaaatggtccgagcggcacaggcaccggtaga

SEQ ID NO: 868038 - DNA, 75 bp, synthetic construct
  source 1..75: mol_type = other DNA
cacgcggtatccgtcatggcgataccgtgcgggtatttaacaataatggagaaatgttgattgccgcgaaagtga

SEQ ID NO: 868039 - DNA, 75 bp, synthetic construct
  source 1..75: mol_type = other DNA
atgagctttaacacaatcattgactggaatagctgtactgcggagcaacaacgccagctattaatgcgcccggcg

SEQ ID NO: 868040 - DNA, 75 bp, synthetic construct
  source 1..75: mol_type = other DNA
accagcctgatgcgctgcccggcgtttctgacagtgccaatagcgcagctgactggataaaggataagacaggat

SEQ ID NO: 868041 - DNA, 75 bp, synthetic construct
  source 1..75: mol_type = other DNA
cacgggatggcccttatgcctcaggaaacccgaaactacattccgaaagtgttaagcaatatgcctgcgcccggg

SEQ ID NO: 868042 - DNA, 75 bp, synthetic construct
  source 1..75: mol_type = other DNA
atagtgaagggggtgctctttgctgctgatgtcattacccagatggcgtggcgcgtctcgcaggcggtaggcggc

SEQ ID NO: 868043 - DNA, 75 bp, synthetic construct
  source 1..75: mol_type = other DNA
ccggtgatacaggataatacagcgaccactaaagactatctgtacagcaataatattgatactgaccttttagtg

SEQ ID NO: 868044 - DNA, 75 bp, synthetic construct
  source 1..75: mol_type = other DNA
cgcagtctcctgccgataagtatgatctcatcaataaaacgtcccgtgtttctcctgacagtggtctgctttatg

SEQ ID NO: 868045 - DNA, 75 bp, synthetic construct
  source 1..75: mol_type = other DNA
gcagatcgcaacaataaccccggtaatattcggcccgtaggcggtggtggctttcgtgcgtttggttctgcgctg

SEQ ID NO: 868046 - DNA, 75 bp, synthetic construct
  source 1..75: mol_type = other DNA
ggactacaccgatgtgagcattcagtacagtgaggcgaagataaacaagcggattacggaagagcagcaggcccg

SEQ ID NO: 868047 - DNA, 75 bp, synthetic construct
  source 1..75: mol_type = other DNA
agacgttcgggcgggtgactcacacggtgctggacaatgcccggcagtataccgatcagcgtttcagacaactcg

SEQ ID NO: 868048 - DNA, 75 bp, synthetic construct
  source 1..75: mol_type = other DNA
caactatcagggtgtggccctgtccccggtactgagtgccggccacagtgataaagcgatgctgtggtcggatgc

SEQ ID NO: 868049 - DNA, 75 bp, synthetic construct
  source 1..75: mol_type = other DNA
ggaatccacggcgctggccattgtcggttttaccacctcgatcgcgaatggactggataagctctactgggcgtc

SEQ ID NO: 868050 - DNA, 75 bp, synthetic construct
  source 1..75: mol_type = other DNA
ggctgccaatatcacagttgagcggcagaagaacgttaattcacaactaactcaacaacttcgaacggtgccgag

SEQ ID NO: 868051 - DNA, 75 bp, synthetic construct
  source 1..75: mol_type = other DNA
cgatccgcgcgaggctgcccgtttgactgttgatcgtcaaaagggcgtgaattcacagttaacccagcaactccc

SEQ ID NO: 868052 - DNA, 75 bp, synthetic construct
  source 1..75: mol_type = other DNA
ctgcactactgtctggagcgcgaaatcccgttcctgtatgcatcttccgcggccacctacggcggacgcacctcc

SEQ ID NO: 868053 - DNA, 75 bp, synthetic construct
  source 1..75: mol_type = other DNA
aataattgaacctattattgagttatataccgatgtgatatggggaccattcaacacactacacaataaaattaa

SEQ ID NO: 868054 - DNA, 75 bp, synthetic construct
  source 1..75: mol_type = other DNA
actatcacttatttaagtgatactggttgtctggagattcagggggccagtctaataccgatatccccgctatta

SEQ ID NO: 868055 - DNA, 75 bp, synthetic construct
  source 1..75: mol_type = other DNA
cgcatccgctacgcccacaggcagtgtttactggaaatgacgctatggcagttggcgtttaccaggcgctatatc

SEQ ID NO: 868056 - DNA, 75 bp, synthetic construct
  source 1..75: mol_type = other DNA
cttgcttatcacaagaaaggccaaatcgaatacattccgttcccggataaactgaaaggccgctaccaggcgttc

SEQ ID NO: 868057 - DNA, 75 bp, synthetic construct
  source 1..75: mol_type = other DNA
tttcaacgtttatggaccgcgtgaaggccataaaggcagcatggcgagcgtcgctttccatctcaacactcagct

SEQ ID NO: 868058 - DNA, 75 bp, synthetic construct
  source 1..75: mol_type = other DNA
ttatggtgctggcgaaccgttacgactggcagctcttcctcgaagtgaccggtcccggcggcagcgggaaaagta

SEQ ID NO: 868059 - DNA, 75 bp, synthetic construct
  source 1..75: mol_type = other DNA
tcaaaagaaattgcagttgttaatatcgatgctatttataatcagtctaccgccggagacatggccaaaaagcat

SEQ ID NO: 868060 - DNA, 75 bp, synthetic construct
  source 1..75: mol_type = other DNA
attatcgattgcctgataaactatcctgactccaagcctgcttatggcatgctagatcagtggatgcaggatact

SEQ ID NO: 868061 - DNA, 75 bp, synthetic construct
  source 1..75: mol_type = other DNA
cgcttccttggttctgaggattagcgctttccttgcgattgttgccgcattcattttttgcgacagcgcaacgtt

SEQ ID NO: 868062 - DNA, 75 bp, synthetic construct
  source 1..75: mol_type = other DNA
tgtttctgatgagtgataagctcccttctgattacgaaattctttttgacctgtggtacagctactggcttgaac

SEQ ID NO: 868063 - DNA, 75 bp, synthetic construct
  source 1..75: mol_type = other DNA
cgcaggtcaggaagaggcgcagaaaaataactggtctgtttccattgctgttgccgatgacggcggtcatctgct

SEQ ID NO: 868064 - DNA, 75 bp, synthetic construct
  source 1..75: mol_type = other DNA
ttggctacaatgaaagatgttgcccgtctggcgggcgtttctacatcgacagtttctcacgtcatcaataaagat

SEQ ID NO: 868065 - DNA, 75 bp, synthetic construct
  source 1..75: mol_type = other DNA
catcatcccggcctgttccagtgaagagggcagaaaacatgcccgggcgaaatgacccgtgtccgtgtggcagcg

SEQ ID NO: 868066 - DNA, 75 bp, synthetic construct
  source 1..75: mol_type = other DNA
ccgacgctccggctcatccatacgtggggaacatccctcgcgacggggcaataaacgcctcaaacgggcgctgtt

SEQ ID NO: 868067 - DNA, 75 bp, synthetic construct
  source 1..75: mol_type = other DNA
caaacttgcgcctcgtctgggtaaacgccttgcagcagacatagctcaggcactggccgaacaaaccgtcgtcgt

SEQ ID NO: 868068 - DNA, 75 bp, synthetic construct
  source 1..75: mol_type = other DNA
catggttacgatcgctggcattattttgggaggtctggcgctcgttggcctgatcacttacttcggtaagtggac

SEQ ID NO: 868069 - DNA, 75 bp, synthetic construct
  source 1..75: mol_type = other DNA
aagcacaacccagcatttgcctactggatggccgaatggccagagggcaacctccccttcaataccgttagcatc

SEQ ID NO: 868070 - DNA, 75 bp, synthetic construct
  source 1..75: mol_type = other DNA
caagaacgaaggcgaagcatgcgcctggctggacagccttacaccagaagcccgcaaaagtggtcaacgcgtggc

SEQ ID NO: 868071 - DNA, 75 bp, synthetic construct
  source 1..75: mol_type = other DNA
ggtcatacccgtatcgcctgtattaccggcccgcctgcggttggaaggttatcgggcggcgatgaaacgtgcggg

SEQ ID NO: 868072 - DNA, 75 bp, synthetic construct
  source 1..75: mol_type = other DNA
ctttaccggaaatgacgctatggctgttggcgtttaccaggcgttatatcacctagattctacgtcagtacttca

SEQ ID NO: 868073 - DNA, 75 bp, synthetic construct
  source 1..75: mol_type = other DNA
cgtgatgatggactgggcgccgttcgatggcgacagcgatctcattcaggataactcgtttctggggggggattt

SEQ ID NO: 868074 - DNA, 75 bp, synthetic construct
  source 1..75: mol_type = other DNA
ccggcacaggagcgcgttctcggtccgagacttgatcacccggcggtactcgatcttctccagcgatatccctca

SEQ ID NO: 868075 - DNA, 75 bp, synthetic construct
  source 1..75: mol_type = other DNA
acacaatcaggcgcttatcgccctggcgagacgacgctgcgacgttctgttcgccatgatgcgcgacgggagttt

SEQ ID NO: 868076 - DNA, 75 bp, synthetic construct
  source 1..75: mol_type = other DNA
gagtctcgctgctgacataacccgagccctgactgagcaaaccgtcgtcgttcccggcacaaatgctgctatcgt

SEQ ID NO: 868077 - DNA, 75 bp, synthetic construct
  source 1..75: mol_type = other DNA
cgtgcgcggtaaaagtgccgatattcattatcaggtaagcgtggactgtaaagcgggaatggcggagtatcagcg

SEQ ID NO: 868078 - DNA, 75 bp, synthetic construct
  source 1..75: mol_type = other DNA
gatctcataccatccatcccatcagatagcataaaaaagagtacaatactaaagccaaaaccatcatggattcat

SEQ ID NO: 868079 - DNA, 75 bp, synthetic construct
  source 1..75: mol_type = other DNA
atgctcacgtcatgttaaccctgaaaaccattggtcccgaaggcttcggtaaaaaagacagaagctggaatgata

SEQ ID NO: 868080 - DNA, 75 bp, synthetic construct
  source 1..75: mol_type = other DNA
accactggagatcgtggttgatgtcagaagctttacgattacacatcttgctgaacccgaagagattgttcttcc

SEQ ID NO: 868081 - DNA, 75 bp, synthetic construct
  source 1..75: mol_type = other DNA
atgccgaccattatggcgggcgttaaccagacgctgatgctggccctttctatggtggtcattgcctcgatgatt

SEQ ID NO: 868082 - DNA, 75 bp, synthetic construct
  source 1..75: mol_type = other DNA
ttcccaagccgtcctaatcaggaacagccggaagtaaatagaagcttagatctcacaccttcaatgccaccagaa

SEQ ID NO: 868083 - DNA, 75 bp, synthetic construct
  source 1..75: mol_type = other DNA
tgaaccatcatcacagttaaaaagtatctcatcttcgaaattaggcttacggcagtttcataaaaatataaaatg

SEQ ID NO: 868084 - DNA, 75 bp, synthetic construct
  source 1..75: mol_type = other DNA
cgttatggaatagaaccggaacacctggtaacagatccttgcatgaatatttataccggtgcgtattacctggca

SEQ ID NO: 868085 - DNA, 75 bp, synthetic construct
  source 1..75: mol_type = other DNA
atcgatctatggtgacgccgagttttcagaacgcgatgctgacagactgaatcaacttagagataagtacctttc

SEQ ID NO: 868086 - DNA, 75 bp, synthetic construct
  source 1..75: mol_type = other DNA
ctacatacaacaccttcaaagatttggctctgcagatcgttgttgacctcagaagtttcactgtatccgaaatgc

SEQ ID NO: 868087 - DNA, 75 bp, synthetic construct
  source 1..75: mol_type = other DNA
gtcatggaccaccatgtcaaacagctaccttgaagccgcagggagtgaggaacgcatcgatcaccgttctctcag

SEQ ID NO: 868088 - DNA, 75 bp, synthetic construct
  source 1..75: mol_type = other DNA
ggcaaccaaaacaaaccgtccagcaatgcagcgcgttcatcgtgccaagtggaatgataaagaagctcaagaaca

SEQ ID NO: 868089 - DNA, 75 bp, synthetic construct
  source 1..75: mol_type = other DNA
aggaatgattgctgatatcgcatttcatgacttggacagtaagaatccacacgctcacgtcatgttaaccctgaa

SEQ ID NO: 868090 - DNA, 75 bp, synthetic construct
  source 1..75: mol_type = other DNA
tatggtggtcattgcctcgatgattgccgtcggcgggctgggtcagatggtacttcgcggtatcggtcgtctgga

SEQ ID NO: 868091 - DNA, 75 bp, synthetic construct
  source 1..75: mol_type = other DNA
gaaactcaaacgtgccgccgccggagccagtgcgattatcgcctggggaacctgcgcttcctggggttgcgtgca

SEQ ID NO: 868092 - DNA, 75 bp, synthetic construct
  source 1..75: mol_type = other DNA
atgaataacgaggaaacattttaccaggccatgcggcgtcagggcgttacccggcgcagctttctcaaatattgt

SEQ ID NO: 868093 - DNA, 75 bp, synthetic construct
  source 1..75: mol_type = other DNA
atgatttcagttatgcttttgaaaaaatccgtaatgcgatttccgcgccaggagaaaataatctttatgctgcaa

SEQ ID NO: 868094 - DNA, 75 bp, synthetic construct
  source 1..75: mol_type = other DNA
aatgctatcgccgcgcccactttgacgctggtgagtttgtccagagttgggacgatgacgccgctcgcaaaggtt

SEQ ID NO: 868095 - DNA, 75 bp, synthetic construct
  source 1..75: mol_type = other DNA
cggctgcctgggctgtgcggaaaatggtttctgggatcgcggttcgttctacagccgcgtggtcgatattccaca

SEQ ID NO: 868096 - DNA, 75 bp, synthetic construct
  source 1..75: mol_type = other DNA
ggctgcctgggctgtgcggaaaatggtttctgggatcgcggttcgttctacagccgcgtggtcgatattccgcaa

SEQ ID NO: 868097 - DNA, 75 bp, synthetic construct
  source 1..75: mol_type = other DNA
cggcacgttctggttcgaaaggattagctaataaaaatatactaatgttgatggggaaacctttgattgcttata

SEQ ID NO: 868098 - DNA, 75 bp, synthetic construct
  source 1..75: mol_type = other DNA
gaagctgttggtgtgcaggtgagccgtctgatccgcgtgcgttacggtgatatcccactgccgaaaggtctgcca

SEQ ID NO: 868099 - DNA, 75 bp, synthetic construct
  source 1..75: mol_type = other DNA
gcaaaccgtttaatgcatccaagccgtgaagttgaacgtgaatatgccgtgcgtgtatttggtcaggttgacgac

SEQ ID NO: 868100 - DNA, 75 bp, synthetic construct
  source 1..75: mol_type = other DNA
aacaaactcttgctaatcatggagatgctggttcgacaagagcttacataggtataactgctcaacatgatctac

SEQ ID NO: 868101 - DNA, 75 bp, synthetic construct
  source 1..75: mol_type = other DNA
tcgagagaatgtagattttgcgaagtttattagcttggatcacgttttaaaagactcttatggcaatctaaataa

SEQ ID NO: 868102 - DNA, 75 bp, synthetic construct
  source 1..75: mol_type = other DNA
atacttatgcttggtacaaatgatattgttgttgatgactggagtgttgactttacaattctttggattgaaaaa

SEQ ID NO: 868103 - DNA, 75 bp, synthetic construct
  source 1..75: mol_type = other DNA
gccgatcgcgctaaaggtcagtttgatagcgaaggtctgatggatttgagcaaactggaaggtgcgttcagcgat

SEQ ID NO: 868104 - DNA, 75 bp, synthetic construct
  source 1..75: mol_type = other DNA
atctcggcgtctggctgaagccggaaggtttcccgcatcaggaaattcgtcagtactctttgactcgcaaaccgg

SEQ ID NO: 868105 - DNA, 75 bp, synthetic construct
  source 1..75: mol_type = other DNA
tcgtgtcagtctgccgttatcggttttcgatccccaggactaccatccactgctaattaccgtttccggaaaaaa

SEQ ID NO: 868106 - DNA, 75 bp, synthetic construct
  source 1..75: mol_type = other DNA
acgctattgccgcctacgccagcaatattgaaaacctgcctgcgctgctgccagcggtagaaaaaatcgctcaga

SEQ ID NO: 868107 - DNA, 75 bp, synthetic construct
  source 1..75: mol_type = other DNA
cgccagcaaagccggtggctgggaaggtactcgcgatttccgcattgtagctaaaacaccgcgcagcgcattgat

SEQ ID NO: 868108 - DNA, 75 bp, synthetic construct
  source 1..75: mol_type = other DNA
ctttaccgcacacacctggtatcgtcagccgagcgaagccgatcgcgctaaaggtcagtttgatagcgaaggtct

SEQ ID NO: 868109 - DNA, 75 bp, synthetic construct
  source 1..75: mol_type = other DNA
cattcactgcaactcgccacggcgccgctttccatgactatagtggtagtgctgactcgcgtttaatgatcgacg

SEQ ID NO: 868110 - DNA, 75 bp, synthetic construct
  source 1..75: mol_type = other DNA
gcaatggcaagttgcatctaatagtattccttatctgacgcgtaaagggcagattcgctacactactgcaatggg

SEQ ID NO: 868111 - DNA, 75 bp, synthetic construct
  source 1..75: mol_type = other DNA
tgcaaaggtcactgtctcacagaacaaccgtattatttatcaagaaaatgttcctccaggcccatttgctattac

SEQ ID NO: 868112 - DNA, 75 bp, synthetic construct
  source 1..75: mol_type = other DNA
tatgaaagcgtcactacgcgccagttatcagcataataccgagaacggtcgactctacctctccggtacatcaca

SEQ ID NO: 868113 - DNA, 75 bp, synthetic construct
  source 1..75: mol_type = other DNA
cctcaacggcattcaagatgacagcaaaattactttacactggggtgacaaatcttgttttattcaaccccccaa

SEQ ID NO: 868114 - DNA, 75 bp, synthetic construct
  source 1..75: mol_type = other DNA
gcccgctgccgcagatattcccgtggcgagcgataacccagcgcactatgcggatgccattcgttataatgctcg

SEQ ID NO: 868115 - DNA, 75 bp, synthetic construct
  source 1..75: mol_type = other DNA
agattacccgtcatatcagcgtttcgccgttggcacggaagatgcaatacccgaagtaagacaaccactggagga

SEQ ID NO: 868116 - DNA, 75 bp, synthetic construct
  source 1..75: mol_type = other DNA
acccatcgccgataccatcggcttttttatggaaacctcattccactacgcgctgtaccgcccaatcatcaccgc

SEQ ID NO: 868117 - DNA, 75 bp, synthetic construct
  source 1..75: mol_type = other DNA
aacgcggcgcttacagatatcgtccgcgatccgctgctgcgcaatgcttatctgagtctgcataacgccactcat

SEQ ID NO: 868118 - DNA, 75 bp, synthetic construct
  source 1..75: mol_type = other DNA
tttattttcgatgctatccacgttgataagcgggtgatcctgctcgactttccgggcatgaatgatttgctcgac

SEQ ID NO: 868119 - DNA, 75 bp, synthetic construct
  source 1..75: mol_type = other DNA
tggcgcgcaggcatttaaaacagcgcaccgactctgcccgtcacacgctggcgctactggcaaaggccgattacg

SEQ ID NO: 868120 - DNA, 75 bp, synthetic construct
  source 1..75: mol_type = other DNA
acctatcgccgacaccatcggctttttaatggaaacctcattccactacgcgctctatcgcccaatcatcaccgc

SEQ ID NO: 868121 - DNA, 75 bp, synthetic construct
  source 1..75: mol_type = other DNA
aacgcattttgtgttacagccactacagccagcaggcgctggcgcacctcagcagcgcgaaagtggtcggcaacc

SEQ ID NO: 868122 - DNA, 75 bp, synthetic construct
  source 1..75: mol_type = other DNA
gaagatgaaaacggtcaacggggccgccgccagtcacacttgcaggcgctgcgcctggcgcaacagcacggctgg

SEQ ID NO: 868123 - DNA, 75 bp, synthetic construct
  source 1..75: mol_type = other DNA
atcaggcgatcgatcagatcgttctgctgaatctggataaacgcccggatcgcttacaacagatccgtgaagaac

SEQ ID NO: 868124 - DNA, 75 bp, synthetic construct
  source 1..75: mol_type = other DNA
gtgcagaacaagcgattaccgccatcctggaatacataagtcttaaaaagggtgaggctattgagcatgtattga

SEQ ID NO: 868125 - DNA, 75 bp, synthetic construct
  source 1..75: mol_type = other DNA
acgctggtgatcaatgaccgcgtgtttaaactgtttctggatgagatgctggcgacgctaaaaagcatcgacgac

SEQ ID NO: 868126 - DNA, 75 bp, synthetic construct
  source 1..75: mol_type = other DNA
gcgctactggcaaaggccgattacgtgctgaccgataacagcggctttattttcgatgctatccacgttgataag

SEQ ID NO: 868127 - DNA, 75 bp, synthetic construct
  source 1..75: mol_type = other DNA
ccgcagcttaaaggaatgcgcttatctgaaatgcaggcacacggtcagcgggtgaaatgcctggtcagcccctac

SEQ ID NO: 868128 - DNA, 75 bp, synthetic construct
  source 1..75: mol_type = other DNA
gtagccagctcactttcgctggttaccgtttctctgataaaaactttgtgacaatgaatgaatatatcaatgaca

SEQ ID NO: 868129 - DNA, 75 bp, synthetic construct
  source 1..75: mol_type = other DNA
acgcttgtattcggcaatgctgttcgtggatatccatcgttattggtctccattcttttccttggaggtattcaa

SEQ ID NO: 868130 - DNA, 75 bp, synthetic construct
  source 1..75: mol_type = other DNA
tgctaagcgctctgaccgttctacagatggaagactgaagcgcaagactgctgagtggttctataaacttcacaa

SEQ ID NO: 868131 - DNA, 75 bp, synthetic construct
  source 1..75: mol_type = other DNA
tcttcaatgaagaggaagcaattccaatcttctataaaaccgtgcgggagtttgaagggcttcagcagcatgaag

SEQ ID NO: 868132 - DNA, 75 bp, synthetic construct
  source 1..75: mol_type = other DNA
ttcatgaaaggcatactgagctgggtgggtggtcagacggatatcgttgaatatgtacgcgcagagcgtgttgct

SEQ ID NO: 868133 - DNA, 75 bp, synthetic construct
  source 1..75: mol_type = other DNA
tcttcaatgaagaagaagcgataccgattttttataaaacggtacgtgaattcgaagagttgaagccatatgaag

SEQ ID NO: 868134 - DNA, 75 bp, synthetic construct
  source 1..75: mol_type = other DNA
gtacggtgcctggatgatcattgatacgcttgcattcgggaatcctgtgcgcggttatccatcattgctggtatc

SEQ ID NO: 868135 - DNA, 75 bp, synthetic construct
  source 1..75: mol_type = other DNA
tgcgtttatggatggcaaggcgggagaacgggcggcggtggtgattatggaggcgctggcggacaaggaatcgtc

SEQ ID NO: 868136 - DNA, 75 bp, synthetic construct
  source 1..75: mol_type = other DNA
gcaaaagtggtcggcaatccgcgcttcgacgcctggcataacggcacgtttgaccgcgctctgccggaaaatatc

SEQ ID NO: 868137 - DNA, 75 bp, synthetic construct
  source 1..75: mol_type = other DNA
ctgagtggttttataagcttcacaacaaaataagcaacccgaaaattgaagagaacgtaggcgatttccggctta

SEQ ID NO: 868138 - DNA, 75 bp, synthetic construct
  source 1..75: mol_type = other DNA
gcggctacccttctctattggtatcgattttatttctgggtggtgtgcagcttatcgggataggcgtgcttggtg

SEQ ID NO: 868139 - DNA, 75 bp, synthetic construct
  source 1..75: mol_type = other DNA
atgcaaaccctcatcaaaacactcgtcactcaccgcgtaaaaccgtttgtcagcgtcgtcacgccaacctggaac

SEQ ID NO: 868140 - DNA, 75 bp, synthetic construct
  source 1..75: mol_type = other DNA
cagcggattcgcgaaatatttccggttgctcatgacatggcagaactgcgttacttgttgtcagaggcgtttgac

SEQ ID NO: 868141 - DNA, 75 bp, synthetic construct
  source 1..75: mol_type = other DNA
ctgagtggttctataagctccacaataaaataagcaatccgaagattgaggaaaacgtcggagactttcggctta

SEQ ID NO: 868142 - DNA, 75 bp, synthetic construct
  source 1..75: mol_type = other DNA
caggggatgcagacgaaccttgcgctcagggaggaaagcaacgccgactggctgccccggtgcgacgaaaccacc

SEQ ID NO: 868143 - DNA, 75 bp, synthetic construct
  source 1..75: mol_type = other DNA
cgatgtgcttcctcatgacatggtcgaatcctccgctgctgcatggcgggatgaaatgagcaggaaggtcgccgg

SEQ ID NO: 868144 - DNA, 75 bp, synthetic construct
  source 1..75: mol_type = other DNA
tcagggcggcgtcgccgtcagaccttgcggatgcgcttgctcaaaaaattcgtgaaggatggcagccatacggcg

SEQ ID NO: 868145 - DNA, 75 bp, synthetic construct
  source 1..75: mol_type = other DNA
ccggtgaattctcatggggttggctgaacaatgtatccctgtatggtggttcagtattaacaaaccgtgattatc

SEQ ID NO: 868146 - DNA, 75 bp, synthetic construct
  source 1..75: mol_type = other DNA
actgacgttattgacgtcaccattgccgaagtccgcatggaaacccgcagcattattgcgcgcccagtcgcgtaa

SEQ ID NO: 868147 - DNA, 75 bp, synthetic construct
  source 1..75: mol_type = other DNA
gggattttatgcgccagaccgttgaaaggcagcataatacctggttccgtgtcagcgccagtgatataagacggt

SEQ ID NO: 868148 - DNA, 75 bp, synthetic construct
  source 1..75: mol_type = other DNA
tcagggcggcgtcgccgtcagaccttgcggagcgactgactcaaaaactgaaggaggggtgggagccatttggca

SEQ ID NO: 868149 - DNA, 75 bp, synthetic construct
  source 1..75: mol_type = other DNA
ccgagtggttctataagcttcacaataaaatcagcaatccgcagatcgaggaaaatgttggtgatttccgtctga

SEQ ID NO: 868150 - DNA, 75 bp, synthetic construct
  source 1..75: mol_type = other DNA
cattaccagcttttcaacattccctttaagaatgtggacctatatcggacttgtcgtggctagtttttcattctt

SEQ ID NO: 868151 - DNA, 75 bp, synthetic construct
  source 1..75: mol_type = other DNA
ccgaccgtctggcaacggcgattctgattcatgcaggacgaaccacagtaaaagtcgatgctccatcttctgaaa

SEQ ID NO: 868152 - DNA, 75 bp, synthetic construct
  source 1..75: mol_type = other DNA
aagcagaagaacgaatccacgtaccagacggtgtacggcagctacaaaaacaaaacggaaaagaatatccatttc

SEQ ID NO: 868153 - DNA, 75 bp, synthetic construct
  source 1..75: mol_type = other DNA
ttgccagcgagtcagagggaagcctgaaagtacagggatggtcagccagtggcggcagggcagaagtggtcagcg

SEQ ID NO: 868154 - DNA, 75 bp, synthetic construct
  source 1..75: mol_type = other DNA
atggataaagatatgattgccattcgaatcgggccagatataccaatggctattgttggctcaccggattatttt

SEQ ID NO: 868155 - DNA, 75 bp, synthetic construct
  source 1..75: mol_type = other DNA
aataggcttgctcccgtctcatcaccagatggcgtcgctggcggttttgcggggataagcaatgattctcttata

SEQ ID NO: 868156 - DNA, 75 bp, synthetic construct
  source 1..75: mol_type = other DNA
ttgtgcctattatgatcatttggctactgttcgtattaaatttactaatactgcaaaaagatacttttcaaaact

SEQ ID NO: 868157 - DNA, 75 bp, synthetic construct
  source 1..75: mol_type = other DNA
tattgttggctcaccggattatttttcccgccgaagtgttccaacgtcagtgtcacaattaatagatcatcaggc

SEQ ID NO: 868158 - DNA, 75 bp, synthetic construct
  source 1..75: mol_type = other DNA
atgaagcgtgaagaaatcgctgatctgatggcgtttgtcgtcgttgcagaggagcgtagcttcactcgcgcagca

SEQ ID NO: 868159 - DNA, 75 bp, synthetic construct
  source 1..75: mol_type = other DNA
aattaatttgtatcttcccacatcgggtacagcaaatcgctggagattaatacgcggtggacgtgaagttcgtgt

SEQ ID NO: 868160 - DNA, 75 bp, synthetic construct
  source 1..75: mol_type = other DNA
ttttagaaaaaaatacagagaaagaaaatgttgagttttttgaacgtgcagctcaaaaaaattgggtaatgaaac

SEQ ID NO: 868161 - DNA, 75 bp, synthetic construct
  source 1..75: mol_type = other DNA
aatgtttattatgtctccgataatattacagataaatgataatatttctcaggaaccaatcaattataccgactc

SEQ ID NO: 868162 - DNA, 75 bp, synthetic construct
  source 1..75: mol_type = other DNA
gcaattgttgaagtgctgtcgcccggtcaacgcccgactaaacgcgcattaatttacgccgcgacgccagccaga

SEQ ID NO: 868163 - DNA, 75 bp, synthetic construct
  source 1..75: mol_type = other DNA
gcagtatcggggagaaaattcgggcaataagggatgcggaaggactatccagaactcaattctttgaattgacag

SEQ ID NO: 868164 - DNA, 75 bp, synthetic construct
  source 1..75: mol_type = other DNA
ttttcgcaagtaacgggggtttctgtagggactatagggaattatgagtctggatataaacctgcgcgaattgag

SEQ ID NO: 868165 - DNA, 75 bp, synthetic construct
  source 1..75: mol_type = other DNA
gtgaatacgccgttattcaaaaaatatacgctctggataatgaccgatgagacagccccgcaagctggtcagata

SEQ ID NO: 868166 - DNA, 75 bp, synthetic construct
  source 1..75: mol_type = other DNA
aatacgatagatctgatcattgatgctgcaattgatgggcacggattagcgtatctacctcatgatcaggttgag

SEQ ID NO: 868167 - DNA, 75 bp, synthetic construct
  source 1..75: mol_type = other DNA
atgcagattgcccaggtgctttctggttataccctcggtggcgcggatatgctgcgtcgtgcgatgggtaagaaa

SEQ ID NO: 868168 - DNA, 75 bp, synthetic construct
  source 1..75: mol_type = other DNA
caaactgtctcccctttctggcgatactaacttagccgcaatggcagcccagatagatctctatgaacacatcgc

SEQ ID NO: 868169 - DNA, 75 bp, synthetic construct
  source 1..75: mol_type = other DNA
cagatcctgaactgatgaccgggcttaattacgaattgctgtttctcgaatcgctgaaactggttgtccggccta

SEQ ID NO: 868170 - DNA, 75 bp, synthetic construct
  source 1..75: mol_type = other DNA
gttgcgacgaagcaaaagaagaagttgccgaactggttgagtatctgcgtgagccgagccgcttccagaaactgg

SEQ ID NO: 868171 - DNA, 75 bp, synthetic construct
  source 1..75: mol_type = other DNA
ttgagtgacatggcgaaaaacctaatactctggctggtcattgccattgtgctgatgtcagtattccagagcttt

SEQ ID NO: 868172 - DNA, 75 bp, synthetic construct
  source 1..75: mol_type = other DNA
atgaaaaaaacgctcgcaacattatttttattaacctgtctggggtcatcatccgcttatgcggataacgctttg

SEQ ID NO: 868173 - DNA, 75 bp, synthetic construct
  source 1..75: mol_type = other DNA
tacattcgtagctgtcgcacaacaaggaactttggggcgcgcggctgaaacccttaatttgagtcaacctgcgct

SEQ ID NO: 868174 - DNA, 75 bp, synthetic construct
  source 1..75: mol_type = other DNA
cagatggcgtcgctggcggttttgcgggcatgagcaatgattctcttatatttgccggaggggccggattcaaag

SEQ ID NO: 868175 - DNA, 75 bp, synthetic construct
  source 1..75: mol_type = other DNA
cttcaccggtaataatttaaaatggaataagcttgctcccgtcgcatcaccagatggcgtcgctggcggctttgc

SEQ ID NO: 868176 - DNA, 75 bp, synthetic construct
  source 1..75: mol_type = other DNA
actggtacaaagtcagggctgtaaaattccttcaggatgtatcgaaacgctttccgcatcgctttcacgccaact

SEQ ID NO: 868177 - DNA, 75 bp, synthetic construct
  source 1..75: mol_type = other DNA
agcgcattcgtttgcgccaccttcatacgtttgtcgctgtcgcacaacaaggaactttggggcgcgcggctgaaa

SEQ ID NO: 868178 - DNA, 75 bp, synthetic construct
  source 1..75: mol_type = other DNA
agcgtggtcgtcagggggcgcaacttaccttacccggcgaacaatttttaacgcatgcagtcagagttcttgacg

SEQ ID NO: 868179 - DNA, 75 bp, synthetic construct
  source 1..75: mol_type = other DNA
gcaattgttgaagtgctgtcgcccggtcaacgcccgactaaacgcgaattaatttacgccgcgacgccagccagc

SEQ ID NO: 868180 - DNA, 75 bp, synthetic construct
  source 1..75: mol_type = other DNA
ctgggaaagccgtctgtttttgtttaagccaacaagtggcagacgaaacagaaatatcagcggtaaagcagcata

SEQ ID NO: 868181 - DNA, 75 bp, synthetic construct
  source 1..75: mol_type = other DNA
ctacctgcggtgtatatggcggaccctcttaaaccaggcggaaacgctgaactctacatcaacagaaaagcgtgg

SEQ ID NO: 868182 - DNA, 75 bp, synthetic construct
  source 1..75: mol_type = other DNA
aagcacgtgaacgtgaagaaattcgactttcagaaaatccctcgcatctcctgtcaaaagaaggatttgcgatgt

SEQ ID NO: 868183 - DNA, 75 bp, synthetic construct
  source 1..75: mol_type = other DNA
gtgaatacaacactgtttcgatggccggttcgcgtctactatgaagataccgatgccggtggtgtggtgtaccac

SEQ ID NO: 868184 - DNA, 75 bp, synthetic construct
  source 1..75: mol_type = other DNA
gtgaatacaacgctgtttcgatggccggttcgcgtctactatgaagataccgataccgatgccggtggtgtggtg

SEQ ID NO: 868185 - DNA, 75 bp, synthetic construct
  source 1..75: mol_type = other DNA
ctgggaaaaccgtctgtttttatttaagccaacacatagcgaacgaagcagaactaaaaaagcgagggccgcatg

SEQ ID NO: 868186 - DNA, 75 bp, synthetic construct
  source 1..75: mol_type = other DNA
cccaccgcgaaaaaccgtttgtcagcgtcgtcacgccaacctggaaccgtggcgcattcctgccgtacctgcttt

SEQ ID NO: 868187 - DNA, 75 bp, synthetic construct
  source 1..75: mol_type = other DNA
gtgaggggcaaagcgcacacagccccccttacccatcaaattaaccccttaactcacccaaacaccatgccaaca

SEQ ID NO: 868188 - DNA, 75 bp, synthetic construct
  source 1..75: mol_type = other DNA
actgcgttatctgctgtcagaggcgtttgactggaaggcgttgcaggcgaagctggcggagattcgccatcacta

SEQ ID NO: 868189 - DNA, 75 bp, synthetic construct
  source 1..75: mol_type = other DNA
ggcaacgcacgatattaacctgatttcgcggcgttcctatcgcatgctcactctgagcgatggtcacttgcatgg

SEQ ID NO: 868190 - DNA, 75 bp, synthetic construct
  source 1..75: mol_type = other DNA
cttcagataacgtggatgcacagctttataatggctttttcagtgacgccgatcgtgcagcaatgaaaattgtgc

SEQ ID NO: 868191 - DNA, 75 bp, synthetic construct
  source 1..75: mol_type = other DNA
actactacccggcagataaaatctcctggaccatcgccatgatgcaaaaacaccgggcgctcatctccggttccg

SEQ ID NO: 868192 - DNA, 75 bp, synthetic construct
  source 1..75: mol_type = other DNA
atttactgtcgaaagagggttttgctctttacatcggtaagactcctcgtgcggtggctgaaatggcacgagctg

SEQ ID NO: 868193 - DNA, 75 bp, synthetic construct
  source 1..75: mol_type = other DNA
tctcaatatgggaaaaaccgaccgcagcgccaacccttcgccgggcaacgaaaacggcggtctcgcaaacgtggt

SEQ ID NO: 868194 - DNA, 75 bp, synthetic construct
  source 1..75: mol_type = other DNA
caggggcataaagtcgcattgctggacattccggctaatggtgaaattattcgttatggcgaagtgattggttac

SEQ ID NO: 868195 - DNA, 75 bp, synthetic construct
  source 1..75: mol_type = other DNA
gtaaacacgcctctgtttaaaaaatatacactgtggattatgacagatgaggttgcgccagaagccgggcagatt

SEQ ID NO: 868196 - DNA, 75 bp, synthetic construct
  source 1..75: mol_type = other DNA
gcaattgttgaagtgctgtcgcccggtcaacacccgactaaacgcggattaatttacgccgcgacgccagccagg

SEQ ID NO: 868197 - DNA, 75 bp, synthetic construct
  source 1..75: mol_type = other DNA
tctcaatatgggaaaaaccgaccgcagcgccaacccttcgccgggcaacgagaatggcgggctcgcaaacgtggt

SEQ ID NO: 868198 - DNA, 75 bp, synthetic construct
  source 1..75: mol_type = other DNA
tctcaatatgggaaaaaccgaccgcagcgccaacccttcgccgggcaacgataaaggcgggctcgcaaacgtggt

SEQ ID NO: 868199 - DNA, 75 bp, synthetic construct
  source 1..75: mol_type = other DNA
acgcaccggcggcagttgtgcctattcgtaccatccacaatatttcgctgaaccctaactttggcggcgaagtaa

SEQ ID NO: 868200 - DNA, 75 bp, synthetic construct
  source 1..75: mol_type = other DNA
aaaaaaggtggcgaggtttatattcataaaggtgagtgggatgcatatgttgcccacttggcacagaatgccccg

SEQ ID NO: 868201 - DNA, 75 bp, synthetic construct
  source 1..75: mol_type = other DNA
agacccgttaaagccgggcggtcacgctgagttatggattaatcgacgtgagtgggacaagtatgcagctcaact

SEQ ID NO: 868202 - DNA, 75 bp, synthetic construct
  source 1..75: mol_type = other DNA
atcgactttctggcgagccgcattgcagaatatgaaaacaacaacgaaaagtttgcagagttcgacaaagccgtt

SEQ ID NO: 868203 - DNA, 75 bp, synthetic construct
  source 1..75: mol_type = other DNA
gcagacgaacaagcaatgctgctaaaagccattgaagagaaaaccttttacccgtttggcagcgatcgccaggtg

SEQ ID NO: 868204 - DNA, 75 bp, synthetic construct
  source 1..75: mol_type = other DNA
tatgcaactggaacacgttatcgctatctgccgccaggcaaagtcgctttctgctgccggacgccagctttttga

SEQ ID NO: 868205 - DNA, 75 bp, synthetic construct
  source 1..75: mol_type = other DNA
atggcatttaaacattacgatgtggtcagggcggcatcgccctctgaccttgcggaacgactgacacaaaaactg

SEQ ID NO: 868206 - DNA, 75 bp, synthetic construct
  source 1..75: mol_type = other DNA
ggcacacgctggcttttgagtttgccggaaacaacagcattcaggtgacaccagtactggatgagaaacggggag

SEQ ID NO: 868207 - DNA, 75 bp, synthetic construct
  source 1..75: mol_type = other DNA
tgaaggtccggagagagaggcggaagccccggccagtaagcgtaccctgatgagtctgctggcatccggcgaaga

SEQ ID NO: 868208 - DNA, 75 bp, synthetic construct
  source 1..75: mol_type = other DNA
gggtattacggagccggtggtcgaacggacgccaaaacctggacgacggccgaccgtaaaacgcattttggatca

SEQ ID NO: 868209 - DNA, 75 bp, synthetic construct
  source 1..75: mol_type = other DNA
gagggtgccaccggtggtaaggccctgcaactgaacaaaccggaaagccacatctggtttctggagcatgatgct

SEQ ID NO: 868210 - DNA, 75 bp, synthetic construct
  source 1..75: mol_type = other DNA
ctgaagaaggggggacgtgtgagcgtacggtttaagttgccgggttcactggtgccgaatcagtttgccctgggc

SEQ ID NO: 868211 - DNA, 75 bp, synthetic construct
  source 1..75: mol_type = other DNA
gccggtgattgatggtaaggacgggacaccgttcatgctgtcgcagtctccggtagggacactggcggcagacaa

SEQ ID NO: 868212 - DNA, 75 bp, synthetic construct
  source 1..75: mol_type = other DNA
cagggcagtcaaatggtatgtcgtatggtgaaggtcttccgctgccggagacatatgaccgtccggacccgcgta

SEQ ID NO: 868213 - DNA, 75 bp, synthetic construct
  source 1..75: mol_type = other DNA
ctattacgccgattttgcccgtgatgtcgctgcgctgtttcagcgcctcgacgcacctttttcatccgcgaaaat

SEQ ID NO: 868214 - DNA, 75 bp, synthetic construct
  source 1..75: mol_type = other DNA
atgacccgtccgatacaggccagcctcgatctgcaggcattaaaacagaatctgtccattgtccgccaggccgcg

SEQ ID NO: 868215 - DNA, 75 bp, synthetic construct
  source 1..75: mol_type = other DNA
ttgattattttctttgccgcattggtggcagtgatatcgggtgccagttgcctctatctggtacgcagagtgatt

SEQ ID NO: 868216 - DNA, 75 bp, synthetic construct
  source 1..75: mol_type = other DNA
aaatcaatgacaacgctgctttcttaccgggcatcggagtcaggcggagcactgaagtcacagggatgggcggct

SEQ ID NO: 868217 - DNA, 75 bp, synthetic construct
  source 1..75: mol_type = other DNA
ctggccgggcaatccaatgccatggcttacggtgaagggcttccgcttccggattcatacgatgcgccccatccg

SEQ ID NO: 868218 - DNA, 75 bp, synthetic construct
  source 1..75: mol_type = other DNA
cttgtcagttgtcgttttaaacttgatggcgcgcttacggctaatcagtacgcactggcgctgtactggccggtt

SEQ ID NO: 868219 - DNA, 75 bp, synthetic construct
  source 1..75: mol_type = other DNA
gtccggttgctattacgccttataccctgatgcaggcgattgcagcggagggtgatgtcaccacgcctgttgtgg

SEQ ID NO: 868220 - DNA, 75 bp, synthetic construct
  source 1..75: mol_type = other DNA
tgttgtggatgatgtcggtgccagcgggggcaaggcgctgaagctgacaaaacagaccggaaagtcatggtttat

SEQ ID NO: 868221 - DNA, 75 bp, synthetic construct
  source 1..75: mol_type = other DNA
cggtggctctgctggcggtgttccctggatatgcggggacacgacgtatttctggaagcagaagaacgaatccac

SEQ ID NO: 868222 - DNA, 75 bp, synthetic construct
  source 1..75: mol_type = other DNA
agatgaagatcctgatatcactgaaatcgactattacggttctggatggcgcaaagataaaaccacatggacaac

SEQ ID NO: 868223 - DNA, 75 bp, synthetic construct
  source 1..75: mol_type = other DNA
ttcagtgaggccagcggtgcttccgctgattcttcacgctggggagtcggtaaacctctgtatcaggacctggta

SEQ ID NO: 868224 - DNA, 75 bp, synthetic construct
  source 1..75: mol_type = other DNA
acattcagtgcggacgcgggggccagccaggattcggcacgctggggtgtgggtaaaccgttatatcaggacctg

SEQ ID NO: 868225 - DNA, 75 bp, synthetic construct
  source 1..75: mol_type = other DNA
ccggactaaaagccatcactggcggcgatgcggtatccgttgatcccaaataccagaacgcctattcaacccaca

SEQ ID NO: 868226 - DNA, 75 bp, synthetic construct
  source 1..75: mol_type = other DNA
tttaagatcaccaagcagagcaataaagcctggtccctgacgcgcccggtggatgacgcagtctccctgctgaca

SEQ ID NO: 868227 - DNA, 75 bp, synthetic construct
  source 1..75: mol_type = other DNA
atgacggctcattcagtgaggccagcggtgcttccgctgattcttcacgctggggagccggtaaacccctgtatc

SEQ ID NO: 868228 - DNA, 75 bp, synthetic construct
  source 1..75: mol_type = other DNA
cgtcagcctcgcacatacctttaccatgcctatctggtctacatggaggccaacggttataaaaatacgctcagt

SEQ ID NO: 868229 - DNA, 75 bp, synthetic construct
  source 1..75: mol_type = other DNA
ggcggtgtgctggatgcagggagagtttgacatgaacgccgccacctacgcacagcaacctgcgctgtttacagc

SEQ ID NO: 868230 - DNA, 75 bp, synthetic construct
  source 1..75: mol_type = other DNA
aggggacattcagcgagtccacgggggccagtcaggattcggctcgctggggagtgggtaagccgttatatcagg

SEQ ID NO: 868231 - DNA, 75 bp, synthetic construct
  source 1..75: mol_type = other DNA
cccgtacgctgcagcaacattcagcacgtctggacagccagcagcgccagattaatgaaaaccacaaggaaatga

SEQ ID NO: 868232 - DNA, 75 bp, synthetic construct
  source 1..75: mol_type = other DNA
acttgagctccgtgccgtcagtattgtcaaagagcttcgcgggaaaggctatgggtcaatgcttgtgtccgaaat

SEQ ID NO: 868233 - DNA, 75 bp, synthetic construct
  source 1..75: mol_type = other DNA
gcggtttgaaagtctcccgtctttgcctcggttgtatgagctatggtgaacctgaacgtcttcctcaatgtcaac

SEQ ID NO: 868234 - DNA, 75 bp, synthetic construct
  source 1..75: mol_type = other DNA
gtaacacccaggctatccagaatcactcccgccagctgcaggagcataacgcacgcctgaacagccagcagcgcc

SEQ ID NO: 868235 - DNA, 75 bp, synthetic construct
  source 1..75: mol_type = other DNA
ttctttcttctgctgttgccggtctgttgttggtgagtggtggggttgttgcggcaactcctgagaacgtaaata

SEQ ID NO: 868236 - DNA, 75 bp, synthetic construct
  source 1..75: mol_type = other DNA
ttcaacgagcagaccgcagcgaaagcaggcgtggcattcagtgatggcgatgcctcctggaacgttggtgtgaac

SEQ ID NO: 868237 - DNA, 75 bp, synthetic construct
  source 1..75: mol_type = other DNA
taccgcaatgtgtttactgaagatgaccagggaacgcatttccggctggttatccgtaatgctgaaggtcagcta

SEQ ID NO: 868238 - DNA, 75 bp, synthetic construct
  source 1..75: mol_type = other DNA
gcaggcggttgctgtcataacagcttaccgcaatgtgtttatccaggatgacccgggaatgcatttccgtcggat

SEQ ID NO: 868239 - DNA, 75 bp, synthetic construct
  source 1..75: mol_type = other DNA
acaggcaatggctgccacaacagcttaccgcaatgtgcttattgaagatgaccatggaacgcatttcctgctggt

SEQ ID NO: 868240 - DNA, 75 bp, synthetic construct
  source 1..75: mol_type = other DNA
cgctggcggtgctggaattttgaacctgatgccggaaaacagctaaatccatatctcgccagtgagggaattctc

SEQ ID NO: 868241 - DNA, 75 bp, synthetic construct
  source 1..75: mol_type = other DNA
tttatcgacgatgaccagggaactcatttccgtcgggttatccgcaacgcagagactgacgccggaaggttagcc

SEQ ID NO: 868242 - DNA, 75 bp, synthetic construct
  source 1..75: mol_type = other DNA
tactggaattttgaacctgatgccggaaaacagctaaatccgtatctcgccagtgagggaattctcaggcaataa

SEQ ID NO: 868243 - DNA, 75 bp, synthetic construct
  source 1..75: mol_type = other DNA
ttattttaattctattgcgtatcctgtctacttacctgagttaaagctggaaaatattaaaaagttaaagggtac

SEQ ID NO: 868244 - DNA, 75 bp, synthetic construct
  source 1..75: mol_type = other DNA
gcatgagttccggcggccataccgacggcagttacaccatccccggtctgggtggtagcctggttgccgggtatg

SEQ ID NO: 868245 - DNA, 75 bp, synthetic construct
  source 1..75: mol_type = other DNA
ctggcctgtctgatgcatgcgggggcgggaaactgggtacatctggcgctgttgcgcttctttatgggcggtgcg

SEQ ID NO: 868246 - DNA, 75 bp, synthetic construct
  source 1..75: mol_type = other DNA
tgcagttgtctaagataagaggaagaaaaattaatgcggcgctaaaggcttttcttgttaacgagaaagcacgga

SEQ ID NO: 868247 - DNA, 75 bp, synthetic construct
  source 1..75: mol_type = other DNA
tttgatttttgcggctaccttgaggtcctacctgacaccacgggcatgtttatggggaacgctaatattgttcca

SEQ ID NO: 868248 - DNA, 75 bp, synthetic construct
  source 1..75: mol_type = other DNA
ttccggattcatacgatgcgccccatccgcgcattaagcaactggcccgtcgtaacacagtgactcccggtggtg

SEQ ID NO: 868249 - DNA, 75 bp, synthetic construct
  source 1..75: mol_type = other DNA
gcacagggcggcagcgcccaaatcaataatggtgttctggatagcttctggctttatgggatgatgaacgtcagc

SEQ ID NO: 868250 - DNA, 75 bp, synthetic construct
  source 1..75: mol_type = other DNA
tgatcggcagttcgccgcaaatgtggctgaatctgcaaaatgcctggagtctggcagaggcagaaaaaacagtgg

SEQ ID NO: 868251 - DNA, 75 bp, synthetic construct
  source 1..75: mol_type = other DNA
atgaaacgcgcagcggcacagagcgcagcacttgccggtctgttccagccgtacagtgtgggcaaattcaacgcc

SEQ ID NO: 868252 - DNA, 75 bp, synthetic construct
  source 1..75: mol_type = other DNA
tactgtctaccagaataaagatggcagctatacacttgaccagagcgcaccgggcaacgttcgtgtgaatgatgc

SEQ ID NO: 868253 - DNA, 75 bp, synthetic construct
  source 1..75: mol_type = other DNA
cctttttgcgaacatttattcagtgagatgtttaatttgctggctgatattattagtgaattaccattaatataa

SEQ ID NO: 868254 - DNA, 75 bp, synthetic construct
  source 1..75: mol_type = other DNA
ttatcgacaatccatatattgctattgtacttatctccattggtggttttggtcatcagataatttcctgcatgt

SEQ ID NO: 868255 - DNA, 75 bp, synthetic construct
  source 1..75: mol_type = other DNA
aagtattgccagcggaggtagtgactccaacttactgatagtgttttatgttcagataatgcccgatgaccttgt

SEQ ID NO: 868256 - DNA, 75 bp, synthetic construct
  source 1..75: mol_type = other DNA
cctgctggagaagggcgggcttatcagttgtcgttttaaagttgatggcacactgacagctaatcagtacgcact

SEQ ID NO: 868257 - DNA, 75 bp, synthetic construct
  source 1..75: mol_type = other DNA
ccatgacgtgtgatgagctggcaaaagcactggatgaacgcctggctgaaggctggcaaccgcacggagcccccg

SEQ ID NO: 868258 - DNA, 75 bp, synthetic construct
  source 1..75: mol_type = other DNA
gaatgctccgacggaagatccggatattgtggctgtcgggtattacggtgcggcatcccgtacccagggcagttt

SEQ ID NO: 868259 - DNA, 75 bp, synthetic construct
  source 1..75: mol_type = other DNA
tgaaggtgcaactggtggaaccgcgatgaagctgagcaaggagacgggtaaaggatcatggcatctggagcatga

SEQ ID NO: 868260 - DNA, 75 bp, synthetic construct
  source 1..75: mol_type = other DNA
gatacttctggtgccctgttgtcgtggcggggcagcattcaccaccggagccgacggctcattcagtgaggccag

SEQ ID NO: 868261 - DNA, 75 bp, synthetic construct
  source 1..75: mol_type = other DNA
gccgcagaaggtgaagtcaggattcctgttgaagttcctgatgacggtgatggttcacagaccacaataacctct

SEQ ID NO: 868262 - DNA, 75 bp, synthetic construct
  source 1..75: mol_type = other DNA
tcaggatattacggtgcggcctcccggacgtcggcaaactggacgtcagcagaccgtgcgagccatttcagctca

SEQ ID NO: 868263 - DNA, 75 bp, synthetic construct
  source 1..75: mol_type = other DNA
ccgcagaatgccgggattcttctggtgccctgttgccgtggcgggtctggtttaaccgtggggaatgacggcacg

SEQ ID NO: 868264 - DNA, 75 bp, synthetic construct
  source 1..75: mol_type = other DNA
tacaaaaataaaacagataaaaacattcatttcgtcccattaatgacagatgaaaatggcgcgaatgtacccacc

SEQ ID NO: 868265 - DNA, 75 bp, synthetic construct
  source 1..75: mol_type = other DNA
gttgctgctgagggggaggtgagtacgccggtgatacgtcctgatgccggtgatgattcatctgtggccgtctcc

SEQ ID NO: 868266 - DNA, 75 bp, synthetic construct
  source 1..75: mol_type = other DNA
tttcggccagaacaactgatgaattaaagcggaaactgaacgaaaaaatccgtgaaggatggcagccttatggaa

SEQ ID NO: 868267 - DNA, 75 bp, synthetic construct
  source 1..75: mol_type = other DNA
gccaaaaaagctacagacaatcagctgaaaccctatggctgggacggtgtgtatggcaggcgcacactggttgat

SEQ ID NO: 868268 - DNA, 75 bp, synthetic construct
  source 1..75: mol_type = other DNA
gctgtataaggaccttatcggtcgaacaaaagcagcactgaagaagaacccgaaaaatgtgctgtttgccgtggt

SEQ ID NO: 868269 - DNA, 75 bp, synthetic construct
  source 1..75: mol_type = other DNA
tctttaacgaagaggccacaatacctatattttataaaacggtacgcgagtttgaaggcctaaaagagtacgaca

SEQ ID NO: 868270 - DNA, 75 bp, synthetic construct
  source 1..75: mol_type = other DNA
tattaccagtttctcaaccttcccactacgaatgtggacatatataggggtcattgttgctggaatatccttttt

SEQ ID NO: 868271 - DNA, 75 bp, synthetic construct
  source 1..75: mol_type = other DNA
aaaccatcaccaacggtgcgccaaattacgtcaaggaatctgaagttcttacgaatctggaaatccttgaacgcg

SEQ ID NO: 868272 - DNA, 75 bp, synthetic construct
  source 1..75: mol_type = other DNA
ataaacacgctggctattgccgatccgcttattgttcctctgtctttcacgcgcaactttggcaaggaatcagca

SEQ ID NO: 868273 - DNA, 75 bp, synthetic construct
  source 1..75: mol_type = other DNA
agtacataggcagaatttatatagaggttaagaatagacctcgttatatcataaagggcaataaaaatgatattt

SEQ ID NO: 868274 - DNA, 75 bp, synthetic construct
  source 1..75: mol_type = other DNA
cttcgcatctggacgtatattgggctagtggtagccggttgcgcttttttgtatggcgcctggatgatattcaac

SEQ ID NO: 868275 - DNA, 75 bp, synthetic construct
  source 1..75: mol_type = other DNA
tgtcgtatatcccgcagaatgcagggatacttctggtgccctgctgtcgtggtggttctgcattcaccaccggtg

SEQ ID NO: 868276 - DNA, 75 bp, synthetic construct
  source 1..75: mol_type = other DNA
cgccggatacaccgtccacaccaccggctgacaccacgacgatgagcaccctgtttgcttaccgggcatcagagt

SEQ ID NO: 868277 - DNA, 75 bp, synthetic construct
  source 1..75: mol_type = other DNA
gacgccggttcttgatggtcaggatggcacaccgttcacgctgacgcagtcaccggtcagtgcctttgcggcgga

SEQ ID NO: 868278 - DNA, 75 bp, synthetic construct
  source 1..75: mol_type = other DNA
caaggaatctgaagttcttaccaatctggaaatccttgaacgcggatttgagcaagcctctccctccacagtgac

SEQ ID NO: 868279 - DNA, 75 bp, synthetic construct
  source 1..75: mol_type = other DNA
agccatctggtgaaaatcgattatccgaaatttatcgttcacggtaagaaaggttcgtttattaaatacggtatc

SEQ ID NO: 868280 - DNA, 75 bp, synthetic construct
  source 1..75: mol_type = other DNA
ctggactgccggtggcggcaaggctcaaattgtggatgatgccggagccagcgggggtaaggccatgaaactgac

SEQ ID NO: 868281 - DNA, 75 bp, synthetic construct
  source 1..75: mol_type = other DNA
ggagccggctggcggtaaagctgaaattatcagtgatgcaggaggcacaggtggtaaggcaatgaaactgaccaa

SEQ ID NO: 868282 - DNA, 75 bp, synthetic construct
  source 1..75: mol_type = other DNA
cacccaaaacgtcagctcctatggtacgttaggctttaacctcggcgcatggcgcttacgtagcgattaccaata

SEQ ID NO: 868283 - DNA, 75 bp, synthetic construct
  source 1..75: mol_type = other DNA
gtaaaagtcgatgttccatcttctgaaactggcgcaccgacgccgtcaccgtcagaaagtgaagcggtaagcacc

SEQ ID NO: 868284 - DNA, 75 bp, synthetic construct
  source 1..75: mol_type = other DNA
acgtatttctggaagcagcgtcatgcggaagggtatgcatcagtatacggagggtataagggtaaggagtcgcag

SEQ ID NO: 868285 - DNA, 75 bp, synthetic construct
  source 1..75: mol_type = other DNA
aaggctatatcccccctggtagatacctcgttcgtgtgcaaataaataaaaatatgttgccacaaacgttaatac

SEQ ID NO: 868286 - DNA, 75 bp, synthetic construct
  source 1..75: mol_type = other DNA
gctgaataatgtgtcgctctatggcggcggcatgttcactgcagatgattaccaggcgatcaccactggcatcgg

SEQ ID NO: 868287 - DNA, 75 bp, synthetic construct
  source 1..75: mol_type = other DNA
aagcggttcattactctgcttaactagagaaaatttaattaattttggcctgcatacagactttattgaatcatt

SEQ ID NO: 868288 - DNA, 75 bp, synthetic construct
  source 1..75: mol_type = other DNA
atggcatttaaacactatgacgtggtcagggcggcatcgccgtcagaccttgcggatgcgcttgctcaaaaaatt

SEQ ID NO: 868289 - DNA, 75 bp, synthetic construct
  source 1..75: mol_type = other DNA
gcggacctgtcaaaggggcagtacggtaccgtggggcaggggctgcatatcgccaaaaaactgctgccgtttata

SEQ ID NO: 868290 - DNA, 75 bp, synthetic construct
  source 1..75: mol_type = other DNA
aaaccggaagaagacccggacattccgggtatcggttattacggttcgaaatggcgtgacagctcagccacctgg

SEQ ID NO: 868291 - DNA, 75 bp, synthetic construct
  source 1..75: mol_type = other DNA
tgctgatgcacttgctcaaaaaattcgtgaaggatggcaaccatacggcgggccgttttcttcgtatacggatga

SEQ ID NO: 868292 - DNA, 75 bp, synthetic construct
  source 1..75: mol_type = other DNA
tttccgaccgtctggcaacggcgattctggtgcatgccgggagaaccgctgaattcattaccggaaaacagcctg

SEQ ID NO: 868293 - DNA, 75 bp, synthetic construct
  source 1..75: mol_type = other DNA
tttgagtaagttttcacacccgaaagccagtgcagctcagtatggatgcgtggggcagggattacatatcgcgaa

SEQ ID NO: 868294 - DNA, 75 bp, synthetic construct
  source 1..75: mol_type = other DNA
ccaacactgcgcggcagctaccagcactattcgccgtggggacgtctgaacattaatggcagtgtacagccgaat

SEQ ID NO: 868295 - DNA, 75 bp, synthetic construct
  source 1..75: mol_type = other DNA
cgatgcggtgtccgttgacccgaaataccgggatgcgtactccacgcacatcccggcggtgattctggccgtgaa

SEQ ID NO: 868296 - DNA, 75 bp, synthetic construct
  source 1..75: mol_type = other DNA
ggtgccgggttcactggtgccgaatcagtttgccctgggcatttactggcagttgtcgtccctgccggagggagt

SEQ ID NO: 868297 - DNA, 75 bp, synthetic construct
  source 1..75: mol_type = other DNA
cagccatgctgaaagagtacgggctaaattatgagaagcgccgtaaaaatcagggcatacagaccaatctggtgc

SEQ ID NO: 868298 - DNA, 75 bp, synthetic construct
  source 1..75: mol_type = other DNA
gattatttccgaccgtctggccacggctgttctgactcatgcagggcgaaccacagtaaaagccgatgttccatc

SEQ ID NO: 868299 - DNA, 75 bp, synthetic construct
  source 1..75: mol_type = other DNA
aaaagacctgaatgtgatgtaccacaatgcgaaagtggcgacaaacaacctgaaactgggaagctttggcgcatt

SEQ ID NO: 868300 - DNA, 75 bp, synthetic construct
  source 1..75: mol_type = other DNA
tgccaccagcgacccggagtattactttgttgtggttctggcagggcagtcaaatggcatgtcgtatggtgaagg

SEQ ID NO: 868301 - DNA, 75 bp, synthetic construct
  source 1..75: mol_type = other DNA
ttaaaatccccgaaaacgtcaatcttgaaacaaccagaaacaagtatgcctttggtttgtactggcgaatagcgg

SEQ ID NO: 868302 - DNA, 75 bp, synthetic construct
  source 1..75: mol_type = other DNA
caaactggacgccaccagagttttgggataccggtatcgccgggtttatccttgattacaacgtgtacgccagcc

SEQ ID NO: 868303 - DNA, 75 bp, synthetic construct
  source 1..75: mol_type = other DNA
atgcgctggaattaaactcttacctcaacgtaacacgcgacacttattgggatcgaaaaagtaataccaactact

SEQ ID NO: 868304 - DNA, 75 bp, synthetic construct
  source 1..75: mol_type = other DNA
tgaaggggctgatttacaatgaagtacatcttcatgcacctcatgcagaacaactggaaggttttacattacagc

SEQ ID NO: 868305 - DNA, 75 bp, synthetic construct
  source 1..75: mol_type = other DNA
cgctaccggcttcattcgaccgccctgaaccgcgcattaagcaactggcacgtcgcagcacggtaacgccagatg

SEQ ID NO: 868306 - DNA, 75 bp, synthetic construct
  source 1..75: mol_type = other DNA
gctgaactgatgcgcgggcagaccgtgacaccaccggatgagaagccgtcacctgatacaccatcaaaaccgtcc

SEQ ID NO: 868307 - DNA, 75 bp, synthetic construct
  source 1..75: mol_type = other DNA
aaattactggataacctgctgaccaagaacgtcaaagttgtcggtgaaccgcctgaagaaccaagcctgttggct

SEQ ID NO: 868308 - DNA, 75 bp, synthetic construct
  source 1..75: mol_type = other DNA
agaaaccatcattaatgggttatcaggcattgttaaagattttttatctacagctgatggcatcaaggattttga

SEQ ID NO: 868309 - DNA, 75 bp, synthetic construct
  source 1..75: mol_type = other DNA
tacccgggctaacaacgaccagaaagcccattgttacaaaaaaactttcagaaatcgttgccgaagagcttgaaa

SEQ ID NO: 868310 - DNA, 75 bp, synthetic construct
  source 1..75: mol_type = other DNA
gaatgattcgtcgcgaagaaattaaagaaggtgaatacctaccttcagaaagagagatgatggaattcttcggtg

SEQ ID NO: 868311 - DNA, 75 bp, synthetic construct
  source 1..75: mol_type = other DNA
ggcactggatatcacttttgttgataaacgaattgaaaagctgttgttcaattatcgggcgcgcaacttcccggg

SEQ ID NO: 868312 - DNA, 75 bp, synthetic construct
  source 1..75: mol_type = other DNA
gatgacgctgattgacgtcccgcagatgaagccactggtgcatgtctcgggaatgtttggcgcctggcgcggaaa

SEQ ID NO: 868313 - DNA, 75 bp, synthetic construct
  source 1..75: mol_type = other DNA
acttacggccataaaagagcatgattgtgataaagctgaacagctaatgtataatcacctttataaacgaattga

SEQ ID NO: 868314 - DNA, 75 bp, synthetic construct
  source 1..75: mol_type = other DNA
ctgctggcactggggggcgatcttagccctgcgcgcctgttaatggcttatcagcgtggtattttcccgtggttt

SEQ ID NO: 868315 - DNA, 75 bp, synthetic construct
  source 1..75: mol_type = other DNA
atggctcgggtatctattagcgaagcggcacgccttgccagtgtcagtcgtccgactatttacaagttactcaaa

SEQ ID NO: 868316 - DNA, 75 bp, synthetic construct
  source 1..75: mol_type = other DNA
gcgttgctgttggtggttgccgatctgctggcgagaattattcatcccccactggagctcccggttggcgtgctg

SEQ ID NO: 868317 - DNA, 75 bp, synthetic construct
  source 1..75: mol_type = other DNA
cccgaccgaatccgtggccattgatgtcgcttatgaaggctccggcagtggcgactggcgcactgacgggttcat

SEQ ID NO: 868318 - DNA, 75 bp, synthetic construct
  source 1..75: mol_type = other DNA
cgtcattcagctatgcaggagacaagaatcgccagctgacccattacagcgatacccgctggcatgaagattccg

SEQ ID NO: 868319 - DNA, 75 bp, synthetic construct
  source 1..75: mol_type = other DNA
gcgcaccgttctcgtcagggaaaattgcctcagtggtggagaccctgaaactgattattccgcagcaggacgccc

SEQ ID NO: 868320 - DNA, 75 bp, synthetic construct
  source 1..75: mol_type = other DNA
tttcacgattacgaaacctttggaacgcaccccgcgttagatcgccctgcacagttcgcagccattcgcactgat

SEQ ID NO: 868321 - DNA, 75 bp, synthetic construct
  source 1..75: mol_type = other DNA
ggtaatgcttttcattcctggcgcaaaaaaaccttttttattcgcaaaaaacatttctgatttacgaattagtct

SEQ ID NO: 868322 - DNA, 75 bp, synthetic construct
  source 1..75: mol_type = other DNA
caggggatgcagaccaacctgtcgctgaaagaggaaagctacggcgactggctgccgaaatgcgatgaacccgca

SEQ ID NO: 868323 - DNA, 75 bp, synthetic construct
  source 1..75: mol_type = other DNA
ccgaccgcgaccttaacggcgacggccagaccaaagccgcagcggccgcagaagcctgtgacggtattgttgccc

SEQ ID NO: 868324 - DNA, 75 bp, synthetic construct
  source 1..75: mol_type = other DNA
atccccgtgccgtggcgcgcgctgctgaccgactggcaggccggacgcgagcattattatgtattgatggagtac

SEQ ID NO: 868325 - DNA, 75 bp, synthetic construct
  source 1..75: mol_type = other DNA
cccgaccgaatctgtgtccgttgatgtcgcttatgaaggctccggcagcggtgactggcgcactgacggttttat

SEQ ID NO: 868326 - DNA, 75 bp, synthetic construct
  source 1..75: mol_type = other DNA
aaagatgtcttcgatgccgtagcactttctgtcaagaaacgtagttttagtgatggtgataccgttatcaaatca

SEQ ID NO: 868327 - DNA, 75 bp, synthetic construct
  source 1..75: mol_type = other DNA
ttataacggctttttcagcgacgccgatcgcgcggcaatgaaaattgtactggaaaccgagccgcgtaatttacc

SEQ ID NO: 868328 - DNA, 75 bp, synthetic construct
  source 1..75: mol_type = other DNA
ataccacgaaagccgatctgggcgataacgccgccgttccggttaagctggtgcatattaataaatgtccggtat

SEQ ID NO: 868329 - DNA, 75 bp, synthetic construct
  source 1..75: mol_type = other DNA
gcgcagcagtatgccgacgataaagaaaaagtcgcattgttgaaggcactatggcagtacgcgcaagagattgtc

SEQ ID NO: 868330 - DNA, 75 bp, synthetic construct
  source 1..75: mol_type = other DNA
cgcgtgaacgtgccgcactgattggtttctcgcttatccgtctgcctgaccaggaaaaatggagcggtgacgggg

SEQ ID NO: 868331 - DNA, 75 bp, synthetic construct
  source 1..75: mol_type = other DNA
caacagtatgccgatgacaaagagaaagtggcgctgttaaaagcgctttggcagtacgcggaagagatcgtctaa

SEQ ID NO: 868332 - DNA, 75 bp, synthetic construct
  source 1..75: mol_type = other DNA
tgcagatgaattgcagatgctggcacaacaatatgccgatgacaaagagaaagtggcgctgttaaaagcgctttg

SEQ ID NO: 868333 - DNA, 75 bp, synthetic construct
  source 1..75: mol_type = other DNA
cgtcagactgctggagaaaacgcgcccggccaccgacaacgcctacctcacccgcaaggggttccccgaccggga

SEQ ID NO: 868334 - DNA, 75 bp, synthetic construct
  source 1..75: mol_type = other DNA
cgcagcgtccatcggttgatgttattactggtctgattaaagcgaatattccgacccgtatcgcctttaccgtat

SEQ ID NO: 868335 - DNA, 75 bp, synthetic construct
  source 1..75: mol_type = other DNA
tgccgttggctggtgagtttccggtaagtagcgcggtggtgctctgttttcgtacgcagatttttgtcacccgta

SEQ ID NO: 868336 - DNA, 75 bp, synthetic construct
  source 1..75: mol_type = other DNA
gtgtctggtattcaccgtggcgaaccagaaatcgtcggtcgttatgacagtcttggaaactctctgggggcgtaa

SEQ ID NO: 868337 - DNA, 75 bp, synthetic construct
  source 1..75: mol_type = other DNA
atgaataaaacaataacggcacttgctatcatgatggcttcatgtgccgcaaacgcgtcggtattaccagaaact

SEQ ID NO: 868338 - DNA, 75 bp, synthetic construct
  source 1..75: mol_type = other DNA
ggttaaattgatgtcgcacgcaccgatgggcatggcgggtcatgtgacttttgtacacaacggcaaggcttatgt

SEQ ID NO: 868339 - DNA, 75 bp, synthetic construct
  source 1..75: mol_type = other DNA
atgaataaaacaataacggcgcttgctatcataatggcttcatttgccgcaaacgcgtctgtattaccggaaact

SEQ ID NO: 868340 - DNA, 75 bp, synthetic construct
  source 1..75: mol_type = other DNA
tttcccttgcctgctttgggatgaggctgccggaaaagttttgccgacaccgaatcttcacacgctgatacaggc

SEQ ID NO: 868341 - DNA, 75 bp, synthetic construct
  source 1..75: mol_type = other DNA
aaagtttatagcgacgatgattttctttatccggggcaggagagcggttttgtacagcattcgctgcacgaggtg

SEQ ID NO: 868342 - DNA, 75 bp, synthetic construct
  source 1..75: mol_type = other DNA
agatggaagcgcaggggattgtcagcgaacaggggcacaacggtaatcgtgaagtgctggccccaccgccgtttg

SEQ ID NO: 868343 - DNA, 75 bp, synthetic construct
  source 1..75: mol_type = other DNA
cgtacacaactttttgttacccgcagtgatgtcgtgctggtgtccggtattcagcacagaacgccggaaatcgta

SEQ ID NO: 868344 - DNA, 75 bp, synthetic construct
  source 1..75: mol_type = other DNA
cgacagctactgctacggcggcggttactaccgtcgtggtcatgcgcaacatgcgctggtgtttacgccagaaaa

SEQ ID NO: 868345 - DNA, 75 bp, synthetic construct
  source 1..75: mol_type = other DNA
tgccgctggcaggcgagtttccggtaagcagtgcagtagtgctctgttttcgcacgcagatttttgtcacccgta

SEQ ID NO: 868346 - DNA, 75 bp, synthetic construct
  source 1..75: mol_type = other DNA
gatcaagcaacctctgcatttattgatggtaatttgtatgtatttggcggtgttggtaaaaacagagatgggtta

SEQ ID NO: 868347 - DNA, 75 bp, synthetic construct
  source 1..75: mol_type = other DNA
tcaggctggtgcggaatcactgctgggtatgggggatatgctctactctgggccgaactccacgttgccggtacg

SEQ ID NO: 868348 - DNA, 75 bp, synthetic construct
  source 1..75: mol_type = other DNA
tcagtatcaccatgtccactcggaccttggtgcgctgggcaaagttaacacttgcttttaaaggcgctcctaacg

SEQ ID NO: 868349 - DNA, 75 bp, synthetic construct
  source 1..75: mol_type = other DNA
tttatcgctaccggcaacagtgcgggcagcggtgaccagacgggcttgtatcaaggtgtgcttcaacagaatttg

SEQ ID NO: 868350 - DNA, 75 bp, synthetic construct
  source 1..75: mol_type = other DNA
gtttcgacgttctccggggattatctccgcgtaactgacaacaaggggaaaacgcacgatgtgctgaccggaagt

SEQ ID NO: 868351 - DNA, 75 bp, synthetic construct
  source 1..75: mol_type = other DNA
ccgaccgtgaccttaacggcgccggccagacaaaagccgctgcggccgcagacgcctgtgagggtgttgttgccc

SEQ ID NO: 868352 - DNA, 75 bp, synthetic construct
  source 1..75: mol_type = other DNA
gaggcgacgcggaaagcgatttatgacgccatccggccactggctgacagtcctttcactaccatgagcgaggcg

SEQ ID NO: 868353 - DNA, 75 bp, synthetic construct
  source 1..75: mol_type = other DNA
aaacgacaaaccgtttatctgcgcgaagttttggataacgccaaattccgcgataatccgtcgccattaaccgtg

SEQ ID NO: 868354 - DNA, 75 bp, synthetic construct
  source 1..75: mol_type = other DNA
ctttgcgcttgaacaaatggctcgcctggtggaagcgcgtctggctgatttccgtattaaagccgatgttgtcaa

SEQ ID NO: 868355 - DNA, 75 bp, synthetic construct
  source 1..75: mol_type = other DNA
gcatggtacaagctggatacacaggccaaagataaaaaatggatagcgttagctgcattccctgatggggcgaga

SEQ ID NO: 868356 - DNA, 75 bp, synthetic construct
  source 1..75: mol_type = other DNA
acagatctgattggacatcacgctctggtcgcggaaaagcctggtcaaccacctgtcatgaagttcatgtatgga

SEQ ID NO: 868357 - DNA, 75 bp, synthetic construct
  source 1..75: mol_type = other DNA
ctggcggtgacgcattgttcgtaaccggccctaccgggtctggcaaaacctcaggtatcaccgagatcgctggtc

SEQ ID NO: 868358 - DNA, 75 bp, synthetic construct
  source 1..75: mol_type = other DNA
tatcagcagccgcaacaaccggttgcgccacagccgcagtatcagcagccgcaacaaccggttgcgccgcagccg

SEQ ID NO: 868359 - DNA, 75 bp, synthetic construct
  source 1..75: mol_type = other DNA
gattcatcagcattgagcatttgaacgaacaacaaacaaatgctaagaaaatgttgcgtcgcttccgtagttctg

SEQ ID NO: 868360 - DNA, 75 bp, synthetic construct
  source 1..75: mol_type = other DNA
gtgaagtggatgtggtgcgggctgctgatcagcctgccgctggcggcgaaggatctgggtgtgcagggtgacctc

SEQ ID NO: 868361 - DNA, 75 bp, synthetic construct
  source 1..75: mol_type = other DNA
actgaaccgtaaggtgatactggtcgggggaaatatccgtgatgccacaaaggcgctgaacacgcggatttactt

SEQ ID NO: 868362 - DNA, 75 bp, synthetic construct
  source 1..75: mol_type = other DNA
tgcagatgaaatttttgatgctcttaacatttcatcgttcaataactttagcaaccgtgggacgttaaattttgc

SEQ ID NO: 868363 - DNA, 75 bp, synthetic construct
  source 1..75: mol_type = other DNA
cttaggtggaaactcagcaattgattttcgtcgtggtccaaatgaatcatgtcatttaaacttctttgattatcg

SEQ ID NO: 868364 - DNA, 75 bp, synthetic construct
  source 1..75: mol_type = other DNA
tgatggtagtacccgtcttgaagacaaccttttctttaaagctggttctcgtcaatctatggactatatggaact

SEQ ID NO: 868365 - DNA, 75 bp, synthetic construct
  source 1..75: mol_type = other DNA
tatgtctggatcacctacgcggcggtgcaatctctggcgactgcccttgagcgtaccggcagcgatgagccgctg

SEQ ID NO: 868366 - DNA, 75 bp, synthetic construct
  source 1..75: mol_type = other DNA
ggggaaaaagatttctccgcactaattgctcgcctgaaaaaagagaatatcgattttgtttattacggcggttac

SEQ ID NO: 868367 - DNA, 75 bp, synthetic construct
  source 1..75: mol_type = other DNA
gtggggcgatatggaatttaacggcgcgcgtcaggcaattaaagacattaatgccaaagggggaattaagggcga

SEQ ID NO: 868368 - DNA, 75 bp, synthetic construct
  source 1..75: mol_type = other DNA
tggcgtggatgaagaagcagaatcccggcacgctgacgtaccgcgtcatactggtcaatggggatgttcgagaag

SEQ ID NO: 868369 - DNA, 75 bp, synthetic construct
  source 1..75: mol_type = other DNA
atgaaacggaatgcgaaaactatcatcgcagggatgattgcactggcaatttcacacaccgctatagctgacgat

SEQ ID NO: 868370 - DNA, 75 bp, synthetic construct
  source 1..75: mol_type = other DNA
ttgctcgcctgaaaaaagagaatatcgattttgtttattacggcggttactaccctgaaatggggcagatgctgc

SEQ ID NO: 868371 - DNA, 75 bp, synthetic construct
  source 1..75: mol_type = other DNA
atgcaatcaatccaatttaaacgcacacaaaccgccgggaaaaagccgactccagatcagctttcggtgggggaa

SEQ ID NO: 868372 - DNA, 75 bp, synthetic construct
  source 1..75: mol_type = other DNA
cgtatgcgatggcgggtgtgtcttacagccgtgtgtcgactttctccggagattatctgcaggtgaccgacaaca

SEQ ID NO: 868373 - DNA, 75 bp, synthetic construct
  source 1..75: mol_type = other DNA
attaacgtgaaataccgttatgagtttacggacacgctggggctgattacgtccttcagttatgccaatgctgaa

SEQ ID NO: 868374 - DNA, 75 bp, synthetic construct
  source 1..75: mol_type = other DNA
gtcattcagttatgccaatgccaaaggtgagcaaaaaacgcattacagcgatacccgctggcatgaagattcagt

SEQ ID NO: 868375 - DNA, 75 bp, synthetic construct
  source 1..75: mol_type = other DNA
attatctcaatcaaatgcgccccgaacggttaccaaataatttctgggtaccacggcgattgttttcaccacaag

SEQ ID NO: 868376 - DNA, 75 bp, synthetic construct
  source 1..75: mol_type = other DNA
gaatttatcggtcatggcggtaagcttatcgactgccaggtccttaacgatcacacagcatcgcttggtgcctgc

SEQ ID NO: 868377 - DNA, 75 bp, synthetic construct
  source 1..75: mol_type = other DNA
aggcgcattacgtgagcctaacggcctgctggcacttgggggcgatcttagccctgcgcgcctgttaatggctta

SEQ ID NO: 868378 - DNA, 75 bp, synthetic construct
  source 1..75: mol_type = other DNA
actctggaaggaaatgccggtcataacctgctggcatcgttctacgtacagagcgatgccacagaccttaacgtg

SEQ ID NO: 868379 - DNA, 75 bp, synthetic construct
  source 1..75: mol_type = other DNA
agcgactgtggtgcatatgttgcactcagttcggccatgaagagcctctctgtgaagcttaccaaggtttgtaat

SEQ ID NO: 868380 - DNA, 75 bp, synthetic construct
  source 1..75: mol_type = other DNA
caactgagccatatcagcacgctttatttgatgcctggcagttccctactctcgcatggggagaccccacactac

SEQ ID NO: 868381 - DNA, 75 bp, synthetic construct
  source 1..75: mol_type = other DNA
ccgaccgagtccgtggccgttgatgtcgcttatgaaggctccggcagtggtgactggcgcactgacggtttcatc

SEQ ID NO: 868382 - DNA, 75 bp, synthetic construct
  source 1..75: mol_type = other DNA
gtggcacgaaaatcaggaaaacaactgatagtcgcagtaagagaacaggatatgaaaaaaatggaagcagagttt

SEQ ID NO: 868383 - DNA, 75 bp, synthetic construct
  source 1..75: mol_type = other DNA
gcaggcgggctcttccatcatgccagctaaagtaaacccggttgttccggaagtggttaaccaggtatgcttcaa

SEQ ID NO: 868384 - DNA, 75 bp, synthetic construct
  source 1..75: mol_type = other DNA
gtgggtaacgcatcattgtcgaatattgccggtgatgctgccgaaggcatgttggtcactatgccaaaacgctat

SEQ ID NO: 868385 - DNA, 75 bp, synthetic construct
  source 1..75: mol_type = other DNA
ggacttcgccgacatccgccaggaatttgacgccaccaacaaagcctacttcgaagagctacaggctgaactggg

SEQ ID NO: 868386 - DNA, 75 bp, synthetic construct
  source 1..75: mol_type = other DNA
cagaccctgacccggatttactgcgaattggtacgcaatacggcgcagatatctgtggtctggatgaattaagag

SEQ ID NO: 868387 - DNA, 75 bp, synthetic construct
  source 1..75: mol_type = other DNA
acgccggaaatacattgccaccggacgctttgtggttgtggtgggtgattacaacacccgcagcgaacagagcgc

SEQ ID NO: 868388 - DNA, 75 bp, synthetic construct
  source 1..75: mol_type = other DNA
gaagaaatggttgcgaatatcggcacactcaataaaattcatgaccgcatcaaagagctgaaccgccagaacaac

SEQ ID NO: 868389 - DNA, 75 bp, synthetic construct
  source 1..75: mol_type = other DNA
aaatactactacaacgcctccattgccgacggctacacgctgcgcctgatccgcgaagagatcgccaccaactac

SEQ ID NO: 868390 - DNA, 75 bp, synthetic construct
  source 1..75: mol_type = other DNA
cagcagctcttacagcaacccggtattcaactacttccgcgaagaagaactcttcaacctgaccaacttactgaa

SEQ ID NO: 868391 - DNA, 75 bp, synthetic construct
  source 1..75: mol_type = other DNA
cgacgtgctgaccggaagtgatgacgctcgccacagtaacacctctatggcgtggggagctggcgtgcagattaa

SEQ ID NO: 868392 - DNA, 75 bp, synthetic construct
  source 1..75: mol_type = other DNA
aggtggattccagaattgcccgcgctatgagcggaaattttggagatcataaattcgaaagggacggtgtctggg

SEQ ID NO: 868393 - DNA, 75 bp, synthetic construct
  source 1..75: mol_type = other DNA
tggtgctgccgctgctggcctttgcgggcggtatggcggggttgatcttgctgaagatgctggcaaagacccacc

SEQ ID NO: 868394 - DNA, 75 bp, synthetic construct
  source 1..75: mol_type = other DNA
agtgcggcgcgggtgacggccttaaactgattgagagggtattcgatgtatctgcctcagaggccgcccaaaagg

SEQ ID NO: 868395 - DNA, 75 bp, synthetic construct
  source 1..75: mol_type = other DNA
atggcaggtgtggcttacagccgtgtttcgacgttctccggggattatctccgcgtaactgacaacaaggggaaa

SEQ ID NO: 868396 - DNA, 75 bp, synthetic construct
  source 1..75: mol_type = other DNA
acaaaatcaaaggtgtcgcaaccggtcgtagcggtatgcatcaggacgtgccaaaagaagatgtcatcattaaaa

SEQ ID NO: 868397 - DNA, 75 bp, synthetic construct
  source 1..75: mol_type = other DNA
tacgccgaatcgcccaccgctgccgatgaagtcgccgaagaaatgccggtattacaggccgcagagcctgccgcc

SEQ ID NO: 868398 - DNA, 75 bp, synthetic construct
  source 1..75: mol_type = other DNA
ttacttcgatcaggatggctcgctcagccggaagtttgaactcaaaaccatcccggcccgtgtgacgctggcgga

SEQ ID NO: 868399 - DNA, 75 bp, synthetic construct
  source 1..75: mol_type = other DNA
ggcccgtctggatttcagtaaacagccctctcctgcagctattcataaaatgaaggttcgtcaggaacgtgccgg

SEQ ID NO: 868400 - DNA, 75 bp, synthetic construct
  source 1..75: mol_type = other DNA
cctgaacaggacccggtgtttaaactggcgggagttgccccggattatgcagctcttgctgatttccgcaaaatt

SEQ ID NO: 868401 - DNA, 75 bp, synthetic construct
  source 1..75: mol_type = other DNA
cacctttaccgttaatgaaaccatcactgacatgcagggaaacatcattgcgcgtcggggggaccaggtgaaccc

SEQ ID NO: 868402 - DNA, 75 bp, synthetic construct
  source 1..75: mol_type = other DNA
gccgttcactgacacgctctactttattgatgccgataatccgcaacagctggcatggatgaaaacgcggaagcc

SEQ ID NO: 868403 - DNA, 75 bp, synthetic construct
  source 1..75: mol_type = other DNA
tgcttactaccatccagacacgcctgaaggcaatggaggccagtggtgaaatggcccgggagcaggaagcattca

SEQ ID NO: 868404 - DNA, 75 bp, synthetic construct
  source 1..75: mol_type = other DNA
tcataaccaaaattttcgccaacccggtagtgccgcagattgacgattactacgaacctttcacctttgactacg

SEQ ID NO: 868405 - DNA, 75 bp, synthetic construct
  source 1..75: mol_type = other DNA
acacaacgtgattgacgccgcccagcgttcgccggtttacaaaatggcaatggactggaaactggcgctgccgct

SEQ ID NO: 868406 - DNA, 75 bp, synthetic construct
  source 1..75: mol_type = other DNA
cgccccgcataacgtgatccataaaggggaaaagtttcacgttaccccggctcaggtcaatctcctggacgcgca

SEQ ID NO: 868407 - DNA, 75 bp, synthetic construct
  source 1..75: mol_type = other DNA
ttcagctatgcaggagacaagaatcgccagctgacccgttacagcgatacccgctggcatgaagattccgttcgt

SEQ ID NO: 868408 - DNA, 75 bp, synthetic construct
  source 1..75: mol_type = other DNA
ccctctccggcggcccttcataaaatgaagatccggcaggaacgtgaggacctgcaaaaacgtaatcgagctgag

SEQ ID NO: 868409 - DNA, 75 bp, synthetic construct
  source 1..75: mol_type = other DNA
cagaaacctgcgtgggtcgcatccggtatctgggcgtgctgctttacgacgccgaccgcattgaggaagcggcaa

SEQ ID NO: 868410 - DNA, 75 bp, synthetic construct
  source 1..75: mol_type = other DNA
gcccctccacgcttacggcgttgctgggcgcagaggcagaaaacatcgatctcttcgaccgtatgcaactggaac

SEQ ID NO: 868411 - DNA, 75 bp, synthetic construct
  source 1..75: mol_type = other DNA
gccactagcggacgcatcactctggaagtggttgaagatgagataaaccgtctgcgctataactggcaggagagc

SEQ ID NO: 868412 - DNA, 75 bp, synthetic construct
  source 1..75: mol_type = other DNA
aaaccttttacccgtttggcagcgatcgccaggtgagtagcgattttcagcttatcgccggaacggtgcgcgatt

SEQ ID NO: 868413 - DNA, 75 bp, synthetic construct
  source 1..75: mol_type = other DNA
ttcccgtcagttcgatggctgacatggttggcgcggcgggtgccgcattatctcccctggcggcgttactccatc

SEQ ID NO: 868414 - DNA, 75 bp, synthetic construct
  source 1..75: mol_type = other DNA
tttcccccacaacatcagtgcgaacgtgcttaatgctcgctacggctctctcatgttgccggtgattccgttgtt

SEQ ID NO: 868415 - DNA, 75 bp, synthetic construct
  source 1..75: mol_type = other DNA
tggtgtcactatcagtaatcctgtatttactgaagatgccattaacaaaagaaaacacgaacgggagttattaaa

SEQ ID NO: 868416 - DNA, 75 bp, synthetic construct
  source 1..75: mol_type = other DNA
tattgaacctaacctggattatgaagtggagcgccacgcctcactcaccggcgacagcgtgcgttttaacaccga

SEQ ID NO: 868417 - DNA, 75 bp, synthetic construct
  source 1..75: mol_type = other DNA
atcaatctctggaccttcaccctgccggggctacgccagcgccaggaagatattgaacctaacctggattatgaa

SEQ ID NO: 868418 - DNA, 75 bp, synthetic construct
  source 1..75: mol_type = other DNA
ggaacggtgcgcgatttgcgccagctggttgccgaaggcaaatttcgcgaagatctgtacgcgcggatcaatctc

SEQ ID NO: 868419 - DNA, 75 bp, synthetic construct
  source 1..75: mol_type = other DNA
cgacgcattttcgaattaaaacaggcgcgacatcagtttagcggcgcgtttgtggaagtgaactgcgccaccttg

SEQ ID NO: 868420 - DNA, 75 bp, synthetic construct
  source 1..75: mol_type = other DNA
cgacgcatcttcgagttaaaacaggcgcggcatcagtttagcggcgcgtttgtggaggtgaactgtgccactctg

SEQ ID NO: 868421 - DNA, 75 bp, synthetic construct
  source 1..75: mol_type = other DNA
ggcagagccagcgttaatgacgcggatcggctacgcaaatacctggcgcgttttggtctgacgtgggaatcggta

SEQ ID NO: 868422 - DNA, 75 bp, synthetic construct
  source 1..75: mol_type = other DNA
aattacacacaaagggcagtggatgcattttatttattccggacggataaactatgtgctgatatatcgaaagat

SEQ ID NO: 868423 - DNA, 75 bp, synthetic construct
  source 1..75: mol_type = other DNA
attgttcgcagaaggctttttgctgatggggtcgttcgtcacgctgtttaattacatcggctatcggttgatgct

SEQ ID NO: 868424 - DNA, 75 bp, synthetic construct
  source 1..75: mol_type = other DNA
gtgagccgtactacaactgttgatggcgctccggcaagcgacactgacaagcaaagcatttctcagccaaatcaa

SEQ ID NO: 868425 - DNA, 75 bp, synthetic construct
  source 1..75: mol_type = other DNA
acgtaatgagaaacttttccggtagaggaagagttgatgaagtcctcctcgaaatgcaaggtggcggagaaacta

SEQ ID NO: 868426 - DNA, 75 bp, synthetic construct
  source 1..75: mol_type = other DNA
gtgcgtcgtgcgtatggacgtatgcaaagtgtagccagtcgggtaattggcgcgattatcagcgtattcgcgcta

SEQ ID NO: 868427 - DNA, 75 bp, synthetic construct
  source 1..75: mol_type = other DNA
atggatcctttgcacgccgtttacctgaccgtaggactgttcgtgattactttttttaatccgggagccaatctc

SEQ ID NO: 868428 - DNA, 75 bp, synthetic construct
  source 1..75: mol_type = other DNA
catgaacagtaagcaatggcccggtaaagccgctattggtcgtctgaaaggagacgaactggcgcaatataattt

SEQ ID NO: 868429 - DNA, 75 bp, synthetic construct
  source 1..75: mol_type = other DNA
ttattagtcgccagcatgtataaaaagatcgttaatttacgcattcctgaatcgttaggtttttatagcggccca

SEQ ID NO: 868430 - DNA, 75 bp, synthetic construct
  source 1..75: mol_type = other DNA
acagagacaagttaatgattggcgcggttatgtcactgctcaatggcgtaccagaagctattcaggaagcagacg

SEQ ID NO: 868431 - DNA, 75 bp, synthetic construct
  source 1..75: mol_type = other DNA
cactgtcccttgcgagccctgcttcccgaccaaaagcaactttcaccgcagcattcatacaaatgcttttttcaa

SEQ ID NO: 868432 - DNA, 75 bp, synthetic construct
  source 1..75: mol_type = other DNA
agcccataactggacattatgcattttagctttcaaggaagatacatcggatgaaccacgacctggcccgattcc

SEQ ID NO: 868433 - DNA, 75 bp, synthetic construct
  source 1..75: mol_type = other DNA
gtatgtggtatgatgttagggctgggaagtggtttagccagcgatgatatgggaaaattcattccagtgttggct

SEQ ID NO: 868434 - DNA, 75 bp, synthetic construct
  source 1..75: mol_type = other DNA
atgaaacaaaagaaagcctggagtttttttcagagcctggggaaggcatttatgtatcccatcgctctgttaagt

SEQ ID NO: 868435 - DNA, 75 bp, synthetic construct
  source 1..75: mol_type = other DNA
tattacagaccatgagcgtacaggaatatgaagatatccgggctgccggaagtgatgaacgccgtgagctgacac

SEQ ID NO: 868436 - DNA, 75 bp, synthetic construct
  source 1..75: mol_type = other DNA
gcgaatctggcacgagtgatggcatcagcaaaaaacgccgtcgaggaagatgtgtatagcaaaatcctgatgatg

SEQ ID NO: 868437 - DNA, 75 bp, synthetic construct
  source 1..75: mol_type = other DNA
gcacctctaacgatttcaatacaccaggtgtcaaagagaactgcattttcctcgataacccgcaccaggcgcgtc

SEQ ID NO: 868438 - DNA, 75 bp, synthetic construct
  source 1..75: mol_type = other DNA
cacggcatcagtttagcggcgcatttgtagaaatgaactgcgccactctgcgtggcgataccgccatgtcgacgc

SEQ ID NO: 868439 - DNA, 75 bp, synthetic construct
  source 1..75: mol_type = other DNA
accggatgacaaactgcagttaattgtcgcaattgccgatccaaccgcgtggattgccgaaggcagcaagctgga

SEQ ID NO: 868440 - DNA, 75 bp, synthetic construct
  source 1..75: mol_type = other DNA
tgatggcatcagcaaaaaatgccgtcgaggaagatgtgtatagcaaaatcctgatgatgaatgaggggcatcgat

SEQ ID NO: 868441 - DNA, 75 bp, synthetic construct
  source 1..75: mol_type = other DNA
cagcaaaaaacgccgtcgaggaagatgtgtatagcaaaatcctgatgatgaatgaggggcatcggttggttaagt

SEQ ID NO: 868442 - DNA, 75 bp, synthetic construct
  source 1..75: mol_type = other DNA
gtgacatgttcgaacaggcgaagaaagcggcaccgtgcatcatctttatcgatgaaatcgacgccgtaggccgcc

SEQ ID NO: 868443 - DNA, 75 bp, synthetic construct
  source 1..75: mol_type = other DNA
atgcagggcggcggtggcaaaggtgccatgtcgtttggtaagagcaaagcgcgcatgctgactgaagatcagatc

SEQ ID NO: 868444 - DNA, 75 bp, synthetic construct
  source 1..75: mol_type = other DNA
aagcaaaagaagaagttgccgaactggttgagtatctccgtgagccgagccgtttccagaagctgggcggtaaga

SEQ ID NO: 868445 - DNA, 75 bp, synthetic construct
  source 1..75: mol_type = other DNA
ggcgcgggaatctcgtgaaggtttattacgcagcgccaacggcggaatgttgtttcttgatgagattggcgaact

SEQ ID NO: 868446 - DNA, 75 bp, synthetic construct
  source 1..75: mol_type = other DNA
gaaaaagtagcgattaaatcccgcgcgccgatcctgcttaacggcccaaccggtgcgggaaagtcatttctggcg

SEQ ID NO: 868447 - DNA, 75 bp, synthetic construct
  source 1..75: mol_type = other DNA
ttgcgctggatatggcggccacactagccgtgccgttcaccggtgacgggcatgatgccgcgcagatcctccgga

SEQ ID NO: 868448 - DNA, 75 bp, synthetic construct
  source 1..75: mol_type = other DNA
ctcgtttcgtgggtaaagttcagggcaaaaatgaccgtctggccatcgttcctgatcatccactcttaaaagacg

SEQ ID NO: 868449 - DNA, 75 bp, synthetic construct
  source 1..75: mol_type = other DNA
ctataacgacatggtgtcgagatatgggagaaacgctggatgccgttaacaaacggttacaacgtggagtatgga

SEQ ID NO: 868450 - DNA, 75 bp, synthetic construct
  source 1..75: mol_type = other DNA
caacctactgccgcgacgcgggagaaacggttgatgccgttaacaaacggatacaaagaggaatatggaaagaag

SEQ ID NO: 868451 - DNA, 75 bp, synthetic construct
  source 1..75: mol_type = other DNA
ctccaatatgcgaggcgataaaagaaacaaattcgaaatcaaaacaggctgtcttcaatatgtatttatcgaaca

SEQ ID NO: 868452 - DNA, 75 bp, synthetic construct
  source 1..75: mol_type = other DNA
atgaaaactgaactgaccctgaatgccctgcagtccatgagcgcacaggaatacgaagacagtcgtgctgcggga

SEQ ID NO: 868453 - DNA, 75 bp, synthetic construct
  source 1..75: mol_type = other DNA
taaacaagcattcatagctgcaggcattaatggtattgatgaaccaaaagaaagtgagatcattttagttaaaac

SEQ ID NO: 868454 - DNA, 75 bp, synthetic construct
  source 1..75: mol_type = other DNA
cggtgaaaaaggtgattttgagaaagctatcaatgcgaagatttcacattcaaagctgtgctactccttgcagga

SEQ ID NO: 868455 - DNA, 75 bp, synthetic construct
  source 1..75: mol_type = other DNA
gagatcaccacccaaatggcagagcgtcgtcgtctcaaccggatggcagaacgtgatgtcggggactggttgtac

SEQ ID NO: 868456 - DNA, 75 bp, synthetic construct
  source 1..75: mol_type = other DNA
ttacaagataaccgacgttatcgacgtcaccatcgcagaagtacgcatggaaacccgtagtattattgcgcgccc

SEQ ID NO: 868457 - DNA, 75 bp, synthetic construct
  source 1..75: mol_type = other DNA
tcccgatgctgccgcgcgagctttctgacgatctctgctcactgcgtgccaatgaagtgcgcccggtactggcat

SEQ ID NO: 868458 - DNA, 75 bp, synthetic construct
  source 1..75: mol_type = other DNA
ccaaaagaacaggcaaaaaccatagatgtaattgatcagaatgaagctaaaggcgatgaaccgagaggggggtaa

SEQ ID NO: 868459 - DNA, 75 bp, synthetic construct
  source 1..75: mol_type = other DNA
gctcgcgtgctgcgcgataagctcggtttcggtatctataacgtgcatatgggctttgatccggcaaatgccgac

SEQ ID NO: 868460 - DNA, 75 bp, synthetic construct
  source 1..75: mol_type = other DNA
cggaacaaatccgcctgttagcgcaaatttgccagcgtcgcggcgaatggcgtaataaccatgcgttggtgttta

SEQ ID NO: 868461 - DNA, 75 bp, synthetic construct
  source 1..75: mol_type = other DNA
gtggtattccctgtatggtcaaacactcacagaccccaagcgcctcatggcgaaacttagtattatctgtaatgg

SEQ ID NO: 868462 - DNA, 75 bp, synthetic construct
  source 1..75: mol_type = other DNA
gctggaaggcatgactatcgatcaggcgatggccatctgttcggcgaaccctgctatgtattcacgcaaacgccg

SEQ ID NO: 868463 - DNA, 75 bp, synthetic construct
  source 1..75: mol_type = other DNA
gatgtaccagcactcaacggcgtttgccgacacgctggatcgctgtttttccgcctgtagcgaaatgctcacgcc

SEQ ID NO: 868464 - DNA, 75 bp, synthetic construct
  source 1..75: mol_type = other DNA
tccgccatcggattttgcccgcgacgtggccgggttatttcagcgtctgcgcgcaccgttctcgtcggggaaaat

SEQ ID NO: 868465 - DNA, 75 bp, synthetic construct
  source 1..75: mol_type = other DNA
aagctctagtctgctgacggttgcaaaaatatgtctggccaccggcgcgagatggagtgaagccgaaaacctgca

SEQ ID NO: 868466 - DNA, 75 bp, synthetic construct
  source 1..75: mol_type = other DNA
ctgggccactggtcagcccccaacccgcttgctgggctgccaacatttaaaattgctgagagtgaattagcgttc

SEQ ID NO: 868467 - DNA, 75 bp, synthetic construct
  source 1..75: mol_type = other DNA
ggtttaatgcccgctggcaggaggcctggcgtctgctctcacagcgtcatggcgacgctctgcctgtggaaccgc

SEQ ID NO: 868468 - DNA, 75 bp, synthetic construct
  source 1..75: mol_type = other DNA
ctgcttcgatgccgctctgtttggctattctcgacaggaagcggaatcaatggacccgcagcagcgtctgttttt

SEQ ID NO: 868469 - DNA, 75 bp, synthetic construct
  source 1..75: mol_type = other DNA
atggagagcgacggcgagttgatgtttagctggtactgcatggacaacgtgctggaacccggcgctgccgaggcg

SEQ ID NO: 868470 - DNA, 75 bp, synthetic construct
  source 1..75: mol_type = other DNA
ttcttgcggcgggcgccgcacaacgcctgtacgccaaaggcgagcaggttcggatggtgttaatcgatcccgtgt

SEQ ID NO: 868471 - DNA, 75 bp, synthetic construct
  source 1..75: mol_type = other DNA
tgtcttccacgcttcagacggcgatatcagcgcctggctgccgctcgctagcgcgttgaacaggcgcgttttcgg

SEQ ID NO: 868472 - DNA, 75 bp, synthetic construct
  source 1..75: mol_type = other DNA
ctgaactctggcaatcgctgctgtctcgccccgtggcaaggcatcacgactttttcgaactgggcggcgacagcc

SEQ ID NO: 868473 - DNA, 75 bp, synthetic construct
  source 1..75: mol_type = other DNA
cttgctgctgatgaaatcaaacgcctgcttgacgcttgtgctgaatctcaaagtcccagtctgctaatgattgcc

SEQ ID NO: 868474 - DNA, 75 bp, synthetic construct
  source 1..75: mol_type = other DNA
ccgacagtgaaagcgaaggtggcgcgggcggtttcgatggcgctgaagaactggatccgttgttcgatcaggcgg

SEQ ID NO: 868475 - DNA, 75 bp, synthetic construct
  source 1..75: mol_type = other DNA
aattctggcactggtggtaaaaatatgtctaagtacaggcgcacgttggcgagaagcaatcaatcttacccgctc

SEQ ID NO: 868476 - DNA, 75 bp, synthetic construct
  source 1..75: mol_type = other DNA
cgtaagcagtttgcaactaagggtgaagcattggcttttgagcgtcacacgatggaagaaaccgaagcaaaaccc

SEQ ID NO: 868477 - DNA, 75 bp, synthetic construct
  source 1..75: mol_type = other DNA
gttgccggtacgtgtccatggtgcttttgttcgcgatcaggaagttcatgccgtggtgcaggactggaaagcgcg

SEQ ID NO: 868478 - DNA, 75 bp, synthetic construct
  source 1..75: mol_type = other DNA
cctgatgatgacggtaggtaaaaaagtggaagagcttatagcacgtctggcgcaaaaagcccgtgccgcgggtat

SEQ ID NO: 868479 - DNA, 75 bp, synthetic construct
  source 1..75: mol_type = other DNA
atctggcgggttataacgaaaaaattgctgaagccgatcgcatgatgcgtccgattccagacccgtactggaagc

SEQ ID NO: 868480 - DNA, 75 bp, synthetic construct
  source 1..75: mol_type = other DNA
atctcgagcaaagttatttaagtggtgcctttagtgaattgattcgcttgggcgaatggctcttgccaaaccctc

SEQ ID NO: 868481 - DNA, 75 bp, synthetic construct
  source 1..75: mol_type = other DNA
aatcgcagaaggtgaactggcgttcctgacaccggaagaaattaaacgcctgctggatgcctgcgctgattctca

SEQ ID NO: 868482 - DNA, 75 bp, synthetic construct
  source 1..75: mol_type = other DNA
cgcccatttttctccagaccatctggaagatgcagtaacgaaaaaccctttgaactttatatacttgtcgaataa

SEQ ID NO: 868483 - DNA, 75 bp, synthetic construct
  source 1..75: mol_type = other DNA
atgacagtacgaaaactcaccacagggaaatggctttgcgaatgttaccccgccggccgaagtgggcgtcgtgtg

SEQ ID NO: 868484 - DNA, 75 bp, synthetic construct
  source 1..75: mol_type = other DNA
gtgaagccgtaaatcttacccgctcgcaggtgaccaaataccgaattacctttgtaagaacgaaggggaagaaaa

SEQ ID NO: 868485 - DNA, 75 bp, synthetic construct
  source 1..75: mol_type = other DNA
ttacaaaaaattctcggacaccacgatataaaaatgactatgcgttacgcacatctggaaacggcgctccgtttc

SEQ ID NO: 868486 - DNA, 75 bp, synthetic construct
  source 1..75: mol_type = other DNA
gcctgcggctacctggacgggctggcccagcagttttccacccttgatgcgccgaaaacgctctctgtcgcctgg

SEQ ID NO: 868487 - DNA, 75 bp, synthetic construct
  source 1..75: mol_type = other DNA
gggtggctatcgctgctctgctctcaggatgttgttttagtgttatcgctgcaccgcctgcgccgtctcccgttt

SEQ ID NO: 868488 - DNA, 75 bp, synthetic construct
  source 1..75: mol_type = other DNA
tcagaaagtggcgctgaaagaggcgatgggcagtacacaaagcattatggttgggccggacggtgagttgtacgg

SEQ ID NO: 868489 - DNA, 75 bp, synthetic construct
  source 1..75: mol_type = other DNA
acagcaaaaaatcactcacttcgcatctggcttccggcacaccgggtacggtagcaggtttctcgctggcgctgg

SEQ ID NO: 868490 - DNA, 75 bp, synthetic construct
  source 1..75: mol_type = other DNA
aatcgctgagggggaactggcgttcctgacctcggaagaaattaaacgtctgctagatgcctgcgctgattctca

SEQ ID NO: 868491 - DNA, 75 bp, synthetic construct
  source 1..75: mol_type = other DNA
agtaaagcgggccggtattgagcttccagagggtcaatgcacccatgtattacgtcatacatttgccagccattt

SEQ ID NO: 868492 - DNA, 75 bp, synthetic construct
  source 1..75: mol_type = other DNA
catatggtgtggaagaagatgttttccatcctgtacgtgcgaaacaggggatggtggcgtctgtggatgccactg

SEQ ID NO: 868493 - DNA, 75 bp, synthetic construct
  source 1..75: mol_type = other DNA
actgatcccacgcggtcctggtaacccgatggaacagccgaaagatgccaaaggcacgggtacggaatccggcat

SEQ ID NO: 868494 - DNA, 75 bp, synthetic construct
  source 1..75: mol_type = other DNA
tcagtcaccgataacttctcaacccgcgaaacgtctggcgtgatccgtggttttgatgtcaacaccggggagctg

SEQ ID NO: 868495 - DNA, 75 bp, synthetic construct
  source 1..75: mol_type = other DNA
tagccaggcgttttctttaccgaccgtgcgtcgcgcatacgggcgtatgcagcatgtcgccagtcggattattgg

SEQ ID NO: 868496 - DNA, 75 bp, synthetic construct
  source 1..75: mol_type = other DNA
ggtggtgccgcagattgatgattactacgaacctttcaccttcgactacgaacatttgcatagcgcaccagaagg

SEQ ID NO: 868497 - DNA, 75 bp, synthetic construct
  source 1..75: mol_type = other DNA
accctttacctgtgtaccgcgcaccaacgtctgtttgcgctggatgccgccagcggcaaagagaaatggcattac

SEQ ID NO: 868498 - DNA, 75 bp, synthetic construct
  source 1..75: mol_type = other DNA
gtcgcgctgttgattagcggtggtatcctcacctgggccggatttaacgatccacaggaaatcaacggcacctta

SEQ ID NO: 868499 - DNA, 75 bp, synthetic construct
  source 1..75: mol_type = other DNA
agtaaagcgagctggcatcgagctgccagagggccaatgcactcacgtgctacgtcatacattcgccagtcattt

SEQ ID NO: 868500 - DNA, 75 bp, synthetic construct
  source 1..75: mol_type = other DNA
ggtacaacgctgtaccggctatgccattgagaacggcgtggacgccaagaccatcatgcgccgtggacgtctgct

SEQ ID NO: 868501 - DNA, 75 bp, synthetic construct
  source 1..75: mol_type = other DNA
cgacggattatgccggggcgctgagagagaatgcggatgccagctctctggccttcacagccctgcacgcgcgcc

SEQ ID NO: 868502 - DNA, 75 bp, synthetic construct
  source 1..75: mol_type = other DNA
tcgctggttgccgtgcatctggcctgtgaaagcctgcgcgcaggcgaatccgatatggcggttgccggcggcgtg

SEQ ID NO: 868503 - DNA, 75 bp, synthetic construct
  source 1..75: mol_type = other DNA
ggcgccattaaaccgtgaaaccgacgaggcgctcagcgcctgggctagtgagaaatcgggggcgctggtttacag

SEQ ID NO: 868504 - DNA, 75 bp, synthetic construct
  source 1..75: mol_type = other DNA
ttgatactgaacgttactggaaagagcgcgtctccccggcctgcgagcctgccgacgcagcgctgtctgccgggc

SEQ ID NO: 868505 - DNA, 75 bp, synthetic construct
  source 1..75: mol_type = other DNA
taacaaagaggcgagcgatgtcctcaatcaggccctgctccagctttacgctgccggcgtcgccctaccgtgggc

SEQ ID NO: 868506 - DNA, 75 bp, synthetic construct
  source 1..75: mol_type = other DNA
cccggtcaacgcccgactaaacgcggattaatttacgccgcgacgccagccagcgattttgtctgtggcacgcaa

SEQ ID NO: 868507 - DNA, 75 bp, synthetic construct
  source 1..75: mol_type = other DNA
tcggctccattgctaaatcgggtaaaagcgcaattgttgaagtgctgtcgcccggtcaacgcccgactaaacgcg

SEQ ID NO: 868508 - DNA, 75 bp, synthetic construct
  source 1..75: mol_type = other DNA
gaatttaccgccatgagcgccagcgacaaggccttgcgggtacatgagcactacggcgaagcgctggctgtggat

SEQ ID NO: 868509 - DNA, 75 bp, synthetic construct
  source 1..75: mol_type = other DNA
gaagtgcgtgacgcgatacatctgctgacaccacgcgcagtgaacgaagaggtcggcaaacggctgctggaggag

SEQ ID NO: 868510 - DNA, 75 bp, synthetic construct
  source 1..75: mol_type = other DNA
tcgtaccattcacaatatttcgctgaaccctaactttggcggcgaagtaatggtgattggcctgggttgtgaaaa

SEQ ID NO: 868511 - DNA, 75 bp, synthetic construct
  source 1..75: mol_type = other DNA
ttgtcagtttgcaggatgaaaagcatgtcggttttcagtccatggtcgaggatattttgcaggtcgccgaacgcc

SEQ ID NO: 868512 - DNA, 75 bp, synthetic construct
  source 1..75: mol_type = other DNA
ggtggaagcgttccgctacaatgaggaaggtgttaaagcactacaacaccttattcatgggagtaatgttgcata

SEQ ID NO: 868513 - DNA, 75 bp, synthetic construct
  source 1..75: mol_type = other DNA
ttcaggacgaactcccgaaatacctgctggcgccggaagtcagcgccctgctccactacgtgccggatcttcacc

SEQ ID NO: 868514 - DNA, 75 bp, synthetic construct
  source 1..75: mol_type = other DNA
gctgcaagccgcgtgctggtaagctccacgaaatccatgaccggtcacctgttaggtgctgctggtgcagtagag

SEQ ID NO: 868515 - DNA, 75 bp, synthetic construct
  source 1..75: mol_type = other DNA
tgaccgtgatttgctgtgcggatatcaataccgccaaaggcgcgctggacgtggcaaaagagtttaacggtgacg

SEQ ID NO: 868516 - DNA, 75 bp, synthetic construct
  source 1..75: mol_type = other DNA
agctgcagatgatggtagccacgctgaaaatcccgctggagcgtcgtaacagacgtaccggcagaacggaaaagg

SEQ ID NO: 868517 - DNA, 75 bp, synthetic construct
  source 1..75: mol_type = other DNA
gtgtacacgaaggtgtttgcgctggatgtggctgcacggcaccgggtgcagttttcgatgcctgagtccgatgct

SEQ ID NO: 868518 - DNA, 75 bp, synthetic construct
  source 1..75: mol_type = other DNA
gttcgtgcagctggccacactcaaacaacgggccgagaaagccgccagaacggccggccgtgctccggccggtag

SEQ ID NO: 868519 - DNA, 75 bp, synthetic construct
  source 1..75: mol_type = other DNA
ttcaccgcaagatgttgcttgcgacgctgtggaacaccggtgcgcgtattaatgaagcgctggcgctaactcgtg

SEQ ID NO: 868520 - DNA, 75 bp, synthetic construct
  source 1..75: mol_type = other DNA
atgacgcatctggcggtgaaaaaaaccgccagtgtgctgctggcggcctatgtcacacccttactaccacataag

SEQ ID NO: 868521 - DNA, 75 bp, synthetic construct
  source 1..75: mol_type = other DNA
cggcaggcgataaggcggaagcgcaggccgtgaaaactatcttcggtgaagctgcaagccgcgtgctggtaagct

SEQ ID NO: 868522 - DNA, 75 bp, synthetic construct
  source 1..75: mol_type = other DNA
gatcgtgatggctttgtactgggtgacggtgccggtatgctggtactcgaagagtacgaacacgcgaaaaaacgc

SEQ ID NO: 868523 - DNA, 75 bp, synthetic construct
  source 1..75: mol_type = other DNA
gatctgcgccgcaagatgctgctggccacactgtggaacaccggagcacgcattaatgaagcactggcgctgacg

SEQ ID NO: 868524 - DNA, 75 bp, synthetic construct
  source 1..75: mol_type = other DNA
agcagccggtgtaggctggggcgaatcagatatcgccgcgatcaaacgcctttctgatatgggcttcaaagtaac

SEQ ID NO: 868525 - DNA, 75 bp, synthetic construct
  source 1..75: mol_type = other DNA
ctccgtcatctcccggaacattgcttccggtggccatcgattaccctgccgccctcgccctgcgccagatggcgc

SEQ ID NO: 868526 - DNA, 75 bp, synthetic construct
  source 1..75: mol_type = other DNA
atcagctcaacggaggtctacacgaaggtatttgcgctggatgtggctgcacggcaccgtgaaccgccccggttt

SEQ ID NO: 868527 - DNA, 75 bp, synthetic construct
  source 1..75: mol_type = other DNA
atgaagcactggcgctgacgcggggggatttttcgcttgcgcctccgtatccgtttgtgcagcttgcgaccctga

SEQ ID NO: 868528 - DNA, 75 bp, synthetic construct
  source 1..75: mol_type = other DNA
ctcgcagtccgccatcatggtagatgccaaaggcgagcggataatcattaactacccaagcccggatttacttcc

SEQ ID NO: 868529 - DNA, 75 bp, synthetic construct
  source 1..75: mol_type = other DNA
tcgatgtcgcagcgcgccatcgtgtgcagttcgccatgcccgaagctgaagctgttgcgttgataaaaaagttaa

SEQ ID NO: 868530 - DNA, 75 bp, synthetic construct
  source 1..75: mol_type = other DNA
aattccgctggaaagacgaaacaagcacaccggcagaattgagaaggcgcgtatctgggagatcacagaccgtac

SEQ ID NO: 868531 - DNA, 75 bp, synthetic construct
  source 1..75: mol_type = other DNA
tactggcagacgccaaaattgccgatgcgggcaaaattctttctcgtatgtgcttcgaagccaacgctgactggg

SEQ ID NO: 868532 - DNA, 75 bp, synthetic construct
  source 1..75: mol_type = other DNA
cagcatccgtgacgctgcgtctccggttgaagccgcgcgtcagttcaaacgttccatcgccgaactgtggggcta

SEQ ID NO: 868533 - DNA, 75 bp, synthetic construct
  source 1..75: mol_type = other DNA
gcggacattaccgcgatcaaacgtctttccgatatgggcttcaaagtgaccgtcaccggtggcctggcgctggaa

SEQ ID NO: 868534 - DNA, 75 bp, synthetic construct
  source 1..75: mol_type = other DNA
gccagtgaccatcgactatcccgcagcactggctttgcggcagatggcgctcgttcaggacgaactaccgaaata

SEQ ID NO: 868535 - DNA, 75 bp, synthetic construct
  source 1..75: mol_type = other DNA
tctttccgatatgggcttcaaagtcaccgtcaccggtggcctggcgctggaagatctgccgctgttcaaaggtat

SEQ ID NO: 868536 - DNA, 75 bp, synthetic construct
  source 1..75: mol_type = other DNA
cgctggacaaccaaacgatgtctcacgcgtatgaaaccacacgtctgatcgccgaagaagtcgatattatcgaag

SEQ ID NO: 868537 - DNA, 75 bp, synthetic construct
  source 1..75: mol_type = other DNA
gtgctcagggccacgctttgcctgaaaaacacaatagcggtgcttttgcgtatgggttgtcagaggacggtttcg

SEQ ID NO: 868538 - DNA, 75 bp, synthetic construct
  source 1..75: mol_type = other DNA
ctggggatcccgttagatgccgggagctggcaggcgatttgtgacgcggcgcggcaaattggtgtaccagaagcg

SEQ ID NO: 868539 - DNA, 75 bp, synthetic construct
  source 1..75: mol_type = other DNA
ggcggcgtacgaggccatgacacttggcattgaaaaagcgcgtcagcacggaattgctgctgtggcactgcgtaa

SEQ ID NO: 868540 - DNA, 75 bp, synthetic construct
  source 1..75: mol_type = other DNA
cctggagtcaggggcacctgcaaattaaccatcatgccaaaatcgttaaagaggcgggggcggcggtcacgctcg

SEQ ID NO: 868541 - DNA, 75 bp, synthetic construct
  source 1..75: mol_type = other DNA
aaagttattacaatagcaatggtaatgtctatgaatctctaagtttttctaatggacttatcaacggcgagtata

SEQ ID NO: 868542 - DNA, 75 bp, synthetic construct
  source 1..75: mol_type = other DNA
aggcgatgtttttcacggcgcactcgcggtagcgttggcagaaaaaatgccaacaaaaaagctattcgttttgcc

SEQ ID NO: 868543 - DNA, 75 bp, synthetic construct
  source 1..75: mol_type = other DNA
atggcgatcgcgcatttggtcaggtcgcggcacacgaagcgatggcgctggggattgagaaagcgcatcagcacg

SEQ ID NO: 868544 - DNA, 75 bp, synthetic construct
  source 1..75: mol_type = other DNA
gtattgccgccgtggcgctacataactcgcatcatatcggccgtatcggttactgggcagaacagtgcgcagcgg

SEQ ID NO: 868545 - DNA, 75 bp, synthetic construct
  source 1..75: mol_type = other DNA
gggcgccagctcaggcggctaaacaggaagcggctccggcagcaggcccttgcatcagcggctggcgtgaaagaa

SEQ ID NO: 868546 - DNA, 75 bp, synthetic construct
  source 1..75: mol_type = other DNA
gcgcgccagctcaggcggctaaacagtaagcggctccggcagcaggcccctgcatcagcggctggcgtgaaagaa

SEQ ID NO: 868547 - DNA, 75 bp, synthetic construct
  source 1..75: mol_type = other DNA
gctggcaggcaatttgtgacgccgcgcggcagattggtatatcagaagagacgttgcaggctttcagccagcagt

SEQ ID NO: 868548 - DNA, 75 bp, synthetic construct
  source 1..75: mol_type = other DNA
gctggcaggccatttgtgatgcggcgcggcagattggtatgccggaagagacgttgcaggctttttgtcagcagc

SEQ ID NO: 868549 - DNA, 75 bp, synthetic construct
  source 1..75: mol_type = other DNA
tactgggcagaacagtgcgcagcggcggggtttgtctctatccactttgttagcgtggtcggtattccaatggtc

SEQ ID NO: 868550 - DNA, 75 bp, synthetic construct
  source 1..75: mol_type = other DNA
ttatgtggtgctgaatatacaaagaaaatgtctactgtatggctcgatgaaactttaaaaccaactgctaaacgt

SEQ ID NO: 868551 - DNA, 75 bp, synthetic construct
  source 1..75: mol_type = other DNA
tcctgggtggatgccaaactggatcgtattgatgagttgatgcagaaactcggcctctcttatgacgatgacgaa

SEQ ID NO: 868552 - DNA, 75 bp, synthetic construct
  source 1..75: mol_type = other DNA
actcggcctctcttatgacgatgacgatgacgaagaagaggaagaagacgagaagcaagaagacatgatgcgtct

SEQ ID NO: 868553 - DNA, 75 bp, synthetic construct
  source 1..75: mol_type = other DNA
cgttcaaggtgctcaccatcaatattcacaaaggctttaccgcgtttaaccgacgcttcattttgccggaacttc

SEQ ID NO: 868554 - DNA, 75 bp, synthetic construct
  source 1..75: mol_type = other DNA
tatggattgtcagaggacggtttcggaaagctgactcgcgcaagaaatgcctgcgacatgctccagcttctcttt

SEQ ID NO: 868555 - DNA, 75 bp, synthetic construct
  source 1..75: mol_type = other DNA
atggcagatagtaacacctatcgtgcatttgcgttgttcgtccagggagaacgagttttaaattgcactgaatac

SEQ ID NO: 868556 - DNA, 75 bp, synthetic construct
  source 1..75: mol_type = other DNA
tcgaaaaacacgcgaggagctggatcaggaagctcgtgaccgcaagcgtcagaaaaaacgtcgtggtcatgcgcc

SEQ ID NO: 868557 - DNA, 75 bp, synthetic construct
  source 1..75: mol_type = other DNA
tcggcgcgtgggtcagttactttctggacggcgcgacaggtggaatcatcgtggtgcgcagacactgctgtttct

SEQ ID NO: 868558 - DNA, 75 bp, synthetic construct
  source 1..75: mol_type = other DNA
ggaagaaacaatacaaggtaggaagcctcactgctgtggctgccggtgaagacgttgttctgaatcgccacggat

SEQ ID NO: 868559 - DNA, 75 bp, synthetic construct
  source 1..75: mol_type = other DNA
aactacctgctggaataccgccgccacggcattaatgtgcaggcgctctccgtgcagaatgagccggtggcggta

SEQ ID NO: 868560 - DNA, 75 bp, synthetic construct
  source 1..75: mol_type = other DNA
cgttcaaggtgctcaccatcaacattcacaaaggttttaccgcgtttaaccgacgcttcattttgccggaacttc

SEQ ID NO: 868561 - DNA, 75 bp, synthetic construct
  source 1..75: mol_type = other DNA
aggcgtgcgtgcggttcgtgacctgaaagcgctttacccgcacaaaatcgtactggcagacgccaaaattgccga

SEQ ID NO: 868562 - DNA, 75 bp, synthetic construct
  source 1..75: mol_type = other DNA
tactggcagacgccaaaattgccgatgcgggcaaaatcctctctcgtatgtgcttcgaagccaacgctgactggg

SEQ ID NO: 868563 - DNA, 75 bp, synthetic construct
  source 1..75: mol_type = other DNA
tcaaactttccgccaactggatggcggctgcaggtcatcctggcgaagatgcgggtctgtatgaagccgtaaaag

SEQ ID NO: 868564 - DNA, 75 bp, synthetic construct
  source 1..75: mol_type = other DNA
ccagcgttgatttgctgggacagggtcgtcaggccctgatcgacgctaacctgcgtcttggcctggcattggcag

SEQ ID NO: 868565 - DNA, 75 bp, synthetic construct
  source 1..75: mol_type = other DNA
gagatggagcgtcgttgccaggaagtgatcgaccgttgctggcagttgggtgatgccaacccaattctgtttatc

SEQ ID NO: 868566 - DNA, 75 bp, synthetic construct
  source 1..75: mol_type = other DNA
tcgctggtgatttctgcatttgcccgcgtggaagatgtacgtcacaccatcacgccgcagctttctaccgaagat

SEQ ID NO: 868567 - DNA, 75 bp, synthetic construct
  source 1..75: mol_type = other DNA
gagatggagcgtcgctgccaggaagtgatcgaccgttgctggcagcttggtgatgccaacccaatcctgtttatc

SEQ ID NO: 868568 - DNA, 75 bp, synthetic construct
  source 1..75: mol_type = other DNA
cggatatcgcctctctgggtgacgatcgcctggcggcgttgtttaacgaagaactgggtgcggtgattcaggttc

SEQ ID NO: 868569 - DNA, 75 bp, synthetic construct
  source 1..75: mol_type = other DNA
ttgggtcaggggcattacgtgcggcgctagcatcttatgctcattctccgcgttattaccgtgccttaatggctg

SEQ ID NO: 868570 - DNA, 75 bp, synthetic construct
  source 1..75: mol_type = other DNA
taaggcgattattgctggtggcgcacggtacaacctgaaggggcagccttgcggtgaggtgacaccggatgaaaa

SEQ ID NO: 868571 - DNA, 75 bp, synthetic construct
  source 1..75: mol_type = other DNA
cgcgcagcagaagcccacaggggcgacaccgtggcggcatatgaccaaacgccagcgcaaaaaccgcaggcgcgt

SEQ ID NO: 868572 - DNA, 75 bp, synthetic construct
  source 1..75: mol_type = other DNA
cgccgaagatgacccgcgatgtgcaaacgctgaaagcgaaaggcgacgcgctggcccgtgaagggatcaccatcg

SEQ ID NO: 868573 - DNA, 75 bp, synthetic construct
  source 1..75: mol_type = other DNA
tgcatctttctctgcacgatcgtcattttgataatcagccgattgatctaccgctggacgtactgcttggcaaaa

SEQ ID NO: 868574 - DNA, 75 bp, synthetic construct
  source 1..75: mol_type = other DNA
aggcgaaatctaacgacgccgatccgggcctgaatgtaaaactgtcgttcgatatcaacgaagatgtggcagcac

SEQ ID NO: 868575 - DNA, 75 bp, synthetic construct
  source 1..75: mol_type = other DNA
gctcatcatcagccaaccccggtcaccagcattgatttgctggggcagggccgtcaggcgctaatcgacgctaac

SEQ ID NO: 868576 - DNA, 75 bp, synthetic construct
  source 1..75: mol_type = other DNA
gagcaggataaaaccacatcggcgcataaagtgatacccggcaatcagaacgcacagcagaagcccacaggggcg

SEQ ID NO: 868577 - DNA, 75 bp, synthetic construct
  source 1..75: mol_type = other DNA
tactgcgtcaggtgattaacaagctgaacgaaattgattttaccagcgtcagcgaacgccacctgttcggggata

SEQ ID NO: 868578 - DNA, 75 bp, synthetic construct
  source 1..75: mol_type = other DNA
tgctttcacaaagcttggtcgtaacccgaacgacatcgagctgtatatgttcgctcaggcgaactccgagcactg

SEQ ID NO: 868579 - DNA, 75 bp, synthetic construct
  source 1..75: mol_type = other DNA
aagcaccgaagccgcttaaggtggggatattcgacgacctgatgcaggatatcgccgtcagggggctggcattcg

SEQ ID NO: 868580 - DNA, 75 bp, synthetic construct
  source 1..75: mol_type = other DNA
cagcgcaaaaatcgcaggcgcgttaaccgccttactgagttgtggcctgaattattcaaccgggaagcaccgaag

SEQ ID NO: 868581 - DNA, 75 bp, synthetic construct
  source 1..75: mol_type = other DNA
atgaaacaatcagtaaaaacgatggggcaaagcatgacaacgctgaccattaacagaaaacctaaaggcatttac

SEQ ID NO: 868582 - DNA, 75 bp, synthetic construct
  source 1..75: mol_type = other DNA
gcagctttctaccgaagataacgcactgctgctgattgatctgggcaaaggcaataacgcgctgggcgcaacggc

SEQ ID NO: 868583 - DNA, 75 bp, synthetic construct
  source 1..75: mol_type = other DNA
ttcctggtgaccattggtgaccgcagcgtaaccggcatggtggcgcgcgatcagatggtgggtccgtggcaggtg

SEQ ID NO: 868584 - DNA, 75 bp, synthetic construct
  source 1..75: mol_type = other DNA
aaccgggcatgagcccgctagaaatctggtgtaacgaatcccaggaacgctacgtgctggcggttgctgccgatc

SEQ ID NO: 868585 - DNA, 75 bp, synthetic construct
  source 1..75: mol_type = other DNA
ggaaatctggtgtaacgaatcccaggaacgctacgtgctggcggttgctgccgatcagttaccgctgtttgacga

SEQ ID NO: 868586 - DNA, 75 bp, synthetic construct
  source 1..75: mol_type = other DNA
gaaacgggccgctacgatttccatcaggaaccggcgcatattctgatgaaagttgaaacccacaaccacccgacg

SEQ ID NO: 868587 - DNA, 75 bp, synthetic construct
  source 1..75: mol_type = other DNA
aagatgaaattgactatctgcaggatgctttcacaaagcttggtcgtaacccgaacgacatcgaactgtatatgt

SEQ ID NO: 868588 - DNA, 75 bp, synthetic construct
  source 1..75: mol_type = other DNA
gccctgatagctggtggcgcacgttacgacctgaaaggccagccatgtggggaagtgacaccacaggaacagcag

SEQ ID NO: 868589 - DNA, 75 bp, synthetic construct
  source 1..75: mol_type = other DNA
gctgcagacgatggtggccacactgaaaatccccatggaacggcgtaataaacgaacaggcaggacagagaaagc

SEQ ID NO: 868590 - DNA, 75 bp, synthetic construct
  source 1..75: mol_type = other DNA
atgtcaggctccgttatacacagccagatgtcgatggttcatgatgaactgccaaaatacctgctcgcccctgaa

SEQ ID NO: 868591 - DNA, 75 bp, synthetic construct
  source 1..75: mol_type = other DNA
acaggtggaagcattccgctacaatgcggaaggtgttaaagcactacaacacctgattcatgggagtaatgttgc

SEQ ID NO: 868592 - DNA, 75 bp, synthetic construct
  source 1..75: mol_type = other DNA
gctggttccgctctccgactcctggtacgtcagtcagctgcagacgatggtggcaacactgaaaattcctctgga

SEQ ID NO: 868593 - DNA, 75 bp, synthetic construct
  source 1..75: mol_type = other DNA
gaggtctacacgaaggtgtttgcactggatgtcgcggcgcgccatcgtgtgcagttcgccatgccggaagccgat

SEQ ID NO: 868594 - DNA, 75 bp, synthetic construct
  source 1..75: mol_type = other DNA
gcaccgcaagatgctgctggccacactgtggaacaccggagcacgcattaatgaagcactggcgctgacgcgggg

SEQ ID NO: 868595 - DNA, 75 bp, synthetic construct
  source 1..75: mol_type = other DNA
gcacaaacgctcacaaatggtcatgtctatgttactcagggcagtgcaggctgtgactggctggagaatggcggg

SEQ ID NO: 868596 - DNA, 75 bp, synthetic construct
  source 1..75: mol_type = other DNA
actaccccagcccggacctgctgcctgacgcagagtggttggaggaaattgatttctctcagtgggacgttgtgc

SEQ ID NO: 868597 - DNA, 75 bp, synthetic construct
  source 1..75: mol_type = other DNA
ttaccgtgatggatcgcatctattacgtggaagggttgccgacggagagcggtaaatacgtggcgaaaaattata

SEQ ID NO: 868598 - DNA, 75 bp, synthetic construct
  source 1..75: mol_type = other DNA
gtggctgcacggcaccgggtgcagtttgcgatgccggagtctgatgcggttgcgatgctgaaacaattatcctga

SEQ ID NO: 868599 - DNA, 75 bp, synthetic construct
  source 1..75: mol_type = other DNA
gggccacaagtcagtcagctcgacagaggtgtacacgaaagtcttcgcgctcgatgtggcggcccgacatcgtgt

SEQ ID NO: 868600 - DNA, 75 bp, synthetic construct
  source 1..75: mol_type = other DNA
gggcgtgaaagagatggcgagtgccctaaaacaggcacaaacgctcacaaatggtcatgtctatgtgacccaggg

SEQ ID NO: 868601 - DNA, 75 bp, synthetic construct
  source 1..75: mol_type = other DNA
cagcgtaccgagaaagcggccaggacggcaggtcgtgcccccgcaggcagtcagatccatcgtctggttcccctt

SEQ ID NO: 868602 - DNA, 75 bp, synthetic construct
  source 1..75: mol_type = other DNA
tcctgttgccatcgattatccggctgcgctggcactccgccagatgtcgatggttcatgatgaactgccaaaata

SEQ ID NO: 868603 - DNA, 75 bp, synthetic construct
  source 1..75: mol_type = other DNA
cggaagtctacacgaaggtttttgcgctggatgtggctgcccggcaccgggtgcagtttgcgatgccggagtctg

SEQ ID NO: 868604 - DNA, 75 bp, synthetic construct
  source 1..75: mol_type = other DNA
gctggatgtagctgcacggcaccgggtgcagttttcgatgccggagtctgatgctgttgcgatgctgaaacaatt

SEQ ID NO: 868605 - DNA, 75 bp, synthetic construct
  source 1..75: mol_type = other DNA
gaacaaaaaacattatcagctgaaccccgcaggtcattttcaaatgagtttaaacttcaaatggttacactggct

SEQ ID NO: 868606 - DNA, 75 bp, synthetic construct
  source 1..75: mol_type = other DNA
taacctcctgttcaaatggctcaggctctggcagaacgaagggcgtgtttcgcggcgtcttccggtaacgacctc

SEQ ID NO: 868607 - DNA, 75 bp, synthetic construct
  source 1..75: mol_type = other DNA
ccgacggcgtgacgttctctgttccggttaccccacatactttccgccattcctacgcgatgcatatgctgtatg

SEQ ID NO: 868608 - DNA, 75 bp, synthetic construct
  source 1..75: mol_type = other DNA
atgcagcacctgccggcaccgatccaccatgcccgggatgctgctcagcttcctgttgccatcgattatccggca

SEQ ID NO: 868609 - DNA, 75 bp, synthetic construct
  source 1..75: mol_type = other DNA
ggatttttcgctcacgcctccgtatccgtttgtgcagcttgcgaccctgaaacaacggaccgaaaaagcagccag

SEQ ID NO: 868610 - DNA, 75 bp, synthetic construct
  source 1..75: mol_type = other DNA
gatggttcatgatgaactgccgaaatatctgctggctcccgaggtgagtgccctgcttcattatgtcccggatct

SEQ ID NO: 868611 - DNA, 75 bp, synthetic construct
  source 1..75: mol_type = other DNA
ctggttccgctctccgacacctggtacgtcagccagctgcagacgatggtggccacactgaaaatccccatggaa

SEQ ID NO: 868612 - DNA, 75 bp, synthetic construct
  source 1..75: mol_type = other DNA
tcggatccgttgtcacggataaaaccattgacagccagcgcctgcttgagatggtaaatcaggctcgtagacagt

SEQ ID NO: 868613 - DNA, 75 bp, synthetic construct
  source 1..75: mol_type = other DNA
cgctgaaggtgctgcagagcctgatggggcacaagtcgattagttcgacagaggtgtacacgaaggtgtttgcgc

SEQ ID NO: 868614 - DNA, 75 bp, synthetic construct
  source 1..75: mol_type = other DNA
acagtacaggacgtcatgctgggagcggtggaacgccgcttcggcaacgagcttccggcgtctccagtagagtag

SEQ ID NO: 868615 - DNA, 75 bp, synthetic construct
  source 1..75: mol_type = other DNA
acaatatcaccctgaaaatcgatcctgccatagtactggcaacccgcaagtatgtggatgacaaggcactggagc

SEQ ID NO: 868616 - DNA, 75 bp, synthetic construct
  source 1..75: mol_type = other DNA
aataataccacgcaacttgcgaccaccgcgtttgttcaggcggcactgacagcccttattaatggtgcgccagcc

SEQ ID NO: 868617 - DNA, 75 bp, synthetic construct
  source 1..75: mol_type = other DNA
ttcagccacaccaccaacaggctggctgaaatgcaacggtgcacctttttctgccgaagagtacccaaaactggc

SEQ ID NO: 868618 - DNA, 75 bp, synthetic construct
  source 1..75: mol_type = other DNA
tgctgtagtactggcaactcgcaagtatgtggatgataaggcactggagctgaaggtgtatgtggatgacctgat

SEQ ID NO: 868619 - DNA, 75 bp, synthetic construct
  source 1..75: mol_type = other DNA
cgtagacctgaccggtgttgatgaggtgacggtaacagttggggctggcggggctgcgatagactcaaataactc

SEQ ID NO: 868620 - DNA, 75 bp, synthetic construct
  source 1..75: mol_type = other DNA
taacgccgatcgcatcggtacgtcgtatcgtcaacatggtggcgctggccgtggttgaagcgcaaacccaaccgc

SEQ ID NO: 868621 - DNA, 75 bp, synthetic construct
  source 1..75: mol_type = other DNA
cgtcgccgcgccttgtcttgaaatcgaaaaagatccgttaaaagcctacaaatatacagcgcgcggtaacctggt

SEQ ID NO: 868622 - DNA, 75 bp, synthetic construct
  source 1..75: mol_type = other DNA
tggcggagatcaccttgatggcggcagaaactgtccgtcgtttcggtattgaaccgcgcgttgctttgttgtcgc

SEQ ID NO: 868623 - DNA, 75 bp, synthetic construct
  source 1..75: mol_type = other DNA
ctggtggtgaaggcggcggaaaagtaggagtcacaaacacaaacggcggtaacggaggcgtaccgaatattggcg

SEQ ID NO: 868624 - DNA, 75 bp, synthetic construct
  source 1..75: mol_type = other DNA
cctcataaacaatatgcaccaaaggcaagcccggccctgacgggaacgcctacagcgccgactgctacggctggt

SEQ ID NO: 868625 - DNA, 75 bp, synthetic construct
  source 1..75: mol_type = other DNA
aaaatggctcgggcaccaatgattctggcgctggcgaatccggaaccggaaattctaccgccgctggcgaaagaa

SEQ ID NO: 868626 - DNA, 75 bp, synthetic construct
  source 1..75: mol_type = other DNA
gcagaacagcagccagattattgccgaacaggtgatccctgaaaatgagggcggttggtggatccgtgaagtggg

SEQ ID NO: 868627 - DNA, 75 bp, synthetic construct
  source 1..75: mol_type = other DNA
actgggcggtgactaccggcggcttcaacagtgaaacagtacaggacgtcggtgatgctgccaacttactgattt

SEQ ID NO: 868628 - DNA, 75 bp, synthetic construct
  source 1..75: mol_type = other DNA
ttttttcagctattgaaaaccttctcaaagctggctttcaacctcgcttttacactgttaacagtggccgaatcg

SEQ ID NO: 868629 - DNA, 75 bp, synthetic construct
  source 1..75: mol_type = other DNA
aaaaggaaaggtgatttacacgatcagatctctctctggaaccttgagccaagttgttctgtcatgttatttaaa

SEQ ID NO: 868630 - DNA, 75 bp, synthetic construct
  source 1..75: mol_type = other DNA
tgtcgatcagccgcgtcggggtgatgccggacgtaccactgtagaaggtacggttacaccaaaacctgatgagca

SEQ ID NO: 868631 - DNA, 75 bp, synthetic construct
  source 1..75: mol_type = other DNA
cgtgaaggatttcagaacatattcctgcgccgcggattctccacgtatattgtcgatcagccgcgtcggggtgat

SEQ ID NO: 868632 - DNA, 75 bp, synthetic construct
  source 1..75: mol_type = other DNA
ctgcgccatgcttactcattctggtgatggtggtgcgcctttaggtgctgggcgagggttcatgatgactgcaga

SEQ ID NO: 868633 - DNA, 75 bp, synthetic construct
  source 1..75: mol_type = other DNA
ctggcactgaaagcgccgctgttaagtccggcattcaccggaacgccaacagcccccactgccgcacagtcggtt

SEQ ID NO: 868634 - DNA, 75 bp, synthetic construct
  source 1..75: mol_type = other DNA
ccgttggtgtgcctgttccgtggcctgcagccactccaccaacaggctggctgaaatgcaatggtgcggcttttt

SEQ ID NO: 868635 - DNA, 75 bp, synthetic construct
  source 1..75: mol_type = other DNA
tcatatattcagggtatttcatggggtgccagtccgacatcgtccggtactgtactaagagcatttcgctgtagt

SEQ ID NO: 868636 - DNA, 75 bp, synthetic construct
  source 1..75: mol_type = other DNA
cgcttaccaatttgagtggaaaggatgtagctggtcttctcacataccttggattgcagaccattaaacccgacc

SEQ ID NO: 868637 - DNA, 75 bp, synthetic construct
  source 1..75: mol_type = other DNA
aacaatacacagattgccactacagcttttgtgaaatcagcgattgcagcaatggtggggtctgcacccgcggca

SEQ ID NO: 868638 - DNA, 75 bp, synthetic construct
  source 1..75: mol_type = other DNA
cgcttaccaatttgagtggaaaggatgtagctggtcttctcgcataccttggtttgggagaagccagatatgtca

SEQ ID NO: 868639 - DNA, 75 bp, synthetic construct
  source 1..75: mol_type = other DNA
tggcggagatcaccttgatggcggcagaaactgtccgtcgttttggtattgagccgcgcgttgctctgttgtcgc

SEQ ID NO: 868640 - DNA, 75 bp, synthetic construct
  source 1..75: mol_type = other DNA
aacgttactggcgcggcagggcagccgactgtatcggcgacaagtgtccagaacactggatttaatattacggtg

SEQ ID NO: 868641 - DNA, 75 bp, synthetic construct
  source 1..75: mol_type = other DNA
tgtagcaggtcttctcacataccttggtttgggagaagcggctaaaaggaatgtaggtacaggggcgaatcagat

SEQ ID NO: 868642 - DNA, 75 bp, synthetic construct
  source 1..75: mol_type = other DNA
ttaaaacatttaaacaatcagtggctggtttaggttccgcagcctcagaaacgcgtccgcgtaatattgcattta

SEQ ID NO: 868643 - DNA, 75 bp, synthetic construct
  source 1..75: mol_type = other DNA
tacacaccagatagcggggctgttggttatattgcctgtgcaggttttagtcccgacccggttaaatttatatcc

SEQ ID NO: 868644 - DNA, 75 bp, synthetic construct
  source 1..75: mol_type = other DNA
atggtgctgattaccagcagtacggacaatatcaccctgaaaatcgatcctgctgtagtgctggcaacccgcaag

SEQ ID NO: 868645 - DNA, 75 bp, synthetic construct
  source 1..75: mol_type = other DNA
gcaggtaaacaaccgctggacaatacgttgactaatttgagtggaaaggatgtaactggtcttctcgcatacctt

SEQ ID NO: 868646 - DNA, 75 bp, synthetic construct
  source 1..75: mol_type = other DNA
actgaatgccgattacgccgggcaagcgaaacagatctctcaggaagcggtgaaagcaggcgtgatggtgctgat

SEQ ID NO: 868647 - DNA, 75 bp, synthetic construct
  source 1..75: mol_type = other DNA
aaaggcttaccctacaaataaattgcctgatttacgaggtgaatttattcgtggctgggatgatgggcgcggtat

SEQ ID NO: 868648 - DNA, 75 bp, synthetic construct
  source 1..75: mol_type = other DNA
attgccgtgggaaactgcccggaaagctataagccgcaactggctgaaggcagcgggcgtacccagaccgtgcgc

SEQ ID NO: 868649 - DNA, 75 bp, synthetic construct
  source 1..75: mol_type = other DNA
tcgggatttacatcatcatatggcggaagcgaaacccgtccacgaaatattgcatttaactatatcgtaagggct

SEQ ID NO: 868650 - DNA, 75 bp, synthetic construct
  source 1..75: mol_type = other DNA
caacggtgcagctttttctgccgaagagtatccggaactggcaaaagtttatccgacaaataaattgccagattt

SEQ ID NO: 868651 - DNA, 75 bp, synthetic construct
  source 1..75: mol_type = other DNA
gcagccagattattgctgaacaggtgatccctgaaaatgagggtggttggtggatacgtgaagtgggcctgtttg

SEQ ID NO: 868652 - DNA, 75 bp, synthetic construct
  source 1..75: mol_type = other DNA
gggcatattcgggatttacatcatcatatggcggaagcgaaacccgtccacgaaatattgcatttaactatatcg

SEQ ID NO: 868653 - DNA, 75 bp, synthetic construct
  source 1..75: mol_type = other DNA
tacgcagagccccacctttggaaaccaagaaggttacccgcgcaacgtcgcatttaactatatcgtgagggcagc

SEQ ID NO: 868654 - DNA, 75 bp, synthetic construct
  source 1..75: mol_type = other DNA
cgctgactaatttgagtggaaaggatgtcgctggtcttctcgcataccttggaataggagaaacgggaaaatacg

SEQ ID NO: 868655 - DNA, 75 bp, synthetic construct
  source 1..75: mol_type = other DNA
tacaaacaatatagcgtggtgtgcgggagccggggatacctcacaaagtgccagggacagttttatcccaggagg

SEQ ID NO: 868656 - DNA, 75 bp, synthetic construct
  source 1..75: mol_type = other DNA
cgacaagctgactgagttcgtttacaaaaccaacctgtttatgaagccgattttctcccaggctcgcaaagcgcc

SEQ ID NO: 868657 - DNA, 75 bp, synthetic construct
  source 1..75: mol_type = other DNA
aatggtgggttctgcaccagcggcactggatacgctgaacgaactggcagcggcgctggggaatgatccgaactt

SEQ ID NO: 868658 - DNA, 75 bp, synthetic construct
  source 1..75: mol_type = other DNA
aacaatacacagattgccactacagcttttgtgaaatcggcgattgcagcaatggtgggttctgcacctgcggca

SEQ ID NO: 868659 - DNA, 75 bp, synthetic construct
  source 1..75: mol_type = other DNA
tgtagctggtcttctcgcataccttggtttgggagagggctctgcattaccggttggggtgcctgttccgtggcc

SEQ ID NO: 868660 - DNA, 75 bp, synthetic construct
  source 1..75: mol_type = other DNA
gcggttggtggatccgtgaagtgggcctgtttgatgaatcaggggcattgattgccgtcggcaactgcccggaaa

SEQ ID NO: 868661 - DNA, 75 bp, synthetic construct
  source 1..75: mol_type = other DNA
cttttgtgaaatcggcaattgcagcaatggtggggtctgcacctgctgcactggatacactgagcgaactggcgg

SEQ ID NO: 868662 - DNA, 75 bp, synthetic construct
  source 1..75: mol_type = other DNA
cggcgatggcggcggaacattgccaacgccggacgcaaagcagacagcattagtaaatgagaaacgccgggctgc

SEQ ID NO: 868663 - DNA, 75 bp, synthetic construct
  source 1..75: mol_type = other DNA
cgctgactaatttgagtggaaaggatgtcgctggtcttctcacataccttggtttgggagaaggagcgcaaggtg

SEQ ID NO: 868664 - DNA, 75 bp, synthetic construct
  source 1..75: mol_type = other DNA
agtcagtgattatcgtacaaaagaaataccagcatcagaagttatgggaagaggatatattgcaagcctgacgcc

SEQ ID NO: 868665 - DNA, 75 bp, synthetic construct
  source 1..75: mol_type = other DNA
ttatggatgatggtgaggaaattatagccccgtcatatttccggcctttacttgcctcaccaagcatacgcaaat

SEQ ID NO: 868666 - DNA, 75 bp, synthetic construct
  source 1..75: mol_type = other DNA
atgatctggcagcctgagttcacagataaaacactctccaggaaacccggggcggttcacactgcgcgaaccaca

SEQ ID NO: 868667 - DNA, 75 bp, synthetic construct
  source 1..75: mol_type = other DNA
agtggcacactgaatttggccacctgaacagaggtgatatgctcacctcagaacaacacaggtgctccaatgaaa

SEQ ID NO: 868668 - DNA, 75 bp, synthetic construct
  source 1..75: mol_type = other DNA
tactcgctgacaaaaatgaaaaaatagactcactctccaccagactggagaagaaatcccgtattcagccgcctg

SEQ ID NO: 868669 - DNA, 75 bp, synthetic construct
  source 1..75: mol_type = other DNA
accgcctgtgcgatagacattgcgctgccggcgcgtaatgcggacggcacgcaagatttgaaatttgccctgtgc

SEQ ID NO: 868670 - DNA, 75 bp, synthetic construct
  source 1..75: mol_type = other DNA
gatatatgaacgttcttgataccgcatggccgcgccaccgatacaccctcccgtattaccccggccttcgttaca

SEQ ID NO: 868671 - DNA, 75 bp, synthetic construct
  source 1..75: mol_type = other DNA
ctgcttggtggctgtgacggcgcacgcggcgagcgccactacttcaccgatttcgccaccagcgtgccggatgac

SEQ ID NO: 868672 - DNA, 75 bp, synthetic construct
  source 1..75: mol_type = other DNA
tgtctacacccacggcgaaatgctgcctgcgcatggctacccggagctgcgtaaattcaagcatctggtcggtaa

SEQ ID NO: 868673 - DNA, 75 bp, synthetic construct
  source 1..75: mol_type = other DNA
gccctatcgtgatgacctcgaactgcatcatcgacccaaccgtaggcgcttatgacgatcgtatctggacccgca

SEQ ID NO: 868674 - DNA, 75 bp, synthetic construct
  source 1..75: mol_type = other DNA
atgatctggcagcctgagttcacagataaaacactctccaggaaacccggggcggttcagatcggcacctgccgt

SEQ ID NO: 868675 - DNA, 75 bp, synthetic construct
  source 1..75: mol_type = other DNA
gtttggcgatatcgaaggtctgccgcgtctggtggatgctggtcagtgtaacgatgcttactcagcaattattct

SEQ ID NO: 868676 - DNA, 75 bp, synthetic construct
  source 1..75: mol_type = other DNA
gtaaatatcgctttaacaaacttgagtttggcgatatcgaaggtctgccgcgtctggtagatgcaggtcaatgta

SEQ ID NO: 868677 - DNA, 75 bp, synthetic construct
  source 1..75: mol_type = other DNA
aagcacagcgcgtagcctgcgctccacatttgacctgccggacgagccaacaggcaatgcagcgccttcatggct

SEQ ID NO: 868678 - DNA, 75 bp, synthetic construct
  source 1..75: mol_type = other DNA
cggcaccaaagcgccgccataccggtattgcggctgcacgacgcgaagcaaagaaacgcaggagagcaaaacgat

SEQ ID NO: 868679 - DNA, 75 bp, synthetic construct
  source 1..75: mol_type = other DNA
tactgcaaaaggcgttacgacagaagtggtaactgtgggtaataacgacaaacgcaaaatcgtgttaaatcgcta

SEQ ID NO: 868680 - DNA, 75 bp, synthetic construct
  source 1..75: mol_type = other DNA
tatgagtgagagtttgttaaagataaaactgaaaaatgaagggggcatgttcagtcgcttgttgctggaagagcg

SEQ ID NO: 868681 - DNA, 75 bp, synthetic construct
  source 1..75: mol_type = other DNA
gtgcgccagctcaggcggctaaacaggaagcggctccggcagcaggcccgtgcatcagcggctggcgtgaaagaa

SEQ ID NO: 868682 - DNA, 75 bp, synthetic construct
  source 1..75: mol_type = other DNA
caaagcggcagaaggtgctgccgcaattatcgctatcggttcctgctccgcgtggggcggtgtcgccgctgctgg

SEQ ID NO: 868683 - DNA, 75 bp, synthetic construct
  source 1..75: mol_type = other DNA
cattaaaagataacggtatttattgcatggttgccggtgagccgattgtggatcacatccgcaaagcggcggaag

SEQ ID NO: 868684 - DNA, 75 bp, synthetic construct
  source 1..75: mol_type = other DNA
tttgccctgcgtgtgccccgctcatttatcgatcgcatggagaaaggcaatccggacgatccgcttttgcgtcag

SEQ ID NO: 868685 - DNA, 75 bp, synthetic construct
  source 1..75: mol_type = other DNA
tctggtgccgaaactggcgcgcgagattggcggtgaacccagcaaaacgcctctggatctccagctacgccagca

SEQ ID NO: 868686 - DNA, 75 bp, synthetic construct
  source 1..75: mol_type = other DNA
atgagccacacggtgattttacaaacattttagaaaatgaactcggacttgcaccacaagttgctcgccgcatga

SEQ ID NO: 868687 - DNA, 75 bp, synthetic construct
  source 1..75: mol_type = other DNA
ctggaggacgttgctgttgtgcctcaaaaagccgttctggtgcagggaactattcgtgataatattctgtatgga

SEQ ID NO: 868688 - DNA, 75 bp, synthetic construct
  source 1..75: mol_type = other DNA
tcaatatctggaaagccagcataagctgacaagaggtcctctgactgacattccactttacttgttgctggaccc

SEQ ID NO: 868689 - DNA, 75 bp, synthetic construct
  source 1..75: mol_type = other DNA
attgcgccgtgtcggcgtcacccagcttaaccagagcgttctgttacgtggcgtgaacgataacgcgcaaacgct

SEQ ID NO: 868690 - DNA, 75 bp, synthetic construct
  source 1..75: mol_type = other DNA
ggctgtcaccctggcagaaaaactgggttgcggtgtcaacgatctgccactctcgctggtactctcctggtttga

SEQ ID NO: 868691 - DNA, 75 bp, synthetic construct
  source 1..75: mol_type = other DNA
ctggatacactgaacgaactggcggcggcgctggggaatgacccgaactttgccacgacaatgttgaatgcgctg

SEQ ID NO: 868692 - DNA, 75 bp, synthetic construct
  source 1..75: mol_type = other DNA
atattctacctatgatgatgcagtcggtgtaaccagtagcatgttaaaaattagctgtccgaaagaagttgctgg

SEQ ID NO: 868693 - DNA, 75 bp, synthetic construct
  source 1..75: mol_type = other DNA
caccttttaacattgagagttataaaacagcggaaggtcaatatgctattccgtttaaggaaggtgcgaacaagt

SEQ ID NO: 868694 - DNA, 75 bp, synthetic construct
  source 1..75: mol_type = other DNA
ctatccctttccctaaaaaagcggatatcgccattcttacccattctggcgatggcggtgcgccttttggtgcag

SEQ ID NO: 868695 - DNA, 75 bp, synthetic construct
  source 1..75: mol_type = other DNA
attcatgcttctaccagcaaaggggtgatgcgctcttcccttgataatgtctactggcagaaaaatttctggcaa

SEQ ID NO: 868696 - DNA, 75 bp, synthetic construct
  source 1..75: mol_type = other DNA
tgataaagacgatctgcttcccggcgacctggtctttttcaagaccggttctggtcaaaatgggttgcatgtggg

SEQ ID NO: 868697 - DNA, 75 bp, synthetic construct
  source 1..75: mol_type = other DNA
ttcgacacgctgaagggggaaccagtgccaatggaacagtttatggcgctgactaaaatcccgattttgattatt

SEQ ID NO: 868698 - DNA, 75 bp, synthetic construct
  source 1..75: mol_type = other DNA
atgtcaatgtcatctctgatgcgatgtctgccgtagtggataaatcaggtccggcaatcctctttactcactctc

SEQ ID NO: 868699 - DNA, 75 bp, synthetic construct
  source 1..75: mol_type = other DNA
cggttacaccaaaacctgatgagcagatgtggtttaaccagttccgtgttggcgtgtggccagattattttaaag

SEQ ID NO: 868700 - DNA, 75 bp, synthetic construct
  source 1..75: mol_type = other DNA
ggcaaattcaatttctacggtatcggttggtggttctgaaacccggccgcgcaacgtcgcatttaactatatcgt

SEQ ID NO: 868701 - DNA, 75 bp, synthetic construct
  source 1..75: mol_type = other DNA
ctacggtaagctttaaaaaaccgtttaatgtcaccccatttatcgttcttccgcataaaatcacagctgaccatc

SEQ ID NO: 868702 - DNA, 75 bp, synthetic construct
  source 1..75: mol_type = other DNA
ggcgtgtggccagagtattttaaaggtgttcagttttctcacgacaaagaagcgttgaaccagtatttccgtcag

SEQ ID NO: 868703 - DNA, 75 bp, synthetic construct
  source 1..75: mol_type = other DNA
tcatacccagtatgcacagaaacataatccgacatttaccggagaaccaaaagcgccgactcctgatgcaggaaa

SEQ ID NO: 868704 - DNA, 75 bp, synthetic construct
  source 1..75: mol_type = other DNA
aacttatggggtacacgacaacaaggacatctgtaaccttaaaagtatcaaccggaaatggtttgtatggaacta

SEQ ID NO: 868705 - DNA, 75 bp, synthetic construct
  source 1..75: mol_type = other DNA
gcagccatgtttgacagcgccatgtcatttgcgctgatccgtggcggtcatattgatgcctgcgtgctcggtggt

SEQ ID NO: 868706 - DNA, 75 bp, synthetic construct
  source 1..75: mol_type = other DNA
cggaaataaatgttggtgtacgggcacagcggacttccgatactcctcgatccagctttccggaatgcagtactg

SEQ ID NO: 868707 - DNA, 75 bp, synthetic construct
  source 1..75: mol_type = other DNA
acgcgcatttttctcaaccctgaccaacgttaacttcgattctccgcgtattgtcggctacgctcgtgaagcaat

SEQ ID NO: 868708 - DNA, 75 bp, synthetic construct
  source 1..75: mol_type = other DNA
gttggtggtaactcatatctaatgggctatgacgtcatgataaatggtgaggttgtttgctcagacccttatgta

SEQ ID NO: 868709 - DNA, 75 bp, synthetic construct
  source 1..75: mol_type = other DNA
tattcactgcatcaaacattataaatttcttcgtggcactcgggacttgcacagcagtgttagttgcattaattg

SEQ ID NO: 868710 - DNA, 75 bp, synthetic construct
  source 1..75: mol_type = other DNA
caatgcttaatgcgctggcaggcaaacaaccgctggacaatacgttgactaatttgagtggaaaagatgttgctg

SEQ ID NO: 868711 - DNA, 75 bp, synthetic construct
  source 1..75: mol_type = other DNA
cgcttaccaatttgagtggaaaggatgtagctggtcttctcacataccttcaattgggagaagcggcaaaacggg

SEQ ID NO: 868712 - DNA, 75 bp, synthetic construct
  source 1..75: mol_type = other DNA
ttggcgttccgttcttctggccctccgctgcaatgccaaattctgtcatcgacagctggtccggtatggtgtttt

SEQ ID NO: 868713 - DNA, 75 bp, synthetic construct
  source 1..75: mol_type = other DNA
agtaccagatatgagtagttttacaacggggcactctggagcagcagactggccgaatcctaaatctggatggag

SEQ ID NO: 868714 - DNA, 75 bp, synthetic construct
  source 1..75: mol_type = other DNA
ctattggtattccacaacagcttcctattacatatccaacgccattccctaacggagtatggggtgtgtttgtca

SEQ ID NO: 868715 - DNA, 75 bp, synthetic construct
  source 1..75: mol_type = other DNA
caaagcgccaacgccagcagcagggaataacaccacgcagattgcgaccaccgagtttgttcaggctgcactgac

SEQ ID NO: 868716 - DNA, 75 bp, synthetic construct
  source 1..75: mol_type = other DNA
atgacaaagatgaccattaaccgaaaaccgaaaggcatttacggcacgccgcagaaaataccgcaggcggcacag

SEQ ID NO: 868717 - DNA, 75 bp, synthetic construct
  source 1..75: mol_type = other DNA
atgggcaaaaccgaccgcagcgccaacccttcgccgggcaacaaaaaaggcgggctcgccaacgtggtaaagaaa

SEQ ID NO: 868718 - DNA, 75 bp, synthetic construct
  source 1..75: mol_type = other DNA
taacgcgggcactatcgctaccggcgaagaaaccattgaagaggtgggctggaagttgttccactttattctcga

SEQ ID NO: 868719 - DNA, 75 bp, synthetic construct
  source 1..75: mol_type = other DNA
ggctgtagttttggttttgggcgcagccatattgcgccagccattaccgaacttatgcgcaattatcctgagtta

SEQ ID NO: 868720 - DNA, 75 bp, synthetic construct
  source 1..75: mol_type = other DNA
gatattacttcggcgctggtgagtatcgtctcactcgctttattccttaaagtctggcggccgaaaaataccgaa

SEQ ID NO: 868721 - DNA, 75 bp, synthetic construct
  source 1..75: mol_type = other DNA
atgggcaaaaccgaccgcagcgccaacccttcgccgggcaacaaaaagggcggactcgcgaacgtggtaaagaaa

SEQ ID NO: 868722 - DNA, 75 bp, synthetic construct
  source 1..75: mol_type = other DNA
atgggcaaaaccgaccgcagcgccaacccttcgccgggcaacaaaaacggcgggctcgcaaacgtggtaaagaaa

SEQ ID NO: 868723 - DNA, 75 bp, synthetic construct
  source 1..75: mol_type = other DNA
acgtgatgaagcaaaaaagctgcttgctcagggaatcgatcctaacgctaaaaaacaggctgatgaaaaagctct

SEQ ID NO: 868724 - DNA, 75 bp, synthetic construct
  source 1..75: mol_type = other DNA
tcttgagcagcgaaggttgatgctacagtggtgggcagattttcttgatgctaaccgggatgggatggtcaggcc

SEQ ID NO: 868725 - DNA, 75 bp, synthetic construct
  source 1..75: mol_type = other DNA
ttatgcgccataatcctgcttacgatatggaaggtgctgtgcagaaaccagagactgagcaccgtcccgcactgg

SEQ ID NO: 868726 - DNA, 75 bp, synthetic construct
  source 1..75: mol_type = other DNA
gaccgtgttccgctccatctctgaaaccatgtttaaagtgactcacatggtgatgcgttatgcaccggtgggtgt

SEQ ID NO: 868727 - DNA, 75 bp, synthetic construct
  source 1..75: mol_type = other DNA
aaatgattgttgtgccgattgtgatctccacgctggtggtgggtatcgcgggtgttggtgatgccaaacagctcg

SEQ ID NO: 868728 - DNA, 75 bp, synthetic construct
  source 1..75: mol_type = other DNA
attctcctgggaagctacctgcactaccatagcgacagccgcgactggctggtcgtcaatttgctctctccggcg

SEQ ID NO: 868729 - DNA, 75 bp, synthetic construct
  source 1..75: mol_type = other DNA
ggctgggggtattccttaccggctcggacacctcctctaacgccctgtttggttcactgcaatcgaccacggcgc

SEQ ID NO: 868730 - DNA, 75 bp, synthetic construct
  source 1..75: mol_type = other DNA
tcagtgccgtggccaccaaatccctgctgatgcatccggagctggattacaacctgcagtacagccactacaaca

SEQ ID NO: 868731 - DNA, 75 bp, synthetic construct
  source 1..75: mol_type = other DNA
tgccgctttgcaggctaccgccgcacaacaaattggcgtttctgacctgttgctggttgctgccaacaccacagg

SEQ ID NO: 868732 - DNA, 75 bp, synthetic construct
  source 1..75: mol_type = other DNA
gcgtggcattaaggaaacctggcccgccgttctggttgccggaggttccttcgccatagcccagtttctcagttc

SEQ ID NO: 868733 - DNA, 75 bp, synthetic construct
  source 1..75: mol_type = other DNA
gttcctgcgctggcagcggttctggacagatcgcagttcgatgttcagccagtcttttgccgccgcgcagttgag

SEQ ID NO: 868734 - DNA, 75 bp, synthetic construct
  source 1..75: mol_type = other DNA
ccgggatacgtatggtctgagtgttattcccgtttccgtggatggcgtgattaatccgctgttgccggattcccg

SEQ ID NO: 868735 - DNA, 75 bp, synthetic construct
  source 1..75: mol_type = other DNA
tgctctgctgcatgatttttccggtatacggaaagaatgcgggctggcagtggtataacgaaaagatgaaacagc

SEQ ID NO: 868736 - DNA, 75 bp, synthetic construct
  source 1..75: mol_type = other DNA
acgctggcggtgagtatcgccatggtcgcccgtgcttttggcgcttatgccgtgcagtttttgcatgaaggcagt

SEQ ID NO: 868737 - DNA, 75 bp, synthetic construct
  source 1..75: mol_type = other DNA
gcgaacgcgaactgccgaagctaatgaataaatccctgtggcggcagagtacctggggcaacatcattgtcgtgg

SEQ ID NO: 868738 - DNA, 75 bp, synthetic construct
  source 1..75: mol_type = other DNA
ggttcactgcaatcgaccacggcgcagcaaatcaacgtctctgacacactgctggtggcagcaaataccagcggc

SEQ ID NO: 868739 - DNA, 75 bp, synthetic construct
  source 1..75: mol_type = other DNA
acacttgccctggctctggcacagacaggcagcgcctttacgttcttctcaccgtttctgggctggctgggcgta

SEQ ID NO: 868740 - DNA, 75 bp, synthetic construct
  source 1..75: mol_type = other DNA
gttagtgaccgttccctccagaggaaaactgtttttcacccacaatgatcagccagcaaatctcagcgcattacg

SEQ ID NO: 868741 - DNA, 75 bp, synthetic construct
  source 1..75: mol_type = other DNA
ttaaaaagcaactgctatatagacgaatataaatatgcaccaatgctttacatcaatgatgagcttttaatttcc

SEQ ID NO: 868742 - DNA, 75 bp, synthetic construct
  source 1..75: mol_type = other DNA
gcaggctcttaagatactgaaagagatccgtcagcttacctatgaagaaggtaatgacgccggattaatttttac

SEQ ID NO: 868743 - DNA, 75 bp, synthetic construct
  source 1..75: mol_type = other DNA
cgaatcggaagtgaacaacattcgtaaacagtatgaagcgcagggcttcgaagtagttattccgaaaactaacat

SEQ ID NO: 868744 - DNA, 75 bp, synthetic construct
  source 1..75: mol_type = other DNA
ccgcagactgaactgttccgcgtggaagacaagtttggctcctggccggaagtgatgaaaactcacttcaccagt

SEQ ID NO: 868745 - DNA, 75 bp, synthetic construct
  source 1..75: mol_type = other DNA
tatgtcgctgggcgaaaacgttggctatgggctgaaaatgcttggcgtgtcgcgtaatgaagtgaagcagcgggt

SEQ ID NO: 868746 - DNA, 75 bp, synthetic construct
  source 1..75: mol_type = other DNA
aaaagataccagccaggcgataaaagtttctcataccagctatacctgctttttgttggctatcatttaaagtat

SEQ ID NO: 868747 - DNA, 75 bp, synthetic construct
  source 1..75: mol_type = other DNA
aagcgatatcagccacatgataaaagtttctcatgccagctttacttaatttttgtgggataccatttgaagtat

SEQ ID NO: 868748 - DNA, 75 bp, synthetic construct
  source 1..75: mol_type = other DNA
gtcgataaaaatgtgcaggccaacggtacggaaaaagccgcaaaagcctacctgaactggctctacagcccacag

SEQ ID NO: 868749 - DNA, 75 bp, synthetic construct
  source 1..75: mol_type = other DNA
tttgtcggcctgggtggttcaagctacggtatcctcaaaaatctggatgactttactgaccgccgggttgataac

SEQ ID NO: 868750 - DNA, 75 bp, synthetic construct
  source 1..75: mol_type = other DNA
gagatagcactggatcgtgttccggcgaacgtcagtaagattgcgatcaccgttgtcattgatggtgaagatact

SEQ ID NO: 868751 - DNA, 75 bp, synthetic construct
  source 1..75: mol_type = other DNA
agagaaagactgatttatgttgatatggataaagttatgcatgaaatgagatatgtacatactcaagcattactt

SEQ ID NO: 868752 - DNA, 75 bp, synthetic construct
  source 1..75: mol_type = other DNA
tatcggcacaatggcgcctggaagcttcgtgcgctagggcagggtttcaacggtggacttgagcctctggccatt

SEQ ID NO: 868753 - DNA, 75 bp, synthetic construct
  source 1..75: mol_type = other DNA
cgaacgtcagtaaaattgcgatcaccgttgttattgatggtgaagataccatcagtgggctcagtttattgagca

SEQ ID NO: 868754 - DNA, 75 bp, synthetic construct
  source 1..75: mol_type = other DNA
taaacttcgatcctgcaggtataaaaaaaagcacctgcatgtatatttcagacctgcccggtattgtgctatatg

SEQ ID NO: 868755 - DNA, 75 bp, synthetic construct
  source 1..75: mol_type = other DNA
agtttactctggaagagcaacttatcattataattgataaatatatctcaaaacggtaccagcccggagataaaa

SEQ ID NO: 868756 - DNA, 75 bp, synthetic construct
  source 1..75: mol_type = other DNA
ccgtttcgaagggaagcaaaaactcttctctattggtgtttaccctgctgtttctctttctgacgcaaggcaacg

SEQ ID NO: 868757 - DNA, 75 bp, synthetic construct
  source 1..75: mol_type = other DNA
aggccgggcttaacgaaattcgttctgtttccttgggtgtggcgcaacctgatgcctataaagataaagcgcgta

SEQ ID NO: 868758 - DNA, 75 bp, synthetic construct
  source 1..75: mol_type = other DNA
atagcgtgcgctaccatgtttccaactatcagcccagcccgatggttcggatgatgaaagctgatgccgcgccgg

SEQ ID NO: 868759 - DNA, 75 bp, synthetic construct
  source 1..75: mol_type = other DNA
agaagattacgccgatacggtatggaagcgccttgagacctatgtattcccggatattggcgacagcaacgtttc

SEQ ID NO: 868760 - DNA, 75 bp, synthetic construct
  source 1..75: mol_type = other DNA
ctgcctatacgcataaggccaaacatcttgaacagagaagattgatgttacagtggtgggcagattatcttgatg

SEQ ID NO: 868761 - DNA, 75 bp, synthetic construct
  source 1..75: mol_type = other DNA
ctgcgtcatgccgtccagcaaaagctgatacgccataacccagcctatgatatggaaggtgcagttcagaaacca

SEQ ID NO: 868762 - DNA, 75 bp, synthetic construct
  source 1..75: mol_type = other DNA
gacctgctcctgataacgggaaagaggatgtgacagcaactttgagagattattttaaaattcctgaagggaaac

SEQ ID NO: 868763 - DNA, 75 bp, synthetic construct
  source 1..75: mol_type = other DNA
taatgacacttgaagagcagcttgttgtcatcgtagataaatatatctctaaacgataccagcccgtagataaaa

SEQ ID NO: 868764 - DNA, 75 bp, synthetic construct
  source 1..75: mol_type = other DNA
actttactctggaagagcaacttatcattattgtcgataagtatatttcaaaaagataccatcccagagataaaa

SEQ ID NO: 868765 - DNA, 75 bp, synthetic construct
  source 1..75: mol_type = other DNA
gttaatgtggccgcgaaggatgctgctaccgccaaaaaacaagcggatgagcgcgtggcgcaatatatctctttc

SEQ ID NO: 868766 - DNA, 75 bp, synthetic construct
  source 1..75: mol_type = other DNA
gttaacgtggctgcgaaggatgctgctacagctaagaaacaggcggatgaacgcgttgcgcaatatatctctttc

SEQ ID NO: 868767 - DNA, 75 bp, synthetic construct
  source 1..75: mol_type = other DNA
ggcagcgcaggctaacgaattgccggatggaccgcatattgtcacctccggtacggcaagtgtggatgcggtgcc

SEQ ID NO: 868768 - DNA, 75 bp, synthetic construct
  source 1..75: mol_type = other DNA
gctctgcaagaagtgaatgctgcattgttcaaagagtatttaccgttattacaaaaagtgagccgaccattaaac

SEQ ID NO: 868769 - DNA, 75 bp, synthetic construct
  source 1..75: mol_type = other DNA
tctggcgcgattagaagaaaagaaatttccggttggtgaaagcgagtcgaaatttaatcagattaacattatcaa

SEQ ID NO: 868770 - DNA, 75 bp, synthetic construct
  source 1..75: mol_type = other DNA
gagatgacgttaagttataaaaactttgaaaaatgtttttttaattcccgttttgaaatgcaacttacatttgat

SEQ ID NO: 868771 - DNA, 75 bp, synthetic construct
  source 1..75: mol_type = other DNA
tttaaccaaagaggctgttgatttcttccatccgctgggtattccggtagaggcggaattagggcatgtcggtaa

SEQ ID NO: 868772 - DNA, 75 bp, synthetic construct
  source 1..75: mol_type = other DNA
ggagtatggaaattattcataacgcctggactcatggtatgaattcattaatgcgtgatgcttccgcatttgatt

SEQ ID NO: 868773 - DNA, 75 bp, synthetic construct
  source 1..75: mol_type = other DNA
ataaaacactatcagtaagttggagtcattaccttgatttcgaagaaaatattcgtttaaccaaagaggctgtcg

SEQ ID NO: 868774 - DNA, 75 bp, synthetic construct
  source 1..75: mol_type = other DNA
tcacttcagcctttcatgaagaaccattaacaaatcaaaatggattgattactgatttaaatacaaattcaaaac

SEQ ID NO: 868775 - DNA, 75 bp, synthetic construct
  source 1..75: mol_type = other DNA
tttactgttgattattccaatggcttcggtgatgcaatggatgcttatgaggaaaacatccgcgctgctggagtc

SEQ ID NO: 868776 - DNA, 75 bp, synthetic construct
  source 1..75: mol_type = other DNA
agggtgcgtctgcagcctgatatggaacatcttcttgccgggctcatcgctattgatgctgccagagctgccgtg

SEQ ID NO: 868777 - DNA, 75 bp, synthetic construct
  source 1..75: mol_type = other DNA
tcaatgtattgtgtgcagtctaaacctttatgattttagtcagattaataaccatgaaattggagtgttaattat

SEQ ID NO: 868778 - DNA, 75 bp, synthetic construct
  source 1..75: mol_type = other DNA
gtttgaattatcaacttgaaaaaacaatcactgaagctgaggaaaggataattctcattagcccataccttaagc

SEQ ID NO: 868779 - DNA, 75 bp, synthetic construct
  source 1..75: mol_type = other DNA
acgtcgatgaggacgtgcaagatattcagaatgatgtcaatcaattagccgacagcctcgaatctgtactgaaat

SEQ ID NO: 868780 - DNA, 75 bp, synthetic construct
  source 1..75: mol_type = other DNA
gatgatatccttaagcgctttgcaaatgttgccagcacctgggctggaaccatacaaaattacgcgacctggata

SEQ ID NO: 868781 - DNA, 75 bp, synthetic construct
  source 1..75: mol_type = other DNA
aggagcaaacaacgactcaaacagaaaatactgattctatagatacacaaacatcacaaagtggtgatgaatatg

SEQ ID NO: 868782 - DNA, 75 bp, synthetic construct
  source 1..75: mol_type = other DNA
tacttctggaggacaaccatcaggcggttccggtggttcgtctgcagagaacagtacaggtagctccagtggagg

SEQ ID NO: 868783 - DNA, 75 bp, synthetic construct
  source 1..75: mol_type = other DNA
aggccgttcagttggaggatttggcggcggggaagataccggttccgtagatacttctggaggacaaccatcagg

SEQ ID NO: 868784 - DNA, 75 bp, synthetic construct
  source 1..75: mol_type = other DNA
gaagtcaggggtttgcttcattctcacgagctgggcgcatggcaagccatatgggaagcagtatggctaacggag

SEQ ID NO: 868785 - DNA, 75 bp, synthetic construct
  source 1..75: mol_type = other DNA
gtcaactcgcggctaatgcttctggattatcaaaatcattctcaccttcgggcatagtagatatagggtttgata

SEQ ID NO: 868786 - DNA, 75 bp, synthetic construct
  source 1..75: mol_type = other DNA
ccttcaaatttctctaataaagacttggcaagatattgtaagcttaatcctcatgtcctattgcctcagtatcag

SEQ ID NO: 868787 - DNA, 75 bp, synthetic construct
  source 1..75: mol_type = other DNA
aaagaccctggtgtagtgtgggaactgctgctgcggtaggtatttttatcggtgcactgttaagcatgcgcaaat

SEQ ID NO: 868788 - DNA, 75 bp, synthetic construct
  source 1..75: mol_type = other DNA
aaagaccctggtgtagcgtgggtacagcagctgcggttggtatttttatcggcgcactgttaagcatgcgcaaat

SEQ ID NO: 868789 - DNA, 75 bp, synthetic construct
  source 1..75: mol_type = other DNA
gcagtacaaatgaaatctatgtttgtaatgcttgtagcctcaattgttcttttggttcttgttaataaaattcct

SEQ ID NO: 868790 - DNA, 75 bp, synthetic construct
  source 1..75: mol_type = other DNA
tattggaattgggcaatcatttatagatcagtacttttatgttattaaagacgatgtgccggatcttaatagcct

SEQ ID NO: 868791 - DNA, 75 bp, synthetic construct
  source 1..75: mol_type = other DNA
gctgtcaacatgcttctcctgttgatcactggctggattctgacctatgcaggcatattactgctcggctttggt

SEQ ID NO: 868792 - DNA, 75 bp, synthetic construct
  source 1..75: mol_type = other DNA
ctatgggccacggggggatgctttattcactgccatctcgcgaactgatcgctgattccgttgagtatatggtca

SEQ ID NO: 868793 - DNA, 75 bp, synthetic construct
  source 1..75: mol_type = other DNA
aaacatcccgttatttcgatgttgctattcctgccgagttaaacaatgacgacaagaaaagacttgtccttgagt

SEQ ID NO: 868794 - DNA, 75 bp, synthetic construct
  source 1..75: mol_type = other DNA
aagtctacaagactttcagcgaacttgatcttgaaatcgtcgttgatgtcagaagctttacgattacacatcttg

SEQ ID NO: 868795 - DNA, 75 bp, synthetic construct
  source 1..75: mol_type = other DNA
aaagaacaggtgatacctatgattatagtcgccgtaccgatttatacggacatttcatattagcaccaattaatg

SEQ ID NO: 868796 - DNA, 75 bp, synthetic construct
  source 1..75: mol_type = other DNA
actacacatcaagataatgtttttaaacgtatcactaccattttattcgattttatgaggggtaaattaagattg

SEQ ID NO: 868797 - DNA, 75 bp, synthetic construct
  source 1..75: mol_type = other DNA
attgtcagaaaaatttcgttgataaaggtatgattgccgatatcgctttccatgatctcgatagcgacaacccac

SEQ ID NO: 868798 - DNA, 75 bp, synthetic construct
  source 1..75: mol_type = other DNA
gatgctgccaagcaggaagcggttgaagtctacaagactttcagtgaacttgaccttgaaatcgtcgttgatgtc

SEQ ID NO: 868799 - DNA, 75 bp, synthetic construct
  source 1..75: mol_type = other DNA
gaccgatcggctttgtcggtctcaccgcgccccattttgcacgggcttttgtcggctcgggacaccgtctgctgc

SEQ ID NO: 868800 - DNA, 75 bp, synthetic construct
  source 1..75: mol_type = other DNA
tcagtattctggtttttatgatgggtggactgagccatgctaatcctgttcgcattgtgctggccggtgcggctc

SEQ ID NO: 868801 - DNA, 75 bp, synthetic construct
  source 1..75: mol_type = other DNA
tcgtgattggtttatctcttcgtgctattgcaaaacaacaaggatgttcagatggaacaattcgtaaaagattgc

SEQ ID NO: 868802 - DNA, 75 bp, synthetic construct
  source 1..75: mol_type = other DNA
atggatcaggcgctactggacgggggttatcgctgttataccggcgaaaatatcgatgtctattttaacactgcg

SEQ ID NO: 868803 - DNA, 75 bp, synthetic construct
  source 1..75: mol_type = other DNA
cacgatttagacagtaagaatccacatgctcacgtcatgttaactctaaaaactattggtcccgaaggcttcggt

SEQ ID NO: 868804 - DNA, 75 bp, synthetic construct
  source 1..75: mol_type = other DNA
agaagctttaaaataactgttcttcctgaacccgaagagattgttcttccagacgacccggcaacagttgaacaa

SEQ ID NO: 868805 - DNA, 75 bp, synthetic construct
  source 1..75: mol_type = other DNA
aacgtattgaccatcgttctcttcaggcccagcatgaagaggcattagaaaaagcggcggtagctttagataatg

SEQ ID NO: 868806 - DNA, 75 bp, synthetic construct
  source 1..75: mol_type = other DNA
agaaatcgatttcacgatgagtgatatcgataaactttcacgcaaagtcccgcagttgtgcaaagttgcgccgag

SEQ ID NO: 868807 - DNA, 75 bp, synthetic construct
  source 1..75: mol_type = other DNA
aagcgctgggcttgtcgcagccgggtaacggctcactgctggcaacccacgctgaccgtaagcaattgttcctta

SEQ ID NO: 868808 - DNA, 75 bp, synthetic construct
  source 1..75: mol_type = other DNA
aacgtacttggcctgacgttgccgcaaacgctggaacaatacgacgttatgctgacccaggatgacgcggtaaaa

SEQ ID NO: 868809 - DNA, 75 bp, synthetic construct
  source 1..75: mol_type = other DNA
aacgtactcggcctgaccttgtcgcaaacgctggaacaatacgatgtcatgctgactcaggatgatgcggtgaaa

SEQ ID NO: 868810 - DNA, 75 bp, synthetic construct
  source 1..75: mol_type = other DNA
tggttcctgctccgggatgttcaccgctaactcgatgaactgcctgaccgaagctctgggtctgtcgcagccagg

SEQ ID NO: 868811 - DNA, 75 bp, synthetic construct
  source 1..75: mol_type = other DNA
gctctacccaaccagcttcctgaaatcaatgggtctcggcaaagcctgtgcgctgatcaccgacggtcgtttctc

SEQ ID NO: 868812 - DNA, 75 bp, synthetic construct
  source 1..75: mol_type = other DNA
gccggaaagcgatcatcgcatggatctcataccacatgccagcaaagataaagccccacgtatgaggccaccggg

SEQ ID NO: 868813 - DNA, 75 bp, synthetic construct
  source 1..75: mol_type = other DNA
ttctgattctggatcaaatactattctgcaaacatcatcctctcaaaacccaaacagggcatccagaagctcccc

SEQ ID NO: 868814 - DNA, 75 bp, synthetic construct
  source 1..75: mol_type = other DNA
aacaataggcccggaaggttttggcaaaaaggaaagaagctggaacgacagaaaaatgtctattttttggcgtga

SEQ ID NO: 868815 - DNA, 75 bp, synthetic construct
  source 1..75: mol_type = other DNA
gctgattccgttgagtatatggtcaacgcccactgcgccgacgccatggtctgcatctctaactgcgacaaaatc

SEQ ID NO: 868816 - DNA, 75 bp, synthetic construct
  source 1..75: mol_type = other DNA
aaaaaaatttaaagcttgcataaataacataccgcctgaagaaactcatccaaccagaaacactcccgaccccaa

SEQ ID NO: 868817 - DNA, 75 bp, synthetic construct
  source 1..75: mol_type = other DNA
ctgagtgacaccgcctatgctttcggcgccgggatcttctttattggttatgccctgttcgaggtgcccagtaat

SEQ ID NO: 868818 - DNA, 75 bp, synthetic construct
  source 1..75: mol_type = other DNA
ttaccgtcgatttagccgcccgcgtgattcaccggggtgaggaagaggtgcatctcacgccgattgagttccgcc

SEQ ID NO: 868819 - DNA, 75 bp, synthetic construct
  source 1..75: mol_type = other DNA
gataacgcgccggaagaaaaagctcgtggtatcaccatcaagcattcgaccagatcgataacgcgccggaagaaa

SEQ ID NO: 868820 - DNA, 75 bp, synthetic construct
  source 1..75: mol_type = other DNA
gcagctctgtttccagccgagtgattgccaaaggctcccgtgacaccagcataacggaaaatggcgttgttattg

SEQ ID NO: 868821 - DNA, 75 bp, synthetic construct
  source 1..75: mol_type = other DNA
tctggttccattgctgccgctgacaacagcgtcgcactgggtacaggctccgtggccaacgaagaaaacacgatc

SEQ ID NO: 868822 - DNA, 75 bp, synthetic construct
  source 1..75: mol_type = other DNA
accaagttcgaatctgaagtgtacattctgtccaaagatgaaggcggtcgtcatactccgttcttcaaaggctac

SEQ ID NO: 868823 - DNA, 75 bp, synthetic construct
  source 1..75: mol_type = other DNA
tatggcccgttccgtgaagctgccggaagcgcattaaaaggcgaccgcaaaagctatcagatgaacccaatgaac

SEQ ID NO: 868824 - DNA, 75 bp, synthetic construct
  source 1..75: mol_type = other DNA
ttaccgtcgatttagccgcccgcgttatccatcggggcgaggaagaggtgcatctcaccccgattgagttccgcc

SEQ ID NO: 868825 - DNA, 75 bp, synthetic construct
  source 1..75: mol_type = other DNA
ctccttaaccaggtgtgggggccaaacgcggtcgaacacagtcactatttgcgtatttatatgggacatctgcga

SEQ ID NO: 868826 - DNA, 75 bp, synthetic construct
  source 1..75: mol_type = other DNA
gagacggtgactaatcttggtgaggatgcgctgaaatgggataaggacaatggtgtcttcactgcagctcatggc

SEQ ID NO: 868827 - DNA, 75 bp, synthetic construct
  source 1..75: mol_type = other DNA
acgacgctgaccgctgcaatcaccaccgtactggctaaaacctacggcggtgctgctcgtgcattcgaccagatc

SEQ ID NO: 868828 - DNA, 75 bp, synthetic construct
  source 1..75: mol_type = other DNA
accactctgaccgctgcaatcactaccgtactggctaaaacctacggcggtgctgctcgtgcattcgaccagatc

SEQ ID NO: 868829 - DNA, 75 bp, synthetic construct
  source 1..75: mol_type = other DNA
acaacactgaccgctgcaatcacgaccgtactggctaaaacctacggcggtgctgctcgtgcattcgaccagatc

SEQ ID NO: 868830 - DNA, 75 bp, synthetic construct
  source 1..75: mol_type = other DNA
catattgcaggtgggcacaatatgtccttagcctgcaaactgccatggtcggcccaaaaaactatagaagcgttt

SEQ ID NO: 868831 - DNA, 75 bp, synthetic construct
  source 1..75: mol_type = other DNA
aacgtgaagaaatcgaacgtggtcaggtactggctaagccgggcaccatcaagccgcacaccaagttcgaatctg

SEQ ID NO: 868832 - DNA, 75 bp, synthetic construct
  source 1..75: mol_type = other DNA
tatcggccacgttgaccaaggtaaaacaaccctgaccgctgcaatcaccaccgtactggctaaaacctacggcgg

SEQ ID NO: 868833 - DNA, 75 bp, synthetic construct
  source 1..75: mol_type = other DNA
tatcggccacgttgaccaaggtaaaacaacactgaccgctgcaatcacaaccgtactggctaaaacctacggcgg

SEQ ID NO: 868834 - DNA, 75 bp, synthetic construct
  source 1..75: mol_type = other DNA
atgaacaaaatatttaaagtcatctggaatccggcgacgggcagttatagcgttaccagcgaaacggcaaaaagc

SEQ ID NO: 868835 - DNA, 75 bp, synthetic construct
  source 1..75: mol_type = other DNA
tatcggccacgttgaccaaggtaaaacgacgctgaccgctgcaatcacaaccgtactggctaaaacctacggcgg

SEQ ID NO: 868836 - DNA, 75 bp, synthetic construct
  source 1..75: mol_type = other DNA
tatcggccacgttgaccaaggtaaaaccaccctgaccgctgcaatcacaaccgtactggctaaaacctacggcgg

SEQ ID NO: 868837 - DNA, 75 bp, synthetic construct
  source 1..75: mol_type = other DNA
tatcggccacgttgaccaaggtaaaacaacgctgaccgctgcaatcacgaccgtactggctaaaacctacggcgg

SEQ ID NO: 868838 - DNA, 75 bp, synthetic construct
  source 1..75: mol_type = other DNA
tgctcgtgtagtgactccacaaaaaccttcgtccacgcgcgtgacgttaacgaaatgagcgcgatgtactgtgct

SEQ ID NO: 868839 - DNA, 75 bp, synthetic construct
  source 1..75: mol_type = other DNA
ttcttctggccgtccgccgcaatgccaaatactgtaatcgacagttggtccagtatggtgtttttgaagttcaac

SEQ ID NO: 868840 - DNA, 75 bp, synthetic construct
  source 1..75: mol_type = other DNA
caaggagtatgacgagaatattggtgcgtgggagacgttcgccacaacctcagccaaccagaacgttaccgttac

SEQ ID NO: 868841 - DNA, 75 bp, synthetic construct
  source 1..75: mol_type = other DNA
ggtttgggagaagcggcaaaaaggaatgtgggcaacggggaaaaccaaatccctgatatgtctttctggacggtt

SEQ ID NO: 868842 - DNA, 75 bp, synthetic construct
  source 1..75: mol_type = other DNA
agtgcggtgcgggtgacggtcttaagctggtcgagaaagtgtttggcgtgaccgcatcagaggctgccgggaggg

SEQ ID NO: 868843 - DNA, 75 bp, synthetic construct
  source 1..75: mol_type = other DNA
cgtggtcaggtactggctaagccgggcaccatcaagccgcacaccaagttcgaatctgaagtgtacattctgtcc

SEQ ID NO: 868844 - DNA, 75 bp, synthetic construct
  source 1..75: mol_type = other DNA
tggaattgtggacgggggacgggcttgccgcaggaagtgcacgggaaggagtaaacccaggaatactggctacat

SEQ ID NO: 868845 - DNA, 75 bp, synthetic construct
  source 1..75: mol_type = other DNA
tcatgcagtattcctgcgcttactggaaagatgccgataatctggaatctgcccaacaagcgaagcttaaaatga

SEQ ID NO: 868846 - DNA, 75 bp, synthetic construct
  source 1..75: mol_type = other DNA
aaaccccgatttttttaaacgcgttctgcaggaaggatcgttggggttaggcgaaagttatatggatggctggtg

SEQ ID NO: 868847 - DNA, 75 bp, synthetic construct
  source 1..75: mol_type = other DNA
ctttaaacggatgtttacctattatctgaatgcttgcgctggtgctttccgcgcccgtgatattcaactctggca

SEQ ID NO: 868848 - DNA, 75 bp, synthetic construct
  source 1..75: mol_type = other DNA
ggggaataatacgattgtattcaaagtcgacaaaccactgaatgcagcctttccttcagataccagcgtctcagc

SEQ ID NO: 868849 - DNA, 75 bp, synthetic construct
  source 1..75: mol_type = other DNA
tgggctttgatattggaagtaccaacagaactaaaatcagatttacttacacttctgctacaccaaattcaattt

SEQ ID NO: 868850 - DNA, 75 bp, synthetic construct
  source 1..75: mol_type = other DNA
gtggaggcctccggtgccagcctggagaaagggcggcatgaccagctacttaccgcgcttcgcgcgctactgtta

SEQ ID NO: 868851 - DNA, 75 bp, synthetic construct
  source 1..75: mol_type = other DNA
caggggatacagaccaatctgtcgctgaaagaggaaagctacggcgactggctgccgaagtgcgacgaacccgca

SEQ ID NO: 868852 - DNA, 75 bp, synthetic construct
  source 1..75: mol_type = other DNA
caaaaccgcacgttaacgtaggtactatcggccacgttgaccagggtaaaaccacgctgaccgctgcaatcacga

SEQ ID NO: 868853 - DNA, 75 bp, synthetic construct
  source 1..75: mol_type = other DNA
accgtattgtcggcggaaacagcctgccgacggcgatccatgcgttgcgcgttgctatcgacgatgatggcaaac

SEQ ID NO: 868854 - DNA, 75 bp, synthetic construct
  source 1..75: mol_type = other DNA
caaaaccgcacgttaacgtgggtactatcggccacgttgaccaaggtaaaaccacgctgaccgctgcaatcacga

SEQ ID NO: 868855 - DNA, 75 bp, synthetic construct
  source 1..75: mol_type = other DNA
caaaaccgcacgttaacgtcggtactatcggccacgttgaccaaggtaaaacaacgctgaccgctgcaatcacaa

SEQ ID NO: 868856 - DNA, 75 bp, synthetic construct
  source 1..75: mol_type = other DNA
caaaaccgcacgttaacgtaggtactatcggccacgttgaccaaggtaaaacaactctgaccgctgcaatcacta

SEQ ID NO: 868857 - DNA, 75 bp, synthetic construct
  source 1..75: mol_type = other DNA
tttgatttttgtggctatctggaggcactgccggagcctgagggcatgtatattggcaatgccaacatcattccg

SEQ ID NO: 868858 - DNA, 75 bp, synthetic construct
  source 1..75: mol_type = other DNA
ggccggctgtctcttatacacaaatccccacccggggatttgtgatgtctgtcagtctgctttagggggactctt

SEQ ID NO: 868859 - DNA, 75 bp, synthetic construct
  source 1..75: mol_type = other DNA
caaaaccgcacgttaacgtgggtactatcggccacgttgaccaaggtaaaacaaccctgaccgctgcaatcacaa

SEQ ID NO: 868860 - DNA, 75 bp, synthetic construct
  source 1..75: mol_type = other DNA
cgttgaatatgacaccccgacccgtcactacgcacatgtagactgcccggggcacgccgactatgttaaaaacat

SEQ ID NO: 868861 - DNA, 75 bp, synthetic construct
  source 1..75: mol_type = other DNA
tattgtcttacattcccatttttacggcagaccttcaataattgggtacaaaacgttttatcgtccattctaacg

SEQ ID NO: 868862 - DNA, 75 bp, synthetic construct
  source 1..75: mol_type = other DNA
aagtagcaaaaaatgcagaaagatcttttgcattcccaacgaagaaacttgccattgaaagtttattgcgccgga

SEQ ID NO: 868863 - DNA, 75 bp, synthetic construct
  source 1..75: mol_type = other DNA
tttctggcatcttcagacagatataaaaaatatctcagtaagagagatgaggctaaagtaattgtggagactgag

SEQ ID NO: 868864 - DNA, 75 bp, synthetic construct
  source 1..75: mol_type = other DNA
ctacctgtactggcgttgaaatgttccgcaaactgctggacgaaggccgtgctggtggtcaggtactggctaagc

SEQ ID NO: 868865 - DNA, 75 bp, synthetic construct
  source 1..75: mol_type = other DNA
cagacttcatcgccccttccgccgcgatggatggccaggtacaggcgattcgccaggcgctggacgctgctggct

SEQ ID NO: 868866 - DNA, 75 bp, synthetic construct
  source 1..75: mol_type = other DNA
ccgtggttgcagctgctgcaggcgcagacttcatcgccccttccgccgcgatggacggccaggtacaggcgattc

SEQ ID NO: 868867 - DNA, 75 bp, synthetic construct
  source 1..75: mol_type = other DNA
ccggcgctatagcggttgtttgcggaattgtcgctggtgctattgtccttgtgtccgcaaaacttgcgcaaagca

SEQ ID NO: 868868 - DNA, 75 bp, synthetic construct
  source 1..75: mol_type = other DNA
ttcaacagatcgctaacaccttcagttatgaagggatttgttgaaatgcaagctcaaatcaacaaatcatatgcc

SEQ ID NO: 868869 - DNA, 75 bp, synthetic construct
  source 1..75: mol_type = other DNA
ggcgtagagatggtaatgccgggcgacaacatcaaaatggttgttaccctgatccacccgatcgcgatggacgac

SEQ ID NO: 868870 - DNA, 75 bp, synthetic construct
  source 1..75: mol_type = other DNA
gttaacgtggccgcgaaggatgccgctactgccaagaaacaggcagatgagcgcgtcgcacaatacatttccttc

SEQ ID NO: 868871 - DNA, 75 bp, synthetic construct
  source 1..75: mol_type = other DNA
agtcgctgttgtcacaggaaaatggcagacagcatattgccggtgcctgggtaacatcgttgagtgatgtgcggg

SEQ ID NO: 868872 - DNA, 75 bp, synthetic construct
  source 1..75: mol_type = other DNA
ataactactataaattaatcaactatccaatcatgatgattcatgatgagtggcttggtgatttaaccggcgtca

SEQ ID NO: 868873 - DNA, 75 bp, synthetic construct
  source 1..75: mol_type = other DNA
ataaaaccaactcatattaatgatttatttcttaacagacttaataaaattttattgccttatgaaactttatga

SEQ ID NO: 868874 - DNA, 75 bp, synthetic construct
  source 1..75: mol_type = other DNA
acagaatggtttaatgcccattttcttaattatgaaggcgccgagcccattgaattgaaccgccccggaaatcct

SEQ ID NO: 868875 - DNA, 75 bp, synthetic construct
  source 1..75: mol_type = other DNA
gagacggcgaaccgtattacaggtctatgtaacaactacattagcctgcgggtaaacgacacaccaacacaaacg

SEQ ID NO: 868876 - DNA, 75 bp, synthetic construct
  source 1..75: mol_type = other DNA
aatcacgttcacgatgcgccatcttctggcatggcaggacaatatcactgccggtcagggctggagcgtggtcag

SEQ ID NO: 868877 - DNA, 75 bp, synthetic construct
  source 1..75: mol_type = other DNA
agaaataccatttaatgagaataaaacaagatttggctgttgtatcaactcttgttgatgggatgaagaatattg

SEQ ID NO: 868878 - DNA, 75 bp, synthetic construct
  source 1..75: mol_type = other DNA
cgtaatgcgctgaaagggccgattactgcgctggcggaagatctggcgcaacttcgcggtgtgctggggctggat

SEQ ID NO: 868879 - DNA, 75 bp, synthetic construct
  source 1..75: mol_type = other DNA
atagcgtgcgctaccatgtttccaactatcagcccagcccaatggtgcggatgatgaaagccgatgccgcgccgg

SEQ ID NO: 868880 - DNA, 75 bp, synthetic construct
  source 1..75: mol_type = other DNA
ttatcctgacagagatacatgcggatgtagctttcatggtagtttgaacgatgccatagaaggttccttgtgtga

SEQ ID NO: 868881 - DNA, 75 bp, synthetic construct
  source 1..75: mol_type = other DNA
atgcctgcacaactttcttattggcggttatactgatgatgacattattgatagttaccagcgtcactttatgtc

SEQ ID NO: 868882 - DNA, 75 bp, synthetic construct
  source 1..75: mol_type = other DNA
agaaggggcggcatgaccagttgcttaccgcacttcgcgcactgctgttaagccgcaataatccgtttggtgata

SEQ ID NO: 868883 - DNA, 75 bp, synthetic construct
  source 1..75: mol_type = other DNA
tgctgctcgcgcattcgatcagatcgataacgcgccggaagaaaaagctcgtggtatcaccatcaacacttctca

SEQ ID NO: 868884 - DNA, 75 bp, synthetic construct
  source 1..75: mol_type = other DNA
ccggatgaagtcgacgtcaccactgtggtgaaagtgattgatacgtgcccaagcggcgcgctgaaataccgtcat

SEQ ID NO: 868885 - DNA, 75 bp, synthetic construct
  source 1..75: mol_type = other DNA
actcactcgtgctggtcgcttctctgctactggcgggccatgtacaggcaacggaactgctgaacagttcttatg

SEQ ID NO: 868886 - DNA, 75 bp, synthetic construct
  source 1..75: mol_type = other DNA
tttccggtggtttcgactccggtgtttccagttatatgttgatgcgtcgcggctgccgcgtgcattactgcttct

SEQ ID NO: 868887 - DNA, 75 bp, synthetic construct
  source 1..75: mol_type = other DNA
tccgcgaaatcgcccagcagaccgagcaggaagtggtggaagtggaaaccgtcaatggcttcggcccgaatgacg

SEQ ID NO: 868888 - DNA, 75 bp, synthetic construct
  source 1..75: mol_type = other DNA
ctcaccgcgtgcgttttgtcgccattaacttcgaaccggtagtcggtgaaattcttgagaaaatcgacgacggtc

SEQ ID NO: 868889 - DNA, 75 bp, synthetic construct
  source 1..75: mol_type = other DNA
taaccgtcagcttaacgcggttaaccgtcacaccggcagcaagctggttaacgcggtgcagcaggatgttcacgc

SEQ ID NO: 868890 - DNA, 75 bp, synthetic construct
  source 1..75: mol_type = other DNA
catgatcgtgctgacgccgtccgatcatatgctggtgccggacttccctggcctgtcggaagatggcatcaccat

SEQ ID NO: 868891 - DNA, 75 bp, synthetic construct
  source 1..75: mol_type = other DNA
acgccgtgcagcaggatgttcacgctatccttcaactgggtgaagcgcagatcgagaaatctgcccgtgcattga

SEQ ID NO: 868892 - DNA, 75 bp, synthetic construct
  source 1..75: mol_type = other DNA
tgactcagttcctgaaaaacgttgaagtgttcgatactggcggtcgtggcgcgactaccacctttgccgagcgcg

SEQ ID NO: 868893 - DNA, 75 bp, synthetic construct
  source 1..75: mol_type = other DNA
ttgatgcagcgcgtaacgaagccgacgaaaaactgtctgccgagctgtctcgtctggaagcgctgcgtgcagtta

SEQ ID NO: 868894 - DNA, 75 bp, synthetic construct
  source 1..75: mol_type = other DNA
ggtactggctaagccgggcaccatcaagccgcacactaagttcgaatctgaagtgtacattctgtccaaagatga

SEQ ID NO: 868895 - DNA, 75 bp, synthetic construct
  source 1..75: mol_type = other DNA
caccctcgatttccacgcgctgtttgaacgtaagcgtgcagcaagaaccgtattgacggggatgtgttattcagt

SEQ ID NO: 868896 - DNA, 75 bp, synthetic construct
  source 1..75: mol_type = other DNA
caaaaccgcacgttaacgtcggtactatcggccacgttgaccagggtaaaacgacactgaccgctgcaatcacga

SEQ ID NO: 868897 - DNA, 75 bp, synthetic construct
  source 1..75: mol_type = other DNA
ctcggtcatgtgcatattgccgataaccatcgctaccagccgggcagcggcaccctcgatttccacgcgctgttt

SEQ ID NO: 868898 - DNA, 75 bp, synthetic construct
  source 1..75: mol_type = other DNA
agggctatgtggtgtatgaagggcgtatccgggcagaagatcctgctcaggcgtaccgtgattctttggcctggt

SEQ ID NO: 868899 - DNA, 75 bp, synthetic construct
  source 1..75: mol_type = other DNA
ctggcagaagtgggcggtaaaggcatcgtcgttccggctgcgtggggcatgtttaccttccgcttaccgccgatg

SEQ ID NO: 868900 - DNA, 75 bp, synthetic construct
  source 1..75: mol_type = other DNA
tcgccgatgctcgtcgttacatcgtcgaaaacaatcttaaacatgtgcagattatcggcgatttctatcacatga

SEQ ID NO: 868901 - DNA, 75 bp, synthetic construct
  source 1..75: mol_type = other DNA
cgtaggttcttccactaaccaacgccgtatcaccaacgttgccgctggtaaaaatgctactgacgcggttaacgt

SEQ ID NO: 868902 - DNA, 75 bp, synthetic construct
  source 1..75: mol_type = other DNA
caccaagtacttcaagaccaacaccgatggcgtagatgctaacgcgcagggtaaagacagtgttgcgattggctc

SEQ ID NO: 868903 - DNA, 75 bp, synthetic construct
  source 1..75: mol_type = other DNA
aaacaagatgccttgctatggaatggctcagcattcagcgccaaacatggtgataatggtggtactgacagcaaa

SEQ ID NO: 868904 - DNA, 75 bp, synthetic construct
  source 1..75: mol_type = other DNA
cgtattcaccgccaaacacggcaccgaagccaccagcaaaatcaccaacgttacggcaggtgagctgacggagac

SEQ ID NO: 868905 - DNA, 75 bp, synthetic construct
  source 1..75: mol_type = other DNA
gacggggacaggaatagttaccgctcctagctatcaactgcaaagcggtgtctttggtaatgtcggcgacgcatt

SEQ ID NO: 868906 - DNA, 75 bp, synthetic construct
  source 1..75: mol_type = other DNA
ctacaccgcctacaacatggacgcaccgcagaactctgtgggtgagttctctgttggcagtgacgatggtcaacg

SEQ ID NO: 868907 - DNA, 75 bp, synthetic construct
  source 1..75: mol_type = other DNA
gccaaacacggtactaatggtgatgcaagcgtgatcactgatgtcgcaaacggggatgtttcaagcacaagctct

SEQ ID NO: 868908 - DNA, 75 bp, synthetic construct
  source 1..75: mol_type = other DNA
ttattataacgtcggcgatgcactggctgcgattaactcctcatttagcacgtctctcggcgatgccctgctttg

SEQ ID NO: 868909 - DNA, 75 bp, synthetic construct
  source 1..75: mol_type = other DNA
cgcccagggtaaagatagcgttgcgattggttctggttccattgctgccgctgacaacagcgtcgcactgggtac

SEQ ID NO: 868910 - DNA, 75 bp, synthetic construct
  source 1..75: mol_type = other DNA
cgacggcgattggctttaacgcggatgcgatcgggaagtccagcctggcgctgggagacaacgccagcgctggtg

SEQ ID NO: 868911 - DNA, 75 bp, synthetic construct
  source 1..75: mol_type = other DNA
ggtacagttaacgcaccaacctacaatttaaaaaatggtaacaaaaataacgttggcagtgcgctcactgtactt

SEQ ID NO: 868912 - DNA, 75 bp, synthetic construct
  source 1..75: mol_type = other DNA
acgaaggcgaaattatttttgcgggagaagagattcaggcgagtcacatccgcgataccgaacgcaaaggtatcg

SEQ ID NO: 868913 - DNA, 75 bp, synthetic construct
  source 1..75: mol_type = other DNA
acgtggcaaccaacaccactaatatcagcaccctgaccggcgatgttgctaacaacaccaccaatatcactaacc

SEQ ID NO: 868914 - DNA, 75 bp, synthetic construct
  source 1..75: mol_type = other DNA
ccaatggtcgttgggtctacaaattacaaggtagtaccaatagccagggtgaatactccgccgcgctcggtgccg

SEQ ID NO: 868915 - DNA, 75 bp, synthetic construct
  source 1..75: mol_type = other DNA
gctttaggtgtgtcgatggtgagcgccaatggtcgttgggtctacaaattacaaggtagtaccaatagccagggt

SEQ ID NO: 868916 - DNA, 75 bp, synthetic construct
  source 1..75: mol_type = other DNA
aacctgaacactcaggtcactaatctggatactcgcgtgaccaatatcgaaaatggcattggcgatattgtaacc

SEQ ID NO: 868917 - DNA, 75 bp, synthetic construct
  source 1..75: mol_type = other DNA
tccgaagcaggcggcgtgcgctatgacaccaaagctgacggttctgttgattacagcaacatcactctcggcggt

SEQ ID NO: 868918 - DNA, 75 bp, synthetic construct
  source 1..75: mol_type = other DNA
aggaaaacggtgcgggtattaactatgtacgtaccaacgacaacggcttagcgttcaacgatgccagcgcctcag

SEQ ID NO: 868919 - DNA, 75 bp, synthetic construct
  source 1..75: mol_type = other DNA
caacgtgggtcagttgaaagtaacggacgcgcaggtttcccagaatacccagagcattactaacctgaacactca

SEQ ID NO: 868920 - DNA, 75 bp, synthetic construct
  source 1..75: mol_type = other DNA
gtgcgctatctgtaggtaaagatggtgaaagttatcgccaaatcattaacgtcgcagatggttcagaggctcatg

SEQ ID NO: 868921 - DNA, 75 bp, synthetic construct
  source 1..75: mol_type = other DNA
gccgggctattgcaatcggaagtgcggctcaagcaaccaaagagtattcccttgcgttggggaatagcgctcatg

SEQ ID NO: 868922 - DNA, 75 bp, synthetic construct
  source 1..75: mol_type = other DNA
aaaactgccagtgtaatcactaacgtcgctaacggtgcagtctctgccaccagcagcgatgccattaatggctca

SEQ ID NO: 868923 - DNA, 75 bp, synthetic construct
  source 1..75: mol_type = other DNA
ccgatggcgataacagcgtggcaatcggtcatggcagcaacagcatcgttgagacgagtattgcgctgggtagcg

SEQ ID NO: 868924 - DNA, 75 bp, synthetic construct
  source 1..75: mol_type = other DNA
actaacctgaccaatgatgtcgcggatatcaacaccacaatcacaggcctggaagatgatgcactgcagtggaat

SEQ ID NO: 868925 - DNA, 75 bp, synthetic construct
  source 1..75: mol_type = other DNA
gctgacggaaccgttaatgcgccaacctatactatttcctcagggacctacaacaatgtaggtgatgctcttgat

SEQ ID NO: 868926 - DNA, 75 bp, synthetic construct
  source 1..75: mol_type = other DNA
tacaacatggacgcaccgcagaactctgtaggtgagttttctgttggtagtgaagacggtcaacgtcagatcaca

SEQ ID NO: 868927 - DNA, 75 bp, synthetic construct
  source 1..75: mol_type = other DNA
ccaacactgccaatatcgccactaacactacggatattgcgactaataccgccgatatagctacaaacgctagca

SEQ ID NO: 868928 - DNA, 75 bp, synthetic construct
  source 1..75: mol_type = other DNA
tgccgctgacaacagcgtcgcgctgggtaccggttccgtggccaacgaagaaaacaccatctctgtgggttcttc

SEQ ID NO: 868929 - DNA, 75 bp, synthetic construct
  source 1..75: mol_type = other DNA
cgatgcggttaacgtgggtcagttgaaagtaacggacgcgcaggtttcccagaatacccagagcattactaacct

SEQ ID NO: 868930 - DNA, 75 bp, synthetic construct
  source 1..75: mol_type = other DNA
gcagcactgacgccgttaatggctcccagctcaaaaccaccaacgataacgtgtcgaccaacaccaccaacatca

SEQ ID NO: 868931 - DNA, 75 bp, synthetic construct
  source 1..75: mol_type = other DNA
actatttcagacaccagtaaagatgcggttaacggttcccagttgaaagaaaccaaagacgatgtggccaccaac

SEQ ID NO: 868932 - DNA, 75 bp, synthetic construct
  source 1..75: mol_type = other DNA
ttgcggctggtgatctctccacaaccagtaccgatgctgttaacggttcccagttaaacgcaaccaatattctgg

SEQ ID NO: 868933 - DNA, 75 bp, synthetic construct
  source 1..75: mol_type = other DNA
cggccagtcgttttcctgttcccggtatcctcagcttgcccgtgcttatcctagctgtaaattgcccgatctgcg

SEQ ID NO: 868934 - DNA, 75 bp, synthetic construct
  source 1..75: mol_type = other DNA
tgtgggcaggttttgaatcctaccctgtcggaagccctataccgtggccatcagccacccctccacaaggctacc

SEQ ID NO: 868935 - DNA, 75 bp, synthetic construct
  source 1..75: mol_type = other DNA
atgctcagattacgagtatttttcccgatattgtatgtactggtagtgaagttcatttttgtcgttgcccagata

SEQ ID NO: 868936 - DNA, 75 bp, synthetic construct
  source 1..75: mol_type = other DNA
tgtcggcagcgaagacggtcaacgtcagatcaccaacgtcgcggctggttcagcggataccgatgcggttaacgt

SEQ ID NO: 868937 - DNA, 75 bp, synthetic construct
  source 1..75: mol_type = other DNA
agctttaggttatgacgcgatagccgaaggtgagtacagctctgccatcgggtcaaaaaccctcgcaagtggtgg

SEQ ID NO: 868938 - DNA, 75 bp, synthetic construct
  source 1..75: mol_type = other DNA
ggtgccctgctgggaggatatgtcacggacctgattgttgatgaaggaacggcagagtttttgctggcgtgtgaa

SEQ ID NO: 868939 - DNA, 75 bp, synthetic construct
  source 1..75: mol_type = other DNA
ttatgccattgctggcggcagttacgacaatgtcggtgacgcgctggaagcgatcgataccacgctggatgacgc

SEQ ID NO: 868940 - DNA, 75 bp, synthetic construct
  source 1..75: mol_type = other DNA
ggtcaacgtcagatcaccaacgtcgcagcggggtcggcggataccgatgcggttaacgtgggtcagttgaaagta

SEQ ID NO: 868941 - DNA, 75 bp, synthetic construct
  source 1..75: mol_type = other DNA
tactatcacgccaactcaacggctgaagactcactggcagtcggtgaagactcgctggcaatgggcgcgaaaacc

SEQ ID NO: 868942 - DNA, 75 bp, synthetic construct
  source 1..75: mol_type = other DNA
ccaccgatgcggttaacgtttcacaactgaagtcttctgaagcaggcggcgttcgctacgacaccaaagctgatg

SEQ ID NO: 868943 - DNA, 75 bp, synthetic construct
  source 1..75: mol_type = other DNA
atattgccactaacaccaccaacatctctaacctgactgagacggtgactaatcttggtgaggatgcgctgaaat

SEQ ID NO: 868944 - DNA, 75 bp, synthetic construct
  source 1..75: mol_type = other DNA
ccactaacacttccaacatctctaccctgactgagacggtgactaatcttggtgaggatgcgctgaaatgggata

SEQ ID NO: 868945 - DNA, 75 bp, synthetic construct
  source 1..75: mol_type = other DNA
agctagcggtactgacagcctcgcattaggcagacaatcacttgccagcgcagcgaacgctattgcgataggtgc

SEQ ID NO: 868946 - DNA, 75 bp, synthetic construct
  source 1..75: mol_type = other DNA
ttctgaagcaggcggcgtgcgctacgacaccaaagctgacggttccgttgattacagtaacatcaccctcggtgg

SEQ ID NO: 868947 - DNA, 75 bp, synthetic construct
  source 1..75: mol_type = other DNA
cgacctgcagcaggatgctctgttgtggaacggcaccgcgttcagcgccgcacacggcaccgacgtcaccagcaa

SEQ ID NO: 868948 - DNA, 75 bp, synthetic construct
  source 1..75: mol_type = other DNA
ggcgatagcagcgtggcaatcggtcatggcagcaacagcatcgttgagacgagtattgcgctgggtagcgaatcc

SEQ ID NO: 868949 - DNA, 75 bp, synthetic construct
  source 1..75: mol_type = other DNA
cgctgcacacggcactaacgccaccaacaaaatcactaacgtcaccgctggtgagctctctgacaccagcaccga

SEQ ID NO: 868950 - DNA, 75 bp, synthetic construct
  source 1..75: mol_type = other DNA
gcattaataatgatcccagtgtaatcactgatgttgcaaacggtgcagtctcgtccaccagtagcgacgctatta

SEQ ID NO: 868951 - DNA, 75 bp, synthetic construct
  source 1..75: mol_type = other DNA
gccgcaggcgcattcaccgctgcacacggtactaacgccaccaacaaaatcagcaacgtacaagctggcatagtc

SEQ ID NO: 868952 - DNA, 75 bp, synthetic construct
  source 1..75: mol_type = other DNA
gtatgtcatcgataaagtgactcacaaccacaccgagttattcagcgacggcgcggctaaaaaaatcgagtttag

SEQ ID NO: 868953 - DNA, 75 bp, synthetic construct
  source 1..75: mol_type = other DNA
ctgagcggtgacctgtatcctgagctgaccggcggcaagttttcgatgctgacgctttatgcgatggccgagcag

SEQ ID NO: 868954 - DNA, 75 bp, synthetic construct
  source 1..75: mol_type = other DNA
gccattaatggctcgcagctctatagcaccaataagtacattgctgatgcactgggtggtgatgcagaagtcaac

SEQ ID NO: 868955 - DNA, 75 bp, synthetic construct
  source 1..75: mol_type = other DNA
actcgtatcagcaacgtctccgctggcgtcaacaacaacgacgcggtgaactacgcgcagttgaagcaaagcgtg

SEQ ID NO: 868956 - DNA, 75 bp, synthetic construct
  source 1..75: mol_type = other DNA
ttaacggttcccagttaaatgccacgaatatgttgatccagaatattgccggtgataccagcgaaagctatatca

SEQ ID NO: 868957 - DNA, 75 bp, synthetic construct
  source 1..75: mol_type = other DNA
cataaatagcctgaacacgtctgtggatgctcttgaacaggatgctatgctctggaacggcactgcattcaacgc

SEQ ID NO: 868958 - DNA, 75 bp, synthetic construct
  source 1..75: mol_type = other DNA
gccgttaacggctctcagttgaaaaccacccaagacgatgtggatgccaacacggctaatatcgcaaccaatact

SEQ ID NO: 868959 - DNA, 75 bp, synthetic construct
  source 1..75: mol_type = other DNA
caagatgccttgctatgggatggcactgcgtttagcgccaaacatggcaccagcaatactgacagcaaaatcacc

SEQ ID NO: 868960 - DNA, 75 bp, synthetic construct
  source 1..75: mol_type = other DNA
acgcttgccggtgtgctttatcccgaactgaccggcggcaagctgacgatgaccacgctcagactgatggcagag

SEQ ID NO: 868961 - DNA, 75 bp, synthetic construct
  source 1..75: mol_type = other DNA
gtgagcgccaatggtcgttgggtctacaaattacaaggtagtaccaatagccagggtgaatactccgccgcactc

SEQ ID NO: 868962 - DNA, 75 bp, synthetic construct
  source 1..75: mol_type = other DNA
ctggtgatctctccacaaccagtaccgatgctgttaacggttcccagttaaacgcaaccaatattctggttacgc

SEQ ID NO: 868963 - DNA, 75 bp, synthetic construct
  source 1..75: mol_type = other DNA
ttcagcgccgcgcacggtaccgaagctaccagcaagatcaccaacttactggctggcaagatatcttctaacagc

SEQ ID NO: 868964 - DNA, 75 bp, synthetic construct
  source 1..75: mol_type = other DNA
gtacttcaagaccaataccgatggtgtagatgccagcgcgcagggtaaagatagcgtcgcgattggttccggctc

SEQ ID NO: 868965 - DNA, 75 bp, synthetic construct
  source 1..75: mol_type = other DNA
tcaccgaagaaaccctttcgcggttgtatgtcacggcggaaacctacgatttcggccctgtcggtacagaggtta

SEQ ID NO: 868966 - DNA, 75 bp, synthetic construct
  source 1..75: mol_type = other DNA
acgctgacggaactatcactgcaccgacttacaccattgcaaataccgattacaacaacgtcggtgaagccctgg

SEQ ID NO: 868967 - DNA, 75 bp, synthetic construct
  source 1..75: mol_type = other DNA
caccgatgtagtaaacggctctcaattgtacgacctgcagcaggatgcgctgttgtggaacggcacagcattcag

SEQ ID NO: 868968 - DNA, 75 bp, synthetic construct
  source 1..75: mol_type = other DNA
cgccagacgggatttaacccgttcgaccgcgacgaaggaccgagcgtgaaagcgacgcaaattggcttcgggcaa

SEQ ID NO: 868969 - DNA, 75 bp, synthetic construct
  source 1..75: mol_type = other DNA
ttgatcccgaaaaactgactaccgcgcaattaatcgctgcctggcagagcggagaaccgtgggtcaccagttggg

SEQ ID NO: 868970 - DNA, 75 bp, synthetic construct
  source 1..75: mol_type = other DNA
accgcaggcgctgctgtccgaaatcgaaaaatgctggcatcgccatcgcaaactgtggcctgagcgaaccatcaa

SEQ ID NO: 868971 - DNA, 75 bp, synthetic construct
  source 1..75: mol_type = other DNA
tatcgctggccgtcaaattcccgtatcggcaaacgggatgcctttcaatttctcggtgtgggtgaggaaaacatc

SEQ ID NO: 868972 - DNA, 75 bp, synthetic construct
  source 1..75: mol_type = other DNA
aaacaggcggaatcgctcatcggtaaggccggtagtctggcgactagattcacggggatgacgggggcggaataa

SEQ ID NO: 868973 - DNA, 75 bp, synthetic construct
  source 1..75: mol_type = other DNA
tgaatgcaattgactcaaccctggataacgccttgctttgggacgctaccgcaggtgaaaacggtgcgtttaacg

SEQ ID NO: 868974 - DNA, 75 bp, synthetic construct
  source 1..75: mol_type = other DNA
ctatcggttctaacgcacgcgcaaatcatgccgacagcattgcaatgggtaatggttctcagactacccgtggtg

SEQ ID NO: 868975 - DNA, 75 bp, synthetic construct
  source 1..75: mol_type = other DNA
actattggtggtactgactacactaacgtcggtgatgctctggcagccattaacacatcatttagctcatcactc

SEQ ID NO: 868976 - DNA, 75 bp, synthetic construct
  source 1..75: mol_type = other DNA
tatcgctggccgtcaaattcccgtatcggtaaacgggatgcctatcagtttctcggtgtgggtgaggagaacatc

SEQ ID NO: 868977 - DNA, 75 bp, synthetic construct
  source 1..75: mol_type = other DNA
caacgagctgcgtaaacagggggttttatctccgacagtggtgtccgttctgtctggttactccataactgatct

SEQ ID NO: 868978 - DNA, 75 bp, synthetic construct
  source 1..75: mol_type = other DNA
agtatcgcgttgggctacgggagtattgcaaataccgataatacgattgctctgggtaatcaaagccaggcaatc

SEQ ID NO: 868979 - DNA, 75 bp, synthetic construct
  source 1..75: mol_type = other DNA
gcagatgcgattaacggtattgctatcggtagcaacgcgcgtgcaaaccatgcaaacagcattgcaatgggtaat

SEQ ID NO: 868980 - DNA, 75 bp, synthetic construct
  source 1..75: mol_type = other DNA
ttcagcgccaaacacggcattaataatgatcccagtgtaatcactgatattgcaaacggtgcagtctcgtccacc

SEQ ID NO: 868981 - DNA, 75 bp, synthetic construct
  source 1..75: mol_type = other DNA
cactgacgccgttaacggctcacagctcaaaaccaccaacgagaacgtgtcgaccaacaccaccaacatcgccac

SEQ ID NO: 868982 - DNA, 75 bp, synthetic construct
  source 1..75: mol_type = other DNA
gatgctctgctctgggatacaaccgcaggcaaattcagcgccaaacacggcattaataatgatcccagtgtaatc

SEQ ID NO: 868983 - DNA, 75 bp, synthetic construct
  source 1..75: mol_type = other DNA
gtggtgctgatattagcgatacaggtgtattaaccgggccaacctatagtattggcggcactgactatactaacg

SEQ ID NO: 868984 - DNA, 75 bp, synthetic construct
  source 1..75: mol_type = other DNA
tcgccgatggttccgaagcccatgacgccgttacggttcgccagctgcaaaatgccattggtgcagtcgctacca

SEQ ID NO: 868985 - DNA, 75 bp, synthetic construct
  source 1..75: mol_type = other DNA
ttaatggctcacagctttatggcgtagcggattcatttacgtcatatcttggtggtggtgctgatatcagcgata

SEQ ID NO: 868986 - DNA, 75 bp, synthetic construct
  source 1..75: mol_type = other DNA
cagtatcaccaacctggctgatacggtgactaaccttggtgaagatgcgctgaaatgggatgacaccgctggcgt

SEQ ID NO: 868987 - DNA, 75 bp, synthetic construct
  source 1..75: mol_type = other DNA
caaaatcaccaatgtcaccgctggcgacctctctgacaccagcaccgacgccgtcaacggttctcagctgaaagc

SEQ ID NO: 868988 - DNA, 75 bp, synthetic construct
  source 1..75: mol_type = other DNA
tgatgggccgttcaagaagttgatcggcggttggaagtttacgccgctgagccaggaggcgtgccgtatcgagtt

SEQ ID NO: 868989 - DNA, 75 bp, synthetic construct
  source 1..75: mol_type = other DNA
cggtgacctgacagctggcagcactgacgccgttaacggctcccagctcaaaaccaccaacgataacgtgacgac

SEQ ID NO: 868990 - DNA, 75 bp, synthetic construct
  source 1..75: mol_type = other DNA
cactgacgccgttaacggctctcagctcaaaaccaccaacgaaaacgtggcgaccaacaccaccaacatcgccac

SEQ ID NO: 868991 - DNA, 75 bp, synthetic construct
  source 1..75: mol_type = other DNA
ttgttgatgcgctgggggggtggtgccgaagtcaatgcagacggcaccatcactgcgccgacgtacaccattgct

SEQ ID NO: 868992 - DNA, 75 bp, synthetic construct
  source 1..75: mol_type = other DNA
ccatttgtaaccaggtgaatcatttgataccaacgagggttttagtgaaaggaggtgaaatcacctgtaagatac

SEQ ID NO: 868993 - DNA, 75 bp, synthetic construct
  source 1..75: mol_type = other DNA
aagcgcctctggtgtcggcgctacagctgtaggttataacgctgtcgcgtctggtgccagcagcgtagccattgg

SEQ ID NO: 868994 - DNA, 75 bp, synthetic construct
  source 1..75: mol_type = other DNA
aacattgaatgccaggttgctccgcatatttaccgggaactggtcaatgcactgcgtgatatcgctgctgtatat

SEQ ID NO: 868995 - DNA, 75 bp, synthetic construct
  source 1..75: mol_type = other DNA
agcaaaatcaccaacgttaaagatgccgacctgacggctgacagcaccgatgccgttaacggctctcagctgaaa

SEQ ID NO: 868996 - DNA, 75 bp, synthetic construct
  source 1..75: mol_type = other DNA
gccaccaacaccaccaatatcaccaatttgacggattccgttggtgaccttcaggatgatgccctgctgtggaat

SEQ ID NO: 868997 - DNA, 75 bp, synthetic construct
  source 1..75: mol_type = other DNA
acgactccctgctgtggaacaaagcggctggcgcgttcagcgccgcgcacggtaccgaagctaccagcaagatca

SEQ ID NO: 868998 - DNA, 75 bp, synthetic construct
  source 1..75: mol_type = other DNA
cactgacgccgttaacggctcgcagctcaaaaccaccaacgaaaacgtgtcgaccaacaccaccaacatcgccac

SEQ ID NO: 868999 - DNA, 75 bp, synthetic construct
  source 1..75: mol_type = other DNA
cactgacgccgttaacggctctcagctcaaaaccaccaacgagaacgtgacgaccaacaccaccaacatcgccac

SEQ ID NO: 869000 - DNA, 75 bp, synthetic construct
  source 1..75: mol_type = other DNA
ttaacgtaggtcagttgaaagtcactgatgagcgcgtagcgcaaaatacccaaagcattactaacctgaacaatc

SEQ ID NO: 869001 - DNA, 75 bp, synthetic construct
  source 1..75: mol_type = other DNA
atgggtgcgaaaaccatcgtgaatggcgataaaggtattggtatcggttatggtgcctacgtggacgcgaatgca

SEQ ID NO: 869002 - DNA, 75 bp, synthetic construct
  source 1..75: mol_type = other DNA
ctatcactgcaccgacttacaccattgcaaataccgattacaacaacgtcggtgaagctctggatgcgcttgatg

SEQ ID NO: 869003 - DNA, 75 bp, synthetic construct
  source 1..75: mol_type = other DNA
ctgaaacatgcactggcgggggcgaaattcccttatgtaaacgccaacgtcattgacgccaaaacccaacagccg

SEQ ID NO: 869004 - DNA, 75 bp, synthetic construct
  source 1..75: mol_type = other DNA
aagtgatggcggaaaactcagtttattatctcagtgaaattccgggtgttgacgccattatgtttggccatgctc

SEQ ID NO: 869005 - DNA, 75 bp, synthetic construct
  source 1..75: mol_type = other DNA
atgtttacaccgtatttaattaaagacaccgaagtggtcgataaagacggaaaaaaacagacgctgaagattggc

SEQ ID NO: 869006 - DNA, 75 bp, synthetic construct
  source 1..75: mol_type = other DNA
ggccagtaaagccgattggcactgctcacaatgtgcgatcgattactatggtgaacgctattgtctgacctgtag

SEQ ID NO: 869007 - DNA, 75 bp, synthetic construct
  source 1..75: mol_type = other DNA
gcggcagtgcactcagataccacccgcagcacgacacggaacgtccctggtttgaacacactgacgacgggctga

SEQ ID NO: 869008 - DNA, 75 bp, synthetic construct
  source 1..75: mol_type = other DNA
aaaaaaacagacgttaaagattggctatattggcgtcgtgccgccgcagattatggggtgggataaagccaattt

SEQ ID NO: 869009 - DNA, 75 bp, synthetic construct
  source 1..75: mol_type = other DNA
atgtacgcaaaatcctttctcgctcttgatagcaacggacgtctgacgggcgcccgtactgcacaggccgcacct

SEQ ID NO: 869010 - DNA, 75 bp, synthetic construct
  source 1..75: mol_type = other DNA
atgtacgcaaaatcctttttcgctcttgatggcaacggacgtctgacgggcgcccgtactgtacaggccgcacct

SEQ ID NO: 869011 - DNA, 75 bp, synthetic construct
  source 1..75: mol_type = other DNA
atgtacgcaaaatcctttatcgctcttgatcgcaacggacgtctgacgggcgcccgtactgcacaggccgcacct

SEQ ID NO: 869012 - DNA, 75 bp, synthetic construct
  source 1..75: mol_type = other DNA
ctaagcacggtcatgagtgcccttatgtcagaccggaacgcagggaggtacgcttgattaagcgtctgcagcaat

SEQ ID NO: 869013 - DNA, 75 bp, synthetic construct
  source 1..75: mol_type = other DNA
atgtacgcaaaatcctttgtcgctcttgattgcaacggacgtctgacgggcgcccgtactgtacaggccgcacct

SEQ ID NO: 869014 - DNA, 75 bp, synthetic construct
  source 1..75: mol_type = other DNA
atgtacgcaaaatcctttctcgctcttgatcgcaacggacgtctgacgggcgcccgtactgaacaggccgcacct

SEQ ID NO: 869015 - DNA, 75 bp, synthetic construct
  source 1..75: mol_type = other DNA
gcaatacgacactgagcgtccctggtttgaacacactgacgacgggctgacagcgcacggtcagcagtgtcctta

SEQ ID NO: 869016 - DNA, 75 bp, synthetic construct
  source 1..75: mol_type = other DNA
gcaatacgacaccgaacggccctggtttgaacacactgacgacgggctgacggctcacggtcagcagtgccctta

SEQ ID NO: 869017 - DNA, 75 bp, synthetic construct
  source 1..75: mol_type = other DNA
atgtacgcaaaatcctttcttgcacttgatggtaacgggcgtctgacgggtgcccgtaccgcacagactgcacct

SEQ ID NO: 869018 - DNA, 75 bp, synthetic construct
  source 1..75: mol_type = other DNA
tcgatggcaacggacgcctgatcggtgcccgtactgcacagacagcgccttacgatcgatacacctgtcaccttt

SEQ ID NO: 869019 - DNA, 75 bp, synthetic construct
  source 1..75: mol_type = other DNA
ttgatggcaacggacgtctgatcggtgcccgtaccgcacagactgctccttatgcccactacacctgccaccttt

SEQ ID NO: 869020 - DNA, 75 bp, synthetic construct
  source 1..75: mol_type = other DNA
caatgtcaccacgattattatggggagcagtactgcacacactgccagaccgggcgtttcagtgatgagggggta

SEQ ID NO: 869021 - DNA, 75 bp, synthetic construct
  source 1..75: mol_type = other DNA
ttgatggcaacggacgtctgacgggcgcccgtactgcacaggacgcaccttatgctaactacacctgccacttgt

SEQ ID NO: 869022 - DNA, 75 bp, synthetic construct
  source 1..75: mol_type = other DNA
caatgtcaccacgattattatggggagcagtactgcacacattgccagagcggaagtttcagtgaggagggggta

SEQ ID NO: 869023 - DNA, 75 bp, synthetic construct
  source 1..75: mol_type = other DNA
ttgacggtaatggtcgtctgaccggtgcccgtaccgcacagaccgccccttacgaccgctacacctgccatctct

SEQ ID NO: 869024 - DNA, 75 bp, synthetic construct
  source 1..75: mol_type = other DNA
agcagtactgcacacactgccagaccggaggattcagtattccccggacaactcagggggaaatatgcgaattct

SEQ ID NO: 869025 - DNA, 75 bp, synthetic construct
  source 1..75: mol_type = other DNA
ctgttgattaaacgcttacagcaatgggtaccggatgccttacccgtggtgcgtaaagcccaccggcactgcaga

SEQ ID NO: 869026 - DNA, 75 bp, synthetic construct
  source 1..75: mol_type = other DNA
tatgctaactacccctgccacttgtgtggcagtgcactcagataccatccgcaatacgacactgaacttccctgg

SEQ ID NO: 869027 - DNA, 75 bp, synthetic construct
  source 1..75: mol_type = other DNA
caatgtcatcacgattattatggggagcggtactgcacgtactgccataccgggcacttcagtgaggaggtggta

SEQ ID NO: 869028 - DNA, 75 bp, synthetic construct
  source 1..75: mol_type = other DNA
caatgtcaccacgattattatggggagcggtactgcacacactgccagaccgggcgattcagtgaggagggggta

SEQ ID NO: 869029 - DNA, 75 bp, synthetic construct
  source 1..75: mol_type = other DNA
gccggatggatagacacactgatgtcaccgaaaggcatgatgccaggagcggttattggcggtattgccgcggcc

SEQ ID NO: 869030 - DNA, 75 bp, synthetic construct
  source 1..75: mol_type = other DNA
atccgcaaaatggagcgggcaggaaaagccacacattcgctggggctgaaaagtgcggcagcccggcgggagctg

SEQ ID NO: 869031 - DNA, 75 bp, synthetic construct
  source 1..75: mol_type = other DNA
aacgcagctaaaagctaccgctcaattcagggaatgcttgatttctttatggcaagagtgatggagatggagagg

SEQ ID NO: 869032 - DNA, 75 bp, synthetic construct
  source 1..75: mol_type = other DNA
cgccaggaagcgggtatggtgttccagcagttttacctcttcccgcatctgacggcgctggaaaacgtcatgttt

SEQ ID NO: 869033 - DNA, 75 bp, synthetic construct
  source 1..75: mol_type = other DNA
ccacgccttacgaatccctgcttgtgaccatcagccaggctgtccgtggcggaaaattacccgccggctggtatc

SEQ ID NO: 869034 - DNA, 75 bp, synthetic construct
  source 1..75: mol_type = other DNA
gcaaaagcggaggccgtctggaccggtaatcacctgaagatggtccgctttgccgtggaaaacgacacgctgtct

SEQ ID NO: 869035 - DNA, 75 bp, synthetic construct
  source 1..75: mol_type = other DNA
atggcacatttacgaaagtcatggcggctattgagcgtttaaaaagttatcaggttgaattcaacacattaactg

SEQ ID NO: 869036 - DNA, 75 bp, synthetic construct
  source 1..75: mol_type = other DNA
aggttataaaatccttttttcaaccatggtaccttatatgaacgccatggtggagttagctaagaacagagtacc

SEQ ID NO: 869037 - DNA, 75 bp, synthetic construct
  source 1..75: mol_type = other DNA
ctggaagagaacaatatcgaatttgtgcgggttgaagaggacgattatgacagccgtttcctgcgctgcgtggag

SEQ ID NO: 869038 - DNA, 75 bp, synthetic construct
  source 1..75: mol_type = other DNA
ttctcattcccgtaaaaaacataattcctatcatcacagtcacgctcattttgaattatctgaataatagcgagc

SEQ ID NO: 869039 - DNA, 75 bp, synthetic construct
  source 1..75: mol_type = other DNA
gccttacgaatccctgcttgtgaccatcagccaggctgtccgtggcggaaaattacctgcaggctggtatcaggt

SEQ ID NO: 869040 - DNA, 75 bp, synthetic construct
  source 1..75: mol_type = other DNA
cgcggaaccggagaagaagccggtgcgtgggaaacgtccacgccttacgaatccctgcttgtgaccatcagctag

SEQ ID NO: 869041 - DNA, 75 bp, synthetic construct
  source 1..75: mol_type = other DNA
tgtttgatgaaccgacttccgctcttgacccggaactgcgccatgaagtgctgaaggttatgcaggatctggctg

SEQ ID NO: 869042 - DNA, 75 bp, synthetic construct
  source 1..75: mol_type = other DNA
caatgtcaccacgattattatggggagcagtactgcacacactgccagaccgggcgcttcagtgaggaggcggta

SEQ ID NO: 869043 - DNA, 75 bp, synthetic construct
  source 1..75: mol_type = other DNA
caatgtcaccacgattattatggggagcagtactgcacacactgccagaccgggcgattcagtgaggaggaggta

SEQ ID NO: 869044 - DNA, 75 bp, synthetic construct
  source 1..75: mol_type = other DNA
cgcttgattcatcgtctgcagcaattcgttccggatgccttacccgtggtccgtaaagccagctggcactgcagt

SEQ ID NO: 869045 - DNA, 75 bp, synthetic construct
  source 1..75: mol_type = other DNA
caatgtcaccacgattattatggggagccgtactgcacacactgccagaccgggcgattcagtgaggaggcggta

SEQ ID NO: 869046 - DNA, 75 bp, synthetic construct
  source 1..75: mol_type = other DNA
caatgtcaccacgattattatggggagctgtactgcacacactgccagaccgggcgtttcagtgaggagggggta

SEQ ID NO: 869047 - DNA, 75 bp, synthetic construct
  source 1..75: mol_type = other DNA
caatgtcaccacgattattatggggagcagtactgcacacactgccagaccgggcggttcagtgaggagggggta

SEQ ID NO: 869048 - DNA, 75 bp, synthetic construct
  source 1..75: mol_type = other DNA
ttgataaaggccggattgcggaagatggtgatcctcaggtgttgatcaaaaacccaccgagccagcgtttgcagg

SEQ ID NO: 869049 - DNA, 75 bp, synthetic construct
  source 1..75: mol_type = other DNA
ggccttctggttccggtaaatcaaccctgctgcgctgcatcaacaaactggaagaaattacctctggcgatctga

SEQ ID NO: 869050 - DNA, 75 bp, synthetic construct
  source 1..75: mol_type = other DNA
gtgattgaatttaaaaacgtctccaagcactttggcccaacccaggtgctgcacaatatcgatttgaacattgcc

SEQ ID NO: 869051 - DNA, 75 bp, synthetic construct
  source 1..75: mol_type = other DNA
cgcttgattcatcgtctgcagcaattcgttccggatgccttacccgtggttcgtaaagccagctggcactgcagc

SEQ ID NO: 869052 - DNA, 75 bp, synthetic construct
  source 1..75: mol_type = other DNA
cgcttgatttatcgtctgcagcaattcgttccggatgccttacccgtggtgcgtaaagccagctggcactgcagg

SEQ ID NO: 869053 - DNA, 75 bp, synthetic construct
  source 1..75: mol_type = other DNA
gatctgcttgccggcgttcctgcccatcgggtgactcgtctgcgcaggcagggtgaacggtattatgccgacggc

SEQ ID NO: 869054 - DNA, 75 bp, synthetic construct
  source 1..75: mol_type = other DNA
ggtggctgagcgcggtggtcccggattcacaccatttattaccttcagcagtaacggacagcctttcgccgtaaa

SEQ ID NO: 869055 - DNA, 75 bp, synthetic construct
  source 1..75: mol_type = other DNA
ggggcagctttctttcaccctgaatcaggggatggcagtcagtgccggtgtacaggaagagggggcgacagtgcc

SEQ ID NO: 869056 - DNA, 75 bp, synthetic construct
  source 1..75: mol_type = other DNA
tacggtaacagacggaaacagtgccactgcacaacattttcgtgcttctgtcccggtaagtgatcctgaaaatgg

SEQ ID NO: 869057 - DNA, 75 bp, synthetic construct
  source 1..75: mol_type = other DNA
acggcgggtgctggaaatactttcgctaccaggaactatttcagaatggtttgaatatggggggaaggcttattt

SEQ ID NO: 869058 - DNA, 75 bp, synthetic construct
  source 1..75: mol_type = other DNA
gcgtgtggtgcggaaatcattacagtgggaaaaagcattgcacttcatgcggaacaggcatctacagtatcgaag

SEQ ID NO: 869059 - DNA, 75 bp, synthetic construct
  source 1..75: mol_type = other DNA
tatatctttatctatggccattttggcatgccggaactcggcggcgtcggttgtggcgtagcaactgcggctgtt

SEQ ID NO: 869060 - DNA, 75 bp, synthetic construct
  source 1..75: mol_type = other DNA
tctgtagtatcggattttgaactgcggttaccggcagagggtacacctgcagcgtggcaggcgggcctgaatgtg

SEQ ID NO: 869061 - DNA, 75 bp, synthetic construct
  source 1..75: mol_type = other DNA
atgcttcagcggtatcggattttgaactgcggttgccggcggagggcacaccagcccgctggcaggcggggctga

SEQ ID NO: 869062 - DNA, 75 bp, synthetic construct
  source 1..75: mol_type = other DNA
tgcgtgacccggaaacgggaaatgtgtcggggcagctttctttcaccctgaatcaggggatggcagtcagtgccg

SEQ ID NO: 869063 - DNA, 75 bp, synthetic construct
  source 1..75: mol_type = other DNA
cagataagtacacttagccaggtatgggatgtggatattgcagatgcccgtacagaaaatggaatgttgattttt

SEQ ID NO: 869064 - DNA, 75 bp, synthetic construct
  source 1..75: mol_type = other DNA
ggcgaatggccaggttactaatattgctgcggcatatgcatctagtttatcaaattttgagcttcgattaccagc

SEQ ID NO: 869065 - DNA, 75 bp, synthetic construct
  source 1..75: mol_type = other DNA
atgcctctgcggtatcggattttgaactgcggttgccggcagagggcacgcctgcatcatggcaggcagggctga

SEQ ID NO: 869066 - DNA, 75 bp, synthetic construct
  source 1..75: mol_type = other DNA
gaaaatctgattaaaggcggtttgcctggccgaactgaaaaaagggaaaagaacaacaacccggccagtaaaagc

SEQ ID NO: 869067 - DNA, 75 bp, synthetic construct
  source 1..75: mol_type = other DNA
tgaggacggtaaagccgttcagtcggttacatatcgtgactcaggggtgatattcaaagttaagccggttatcac

SEQ ID NO: 869068 - DNA, 75 bp, synthetic construct
  source 1..75: mol_type = other DNA
gctcgtttttatcgggtgaaggggattcactggttttcagggggacaagttcagagctggttcgccttaaggagc

SEQ ID NO: 869069 - DNA, 75 bp, synthetic construct
  source 1..75: mol_type = other DNA
gggctttagaaagggccgtagaattattagaacaagatacaattactgaaacattaacccaattagttggaaccc

SEQ ID NO: 869070 - DNA, 75 bp, synthetic construct
  source 1..75: mol_type = other DNA
gcagtttcctgaatgcctgcacctcgctatggcgcaatggtgaaacgcgtttttcgctggtgggcaccagtttat

SEQ ID NO: 869071 - DNA, 75 bp, synthetic construct
  source 1..75: mol_type = other DNA
ggtgggaattccggttgtgcccattggcattggttttggtgcgctgtttgcgctggcaataacggcgctgtggat

SEQ ID NO: 869072 - DNA, 75 bp, synthetic construct
  source 1..75: mol_type = other DNA
atgacccgtagtttcctactggcctgcacttcactgtggtgcaatggcgaaacgagattctcgctggtaggcact

SEQ ID NO: 869073 - DNA, 75 bp, synthetic construct
  source 1..75: mol_type = other DNA
gcccaggacaggtgcgtcaggccgtggcagtgatgccccttgcggcgaaggttctcaaacaggtgatggtgaata

SEQ ID NO: 869074 - DNA, 75 bp, synthetic construct
  source 1..75: mol_type = other DNA
ttgatgcgctcatcggtaatagtgatagacaccaagagaattggggttttgtttttgtacctgaatctgcaccag

SEQ ID NO: 869075 - DNA, 75 bp, synthetic construct
  source 1..75: mol_type = other DNA
aagctgcattaacctaccgatatgaagatgaaaataaatctccggtcagtattgaacagataattcatccgcgcc

SEQ ID NO: 869076 - DNA, 75 bp, synthetic construct
  source 1..75: mol_type = other DNA
ggcagcagctctgccacgtcacatgacagcggaacgcatgatccgcattgctacaacagaaatccgtaaagtacc

SEQ ID NO: 869077 - DNA, 75 bp, synthetic construct
  source 1..75: mol_type = other DNA
gccgtggcagtgatgccccttgcggcgaaggttctcaaacaggtgatggtgaataccggggggaacaaagagcag

SEQ ID NO: 869078 - DNA, 75 bp, synthetic construct
  source 1..75: mol_type = other DNA
gggaggagtttggagtcaaagtcttcgccatctcaaaggtgaaagtttcaaatgttcctgttactgataaaacaa

SEQ ID NO: 869079 - DNA, 75 bp, synthetic construct
  source 1..75: mol_type = other DNA
catgataaaggttcattaccgtttcttgaggggcatctgttcgaagtggctgagcgcggaggtccaggttttaca

SEQ ID NO: 869080 - DNA, 75 bp, synthetic construct
  source 1..75: mol_type = other DNA
tttgcactgtggatccacgacctgtcggcacaggacccgtactacatcttgccgatcctgatgggcgtaacgatg

SEQ ID NO: 869081 - DNA, 75 bp, synthetic construct
  source 1..75: mol_type = other DNA
gtatgctgcagccgaagattcaggcaatgcgtgagcgtctgggtgatgacaaacagcgtatcagccaggaaatga

SEQ ID NO: 869082 - DNA, 75 bp, synthetic construct
  source 1..75: mol_type = other DNA
ggttcatctctcagccgctgttcaaactgctgaaatggatccatagctttgtgggtaactggggcttctccatta

SEQ ID NO: 869083 - DNA, 75 bp, synthetic construct
  source 1..75: mol_type = other DNA
cccgcagggtaaagatatgctggcgattttgtcgaacaacagtgtcggaacagcatatgcaattgaagcggtacg

SEQ ID NO: 869084 - DNA, 75 bp, synthetic construct
  source 1..75: mol_type = other DNA
atgaaaaacctatcagctttggaagcagttcttgactacgacaaaccttctcgacgttttcttgatgagctcaac

SEQ ID NO: 869085 - DNA, 75 bp, synthetic construct
  source 1..75: mol_type = other DNA
gcgtcaggcaccgtttgcactgtggatccacgacctgtcggcacaggacccgtactacatcctgccgatcctgat

SEQ ID NO: 869086 - DNA, 75 bp, synthetic construct
  source 1..75: mol_type = other DNA
taacgacggcaccaacaacttctataccgctaatctgggtaacggcatcgccgctatcggctataaatctcagcc

SEQ ID NO: 869087 - DNA, 75 bp, synthetic construct
  source 1..75: mol_type = other DNA
atttcattgcgctggctcaggggggaacattagtgctcagccatcctgaacacctgacgcgtgaacagcagtacc

SEQ ID NO: 869088 - DNA, 75 bp, synthetic construct
  source 1..75: mol_type = other DNA
atgactatgtacgcaaaatcctttctcgctcttgatggcaacggacgtctgacgggcgcccgtaccgcacatact

SEQ ID NO: 869089 - DNA, 75 bp, synthetic construct
  source 1..75: mol_type = other DNA
ggtactggttcagcctggtcagactggcgcgatgaacagcaccctgtgggttggcccggaaatccaggacaaaat

SEQ ID NO: 869090 - DNA, 75 bp, synthetic construct
  source 1..75: mol_type = other DNA
ccgctatcggctataagtctcagccggtactggttcagcctggtcagactggcgcgatgaacagcaccctgtggg

SEQ ID NO: 869091 - DNA, 75 bp, synthetic construct
  source 1..75: mol_type = other DNA
cctgacgagaagtacgagaaatacaagttcgatactattgctgacaacgaaaacctgaacatctcttcgaaaggt

SEQ ID NO: 869092 - DNA, 75 bp, synthetic construct
  source 1..75: mol_type = other DNA
gaaaagtcgtgccatttgtcgagcaggatcgcatctttactccggatattgcagcatcgcaaaaattcttagaag

SEQ ID NO: 869093 - DNA, 75 bp, synthetic construct
  source 1..75: mol_type = other DNA
tgagaacagtgaatctgcatcttgcactggccccatttctgataaacgtgatatctgcgctcgtttttttcggct

SEQ ID NO: 869094 - DNA, 75 bp, synthetic construct
  source 1..75: mol_type = other DNA
atgaatataaattccttaccatcccccgaaataaaagacaccgatgttttcattaccgtcataaccgttctggtg

SEQ ID NO: 869095 - DNA, 75 bp, synthetic construct
  source 1..75: mol_type = other DNA
aacgtgggattgccaacggcgatatggtgcgggtgtttaaccatcgtggcgaagttcggctaccagccaaagtga

SEQ ID NO: 869096 - DNA, 75 bp, synthetic construct
  source 1..75: mol_type = other DNA
agtggctgaacgcggtggccccggctttacaccttttgtctcgttcagcagtaatagtcagccttttacagtaac

SEQ ID NO: 869097 - DNA, 75 bp, synthetic construct
  source 1..75: mol_type = other DNA
agcttatgcatcgtccgtatctgattttgaattacatcttccggcagaagggacccctgctcagtggcaggcaaa

SEQ ID NO: 869098 - DNA, 75 bp, synthetic construct
  source 1..75: mol_type = other DNA
cgtgcttctgtcccggtaagtgatcctgaaaatggtcaggtgacagggcaactttattttacccttgatcagggg

SEQ ID NO: 869099 - DNA, 75 bp, synthetic construct
  source 1..75: mol_type = other DNA
tgccgctgattgtcgatgccgccgccgaagaggatttacgtgcctgggtggtgagcggagcggatatggtggtct

SEQ ID NO: 869100 - DNA, 75 bp, synthetic construct
  source 1..75: mol_type = other DNA
cggatagctccggcatggccaatgaagtggtgatgctgcgcggccataacgtcgattacggtgcatcgatcctca

SEQ ID NO: 869101 - DNA, 75 bp, synthetic construct
  source 1..75: mol_type = other DNA
cggtttaacgcgcttcctgtcggcacccggtaataaaggtcacggcttcggttcgctgcatattccgtttgtcgc

SEQ ID NO: 869102 - DNA, 75 bp, synthetic construct
  source 1..75: mol_type = other DNA
attgaaatttattccagcaagctggcggaaattgcccgtacctgggaactggaaaaagatgaagtgataagccca

SEQ ID NO: 869103 - DNA, 75 bp, synthetic construct
  source 1..75: mol_type = other DNA
cgtcttacgacgaattaaaaaaaatgggtatctataagcgtaaagatcccaatggtcattttgtcgcctacaaag

SEQ ID NO: 869104 - DNA, 75 bp, synthetic construct
  source 1..75: mol_type = other DNA
aaaaaaatctggattgcagcctgcaaagcgcagcatcacggcattgccagggcgatgaaaatcggcaaggagaac

SEQ ID NO: 869105 - DNA, 75 bp, synthetic construct
  source 1..75: mol_type = other DNA
tcggtaaacaggcggagtcgctcatcggtaaggccggcagtctggcgaccagattcacgggtatgacgggggcgg

SEQ ID NO: 869106 - DNA, 75 bp, synthetic construct
  source 1..75: mol_type = other DNA
gcaccattgagctttatttcaaatatggtaagaagctggccccgtcgtacgcgaactgggctacccttcgaaaag

SEQ ID NO: 869107 - DNA, 75 bp, synthetic construct
  source 1..75: mol_type = other DNA
aagattggcaatgctttacgtaccattgatacctggcatccaaaggttgatgaattgggggctatagccgtggaa

SEQ ID NO: 869108 - DNA, 75 bp, synthetic construct
  source 1..75: mol_type = other DNA
cggtagatgcagatacgctaaaagtggtgtttacgctgcgagtgctgggtaatttatcttcaccttcagtatgta

SEQ ID NO: 869109 - DNA, 75 bp, synthetic construct
  source 1..75: mol_type = other DNA
gatgtgaacgtgagacgttcggcagatgttacaagctaccccgtagaaaatggtgctactgtgtctgatcacgtt

SEQ ID NO: 869110 - DNA, 75 bp, synthetic construct
  source 1..75: mol_type = other DNA
gcgggtaatccccgccataacattacaaggaaaattattattatggcgaccgccgggattttaaccatacgtgca

SEQ ID NO: 869111 - DNA, 75 bp, synthetic construct
  source 1..75: mol_type = other DNA
gacgaccgacagaatcacaagtaaacagcacatctaacgacagcacgggaagatctaccaaaggggataacggct

SEQ ID NO: 869112 - DNA, 75 bp, synthetic construct
  source 1..75: mol_type = other DNA
cctacggtaacgttgatgtgctgaaagcggcttgtcgccaggaaatgtggatcaacccaattgatgcgcaaaaac

SEQ ID NO: 869113 - DNA, 75 bp, synthetic construct
  source 1..75: mol_type = other DNA
ttaccggtatcccggcagataaaatcatcaaacttgctcgtgaaattggtagcaccaaaccggcatttatcagcc

SEQ ID NO: 869114 - DNA, 75 bp, synthetic construct
  source 1..75: mol_type = other DNA
aaaacaccgcaatgggcctcgcaaatcaccggtatcccggcagagaaaatcattcaactggcacgggaaatcggc

SEQ ID NO: 869115 - DNA, 75 bp, synthetic construct
  source 1..75: mol_type = other DNA
gtgtggatcactattgcaccgttcgtgacagctaataaaacaaaaggagagaacggatttgctattgttaccagt

SEQ ID NO: 869116 - DNA, 75 bp, synthetic construct
  source 1..75: mol_type = other DNA
gatgtgaacgtaagacgttcggcagatgttacaagctaccccgtagagaatggggctactgtatcggatcacgtt

SEQ ID NO: 869117 - DNA, 75 bp, synthetic construct
  source 1..75: mol_type = other DNA
gtaatgacgtttatgaaaattatatggcactggcttttgacagtgtagacgatgtgaacgtaagacgttcggcag

SEQ ID NO: 869118 - DNA, 75 bp, synthetic construct
  source 1..75: mol_type = other DNA
acgaaaatagcaaagctaataaaacaaaaggagagaatggatttgctattgttaccagtgggctggcatcttctg

SEQ ID NO: 869119 - DNA, 75 bp, synthetic construct
  source 1..75: mol_type = other DNA
cttgaaacgccgtttgtctcactgatcaaatacagcatgcagtgcgtggggttgccggtggagacatattgcctg

SEQ ID NO: 869120 - DNA, 75 bp, synthetic construct
  source 1..75: mol_type = other DNA
atggaacaggaaactgattatagaatacctgaaaacctgaagttagtcggcattggttttggttgtcgttttgta

SEQ ID NO: 869121 - DNA, 75 bp, synthetic construct
  source 1..75: mol_type = other DNA
ccgtagctatttgattcatgagtatgcatctttatcaaccggaaaaaacaagtttataaagttatttaaagatat

SEQ ID NO: 869122 - DNA, 75 bp, synthetic construct
  source 1..75: mol_type = other DNA
tatgttatttgtttttctcagtcctggagaaagttataaatgcaaggaaaagcaaagatgaatcaatatatcacg

SEQ ID NO: 869123 - DNA, 75 bp, synthetic construct
  source 1..75: mol_type = other DNA
tgttctggtttatgaggtcgatagccagtggggaaaagtgtatattctgcgagtgttgcatacagcacagaagtg

SEQ ID NO: 869124 - DNA, 75 bp, synthetic construct
  source 1..75: mol_type = other DNA
acggtctgcggattttattttactggaaacctcaggtagcagccatcctcttcccctggtccgctatctgcgaga

SEQ ID NO: 869125 - DNA, 75 bp, synthetic construct
  source 1..75: mol_type = other DNA
tattcaacgggcacatcgaattcatttatttttaataacgatgtcagtagcataacagggttagtcgctcaatcg

SEQ ID NO: 869126 - DNA, 75 bp, synthetic construct
  source 1..75: mol_type = other DNA
gggtagatcttaatggcaacaataacagcgtgacgctggcggcaaaagatctaaaagtggtcgggcagaaagcga

SEQ ID NO: 869127 - DNA, 75 bp, synthetic construct
  source 1..75: mol_type = other DNA
acacgttcaggctgtttacaaagcagaacaagatataaattctacaaaaaacacaaataactctgcctctactgt

SEQ ID NO: 869128 - DNA, 75 bp, synthetic construct
  source 1..75: mol_type = other DNA
ttgcacagctttttgccgattacgaaattatgccgccttttcgccagttgtcgcgccgcacggtgctgctcacac

SEQ ID NO: 869129 - DNA, 75 bp, synthetic construct
  source 1..75: mol_type = other DNA
actttcggcgtgtgccaatcggggaatgagtacaataatacagatgatttcacctcactgatctataccggtggc

SEQ ID NO: 869130 - DNA, 75 bp, synthetic construct
  source 1..75: mol_type = other DNA
aactggctcgtgaaatcggcagtaccaaaccggcgtttatcagccagggatggggcccgcagcgtcacgctaacg

SEQ ID NO: 869131 - DNA, 75 bp, synthetic construct
  source 1..75: mol_type = other DNA
aatggagctggaggtaaattagcaggaagtttaggcagagtaactggaaccagagcatttatgaatggtttcaaa

SEQ ID NO: 869132 - DNA, 75 bp, synthetic construct
  source 1..75: mol_type = other DNA
aaatatgtttactgcatgggtcggcagttgtctcaactatatactgttaaatttattctatagcatatcatttag

SEQ ID NO: 869133 - DNA, 75 bp, synthetic construct
  source 1..75: mol_type = other DNA
gtcgcacaagcgatatctcctacattctttgctgccataaccttatacgttatttatctaatatatgaaatcacg

SEQ ID NO: 869134 - DNA, 75 bp, synthetic construct
  source 1..75: mol_type = other DNA
ttttcgccgttcggaagagtgcctgcaccttattcctaccagtgaaggtcagggtgaaaatggtgatattggctc

SEQ ID NO: 869135 - DNA, 75 bp, synthetic construct
  source 1..75: mol_type = other DNA
tctggatataaaaattaaagcaataaagcggctatactatggcttggggttctaccgtgggcgtggtgattgtag

SEQ ID NO: 869136 - DNA, 75 bp, synthetic construct
  source 1..75: mol_type = other DNA
aagcatgttcacttcatggtgtggtagttgtttgaactacatattattgaacgttttttatactatatcttttgg

SEQ ID NO: 869137 - DNA, 75 bp, synthetic construct
  source 1..75: mol_type = other DNA
acttcggtatcgctaactcgattattcagcgaaaagaaatcagccatcttgaactcaccacgctgtactggttga

SEQ ID NO: 869138 - DNA, 75 bp, synthetic construct
  source 1..75: mol_type = other DNA
ataattttgtaccgctggtatttggtgagaagtggagcagcattattccggtgctgcaattgctgtgtgtggtgg

SEQ ID NO: 869139 - DNA, 75 bp, synthetic construct
  source 1..75: mol_type = other DNA
caggacgacaccgaaaagctgcgcgtgaacttctacaagctgctgtcggtggtggggattatcaactttccggcg

SEQ ID NO: 869140 - DNA, 75 bp, synthetic construct
  source 1..75: mol_type = other DNA
cttgttgagcaagtaggtactctctgctcaactcttactggcggggtaggtataaatggccttacatcagccgct

SEQ ID NO: 869141 - DNA, 75 bp, synthetic construct
  source 1..75: mol_type = other DNA
attacgctggcagatacgctttctgacttcggcatcgccaactccattattcagcggaaagaaatcagtcacctt

SEQ ID NO: 869142 - DNA, 75 bp, synthetic construct
  source 1..75: mol_type = other DNA
taacgataccggcctgaaacagaatggtgacggcctgctggatgtttatgccaatggtcagcacgtattccgttt

SEQ ID NO: 869143 - DNA, 75 bp, synthetic construct
  source 1..75: mol_type = other DNA
taatggtgaaatcgctactcgtgctatctcaatgctggcaattctgaccggcaacgtcgggattaacggtggtaa

SEQ ID NO: 869144 - DNA, 75 bp, synthetic construct
  source 1..75: mol_type = other DNA
cgggaaagataagctggatgtgccgatcaaaatgatctggaactatgccggtaactgcctgattaatcagcattc

SEQ ID NO: 869145 - DNA, 75 bp, synthetic construct
  source 1..75: mol_type = other DNA
gatcatcatcgatccgcgctataccgacaccggtgccgggcgcgaagatgagtggatccctattcgtccgggaac

SEQ ID NO: 869146 - DNA, 75 bp, synthetic construct
  source 1..75: mol_type = other DNA
atatgctgacatcctgctgcctgactgcaccgcttccgaacagatggactttgcactggatgcatcctgcgggaa

SEQ ID NO: 869147 - DNA, 75 bp, synthetic construct
  source 1..75: mol_type = other DNA
gtgctgtttggtaataaccctggcgaaacgcgaatgagtggcggtggggtgacttactatcttgaacaggcacgc

SEQ ID NO: 869148 - DNA, 75 bp, synthetic construct
  source 1..75: mol_type = other DNA
ggtgttccggcagacaaaatcatcaaattggctcgtgaaatcggtagtaccaaaccggcgtttatcagccaggga

SEQ ID NO: 869149 - DNA, 75 bp, synthetic construct
  source 1..75: mol_type = other DNA
ggattacaccaccggtcagattctcaccgcgggtaatgagcatcaacagcgcaatcccgccagcctgacaaagct

SEQ ID NO: 869150 - DNA, 75 bp, synthetic construct
  source 1..75: mol_type = other DNA
atttgagttcccgcctgtgtcgcagggcgataaaaactattacggaaagaagaaaaaatccgaatcccttcttga

SEQ ID NO: 869151 - DNA, 75 bp, synthetic construct
  source 1..75: mol_type = other DNA
taacaccgtcagactacggaaactttgatgcccgttatcagcagcgaaatggcggtgtgcaggatatcaggctgg

SEQ ID NO: 869152 - DNA, 75 bp, synthetic construct
  source 1..75: mol_type = other DNA
gcgccacgccaacggcgaaatcgcgactcgcgctatctcgatgctggcgattctgaccggtaacgtcggcattaa

SEQ ID NO: 869153 - DNA, 75 bp, synthetic construct
  source 1..75: mol_type = other DNA
ctgctgcggcggctatctgaaccattacggcgactactcctccgcgcaaattgcggaaggtttgaactataccta

SEQ ID NO: 869154 - DNA, 75 bp, synthetic construct
  source 1..75: mol_type = other DNA
ccgggaaaaccgaactggcaacgcgcaaactggcgggaaaactggggatgagcgacagcgaaattcgccgtcagt

SEQ ID NO: 869155 - DNA, 75 bp, synthetic construct
  source 1..75: mol_type = other DNA
catgacggacgaaatggaggaggagattgaacggcagctgcgggacagcaaggggatcggcaacttctccaccat

SEQ ID NO: 869156 - DNA, 75 bp, synthetic construct
  source 1..75: mol_type = other DNA
cgagctggaggccgctgtttttgattacctgacctttggtgatatcgctgtggccaaaatccgtaatggctgggg

SEQ ID NO: 869157 - DNA, 75 bp, synthetic construct
  source 1..75: mol_type = other DNA
aaaggccatttctgaaaaaatagaacagtcaaaaggcgcgggtaatttccgcagtatgtttattaacatccccaa

SEQ ID NO: 869158 - DNA, 75 bp, synthetic construct
  source 1..75: mol_type = other DNA
ctcggcggcattcactctgccatgctcaataatgaggccactattttccgtcgtcgctattacaagaacggcgct

SEQ ID NO: 869159 - DNA, 75 bp, synthetic construct
  source 1..75: mol_type = other DNA
gccgcggtaaaaacggaaagttttatgtgcttcagaaaagtggccatctggaatatgccagcgcagacattatct

SEQ ID NO: 869160 - DNA, 75 bp, synthetic construct
  source 1..75: mol_type = other DNA
ggggttccggactatatccatggtatggagtccgccatgcttaatgtggatgccacccggttccgccgtaaatat

SEQ ID NO: 869161 - DNA, 75 bp, synthetic construct
  source 1..75: mol_type = other DNA
agcgcatgtttaccgccgcagtggaacaggaaagtgatgtaccgccccacctgtaccttaatttcctgaaagaca

SEQ ID NO: 869162 - DNA, 75 bp, synthetic construct
  source 1..75: mol_type = other DNA
tgccaacatcaaagggataaccgcgcaggatatctttaccgcccaccgtttccccgctggcctggcgggtatcat

SEQ ID NO: 869163 - DNA, 75 bp, synthetic construct
  source 1..75: mol_type = other DNA
acacgccgccatggcggcagcagtgaccaatctgctgatattcggggatatgggtctgcttaaagtgcgcaatgg

SEQ ID NO: 869164 - DNA, 75 bp, synthetic construct
  source 1..75: mol_type = other DNA
cgtgccgtatatcaattagatgaagtctggcccatgcaggcgctaattgagaatgcaatcaatagtgattctgaa

SEQ ID NO: 869165 - DNA, 75 bp, synthetic construct
  source 1..75: mol_type = other DNA
ggtggcactgtacccgctgccggcactctatacccgccagcgtaagaccggggagtttgtggtactgcagcaggg

SEQ ID NO: 869166 - DNA, 75 bp, synthetic construct
  source 1..75: mol_type = other DNA
cggcggtgtgctgtatgcccgtcgcaatatggtgacggcaaactataaagacggcggactgacgcatgaacagct

SEQ ID NO: 869167 - DNA, 75 bp, synthetic construct
  source 1..75: mol_type = other DNA
acaccgttatgccagtacagagagcaccatgcaggaaatccagcggctggctaccgtctgccacaatgcactgag

SEQ ID NO: 869168 - DNA, 75 bp, synthetic construct
  source 1..75: mol_type = other DNA
atgatccagatggacttttaaagacctataattctgtaatatctgaaattgggagtggattaaagtgcagtcggt

SEQ ID NO: 869169 - DNA, 75 bp, synthetic construct
  source 1..75: mol_type = other DNA
cggctttaacaccgggatggaaaaagccaataccgaagagttctgcattagctgccacgaaatgcgtaacacggt

SEQ ID NO: 869170 - DNA, 75 bp, synthetic construct
  source 1..75: mol_type = other DNA
ttttgttcggtgtggcgcaaaaagaacgtcctcaacaatctgtgggcggctccgctgctggtgctgtatcgcatt

SEQ ID NO: 869171 - DNA, 75 bp, synthetic construct
  source 1..75: mol_type = other DNA
ctttggttaccactgctttgttcatgattgcaataaaactcagctattttgtgctctttttgcaagctaagaatc

SEQ ID NO: 869172 - DNA, 75 bp, synthetic construct
  source 1..75: mol_type = other DNA
cctgaagtctgagatggctgatttacgccagtctctgaaagttgagatggctgagcatcgtactgaacttcagaa

SEQ ID NO: 869173 - DNA, 75 bp, synthetic construct
  source 1..75: mol_type = other DNA
tcagttgcctggaaagtgatgtgactgaaatcaaaaacaacctgattactctcaccacaagaagcgaatcctttg

SEQ ID NO: 869174 - DNA, 75 bp, synthetic construct
  source 1..75: mol_type = other DNA
acagaagacaccgtgctggaaattcagcggctggctacagtctgccgcgacaccctgaatggcatgacgaagtaa

SEQ ID NO: 869175 - DNA, 75 bp, synthetic construct
  source 1..75: mol_type = other DNA
aatacctgctcaatacagaacgtgatcttgccgctcgcgtgcgtgatcgttatgacatgtacctgaaatccctgc

SEQ ID NO: 869176 - DNA, 75 bp, synthetic construct
  source 1..75: mol_type = other DNA
gattgttattgatggtcgctacatgattgacagccaccagggcaattacaggctttaccgtgttgaaggtggtaa

SEQ ID NO: 869177 - DNA, 75 bp, synthetic construct
  source 1..75: mol_type = other DNA
gctttcaaagcaggcgctggcgatcctgaagcagataaaacagttctgtggcgaacatgagctgatttttattgg

SEQ ID NO: 869178 - DNA, 75 bp, synthetic construct
  source 1..75: mol_type = other DNA
gcctgcagttcgttaattgagtcagggctatggtcgaaggatgcggtggaaaggcagatgagccatatggaacgc

SEQ ID NO: 869179 - DNA, 75 bp, synthetic construct
  source 1..75: mol_type = other DNA
ttctcatcctcggtggcagtcgtggtatcggtgccgctatcgtacgtcgtttcgtcaccgatggggccaatgtac

SEQ ID NO: 869180 - DNA, 75 bp, synthetic construct
  source 1..75: mol_type = other DNA
gttgcgcaccgttttccacccggacttgccggcatcatccccgcaaatacggccgggcttggtgatccgctgaaa

SEQ ID NO: 869181 - DNA, 75 bp, synthetic construct
  source 1..75: mol_type = other DNA
aaccggccctgcaggcccctggcgaaatcgtccgggggctggatgatatctggcaggccattcaaatcatcctgc

SEQ ID NO: 869182 - DNA, 75 bp, synthetic construct
  source 1..75: mol_type = other DNA
gaaaagaaaaccgcgcagggtgttaaacatatctgtgccagtaaacaatgtggaaagccggtttcggcggaataa

SEQ ID NO: 869183 - DNA, 75 bp, synthetic construct
  source 1..75: mol_type = other DNA
gcggacggccatgttgtcaaagttctggaggggcaggtttgccctgtatgtgacgcaaaccttgtgttacgtcag

SEQ ID NO: 869184 - DNA, 75 bp, synthetic construct
  source 1..75: mol_type = other DNA
ggtaacgccgtgcataccgcgctgtcgtttgatctggtgggcgaggatgtgctggtctctggtgcaggcccgatt

SEQ ID NO: 869185 - DNA, 75 bp, synthetic construct
  source 1..75: mol_type = other DNA
aaacagccatctgcggaactgacgttcacatctataactgggatgagtggtcgcaaaaaaccatcccggtgccga

SEQ ID NO: 869186 - DNA, 75 bp, synthetic construct
  source 1..75: mol_type = other DNA
cagacgatattgtcactgtggggcgtgatgcgtgggcaaaagataacccggtatttgtcggttcttcactgatgt

SEQ ID NO: 869187 - DNA, 75 bp, synthetic construct
  source 1..75: mol_type = other DNA
taagattactgttactgtggcgctggaaactggtgggtatacgtcactgttgttgccaaatgtggtgattgatct

SEQ ID NO: 869188 - DNA, 75 bp, synthetic construct
  source 1..75: mol_type = other DNA
agacgccaccgacggcattgcggtcagaaaaagatgatattgaatcgcccattgaaaaactggagaaaaaattgt

SEQ ID NO: 869189 - DNA, 75 bp, synthetic construct
  source 1..75: mol_type = other DNA
tctcattgcgtcggcggtggatggtcagcgtcgtctcattgcggtggtgatgggggctgacagcgcaaaaggtcg

SEQ ID NO: 869190 - DNA, 75 bp, synthetic construct
  source 1..75: mol_type = other DNA
atgatgaataattatgctgagaagttacatcttcaggatacgcattttgaaacagtgcatggtctggatgcaccc

SEQ ID NO: 869191 - DNA, 75 bp, synthetic construct
  source 1..75: mol_type = other DNA
ggcagcgtcgtctcattgcagtggtaatgggtgctgacagcgcaaaaggtcgtgaggaagaggcaagaaaattac

SEQ ID NO: 869192 - DNA, 75 bp, synthetic construct
  source 1..75: mol_type = other DNA
gctggtttctggtgcggggccaattggtattatggcggcggcggtggcaaaacacgtcggcgcacgcaacgtggt

SEQ ID NO: 869193 - DNA, 75 bp, synthetic construct
  source 1..75: mol_type = other DNA
cgctgggttggccggaattgtcccgcagaacaccgctggcctgggggatgttgaaaaggcggaaaggatttacaa

SEQ ID NO: 869194 - DNA, 75 bp, synthetic construct
  source 1..75: mol_type = other DNA
cccgaaataccggaaaggctacaccttaactttgatttaagttacacagaatcaacggataagggtgcggcatga

SEQ ID NO: 869195 - DNA, 75 bp, synthetic construct
  source 1..75: mol_type = other DNA
gcccaggacattctgaacgctcaccgtttccctgctggcctcgccggtattgtcccgcagaacactgccggactg

SEQ ID NO: 869196 - DNA, 75 bp, synthetic construct
  source 1..75: mol_type = other DNA
tatggaggggatcaacagcgacccggatatccggcgactgggggaggtggaatttgttcttgaatttaacgaatc

SEQ ID NO: 869197 - DNA, 75 bp, synthetic construct
  source 1..75: mol_type = other DNA
ggggatgttgaaaaggcggaaaggatttacaagaaaagcgagatagcgcccattcagcgcaggtttatgaccgct

SEQ ID NO: 869198 - DNA, 75 bp, synthetic construct
  source 1..75: mol_type = other DNA
aagggatcggtaacttctccaccatcctggtaaacattcctggtggagacggtgacgccatcaaattcattgaaa

SEQ ID NO: 869199 - DNA, 75 bp, synthetic construct
  source 1..75: mol_type = other DNA
caccatttaatattgaaagttataaaactaccgacgggcaatatgccataccgtttaaagctaaatatctgaaac

SEQ ID NO: 869200 - DNA, 75 bp, synthetic construct
  source 1..75: mol_type = other DNA
cggaagaaggcatctggatgaccgacgttcctgagccggaactgggtcataacgatctgctgattaaaatccgta

SEQ ID NO: 869201 - DNA, 75 bp, synthetic construct
  source 1..75: mol_type = other DNA
gataccatgaaccacggcggtcgtattgcgatgctgggtattccaccgtccgatatgtctatcgactggaccaaa

SEQ ID NO: 869202 - DNA, 75 bp, synthetic construct
  source 1..75: mol_type = other DNA
ccgttactacaacaacggggcgcatatggggtttttgctgtatacgaacgaccctgggatcaccacggagatgga

SEQ ID NO: 869203 - DNA, 75 bp, synthetic construct
  source 1..75: mol_type = other DNA
ctgctggcccgacatgaaggtaaagccgtcggacatattttatttaccctagcgacgttcaaaggagaaatggat

SEQ ID NO: 869204 - DNA, 75 bp, synthetic construct
  source 1..75: mol_type = other DNA
caccttttaacattgagagttataaaacagcggaaggtcaatatgctattccgtttaaagcaaaatacctgaaac

SEQ ID NO: 869205 - DNA, 75 bp, synthetic construct
  source 1..75: mol_type = other DNA
aacacgataaaagcttaataagttttatctacttattttttatatttacacttattgtaggcttcattatcgcaa

SEQ ID NO: 869206 - DNA, 75 bp, synthetic construct
  source 1..75: mol_type = other DNA
ggctgtgatcatcactggtttgaaaaccggggtcctaagtgtacggcactggtttacgtagacgatgcaactagt

SEQ ID NO: 869207 - DNA, 75 bp, synthetic construct
  source 1..75: mol_type = other DNA
gcaaaaggtcgtgttgagcgggcgcatctaacccttcaggacagactggtcaaggaactcaggcttcagggcatc

SEQ ID NO: 869208 - DNA, 75 bp, synthetic construct
  source 1..75: mol_type = other DNA
aaagacgccgttaacggctcacaactaaaagctaccaatgacgatgttgagaccaataccgccaatatcgctact

SEQ ID NO: 869209 - DNA, 75 bp, synthetic construct
  source 1..75: mol_type = other DNA
ccttcccgacgacggccaaagcaggaagggaagaaatcccagcgctcactggataatgatgacatgctcgaagca

SEQ ID NO: 869210 - DNA, 75 bp, synthetic construct
  source 1..75: mol_type = other DNA
tcaggcttgaccttattctttgtttattatgcaagcgttgcactttgggttttagattatactcaattcagaaat

SEQ ID NO: 869211 - DNA, 75 bp, synthetic construct
  source 1..75: mol_type = other DNA
gtaagcagcagcaacaattcgccattaacgccatccttgcaacaactctcgataaagacaaacccgttacgatcc

SEQ ID NO: 869212 - DNA, 75 bp, synthetic construct
  source 1..75: mol_type = other DNA
ttccacacaaaatacaagtcagaccatacaaaacgttagaatgacatttaggaaattggaccgtcattggacaca

SEQ ID NO: 869213 - DNA, 75 bp, synthetic construct
  source 1..75: mol_type = other DNA
ccaaatgctgtttacaggtttagcagatttgatgcactggatcgtaacccaatctactgggatttcctgattcga

SEQ ID NO: 869214 - DNA, 75 bp, synthetic construct
  source 1..75: mol_type = other DNA
gggtaccaaaatgcagatgactcaacgtgatattcctcagtcggtcactattgttagtcagcagcgaatggagga

SEQ ID NO: 869215 - DNA, 75 bp, synthetic construct
  source 1..75: mol_type = other DNA
gtgactcacgagatacagggcatcctcgcaactcctctcgataaagacaagccagtcaccatccgcattactgac

SEQ ID NO: 869216 - DNA, 75 bp, synthetic construct
  source 1..75: mol_type = other DNA
ctaagcaacaacagcaagccgcaatcaacgccatcctcgcaacaccactcgataaagacaagccagtcaccatcc

SEQ ID NO: 869217 - DNA, 75 bp, synthetic construct
  source 1..75: mol_type = other DNA
gattccctgctgtggaacgctacagcgggggcattcagcgccgcacacggtactgatgccaccagcaaaatcacc

SEQ ID NO: 869218 - DNA, 75 bp, synthetic construct
  source 1..75: mol_type = other DNA
gtgcttacgcgctttctgaacagctgaaagagatcatggcaccgctgttccagaaacatatggacgacatcatct

SEQ ID NO: 869219 - DNA, 75 bp, synthetic construct
  source 1..75: mol_type = other DNA
gggcgttgagctggcattcgaaaccatggttgattccggcatcattgaagagtcggcttactatgaatcactgca

SEQ ID NO: 869220 - DNA, 75 bp, synthetic construct
  source 1..75: mol_type = other DNA
tagcaacgcgagtgcaaatcatgcaaacagtattgcgatgggtagtggttcccagaccacccgtggtgcgcaaac

SEQ ID NO: 869221 - DNA, 75 bp, synthetic construct
  source 1..75: mol_type = other DNA
cagaaacatatggacgacatcatctctggcgaattctcctccggcatgatggcagactgggccaacgacgataag

SEQ ID NO: 869222 - DNA, 75 bp, synthetic construct
  source 1..75: mol_type = other DNA
aaaccatcaccgaagcgctgaaacagggcggcatcaccctgatgatagaccgtctttctaacccggcgaaactgc

SEQ ID NO: 869223 - DNA, 75 bp, synthetic construct
  source 1..75: mol_type = other DNA
atggctaactacttcaatacactgaatctgcgtcagcagctggcacagctgggcaaatgtcgctttatggggcgc

SEQ ID NO: 869224 - DNA, 75 bp, synthetic construct
  source 1..75: mol_type = other DNA
accgatgcggttaacgtgggtcagttgaaagtaacggacgcgcaggtttcccagaacacccagagcattactaac

SEQ ID NO: 869225 - DNA, 75 bp, synthetic construct
  source 1..75: mol_type = other DNA
ggaatgatgcagcgaaagcattcagcgccgcgcacggtactgatgccaccagcaaaatcactaacgtcaaagacg

SEQ ID NO: 869226 - DNA, 75 bp, synthetic construct
  source 1..75: mol_type = other DNA
atcgtcaaatcatcaacgtagccgatggttccgaagcccatgacgccgttacggttcgccagttgcaaaatgcca

SEQ ID NO: 869227 - DNA, 75 bp, synthetic construct
  source 1..75: mol_type = other DNA
acggtactgatgccaccagcaaaatcaccaacgtcaccgctggcgacctgacggctggcagcaccgacgcggtta

SEQ ID NO: 869228 - DNA, 75 bp, synthetic construct
  source 1..75: mol_type = other DNA
ctgttgacagtctcggtgatgactctctgctgtggaacgctacggcgggtgcattcagtgccaaacacggtacca

SEQ ID NO: 869229 - DNA, 75 bp, synthetic construct
  source 1..75: mol_type = other DNA
gttttacagacaccgggggtggctccagcaccgcagtaggttatcacgcaactgctgacggaaggtggtcaacag

SEQ ID NO: 869230 - DNA, 75 bp, synthetic construct
  source 1..75: mol_type = other DNA
tgatctaccaatatgcttccagcgcgatgatgcgcaggcaatcactcgcttcttcgattcactgaaaagccagtt

SEQ ID NO: 869231 - DNA, 75 bp, synthetic construct
  source 1..75: mol_type = other DNA
attatatccgtgatacttactttggagcgtttttaaaaactgaagggctaactgaagttgcagtgaatcgtccaa

SEQ ID NO: 869232 - DNA, 75 bp, synthetic construct
  source 1..75: mol_type = other DNA
tgatgaaaattacgatccatcgatgcacgaacaacaaattcaaggtttcctgtcaaaacctgatgaactggtgcg

SEQ ID NO: 869233 - DNA, 75 bp, synthetic construct
  source 1..75: mol_type = other DNA
acaaaagaggccgatgggactggcttgatagcggttgtgatatagatgaggatgaattaaagcaggaagagtggt

SEQ ID NO: 869234 - DNA, 75 bp, synthetic construct
  source 1..75: mol_type = other DNA
ctaaagaattacccgcatcaattattacccgcctaccagtgagaatgacttgggataataattatttctttgata

SEQ ID NO: 869235 - DNA, 75 bp, synthetic construct
  source 1..75: mol_type = other DNA
tgctgaatatagatactatgatatgcatcaagtgattaggtcggcatttacaaagttcggaattgaatttaaaaa

SEQ ID NO: 869236 - DNA, 75 bp, synthetic construct
  source 1..75: mol_type = other DNA
agctgagtaccgttactacgatatgcatcaagtcattagatctgcctttaataaatttgagcaagagttaggaag

SEQ ID NO: 869237 - DNA, 75 bp, synthetic construct
  source 1..75: mol_type = other DNA
caacatagtaaagcatacaaatattatttacacaaagggatattcaatagaaaacacaatcattgatgaaaaaat

SEQ ID NO: 869238 - DNA, 75 bp, synthetic construct
  source 1..75: mol_type = other DNA
tcggtaaacaggcggaatcgctcatcggtaaggctggcagtatggcgaccagattcacggggatgacgggggcgg

SEQ ID NO: 869239 - DNA, 75 bp, synthetic construct
  source 1..75: mol_type = other DNA
aactgaccggcggcaagctgacgatgaccacgctcaggctgatggcagaggaaggccgggcgtggccgttgctgg

SEQ ID NO: 869240 - DNA, 75 bp, synthetic construct
  source 1..75: mol_type = other DNA
ctatgtcagaatggcttgaggaactacttaaagataatgaatctatggaacaaataaatcgtattttaaaagggt

SEQ ID NO: 869241 - DNA, 75 bp, synthetic construct
  source 1..75: mol_type = other DNA
ttgaagcgttcaaaaaatctgtcggtaaatataatacacgcaagattagtgagcaatttcttaagttttctgatt

SEQ ID NO: 869242 - DNA, 75 bp, synthetic construct
  source 1..75: mol_type = other DNA
tactgtttcctgttataggtgaatctccggtaggtgagaacatagagtatgatccagtgtatagcgaaatacgag

SEQ ID NO: 869243 - DNA, 75 bp, synthetic construct
  source 1..75: mol_type = other DNA
aagattttattattcatcgccgtgatggtttgttcgcctataacctggcggtggtggttgacgatcacttccagg

SEQ ID NO: 869244 - DNA, 75 bp, synthetic construct
  source 1..75: mol_type = other DNA
tctgaaccacaagctgaagggtgtagaagctatttatgacagatacgactattttgaagagaggaaaaaagctct

SEQ ID NO: 869245 - DNA, 75 bp, synthetic construct
  source 1..75: mol_type = other DNA
tatgtgcaggcgggtcgcatggacaaccgcacactatttaatgcacaaggcgggaactttacctttaactttctg

SEQ ID NO: 869246 - DNA, 75 bp, synthetic construct
  source 1..75: mol_type = other DNA
ggggcgaaaaggcggaaggccaccggcgatagatgctgaaagggttgatcaaatcctcgcagctctggaaggagg

SEQ ID NO: 869247 - DNA, 75 bp, synthetic construct
  source 1..75: mol_type = other DNA
ctggcgtacttggccaaaaccagaactaaggatgtccactgcggttaccgcaactttggtacaagccaatgtccg

SEQ ID NO: 869248 - DNA, 75 bp, synthetic construct
  source 1..75: mol_type = other DNA
ctggcgtatctggctaaaaccagaactaaggacgtccacagcggttaccgcaactttggcacaagccagtgtcca

SEQ ID NO: 869249 - DNA, 75 bp, synthetic construct
  source 1..75: mol_type = other DNA
atcttcccaaagaacgcagtaaaactggcgtgccaatcagcatccctttaccgcgccaagccattgcttggttta

SEQ ID NO: 869250 - DNA, 75 bp, synthetic construct
  source 1..75: mol_type = other DNA
ggggcagatttgatcgaaccgacagtgcggcaaatctcgctgtaccagctttttggctggaaagtgccagattac

SEQ ID NO: 869251 - DNA, 75 bp, synthetic construct
  source 1..75: mol_type = other DNA
tggcggtggtggtggatgatcacttccagggcgtgagcgaaattgtccgcggggcagatttgatcgaaccgacag

SEQ ID NO: 869252 - DNA, 75 bp, synthetic construct
  source 1..75: mol_type = other DNA
acactggcaggatttcagcgtcgagcaaatccttcagtcagccgtcaaaaactggacgctgaccgccgtgcctga

SEQ ID NO: 869253 - DNA, 75 bp, synthetic construct
  source 1..75: mol_type = other DNA
tggccgcttcgccccctctccttccggcgagcttcattttggctctctgattgccgcgcttggcagctatttaca

SEQ ID NO: 869254 - DNA, 75 bp, synthetic construct
  source 1..75: mol_type = other DNA
ggcgcggatttgatcgaacccacggtgcgccaaatctcgctgtaccagctttttggctggcaggtgccagattac

SEQ ID NO: 869255 - DNA, 75 bp, synthetic construct
  source 1..75: mol_type = other DNA
cgatgcctatcgcgaagcactcgtctggctacacgagcaagggctaagttattactgcacctgtacacgtgcgcg

SEQ ID NO: 869256 - DNA, 75 bp, synthetic construct
  source 1..75: mol_type = other DNA
gcctatgcgaatgctgacctgatggtcaatttcgggcgctgggtgctggatagtaacatgagtgcgtcccggtat

SEQ ID NO: 869257 - DNA, 75 bp, synthetic construct
  source 1..75: mol_type = other DNA
atttggttttgagaacgtacttcgttacattctgcgtgtgaaggataagcagggtaaataccttacaggtggtga

SEQ ID NO: 869258 - DNA, 75 bp, synthetic construct
  source 1..75: mol_type = other DNA
atctgattatgcttatcctcaggggcaatacagtgttgatgtatttgttaataatgaaaaaaccggtacggctga

SEQ ID NO: 869259 - DNA, 75 bp, synthetic construct
  source 1..75: mol_type = other DNA
cagatggcgggcgcaatcggcgtcacgcttggcttcctgctggtgcagattatcaacaccattctgagttacttc

SEQ ID NO: 869260 - DNA, 75 bp, synthetic construct
  source 1..75: mol_type = other DNA
tttgtggctgccgttttatctctcgctgccgacgctggtggtcagttatgcgctgggcattgtgctgaaagggca

SEQ ID NO: 869261 - DNA, 75 bp, synthetic construct
  source 1..75: mol_type = other DNA
tgagaagtggaacagcattattccggtgctgcaattgctgtgtgtggtggggctactgcgctccgtgggtaaccc

SEQ ID NO: 869262 - DNA, 75 bp, synthetic construct
  source 1..75: mol_type = other DNA
ggcggtatgcacgctatggcggtcagcgctcccgttatgaggcgcgtctgtcgcagcgctttgatggtacatacc

SEQ ID NO: 869263 - DNA, 75 bp, synthetic construct
  source 1..75: mol_type = other DNA
ggacaatatatagttgatgttactgtgaataaagaacgcacggggcggcttggtctgaatattagcaaggaagaa

SEQ ID NO: 869264 - DNA, 75 bp, synthetic construct
  source 1..75: mol_type = other DNA
gatgatgaaaaaaaacgcttatgatgacgtatttgacaaggaaaaacagtgctatgtcctgactcgtaatcccca

SEQ ID NO: 869265 - DNA, 75 bp, synthetic construct
  source 1..75: mol_type = other DNA
atatgaagcaaggttatcgcatcgatttgataatgcttatctgagcggatcttactggcgccaggattactggaa

SEQ ID NO: 869266 - DNA, 75 bp, synthetic construct
  source 1..75: mol_type = other DNA
ccgggggtgacgttcaacaactccctgccgaccaacagtaagggcaacacggtgatgtacctgagcagttacagc

SEQ ID NO: 869267 - DNA, 75 bp, synthetic construct
  source 1..75: mol_type = other DNA
caacctggccgtgggcgagcgcagcgacactaacaccgtggacgacgcgttccgcgccgggaccggcacctttgt

SEQ ID NO: 869268 - DNA, 75 bp, synthetic construct
  source 1..75: mol_type = other DNA
acgcaatgcgctggtggtggaaatgaagcgccagttttgccgtaacgaaaaaatgaaaacgctgcttcgcgcagg

SEQ ID NO: 869269 - DNA, 75 bp, synthetic construct
  source 1..75: mol_type = other DNA
atcgcgctggcagatacgctttctgacttcggtatcgctaactccattattcagcgaaaagaaatcagccacctt

SEQ ID NO: 869270 - DNA, 75 bp, synthetic construct
  source 1..75: mol_type = other DNA
gtgatgattaaaccggtgctcggttccagttatcgccagtacatcctgagtttgtggctgccgttttatctctcg

SEQ ID NO: 869271 - DNA, 75 bp, synthetic construct
  source 1..75: mol_type = other DNA
cgtaagaaaggcatcgaagttctgctgctttccgaccgcatcgatgagtggatgatgaactatctgactgagttc

SEQ ID NO: 869272 - DNA, 75 bp, synthetic construct
  source 1..75: mol_type = other DNA
gtgaaaaatataaaagcggcacgccagcaagcgatagtcgacctgctgctgaaccataccagcctgaccacggaa

SEQ ID NO: 869273 - DNA, 75 bp, synthetic construct
  source 1..75: mol_type = other DNA
taatcgttcaggggaagcccgcatcgggcatctggatgaggtaacgcacattatttctgatgagcgccaggttgc

SEQ ID NO: 869274 - DNA, 75 bp, synthetic construct
  source 1..75: mol_type = other DNA
tagtcgacctgctgctgaaccataccagcctgaccacggaagctctctctgaacagctaaaggtcagtaaagaaa

SEQ ID NO: 869275 - DNA, 75 bp, synthetic construct
  source 1..75: mol_type = other DNA
gggagatttattactgggaaaatcgcaaactcagacagagttattttctgattttaatttttatggcgtatcagt

SEQ ID NO: 869276 - DNA, 75 bp, synthetic construct
  source 1..75: mol_type = other DNA
gccaaaaactttacagacagaacagacctgcagcttctgacatatcgttatcaggacaaagggtatgtggattat

SEQ ID NO: 869277 - DNA, 75 bp, synthetic construct
  source 1..75: mol_type = other DNA
ctcaggcttatctgctcagtaaaagtgacccgtcacgatgggattatggtgttaccggaggacggctgaagtatt

SEQ ID NO: 869278 - DNA, 75 bp, synthetic construct
  source 1..75: mol_type = other DNA
aaacacatcgcccacgactttaacgatccactgacctggagccataaccgcgttgaaggtaagcaagagtacacc

SEQ ID NO: 869279 - DNA, 75 bp, synthetic construct
  source 1..75: mol_type = other DNA
cgcaatatgctggcgaacctggaacaggttaacgcgacctatggtccgctgttgcatccgggcaaagagctggtg

SEQ ID NO: 869280 - DNA, 75 bp, synthetic construct
  source 1..75: mol_type = other DNA
tagctgtgctttctcgcgctatcatccacggcgagcccgagttttatcatatgtacagtgagaaaagtctcacct

SEQ ID NO: 869281 - DNA, 75 bp, synthetic construct
  source 1..75: mol_type = other DNA
gaatggcagctcaacactctgcgcgaagaggcgtaccgcgacacacagtcgcaggatgcagcaggtgcacaattc

SEQ ID NO: 869282 - DNA, 75 bp, synthetic construct
  source 1..75: mol_type = other DNA
ccaacagacggcgaatggggggcggacgcagacattactgatcggcggcgcggaccaaacgtgtaatataataga

SEQ ID NO: 869283 - DNA, 75 bp, synthetic construct
  source 1..75: mol_type = other DNA
tcgataaaacagtagctaaaaaacagtttattcaatatcactatgaactatctgaagcattaaaaaatatcagag

SEQ ID NO: 869284 - DNA, 75 bp, synthetic construct
  source 1..75: mol_type = other DNA
gtatctgttttctgatccttccagcgtcaaactaccgttgtaatggtgaggtctggtgctattgtaataattcag

SEQ ID NO: 869285 - DNA, 75 bp, synthetic construct
  source 1..75: mol_type = other DNA
tgaaggatacaataaccctgattcttattcattgggtgatgactgggatatagggttgcatgtatacgatagctg

SEQ ID NO: 869286 - DNA, 75 bp, synthetic construct
  source 1..75: mol_type = other DNA
taaaaagttggagtaaaggaacccatcttgtatttactggtgatggagaaaaaaacaaatatttttttaacatct

SEQ ID NO: 869287 - DNA, 75 bp, synthetic construct
  source 1..75: mol_type = other DNA
ttatgatgcatatggtgcgcagcagttctattttcctaatgtgctgaagtatgaccccgatcagctacggcagca

SEQ ID NO: 869288 - DNA, 75 bp, synthetic construct
  source 1..75: mol_type = other DNA
gggaaacactttttcaaagttgttggtaatgaccttaaagaattgcgggtagctttaaactactcacaaaatccc

SEQ ID NO: 869289 - DNA, 75 bp, synthetic construct
  source 1..75: mol_type = other DNA
gtcatggctggaactggcgagagccaatggttggtttgttgttcgcagagataaactggtggaaaggttgatgca

SEQ ID NO: 869290 - DNA, 75 bp, synthetic construct
  source 1..75: mol_type = other DNA
atggctaactacttcaatacactgaatctgcgccagcaactggcgcaactgggtaaatgtcgctttatgggccgc

SEQ ID NO: 869291 - DNA, 75 bp, synthetic construct
  source 1..75: mol_type = other DNA
gaactgggggagctggcgattgatgtactcatccatcggataacccagccgacccttcagcaacaacgattacaa

SEQ ID NO: 869292 - DNA, 75 bp, synthetic construct
  source 1..75: mol_type = other DNA
aaaccaaaaactacacgccaatcaatgacgcaaaaattaaatatgctaagtggtcgctgttgcgggtctgtttgc

SEQ ID NO: 869293 - DNA, 75 bp, synthetic construct
  source 1..75: mol_type = other DNA
acctggcgatccgtgacgataaaaccgccttcatccgaagttatgcgcctggtcagctggtgacggttgaagaag

SEQ ID NO: 869294 - DNA, 75 bp, synthetic construct
  source 1..75: mol_type = other DNA
ttagaatacctgcaggtaaatggatgatttctaagaacatagatgtgcctcctggagtgtcattaattggtgatg

SEQ ID NO: 869295 - DNA, 75 bp, synthetic construct
  source 1..75: mol_type = other DNA
ggcaccgctaaaccggatccagccgccatgaaacgcctggtgcaacttggtcttcctatcgcgctggcgctgttc

SEQ ID NO: 869296 - DNA, 75 bp, synthetic construct
  source 1..75: mol_type = other DNA
tattgttgatgtcgcaggacatcagattgccctgaactttagttcactgatgttcgtacttcccatgtcgctggc

SEQ ID NO: 869297 - DNA, 75 bp, synthetic construct
  source 1..75: mol_type = other DNA
tattatcgatgtggcaggccaccagattgcactgaactttagttcactgatgttcgtgcttccaatgtcgctggc

SEQ ID NO: 869298 - DNA, 75 bp, synthetic construct
  source 1..75: mol_type = other DNA
tctaccttcgccatgtgggctttctcggtgcacagccaccttccgtcaaggggctgaaacaggtgtccttcagtg

SEQ ID NO: 869299 - DNA, 75 bp, synthetic construct
  source 1..75: mol_type = other DNA
tttcgccgaacaggccacaaaggagcgtgtcggcgacacggtgaaggtggatgtgacggagtttgcggaagccga

SEQ ID NO: 869300 - DNA, 75 bp, synthetic construct
  source 1..75: mol_type = other DNA
attaacgccggttatcgcgcaattaaatggttctggtcgacgtgagcgcattgcgcatcaggtgcgacaaggttt

SEQ ID NO: 869301 - DNA, 75 bp, synthetic construct
  source 1..75: mol_type = other DNA
gtggtaatcctccgttccagttccgtttagatcctgacttacgggaaaagatggaaaaggcacaacaacaggacg

SEQ ID NO: 869302 - DNA, 75 bp, synthetic construct
  source 1..75: mol_type = other DNA
gtgacggcgctgccgctgtatcacatttttgcactgaccattaactgcctgctgtttatcgaactggggggggca

SEQ ID NO: 869303 - DNA, 75 bp, synthetic construct
  source 1..75: mol_type = other DNA
gcaacgtttccctgagcaaaaccgcgccaagcatgaaaaatgtcctggttggccttggctgggatgcacgctcta

SEQ ID NO: 869304 - DNA, 75 bp, synthetic construct
  source 1..75: mol_type = other DNA
atggttccggtcgacgtgagcgcattgcgcatcaggtgcgacaaggtttctggctggcaggtttttgtttccgtt

SEQ ID NO: 869305 - DNA, 75 bp, synthetic construct
  source 1..75: mol_type = other DNA
aaacatcgatccggctctggcggacaaagccgtgggttatctgcgtgcgttgttgtggggcgcgccgggctatct

SEQ ID NO: 869306 - DNA, 75 bp, synthetic construct
  source 1..75: mol_type = other DNA
ggataaaaaattattgggatgcgacatatgatcctaacattaatctggaagagttcatcaaatggggacttgacg

SEQ ID NO: 869307 - DNA, 75 bp, synthetic construct
  source 1..75: mol_type = other DNA
gattttgccgatgatagcttatcgggtaataataaatgtcaacgacggatgaaaagtgatccacttatatctcca

SEQ ID NO: 869308 - DNA, 75 bp, synthetic construct
  source 1..75: mol_type = other DNA
gtattgaaaaaaacagtaacttcaattcaacaagacaacgtccaccgacacacaccaataacgaaattccagggg

SEQ ID NO: 869309 - DNA, 75 bp, synthetic construct
  source 1..75: mol_type = other DNA
cgcatcttcatggttatcaccgcctgaccctggcccacttttttctgccggaaaaaggcaccatcatctcagtgg

SEQ ID NO: 869310 - DNA, 75 bp, synthetic construct
  source 1..75: mol_type = other DNA
cagccgcaaggcggccagcagttcagcggccagccacagaccaccggcacagcgccagcggcaggaaacgaaccg

SEQ ID NO: 869311 - DNA, 75 bp, synthetic construct
  source 1..75: mol_type = other DNA
gtctatggctaatgacagggttagcagaatacagatgcagttgaataacacaatcaatagccataagaaggttgt

SEQ ID NO: 869312 - DNA, 75 bp, synthetic construct
  source 1..75: mol_type = other DNA
cggtatttacccttgaagaacatgaagtagcacgacatgagtcggtgcagttacaaattgcgccagtggtatcct

SEQ ID NO: 869313 - DNA, 75 bp, synthetic construct
  source 1..75: mol_type = other DNA
gtggcggtttacggattaattttcttcctgccgacccaggttgcggcattgctgggaacaaaagtgggctttaca

SEQ ID NO: 869314 - DNA, 75 bp, synthetic construct
  source 1..75: mol_type = other DNA
attattataatcagatgatggaacgcgaacggctaacggtttgcttccatgcgcagttaaaacagcgtcacgcaa

SEQ ID NO: 869315 - DNA, 75 bp, synthetic construct
  source 1..75: mol_type = other DNA
gcaattgatgaattgcgtggggcattctcaaaacgtcgtcaggtcggtgcaagtgagtatgcatatattagtttt

SEQ ID NO: 869316 - DNA, 75 bp, synthetic construct
  source 1..75: mol_type = other DNA
tccgtgcattacgtgaattattcagtctgtttgagtatgcaccgacaattctgacgtcggtaaaaccagagcaat

SEQ ID NO: 869317 - DNA, 75 bp, synthetic construct
  source 1..75: mol_type = other DNA
aagaattatcctaggggatgctgtagtggaagtagcaaaacagggaagacctatcaataccagaacattgcttga

SEQ ID NO: 869318 - DNA, 75 bp, synthetic construct
  source 1..75: mol_type = other DNA
atgaaatcaaatgacaccctaaagtggttccccgcgcagcttcctgaagtcagaattatcctgggagatgctgtc

SEQ ID NO: 869319 - DNA, 75 bp, synthetic construct
  source 1..75: mol_type = other DNA
tcgaaaaacagccagcagctatgcgccggataattggtaagcatcttgccgtccctcgctggcaggatacatgtg

SEQ ID NO: 869320 - DNA, 75 bp, synthetic construct
  source 1..75: mol_type = other DNA
catctacaattgcgccttaaccaaaccattgccagtcataagaaggtagtggacaggtatgaacaacagttggag

SEQ ID NO: 869321 - DNA, 75 bp, synthetic construct
  source 1..75: mol_type = other DNA
agcaggtgctgatcgtcgaaccggagcaacaacgccaaccgcagcagcctgaagccgattccgcgatgagcggga

SEQ ID NO: 869322 - DNA, 75 bp, synthetic construct
  source 1..75: mol_type = other DNA
ttcagcgtatgcgctgaaagccgattcgggcgctgtgcagcaggtgatgaccgcaaggccggagcaatcacacca

SEQ ID NO: 869323 - DNA, 75 bp, synthetic construct
  source 1..75: mol_type = other DNA
gaggcgttacgcaagatacttggcggctaccgggaaaacgggaacggaatttgttcagcgagcgacgacgttttt

SEQ ID NO: 869324 - DNA, 75 bp, synthetic construct
  source 1..75: mol_type = other DNA
acccgaagaaatccgctttcagtgcctggaaagccagattacgcgagggggtgccaccagaggccatgctggatg

SEQ ID NO: 869325 - DNA, 75 bp, synthetic construct
  source 1..75: mol_type = other DNA
gccgaagcagattacgacccatttgacgtttaacggtgctattaatgctggtggtgattttcaagccggtaatga

SEQ ID NO: 869326 - DNA, 75 bp, synthetic construct
  source 1..75: mol_type = other DNA
ccaatcagcgtgtgcatgcaaccagcttgggttatttctggtgccgggagttcggcaagatgtatggcaggaaac

SEQ ID NO: 869327 - DNA, 75 bp, synthetic construct
  source 1..75: mol_type = other DNA
ccaagccggagaataccgccatccagcagtggggactgaagcgcgatataacaccgtgttttggggctcgtctgg

SEQ ID NO: 869328 - DNA, 75 bp, synthetic construct
  source 1..75: mol_type = other DNA
tgtgctttcagcgacgatgactcgctgcgcctggatcaggcctttccgttgatactcaagcagctggagctgatg

SEQ ID NO: 869329 - DNA, 75 bp, synthetic construct
  source 1..75: mol_type = other DNA
tgtaagaaatggtgggaagctgtttccaataataatataggtgatagtgttttagagttcccttattctaaacgc

SEQ ID NO: 869330 - DNA, 75 bp, synthetic construct
  source 1..75: mol_type = other DNA
ctcaccagcggagaactctccccccgccatcagcactgtgtcaccctctatcacaacggactcacctgcgaagcc

SEQ ID NO: 869331 - DNA, 75 bp, synthetic construct
  source 1..75: mol_type = other DNA
caaagccggagaatcccgcctgccagcagtgggggctaaagagtacgattacaccctgttttggagctcggctgg

SEQ ID NO: 869332 - DNA, 75 bp, synthetic construct
  source 1..75: mol_type = other DNA
ggggcgttcaccgacgatgttgcaatgcgccttgaccaggcatttccgctcatgatgaaacaacttgaactgatg

SEQ ID NO: 869333 - DNA, 75 bp, synthetic construct
  source 1..75: mol_type = other DNA
ttgaaaaacagccagcagctatgcgccggataattggtaagcatctggccgtccctcgctggcaggagacatgcg

SEQ ID NO: 869334 - DNA, 75 bp, synthetic construct
  source 1..75: mol_type = other DNA
caattactggagcaactcacattattaatcgcccaggaaaatcaatttgccgaaatgggccaggcgctggaagtg

SEQ ID NO: 869335 - DNA, 75 bp, synthetic construct
  source 1..75: mol_type = other DNA
tgcatcggttggcaatattggagattcccggcattgtgcgccagcagggaagtacactgacacttgcaggcaacg

SEQ ID NO: 869336 - DNA, 75 bp, synthetic construct
  source 1..75: mol_type = other DNA
atgacagtgatgacgcttaatctcgttgaaaaacagccagcagctatgcgccggataattggtaagcatcttgcc

SEQ ID NO: 869337 - DNA, 75 bp, synthetic construct
  source 1..75: mol_type = other DNA
aacggttcttacccgtttgcgccagcacaaattgcccgcttctaccgctgatatggctgccgctcatctgcatgc

SEQ ID NO: 869338 - DNA, 75 bp, synthetic construct
  source 1..75: mol_type = other DNA
gccttatggcggttagatgaaatcagcggtatgcaaggcgcgcagatattgcagacgacgttatgtgcggctatc

SEQ ID NO: 869339 - DNA, 75 bp, synthetic construct
  source 1..75: mol_type = other DNA
ctttgccatatcctgcgcgatctacatagcggcgttaatttacccggcgtttcgctttctgcggcggtagcctta

SEQ ID NO: 869340 - DNA, 75 bp, synthetic construct
  source 1..75: mol_type = other DNA
atagcattatcttttcatttatggccagggtttcacaatcctgtagtgctaaagtctgtcactgtcggacctcaa

SEQ ID NO: 869341 - DNA, 75 bp, synthetic construct
  source 1..75: mol_type = other DNA
agtactccctatacaatgtattttaattttgataaagcgctggtgccatttttgttagtcctgtgtacatcttct

SEQ ID NO: 869342 - DNA, 75 bp, synthetic construct
  source 1..75: mol_type = other DNA
gacaaataccgcgccctgtacctgagcaaaaatccgttatgcgtgcgttgtctggctaaggggatttatacgcca

SEQ ID NO: 869343 - DNA, 75 bp, synthetic construct
  source 1..75: mol_type = other DNA
gatctaagcgtagcgcgctacagccgtggatttacgccatcacgcccgggccatttacatggcgcgcacagctaa

SEQ ID NO: 869344 - DNA, 75 bp, synthetic construct
  source 1..75: mol_type = other DNA
cgtgaattattcagtctgtttgagtatgcaccgacaattctgacatcggtaaaaccagagcaatatctgcattaa

SEQ ID NO: 869345 - DNA, 75 bp, synthetic construct
  source 1..75: mol_type = other DNA
atgcgcgtctttgaggccgaaacgctgcaacgcggcttgctggaagcggcaacccgtaagccagatttgattatt

SEQ ID NO: 869346 - DNA, 75 bp, synthetic construct
  source 1..75: mol_type = other DNA
cggcatttctctttctgcggcggtagccttactggagcgacgcagtcaggcaattcatgcccggcgctggatcgc

SEQ ID NO: 869347 - DNA, 75 bp, synthetic construct
  source 1..75: mol_type = other DNA
agggtgatgacggtgccggaactcactggtgaagccagtcagctctatgcgcgagaaggctttaatattattgcc

SEQ ID NO: 869348 - DNA, 75 bp, synthetic construct
  source 1..75: mol_type = other DNA
cttgctgctgcgtgccacccgcatggataacagcgataccctgtgggatcacttgttcgaagatgaaagccagca

SEQ ID NO: 869349 - DNA, 75 bp, synthetic construct
  source 1..75: mol_type = other DNA
tcatcccgataccgatccgattctgttaacgctgattgatgcattggcgggtgacggtttcggtagacttgcccc

SEQ ID NO: 869350 - DNA, 75 bp, synthetic construct
  source 1..75: mol_type = other DNA
aaaagaattcaaccagccatactggcgaattaatgaagaatcatgttactggcgtgatgctttgttccgtgcatt

SEQ ID NO: 869351 - DNA, 75 bp, synthetic construct
  source 1..75: mol_type = other DNA
ggctggtgaaatcgttaatcgaaagccagcggccacgatacgtgttgattgaaggcccggctgattttaatgacc

SEQ ID NO: 869352 - DNA, 75 bp, synthetic construct
  source 1..75: mol_type = other DNA
gccctgcccgatttacgcgcggcgatggcctggctaccaccacgagaacgcgggacgctggcgcatcaggtgctt

SEQ ID NO: 869353 - DNA, 75 bp, synthetic construct
  source 1..75: mol_type = other DNA
tgccgtggagctatcgcggagttattcatcccgataccgatccgattctgctaacgttgatagacacattagcgg

SEQ ID NO: 869354 - DNA, 75 bp, synthetic construct
  source 1..75: mol_type = other DNA
aaaaggagtttcacgctcacctgcatagctggcaggcgctttgccatatcctgcgcgatctacatagcggcgtta

SEQ ID NO: 869355 - DNA, 75 bp, synthetic construct
  source 1..75: mol_type = other DNA
ctggaaattaacccgcccgcttagccagcatgcggcattgattgaggccgcctgctttggtgccacactccagga

SEQ ID NO: 869356 - DNA, 75 bp, synthetic construct
  source 1..75: mol_type = other DNA
gctggatgccatagctggctcgctgattaaagaagccctgaatgcgccgttgccgtggagctatcgcggagttat

SEQ ID NO: 869357 - DNA, 75 bp, synthetic construct
  source 1..75: mol_type = other DNA
ttgccttgctgggcgcagagtgaagaagaggacgattcgcctgatacgcaagatgaaagccagcaaactgcatta

SEQ ID NO: 869358 - DNA, 75 bp, synthetic construct
  source 1..75: mol_type = other DNA
gaagcctttatggcccactggattgcatgggcgatgcagcaaaacaatggcggcgtgttagtcgtctgtggtggc

SEQ ID NO: 869359 - DNA, 75 bp, synthetic construct
  source 1..75: mol_type = other DNA
ttttttgtgccttggtaaagcgttgcgctatgttgcggttgcagcagccaccgttcagggcatgatgtggtggca

SEQ ID NO: 869360 - DNA, 75 bp, synthetic construct
  source 1..75: mol_type = other DNA
cctttgacatctatctggacggcgacctgatccacattgaaaaaatttcgctggatatcaccgataacagagcgg

SEQ ID NO: 869361 - DNA, 75 bp, synthetic construct
  source 1..75: mol_type = other DNA
agaaatccgcgtcgaagccttcggttgcgagctgatgctttccggcctgttaagcattgacaccgagagcgcaga

SEQ ID NO: 869362 - DNA, 75 bp, synthetic construct
  source 1..75: mol_type = other DNA
gatacggtactgaacggtgctcaggtcaacggcaacaggattatcgccgatgtgggccacgacctgctgataagc

SEQ ID NO: 869363 - DNA, 75 bp, synthetic construct
  source 1..75: mol_type = other DNA
ccagctcgatggtgcggttatcgcttccacggcgacggcagataaaaacagcctcgataccgggacgctcggctt

SEQ ID NO: 869364 - DNA, 75 bp, synthetic construct
  source 1..75: mol_type = other DNA
tttgtgaccagtcccaagttcgtgaacatcaacggtgtgccgtatctggaagcggaagccacggaaaacctgatc

SEQ ID NO: 869365 - DNA, 75 bp, synthetic construct
  source 1..75: mol_type = other DNA
gccctggagtgggtctttaccattgctgatgaaattccgatgtttgtcgataccgtttccgaatttaaagcgaac

SEQ ID NO: 869366 - DNA, 75 bp, synthetic construct
  source 1..75: mol_type = other DNA
cataacctggctctgcttggtcgggatgtgcatttaatatcagctattggcaacgatttttacggcgagacatta

SEQ ID NO: 869367 - DNA, 75 bp, synthetic construct
  source 1..75: mol_type = other DNA
atggaatcattattagacagtatgactattacgctctctcgcccgtttattattaagggggagagccgcgataca

SEQ ID NO: 869368 - DNA, 75 bp, synthetic construct
  source 1..75: mol_type = other DNA
acagggcgttaaacgcatttttgtttatctgcaagatgaatctgtattttgtagcgaaaaggatggcgagcaatt

SEQ ID NO: 869369 - DNA, 75 bp, synthetic construct
  source 1..75: mol_type = other DNA
actgtgtggtggtgggggcaatcaatatggatattcgcggaatggcggatatccactacccagaagcggcatcaa

SEQ ID NO: 869370 - DNA, 75 bp, synthetic construct
  source 1..75: mol_type = other DNA
ctgatgaaattccgatgtttgtcgataccgtttccgaatttaaagcgaacaaagtaaaaactggtacagccggat

SEQ ID NO: 869371 - DNA, 75 bp, synthetic construct
  source 1..75: mol_type = other DNA
gtttttaatgcgtcagcaagggttggcatggttccggtaccgtctgacgccttcaggtgaggcgcatcgtcaggc

SEQ ID NO: 869372 - DNA, 75 bp, synthetic construct
  source 1..75: mol_type = other DNA
ggtgaactgaatgcgcggctggtttaccgtaaacgccttcgccgcccactgagcgaatatcagcgtaatgtgccg

SEQ ID NO: 869373 - DNA, 75 bp, synthetic construct
  source 1..75: mol_type = other DNA
atggacgaaattgaccgccgtttcgccgaagataaacctgcgctggcaacttataacctgaaagattgcgagctg

SEQ ID NO: 869374 - DNA, 75 bp, synthetic construct
  source 1..75: mol_type = other DNA
accgaaggctttctcgatgcctggttctcgcgagaaaaacattgcctgccggagattgtgactaacatctggcac

SEQ ID NO: 869375 - DNA, 75 bp, synthetic construct
  source 1..75: mol_type = other DNA
tttctgatgccaactattcgcggagccgataccggcagtaagaagcgatacgccggactgattcaggagggcgac

SEQ ID NO: 869376 - DNA, 75 bp, synthetic construct
  source 1..75: mol_type = other DNA
cgaaaccatcgacaaactgatggcgggcgaactggatgcgcggctggtttaccgtaaacgccttcgccgtccgct

SEQ ID NO: 869377 - DNA, 75 bp, synthetic construct
  source 1..75: mol_type = other DNA
cccgacactggcgggacaccccgcaaggaaccgaagtttccttttggttagcgacggacaacgggccgttgcagg

SEQ ID NO: 869378 - DNA, 75 bp, synthetic construct
  source 1..75: mol_type = other DNA
acttataacctgaaagattgcgagctggtgacgcagatcttccacaaaactgaaatcatgccgtttttgctcgaa

SEQ ID NO: 869379 - DNA, 75 bp, synthetic construct
  source 1..75: mol_type = other DNA
ccgctttggtggcaacgagaagatactgcgctggggaaataccctcaagagtcgctggcagatgcccggacacgc

SEQ ID NO: 869380 - DNA, 75 bp, synthetic construct
  source 1..75: mol_type = other DNA
tcagcgcaatagacaacatgactcacagtgagcaggaaaaagttgcgcaatttttgtcacgcgaaggaattcgtc

SEQ ID NO: 869381 - DNA, 75 bp, synthetic construct
  source 1..75: mol_type = other DNA
cctgcgctggcgacttataacctgaaagattgcgagctggtgacgcagattttccataaaactgaaatcatgccg

SEQ ID NO: 869382 - DNA, 75 bp, synthetic construct
  source 1..75: mol_type = other DNA
agcgagctggagtggcgcgagcacggctttaaaaacggcgtcttttttgcccaggctaaaggtcggctaattatc

SEQ ID NO: 869383 - DNA, 75 bp, synthetic construct
  source 1..75: mol_type = other DNA
ccacccgccacggtgagctgtactgcatcggcctggaaggctgcgggcagcgcatcgtttatatgctggggccgg

SEQ ID NO: 869384 - DNA, 75 bp, synthetic construct
  source 1..75: mol_type = other DNA
gactggaatgaagaattgcgatcacgtattggcgtgatgaattatatccatcaacgtacacgtatatcgcgttct

SEQ ID NO: 869385 - DNA, 75 bp, synthetic construct
  source 1..75: mol_type = other DNA
aatcctggtcagccagcaggcacgacaccggaagccgattcgggcgctgtgcagcaggtgatgaccgcagggtcg

SEQ ID NO: 869386 - DNA, 75 bp, synthetic construct
  source 1..75: mol_type = other DNA
tggcatgacaccggaagcagattccgggcgttgtgtgcagcaggtgctgctcgtcgaaccggagcaacaacacca

SEQ ID NO: 869387 - DNA, 75 bp, synthetic construct
  source 1..75: mol_type = other DNA
agcatggcaggttggtgaagcgctgaaacctggcgataaccgttgtgctggggtaagaaatgaatattccgcgtt

SEQ ID NO: 869388 - DNA, 75 bp, synthetic construct
  source 1..75: mol_type = other DNA
accaggcaggggatgttcagaccgtaaattctggtcagccagcaggcacgacaccggaagccgattcagcgtatg

SEQ ID NO: 869389 - DNA, 75 bp, synthetic construct
  source 1..75: mol_type = other DNA
cccggtaagcggtacgaacaaccagcgttgtgtgaatcaaatttctgaaccggatactgaaataccgccggggtt

SEQ ID NO: 869390 - DNA, 75 bp, synthetic construct
  source 1..75: mol_type = other DNA
cccggtaagcggcacgaacaaccagcgttgtgtgaatcatatttctgaaccggataccgaaattccgccgggatt

SEQ ID NO: 869391 - DNA, 75 bp, synthetic construct
  source 1..75: mol_type = other DNA
tttacgtaatccgtgacaaatttatgatctccctcgcggtgttatctcttgcaatactgtttgctgtaacgcata

SEQ ID NO: 869392 - DNA, 75 bp, synthetic construct
  source 1..75: mol_type = other DNA
gccacggacccactggtggattcttgtcccgttctgactgaacgtccaggaccagctggcatgacaccggaagca

SEQ ID NO: 869393 - DNA, 75 bp, synthetic construct
  source 1..75: mol_type = other DNA
ctggaggctaccgggaaagcgggaactgaatttgttcagcaggcatcgacgttttttggcccgaacaggaatttc

SEQ ID NO: 869394 - DNA, 75 bp, synthetic construct
  source 1..75: mol_type = other DNA
acggtggcgctctcctccgccgtcaaccgcggcgaaaccctgaccgttaacaacattaatgactatggcgccgat

SEQ ID NO: 869395 - DNA, 75 bp, synthetic construct
  source 1..75: mol_type = other DNA
tgcattctaataaagaaaaaatcgtttcttttgagggatgtgaacacgacattttctattctgataggtgcgatg

SEQ ID NO: 869396 - DNA, 75 bp, synthetic construct
  source 1..75: mol_type = other DNA
gaagaaatccgctttcagtgcctggaaggccagattacgcgagggggtgccaccagaggccatgctggatggtgt

SEQ ID NO: 869397 - DNA, 75 bp, synthetic construct
  source 1..75: mol_type = other DNA
ggaatttgttcagcgagcgacgacgttttttggaccggaccggaattttgaaaacccctggttgctcccggtaag

SEQ ID NO: 869398 - DNA, 75 bp, synthetic construct
  source 1..75: mol_type = other DNA
aggggatagagaaagcaaggaaagacggcaaatataaagggcgtaaacctaatcaagccagacatgatgcaatta

SEQ ID NO: 869399 - DNA, 75 bp, synthetic construct
  source 1..75: mol_type = other DNA
gctcctggacacaggtacagaaggtgctagggtgcagccgtggcacaatcagtagcgcaataaaacgtaaatccg

SEQ ID NO: 869400 - DNA, 75 bp, synthetic construct
  source 1..75: mol_type = other DNA
tgatatgagaaattgtgttgtggatgatatgactctgacaaacgagaggacgggcaagagctggaatgagtatga

SEQ ID NO: 869401 - DNA, 75 bp, synthetic construct
  source 1..75: mol_type = other DNA
tttgtccagatacggtacgcgcttcgagtttaataatgaaaagcaagttatattttccagtgatgtcaatagcga

SEQ ID NO: 869402 - DNA, 75 bp, synthetic construct
  source 1..75: mol_type = other DNA
atgaaaaaagaggatagatcctttattagatgggtcagccttagcagtaggatttttactgctgccttagctatc

SEQ ID NO: 869403 - DNA, 75 bp, synthetic construct
  source 1..75: mol_type = other DNA
tacagtataggtgattatattctctcggttggttatcttttcgttattttcatggctcaatcgtatgcggctgca

SEQ ID NO: 869404 - DNA, 75 bp, synthetic construct
  source 1..75: mol_type = other DNA
aagacggcaaatataaagggcgtaaacctaatcaagccagacatgatgcaattatcaggttgatagaaagtggca

SEQ ID NO: 869405 - DNA, 75 bp, synthetic construct
  source 1..75: mol_type = other DNA
ttaatcactggatgggaaaaacgccaggtgcttaaagaggacaacggcaatatttcgcaaaccgcaaaatctccg

SEQ ID NO: 869406 - DNA, 75 bp, synthetic construct
  source 1..75: mol_type = other DNA
gatacctggcggctaccgggaaaacgggaacggaatttgttcagcgagcgacgacgttttttgggccggaccgga

SEQ ID NO: 869407 - DNA, 75 bp, synthetic construct
  source 1..75: mol_type = other DNA
gatgtggatcggttgtcccgtctgacaggtgaggattggaataagctgaagaaaatgatccgtcagaaagatatc

SEQ ID NO: 869408 - DNA, 75 bp, synthetic construct
  source 1..75: mol_type = other DNA
cgggttgtggccgtcaacgttccgacaacctggctcgcatcgggtcacaatgattttgacagccgaatgttttcg

SEQ ID NO: 869409 - DNA, 75 bp, synthetic construct
  source 1..75: mol_type = other DNA
gatgtggacaggctttcccgcctgtcaggggaagactggaatacccttaaaaaaatgatccggcagaaagacatc

SEQ ID NO: 869410 - DNA, 75 bp, synthetic construct
  source 1..75: mol_type = other DNA
tcgttagatgtacctaacgcgtgcattaacataagtatctctcaatcaccagatggaagcattcacgttgccagc

SEQ ID NO: 869411 - DNA, 75 bp, synthetic construct
  source 1..75: mol_type = other DNA
tacccaccaaacatccccaacactcaggtcggcgtatatggcgactggtttaatgatggcaagcccacttgggat

SEQ ID NO: 869412 - DNA, 75 bp, synthetic construct
  source 1..75: mol_type = other DNA
gcgcaatatcgagacggtgagttttttgatgtagtccgtaatggtgatgaatttttcgaaacacagagccgcaat

SEQ ID NO: 869413 - DNA, 75 bp, synthetic construct
  source 1..75: mol_type = other DNA
tcgttagatacacctaacgctgcattaacatcagtatctctcaatcatcagatggaaacatttatgttaccagcc

SEQ ID NO: 869414 - DNA, 75 bp, synthetic construct
  source 1..75: mol_type = other DNA
agattactgtgctcctggagtcaaacgaacaaaataggttattacaatctttacccatcgatcgccacatgccat

SEQ ID NO: 869415 - DNA, 75 bp, synthetic construct
  source 1..75: mol_type = other DNA
aatgttgacgaacaggacctcctatgaagtgccacaaggtgtgaaatgtgaaatcgatgagatggtaagaacgct

SEQ ID NO: 869416 - DNA, 75 bp, synthetic construct
  source 1..75: mol_type = other DNA
taaaaccatcgaatggctgaactatattgccaccgaactacataaaggctttaccccgctgtttcacccggctac

SEQ ID NO: 869417 - DNA, 75 bp, synthetic construct
  source 1..75: mol_type = other DNA
gcactggaagccgcagccgaaccagaagatcttagcgagtgggctgatatgcagtttctgttgtgggatgcacag

SEQ ID NO: 869418 - DNA, 75 bp, synthetic construct
  source 1..75: mol_type = other DNA
acgatcttagcgagtgggctgatatgcagtttctgttgtgggatgcacagcgccgtgctggtatcagtgatgctg

SEQ ID NO: 869419 - DNA, 75 bp, synthetic construct
  source 1..75: mol_type = other DNA
ttcacagagatgtgctgccgttctcgcttccggtaactccggatggttggataagctgtagtgagcgaatgccgg

SEQ ID NO: 869420 - DNA, 75 bp, synthetic construct
  source 1..75: mol_type = other DNA
tctatatagccgcattggagtacgacgacgatgagccaattggcggtgtaacccactggatgcctctaccagaac

SEQ ID NO: 869421 - DNA, 75 bp, synthetic construct
  source 1..75: mol_type = other DNA
ttcacagagatgtgctgccgttctcgcttccggtgactccggatggttggataagctgtagtgagcgaatgccga

SEQ ID NO: 869422 - DNA, 75 bp, synthetic construct
  source 1..75: mol_type = other DNA
caggaagcgttgcagtatgcgaatcaggcgcaggtaacaaagccgcagattcagcagactggtgaaaatattact

SEQ ID NO: 869423 - DNA, 75 bp, synthetic construct
  source 1..75: mol_type = other DNA
tagtattgcgttgtataccgcctttggcggctttcgcgccagcgtgctgaacgacaccatgcaaggactggtgat

SEQ ID NO: 869424 - DNA, 75 bp, synthetic construct
  source 1..75: mol_type = other DNA
ctaccagagtcgtctactggtgtggctagcgagcttgagtttattggtcgcgttcattggtgcaatgactgtgca

SEQ ID NO: 869425 - DNA, 75 bp, synthetic construct
  source 1..75: mol_type = other DNA
gtcgccagcagctacagtgctgaaatcatgcctgcaacaactgacacaatcctcaaaccatgcctgcgccgatat

SEQ ID NO: 869426 - DNA, 75 bp, synthetic construct
  source 1..75: mol_type = other DNA
aaagcgttgtcgaaattagaaaacttaatattagcaaacagtcctggccatttaattatgtgacagaaacatgca

SEQ ID NO: 869427 - DNA, 75 bp, synthetic construct
  source 1..75: mol_type = other DNA
cgacgctgatggtaaaagtgctgccaccgtttgctgccgggatcttccttgctgcaccaatggctgcgatcatgt

SEQ ID NO: 869428 - DNA, 75 bp, synthetic construct
  source 1..75: mol_type = other DNA
gcaaaccatcgatccacaactggttacgccacaaggtgctgacgatattctgtcacctgcctttatgacgtcgtt

SEQ ID NO: 869429 - DNA, 75 bp, synthetic construct
  source 1..75: mol_type = other DNA
cacggctgcagtgattaaagacagcagcaatgcagttgtgactcctgggaatatagatacatcagttaatatgaa

SEQ ID NO: 869430 - DNA, 75 bp, synthetic construct
  source 1..75: mol_type = other DNA
gccttacatcccggcggccttttgccgggatgccaggagcgcaggccacggcgcgacagaggcggcgcgaccgga

SEQ ID NO: 869431 - DNA, 75 bp, synthetic construct
  source 1..75: mol_type = other DNA
gtgctgctgggcggcatggttggcgcggggattgtgctggggcgtaacgcgctgcgtaattacaacgcgaaataa

SEQ ID NO: 869432 - DNA, 75 bp, synthetic construct
  source 1..75: mol_type = other DNA
gcggagctgaaactgattgcggagaaaacgaaaaaggggtatgtggcggagaacattgtgataacaccgtcatct

SEQ ID NO: 869433 - DNA, 75 bp, synthetic construct
  source 1..75: mol_type = other DNA
ggaggcgcaaactatggcattttcggatacctttctgctaatcagtggtctgttatttatcgcatttttgttggt

SEQ ID NO: 869434 - DNA, 75 bp, synthetic construct
  source 1..75: mol_type = other DNA
tggcattggtgagttttattttatttgctgcgcgtacacttacaatatccaatccgataatggatcttcatgctt

SEQ ID NO: 869435 - DNA, 75 bp, synthetic construct
  source 1..75: mol_type = other DNA
tgattaaagaaatcaaagagcgcataggcagcctggacgttcgagacaatattgagcgacggtcgtatgaaattg

SEQ ID NO: 869436 - DNA, 75 bp, synthetic construct
  source 1..75: mol_type = other DNA
caaacatttcgcaccattctgaccgtatccagcactgccaccgtggtgcttaccgtggataacaccatggtgatg

SEQ ID NO: 869437 - DNA, 75 bp, synthetic construct
  source 1..75: mol_type = other DNA
taaatccacttttggaaaagtgaagtaccggatcgaagttgatggaaagtccataacctggacaggaaaaggtcg

SEQ ID NO: 869438 - DNA, 75 bp, synthetic construct
  source 1..75: mol_type = other DNA
acggggcttggtattatcggtgaagtcgatggtgatgatccggcagtattcagaccaatacaaaagttaattaac

SEQ ID NO: 869439 - DNA, 75 bp, synthetic construct
  source 1..75: mol_type = other DNA
ttgttaaacgaatcgcttaatagttcacgaataaaaatttatcatttgagcacctcaggaaaaaaaagcaaagcg

SEQ ID NO: 869440 - DNA, 75 bp, synthetic construct
  source 1..75: mol_type = other DNA
caattaaccattaatgtggatgactggcaaaatagcgatattaatcgcgttgtgtatcaaaatttagagaagttg

SEQ ID NO: 869441 - DNA, 75 bp, synthetic construct
  source 1..75: mol_type = other DNA
gcaggctgcaacgccgaaagcagtaaaggccgcgtatgaccttgctaacggtaaatatactgcgcaggatgccag

SEQ ID NO: 869442 - DNA, 75 bp, synthetic construct
  source 1..75: mol_type = other DNA
ttaaatggcatcggatttgcccagaagttgaatatggaagtagatagcgcccagcatcttgttgtacatgatgtg

SEQ ID NO: 869443 - DNA, 75 bp, synthetic construct
  source 1..75: mol_type = other DNA
agagattggtgaaattacgctgcccgatcatgtatttgagctgatttttatgctgcgccagcaactggataaatt

SEQ ID NO: 869444 - DNA, 75 bp, synthetic construct
  source 1..75: mol_type = other DNA
atatgaccgcatgctgattcgtctgtggttagataaagtgcaggataaagcgaatttccgctccatgctgaccag

SEQ ID NO: 869445 - DNA, 75 bp, synthetic construct
  source 1..75: mol_type = other DNA
tggtagaagaggtgtcacgtaacgcctccgcggttgcacagaatacggcagccgcgaaaaaatcagtcagcgatg

SEQ ID NO: 869446 - DNA, 75 bp, synthetic construct
  source 1..75: mol_type = other DNA
tgcgtctgcttcaaaagatgaggcgaccagacaggcgtcagcagcaaagggcagcgccacgacggcatccacgaa

SEQ ID NO: 869447 - DNA, 75 bp, synthetic construct
  source 1..75: mol_type = other DNA
actgccgtacagacagataaaatgcgaaaaaaaagctcgcactttcgtacgagctcttctttaaatatggcggtg

SEQ ID NO: 869448 - DNA, 75 bp, synthetic construct
  source 1..75: mol_type = other DNA
atggagcaaaaggctccagcagttcatttgtggctatcggtcaggttattggtctggtgctctttatcggcggtc

SEQ ID NO: 869449 - DNA, 75 bp, synthetic construct
  source 1..75: mol_type = other DNA
cctgctgctgatgctgttactcgccgcctacgttttgctgggctatctgctatggcgtagctggcggcgtactat

SEQ ID NO: 869450 - DNA, 75 bp, synthetic construct
  source 1..75: mol_type = other DNA
cctgctgctgatgctgttactcgccgcctacgttttgctgggctatctgctatggcgtggctggcgacgtactat

SEQ ID NO: 869451 - DNA, 75 bp, synthetic construct
  source 1..75: mol_type = other DNA
ttagcggcagtattgagcgaaaaacggctgttgcagcaggtcattgtgctggattcgctgggctacagccgctgg

SEQ ID NO: 869452 - DNA, 75 bp, synthetic construct
  source 1..75: mol_type = other DNA
tacgcgcaatgctggtctgaaggtcaagggtggcttggtgatgatatcagcatccctgaatgcgatgtaatcaat

SEQ ID NO: 869453 - DNA, 75 bp, synthetic construct
  source 1..75: mol_type = other DNA
atggctacgccgttacggtacgcattaatctttctgctgtgggcgatggtggcggtgatttacgcaccgctaatc

SEQ ID NO: 869454 - DNA, 75 bp, synthetic construct
  source 1..75: mol_type = other DNA
tggcgtggctggaatggggatcgtcacgtcggcacttctggctatggttgcccattttattacccgctctgccac

SEQ ID NO: 869455 - DNA, 75 bp, synthetic construct
  source 1..75: mol_type = other DNA
ttctgacgatggcctttgctgttggtcatatttctggtggtcattttaacccggcggtcactattggtttatggg

SEQ ID NO: 869456 - DNA, 75 bp, synthetic construct
  source 1..75: mol_type = other DNA
gtacgacgacgatgaaccaattgacggtgtaacccactggatgcatctaccagaaccgccgcaggaggtgaatca

SEQ ID NO: 869457 - DNA, 75 bp, synthetic construct
  source 1..75: mol_type = other DNA
ataaccaaagaacgtatcaaattattcattaaaaatccgcttgataacggacttactcgtggcgaacaaatggaa

SEQ ID NO: 869458 - DNA, 75 bp, synthetic construct
  source 1..75: mol_type = other DNA
cacggtatgcgctgaggcttatcaggttgtaggagttatggcagatgcgcttggtgtattcggtgatgcagcagt

SEQ ID NO: 869459 - DNA, 75 bp, synthetic construct
  source 1..75: mol_type = other DNA
tggtggctgtggtagtgccgtactggccgcaggcttcccggaattaggcattggttttgccggcgtggcgctggc

SEQ ID NO: 869460 - DNA, 75 bp, synthetic construct
  source 1..75: mol_type = other DNA
tctggccttaaccctgattcacttaatcagtattccggtgactaacacttctgttaacccggcgcgcagcaccgc

SEQ ID NO: 869461 - DNA, 75 bp, synthetic construct
  source 1..75: mol_type = other DNA
tgacctgtgccgcctggtcatcacgggttcgcatgctgcgggttgaattcagggctgagtttaagcaggtggtga

SEQ ID NO: 869462 - DNA, 75 bp, synthetic construct
  source 1..75: mol_type = other DNA
aagcgtttctggcagagcacggtggctggaaggcatttttgtggaagccaccctatgcataccggcagataaagg

SEQ ID NO: 869463 - DNA, 75 bp, synthetic construct
  source 1..75: mol_type = other DNA
tgacctgtgccgcctggtcatcacgggttcgcatgctgggggttgaattcagtgccgagtttaagcaggtggtga

SEQ ID NO: 869464 - DNA, 75 bp, synthetic construct
  source 1..75: mol_type = other DNA
gggatagaattacgcgatttatcaccagaatcatggcgtaaacatctctcctgggttgggcaaaacccacaatta

SEQ ID NO: 869465 - DNA, 75 bp, synthetic construct
  source 1..75: mol_type = other DNA
ctggttcatggcgcgtattctgcagcacatgattatggagaacatcccccgcgaagccctgcttctgccctttac

SEQ ID NO: 869466 - DNA, 75 bp, synthetic construct
  source 1..75: mol_type = other DNA
tcccctctaactgggctgcggcgctcattctgctgggcactgcaccgttaattccgttgtttatggcgctggttg

SEQ ID NO: 869467 - DNA, 75 bp, synthetic construct
  source 1..75: mol_type = other DNA
aggcccgtctgcgcgttgctttacgtcgccactccgccaccgccgctcccgatccgctggtgaaattttctgatg

SEQ ID NO: 869468 - DNA, 75 bp, synthetic construct
  source 1..75: mol_type = other DNA
cggcacactgtcggtatgggttgccggtgagcaggtcacggtggatgtggaaaccggtgatgaaccgtcgaaaat

SEQ ID NO: 869469 - DNA, 75 bp, synthetic construct
  source 1..75: mol_type = other DNA
gacgtcttgatgttgaggttattgaacagaacggacggaagaaaacctttcaggtcgatacggcctcggttcctt

SEQ ID NO: 869470 - DNA, 75 bp, synthetic construct
  source 1..75: mol_type = other DNA
ggtgacgggtactcacagcgtatggcggcagggctgaatgctgacctgaaaacataccgtgtgacgctttccgtg

SEQ ID NO: 869471 - DNA, 75 bp, synthetic construct
  source 1..75: mol_type = other DNA
gaagcgccgttcgagcacgtcaagggcaaccgcaagagctacttcgtcacgctgcgcgacgggaacggcgaagac

SEQ ID NO: 869472 - DNA, 75 bp, synthetic construct
  source 1..75: mol_type = other DNA
ggctgacgcagcaagccgagcgcggcaacgccgaggcgctggccgtgctgcgcgaccgcgaggaacggacacgcc

SEQ ID NO: 869473 - DNA, 75 bp, synthetic construct
  source 1..75: mol_type = other DNA
ttagcacgatattcatcctggccggttgtgtctctctggcacctgaatatcagcgcccggcagcaccggtacccc

SEQ ID NO: 869474 - DNA, 75 bp, synthetic construct
  source 1..75: mol_type = other DNA
cacaggcgggctgcatggcgtgcagaggatgccagacggggacaccgccgcgcacgtgggtattcccgactgtgg

SEQ ID NO: 869475 - DNA, 75 bp, synthetic construct
  source 1..75: mol_type = other DNA
cttctggcccgaatggaaccatcagccattgtgccaggcgtgccataaccagaaaacgaaatggcttgatccggc

SEQ ID NO: 869476 - DNA, 75 bp, synthetic construct
  source 1..75: mol_type = other DNA
tatgcagcaccgtgggcggcaccaggtgtgcctttaaaagcgattaaatggatgttccagcgccatgcgccgctg

SEQ ID NO: 869477 - DNA, 75 bp, synthetic construct
  source 1..75: mol_type = other DNA
agacagcctcaagcacccgcagcaattctacttaactctcgctttaccgcaaaccgttttgcccgatatgggaat

SEQ ID NO: 869478 - DNA, 75 bp, synthetic construct
  source 1..75: mol_type = other DNA
aacgtacagtgtgacgctttccgtgacccgggaggaggcccggcatctggagtcgtttctggcagagcacggggg

SEQ ID NO: 869479 - DNA, 75 bp, synthetic construct
  source 1..75: mol_type = other DNA
gcgatctggctcaggcaaacaatgccctgcaactggtgctgggaacgtaccgcgcacttccgtcagaaaaaggga

SEQ ID NO: 869480 - DNA, 75 bp, synthetic construct
  source 1..75: mol_type = other DNA
gacgcgagactggagctcagctatgagctcgattttttcggcaaacttaagaacatgagtgatgctgatcgccag

SEQ ID NO: 869481 - DNA, 75 bp, synthetic construct
  source 1..75: mol_type = other DNA
tatatgaaaaacaatatgatgcaacagtcacacgagtaaaccatgctgaagagttgagaaataaactaaattcag

SEQ ID NO: 869482 - DNA, 75 bp, synthetic construct
  source 1..75: mol_type = other DNA
gaggcgctgaatgccgcctctctgcgccagacaacgttaatggtcacccaccagttagaagatcttgctgactgg

SEQ ID NO: 869483 - DNA, 75 bp, synthetic construct
  source 1..75: mol_type = other DNA
atgtctcaaaataaggctttcagcacgccatttatcctggctgttctttgtatttacctcagttattttctacac

SEQ ID NO: 869484 - DNA, 75 bp, synthetic construct
  source 1..75: mol_type = other DNA
tatttatatgatgatgggtgggctggcaaactttgttattccgctgattaccggatatctttcgaatatcggact

SEQ ID NO: 869485 - DNA, 75 bp, synthetic construct
  source 1..75: mol_type = other DNA
ctttggtattcccgcttgcccgaatttaacgctcgcttactgtctggcagtgtgcgtaggtatcgctaactcggc

SEQ ID NO: 869486 - DNA, 75 bp, synthetic construct
  source 1..75: mol_type = other DNA
caggcctggctggaatattccgatgcctcctggctgccgccgtcccgctgggataacggtattcccggactgttg

SEQ ID NO: 869487 - DNA, 75 bp, synthetic construct
  source 1..75: mol_type = other DNA
tatttttgccgcactactgaaaaaatggtccggcccatctgggctaatgtatttaactctgcactggcaacaata

SEQ ID NO: 869488 - DNA, 75 bp, synthetic construct
  source 1..75: mol_type = other DNA
gcaatatatcatcgttctcgattttactttcgcgctgctggccctgattaccgcaattattgtttttatccgcta

SEQ ID NO: 869489 - DNA, 75 bp, synthetic construct
  source 1..75: mol_type = other DNA
agcgggcgcgtgtccgtcccctggtatcgcggctccgtgaagctgccagcggtgctggctgccatctacggcgct

SEQ ID NO: 869490 - DNA, 75 bp, synthetic construct
  source 1..75: mol_type = other DNA
atgaaaacctttcactggaaagtgaaacccggcatggaagtggcttcggccccttctgtcagggaggtgcgcttt

SEQ ID NO: 869491 - DNA, 75 bp, synthetic construct
  source 1..75: mol_type = other DNA
attacccagaaagacgggttgccagtgacggcaacggcaaacgcgggggaagtgaccctgacctgccgccataaa

SEQ ID NO: 869492 - DNA, 75 bp, synthetic construct
  source 1..75: mol_type = other DNA
cgccatttatcctggctgttctttgtatatacttcagctatttcctgcacggcattagtgttattacacttgcac

SEQ ID NO: 869493 - DNA, 75 bp, synthetic construct
  source 1..75: mol_type = other DNA
gtgtttgtgctgatcatgctgatgctattgaaaagtaaattcccaggtcagttggtggatgccagcgtagctggt

SEQ ID NO: 869494 - DNA, 75 bp, synthetic construct
  source 1..75: mol_type = other DNA
gagattctggagaacgtggaagcgaataaggcaaagctgcgcgttcagcgaaacgggaaagatgcaaaccgtctc

SEQ ID NO: 869495 - DNA, 75 bp, synthetic construct
  source 1..75: mol_type = other DNA
atatctgcatcccgttcgaaataccagaaccgggataacgattcggcgtttgttcgtctgtccgtgccgtgggga

SEQ ID NO: 869496 - DNA, 75 bp, synthetic construct
  source 1..75: mol_type = other DNA
tcagtacgtacacggttaacgcacagggcgtgactgacgtctcgttactggatatcacgtccatcagaacgctgg

SEQ ID NO: 869497 - DNA, 75 bp, synthetic construct
  source 1..75: mol_type = other DNA
gcaggggaaatcctggcgtctgagctattccaaacgttttgatgaagtgaatacggatatcacttttgcgggtta

SEQ ID NO: 869498 - DNA, 75 bp, synthetic construct
  source 1..75: mol_type = other DNA
tgctgtgctgcgtctggcagacaacagccatccgccgtttggtgccagcgtgacaaacgcgaaaggccgtgagct

SEQ ID NO: 869499 - DNA, 75 bp, synthetic construct
  source 1..75: mol_type = other DNA
atgaaaacatttcgctggaaagtgaagccggatatggaggtgaactcgcagccgtcggtgcgtgaagtgcgtttt

SEQ ID NO: 869500 - DNA, 75 bp, synthetic construct
  source 1..75: mol_type = other DNA
gtgggtcagatatatcgttacttcgccaacaaagacgccattattgaagagatggttcgccgtatcatcgacttt

SEQ ID NO: 869501 - DNA, 75 bp, synthetic construct
  source 1..75: mol_type = other DNA
attctgagattttcagctcctggcgctacactggtgccagtctggaaagtgatgaccgcatgctgccgccaaaac

SEQ ID NO: 869502 - DNA, 75 bp, synthetic construct
  source 1..75: mol_type = other DNA
ttaacagcattacatatgcgctgatgctttcccttgcaggcgcaccggcttatgccgtcgactttaatacagatg

SEQ ID NO: 869503 - DNA, 75 bp, synthetic construct
  source 1..75: mol_type = other DNA
cgatggtgtcggaggtgtgccggttgacggtggccgggtttataccaaccggtggggcattggtgtggtgacgga

SEQ ID NO: 869504 - DNA, 75 bp, synthetic construct
  source 1..75: mol_type = other DNA
gaggaacccgtcttctggtggataccgatggtgtcggaggtgtgccggttgacggtggccgggtttataccaacc

SEQ ID NO: 869505 - DNA, 75 bp, synthetic construct
  source 1..75: mol_type = other DNA
cagtaacaagtggtcactttacggtggcggtatcgtcgccggagattacaacgccctggctgtggggctgggccg

SEQ ID NO: 869506 - DNA, 75 bp, synthetic construct
  source 1..75: mol_type = other DNA
tatgccgtcgactttaatacagatgttctggatgcagcagacagacagaatattgatttttcccggttctctcag

SEQ ID NO: 869507 - DNA, 75 bp, synthetic construct
  source 1..75: mol_type = other DNA
gcagaaaaaaacgttccaggtggatacggcgtatgtgccgtatctgacccgtccgggccaggttcgttacaagct

SEQ ID NO: 869508 - DNA, 75 bp, synthetic construct
  source 1..75: mol_type = other DNA
ccccgcgctcagcatattttgcagggtgaacaaggctttcgcctgacgccgctggcgttaaaggattttcaccgc

SEQ ID NO: 869509 - DNA, 75 bp, synthetic construct
  source 1..75: mol_type = other DNA
ttggctgacattccttcacttcactctggggagcaggttcttctggcttgtcttctccgtttacgaactgatgta

SEQ ID NO: 869510 - DNA, 75 bp, synthetic construct
  source 1..75: mol_type = other DNA
agtcagcgaatcgagagcatcatctgaagtagcatcaagctatgctatagcaagaaaaaagtggcaagatgcttt

SEQ ID NO: 869511 - DNA, 75 bp, synthetic construct
  source 1..75: mol_type = other DNA
caccaacgcttgattaccacgaaggtccgataggtaaacttccttttaaaggaaagcttaaggctcaagttttag

SEQ ID NO: 869512 - DNA, 75 bp, synthetic construct
  source 1..75: mol_type = other DNA
atggataaggtgatggagttccttgattcagttagtagtgagttgtcctcaaagcaattgaaggtcgggtttctt

SEQ ID NO: 869513 - DNA, 75 bp, synthetic construct
  source 1..75: mol_type = other DNA
atcatgaaatcgcatgacggagatacggatactgttctgaatcttatcggcgagatcataaaagcagacattcag

SEQ ID NO: 869514 - DNA, 75 bp, synthetic construct
  source 1..75: mol_type = other DNA
cccggtttcaagtctatataaagcttttccatatatagacgccatactgacagtgagtaattatcataatcaaat

SEQ ID NO: 869515 - DNA, 75 bp, synthetic construct
  source 1..75: mol_type = other DNA
aacattttttcgattagttgatggagatgaaacaaaaaaaatacaaaatttaaatttacgcataaacaattattc

SEQ ID NO: 869516 - DNA, 75 bp, synthetic construct
  source 1..75: mol_type = other DNA
atgaatactcagaaatcgtaaaagaccgtgacgatataactttatatataaatttaaaacacctttatggtagcg

SEQ ID NO: 869517 - DNA, 75 bp, synthetic construct
  source 1..75: mol_type = other DNA
aatccaactatagaatttcaaactggcgatattaatatattaccctttaagaaagtttgcgagatagaacacttt

SEQ ID NO: 869518 - DNA, 75 bp, synthetic construct
  source 1..75: mol_type = other DNA
cttattgggtaagtgatatatatagggatattttcacccagtcaccagctctctcctcaatagctaaaccaaggc

SEQ ID NO: 869519 - DNA, 75 bp, synthetic construct
  source 1..75: mol_type = other DNA
aaatgatggcgaggatattcattcttttcataatttatcaaaagattataatggtgcacctgttcgaggaaaagc

SEQ ID NO: 869520 - DNA, 75 bp, synthetic construct
  source 1..75: mol_type = other DNA
gtaccgaatatgtggtaccgctgctggcgcgttatcaggccaatatcgatcgcctgaacgatcaacttgatgagg

SEQ ID NO: 869521 - DNA, 75 bp, synthetic construct
  source 1..75: mol_type = other DNA
atcctcaacctactttgatagatttaaagcattctgtgacaattcatgggatattgaaaccttctgtaaaaacaa

SEQ ID NO: 869522 - DNA, 75 bp, synthetic construct
  source 1..75: mol_type = other DNA
aatgcagcgttataaacaactgagtcagcacggggctgacaactggaaaatcctgccgggaacaccgttgtatga

SEQ ID NO: 869523 - DNA, 75 bp, synthetic construct
  source 1..75: mol_type = other DNA
gtggatcacttttcatccgtcgttgacaccctgagccggacactgatttatgactatgagcagaaccctgactcc

SEQ ID NO: 869524 - DNA, 75 bp, synthetic construct
  source 1..75: mol_type = other DNA
tgctctgtaaacagctggccgttacggatggttaaaggaacagttgtggggacaactgacacattgcgtgaaatg

SEQ ID NO: 869525 - DNA, 75 bp, synthetic construct
  source 1..75: mol_type = other DNA
cacgatgaagaagcccgttccctggctgtggtgattaaaaaccgtaacggcctccacgtgcgcccggcctctcga

SEQ ID NO: 869526 - DNA, 75 bp, synthetic construct
  source 1..75: mol_type = other DNA
gtttttaacggagagaaaaatgtgccggcagacagtctgaaaccacagcctctgattcttccggtcaagggaaaa

SEQ ID NO: 869527 - DNA, 75 bp, synthetic construct
  source 1..75: mol_type = other DNA
gccggcattcccgtcattttgccatgctttacttttctgaccatggactgtcagtcagcgacagtactaatcctg

SEQ ID NO: 869528 - DNA, 75 bp, synthetic construct
  source 1..75: mol_type = other DNA
tcaaacgtgagcatagtgaagagatcagcaacccgagtgataaccgcgcgttttcgcaggtggcgaaagtctatt

SEQ ID NO: 869529 - DNA, 75 bp, synthetic construct
  source 1..75: mol_type = other DNA
cgccgaacgagccgaaccgcttcggctgggtggtggaaatcgatccatacgatccgcattcagtgccgcgcaagc

SEQ ID NO: 869530 - DNA, 75 bp, synthetic construct
  source 1..75: mol_type = other DNA
gaactggtccgatattttcgtaaaaaaagcagagatgaacccgctggaaaaacgttacggtatcagcgggagcga

SEQ ID NO: 869531 - DNA, 75 bp, synthetic construct
  source 1..75: mol_type = other DNA
aagaaaggcagcttcgcttcccgtaaaacggatgacatgttgttgttacaggaaacagaacgtgcgctggcggat

SEQ ID NO: 869532 - DNA, 75 bp, synthetic construct
  source 1..75: mol_type = other DNA
ttatttattgacggctatacatcggcagcagccagtaccgtaccttccctgagccggacactgatttatgactat

SEQ ID NO: 869533 - DNA, 75 bp, synthetic construct
  source 1..75: mol_type = other DNA
gccaaacgcggtgctggctttcaaacgtgaaggctatcgcaagcgcgacttctcatttagcgacacgctggagat

SEQ ID NO: 869534 - DNA, 75 bp, synthetic construct
  source 1..75: mol_type = other DNA
gttaacacgctaagatgcaatttcaatgcttcagatagagaagaagctaaaatatcattaaaaaaatggtttccc

SEQ ID NO: 869535 - DNA, 75 bp, synthetic construct
  source 1..75: mol_type = other DNA
ggtttgaggacgacgtcacctctcgcgtcaaagagtttgtccgcaccgtctggggcgaagagcacctgcaggaaa

SEQ ID NO: 869536 - DNA, 75 bp, synthetic construct
  source 1..75: mol_type = other DNA
cgcaggcgccggaaactaaaccgatgtctgtagggttaccgctggatctgcgtgaattccagcagcagcaagaga

SEQ ID NO: 869537 - DNA, 75 bp, synthetic construct
  source 1..75: mol_type = other DNA
ttcaaaaagataccgggggggcctattgcttattggttttccaactcatttagagatttatttgtatctaataaa

SEQ ID NO: 869538 - DNA, 75 bp, synthetic construct
  source 1..75: mol_type = other DNA
ataaaaatgatatactcaataccttagcctcactaaatagtgaagtaatcgcatatataatgaaggcagtaaatc

SEQ ID NO: 869539 - DNA, 75 bp, synthetic construct
  source 1..75: mol_type = other DNA
atcctcactaattatacaatcgaaactatggtgcatatgggcaatggagttatgaaaattgccttcggaactaat

SEQ ID NO: 869540 - DNA, 75 bp, synthetic construct
  source 1..75: mol_type = other DNA
aaaggcgaatctgcgctggagaccattcgtcgctatctttccacacagttctggaaagatcatatgaagatgtat

SEQ ID NO: 869541 - DNA, 75 bp, synthetic construct
  source 1..75: mol_type = other DNA
gctgaaggtgatattcagcagaaagaagctgcggcagaactgatcccctatatccagcaggcgtggattttggcg

SEQ ID NO: 869542 - DNA, 75 bp, synthetic construct
  source 1..75: mol_type = other DNA
tgctgatgcgtacgttgggattgtttaccagcgcaaaaacgttgggatcgctgattcaggtcccacatgaagatg

SEQ ID NO: 869543 - DNA, 75 bp, synthetic construct
  source 1..75: mol_type = other DNA
ggaaattgaaaatgaaattaataaaatattcattagaaattataatctagatgaatactctgaaatcgtaaaaga

SEQ ID NO: 869544 - DNA, 75 bp, synthetic construct
  source 1..75: mol_type = other DNA
aaaaagtaaccgtaaatggtttccctacaataagggcggggagtacaggaagtggtatggaaataacgagtatgt

SEQ ID NO: 869545 - DNA, 75 bp, synthetic construct
  source 1..75: mol_type = other DNA
ttttttccgtttgactgatggtaatgaagggaaaaaacaaacagcgttacttgaacgtgaaaatcgttttgatag

SEQ ID NO: 869546 - DNA, 75 bp, synthetic construct
  source 1..75: mol_type = other DNA
gcaggcgtggattctggcgcagcgctatgatgcggtggtagcgaacccgccgtatatgggtgggaaaggaatgaa

SEQ ID NO: 869547 - DNA, 75 bp, synthetic construct
  source 1..75: mol_type = other DNA
cgcagaatatcagctgctgatgcgcacgttgaaacgctttgtgaatgcaaaaacgctgggatcgctgattcaggt

SEQ ID NO: 869548 - DNA, 75 bp, synthetic construct
  source 1..75: mol_type = other DNA
tctgcatcacctgtaatatttaacgataaatttaacagtgatctttatacgcttgctctcttgaatacaaaagtt

SEQ ID NO: 869549 - DNA, 75 bp, synthetic construct
  source 1..75: mol_type = other DNA
tcatatgaagatgtataaaaagcgcccaatctactggctattcagctccggtaaagagaaagccttcgagtgcct

SEQ ID NO: 869550 - DNA, 75 bp, synthetic construct
  source 1..75: mol_type = other DNA
agtggtttgacgatgacgtcacctctcgcgtcaaggagtttatccgcaccgtttggggcgaagaatatttgcgcg

SEQ ID NO: 869551 - DNA, 75 bp, synthetic construct
  source 1..75: mol_type = other DNA
ttcaatctattaagcttttcaattggctgcatgatgggccgctactccctcgatcgcgaaggactcgtctacgcc

SEQ ID NO: 869552 - DNA, 75 bp, synthetic construct
  source 1..75: mol_type = other DNA
acagaataaataggccgttggtgtatttcgataatcttccaaaccaagagttagcttttaaattaacgaaacatc

SEQ ID NO: 869553 - DNA, 75 bp, synthetic construct
  source 1..75: mol_type = other DNA
gtatcagttctatatctcggaaaagaaagatgccgtgattggcaaagtggtgaagagcgaagatattcctgccgc

SEQ ID NO: 869554 - DNA, 75 bp, synthetic construct
  source 1..75: mol_type = other DNA
tctggacgcgctgtatcgcctggaacaggagggcgatttccagcagaaagcggcggcgaaagcgtttattccgtt

SEQ ID NO: 869555 - DNA, 75 bp, synthetic construct
  source 1..75: mol_type = other DNA
gtcaatgatgatatcgaactggttctgccggataacctgactcgcaccgactccattctgcgcgggctggtggac

SEQ ID NO: 869556 - DNA, 75 bp, synthetic construct
  source 1..75: mol_type = other DNA
aaaagcttattaatagggagtgccattattcacacttgagtcagtcggattttagcataattaaaggcagtcccg

SEQ ID NO: 869557 - DNA, 75 bp, synthetic construct
  source 1..75: mol_type = other DNA
atccgccgtatatggggggtaattatatggagacagaacttaagaatttcgtctcttcttactaccctcaaggaa

SEQ ID NO: 869558 - DNA, 75 bp, synthetic construct
  source 1..75: mol_type = other DNA
agcattgaacccgaaagtattaaagtgctcgacccagcctgcggctccggtcatattttgattgaagcctataat

SEQ ID NO: 869559 - DNA, 75 bp, synthetic construct
  source 1..75: mol_type = other DNA
cgtatatgggggggaaagggatgaatggtgagctgaaggaatttgctaaaaagcaatttcctgacagtaagtctg

SEQ ID NO: 869560 - DNA, 75 bp, synthetic construct
  source 1..75: mol_type = other DNA
accaccgcggtcaccataactggctggtactgctgctattcgtattatgctctgtaaacagctggccgttgcgga

SEQ ID NO: 869561 - DNA, 75 bp, synthetic construct
  source 1..75: mol_type = other DNA
aatgcagcgttatgaacaactgagtcagcacgggactgacaactggaaaatcctgccgggagcaccgttatatga

SEQ ID NO: 869562 - DNA, 75 bp, synthetic construct
  source 1..75: mol_type = other DNA
ttgcttctgtttctccttctgcttcttgcacacagaaatactctcacatccattacagctctgttatttctgttc

SEQ ID NO: 869563 - DNA, 75 bp, synthetic construct
  source 1..75: mol_type = other DNA
cgaggcacgggtagaagcaatgaataacggtgttttgctttgcgaacaattattccccatgcttcagcaacaagg

SEQ ID NO: 869564 - DNA, 75 bp, synthetic construct
  source 1..75: mol_type = other DNA
tcaactgctccataacggctggcgctatcaggaacagagcgctattagtcaggcagagttgctggcgaatgacct

SEQ ID NO: 869565 - DNA, 75 bp, synthetic construct
  source 1..75: mol_type = other DNA
gttcccactacttatttggtggacaccactttgtctaattcgtcagattctgaccagacggttcaggctgtacgc

SEQ ID NO: 869566 - DNA, 75 bp, synthetic construct
  source 1..75: mol_type = other DNA
tatcatctgcccgttccgtggcgagtatttccgccttgcgccggagcataaccagattgttaaccacctgattta

SEQ ID NO: 869567 - DNA, 75 bp, synthetic construct
  source 1..75: mol_type = other DNA
atgtatgattttgtgattattggcggcggcatcatcggcaggccgcccgccatgcaactgattgatgtctatccg

SEQ ID NO: 869568 - DNA, 75 bp, synthetic construct
  source 1..75: mol_type = other DNA
ttggcggtatttttgtgccgtccagcggcattgtcagctaccgcgaagtcacggcggcgatggcaaaaattttcc

SEQ ID NO: 869569 - DNA, 75 bp, synthetic construct
  source 1..75: mol_type = other DNA
gctgaagagttctctttaaacgaaaatgaacgggataactattataaatactataggttataccctaacttccaa

SEQ ID NO: 869570 - DNA, 75 bp, synthetic construct
  source 1..75: mol_type = other DNA
tggaacggatgcgcgccttatgggaacgcacagcggcgaacggtatcgagcgcgaatggcttaacgccgacgaac

SEQ ID NO: 869571 - DNA, 75 bp, synthetic construct
  source 1..75: mol_type = other DNA
tttttgggcgtgcatctcacccgcatgatcgacggcagcgtgaccgtcgggccaaacgcggtgctggcttttaaa

SEQ ID NO: 869572 - DNA, 75 bp, synthetic construct
  source 1..75: mol_type = other DNA
caaagatattgaccagatcatcatggatagaattaagggcggtggtgtattaagtcaatcaattcaaaataaatc

SEQ ID NO: 869573 - DNA, 75 bp, synthetic construct
  source 1..75: mol_type = other DNA
cgcgcccaagaatcagtacaactcattcggtaaatataaatacagaagctgcgaagacattcttgaaggcgttaa

SEQ ID NO: 869574 - DNA, 75 bp, synthetic construct
  source 1..75: mol_type = other DNA
atgagcaaagacttttacgcaagactggcagctattcaggagaacttgaacgcgccaaagaatcagtacgactca

SEQ ID NO: 869575 - DNA, 75 bp, synthetic construct
  source 1..75: mol_type = other DNA
caccatcaccacgatctctcggtcgccacgctgcatgtgcacattaatcacgacgactgtctggaaatcgccgtg

SEQ ID NO: 869576 - DNA, 75 bp, synthetic construct
  source 1..75: mol_type = other DNA
gcactctggccgatgctgatcaccttatcccgtccatccaagctgcattcgacaacccgaactcacaagctatcg

SEQ ID NO: 869577 - DNA, 75 bp, synthetic construct
  source 1..75: mol_type = other DNA
cctggtggccaaacagatgtccctcgtcgacaacgagcgctacggcgaagacgatcaggtcgctttgcagcgctt

SEQ ID NO: 869578 - DNA, 75 bp, synthetic construct
  source 1..75: mol_type = other DNA
ctcgaagggacgccggagcagcacaaagcgcaggacgtttacaacatcagacgaggcgaattagaaggggcaact

SEQ ID NO: 869579 - DNA, 75 bp, synthetic construct
  source 1..75: mol_type = other DNA
taccgccagtgacatcacatctcaccagtccgtcagcagaaaaatcagtgcccgtcatttcgcaggcatttttca

SEQ ID NO: 869580 - DNA, 75 bp, synthetic construct
  source 1..75: mol_type = other DNA
cttgcttatattgatgttagaaatgagaatgagtttacgaaaatcgtttttgatacgttaaaaaaagtcaccctt

SEQ ID NO: 869581 - DNA, 75 bp, synthetic construct
  source 1..75: mol_type = other DNA
ctgcaattattaacagtaccgtagcgtatggcgtacaacaattcgaagtaatagatccaacttcaaaggcgtccg

SEQ ID NO: 869582 - DNA, 75 bp, synthetic construct
  source 1..75: mol_type = other DNA
aaatcctctccgaaggtgattttcctgcacatgattggctctcatccgaatccgtgtgaccgacttaactcctgg

SEQ ID NO: 869583 - DNA, 75 bp, synthetic construct
  source 1..75: mol_type = other DNA
tttatgactatgagcagaaccctgattccggcaacaacgtggtggcgctggcagcaaaagcaggatacagcacat

SEQ ID NO: 869584 - DNA, 75 bp, synthetic construct
  source 1..75: mol_type = other DNA
agtgacatcacatctcaccagtccgtcagcagaaaaatcagtgtccgtcagcagaaaaatcagtgcccgtcattt

SEQ ID NO: 869585 - DNA, 75 bp, synthetic construct
  source 1..75: mol_type = other DNA
ttggcaaatacggagattaacgttaaccagactaaccatgttggctggacaccgttgctggaagcgattgtgctt

SEQ ID NO: 869586 - DNA, 75 bp, synthetic construct
  source 1..75: mol_type = other DNA
cgtgatattgccgggcgggtaaatcagcagttggccgctgcggcaaatgaagtatggctggtggtttcgggtatt

SEQ ID NO: 869587 - DNA, 75 bp, synthetic construct
  source 1..75: mol_type = other DNA
gcccaggtgggcgaaatcctggctggcgtgaaggtgatgaacaagctgatagggcttggtatgcctgttcgccag

SEQ ID NO: 869588 - DNA, 75 bp, synthetic construct
  source 1..75: mol_type = other DNA
atgcagcgttataaacaactgagtcagcacggggctgacaactggaaaatcctgccgggtgtgccgttgtatgac

SEQ ID NO: 869589 - DNA, 75 bp, synthetic construct
  source 1..75: mol_type = other DNA
cctgaatgctgtaagtgaagcagcaaaaacagcattaattaaaaaaggcttccagcttgaaggctttaatacggt

SEQ ID NO: 869590 - DNA, 75 bp, synthetic construct
  source 1..75: mol_type = other DNA
gtggttaaacgccatggaactgcgcgagcgcgaaccgaatatcaccgggcttggcggcatttttgtgccatccag

SEQ ID NO: 869591 - DNA, 75 bp, synthetic construct
  source 1..75: mol_type = other DNA
catgcaactgattgatatctatcctgacgcccgcattgcgttgctggaaaaagagtccggccctgcctgtcacca

SEQ ID NO: 869592 - DNA, 75 bp, synthetic construct
  source 1..75: mol_type = other DNA
tactgcaactggatccggcggttgtaaaaggtatctgccttagcgccggaagtccggtatcccacagcgccctaa

SEQ ID NO: 869593 - DNA, 75 bp, synthetic construct
  source 1..75: mol_type = other DNA
gtttaactcgccaactattctactggcggagaacatttatccttccacagtactgcaactggatccggcggttgt

SEQ ID NO: 869594 - DNA, 75 bp, synthetic construct
  source 1..75: mol_type = other DNA
gattgtgaaagggccagaagctgaagaggcgctggccgctttccgccagttggctgaagataactttggtgaaac

SEQ ID NO: 869595 - DNA, 75 bp, synthetic construct
  source 1..75: mol_type = other DNA
tcctgactgcacgggagttgagcgtgcttaagattctgatgcagggcatgagtttcagtgagattgcccgttatg

SEQ ID NO: 869596 - DNA, 75 bp, synthetic construct
  source 1..75: mol_type = other DNA
cgtgaaggctatcgcaagcgcgacttctcatttagcgacacgctggagattttgggctcgtcggggattcgccgg

SEQ ID NO: 869597 - DNA, 75 bp, synthetic construct
  source 1..75: mol_type = other DNA
ctggtttataccttatcgacatttaatgccgatatgttgctggaaaaaaacggcaaatgcgtcacaccggagagt

SEQ ID NO: 869598 - DNA, 75 bp, synthetic construct
  source 1..75: mol_type = other DNA
agttccggcaaaatgtcttatctcatagcccgtggtttcagcgttatctgacgttgccctttaatcagtggccaa

SEQ ID NO: 869599 - DNA, 75 bp, synthetic construct
  source 1..75: mol_type = other DNA
gcctgaattacgttgttatgctgaatctgatgctgtatggaaagcagaatacttggtaacatcagttttgaaatt

SEQ ID NO: 869600 - DNA, 75 bp, synthetic construct
  source 1..75: mol_type = other DNA
caaatgttattcgtaattgtaatattgtttttggaactagtggtgctagaggtttagtggtagatttcacccatg

SEQ ID NO: 869601 - DNA, 75 bp, synthetic construct
  source 1..75: mol_type = other DNA
gtttctttctgttattgatgacaaatacaattttaataaagttgccttagccattgataaccgcccaagtagtta

SEQ ID NO: 869602 - DNA, 75 bp, synthetic construct
  source 1..75: mol_type = other DNA
atgtgctttaccaacaagggatgctctattaccagcattaatgctttttgttgctgctcgtaaggaaaatatatc

SEQ ID NO: 869603 - DNA, 75 bp, synthetic construct
  source 1..75: mol_type = other DNA
ggctgtatctaaagaagataaagataaagcacgtagatgggttcgagaatttaatcttgatgcaattttctccac

SEQ ID NO: 869604 - DNA, 75 bp, synthetic construct
  source 1..75: mol_type = other DNA
gtatacagaatttttctaatgttttaagtaataagatcattgctaattgtcatcgtgatcctaatgcttttatca

SEQ ID NO: 869605 - DNA, 75 bp, synthetic construct
  source 1..75: mol_type = other DNA
cgatgcctgtagtcgtgtgctggcgatgacgttgccgctaacagccgattatcgactgctacaaaccggagcagc

SEQ ID NO: 869606 - DNA, 75 bp, synthetic construct
  source 1..75: mol_type = other DNA
gctactttcgtacccgcaggctgcattttaccgatcgtcaggcgctggaaaactggcaggcaaaaaggttgcatt

SEQ ID NO: 869607 - DNA, 75 bp, synthetic construct
  source 1..75: mol_type = other DNA
ttaatttggtcgcaggaactgcaaactgtgccagtctcttttacagccaagcggcggcgcattgtgcgtcagtgg

SEQ ID NO: 869608 - DNA, 75 bp, synthetic construct
  source 1..75: mol_type = other DNA
atttgcaagtatacaacgaacgaaaataggttctccttatgtaattgcagcgtttgcagatcttgctaagcaatt

SEQ ID NO: 869609 - DNA, 75 bp, synthetic construct
  source 1..75: mol_type = other DNA
tcctgcattggctcattactccatgcagaaaaatatcccctgtataatggttaccgggagccacataccttttga

SEQ ID NO: 869610 - DNA, 75 bp, synthetic construct
  source 1..75: mol_type = other DNA
gatttttcccatgatgtttgtgctgcgttcactcatgcgtttctttctgttattgatgacaaatacaattttaat

SEQ ID NO: 869611 - DNA, 75 bp, synthetic construct
  source 1..75: mol_type = other DNA
gaaatactttctttttatttgaacgaatatttatctagcgattcgattaagaactttttacagaaagagtctcgt

SEQ ID NO: 869612 - DNA, 75 bp, synthetic construct
  source 1..75: mol_type = other DNA
aatgtgagcaaagcgccaacatcaatgcctactgggagccaaatactttgcgctgcctggaccgtcgaactggcc

SEQ ID NO: 869613 - DNA, 75 bp, synthetic construct
  source 1..75: mol_type = other DNA
cttagactacaagatgtacattattcagggattgcatttgataaagaactaaacaggataaaactagtcgataaa

SEQ ID NO: 869614 - DNA, 75 bp, synthetic construct
  source 1..75: mol_type = other DNA
atgctgcaaatcagtcgttcgcgcgttgcggcgcatattatggatttaatgcgcaaagggcggattaaaggcaaa

SEQ ID NO: 869615 - DNA, 75 bp, synthetic construct
  source 1..75: mol_type = other DNA
gtccggggcgttgttcacagatatgaacgtatttgacaacgttgcctatccactgcgcgaacatacccagctccc

SEQ ID NO: 869616 - DNA, 75 bp, synthetic construct
  source 1..75: mol_type = other DNA
atcgggcatcggtaaaacgacgctactccgtctgattggcgggcaaatcgcaccagatcatggtgagatcctttt

SEQ ID NO: 869617 - DNA, 75 bp, synthetic construct
  source 1..75: mol_type = other DNA
cccagatgagttttggatttcaaatgctgttcgacattttgaagaaaatagtaaatgcacaagaattggtgggaa

SEQ ID NO: 869618 - DNA, 75 bp, synthetic construct
  source 1..75: mol_type = other DNA
ctgggttctggcggcgtgatgttacctaaccattcaccgttggtaattgcagaacagttcggcacactcaatacg

SEQ ID NO: 869619 - DNA, 75 bp, synthetic construct
  source 1..75: mol_type = other DNA
ttaacgggcagattttcgaccaccaggcgcgcctgcattcgtttgagctggtgatggatgtgaaggaagaattat

SEQ ID NO: 869620 - DNA, 75 bp, synthetic construct
  source 1..75: mol_type = other DNA
tcttcctccattatatgagcaagagaggattgtttcagttctcgacaaatctaatagattacgccaaaaacgtga

SEQ ID NO: 869621 - DNA, 75 bp, synthetic construct
  source 1..75: mol_type = other DNA
caggaaaaattcatcaatataaaaaataaaattgaatcaattttttatagaaaagataagcatgaagatcttttt

SEQ ID NO: 869622 - DNA, 75 bp, synthetic construct
  source 1..75: mol_type = other DNA
ccatcaggagcgtaataacgttcgcgctgcttacatccaccttgctgaacatctcgatgagcggaggctaatgct

SEQ ID NO: 869623 - DNA, 75 bp, synthetic construct
  source 1..75: mol_type = other DNA
atcccggtacaattcattgctcggcaggcggcgttggacgcaatatcgcccacaatctggcgctgttaggccgcg

SEQ ID NO: 869624 - DNA, 75 bp, synthetic construct
  source 1..75: mol_type = other DNA
atgaacctacagccagtttagatatacaaaataaaaaactagttatggatatcttatcggattataatgatgggg

SEQ ID NO: 869625 - DNA, 75 bp, synthetic construct
  source 1..75: mol_type = other DNA
gagggatcgttcaatattattactggcccgtctggagttggaaagacttcactgcttaacattattggtctatta

SEQ ID NO: 869626 - DNA, 75 bp, synthetic construct
  source 1..75: mol_type = other DNA
atgatgatcttctttttattcgcgttaatggaaatccgaactatgttggccgtacggctgtattcaagtcatata

SEQ ID NO: 869627 - DNA, 75 bp, synthetic construct
  source 1..75: mol_type = other DNA
aaagcaaagtataatcaggaatcttttatgttctgtagattattcatatatttctgaggcagaaaaaaacactca

SEQ ID NO: 869628 - DNA, 75 bp, synthetic construct
  source 1..75: mol_type = other DNA
aagtattttctagccgagttgttatttcaaatttaagtattgatatacaaaataacgattttgttatcataacag

SEQ ID NO: 869629 - DNA, 75 bp, synthetic construct
  source 1..75: mol_type = other DNA
tcttatctggaggcgaaaaacaaagattagctcttgcaagagcattaataaaaaatcccaatatactgttagctg

SEQ ID NO: 869630 - DNA, 75 bp, synthetic construct
  source 1..75: mol_type = other DNA
cctgcgcggcaatttcgcgcgccagcggcaacataaacaaccctactctgtctgccgataacgcgctttcattag

SEQ ID NO: 869631 - DNA, 75 bp, synthetic construct
  source 1..75: mol_type = other DNA
ccatctgctggaacagttgacaccgcaactactgaacgggtcgcgcgatttacttcgtcatgcgggcgtggtact

SEQ ID NO: 869632 - DNA, 75 bp, synthetic construct
  source 1..75: mol_type = other DNA
tgaatgtctcaggctgcgttcgtttacacggtcaaagtacgtcaacgtatctcgcgattgccaatcaagacgatg

SEQ ID NO: 869633 - DNA, 75 bp, synthetic construct
  source 1..75: mol_type = other DNA
caactgctcaatacttcacgggacttgattcgccatgctggtgtggtgctggctgattgtaatctcacacctgaa

SEQ ID NO: 869634 - DNA, 75 bp, synthetic construct
  source 1..75: mol_type = other DNA
cctgcgcggcaatttcacgcgccagcggcagcttaaacaaccctaccctgtctgccgataacgcgctttcattag

SEQ ID NO: 869635 - DNA, 75 bp, synthetic construct
  source 1..75: mol_type = other DNA
accgtttcagaattcaaagcgggtaatgactccaacttattgatagtgttttatgttcagataatgcccgatgac

SEQ ID NO: 869636 - DNA, 75 bp, synthetic construct
  source 1..75: mol_type = other DNA
gccagtgattcggccagagagctggaagataaactggaggcgttaaaaaatgtggcaccgcgtgagatacgcacg

SEQ ID NO: 869637 - DNA, 75 bp, synthetic construct
  source 1..75: mol_type = other DNA
gtattgacctcttacacgctgataacgcattaaccgaacatgagcttgtggcgctgtgggaaaatatcacgggga

SEQ ID NO: 869638 - DNA, 75 bp, synthetic construct
  source 1..75: mol_type = other DNA
taaaaaaacttactcaaacacatcaacgttcgtccgggggaatacgtggagcaatcaaacgcctgcttccttcag

SEQ ID NO: 869639 - DNA, 75 bp, synthetic construct
  source 1..75: mol_type = other DNA
attacacgtttcgataatcgcatccgtgtcggcggaatggcggaaattgttggctttaatactgaactgctacag

SEQ ID NO: 869640 - DNA, 75 bp, synthetic construct
  source 1..75: mol_type = other DNA
cgtttgcgatgtatgtaaagggaagggagtgataagtgccaggtgtcgttgtggtggaaagggagaggtactgga

SEQ ID NO: 869641 - DNA, 75 bp, synthetic construct
  source 1..75: mol_type = other DNA
gttgcagcggaaatggattttccacggtaccgtctaccacagtatataaagttgtactgaagcggatacccgagc

SEQ ID NO: 869642 - DNA, 75 bp, synthetic construct
  source 1..75: mol_type = other DNA
cctacgatgaagatgccagcatcatgaatgatgaagaggcatcggcagacaacgaaaccgttatgtcggttattg

SEQ ID NO: 869643 - DNA, 75 bp, synthetic construct
  source 1..75: mol_type = other DNA
gctggtaaattccgggcaaaaacgtcaaacgctggcgaataatgcgaaggaatacacgtactcgttaatgagtta

SEQ ID NO: 869644 - DNA, 75 bp, synthetic construct
  source 1..75: mol_type = other DNA
tgccgccatcgaccatgttaataccgagggtgaggaaggtatcaacttctcagcagaacgccagccagaacgcga

SEQ ID NO: 869645 - DNA, 75 bp, synthetic construct
  source 1..75: mol_type = other DNA
ggatcaattaagtgggggcaatgcaaactggtgtactcaaacgacacctatgaatcaaacggccttgattcagca

SEQ ID NO: 869646 - DNA, 75 bp, synthetic construct
  source 1..75: mol_type = other DNA
gaactggaaggaaaatacgttcctcactttaaaccaggtaaagaactgcgtgatcgcgccaatatttacggttaa

SEQ ID NO: 869647 - DNA, 75 bp, synthetic construct
  source 1..75: mol_type = other DNA
gggcggtgaaggtatcatcctgaatgctgatcacatccctgagcgtgacgtcactcccgcatcagatgagattat

SEQ ID NO: 869648 - DNA, 75 bp, synthetic construct
  source 1..75: mol_type = other DNA
atgttcgatatcgttgaatttgttaaacagcaggagcgctttttctgcgaagcattaactgaaccgacgctgaca

SEQ ID NO: 869649 - DNA, 75 bp, synthetic construct
  source 1..75: mol_type = other DNA
tcgggatgcaccttatcttaagcaggtttatcaacaggagccaccactaaaaggcgctatttttgaacgtaatga

SEQ ID NO: 869650 - DNA, 75 bp, synthetic construct
  source 1..75: mol_type = other DNA
tctgataaaaaagaagatacgcttgttgttactgcctccgggttcactcagcagctcagaaatgccccggccagt

SEQ ID NO: 869651 - DNA, 75 bp, synthetic construct
  source 1..75: mol_type = other DNA
ctctcagggaacaccagcaaaaaataataagaatataacggcaacactccagtttactccgactgaaagccagaa

SEQ ID NO: 869652 - DNA, 75 bp, synthetic construct
  source 1..75: mol_type = other DNA
gcatgggcggtgacggttggttctgcaatcacgcgccttgagcacatttgtcagtggtataacacagcgatgaaa

SEQ ID NO: 869653 - DNA, 75 bp, synthetic construct
  source 1..75: mol_type = other DNA
cagcatgtacaacagcgccgtcgccggtaccgaacgtgcgttatcaggaaaacctgaaaacacgatgcgccacgc

SEQ ID NO: 869654 - DNA, 75 bp, synthetic construct
  source 1..75: mol_type = other DNA
tggtggcgctggcgtttgtctggggctggctgaccgctgactggcggcgtgacagcttagagctggcaatcaata

SEQ ID NO: 869655 - DNA, 75 bp, synthetic construct
  source 1..75: mol_type = other DNA
cagggacctgaaaccggagaccagtataaccgaagagatcggtattatttatagtaatgatagtggtttttcggc

SEQ ID NO: 869656 - DNA, 75 bp, synthetic construct
  source 1..75: mol_type = other DNA
atcatgaaatctatggcagttactggaatccaagattgtacgctgtttataacctgaccgataatctcacactca

SEQ ID NO: 869657 - DNA, 75 bp, synthetic construct
  source 1..75: mol_type = other DNA
gtgagtctctcgatgcctggactatgcggggaaatcttaaacaaccaaacagtaaaagagaaactcataattcac

SEQ ID NO: 869658 - DNA, 75 bp, synthetic construct
  source 1..75: mol_type = other DNA
gtgcatgttggtactggcacaattcgcctttgctgaatattcccgatcggctgctactagtgtggcatgccccaa

SEQ ID NO: 869659 - DNA, 75 bp, synthetic construct
  source 1..75: mol_type = other DNA
ggtttgttggcaatgacggactgttcaacgcgagaagatggtctggcatgtcaaacactgggcgcagaaattatc

SEQ ID NO: 869660 - DNA, 75 bp, synthetic construct
  source 1..75: mol_type = other DNA
cgcctgaaacgccagaagagccggatctggcgctggtgaaaacgttgagtgacgccggatgccgggtgattgccg

SEQ ID NO: 869661 - DNA, 75 bp, synthetic construct
  source 1..75: mol_type = other DNA
gccgattatcgggattgtgaaacgcgatctggaggattctccggtacgtatcacagcttatattgaagatgttga

SEQ ID NO: 869662 - DNA, 75 bp, synthetic construct
  source 1..75: mol_type = other DNA
cacaaaactttccgccagccgactacatcgcgctcgggcatattcaccgcgcgcagattattggcggcatggaac

SEQ ID NO: 869663 - DNA, 75 bp, synthetic construct
  source 1..75: mol_type = other DNA
attattatcaacaacattatgccgatgcctgcaaactgcgcggcgatcagcctctgcccatcatcgccacgggac

SEQ ID NO: 869664 - DNA, 75 bp, synthetic construct
  source 1..75: mol_type = other DNA
gcgcaaattattggcggcatggaacatgttcgctattgcggatcccccatcccactgagttttgatgagtgcggc

SEQ ID NO: 869665 - DNA, 75 bp, synthetic construct
  source 1..75: mol_type = other DNA
atggaaagcctggtcaaacgcgaccgtgctgcggtggtctgcgacctgctgtttggcctgccgggtcaggatgcg

SEQ ID NO: 869666 - DNA, 75 bp, synthetic construct
  source 1..75: mol_type = other DNA
catctcaccccgattgagtttcgcctgctggcagtgttgctcaataatgcgggaaaagtgctcacccagcgccag

SEQ ID NO: 869667 - DNA, 75 bp, synthetic construct
  source 1..75: mol_type = other DNA
cttctgcccctgcagcaccgccaatgccggtctctgatgccgttcacgagcgctttatccgtctgcccgaagtga

SEQ ID NO: 869668 - DNA, 75 bp, synthetic construct
  source 1..75: mol_type = other DNA
atgacgtgcctgaatattgcctgcgccggcgccctgattgacgccatgatgcaggcagacgcccggcaggcggca

SEQ ID NO: 869669 - DNA, 75 bp, synthetic construct
  source 1..75: mol_type = other DNA
agcgacgcgagtattgatgacgctatttacgcttatcttgcgaaaataattgacggatccaaaatccagcctctg

SEQ ID NO: 869670 - DNA, 75 bp, synthetic construct
  source 1..75: mol_type = other DNA
gtctactacccttaaaaatcagcctgtggcttattcaaaaaccgaaattaagccagttggtcagttacctgtcat

SEQ ID NO: 869671 - DNA, 75 bp, synthetic construct
  source 1..75: mol_type = other DNA
cagtctgacgcaatccaccacgctgtttaaaagttttatggcgatgactgcgggcaacgagcacgtcaggggatt

SEQ ID NO: 869672 - DNA, 75 bp, synthetic construct
  source 1..75: mol_type = other DNA
agagcaggcgggcgcggttgccattcgcattgaaggtgtggcaaatctgcaagccacgcgtgcggtggtgagcgt

SEQ ID NO: 869673 - DNA, 75 bp, synthetic construct
  source 1..75: mol_type = other DNA
atagcgctaatgttaaataactataagcaacaactacaaaaaatattatataaagagggttgtgatatatgtgtg

SEQ ID NO: 869674 - DNA, 75 bp, synthetic construct
  source 1..75: mol_type = other DNA
gcaagaaaatggcccgcacctcggatggcccaaccgccattgcgtttatggaaagcctggtcaaacgcgaccgtg

SEQ ID NO: 869675 - DNA, 75 bp, synthetic construct
  source 1..75: mol_type = other DNA
gatgattctggagaacaacctctacggcttagacatagatgatcgtgcagcgcaattgtctggctttgcgttgat

SEQ ID NO: 869676 - DNA, 75 bp, synthetic construct
  source 1..75: mol_type = other DNA
gtgtgctattcgctatatggaaatccatgactatctaggccacggttttcgtgttttgtcgcacccagacaatcc

SEQ ID NO: 869677 - DNA, 75 bp, synthetic construct
  source 1..75: mol_type = other DNA
gttattttgaagaaaccaagttgcgccatatccgcgaaggtgcaccagcacaaattaccctctatagtgataaca

SEQ ID NO: 869678 - DNA, 75 bp, synthetic construct
  source 1..75: mol_type = other DNA
gacgatggcgttaaggttaactacggcaagtttggcgatctgctggcagatgtcaaagccatcaccggcaatgcc

SEQ ID NO: 869679 - DNA, 75 bp, synthetic construct
  source 1..75: mol_type = other DNA
tcacttgccggagagattgaggatgaagacagccgctcgctgaacgtcaggaagccgggcggagcggtttaccgg

SEQ ID NO: 869680 - DNA, 75 bp, synthetic construct
  source 1..75: mol_type = other DNA
gccgcgatgatcccgcccggtcagcccattcttgtggggcatcacagcgaacgccgcgcccgtcgtgatgcgcag

SEQ ID NO: 869681 - DNA, 75 bp, synthetic construct
  source 1..75: mol_type = other DNA
cgttttttacgtctgccggaagtgatgcacctgtgcggcctgtcacgctcgaccatctacgaactcatccgtaag

SEQ ID NO: 869682 - DNA, 75 bp, synthetic construct
  source 1..75: mol_type = other DNA
atgatcgattcgaatgccaaactgcgatcgattcagatgccattttgcagtagcccgatgcaagctgttttttct

SEQ ID NO: 869683 - DNA, 75 bp, synthetic construct
  source 1..75: mol_type = other DNA
tgaacgaacgcaatcttcagacctggcatgaatccgtcgcggcaggcaaaaaaccgctgatgatgatcatgcgta

SEQ ID NO: 869684 - DNA, 75 bp, synthetic construct
  source 1..75: mol_type = other DNA
tgctgtgcgtgctttctggctgcgcgcaaaaatctaaatctctgccgcccgcattcagcggccagggtagccctg

SEQ ID NO: 869685 - DNA, 75 bp, synthetic construct
  source 1..75: mol_type = other DNA
ccgccattcagccacctccgcgcccgatccggtggtgaaattttccgatgtgaccgtcgatttagctgctcgggt

SEQ ID NO: 869686 - DNA, 75 bp, synthetic construct
  source 1..75: mol_type = other DNA
aggcgcgtctgcgcgtcgctttacgccgccactcagctaccgccgcacccgatccggtagtgaagttttctgatg

SEQ ID NO: 869687 - DNA, 75 bp, synthetic construct
  source 1..75: mol_type = other DNA
ttccggccagcatcgtggcgaaatacctcgacgaacatggcatcgttgttgagaaaaccggtccgtataacctgc

SEQ ID NO: 869688 - DNA, 75 bp, synthetic construct
  source 1..75: mol_type = other DNA
cgagtcactctcggaggtgaagatgtccgcctgttagttccgaccacatttatgaatctcagcggcaaagccgtc

SEQ ID NO: 869689 - DNA, 75 bp, synthetic construct
  source 1..75: mol_type = other DNA
aatgtgagcagagtgccaacattaatgcctactgggagccgaatactttacgctgtctggaccgtcgtactggcc

SEQ ID NO: 869690 - DNA, 75 bp, synthetic construct
  source 1..75: mol_type = other DNA
cactgaaaaagagtgggataaagccgacgccgcttttgataaccgcgataaatgtgagcaaagcgccaacatcaa

SEQ ID NO: 869691 - DNA, 75 bp, synthetic construct
  source 1..75: mol_type = other DNA
gggagccgaaaggctcgccggtctccgttgacgccggtagtgcaaaccctgttcagtccgccaccagcgagattt

SEQ ID NO: 869692 - DNA, 75 bp, synthetic construct
  source 1..75: mol_type = other DNA
gtcttttttatcgtccgcatttgctcacatcaaagttatggtgggctgggcgggggcatcgaaagatgcgccggt

SEQ ID NO: 869693 - DNA, 75 bp, synthetic construct
  source 1..75: mol_type = other DNA
cgagagctgcattgaagcattccatgaggcagagaacagcctgaatcttaccgctttctgctgtaatcaatggga

SEQ ID NO: 869694 - DNA, 75 bp, synthetic construct
  source 1..75: mol_type = other DNA
ttggacataattcttacgaacaaattcgcgccactttattatcaatgattgactggaatgacgaattacgcgcac

SEQ ID NO: 869695 - DNA, 75 bp, synthetic construct
  source 1..75: mol_type = other DNA
gttctgtcgtcgcagaagttctcgctgctttgcgtaaaggcggctatatcgaaatgaataaaggcaaactggtcg

SEQ ID NO: 869696 - DNA, 75 bp, synthetic construct
  source 1..75: mol_type = other DNA
atctttcaggtggagaaaaacagcggttagctttagctagagcattgataaaaaaacctaatgttctgttggctg

SEQ ID NO: 869697 - DNA, 75 bp, synthetic construct
  source 1..75: mol_type = other DNA
cacacccaaattatggtgggctggacgggggcaccgaaaggtgcgccggtttccgataacgccggttacgccaac

SEQ ID NO: 869698 - DNA, 75 bp, synthetic construct
  source 1..75: mol_type = other DNA
atatttatatagcgattaattcaccagagatatttctgctggttgctccctcaccagaatttaacactaaaagag

SEQ ID NO: 869699 - DNA, 75 bp, synthetic construct
  source 1..75: mol_type = other DNA
atgcataccccgatcggggtaaaacctgtagcaggatcaaaagagtggcgggaagcggggcaaaaaagggctttt

SEQ ID NO: 869700 - DNA, 75 bp, synthetic construct
  source 1..75: mol_type = other DNA
tcgccctgttcctgtttatggcgttaggcggaattggtggcgtcatgctcgcaggttatacctttattttgcgtg

SEQ ID NO: 869701 - DNA, 75 bp, synthetic construct
  source 1..75: mol_type = other DNA
ctcctcgttttccatttcctgtaattggtggtgatcgattacgaatttataaaatatgtcaagaactatctaaac

SEQ ID NO: 869702 - DNA, 75 bp, synthetic construct
  source 1..75: mol_type = other DNA
cctgcatgtacgtccggcctcccggctggtttataccttatcgacatttaatgccgatatgttgctggagaaaaa

SEQ ID NO: 869703 - DNA, 75 bp, synthetic construct
  source 1..75: mol_type = other DNA
tactgcaactggatccggcagttgtaaaaggtatctgccttagcgccggaagtccgctatcccacagcgccctga

SEQ ID NO: 869704 - DNA, 75 bp, synthetic construct
  source 1..75: mol_type = other DNA
tttgtagaaaataatttttcttgggaatcaaaagttgccaatttaatgaatatattagatgagaaattatatgaa

SEQ ID NO: 869705 - DNA, 75 bp, synthetic construct
  source 1..75: mol_type = other DNA
gtattaatgcaaaatctggtagcgaaatttttgttgcagatacagtagagcaatataaaaacgtactaagagaaa

SEQ ID NO: 869706 - DNA, 75 bp, synthetic construct
  source 1..75: mol_type = other DNA
attggaaatatgtattcattacagaatatggatgctgttaaatggttttgtcatgaaattttaccaaatttatgc

SEQ ID NO: 869707 - DNA, 75 bp, synthetic construct
  source 1..75: mol_type = other DNA
agtacgtttgtgtgctgcgccgttggtcgaaggtacactggcagccgccgtcagcgcagcctcgggggcggatat

SEQ ID NO: 869708 - DNA, 75 bp, synthetic construct
  source 1..75: mol_type = other DNA
tatgttgaccggttacgccaaccctgtacgtctcaccacctctgtgattggcgtcccatgtggtgagttctttga

SEQ ID NO: 869709 - DNA, 75 bp, synthetic construct
  source 1..75: mol_type = other DNA
gtcagagtgcagtaaaaaacacgcgcgatcccatcgttgcctttaattctgagttcgaaaagcccgtcaccaaag

SEQ ID NO: 869710 - DNA, 75 bp, synthetic construct
  source 1..75: mol_type = other DNA
gtgaactgggcactcattttccaccagccactgaagcaggtgcacctgaactgaatcgaatattcgccgcaggtg

SEQ ID NO: 869711 - DNA, 75 bp, synthetic construct
  source 1..75: mol_type = other DNA
ggagtatgcctggcagcaagttcttaaagaacttagccagcaataccagcagattgatgatgaatatttgcaggc

SEQ ID NO: 869712 - DNA, 75 bp, synthetic construct
  source 1..75: mol_type = other DNA
gcgaaagcagaaaccagcgggcttgacgatattgccgcaatcttttctggtcaccatacactgttagatgatccg

SEQ ID NO: 869713 - DNA, 75 bp, synthetic construct
  source 1..75: mol_type = other DNA
caaaaactggaacaggatcccgcccgcccacgccatttcattactgaaaccggtattgggtatcggtttatgctt

SEQ ID NO: 869714 - DNA, 75 bp, synthetic construct
  source 1..75: mol_type = other DNA
agctggttgccggagccagcgcggtggtccattgcgccgggcaagtgcgcgggcacaaagaagagattttcaccc

SEQ ID NO: 869715 - DNA, 75 bp, synthetic construct
  source 1..75: mol_type = other DNA
gctgatgcaggcagcaaaagagaacggcttatgccaacgatttctgtttatctcttcgctggcggcgcgccatcc

SEQ ID NO: 869716 - DNA, 75 bp, synthetic construct
  source 1..75: mol_type = other DNA
tcacttttaaaatcactggttcagggaaaacagccgcaggtatcaaaaacggtattgattacattacccgtaatg

SEQ ID NO: 869717 - DNA, 75 bp, synthetic construct
  source 1..75: mol_type = other DNA
tggcgatggccgtgaaaaaactggatgtgggcgaaattttaacgctggtattacatcaggtatgacagaggataa

SEQ ID NO: 869718 - DNA, 75 bp, synthetic construct
  source 1..75: mol_type = other DNA
gcaggctacagggaaacgcatcgcaataactggcagattgaaaatattgcccttgttcggaacagagaacgtcag

SEQ ID NO: 869719 - DNA, 75 bp, synthetic construct
  source 1..75: mol_type = other DNA
gtcaagagtttcaacttgttgggaatgatgatgttgccgagctgtcaacaattaatgcaactcaagaaataaaag

SEQ ID NO: 869720 - DNA, 75 bp, synthetic construct
  source 1..75: mol_type = other DNA
gaagaggaaaatgcaatgtatgcagccacctcagcggctcgtaattctgcatgtctatcaagacaagttggtgct

SEQ ID NO: 869721 - DNA, 75 bp, synthetic construct
  source 1..75: mol_type = other DNA
gacagcgttgtcctcgcggcttttacccggtcaaaacagcgttacggtgccccacgcctgacggatgaactgcgt

SEQ ID NO: 869722 - DNA, 75 bp, synthetic construct
  source 1..75: mol_type = other DNA
aatccgtgaattaacccatgccgactggtcggcaagtaataaccgtatttctgaagatattaattggtttcccgg

SEQ ID NO: 869723 - DNA, 75 bp, synthetic construct
  source 1..75: mol_type = other DNA
ctggaagatgcacattcgcttactgaactggtagccggagcaaatgcagtggtccactgtgccggacaggtgcgt

SEQ ID NO: 869724 - DNA, 75 bp, synthetic construct
  source 1..75: mol_type = other DNA
attactttttgcgggttgacagtgggttggcagagccaggaaatgccgatgctaaaggccaaattctatctaaac

SEQ ID NO: 869725 - DNA, 75 bp, synthetic construct
  source 1..75: mol_type = other DNA
gaaaacagccgcaggtatcaaaaacggtattgattacattacccgtaatggtgaacttgaggcttactgttatga

SEQ ID NO: 869726 - DNA, 75 bp, synthetic construct
  source 1..75: mol_type = other DNA
gactgcgcttaacgctaaccgccgcgcatgaaatgcaggatatcgaccgtctgctggaggtgctgcatggcaacg

SEQ ID NO: 869727 - DNA, 75 bp, synthetic construct
  source 1..75: mol_type = other DNA
ccaaccgtacccgtcggcaccgcgcgtctacgcttaacgctaaccgcagcgcatgaaacgcaggatattgaccgt

SEQ ID NO: 869728 - DNA, 75 bp, synthetic construct
  source 1..75: mol_type = other DNA
cccgccatcttatctacagcaccagtatgccgcccgctcaggcgcaggcattacgtgcatcgctggcggtcattc

SEQ ID NO: 869729 - DNA, 75 bp, synthetic construct
  source 1..75: mol_type = other DNA
cccgcgcggtatcgtcacgctgcttgagcgttacaacattgataccttcggcctcaacgccgtggtgattggcgc

SEQ ID NO: 869730 - DNA, 75 bp, synthetic construct
  source 1..75: mol_type = other DNA
aaacgattgcgcagcaggtgcgctctgaagttgctcaaaaagttcaggcgcgtattgcagccggactgcgggcac

SEQ ID NO: 869731 - DNA, 75 bp, synthetic construct
  source 1..75: mol_type = other DNA
aggggaaattcaccgttgatgaggttgaacaccggggcgcaccggatgtggtcaccatccgcgcccggagtgcag

SEQ ID NO: 869732 - DNA, 75 bp, synthetic construct
  source 1..75: mol_type = other DNA
ctccggttaatcaacgtgcgtgggcgtttcatgatgcgctggcgcaggggggggccgcgttgatgcgtgagcagg

SEQ ID NO: 869733 - DNA, 75 bp, synthetic construct
  source 1..75: mol_type = other DNA
gctggcgcgtattgatagcgtcgagcgtgagccgtttatctggtcacaactgcccactgagttcaccatccgcca

SEQ ID NO: 869734 - DNA, 75 bp, synthetic construct
  source 1..75: mol_type = other DNA
agctgcttgagcagtatcaccgtgccgggcagcaacgccttgccgccgtgcaacgggccatgcagcagggggccg

SEQ ID NO: 869735 - DNA, 75 bp, synthetic construct
  source 1..75: mol_type = other DNA
cagcacctgggcggcttgcccgcggtggcgcttccggggggcgatttggctgcaaagcagccgtggcgaaacctg

SEQ ID NO: 869736 - DNA, 75 bp, synthetic construct
  source 1..75: mol_type = other DNA
ggcgatggtggattgtctctggggcagggggttattgctgcggcgcgctggggggcggggaaagtccagaacgga

SEQ ID NO: 869737 - DNA, 75 bp, synthetic construct
  source 1..75: mol_type = other DNA
aaccgtttgctgcgtgcacgtctggcgcattatctcgctgatttcacattgctctttccacagagtttaccggcg

SEQ ID NO: 869738 - DNA, 75 bp, synthetic construct
  source 1..75: mol_type = other DNA
acgctgaaagaactggctctgcctatctactccatcggtatggtgctggcattcgcctttatttcgaactattcc

SEQ ID NO: 869739 - DNA, 75 bp, synthetic construct
  source 1..75: mol_type = other DNA
tagtaggggttattttctcttgttctgtgctggcacagacagaggaacaggcgcaaaaggaactgaaacgttatc

SEQ ID NO: 869740 - DNA, 75 bp, synthetic construct
  source 1..75: mol_type = other DNA
ctcctggttcggcgaccttcatggaaggatgcaaagacagtttaccgattgttattagttatattccggtggcct

SEQ ID NO: 869741 - DNA, 75 bp, synthetic construct
  source 1..75: mol_type = other DNA
ttcaatgtgaaatgttatcaataaatagagaagttccaagtattctatcgataagatctaaagagtgtgtggctg

SEQ ID NO: 869742 - DNA, 75 bp, synthetic construct
  source 1..75: mol_type = other DNA
caaagtcacctgcttttcctgcctggacgcaacgacgttgggcgcgcataaattcgtgacggcaaaacagatctc

SEQ ID NO: 869743 - DNA, 75 bp, synthetic construct
  source 1..75: mol_type = other DNA
gtccgtcgaaacggcggttactggaagaggtggtgtacgtcataacggagacggtgagaaaaacggcgatgcaaa

SEQ ID NO: 869744 - DNA, 75 bp, synthetic construct
  source 1..75: mol_type = other DNA
gttttacggggctgaagcggggctaccgtctggcagagctggtcctgatgcatgagccgctggcccggatgcggt

SEQ ID NO: 869745 - DNA, 75 bp, synthetic construct
  source 1..75: mol_type = other DNA
gccagaatcaggttgattccagcaccatcttcaacggcattgaaggcgctgagatgagcaacaaaggtaaagatc

SEQ ID NO: 869746 - DNA, 75 bp, synthetic construct
  source 1..75: mol_type = other DNA
ggttattcaggaaggtcttactcaaaaagatgctacaactacgattgtgttgggttgcgcgagtgagggtaaaga

SEQ ID NO: 869747 - DNA, 75 bp, synthetic construct
  source 1..75: mol_type = other DNA
ccggaccgacaggtgcatatgagtattttgcccgaagtgtgagcggaagcattgccgatgtaagggcgacgagcc

SEQ ID NO: 869748 - DNA, 75 bp, synthetic construct
  source 1..75: mol_type = other DNA
atgcatattaatttttggcctgtccaccattttgaagaaaatattgagcaggatggtcgctatattatcaagttt

SEQ ID NO: 869749 - DNA, 75 bp, synthetic construct
  source 1..75: mol_type = other DNA
ttgtttgaacgtttttatcgcaccgaaggttcccgcaaccgtgccagcggcggttccgggctggggctggcgatt

SEQ ID NO: 869750 - DNA, 75 bp, synthetic construct
  source 1..75: mol_type = other DNA
gccgatcagcagctttgccgcactgcgtgctcaggtgggtactatgccggtgggcagcaaactgaccctgggctt

SEQ ID NO: 869751 - DNA, 75 bp, synthetic construct
  source 1..75: mol_type = other DNA
ggctgcgcaacacgttccggctaaccgatgaggagatcgccgcatcacttactcgcggacatgctgattatctgg

SEQ ID NO: 869752 - DNA, 75 bp, synthetic construct
  source 1..75: mol_type = other DNA
gtctgatttgttccgctttactgtcaaacacagcctgatcttcacctgtatagtgggcgtgatcaccacgcttca

SEQ ID NO: 869753 - DNA, 75 bp, synthetic construct
  source 1..75: mol_type = other DNA
cgccgcattgctggtcggtctgggctttaaaccactgtacgccgccggactgtgcctgattgttaacaccgcgcc

SEQ ID NO: 869754 - DNA, 75 bp, synthetic construct
  source 1..75: mol_type = other DNA
ggatcatggcgattatggacggctggcgcggtatcaaagagacgtggcctgcggtcgtggttgcgggcgggtcgt

SEQ ID NO: 869755 - DNA, 75 bp, synthetic construct
  source 1..75: mol_type = other DNA
tgtgcctgattgttaacaccgctcccgtagcatttggcgcgatggggatcccaattctggttgccggacaggtga

SEQ ID NO: 869756 - DNA, 75 bp, synthetic construct
  source 1..75: mol_type = other DNA
tgctctgcctgacgctgttcctcaaacgctggcagccagtgcgcgtattccgttttggtgatttggggcgtcaaa

SEQ ID NO: 869757 - DNA, 75 bp, synthetic construct
  source 1..75: mol_type = other DNA
tgtgcctgattgttaacaccgcgccggtggcatttggcgcgatgggcattccgattctggttgccggacaggtga

SEQ ID NO: 869758 - DNA, 75 bp, synthetic construct
  source 1..75: mol_type = other DNA
tggtgtcaccggtaagatgatctctccgcaatctatcgctatcgcctgtgcggcggtaggcctggtgggcaaaga

SEQ ID NO: 869759 - DNA, 75 bp, synthetic construct
  source 1..75: mol_type = other DNA
ggtttgtcatcaacactggcgctggcactggcgcacaccggtcatgcattcaccttcttctcgccgttcctcggc

SEQ ID NO: 869760 - DNA, 75 bp, synthetic construct
  source 1..75: mol_type = other DNA
cggggaactggtcgctcgatgacattcccgtctttattccgcatcttcgcggttcgggttcgccctataaaaatc

SEQ ID NO: 869761 - DNA, 75 bp, synthetic construct
  source 1..75: mol_type = other DNA
gcttcgggtggcgcgctgtatgagtgggtcatcaacattccggtgccgtatctcgacaagctggttgcccgtatg

SEQ ID NO: 869762 - DNA, 75 bp, synthetic construct
  source 1..75: mol_type = other DNA
ttattgcagcggtgttcgtctataagatctcggtgaaaaccgggcagtttgacatcatccgctcgtctattcttt

SEQ ID NO: 869763 - DNA, 75 bp, synthetic construct
  source 1..75: mol_type = other DNA
gggttgtcgtcaacactggcgctggctctggcacacaccggccacgcattcaccttcttctcgccattccttggt

SEQ ID NO: 869764 - DNA, 75 bp, synthetic construct
  source 1..75: mol_type = other DNA
tgttgttcagtatgcagagcgggccgcagagaaactacgtggggagcgtcagtattgccggcaggtgacgacatt

SEQ ID NO: 869765 - DNA, 75 bp, synthetic construct
  source 1..75: mol_type = other DNA
gtgacgacatttgtacggacatccccctttgcagtaaaagaaccctgttacagcaatgccgctgtggaaaagctt

SEQ ID NO: 869766 - DNA, 75 bp, synthetic construct
  source 1..75: mol_type = other DNA
cttcgcgcagaaaaactcgggcaactggataatttttttacccatatctgccagttggtaatgactccaacttac

SEQ ID NO: 869767 - DNA, 75 bp, synthetic construct
  source 1..75: mol_type = other DNA
aggagctgcggagtgaggggctgtctcaatcgaaggtagcgaagcgtctcggcgttagcgtgagcaccgttaaac

SEQ ID NO: 869768 - DNA, 75 bp, synthetic construct
  source 1..75: mol_type = other DNA
ctgcagctttatgcggtttgttggctctgtctgggtgtgcttctaaaatcactcagccggataaatactccggtt

SEQ ID NO: 869769 - DNA, 75 bp, synthetic construct
  source 1..75: mol_type = other DNA
ccgtaaaaacagtgaaaagttaatgaaaacactcgatgaactgaaccagtcgggaaaagggaaagtgtggtttgc

SEQ ID NO: 869770 - DNA, 75 bp, synthetic construct
  source 1..75: mol_type = other DNA
cctggcgacagcaacgccggacaaccttttttcgcttctggttgctgatgttcgttgctcctttgctgttggctg

SEQ ID NO: 869771 - DNA, 75 bp, synthetic construct
  source 1..75: mol_type = other DNA
cgcacgctgatcagtatcaaccgcgcgcaacctgcggtaatgccactggtgatccacgaactggagcgccatccg

SEQ ID NO: 869772 - DNA, 75 bp, synthetic construct
  source 1..75: mol_type = other DNA
gccgctgcgttatgtggcgatgattatctggttgtatagcgcgtttcgtggtgtgcagttaacttacgaacacac

SEQ ID NO: 869773 - DNA, 75 bp, synthetic construct
  source 1..75: mol_type = other DNA
ggactcttgtttatcggtgttttaaatgcacctatcaatgcttatgaaatggtgatctaccccattagactggcc

SEQ ID NO: 869774 - DNA, 75 bp, synthetic construct
  source 1..75: mol_type = other DNA
aaaagcggggataatgctcaatgatttcagtccgaacggcgtcgcgcagctgaatctgttcgatgacgtgcagcc

SEQ ID NO: 869775 - DNA, 75 bp, synthetic construct
  source 1..75: mol_type = other DNA
taaacgcactagaaacgtcactccgccaggatgcatcttttcatctcaatcagcggggggccacgcagcaggatg

SEQ ID NO: 869776 - DNA, 75 bp, synthetic construct
  source 1..75: mol_type = other DNA
cgtgaaggtggtgtctcttgacctgccagcgcgtgatctgacttcatctgagggcaagctaatccgccagatgtt

SEQ ID NO: 869777 - DNA, 75 bp, synthetic construct
  source 1..75: mol_type = other DNA
gaccaaatgttctgaagtcgtggtctatttcaaaacacctgaactgaatctgtttaaagagtcgtggcaggatct

SEQ ID NO: 869778 - DNA, 75 bp, synthetic construct
  source 1..75: mol_type = other DNA
aactttcatgaaagaaaccattgatgaaggtttatgggacaccctgagtgcacgtctggatttttgtaatcttga

SEQ ID NO: 869779 - DNA, 75 bp, synthetic construct
  source 1..75: mol_type = other DNA
ttgctgccttccctgtatcaactggaaaaagccggtcagctcaacccggacacacggattatcggcgtagggcgt

SEQ ID NO: 869780 - DNA, 75 bp, synthetic construct
  source 1..75: mol_type = other DNA
gaaaccatgaaaaatggcagcttcagtggattaggaggggttaatgtggcctgtaccatctggttgcataggtat

SEQ ID NO: 869781 - DNA, 75 bp, synthetic construct
  source 1..75: mol_type = other DNA
tccagaaaaccagttgaggtagaaagactacaaaaagtttatgtccgagacccgatggtaaaagcttggatttta

SEQ ID NO: 869782 - DNA, 75 bp, synthetic construct
  source 1..75: mol_type = other DNA
gattcaccggggtgaggaagaggtgcatctcaccccgattgaattccgcctgctggcggtgctgctgaataatgc

SEQ ID NO: 869783 - DNA, 75 bp, synthetic construct
  source 1..75: mol_type = other DNA
agccggaaaactgtctgccggaggcagaaacagcagaatacagggagtcagtccccggtgatatattatttgatt

SEQ ID NO: 869784 - DNA, 75 bp, synthetic construct
  source 1..75: mol_type = other DNA
cgtgaaggtggtgtctcttgacctgccagcgcacgacctgacttcatccgaaggcacgttaatcagacacatgtt

SEQ ID NO: 869785 - DNA, 75 bp, synthetic construct
  source 1..75: mol_type = other DNA
tttcaacacgcgagcaggatacgcagaatcaggtgctggctattgagcgtgccgggtacaaggtgcctgagagca

SEQ ID NO: 869786 - DNA, 75 bp, synthetic construct
  source 1..75: mol_type = other DNA
tccaggaaaccagttgaggtagaaagactacaaaaagtttatgtccgagacccaatggtaaaagcttggatttta

SEQ ID NO: 869787 - DNA, 75 bp, synthetic construct
  source 1..75: mol_type = other DNA
taaatatgaatgtgaatatgaatatgatgaaagaagccattgatgttttgataaactctgaaaaacatattctga

SEQ ID NO: 869788 - DNA, 75 bp, synthetic construct
  source 1..75: mol_type = other DNA
agaagccattgatgttttgataaactctgaaaaacatattctgattataggcgaaactggaactggaaaatcaac

SEQ ID NO: 869789 - DNA, 75 bp, synthetic construct
  source 1..75: mol_type = other DNA
ctggacaaggtacgaagaaagattggtcgatgaagcgagagcatttgtctcccgcctatacaacacgctgggacc

SEQ ID NO: 869790 - DNA, 75 bp, synthetic construct
  source 1..75: mol_type = other DNA
aagcgcaggacggtacgccggactggaatattatcgagcgtttgttgaaagagtggcagccagacgaaatcatcg

SEQ ID NO: 869791 - DNA, 75 bp, synthetic construct
  source 1..75: mol_type = other DNA
attgccggccctctggcacaaaccgaacgcgatttgctcggtcatagcctaaacgacaatgctgccattcccgct

SEQ ID NO: 869792 - DNA, 75 bp, synthetic construct
  source 1..75: mol_type = other DNA
ctttgtgcaagatgcctgggctgccgagcaacgtggcggtttgttgctcaccttacctgccgggcaaaatgcctt

SEQ ID NO: 869793 - DNA, 75 bp, synthetic construct
  source 1..75: mol_type = other DNA
ggctattttcttggcgtgttaatgacagcaacttttggcaattatgcatatcttcgcgcagaaaaactcgggtaa

SEQ ID NO: 869794 - DNA, 75 bp, synthetic construct
  source 1..75: mol_type = other DNA
atgaaacttcaggtattaccgttaagtcaggaagccttctgtgcttatggcgacgtaatcgaaacgcagaaacgg

SEQ ID NO: 869795 - DNA, 75 bp, synthetic construct
  source 1..75: mol_type = other DNA
caaaggcaaagttgactctgcctctgcggttattattctcgaaagctatttcgagcagggatatgaaggcgattt

SEQ ID NO: 869796 - DNA, 75 bp, synthetic construct
  source 1..75: mol_type = other DNA
cttatgccaacgcggctgagcggctattgatggctatcggtgagcctgtcatggtcgatacagcccaggacccca

SEQ ID NO: 869797 - DNA, 75 bp, synthetic construct
  source 1..75: mol_type = other DNA
cagctattgccagagagcacaatgtgcttcgtcttaaacgctacaggtgagccgaagcaccctttgtatatgaaa

SEQ ID NO: 869798 - DNA, 75 bp, synthetic construct
  source 1..75: mol_type = other DNA
atacgtcaggaaccctttgaatgaattaataaacggggggatcaggatattccggctgaaacgccgtatgcgccg

SEQ ID NO: 869799 - DNA, 75 bp, synthetic construct
  source 1..75: mol_type = other DNA
agtcaggtgaatggcaattagcgttgttgggcttaaacccagatgttcgccaacattggataaatttagccgccg

SEQ ID NO: 869800 - DNA, 75 bp, synthetic construct
  source 1..75: mol_type = other DNA
gcaaggtcagataaaacaaattttgacagcactaaaaatacggttgcgggtagtggtaatgcatatgccccggca

SEQ ID NO: 869801 - DNA, 75 bp, synthetic construct
  source 1..75: mol_type = other DNA
cgcagagcagaatggattgcaggaacgtatccaaatgatggaatcaaaagttcgtgctgatgaagccgctttgcc

SEQ ID NO: 869802 - DNA, 75 bp, synthetic construct
  source 1..75: mol_type = other DNA
ttaaccaggataagcacctgattgtctatgacgaaggtaatcttttctcagccccacgagcatggtggatgctgc

SEQ ID NO: 869803 - DNA, 75 bp, synthetic construct
  source 1..75: mol_type = other DNA
gccgccaaaacaggagattgtctgcagccggtcctttggggagcgtgtcacgacgtatgaagccatgcgccagtc

SEQ ID NO: 869804 - DNA, 75 bp, synthetic construct
  source 1..75: mol_type = other DNA
gatcggatctgggtgaatggccatcgatatgcaaaagcaggttgcacgctcaatgatttcactcctaccgggggt

SEQ ID NO: 869805 - DNA, 75 bp, synthetic construct
  source 1..75: mol_type = other DNA
atttcgacctgatttgcgaaacaagccggttgtggtactcagtaacaatgatggttgcgttatcgcccgttcaaa

SEQ ID NO: 869806 - DNA, 75 bp, synthetic construct
  source 1..75: mol_type = other DNA
agtctgtcagtacgctgagcgtgcagctgaaaagctgcgcggcgagcggcagttctgcaagcatattgctgtatt

SEQ ID NO: 869807 - DNA, 75 bp, synthetic construct
  source 1..75: mol_type = other DNA
agttctgcaggcatattgccgtgtttgtgaaaacatcgccgttcgccgtaaatgagccctactatggtaatctgg

SEQ ID NO: 869808 - DNA, 75 bp, synthetic construct
  source 1..75: mol_type = other DNA
cgttctatgccagctgcgaaaaggtttttcgccctgacctgcgaaacaaacctgtcgtcgttctctcaaataacg

SEQ ID NO: 869809 - DNA, 75 bp, synthetic construct
  source 1..75: mol_type = other DNA
tttcaggccggatttgcgcggcaaacctgtcgtcgttctcagtaacaacgatggctgcgttattgcccggagtgc

SEQ ID NO: 869810 - DNA, 75 bp, synthetic construct
  source 1..75: mol_type = other DNA
gtatttttcgatatcgaagcactttccgatcacacttccccgcttccgcacatgctgccacgcccggaaacattc

SEQ ID NO: 869811 - DNA, 75 bp, synthetic construct
  source 1..75: mol_type = other DNA
tacggcgcaaattattgatgcccgcccggctgcacgttttaacgcagaagttgatgaacctcgcccaggtttacg

SEQ ID NO: 869812 - DNA, 75 bp, synthetic construct
  source 1..75: mol_type = other DNA
aagaccgcgctcgatctggctctgacgaacccggccttcatccgcaaaaatttttctgtcgtccttgagcgaacg

SEQ ID NO: 869813 - DNA, 75 bp, synthetic construct
  source 1..75: mol_type = other DNA
ttgagtgtagaacaacagtgttacacagcaaaatcggcgcagtgggcgtcaaaggaatggccacaattcagtggg

SEQ ID NO: 869814 - DNA, 75 bp, synthetic construct
  source 1..75: mol_type = other DNA
acgtagtgctggagcgcacggtacgtgagctgaacggcgagagttgcatttcgctggaggaagcgccgccgccga

SEQ ID NO: 869815 - DNA, 75 bp, synthetic construct
  source 1..75: mol_type = other DNA
acattcaattcgtaacacctttccaccaggaaaattaccaccaattgagaaatacaaaaacgtatattacaacat

SEQ ID NO: 869816 - DNA, 75 bp, synthetic construct
  source 1..75: mol_type = other DNA
ggattgggtgagcaacgagcaactttccgagttgaccgggatattgccgcacaagtgttctgctgcaaaaagtgt

SEQ ID NO: 869817 - DNA, 75 bp, synthetic construct
  source 1..75: mol_type = other DNA
aaaaataaagtttacctgaaagaggtaaatttacctgaatcaggtaagaaaattttacccaaatcaggtaaagac

SEQ ID NO: 869818 - DNA, 75 bp, synthetic construct
  source 1..75: mol_type = other DNA
caaaaaaataattttgccattaccgtttttgcctcccaccgtaacgaaagaaatgaaatcctttccgttgccgat

SEQ ID NO: 869819 - DNA, 75 bp, synthetic construct
  source 1..75: mol_type = other DNA
gctctaccgggctgaaagacacggctcagcagaactggtgccacctgcgctgcaaccaacgttaccaccagcgac

SEQ ID NO: 869820 - DNA, 75 bp, synthetic construct
  source 1..75: mol_type = other DNA
aatatacagtacgggtaagtgaacctaatccaggcttagctaatctacttttagaacaattcggcgggccacagg

SEQ ID NO: 869821 - DNA, 75 bp, synthetic construct
  source 1..75: mol_type = other DNA
cccatcacagtatctggctgctcatgcccggatggactgctttactccacaagtactgatgccctatttacccgg

SEQ ID NO: 869822 - DNA, 75 bp, synthetic construct
  source 1..75: mol_type = other DNA
cctttcccttctgattgcctctgcattaaacctgttacaggcatttatggcatgggattctggcgttttgatgac

SEQ ID NO: 869823 - DNA, 75 bp, synthetic construct
  source 1..75: mol_type = other DNA
actctctgagcttttcatataaagtaaatttaccccctgttttcaataatctgtcgcttaagattgagcagggag

SEQ ID NO: 869824 - DNA, 75 bp, synthetic construct
  source 1..75: mol_type = other DNA
ttaagcccggagcaattattgaagctgaatgtattcttgacctatcagaatgaattaaacccttacagtgaggtg

SEQ ID NO: 869825 - DNA, 75 bp, synthetic construct
  source 1..75: mol_type = other DNA
atcatcccgaacatcgtctggtcagtccgcaacagtatattgcagcagcatcagctgctgagtcgtttaaacccc

SEQ ID NO: 869826 - DNA, 75 bp, synthetic construct
  source 1..75: mol_type = other DNA
ggcattatcgacttctttcgtcgcggattaggcaacggcgtcttttcgctggcgctctcgttactgtacctgttg

SEQ ID NO: 869827 - DNA, 75 bp, synthetic construct
  source 1..75: mol_type = other DNA
tggtttgtatgggggcacctgaactcaaagtttggaaaagcaaaattatttaatctttgtcgtaatattattggt

SEQ ID NO: 869828 - DNA, 75 bp, synthetic construct
  source 1..75: mol_type = other DNA
gataacgcatccatttggagataatatcaccgttggtccaagaggaaaaaatggagatagtggttattatttact

SEQ ID NO: 869829 - DNA, 75 bp, synthetic construct
  source 1..75: mol_type = other DNA
gctatcgttactttacctgatgacgctggcagtcagtattgcgatggtcgcacgcgcatttggcgcttatgctgt

SEQ ID NO: 869830 - DNA, 75 bp, synthetic construct
  source 1..75: mol_type = other DNA
ataaccttccttgcctatgcgggctttggcatgatggcgaacgcggcggataaagtgaaagatccgcaggtcatt

SEQ ID NO: 869831 - DNA, 75 bp, synthetic construct
  source 1..75: mol_type = other DNA
tcctcgtcggcattaaaatgatgatcctgttattgctgattattgccggtgtctggtcgctgcaaccggcgcata

SEQ ID NO: 869832 - DNA, 75 bp, synthetic construct
  source 1..75: mol_type = other DNA
atggtcaatataatgcagcaaaaaaaaatgaatctaagaaaaaataaaatggaaaagggtctttcacttattgaa

SEQ ID NO: 869833 - DNA, 75 bp, synthetic construct
  source 1..75: mol_type = other DNA
gctttctgatcctggagtcagtatcaatggtacaaaccatcctctggatgaaacgacctttactgcgctaaaagc

SEQ ID NO: 869834 - DNA, 75 bp, synthetic construct
  source 1..75: mol_type = other DNA
agcgcctgggaactggcgtgtgactgcgcccgtgttatgaaggccgacgggctggtgaatgttcagacgcgaaac

SEQ ID NO: 869835 - DNA, 75 bp, synthetic construct
  source 1..75: mol_type = other DNA
tacctccgccatccccgataactataaaaaaggtactcagattatgcacccgttcgggggcgaagttaacctcgg

SEQ ID NO: 869836 - DNA, 75 bp, synthetic construct
  source 1..75: mol_type = other DNA
taatgttggtaatactaacggtatcggtaacttcaccaaaaatgctctgactccagcacgggcttccgacgcttg

SEQ ID NO: 869837 - DNA, 75 bp, synthetic construct
  source 1..75: mol_type = other DNA
aaaattcctctgcgatacctgataattacaagaagggtaccacgatttcaaatccatttggtggtaatttaaacg

SEQ ID NO: 869838 - DNA, 75 bp, synthetic construct
  source 1..75: mol_type = other DNA
actgctggcaaaagtcgatgccaactttaaaaaggtcgataccattctggcgaaataccgtactaaagacggttt

SEQ ID NO: 869839 - DNA, 75 bp, synthetic construct
  source 1..75: mol_type = other DNA
acaaaagattttattggaaataaacctaatttaaaaacagcaacccaaaatacaaagggacttcttgaatcctgc

SEQ ID NO: 869840 - DNA, 75 bp, synthetic construct
  source 1..75: mol_type = other DNA
attctgatgttcataaattattaagcaaatactccatttctctaggtattaaaaatattcggatactgaaaaaaa

SEQ ID NO: 869841 - DNA, 75 bp, synthetic construct
  source 1..75: mol_type = other DNA
gaaggtgtttgactgcgaggtccgacactggtacagcgagccggtacacgatatacagggttacaactgttacga

SEQ ID NO: 869842 - DNA, 75 bp, synthetic construct
  source 1..75: mol_type = other DNA
ccgacacagtctggactgtgttaaaaaaacattccctcagttacgggctgaagaggggggatatcatgcatttaa

SEQ ID NO: 869843 - DNA, 75 bp, synthetic construct
  source 1..75: mol_type = other DNA
tgagagaagagacgcctggaaaaaagttgagcactatctagatactgctgcaagacgtaatgttgttaaagttga

SEQ ID NO: 869844 - DNA, 75 bp, synthetic construct
  source 1..75: mol_type = other DNA
aaaatcttaagggattatataagaaaaaacatattaatatgctatgggataaatatatatcaaagaatgcagaaa

SEQ ID NO: 869845 - DNA, 75 bp, synthetic construct
  source 1..75: mol_type = other DNA
gctggtaatagccgctggttaattccggcaaggagggggaggactacatcgcacgttagtcgcagtacgctgaat

SEQ ID NO: 869846 - DNA, 75 bp, synthetic construct
  source 1..75: mol_type = other DNA
aagtagcagttcttctcgtgcccaacaaactattggaggggagttggcgactcagataagtaaacaaacagctac

SEQ ID NO: 869847 - DNA, 75 bp, synthetic construct
  source 1..75: mol_type = other DNA
ccgaagaatctggttcaggtggtggaggccgttccggtggaggatttggcggcggggaagatactggttctgtag

SEQ ID NO: 869848 - DNA, 75 bp, synthetic construct
  source 1..75: mol_type = other DNA
ctggtgaaacccacccggacgacgcagtatccgccatatccggcgctggttcgtcacggtacggggttgtcatct

SEQ ID NO: 869849 - DNA, 75 bp, synthetic construct
  source 1..75: mol_type = other DNA
gccatgccatacagcagagtatacagctgtttctgatcggttgtgccggactggtgaaacctacccggacgacgc

SEQ ID NO: 869850 - DNA, 75 bp, synthetic construct
  source 1..75: mol_type = other DNA
attttgaagagagaaaagctgcattggagcagtgggctgaactgctggttacgctggaaagtggtgaagattaca

SEQ ID NO: 869851 - DNA, 75 bp, synthetic construct
  source 1..75: mol_type = other DNA
ccataaaaaaaagctcattcacgtacaaaaatcaatcgtcattagaagcaattgatctttatgccgaactaacac

SEQ ID NO: 869852 - DNA, 75 bp, synthetic construct
  source 1..75: mol_type = other DNA
gtgccgtggtggtcgacgtaccaggtgttaggcaaaatgattctgaacatttttacacctcagttggccggatta

SEQ ID NO: 869853 - DNA, 75 bp, synthetic construct
  source 1..75: mol_type = other DNA
ctagcggatttattccgactgcggtgataaatcgttctcaaacaaaacaagctccaggccacgaaaaaatccgtg

SEQ ID NO: 869854 - DNA, 75 bp, synthetic construct
  source 1..75: mol_type = other DNA
tgtggtcgatttgcaaaaacgcatcagtgaactggctttccctccgtcaaaagtggtcggcggggctgccggact

SEQ ID NO: 869855 - DNA, 75 bp, synthetic construct
  source 1..75: mol_type = other DNA
acgcgccagcactatgagcgcatcgaaccgattgctgaactgttctccgatctggatggcagcattgacgcccgt

SEQ ID NO: 869856 - DNA, 75 bp, synthetic construct
  source 1..75: mol_type = other DNA
agttgaaaaaagccggtgttgatgtgctgggtatcagcactgataaacccgaaaaactcttccgtttcgcggaaa

SEQ ID NO: 869857 - DNA, 75 bp, synthetic construct
  source 1..75: mol_type = other DNA
ttatccatagaacaacctttgagggttattactttgatgccgggcaggctctactcttgtcagcatcccaattga

SEQ ID NO: 869858 - DNA, 75 bp, synthetic construct
  source 1..75: mol_type = other DNA
caacggacgggaacatcatctgcatattattttgaccttccgcgaatcgctgccaggccgacatcgggtacgccg

SEQ ID NO: 869859 - DNA, 75 bp, synthetic construct
  source 1..75: mol_type = other DNA
agtttcggggatcttaagtgctattcaccagaaaatatcagagaaattacgcgatataaatgttcataaatatag

SEQ ID NO: 869860 - DNA, 75 bp, synthetic construct
  source 1..75: mol_type = other DNA
agcaacaggctggagtgacagccggaaaaccaaaactcgacctgacaaacactgactggatttacggggtggagc

SEQ ID NO: 869861 - DNA, 75 bp, synthetic construct
  source 1..75: mol_type = other DNA
tttaacaaaaataaaactgaatgatattctgaattctgtgataataaatggttgcaacaccaaattaatatctga

SEQ ID NO: 869862 - DNA, 75 bp, synthetic construct
  source 1..75: mol_type = other DNA
atgtatcttacgaaaaagattataataagtatgatgtttatattaccatctgctgcattttcatcagatccacct

SEQ ID NO: 869863 - DNA, 75 bp, synthetic construct
  source 1..75: mol_type = other DNA
cgacaaatatgattatcttgatgaacaaaaggaggcgttaaataaatttgcggattacgtcttatccctggctgg

SEQ ID NO: 869864 - DNA, 75 bp, synthetic construct
  source 1..75: mol_type = other DNA
gcattaggctttatgctaccggcgctctttatgagttttctgctcgcctctttccagcgcaaacaatccctttgc

SEQ ID NO: 869865 - DNA, 75 bp, synthetic construct
  source 1..75: mol_type = other DNA
aggaaatggggatcagttttcaacaggcattgggagtgcatccgcaggcagtgaagttacgtcttgagaggaccg

SEQ ID NO: 869866 - DNA, 75 bp, synthetic construct
  source 1..75: mol_type = other DNA
tatcaaacaaatgaaaatggaaaaatggcgaaaaatatcattgatgggtttgagtgttgcgaaggggaaatcact

SEQ ID NO: 869867 - DNA, 75 bp, synthetic construct
  source 1..75: mol_type = other DNA
ctaacggaacccaaaagagctgcggccataagccttgcgaatatcttccggtaatgatgtccggagacgcaatca

SEQ ID NO: 869868 - DNA, 75 bp, synthetic construct
  source 1..75: mol_type = other DNA
ctccttgctgcgcctggctcccggcgatgatgcggaagtggtatttaacgctctgccaggcaaagtgttcagcgg

SEQ ID NO: 869869 - DNA, 75 bp, synthetic construct
  source 1..75: mol_type = other DNA
gttcccggcggagcttatcagtcgaccggcaccttacagacgttaaacacagcgccgggttcagatggcgttatc

SEQ ID NO: 869870 - DNA, 75 bp, synthetic construct
  source 1..75: mol_type = other DNA
ggcaaatcatggtcctgtcacgacctccgcaggacgtgccgtacacacctttcagctataggtgttccggtacat

SEQ ID NO: 869871 - DNA, 75 bp, synthetic construct
  source 1..75: mol_type = other DNA
gcgcaaaatggtgatgggcgggttggctctgtttggtgcaagcgttgttggtcagggtgtgcagtggacgatgaa

SEQ ID NO: 869872 - DNA, 75 bp, synthetic construct
  source 1..75: mol_type = other DNA
ttgagatgctccgcgtgttcattcggaatggcgcaattgtaatctccgctcatcatcaacaagagcgagtgatcg

SEQ ID NO: 869873 - DNA, 75 bp, synthetic construct
  source 1..75: mol_type = other DNA
aaaaacacaagttagaatttgaaaaaatcctggataaaaaaaatcatattaagaatgaattattaaaactaaaaa

SEQ ID NO: 869874 - DNA, 75 bp, synthetic construct
  source 1..75: mol_type = other DNA
gcctgactttgaggcaattctggctgacacaaaggccatgatgattgcgtcctatcccgccgaacagcgtgaagc

SEQ ID NO: 869875 - DNA, 75 bp, synthetic construct
  source 1..75: mol_type = other DNA
tttctcaatgctctgaaagccagcggtaagcagcgaattttgctcaccaacgcccatccgcataacctggcagtt

SEQ ID NO: 869876 - DNA, 75 bp, synthetic construct
  source 1..75: mol_type = other DNA
actgcatcgcaggaactgattcagaccgtcagtaacgccctcaacgatgagcgaatcaggcctgtcgcagaccgg

SEQ ID NO: 869877 - DNA, 75 bp, synthetic construct
  source 1..75: mol_type = other DNA
tccgagccattgaacatcatttcccaggccatggcctttcgtgaaatgctgcttcgccagcgcatcaatgaagcc

SEQ ID NO: 869878 - DNA, 75 bp, synthetic construct
  source 1..75: mol_type = other DNA
tgaggtcataaaacccacgcagaacatcaccatcagtgacactcaggcagccagatgtaccacattcagcatcag

SEQ ID NO: 869879 - DNA, 75 bp, synthetic construct
  source 1..75: mol_type = other DNA
ttttgcacgcagcgccagcggtctggtgcgtaatgcgcgggccatcagcccgtctccggcctgtgtgacggtttc

SEQ ID NO: 869880 - DNA, 75 bp, synthetic construct
  source 1..75: mol_type = other DNA
agctcctgattcgactcattttaccatttggctttgtaaagatgctcgagttcatgaaaaattcacctgtataag

SEQ ID NO: 869881 - DNA, 75 bp, synthetic construct
  source 1..75: mol_type = other DNA
aaaatcacaagttagaacttgataaaatcctagacaaaaaaaatcatattgagaatgaattattagaactaaaaa

SEQ ID NO: 869882 - DNA, 75 bp, synthetic construct
  source 1..75: mol_type = other DNA
tcagcggagaatatacagttcactcatgattttataaaaaatgaaaaagggatgttttttgcgactacttatgga

SEQ ID NO: 869883 - DNA, 75 bp, synthetic construct
  source 1..75: mol_type = other DNA
tctgaaccactgaccattatcgccgaggtaatggctttccgggagatgctactgcgccagcgtatcaatgaaggt

SEQ ID NO: 869884 - DNA, 75 bp, synthetic construct
  source 1..75: mol_type = other DNA
gcgtgtcgtttgtggtgctgctggcaacgctgggtagcgtggggatcccgctggaaggcctggcgtttattgccg

SEQ ID NO: 869885 - DNA, 75 bp, synthetic construct
  source 1..75: mol_type = other DNA
gacggtggctaactttggtttctcttctctgtggccactggcgaaactggtgctgctggtgcatttcgccattct

SEQ ID NO: 869886 - DNA, 75 bp, synthetic construct
  source 1..75: mol_type = other DNA
caaaggccacgcgggataaattcgctaaagagtatcagcgttacgcacgcggcagccaggcgaaagtaaacccgt

SEQ ID NO: 869887 - DNA, 75 bp, synthetic construct
  source 1..75: mol_type = other DNA
tgataaggctgttgagcttgtcagggatcgcagtaaattcgcggaaatttcgaaaaatttcggctatttcacgcc

SEQ ID NO: 869888 - DNA, 75 bp, synthetic construct
  source 1..75: mol_type = other DNA
gaatacggcagtgcgcaccctgatgatcaaaccgtgctggcggtgcctgttgataaggctgttgagcttgtcagg

SEQ ID NO: 869889 - DNA, 75 bp, synthetic construct
  source 1..75: mol_type = other DNA
gcaaaaaatctttgatgataagccggacagggcgatcgcttcactcaataccccggaaagtcttgatgcgctttc

SEQ ID NO: 869890 - DNA, 75 bp, synthetic construct
  source 1..75: mol_type = other DNA
gagcaccgaaaagagaatgatcagcgtacatatgatcttaatgtcaggaatgctgaccgtgaatatgcgctgaaa

SEQ ID NO: 869891 - DNA, 75 bp, synthetic construct
  source 1..75: mol_type = other DNA
ttttgaatttgcgcagtcgcagtttgagcataataaagatgttgatcagcggaacttcgattacagagccaaagt

SEQ ID NO: 869892 - DNA, 75 bp, synthetic construct
  source 1..75: mol_type = other DNA
tcaaaaggccagggaggaacaggccagggatgatagcgcggcctctgcatctgagtttatccgtggtctgaaaca

SEQ ID NO: 869893 - DNA, 75 bp, synthetic construct
  source 1..75: mol_type = other DNA
gctggcgctcacattacgccttatatcgttcgtcatagtcgattatgcgcgcatgacatttacgcaattcctctg

SEQ ID NO: 869894 - DNA, 75 bp, synthetic construct
  source 1..75: mol_type = other DNA
tgccagtcatgccagcgtgatattgagcgtgaccgcgataattgggagaagacgcacggcaggctggcgatgcat

SEQ ID NO: 869895 - DNA, 75 bp, synthetic construct
  source 1..75: mol_type = other DNA
acatggactttgttgcttcccgtccatgctgtggctgtggagctgcgggagctggcgctcacattacgccttata

SEQ ID NO: 869896 - DNA, 75 bp, synthetic construct
  source 1..75: mol_type = other DNA
ggtcagtcctatccgttgtcgctcgctatcaagaccctgattccgggctacttgtccggcctgccgtctaccagc

SEQ ID NO: 869897 - DNA, 75 bp, synthetic construct
  source 1..75: mol_type = other DNA
tgataaggctgtcgctcaggtcagggatcgcagtaaattcgcggaaatttcgaaaaattacggttattttatgcc

SEQ ID NO: 869898 - DNA, 75 bp, synthetic construct
  source 1..75: mol_type = other DNA
ggggcagtggttaagcgccgaaactgtacagacgcaaacctatgaattatgcgatggcgtcgccggcggctatga

SEQ ID NO: 869899 - DNA, 75 bp, synthetic construct
  source 1..75: mol_type = other DNA
gatcgatgtctatttcaacactgcgatatgtcagcattctggcaattgcgtacgtggcaacggcaagttatttaa

SEQ ID NO: 869900 - DNA, 75 bp, synthetic construct
  source 1..75: mol_type = other DNA
tccggtcacgtcagcggttatagcgttgcgcatcaggcgctggaagaagaactggccgagtggctgggctattcg

SEQ ID NO: 869901 - DNA, 75 bp, synthetic construct
  source 1..75: mol_type = other DNA
cgacgcagcacaggaagaagaagggcaagttgaagcggtgatggatgccgcattacgcccgaaacgcagtctgtg

SEQ ID NO: 869902 - DNA, 75 bp, synthetic construct
  source 1..75: mol_type = other DNA
ttatggcgcttgcgtcagcgtgcgcacgaacgcgacgaagcgcgcgatttgttgcacagtcatggcacgggcaaa

SEQ ID NO: 869903 - DNA, 75 bp, synthetic construct
  source 1..75: mol_type = other DNA
agctatttaccccataactttacattttgcgcaaatctcattatcgccgctgattttatttcttttctttttcac

SEQ ID NO: 869904 - DNA, 75 bp, synthetic construct
  source 1..75: mol_type = other DNA
gactgcgcttaacgctaacagcagcgcatgaaatgcaggatatcgaccgtctgctggaggtgctgcatggcaacg

SEQ ID NO: 869905 - DNA, 75 bp, synthetic construct
  source 1..75: mol_type = other DNA
atctgctgcaattcgctcgccatcttatctacagcaccagtatgccgcccgctcaggcgcaggcattacgtgcgt

SEQ ID NO: 869906 - DNA, 75 bp, synthetic construct
  source 1..75: mol_type = other DNA
cagtatcgtaccggcgcagcaggaagggtacgtacttattggccttgatctcacatacagcgatggctccaccgc

SEQ ID NO: 869907 - DNA, 75 bp, synthetic construct
  source 1..75: mol_type = other DNA
gagagggaacacaaagcagcgcagaattatcgaaatgcgtcacttgggctatctcagcagagactgcaactggaa

SEQ ID NO: 869908 - DNA, 75 bp, synthetic construct
  source 1..75: mol_type = other DNA
aagcggggcaggccgtgaacaacctgcagaaaatctttgatgataagccggacagggcgattgcttcgctgaata

SEQ ID NO: 869909 - DNA, 75 bp, synthetic construct
  source 1..75: mol_type = other DNA
gtcagggcgtacagtggacaataaatgcctggcaaacccaggactgggtcgcgctgggaggctgtgccgctggag

SEQ ID NO: 869910 - DNA, 75 bp, synthetic construct
  source 1..75: mol_type = other DNA
acatctggttcagccagtgctggatgcgcaggcgcgcagagaaatcagccgttcggcggcagaatctaccctgat

SEQ ID NO: 869911 - DNA, 75 bp, synthetic construct
  source 1..75: mol_type = other DNA
cgcaacatcagcagaaaattcagcagcaaaaaattcagcaagtgattaccagctgggcgggggatgatccggata

SEQ ID NO: 869912 - DNA, 75 bp, synthetic construct
  source 1..75: mol_type = other DNA
tcactctcgatttgcagcgtaagccaatcaaaaacttgcatatcagcgtacttcctccggatggccgagtaagag

SEQ ID NO: 869913 - DNA, 75 bp, synthetic construct
  source 1..75: mol_type = other DNA
ttatttaatggcgtcaatgcattaaatgcttataacgctgcattgcttgcaaaaattctcaacgttagcgttgaa

SEQ ID NO: 869914 - DNA, 75 bp, synthetic construct
  source 1..75: mol_type = other DNA
tccagtcacttagcatgctgatcacctttaccgttattctttggcaaagcgcgggtacgctctcattcactgggt

SEQ ID NO: 869915 - DNA, 75 bp, synthetic construct
  source 1..75: mol_type = other DNA
gcaggaaatacgaaaataccgctcctgattaacggcggcatgaatatcctgaatatcgttataagcgccagcctg

SEQ ID NO: 869916 - DNA, 75 bp, synthetic construct
  source 1..75: mol_type = other DNA
ttgaggcacatcttaacggcgaaaaattttttgtcaaacccgatttttaaattcctcaactgtttgccgtttcta

SEQ ID NO: 869917 - DNA, 75 bp, synthetic construct
  source 1..75: mol_type = other DNA
aaggggttcttcgataacattgatcatgaccttttgatgaaggcggtttgtaaacatacccggtgcaagtggact

SEQ ID NO: 869918 - DNA, 75 bp, synthetic construct
  source 1..75: mol_type = other DNA
tggggtactacctgtatggtgcgcctgctaatggtaatactttgcaagggcaacttttcctgcgcccactgcgtg

SEQ ID NO: 869919 - DNA, 75 bp, synthetic construct
  source 1..75: mol_type = other DNA
gatgagcggatatggctgggtgattacggtagtccactgcgcgacagcgcgttgatgctctcattgctggaagag

SEQ ID NO: 869920 - DNA, 75 bp, synthetic construct
  source 1..75: mol_type = other DNA
tgctgaagcccttttggctgcgtaagaataataaaacttcagtgttgttaatcattattatcctcgccatgatcc

SEQ ID NO: 869921 - DNA, 75 bp, synthetic construct
  source 1..75: mol_type = other DNA
ttctgtcggctttttagccctgcgtttttggttacgctaccaggagcattcactggcatttgctcgctggacgcg

SEQ ID NO: 869922 - DNA, 75 bp, synthetic construct
  source 1..75: mol_type = other DNA
tcgtcgtatgcacagtcagcaggcgcgcattattgccttcccgctggcgttggtggtgctgtacatcatcattaa

SEQ ID NO: 869923 - DNA, 75 bp, synthetic construct
  source 1..75: mol_type = other DNA
ggacggtgaagaggtgatggttcgcgccaatcaactggaattcgctggcgatgaaatggaagaggggatgaacta

SEQ ID NO: 869924 - DNA, 75 bp, synthetic construct
  source 1..75: mol_type = other DNA
ttgacgctcgacggtatcggtatgggggagaacggcgctttgtggggcggcgagtgcctgcgggtgaactatcgc

SEQ ID NO: 869925 - DNA, 75 bp, synthetic construct
  source 1..75: mol_type = other DNA
gccgcgccgattgtgctggtggataaaaaatacgttcctgagctttgtgatgatatcgcccctgaccttaacgaa

SEQ ID NO: 869926 - DNA, 75 bp, synthetic construct
  source 1..75: mol_type = other DNA
gtggcccgcatcttgaatgggtaagtcatggtgaacatgcggaacaagaggcggcattacaggcggctatcgcac

SEQ ID NO: 869927 - DNA, 75 bp, synthetic construct
  source 1..75: mol_type = other DNA
gcggttatgttgccaacggtagaaaacctaccagaggctgtccgtcagttgctcaccacgcctgccgcgccgatt

SEQ ID NO: 869928 - DNA, 75 bp, synthetic construct
  source 1..75: mol_type = other DNA
gcggcccgcgcttcaccattattcgcgccatgccttacgatcgcccgtttaccgtgatggcggcgtttccgctgt

SEQ ID NO: 869929 - DNA, 75 bp, synthetic construct
  source 1..75: mol_type = other DNA
ctggcgcagtgcctgcgctttgtgccggagtggcagaattaccctgaaacggcaagtgtgcaacagcaaaactgg

SEQ ID NO: 869930 - DNA, 75 bp, synthetic construct
  source 1..75: mol_type = other DNA
ttcgaaaaaggaatacgcaaacttaacagagaaaggctatcagagtgcatctaacctcaaaaacaactcaaggaa

SEQ ID NO: 869931 - DNA, 75 bp, synthetic construct
  source 1..75: mol_type = other DNA
gaccgtattgatttagatattgccattgatgatttgacatcaaagggattaatacatacggggccgatggaaatc

SEQ ID NO: 869932 - DNA, 75 bp, synthetic construct
  source 1..75: mol_type = other DNA
aacgcgaacatgagttatctctggagcgggagcgtcagccggaaatccaggagcggacactggatggcccttcgc

SEQ ID NO: 869933 - DNA, 75 bp, synthetic construct
  source 1..75: mol_type = other DNA
ctgaaaaacaccttctgcctggtgcgcggtgaacaagcggtgttgagtcagcatctgggcgatttaagtgacgat

SEQ ID NO: 869934 - DNA, 75 bp, synthetic construct
  source 1..75: mol_type = other DNA
gcagggcgtcggttttcgtccgtttgtctggcagctggcacagcaattaaatcttcacggcgatgtctgtaatga

SEQ ID NO: 869935 - DNA, 75 bp, synthetic construct
  source 1..75: mol_type = other DNA
gtttttcacggtataagcgatagtgctattgatgtagggaaaaagattcttactggcttgttaatgcaggcttca

SEQ ID NO: 869936 - DNA, 75 bp, synthetic construct
  source 1..75: mol_type = other DNA
gatgagcggatatggctgggtgattacggtagtccactgcgcgacaacgcgttaatgctctccttgctggaagaa

SEQ ID NO: 869937 - DNA, 75 bp, synthetic construct
  source 1..75: mol_type = other DNA
aaataatcgtggatgggtcgcgagttctgattaatattaggtatctttcgactaattatggcaaaagtgatttca

SEQ ID NO: 869938 - DNA, 75 bp, synthetic construct
  source 1..75: mol_type = other DNA
atgaaaaatattcacagcgtaactgataaagctttgtatgatgctttaaaccaaaagcaaattaccataaatgaa

SEQ ID NO: 869939 - DNA, 75 bp, synthetic construct
  source 1..75: mol_type = other DNA
tatgtgcaaaggatctttataaaggtgggcattgggcgacagctaaagccatcttagatgattatcctattgatt

SEQ ID NO: 869940 - DNA, 75 bp, synthetic construct
  source 1..75: mol_type = other DNA
taaagccagcactaaaaatggcgagaagcctaaacaggtgaatgtgctggtgtctgccgttgatagtggtgtgct

SEQ ID NO: 869941 - DNA, 75 bp, synthetic construct
  source 1..75: mol_type = other DNA
tactactggaactggtcagaagatgaaggctggcaatcacagtttgatcaaaaagatctgatcgaaaatgaacaa

SEQ ID NO: 869942 - DNA, 75 bp, synthetic construct
  source 1..75: mol_type = other DNA
tgcgcaaggcgtgaaaaaagccgtgtcgggcttgcaggtgcgcctgattcgcgaacgccgcgattactactggaa

SEQ ID NO: 869943 - DNA, 75 bp, synthetic construct
  source 1..75: mol_type = other DNA
atgggttgactcacacgatgaaggagagtcggtaaacatagtcctggcaatggaattacattccgtcggaaaaga

SEQ ID NO: 869944 - DNA, 75 bp, synthetic construct
  source 1..75: mol_type = other DNA
gacggcgagcatcatcgttacgttgatacggggtttccgtgcagaaacgatcgggacttcaggccatttccggta

SEQ ID NO: 869945 - DNA, 75 bp, synthetic construct
  source 1..75: mol_type = other DNA
acatatacggaaatgtgggcttacaacctggcctgcgcctttagtgaggcaggggtaacattgcaataccatcgt

SEQ ID NO: 869946 - DNA, 75 bp, synthetic construct
  source 1..75: mol_type = other DNA
cgtgactcgggaaattcatttgaggaaaaacgttttcggactgagtttatggccctgagagaggctaaaccttaa

SEQ ID NO: 869947 - DNA, 75 bp, synthetic construct
  source 1..75: mol_type = other DNA
tcaaagctcactcatgattattatttgcatcagaaaatttctggaatatttggaggttttttaaggcgagagaaa

SEQ ID NO: 869948 - DNA, 75 bp, synthetic construct
  source 1..75: mol_type = other DNA
atggctgccgatagtaaacagcatgaagatacatattatcagcaagctgcaaagaagaacgccatccgcattccg

SEQ ID NO: 869949 - DNA, 75 bp, synthetic construct
  source 1..75: mol_type = other DNA
gcagtggaaaatgggtgtccgtccggcatttccggcacaaaccgtcaattacggtacggcgttgcagcctggtga

SEQ ID NO: 869950 - DNA, 75 bp, synthetic construct
  source 1..75: mol_type = other DNA
aattctctgtagtgggttattacctctatggtgcgcctgcgaacggcaacacattacaagggcagcttttcctgc

SEQ ID NO: 869951 - DNA, 75 bp, synthetic construct
  source 1..75: mol_type = other DNA
gcgcgccgggctacagcaaacagttttttatgtttggtccacgcgatctttatcgccctggcgaaacagtaatcc

SEQ ID NO: 869952 - DNA, 75 bp, synthetic construct
  source 1..75: mol_type = other DNA
cgctgggcgatatcaaaccacttcagcaagcgggagtttatctggcggtaatgaatcaggctggacattatgaat

SEQ ID NO: 869953 - DNA, 75 bp, synthetic construct
  source 1..75: mol_type = other DNA
cgctgaaactggataaagccagttatcgccctggcgataccattaagttgcatattgccgcgccaacggcgggta

SEQ ID NO: 869954 - DNA, 75 bp, synthetic construct
  source 1..75: mol_type = other DNA
tgcattgaccggctatggtgatggcgaagtgcaggcgaccatcagtggtctggatttaccgggtgaaaccgttgc

SEQ ID NO: 869955 - DNA, 75 bp, synthetic construct
  source 1..75: mol_type = other DNA
tactggctgacggcttatgtgatggatttcctggttcgcgcaggtgagcagggttacagcgtgccgacagaagcc

SEQ ID NO: 869956 - DNA, 75 bp, synthetic construct
  source 1..75: mol_type = other DNA
agcgtcggttttgccagccgtggttcgctgctgcctggcaaagtcgttgaagggctgccggtaatggcgctcaac

SEQ ID NO: 869957 - DNA, 75 bp, synthetic construct
  source 1..75: mol_type = other DNA
caggaaagtaacgcgttgttcctggctgcccgtacgattcaggatttaccgggcaaatggcaggcgcaaacgtct

SEQ ID NO: 869958 - DNA, 75 bp, synthetic construct
  source 1..75: mol_type = other DNA
tgctaatggtaatactttgcaagggcaacttttcctgcgcccactgcgtgaagctgtgtcagccttacctggttt

SEQ ID NO: 869959 - DNA, 75 bp, synthetic construct
  source 1..75: mol_type = other DNA
ctttcgcagcaggcgtttggtgaacgctggctatcgacgcaggaaagtaacgcgttgttcctggctgcccgtacg

SEQ ID NO: 869960 - DNA, 75 bp, synthetic construct
  source 1..75: mol_type = other DNA
accaatgcagcccagctacaggcgttgggcatcaaaggcgacagtgatgataaacgccgtgcggcagttgatatt

SEQ ID NO: 869961 - DNA, 75 bp, synthetic construct
  source 1..75: mol_type = other DNA
cagtggaaggaaacgcattccccattgcaggttattctccaggggagtttgctggaatcgggtggtcgcccggtg

SEQ ID NO: 869962 - DNA, 75 bp, synthetic construct
  source 1..75: mol_type = other DNA
gtacggtctgggtttccggggatggaaaagcggtagaaatcatcgatcagactaagttgccttttaagttcgagg

SEQ ID NO: 869963 - DNA, 75 bp, synthetic construct
  source 1..75: mol_type = other DNA
aagctggatggtcgacgactctttcccgagagcattacgcgagtacaacgaaatggttgatgactataatagcct

SEQ ID NO: 869964 - DNA, 75 bp, synthetic construct
  source 1..75: mol_type = other DNA
atgacgctttatagcgggatgaacaatacaagcggcaaagtcattactgatattgaccatctgcgccagtcggtg

SEQ ID NO: 869965 - DNA, 75 bp, synthetic construct
  source 1..75: mol_type = other DNA
tttatgcaggattttgaggcgctcacgggagataaagttccggtcgcttcgctactgcctgagattcccggctct

SEQ ID NO: 869966 - DNA, 75 bp, synthetic construct
  source 1..75: mol_type = other DNA
gggaagcattgctgtctttagaacacgctttccagtttggcccagattccccttcatttatgcaggatttcgagg

SEQ ID NO: 869967 - DNA, 75 bp, synthetic construct
  source 1..75: mol_type = other DNA
ggagaaaacggaggcggtattccgtctgttccggcccgtacatccggttgttgccgtatcggcccgcaccggctg

SEQ ID NO: 869968 - DNA, 75 bp, synthetic construct
  source 1..75: mol_type = other DNA
gacgatgttgagcgcgctggtgcaagcgtgaagccattagctgaagcaatttacctgaatggtcgtgttcgtttt

SEQ ID NO: 869969 - DNA, 75 bp, synthetic construct
  source 1..75: mol_type = other DNA
agccaggagttgaatatcctgcgcgggattctggcttctattgagcagcagaataaaggtaacaaggccgaataa

SEQ ID NO: 869970 - DNA, 75 bp, synthetic construct
  source 1..75: mol_type = other DNA
agagttgcagaaatgccattatcatgtcgcgattgcggctaacccggaatacagctcgctgaacctggcgatggc

SEQ ID NO: 869971 - DNA, 75 bp, synthetic construct
  source 1..75: mol_type = other DNA
tattgaccatctgcgtcagtcggtgcgggacattctactgacaccgcagggtagccgcattgcccgtcgtgaata

SEQ ID NO: 869972 - DNA, 75 bp, synthetic construct
  source 1..75: mol_type = other DNA
cgatggcaaaccagtacgaaacgctggcgaatgcccgtcaaaaagggatcgaaaaatacctgtggaacgatcaac

SEQ ID NO: 869973 - DNA, 75 bp, synthetic construct
  source 1..75: mol_type = other DNA
aaaaatgggattctctgttaccgctgccggaaccttatgtcgtgccgggcggacgttttcgcgaggtatattact

SEQ ID NO: 869974 - DNA, 75 bp, synthetic construct
  source 1..75: mol_type = other DNA
ccagtcgatctggcggatgaaaatgttgtcgatatcgctgcgccgcgggcagatctccagggggcggcatggcag

SEQ ID NO: 869975 - DNA, 75 bp, synthetic construct
  source 1..75: mol_type = other DNA
ttttacaagccacaatttaaaaaagagtatgaaatgataaatcataatgatggatggtattatattttagccaga

SEQ ID NO: 869976 - DNA, 75 bp, synthetic construct
  source 1..75: mol_type = other DNA
ggatgtacgggcatcgggtatcagcatcatgtttctcacagagtgaatttataaaaaaacatattattgaaattt

SEQ ID NO: 869977 - DNA, 75 bp, synthetic construct
  source 1..75: mol_type = other DNA
ttttctggccgtgtttttattattcataccaatagtcatagagttttccgtactcaaaaaacatttagcgttgaa

SEQ ID NO: 869978 - DNA, 75 bp, synthetic construct
  source 1..75: mol_type = other DNA
aagcagacagcagcctggaagcgttatatgaccgtatgctgattcgtctgtggttagataaagtgcaggataaag

SEQ ID NO: 869979 - DNA, 75 bp, synthetic construct
  source 1..75: mol_type = other DNA
ccgacctcaacgccgccagaagactgaaagaaatctggatggcaaagaaatctcagttgggattgactcaggaac

SEQ ID NO: 869980 - DNA, 75 bp, synthetic construct
  source 1..75: mol_type = other DNA
aaaatcaagctggttcttgagctgacggaacgtaaccctattccggtaacgccagaagccagagcgatatttgac

SEQ ID NO: 869981 - DNA, 75 bp, synthetic construct
  source 1..75: mol_type = other DNA
agttttactccgttaaaccacaaccgggcggtttaatctggcgcgactggttaggccttatcgaaacgggtaaat

SEQ ID NO: 869982 - DNA, 75 bp, synthetic construct
  source 1..75: mol_type = other DNA
gcgcagctctactctgctgactggtgcgcagggtgacacttcaaccgcaaacaccagcggtaaaacgctgcttgg

SEQ ID NO: 869983 - DNA, 75 bp, synthetic construct
  source 1..75: mol_type = other DNA
gcgctcctgagcctgatgacgaccaaaaattacggtgcgaattatgccatgtggcagcatcctttaacgccttac

SEQ ID NO: 869984 - DNA, 75 bp, synthetic construct
  source 1..75: mol_type = other DNA
gcggctggctgcgcaaacggcttcacggattctgagtctgttacggagtgcattgaaagaagcatggttctccga

SEQ ID NO: 869985 - DNA, 75 bp, synthetic construct
  source 1..75: mol_type = other DNA
gtggcagcatcccttaacgccttaccgtgtaccccttaaagagggcggcgagttttactcggtcaaaccacaacc

SEQ ID NO: 869986 - DNA, 75 bp, synthetic construct
  source 1..75: mol_type = other DNA
aagccgatttacctttaccaaaaacctttgatgacctggtctttccttggcttgcaccgacgcgtaccagcgaac

SEQ ID NO: 869987 - DNA, 75 bp, synthetic construct
  source 1..75: mol_type = other DNA
caatcccggatgacaaaggacattgccctgaacgcactgctgatggttgtatggcggcgtaatcccgaaaaacag

SEQ ID NO: 869988 - DNA, 75 bp, synthetic construct
  source 1..75: mol_type = other DNA
atctccaataaggggtgggtctcaaaaagagctaaaaatcacccagatttggggttttgttataataaggcaagt

SEQ ID NO: 869989 - DNA, 75 bp, synthetic construct
  source 1..75: mol_type = other DNA
tttccattgatatccagcttcatgccacgacgtcgatagaagacctgttgcgattattaaaaggcatggcagggg

SEQ ID NO: 869990 - DNA, 75 bp, synthetic construct
  source 1..75: mol_type = other DNA
tgatcctgaccgcaattgcttgtggtgctattggcatggaaaggcaaatgcgcggcaaaggagccgggttacgca

SEQ ID NO: 869991 - DNA, 75 bp, synthetic construct
  source 1..75: mol_type = other DNA
ggtgatcataccaatgggatcgcctggcgtttaatctctcagggcgagatgtatcttactgacaatattattatg

SEQ ID NO: 869992 - DNA, 75 bp, synthetic construct
  source 1..75: mol_type = other DNA
tctgccggtttgacaacagcaattggctcgaccgtgggaagtggtagtgccagttcttctgctggtggcggtagc

SEQ ID NO: 869993 - DNA, 75 bp, synthetic construct
  source 1..75: mol_type = other DNA
aaccgcgcgacatggaaaactattgtgactggaaattagtggcaaaatacacggcagattataaaggggttttct

SEQ ID NO: 869994 - DNA, 75 bp, synthetic construct
  source 1..75: mol_type = other DNA
tgccttccaggttcaggatgacatcctggatgtggtgggagatactgcaacgttgggaaaacgccagggtgccga

SEQ ID NO: 869995 - DNA, 75 bp, synthetic construct
  source 1..75: mol_type = other DNA
cagatcgcgacagaattgcgatgatttctgaactggcaaatgccagcggtattgccggaatgtgcggcggtcagg

SEQ ID NO: 869996 - DNA, 75 bp, synthetic construct
  source 1..75: mol_type = other DNA
atgaacaggcgctggaggatttgcaggacattgccgacggattcttgttgcataaccgcgatattgtgcagcgga

SEQ ID NO: 869997 - DNA, 75 bp, synthetic construct
  source 1..75: mol_type = other DNA
acgggtgttgggtttatcggtgcgggtaacattcttgttcgtaaccaaaatattgtgggtctgacgacggcagcc

SEQ ID NO: 869998 - DNA, 75 bp, synthetic construct
  source 1..75: mol_type = other DNA
aagatttaaccgacagcgagcgtgaggaaattaccgcggcgctgtggaaagaaatgcgcgagatttattacgggc

SEQ ID NO: 869999 - DNA, 75 bp, synthetic construct
  source 1..75: mol_type = other DNA
gtggatagcgatgcagatcctgtgtaccccaagatgcgctatttttgcggttcgtgagggtcagttgactcgctg

SEQ ID NO: 870000 - DNA, 75 bp, synthetic construct
  source 1..75: mol_type = other DNA
ggatttaacgcagattggcgatgatttctgggatgccttcaatggcctcgatcgtgaggtgttgattcagcagac

SEQ ID NO: 870001 - DNA, 75 bp, synthetic construct
  source 1..75: mol_type = other DNA
ctgcgtgacagcggacaacagtgcggagtaaacagagtctggagactgatgaaacgtgtcggaataaaggctcag

SEQ ID NO: 870002 - DNA, 75 bp, synthetic construct
  source 1..75: mol_type = other DNA
tggttatcgcaaaatccatctggatctgcgtgacagcggacaacagtgcggagtaaacagagtctggagactgat

SEQ ID NO: 870003 - DNA, 75 bp, synthetic construct
  source 1..75: mol_type = other DNA
atgcgcgtctatgaggccgaaacgctgcaacgcggcttgctggaagcggctacccgtaagccagatttgattatt

SEQ ID NO: 870004 - DNA, 75 bp, synthetic construct
  source 1..75: mol_type = other DNA
ctgcgagataccggacaacagtgcggagttaatcgtgtctggcgactgatgaagcgtgccgggataagggctcag

SEQ ID NO: 870005 - DNA, 75 bp, synthetic construct
  source 1..75: mol_type = other DNA
acaggtgctggttcattcggatcagggcagtcagtacacaagccatgagtggcagtcgttcctgaaatcacacgg

SEQ ID NO: 870006 - DNA, 75 bp, synthetic construct
  source 1..75: mol_type = other DNA
gtacttcgcaaagctgtccgactgaggtacgcctttatccgtgacaactcctgttgctggcctgttcgcctgctc

SEQ ID NO: 870007 - DNA, 75 bp, synthetic construct
  source 1..75: mol_type = other DNA
actccaagcgccccgtcgccatccgctaccactcgatgagcagcggcaagtccgaacgggtcattgtgccctttg

SEQ ID NO: 870008 - DNA, 75 bp, synthetic construct
  source 1..75: mol_type = other DNA
gtgcccgtagcgagcgtgatgtccgcggtttcatgaaaactggtcttgctgctgaacaccaccgcgttggtcatt

SEQ ID NO: 870009 - DNA, 75 bp, synthetic construct
  source 1..75: mol_type = other DNA
gcaatccattattggtgagcaatatcatcgcggcgacatagtcgagcgcctgctcaacgatcaggacgcgctgct

SEQ ID NO: 870010 - DNA, 75 bp, synthetic construct
  source 1..75: mol_type = other DNA
aaaagatggaccaatgagcagccaaggattgatatctatattgatcagataatgactgtctcaggggtggcaaat

SEQ ID NO: 870011 - DNA, 75 bp, synthetic construct
  source 1..75: mol_type = other DNA
aagaatggaaaaattccgcaatgatcagtaatactgaagaacgatttcttattgcagatctcctaaaagcagcaa

SEQ ID NO: 870012 - DNA, 75 bp, synthetic construct
  source 1..75: mol_type = other DNA
aatcaatcacaagatacgttgcaccttcgttgccgtgagcttaagaatcatagtgttctggtcgagactactata

SEQ ID NO: 870013 - DNA, 75 bp, synthetic construct
  source 1..75: mol_type = other DNA
tctccttcctgcattgcgaccgtgcgctcgtcgttaagaaccattgccacacaaccagagttgcggcaaaaattg

SEQ ID NO: 870014 - DNA, 75 bp, synthetic construct
  source 1..75: mol_type = other DNA
aataattatctcggtttaaccttcaataacgaggccatcgccgaaggtcaggctgcgttagcggcacaaggcacc

SEQ ID NO: 870015 - DNA, 75 bp, synthetic construct
  source 1..75: mol_type = other DNA
attgccattttgattttccgccgttttgcggtgatgaaactgcgagcctgcaacgcgcggcacaagcgggtgtcg

SEQ ID NO: 870016 - DNA, 75 bp, synthetic construct
  source 1..75: mol_type = other DNA
atagatgaacgaaaacgtgcagctgctgttagcgaaagtacacctgctggagctacggtaaagaaagaaagccaa

SEQ ID NO: 870017 - DNA, 75 bp, synthetic construct
  source 1..75: mol_type = other DNA
gcaccttcagtaaaagtctggcctcgattggcggttttgctgtcggttcggaagcgatggaagtgctgcgctacg

SEQ ID NO: 870018 - DNA, 75 bp, synthetic construct
  source 1..75: mol_type = other DNA
gttaggtgcgacgggacgcggattggttgaggctgttggggttgaggatgacgttgatatcatcgtcggaacttt

SEQ ID NO: 870019 - DNA, 75 bp, synthetic construct
  source 1..75: mol_type = other DNA
gctgcgcgggtgtttgccgtactttgcgagttacgcccggaaccagaagatgagattgccgaagtgttgcttaat

SEQ ID NO: 870020 - DNA, 75 bp, synthetic construct
  source 1..75: mol_type = other DNA
tggcgcattcaccctgttctatatgtcgatcaacatcggctcgttgatagcgttatcgctggcccccgtgatcgc

SEQ ID NO: 870021 - DNA, 75 bp, synthetic construct
  source 1..75: mol_type = other DNA
ctgtcgcggaatggtgaaagatattggttctgaacccgacttctgcccgatgagcttcagtaaactgttgtacgt

SEQ ID NO: 870022 - DNA, 75 bp, synthetic construct
  source 1..75: mol_type = other DNA
gatctctttggcgacgatccacaatttgatcgccaacagcggttgctcgacgaacaacttaagctggcgaaacgc

SEQ ID NO: 870023 - DNA, 75 bp, synthetic construct
  source 1..75: mol_type = other DNA
acggtttgtacagctgggctacaaaattggcgtaggcgggactatcacctatccacgcgccagtaaaacccgcga

SEQ ID NO: 870024 - DNA, 75 bp, synthetic construct
  source 1..75: mol_type = other DNA
gcgagttacgcccggaaccagaagatgagattgccgaagtgttgcttaataatacgtatgcgttgtttaacgtgc

SEQ ID NO: 870025 - DNA, 75 bp, synthetic construct
  source 1..75: mol_type = other DNA
agagaaaaacctgccggtgccgaagtgctggaaagatctcaccaaaccggaatataaaggcgaaattcaaattgc

SEQ ID NO: 870026 - DNA, 75 bp, synthetic construct
  source 1..75: mol_type = other DNA
cccggcgcagaacgacagcgtgacggcgcgggattacctctggaacgcagacggtgaagtcggtggcatcaatga

SEQ ID NO: 870027 - DNA, 75 bp, synthetic construct
  source 1..75: mol_type = other DNA
acagccgtacacgccggtggcggtcatcacggggcgcggagaaagccagaaaatctggtattaccacacggacct

SEQ ID NO: 870028 - DNA, 75 bp, synthetic construct
  source 1..75: mol_type = other DNA
ccgtagttgccattcttttgatgccatggatattgcctcgcaaagtgaatctgcgcagaaaatgcataacaaagc

SEQ ID NO: 870029 - DNA, 75 bp, synthetic construct
  source 1..75: mol_type = other DNA
gcggtggtctgggggcatctgctgtgggtaatgccgtggatgctgtttatcctgcaacccgcctggcagcgcatt

SEQ ID NO: 870030 - DNA, 75 bp, synthetic construct
  source 1..75: mol_type = other DNA
ttcggtggatctgctctgggtgaacggcgaaaacttccgcaccttaaaagaggccaatttattacaaacgggctg

SEQ ID NO: 870031 - DNA, 75 bp, synthetic construct
  source 1..75: mol_type = other DNA
ggctggaatgggggccacagcgtcgccagttgtggctatggttgcccattttattacccgctctgccgctggtgg

SEQ ID NO: 870032 - DNA, 75 bp, synthetic construct
  source 1..75: mol_type = other DNA
actggacgttggctatggaaataccctcgacccgagccgcaaaagtgtgaaaaaaagccagttgtgtcggaataa

SEQ ID NO: 870033 - DNA, 75 bp, synthetic construct
  source 1..75: mol_type = other DNA
accttccacaaaatgtacccggattcaccgtacgaatacgtcacgttctgccatacctgccgtcgttttgattta

SEQ ID NO: 870034 - DNA, 75 bp, synthetic construct
  source 1..75: mol_type = other DNA
agcgaagaacgaaagacagaagaccggggagccacagagcaaaactgtgataccagaaaagacgcaggtacaacg

SEQ ID NO: 870035 - DNA, 75 bp, synthetic construct
  source 1..75: mol_type = other DNA
cgtcattacaggggacgcttaccgatcccgcattagcggaccgtaaaccgctatggcaatacgctgaaaaactcg

SEQ ID NO: 870036 - DNA, 75 bp, synthetic construct
  source 1..75: mol_type = other DNA
catgagcgaaaacgaactggacattttgacgcggtacttccagtacaacgccaaagatattaccgagaaacagtg

SEQ ID NO: 870037 - DNA, 75 bp, synthetic construct
  source 1..75: mol_type = other DNA
agctggaaagtcaggccgctacttcagtgactaatggcgcacatatttatcctttcaaaacttctcgcataggcg

SEQ ID NO: 870038 - DNA, 75 bp, synthetic construct
  source 1..75: mol_type = other DNA
ctgtcgaggaatggtggaatacattggttctgaacccgatttccggccaatgagcttcagcaaactactgtacgt

SEQ ID NO: 870039 - DNA, 75 bp, synthetic construct
  source 1..75: mol_type = other DNA
gtgcattagcgttaagtgtcgggttaactctctcggcgccgtttcaggccatcgcatcgattcccgctcaggttg

SEQ ID NO: 870040 - DNA, 75 bp, synthetic construct
  source 1..75: mol_type = other DNA
aaaaagacgatgtgatcattggcgtcaaccgcgatcgggtgaactcgattgctgaaatgcgtaaagtgctggcgg

SEQ ID NO: 870041 - DNA, 75 bp, synthetic construct
  source 1..75: mol_type = other DNA
tcgactttggtgaaatcaaacgcggcctgttaggcattaaaggcaccgaaatgagtgccgatatcgccaaagcat

SEQ ID NO: 870042 - DNA, 75 bp, synthetic construct
  source 1..75: mol_type = other DNA
attcatcttttttcctttttaagtcaattggttatgaatataaagatgctgtccgtaccttctgaccggggtcgc

SEQ ID NO: 870043 - DNA, 75 bp, synthetic construct
  source 1..75: mol_type = other DNA
aatcccggaagaattcaaaaagttttttggtgatgatttaccggatcaaccagcacaacccttcgaaggtttagg

SEQ ID NO: 870044 - DNA, 75 bp, synthetic construct
  source 1..75: mol_type = other DNA
aactctctcggcgtcatttcaggccgttgcgtcgattccaggccaggttgccgatcaggcccccctccccagtct

SEQ ID NO: 870045 - DNA, 75 bp, synthetic construct
  source 1..75: mol_type = other DNA
gacgcaatgtgtgagaaaacgtgggaatactttacaccacgttcccagtatcggctttcaatgcttttccctact

SEQ ID NO: 870046 - DNA, 75 bp, synthetic construct
  source 1..75: mol_type = other DNA
aatgctgatgcgaacgatgggagcagacgcaatgtgtgagaaaacgtgggaatactttacacctcgttcccagta

SEQ ID NO: 870047 - DNA, 75 bp, synthetic construct
  source 1..75: mol_type = other DNA
aaagactgcctaagttaatggcaaaatggcagcaggaaattaaagttgaagccagttatgttggcatcaagcgaa

SEQ ID NO: 870048 - DNA, 75 bp, synthetic construct
  source 1..75: mol_type = other DNA
aactttattcagaccgatgcctctattaaccgtggtaactccggcggtgcgctgttaaaccttaacggtgaatta

SEQ ID NO: 870049 - DNA, 75 bp, synthetic construct
  source 1..75: mol_type = other DNA
tcacaattattttaatattggtattaattgccttgggctgtgctgcttattttggagatagtgagggttatttta

SEQ ID NO: 870050 - DNA, 75 bp, synthetic construct
  source 1..75: mol_type = other DNA
gctagtgttgcaatgattaaaatacttgaaaatataaaaagatttgataaggaatctcatgataaaaaactttat

SEQ ID NO: 870051 - DNA, 75 bp, synthetic construct
  source 1..75: mol_type = other DNA
aagcgatgcttaccgccctcacccatcttagccgttcgccgctggagcagaatatcattcagccgctggtgttaa

SEQ ID NO: 870052 - DNA, 75 bp, synthetic construct
  source 1..75: mol_type = other DNA
gtgagaatgacaccattaatctggtgaaagatgagcgaatcatcgtcacgccaattaacgatatctattacgccg

SEQ ID NO: 870053 - DNA, 75 bp, synthetic construct
  source 1..75: mol_type = other DNA
cgcgtgagaatgacaccattaatctggtgaaagatgagcgaatcatcgtcacgcccattaacgatatctattacg

SEQ ID NO: 870054 - DNA, 75 bp, synthetic construct
  source 1..75: mol_type = other DNA
gttgatttccccgtgtgaaggtacgggctacgaaataggcggcgtcagcattctgaaaggtgcgcgcaacctcga

SEQ ID NO: 870055 - DNA, 75 bp, synthetic construct
  source 1..75: mol_type = other DNA
tggtgttttacattctctacgcccagatgccaacatcgctgaacttctttgccatcaacaacgtgcatcatgaaa

SEQ ID NO: 870056 - DNA, 75 bp, synthetic construct
  source 1..75: mol_type = other DNA
ttatcgcactgggaacaattgccgtcggtaacggcctgtttaaagcaaacccggcaagcctgctttcgaagtgct

SEQ ID NO: 870057 - DNA, 75 bp, synthetic construct
  source 1..75: mol_type = other DNA
tatcaggagtcacgcattaccgggatgctgcaaaaactggaagcagcctggcaacaacagcagaccagcagtacg

SEQ ID NO: 870058 - DNA, 75 bp, synthetic construct
  source 1..75: mol_type = other DNA
cttttacccctggatcaaggacgcggtcactcaacccggtatgcccaccagcgatctcaatgaagaatttacctt

SEQ ID NO: 870059 - DNA, 75 bp, synthetic construct
  source 1..75: mol_type = other DNA
tatctctgctctcattgccgtaaaacatggcaactacagttcacttacaccgcctctcagcccggtacgcaccag

SEQ ID NO: 870060 - DNA, 75 bp, synthetic construct
  source 1..75: mol_type = other DNA
cctgcaacgcggcgaaggtgaagcgatgcttaccgccctcacccatcttagccgttcgccgctggagcagaatat

SEQ ID NO: 870061 - DNA, 75 bp, synthetic construct
  source 1..75: mol_type = other DNA
tctgcgatgccaggtgaaagcaaagagcttcaactggatttggggctcggggacagccgtagctttcctattttc

SEQ ID NO: 870062 - DNA, 75 bp, synthetic construct
  source 1..75: mol_type = other DNA
ctcctctggctgttctgtatgccagccagctgcgtaaaaaggatggttcaatcgctacagggcttcaggacgcag

SEQ ID NO: 870063 - DNA, 75 bp, synthetic construct
  source 1..75: mol_type = other DNA
taagtattagctacgaaggaaaaccgatcagcaaaaacgtaacagtatatgggctggagaacgtccgtatacagc

SEQ ID NO: 870064 - DNA, 75 bp, synthetic construct
  source 1..75: mol_type = other DNA
tttatgacatttaacagcagtctgtatgaccaatatgcagaggctacgttattgagttcatcattcccagaagat

SEQ ID NO: 870065 - DNA, 75 bp, synthetic construct
  source 1..75: mol_type = other DNA
ttctaacgatgagctaaacggcattttgaaagcatttgagcagatggcgagcaagggcaagattcaggctgaaga

SEQ ID NO: 870066 - DNA, 75 bp, synthetic construct
  source 1..75: mol_type = other DNA
tagaatttttagttcaatgggtgaattgtttaacaatgccacaatgaatattgcaagattcaatcatccagaatt

SEQ ID NO: 870067 - DNA, 75 bp, synthetic construct
  source 1..75: mol_type = other DNA
accagcattaacaatacaagcgacgcatttaataatcttgcaagcaatgcaattaagttatctggtgcattttac

SEQ ID NO: 870068 - DNA, 75 bp, synthetic construct
  source 1..75: mol_type = other DNA
cagtcagagaagcaattgctaaagccagaggtcatacatccaccagcattaacaatacaagcgacgcatttaata

SEQ ID NO: 870069 - DNA, 75 bp, synthetic construct
  source 1..75: mol_type = other DNA
ttgcagaaatacatcaaatctcagttttacgggctatctgctaaagctgggtcaatggattcttcaaaattcaat

SEQ ID NO: 870070 - DNA, 75 bp, synthetic construct
  source 1..75: mol_type = other DNA
atctatgggtattcagggttctgaagagctttttcgaaatatggttggctattctcgtttaatgggtcgaagtga

SEQ ID NO: 870071 - DNA, 75 bp, synthetic construct
  source 1..75: mol_type = other DNA
ttttgattgagctaagttttagctctcagaaagttttaaaaggcttggaaaaagccgagaaacaaacgatgcagg

SEQ ID NO: 870072 - DNA, 75 bp, synthetic construct
  source 1..75: mol_type = other DNA
gaatatgctattagctggtagtgctatctatgcaggttatgagagattagcttctacgcctgaacgaatggaagc

SEQ ID NO: 870073 - DNA, 75 bp, synthetic construct
  source 1..75: mol_type = other DNA
atgaactctttagccgctgttttatgggctatggttcagggcaaatcaaaagatgttccacagttttcacctgaa

SEQ ID NO: 870074 - DNA, 75 bp, synthetic construct
  source 1..75: mol_type = other DNA
acgattagctaccgagtacagggattctttgacagagtgacccttgcttacagagaattagatgacactcaaaaa

SEQ ID NO: 870075 - DNA, 75 bp, synthetic construct
  source 1..75: mol_type = other DNA
gctaagcaccgatgaaattaacgggattttaaaagcttttgagcagatggcgagcaagggcaagattcaagctga

SEQ ID NO: 870076 - DNA, 75 bp, synthetic construct
  source 1..75: mol_type = other DNA
cagagagcaagaaacacaaaagcatttcagtttgccaccagatttaatgacactgttaatcctccaaaacaatca

SEQ ID NO: 870077 - DNA, 75 bp, synthetic construct
  source 1..75: mol_type = other DNA
aaagatgcgcacaaaacagcgccaaaacgacagaagggcgtttatgaggttgttgatgttggctacgaccattat

SEQ ID NO: 870078 - DNA, 75 bp, synthetic construct
  source 1..75: mol_type = other DNA
agctccagatgagaaatttctcccaaataaaacagtcaatgattcaaagtgaacagaaagtgaaaattggtattc

SEQ ID NO: 870079 - DNA, 75 bp, synthetic construct
  source 1..75: mol_type = other DNA
gggcaaaaggaggtgaaaatccctgcacttgataagaacggggtacagcatggctggaagacagcacacaggaat

SEQ ID NO: 870080 - DNA, 75 bp, synthetic construct
  source 1..75: mol_type = other DNA
tctcgatattcagattgtgctaaaagggcaggaaggcatgaccttcagcacacaacctgcgggcacgccggatac

SEQ ID NO: 870081 - DNA, 75 bp, synthetic construct
  source 1..75: mol_type = other DNA
aaaaatgctgaaaaggtccagtgtcacacctggtcggcaattgcggaaaagatgcttgagacgtttgtcacgcag

SEQ ID NO: 870082 - DNA, 75 bp, synthetic construct
  source 1..75: mol_type = other DNA
gaggtcgttgtcaaaatatcaggaggtgcgattacccggcagggagttcgaaacagtattgactatatgagccgt

SEQ ID NO: 870083 - DNA, 75 bp, synthetic construct
  source 1..75: mol_type = other DNA
atagggtaaaacgtaagtcttccgaaaatggtcgtaagtctgcatttgctcataaagttaaaaacggtggtgaaa

SEQ ID NO: 870084 - DNA, 75 bp, synthetic construct
  source 1..75: mol_type = other DNA
agcatttagtctcggtaagcgggatcgacgacgagcgagggtggcgacgcggcagtcattggtgatcatgacgtt

SEQ ID NO: 870085 - DNA, 75 bp, synthetic construct
  source 1..75: mol_type = other DNA
cgcctcatgggtgctacccgctggatttaagggggctcgtgacgcccgttacgctatgtgggtttctatgttgag

SEQ ID NO: 870086 - DNA, 75 bp, synthetic construct
  source 1..75: mol_type = other DNA
agccagcaaagagctggtactgaacagccctgatatgctgctgaagcaacaacagcgaatggcgcagtttacgca

SEQ ID NO: 870087 - DNA, 75 bp, synthetic construct
  source 1..75: mol_type = other DNA
aacgcgctgacatcaggaaaaaagatttacgggaaattcgtacaggtttttgtgaagagttgaagttaaaaggtt

SEQ ID NO: 870088 - DNA, 75 bp, synthetic construct
  source 1..75: mol_type = other DNA
gaggttgttgtcaaaatatctggaggtgctgttactcgtcaggggattcggaacagtattgattatatgagccgt

SEQ ID NO: 870089 - DNA, 75 bp, synthetic construct
  source 1..75: mol_type = other DNA
cacaggcacaactagggaacttgaaaaactcttggaataccacgcttgatagtatcttcagaggttctgaaaatg

SEQ ID NO: 870090 - DNA, 75 bp, synthetic construct
  source 1..75: mol_type = other DNA
gaacgtattgatgtcgatgaaggtgccagcggcgcgatggtcgggtttaacgtccatttccattctctggcaagc

SEQ ID NO: 870091 - DNA, 75 bp, synthetic construct
  source 1..75: mol_type = other DNA
ccggctggtggcactgggtagttgttaatttacccgctgatacccgcgtattaccgcaagggtttggctctggtc

SEQ ID NO: 870092 - DNA, 75 bp, synthetic construct
  source 1..75: mol_type = other DNA
ggaaaaaagaggttaaaaaactcaatgccgctagtgtctcctcaaatcggttccccatccctaagccaccaacag

SEQ ID NO: 870093 - DNA, 75 bp, synthetic construct
  source 1..75: mol_type = other DNA
gtgcacctgtccggtggtcagcaacagcgtgtttctatcgcgcgggcgctagcgatggaaccggaagttttactg

SEQ ID NO: 870094 - DNA, 75 bp, synthetic construct
  source 1..75: mol_type = other DNA
accgggtacgatggcgcagcaccgccgaaaggcgaaacccatcgctacatttttaccgttcacgcgctggatgta

SEQ ID NO: 870095 - DNA, 75 bp, synthetic construct
  source 1..75: mol_type = other DNA
gatggcgataatatttcaccgcatctggcgtgggatgatgttcctgcgggaacgaaaagttttgttgtcacctgc

SEQ ID NO: 870096 - DNA, 75 bp, synthetic construct
  source 1..75: mol_type = other DNA
cgtgtttatgggcgtgaatgaagatatttatcgcacctccagcggcaacgatcttatcgcaacgctcaatcatcc

SEQ ID NO: 870097 - DNA, 75 bp, synthetic construct
  source 1..75: mol_type = other DNA
gtactataaagatggtagcgaaatattaatagagcaaaaaggaagtaacccaagaaaaataactccgcgggaagc

SEQ ID NO: 870098 - DNA, 75 bp, synthetic construct
  source 1..75: mol_type = other DNA
attgccaatgcggtgcgagaagaaacgacggggtatgatgtggatattcagggtgtaatggaattggcaaaagcg

SEQ ID NO: 870099 - DNA, 75 bp, synthetic construct
  source 1..75: mol_type = other DNA
ggaagatgatgttcgtgttgattcttttgaatatgacaagaaagataagaaaacagggctggtagttgttgattc

SEQ ID NO: 870100 - DNA, 75 bp, synthetic construct
  source 1..75: mol_type = other DNA
caaaccctggcttatatgttcgctagtgcataaattcggccgtcacgaagaggatgacatagaggccgacactga

SEQ ID NO: 870101 - DNA, 75 bp, synthetic construct
  source 1..75: mol_type = other DNA
atgccagcatcgccaatgaaatgccggaagcaggctacactgccgaagaggtagagagcattcgcgccgaagtcg

SEQ ID NO: 870102 - DNA, 75 bp, synthetic construct
  source 1..75: mol_type = other DNA
caggaagcgcgcgagcgggcggtgaagtatctggcaaaagtcgggatagacgaacgtgcgcaggggaaatacccg

SEQ ID NO: 870103 - DNA, 75 bp, synthetic construct
  source 1..75: mol_type = other DNA
cgcccagggcaaaaaagtgccgggctatctggaagaagagggcgcgaacaagagcagcaatacagaaaccttcgt

SEQ ID NO: 870104 - DNA, 75 bp, synthetic construct
  source 1..75: mol_type = other DNA
acgaccaagctggatctgagctattcggagaccttcaatcagacacatctcgccgatgcttatgaacggttgctg

SEQ ID NO: 870105 - DNA, 75 bp, synthetic construct
  source 1..75: mol_type = other DNA
atatgatccagaaccacctgctacaaattctctgcatgattgcgatgtctccgccgtctgacctgagtgccgata

SEQ ID NO: 870106 - DNA, 75 bp, synthetic construct
  source 1..75: mol_type = other DNA
agctaaagaatctatgggtattcaaggttctgaagaactttttagaaatatgattggctattctcgtctgatggg

SEQ ID NO: 870107 - DNA, 75 bp, synthetic construct
  source 1..75: mol_type = other DNA
ccggctggtggcactgggtagttgttaacttgcctgccgatacccgtgtattgccgcaaggatttggctctggtc

SEQ ID NO: 870108 - DNA, 75 bp, synthetic construct
  source 1..75: mol_type = other DNA
tcgtagaactactgcaaaaagccagcaatggaatagacgcggctgtttcattcagccaagcgcagattcctgatg

SEQ ID NO: 870109 - DNA, 75 bp, synthetic construct
  source 1..75: mol_type = other DNA
ggggaaaagtacctttctgcgctgtattaacttcctcgaaaaaccgagcgaaggcgcgatcgtggttaacgggca

SEQ ID NO: 870110 - DNA, 75 bp, synthetic construct
  source 1..75: mol_type = other DNA
gcgcattatgcaaaaactggcggaagaggggaaaaccatggtggtggtaacccatgaaatgggttttgcccgcca

SEQ ID NO: 870111 - DNA, 75 bp, synthetic construct
  source 1..75: mol_type = other DNA
ggggcgccggagcagttattcggtaacccgcaaagccctcgtctgcaacagttccttaaaggttcgctgaaataa

SEQ ID NO: 870112 - DNA, 75 bp, synthetic construct
  source 1..75: mol_type = other DNA
caaaatattggtcgtcggtacagatggaattccggaagcccgcaaaatggtggaagccggacaaatgaccgcgac

SEQ ID NO: 870113 - DNA, 75 bp, synthetic construct
  source 1..75: mol_type = other DNA
aagatgaagcaaaaacactgggcgtcagcgttgatatttttgcctctccttcagaaggcgattttcaatctcaat

SEQ ID NO: 870114 - DNA, 75 bp, synthetic construct
  source 1..75: mol_type = other DNA
tcgtagaactactgcaaaaagccagcaatggaatagatgcggctgtttcatttagccaggcacagattcctgatg

SEQ ID NO: 870115 - DNA, 75 bp, synthetic construct
  source 1..75: mol_type = other DNA
tatggttctggaaagtcaggacgaatatgactcacaatgggcgacaatttgttccattgctccaaagaatggctg

SEQ ID NO: 870116 - DNA, 75 bp, synthetic construct
  source 1..75: mol_type = other DNA
ctgcgtggtggcgcggtgggtacattaatgagcaacatggggctggaactggcgctgaaacagttaggcattcca

SEQ ID NO: 870117 - DNA, 75 bp, synthetic construct
  source 1..75: mol_type = other DNA
gtaaagtgctggcgcgccacggctcccgtaagatcattattggtaaagacacgcgtatttctggctatatgctgg

SEQ ID NO: 870118 - DNA, 75 bp, synthetic construct
  source 1..75: mol_type = other DNA
tacctcttgcgcagaacggtatgttagtgacttttggtgttgttcctactcatcctgaaacaggatatggatata

SEQ ID NO: 870119 - DNA, 75 bp, synthetic construct
  source 1..75: mol_type = other DNA
cggacgacgggagtttgaaaccagtgaactgatccgggcatacggcgaattaaagcagaatgagacaccagaaag

SEQ ID NO: 870120 - DNA, 75 bp, synthetic construct
  source 1..75: mol_type = other DNA
gttaattcgcgtgatggtcgaaggtgaagacgaagcgcaggtcaccgagtttgctcaccgtatcgctgatgcggt

SEQ ID NO: 870121 - DNA, 75 bp, synthetic construct
  source 1..75: mol_type = other DNA
atccgctggagcatgagtcagtcaaagctgtgaccgcagaagttgaagcggcgctgggtagccgtggacgtgtgc

SEQ ID NO: 870122 - DNA, 75 bp, synthetic construct
  source 1..75: mol_type = other DNA
atccctgttggtgcggctcattcatttgagaacccagggaaggtgaatttagaattaattgaagttagaaccggt

SEQ ID NO: 870123 - DNA, 75 bp, synthetic construct
  source 1..75: mol_type = other DNA
ggctgtattgtcaccagtcagcattacctgacggattttccagtccgtcagggcggaacgtccgtcttttatccg

SEQ ID NO: 870124 - DNA, 75 bp, synthetic construct
  source 1..75: mol_type = other DNA
ctgcattgtttccaccaacggtgcattgcgacactgctttgagttccgtgaaggttctcacagccgtgaatatcg

SEQ ID NO: 870125 - DNA, 75 bp, synthetic construct
  source 1..75: mol_type = other DNA
attcctgcgggtacagtgcatactttagaaaatccaggtaaaattcaactcgaggtaatagaaatccaatcagga

SEQ ID NO: 870126 - DNA, 75 bp, synthetic construct
  source 1..75: mol_type = other DNA
aagttttccattagaaattattgaaatacgaacgggctcttacctttttgaggatgataattatcatgtggaaaa

SEQ ID NO: 870127 - DNA, 75 bp, synthetic construct
  source 1..75: mol_type = other DNA
atgaaatagaaaatcttggtaaaattcctttggtatttttagagatacaatcaggtgaatatctttctgaagacg

SEQ ID NO: 870128 - DNA, 75 bp, synthetic construct
  source 1..75: mol_type = other DNA
actttctgaccctgctgggctggctggtgaataatggcctgtgggatctgctgacggggacggggctgtttgccc

SEQ ID NO: 870129 - DNA, 75 bp, synthetic construct
  source 1..75: mol_type = other DNA
cgcaggaaaatacacacaccgtctcaggctcaagaagcaattacccgctgggctgccacttgttgcgatccgtca

SEQ ID NO: 870130 - DNA, 75 bp, synthetic construct
  source 1..75: mol_type = other DNA
cgcagcaaaatacacacaccgtctcaggctcaagaagcaattacccgctggcctgccacttgttgcgatccgtca

SEQ ID NO: 870131 - DNA, 75 bp, synthetic construct
  source 1..75: mol_type = other DNA
cgcagtaaaatacacacaccgtctcaggctcaagaagcaattacccgctgggctgccacttgttgcgatccgaca

SEQ ID NO: 870132 - DNA, 75 bp, synthetic construct
  source 1..75: mol_type = other DNA
acgggtaatcgccgcagcaaaatacacacaccgactcaggctcaagaagcaattacccgctggactgccacttgt

SEQ ID NO: 870133 - DNA, 75 bp, synthetic construct
  source 1..75: mol_type = other DNA
acgggtaatcgccgcagaaaaatacacacaccgcctcaggctcaagaagcaattacccgctggactgccacttgt

SEQ ID NO: 870134 - DNA, 75 bp, synthetic construct
  source 1..75: mol_type = other DNA
acgggtaatcgccgcagaaaaatacacacaccgactcaggctcaagaagcaattccccgctggactgccacttgt

SEQ ID NO: 870135 - DNA, 75 bp, synthetic construct
  source 1..75: mol_type = other DNA
acagctacagaatgagatagcccagctcaggcaggcactggaacaggaaaagaaacggggattctggtccaggct

SEQ ID NO: 870136 - DNA, 75 bp, synthetic construct
  source 1..75: mol_type = other DNA
acctgacgatttctcaggggggagaagtgtatcggggatatggtggtaatgcagacatgaccacgatgaatgcca

SEQ ID NO: 870137 - DNA, 75 bp, synthetic construct
  source 1..75: mol_type = other DNA
aatgcagccagagatggaacaagtgcagcacatcaagcagcttcaaaggcaggagatcttgttgggaaagtagga

SEQ ID NO: 870138 - DNA, 75 bp, synthetic construct
  source 1..75: mol_type = other DNA
cgcagtaaaatacacacaccgtctcaggctcaagaagcaattacccgctggactgccacttgttgcgatccggca

SEQ ID NO: 870139 - DNA, 75 bp, synthetic construct
  source 1..75: mol_type = other DNA
cgcagaaaaatacacacaccgtctcaggctcaagaagcaattacccgctggactgccacttgttgcgatccgtca

SEQ ID NO: 870140 - DNA, 75 bp, synthetic construct
  source 1..75: mol_type = other DNA
gtatttcgtatatacatacctcgctggtcagtattatcatagctaccctgttgagactgccaaatggcccccgaa

SEQ ID NO: 870141 - DNA, 75 bp, synthetic construct
  source 1..75: mol_type = other DNA
cggcacctctcttacttaaggatcccgaaatcacggatgacatggttcatccagtacccggcaccgtcctcaaaa

SEQ ID NO: 870142 - DNA, 75 bp, synthetic construct
  source 1..75: mol_type = other DNA
gaacctgtaagccaaacttacaagttgccagttaatacaccttgccaagatgcgccagcccatatctggctgcaa

SEQ ID NO: 870143 - DNA, 75 bp, synthetic construct
  source 1..75: mol_type = other DNA
ttccctttgattattctctttttcctcctgctctgactctgattactgctgccctgattattgtctgttttgttg

SEQ ID NO: 870144 - DNA, 75 bp, synthetic construct
  source 1..75: mol_type = other DNA
tccaaccgtatggcagaagagcttaaggatgtggcagataaggtctacacccgcgatctctttggcagcgactaa

SEQ ID NO: 870145 - DNA, 75 bp, synthetic construct
  source 1..75: mol_type = other DNA
cgggagtagaacgccaggtgcgtaacctgctgtggaaagggaaatcgcaggcagagttttatcgcggcatggagt

SEQ ID NO: 870146 - DNA, 75 bp, synthetic construct
  source 1..75: mol_type = other DNA
actatctccatatctcactccacaacgtacttaccgatcggccgcagggtagtgaggataaggaaactattctgg

SEQ ID NO: 870147 - DNA, 75 bp, synthetic construct
  source 1..75: mol_type = other DNA
agcaagcaatatcttaatgagctgatcaccaacatagagtttgctgcaagggcaccagttgaagtcgtgagagcg

SEQ ID NO: 870148 - DNA, 75 bp, synthetic construct
  source 1..75: mol_type = other DNA
gaacgcctgcaacgcggcgttgcatcattctcgctacaaccggcggaagggcgggcagatctctacacagaaatg

SEQ ID NO: 870149 - DNA, 75 bp, synthetic construct
  source 1..75: mol_type = other DNA
gttcggacaatttccgtgcttcctcaattcagggtattatgaagcgaatcaaggcgaaaggcgtgcctgtaatcg

SEQ ID NO: 870150 - DNA, 75 bp, synthetic construct
  source 1..75: mol_type = other DNA
caacaacccgtcattcggttatggtggttattgtctgccgaaagataccaagcagttactggcaaattaccagtc

SEQ ID NO: 870151 - DNA, 75 bp, synthetic construct
  source 1..75: mol_type = other DNA
ctctggaaggccactgtgcacgacaaatcagccgccgcctgtgtcgcaactatgacctgattttgaccatggaaa

SEQ ID NO: 870152 - DNA, 75 bp, synthetic construct
  source 1..75: mol_type = other DNA
gatgcgccgtgcgcggtcggcaccgggtgaaaaccccggttatcagaccggacgcctggcacgttcgattggtta

SEQ ID NO: 870153 - DNA, 75 bp, synthetic construct
  source 1..75: mol_type = other DNA
cagccatcatcgtggtgcatccggtggcagcggctggcgactggctccacgtaataacttcatggtggaaacgct

SEQ ID NO: 870154 - DNA, 75 bp, synthetic construct
  source 1..75: mol_type = other DNA
agcaggaagagtggggcgtgaaggatggcagtaaagaggaagtgctctcttactttgaggggatccacccccgtc

SEQ ID NO: 870155 - DNA, 75 bp, synthetic construct
  source 1..75: mol_type = other DNA
aggcgctggcgcagtgtgagggtgatgcggcgcaagcctttgcgctgtatgagtcggtacgtattccgcgcaccg

SEQ ID NO: 870156 - DNA, 75 bp, synthetic construct
  source 1..75: mol_type = other DNA
cgcactgtcacctggtgcattaccctttgcgcggcggcaagcagtataacctggtggtgacattccacagccgcc

SEQ ID NO: 870157 - DNA, 75 bp, synthetic construct
  source 1..75: mol_type = other DNA
gcgcgcggtgtttaccgatcacatcaccatgatggatgcagtaaacgccgaagaagtggtgcgcattgaaaccgg

SEQ ID NO: 870158 - DNA, 75 bp, synthetic construct
  source 1..75: mol_type = other DNA
acattggtccgcattcccctttgccagttgaaaaaacttttcattcgtttgtccgagagtttgggggatgtatca

SEQ ID NO: 870159 - DNA, 75 bp, synthetic construct
  source 1..75: mol_type = other DNA
tcatggtatcagcaggtattgccaactagcggagctatatttgggagaaaactccgctcaactcacaggacggca

SEQ ID NO: 870160 - DNA, 75 bp, synthetic construct
  source 1..75: mol_type = other DNA
agcaggaagagtggggcgtgaaggatggcagtaaagaggaagtgctctcttactttgaggggatccaccccataa

SEQ ID NO: 870161 - DNA, 75 bp, synthetic construct
  source 1..75: mol_type = other DNA
cacccgatgagcgtttctacaaagaggtgcttatccccgccggaggcaaatcgaaaacgctgtttgtccttaatc

SEQ ID NO: 870162 - DNA, 75 bp, synthetic construct
  source 1..75: mol_type = other DNA
atgaacatttttacaaaaacgttctgaaacctgccgggggtgaagagaagacgctgtttgtgcttaatcaggtag

SEQ ID NO: 870163 - DNA, 75 bp, synthetic construct
  source 1..75: mol_type = other DNA
cgacggtggcccgccttgacaccatggtcactgtggtggatgcgtacaattttctgaaagactacggttcggaag

SEQ ID NO: 870164 - DNA, 75 bp, synthetic construct
  source 1..75: mol_type = other DNA
ctggtggtaacattccacagccgccagcaggaagagtggggcgtgaaggatggtagtaaagaggaagtgctctct

SEQ ID NO: 870165 - DNA, 75 bp, synthetic construct
  source 1..75: mol_type = other DNA
cgatatgccggaagatttgcgcattaacgcccggtactgtgggcggggccgcattgtcacctggtgcattaccct

SEQ ID NO: 870166 - DNA, 75 bp, synthetic construct
  source 1..75: mol_type = other DNA
tgcatcagccatctcctgcacagcgcatcaacatcgaaaagaaagaagcctacattactgaacgatttggtttta

SEQ ID NO: 870167 - DNA, 75 bp, synthetic construct
  source 1..75: mol_type = other DNA
catggagagcctgctgaaccccgtagaggccattcgcaaaccccaacccaagaactccaggaccagacgcctgga

SEQ ID NO: 870168 - DNA, 75 bp, synthetic construct
  source 1..75: mol_type = other DNA
tttgtgattttatgatgtattgctggtgtgaaggtctggcggtattactgcatctgaacccacacctgcaatggg

SEQ ID NO: 870169 - DNA, 75 bp, synthetic construct
  source 1..75: mol_type = other DNA
ttaagcgccattttcagcaatggctgaactcactgtggcaggaaaaagaccaacttctgacgtcgttgatgtcat

SEQ ID NO: 870170 - DNA, 75 bp, synthetic construct
  source 1..75: mol_type = other DNA
gtggcgaccggttccggcctgggcccgcgttatgttgattacgttctgggtatcctcaaagcttactccactcgt

SEQ ID NO: 870171 - DNA, 75 bp, synthetic construct
  source 1..75: mol_type = other DNA
tctggcttctgcctgaccaaactggacgttctggatggcctgaaagaggtgaaactctgcgtggcttaccgtatg

SEQ ID NO: 870172 - DNA, 75 bp, synthetic construct
  source 1..75: mol_type = other DNA
caagcagggtaacgaattcggcgcaactacggggcgtcgtcgtcgtaccggctggctggaccccgttgccgttcg

SEQ ID NO: 870173 - DNA, 75 bp, synthetic construct
  source 1..75: mol_type = other DNA
tacaggccagactggctgttgagctgcaaatcctcagggatgaattactctcaggccactaccagcccttgcccg

SEQ ID NO: 870174 - DNA, 75 bp, synthetic construct
  source 1..75: mol_type = other DNA
tggttacgcatggcgactcgttcattaacccgttgtatcggattttccctgttactcagcaaatccgcagaagtt

SEQ ID NO: 870175 - DNA, 75 bp, synthetic construct
  source 1..75: mol_type = other DNA
tgtttcgcgcctggtttgtacgcattgcacaagaacagctccgccaggggccaagtccacgctggtatcagcagg

SEQ ID NO: 870176 - DNA, 75 bp, synthetic construct
  source 1..75: mol_type = other DNA
ccacttttcaaaacttgttgccaccaaaggcggcaggcattgcgatggcgctaaatgtactgggtaaacaattcg

SEQ ID NO: 870177 - DNA, 75 bp, synthetic construct
  source 1..75: mol_type = other DNA
tttcgggttgtccggcctgatacatcagagcaatacgttgcgttaaaaactgctgttcagtctctgatgccacga

SEQ ID NO: 870178 - DNA, 75 bp, synthetic construct
  source 1..75: mol_type = other DNA
tattttattaaatttaaatgcattagtaatggctattctatatagcaatataagaactgttacaaaaaaaggggg

SEQ ID NO: 870179 - DNA, 75 bp, synthetic construct
  source 1..75: mol_type = other DNA
atgcacctcccaccgcaagcggcgggccccgaccggagccaatttagttacaacatgcaaaaacagaccccggaa

SEQ ID NO: 870180 - DNA, 75 bp, synthetic construct
  source 1..75: mol_type = other DNA
cagtctccagcatgattatgattatgttctgttatacagcgctgagaatgtggcgacggattacaacgctttaat

SEQ ID NO: 870181 - DNA, 75 bp, synthetic construct
  source 1..75: mol_type = other DNA
cactgaaaacaacagttgttgatgcctaccttatcgataaggttacaggcgtggctgaacgtctgacttctgtta

SEQ ID NO: 870182 - DNA, 75 bp, synthetic construct
  source 1..75: mol_type = other DNA
aaagcaccacttgaaggttggcattatggcactaaagaaatcgttaaaaaattccacatatatcatcgtgttgcg

SEQ ID NO: 870183 - DNA, 75 bp, synthetic construct
  source 1..75: mol_type = other DNA
catctgaaaaatattctgattgaagttttacccgcgctcgacaacgtcgatgtggagagtgacgctggtaataca

SEQ ID NO: 870184 - DNA, 75 bp, synthetic construct
  source 1..75: mol_type = other DNA
gggctgatgtggtgatctggcagatgccaggctggtggatgggcgcgccgtggacagtgaaaaaatacattgatg

SEQ ID NO: 870185 - DNA, 75 bp, synthetic construct
  source 1..75: mol_type = other DNA
ggtaacatcggcttctgcattgtcagtcacacgctcgggaaaaattaacgccaatggtagtatcgacgttgctac

SEQ ID NO: 870186 - DNA, 75 bp, synthetic construct
  source 1..75: mol_type = other DNA
ggaactggagaaagatccagaatcgacagtaataacgctggaaagtactaatagcgccatttatctcattgaatt

SEQ ID NO: 870187 - DNA, 75 bp, synthetic construct
  source 1..75: mol_type = other DNA
atccagacccgggttccggctgaatgatgtccgtctcactatacttatactgactcaaccggtaatatttgataa

SEQ ID NO: 870188 - DNA, 75 bp, synthetic construct
  source 1..75: mol_type = other DNA
tcatggaatggaatggcgatttacggtgccctcgctgttggtgctccgcttggcctgttgattcatagccattac

SEQ ID NO: 870189 - DNA, 75 bp, synthetic construct
  source 1..75: mol_type = other DNA
taatgttattgagatgtgttttttcgtgatgttttcagtattactggctgcattcagttttgtaagtacaatggg

SEQ ID NO: 870190 - DNA, 75 bp, synthetic construct
  source 1..75: mol_type = other DNA
tcccgcgcactggagcgctttcacaaagaaaatatggatactgtcagacagaatcctcatatgggtacatttgaa

SEQ ID NO: 870191 - DNA, 75 bp, synthetic construct
  source 1..75: mol_type = other DNA
ggaaaataaggattgatgataacctggttgtttatataggaaacacgattacaccatccgaactggcaaaaaact

SEQ ID NO: 870192 - DNA, 75 bp, synthetic construct
  source 1..75: mol_type = other DNA
tattggccaggacataaaccaggcgctgcctggcgatatgatttttttcgatcagggcgatgcccagcacttaat

SEQ ID NO: 870193 - DNA, 75 bp, synthetic construct
  source 1..75: mol_type = other DNA
cggcaatgaaaatgattggcagcagccaggtcgattataaggaagaagttgtccgacggctggtgagtccgaaga

SEQ ID NO: 870194 - DNA, 75 bp, synthetic construct
  source 1..75: mol_type = other DNA
tgccgctggtatttaaggtgattgggatctggctgaaagtccgggaagagggggaagatgaaggtaacaagggat

SEQ ID NO: 870195 - DNA, 75 bp, synthetic construct
  source 1..75: mol_type = other DNA
aagctgcacaagcaagtgaaaaaggagggaaagtcgcagaacaaggtgtttcatctttcacaggtggcatgatga

SEQ ID NO: 870196 - DNA, 75 bp, synthetic construct
  source 1..75: mol_type = other DNA
agagtattctgctgatggcggtgtatatcatgcttccgatgatacttgcttttgcggcatatgaattcagtacgc

SEQ ID NO: 870197 - DNA, 75 bp, synthetic construct
  source 1..75: mol_type = other DNA
tctgctgatggcaatttatatcatgttgccgctgattctggcgtttgcagcatatgagttgtcaaccctgatcac

SEQ ID NO: 870198 - DNA, 75 bp, synthetic construct
  source 1..75: mol_type = other DNA
ccaggtcgattataaggaagaagttgtccgacggctggtgagtccgaagagtctgacagtctctcaggacggtga

SEQ ID NO: 870199 - DNA, 75 bp, synthetic construct
  source 1..75: mol_type = other DNA
gtatttcgtatatacatacctcgctggtcagtattaacgatagctaccctgttgagtctgccaaatggcccccga

SEQ ID NO: 870200 - DNA, 75 bp, synthetic construct
  source 1..75: mol_type = other DNA
aaatacgcacaccgtctcaggctcaagaagcaatttccactggcctgccacttgttgcgatcggtaaagggctgg

SEQ ID NO: 870201 - DNA, 75 bp, synthetic construct
  source 1..75: mol_type = other DNA
acgggtaatcgccgcaggaaaatacacacaccggctcaggctcaagaagcaattgcccgctggactgccacttgt

SEQ ID NO: 870202 - DNA, 75 bp, synthetic construct
  source 1..75: mol_type = other DNA
agctggttactacgataccgaccatgcgctttcaccacacagtacgtggccgtacagcacatcacgcgatgccgg

SEQ ID NO: 870203 - DNA, 75 bp, synthetic construct
  source 1..75: mol_type = other DNA
actttctgacgctgctcggctgggtggtcaataacgggttgtggaatgcgattagcgccaccggattattcgccc

SEQ ID NO: 870204 - DNA, 75 bp, synthetic construct
  source 1..75: mol_type = other DNA
agcggcaaaaagtggtggagctccggctatcctacagatttttcatgccggtaataaagctattccagagcttgt

SEQ ID NO: 870205 - DNA, 75 bp, synthetic construct
  source 1..75: mol_type = other DNA
ttccgtggaatgcatcccgtgacagtggacgcccgaacaccggtcggggtggttacccgacctgtaatgagtggt

SEQ ID NO: 870206 - DNA, 75 bp, synthetic construct
  source 1..75: mol_type = other DNA
gaaggcgcgattaagcaaaatatcccgaccctgttcaccgattcaaccgaagcagaagcgattaaacttttcgct

SEQ ID NO: 870207 - DNA, 75 bp, synthetic construct
  source 1..75: mol_type = other DNA
caatacatcgagtgtagaatcagtaattaaagacgtagttgagataaatccttatgcggttatggtcatcaaatc

SEQ ID NO: 870208 - DNA, 75 bp, synthetic construct
  source 1..75: mol_type = other DNA
tcgatccgcgtatcggcaaccattacaacaatccatcgtttggctatggcggttattgcttgccgaaagacacta

SEQ ID NO: 870209 - DNA, 75 bp, synthetic construct
  source 1..75: mol_type = other DNA
ctgcaacaacttatgacatggaagttgtatattaaaatttcattaattatcaatatgttaatgtgcgctggtcat

SEQ ID NO: 870210 - DNA, 75 bp, synthetic construct
  source 1..75: mol_type = other DNA
aaaagtaacggtatagaaagtcagtatttgccgccagagatgacgctaacacctgaacagcggcaactggcacaa

SEQ ID NO: 870211 - DNA, 75 bp, synthetic construct
  source 1..75: mol_type = other DNA
atgaaaatcaccatttccggtactggttatgtaggcctttcaaatgggcttttaatcgcacaaaatcatgaagtt

SEQ ID NO: 870212 - DNA, 75 bp, synthetic construct
  source 1..75: mol_type = other DNA
acacacagccgctttaatatggcgggactgcagaacagctcagatgacctcattatgaatctggtgatgggagcg

SEQ ID NO: 870213 - DNA, 75 bp, synthetic construct
  source 1..75: mol_type = other DNA
cttacgagttcaagaccgttattacgctgacttttgtaatattcgctctgaacttcctgacgttctggtgggaac

SEQ ID NO: 870214 - DNA, 75 bp, synthetic construct
  source 1..75: mol_type = other DNA
caacacaagcaggagaaaagggaggggaagttgctaaaaaggctggagctacttttatggagggagtaaatggaa

SEQ ID NO: 870215 - DNA, 75 bp, synthetic construct
  source 1..75: mol_type = other DNA
aacacctacctggcgatgcgcgtggcgtactttaacgaactggatagctacgcagaaagtttaggtctgaatact

SEQ ID NO: 870216 - DNA, 75 bp, synthetic construct
  source 1..75: mol_type = other DNA
aagccgacgtcattatttccaaccgtatggcagaagagcttaaggatgtggcagataaggtctacacccgcgatc

SEQ ID NO: 870217 - DNA, 75 bp, synthetic construct
  source 1..75: mol_type = other DNA
taatacgtttagcgtggaatctgtcattcaggatgtcattgaaataaatccacttgcagttatggttatcaagtc

SEQ ID NO: 870218 - DNA, 75 bp, synthetic construct
  source 1..75: mol_type = other DNA
cgtctgacgcaactgctagccctgttgccgggagcagtgcagagcaccacgccggagatcctgccacaaccacag

SEQ ID NO: 870219 - DNA, 75 bp, synthetic construct
  source 1..75: mol_type = other DNA
gactacctgtttgtgacttacaagcgtgggccaactgtcggaaaccctatctccaaggcgggttatcacaaaata

SEQ ID NO: 870220 - DNA, 75 bp, synthetic construct
  source 1..75: mol_type = other DNA
tagctctaacaggatccgtatcgttaggcgagcagatgaacgagctgattctagaaccaatgagcctaatgccaa

SEQ ID NO: 870221 - DNA, 75 bp, synthetic construct
  source 1..75: mol_type = other DNA
agatatccgtattctggttgtcctgctgcgctgccgtatccagcaggccggcgcacagggactggcagacgcgct

SEQ ID NO: 870222 - DNA, 75 bp, synthetic construct
  source 1..75: mol_type = other DNA
aactgggcggagcttgagcgggatgcccgccgcctgctgatgcgcagtaaagatatccgtattctggttgtcctg

SEQ ID NO: 870223 - DNA, 75 bp, synthetic construct
  source 1..75: mol_type = other DNA
gctgcgccaggcggaacggctgattggaaaacgcttctcggaggtaataaatgaaattccagcagaactgctgga

SEQ ID NO: 870224 - DNA, 75 bp, synthetic construct
  source 1..75: mol_type = other DNA
attttcagacggcgaacgcaagttagtgttagctagacatacgcctcgtaagacgttcgaaactaaagcgaacaa

SEQ ID NO: 870225 - DNA, 75 bp, synthetic construct
  source 1..75: mol_type = other DNA
tgttcagagtttaatagtaacgcattcaatagccttcaatcgtgctcttcatgaggaattaattaaaattaaagt

SEQ ID NO: 870226 - DNA, 75 bp, synthetic construct
  source 1..75: mol_type = other DNA
gaaactgatatcgaaaaaaataaagaatctttccgaagtcttgttcaatttggtgtggatctttttaagctaact

SEQ ID NO: 870227 - DNA, 75 bp, synthetic construct
  source 1..75: mol_type = other DNA
ccgcgaccagcgcagctgggcatactggagcaccctgtggatgtccggggctgcccgccttgtgcgccccggtgg

SEQ ID NO: 870228 - DNA, 75 bp, synthetic construct
  source 1..75: mol_type = other DNA
cgacaactaccggcgcttacagatgcatttcaggccggtggtgtgctgtggcgtggtctggttgtctgggataaa

SEQ ID NO: 870229 - DNA, 75 bp, synthetic construct
  source 1..75: mol_type = other DNA
acgcaatgcagacttggattcccttaacaacgagtgcactaccttgcgtgcaatggttcaagcagatttaggaag

SEQ ID NO: 870230 - DNA, 75 bp, synthetic construct
  source 1..75: mol_type = other DNA
atccgtcgctggtttgagcacagcgaaccgagcagcccgaccattccttgctgcgccaggcagaacgtctggtcg

SEQ ID NO: 870231 - DNA, 75 bp, synthetic construct
  source 1..75: mol_type = other DNA
gcgtatggcgcagcatacggagcagaggggggattgtgattctgacctacccaccagccgctcaacgttgctgaa

SEQ ID NO: 870232 - DNA, 75 bp, synthetic construct
  source 1..75: mol_type = other DNA
ggggggattgtgattcttactactcaccaaccgctcaacgttgccgaaagtaaaatccgccgcatatctctgacg

SEQ ID NO: 870233 - DNA, 75 bp, synthetic construct
  source 1..75: mol_type = other DNA
gtagcaacggtgcggggaagacaacgcttctccgtttgctgacggggttgtctcgccctgacgcaggcgaggttc

SEQ ID NO: 870234 - DNA, 75 bp, synthetic construct
  source 1..75: mol_type = other DNA
ctcttcttatatttttacttgtcataatcgtttctgtatccatcatatacattgtaagaactccagtcagacttg

SEQ ID NO: 870235 - DNA, 75 bp, synthetic construct
  source 1..75: mol_type = other DNA
ttctgattatatctttattcgttatattagttttattgtcaatcatatatatagcaagaactccggccagacttg

SEQ ID NO: 870236 - DNA, 75 bp, synthetic construct
  source 1..75: mol_type = other DNA
gccgcaacacccaggtcggctcatttaacttcagccgggctgcagaccgttcgaattcggagaacgtgcttgtcg

SEQ ID NO: 870237 - DNA, 75 bp, synthetic construct
  source 1..75: mol_type = other DNA
atgggaaaagtgttcccggcgatgtttaaagagagttactggtatcctaatttctcctgcacggtgaaagagagc

SEQ ID NO: 870238 - DNA, 75 bp, synthetic construct
  source 1..75: mol_type = other DNA
cggaaaatacccgcacggcaatccattcctgcgatggcgaaatcaatatgaatgatttgatagccagggaggcga

SEQ ID NO: 870239 - DNA, 75 bp, synthetic construct
  source 1..75: mol_type = other DNA
caggccgcagagaccactgagcggctgcaacgccatgcgcgtgaaacgctgaatgaacaggcaccgaacctatcc

SEQ ID NO: 870240 - DNA, 75 bp, synthetic construct
  source 1..75: mol_type = other DNA
atcccactgtacagttttctggtttttataaggtattttgggatttttatctattttaccagcatcaagtcgctt

SEQ ID NO: 870241 - DNA, 75 bp, synthetic construct
  source 1..75: mol_type = other DNA
taatggaagtgatggcaagtgagcttgaaaagaacaacatcaagcccactgattgttgtttaagaaccgtaatga

SEQ ID NO: 870242 - DNA, 75 bp, synthetic construct
  source 1..75: mol_type = other DNA
caaataattcgtgtaagcgcaagaataatggaagtgatggcaagtgagcttgaaaagaacaacatcaagcccact

SEQ ID NO: 870243 - DNA, 75 bp, synthetic construct
  source 1..75: mol_type = other DNA
ctgactgggaagatcacaaatcaatggcggatgccattgaatcaagaactaaacagatctctgaatcattaggcc

SEQ ID NO: 870244 - DNA, 75 bp, synthetic construct
  source 1..75: mol_type = other DNA
cgtgaaatcgccgaacgtgggcaatattttggttggcaatcgctggtgctatttctggtgagtctggtgatggtg

SEQ ID NO: 870245 - DNA, 75 bp, synthetic construct
  source 1..75: mol_type = other DNA
aaagtcgatggggataataagaaaatagcgattctttgtcttagcaccggcgcgagatggagtgaggctgcaaaa

SEQ ID NO: 870246 - DNA, 75 bp, synthetic construct
  source 1..75: mol_type = other DNA
gcgggatgttcaccaagttaattgacgccggtgaataccactctcacaacccgttccgtgaggttaagcggttac

SEQ ID NO: 870247 - DNA, 75 bp, synthetic construct
  source 1..75: mol_type = other DNA
cgtgaaatcgccgaacgtgggcaatattttggttggcaatcgctggtgctatttctggtgagtctggtaatggta

SEQ ID NO: 870248 - DNA, 75 bp, synthetic construct
  source 1..75: mol_type = other DNA
atgctggcattcttgctcattttgctccctctgttggtactggcatggcaagcctggcaaagcctgaatgcgctt

SEQ ID NO: 870249 - DNA, 75 bp, synthetic construct
  source 1..75: mol_type = other DNA
atgcccacgcaggcgtgctgccagacaataaactctaccaggcattacgccaggatctgaataatctcgctcaac

SEQ ID NO: 870250 - DNA, 75 bp, synthetic construct
  source 1..75: mol_type = other DNA
tgagaatccgccagccgaaaccggagcatggaaagacgctatttactgggtgctaaaagaggcctgccaggttgt

SEQ ID NO: 870251 - DNA, 75 bp, synthetic construct
  source 1..75: mol_type = other DNA
tgctgacaatccagcagtggcgcgaaacatacggaccgggtagcaacgttgtactgccagcagaagaagcggaag

SEQ ID NO: 870252 - DNA, 75 bp, synthetic construct
  source 1..75: mol_type = other DNA
ttatctcggatggaagtaagcgtattgctgaactggagaaaagcgaagagcaactcattaacgagcgtgaccatg

SEQ ID NO: 870253 - DNA, 75 bp, synthetic construct
  source 1..75: mol_type = other DNA
tgcgtgctaaggcagaaaaagcaacgtgtggcgagtggtcgctcgaatatggagagagccgatttgatggtgatg

SEQ ID NO: 870254 - DNA, 75 bp, synthetic construct
  source 1..75: mol_type = other DNA
cggtaatggtcatgtatgaagacggtgagatgtggtctgcaatgtggaatggcaatcgctgggatgatggcaccg

SEQ ID NO: 870255 - DNA, 75 bp, synthetic construct
  source 1..75: mol_type = other DNA
tggcgaacgcatttcagtgcgtcatatcgcggtgaaagagtcggaagtgattgactggcaggaccatatcttaaa

SEQ ID NO: 870256 - DNA, 75 bp, synthetic construct
  source 1..75: mol_type = other DNA
tagtgaagcgatgaccaacgcggcgctggagatggagcgtagctaccgtcagtattgcgtgctggacgaccctac

SEQ ID NO: 870257 - DNA, 75 bp, synthetic construct
  source 1..75: mol_type = other DNA
tacagccctgattgaagcggagttattctttggtgagcaccctatcagagggacaaaaaggcttaaggaggaaaa

SEQ ID NO: 870258 - DNA, 75 bp, synthetic construct
  source 1..75: mol_type = other DNA
attacgaaatcccttatcagccagtactgcgccacccgaagaagtcagggtattaaaccttcgagtatcaatcgt

SEQ ID NO: 870259 - DNA, 75 bp, synthetic construct
  source 1..75: mol_type = other DNA
tggcatcactgggagcagaacatgtaagccaaacttacaacttgccagaattaatcgaaggcatggaggtttcca

SEQ ID NO: 870260 - DNA, 75 bp, synthetic construct
  source 1..75: mol_type = other DNA
ggctgttactcgccatgctaaatacggggcatggtggtgcattggcaggaaacccaaacgaagccagcctgaata

SEQ ID NO: 870261 - DNA, 75 bp, synthetic construct
  source 1..75: mol_type = other DNA
acccgatttctgttattcaacgctctccaaccagtggggtgtttggctcaaatcagttcgtaggagacaaagagg

SEQ ID NO: 870262 - DNA, 75 bp, synthetic construct
  source 1..75: mol_type = other DNA
tggctatcaaaaccaacagacaagcgacgtctgtcggaactgacacagatctggtgggatttaaagggtaaacac

SEQ ID NO: 870263 - DNA, 75 bp, synthetic construct
  source 1..75: mol_type = other DNA
catcatccttatacccaggcgctgatccgcgcgataccagacttcggcagcgcgatgccgcataaaagtcgcctc

SEQ ID NO: 870264 - DNA, 75 bp, synthetic construct
  source 1..75: mol_type = other DNA
gtcgccagttgatgcaaaacatcccagcctggacctataaaggccgttggtggcagcgttttggctggcgcaaac

SEQ ID NO: 870265 - DNA, 75 bp, synthetic construct
  source 1..75: mol_type = other DNA
catcatccttacacccaggcgctgatccgcgcgataccggatttcggcagcgcgatgccgcataaaagtcgcctc

SEQ ID NO: 870266 - DNA, 75 bp, synthetic construct
  source 1..75: mol_type = other DNA
tcgaattattcattaaaaatccgcttgataacgggcttacccgtggcgaacaaatggaagtggcacggattgcac

SEQ ID NO: 870267 - DNA, 75 bp, synthetic construct
  source 1..75: mol_type = other DNA
tccacggtatgcgctgaggcttatcaggttgtaggagttatggcagatgcgcttggtgtattcggtgatgcagca

SEQ ID NO: 870268 - DNA, 75 bp, synthetic construct
  source 1..75: mol_type = other DNA
gtgcatttccctgactggctggggagctggttttacgacgaactgacgtatgaagagcggagcagtgacgggaaa

SEQ ID NO: 870269 - DNA, 75 bp, synthetic construct
  source 1..75: mol_type = other DNA
ctacgctgtttaccgattcgacggaagcagaggcgattaaactctttgccaacacctatctggcaatgcgtgttg

SEQ ID NO: 870270 - DNA, 75 bp, synthetic construct
  source 1..75: mol_type = other DNA
gaggttgggcaaatttctccggctctctctcttgatggcttctccagtttggagggcgatcagagttcaaccgaa

SEQ ID NO: 870271 - DNA, 75 bp, synthetic construct
  source 1..75: mol_type = other DNA
aacacctatctggcgatgcgtgtagcttatttcaatgaactagatagttatgctgaaagtctggggcttaattcc

SEQ ID NO: 870272 - DNA, 75 bp, synthetic construct
  source 1..75: mol_type = other DNA
gttacgtcggcctgtcgaacggcattctgatcgcccagcaccacgaagtggtggccctggatatcgttcaggcca

SEQ ID NO: 870273 - DNA, 75 bp, synthetic construct
  source 1..75: mol_type = other DNA
tcgatccgcgcattggtaaccactataacaacccgtcatttggctacggtggttactgcctgccaaaagatacca

SEQ ID NO: 870274 - DNA, 75 bp, synthetic construct
  source 1..75: mol_type = other DNA
aatataaaaggacgggaattttgcctccgggaggggcactctctaatctcaccagacttaacccgttcaagaaaa

SEQ ID NO: 870275 - DNA, 75 bp, synthetic construct
  source 1..75: mol_type = other DNA
ctctttgcagcttctggtaagaccccggccaaacaaggctggaaggttctgttttcctctgacagcgaaagcagc

SEQ ID NO: 870276 - DNA, 75 bp, synthetic construct
  source 1..75: mol_type = other DNA
tcaaccacactcttcacgttggcagggttatcaccccaaccgtcgctcttgtttgtcaacgggaccgagagatcg

SEQ ID NO: 870277 - DNA, 75 bp, synthetic construct
  source 1..75: mol_type = other DNA
ggtcagcagtaaacgtgacccaatgctgcgccggcagcgacgtgaagccagagctgaggcccgtgctgacctgcg

SEQ ID NO: 870278 - DNA, 75 bp, synthetic construct
  source 1..75: mol_type = other DNA
agaccctacacaagccagcggtggtgttcttgattatgcagttgttggaaattcagtgagcttcgtgctcccact

SEQ ID NO: 870279 - DNA, 75 bp, synthetic construct
  source 1..75: mol_type = other DNA
atatatttctcacgtgttgatgcattcgctaacagagtaaatcttgcgattgtttcaaacagaagagctgatgag

SEQ ID NO: 870280 - DNA, 75 bp, synthetic construct
  source 1..75: mol_type = other DNA
tgagttcttccgctcgaaagtctatcgtgaccttgaggcctttaaagcggacagcgacattattttggctaaccg

SEQ ID NO: 870281 - DNA, 75 bp, synthetic construct
  source 1..75: mol_type = other DNA
ttatcggcgagcgatctgagcgagcaaagcgtttcgcctcgctgttacaggaaggcgcaattaagaaagatatcc

SEQ ID NO: 870282 - DNA, 75 bp, synthetic construct
  source 1..75: mol_type = other DNA
agcagttactggcgaactatcagtctgtgccgaataacctgatctcggcaattgtcgatgctaaccgcacgcgta

SEQ ID NO: 870283 - DNA, 75 bp, synthetic construct
  source 1..75: mol_type = other DNA
aaggcgaaaggcgtgcctgtaatcgtttatgagccagcgatgaaagaggacgattttttccggtcgcgcgtggta

SEQ ID NO: 870284 - DNA, 75 bp, synthetic construct
  source 1..75: mol_type = other DNA
agcagttgctggccaactacaacaaggtgcccaacaatctgatccgcgccattgtcgatgctaattgcactcgca

SEQ ID NO: 870285 - DNA, 75 bp, synthetic construct
  source 1..75: mol_type = other DNA
caatacaaataccgtcgaagccgttatccgcgatgtgatgagtattaatccacatgccgttatggtcatcaagtc

SEQ ID NO: 870286 - DNA, 75 bp, synthetic construct
  source 1..75: mol_type = other DNA
tagcttctttcattcccgggtcattcgtgacctcggtgaatttaaagccatcagtgatgtgattctttgcaaccg

SEQ ID NO: 870287 - DNA, 75 bp, synthetic construct
  source 1..75: mol_type = other DNA
gatatgttggcctgtcaaatggtattctgattgctcagagccacgaagtggtggcactggatatcatccagacga

SEQ ID NO: 870288 - DNA, 75 bp, synthetic construct
  source 1..75: mol_type = other DNA
aacagttgttggcaaactacgatgatgtgccgaataacctgattaacgccattgtggagtctaaccgcacacgta

SEQ ID NO: 870289 - DNA, 75 bp, synthetic construct
  source 1..75: mol_type = other DNA
tgcagaaagtcgcggtttgaacgcacgacaaatcattgaaggggtgtcattagacccgcgtatcggtagccacta

SEQ ID NO: 870290 - DNA, 75 bp, synthetic construct
  source 1..75: mol_type = other DNA
taatacatcgagtgtggaagcggtcatccgtgatgtggtagaaattaaccccaacgctgtaatgattatcaaatc

SEQ ID NO: 870291 - DNA, 75 bp, synthetic construct
  source 1..75: mol_type = other DNA
gttcggacaatttccgtgcttcatcgattcagggtattatgaagcgaatcaaggcgaaaggtgtgccagtaatcg

SEQ ID NO: 870292 - DNA, 75 bp, synthetic construct
  source 1..75: mol_type = other DNA
tgagttttttaactcccgcgtggtacgtgacttcgaagcctttaagctggaggcagacgtgattatctccaaccg

SEQ ID NO: 870293 - DNA, 75 bp, synthetic construct
  source 1..75: mol_type = other DNA
aaagaagcctgtccgttagggctggcaccgaccagcagcaccaccgccacgctggttatgggcgatgccctcgct

SEQ ID NO: 870294 - DNA, 75 bp, synthetic construct
  source 1..75: mol_type = other DNA
actcccttcacacttttccgggaacgagcaatacaaggcagttgagcaagcaatcaagtcccgtgcgggttctgc

SEQ ID NO: 870295 - DNA, 75 bp, synthetic construct
  source 1..75: mol_type = other DNA
ttacttgtttttattgtattcatctttgcaattatactgaatactggtaagcaaattgtctttatggttatcatc

SEQ ID NO: 870296 - DNA, 75 bp, synthetic construct
  source 1..75: mol_type = other DNA
aatattttattcatattttatttataccttttctttcattttttatcatgaaagcttcatgactaatattagcag

SEQ ID NO: 870297 - DNA, 75 bp, synthetic construct
  source 1..75: mol_type = other DNA
cgcaatgccctgctgctggcgctgctcaccaccgtggcggcatatctgattatgatgctcgcccccttccccggt

SEQ ID NO: 870298 - DNA, 75 bp, synthetic construct
  source 1..75: mol_type = other DNA
ctggcgggaacggtcgccactttattgattttcggtgaattacacctgatgacgctggtgatgagcatgagcgtt

SEQ ID NO: 870299 - DNA, 75 bp, synthetic construct
  source 1..75: mol_type = other DNA
cgattaaagtgcaaaatggtggattatttatttcccgtggcgtagggaggcatcctgcaaggcggctggagtcat

SEQ ID NO: 870300 - DNA, 75 bp, synthetic construct
  source 1..75: mol_type = other DNA
cttcgctctgtttaaaaacggacgaaaagctgccagcagacgaagtaacaaaatatgctgagaatttgttggagt

SEQ ID NO: 870301 - DNA, 75 bp, synthetic construct
  source 1..75: mol_type = other DNA
atggcacgacctcagacggttaatcagttacccgactctatcaagaagaaactgaataaaaagctgacggaaagt

SEQ ID NO: 870302 - DNA, 75 bp, synthetic construct
  source 1..75: mol_type = other DNA
tatggatacactggttcttcatcgggagaatcacaatctggttcttgacggatattcaaaaccgaacgattttat

SEQ ID NO: 870303 - DNA, 75 bp, synthetic construct
  source 1..75: mol_type = other DNA
tggcgctattgctgcatcttaatccacatctacaatgggaagttcatgggctggaagggttaagtaaaaagaact

SEQ ID NO: 870304 - DNA, 75 bp, synthetic construct
  source 1..75: mol_type = other DNA
gtggcgatatgtcattgcaatttaatgctattgacccactcgcttttcgagtttttattgaacactacaatattt

SEQ ID NO: 870305 - DNA, 75 bp, synthetic construct
  source 1..75: mol_type = other DNA
cgggcagagccgtatatgtactggatagccgggcaagttaaaaacgtaacatgcctatggaactggtactactac

SEQ ID NO: 870306 - DNA, 75 bp, synthetic construct
  source 1..75: mol_type = other DNA
aataaaaaactgtcgctggggctgcccgtcgcgctggcgctgttttcactagcggggatgtcaatgctgcgcgtc

SEQ ID NO: 870307 - DNA, 75 bp, synthetic construct
  source 1..75: mol_type = other DNA
actgtgagcaaggtgcggtgccgacgattatgaatcgcggcggctttgccgagaagttgcgtgcggactggcaat

SEQ ID NO: 870308 - DNA, 75 bp, synthetic construct
  source 1..75: mol_type = other DNA
ggctggcgtctgctgtggctgacgctggaaaatggcgcaagcggcgtgctggtgccggttgaaggggttaaaaat

SEQ ID NO: 870309 - DNA, 75 bp, synthetic construct
  source 1..75: mol_type = other DNA
taaaaaaagcgatgaagcgttcctgtctgtctataaattaattgagcaagccggaaagtactgggctaaaaaact

SEQ ID NO: 870310 - DNA, 75 bp, synthetic construct
  source 1..75: mol_type = other DNA
ccagcgaaatcacggccttaattccagtgcttaagcgtcttcacgtaccgttaatctgcatcaccggtcgcccgg

SEQ ID NO: 870311 - DNA, 75 bp, synthetic construct
  source 1..75: mol_type = other DNA
aattatgaatcgcggaggttttgccgagaagttgcgtgtagactggcaatgggtgattccactgccggaaaatat

SEQ ID NO: 870312 - DNA, 75 bp, synthetic construct
  source 1..75: mol_type = other DNA
ctggcggggcagtttgatctcattatcaacaccgtcaacgtcagcctcgactggcagccttattttgaggcgctg

SEQ ID NO: 870313 - DNA, 75 bp, synthetic construct
  source 1..75: mol_type = other DNA
ggcgggtgattttatgtcgctgtgcaaaaatgctgagctggcgtgcgaagtgactttgcaaccgctgcgtcgcta

SEQ ID NO: 870314 - DNA, 75 bp, synthetic construct
  source 1..75: mol_type = other DNA
aaaaatgccgaattggcgtgcgaagtgactttgcaaccgctgcgtcgctacccgctggatgcggcgatcctcttt

SEQ ID NO: 870315 - DNA, 75 bp, synthetic construct
  source 1..75: mol_type = other DNA
gtaccggtaatatttgtcgctcaccattaggcgaaagatatttaagagcagccttgcctgaaaaaaaaatagatt

SEQ ID NO: 870316 - DNA, 75 bp, synthetic construct
  source 1..75: mol_type = other DNA
acgccatgccagtgaaggttgatgaatggctggcaagccccgccagtgaaggctggcgtctgctgtggctgacgc

SEQ ID NO: 870317 - DNA, 75 bp, synthetic construct
  source 1..75: mol_type = other DNA
gggcagagcgtcgatcaaaaatggtttgtggtttacggcgactccccacagcaaacattgcggcggctggagaca

SEQ ID NO: 870318 - DNA, 75 bp, synthetic construct
  source 1..75: mol_type = other DNA
cgtttgatatgcagcaaacccaccagctcatcacgaccctgaatacgctggaaaaagatctgaaaacgcgttacc

SEQ ID NO: 870319 - DNA, 75 bp, synthetic construct
  source 1..75: mol_type = other DNA
agccaaagttaaagagctggaaggtaaactggagcggtttggcaaactgaatgaaaccttgtcagaaatggggtt

SEQ ID NO: 870320 - DNA, 75 bp, synthetic construct
  source 1..75: mol_type = other DNA
gcgagatcagcaaggaaacgggtaaatctctgcgtgataacgctgaatacgtgaatgcctgggcgtctctgcatc

SEQ ID NO: 870321 - DNA, 75 bp, synthetic construct
  source 1..75: mol_type = other DNA
cggcggaagttgcgccggtttctgcgctttcaaacctgatcactctgtacgctgccgataacgagcaggaacagc

SEQ ID NO: 870322 - DNA, 75 bp, synthetic construct
  source 1..75: mol_type = other DNA
ctgagaaaaaagcaatcaatccttacgtagagacggaagagcaatcttcagtttctgcgctttcaaacctgatcg

SEQ ID NO: 870323 - DNA, 75 bp, synthetic construct
  source 1..75: mol_type = other DNA
gcgacacgctggatatggaagatgtggtaaacgccagcagcagcaacccggcacatcgccgcaatgagatgatgg

SEQ ID NO: 870324 - DNA, 75 bp, synthetic construct
  source 1..75: mol_type = other DNA
atgagtatgtgtcttgatgccgcttgtggtgatttgtatgccaccgatgatgttaagccagaagaaatccgcaag

SEQ ID NO: 870325 - DNA, 75 bp, synthetic construct
  source 1..75: mol_type = other DNA
ctagcggctttaacgaggccgccgcatcattttcatggaacggcccgaaaaaggccattaacccttatctggacc

SEQ ID NO: 870326 - DNA, 75 bp, synthetic construct
  source 1..75: mol_type = other DNA
atttcgtaaggctatgcacaaagccgggttgcgctggtatggcgtgcgggtggctgaaccgcatcatgacggcac

SEQ ID NO: 870327 - DNA, 75 bp, synthetic construct
  source 1..75: mol_type = other DNA
cgaagtggcaattgatgattttggtattggctactctaacttgcataaccttaaatcattgggtgatgctgccaa

SEQ ID NO: 870328 - DNA, 75 bp, synthetic construct
  source 1..75: mol_type = other DNA
aaatggagcaggataagctcattagccgcgcaaagcttgcgcatgagcagcagcgttttaacccggacatggtca

SEQ ID NO: 870329 - DNA, 75 bp, synthetic construct
  source 1..75: mol_type = other DNA
gataaatccgagttggttattcaacaggcagatttggcgagcgatgaggcggagcgttatcagggacacgtttgt

SEQ ID NO: 870330 - DNA, 75 bp, synthetic construct
  source 1..75: mol_type = other DNA
agttcactggcacctgttgtgtttcatgcgcaaaaaagatcgccgcgccattactgctttgttgcgtaagtttgc

SEQ ID NO: 870331 - DNA, 75 bp, synthetic construct
  source 1..75: mol_type = other DNA
aatcgtttgttgagacgctgaccacccataaaaccagtcatttgattgcggaacacatcatcgagctggcgcaca

SEQ ID NO: 870332 - DNA, 75 bp, synthetic construct
  source 1..75: mol_type = other DNA
tctcatgaactggtgaacgaagacggtgacacgctggatatggaagatgtggtaaacgccagcagcagcaacccg

SEQ ID NO: 870333 - DNA, 75 bp, synthetic construct
  source 1..75: mol_type = other DNA
atggcacccgtttcaggtgagagaatggacgacacaattctccggtatatgcagcgtgttgtgagaaattcccgc

SEQ ID NO: 870334 - DNA, 75 bp, synthetic construct
  source 1..75: mol_type = other DNA
ggttaattagcgaaaccagctcgacgtatcagttactcaatattattgccgacgcagccttcttcttcttgcctg

SEQ ID NO: 870335 - DNA, 75 bp, synthetic construct
  source 1..75: mol_type = other DNA
tgaaagagaaaaactgaattaccgggtgatgcacagtggtgccgggcacgacgcgcaaattttcgcgcctcgcgt

SEQ ID NO: 870336 - DNA, 75 bp, synthetic construct
  source 1..75: mol_type = other DNA
caaaggtaaaaacgatcaccaccgtgtagagagcctgttcaaagcttttggtcgcaccctgcgccaggccatccg

SEQ ID NO: 870337 - DNA, 75 bp, synthetic construct
  source 1..75: mol_type = other DNA
ttatcgccggaccacgtcagcagaaggccaggacatggaccattacccttccgtcgcgcgtctttctgggggtaa

SEQ ID NO: 870338 - DNA, 75 bp, synthetic construct
  source 1..75: mol_type = other DNA
tgaacgataaaattctccggtatatgcagcgtgttgtgagaaattcccgcaaccctgaatttatgaatgaagtta

SEQ ID NO: 870339 - DNA, 75 bp, synthetic construct
  source 1..75: mol_type = other DNA
ctgaaaatttgaaccaacaagggaaagacaaatcagctgatggggataccaggacggacattacccgcatggatg

SEQ ID NO: 870340 - DNA, 75 bp, synthetic construct
  source 1..75: mol_type = other DNA
tcactgcattgttgcgtaagtttgccatccgtgaagaccgcgaggaactgggtaataacactggtccacgcttta

SEQ ID NO: 870341 - DNA, 75 bp, synthetic construct
  source 1..75: mol_type = other DNA
actcgtggcaataactgtccccctgttgaaattttgaaccaatcagggggcgaattaccagaaaccgaagaaact

SEQ ID NO: 870342 - DNA, 75 bp, synthetic construct
  source 1..75: mol_type = other DNA
gaaaaagcgaaaaagatgggcgacccgctggttctgacctttggcaaagtagagccgcgcccgaatacggtgaat

SEQ ID NO: 870343 - DNA, 75 bp, synthetic construct
  source 1..75: mol_type = other DNA
gcctgccgcgctgccggactgctgcaacgttttaacgtcacgacgtccgcacaatctatcgagcaactttccacc

SEQ ID NO: 870344 - DNA, 75 bp, synthetic construct
  source 1..75: mol_type = other DNA
gaatcccgtgatcctgtccaacgcgaaatggagcaggataaactcattagccgggcaaggctggcgcatgagcag

SEQ ID NO: 870345 - DNA, 75 bp, synthetic construct
  source 1..75: mol_type = other DNA
tgctgtctgcctggtcagcaaaaaagcatccccctatgtcagctatgaagccgtgatgcataaacgtgagcagcg

SEQ ID NO: 870346 - DNA, 75 bp, synthetic construct
  source 1..75: mol_type = other DNA
tggcaattatcaaaaagtacatggatgacgcaggtgtaacggcggaagatgtgtatcgtgaatttggcaaaaaat

SEQ ID NO: 870347 - DNA, 75 bp, synthetic construct
  source 1..75: mol_type = other DNA
agccagttcaccgaccagatggtgatgaatctggcggactgggaaaccctcccttacgacagtttttcgcctcat

SEQ ID NO: 870348 - DNA, 75 bp, synthetic construct
  source 1..75: mol_type = other DNA
aaaccatcggtttctcgctgtatatggagttgctggaaaacgccgtcgatgcgctgaaagccggacgcgagccgt

SEQ ID NO: 870349 - DNA, 75 bp, synthetic construct
  source 1..75: mol_type = other DNA
atgaggtcattgaagacgcgaaggcgttgacactcgaagacgaattatttcgccttcgggctaacaaccttgtcg

SEQ ID NO: 870350 - DNA, 75 bp, synthetic construct
  source 1..75: mol_type = other DNA
cgaccaacccattccaacccggcaaccagcaggcgttaaagcatggtggctacgcccgccgccttctgcttaaag

SEQ ID NO: 870351 - DNA, 75 bp, synthetic construct
  source 1..75: mol_type = other DNA
tcgaggacgaattatttcgccttcgtgctaacaaccttgtcgctgcagagaatattggtcggtggctggtgtcgc

SEQ ID NO: 870352 - DNA, 75 bp, synthetic construct
  source 1..75: mol_type = other DNA
atgtggaaaacatccagaaagccgccgaacggctggcagaactggtgccagaagcgcggattgccatcggtcacg

SEQ ID NO: 870353 - DNA, 75 bp, synthetic construct
  source 1..75: mol_type = other DNA
gccgaacgtcacgccggaccggtggtgcttattgcgccagatatgcaaaatgctctgcgtttgcatgatgaaatc

SEQ ID NO: 870354 - DNA, 75 bp, synthetic construct
  source 1..75: mol_type = other DNA
ggggtgcgtcataaagagcgcattaaagcgatgcgcgcgaacgtggatattctgacgcttaccgcaacgccgatc

SEQ ID NO: 870355 - DNA, 75 bp, synthetic construct
  source 1..75: mol_type = other DNA
atgaacagcattgcttatcagagatatgccccatatgttgaggcatatcctaacgagaatctgacaaccgttatg

SEQ ID NO: 870356 - DNA, 75 bp, synthetic construct
  source 1..75: mol_type = other DNA
gtggtgttctcggtagaaagtgaaggtcgccgtgaagcactcggtgaactgctcgcccgtattaaaatagctcca

SEQ ID NO: 870357 - DNA, 75 bp, synthetic construct
  source 1..75: mol_type = other DNA
cacgctggaggaagtagaagcgatcaatctgcttcccgcgcacgaatttccgaccgataaagcggcaattgaact

SEQ ID NO: 870358 - DNA, 75 bp, synthetic construct
  source 1..75: mol_type = other DNA
gccatgcaccgtaacacggcccgcattgagtcgctggaattcacaaaggcatctatagagcatcggctcgcctcc

SEQ ID NO: 870359 - DNA, 75 bp, synthetic construct
  source 1..75: mol_type = other DNA
atttcgtaaggcgatgcacaaagccgggttgcgctggtatggcgtgcggggggctgagccgcatcatgacggccc

SEQ ID NO: 870360 - DNA, 75 bp, synthetic construct
  source 1..75: mol_type = other DNA
atcttaatgcggatcgcggaaagtctggcggttatcacatcgggcatacattgctttggtcttcaggtaaaagcc

SEQ ID NO: 870361 - DNA, 75 bp, synthetic construct
  source 1..75: mol_type = other DNA
ctatgaagccgtgatgcataaacgcgagcagcgccgtaagtcgctggagttttttcgttctcatgaactggtgaa

SEQ ID NO: 870362 - DNA, 75 bp, synthetic construct
  source 1..75: mol_type = other DNA
acatgggaaaaggtggcagcggaaaccctgcgtctggatgttatcccgcctgcatttgagaaacttcgtcggaaa

SEQ ID NO: 870363 - DNA, 75 bp, synthetic construct
  source 1..75: mol_type = other DNA
gcagcggctttaacgaggccgccgcagcattctcatggaacagcccgaaaaaggctattaacccttatctggacc

SEQ ID NO: 870364 - DNA, 75 bp, synthetic construct
  source 1..75: mol_type = other DNA
cgcggaaatgcgtggtgactgcgccgttttctacaccatcacctgtccgtcacgtttccattccacgctaaataa

SEQ ID NO: 870365 - DNA, 75 bp, synthetic construct
  source 1..75: mol_type = other DNA
ggtatggcgtccgcgttgcggagccgcaccatgacggcacagtgcactggcatctgttgtgcttcatgcgcaaaa

SEQ ID NO: 870366 - DNA, 75 bp, synthetic construct
  source 1..75: mol_type = other DNA
ctggaagggctgctggttctgcctgaaatgaatcaggatcaggtcaaacgcctgtccacgctggttgcggctcat

SEQ ID NO: 870367 - DNA, 75 bp, synthetic construct
  source 1..75: mol_type = other DNA
gcggcgcggccttttgttgccctttgcctttttactcacatgttctttccggccttatcccctgattctgtggat

SEQ ID NO: 870368 - DNA, 75 bp, synthetic construct
  source 1..75: mol_type = other DNA
acagggtgacaaaaaagcaggtgcgccgatactggatgacccgcgccttgatgccatcctggctgctgctgatgc

SEQ ID NO: 870369 - DNA, 75 bp, synthetic construct
  source 1..75: mol_type = other DNA
ccgcaaatcgctggagtttttccagtcgcacgagctggttaatgcagacggcgacacgctggatatggaagacgt

SEQ ID NO: 870370 - DNA, 75 bp, synthetic construct
  source 1..75: mol_type = other DNA
gcgtgacagccaggtgtctgcgtctttccggttcatggcgagccaggacggcctggaggggctgctggtactgcc

SEQ ID NO: 870371 - DNA, 75 bp, synthetic construct
  source 1..75: mol_type = other DNA
atcgattccagctcacgattggttatcacatccgatgaaggcgtgcgcgccgggcgtagcattccactgaagaag

SEQ ID NO: 870372 - DNA, 75 bp, synthetic construct
  source 1..75: mol_type = other DNA
gaccgttcgtcgctgcgcattctcggttccgtgggcgagccaattaacccggaagcgtgggagtggtactggaaa

SEQ ID NO: 870373 - DNA, 75 bp, synthetic construct
  source 1..75: mol_type = other DNA
ccttaccagaaggtgaaaaacacctcctttgcccccggtaatgtgtccattaaatggtacgaggacggcacgctg

SEQ ID NO: 870374 - DNA, 75 bp, synthetic construct
  source 1..75: mol_type = other DNA
acgctgtttggcgatcacgagcgttttgaacagacctacttttccaccttcaaaaatatgtatttcagtggcgat

SEQ ID NO: 870375 - DNA, 75 bp, synthetic construct
  source 1..75: mol_type = other DNA
tggtggcacgacctggttgagcaagcgagcgatcagcaccaggcggaagagatgaacgccgaagatccgctgttt

SEQ ID NO: 870376 - DNA, 75 bp, synthetic construct
  source 1..75: mol_type = other DNA
attactggatcaccgggcgtgtggacgatgtgctgaacgtctccggtcatcgtctggggacagcggagattgagt

SEQ ID NO: 870377 - DNA, 75 bp, synthetic construct
  source 1..75: mol_type = other DNA
gctataaaggttttccggccttaaagctggcattgagtgaagctctggcaagccaaccggaatctccctccgtac

SEQ ID NO: 870378 - DNA, 75 bp, synthetic construct
  source 1..75: mol_type = other DNA
gctataaaggttttccggcgcttaagttggcgttgagtgaagcgctggcaagccagccggaatctccctccgtgc

SEQ ID NO: 870379 - DNA, 75 bp, synthetic construct
  source 1..75: mol_type = other DNA
tgatcctctgcgactggtcggcgaaaaactgatcaaagaaaatactgccgccatgtatgcaacgctgaacgttaa

SEQ ID NO: 870380 - DNA, 75 bp, synthetic construct
  source 1..75: mol_type = other DNA
ttaattcattgaatatcgatatcttgaaaatcgataaatcgtttgttgagacgctaaccacgcacagaaccagcc

SEQ ID NO: 870381 - DNA, 75 bp, synthetic construct
  source 1..75: mol_type = other DNA
gaagaaagcattattactgacgatgaacacccttttgtggcacatcgaccgtcagcggtgcagagggaaggaaga

SEQ ID NO: 870382 - DNA, 75 bp, synthetic construct
  source 1..75: mol_type = other DNA
atgaaacaaagactccctgcttaccttcaccagaataaattatcagatgaacaacgcaatctgaacaatactgtt

SEQ ID NO: 870383 - DNA, 75 bp, synthetic construct
  source 1..75: mol_type = other DNA
ccgtaccagaaggtgaaaaacacctcctttgccccgggtaacgtctcgattaaatggtacgaagacggcacgctg

SEQ ID NO: 870384 - DNA, 75 bp, synthetic construct
  source 1..75: mol_type = other DNA
tccagttgcaggcgcttgaagcgctattacgtgaacatcagcactggcagagcgatgaaccccagccgcatcaat

SEQ ID NO: 870385 - DNA, 75 bp, synthetic construct
  source 1..75: mol_type = other DNA
ggaaatacaaaagcagtttgatacttctgtttttgcagaagggatcacttatgccctggaccagataaggtcaga

SEQ ID NO: 870386 - DNA, 75 bp, synthetic construct
  source 1..75: mol_type = other DNA
gaccgtttgctgatggagcaactgccgcacctgctggtggaaggtatgttgatctctgcctttgcgctgaaagcg

SEQ ID NO: 870387 - DNA, 75 bp, synthetic construct
  source 1..75: mol_type = other DNA
tccgggctttgtgtcaccggacgaatcaaagcagtaccacccgggatgtggcgctggatcgtcattcaccggact

SEQ ID NO: 870388 - DNA, 75 bp, synthetic construct
  source 1..75: mol_type = other DNA
atgctcctgatatgtcggaatataatgtgatgttaggcatcagagaggaatatttcgatgcccctaatctggggc

SEQ ID NO: 870389 - DNA, 75 bp, synthetic construct
  source 1..75: mol_type = other DNA
ttgcagtgggtgcttatcccgcggatgcacgatttattagataacaatcagccattaccaggggcatttgctgtg

SEQ ID NO: 870390 - DNA, 75 bp, synthetic construct
  source 1..75: mol_type = other DNA
ttaatgatgttactgtcacctggcgtaacgggcacacagcactgcgcgatgcatccttcacagtaccaagtggat

SEQ ID NO: 870391 - DNA, 75 bp, synthetic construct
  source 1..75: mol_type = other DNA
ctattgccgctctggttggggtaaacggttccggaaaatcgacgttgtttaaagcaattatgggatttgtgcgtc

SEQ ID NO: 870392 - DNA, 75 bp, synthetic construct
  source 1..75: mol_type = other DNA
cggcgtgcaaccggcgctggtcgataacgaaggtaacccgctggaaggggctaccgaaggcagcctggtgatcac

SEQ ID NO: 870393 - DNA, 75 bp, synthetic construct
  source 1..75: mol_type = other DNA
gtcaatcaggttaaagacgctggcctgaaagggcgcggcggtgcgggcttctcgactggcctgaaatggagcctg

SEQ ID NO: 870394 - DNA, 75 bp, synthetic construct
  source 1..75: mol_type = other DNA
gggatcaaacagccgttcagcaatacccatttgattaatgggattcagccgaacctgctgaaagagcgctggtaa

SEQ ID NO: 870395 - DNA, 75 bp, synthetic construct
  source 1..75: mol_type = other DNA
gaacatttcgactggatgaagatcggcatgaaggtgctggcgtttgtcggcatgctgattggtgggcgctattta

SEQ ID NO: 870396 - DNA, 75 bp, synthetic construct
  source 1..75: mol_type = other DNA
atgcgcagaccaaaacatatgttttggtctgccaaaagtgatgttttggtcattatgaaaattgaacaaatcgga

SEQ ID NO: 870397 - DNA, 75 bp, synthetic construct
  source 1..75: mol_type = other DNA
gccgcgttcctgtcagggattggcgtttcacgttttaccgtgcgttttgaggataacaaacatgctgaaaaagat

SEQ ID NO: 870398 - DNA, 75 bp, synthetic construct
  source 1..75: mol_type = other DNA
ttttggtcattatgaagattgaacaaatcggaatggcagccttccggcagcaggctgaaagcggtggcgtggatg

SEQ ID NO: 870399 - DNA, 75 bp, synthetic construct
  source 1..75: mol_type = other DNA
acatcatgaagcagggtggcgtactggttccccgcaaatatcacctcatcagaactgcttatgaaatcaacgaag

SEQ ID NO: 870400 - DNA, 75 bp, synthetic construct
  source 1..75: mol_type = other DNA
gagatcagcaaggaaacggggaaatccctgcgtgataatgctgaatacgttaatgcctgggcgtctttgcatcgt

SEQ ID NO: 870401 - DNA, 75 bp, synthetic construct
  source 1..75: mol_type = other DNA
agtctgagttgattaacccgcgcaaaggaacgccgacaagctacatcgcgaaatacattagtaagaacattgacg

SEQ ID NO: 870402 - DNA, 75 bp, synthetic construct
  source 1..75: mol_type = other DNA
atgaagattgaacaaatcggaatggcagctttcaggcaacaggctgaaagcggtggcgtggatgagttcgtcgtg

SEQ ID NO: 870403 - DNA, 75 bp, synthetic construct
  source 1..75: mol_type = other DNA
atgaaagaaaatagtgaaaccagcgtaaaacgatttatccgcgttcctgatgttttaaatcgagtgggatttagt

SEQ ID NO: 870404 - DNA, 75 bp, synthetic construct
  source 1..75: mol_type = other DNA
gcaagcgatggatcgtgccaatagttatgtgattggcgatcgcgcgaccgatattcaactggcagaaaacatggg

SEQ ID NO: 870405 - DNA, 75 bp, synthetic construct
  source 1..75: mol_type = other DNA
ttccggcagcaggctgaaagcggtggcgtggatgagttcgtcgtgcagcggttcggtggtgtgtatcacctcttc

SEQ ID NO: 870406 - DNA, 75 bp, synthetic construct
  source 1..75: mol_type = other DNA
gggattggtgtttcacgttttaccgtgcgttttgaggataacaaacatgctgaaaaagatgatcggagccattaa

SEQ ID NO: 870407 - DNA, 75 bp, synthetic construct
  source 1..75: mol_type = other DNA
atgaagattgaacaaatcggaatggcagcctttcggcaacaggctgaaagcggtggcgtggatgagttcgtcgtg

SEQ ID NO: 870408 - DNA, 75 bp, synthetic construct
  source 1..75: mol_type = other DNA
cacccacatcagcaagccgctgatgcaacgtatcgaatacttcagtagcctgggcaggccaaaggcttattcccg

SEQ ID NO: 870409 - DNA, 75 bp, synthetic construct
  source 1..75: mol_type = other DNA
caaggaaacgggtaaatctctgcgtgataacgctgaatacgttaatgtctgggcgtctctgcatcgtgttcagca

SEQ ID NO: 870410 - DNA, 75 bp, synthetic construct
  source 1..75: mol_type = other DNA
cagcgttttaatccggacatggtcatactggcggacgttaaagcccagccctcccatatcagcaagccgctgatg

SEQ ID NO: 870411 - DNA, 75 bp, synthetic construct
  source 1..75: mol_type = other DNA
atgagtcatgacgatatgagcaactctagcggctttaacgaggctgccgcagcattttcatggaacggcccgaaa

SEQ ID NO: 870412 - DNA, 75 bp, synthetic construct
  source 1..75: mol_type = other DNA
cacgtttccattccacgctaaataacggtaggccaaacccgacctggaccaacgcgacagtaagacaaagcagcg

SEQ ID NO: 870413 - DNA, 75 bp, synthetic construct
  source 1..75: mol_type = other DNA
tccccttgctgaaaatttgtaccaacaagcgaaagacaaatcagctgatggagataccagaacggatatcacccg

SEQ ID NO: 870414 - DNA, 75 bp, synthetic construct
  source 1..75: mol_type = other DNA
tgctggctggtcacgcggcaaggcaacagggtgacaaaaaagcaggtgcgccggtactggataacccgcgtcttg

SEQ ID NO: 870415 - DNA, 75 bp, synthetic construct
  source 1..75: mol_type = other DNA
caaggaaacgggtaaatctctgcgtgataacgctgaatacgtgaatgcgtgggcgtctctgcatcgtgttcagca

SEQ ID NO: 870416 - DNA, 75 bp, synthetic construct
  source 1..75: mol_type = other DNA
cctgtgttaaaggtctggagcttatcgtagaaatgcgcagtgactgtgccgttttctacactatcacctgtccgt

SEQ ID NO: 870417 - DNA, 75 bp, synthetic construct
  source 1..75: mol_type = other DNA
ctaaataacggcaggcccaacccaacctggacaaatgcgacggtaagacaaagtagtgattacctggtcggcatg

SEQ ID NO: 870418 - DNA, 75 bp, synthetic construct
  source 1..75: mol_type = other DNA
cagcgttttaatccagacatggtcattctggctgacgtcaacgcccaaccttcccatatcagcaagccgctgatg

SEQ ID NO: 870419 - DNA, 75 bp, synthetic construct
  source 1..75: mol_type = other DNA
tgctggctggtcaggcggcaaggcaacagggggacaaaaaagcaggtgcgccggtactggataacccgcgccttg

SEQ ID NO: 870420 - DNA, 75 bp, synthetic construct
  source 1..75: mol_type = other DNA
gcgcatcgccgcaatgagatgatggcatgtgttaaaggtctggagcttatcgcgggaatgcgcggtgactgcgcc

SEQ ID NO: 870421 - DNA, 75 bp, synthetic construct
  source 1..75: mol_type = other DNA
gaaaaactggcaaaaaaatttgcatggttacgtagtgctaccacagtgaataagcccaaacgatccagcgccctg

SEQ ID NO: 870422 - DNA, 75 bp, synthetic construct
  source 1..75: mol_type = other DNA
atttctccacttcattcatgtagcaatggagatagggggtaagcagggcatcaaatttgccaacgccacaaaact

SEQ ID NO: 870423 - DNA, 75 bp, synthetic construct
  source 1..75: mol_type = other DNA
ttatttttttctgttccggctgtatacccgcattcacaatacatttttcccccaaaagcaacaactcccgttcac

SEQ ID NO: 870424 - DNA, 75 bp, synthetic construct
  source 1..75: mol_type = other DNA
ttcatagttgtttaaaaattcagctaactttttattcaaaagaagataacgcgacaatcacaagattaactgcgc

SEQ ID NO: 870425 - DNA, 75 bp, synthetic construct
  source 1..75: mol_type = other DNA
gtgatctcgttgttttgcccgcatatcgtagtgaccctgggctggtcgtgctgaataaagcatgtatagaaattg

SEQ ID NO: 870426 - DNA, 75 bp, synthetic construct
  source 1..75: mol_type = other DNA
taacgatattgaagattattttggtgtggaattagtggtgcggaaaaataccggtgtaacattaacacggctttg

SEQ ID NO: 870427 - DNA, 75 bp, synthetic construct
  source 1..75: mol_type = other DNA
tctacagtctatgcgcgattgctgctggaacgtcagggcgtgttacccgccaccgatggcagcccggcgctcttt

SEQ ID NO: 870428 - DNA, 75 bp, synthetic construct
  source 1..75: mol_type = other DNA
tcaccgggctcgtcgtggacgtcctgtctatgcgcaacccgtctcgccgctggtatcttacaacacaccaaatct

SEQ ID NO: 870429 - DNA, 75 bp, synthetic construct
  source 1..75: mol_type = other DNA
gcctgcacatccggcgacgcaggttccaacgcgtcgggccggtgcgctggtggtcatttacggcggcaagctggt

SEQ ID NO: 870430 - DNA, 75 bp, synthetic construct
  source 1..75: mol_type = other DNA
gatgaacgtgctgatggttccgtcccgctgaaactgtccggaaaaatccacaaacagcttgaaagtattgcccga

SEQ ID NO: 870431 - DNA, 75 bp, synthetic construct
  source 1..75: mol_type = other DNA
tggtgtcctcccaaaaaaactgctgaatgaaatgattgagcaggcgtaccaggactttgtggcaaatgagcaaca

SEQ ID NO: 870432 - DNA, 75 bp, synthetic construct
  source 1..75: mol_type = other DNA
gcagcagtaccagcgcgcgcgcctcagctcgccgcagtcaccgggctcggcgtggacgtcctgcctatacgttgc

SEQ ID NO: 870433 - DNA, 75 bp, synthetic construct
  source 1..75: mol_type = other DNA
atgaaaacacaacgtggttatacgctgattgaaacgctggtcgcgatgctgattttggtcatgctaagcgcaagt

SEQ ID NO: 870434 - DNA, 75 bp, synthetic construct
  source 1..75: mol_type = other DNA
ggcatttattgttattgattatttagagagaaggcaagtaagtaaagggcgtgatgtaactgattcaagagtaat

SEQ ID NO: 870435 - DNA, 75 bp, synthetic construct
  source 1..75: mol_type = other DNA
tgccgaagccggttttgatccgcaggggcgaaccagcgaagacctgttggacctggctgaatcccgcgtctttaa

SEQ ID NO: 870436 - DNA, 75 bp, synthetic construct
  source 1..75: mol_type = other DNA
gctaaaagccctggcgaaagaactgaatgtgccggtggtggcgctgtctcagttgaaccgttctctggaacaacg

SEQ ID NO: 870437 - DNA, 75 bp, synthetic construct
  source 1..75: mol_type = other DNA
aacgcagtatcacccggttcgcccggcgaattgttcccgtggtcggcggcatactcctcacagccggactggtgt

SEQ ID NO: 870438 - DNA, 75 bp, synthetic construct
  source 1..75: mol_type = other DNA
ttgatgccattgcggatgaaatccgccgcagggaaagtaccccggtcatacttcgcccgctaaacaacataaaag

SEQ ID NO: 870439 - DNA, 75 bp, synthetic construct
  source 1..75: mol_type = other DNA
atggctttcgtgattctaactttacctctgctctcaatcgctaagggtattggttatggaaatactaaatgggac

SEQ ID NO: 870440 - DNA, 75 bp, synthetic construct
  source 1..75: mol_type = other DNA
tgtcttgtaagtgccgccgcagggacgaatacctgtcatggccattcaccgttggtctttgtgccacgctggccc

SEQ ID NO: 870441 - DNA, 75 bp, synthetic construct
  source 1..75: mol_type = other DNA
atgaaaacacaacgtggttatacgctgattgaaacactggttgcgatgctgattttagtcatgttaagcgcaact

SEQ ID NO: 870442 - DNA, 75 bp, synthetic construct
  source 1..75: mol_type = other DNA
cgtctcaaaaattcatcaggcgaatggtggctggtggtgtccgcatggggaaggattcgactatgccaacgcgga

SEQ ID NO: 870443 - DNA, 75 bp, synthetic construct
  source 1..75: mol_type = other DNA
acctggctgaatcccgcgtctttaaaattgccgaaagtcgtgcaaacaaagacgaagggccgaagaacatcgccg

SEQ ID NO: 870444 - DNA, 75 bp, synthetic construct
  source 1..75: mol_type = other DNA
tgccgaagccggttttgatccgcaggggcgaaccagcgaagatctgctggacctggctgaatcccgcgtctttaa

SEQ ID NO: 870445 - DNA, 75 bp, synthetic construct
  source 1..75: mol_type = other DNA
gacgaagggccgaagaatatcgccgatgtgctcgacgccacggtggcgcgtattgagcaactgttccagcaaccg

SEQ ID NO: 870446 - DNA, 75 bp, synthetic construct
  source 1..75: mol_type = other DNA
ttacccgcctcgctgtgggaaagtcagatcctgcccgcccgcgtgcgcgattattcgcccgagatgctcgatgaa

SEQ ID NO: 870447 - DNA, 75 bp, synthetic construct
  source 1..75: mol_type = other DNA
aactgctgaatgaaatgattgagcaggcgtaccgggatttggtggcaaccaggcagaacagccagatcgattcca

SEQ ID NO: 870448 - DNA, 75 bp, synthetic construct
  source 1..75: mol_type = other DNA
gtgggagggctgattctctttacgcgtaactatcatgatcctgcccagttgcgtgaactggtgcgccagatccgc

SEQ ID NO: 870449 - DNA, 75 bp, synthetic construct
  source 1..75: mol_type = other DNA
aaaccaccggtaaacactttcctggtcacggcgcagtaactgctgactcacataaagagacgccgtgtgatccgc

SEQ ID NO: 870450 - DNA, 75 bp, synthetic construct
  source 1..75: mol_type = other DNA
cactgaaactgtccggaaaaatccacaaacagcctgaaagtattgcccgaagtcgtggcgaccccccacccaaaa

SEQ ID NO: 870451 - DNA, 75 bp, synthetic construct
  source 1..75: mol_type = other DNA
ggttaaaaaaagaaccacgggcatcttatttttttctgttccggctgtatacccgcattcacaatacatttttcc

SEQ ID NO: 870452 - DNA, 75 bp, synthetic construct
  source 1..75: mol_type = other DNA
gtgcaccgtgcatccggataaaatctaccgtgaaattatatggttctgctccggttacctgctgaaatccggacc

SEQ ID NO: 870453 - DNA, 75 bp, synthetic construct
  source 1..75: mol_type = other DNA
cgacgtgagcttcagttcggtgagtggctccgccacgacatcctctccggaacgttcgagcctgccgttctggat

SEQ ID NO: 870454 - DNA, 75 bp, synthetic construct
  source 1..75: mol_type = other DNA
atgggtgaatttttccctgcacaagttttcaagcagctgtcccacgctcgcgcggtgatcgagcgccatctggct

SEQ ID NO: 870455 - DNA, 75 bp, synthetic construct
  source 1..75: mol_type = other DNA
cgacactattgcccagtggaatgcagagtcggattggaagggtgacgagcggaacgtcgttcttgctcttgctcg

SEQ ID NO: 870456 - DNA, 75 bp, synthetic construct
  source 1..75: mol_type = other DNA
tcgccatggatattgatatcagctttgcacccgtgctggacgtagggcacattagcgcggcgataggcgagcgtt

SEQ ID NO: 870457 - DNA, 75 bp, synthetic construct
  source 1..75: mol_type = other DNA
ttttacgccaggagttgggttttgacggcgtcattttctctgacgatttgtcgatggaaggcgctgcgattatgg

SEQ ID NO: 870458 - DNA, 75 bp, synthetic construct
  source 1..75: mol_type = other DNA
cacgatcttgcgattttgctgaccaaggcgaggcaacacagccttgctctgctaggtccatccgcagtcacgttc

SEQ ID NO: 870459 - DNA, 75 bp, synthetic construct
  source 1..75: mol_type = other DNA
ccctgaaactgtccggaaaaatccacaaacagcatgaaagtattgcccgaagtcgtggcgaccccccacccaaaa

SEQ ID NO: 870460 - DNA, 75 bp, synthetic construct
  source 1..75: mol_type = other DNA
tctctaaggaacaacgcgccataacagaacaggcgctgaaatcgggcgaattgcgctgcgtggtcgcaacctcca

SEQ ID NO: 870461 - DNA, 75 bp, synthetic construct
  source 1..75: mol_type = other DNA
tacctcctggcggatccagcaaattacccgcgatcaggtgattgtgacgcctgcgcccggacgctccgccagact

SEQ ID NO: 870462 - DNA, 75 bp, synthetic construct
  source 1..75: mol_type = other DNA
gcgccgactggctccgggaaaacgctggcagcttttctctacgcccttgatcgacttttccgcgaaggcggagac

SEQ ID NO: 870463 - DNA, 75 bp, synthetic construct
  source 1..75: mol_type = other DNA
tcgttctgcccggctccccttctggcgtggtgaaggtaacggacgtccggcagaattaggcgagatgatcggcga

SEQ ID NO: 870464 - DNA, 75 bp, synthetic construct
  source 1..75: mol_type = other DNA
tgcgtggtcgttttgttgaaggtcttggcggcgcgcaatttgctgatcgcctgactattgaccgattgcgcgatc

SEQ ID NO: 870465 - DNA, 75 bp, synthetic construct
  source 1..75: mol_type = other DNA
cagagaagcgacgcgtccagttccgtctacagtctatgcgcgattgctgctggaacgtcagggcgtgttgcccgc

SEQ ID NO: 870466 - DNA, 75 bp, synthetic construct
  source 1..75: mol_type = other DNA
cgctgaaactgtccggaaaaatccacaaacagcctgaaagtattgcccgaagtcgtggcgaccccccgcccaaaa

SEQ ID NO: 870467 - DNA, 75 bp, synthetic construct
  source 1..75: mol_type = other DNA
ccctgaaactgtccggaaaaatccacaaacagcgtgaaagtattgcccgaagtcgtggcgaccccccgcccaaaa

SEQ ID NO: 870468 - DNA, 75 bp, synthetic construct
  source 1..75: mol_type = other DNA
ccctgaaactgtccggaaaaatccacaaacagcctgaaagtattgcccgaagtcgtggcgaccccccccccaaaa

SEQ ID NO: 870469 - DNA, 75 bp, synthetic construct
  source 1..75: mol_type = other DNA
ggtcattcgccaggtggaagaagagttgcaacgactggctcctggcagaagagcgaaaggtgaagaaggattgtt

SEQ ID NO: 870470 - DNA, 75 bp, synthetic construct
  source 1..75: mol_type = other DNA
ccaatatggatgatgtctcatcggtcgccagcggcaccggcgaagacagccatgccggccgggaaggctccatct

SEQ ID NO: 870471 - DNA, 75 bp, synthetic construct
  source 1..75: mol_type = other DNA
acgggcatcgttccggggagtcgccatctggtcctcgaacggtgccgtgatgaaattggtgactggcgtattatt

SEQ ID NO: 870472 - DNA, 75 bp, synthetic construct
  source 1..75: mol_type = other DNA
gcttcccgcagcggatgcagaaagattaccgcgatgccatcgatgcgctgtttgatgccaaccgttttggtcaga

SEQ ID NO: 870473 - DNA, 75 bp, synthetic construct
  source 1..75: mol_type = other DNA
agaagccttaaacctggaaaacaaaagttttgtcccgctggcgcataccaacgaagctcgcgcactggtcggcat

SEQ ID NO: 870474 - DNA, 75 bp, synthetic construct
  source 1..75: mol_type = other DNA
cgttggtagaaattattcgcggcgagaaaagctccgacgaaaccatcgcgaaagtcgtcgcctgggcgagcaaga

SEQ ID NO: 870475 - DNA, 75 bp, synthetic construct
  source 1..75: mol_type = other DNA
tggatgagctggtggattgtgtggcagagctggaaaccaaggttgggaagtttgaaaagctggtgcaggaggtac

SEQ ID NO: 870476 - DNA, 75 bp, synthetic construct
  source 1..75: mol_type = other DNA
actatttattggctgcacaacagggtgatatcgataaagtaaaaacctgccttgcgctgggtgtcgatattaata

SEQ ID NO: 870477 - DNA, 75 bp, synthetic construct
  source 1..75: mol_type = other DNA
atgactataaaaaatctacctgccgactatttattggctgcgcaacagggggatatcgataaagtaaaaacctgc

SEQ ID NO: 870478 - DNA, 75 bp, synthetic construct
  source 1..75: mol_type = other DNA
atctcgctggtcgccgccggatggatttttaccgcgctgatttatctcgtggcgtcactgtttttccggctgata

SEQ ID NO: 870479 - DNA, 75 bp, synthetic construct
  source 1..75: mol_type = other DNA
gcaggaaatgttgcgacaggcggaacaactggaaaaaacaggtgtaacaaaagatgccattcgtcgggatatggt

SEQ ID NO: 870480 - DNA, 75 bp, synthetic construct
  source 1..75: mol_type = other DNA
tggatgagctggtggattgtgtggcggagctggaaaccaaagttggaaagtttgaaaaactggtgcaggaggtac

SEQ ID NO: 870481 - DNA, 75 bp, synthetic construct
  source 1..75: mol_type = other DNA
gaaggtctgcgtaataaagcgcgtcataacgaaccgtactatcccccggttgagccagcccgtccggttggcgac

SEQ ID NO: 870482 - DNA, 75 bp, synthetic construct
  source 1..75: mol_type = other DNA
agtacgcccggataccgtgctggcgtctaacacttcaaccattcctatcagcgaactggccaacgcgctggaacg

SEQ ID NO: 870483 - DNA, 75 bp, synthetic construct
  source 1..75: mol_type = other DNA
cgatgggtccggcatacctgctggacgtcgtcgggattgataccgcgcatcatgcccaggcggtgatggcagcag

SEQ ID NO: 870484 - DNA, 75 bp, synthetic construct
  source 1..75: mol_type = other DNA
caactggaaaaaacaggtgtaacaaaagatgccattcgtcgggatatggtgccagcgctcagggaactgatgcag

SEQ ID NO: 870485 - DNA, 75 bp, synthetic construct
  source 1..75: mol_type = other DNA
ctcctcgcccaacaacactacgacaacttccgcgaccgttttgctaactggccggtgcgcatcgaaatgatctcc

SEQ ID NO: 870486 - DNA, 75 bp, synthetic construct
  source 1..75: mol_type = other DNA
agtaacgagatggcacgagcgcaggatcgtattaacgaaatcaaccaacgtgtcatttcaggtagtcgtttgtaa

SEQ ID NO: 870487 - DNA, 75 bp, synthetic construct
  source 1..75: mol_type = other DNA
caggtacccgtattttgcgtgttcttaaggcgttacgtggccacgctttgaacggtatctccaacggtgaactgg

SEQ ID NO: 870488 - DNA, 75 bp, synthetic construct
  source 1..75: mol_type = other DNA
attgaacgcgcggatcatttcggtctggcgcagttgcaccagttgcgcggtcgcgtcggacgctcacaccatcag

SEQ ID NO: 870489 - DNA, 75 bp, synthetic construct
  source 1..75: mol_type = other DNA
gcgtgatcgaatttgccgagaagaatcacgttaatccggcctggttgattggtttgctgcaaaaacagccgcagc

SEQ ID NO: 870490 - DNA, 75 bp, synthetic construct
  source 1..75: mol_type = other DNA
cgccgcaccatcaaccccgatacactgatccgtaaccttgcggagctgcatattggtcagccggtggtccatctg

SEQ ID NO: 870491 - DNA, 75 bp, synthetic construct
  source 1..75: mol_type = other DNA
gtaaaatataacgaaccgcgaatgccgtggccggaggtggttgctttgctgcaaaaatatacccgtctggaaaag

SEQ ID NO: 870492 - DNA, 75 bp, synthetic construct
  source 1..75: mol_type = other DNA
gcatattcgggcgttgaataattcccctgatattgcaaaggctattcaggcaattgatatcgataggctgcgata

SEQ ID NO: 870493 - DNA, 75 bp, synthetic construct
  source 1..75: mol_type = other DNA
atgagtaaggcgaatgtttcaagctccggcacccgtatccttcgggtacttaaggcactgcgcggtcatgccctg

SEQ ID NO: 870494 - DNA, 75 bp, synthetic construct
  source 1..75: mol_type = other DNA
atgcgtgtgttactggcgccgatggagggggtacttgactctctggtgcgtgaattactgaccgaagtgaatgac

SEQ ID NO: 870495 - DNA, 75 bp, synthetic construct
  source 1..75: mol_type = other DNA
gaactcatctaccagggtgcaaaagcgatgcgcgaagctgtaccggcgcatttacccgtcagtgtgaaagtgcgg

SEQ ID NO: 870496 - DNA, 75 bp, synthetic construct
  source 1..75: mol_type = other DNA
cgtgaattgctgaccgaagttaacgactacgatctgtgcatcaccgagtttgtccgcgtggtggatcaactgctg

SEQ ID NO: 870497 - DNA, 75 bp, synthetic construct
  source 1..75: mol_type = other DNA
ggcgtcggtgttcttccggctgatacgtacggcctgccgtcagcgttttgaggggcgggaaccatgtcaaggctg

SEQ ID NO: 870498 - DNA, 75 bp, synthetic construct
  source 1..75: mol_type = other DNA
cccgggagttactggaaagccgccatctgcgcatcaagtttattgacgagcagggcagcctgtttgttgacgatg

SEQ ID NO: 870499 - DNA, 75 bp, synthetic construct
  source 1..75: mol_type = other DNA
gtctgggttttcgcgctgttctcgacagcaccattgcgctggcagtgtggctgcaaattgaactggcggaaccgt

SEQ ID NO: 870500 - DNA, 75 bp, synthetic construct
  source 1..75: mol_type = other DNA
ttcgcgtcttggcaacattatgcgtgccgatgtgttgggcgaaccgctgggctgccaggcgattgtcgggttttc

SEQ ID NO: 870501 - DNA, 75 bp, synthetic construct
  source 1..75: mol_type = other DNA
ctggccgctgtgggggggattacttacatcgggagccagtcgaaaactgtcccgatggtttatgaacaggacaag

SEQ ID NO: 870502 - DNA, 75 bp, synthetic construct
  source 1..75: mol_type = other DNA
ccgcaggcgtgctgcgaactgtgccaccagccggtggcaaaaaagccggatacgctgactcacctgtcggcggaa

SEQ ID NO: 870503 - DNA, 75 bp, synthetic construct
  source 1..75: mol_type = other DNA
atgaaagatttcatcaccgaagcatggctaagagcgaaccatacgcttagcgaaggcgcagagatccatctccct

SEQ ID NO: 870504 - DNA, 75 bp, synthetic construct
  source 1..75: mol_type = other DNA
gttatctcatctatcaaagatgtttgcgtgagtaatatcgctttcagtataccccccgaaattaatgaagaaata

SEQ ID NO: 870505 - DNA, 75 bp, synthetic construct
  source 1..75: mol_type = other DNA
attattgtggtgcttgttctgctttatggcgaacatttcggcatgagcctttctggcttgttgacctttggtggt

SEQ ID NO: 870506 - DNA, 75 bp, synthetic construct
  source 1..75: mol_type = other DNA
gccggcgcaccgcgttaatgaacactcccttcgccaggtggtcagttcagcggtggcaacccgtgacgccgccac

SEQ ID NO: 870507 - DNA, 75 bp, synthetic construct
  source 1..75: mol_type = other DNA
cgttaaaggcacgtttggtaagcaatccagcgtagtcaaatgggtggttctggcagaagtcgtcgccggtggcat

SEQ ID NO: 870508 - DNA, 75 bp, synthetic construct
  source 1..75: mol_type = other DNA
aaaatggtgaggtctgcgggtttgccgatgaggtttccttcaaaggccttgaagtgcaggaatacagtaaaacaa

SEQ ID NO: 870509 - DNA, 75 bp, synthetic construct
  source 1..75: mol_type = other DNA
atgtcaattctgaatgtattatccgatgccatcctgtcacagaagaaagtaaattttaattacaaagataaagag

SEQ ID NO: 870510 - DNA, 75 bp, synthetic construct
  source 1..75: mol_type = other DNA
gggcagaccgcttgtctccagccaaaatcgacgactaccgtaccgctgtatggaactttatcgataacataagaa

SEQ ID NO: 870511 - DNA, 75 bp, synthetic construct
  source 1..75: mol_type = other DNA
aagaaaagcacagccttttgcctgctgcataccgcattatttccatcacccgtcatacaccacaggagtggaatt

SEQ ID NO: 870512 - DNA, 75 bp, synthetic construct
  source 1..75: mol_type = other DNA
cgggactgtgtgctgtacaggcaggagatggcgaactggcaccggcaccacaatctcattctgaccctggatgaa

SEQ ID NO: 870513 - DNA, 75 bp, synthetic construct
  source 1..75: mol_type = other DNA
gggctgggcagacctgcttatccgcaatgtcggcaaagtgaccggcgcgctttttaccctccgcgaaggcgacag

SEQ ID NO: 870514 - DNA, 75 bp, synthetic construct
  source 1..75: mol_type = other DNA
ctgacctaccgacaactacattcccttcgcaggggttcaccggggcgtattatcagttgaataatgacaactttg

SEQ ID NO: 870515 - DNA, 75 bp, synthetic construct
  source 1..75: mol_type = other DNA
aacctctgcaaatggcactccagtggagggtcaggtcatcaactttagcgtaacgccagaaggggcgacgttaag

SEQ ID NO: 870516 - DNA, 75 bp, synthetic construct
  source 1..75: mol_type = other DNA
agctagcctggaaaatggtagctccacgcttagcacgtccatacaagtcgacgctgatgcgtctacggcacatct

SEQ ID NO: 870517 - DNA, 75 bp, synthetic construct
  source 1..75: mol_type = other DNA
acgccagcatcaacgaaaacaacgatgtgatgaacccgcatcgtatcttcatcaaagattttaactggtcaaaac

SEQ ID NO: 870518 - DNA, 75 bp, synthetic construct
  source 1..75: mol_type = other DNA
gtggactggatcgaaaccacccgtaaccgggacggtacactgaaaagtgaaccggtcaaaatgcgcgcgcttgtc

SEQ ID NO: 870519 - DNA, 75 bp, synthetic construct
  source 1..75: mol_type = other DNA
gttgactggattgagacaacacgtaaccgcgacggtacgttaaaaaacccaccggttcgaatgagagcactggtc

SEQ ID NO: 870520 - DNA, 75 bp, synthetic construct
  source 1..75: mol_type = other DNA
cgggactgtgtgctgtacaaacaggaaatggcgaactggcgccggcaccacaatctcattctgaccctggatgaa

SEQ ID NO: 870521 - DNA, 75 bp, synthetic construct
  source 1..75: mol_type = other DNA
tttatggcttcgcggctgttacggaaatggctatcccattgacgctttccgccataagccgttgttgattattgc

SEQ ID NO: 870522 - DNA, 75 bp, synthetic construct
  source 1..75: mol_type = other DNA
tctttaccgcgcataggtgaagcccctatttccatttcagactatggagacggttggatagaccttcttattcgc

SEQ ID NO: 870523 - DNA, 75 bp, synthetic construct
  source 1..75: mol_type = other DNA
gtgacctacatcgtatcgcggatgccctgcaggcggtccagaaacgtaacttctggcagttacaggctgaaatca

SEQ ID NO: 870524 - DNA, 75 bp, synthetic construct
  source 1..75: mol_type = other DNA
gtgatctacatcgtatcgcggatgccctgcaggcggttcagaaacgtaacttctggcagttacaggctgaaatca

SEQ ID NO: 870525 - DNA, 75 bp, synthetic construct
  source 1..75: mol_type = other DNA
gtgaactgcatcgtatcgcggatgccctgcaggcggtgcagaaacgtaacttctggcagttacaggctgaaatca

SEQ ID NO: 870526 - DNA, 75 bp, synthetic construct
  source 1..75: mol_type = other DNA
atgaggcataaaaataaagttgatgttgtaaagtttctgaaagtttttgagtcaaagaagactcctgaaaatggc

SEQ ID NO: 870527 - DNA, 75 bp, synthetic construct
  source 1..75: mol_type = other DNA
gttttgggcaacgttatttgctgctattggtgcattgggtagcatgacagcagcttttataggactgatgaaata

SEQ ID NO: 870528 - DNA, 75 bp, synthetic construct
  source 1..75: mol_type = other DNA
gtgagctacatcgtatcgcggatgccctgcaggcggtgcagaaacgtaacttctggcagttacaggctgaaatca

SEQ ID NO: 870529 - DNA, 75 bp, synthetic construct
  source 1..75: mol_type = other DNA
ttttcaactgtcaattggtctggaacgtttttttaaaattatttatgttgttcagtatatgattgaaaatgattt

SEQ ID NO: 870530 - DNA, 75 bp, synthetic construct
  source 1..75: mol_type = other DNA
cagcaaagccctgcgcgacctggccttctggctgtaccgccagctggaaaacgagtacgactggctgacctcaga

SEQ ID NO: 870531 - DNA, 75 bp, synthetic construct
  source 1..75: mol_type = other DNA
agcggattctgcagccagggggacggagcctgttttgaaggacgctggcactggcagtctgcaacagcccggaga

SEQ ID NO: 870532 - DNA, 75 bp, synthetic construct
  source 1..75: mol_type = other DNA
gtgaactccatcgtatcgcggatgccctgcaggcggtccagaaacgtaacttctggcagttacaggctgaaatca

SEQ ID NO: 870533 - DNA, 75 bp, synthetic construct
  source 1..75: mol_type = other DNA
gtgaactacatcgtatcgcggatgccctgcaggcggtacagaaacgtaacttctggcagttacaggctgaaatca

SEQ ID NO: 870534 - DNA, 75 bp, synthetic construct
  source 1..75: mol_type = other DNA
attgcatgggaaataattagcatgttgcaaccgtattactttttgctaatgagattacgagatactgtgcagttg

SEQ ID NO: 870535 - DNA, 75 bp, synthetic construct
  source 1..75: mol_type = other DNA
cgttaataggtatctatttctctgtaaaaatgaaattagataaagcatctcacgccgaaataactaaagaattag

SEQ ID NO: 870536 - DNA, 75 bp, synthetic construct
  source 1..75: mol_type = other DNA
gccggttattgcagtaaccgcacatgcgatggccgggcaaaaagaaaagctacttggcgcggggatgagtgatta

SEQ ID NO: 870537 - DNA, 75 bp, synthetic construct
  source 1..75: mol_type = other DNA
ttgcaggcaaacgtctggcttatgttgaaccgaattccgctgccgcgcagtgtactctcgacattttaagcgaaa

SEQ ID NO: 870538 - DNA, 75 bp, synthetic construct
  source 1..75: mol_type = other DNA
ttctcaaaactggaagctggcaaactgattctggaaagcattccattcccactgcgtagcacgctggatgaagtg

SEQ ID NO: 870539 - DNA, 75 bp, synthetic construct
  source 1..75: mol_type = other DNA
atgttaaagcataaaattcaaacaatatttgaagctctgttatacataatgcttacttattggttaatagatgct

SEQ ID NO: 870540 - DNA, 75 bp, synthetic construct
  source 1..75: mol_type = other DNA
tctccatcacccaacatattaatgcactttacagcaaccaacctaaatccgcttactctgagcttacgcgagaat

SEQ ID NO: 870541 - DNA, 75 bp, synthetic construct
  source 1..75: mol_type = other DNA
cggttatagcggcgtaccacgtatgaagaatctctgccaactcatcgaacaacaactacgtagcggtaccaaaga

SEQ ID NO: 870542 - DNA, 75 bp, synthetic construct
  source 1..75: mol_type = other DNA
gacgatgcagcatgagcggttggcgcaagcggtgtcaatgaccgattttctgatgctggcacttccgtgccatgc

SEQ ID NO: 870543 - DNA, 75 bp, synthetic construct
  source 1..75: mol_type = other DNA
aaagaatctctttttaatgagaagtttacttttaaccatgtcattatcaagcattaattcttatgctgaagagac

SEQ ID NO: 870544 - DNA, 75 bp, synthetic construct
  source 1..75: mol_type = other DNA
atgagcaaagaaatcagagcaaaaagaatcaaaaatgcaattcttaatgcttcaacttatgaggaagtatctaat

SEQ ID NO: 870545 - DNA, 75 bp, synthetic construct
  source 1..75: mol_type = other DNA
ccgctggcggtttctaccgaatatggcatgagtctgcaaaatcgcgaatctatcgggcaattgataagcgttctg

SEQ ID NO: 870546 - DNA, 75 bp, synthetic construct
  source 1..75: mol_type = other DNA
cgctacaagcctggcagcggtatttcctctcgcgtcgtgacgcccgaagtcaacgaaattgtggtgaacccgaat

SEQ ID NO: 870547 - DNA, 75 bp, synthetic construct
  source 1..75: mol_type = other DNA
caaagttgaggaacagctggttggagaaaacccggaaggcctggttgatttgattcataaactgcatggcagttg

SEQ ID NO: 870548 - DNA, 75 bp, synthetic construct
  source 1..75: mol_type = other DNA
gagcctgttttgaaggacgctggcactggcagccagcggcaccccggaaaatcagggaatatgccccgcagaacc

SEQ ID NO: 870549 - DNA, 75 bp, synthetic construct
  source 1..75: mol_type = other DNA
tgagcagttcctgccgtatctgctgggtgagaaagacggtcagccgaaagatgccgcatgggctgaaaaactgac

SEQ ID NO: 870550 - DNA, 75 bp, synthetic construct
  source 1..75: mol_type = other DNA
ttctgaccgctatgcacccggcgtggcgcgaattcacgaaggggcatggtacgatccagataaaggcggcgagcc

SEQ ID NO: 870551 - DNA, 75 bp, synthetic construct
  source 1..75: mol_type = other DNA
aagacggtcagccgaaagatgccgcatgggctgaaaaactgaccggcattgatgccgaaaccattcgtgggctgg

SEQ ID NO: 870552 - DNA, 75 bp, synthetic construct
  source 1..75: mol_type = other DNA
aggctggcgcaagctggaaacggttatcgccatagataaccagtggacctcaacctgccgctttgccgatatcgt

SEQ ID NO: 870553 - DNA, 75 bp, synthetic construct
  source 1..75: mol_type = other DNA
gcaatctgtgcatccggatttccgacttcactcgcagttatgtgagtcagaaacgctgcgtcagcaatatacggt

SEQ ID NO: 870554 - DNA, 75 bp, synthetic construct
  source 1..75: mol_type = other DNA
gcgctggcccacaccctgtacagcgaaaatctgtacgacaaacaatttattgctgattattgcgttggttttgaa

SEQ ID NO: 870555 - DNA, 75 bp, synthetic construct
  source 1..75: mol_type = other DNA
gtgtcagggcttaaacagacaggaaccgcagtaattcctgccgttggcgataacctttcacgacttgttgggggg

SEQ ID NO: 870556 - DNA, 75 bp, synthetic construct
  source 1..75: mol_type = other DNA
atcatcgttgagaatattatcggccttggcaaagcctattcgctggctgtcaccgctgaaggcgtggaaacggcg

SEQ ID NO: 870557 - DNA, 75 bp, synthetic construct
  source 1..75: mol_type = other DNA
ttcccaaaattctgtttattctctttgttgttgccttctgcgtttatttagtgccgcgcgttgccatcaacttct

SEQ ID NO: 870558 - DNA, 75 bp, synthetic construct
  source 1..75: mol_type = other DNA
gcaatctgtgcatccggattttcgacttcactcgcagttatgtgagtctgaaaccctgcgtcagcagtatacggt

SEQ ID NO: 870559 - DNA, 75 bp, synthetic construct
  source 1..75: mol_type = other DNA
accagcaagcgaactggtggtgcccggatcacgatgtttatgaatattacgcgcagctaaaagcgaaagtcgccg

SEQ ID NO: 870560 - DNA, 75 bp, synthetic construct
  source 1..75: mol_type = other DNA
cttcactcgcagttatgtgagtcggaaactctgcgtcagcaatatacggtagcgggtaaagagccagtattcatt

SEQ ID NO: 870561 - DNA, 75 bp, synthetic construct
  source 1..75: mol_type = other DNA
gatgccgaaacaattcgtgcgctggcacggcagatggcggcgaacagaacacagatcattgctggctggtgtgta

SEQ ID NO: 870562 - DNA, 75 bp, synthetic construct
  source 1..75: mol_type = other DNA
tcagacgccgctgtggatgaggcccttctcatcaacgaatacaccttcaccgaagccggtctgcgcgccggctga

SEQ ID NO: 870563 - DNA, 75 bp, synthetic construct
  source 1..75: mol_type = other DNA
gcccgctggttgtatcagcaacttgaaacgcaatatgactggctgacctcaccggaagccgtggatgaggcgctt

SEQ ID NO: 870564 - DNA, 75 bp, synthetic construct
  source 1..75: mol_type = other DNA
tatcatcgccagcagcttgaagagattgctgaagaggatgatgaggactgggatgatgactgggacgaagacgac

SEQ ID NO: 870565 - DNA, 75 bp, synthetic construct
  source 1..75: mol_type = other DNA
tacgactggctgacctcagacgccgctgtggatgaggccctgctcatcaacgaatacaccttcaccgaagccggt

SEQ ID NO: 870566 - DNA, 75 bp, synthetic construct
  source 1..75: mol_type = other DNA
aagaactggtctatgtgattaatggcaggttcctgagaaaagatattaagaaagataaaatcacggaccgggaaa

SEQ ID NO: 870567 - DNA, 75 bp, synthetic construct
  source 1..75: mol_type = other DNA
gttttacgctgaccaatggcaacaacgaagagcaagaactgattttacagcggcgcgaaggtaagtgggaaatcg

SEQ ID NO: 870568 - DNA, 75 bp, synthetic construct
  source 1..75: mol_type = other DNA
actgacgaagaaaaacgcctgctgaggattaccgacgcgcgtactgtcacgctgtaccatccgcagggctgcccc

SEQ ID NO: 870569 - DNA, 75 bp, synthetic construct
  source 1..75: mol_type = other DNA
tgaacagcggctgaatgcggtctggcagcgggactcttccgaggctcgccagctgatggaagatctcggttctgc

SEQ ID NO: 870570 - DNA, 75 bp, synthetic construct
  source 1..75: mol_type = other DNA
gcccgcctgacgctggagcgtctggggctgagtcatgaactgaccgcgcagttgcgccagctactgcacaaaccg

SEQ ID NO: 870571 - DNA, 75 bp, synthetic construct
  source 1..75: mol_type = other DNA
aaaagagccaaaacggttgatcctaatcccggatggcgaacacattgatgctttttccgatcgtcacggcgatgt

SEQ ID NO: 870572 - DNA, 75 bp, synthetic construct
  source 1..75: mol_type = other DNA
tggaaattatccgcatgacggcccagggaatgctgcctaaatcgattgccagaattgaaaattgtagtgtgaaga

SEQ ID NO: 870573 - DNA, 75 bp, synthetic construct
  source 1..75: mol_type = other DNA
tgaacagcggctgaatgcggtctggcagcgggactcctccgaggctcgccagttgatggaagatctcggctccgc

SEQ ID NO: 870574 - DNA, 75 bp, synthetic construct
  source 1..75: mol_type = other DNA
gcaaatgggcttacagggcgattcgtcagggctggccagcattctcacagtggcttgatgccgtgattcagcgtg

SEQ ID NO: 870575 - DNA, 75 bp, synthetic construct
  source 1..75: mol_type = other DNA
ttgatgcagtcagtctgcgcgatctgacgcccgggcagccaatacaactaaccatgctacgccaagcctggcgag

SEQ ID NO: 870576 - DNA, 75 bp, synthetic construct
  source 1..75: mol_type = other DNA
cgtctcgcaaatcaacggctgcgcattttgtctggagatgcacagcaaagcattacgcaaatccggtgtgccgca

SEQ ID NO: 870577 - DNA, 75 bp, synthetic construct
  source 1..75: mol_type = other DNA
gccgatctgggggcacctgcgcccacactcaccatcaaaaaccccgagaacggacatgctcacctgttgtatgcc

SEQ ID NO: 870578 - DNA, 75 bp, synthetic construct
  source 1..75: mol_type = other DNA
gctaaaaatgaccatttttacgggaaacattgtgctgatgctggcgctaatggtttcgtgagtaaaaaagaaggc

SEQ ID NO: 870579 - DNA, 75 bp, synthetic construct
  source 1..75: mol_type = other DNA
ggtaaagcgaaaggcgccaccgggcgtccggtagcgttgctggcacagttcctgctgaatcgcgccgggtttaac

SEQ ID NO: 870580 - DNA, 75 bp, synthetic construct
  source 1..75: mol_type = other DNA
gatgcaaatgaatcctggcgtgcagaagggttggcggcgcgttgccagctattggcggatttaggcgttgcaatg

SEQ ID NO: 870581 - DNA, 75 bp, synthetic construct
  source 1..75: mol_type = other DNA
gacgctaatgagtcctggcgcgcggaaggactggcggcacgttgtcagttactggccgatttaggcgtcgcgatg

SEQ ID NO: 870582 - DNA, 75 bp, synthetic construct
  source 1..75: mol_type = other DNA
ctgcgcgttgtgggatctctcggcccgtaaacagcagcaaacgttagctgaatttatcggcataacgcttcccga

SEQ ID NO: 870583 - DNA, 75 bp, synthetic construct
  source 1..75: mol_type = other DNA
cgcaacagagatcagcgacctgacgttcgccatcgggctgatgaattgctttaaccgtctggcggtttccatgcg

SEQ ID NO: 870584 - DNA, 75 bp, synthetic construct
  source 1..75: mol_type = other DNA
gaggaagagcttgaatacgcatttgttatccggcgctatgaccgggattacaaggggctgccagtgcatcaggaa

SEQ ID NO: 870585 - DNA, 75 bp, synthetic construct
  source 1..75: mol_type = other DNA
cgctggcgactgaagcgcgtgcacaaggttttagtctgatgctgggctgcatgttgtgtacctctcgtgccatta

SEQ ID NO: 870586 - DNA, 75 bp, synthetic construct
  source 1..75: mol_type = other DNA
gatacgcacacgccagaaattcaggctgcacgcggtcgcaagggcggttctaagtctaagcgcagcacagtggct

SEQ ID NO: 870587 - DNA, 75 bp, synthetic construct
  source 1..75: mol_type = other DNA
ttgcagatttcatccgtccgaatagcggaagtttgcttaaacagattgaagcgaagactgcggccagattaaagc

SEQ ID NO: 870588 - DNA, 75 bp, synthetic construct
  source 1..75: mol_type = other DNA
tgaagagcaggatttagttttacagcggcgcgaaggaaagtgggaaattgccgattttatccgtcctggcagcgg

SEQ ID NO: 870589 - DNA, 75 bp, synthetic construct
  source 1..75: mol_type = other DNA
aatgaattttataaaaccaccttcaataaaaacggcaatttcgatcaagagatgcaaatagaacggcaatttatt

SEQ ID NO: 870590 - DNA, 75 bp, synthetic construct
  source 1..75: mol_type = other DNA
ttgaaatccagcgtaacctgttgcaggagatgctggagcgccatccagaaatcgacgtcgttgccggaacggcca

SEQ ID NO: 870591 - DNA, 75 bp, synthetic construct
  source 1..75: mol_type = other DNA
gtgtggatttaaaagtgctggaggcaggcggctacagccagttggctacccagcaagcacaaatcgaccagtgta

SEQ ID NO: 870592 - DNA, 75 bp, synthetic construct
  source 1..75: mol_type = other DNA
atcaggtgtatcgcgggctgaagcggggaagagtgattatggctgccagcgatcaaatggtctggcagggggaac

SEQ ID NO: 870593 - DNA, 75 bp, synthetic construct
  source 1..75: mol_type = other DNA
gcgattcgtcagggatggccagcattctcacagtggcttgatgcggtgattcagcgtgtcgaaatgtacaacgca

SEQ ID NO: 870594 - DNA, 75 bp, synthetic construct
  source 1..75: mol_type = other DNA
tcagggctggccagcattctcacaatggcttgatgccgtgatccagcgtgtcgaaatgtacaacgcatcacttcc

SEQ ID NO: 870595 - DNA, 75 bp, synthetic construct
  source 1..75: mol_type = other DNA
tgtgaacggacacgctcacctgctctatgcactcaatatcgccgtgagaaccgcgcctgatgcgtcggttaaggc

SEQ ID NO: 870596 - DNA, 75 bp, synthetic construct
  source 1..75: mol_type = other DNA
tctcacgctgccgggcaatattggctggctggattatgatccgatttgtgattgtcaggattttggcgatctggt

SEQ ID NO: 870597 - DNA, 75 bp, synthetic construct
  source 1..75: mol_type = other DNA
tggcttgatgccgtgattcagcgcgtcgaaatgtacaacgcatcgcttcccgttccgctttcacctcctgaatgt

SEQ ID NO: 870598 - DNA, 75 bp, synthetic construct
  source 1..75: mol_type = other DNA
gtggcgagaggaagcctataccctcggtgaactggctgattatctcgatttgagcgcttcagcgcgccgtagcat

SEQ ID NO: 870599 - DNA, 75 bp, synthetic construct
  source 1..75: mol_type = other DNA
agcggatggtggcaattcgctcggctgtacccgatgcgacgttgattgttgatgcgaatgaatcctggcgcgcag

SEQ ID NO: 870600 - DNA, 75 bp, synthetic construct
  source 1..75: mol_type = other DNA
attagataaagccccaatgccagattttagttctgtagattcaggtattggtgtagcaacattaattgaccctca

SEQ ID NO: 870601 - DNA, 75 bp, synthetic construct
  source 1..75: mol_type = other DNA
gttccagggtattcctggcgcgcggcagtggcggcgttatttaagtgaaaatgcccataaagcgggtgctgacat

SEQ ID NO: 870602 - DNA, 75 bp, synthetic construct
  source 1..75: mol_type = other DNA
ggggacttatctgggccatattacccggcatatgctggggctgttccagggtattcctggcgcgcggcagtggcg

SEQ ID NO: 870603 - DNA, 75 bp, synthetic construct
  source 1..75: mol_type = other DNA
ctacacgaggaatgacgtattaccgatctatggtgaggctggtgatagcggttctccgctctttgcctgggacac

SEQ ID NO: 870604 - DNA, 75 bp, synthetic construct
  source 1..75: mol_type = other DNA
atctatggtgaggctggtgatagtggttctccgctctttgcctgggacaccaccctacaaaaatgggttttagtt

SEQ ID NO: 870605 - DNA, 75 bp, synthetic construct
  source 1..75: mol_type = other DNA
gaagaaaattaaggacattaagcttaaagcaggtgtgtggagtaataacaaccttaacgagatgtccggaatttc

SEQ ID NO: 870606 - DNA, 75 bp, synthetic construct
  source 1..75: mol_type = other DNA
aagagttacaacaacgcttcgaaaagcaattactacctgaccttgatatgtcatttgaactaaatggagaagtat

SEQ ID NO: 870607 - DNA, 75 bp, synthetic construct
  source 1..75: mol_type = other DNA
ttgcagcattttttcttcttacgccacttattattcttatcttaagaaaactctttatgcgggaaatgttcgagt

SEQ ID NO: 870608 - DNA, 75 bp, synthetic construct
  source 1..75: mol_type = other DNA
gcttacttattggttaatagatgctttttttgctttcaataagtatgactggatgcttgagtcgggaggcaatat

SEQ ID NO: 870609 - DNA, 75 bp, synthetic construct
  source 1..75: mol_type = other DNA
agtcgtcgcaaacgctggtggcgttttatgaacgcatgggaaatgtagagcgaatgagtgatagtggagacgccg

SEQ ID NO: 870610 - DNA, 75 bp, synthetic construct
  source 1..75: mol_type = other DNA
gactgaacttcattgagcagcaaatgctgaataagctcaatgaaaaaataaagcagttggagaaagggccgtttg

SEQ ID NO: 870611 - DNA, 75 bp, synthetic construct
  source 1..75: mol_type = other DNA
ataaacaaacagagccatttcttccaattgactggaactcaaacgattacgattggctacctgatgatgatgaat

SEQ ID NO: 870612 - DNA, 75 bp, synthetic construct
  source 1..75: mol_type = other DNA
acgtgcgcaagggcaaaataacatcctggatgtttcgctgttctttgatgagaatgcgcgcctcaaaaatgatct

SEQ ID NO: 870613 - DNA, 75 bp, synthetic construct
  source 1..75: mol_type = other DNA
tggttaactgttatgggaaatgtagagtatacagaagcacaacgggagtggcttcggcaaaggagagaatattgt

SEQ ID NO: 870614 - DNA, 75 bp, synthetic construct
  source 1..75: mol_type = other DNA
ttgaattttattttgaatttacaggttttattttgagtcttcacattcattatcctgtgcaggtacaggatcctg

SEQ ID NO: 870615 - DNA, 75 bp, synthetic construct
  source 1..75: mol_type = other DNA
agaaatgcagatttaacgcaagaaaaaaacattacagaaagagttttatccatatttaaaataaaacgagatttt

SEQ ID NO: 870616 - DNA, 75 bp, synthetic construct
  source 1..75: mol_type = other DNA
gatgcaaatgaatcctggcgatgttgtgtacctctcgtgccattagcgccgctttaccgctggtgccgcaggtca

SEQ ID NO: 870617 - DNA, 75 bp, synthetic construct
  source 1..75: mol_type = other DNA
ccttttccgatcgtcatggtgatgtttatcgtgagcagatggtggattttatcctcagtgcgttgaatcccggga

SEQ ID NO: 870618 - DNA, 75 bp, synthetic construct
  source 1..75: mol_type = other DNA
ttctcaaaattctgtttattctctttgttgttgccttctgcatttatttaataccgcgcatcgccatcaattttt

SEQ ID NO: 870619 - DNA, 75 bp, synthetic construct
  source 1..75: mol_type = other DNA
ccgacctgaagccagtgtatcgtgcggtgtcaaaagaagcagcggaaacggcgctggatgagctggaagcgaaac

SEQ ID NO: 870620 - DNA, 75 bp, synthetic construct
  source 1..75: mol_type = other DNA
cgccgcagccatacatgattttacaggcgcgtgttcatctgctgcgtagccaggcgctgggaaaacaattcaagg

SEQ ID NO: 870621 - DNA, 75 bp, synthetic construct
  source 1..75: mol_type = other DNA
atgcatcgtatagacacgaaaaccgcgcaaaaggataagttcggcgcgggtaagaacggttttacccgtggtaac

SEQ ID NO: 870622 - DNA, 75 bp, synthetic construct
  source 1..75: mol_type = other DNA
gggtacaccaagaaaatcggccgatatagcaaaagaagagcacagaaatgcactaaatttcatgataatggaaaa

SEQ ID NO: 870623 - DNA, 75 bp, synthetic construct
  source 1..75: mol_type = other DNA
taaacagaaaaataaccaccactcccacaccagcgaaactattatcatatcgaaatgcagatttaataaaagaaa

SEQ ID NO: 870624 - DNA, 75 bp, synthetic construct
  source 1..75: mol_type = other DNA
acaaaaaacatcatattctctgacaaaaatggagcagacagggaagttgttaaatagaaaaataactccagaaaa

SEQ ID NO: 870625 - DNA, 75 bp, synthetic construct
  source 1..75: mol_type = other DNA
ttactggcagcaaataaatccggcggtctggttgtgaacgatttcgcgcagctggcaggaatgagtgagcaagag

SEQ ID NO: 870626 - DNA, 75 bp, synthetic construct
  source 1..75: mol_type = other DNA
tgaacagttctcggcggaactggcggaactggctaatgatatctacctgaatggcgaattattcgcgcgggtaga

SEQ ID NO: 870627 - DNA, 75 bp, synthetic construct
  source 1..75: mol_type = other DNA
ttctgaactgtcagccctgcagcgtattgagcatctcaccctgatgaaacagcaggcagaatccgacagcaaccg

SEQ ID NO: 870628 - DNA, 75 bp, synthetic construct
  source 1..75: mol_type = other DNA
ttgagcaggaagtgcttaccacctggcccacggaggcaattgctcaggctgaaaacgtggtgttatgtctgtccg

SEQ ID NO: 870629 - DNA, 75 bp, synthetic construct
  source 1..75: mol_type = other DNA
gacgcaaatgctggcagacgacggttatcaatggtttgtcgagcagggcggcttaacgcgtgagaatgggcaacg

SEQ ID NO: 870630 - DNA, 75 bp, synthetic construct
  source 1..75: mol_type = other DNA
aatataacggtgtgactgtcacgctttctgagctgtctgcgctgcagcgtattgagcatcttgccctcctgaaac

SEQ ID NO: 870631 - DNA, 75 bp, synthetic construct
  source 1..75: mol_type = other DNA
ttaaacttttctgaaggcattgaatctggattcagcggcgccaaaatcaccggttctcagaatgaaagcatcaat

SEQ ID NO: 870632 - DNA, 75 bp, synthetic construct
  source 1..75: mol_type = other DNA
gcttgctgaccctcttaaacccggcacatataccgttaactggcatgtcgtttcggtagacgggcataagaccaa

SEQ ID NO: 870633 - DNA, 75 bp, synthetic construct
  source 1..75: mol_type = other DNA
cgcagaaagccagttccgtgctcgggccgcaggtgacgctatggcaagggcttgccgatcaaagcaacctcaacg

SEQ ID NO: 870634 - DNA, 75 bp, synthetic construct
  source 1..75: mol_type = other DNA
atgtggaaaaagaaccttggcgtagatgttaaattgcaaaatcaggaatggaaaacctatatcgatagccgtaac

SEQ ID NO: 870635 - DNA, 75 bp, synthetic construct
  source 1..75: mol_type = other DNA
ggttcagcggcgcaaaagtcattggctcaaagaatgaaaatattaaaacgttacccgcgaagcgtaatgaacagg

SEQ ID NO: 870636 - DNA, 75 bp, synthetic construct
  source 1..75: mol_type = other DNA
aacttctcggaaggtgttgaaacaggattcagtggtgcaaaaatcacggggccaaaaaacgaaaatattaaaaca

SEQ ID NO: 870637 - DNA, 75 bp, synthetic construct
  source 1..75: mol_type = other DNA
attgagcatcttgcctggttgaaagagcaggaaaaaaaggctgaatccagtggcaacctgcaggtgtctgtagag

SEQ ID NO: 870638 - DNA, 75 bp, synthetic construct
  source 1..75: mol_type = other DNA
gcgttcaggcaacgatcgccgggaagctttgggatcatctggaagagcgattcccgctggcttacaacgatcttt

SEQ ID NO: 870639 - DNA, 75 bp, synthetic construct
  source 1..75: mol_type = other DNA
acagtgctggcagggcagatgcctgccgattaccagactatcgcttcggcaatcatttcactggcgaacaaccct

SEQ ID NO: 870640 - DNA, 75 bp, synthetic construct
  source 1..75: mol_type = other DNA
atggggctgaatacggcttctgtctccggtatgaatctgctggcggatgatgcctgcgtgccattaaccacaatg

SEQ ID NO: 870641 - DNA, 75 bp, synthetic construct
  source 1..75: mol_type = other DNA
gtatgtctgagtttgttgtgaataatgctcctgagcagacagaagacgccgggcctgcagagcctgtttctgcgg

SEQ ID NO: 870642 - DNA, 75 bp, synthetic construct
  source 1..75: mol_type = other DNA
aacatcgaaacacaggatggtgttattcaggttaagccgaaattcaccgactattacaacctcgcttataacaaa

SEQ ID NO: 870643 - DNA, 75 bp, synthetic construct
  source 1..75: mol_type = other DNA
tgaataatggttatatggcaacgcgtgatgtcacatttaatacgggcgacagtgaacaagggattgttccctgcc

SEQ ID NO: 870644 - DNA, 75 bp, synthetic construct
  source 1..75: mol_type = other DNA
gcgcgttgggataaaactgctcatgacgctgacccacaataataagccgctgccgtttggggcgatggtgacatc

SEQ ID NO: 870645 - DNA, 75 bp, synthetic construct
  source 1..75: mol_type = other DNA
gaaatgaaaataggttcgaatgttggttccttgggtattgacacaaccaataataaagacgccctagacgttgta

SEQ ID NO: 870646 - DNA, 75 bp, synthetic construct
  source 1..75: mol_type = other DNA
aaaggatcactgactctcaagagagtattgcaactaaaagccacgccactaccattaaataataacggcctaaac

SEQ ID NO: 870647 - DNA, 75 bp, synthetic construct
  source 1..75: mol_type = other DNA
gctactgatcgtcactggattccgttctgttgaggcattcaatctcagacaggatgccttggtcaaacgacatat

SEQ ID NO: 870648 - DNA, 75 bp, synthetic construct
  source 1..75: mol_type = other DNA
tttagtgttcaagagaagcagcaagggcagagtattgcacagcagaacgcagatacatctgcatataatgctcag

SEQ ID NO: 870649 - DNA, 75 bp, synthetic construct
  source 1..75: mol_type = other DNA
aaggctgcttctcttattccgttagttccgatcatacaggagcagactgatcctacccacataatatggacacag

SEQ ID NO: 870650 - DNA, 75 bp, synthetic construct
  source 1..75: mol_type = other DNA
actaaatcagtaagttggcagcatcaccgggatagctttgtctggatatgtgggatcaaaggatccggctggtta

SEQ ID NO: 870651 - DNA, 75 bp, synthetic construct
  source 1..75: mol_type = other DNA
atccagcgtgtagaaaacggcactgaaaagatagcgcttaattgccttctgctactcatcatcacggggtttcgt

SEQ ID NO: 870652 - DNA, 75 bp, synthetic construct
  source 1..75: mol_type = other DNA
tttcgccttgcgaaacaagctggtgtaatggctacaacagtatctaacctacttggtcaagacatttcagcacta

SEQ ID NO: 870653 - DNA, 75 bp, synthetic construct
  source 1..75: mol_type = other DNA
tagaactcacgccgcaggccctgacggcgttaagcaatgccggttttgttaagcgcagtcttaaggaactggaaa

SEQ ID NO: 870654 - DNA, 75 bp, synthetic construct
  source 1..75: mol_type = other DNA
tggaccagcagtcacagttcaacaccacccagcgggagctgagggagttctattaccagatacgtgagatgccgt

SEQ ID NO: 870655 - DNA, 75 bp, synthetic construct
  source 1..75: mol_type = other DNA
caccaatcgcaataccggcaggacggacagtgtctcccttcagtcggtggctaaacgatctaaggagtttctgga

SEQ ID NO: 870656 - DNA, 75 bp, synthetic construct
  source 1..75: mol_type = other DNA
gacataatatcaatacgtttctggcgattgctgaaatctcagaccacttacaggcaatgcttatggggcgagtgg

SEQ ID NO: 870657 - DNA, 75 bp, synthetic construct
  source 1..75: mol_type = other DNA
tcggccgtaccaaaggtattgaggggcgtcatgccgtggcagaagactatgcccggtttatgaaagccctgctgg

SEQ ID NO: 870658 - DNA, 75 bp, synthetic construct
  source 1..75: mol_type = other DNA
caggctgatatcgaacaacggttacaacaactcgaaacaatgcaagcacagtggctgcgtcgtaccgaggctcag

SEQ ID NO: 870659 - DNA, 75 bp, synthetic construct
  source 1..75: mol_type = other DNA
attactggaggaggatggcacctcgacgcggatgcgtacccacattccccggcacaacatcaatccctttcttgc

SEQ ID NO: 870660 - DNA, 75 bp, synthetic construct
  source 1..75: mol_type = other DNA
gagtatggcccagccttcccagcaatcgtcgattgttataccagtccacccacgttagtgtggccagttccactt

SEQ ID NO: 870661 - DNA, 75 bp, synthetic construct
  source 1..75: mol_type = other DNA
attgccgggaaagattacgacgaaaagaccgcgccagctgcggttaatagcaaatatccagatggaactactgtg

SEQ ID NO: 870662 - DNA, 75 bp, synthetic construct
  source 1..75: mol_type = other DNA
gaaatgaaagttggttcaaacgtcggatcgttaggtatagacactacaaacaataaagacgccttagacgttgta

SEQ ID NO: 870663 - DNA, 75 bp, synthetic construct
  source 1..75: mol_type = other DNA
acccggatgcgtacccacattccccggcacaactgtcaacgacggatgaaaagtgatccacttatatctccacca

SEQ ID NO: 870664 - DNA, 75 bp, synthetic construct
  source 1..75: mol_type = other DNA
agccgatatcgacagcactaactgccacgccctattcgtcctccgttgctacgccactggatatcgtcaaacaga

SEQ ID NO: 870665 - DNA, 75 bp, synthetic construct
  source 1..75: mol_type = other DNA
cactggctttactggctacgcctataccattcactaatgtattgatgaacaagtttttaggcaatcatgaccctg

SEQ ID NO: 870666 - DNA, 75 bp, synthetic construct
  source 1..75: mol_type = other DNA
tgaagtacatcacccaaactacctcaagttttcggggccgggcaggacaacgggacaaaacatccaaagccctta

SEQ ID NO: 870667 - DNA, 75 bp, synthetic construct
  source 1..75: mol_type = other DNA
tgacgtacatcacacaaaccacctcaagctttcgtggccgggcaggacaacgagacaaaacatccaaagccctca

SEQ ID NO: 870668 - DNA, 75 bp, synthetic construct
  source 1..75: mol_type = other DNA
tgtctggtgaagtaatcaccgagggcaaaatccgtacactggcccagctttttgccctcgaataccaacaattga

SEQ ID NO: 870669 - DNA, 75 bp, synthetic construct
  source 1..75: mol_type = other DNA
ccggccatctggtggtcatggaacacatggcgctggacaagaccatcaaagctaacctgcatacttttgacgatc

SEQ ID NO: 870670 - DNA, 75 bp, synthetic construct
  source 1..75: mol_type = other DNA
ctttgagcagtttatgatttccagccagcgccgtgggctcacatactccgtatttaagggtaaaaaaaacatcgg

SEQ ID NO: 870671 - DNA, 75 bp, synthetic construct
  source 1..75: mol_type = other DNA
gataaccgtgcatcgtatgcgtttggcggggtaaccaacactgcagcgcaaggctacccagtgcctctgctttat

SEQ ID NO: 870672 - DNA, 75 bp, synthetic construct
  source 1..75: mol_type = other DNA
gcagataaccgtgcatcgtatgcgtttggcggggtaaccaacactgcagcgcaaggctacccagtgcctctgctt

SEQ ID NO: 870673 - DNA, 75 bp, synthetic construct
  source 1..75: mol_type = other DNA
cgggctggacgcgagcggaaaaaaatgatgccaatgatacccgcgctatcattcaacgtctggtggagatccgtg

SEQ ID NO: 870674 - DNA, 75 bp, synthetic construct
  source 1..75: mol_type = other DNA
tatctgtggacgcaaatgttggccgatgatggttatcagtggtttgttgagcagggcggattaacgcgtgaaaat

SEQ ID NO: 870675 - DNA, 75 bp, synthetic construct
  source 1..75: mol_type = other DNA
agcttggcggtgttttgggtaaaacctatggaaaggttcaccatcgattaatacgcacaaccgctgaggcgatca

SEQ ID NO: 870676 - DNA, 75 bp, synthetic construct
  source 1..75: mol_type = other DNA
cagcatgaatatgttcaacagtgagctgaatcttgagcaagtttcaaatgatgctaaaaaatttgttacgcatac

SEQ ID NO: 870677 - DNA, 75 bp, synthetic construct
  source 1..75: mol_type = other DNA
gcatgcaagtgagaaaaatgctgatatagcagtaattccattgtttggagataatcttaaagattgcgaattcga

SEQ ID NO: 870678 - DNA, 75 bp, synthetic construct
  source 1..75: mol_type = other DNA
aaatcagttgccgcgagctgacggttacgcaactggaacaggtgctcaatgccatgaaagaacgcggctttaaga

SEQ ID NO: 870679 - DNA, 75 bp, synthetic construct
  source 1..75: mol_type = other DNA
atttcccgcgtgaacgaagcgagtgttgcgctggcaaagactataccgggctttgagcagtttatgatttccagc

SEQ ID NO: 870680 - DNA, 75 bp, synthetic construct
  source 1..75: mol_type = other DNA
agcttggcggcgtgctcgggaaaacattcggtaaagttcaccatcgcctgatttcccgcgtgaacgaagcgagtg

SEQ ID NO: 870681 - DNA, 75 bp, synthetic construct
  source 1..75: mol_type = other DNA
ccgatccaggttacagaacgtcctgaacctgtgagaactaaggctaaaaatctcaaggccattcctgttacatat

SEQ ID NO: 870682 - DNA, 75 bp, synthetic construct
  source 1..75: mol_type = other DNA
aaagcaatgccggaagagttgcaacaaaaaatgcgtaatgccagcctgttcaataaaggttatgagatgagcgaa

SEQ ID NO: 870683 - DNA, 75 bp, synthetic construct
  source 1..75: mol_type = other DNA
aacacgctctatatgcaggaagtgttgagctggatgcgccgtaatggagaagaaattatagatgaagatatcgct

SEQ ID NO: 870684 - DNA, 75 bp, synthetic construct
  source 1..75: mol_type = other DNA
agtacaggccaccacgacgctgatttataagatctaccgcgaaggctttaccggactggatctggcttcgtctgc

SEQ ID NO: 870685 - DNA, 75 bp, synthetic construct
  source 1..75: mol_type = other DNA
gcgggctgatcacccattttctcgcggagttcggctacgactggaaccacgcgcaaaacagcggtcaggcaatgt

SEQ ID NO: 870686 - DNA, 75 bp, synthetic construct
  source 1..75: mol_type = other DNA
aaccaggaaaaaatgcagtcattattatttatatttttgttgctgacaggtgggtatctttcatcccatatcttt

SEQ ID NO: 870687 - DNA, 75 bp, synthetic construct
  source 1..75: mol_type = other DNA
caacgggctgggcatcgccgtgataccttcgttatcgaactacaccacctccatgttgcgggtgaacaataacga

SEQ ID NO: 870688 - DNA, 75 bp, synthetic construct
  source 1..75: mol_type = other DNA
caattctgttaccgcaggctggtacggttcacttaccgctacacgtcatggtgtcgcccttcacgattatagcta

SEQ ID NO: 870689 - DNA, 75 bp, synthetic construct
  source 1..75: mol_type = other DNA
atccggtaatttataacgtctgcaattatcagaaacccgctgccggtgagcctgcgttgttactctgggatgatg

SEQ ID NO: 870690 - DNA, 75 bp, synthetic construct
  source 1..75: mol_type = other DNA
gaactggctaatgacatctacctcaatggcgaattatttgctcgggttgacgctgtctggcagcggcgcgaaacg

SEQ ID NO: 870691 - DNA, 75 bp, synthetic construct
  source 1..75: mol_type = other DNA
tgccaatcatcactatcgcccggcattcgatgagggaatgcagcaaaagcgggcagaaattgctgccatcgcgct

SEQ ID NO: 870692 - DNA, 75 bp, synthetic construct
  source 1..75: mol_type = other DNA
ttgaataccagcaagcagcgtgggcttacttatgccgtgttcagcggtaagcgtaacctgaacaatgatgaactc

SEQ ID NO: 870693 - DNA, 75 bp, synthetic construct
  source 1..75: mol_type = other DNA
cagcaaccggcgcttgctgaacttcgcgatcgcgcgacgcgtgaaaaactattcactgcgggctggacgcgggca

SEQ ID NO: 870694 - DNA, 75 bp, synthetic construct
  source 1..75: mol_type = other DNA
gtaaacgggcggacgatgaactggcattaattcaggcgattatcgatcagcaacaaggtgaatttcgcgctcagc

SEQ ID NO: 870695 - DNA, 75 bp, synthetic construct
  source 1..75: mol_type = other DNA
atctattacgtctcaacatatacaccatctacaaaatcggtagacttgctcacagttgaaaccttcgccggtaca

SEQ ID NO: 870696 - DNA, 75 bp, synthetic construct
  source 1..75: mol_type = other DNA
tgcgtggcgactggcaggccaacgaactggcgcgaccgctggcgcggctgaaaacgatggacaataacggcttgc

SEQ ID NO: 870697 - DNA, 75 bp, synthetic construct
  source 1..75: mol_type = other DNA
tcactatggttcgtaagggcgaattcaccaatgcaacgtgggatgaaatagattttaaaaaatggacatggacaa

SEQ ID NO: 870698 - DNA, 75 bp, synthetic construct
  source 1..75: mol_type = other DNA
agctgtttataacaaggctgaatatcgtgagcagagggccgagatgctacaagattgggcgaatatgattgatga

SEQ ID NO: 870699 - DNA, 75 bp, synthetic construct
  source 1..75: mol_type = other DNA
ttgtggtactcccttttttaatcggatattattataataatagaatttcattaagtggatacgacgctgtaatgg

SEQ ID NO: 870700 - DNA, 75 bp, synthetic construct
  source 1..75: mol_type = other DNA
tgggtttggcaatgtttatataatgttgataattgcgtttgctttatcttccatcctattctatacaatagaaaa

SEQ ID NO: 870701 - DNA, 75 bp, synthetic construct
  source 1..75: mol_type = other DNA
ggatacttgagtgcgcacctcaatcagaaattttgttttttattgttacctatcaaccaacgaaccagatcaaat

SEQ ID NO: 870702 - DNA, 75 bp, synthetic construct
  source 1..75: mol_type = other DNA
ccgagacgcgcggttatgtgaagaacgtgctggcttatgacgcttactaccgctatttcatgggggataaaccga

SEQ ID NO: 870703 - DNA, 75 bp, synthetic construct
  source 1..75: mol_type = other DNA
atgtatttacacttagaggatgcgcttgtggaaaaagccaaacaagttacctggcggctgttggctgccggtgtc

SEQ ID NO: 870704 - DNA, 75 bp, synthetic construct
  source 1..75: mol_type = other DNA
cagccctgggcaattgctggatccggaaacgaatatcaacattggcaccagttacctgcaatatgtttatcagca

SEQ ID NO: 870705 - DNA, 75 bp, synthetic construct
  source 1..75: mol_type = other DNA
gtcggagggatcacgctagcggaagcccgcgaacggctgggcgaagccaagaagatgatcgccgcagggaaatct

SEQ ID NO: 870706 - DNA, 75 bp, synthetic construct
  source 1..75: mol_type = other DNA
tctggaatatcgccagattactgatgatttaatgaatcaaccggcgatcacggtcactaactttgttcgtgccaa

SEQ ID NO: 870707 - DNA, 75 bp, synthetic construct
  source 1..75: mol_type = other DNA
tcgtcgcctggcgtctgatgggcaacgacgtcaccgacgagcaggcgaaatggcgcgatgacgccattatgcgtt

SEQ ID NO: 870708 - DNA, 75 bp, synthetic construct
  source 1..75: mol_type = other DNA
taaaaaattcagttctgcaaaaaagcaaaagagcaaacacaccatcattgttgatcgtgagaggcatagatatca

SEQ ID NO: 870709 - DNA, 75 bp, synthetic construct
  source 1..75: mol_type = other DNA
gagagtgtcgttggtatttaatgggggaaggtgagatgaaaaagatagctgctatatcattaattagtattttta

SEQ ID NO: 870710 - DNA, 75 bp, synthetic construct
  source 1..75: mol_type = other DNA
atcaacgatgcgctgaattatcgcaccgtaacgaaaaacattattcagcatgtagagaataaccgtttctctttg

SEQ ID NO: 870711 - DNA, 75 bp, synthetic construct
  source 1..75: mol_type = other DNA
gtgaagtggtggttaccgaagaggaacccgccgcataacgaatttacccataaactctgcgcccgctgggaagag

SEQ ID NO: 870712 - DNA, 75 bp, synthetic construct
  source 1..75: mol_type = other DNA
taaaaagttgtttggatgttctcccagagaatatcggctccgtgacttttgggatctcaccaacatcttgcctcc

SEQ ID NO: 870713 - DNA, 75 bp, synthetic construct
  source 1..75: mol_type = other DNA
atttaaatatgatattgaagtgtcgaataaatcaccggatgaagaagtcaaactgcgacgtcatcatttagccag

SEQ ID NO: 870714 - DNA, 75 bp, synthetic construct
  source 1..75: mol_type = other DNA
atctatttcgtctccacgtttgaaccgtcaacaaaatcggtcgatttgctcacggttgaaacttttgccggtacg

SEQ ID NO: 870715 - DNA, 75 bp, synthetic construct
  source 1..75: mol_type = other DNA
atgccaataataaacaaatcggcatcaaattatgttgaatatatttcaaaaaacaatcccccttatttatcaaaa

SEQ ID NO: 870716 - DNA, 75 bp, synthetic construct
  source 1..75: mol_type = other DNA
gtcaggtctgggcattgcagagagcgggagaagggaatcgcatggccgctctggcaaccatcagctccggcctga

SEQ ID NO: 870717 - DNA, 75 bp, synthetic construct
  source 1..75: mol_type = other DNA
tgtactgattcgcagctagacattaatgacctaacatatagtgacaagaccagaataatcgagttatatctggag

SEQ ID NO: 870718 - DNA, 75 bp, synthetic construct
  source 1..75: mol_type = other DNA
taccagcaagccaggtgtctatacgttcacattcaacgcactgacgtatggcgggtacgaaatgacgcctgtgaa

SEQ ID NO: 870719 - DNA, 75 bp, synthetic construct
  source 1..75: mol_type = other DNA
atgaaaaagatagctgctatatcattaattagtgtttttcttatgtctgggtgtgctgtacataatgatgagaca

SEQ ID NO: 870720 - DNA, 75 bp, synthetic construct
  source 1..75: mol_type = other DNA
aaaagaagacacactgtcactttttgtggataaaacaaaatcgaatgacaacaataatgtgtttataaaaaaatt

SEQ ID NO: 870721 - DNA, 75 bp, synthetic construct
  source 1..75: mol_type = other DNA
acatattcgccgctcgctgtcgccaggaggatttcgtccggtctatttttatcagcacacatcagcggctaggaa

SEQ ID NO: 870722 - DNA, 75 bp, synthetic construct
  source 1..75: mol_type = other DNA
tgatgcgggtctcggcagcgatgaccgcgcagcgggaagccgccccgttgcgacatgcaactgtctatgagcaga

SEQ ID NO: 870723 - DNA, 75 bp, synthetic construct
  source 1..75: mol_type = other DNA
ggttcgtgtttctattcgtacagcgcccaatctactaccgccgtgcgagcagccattgctttcgatgagcaataa

SEQ ID NO: 870724 - DNA, 75 bp, synthetic construct
  source 1..75: mol_type = other DNA
accaggttgaggaaagcgggtttgaatggcagatccccggtctgcgccgcgaactggtgattgctctgattaaat

SEQ ID NO: 870725 - DNA, 75 bp, synthetic construct
  source 1..75: mol_type = other DNA
gaaacgcagcagaattattttcagggatacggcacattgctattaatcttttgacgaatgagcaggtattctagg

SEQ ID NO: 870726 - DNA, 75 bp, synthetic construct
  source 1..75: mol_type = other DNA
atgcgtgactgccattcttcagatgataaagacgtcattgcaattgatggaaaaacgctccggcactcttgtcgc

SEQ ID NO: 870727 - DNA, 75 bp, synthetic construct
  source 1..75: mol_type = other DNA
tcgggcagatcaagacggataagaaatccaatgagatcacagctatccctgaacttcttaacatgctggatatta

SEQ ID NO: 870728 - DNA, 75 bp, synthetic construct
  source 1..75: mol_type = other DNA
gcatatctggagctttggggaactgccggaaagctacgagcagaagcgcggtaactacaaagtgaaggcgtggcc

SEQ ID NO: 870729 - DNA, 75 bp, synthetic construct
  source 1..75: mol_type = other DNA
gtggatgacaaaaacaagaagcttcaggaaggacgttctttgcaggcactgaaagaggcactaaaaggcaaagta

SEQ ID NO: 870730 - DNA, 75 bp, synthetic construct
  source 1..75: mol_type = other DNA
gcgctgaaaggcaaagtgcaggaaacgctgtctgcggtggcggatgacggtatcgagcagagcggactgcatatc

SEQ ID NO: 870731 - DNA, 75 bp, synthetic construct
  source 1..75: mol_type = other DNA
gtacatattccgctgccgttacttaaccaggttgaggaaagcgggtttgaatggcagatccccggtctgcgccgc

SEQ ID NO: 870732 - DNA, 75 bp, synthetic construct
  source 1..75: mol_type = other DNA
tgaatggcaggatatctacacccaattgcgccaggtggtaaaagaacttggcattcctgttaacagcgaaccggc

SEQ ID NO: 870733 - DNA, 75 bp, synthetic construct
  source 1..75: mol_type = other DNA
gatctgaaagatgcgctgaaaggcaaagtgcaggaaacgctgtctgcggtggcggatgacggtatcgagcagagc

SEQ ID NO: 870734 - DNA, 75 bp, synthetic construct
  source 1..75: mol_type = other DNA
ttgactatttttgccgttatttctggtgcagaaagttgggaagatatagaggatttcggggaaacacatctcgac

SEQ ID NO: 870735 - DNA, 75 bp, synthetic construct
  source 1..75: mol_type = other DNA
aaagcgctctgcttgctgctgccggttttgatgccgatctgcttctgcagacgctggacctgacaaccgatctgg

SEQ ID NO: 870736 - DNA, 75 bp, synthetic construct
  source 1..75: mol_type = other DNA
tggagctgctgccgaagtacgccgcctgggccgagggtgtcctgaatgccggaggcgtacagcaggatgacgtgc

SEQ ID NO: 870737 - DNA, 75 bp, synthetic construct
  source 1..75: mol_type = other DNA
atcgcctgcgcgttcaggttgaacaggccgcccgcgagggcggcagcgttcgccacgcgtcgggctatgacctga

SEQ ID NO: 870738 - DNA, 75 bp, synthetic construct
  source 1..75: mol_type = other DNA
atcgcctgcgcgttcaggctgaacagaccgctcgcgagggtggcagtgttcgccacgcgtcgggctatgacctga

SEQ ID NO: 870739 - DNA, 75 bp, synthetic construct
  source 1..75: mol_type = other DNA
tctgcataaagcgattggtgctgtcctgagtgaaagcaatccggcgtccgccattaatcatctcaaccatgcgtt

SEQ ID NO: 870740 - DNA, 75 bp, synthetic construct
  source 1..75: mol_type = other DNA
gcagaggaaatggcagacgcggcgcagagcgcaatgcttgctgccaccggctttgatgccgatccgctgctgcag

SEQ ID NO: 870741 - DNA, 75 bp, synthetic construct
  source 1..75: mol_type = other DNA
tgatgccggagattatgccggagcgctggagatcgggcgtcatgccctgcgtcatggctgggtgatgccgctggg

SEQ ID NO: 870742 - DNA, 75 bp, synthetic construct
  source 1..75: mol_type = other DNA
gtgtgttctgggtgttccccgctggcgcagggtgctgatgtatgctgccgtcaggctgtttggtcggggtaatta

SEQ ID NO: 870743 - DNA, 75 bp, synthetic construct
  source 1..75: mol_type = other DNA
gtgtgtgctgggagtttcccgctggcgcaggatgctgatgtactgtgcggtcagactgttcgggcgggggaatta

SEQ ID NO: 870744 - DNA, 75 bp, synthetic construct
  source 1..75: mol_type = other DNA
cacgaccaacgcaatcgagagcgtgcatgcgcgcctgcgcaagatcatcaagacccgcggccacttccccagcga

SEQ ID NO: 870745 - DNA, 75 bp, synthetic construct
  source 1..75: mol_type = other DNA
gcgtgccccggatattctggacattcctcccgcctgatgggcggtacgccaaagcagctatcattcatgattaca

SEQ ID NO: 870746 - DNA, 75 bp, synthetic construct
  source 1..75: mol_type = other DNA
atatgccggaccagtcacgggcacgtctgcataaagcgattggcgctgtcctgagtgaaagcaacccggcttccg

SEQ ID NO: 870747 - DNA, 75 bp, synthetic construct
  source 1..75: mol_type = other DNA
cgccacgcgtcgggctatgacctgatgctgcaactggcggaagaccgccgccgtctcaagggcgttcagtccacg

SEQ ID NO: 870748 - DNA, 75 bp, synthetic construct
  source 1..75: mol_type = other DNA
tttgtgccgttatttctggtgcagaaggctgggaagatatagaggattttggggaaacacatctcgattttttaa

SEQ ID NO: 870749 - DNA, 75 bp, synthetic construct
  source 1..75: mol_type = other DNA
gaaaaaagtcacggcagagaagaaatccgtcttcatattgtttgcgatgtccctgatgaacttattgatttcacg

SEQ ID NO: 870750 - DNA, 75 bp, synthetic construct
  source 1..75: mol_type = other DNA
tgacaagagtcgccgcaagggagcgattcatgtcattagtgcgttctcaacaatgcacagcctggtcatcggaca

SEQ ID NO: 870751 - DNA, 75 bp, synthetic construct
  source 1..75: mol_type = other DNA
gttgccagaaagatattgcagagaagatacaaaaacagggaggtgattatttattcgctgtaaaaggaaaccagg

SEQ ID NO: 870752 - DNA, 75 bp, synthetic construct
  source 1..75: mol_type = other DNA
taaccgcagaaagttcgccacagcaatccgaaaccactggcacgtggagaataagctgcactggcgtctggacgt

SEQ ID NO: 870753 - DNA, 75 bp, synthetic construct
  source 1..75: mol_type = other DNA
gatgataaagacgtcatcgcaattgatggaaaaatacaccggcattcttatgacaagagtcgccgcaagggagcg

SEQ ID NO: 870754 - DNA, 75 bp, synthetic construct
  source 1..75: mol_type = other DNA
aataagaagaggaaatgcagcagaattattttcagggatacggcacatcgctattaatattttaacgaatgataa

SEQ ID NO: 870755 - DNA, 75 bp, synthetic construct
  source 1..75: mol_type = other DNA
acagttacgcaattagtgaaaagagtcacggcagagaagaaatccgtcttcatattgtttgcgatgtccctgatg

SEQ ID NO: 870756 - DNA, 75 bp, synthetic construct
  source 1..75: mol_type = other DNA
ttatccgatattctactgttgactatttgtgccgttatttctggtgcggaaggttgggaagatatagaggatttt

SEQ ID NO: 870757 - DNA, 75 bp, synthetic construct
  source 1..75: mol_type = other DNA
agagttgtatcctgtatcagtcctgcaaaatttcacgagtgctttattaactggatgcgtgattgtcattcttca

SEQ ID NO: 870758 - DNA, 75 bp, synthetic construct
  source 1..75: mol_type = other DNA
catctgacgctgccgacgatatgcagtgtctctacttccgtgagcacgttagtacgtaaatcatataaacagatg

SEQ ID NO: 870759 - DNA, 75 bp, synthetic construct
  source 1..75: mol_type = other DNA
caaaataagaagaggaaatgcagcagaattattttcagggatacggcacattgctagtaagcgtcaacggagcac

SEQ ID NO: 870760 - DNA, 75 bp, synthetic construct
  source 1..75: mol_type = other DNA
atgtccctgatgaacttattgatttcacgtttgaatggaaaggtctgaagaaattatgcgtggcagtctcctttc

SEQ ID NO: 870761 - DNA, 75 bp, synthetic construct
  source 1..75: mol_type = other DNA
atcggcatggggatttcagcggttgtgttgctgatcctcgctgaaccataccgtattcgccgcgttaccgcgttc

SEQ ID NO: 870762 - DNA, 75 bp, synthetic construct
  source 1..75: mol_type = other DNA
gcgatgtcgattggccgcaaagcgttagaaattgaccaccgttttttccggttttctcgcctgttctattggcat

SEQ ID NO: 870763 - DNA, 75 bp, synthetic construct
  source 1..75: mol_type = other DNA
gacaagagtcgccgcaggggagcgattcatgtcattagtgcgttctcaacaatgcacagtctggtcatcggacag

SEQ ID NO: 870764 - DNA, 75 bp, synthetic construct
  source 1..75: mol_type = other DNA
gtggaacataaattatcggatattctactgttgactatttttaccgttatttctggtgcagaaggttgggaagat

SEQ ID NO: 870765 - DNA, 75 bp, synthetic construct
  source 1..75: mol_type = other DNA
gcttttcgcgcgatgtcgattggccgcaaagcgttagaaattgaccaccgtttttccggttttctcgcctgttct

SEQ ID NO: 870766 - DNA, 75 bp, synthetic construct
  source 1..75: mol_type = other DNA
cgcggcttcctgaaaccgatgggcgtgattctggtgttggccgtgttgctgctggcacagcctgaccttggtacg

SEQ ID NO: 870767 - DNA, 75 bp, synthetic construct
  source 1..75: mol_type = other DNA
caatgcacagtctggtcatcggacagatcaggacggatgagaaatccaatgagattacagctatccctgaacttc

SEQ ID NO: 870768 - DNA, 75 bp, synthetic construct
  source 1..75: mol_type = other DNA
ccctgatgaacttattgatttcacgtttgaatggaaagggctgaagaaattatgcgtggcagtctcctttcggtc

SEQ ID NO: 870769 - DNA, 75 bp, synthetic construct
  source 1..75: mol_type = other DNA
ttaacattttgtatattaaaaagagaaaatcatcacaactgatgcgatgggttgccagaaagatattgcagagaa

SEQ ID NO: 870770 - DNA, 75 bp, synthetic construct
  source 1..75: mol_type = other DNA
gaacttcttaacatgctggatattaaaggaaaaatcatcacaactgatgcgatgggttgccagaaagatatagca

SEQ ID NO: 870771 - DNA, 75 bp, synthetic construct
  source 1..75: mol_type = other DNA
tgccagaaagatattgcagagaagatacaaaaacagggaggtgattatttattcgcggtgaaaggaaaccagggg

SEQ ID NO: 870772 - DNA, 75 bp, synthetic construct
  source 1..75: mol_type = other DNA
tatcagtcctgcaaaatttcacgagtgctttattaactggatgcgtgactgccattcttcagatgataaagacgt

SEQ ID NO: 870773 - DNA, 75 bp, synthetic construct
  source 1..75: mol_type = other DNA
aatggggttctctgaaacgcatctcagatgctacgtcttacatgacgacgaagacggccagcacatccacataat

SEQ ID NO: 870774 - DNA, 75 bp, synthetic construct
  source 1..75: mol_type = other DNA
acaggctcaactacaacccagaccatctagaagctctgcgaaccggcataccaccagaagaaccccctgctcctg

SEQ ID NO: 870775 - DNA, 75 bp, synthetic construct
  source 1..75: mol_type = other DNA
cccgtaacagttttgaaaacctctgagagaaaggaaagtataggtggaaaaattgcagaactggaattgcggctc

SEQ ID NO: 870776 - DNA, 75 bp, synthetic construct
  source 1..75: mol_type = other DNA
cgaagatagcccctttatgcctcgccacaacagatgagcctgtctcggtacaccgcaaacgatcaccatcattgt

SEQ ID NO: 870777 - DNA, 75 bp, synthetic construct
  source 1..75: mol_type = other DNA
gcacaactcgcttcgcttacctaaaggtgaatcacttacggctaaacagtggtcctgcatcgcagatgactacat

SEQ ID NO: 870778 - DNA, 75 bp, synthetic construct
  source 1..75: mol_type = other DNA
ttcacaaaacccatatgaccttctcaaatatctccgcaatgaaacctttaaacaaggcgagaaaaattcgtttat

SEQ ID NO: 870779 - DNA, 75 bp, synthetic construct
  source 1..75: mol_type = other DNA
ctcaggcttatcggctggcttccatttcttagaaggcttgcagagcttctcagaagctatgggaagtccattctt

SEQ ID NO: 870780 - DNA, 75 bp, synthetic construct
  source 1..75: mol_type = other DNA
gcccgcagcaaggttgcgccgactaccgaattgttcccgatgtcgaaaattaacgacgccatccagcatgtgcgc

SEQ ID NO: 870781 - DNA, 75 bp, synthetic construct
  source 1..75: mol_type = other DNA
tggatggcaggaaggatcaacccgcccaggcgatgctggaacatgtcgagagctttcttctggaaagtaacagcg

SEQ ID NO: 870782 - DNA, 75 bp, synthetic construct
  source 1..75: mol_type = other DNA
ggggtaagaacttctcaggtgttgttcattatgcattgaaaccgggagcacaccacaaaagtgatccagtagtca

SEQ ID NO: 870783 - DNA, 75 bp, synthetic construct
  source 1..75: mol_type = other DNA
gccatcatgcgagtctgaagagcaggctgcaaaccgggaaacgattctggagaaaatccatcagcttgaagaaaa

SEQ ID NO: 870784 - DNA, 75 bp, synthetic construct
  source 1..75: mol_type = other DNA
aacagtgggtgtcattcaactcaggagcaaactgcacaatacagctcgtcagataccccgccagcgtcgtctgca

SEQ ID NO: 870785 - DNA, 75 bp, synthetic construct
  source 1..75: mol_type = other DNA
gttcaggacgcagagccaaacttcgatgtaaatggcaactctccggtaactccggatggttggataagctgtagt

SEQ ID NO: 870786 - DNA, 75 bp, synthetic construct
  source 1..75: mol_type = other DNA
acccgcattttgtgcagacaatcaaaaatgcctggcaacaaatagcgcagtttggagcgcatcaggcactgttaa

SEQ ID NO: 870787 - DNA, 75 bp, synthetic construct
  source 1..75: mol_type = other DNA
gccatcgaacaagcctggcaacaaatcgtacaattcggcgcacatcaggcgctattaaacaccctcaaaatttaa

SEQ ID NO: 870788 - DNA, 75 bp, synthetic construct
  source 1..75: mol_type = other DNA
gtggacgaccataaaatccatctgggataaaggtattgcgtattttgcagcagaaccgaggcaggaggttaaccg

SEQ ID NO: 870789 - DNA, 75 bp, synthetic construct
  source 1..75: mol_type = other DNA
cgcgccaggtattctcgtcgaagcactgaaacgccgccgtgagcgcggccttacaccgtttaccgtgctctcctg

SEQ ID NO: 870790 - DNA, 75 bp, synthetic construct
  source 1..75: mol_type = other DNA
tcgacccggctaccggcacactcgacatcagcaatccacgtatcgttcacgatctacaaagtcccgaagatcctc

SEQ ID NO: 870791 - DNA, 75 bp, synthetic construct
  source 1..75: mol_type = other DNA
gcggatgcttaatggcagccactcttttctcgcttatctgggttacctctcaggattcgcgcacatcagtgattg

SEQ ID NO: 870792 - DNA, 75 bp, synthetic construct
  source 1..75: mol_type = other DNA
gagaggcggcagagaaagcaacgtgtggtgagtggtcgatcgaatatggagatggcagctttgatggtgatgatg

SEQ ID NO: 870793 - DNA, 75 bp, synthetic construct
  source 1..75: mol_type = other DNA
gaatgccggatgatggtcagcacgtaattattttatgtgatggcgcattcgttctttatgcgcaatatcgagaca

SEQ ID NO: 870794 - DNA, 75 bp, synthetic construct
  source 1..75: mol_type = other DNA
tgagctggtcaccaacatggagtttgctgcaagggcaccagttgaagtcgtgagagcgatggcagcagagctaca

SEQ ID NO: 870795 - DNA, 75 bp, synthetic construct
  source 1..75: mol_type = other DNA
agacaagcggattgctgacatggaggcgcgggaggttgtactgccgcgtgcgcacgatgttcacccattagggcc

SEQ ID NO: 870796 - DNA, 75 bp, synthetic construct
  source 1..75: mol_type = other DNA
caaaatttcacgagtgctttattaactggatgcgtgattgccattgttcagattataaagacgtcattgcaattg

SEQ ID NO: 870797 - DNA, 75 bp, synthetic construct
  source 1..75: mol_type = other DNA
atgtaaatggcaactctccgggaactccggatagttggataagctgtagtgatcgaatgcctgaaaagggccaga

SEQ ID NO: 870798 - DNA, 75 bp, synthetic construct
  source 1..75: mol_type = other DNA
gaaacgatatttaactgccatgcctcggatttcaacttaaagatgctcggtgatacagttggtggcacacagcga

SEQ ID NO: 870799 - DNA, 75 bp, synthetic construct
  source 1..75: mol_type = other DNA
gccattttccaggaaatggcaaaagagattgaccaggcggcagggaaagtcctgctgcgtgaagcggcgcgtccg

SEQ ID NO: 870800 - DNA, 75 bp, synthetic construct
  source 1..75: mol_type = other DNA
gaagcgtttttaggccgcgtcacaccgctggagttaccgttgcttgacagccttgagcgcgagttacggcggatg

SEQ ID NO: 870801 - DNA, 75 bp, synthetic construct
  source 1..75: mol_type = other DNA
actggcactgggatcaagtgcccgatcacctaaaaatcaccttccgcgtggtggatgacaaaaacaagaagcttc

SEQ ID NO: 870802 - DNA, 75 bp, synthetic construct
  source 1..75: mol_type = other DNA
tgtcagaagggatctgtattcgtctctattccgaagacgatttcctctcgcgcccggagtttaccgacccggaga

SEQ ID NO: 870803 - DNA, 75 bp, synthetic construct
  source 1..75: mol_type = other DNA
atacgttatcgaccccggtacggcgcgtatcagccgctacagctatcgcaccaaagtgcagcgtttgccgattga

SEQ ID NO: 870804 - DNA, 75 bp, synthetic construct
  source 1..75: mol_type = other DNA
gtggcgatcaaactgtttgataatccgctggaacaaaagcaggcaatgtggaacggtcttcgccgtctactgcta

SEQ ID NO: 870805 - DNA, 75 bp, synthetic construct
  source 1..75: mol_type = other DNA
gagaatgaaactgaattatcaaaatatatatcatcacatatcttagctcataggctttgcaatcttccatcgaat

SEQ ID NO: 870806 - DNA, 75 bp, synthetic construct
  source 1..75: mol_type = other DNA
tctgcataaagcgattggcgctgtcctgagtgaaagcaatccggcttctgcccttaaccatctcaaccatgcgtt

SEQ ID NO: 870807 - DNA, 75 bp, synthetic construct
  source 1..75: mol_type = other DNA
tgctgctgcaactggcggaagaccgacgccgtctcaagggtgttcagtccacggtcaaaaaagcggaaatcaaag

SEQ ID NO: 870808 - DNA, 75 bp, synthetic construct
  source 1..75: mol_type = other DNA
ccggtttgctttcacatatcggcatgaaagatgcggataaacaggaatataccggcgcacgtaacgcgcgtttct

SEQ ID NO: 870809 - DNA, 75 bp, synthetic construct
  source 1..75: mol_type = other DNA
atgcggcccggtcagtcggtgaaattcagatacaggatctgcttggtgaagagctgaccggtatatttgttcctt

SEQ ID NO: 870810 - DNA, 75 bp, synthetic construct
  source 1..75: mol_type = other DNA
gcgagggcatgctattggctggatacagcaattattggccccggcgggagtcgaaaccatagatggtacgactat

SEQ ID NO: 870811 - DNA, 75 bp, synthetic construct
  source 1..75: mol_type = other DNA
ctggagaaactggcggttgatccacaccgcgaccgcgcccagatgctgaaagtcgaaaacgtccagcaggcgtgg

SEQ ID NO: 870812 - DNA, 75 bp, synthetic construct
  source 1..75: mol_type = other DNA
taaacaacttaaatattacaagctctggcggtggaaaagtaactgtaattctcaatggtacgacattcaagagcg

SEQ ID NO: 870813 - DNA, 75 bp, synthetic construct
  source 1..75: mol_type = other DNA
tattgggcatcaaggaattgggtttgatccttttgaggggggggtaataacgtctgcgggaaatgcctttgctaa

SEQ ID NO: 870814 - DNA, 75 bp, synthetic construct
  source 1..75: mol_type = other DNA
tggttgccgggcatgaggtgattgggcgcgtggttgcattgggtagcgccgcgcaggataaaggtttgcaggtcg

SEQ ID NO: 870815 - DNA, 75 bp, synthetic construct
  source 1..75: mol_type = other DNA
gcccgcagcaaggttgcgccgaccaccgaactgttcccgatgtcgaaaattaacgacgccatccagcatgtgcgc

SEQ ID NO: 870816 - DNA, 75 bp, synthetic construct
  source 1..75: mol_type = other DNA
agtttatgagtacgatcccggtgagctgaagccacaagatattgaagtgcaggtggattactgcgggatctgcca

SEQ ID NO: 870817 - DNA, 75 bp, synthetic construct
  source 1..75: mol_type = other DNA
taacccatattttgaggctaacgctggtggttctgaccttggcattgataacacgggaacgcgccccgtcaccgt

SEQ ID NO: 870818 - DNA, 75 bp, synthetic construct
  source 1..75: mol_type = other DNA
atcattgacgaagcgcacgaacgcagcctgaacattgatttcctgctcggttatttgaaagagctgttgccacgt

SEQ ID NO: 870819 - DNA, 75 bp, synthetic construct
  source 1..75: mol_type = other DNA
tcgacagctggtggaaaaaagtcagccgcgaaacccctgatttgctcaactttgaaaaaagcatgttgatcaaag

SEQ ID NO: 870820 - DNA, 75 bp, synthetic construct
  source 1..75: mol_type = other DNA
ctgaatattccatcgccgatcaagtacttgcatgaaaagttaccaaacaaagccaagttagggttgtactttaac

SEQ ID NO: 870821 - DNA, 75 bp, synthetic construct
  source 1..75: mol_type = other DNA
agtttatgagtacgatcccggtgagctgaggccacaagatgttgaagtgcaggtggattactgcgggatctgcca

SEQ ID NO: 870822 - DNA, 75 bp, synthetic construct
  source 1..75: mol_type = other DNA
cctcgactggcagccttattttgaggcgctgacgtatggcggtaatttccacaccgtcggtgcggttctcacgcc

SEQ ID NO: 870823 - DNA, 75 bp, synthetic construct
  source 1..75: mol_type = other DNA
gcttcgtctggccagtcacccgtaacggcaaggtgcaccttactccggctcagttatccatgcttcttgaaggta

SEQ ID NO: 870824 - DNA, 75 bp, synthetic construct
  source 1..75: mol_type = other DNA
accggcatgcccgcgactttgcccgggcacagaaagccgaccttttcctggcctgtcagtatctcagtaatgaag

SEQ ID NO: 870825 - DNA, 75 bp, synthetic construct
  source 1..75: mol_type = other DNA
gtgacggatatttcaccgacagagcggcaggtgtttccgctgacggcagggcgcaatgtgtttctggccggtctg

SEQ ID NO: 870826 - DNA, 75 bp, synthetic construct
  source 1..75: mol_type = other DNA
gtgacggatatttcaccgacagagcggcagatgtttccgctgacagcaggacgaaatgtgtttctggctggcctg

SEQ ID NO: 870827 - DNA, 75 bp, synthetic construct
  source 1..75: mol_type = other DNA
aaaagccgctggacgttatctgtctgggacgagtcgctgttgatttgtatggtcaacaaatcgggtcgcggctgg

SEQ ID NO: 870828 - DNA, 75 bp, synthetic construct
  source 1..75: mol_type = other DNA
ggatccccataacggggctaccggattttttccggttaacctttaatcaggctggtgggttttacatacccttga

SEQ ID NO: 870829 - DNA, 75 bp, synthetic construct
  source 1..75: mol_type = other DNA
gcccttctcggcactgcatggtacggctggcagtattatgaacgctggcagacagaaaaagccgcgcaggcagcg

SEQ ID NO: 870830 - DNA, 75 bp, synthetic construct
  source 1..75: mol_type = other DNA
cagaccggagatcctgcgcgatctgccgggtctgacgcgcagcgcggcgcccctgagctggcgcgactgctgcga

SEQ ID NO: 870831 - DNA, 75 bp, synthetic construct
  source 1..75: mol_type = other DNA
gaacttgtggccggattcagtgaggttgtggaggcgtataactggcgctgccgcaccgggggaatcagggaggac

SEQ ID NO: 870832 - DNA, 75 bp, synthetic construct
  source 1..75: mol_type = other DNA
aacgtttctatattcttatcctcagcaaaaaaagagctctcaaaatccaattctatatataaaagtctttttgga

SEQ ID NO: 870833 - DNA, 75 bp, synthetic construct
  source 1..75: mol_type = other DNA
gacgggaatagcggtggttttgccctgccggtcaccttcagtatgcctgaaactcccgttgccgttgaggcatta

SEQ ID NO: 870834 - DNA, 75 bp, synthetic construct
  source 1..75: mol_type = other DNA
gaacttgtggccggattcagtgaggttgtggaggcgtataactggcgctgccgcaccggggaaatcagggagggc

SEQ ID NO: 870835 - DNA, 75 bp, synthetic construct
  source 1..75: mol_type = other DNA
gagctacggccccgtcatttggtcatccagtctgtatgtcgcagaccatcagcagaacccccacagtctctggcg

SEQ ID NO: 870836 - DNA, 75 bp, synthetic construct
  source 1..75: mol_type = other DNA
acatcgcttcttcacgcgcattagccgtcactggtacccatctttctcaccccaatacgcgcgccgccgttctta

SEQ ID NO: 870837 - DNA, 75 bp, synthetic construct
  source 1..75: mol_type = other DNA
tggagaataagctgcactggcgtctggacgtggtaatgaatgaagacgactgcaaaataagaagaggaaacgccg

SEQ ID NO: 870838 - DNA, 75 bp, synthetic construct
  source 1..75: mol_type = other DNA
atgctggcaataaaacgtagcgtggcgatcatctcgatactattcactccgttaagtgcggcgagtaatctcaca

SEQ ID NO: 870839 - DNA, 75 bp, synthetic construct
  source 1..75: mol_type = other DNA
gacattacagctatccctgaacttcttaacatgctggatattaaaggaaaaatcatcacaactgatgcgatgggt

SEQ ID NO: 870840 - DNA, 75 bp, synthetic construct
  source 1..75: mol_type = other DNA
atcagtcctgcaaaatttcacgagtgctttattaactggatgcgagattgccatacttcagatgataaagacgtc

SEQ ID NO: 870841 - DNA, 75 bp, synthetic construct
  source 1..75: mol_type = other DNA
tcgcaattgcacaacttttttagcgcccaactcgcgggggtaagtgatgaggttcgtgtttctattcgtacagcg

SEQ ID NO: 870842 - DNA, 75 bp, synthetic construct
  source 1..75: mol_type = other DNA
gtgatgttgacgaagtgtgcgctcgctttccgaacgtgcataaggtagtctgcgcgcgtcctggtcccaccagca

SEQ ID NO: 870843 - DNA, 75 bp, synthetic construct
  source 1..75: mol_type = other DNA
cgtttatcggcatgacgctggtgatggtgtggctggcaggtgaactgtggttcttccgtccgaccgctccggcgc

SEQ ID NO: 870844 - DNA, 75 bp, synthetic construct
  source 1..75: mol_type = other DNA
tgtcggaagggatctgtattcgtctttattcggaagatgatttcctgtcacgtccggaatttaccgatccggaaa

SEQ ID NO: 870845 - DNA, 75 bp, synthetic construct
  source 1..75: mol_type = other DNA
gaaaactgcgaaaaggtggctgatggagaactgcctgtcacctgccacacctgtttctctatatggcaggatgta

SEQ ID NO: 870846 - DNA, 75 bp, synthetic construct
  source 1..75: mol_type = other DNA
gctgagtgcggctggcgatctcacatcacaattgcaaaccttttttgccgcacaactggcagggttgagtgatga

SEQ ID NO: 870847 - DNA, 75 bp, synthetic construct
  source 1..75: mol_type = other DNA
ttgtcggatattctactgttgactatttgtgccgttatttctggtgcagaaggttgggaagatatagaggatttt

SEQ ID NO: 870848 - DNA, 75 bp, synthetic construct
  source 1..75: mol_type = other DNA
tcctctcacacttgctgtacaccatctatttcgccggccagatgacgctctcctttttctggccgttgccgctgg

SEQ ID NO: 870849 - DNA, 75 bp, synthetic construct
  source 1..75: mol_type = other DNA
ctcgtccattcgaaattcaacaaggaaagagacttgtcgctggcatggacgtcaacattgatgatgagattggcg

SEQ ID NO: 870850 - DNA, 75 bp, synthetic construct
  source 1..75: mol_type = other DNA
ggacattttgtgcctcggtaaagccttaactggcggcacgatgaccctttccgccacgctcaccacgcgcgaggt

SEQ ID NO: 870851 - DNA, 75 bp, synthetic construct
  source 1..75: mol_type = other DNA
gctgcgcgagcaacttgcccccgcccgtgatgccgaaatggttgccgatgtgcgcgtgctgggggcaatcggcgt

SEQ ID NO: 870852 - DNA, 75 bp, synthetic construct
  source 1..75: mol_type = other DNA
gccggttgctttatgcatgggccaacttttatgggcaatccgctagcctgcgcggcagcaaacgccagcctggcg

SEQ ID NO: 870853 - DNA, 75 bp, synthetic construct
  source 1..75: mol_type = other DNA
atgaaaggacgtcaggcagtaacgctggcaaaaatgaaccgcatggtacagggtatgtttggtataaaccggccg

SEQ ID NO: 870854 - DNA, 75 bp, synthetic construct
  source 1..75: mol_type = other DNA
caggcagtgtcctgctgttgaccggctgtgccggcgttaaaagcaactttgactgcgatgccacaacgtctgata

SEQ ID NO: 870855 - DNA, 75 bp, synthetic construct
  source 1..75: mol_type = other DNA
gggtggacagtgataacgctttccatcagcccggtcgcgtctcctttgtggtcagtgctgccgactggatctttc

SEQ ID NO: 870856 - DNA, 75 bp, synthetic construct
  source 1..75: mol_type = other DNA
tataaagccctggggcatccggtgatgatcaactatttaaaacagttgggcattaccgcactggaactgctgccg

SEQ ID NO: 870857 - DNA, 75 bp, synthetic construct
  source 1..75: mol_type = other DNA
cttccctttgacgtggaccggacaggggcatcaatcgactggagcgaccggaattgtccggcccctaacatcacc

SEQ ID NO: 870858 - DNA, 75 bp, synthetic construct
  source 1..75: mol_type = other DNA
ttcggtggactgctaacgacgacaaacgtcgtagggcgcttgatatgtatatcttgggagcgtcaacggaagata

SEQ ID NO: 870859 - DNA, 75 bp, synthetic construct
  source 1..75: mol_type = other DNA
ttttggcaaactgatttacctgatgccgccctatattattctcccgcaacagttgcagcgtctgaccgcagcggt

SEQ ID NO: 870860 - DNA, 75 bp, synthetic construct
  source 1..75: mol_type = other DNA
gatacgcacacaccagaaatacaggccaagagaggccggaaaggtggtatcgctaaaggcgaagcctacgatgac

SEQ ID NO: 870861 - DNA, 75 bp, synthetic construct
  source 1..75: mol_type = other DNA
ggaaactttcgcacagtatgtggctgatacgcacacaccagaaatacaggccaagagaggccggaaaggtggtat

SEQ ID NO: 870862 - DNA, 75 bp, synthetic construct
  source 1..75: mol_type = other DNA
tacatgatttttatcaggctcttgaaggttatgattttttaacccttaaatcactttgctccagtgactttgttt

SEQ ID NO: 870863 - DNA, 75 bp, synthetic construct
  source 1..75: mol_type = other DNA
ttgcaattgcgctcatcaacgatccccgggtattgattgccgatgagccaacatcagcactggatgtgcgcctgc

SEQ ID NO: 870864 - DNA, 75 bp, synthetic construct
  source 1..75: mol_type = other DNA
tagtaaccgcggacacacttaacattctggggcgtgatgcactcacccttgacgcgcgtggatggcaacagttgc

SEQ ID NO: 870865 - DNA, 75 bp, synthetic construct
  source 1..75: mol_type = other DNA
gggcgctggcagcgttgttgcatgacattaccgccaatagttatcaccgcaccaacgtgccaaattccagtaagc

SEQ ID NO: 870866 - DNA, 75 bp, synthetic construct
  source 1..75: mol_type = other DNA
gtgcgtgaggccttaaaactgaagccaggccaggacagcattcattacgaaattctgcctggtgggcaagtattt

SEQ ID NO: 870867 - DNA, 75 bp, synthetic construct
  source 1..75: mol_type = other DNA
acatcggcactggatgttcgcctgcgcaatcagattctggaactcctggttactcaatgtgaacaacggcagatg

SEQ ID NO: 870868 - DNA, 75 bp, synthetic construct
  source 1..75: mol_type = other DNA
ttacacgcgcacactgtggacttgccgcccaaatgcacaaacttacgggcagatgctgccgacgctggacaggac

SEQ ID NO: 870869 - DNA, 75 bp, synthetic construct
  source 1..75: mol_type = other DNA
ggatcacttttcatccgtcgttgacacgtctcgacggcagcacctgtctgcagttatggaataaagaaggcaggg

SEQ ID NO: 870870 - DNA, 75 bp, synthetic construct
  source 1..75: mol_type = other DNA
gcattgcagttaagtgaaaaatcgcgatctgccatgatggctgaaaacgaaagaattaaaacactggagaaggag

SEQ ID NO: 870871 - DNA, 75 bp, synthetic construct
  source 1..75: mol_type = other DNA
gctcagccatgctgaccgaaaacgaaagaattaaagcactggaaaaggagtaccaacgcaaaacagcagaactga

SEQ ID NO: 870872 - DNA, 75 bp, synthetic construct
  source 1..75: mol_type = other DNA
cgccacaaagattgccagaatccgctgcgcgtctattcgcacattgcgccgtatatgggcgggccagaaaaaatc

SEQ ID NO: 870873 - DNA, 75 bp, synthetic construct
  source 1..75: mol_type = other DNA
acgcgatccgctgttgcagcaaatccaaccagaaaacgaaaccagcgcagcctgggtggtcggtatcgaccagac

SEQ ID NO: 870874 - DNA, 75 bp, synthetic construct
  source 1..75: mol_type = other DNA
gcgacgagactacaacacgaaaaaccagcagcctgcatttgctttagggcaaacaggacgcagggtcgcaaatga

SEQ ID NO: 870875 - DNA, 75 bp, synthetic construct
  source 1..75: mol_type = other DNA
aaaagagtcacggcagagaagaaacccgtcttcatattgtttgcgatgtccctgatgaacttattgatttcacgt

SEQ ID NO: 870876 - DNA, 75 bp, synthetic construct
  source 1..75: mol_type = other DNA
gcacagtctggtcctcgggcagatcaagacggatgagaaatccaatgagattacagctattcctgaacttcttaa

SEQ ID NO: 870877 - DNA, 75 bp, synthetic construct
  source 1..75: mol_type = other DNA
ggaaaaacggtcatcttgggctgaacgaaccgggagaaagcctgcaaccggcctgccatatcggtgatgctgcca

SEQ ID NO: 870878 - DNA, 75 bp, synthetic construct
  source 1..75: mol_type = other DNA
acaagcctggaaagtggaacataaattatcggatattctactgttgactatttgtgccgttatttcgggtgcgga

SEQ ID NO: 870879 - DNA, 75 bp, synthetic construct
  source 1..75: mol_type = other DNA
caaaatttcacgagtgctttattaactggatgcgagattgccatacttcagatgataaagacgtcatcgcaattg

SEQ ID NO: 870880 - DNA, 75 bp, synthetic construct
  source 1..75: mol_type = other DNA
ggttaagacgtaagatgcgaaaagcagccatggacagaaactacctagcgtcagtccttgcggggagcgggcttt

SEQ ID NO: 870881 - DNA, 75 bp, synthetic construct
  source 1..75: mol_type = other DNA
ctcaataatagcagagcaaaagaaagagcccgaaatgatggtcagatattatatcagttctgctgatttaaccgc

SEQ ID NO: 870882 - DNA, 75 bp, synthetic construct
  source 1..75: mol_type = other DNA
ttcagttcgctaacgcgcataaatgaggaaaatggggaactggaagcagacatcgcccaccactggcagcaaata

SEQ ID NO: 870883 - DNA, 75 bp, synthetic construct
  source 1..75: mol_type = other DNA
atggcggtgcgtatgcagcaagaagcagaacgcagtcgcttacgcggaagcgtagtcgaaattctcagctggcat

SEQ ID NO: 870884 - DNA, 75 bp, synthetic construct
  source 1..75: mol_type = other DNA
ccacagcaatccgaaaccactggcacgtggagaataagctgcactggcgtctggacgtggtaatgaatgaagacg

SEQ ID NO: 870885 - DNA, 75 bp, synthetic construct
  source 1..75: mol_type = other DNA
atgctgacaataaaacgtagcgtggcgatcatcgcgatactgttcagtccgttaagtacggcgagcaatctcaca

SEQ ID NO: 870886 - DNA, 75 bp, synthetic construct
  source 1..75: mol_type = other DNA
cagttctgctgatttaaccgcagagaagttcgccacagcaatccgaaaccactggcacgtggagaataagctgca

SEQ ID NO: 870887 - DNA, 75 bp, synthetic construct
  source 1..75: mol_type = other DNA
aaaaggccgcaataactactggaaagtgcgccaggctgtcgagacggcaaaagagacgctctacagctttgatca

SEQ ID NO: 870888 - DNA, 75 bp, synthetic construct
  source 1..75: mol_type = other DNA
gcaaaatttcatgagtgctttattaactggatgcgtgactgccattcatcaaatgataaagacgtcattgcaatt

SEQ ID NO: 870889 - DNA, 75 bp, synthetic construct
  source 1..75: mol_type = other DNA
tccgtcttcatattgtttgcgatgtccctgatgaacttattgatttcacgtttgaatggaaaggtctgaagaaat

SEQ ID NO: 870890 - DNA, 75 bp, synthetic construct
  source 1..75: mol_type = other DNA
ctggatgcgtgattgccattcatcaaatgataaagacgtcatcgcaattgatggaaaaatacaccggcattctta

SEQ ID NO: 870891 - DNA, 75 bp, synthetic construct
  source 1..75: mol_type = other DNA
tgacaagagtcgccgcaagggagcgattcatgtcattagtgcgttctcaacaatgcacagtctggttctcgggca

SEQ ID NO: 870892 - DNA, 75 bp, synthetic construct
  source 1..75: mol_type = other DNA
gatgataaagacgtcattgcaattgatggaaaaacgctccggcattcttatgataagagtcgccgcaggggagcg

SEQ ID NO: 870893 - DNA, 75 bp, synthetic construct
  source 1..75: mol_type = other DNA
tattcctgttcacgatactattgccagagttgtatcctgtatcagtcctgcaaagtttcacgagtgctttattaa

SEQ ID NO: 870894 - DNA, 75 bp, synthetic construct
  source 1..75: mol_type = other DNA
taccggtctgatggcgaaccacaatccgctggcccatgagctgattgccgcgtctgaacaatccggtgaccgcgc

SEQ ID NO: 870895 - DNA, 75 bp, synthetic construct
  source 1..75: mol_type = other DNA
tctccgattgcagaacagctcgataaaatcagcgatgggtacatcagcgccctgctacgtcggggcgaactggaa

SEQ ID NO: 870896 - DNA, 75 bp, synthetic construct
  source 1..75: mol_type = other DNA
atgcctggcgggcgagcctatcgtccgggcgatgtgttaaccaccatgtccggtcaaaccgttgaagtgctgaac

SEQ ID NO: 870897 - DNA, 75 bp, synthetic construct
  source 1..75: mol_type = other DNA
gtggtaatgaatgaagacgactgcaaaataagaagaggaaacgccgcagaattattttcagggatacggcacatc

SEQ ID NO: 870898 - DNA, 75 bp, synthetic construct
  source 1..75: mol_type = other DNA
tggaagaagagggtattaaaggcaccggcgaatgcacgccgtatccgcgttatggggaaagtgatgcctcggtaa

SEQ ID NO: 870899 - DNA, 75 bp, synthetic construct
  source 1..75: mol_type = other DNA
tgcattgtgggatctggcggcgcgaaaacagcagcaatcgctggctgatttgatcggcataacgcttcccgagac

SEQ ID NO: 870900 - DNA, 75 bp, synthetic construct
  source 1..75: mol_type = other DNA
tgaacacattgaaaatctgatttcacttgaggcaggtattgatcaggttgttgagatgcgtattacgggggcggg

SEQ ID NO: 870901 - DNA, 75 bp, synthetic construct
  source 1..75: mol_type = other DNA
caggcgattttcgatgccgtagacgaacttagtcaggaaagccccggcgacattctgatctttatgagcggtgag

SEQ ID NO: 870902 - DNA, 75 bp, synthetic construct
  source 1..75: mol_type = other DNA
ccgtatggcaaagtgctggagctgatcgacgactgtatctcctgcggtgtggatcaactgatcgacgccaatggt

SEQ ID NO: 870903 - DNA, 75 bp, synthetic construct
  source 1..75: mol_type = other DNA
gatcagcaagctggattacccgaacttctggcatcagggcaatctcaagctgcgtttgagttatcagtttgagcc

SEQ ID NO: 870904 - DNA, 75 bp, synthetic construct
  source 1..75: mol_type = other DNA
ggatgacactgagcgcgaccagttgcaggcgatttttgacgccgtggatgaactggggcgtgaaagtgccggcga

SEQ ID NO: 870905 - DNA, 75 bp, synthetic construct
  source 1..75: mol_type = other DNA
atcgcgaccgtgctcagatgctgaaagtcgaaaatgtccagcaggcgtggcagcaatggatcaacaaactgccgc

SEQ ID NO: 870906 - DNA, 75 bp, synthetic construct
  source 1..75: mol_type = other DNA
gaacggtcttcgccgtctactgctgctgaatattccatcgccaatcaaatatttgcatgagaagttgccaaacaa

SEQ ID NO: 870907 - DNA, 75 bp, synthetic construct
  source 1..75: mol_type = other DNA
caggcgatttttgacgccgtagacgaactgagtcaggaaagccctggcgacattctgatctttatgagcggtgag

SEQ ID NO: 870908 - DNA, 75 bp, synthetic construct
  source 1..75: mol_type = other DNA
gaacggtcttcgtcgtttactgctgctgaatattccttcaccaatcaaatacttgcatgaaaagttgccaaacaa

SEQ ID NO: 870909 - DNA, 75 bp, synthetic construct
  source 1..75: mol_type = other DNA
tattgagcaaagcgggttacatatctggagcttcggtaatttaccggatcactacgagcagaaacgtggcaacta

SEQ ID NO: 870910 - DNA, 75 bp, synthetic construct
  source 1..75: mol_type = other DNA
ggaaagtcctgctgcgtgaagcggcacgaccggaaatcacttatcccgacaatttgccggttagtcagaaaaagc

SEQ ID NO: 870911 - DNA, 75 bp, synthetic construct
  source 1..75: mol_type = other DNA
cgctgcgttatttgcaggcgattgaaaaacgactggaaaaactggcggttgatccgcatcgcgaccgtgctcaga

SEQ ID NO: 870912 - DNA, 75 bp, synthetic construct
  source 1..75: mol_type = other DNA
aggtcaactacagccagatcgatccggcgttatgtcgtgaactctttattcgccacgctctggtggaaggtgact

SEQ ID NO: 870913 - DNA, 75 bp, synthetic construct
  source 1..75: mol_type = other DNA
cgctgaacaagctgaatctgcgtcatacggaaattttaccgctttatgcgcggctttcgaatagcgaacagaacc

SEQ ID NO: 870914 - DNA, 75 bp, synthetic construct
  source 1..75: mol_type = other DNA
aaaccaccaccggcccgttggggcagggcgtagctaatgcggtggggatggcgattgcggagaaggcgctggcgg

SEQ ID NO: 870915 - DNA, 75 bp, synthetic construct
  source 1..75: mol_type = other DNA
ccgggcgcgccgatggggatggcggatattgccgaagtggtctggcgtcgtcacctgcgtcataacccaaaaaat

SEQ ID NO: 870916 - DNA, 75 bp, synthetic construct
  source 1..75: mol_type = other DNA
ccatccggatgttaagtgttgatgcgatccagaaagcgaactccggtcatccgggcgcgccgatggggatggcgg

SEQ ID NO: 870917 - DNA, 75 bp, synthetic construct
  source 1..75: mol_type = other DNA
agataaaacattggaggctacacgtaagcgtactgaggggcggacagagatacaactcaaagcggaaggggtacc

SEQ ID NO: 870918 - DNA, 75 bp, synthetic construct
  source 1..75: mol_type = other DNA
aattatcacaactgatgcgatgggttgccagaaagatattgcagaggagatacaaaaacagggaggtgattattt

SEQ ID NO: 870919 - DNA, 75 bp, synthetic construct
  source 1..75: mol_type = other DNA
ccaaataaagccaacagccacgattgccacggctcggcgctgggtgcagatgaagtggcgctggtgcgtgaacgt

SEQ ID NO: 870920 - DNA, 75 bp, synthetic construct
  source 1..75: mol_type = other DNA
gccttccgtcgcctgtgtcgtactgattatctcaactatctgcgcgtgcgcgaatggcaggatatctacacccag

SEQ ID NO: 870921 - DNA, 75 bp, synthetic construct
  source 1..75: mol_type = other DNA
tagcgatcaaactgtttgataacccgctggaacagaagcaggcaatgtggagcggtcttcgccgtttactgctgc

SEQ ID NO: 870922 - DNA, 75 bp, synthetic construct
  source 1..75: mol_type = other DNA
aaaagagtcacggcagagaagaaatccgtcttcatattgtttgcgatgcccctgatgaacttattgatttcacgt

SEQ ID NO: 870923 - DNA, 75 bp, synthetic construct
  source 1..75: mol_type = other DNA
ttcgtctctattccgaagacgatttcctttcgcgcccggaatttaccgatccggagattctgcgtaccaacctgg

SEQ ID NO: 870924 - DNA, 75 bp, synthetic construct
  source 1..75: mol_type = other DNA
gggttttttattaattctaaaaacgataagggaaaaaattcaggagttcagaaaaatacaattctctgctgcaag

SEQ ID NO: 870925 - DNA, 75 bp, synthetic construct
  source 1..75: mol_type = other DNA
gtggaagaactggaacacaaaactcgtcgccgcgatattctggtggatgacgaaacgttgtttgagttctacgac

SEQ ID NO: 870926 - DNA, 75 bp, synthetic construct
  source 1..75: mol_type = other DNA
tttcgccatcgacaaatcggcgagctttccggtggacaaaagaaacgcgtctttctggcgagagcgattgcacag

SEQ ID NO: 870927 - DNA, 75 bp, synthetic construct
  source 1..75: mol_type = other DNA
gttaatgaaatcacctttgatggtctgggcagctttgttgcccgtaaggggaataaaggtccaaaagttgccgtt

SEQ ID NO: 870928 - DNA, 75 bp, synthetic construct
  source 1..75: mol_type = other DNA
gcgtgtatctgaatccgcaagattgcagcgtgattaatgacgaagcgctgaatcgtattatcgccgtaggccacc

SEQ ID NO: 870929 - DNA, 75 bp, synthetic construct
  source 1..75: mol_type = other DNA
aaacctgcgggtgaagaagaagttctgtggttgagtaacaacacaccgttcaaaaatggcgtcgccattcgcggt

SEQ ID NO: 870930 - DNA, 75 bp, synthetic construct
  source 1..75: mol_type = other DNA
atacccgctgaaactgggcaacgggccggggctgatgctgtttgacaagcgctacttccccaaccagaaactggt

SEQ ID NO: 870931 - DNA, 75 bp, synthetic construct
  source 1..75: mol_type = other DNA
ccaattttgcctgctggggcgaagataaaatagtcggcaaggcgctggataatcgcatcggctgcgcgatgatgg

SEQ ID NO: 870932 - DNA, 75 bp, synthetic construct
  source 1..75: mol_type = other DNA
ggcagtgtggaagaagaagttgggctacgcggggcacaaacctcggctgaacacactaaaccggatgtggtgatc

SEQ ID NO: 870933 - DNA, 75 bp, synthetic construct
  source 1..75: mol_type = other DNA
aaatggcagagaacaaacctgacctgccggatggcaaaacagagcaggctgtcagggaaattgccgggcaggagc

SEQ ID NO: 870934 - DNA, 75 bp, synthetic construct
  source 1..75: mol_type = other DNA
aaaacactgctggcggtagagattaaactggcgcagaaagattttgctggcgcgcaaaacttgctggcgaaaatt

SEQ ID NO: 870935 - DNA, 75 bp, synthetic construct
  source 1..75: mol_type = other DNA
tgcagcagcagcagttgcattcgataaaattgaaagggctgttctgtcaggtaatgaacccagaaaagatggctt

SEQ ID NO: 870936 - DNA, 75 bp, synthetic construct
  source 1..75: mol_type = other DNA
cggtcatcgaacaaatctcccctgtcctctcccgtcgtaaactggatgaactggacctcattgtggtcgatcatc

SEQ ID NO: 870937 - DNA, 75 bp, synthetic construct
  source 1..75: mol_type = other DNA
gctggataaggatggtcgcgtgcaatgggccaaagacggggcgctcacacaggaagaggtgcagcaagtgatgga

SEQ ID NO: 870938 - DNA, 75 bp, synthetic construct
  source 1..75: mol_type = other DNA
ggaagccgcgctgccggagagtgtgctgcgtgaatcacaacgggagcgggatatggttcgtgacctgcagaaaga

SEQ ID NO: 870939 - DNA, 75 bp, synthetic construct
  source 1..75: mol_type = other DNA
gcgccggatttatcgggatggagctctatgaattccatcatctgattgttaacggcatgggtccggatcgcagcg

SEQ ID NO: 870940 - DNA, 75 bp, synthetic construct
  source 1..75: mol_type = other DNA
tagaaattgaaggcaaaataaacattagaacattggtccgcatacccgtaggaaaagttaaagtaatatctactc

SEQ ID NO: 870941 - DNA, 75 bp, synthetic construct
  source 1..75: mol_type = other DNA
tagactgctatgatctacgtgacggcaaacttactgatcaaagagaattaatcgtttcgagcgaaattttacctc

SEQ ID NO: 870942 - DNA, 75 bp, synthetic construct
  source 1..75: mol_type = other DNA
gcgttgaaaacacaaaatatagctttgaatgcgataaagaagatttggaatttaataataaagttaaaggaataa

SEQ ID NO: 870943 - DNA, 75 bp, synthetic construct
  source 1..75: mol_type = other DNA
ttagagatggaaaatggttagtaggaattgacaatgagttatctttaaaagagttaactcgcttacctaagaaca

SEQ ID NO: 870944 - DNA, 75 bp, synthetic construct
  source 1..75: mol_type = other DNA
cgcgttgaaaacacaaaatatagctttgaatgcgataaagaagatttggaatttaataataaagttaaaggaata

SEQ ID NO: 870945 - DNA, 75 bp, synthetic construct
  source 1..75: mol_type = other DNA
tggctcatatttatttgacccatgttttctaccttccaatttaaaaaatgcattcgtagtatctaccgaagactc

SEQ ID NO: 870946 - DNA, 75 bp, synthetic construct
  source 1..75: mol_type = other DNA
ttggatacatactcttacaattctgtagcaaaaagaattgttgagcaaatggaaataatgttgaatgaatgtaat

SEQ ID NO: 870947 - DNA, 75 bp, synthetic construct
  source 1..75: mol_type = other DNA
taaagataaggggtataaatacgctttggatacatactcttacaattctgtagcaaaaagaattgttgagcaaat

SEQ ID NO: 870948 - DNA, 75 bp, synthetic construct
  source 1..75: mol_type = other DNA
gttcgttctggttgaaactttcctgctgttgttcagctccatcacctacggcatgacggctatcgccatgtacaa

SEQ ID NO: 870949 - DNA, 75 bp, synthetic construct
  source 1..75: mol_type = other DNA
tgctgggcttcagtgccagtatgggcagcggctcggttagcctgttcctgatgattgccttctacgccttgagcg

SEQ ID NO: 870950 - DNA, 75 bp, synthetic construct
  source 1..75: mol_type = other DNA
gtaattacatgcgctttacaaacaggagcatcactgacctggctagttaacggtaatggtcctgtttttgatata

SEQ ID NO: 870951 - DNA, 75 bp, synthetic construct
  source 1..75: mol_type = other DNA
atattgaaaatataatgaggagttctgatgttttaatattaccctcagttccagttgacggatacttggaacaat

SEQ ID NO: 870952 - DNA, 75 bp, synthetic construct
  source 1..75: mol_type = other DNA
tcgtgctgggtagcttcatgctgtaatgacccatcgcggggcgttcacgccccgctttctttcccgccgactaac

SEQ ID NO: 870953 - DNA, 75 bp, synthetic construct
  source 1..75: mol_type = other DNA
ctacggcaaaaatattccgcttgaggaaacggtagtttcaccacaagccgttttcgatgcgccacaactcaccac

SEQ ID NO: 870954 - DNA, 75 bp, synthetic construct
  source 1..75: mol_type = other DNA
catgaccttgctgatgaagacctgaaccccatcactatcattcagaactacaccaacatgtccgacccgatgaaa

SEQ ID NO: 870955 - DNA, 75 bp, synthetic construct
  source 1..75: mol_type = other DNA
ccattaccccggaacaaattgaaatccgtgagctgaggaaaaagctacaacgcattgaaatggagaatgaaatat

SEQ ID NO: 870956 - DNA, 75 bp, synthetic construct
  source 1..75: mol_type = other DNA
cagccgtttaatgcctcattctggagtttttcgttcggtgtttccgcgctggctaccaccggtttgcatctggga

SEQ ID NO: 870957 - DNA, 75 bp, synthetic construct
  source 1..75: mol_type = other DNA
atgaaagatttaacactcaaatttgccgacagggccgacttttcggcctttatggagagcactggctattatgat

SEQ ID NO: 870958 - DNA, 75 bp, synthetic construct
  source 1..75: mol_type = other DNA
gaaacggtggtctcaccacaagccgttttcgatgcgccacaactcaccacggttgccaaagagtggccactgttt

SEQ ID NO: 870959 - DNA, 75 bp, synthetic construct
  source 1..75: mol_type = other DNA
cggtggtgagttttctgctcaccttcatggggtttgtgggagggctcgccaaatggttgttcagtaaaacagaag

SEQ ID NO: 870960 - DNA, 75 bp, synthetic construct
  source 1..75: mol_type = other DNA
agtttaaacgcgaatccgctcaactggttgttgaccagagatacacggtggcagatgccgccaaagctatggatg

SEQ ID NO: 870961 - DNA, 75 bp, synthetic construct
  source 1..75: mol_type = other DNA
agtttaaacgcgaatccgctcaactggttgttgaccagacatacaccgtggcagatgccgccaaagctatggatg

SEQ ID NO: 870962 - DNA, 75 bp, synthetic construct
  source 1..75: mol_type = other DNA
ggtagaagcaagaaatcgcgcaggcaaaatttcaggtattttaaccgacttcacctttcatgatctgaaggcgaa

SEQ ID NO: 870963 - DNA, 75 bp, synthetic construct
  source 1..75: mol_type = other DNA
cagataaaatactctccaggaaacccggggcggttcatcctgtttttatcgcaatggaaattgcctatctgtgtg

SEQ ID NO: 870964 - DNA, 75 bp, synthetic construct
  source 1..75: mol_type = other DNA
atgacactgcaggttgaattctggacggtggtgggctttctcatcaccttcatgagctttgttggcggtatggcc

SEQ ID NO: 870965 - DNA, 75 bp, synthetic construct
  source 1..75: mol_type = other DNA
atgctcatccgtactttcgcgcttctgatgcagggaaaattgttaatcagaactgagcgcgccgttttaatgaaa

SEQ ID NO: 870966 - DNA, 75 bp, synthetic construct
  source 1..75: mol_type = other DNA
gacagggccgacttttcggcctttatggagaggagtggctattatgatgacgagtcgatgcaggatgatattctt

SEQ ID NO: 870967 - DNA, 75 bp, synthetic construct
  source 1..75: mol_type = other DNA
gacagggccgacttttcggcctttatggagagcactggctattatgatgacgagtcgatgcaggatgatattctt

SEQ ID NO: 870968 - DNA, 75 bp, synthetic construct
  source 1..75: mol_type = other DNA
gacagggccgacttttcggcctttatggagagaaatggctattatgatgacgagtcgatgcaggatgatattctt

SEQ ID NO: 870969 - DNA, 75 bp, synthetic construct
  source 1..75: mol_type = other DNA
ttcttgccgctattggcgttaaacccggtaacatcccgttcgatgtcatctccattatcatggcggttatcgccg

SEQ ID NO: 870970 - DNA, 75 bp, synthetic construct
  source 1..75: mol_type = other DNA
tcatcagacagaaaagctgctgcgccgtaacccgaaatacatcacgatcctcgcaccgatcgtgacctatttcct

SEQ ID NO: 870971 - DNA, 75 bp, synthetic construct
  source 1..75: mol_type = other DNA
cgctgtagcttctttcgcagccgtgtctggtctgttcattctgccgacctatccgacgctggttgctgcggtaca

SEQ ID NO: 870972 - DNA, 75 bp, synthetic construct
  source 1..75: mol_type = other DNA
cgatgcaaaagcgttcccgattattccgtgcaacctgtgcggttcacagcctaacctgcaacgtcaggtgattgc

SEQ ID NO: 870973 - DNA, 75 bp, synthetic construct
  source 1..75: mol_type = other DNA
ccggcgggctggcagcctgaagaagatgaaaatcagttggatgagttacggctgaatgtggttgaagtgaaataa

SEQ ID NO: 870974 - DNA, 75 bp, synthetic construct
  source 1..75: mol_type = other DNA
gttcagcgccatgcagaatgtggtgccttcacatctgtgtgataccaatctttttgatttcaaaggcattaacca

SEQ ID NO: 870975 - DNA, 75 bp, synthetic construct
  source 1..75: mol_type = other DNA
gacagggccgacttttcggcctttatggacagcagtggctattatgatgacgagtcgatgcaggatgatattctt

SEQ ID NO: 870976 - DNA, 75 bp, synthetic construct
  source 1..75: mol_type = other DNA
gacagggccgacttttcggcctttatggatagtagtggctattatgatgacgagtcgatgcaggatgatattctt

SEQ ID NO: 870977 - DNA, 75 bp, synthetic construct
  source 1..75: mol_type = other DNA
gacagggccgacttttcggcctttatggaaagaagtggctattatgatgacgagtcgatgcaggatgatattctt

SEQ ID NO: 870978 - DNA, 75 bp, synthetic construct
  source 1..75: mol_type = other DNA
gtgatatgctcacctcagaacaacacaggtgctccaacgaaaaaaagaaattttagcgcagagtttaaacgcgaa

SEQ ID NO: 870979 - DNA, 75 bp, synthetic construct
  source 1..75: mol_type = other DNA
gcagttcacgcaccataaaaaaggggatgccggtaaaaaatcggcaaaaggtgatgccgcgaaaaaagcggctaa

SEQ ID NO: 870980 - DNA, 75 bp, synthetic construct
  source 1..75: mol_type = other DNA
ggtactggatgatctccaacattccgttaagtctacgtattggcatcaccagcggaatcggattatttattgcct

SEQ ID NO: 870981 - DNA, 75 bp, synthetic construct
  source 1..75: mol_type = other DNA
gccggtatcggcagtattgcgatggggatatttgctaacttacccgtggcgctggctccggcaatggggctgaac

SEQ ID NO: 870982 - DNA, 75 bp, synthetic construct
  source 1..75: mol_type = other DNA
gggaccaccgtccgcacagaattgattgcggggatgaccacttttttaaccatggtgtacatcgtttttgtgaac

SEQ ID NO: 870983 - DNA, 75 bp, synthetic construct
  source 1..75: mol_type = other DNA
agatgagctgagaaaaaagctacaacgcattgaaatggagaatgaaatattaaagctcttgatgtcagacaccct

SEQ ID NO: 870984 - DNA, 75 bp, synthetic construct
  source 1..75: mol_type = other DNA
caataacgccggaacaaatcgaaatacgagagctgaagaaaaagctacaacgtattgaaatggaaaacgatattc

SEQ ID NO: 870985 - DNA, 75 bp, synthetic construct
  source 1..75: mol_type = other DNA
gtaactgataaagctggcttaatagatagtaacggtaaattccccaatatgaataaggcgctgtatgtcgatagc

SEQ ID NO: 870986 - DNA, 75 bp, synthetic construct
  source 1..75: mol_type = other DNA
ggattttattctgggcgcgaacagtaaggagcagcgggaaaggctgacgggctggattggtgaaattgccgcgta

SEQ ID NO: 870987 - DNA, 75 bp, synthetic construct
  source 1..75: mol_type = other DNA
tggacgccgcgtcgtaagcgtgggactttcctcggtttctggaatatttcacataatctcggcggtgcaggcgcg

SEQ ID NO: 870988 - DNA, 75 bp, synthetic construct
  source 1..75: mol_type = other DNA
gagtttcatttccctgggtaaggctgatcaccttctgacacatgctcaggatgctgaatacgttgccgatatcat

SEQ ID NO: 870989 - DNA, 75 bp, synthetic construct
  source 1..75: mol_type = other DNA
attacctgttcgatggccatgtgattggcatgtttattttcccgtcgattattgcactgattgtcggttttatcg

SEQ ID NO: 870990 - DNA, 75 bp, synthetic construct
  source 1..75: mol_type = other DNA
gcctgcgttacggcagcgactccccggaatcttatggcctcggcaaagctgaagagctgttcggcgaggagatca

SEQ ID NO: 870991 - DNA, 75 bp, synthetic construct
  source 1..75: mol_type = other DNA
cagattcatcaccaccagattgtgtaagcactgaaaacaaccgacttacctctgtaatatctacgcttatttcat

SEQ ID NO: 870992 - DNA, 75 bp, synthetic construct
  source 1..75: mol_type = other DNA
ctgcgcggcgcgaaaacccgcgacaccagcaagtggaccgagtatctgaacgaaacgctggatatgtggggtaac

SEQ ID NO: 870993 - DNA, 75 bp, synthetic construct
  source 1..75: mol_type = other DNA
ccgagaacgccacgcataccctgcacaacttctacactctgcgcggcgcgaaaacccgcgacaccagcaagtgga

SEQ ID NO: 870994 - DNA, 75 bp, synthetic construct
  source 1..75: mol_type = other DNA
tggcttatggcttcaagtcacgccaagcattctgtaaccatctaggtatttcccaaagcacgatggctaacagat

SEQ ID NO: 870995 - DNA, 75 bp, synthetic construct
  source 1..75: mol_type = other DNA
gttatctacactcacagccacgccgaccactatggcggcgtgaaaggcatcatctctgaagccgatgttaaatcc

SEQ ID NO: 870996 - DNA, 75 bp, synthetic construct
  source 1..75: mol_type = other DNA
cgaaaacgtgctggcgggcaacatcatgagccgtcgcgcgctttactcatacggcctgctgctgccgcacaatgc

SEQ ID NO: 870997 - DNA, 75 bp, synthetic construct
  source 1..75: mol_type = other DNA
ttatattggtaaatatcgcgataccatcaagtacattcacgaccagaccctgcacctggcaaaccagggctacac

SEQ ID NO: 870998 - DNA, 75 bp, synthetic construct
  source 1..75: mol_type = other DNA
attaaaagaagcgaacttaattgcggtgcctggctgttatccgacggcggcgcaattggcgctgaaaccgttgat

SEQ ID NO: 870999 - DNA, 75 bp, synthetic construct
  source 1..75: mol_type = other DNA
atggagatatcagtattcgaacaatcactaaattacctaatgaaaaaattcaagtaaaaaataaaaacatagttt

SEQ ID NO: 871000 - DNA, 75 bp, synthetic construct
  source 1..75: mol_type = other DNA
cgcgatacatttccagcagattgggttgttatctgctcgatggagacaggcgcatcaattgaatggctagcattt

SEQ ID NO: 871001 - DNA, 75 bp, synthetic construct
  source 1..75: mol_type = other DNA
tactgaaaggcgcggcggcacaagcggtacagtgcgccaatattcgtttcggctatgcggaaacgcagtctctta

SEQ ID NO: 871002 - DNA, 75 bp, synthetic construct
  source 1..75: mol_type = other DNA
attattgtggcgaccgaagacaacttactgaaaggcgcggcggcacaagcggtacagtgcgccaatattcgtttc

SEQ ID NO: 871003 - DNA, 75 bp, synthetic construct
  source 1..75: mol_type = other DNA
gatcgccacgcatctcggtgctgacgttatttttaccccgcatctgggcaatttcccgcgcggcattctcgaaac

SEQ ID NO: 871004 - DNA, 75 bp, synthetic construct
  source 1..75: mol_type = other DNA
ggacacccttcgcggaatgtcggtcgaaatgctgttcgactttatgtccgttcgcctcgatagcgcgaaagccgc

SEQ ID NO: 871005 - DNA, 75 bp, synthetic construct
  source 1..75: mol_type = other DNA
tcatacagaatcgcggtggtcagaaagtaattgagcggatactcatggcttatggcttcaagtcacgccaggcat

SEQ ID NO: 871006 - DNA, 75 bp, synthetic construct
  source 1..75: mol_type = other DNA
tatgacaaaggcgttccggcgctgaaaaatgtcgttgggctgccatttgcgatatcgggtttgccgttcagggcg

SEQ ID NO: 871007 - DNA, 75 bp, synthetic construct
  source 1..75: mol_type = other DNA
cagtggccggtgatcaacgccaccagcggcgtgagcggtgcaggacgtaaggcagcgatttcaaatagtttttgt

SEQ ID NO: 871008 - DNA, 75 bp, synthetic construct
  source 1..75: mol_type = other DNA
gatgcaccggtagctgagaaagacggttttgccatttgccgctcggtcagtcttgatgggtgggtttatgttatc

SEQ ID NO: 871009 - DNA, 75 bp, synthetic construct
  source 1..75: mol_type = other DNA
tagcgaatgggttacggatgcggatgcacagaaaagcggtcagatgctggaagcggagcagcaaaaatccgcatt

SEQ ID NO: 871010 - DNA, 75 bp, synthetic construct
  source 1..75: mol_type = other DNA
tacgggtccgccattttactcaggatgacgcgcatatcttttgcacgctgcaacaggtcgagggggaatgtaaaa

SEQ ID NO: 871011 - DNA, 75 bp, synthetic construct
  source 1..75: mol_type = other DNA
attatcgacggcctggagtttgacttcctgatgactccaggtagcgaagcgccagccgaaatgcacttctatatt

SEQ ID NO: 871012 - DNA, 75 bp, synthetic construct
  source 1..75: mol_type = other DNA
cctgtttaaagtcaccgataaaatgtatcaagtgcgcggtcaggacatctctaacattacgttcgttgaaggcga

SEQ ID NO: 871013 - DNA, 75 bp, synthetic construct
  source 1..75: mol_type = other DNA
tgagcaggattgttattgcattaaccgccgccagcggcatgatggtaaataccgcttacgcgaaggaagaagctc

SEQ ID NO: 871014 - DNA, 75 bp, synthetic construct
  source 1..75: mol_type = other DNA
ccgcggctattacggttctgtcagccacaacgcccgcgcggtgtataacttctatcttggctattacgacggtaa

SEQ ID NO: 871015 - DNA, 75 bp, synthetic construct
  source 1..75: mol_type = other DNA
taagcatatcaatgattatattggtaaataccgcgataccatcaagtacattcacgaccagaccctgcacctggc

SEQ ID NO: 871016 - DNA, 75 bp, synthetic construct
  source 1..75: mol_type = other DNA
actgggccagccgcggctactatggctctgttagccataacgcccgcgcggtgtataacttctatcttggctact

SEQ ID NO: 871017 - DNA, 75 bp, synthetic construct
  source 1..75: mol_type = other DNA
tgtacaccagcggtctgggttacgttaaccgtgtccgcaccgtcaccccaaaacgcggcgaaccctttttatgct

SEQ ID NO: 871018 - DNA, 75 bp, synthetic construct
  source 1..75: mol_type = other DNA
tccaactacctctctgtgcctgcaatggctcgacagcctcgatttaaccggtaaaacagtcatcgactttggctg

SEQ ID NO: 871019 - DNA, 75 bp, synthetic construct
  source 1..75: mol_type = other DNA
aatcagcgtcctgccggtttcaggcggtttgctgggcctttccggtattctggcaagccaggcagagagcgtttg

SEQ ID NO: 871020 - DNA, 75 bp, synthetic construct
  source 1..75: mol_type = other DNA
tcgagcaaacgctgattatctcggtggcgctggtgattctggtggtgtttttattcctgcgctcgggtcgcgcca

SEQ ID NO: 871021 - DNA, 75 bp, synthetic construct
  source 1..75: mol_type = other DNA
caacgcaactggccccgacgatttcacaaatcgacggtgtcggtgatgttgatgtcggcggcagctcgctgcctg

SEQ ID NO: 871022 - DNA, 75 bp, synthetic construct
  source 1..75: mol_type = other DNA
gcgacttatacgtcgatatgttcacctacagcaaaggcgagcgtaaaggcgaaacaggcgtcagcctgaaagccc

SEQ ID NO: 871023 - DNA, 75 bp, synthetic construct
  source 1..75: mol_type = other DNA
agcacgatgagcccctgacgttcagcgatgcggaaatgctcgacccccgcttccttgatgtggtggcggatgcct

SEQ ID NO: 871024 - DNA, 75 bp, synthetic construct
  source 1..75: mol_type = other DNA
tgaccgcccagctgcaggcgctgcctgaagaacaggcacaacttgtgctgctcagcctgcaaaaggtgatggcac

SEQ ID NO: 871025 - DNA, 75 bp, synthetic construct
  source 1..75: mol_type = other DNA
aacatgacgagcccctgactttccgggatgcagaatcactggacccgcgttttcttgatgttgttgccgacgcct

SEQ ID NO: 871026 - DNA, 75 bp, synthetic construct
  source 1..75: mol_type = other DNA
ccattggtattgatatcgatccgcaggcgattcaggccagccgcgacaacgccgaacgtaatggcgtttctgacc

SEQ ID NO: 871027 - DNA, 75 bp, synthetic construct
  source 1..75: mol_type = other DNA
cataaacggccaggaatcgtcgctaaaaaacagggttcggataccgaactcagtccagaaaggtacaacaattca

SEQ ID NO: 871028 - DNA, 75 bp, synthetic construct
  source 1..75: mol_type = other DNA
gccattatcgcagccatcttgcgctgatcgaatcgcgtctggacagcccacagtctcccagccagatggcgaaac

SEQ ID NO: 871029 - DNA, 75 bp, synthetic construct
  source 1..75: mol_type = other DNA
tgcgctggtgattctggtggtgtttttgttcctgcgttcgggtcgcgccaccattattcccgccgttgcggtgcc

SEQ ID NO: 871030 - DNA, 75 bp, synthetic construct
  source 1..75: mol_type = other DNA
gaagtggatccacgctatacccaggacatcagtgcactggaaaaaatgttcgtcattaataacgaaggaaaagcg

SEQ ID NO: 871031 - DNA, 75 bp, synthetic construct
  source 1..75: mol_type = other DNA
acgattctctccaccctgccctcggcgggcgttggagcgctgttggcgctggagctgttcaatgccccgttcagc

SEQ ID NO: 871032 - DNA, 75 bp, synthetic construct
  source 1..75: mol_type = other DNA
tttgcagtttgattttgaccgggatatcaacggcgcagcgcgtgatgtgcaggcggcgatcaacgccgcacaaag

SEQ ID NO: 871033 - DNA, 75 bp, synthetic construct
  source 1..75: mol_type = other DNA
ttgccgggtcgcctgttacgcgagtttgccgtgacgctttctgtcgccattggtatttcgttgctggtttccctg

SEQ ID NO: 871034 - DNA, 75 bp, synthetic construct
  source 1..75: mol_type = other DNA
ggatgtgcgcaacgccgggatgaccaacgctaaaccggctattttgttgatgatccgcaaactgccggaagccaa

SEQ ID NO: 871035 - DNA, 75 bp, synthetic construct
  source 1..75: mol_type = other DNA
gatgtcggcggcagctcgctgcctgcggtgcgcgtcgggctgaatccacaggcgctgtttaatcagggcgtgtcg

SEQ ID NO: 871036 - DNA, 75 bp, synthetic construct
  source 1..75: mol_type = other DNA
acgccggtggtgtatctttttttcgaccgtctgcggctgcgtttttcgcgaaaatctaaagaaacggtaaccgag

SEQ ID NO: 871037 - DNA, 75 bp, synthetic construct
  source 1..75: mol_type = other DNA
ccggtggtgtatctctttttcgaccgtctgcggctgcgtttttcgcgtaaacctaaacaaacggtaaccgagtaa

SEQ ID NO: 871038 - DNA, 75 bp, synthetic construct
  source 1..75: mol_type = other DNA
ttgcactgcaacaaggctacggcaagtcgctgaaatgggtactcaatcacacccgtctggtaggcgtggtgctgc

SEQ ID NO: 871039 - DNA, 75 bp, synthetic construct
  source 1..75: mol_type = other DNA
ctggtttccctgacgctaacgccaatgatgtgtggctggatgctgaaagccagcaagccgcgtgagcaaaagcga

SEQ ID NO: 871040 - DNA, 75 bp, synthetic construct
  source 1..75: mol_type = other DNA
ggcgcggagatgaacctggtttacgatcgcgacaccatggcgcggctgggaatcgacgtgcaggccgctaacagt

SEQ ID NO: 871041 - DNA, 75 bp, synthetic construct
  source 1..75: mol_type = other DNA
tgatgtgtggctggatgctgaaagccagcaagccgcgcgagcaaaagcgtctgcgtggttttggtcgcatgttgg

SEQ ID NO: 871042 - DNA, 75 bp, synthetic construct
  source 1..75: mol_type = other DNA
gctgcttgcggtgctgaagcgtgcccgggagggaaatttttatccgccgaaacagaaacagcgcgtcgctgtatc

SEQ ID NO: 871043 - DNA, 75 bp, synthetic construct
  source 1..75: mol_type = other DNA
ttaactgccagaacggcgacgttcgccagtttgttcatgctgaggaatacccgacctgtgacgatgccttgtgtg

SEQ ID NO: 871044 - DNA, 75 bp, synthetic construct
  source 1..75: mol_type = other DNA
gctggcgtgcagaatggtgatctgctggtagtggacagggccgaaaaaccacaacacggggacatcgttatcgct

SEQ ID NO: 871045 - DNA, 75 bp, synthetic construct
  source 1..75: mol_type = other DNA
acgaacagttattttcagaataccgaatatgcggccagaaattaccccgacgccgcggaactggtgcttctggca

SEQ ID NO: 871046 - DNA, 75 bp, synthetic construct
  source 1..75: mol_type = other DNA
ttttagaagcactcacgttaactccgcatacgcgcaatacatttaccgataaaaaattatttctggaagaattac

SEQ ID NO: 871047 - DNA, 75 bp, synthetic construct
  source 1..75: mol_type = other DNA
ccgccgccgcgtcaccataagaaagctcatcatgatcatcacggcggtaatggtccaggcaaacatcaccgctaa

SEQ ID NO: 871048 - DNA, 75 bp, synthetic construct
  source 1..75: mol_type = other DNA
tgtctggggtatggactttgtctctgatgccttatttgacgggttccggttgcgcctgctgacagtcattgacct

SEQ ID NO: 871049 - DNA, 75 bp, synthetic construct
  source 1..75: mol_type = other DNA
agagcacgctcaagaagagctatgacttccaggaactgctcaccctcttctcgccgcactcgaaggagaaagcca

SEQ ID NO: 871050 - DNA, 75 bp, synthetic construct
  source 1..75: mol_type = other DNA
tgacgtcgatgaacaagatcacggctgccgatgatgccaaactgcagcatctcaaagcactggttctggaaaaga

SEQ ID NO: 871051 - DNA, 75 bp, synthetic construct
  source 1..75: mol_type = other DNA
gcgaacggatgtgatgagcttcaacgagatcttcgagcagctgtctttgctcaagctcgccgtttatgccccgat

SEQ ID NO: 871052 - DNA, 75 bp, synthetic construct
  source 1..75: mol_type = other DNA
caaaataacagacagaaaaaaaatcataacagcttgtatactgtccccctttttgtgtattttttatgcttattt

SEQ ID NO: 871053 - DNA, 75 bp, synthetic construct
  source 1..75: mol_type = other DNA
aagaagtacgaagagatgtatgacactcaggttgcagggaaaggcaagcttaaacaagtcgaccgcgaaaagagc

SEQ ID NO: 871054 - DNA, 75 bp, synthetic construct
  source 1..75: mol_type = other DNA
agattcgttggacttcgacttcttcgaattgctcgacagcgtcaccatcgcacgttcgcgcaagcatattcagac

SEQ ID NO: 871055 - DNA, 75 bp, synthetic construct
  source 1..75: mol_type = other DNA
tgttgtcggtcaggaacaaggaaagcgaggactggaaattaccgccgctggcgggcacaaccttttactgattgg

SEQ ID NO: 871056 - DNA, 75 bp, synthetic construct
  source 1..75: mol_type = other DNA
tgcggcattaccacagccatatcacgctgtttgaatcacggatgggcgcagcgcagacaccgtctcagatggcag

SEQ ID NO: 871057 - DNA, 75 bp, synthetic construct
  source 1..75: mol_type = other DNA
gctgaacgcatggctgctgatgtgcgggcagacaacatttactccgccagcctcgacgggctgggcgtcaccatg

SEQ ID NO: 871058 - DNA, 75 bp, synthetic construct
  source 1..75: mol_type = other DNA
gggcagacaacatttactccgtcagcctcgacgggctgggtgtcaccatgtgggcggtgacgtgggagcaggaat

SEQ ID NO: 871059 - DNA, 75 bp, synthetic construct
  source 1..75: mol_type = other DNA
gtggtgagaacactgagttcggcaccggaaaagctgagttcggaaaccgaaccgggtaaaaaaatggggcaaaaa

SEQ ID NO: 871060 - DNA, 75 bp, synthetic construct
  source 1..75: mol_type = other DNA
gaagcaactgcaggcgttgccggaaacgctggcggaaggtgtgctggacagtctgtcacagatgctcagcaaaaa

SEQ ID NO: 871061 - DNA, 75 bp, synthetic construct
  source 1..75: mol_type = other DNA
tcggaatccgcacagccccctgtatgtgcgtcggtaaccgaactcagtgctcaggtaaccgaactctgtactgcg

SEQ ID NO: 871062 - DNA, 75 bp, synthetic construct
  source 1..75: mol_type = other DNA
aaatcttgcgcctgccgatctaccgaaagaaggtggaagatatgatttacctatcgccattgcgttgctggctgc

SEQ ID NO: 871063 - DNA, 75 bp, synthetic construct
  source 1..75: mol_type = other DNA
ggcgcataacggcgtgctttttcttgatgagctacctgaatttgaacggcgtacactggatgccttgcgagagcc

SEQ ID NO: 871064 - DNA, 75 bp, synthetic construct
  source 1..75: mol_type = other DNA
atccggcgaaaaaaatcaccatcaaccttgctccagccgatctgccaaaagaagggggacgatatgatttaccta

SEQ ID NO: 871065 - DNA, 75 bp, synthetic construct
  source 1..75: mol_type = other DNA
cgaatagcttttaatttggaaaagttctacgaggattttacttgggaggaactggttcaaacgataagctgtgta

SEQ ID NO: 871066 - DNA, 75 bp, synthetic construct
  source 1..75: mol_type = other DNA
ctgtgtatgtgatccaaaatcaaaagaatcggaacaaaaatttgctctttcgttgcttgaaaagaattttcatgg

SEQ ID NO: 871067 - DNA, 75 bp, synthetic construct
  source 1..75: mol_type = other DNA
tgaatcccagccctaccggacattatcagggaaaccataaccgctgcacgccagaacagacattacgttatctca

SEQ ID NO: 871068 - DNA, 75 bp, synthetic construct
  source 1..75: mol_type = other DNA
gacaccggtactctgggctggtcggatatccataaccaggcagactataaagccagctataccggaatcagttta

SEQ ID NO: 871069 - DNA, 75 bp, synthetic construct
  source 1..75: mol_type = other DNA
gcagcgcgttctcccgccatacgacagccgtcagagcagtgcgtcagcgggcggcagttttacctggggtgctgg

SEQ ID NO: 871070 - DNA, 75 bp, synthetic construct
  source 1..75: mol_type = other DNA
aggaaactctcggggaaattgtgactgagattttgaaagatggacgtaatctgagtcgaaagtcgctttgtgcca

SEQ ID NO: 871071 - DNA, 75 bp, synthetic construct
  source 1..75: mol_type = other DNA
ggtactggatgatctccaacattccattaagtttacgtattggtatcaccagcggaatcggattatttattgcct

SEQ ID NO: 871072 - DNA, 75 bp, synthetic construct
  source 1..75: mol_type = other DNA
ggtgaaattaagtgcctggaggacacaaatattgatgctatgtgtcgaattgcagagcttgagactaatctcgcg

SEQ ID NO: 871073 - DNA, 75 bp, synthetic construct
  source 1..75: mol_type = other DNA
tggtccaggctaagctcaaagaacgctacggcaaaaatattccgcttgaggaaacggtagtttcaccacaagccg

SEQ ID NO: 871074 - DNA, 75 bp, synthetic construct
  source 1..75: mol_type = other DNA
gtcgccagtctgctccctggccgaacgcgcaaccgggctaccagaaacagcaaggcgaagtgtatcgccagcttt

SEQ ID NO: 871075 - DNA, 75 bp, synthetic construct
  source 1..75: mol_type = other DNA
agcgccgtttaggggcgatttgtggcaccgcttttctcgaacatgcgctggcgattgaatggcagcacggcgatc

SEQ ID NO: 871076 - DNA, 75 bp, synthetic construct
  source 1..75: mol_type = other DNA
cgccgcattgcgctggcgcgtttcgacgtcactatcaacttgtcgcataacggtaaaattgtgcgccagtaccgc

SEQ ID NO: 871077 - DNA, 75 bp, synthetic construct
  source 1..75: mol_type = other DNA
aacgacgctggaggtgctggacctgttctacaacaccccggcgcggcgcaaattcctgcgcaccgagaaaaccga

SEQ ID NO: 871078 - DNA, 75 bp, synthetic construct
  source 1..75: mol_type = other DNA
cgcgacggcaacatttcacttttatccttgccagtggcagaacgttggctgcgtcaggcacaattgacgccgggt

SEQ ID NO: 871079 - DNA, 75 bp, synthetic construct
  source 1..75: mol_type = other DNA
aattcatgcgcaccgagaaaacggaatttaaccatattgatgagattatccggcgtattgcactggcgcgtttcg

SEQ ID NO: 871080 - DNA, 75 bp, synthetic construct
  source 1..75: mol_type = other DNA
tgaatcgcaagacgattacccagaaggcggcatgatggacgcctttgaactgctttgctgcaagcacgttgaaac

SEQ ID NO: 871081 - DNA, 75 bp, synthetic construct
  source 1..75: mol_type = other DNA
gattatctccaccaaagcaggatacgatatgtggcccggcccatatggttctggaggctcgcgtaaatacctgct

SEQ ID NO: 871082 - DNA, 75 bp, synthetic construct
  source 1..75: mol_type = other DNA
gaagcgcagaagagaactttggtcgcctgctgcgggaggattttgccgcttatcgcgatgaactgattatctcta

SEQ ID NO: 871083 - DNA, 75 bp, synthetic construct
  source 1..75: mol_type = other DNA
acaatttcggtcacgttaacgcgctggaatcacagcgtgcgatcctgcgtaaagcgtttgatttgggcattacgc

SEQ ID NO: 871084 - DNA, 75 bp, synthetic construct
  source 1..75: mol_type = other DNA
agtttaaacgcgaatccgctcaactggttgttgaccagatatacactgtggcagatgccgccaaagctatggatg

SEQ ID NO: 871085 - DNA, 75 bp, synthetic construct
  source 1..75: mol_type = other DNA
agtttaaacgcgaatccgctcaactggttgttgaccagaaatacacagtggcagatgccgccaaagctatggatg

SEQ ID NO: 871086 - DNA, 75 bp, synthetic construct
  source 1..75: mol_type = other DNA
ttaccgaagtcaatctcaacagtctgcggttattgaatgaaatggcgcaacggcgcggtcagtcgatggcgcaaa

SEQ ID NO: 871087 - DNA, 75 bp, synthetic construct
  source 1..75: mol_type = other DNA
tgcggaaaaaacgcgcgcgaggcagcattgacgttattaggtcgtgcacgcaaggacgagcgcagcagccactaa

SEQ ID NO: 871088 - DNA, 75 bp, synthetic construct
  source 1..75: mol_type = other DNA
ccgccggagcgttaatctttgttggcgtgctgatgacttcaagcctggcgcgcgttaactgggatgattttaccg

SEQ ID NO: 871089 - DNA, 75 bp, synthetic construct
  source 1..75: mol_type = other DNA
tctcctttatgctgatcaacttatttgattcatcaggaacattaattggtgtgactgataaagctggcttaatag

SEQ ID NO: 871090 - DNA, 75 bp, synthetic construct
  source 1..75: mol_type = other DNA
atggcggttggcagagccatgctgtatgagaaagaagacacgctgtctgaccacattgagtcctacgggatccgc

SEQ ID NO: 871091 - DNA, 75 bp, synthetic construct
  source 1..75: mol_type = other DNA
tcgtggctgggatgacggacgtggagtggatgccgggcgacaattattatcttcacagggggatgcaataagaaa

SEQ ID NO: 871092 - DNA, 75 bp, synthetic construct
  source 1..75: mol_type = other DNA
gctaccgcaatacgaaagaagtccgcgaactggcgcatcgcttcggcgttgaaatgccaataaccgaggaaattt

SEQ ID NO: 871093 - DNA, 75 bp, synthetic construct
  source 1..75: mol_type = other DNA
gcaggaagcctggcaggcttatgccgaagggcgtgatatggacgtgacggttaaaccagcggcgcatccggtggg

SEQ ID NO: 871094 - DNA, 75 bp, synthetic construct
  source 1..75: mol_type = other DNA
cgatgtagcaaatttaacccgcctttgctataacgccccacttacccctcacgacagtgcgccactgcaactttc

SEQ ID NO: 871095 - DNA, 75 bp, synthetic construct
  source 1..75: mol_type = other DNA
cgatctgaccgccagccgctttattgccgatccttttgccccaggtgaacggatgtaccgtaccggcgatgtggc

SEQ ID NO: 871096 - DNA, 75 bp, synthetic construct
  source 1..75: mol_type = other DNA
tggttctgctgcaacttccacagttaccacttagcgccaacggcaagctggatcgcaaagccttaccgttgcctg

SEQ ID NO: 871097 - DNA, 75 bp, synthetic construct
  source 1..75: mol_type = other DNA
tggtgcccgtcgttctgctgcaacttccgcagttgccacttagcgccaacggtaaactggatcgcaaagccttac

SEQ ID NO: 871098 - DNA, 75 bp, synthetic construct
  source 1..75: mol_type = other DNA
gatgcgcgtcagttggtggggtatctggtgtcgcaatcaggtttgccgctggataccactgcactgcaggcgcaa

SEQ ID NO: 871099 - DNA, 75 bp, synthetic construct
  source 1..75: mol_type = other DNA
gatgcgcgtcagctggtgggctatctggtgtcgcaatcaggtctgccgctggatttaaccgcattgcaggcgcaa

SEQ ID NO: 871100 - DNA, 75 bp, synthetic construct
  source 1..75: mol_type = other DNA
tggcaatccgcctggcggctcaactgaaaaaaatgcgccgtcatcaacgctacgatgccgaacagattgtccgtg

SEQ ID NO: 871101 - DNA, 75 bp, synthetic construct
  source 1..75: mol_type = other DNA
cggcgcaacccggcatctggatggcagaaaaactgtcagatttaccctctgcctggagcgtagcgcattacgttg

SEQ ID NO: 871102 - DNA, 75 bp, synthetic construct
  source 1..75: mol_type = other DNA
agtgaatcatcagggactgtccgcagcctcaaccatctcgttcaacctgccgaccgggaaatcactctcggacgc

SEQ ID NO: 871103 - DNA, 75 bp, synthetic construct
  source 1..75: mol_type = other DNA
tctcgtcattgctgggttgtgacgtgcaggatgccgacgctgatttcttcgcgcttggcggtcattcgctactgg

SEQ ID NO: 871104 - DNA, 75 bp, synthetic construct
  source 1..75: mol_type = other DNA
attcagtcgccgcgccctcatggacccatgcagacagcgacaaacctggatgaagtctgcgaagcgcatctggca

SEQ ID NO: 871105 - DNA, 75 bp, synthetic construct
  source 1..75: mol_type = other DNA
actgaaaaaaatgcgtcgtcatcaacgttacgatgccgaacaaattgtccgtgacagcgggcgagcggcaggaga

SEQ ID NO: 871106 - DNA, 75 bp, synthetic construct
  source 1..75: mol_type = other DNA
cgacaaacctggatgaagtatgcgaagcgcatctggcaacattactggcacaacaacctcgtggcccttattact

SEQ ID NO: 871107 - DNA, 75 bp, synthetic construct
  source 1..75: mol_type = other DNA
atgattaagaaaatttttgcccttccggtcatcgaacaaatctcccctgtcctctcccgtcgtaaactggatgaa

SEQ ID NO: 871108 - DNA, 75 bp, synthetic construct
  source 1..75: mol_type = other DNA
ggatgaggttcctgtttaccggcagaaaaaatcagagcaggaggataaaccccgtcgccgtgaggcggctgcaat

SEQ ID NO: 871109 - DNA, 75 bp, synthetic construct
  source 1..75: mol_type = other DNA
tgtggtggcgcctggctaatgaaatgtatatatcggggaataaaaaacaacgaaaatgtgcgatcaagataaaaa

SEQ ID NO: 871110 - DNA, 75 bp, synthetic construct
  source 1..75: mol_type = other DNA
tggacgtccgtattgttgttgatgacaaggggaatacgaaccgggcaagtcaggaagcgatgaaatatatcaacc

SEQ ID NO: 871111 - DNA, 75 bp, synthetic construct
  source 1..75: mol_type = other DNA
aacggcttatgcctcagaaactcaaaaagtcaccaaagagagaccttcccacctggcccaatcgattcgcgttgc

SEQ ID NO: 871112 - DNA, 75 bp, synthetic construct
  source 1..75: mol_type = other DNA
aatcgtattatcgccgtaggccaccagcatcatctgaacgttgtcggctggaacccgggaccggcgctttcagtt

SEQ ID NO: 871113 - DNA, 75 bp, synthetic construct
  source 1..75: mol_type = other DNA
ttaatgagatcacctttgatggtctgggcagctttgttgcccgtaaggggaataaaggtccaaaagttgccgttg

SEQ ID NO: 871114 - DNA, 75 bp, synthetic construct
  source 1..75: mol_type = other DNA
tctggttttgccgtaacagcctttttgagaattaaaggccaggatatcgcaactaatatacttaaccgtgaggga

SEQ ID NO: 871115 - DNA, 75 bp, synthetic construct
  source 1..75: mol_type = other DNA
catcagaagatagttccttttgcagcgttaataaaagctgatgaatgcatcatttcaaaaattgcttcgtattct

SEQ ID NO: 871116 - DNA, 75 bp, synthetic construct
  source 1..75: mol_type = other DNA
tccatattggcacgtttttattttcaggaaaaaaacgtcatcttctggaatactggaaagcagaagttatcatgc

SEQ ID NO: 871117 - DNA, 75 bp, synthetic construct
  source 1..75: mol_type = other DNA
catggctactgtcatatttatgtctgttgcgcggttttatctgtgtatataaaatacatctgtattcattgttat

SEQ ID NO: 871118 - DNA, 75 bp, synthetic construct
  source 1..75: mol_type = other DNA
tggagccatgtcttttattatggaggaggttccggataactgtacttacgttaccaggaaagaatcacggataat

SEQ ID NO: 871119 - DNA, 75 bp, synthetic construct
  source 1..75: mol_type = other DNA
agtgacagcgtttatcaaattattgaaagcgatattcacaaagactggaatcttagtatggtagccagttgttta

SEQ ID NO: 871120 - DNA, 75 bp, synthetic construct
  source 1..75: mol_type = other DNA
atacagttgaacgcctttatgaacataaacgggacactgtacccgaagaacatatggtggattttttgggggcat

SEQ ID NO: 871121 - DNA, 75 bp, synthetic construct
  source 1..75: mol_type = other DNA
atggcaattcttgatgatgtgattggcgttttttcaccaggatggaaagcggcaaggctgcgttcccgtgcggtg

SEQ ID NO: 871122 - DNA, 75 bp, synthetic construct
  source 1..75: mol_type = other DNA
ttttaatgattacgggcggaacaggatctttcggaaatacggttctcaaacgatttctagagacggatattaaag

SEQ ID NO: 871123 - DNA, 75 bp, synthetic construct
  source 1..75: mol_type = other DNA
tactgcgcattgcgctgtacgagctgtctaaacgtagcgatgtgccgtataaagtggccattaacgaagcgatcg

SEQ ID NO: 871124 - DNA, 75 bp, synthetic construct
  source 1..75: mol_type = other DNA
ccggaatgtcaaaagaacaactgaaggcggcactgaatgaagctcaggcggcctatattgagctgctttcagggc

SEQ ID NO: 871125 - DNA, 75 bp, synthetic construct
  source 1..75: mol_type = other DNA
ggcaattactgatgatatgcgcacaatggcggaaaacggcggatttcttgatgactggcagaaagctaatgatct

SEQ ID NO: 871126 - DNA, 75 bp, synthetic construct
  source 1..75: mol_type = other DNA
gcgttactgatatgcgtaaatccttcaacggtctgggggagcagatacagcatgtgctggatgataaccccttct

SEQ ID NO: 871127 - DNA, 75 bp, synthetic construct
  source 1..75: mol_type = other DNA
ccattgcggtaaaatgacactggaaaatccttcaccagagctgctcacggtgttgatccgtgaactgaccgggag

SEQ ID NO: 871128 - DNA, 75 bp, synthetic construct
  source 1..75: mol_type = other DNA
tatggcaaataaggccgctgtaaaagcgatacgtgatacagtcggaaacgaagagtttcagcgattagcgagagc

SEQ ID NO: 871129 - DNA, 75 bp, synthetic construct
  source 1..75: mol_type = other DNA
acgttacatcaacagtgttaaatgcaattgccaattcaacatcaggtgccattgttggtggagcaggaggagggg

SEQ ID NO: 871130 - DNA, 75 bp, synthetic construct
  source 1..75: mol_type = other DNA
gcgcgcggcatgggatgacgtgcggtcaacaatgccaaatcaaaaagcaagaatgctaaatggtaatgccgttat

SEQ ID NO: 871131 - DNA, 75 bp, synthetic construct
  source 1..75: mol_type = other DNA
ctatggacagcaaggtgacatttttgttcaaaaagctcctgcaagtaccgttaatgaattatctgttgcgctatg

SEQ ID NO: 871132 - DNA, 75 bp, synthetic construct
  source 1..75: mol_type = other DNA
ccattgcggtactcctgacacaacgctttcatattgcgctcctgctggcaactggcatatcgatattggtctcaa

SEQ ID NO: 871133 - DNA, 75 bp, synthetic construct
  source 1..75: mol_type = other DNA
atgcgggtactggtatcagatgcggtaaacggcggagggatcgttgagaaactattctgggattttgacgggaaa

SEQ ID NO: 871134 - DNA, 75 bp, synthetic construct
  source 1..75: mol_type = other DNA
ttctggtcctgaaaagttgggcactgatgggtgacgcgatgagtcatgcggtttttcctggcatcgtgcttgcct

SEQ ID NO: 871135 - DNA, 75 bp, synthetic construct
  source 1..75: mol_type = other DNA
ccattgcggtactcctgacacaacgctttcatattgcgctcctactggcgattggcatatcggtaatagtgtcaa

SEQ ID NO: 871136 - DNA, 75 bp, synthetic construct
  source 1..75: mol_type = other DNA
acatcttgaccatattcttttcggcgacatgctcggggtaaccatcggcgatataatccagacggtgattattgc

SEQ ID NO: 871137 - DNA, 75 bp, synthetic construct
  source 1..75: mol_type = other DNA
tgtgcggtggcgacgggatacctgaaagacaacagccgaatcaagcaagatacagtgatggggattgttttttct

SEQ ID NO: 871138 - DNA, 75 bp, synthetic construct
  source 1..75: mol_type = other DNA
aggaaacatggtggggttactggatattcgctttgaacatattggtgatgacacccttgaagcgacaatgccagt

SEQ ID NO: 871139 - DNA, 75 bp, synthetic construct
  source 1..75: mol_type = other DNA
gtatgcaaaccgttgcatctcggttcgcgtcaccaggtctggcagattgaaatcttcgatgagaaagggcgtttg

SEQ ID NO: 871140 - DNA, 75 bp, synthetic construct
  source 1..75: mol_type = other DNA
gctgggggagaagattaccgcctttgatgcggtagagattaataactggctggcggagcgccggggaaaggtggc

SEQ ID NO: 871141 - DNA, 75 bp, synthetic construct
  source 1..75: mol_type = other DNA
cggcggttatcatcgcgatgaacaagcgcgacgcggatgccattctgagttctccgcagtgggcaagcgtggacg

SEQ ID NO: 871142 - DNA, 75 bp, synthetic construct
  source 1..75: mol_type = other DNA
ctcttttcctgctggccggttgtgattctgaacatcctgtttcctggtacaaggaacacgatcaggagcgtaaag

SEQ ID NO: 871143 - DNA, 75 bp, synthetic construct
  source 1..75: mol_type = other DNA
ggcgagcaaaaagtcgttggtctggaaatcaatgccaaccatgtccggtcggcgcgagaagggcgggttcgcggc

SEQ ID NO: 871144 - DNA, 75 bp, synthetic construct
  source 1..75: mol_type = other DNA
gtgcggcttcctgccatgtggaattccattacggtaaaatgacactggaaaatccttcaccagagctgctcacgg

SEQ ID NO: 871145 - DNA, 75 bp, synthetic construct
  source 1..75: mol_type = other DNA
tgacatttatcactcttgcatgtttgctattaataataaaaatattgatggtgacttcattagcattgctcatga

SEQ ID NO: 871146 - DNA, 75 bp, synthetic construct
  source 1..75: mol_type = other DNA
gaccacgctatttatacaggacaatgcgcaacacagcggccaggagcagcatttctcttactcaaccagctttga

SEQ ID NO: 871147 - DNA, 75 bp, synthetic construct
  source 1..75: mol_type = other DNA
accagtgacggaatatttaatataacctgtaagaattttaatattactgcaacagaaaatggaaagataaataca

SEQ ID NO: 871148 - DNA, 75 bp, synthetic construct
  source 1..75: mol_type = other DNA
atgaaaaaattaacagtggcggctttggcagtaacaactcttctctctggcacggcctttgcgcatgaagcaggc

SEQ ID NO: 871149 - DNA, 75 bp, synthetic construct
  source 1..75: mol_type = other DNA
ctaagtataaatctggtgttactaccgtgaaagactcggtacgactggatccgtgggtgtttatgttctctgccg

SEQ ID NO: 871150 - DNA, 75 bp, synthetic construct
  source 1..75: mol_type = other DNA
gattcctggggagctgccgggcaggtgggggttgattatctgattaaccgtgactggttggttaacatgtcagtc

SEQ ID NO: 871151 - DNA, 75 bp, synthetic construct
  source 1..75: mol_type = other DNA
actttgatttcattcagcgcctgatgcaggaatgggggatttactggtggtttgaacacagtgagaacagccaca

SEQ ID NO: 871152 - DNA, 75 bp, synthetic construct
  source 1..75: mol_type = other DNA
gccaggaagtgctggtggatttcaaaaatggcgacccggatttaccgattatcgtgggccgtacctacaaccagg

SEQ ID NO: 871153 - DNA, 75 bp, synthetic construct
  source 1..75: mol_type = other DNA
aaacggtatatcagcgggctggtgaccgctgcgcgggtagtcggccatgagggacgttcggtcacgtatgaatta

SEQ ID NO: 871154 - DNA, 75 bp, synthetic construct
  source 1..75: mol_type = other DNA
tggcactgaatcctggcggtagtgacgcaaatggtaaatataaaattaatacaattagagatttttctacatcag

SEQ ID NO: 871155 - DNA, 75 bp, synthetic construct
  source 1..75: mol_type = other DNA
taccatcacatcaaaatctggtgccattcatttgactgcggcaacgaacattacgttgactgtgggaagcagcac

SEQ ID NO: 871156 - DNA, 75 bp, synthetic construct
  source 1..75: mol_type = other DNA
cggaaccgtcaggtctggttaaagccgcagtaactgctgcgcaagctgccgctgctgcagcagggatctcggata

SEQ ID NO: 871157 - DNA, 75 bp, synthetic construct
  source 1..75: mol_type = other DNA
tagccatggtaatagtggtaaagtggctgaacggcaaatctctgttgctcgtgaagtcattgataatcggaaaaa

SEQ ID NO: 871158 - DNA, 75 bp, synthetic construct
  source 1..75: mol_type = other DNA
cagacaggtgtgaccggatgcccgcaactggaagaggcgctggtttcgtttgactgccgtatcagccaggtggtg

SEQ ID NO: 871159 - DNA, 75 bp, synthetic construct
  source 1..75: mol_type = other DNA
gaccgacacgccgcccacattgctggtgtgcctgaaccgcggggcttccgtctggccgatattcaatgaaaaccg

SEQ ID NO: 871160 - DNA, 75 bp, synthetic construct
  source 1..75: mol_type = other DNA
aactggaagaggcactggtttcgtttgactgccgtatcagccaggtggtgagcgtcggcacccacgacattctgt

SEQ ID NO: 871161 - DNA, 75 bp, synthetic construct
  source 1..75: mol_type = other DNA
ccagttcctgcaaggtggaattccgtcacggtaacatgacgctggaaaatccatcgccagagctgctcacagtgt

SEQ ID NO: 871162 - DNA, 75 bp, synthetic construct
  source 1..75: mol_type = other DNA
tttgtgccatagaagcgattcatcgtcacgccaccccctacgggctggtgtggttcgatcgcagttatcacgcgt

SEQ ID NO: 871163 - DNA, 75 bp, synthetic construct
  source 1..75: mol_type = other DNA
aacgctgtgtgtaaatacacttagcgccgggcaggagccgctttcaaacctttttggcggcaaaacgcccatgga

SEQ ID NO: 871164 - DNA, 75 bp, synthetic construct
  source 1..75: mol_type = other DNA
gcaggcctatgccgaagggcgcgatatggacgtgacggttaaaccggcggcgcatccggtgggaacgacgctgga

SEQ ID NO: 871165 - DNA, 75 bp, synthetic construct
  source 1..75: mol_type = other DNA
ggtgtgacagatttaaagattgacgctttgaagtttgcggtgctgtaccattatgatatctgggactcagtccac

SEQ ID NO: 871166 - DNA, 75 bp, synthetic construct
  source 1..75: mol_type = other DNA
gatacaaagattgcctgttaaagcgttaccgcatttctcgtgaaggtcatcttatgaaggatactcacggggaag

SEQ ID NO: 871167 - DNA, 75 bp, synthetic construct
  source 1..75: mol_type = other DNA
cgttattcgcttgaggaactgctggcgcagtgcgatccgcatgccgaaatgagtgaagaggatcgggaatggatt

SEQ ID NO: 871168 - DNA, 75 bp, synthetic construct
  source 1..75: mol_type = other DNA
tgcatacggacttgccttccattcgttgcgtgggttatcgccagatgtggtcttaccttgaaggcgaaatctcat

SEQ ID NO: 871169 - DNA, 75 bp, synthetic construct
  source 1..75: mol_type = other DNA
ggcgggcaaaaagaacggcgcttaggcgcgatttgcggcaccgcttttctcgaacaagcgctggcgattgaatgg

SEQ ID NO: 871170 - DNA, 75 bp, synthetic construct
  source 1..75: mol_type = other DNA
gccgtcgcctgattgactctcgcctgcttgctgctgactggaatgtaggcgaagaccttaaaaataccgatcagg

SEQ ID NO: 871171 - DNA, 75 bp, synthetic construct
  source 1..75: mol_type = other DNA
cacaccacagaattcctgcgcgaaggcatcaaacgggagaaattaagcgacgcacaaatccgcgagctggaagaa

SEQ ID NO: 871172 - DNA, 75 bp, synthetic construct
  source 1..75: mol_type = other DNA
acgcagcagggcagtcgccctaaaacaaagttagccattaagggagttaaattgaaaatatcattgatttctgca

SEQ ID NO: 871173 - DNA, 75 bp, synthetic construct
  source 1..75: mol_type = other DNA
aaaatggcctgaaagatcgggacggccaactccccggtaaaaccatcatttttgcccgtaaccacaaacacgcgc

SEQ ID NO: 871174 - DNA, 75 bp, synthetic construct
  source 1..75: mol_type = other DNA
agcaggttcagggggcactggagccgctgttccagcaaaatccggtgctgaagaaaatccgcaacggcgagccag

SEQ ID NO: 871175 - DNA, 75 bp, synthetic construct
  source 1..75: mol_type = other DNA
tgaaaccattgcccgcgtcagcgaacggtttaccaacaagtaccggcaatcgttgattgttcaggctactggtac

SEQ ID NO: 871176 - DNA, 75 bp, synthetic construct
  source 1..75: mol_type = other DNA
gagaagacaatcaatgaactgaaccataaatataaaaatcttaatgtcttaattatcaatagatcatctttatat

SEQ ID NO: 871177 - DNA, 75 bp, synthetic construct
  source 1..75: mol_type = other DNA
ttcttgatttaacatatgctagttgcccaactatttttgggttgaatgttgtgagtaatgataacagcaccaagt

SEQ ID NO: 871178 - DNA, 75 bp, synthetic construct
  source 1..75: mol_type = other DNA
tcggtttttctgggtgttaaatattcatatccggtgtttagtcagcgactggatgcaaaagttaatattattgct

SEQ ID NO: 871179 - DNA, 75 bp, synthetic construct
  source 1..75: mol_type = other DNA
ccatgtcatcgtcgccggtggtggagaaatctaccatgaaacgatacccatggcctctactctgcatgtgtcgac

SEQ ID NO: 871180 - DNA, 75 bp, synthetic construct
  source 1..75: mol_type = other DNA
tgggagtaaatgttccagaaaaaatgtccagagctataatatttggaaaaaaaatacctgaaatatatatttcat

SEQ ID NO: 871181 - DNA, 75 bp, synthetic construct
  source 1..75: mol_type = other DNA
aaataggcaatcatcattcttaacaaacaatccaatcgctcaatatctgggtaaaatctcttactcaatatattt

SEQ ID NO: 871182 - DNA, 75 bp, synthetic construct
  source 1..75: mol_type = other DNA
gccgtcgcctgattgactctcgcttacttgcagccgactggaatgtaggggaagaacttaaaaacacggatcaag

SEQ ID NO: 871183 - DNA, 75 bp, synthetic construct
  source 1..75: mol_type = other DNA
aaatgatgttgaggcaggtattgcaggaggacagatatatttcgttaatacagcgcttgaggatataaatcacaa

SEQ ID NO: 871184 - DNA, 75 bp, synthetic construct
  source 1..75: mol_type = other DNA
ttggattaggaagttttctggtatccaggctatttgcaaagcacccagataggattgattattctaccgatgttc

SEQ ID NO: 871185 - DNA, 75 bp, synthetic construct
  source 1..75: mol_type = other DNA
aggcggtggcgagcagcgtgatgtatgacatgagccgtgcaatggggcatggcgtgggcgatggcaaagaccgct

SEQ ID NO: 871186 - DNA, 75 bp, synthetic construct
  source 1..75: mol_type = other DNA
atcatcaagcaaaaataacagaactggtcgcctcgtcttataatattgcagtatattccaataaaggaaaggttc

SEQ ID NO: 871187 - DNA, 75 bp, synthetic construct
  source 1..75: mol_type = other DNA
tgagttgtacggagcagaaggtaacgactggttatatggtgggggaggtaatgattatctgtatggtggtactgg

SEQ ID NO: 871188 - DNA, 75 bp, synthetic construct
  source 1..75: mol_type = other DNA
tggattttaataaacataagagtgaagaagattttctgtttttatcaaaggacattgttacatcgacagatgagt

SEQ ID NO: 871189 - DNA, 75 bp, synthetic construct
  source 1..75: mol_type = other DNA
ggtggatttagttgctcaccagcttcgcgagcaaatcaacgcactggatgaaaagtcgattgccgtccaggaaaa

SEQ ID NO: 871190 - DNA, 75 bp, synthetic construct
  source 1..75: mol_type = other DNA
catgtcaaagacaacgaaggtaaggccgttgccggacgtttgtatcagcttgaaaccatcgcccgcgtcagcgaa

SEQ ID NO: 871191 - DNA, 75 bp, synthetic construct
  source 1..75: mol_type = other DNA
ggagcgcctgccgccgcatttggcgcaggtgcagcaacagggacaacgaatcaatcagcttcgtgatttaagctg

SEQ ID NO: 871192 - DNA, 75 bp, synthetic construct
  source 1..75: mol_type = other DNA
cttcggggcggtgaaagagcaatccagtggcctgtatgcgcagacgctggctgaacgggggtttgtcactctggc

SEQ ID NO: 871193 - DNA, 75 bp, synthetic construct
  source 1..75: mol_type = other DNA
tgaaaccattgcccgcgtcagcgaacgtttcaccaacaagtatcgccagtcgttgattgttcaggctaccggtac

SEQ ID NO: 871194 - DNA, 75 bp, synthetic construct
  source 1..75: mol_type = other DNA
cgtctggaagatgcaatcaaggctcaggatgaaagccgtgagcgcgaactggcgctgcaacgcgcactacagcaa

SEQ ID NO: 871195 - DNA, 75 bp, synthetic construct
  source 1..75: mol_type = other DNA
aaggttctaacgaagaagacaatgaccatggagtgcctactgcatattttaacaaaaaatactcaaaacccaata

SEQ ID NO: 871196 - DNA, 75 bp, synthetic construct
  source 1..75: mol_type = other DNA
agctccggatgcaaaatctgccgatgcgaatattgccttttgtatggcaatgacgccagaagctgaacaattatt

SEQ ID NO: 871197 - DNA, 75 bp, synthetic construct
  source 1..75: mol_type = other DNA
aatgaaagagccaccagataccgtggttctgggttgtactcatttccctctattacaagatgaactgttacaggt

SEQ ID NO: 871198 - DNA, 75 bp, synthetic construct
  source 1..75: mol_type = other DNA
ttcgctaatgaatgccagatagagatgctgggctcggcagaaatggttgaactggctgaagcgaagctgcatggc

SEQ ID NO: 871199 - DNA, 75 bp, synthetic construct
  source 1..75: mol_type = other DNA
atgtctaatttggcgggtactattcccgccgatttaaacggaatacagacaatgttcaatattatgattcgtaaa

SEQ ID NO: 871200 - DNA, 75 bp, synthetic construct
  source 1..75: mol_type = other DNA
gagattaaagagattaaagcggtggctaaggaattaggtgttaaaggtttccgtaagttaaagctgaatcgtgag

SEQ ID NO: 871201 - DNA, 75 bp, synthetic construct
  source 1..75: mol_type = other DNA
gagattaaagagattaaagcggtggctaaggaattaggtgttaaaggtttccgtaagctgagattgaatcgtgag

SEQ ID NO: 871202 - DNA, 75 bp, synthetic construct
  source 1..75: mol_type = other DNA
tatcgacagcgcaccagctccgacgattgtcgtcttattcgcggttgtgttcatcatgacgttcaccgttaccag

SEQ ID NO: 871203 - DNA, 75 bp, synthetic construct
  source 1..75: mol_type = other DNA
acccgcattttgttctggtttatgaggtcgacagccagtggggaaaagtgtatattcgaactactgttgccatta

SEQ ID NO: 871204 - DNA, 75 bp, synthetic construct
  source 1..75: mol_type = other DNA
ataagtcgcagctggcgggcaaactggccgaatgttgccaccttcttcgtgtacccggaggcgatccacaaggtt

SEQ ID NO: 871205 - DNA, 75 bp, synthetic construct
  source 1..75: mol_type = other DNA
tgctcggttcggcagagatggtcgagctggctgaagcgaagctgcatggcaatgaagtttctctggatgcactaa

SEQ ID NO: 871206 - DNA, 75 bp, synthetic construct
  source 1..75: mol_type = other DNA
gctgccagagggaacccgactggtagattctggcgcagcaattgcgcgccgaacggcctggctgctggaacatga

SEQ ID NO: 871207 - DNA, 75 bp, synthetic construct
  source 1..75: mol_type = other DNA
ggatagctgaagaatcaccaagtacggctcagcagctggtggcctggttaaacagagcaaggcactatacgcccg

SEQ ID NO: 871208 - DNA, 75 bp, synthetic construct
  source 1..75: mol_type = other DNA
caataaaccgtttgtcggtttttataccaccaagcgcaccggcgggatgctggtcgattcgcaggccatcaaact

SEQ ID NO: 871209 - DNA, 75 bp, synthetic construct
  source 1..75: mol_type = other DNA
cgaacgcgcccgtttcgcaggtcgagaaatgggataaaacgtttgctgagagcacgaaagttgatcaccgtaagg

SEQ ID NO: 871210 - DNA, 75 bp, synthetic construct
  source 1..75: mol_type = other DNA
aaatttcgcgccggacgcgacgcacgagagtgaaaagcccgcgccatctaccaatgaggtcacccctgatgagcc

SEQ ID NO: 871211 - DNA, 75 bp, synthetic construct
  source 1..75: mol_type = other DNA
gcccactgggaaaggcgctaagtctggtgaatatgcgacacatttttcaacgattattgccccgacggctgtggc

SEQ ID NO: 871212 - DNA, 75 bp, synthetic construct
  source 1..75: mol_type = other DNA
agagcgaaaacaaaaaccatattaattagcattggtataatatcattatcattatcaatatatacaagcagcaaa

SEQ ID NO: 871213 - DNA, 75 bp, synthetic construct
  source 1..75: mol_type = other DNA
cgatcatctaagtgaacacggaaataaaatattaataccgatgttcgaaaaagcatttgcaaataaaaagaacaa

SEQ ID NO: 871214 - DNA, 75 bp, synthetic construct
  source 1..75: mol_type = other DNA
ttttgacccttcatacacgggtgaaagcggcggctacccgcgaaacgtcgcatctccggatatcaacaccgagga

SEQ ID NO: 871215 - DNA, 75 bp, synthetic construct
  source 1..75: mol_type = other DNA
gtcgatatcctgcaaattcatcgctgggattacaacacgccgatcgaagagacgctggaagccctcaacgacgtg

SEQ ID NO: 871216 - DNA, 75 bp, synthetic construct
  source 1..75: mol_type = other DNA
cgataatcggtacttcgcgcgaagaacagcttgatgagttgctcaacgcggtagatatcactctccaaccgaagc

SEQ ID NO: 871217 - DNA, 75 bp, synthetic construct
  source 1..75: mol_type = other DNA
agagatcgtcggtcgcgcattgcgggatttcgcccgtcgcgatgacgtggtcgtcgcgacaaaagttttccatcg

SEQ ID NO: 871218 - DNA, 75 bp, synthetic construct
  source 1..75: mol_type = other DNA
gtatcaactctggcgcgacggtcaggcgctgcaactgcaactggcggaagagcgccaacgctacagcaaactcca

SEQ ID NO: 871219 - DNA, 75 bp, synthetic construct
  source 1..75: mol_type = other DNA
ccgcaagctggaaaacctgaccgatattgaacgccagctctcgacccgcaaaccggctggaaatttctcgccgga

SEQ ID NO: 871220 - DNA, 75 bp, synthetic construct
  source 1..75: mol_type = other DNA
aacggagagcgaagatgagtttgctcagtcagccaatgcggttaaggcgatgaaacaagagggtgcattctcgtt

SEQ ID NO: 871221 - DNA, 75 bp, synthetic construct
  source 1..75: mol_type = other DNA
gttttgggctggatgtggatactgttaaaaaatctgttcttgaaaaatataattacaagcatgacactattgttt

SEQ ID NO: 871222 - DNA, 75 bp, synthetic construct
  source 1..75: mol_type = other DNA
aggggactctgtacgcagacaatctaagctggttactgactggcttgataagaaccctgagttttacttggattc

SEQ ID NO: 871223 - DNA, 75 bp, synthetic construct
  source 1..75: mol_type = other DNA
atgagacgtggcatttcctacatccggttttcaagtgaacgacaactaaaaggggactctgtacgcagacaatct

SEQ ID NO: 871224 - DNA, 75 bp, synthetic construct
  source 1..75: mol_type = other DNA
gtccgctattaccagcaaactaaaacagttaaaaggtgagttatcacaggttgatgcggatatcgagaaggagac

SEQ ID NO: 871225 - DNA, 75 bp, synthetic construct
  source 1..75: mol_type = other DNA
aaacccattttagccgttaaatataaagagaaaatcattcatgatgatataaagaaaaaaccagctaatttggct

SEQ ID NO: 871226 - DNA, 75 bp, synthetic construct
  source 1..75: mol_type = other DNA
acgatttataataaagcaaaacaaaataatttaaaaatggagggtatcgattttataattattgatgaagatgta

SEQ ID NO: 871227 - DNA, 75 bp, synthetic construct
  source 1..75: mol_type = other DNA
tccgttgctaaactgccgtttgcttacgctaaagatggtatctcctacaccttctctatcgttccgaacgcactg

SEQ ID NO: 871228 - DNA, 75 bp, synthetic construct
  source 1..75: mol_type = other DNA
cttcctgcgtactccggagtacgatgaactgttctctggcgacccgatctgggcaaccgaatctatcggtggtat

SEQ ID NO: 871229 - DNA, 75 bp, synthetic construct
  source 1..75: mol_type = other DNA
atgcaatgtgttctaccactttatgatccaggaaaaggcgtttttcctcgattaaaccatgatccgcgccacact

SEQ ID NO: 871230 - DNA, 75 bp, synthetic construct
  source 1..75: mol_type = other DNA
tacactcgggtttaccagcaatttgatggtgcaagctggaaagatatcgaagaggctgaatattcagcatgcaaa

SEQ ID NO: 871231 - DNA, 75 bp, synthetic construct
  source 1..75: mol_type = other DNA
gcagctgaagatttaggaattcagctatttaatggtttttcaggattgcatacaagacaattttatcctcaaaat

SEQ ID NO: 871232 - DNA, 75 bp, synthetic construct
  source 1..75: mol_type = other DNA
tttaatttatccgggggctaataaatatagccatacaattggttttgtttacggtgaaatgtttagacgttttgg

SEQ ID NO: 871233 - DNA, 75 bp, synthetic construct
  source 1..75: mol_type = other DNA
aaacatctgttcaagaccttttgaagaatcgctctgtaattggatactttaccccgaaaggctgtgaagagattg

SEQ ID NO: 871234 - DNA, 75 bp, synthetic construct
  source 1..75: mol_type = other DNA
ctcgtcggtggtaactatatcggcatgatgccaggtaaaggtaaagagcaggatcactttgtcgcactcgatacc

SEQ ID NO: 871235 - DNA, 75 bp, synthetic construct
  source 1..75: mol_type = other DNA
ggcacctttaaccagtttatccgtggcggcatcgccttcgccacgcctccgggtacgccactggcaccgaaagcc

SEQ ID NO: 871236 - DNA, 75 bp, synthetic construct
  source 1..75: mol_type = other DNA
agccagctatccactgtatgccaatctggaaaaagcgctggagaacagccttagcgatttacccaccacaaccgt

SEQ ID NO: 871237 - DNA, 75 bp, synthetic construct
  source 1..75: mol_type = other DNA
aggcagccgtttctggaacgtttccggcgttgatgccaatgtcagtctgagtggcgctaaagtgaaactggaaag

SEQ ID NO: 871238 - DNA, 75 bp, synthetic construct
  source 1..75: mol_type = other DNA
tcaggatcgggggaacaccgtcaccatcgactttatgtcggcggacggcattgtccctggccgcacacctgttcg

SEQ ID NO: 871239 - DNA, 75 bp, synthetic construct
  source 1..75: mol_type = other DNA
gttccgtggtctggaagtcggtacggttaccggaatgacgctggggacattgtcagatcgcgtgatgattgcgat

SEQ ID NO: 871240 - DNA, 75 bp, synthetic construct
  source 1..75: mol_type = other DNA
ggatcactttgtcgcactcgatacccaaccgaagtatcggctggataacggcgatctgatgatccacctgcaagc

SEQ ID NO: 871241 - DNA, 75 bp, synthetic construct
  source 1..75: mol_type = other DNA
attgccttcgattcacctgaagagtcgaaacctgccgaggcggaagatacctttggtctgtatgaagacctggcc

SEQ ID NO: 871242 - DNA, 75 bp, synthetic construct
  source 1..75: mol_type = other DNA
ggttttcatctgagaagcaatccagaggcgactcattaagacgacaggctaagatggtcactgattggcttaagg

SEQ ID NO: 871243 - DNA, 75 bp, synthetic construct
  source 1..75: mol_type = other DNA
ggggctattagcttcgataacctcagtggtgccagcgccagtcagcgtaaaggcgacaagcgtattctgtatgct

SEQ ID NO: 871244 - DNA, 75 bp, synthetic construct
  source 1..75: mol_type = other DNA
atgtatcaggggctggaagtcggacagctaactaaactggatttaaatcctggtggtaaagtcactggggaaatg

SEQ ID NO: 871245 - DNA, 75 bp, synthetic construct
  source 1..75: mol_type = other DNA
tcccggtgggaaaagtctacgactatgccatcaatcccaacaagcaaggcgtggtgattgatgtcctgatcgagc

SEQ ID NO: 871246 - DNA, 75 bp, synthetic construct
  source 1..75: mol_type = other DNA
ggctaatgcggtggctctgcataaggatcacattgtcgggcatatgtttctgatcagctaccgtccgaactggcg

SEQ ID NO: 871247 - DNA, 75 bp, synthetic construct
  source 1..75: mol_type = other DNA
tgcgcgtgaatgaatggttcagcgcgtatgcgatggcgggtgtagcttacagccgtgtgtcgactttctccgggg

SEQ ID NO: 871248 - DNA, 75 bp, synthetic construct
  source 1..75: mol_type = other DNA
tttccgtcatgctgggaacccctgtaggtattctgggttttgcaattattatggcggctgtgagtgcgcttgtta

SEQ ID NO: 871249 - DNA, 75 bp, synthetic construct
  source 1..75: mol_type = other DNA
ctgtaaaaacggacaactggcgtccattttttgtaaaacttgaatcactggcagcaggaagagctgcttcagcag

SEQ ID NO: 871250 - DNA, 75 bp, synthetic construct
  source 1..75: mol_type = other DNA
ataaattccgtaataatctgaacaagaaatataacatacaagatcgcatggccatttctaaagccctggaagcta

SEQ ID NO: 871251 - DNA, 75 bp, synthetic construct
  source 1..75: mol_type = other DNA
cctctgctgaatctgcggtaaattcggcgagaaataacgtcagtgccagaacaaatgaacaaaagcatgcaaatg

SEQ ID NO: 871252 - DNA, 75 bp, synthetic construct
  source 1..75: mol_type = other DNA
gttttaccggaaaagttattgatcgttatgatgttgctgtggagttacaaaaggctgtaaaaacggacaactggc

SEQ ID NO: 871253 - DNA, 75 bp, synthetic construct
  source 1..75: mol_type = other DNA
gagtcgtggcgctattttatggggcggcgaaaatttattgcgtcccggctggccacgcagatgttttcctgctgg

SEQ ID NO: 871254 - DNA, 75 bp, synthetic construct
  source 1..75: mol_type = other DNA
gttttacagcgtcatggaacggctgaagatgctggattccctgcaggcaacacagcttcagacggccatagtgaa

SEQ ID NO: 871255 - DNA, 75 bp, synthetic construct
  source 1..75: mol_type = other DNA
atggagaataccgatccgcaatttgtacatctgctgtttgataccgggcatatatatgtttctgacggcgatgtc

SEQ ID NO: 871256 - DNA, 75 bp, synthetic construct
  source 1..75: mol_type = other DNA
tgccagataaagatattttaattcctcgaattgaagaggttctttatagtgggtttattgctgagggggaagctg

SEQ ID NO: 871257 - DNA, 75 bp, synthetic construct
  source 1..75: mol_type = other DNA
aacacaggctaatataactcgacagggttataaatataatatgaataatgttgcagcagaaataggtatatctca

SEQ ID NO: 871258 - DNA, 75 bp, synthetic construct
  source 1..75: mol_type = other DNA
aatgcggcaagaccgtttctggttttttacgggcggcagctctcggtaagaaagttaactcactgactgatgacc

SEQ ID NO: 871259 - DNA, 75 bp, synthetic construct
  source 1..75: mol_type = other DNA
gtgttcgacctgagacgttactccgacgggttaacaccgtttcgttaccggacagtgcgatcccgccaggcttca

SEQ ID NO: 871260 - DNA, 75 bp, synthetic construct
  source 1..75: mol_type = other DNA
aaaagtttgaccctctggatattgctttgtccgctttgtgccaggagcagacgttactaacatctatctgcatca

SEQ ID NO: 871261 - DNA, 75 bp, synthetic construct
  source 1..75: mol_type = other DNA
atgaagattacatctgtagaaatttttgactgcgaactcaaaaaaagagatcaaactatggcctcttataatcca

SEQ ID NO: 871262 - DNA, 75 bp, synthetic construct
  source 1..75: mol_type = other DNA
ttttgcgtgcaaatgaatttgtcacatcgttgccgtctctgaaagaagctgggattaaggctggtttttctgctt

SEQ ID NO: 871263 - DNA, 75 bp, synthetic construct
  source 1..75: mol_type = other DNA
gtatagataaaggagcaaaagttatagcacaaaattccatgttcacaacaaaaggtattgatatctccggtgaac

SEQ ID NO: 871264 - DNA, 75 bp, synthetic construct
  source 1..75: mol_type = other DNA
gcaagttgtgattaaacaaaatggctatgtcatttaccaaacatgggtatcagcagggccatttgaaattaaaga

SEQ ID NO: 871265 - DNA, 75 bp, synthetic construct
  source 1..75: mol_type = other DNA
ctatggggcatgagcgaggcgcagatccaacagtggcaggcgctggggacgcgttttatccaggtcgtgccggat

SEQ ID NO: 871266 - DNA, 75 bp, synthetic construct
  source 1..75: mol_type = other DNA
ttcgtattgaccgcgtgctgctggcgggcgatgcggcgcacattatgccggtctggcagggtcagggatacaaca

SEQ ID NO: 871267 - DNA, 75 bp, synthetic construct
  source 1..75: mol_type = other DNA
catcggaacatacattattgccgcactagccccgtatacaaccgacatcggcagaacctatcagccaggagaaac

SEQ ID NO: 871268 - DNA, 75 bp, synthetic construct
  source 1..75: mol_type = other DNA
gcggcagggatagcggatatggcaggggccgcacaggatgcaatgtcatcccttatctccggcccgggggcgcat

SEQ ID NO: 871269 - DNA, 75 bp, synthetic construct
  source 1..75: mol_type = other DNA
gaagggcttggaaacctgttttcctacacagtacagcttaaaaccccggataccctgaacctcggatatgtctcc

SEQ ID NO: 871270 - DNA, 75 bp, synthetic construct
  source 1..75: mol_type = other DNA
ctacccgtgggcagggaaaggattcggtggcattcagatcccacgcatcggtcaggaagtgctggtggatttcaa

SEQ ID NO: 871271 - DNA, 75 bp, synthetic construct
  source 1..75: mol_type = other DNA
tgacccataccagcgactacaaagcgttccagaacaaaaccgtggtggatattctcgatgaagtactggatgaat

SEQ ID NO: 871272 - DNA, 75 bp, synthetic construct
  source 1..75: mol_type = other DNA
ggggcgcataacgtcacagtaagtggtagcgctgtgccgccgcagttgcttttgtttgcaggcatgaatggttcg

SEQ ID NO: 871273 - DNA, 75 bp, synthetic construct
  source 1..75: mol_type = other DNA
acgcgcagcacagcggccaggatcagcattttacctatgtcaccacgtttgaactgcatcccacctgcgaagtct

SEQ ID NO: 871274 - DNA, 75 bp, synthetic construct
  source 1..75: mol_type = other DNA
acaccgatggcattgacggcaacctatcctcagttccgggctcatggatggtgtgtaatgaaattacgtcgacaa

SEQ ID NO: 871275 - DNA, 75 bp, synthetic construct
  source 1..75: mol_type = other DNA
ggatgcaggcccggccggaccccgggggcaaaaaggtgatacaggacctgcaggtccgcagggaccagctggccc

SEQ ID NO: 871276 - DNA, 75 bp, synthetic construct
  source 1..75: mol_type = other DNA
tgatgcaggcccggcaggccccgcaggaaaggatggtaccgccggagcggaaggtaaggcaggtccggcagggcc

SEQ ID NO: 871277 - DNA, 75 bp, synthetic construct
  source 1..75: mol_type = other DNA
atacagtacagcttaaaacgcctgacaccctgaacctcggatatgtctcccctgctgccaatctgccgctcaaac

SEQ ID NO: 871278 - DNA, 75 bp, synthetic construct
  source 1..75: mol_type = other DNA
cggcatactatcctcagttccgggctcatggatggtgtgtaatgaaattacgtcgacaaatgataatgaaagcat

SEQ ID NO: 871279 - DNA, 75 bp, synthetic construct
  source 1..75: mol_type = other DNA
cgggggcacagggtgttccggggccggttggtccggcaggtcctgcgggtaaaacggggccacagggccctgccg

SEQ ID NO: 871280 - DNA, 75 bp, synthetic construct
  source 1..75: mol_type = other DNA
aagtttgcaatgtcgagtagtgcgggaagtagtccaacaattagtgtaattttaaaatataactttgcaatttta

SEQ ID NO: 871281 - DNA, 75 bp, synthetic construct
  source 1..75: mol_type = other DNA
atggtcctcagccgtcagagcctgcttcagcttatgcgtctgactgaagacgtaccggatgcgagacaggaactg

SEQ ID NO: 871282 - DNA, 75 bp, synthetic construct
  source 1..75: mol_type = other DNA
ttccataaaaatgctcaagtgttcgcctgcacccgatccagcttcagcgagaaagtcgcaatgtctggttatgtc

SEQ ID NO: 871283 - DNA, 75 bp, synthetic construct
  source 1..75: mol_type = other DNA
cgatcggggccggcaggcaagaaaaagagaaataaaggattaaggaataggtgggtaagctacaactcatatcat

SEQ ID NO: 871284 - DNA, 75 bp, synthetic construct
  source 1..75: mol_type = other DNA
gcacctgagcacaccttttgactgcgcatgtgttgatctggttaacgatgttatgcgtgtagtctcagggcaaaa

SEQ ID NO: 871285 - DNA, 75 bp, synthetic construct
  source 1..75: mol_type = other DNA
gctgctgaaattgccactaaaggagagggtaatttccctgctgcatcatatcgtctggggatccctgcaccgaca

SEQ ID NO: 871286 - DNA, 75 bp, synthetic construct
  source 1..75: mol_type = other DNA
gcagaaaactgtcattttcgctatggagtgatcacgcctgaacaccagatgtcagaggctgagaaaacattcgcg

SEQ ID NO: 871287 - DNA, 75 bp, synthetic construct
  source 1..75: mol_type = other DNA
atgccggagaaaagctctgggacgcggtcactggtcagcatgataaagacgatcaggcgaagaaggtgcaggaac

SEQ ID NO: 871288 - DNA, 75 bp, synthetic construct
  source 1..75: mol_type = other DNA
tggtacacacttttcggtagtcacaccgcaaatttcggcggcaggcgttgagcatctcgataccctcctccagcc

SEQ ID NO: 871289 - DNA, 75 bp, synthetic construct
  source 1..75: mol_type = other DNA
ctgggaataaaaaaatcagttattcagtctaaaaataaagagaagaccatgaaagaagaaataaagaaaaaaaca

SEQ ID NO: 871290 - DNA, 75 bp, synthetic construct
  source 1..75: mol_type = other DNA
actgtcggagtcagtcagcacagcattaaatcagacacaacagacactaacaagagtgaacaactcattagaagc

SEQ ID NO: 871291 - DNA, 75 bp, synthetic construct
  source 1..75: mol_type = other DNA
aaaccagctcgtatcgtgctacagaacgcattacagtcggctatggtaggcaaaccagaccttgagacattcata

SEQ ID NO: 871292 - DNA, 75 bp, synthetic construct
  source 1..75: mol_type = other DNA
atggtgaagaaggtccgccaggtccggcgtctctggaggtaacactccgtactccgggaactgcggtacaactga

SEQ ID NO: 871293 - DNA, 75 bp, synthetic construct
  source 1..75: mol_type = other DNA
agtttgctgttatcttgttcgaagataaaacgggcggcgcatggtgtaagaaagtaactggtgcagaggcgcgtt

SEQ ID NO: 871294 - DNA, 75 bp, synthetic construct
  source 1..75: mol_type = other DNA
aacctctttctcctgtctcagggtgaagtctccgacgccagagcgggtgggaattactgtgctggcagatgatgt

SEQ ID NO: 871295 - DNA, 75 bp, synthetic construct
  source 1..75: mol_type = other DNA
tgacgaaaatccgaatgatgatgaaacccgcttttataccgaaacctttgtatcggcgtatggtgaggaagggcc

SEQ ID NO: 871296 - DNA, 75 bp, synthetic construct
  source 1..75: mol_type = other DNA
ttttaagagtggtggtaaatatagtttcaacagttgttctaggtattgtttcagctaggctggacaaattattat

SEQ ID NO: 871297 - DNA, 75 bp, synthetic construct
  source 1..75: mol_type = other DNA
agtttgccgttatattgttcgaagataaaactggcggcgcatggtgtaagagagtcactggtgcagaagcgcgtt

SEQ ID NO: 871298 - DNA, 75 bp, synthetic construct
  source 1..75: mol_type = other DNA
atggacaagttagaaataaacgatcagtttgccgttatattgttcgaagataaaactggcggcgcatggtgtaag

SEQ ID NO: 871299 - DNA, 75 bp, synthetic construct
  source 1..75: mol_type = other DNA
ttctccattcttgttgtatgataatatagataaaaagtgggttgtacttggtactcttttgggtgaatattacta

SEQ ID NO: 871300 - DNA, 75 bp, synthetic construct
  source 1..75: mol_type = other DNA
agccagaagaaaataatgtatcccgtatctgtctgatagatgtacccgttagcaagacttacgcggcattcacaa

SEQ ID NO: 871301 - DNA, 75 bp, synthetic construct
  source 1..75: mol_type = other DNA
ttgtggcttatccctggcgtggtgaatacattgcctgttacacgaaaccggatggtaagcaggatgtgtttgtct

SEQ ID NO: 871302 - DNA, 75 bp, synthetic construct
  source 1..75: mol_type = other DNA
actggatgcatccgtgctcagttacacggacaaaataccggcgaaaaaccttgggccttccctggcgacatggga

SEQ ID NO: 871303 - DNA, 75 bp, synthetic construct
  source 1..75: mol_type = other DNA
ctcgacacctggaacttgcagtccttagggccgatgaccgccatttcagcagggaagatttacggcctttcctag

SEQ ID NO: 871304 - DNA, 75 bp, synthetic construct
  source 1..75: mol_type = other DNA
gaacgcagagaacttcatgtctgccggctataaaagcttcctggcggaggtaaacaacctgaacaaacgtatggg

SEQ ID NO: 871305 - DNA, 75 bp, synthetic construct
  source 1..75: mol_type = other DNA
ttaggcattattgatgccggaaatgcaggcatggcgagcggcggcatgggcgatgtgctctctggtattattggc

SEQ ID NO: 871306 - DNA, 75 bp, synthetic construct
  source 1..75: mol_type = other DNA
gttaagaatggtgatgcgatagatatcccgatccctacaccagcgcttgaatggctgaaagaactgcttcagatg

SEQ ID NO: 871307 - DNA, 75 bp, synthetic construct
  source 1..75: mol_type = other DNA
gggatgaattcgacttagatggcgcgatttggcatctaccagaacaacgaactaaaaatggcgatgctatcgaca

SEQ ID NO: 871308 - DNA, 75 bp, synthetic construct
  source 1..75: mol_type = other DNA
atctgaacgggaaacaacaaagaaccagatccgtgtcgccttgcctggcattattcagtcattcgatcctgatgc

SEQ ID NO: 871309 - DNA, 75 bp, synthetic construct
  source 1..75: mol_type = other DNA
tgttacaacccattgatttagcacaaataaattatagtgtgttcgggtttgttgtgactgtggcattatttccgt

SEQ ID NO: 871310 - DNA, 75 bp, synthetic construct
  source 1..75: mol_type = other DNA
ttgataatgaactgtaaagggcacgttattctttcgggaatgggtaaatcagggcatgtcggtcgtaaaatgtca

SEQ ID NO: 871311 - DNA, 75 bp, synthetic construct
  source 1..75: mol_type = other DNA
ccgccacgctctggagttatgggccgacctgctggtggctctggaacagggggatgaatacaacgtaacccccat

SEQ ID NO: 871312 - DNA, 75 bp, synthetic construct
  source 1..75: mol_type = other DNA
accgccatcagtatttcaatgaacgccgccacgctctggagttatgggccgacctgctggtggctctggaacagg

SEQ ID NO: 871313 - DNA, 75 bp, synthetic construct
  source 1..75: mol_type = other DNA
aacacgtgatgaactcattcgttttttcaggccatgcgcacagctaaaggattcagccgtgagaatgaactcacc

SEQ ID NO: 871314 - DNA, 75 bp, synthetic construct
  source 1..75: mol_type = other DNA
tccaacaattgctactgacgttcttcggtggacacgtcgaatatttgactacggtattaaacgccttgctttgga

SEQ ID NO: 871315 - DNA, 75 bp, synthetic construct
  source 1..75: mol_type = other DNA
acaggacgctcacacttagctgcattaggcgttgatcctgttgttgcagaacgctgtttaaaccaccgcattaag

SEQ ID NO: 871316 - DNA, 75 bp, synthetic construct
  source 1..75: mol_type = other DNA
gttttgcgatggactaaacggatattcgactacgccatcaaacgccacgcactggaaacaaaccccgccgctgct

SEQ ID NO: 871317 - DNA, 75 bp, synthetic construct
  source 1..75: mol_type = other DNA
gtatttccgcgcggcggaggctgtacgctaacgttcccggttaaagccggtgatgaatgtctggtgatttttgcc

SEQ ID NO: 871318 - DNA, 75 bp, synthetic construct
  source 1..75: mol_type = other DNA
tgccgactggatcagcaaacaattcccggaactacgttcccgcgagccgttcaatccgtcgtgggccatccgcgc

SEQ ID NO: 871319 - DNA, 75 bp, synthetic construct
  source 1..75: mol_type = other DNA
caagcaggacaacaccattgagatggcgtcgctggaatcctgcatccgtgaagatctcaacgaaaatgccccgcg

SEQ ID NO: 871320 - DNA, 75 bp, synthetic construct
  source 1..75: mol_type = other DNA
ggtggtgatggagatgaccgatgcggtgatgtttagtgatattttacgccagcttgtagagcttgatgggtttta

SEQ ID NO: 871321 - DNA, 75 bp, synthetic construct
  source 1..75: mol_type = other DNA
gtggctgaaatatatcgcgtctatgattattttcgttcttttccccgcttaaccgcctctgaaccgccgcgagcc

SEQ ID NO: 871322 - DNA, 75 bp, synthetic construct
  source 1..75: mol_type = other DNA
gggttagatgccactagctggtttggtcatgttgagcaagtcaacgccgggcgcagcgccacgaactggcgagaa

SEQ ID NO: 871323 - DNA, 75 bp, synthetic construct
  source 1..75: mol_type = other DNA
actgccagcggatggcgttcaccttaagcgcctataacggcggcttaggctgggtgaaccgcgataaaaaactgg

SEQ ID NO: 871324 - DNA, 75 bp, synthetic construct
  source 1..75: mol_type = other DNA
gccacggctgcgcagatgatgacacgtgaaccgctgacgctaccggaagacaccatgatcattgaagcggaagaa

SEQ ID NO: 871325 - DNA, 75 bp, synthetic construct
  source 1..75: mol_type = other DNA
atgatgctcggctggatgattgcatttttagcagttggttttttcatcggtattgtggtgatgtccagttgcatt

SEQ ID NO: 871326 - DNA, 75 bp, synthetic construct
  source 1..75: mol_type = other DNA
cgatgacagaatgcatgatttatcggatgcgttttgtattgtcggtccccagtcgcaggcgaggaagattagcgg

SEQ ID NO: 871327 - DNA, 75 bp, synthetic construct
  source 1..75: mol_type = other DNA
gcgacaagtatctatgcgccaggaacaacattttccattggtaaggggaatgtcctgcgtgaaggcactgatatc

SEQ ID NO: 871328 - DNA, 75 bp, synthetic construct
  source 1..75: mol_type = other DNA
attacgccttacgatcttctgatccttatttctgccagcggtgaaacggatgaaatcctcaagctagttccttca

SEQ ID NO: 871329 - DNA, 75 bp, synthetic construct
  source 1..75: mol_type = other DNA
gccacggctgcgcagatgatgacacgtgaaccgctgacgctaccggaagacaccatgatcgcaaattccaaacac

SEQ ID NO: 871330 - DNA, 75 bp, synthetic construct
  source 1..75: mol_type = other DNA
tccgtgcctggataaaggcagacgagaggtttgacggcaaagctgacggtaacggcctgtatctctgctatccca

SEQ ID NO: 871331 - DNA, 75 bp, synthetic construct
  source 1..75: mol_type = other DNA
accgcacgtactcatttagcagcgttgggtgttgatcctgtcgtggcggaacgatgcctcaatcatcgcattaag

SEQ ID NO: 871332 - DNA, 75 bp, synthetic construct
  source 1..75: mol_type = other DNA
attgtatctattggcctttgtcctttgcgcattcattcgcgttgagcagccaggattcagttctgcgccagtgac

SEQ ID NO: 871333 - DNA, 75 bp, synthetic construct
  source 1..75: mol_type = other DNA
attatggtgtgttaccccattactcggatattatctttatccgccgacagaaaagaaaaatgcccaggttccagt

SEQ ID NO: 871334 - DNA, 75 bp, synthetic construct
  source 1..75: mol_type = other DNA
cgcccgcacctggaatataaggccgaatttacctaccagcgcgtgggcgatctcagcaccgaaatgatcgagcac

SEQ ID NO: 871335 - DNA, 75 bp, synthetic construct
  source 1..75: mol_type = other DNA
tctcagcaccgagatgatcgagcacttcttccgttcgctctcttacaccatgggcgtgacgctgcacctgaaaac

SEQ ID NO: 871336 - DNA, 75 bp, synthetic construct
  source 1..75: mol_type = other DNA
gcgtacagtttgatgaagtgctgatttgcccgcacctgcccgccgatgagtgcgactgccgtaagccgaaagtaa

SEQ ID NO: 871337 - DNA, 75 bp, synthetic construct
  source 1..75: mol_type = other DNA
actccccgtgagaagtttgcagaattaagtcgggcagtaactttactttataccaaccgcaatatttttctctcc

SEQ ID NO: 871338 - DNA, 75 bp, synthetic construct
  source 1..75: mol_type = other DNA
gatttaggcttacccgatgaagatgggctgcattttcttgcccgtatccggcagaaaaaatacactctgccggtg

SEQ ID NO: 871339 - DNA, 75 bp, synthetic construct
  source 1..75: mol_type = other DNA
gcatatccacaacctgcgcgacaaagtgggtaaaacacgtatccgcaccgtgcgcggctttggctatatgctggt

SEQ ID NO: 871340 - DNA, 75 bp, synthetic construct
  source 1..75: mol_type = other DNA
tcaacctaacttgcgccagcggcaccagcgcctgtctcaggatgttgcacaaatctgcgaaccagccgattggac

SEQ ID NO: 871341 - DNA, 75 bp, synthetic construct
  source 1..75: mol_type = other DNA
tgccgccgcagaagtcgtaccgactgatatcgcactgatcgaaacgcacggtaccggtaccccgttgggtgatga

SEQ ID NO: 871342 - DNA, 75 bp, synthetic construct
  source 1..75: mol_type = other DNA
tgcgcagcgacagtaccagtgccgcgctgggctggttctgggcggtttactccattggtattggcgttttcggta

SEQ ID NO: 871343 - DNA, 75 bp, synthetic construct
  source 1..75: mol_type = other DNA
gcttttggtcgcaccctgcgccaggccatccgcgtggaaggcgacaccctgccctcgtcgaaaggagtgctgtaa

SEQ ID NO: 871344 - DNA, 75 bp, synthetic construct
  source 1..75: mol_type = other DNA
acgttgccttaatcaccgcatcaaaggcgtcgagggcatctacaaccgtcaccaatatttaaacgaacggcggga

SEQ ID NO: 871345 - DNA, 75 bp, synthetic construct
  source 1..75: mol_type = other DNA
cgcatgggtgcttccagccaggaagatgcaaaacagaatgatcccacatattcaggaaagcactttgcccgtagc

SEQ ID NO: 871346 - DNA, 75 bp, synthetic construct
  source 1..75: mol_type = other DNA
agcactggcacagtgggctgatctgctggtggcactggaaagcggaaaagactacaacgtaacgcctctcagaag

SEQ ID NO: 871347 - DNA, 75 bp, synthetic construct
  source 1..75: mol_type = other DNA
acagcacgcacacatttagccgcgcttggtgttgatccggtagtcgctgaaagatgcctcaatcaccgcatcaag

SEQ ID NO: 871348 - DNA, 75 bp, synthetic construct
  source 1..75: mol_type = other DNA
gattaacccgtgctcggcgtttgaagtctctgatgctggtggcaaggagtcatcccgcgatcgctggctgacccg

SEQ ID NO: 871349 - DNA, 75 bp, synthetic construct
  source 1..75: mol_type = other DNA
gattggtctgtcgctgaacactgccgcctatgctgccgaaacgctgcgcgccgccatttcttctattgataaagg

SEQ ID NO: 871350 - DNA, 75 bp, synthetic construct
  source 1..75: mol_type = other DNA
ttcttccgttcgctctcatacaccatgggcgtgacgctgcacctgaaaaccaaaggtaaaaacgatcaccaccgt

SEQ ID NO: 871351 - DNA, 75 bp, synthetic construct
  source 1..75: mol_type = other DNA
tgggcgtgaccctgcacctgaaaaccaaaggtaaaaacgatcatcaccgtgtagagagcctgttcaaagcttttg

SEQ ID NO: 871352 - DNA, 75 bp, synthetic construct
  source 1..75: mol_type = other DNA
cgttttgacaaactcgcctttgaaccaggcgtgatcccggaactgctgaagctgcaaaaagcgggctataaactg

SEQ ID NO: 871353 - DNA, 75 bp, synthetic construct
  source 1..75: mol_type = other DNA
ttgcccgtagcactggctaaggttcgcgccgaaatgccggatgtgcctaatttcacgattcacgacttccgacgc

SEQ ID NO: 871354 - DNA, 75 bp, synthetic construct
  source 1..75: mol_type = other DNA
cagccaggaagatgcaaaacagaatgatcccacatattcaggaaagcactttacccgtagcactggctaaggttc

SEQ ID NO: 871355 - DNA, 75 bp, synthetic construct
  source 1..75: mol_type = other DNA
taaccttcaagttgctactggcgctttgcgtcaggaagatggagttgtgcgccgccagatgggaagagttcgacc

SEQ ID NO: 871356 - DNA, 75 bp, synthetic construct
  source 1..75: mol_type = other DNA
ggcgcgcaatgtatccaggcggatttttccactaacgatggcgtactggcgtttgctgatgaagtgttgaaaagc

SEQ ID NO: 871357 - DNA, 75 bp, synthetic construct
  source 1..75: mol_type = other DNA
gggcacggacacgccgccagcgatatcattcactttaccgattatgtggtggagcgcggtagcgacaaacatatt

SEQ ID NO: 871358 - DNA, 75 bp, synthetic construct
  source 1..75: mol_type = other DNA
tggataatatgacccgctcgtttgcccgcaagctggcaccggaagtgaaagtgaattctattgcgccatcgctga

SEQ ID NO: 871359 - DNA, 75 bp, synthetic construct
  source 1..75: mol_type = other DNA
cgagaactggaaagagcttgcggtcgggcatcttcagaacgttcggcgcgggactggtgatcagtctgatttgat

SEQ ID NO: 871360 - DNA, 75 bp, synthetic construct
  source 1..75: mol_type = other DNA
attactggtgactcagcctggcgtgccgaagttatcgttccgggtatcgatctgagccgtaagatgaaaccgacc

SEQ ID NO: 871361 - DNA, 75 bp, synthetic construct
  source 1..75: mol_type = other DNA
gtttgccgatgaagtactaaaaagcacccatggtctgcgtgctattttgcataacgccagcgcgtggatggcgga

SEQ ID NO: 871362 - DNA, 75 bp, synthetic construct
  source 1..75: mol_type = other DNA
gcgctgccgttcccggataacacctttgattgcatcaccatttcgtttggtctgcgtaacgtcactgacaaagat

SEQ ID NO: 871363 - DNA, 75 bp, synthetic construct
  source 1..75: mol_type = other DNA
tggtcggagaaactggcaaagtggtccttgctgatatcaatgaatccatgctcaaaatggggcgcgagaagctgc

SEQ ID NO: 871364 - DNA, 75 bp, synthetic construct
  source 1..75: mol_type = other DNA
tgcgcgaccggctggcgctcgacggtaaaaaagcgggcggctattttaaccagcagattgtcgaaccgattgccg

SEQ ID NO: 871365 - DNA, 75 bp, synthetic construct
  source 1..75: mol_type = other DNA
atgggtaaaacccagtccttgccaatattaattactggcggaggtcgccgcatcggcctcggcctcgccctcgca

SEQ ID NO: 871366 - DNA, 75 bp, synthetic construct
  source 1..75: mol_type = other DNA
gcgagaaagaggtgatcgatctggtcgattacttgctcaccagttgctttgttaccgggcgcagtttcccgcttg

SEQ ID NO: 871367 - DNA, 75 bp, synthetic construct
  source 1..75: mol_type = other DNA
tgacctgcagcctgatagccacggactcataaccgtacagcgcacgcctgaagaagttttcagcgagcgcactat

SEQ ID NO: 871368 - DNA, 75 bp, synthetic construct
  source 1..75: mol_type = other DNA
cgaggacgatgaagaagaaaccacgattactggtgacgctgcttatcgtgccgaagttatcgtcccgggtatcga

SEQ ID NO: 871369 - DNA, 75 bp, synthetic construct
  source 1..75: mol_type = other DNA
acattttggccttcagcggttaatgctgcatgccagtcagttgtcattgacgcatccttttactggcgagccgct

SEQ ID NO: 871370 - DNA, 75 bp, synthetic construct
  source 1..75: mol_type = other DNA
ctccggctggctggttcaccgcagctggctggatcgcgacgagaaagtagtggtcatgcaaaccgtgcgtgacca

SEQ ID NO: 871371 - DNA, 75 bp, synthetic construct
  source 1..75: mol_type = other DNA
ctggtggaactggagccgaaaaccggacgcaaacatcagcttcgccgacatcttgcccatttgcgtcatccgatt

SEQ ID NO: 871372 - DNA, 75 bp, synthetic construct
  source 1..75: mol_type = other DNA
tcggctcgcgcgtaccggattacagtgggaaatttatgttgtgtatcagtaacctgtcactgccgcgatatatgg

SEQ ID NO: 871373 - DNA, 75 bp, synthetic construct
  source 1..75: mol_type = other DNA
cgggaacggctggatatctgccacagcaggctgctggcttacgccggaatattatccggccccggacgttcaccg

SEQ ID NO: 871374 - DNA, 75 bp, synthetic construct
  source 1..75: mol_type = other DNA
ggggataagagaagctctcaactggggagaaccagttttattggtaagccgccacgcgaaccctttgtgaccata

SEQ ID NO: 871375 - DNA, 75 bp, synthetic construct
  source 1..75: mol_type = other DNA
ttaacctttcaccgcagcaaccattgccggacaaaaagccggaaatgggcggagagccaaccggcgacggcgagg

SEQ ID NO: 871376 - DNA, 75 bp, synthetic construct
  source 1..75: mol_type = other DNA
gcgttcaaacgcgaggttctggcttctgctgacaaaacgctggttcgccagatagtcggtgatgcggatatccgc

SEQ ID NO: 871377 - DNA, 75 bp, synthetic construct
  source 1..75: mol_type = other DNA
gcgacgggcgataacgacaataagcctgacgaaaaagacaaaaaagatccgaccggcgacggcgaggacgacgaa

SEQ ID NO: 871378 - DNA, 75 bp, synthetic construct
  source 1..75: mol_type = other DNA
ctggtggaactggagccgaaaacaggacgcaagcatcagctccgtcgccatcttgcccacttgcgccatccgatt

SEQ ID NO: 871379 - DNA, 75 bp, synthetic construct
  source 1..75: mol_type = other DNA
atgaacagtttcagtgaaattgcacataaaagcggcaaagaggcaggaagtcagattatgaaatttgaagtgcag

SEQ ID NO: 871380 - DNA, 75 bp, synthetic construct
  source 1..75: mol_type = other DNA
atggcctgcgcgaagtgtcgtgtggctatgacgcggagtatgagcaggctgagccgggtaaggctcagcaggtcg

SEQ ID NO: 871381 - DNA, 75 bp, synthetic construct
  source 1..75: mol_type = other DNA
ggaaaaatggtccgctcggctatctgcgcctgacgctcgacacccacacactcgccaccgaagccaaacaggtgg

SEQ ID NO: 871382 - DNA, 75 bp, synthetic construct
  source 1..75: mol_type = other DNA
tgaaagacgcaggaatttcgcttaccgatcaccagaaaaaccagcttattgcctacgtgaatatgctgcataaat

SEQ ID NO: 871383 - DNA, 75 bp, synthetic construct
  source 1..75: mol_type = other DNA
tggtggcaccgtatctgcaaggtgaacggtttatcgatgtcggcaccggaccaggactgcctggcattccactct

SEQ ID NO: 871384 - DNA, 75 bp, synthetic construct
  source 1..75: mol_type = other DNA
cagaaggctcaacgccatctattacaggagaaacatcaacctctcttgcagcactattaaaaccgataaaaaaac

SEQ ID NO: 871385 - DNA, 75 bp, synthetic construct
  source 1..75: mol_type = other DNA
tgaacgtatcaaagaacctttggaacaatttttgcctggaataaactctgtaagtatagagattcctgacgatac

SEQ ID NO: 871386 - DNA, 75 bp, synthetic construct
  source 1..75: mol_type = other DNA
atggcgctggagccacagatgagtaagctgatgtcacgtctggagtggacctggcgactggtcatgaccgggtta

SEQ ID NO: 871387 - DNA, 75 bp, synthetic construct
  source 1..75: mol_type = other DNA
tgaaagacgcaggaatttcgcttaccgatcaccagaaaaatcagcttattgcctacgtaaatatgctgcacaaat

SEQ ID NO: 871388 - DNA, 75 bp, synthetic construct
  source 1..75: mol_type = other DNA
acaagaacacgcaagaaaagcttcggatggtatgcagaggtgatcaagacgcgggggctgtcattaaaaaaaata

SEQ ID NO: 871389 - DNA, 75 bp, synthetic construct
  source 1..75: mol_type = other DNA
tttggggtggcgcaacagctgccaatcaggtggaaggtgcctggcaggaagatggcaaagggatcacgacctcag

SEQ ID NO: 871390 - DNA, 75 bp, synthetic construct
  source 1..75: mol_type = other DNA
aaagcattaataaaaatgcgcagggcaacatactgaatatgatccctgaaccgccccgggtttcctggagagtgt

SEQ ID NO: 871391 - DNA, 75 bp, synthetic construct
  source 1..75: mol_type = other DNA
ataatggcgaaggaagcctcacaagaacgcgcaagaaaagcttcggatggtatgcagaagtgatcaagacgcggg

SEQ ID NO: 871392 - DNA, 75 bp, synthetic construct
  source 1..75: mol_type = other DNA
tattcccattattttttctgcctggttgtgcagcattctggaacgccgacttaatgcgtggttaccttcggcaat

SEQ ID NO: 871393 - DNA, 75 bp, synthetic construct
  source 1..75: mol_type = other DNA
tatcccggctatatgcagcgtttcttccgcgaccacaatatcaccattgagatgactgaaagtgacgcagaagat

SEQ ID NO: 871394 - DNA, 75 bp, synthetic construct
  source 1..75: mol_type = other DNA
agttctttacgtcatttttcttatggtttattagtatatttattacagcgttatcaatattttttttcttgagag

SEQ ID NO: 871395 - DNA, 75 bp, synthetic construct
  source 1..75: mol_type = other DNA
ttagtgcagccgcctaactgcactattagcaacgctcaaaccatagaaatcacctttcaggatgtgtttgttgat

SEQ ID NO: 871396 - DNA, 75 bp, synthetic construct
  source 1..75: mol_type = other DNA
agcatatcttaattttgaacgcggtcgtgatatgcatttaaatagaattaataaaattgaaccgaagataataat

SEQ ID NO: 871397 - DNA, 75 bp, synthetic construct
  source 1..75: mol_type = other DNA
tgattatgctgaccgtaagtttgatggtcatgttaagcgcacggcaaaccgaccacttcccagcggcgaggtctc

SEQ ID NO: 871398 - DNA, 75 bp, synthetic construct
  source 1..75: mol_type = other DNA
agcaaagatgctcatcctctggaggagttaacctcatttcaaggagcagggatttacgcaatttattacactggc

SEQ ID NO: 871399 - DNA, 75 bp, synthetic construct
  source 1..75: mol_type = other DNA
attatcgacaacatcaacggcaataacttccgccagaatgtgccctataccattacatgcgatcccgacgtgcgc

SEQ ID NO: 871400 - DNA, 75 bp, synthetic construct
  source 1..75: mol_type = other DNA
taccggtgaaagccaatgatgcagcgctcagcgacggaaccttttctgcctacgcaacattacaggtggattacc

SEQ ID NO: 871401 - DNA, 75 bp, synthetic construct
  source 1..75: mol_type = other DNA
ggatcaaacatctggtcgtggcgatcaacaaaatggatctggtgggttacagtgaagagacgttcacccgtattc

SEQ ID NO: 871402 - DNA, 75 bp, synthetic construct
  source 1..75: mol_type = other DNA
atgaacaccgcacttgcacaacaaatcgccaatgaaggcggcgtcgaagcttggatgattgcgcaacaacataaa

SEQ ID NO: 871403 - DNA, 75 bp, synthetic construct
  source 1..75: mol_type = other DNA
cacagttttatctccacgctgctggggatcaaacatctggtcgtggcgatcaacaaaatggatctggtggattac

SEQ ID NO: 871404 - DNA, 75 bp, synthetic construct
  source 1..75: mol_type = other DNA
tgacgacgacgtgaagattggcattaaatccactgcgattctgtttggtcaatacgataaattgattattggcat

SEQ ID NO: 871405 - DNA, 75 bp, synthetic construct
  source 1..75: mol_type = other DNA
gggaagtattacctggggatagtaaaagaaacattaaataagctggaacgcgataccaataccattatgacctag

SEQ ID NO: 871406 - DNA, 75 bp, synthetic construct
  source 1..75: mol_type = other DNA
tgctcagccgatgcgttttccggttcagtacgttaatcgcccgaatcttgattttcgtggctatgccggaacgct

SEQ ID NO: 871407 - DNA, 75 bp, synthetic construct
  source 1..75: mol_type = other DNA
agacagccatgccggccgggaaggctccatctggccatatattgaaacgggtatccttgatgaagtgttgcgcca

SEQ ID NO: 871408 - DNA, 75 bp, synthetic construct
  source 1..75: mol_type = other DNA
agtcgacctccggcgcaacctctaaccgttcttttccgggactattcccccgtggttggcagaagaaaatacgat

SEQ ID NO: 871409 - DNA, 75 bp, synthetic construct
  source 1..75: mol_type = other DNA
ttaccggcgagatcacctacggtctggaacgtctggcaatgtacattcagggtgtagacagcgtttacgacctgg

SEQ ID NO: 871410 - DNA, 75 bp, synthetic construct
  source 1..75: mol_type = other DNA
cggaacgtctggcggcgattcgcgaggaacgtcgggagaacagtcgctatgcctcgcttcgtcagtgcaggatgg

SEQ ID NO: 871411 - DNA, 75 bp, synthetic construct
  source 1..75: mol_type = other DNA
atgtttaaactcactacccccaccagtcttccccttctcaacctgcccgcctccacgctggaagtcctcagcaat

SEQ ID NO: 871412 - DNA, 75 bp, synthetic construct
  source 1..75: mol_type = other DNA
gggtatctatctggtattcccagaaacgaccattatcactcaactccagaacctgattgaggcgctgaaccatga

SEQ ID NO: 871413 - DNA, 75 bp, synthetic construct
  source 1..75: mol_type = other DNA
caatattcaggagctgtaccttggttctctgaaagagctgggcatggacccgactatccacgacatccgtttcgt

SEQ ID NO: 871414 - DNA, 75 bp, synthetic construct
  source 1..75: mol_type = other DNA
atgattctgactctgaatgataagcgtgaaatatcgcaaatcatcgcaagttttaccgatgaagattacgaacga

SEQ ID NO: 871415 - DNA, 75 bp, synthetic construct
  source 1..75: mol_type = other DNA
cagcgacgaacaatcccagggatggcaaagccatatttttttcaaccgtaaacagcagagcgcccaaatctatcg

SEQ ID NO: 871416 - DNA, 75 bp, synthetic construct
  source 1..75: mol_type = other DNA
atgcgcgtaaagctatctccgtcaccgagcgtcagcgttatattttacgcattcgcaccctgaccaaagcagtgg

SEQ ID NO: 871417 - DNA, 75 bp, synthetic construct
  source 1..75: mol_type = other DNA
tctctgaaagagctgggcatggacccgactatccacgatattcgtttcgtggaagataactgggaaaacccgacg

SEQ ID NO: 871418 - DNA, 75 bp, synthetic construct
  source 1..75: mol_type = other DNA
ggaagataactgggaaaacccgacgctgggtgcctggggactgggctgggaagtgtggctgaacggcatggaagt

SEQ ID NO: 871419 - DNA, 75 bp, synthetic construct
  source 1..75: mol_type = other DNA
ccttaaccctaataatctcaataaatatgatgcacgtattgcggcgattgattacaccctcgcccatgatgacgg

SEQ ID NO: 871420 - DNA, 75 bp, synthetic construct
  source 1..75: mol_type = other DNA
cattcaacatcagagtgatagcgcaaactgttcttattatctcgtcaccgaaaaatactcccattttatgaagtt

SEQ ID NO: 871421 - DNA, 75 bp, synthetic construct
  source 1..75: mol_type = other DNA
tatgccggaaagggcgctcaagggcattgaggaccgggacaggaaggcgcgagaaggacagaaagccgctaacga

SEQ ID NO: 871422 - DNA, 75 bp, synthetic construct
  source 1..75: mol_type = other DNA
tcgatgcaaaagaacacggtgcggttatccttaccgcccacgaagtcactggcctgattcgtgaaggcgcgacgg

SEQ ID NO: 871423 - DNA, 75 bp, synthetic construct
  source 1..75: mol_type = other DNA
cggtggcaacggctgcattctcattaccgtctttggtttatgccgcacaacaaaacattcttagcgtgcatattt

SEQ ID NO: 871424 - DNA, 75 bp, synthetic construct
  source 1..75: mol_type = other DNA
attattgtcactgagcagattactcgaccgaaagaagtcgaagccatgtttaacagtatgccggaacgggcgctt

SEQ ID NO: 871425 - DNA, 75 bp, synthetic construct
  source 1..75: mol_type = other DNA
cattaatctgtctcctaaaggcgctgctgcgctcctgcgcttaagtcttcaaaagctgatggtccatctcggtga

SEQ ID NO: 871426 - DNA, 75 bp, synthetic construct
  source 1..75: mol_type = other DNA
ccgactacatggaagctagaagcatcattaatctgtctcctaaaggcgctgctgcgctcctgcgcttaagtcttc

SEQ ID NO: 871427 - DNA, 75 bp, synthetic construct
  source 1..75: mol_type = other DNA
gaagaaagaatcacacgaccacagaaagtagcgaaaatgtacgcgaatcttcccgcgggagctaaagccgctatc

SEQ ID NO: 871428 - DNA, 75 bp, synthetic construct
  source 1..75: mol_type = other DNA
atccgcgcggcaaactacccctttattgccgatgacatggataatctggtactgcccgcgtcccttaaaccgcta

SEQ ID NO: 871429 - DNA, 75 bp, synthetic construct
  source 1..75: mol_type = other DNA
ggctgaagccacgctacaaaaaattatctccctcccagccccgctgcgcggttctgcggtttaccgtcatggcga

SEQ ID NO: 871430 - DNA, 75 bp, synthetic construct
  source 1..75: mol_type = other DNA
cggcagaagaagtggatattctgctgcgtgaaggggaaaaactggcccccgtgatggcgaaaacgcgcattttgc

SEQ ID NO: 871431 - DNA, 75 bp, synthetic construct
  source 1..75: mol_type = other DNA
ggacgtaacgtcagccgtggcatcgtgctgctcgatcatgctgaacgcgatggtctggacggatttatcaccatc

SEQ ID NO: 871432 - DNA, 75 bp, synthetic construct
  source 1..75: mol_type = other DNA
tctactcgatgtttcctatgagtatgattttggtcttaaagtaacattaaacagccttgaacctaaagagttaaa

SEQ ID NO: 871433 - DNA, 75 bp, synthetic construct
  source 1..75: mol_type = other DNA
gcggcggcgggcttcctgctcggtttcccggtgttgcgtctgcgcggtgattatctggcgatcgttactctcggc

SEQ ID NO: 871434 - DNA, 75 bp, synthetic construct
  source 1..75: mol_type = other DNA
tttccggcctgctggtgctcggttatggcggattttacgccattggtgcttacacctttgcgctgctcaatcact

SEQ ID NO: 871435 - DNA, 75 bp, synthetic construct
  source 1..75: mol_type = other DNA
tgctcaataacaccgaaattaccggcggcccgaacggaatcagtcagatcccgaaaccgacactcttcggactcg

SEQ ID NO: 871436 - DNA, 75 bp, synthetic construct
  source 1..75: mol_type = other DNA
cgtccgcagggtttgctgcccatgacgcgcccgcaactcaagctgaagaacggcgcagcgaaaggagagcaggca

SEQ ID NO: 871437 - DNA, 75 bp, synthetic construct
  source 1..75: mol_type = other DNA
ggtacggcggtggtctttttcttccagcttgtgcgacctgctttccagaaggggttgaaaagcgtttccgggccg

SEQ ID NO: 871438 - DNA, 75 bp, synthetic construct
  source 1..75: mol_type = other DNA
cgctgctctctgctgcgatgttctttgttctggcgggcgtctttatgggcgtgcaactggagctggatggtacaa

SEQ ID NO: 871439 - DNA, 75 bp, synthetic construct
  source 1..75: mol_type = other DNA
cataacctcgaaacactggcagaacgtgccggactggtgacacgcagtgacgcggggcgtaaatctatttcccgt

SEQ ID NO: 871440 - DNA, 75 bp, synthetic construct
  source 1..75: mol_type = other DNA
tcgctatgcgagctgcacatcaggcagggaaacacagagctttcagcgtatttagcctacgaagttgaaaaacgt

SEQ ID NO: 871441 - DNA, 75 bp, synthetic construct
  source 1..75: mol_type = other DNA
gagcggtaatgatggactaactgccactgagcgccagcaaagtgaaggccataagctagaggttcatgatatacc

SEQ ID NO: 871442 - DNA, 75 bp, synthetic construct
  source 1..75: mol_type = other DNA
cacttttgccgaatcggcgtttgtgctggcgatagtggtgctcggcggtatgggctcgcaatttgcagtgattct

SEQ ID NO: 871443 - DNA, 75 bp, synthetic construct
  source 1..75: mol_type = other DNA
atgtatggaatttatagatggttcatcaaaagtaatagaaattgacaaggttcagtatatttacgaggaaaagca

SEQ ID NO: 871444 - DNA, 75 bp, synthetic construct
  source 1..75: mol_type = other DNA
gggcgtatcaaaatcaaaaacgaactccgccgccgtatccggcataaccgctattgggttaatgaggctaacaag

SEQ ID NO: 871445 - DNA, 75 bp, synthetic construct
  source 1..75: mol_type = other DNA
ttcggcgaaattgtgcgcatattgctgctcaataacacggaaatcaccggcggtccgaacggaatcagtcagatc

SEQ ID NO: 871446 - DNA, 75 bp, synthetic construct
  source 1..75: mol_type = other DNA
tggtaatggcaaacggacatgttatggcgcaaggcacaccagaagaggtgatgaccccaggattgctgagaacag

SEQ ID NO: 871447 - DNA, 75 bp, synthetic construct
  source 1..75: mol_type = other DNA
gaagaggcaccacgcctgtttacgcacattaatctgcattttatcgtcaccggtcgcgacctgaaagacgcagcg

SEQ ID NO: 871448 - DNA, 75 bp, synthetic construct
  source 1..75: mol_type = other DNA
ggcgcaaggtgctccggaagcagtgatgaaaccagagcttctaaagacggtgttcagcgtagaagcggaaatcca

SEQ ID NO: 871449 - DNA, 75 bp, synthetic construct
  source 1..75: mol_type = other DNA
aaccgtgtgattgataatggcaattataaagttgagtttggtataattacaaaaaaaccagcgagattgaagtct

SEQ ID NO: 871450 - DNA, 75 bp, synthetic construct
  source 1..75: mol_type = other DNA
agattacttacagagtttaaaggattatatagatgcaaggtgcgaagatactctacttccaccatataatcatga

SEQ ID NO: 871451 - DNA, 75 bp, synthetic construct
  source 1..75: mol_type = other DNA
atgttgcccgtaactcactgacacatatctgtcttgatcaaacagatataagccctgatggatatacgcaaatag

SEQ ID NO: 871452 - DNA, 75 bp, synthetic construct
  source 1..75: mol_type = other DNA
tgccgttgatgcaggaaaacgaaaagttgtatcaactgccgggcagtgaattgctgctggtactgaccgggccgg

SEQ ID NO: 871453 - DNA, 75 bp, synthetic construct
  source 1..75: mol_type = other DNA
gcgggacggtggatatcgccaccctgaccatgatctacattatcctcggcctcgggctgaacgtggtggtggggc

SEQ ID NO: 871454 - DNA, 75 bp, synthetic construct
  source 1..75: mol_type = other DNA
agttcagtcgcaccgcccgcgaaggcggctgggatacgttcagcaatttctttggcctgaaatacgacccgtccg

SEQ ID NO: 871455 - DNA, 75 bp, synthetic construct
  source 1..75: mol_type = other DNA
aacgataaaaaagttggctcctttagtccgggtctgaagaatacgcaaaaagaactgtctgacctcagtgagtgt

SEQ ID NO: 871456 - DNA, 75 bp, synthetic construct
  source 1..75: mol_type = other DNA
aagtgtggttgcagagtttgtagagacgcaacagcagcaagcgctattgcataaacttggggtgcaatatctgca

SEQ ID NO: 871457 - DNA, 75 bp, synthetic construct
  source 1..75: mol_type = other DNA
aacatcgagcagctgcataagtttggtttccggattgcgattgatgactttggcaccggatatgccaactacgaa

SEQ ID NO: 871458 - DNA, 75 bp, synthetic construct
  source 1..75: mol_type = other DNA
tattttaggagtcgccatggtgtaactcttaacgttaatggtggtagtataaatataggaaaaaatgtatttttc

SEQ ID NO: 871459 - DNA, 75 bp, synthetic construct
  source 1..75: mol_type = other DNA
tcattccgattgcgatggatgaaggcaaccccgtaactccagttcttatctatgaaatggataaagactcccatg

SEQ ID NO: 871460 - DNA, 75 bp, synthetic construct
  source 1..75: mol_type = other DNA
gtgactctcaagacccgtcatgccgatggtagagcagcaatcatcgtcgggatggaaagatacaaagagttaaaa

SEQ ID NO: 871461 - DNA, 75 bp, synthetic construct
  source 1..75: mol_type = other DNA
gcgatggtttacaactggccctgatggtcaaacatgaattttggtcaacctacgatccagaggacagagcgacgg

SEQ ID NO: 871462 - DNA, 75 bp, synthetic construct
  source 1..75: mol_type = other DNA
ttcttcgttaatttcttctgttaactttacctctgttgtagctgtaattctttctattggtgctgctgctgttac

SEQ ID NO: 871463 - DNA, 75 bp, synthetic construct
  source 1..75: mol_type = other DNA
gatgatggtgccggtcggcaggttgacggtgatgaaaatcgtaccgcgcgagcaatatatggcggcgatgacctt

SEQ ID NO: 871464 - DNA, 75 bp, synthetic construct
  source 1..75: mol_type = other DNA
ttttctttcagtagcccgtactggaaggattttttcagcttgcggcattttgctattactgattatcgcatggag

SEQ ID NO: 871465 - DNA, 75 bp, synthetic construct
  source 1..75: mol_type = other DNA
atggcaagacttattctgctcactgagtgggcaaaagaggaattcagtgaaccggtccctactccgagtacgtta

SEQ ID NO: 871466 - DNA, 75 bp, synthetic construct
  source 1..75: mol_type = other DNA
ccgtagagatccaacgagtggtggatgcccagccaatgcgcttcccggtgcagtatgttaaccgcccgaatcttg

SEQ ID NO: 871467 - DNA, 75 bp, synthetic construct
  source 1..75: mol_type = other DNA
gccctgcggaaaagcaaatttaaggtactggtagacgaaattacgccaacgatctccgctggcaccggagcaagc

SEQ ID NO: 871468 - DNA, 75 bp, synthetic construct
  source 1..75: mol_type = other DNA
accttctttggtctatgctgcacaacaaaacattcttagcgtgcacattttgaaccagcaaaccggaaaacccgc

SEQ ID NO: 871469 - DNA, 75 bp, synthetic construct
  source 1..75: mol_type = other DNA
gtgagaagaataattcagatatcaggatggttgttattcattatgggtctgatcatcatgcttttttccgggaat

SEQ ID NO: 871470 - DNA, 75 bp, synthetic construct
  source 1..75: mol_type = other DNA
catcgctgtttgaaagagtttccccggaattacttcccctcgcactggctatcgggattatgcagacagcggata

SEQ ID NO: 871471 - DNA, 75 bp, synthetic construct
  source 1..75: mol_type = other DNA
gtgaaaaacgtgatgagcagctaattagcagtcagaaaaaagagaaggactatacgtggtatatatataaagata

SEQ ID NO: 871472 - DNA, 75 bp, synthetic construct
  source 1..75: mol_type = other DNA
gttacattcccagctttaccattccggttatcggcgaaatgggcaccctgtggctggcgctgggattttgcgtaa

SEQ ID NO: 871473 - DNA, 75 bp, synthetic construct
  source 1..75: mol_type = other DNA
gttacattcccagctttaccatcccggttatcggcgaaatgggtactctatggttggcgctggcgttttgcgtaa

SEQ ID NO: 871474 - DNA, 75 bp, synthetic construct
  source 1..75: mol_type = other DNA
attattacgtgattggataagacaatttaatccagcaagttataatgatttaataaatggattaagtgaagactt

SEQ ID NO: 871475 - DNA, 75 bp, synthetic construct
  source 1..75: mol_type = other DNA
aatggggtattgttaatattgaactcttgattgagtttgtacggcaaaatggttttgttgttgaaaaagctgaac

SEQ ID NO: 871476 - DNA, 75 bp, synthetic construct
  source 1..75: mol_type = other DNA
ggtgaaattgttgctatttctaatcaatggggtattgttaatattgaactcttgattgagtttgtacggcaaaat

SEQ ID NO: 871477 - DNA, 75 bp, synthetic construct
  source 1..75: mol_type = other DNA
tcatcggattttagcaaggaacttactaccactgcgatttggttaagagataagggggtagacattcgatgcgtt

SEQ ID NO: 871478 - DNA, 75 bp, synthetic construct
  source 1..75: mol_type = other DNA
taataagtggattaagtgaagactttaaaaaacgtacagttatacttatcgatcagataccagagaagcaaaaga

SEQ ID NO: 871479 - DNA, 75 bp, synthetic construct
  source 1..75: mol_type = other DNA
ttcaggagcaactcatgaaggtgttacgcaaactcaccggtcagacaacaaaatgtttttcagccccggagtacg

SEQ ID NO: 871480 - DNA, 75 bp, synthetic construct
  source 1..75: mol_type = other DNA
aatatcatcgaacaagacatttgacaattacacatcacacataggtgtattcccattgtgctcaatggctaatgt

SEQ ID NO: 871481 - DNA, 75 bp, synthetic construct
  source 1..75: mol_type = other DNA
acatcaccctatataataccagaagtaataaataactatattatagagaaacagaatcagcataatataaaaata

SEQ ID NO: 871482 - DNA, 75 bp, synthetic construct
  source 1..75: mol_type = other DNA
catcaaaagcaaagaaaaagaaaaactattttttaaagaaaacaactctgtttttatgaatatcgatggttcatc

SEQ ID NO: 871483 - DNA, 75 bp, synthetic construct
  source 1..75: mol_type = other DNA
ttattatcgccgacactcctgggcacgaacagtacacccgcaatatggcgaccggcgcgtcaacatgtgagctgg

SEQ ID NO: 871484 - DNA, 75 bp, synthetic construct
  source 1..75: mol_type = other DNA
aggcaacactcgtggaatatgcgtcgctggcggagcagaaagataaggcggtaagcgcgccggtttttgacgatc

SEQ ID NO: 871485 - DNA, 75 bp, synthetic construct
  source 1..75: mol_type = other DNA
tatgacggttatctcacgccgcaaaatccggcgaatcagcaccattgtattggtgccagttatcatcgcggcagc

SEQ ID NO: 871486 - DNA, 75 bp, synthetic construct
  source 1..75: mol_type = other DNA
cgcagatgagcgacgaaccgattccgatggatgccagtacgctggcggcgttaaacccgaatcggttatgggtgc

SEQ ID NO: 871487 - DNA, 75 bp, synthetic construct
  source 1..75: mol_type = other DNA
tgccagtacgctggcggcgttaaatccgaatcggttatgggtacggaaattgttgaaaggtaaaatggtgaaggc

SEQ ID NO: 871488 - DNA, 75 bp, synthetic construct
  source 1..75: mol_type = other DNA
gcgcgtcctggcggcacgctggcgaccttcacttctgccggatttgtccgtcgcggtttgcaggaagccggattc

SEQ ID NO: 871489 - DNA, 75 bp, synthetic construct
  source 1..75: mol_type = other DNA
ttattgcgcggatgaagcccccgcactgggtgcttccggcaatcgccagggggcgctgtatccgcttttaagtaa

SEQ ID NO: 871490 - DNA, 75 bp, synthetic construct
  source 1..75: mol_type = other DNA
tgccgacgtggcagtcactcttgaaaagaaagcggataacggctggttacaacttaataccgccaaaacagataa

SEQ ID NO: 871491 - DNA, 75 bp, synthetic construct
  source 1..75: mol_type = other DNA
atgaggggatctctcagtactcaacaggaacaacttgccagaagtatgagagatggccaccggatcattcatggt

SEQ ID NO: 871492 - DNA, 75 bp, synthetic construct
  source 1..75: mol_type = other DNA
tttttgaaaatatggagctagcgttgactgatggtttcaagacaggaaaaataaaaccagaacaatacagcgctg

SEQ ID NO: 871493 - DNA, 75 bp, synthetic construct
  source 1..75: mol_type = other DNA
catttacgtctgccggttttgtccgccgcggtttgcaggaagccggattcacgatgcaaaaacgtaagggctttg

SEQ ID NO: 871494 - DNA, 75 bp, synthetic construct
  source 1..75: mol_type = other DNA
gcacaggtagcaacaaacgggaagtggcgattattggcggcggtatcgccagcgcgttgttgtcactggcgctgt

SEQ ID NO: 871495 - DNA, 75 bp, synthetic construct
  source 1..75: mol_type = other DNA
cgctttcctgagcatccacatcctctgtttgtggtagcagagagcggcttcggcaccggattaaacttcctgacg

SEQ ID NO: 871496 - DNA, 75 bp, synthetic construct
  source 1..75: mol_type = other DNA
gcgcggtttgtgttctgccccgctgtgtgccgagattctggcggcacagatgagtgaagaaccgattccgatgga

SEQ ID NO: 871497 - DNA, 75 bp, synthetic construct
  source 1..75: mol_type = other DNA
ggttttgaggtggtgcgcaccacgaaaagcagtatcagcattgccgacccggacggggggcgaaacatccgactg

SEQ ID NO: 871498 - DNA, 75 bp, synthetic construct
  source 1..75: mol_type = other DNA
agcttcgagcgcgttctgatgcccggacttgataaagatcagtacagcattctgtgggtggagcacgcggacaag

SEQ ID NO: 871499 - DNA, 75 bp, synthetic construct
  source 1..75: mol_type = other DNA
atgctgtgctggataaggggcgggatgatgatcgttaaatttcatccacgcggtcgcggcggtggcgccgggccg

SEQ ID NO: 871500 - DNA, 75 bp, synthetic construct
  source 1..75: mol_type = other DNA
cccaagtatgagcgcattattgctgatgctattggtgttgcaccggaggaaatctggcccagccgttacgctcgt

SEQ ID NO: 871501 - DNA, 75 bp, synthetic construct
  source 1..75: mol_type = other DNA
tgtcgcggcggtgcatgtaaaaggttttactttacgctctctgtccattgaagccggtttaaaccaggattcttt

SEQ ID NO: 871502 - DNA, 75 bp, synthetic construct
  source 1..75: mol_type = other DNA
caacatcaccacgctctcggcgaacacgccctggtacagtggcccggcgctgatcgagcacctggagcgcgtgcc

SEQ ID NO: 871503 - DNA, 75 bp, synthetic construct
  source 1..75: mol_type = other DNA
ccggagcaataaaaacgcgtcaggatgtcactgaggcgctcacagcggcaggttttgaggtggtgaggacaacca

SEQ ID NO: 871504 - DNA, 75 bp, synthetic construct
  source 1..75: mol_type = other DNA
tgccagtacgctggcagcgttaaatccgaatcgattatgggtacggaagctgctgaaaggtaaagcggttaaggc

SEQ ID NO: 871505 - DNA, 75 bp, synthetic construct
  source 1..75: mol_type = other DNA
tattgattgtttcccacaagcacaatgggcgaaggcggttgatgtcagtgataaagaggcgcgttgcggtgttcg

SEQ ID NO: 871506 - DNA, 75 bp, synthetic construct
  source 1..75: mol_type = other DNA
atgatcgttaaatttcatccacgcggtcgcggcggtggcgccgggccggtggactatctgctgggtaaagaccgg

SEQ ID NO: 871507 - DNA, 75 bp, synthetic construct
  source 1..75: mol_type = other DNA
gggacgctctggtatcttggcgggcggatacaggcgaacctggaagaaatcaggatacaggaagaaacattgcag

SEQ ID NO: 871508 - DNA, 75 bp, synthetic construct
  source 1..75: mol_type = other DNA
ctttctcctgtttaccgcgagtggcgggacgctctggtatcttggcgggcggatacaggcgaacctggaagaaat

SEQ ID NO: 871509 - DNA, 75 bp, synthetic construct
  source 1..75: mol_type = other DNA
gcagacatatcccggatctcagtggtaaatttttgttgtgcattaataacctgaaactggaacgttacctggctt

SEQ ID NO: 871510 - DNA, 75 bp, synthetic construct
  source 1..75: mol_type = other DNA
ggcgggtatccagaaagccacaacatccttaccctttataaaagacggcaataaatggatcgtcgttatgcctgt

SEQ ID NO: 871511 - DNA, 75 bp, synthetic construct
  source 1..75: mol_type = other DNA
atgctaattcctcaatccctcgatacaaagtggtatgagcgtgcaacagagtgtgcgaatgagacgattattctg

SEQ ID NO: 871512 - DNA, 75 bp, synthetic construct
  source 1..75: mol_type = other DNA
ttaattgcaggttcaattactctaacaggtggtcatggtaatgccggagcatggggccctattctcgctgataaa

SEQ ID NO: 871513 - DNA, 75 bp, synthetic construct
  source 1..75: mol_type = other DNA
atgagtatgccactgctggcccgtgtgcaggcaaatgttccggcctgggcaaatgaacaactggctgcatgggat

SEQ ID NO: 871514 - DNA, 75 bp, synthetic construct
  source 1..75: mol_type = other DNA
cgggaggtgaggaaattacagaacagagctgaggcgttgtcagcgtcaccggagacagatatcccccgctcatgg

SEQ ID NO: 871515 - DNA, 75 bp, synthetic construct
  source 1..75: mol_type = other DNA
tttgtcagcacggatggcattcactggtatgtcagtgctgatggtaatcaccgcagttgtctggcccgctttctg

SEQ ID NO: 871516 - DNA, 75 bp, synthetic construct
  source 1..75: mol_type = other DNA
tcagatgccattctgttcgcaaaaaatgactacaaattgctcccggaaagccagcaacagatccaaccatggcag

SEQ ID NO: 871517 - DNA, 75 bp, synthetic construct
  source 1..75: mol_type = other DNA
cgccggtgactggtcacttggcttatcagacacgattctgtttgctaaaaatgactacaaactacttccggaaag

SEQ ID NO: 871518 - DNA, 75 bp, synthetic construct
  source 1..75: mol_type = other DNA
ggaaatcctctcttacgcggcgcagcagcatccctccgggctgggagccagctttctggaaaaggatctctgggt

SEQ ID NO: 871519 - DNA, 75 bp, synthetic construct
  source 1..75: mol_type = other DNA
cagtaaaataccgctggcggtgatgaaaaagctggttggttatgaccctgccaatgttgtcaggaagaagagacc

SEQ ID NO: 871520 - DNA, 75 bp, synthetic construct
  source 1..75: mol_type = other DNA
gtcaaatttgggtgcaaatcaacagatatcgacaacctctcgcgcaaccaagacatcgcggtcggactgcaagtg

SEQ ID NO: 871521 - DNA, 75 bp, synthetic construct
  source 1..75: mol_type = other DNA
ataaagcgattaatcatgacttccgccagctggaaaatatctggagccaatccccaaagcggactgggagcaggt

SEQ ID NO: 871522 - DNA, 75 bp, synthetic construct
  source 1..75: mol_type = other DNA
gcagactggaggttctgtccgcatcaccggagaacgatttgccacgctcatggtggctgcgtcttttacagagag

SEQ ID NO: 871523 - DNA, 75 bp, synthetic construct
  source 1..75: mol_type = other DNA
ctggtattaactgccctgctgttctgtatcgtcattggtctgccgctggggatctggctggcgagaagtccgcga

SEQ ID NO: 871524 - DNA, 75 bp, synthetic construct
  source 1..75: mol_type = other DNA
gcccccgccggcacttgaacatttcaatattatggatccgttccataaaacgctgatcccgcttgacagttgggt

SEQ ID NO: 871525 - DNA, 75 bp, synthetic construct
  source 1..75: mol_type = other DNA
cgcacaatccgcagatgcctggggtacaccggctgctacaccgactgacggtggcggcgccgactggctgaccag

SEQ ID NO: 871526 - DNA, 75 bp, synthetic construct
  source 1..75: mol_type = other DNA
atgcttagtggtaaagacttaggccgagcgatagagcaggccattaacaaaaaaatcgcatcgggatccgtcaaa

SEQ ID NO: 871527 - DNA, 75 bp, synthetic construct
  source 1..75: mol_type = other DNA
gagcgatagagcaggccattaacaaaaaaattgcatcaggagccgtcaaatcaaaggcggaaatcgcacgtcatt

SEQ ID NO: 871528 - DNA, 75 bp, synthetic construct
  source 1..75: mol_type = other DNA
ctgctgggtatgcctgcacctgtggcgattatcgttttcgctctcatcgcctggcagatttccggcgtcggtatg

SEQ ID NO: 871529 - DNA, 75 bp, synthetic construct
  source 1..75: mol_type = other DNA
cgattatcgttttcgctctcatcgcctggcagatttccggcatcggaatgggcgtggcgacgctgatttcgctga

SEQ ID NO: 871530 - DNA, 75 bp, synthetic construct
  source 1..75: mol_type = other DNA
acgttatgtactggatatgttgctggactgcaacatcgccgaaacccctctgacagacctttcaaccagccacgt

SEQ ID NO: 871531 - DNA, 75 bp, synthetic construct
  source 1..75: mol_type = other DNA
tttgtcagcacggatggcattcactggtatgtcagtgctgacggtaatcaccgcagctgtctggcccgctttctg

SEQ ID NO: 871532 - DNA, 75 bp, synthetic construct
  source 1..75: mol_type = other DNA
gtttgtttatctggtgccagcccgcgccagatgctgttcaaagttcagttaccgctggcgatgccaaccattatg

SEQ ID NO: 871533 - DNA, 75 bp, synthetic construct
  source 1..75: mol_type = other DNA
ctggtgttaaccgccctgctgttctgtatcgtcatcggtttgccgttggggatctggctggcgagaagtccgcga

SEQ ID NO: 871534 - DNA, 75 bp, synthetic construct
  source 1..75: mol_type = other DNA
ggcgtggcgacgctggtttcgctgattgccatcggcgcaatcggtgcctggtcgcaggcaatggttactctggcg

SEQ ID NO: 871535 - DNA, 75 bp, synthetic construct
  source 1..75: mol_type = other DNA
atctgctgtatgccgcccgaaaacgggggctggaacccggtatcttctgcgccatccacacgtatggccgtcgtc

SEQ ID NO: 871536 - DNA, 75 bp, synthetic construct
  source 1..75: mol_type = other DNA
ggcacggtgatagttcaccgtatccgtgggcgacgtcgtttaatgagtatgtgaaagcgaatctgacgtggcaag

SEQ ID NO: 871537 - DNA, 75 bp, synthetic construct
  source 1..75: mol_type = other DNA
ggccggtggaacagcatcctctggtgaactacctggaccatgagggcggggcgttatcgaatccaacaccggaac

SEQ ID NO: 871538 - DNA, 75 bp, synthetic construct
  source 1..75: mol_type = other DNA
ttaccgcgcaatgacgcacccggcgaaactgtaagctatcaggtggcaaacgcacaatatcggctaacgattgtg

SEQ ID NO: 871539 - DNA, 75 bp, synthetic construct
  source 1..75: mol_type = other DNA
acctgtggatagcgacacagctgaatcgtcttcctgactgcgaccgggtacacctggtcttcaccctgccggaca

SEQ ID NO: 871540 - DNA, 75 bp, synthetic construct
  source 1..75: mol_type = other DNA
tgtcgccgcttacgtgtttgaggttcagaccagcgagcgtaacggctcagggctggcactggcggcgaagctgct

SEQ ID NO: 871541 - DNA, 75 bp, synthetic construct
  source 1..75: mol_type = other DNA
cgttccgtggcgtatctgtctgacattctggccggacagtttaccgggcagtttaacagtcagcgtaactcgtta

SEQ ID NO: 871542 - DNA, 75 bp, synthetic construct
  source 1..75: mol_type = other DNA
atggcatttgaatggcgatatcgctacgtgagaaaaggcgttacgaactttcaggagaagccgtgggttggtgac

SEQ ID NO: 871543 - DNA, 75 bp, synthetic construct
  source 1..75: mol_type = other DNA
ccggtgttgctggaaatattaattctcgcctgagctataatgcgtccatcaaccagtcacgtaacaccacaggaa

SEQ ID NO: 871544 - DNA, 75 bp, synthetic construct
  source 1..75: mol_type = other DNA
tgtcgaacaaggtgggtacacattgaaatcattcgtggttccgcctggtccttttgtgattaatgatctgaccgg

SEQ ID NO: 871545 - DNA, 75 bp, synthetic construct
  source 1..75: mol_type = other DNA
tggtttacttactggcaatggcgttaatggcgtactgaaaggtgcagctgttggcgctggcgttggtgcagtaac

SEQ ID NO: 871546 - DNA, 75 bp, synthetic construct
  source 1..75: mol_type = other DNA
tggtctgtccggtgaatatgcggagaaatcccttgaagaatgggcggaacagattcgcaaaggaggcaaccagtg

SEQ ID NO: 871547 - DNA, 75 bp, synthetic construct
  source 1..75: mol_type = other DNA
ccatcaccccgtattgccagcgtcaggactggtaaacgcagtgcgtttctatgaacaggtaaagcgtgagaatcc

SEQ ID NO: 871548 - DNA, 75 bp, synthetic construct
  source 1..75: mol_type = other DNA
gggagtgtcagttgatattcctccattccctgaatggaacagtggtcattatatagaaattccaggagagggtat

SEQ ID NO: 871549 - DNA, 75 bp, synthetic construct
  source 1..75: mol_type = other DNA
actaagcatttctaatgccgataatccgcttgaaacatctgcaacagtctggattaaagcgggggcgttaattca

SEQ ID NO: 871550 - DNA, 75 bp, synthetic construct
  source 1..75: mol_type = other DNA
tggtcggcattggagcagctggctaataatggtgtcgatggagcgaaattagccattgttcaggccgataatcct

SEQ ID NO: 871551 - DNA, 75 bp, synthetic construct
  source 1..75: mol_type = other DNA
ggcgcgatgcattgtttgagcaatataaatcactcagcgatgccgatggctggtcggcattggagcagctggcta

SEQ ID NO: 871552 - DNA, 75 bp, synthetic construct
  source 1..75: mol_type = other DNA
ggccgtcgtctcaactggcatccgcatcaagcttccagtcacagacaaatcaccggattacacaggggcacacag

SEQ ID NO: 871553 - DNA, 75 bp, synthetic construct
  source 1..75: mol_type = other DNA
agcggcaaacgccgccggaaaagatatcggcatgatggagacagaactgaaaagcgcgatggaacagatagagta

SEQ ID NO: 871554 - DNA, 75 bp, synthetic construct
  source 1..75: mol_type = other DNA
actttacacgtcctgaacaagtgatagcacatcttttcagtgatgtagcccttaatcctataacgctgggcgact

SEQ ID NO: 871555 - DNA, 75 bp, synthetic construct
  source 1..75: mol_type = other DNA
gttagcaaaggggctgctggtattgatttcactcgtccggaacaggttgtgacacaccttttcagcgatgttgcc

SEQ ID NO: 871556 - DNA, 75 bp, synthetic construct
  source 1..75: mol_type = other DNA
caacgcgacgaaaagcatcaaattaaccagtttttagcggactggttgcgatactgtttagcacatggagcgatg

SEQ ID NO: 871557 - DNA, 75 bp, synthetic construct
  source 1..75: mol_type = other DNA
atgaagcgttacacacctgactttcctgaaatgatgcgcctgtgcgagatgaacttttcacaattgcgccgtttg

SEQ ID NO: 871558 - DNA, 75 bp, synthetic construct
  source 1..75: mol_type = other DNA
acgctctcgtggtgatgtggagcgtgctattaagtctggtgtgctggatatcagtatcgatgttattcagaaccc

SEQ ID NO: 871559 - DNA, 75 bp, synthetic construct
  source 1..75: mol_type = other DNA
acttactgaacaggtgaagtctatagctaataacctaccaaaagtggctggtgggaaagcggcagacgatgcaga

SEQ ID NO: 871560 - DNA, 75 bp, synthetic construct
  source 1..75: mol_type = other DNA
tttccatcgctggactactctgaagactgctgcggacgtcggggcgacggtaaaaatccctgatattgtcgagaa

SEQ ID NO: 871561 - DNA, 75 bp, synthetic construct
  source 1..75: mol_type = other DNA
aattgcggtcaacatccctggttttatcgacgccatacaggttattttcagcggtcataccgccagtggtggtga

SEQ ID NO: 871562 - DNA, 75 bp, synthetic construct
  source 1..75: mol_type = other DNA
cccataaccagcgccagacatcgcgcattatgctgttggtgttgctcgcagccgtgccaggaatcgcagcgcaac

SEQ ID NO: 871563 - DNA, 75 bp, synthetic construct
  source 1..75: mol_type = other DNA
gatcgttttaattccctgaaacatgaattttccggcgtatctgatgatgcgggtgatgcgctttcgtcaatatcc

SEQ ID NO: 871564 - DNA, 75 bp, synthetic construct
  source 1..75: mol_type = other DNA
gcctgtttccacaaccttaaaagataattcggcgcttttaacagggctgttactcgccgtaagtattccgcccct

SEQ ID NO: 871565 - DNA, 75 bp, synthetic construct
  source 1..75: mol_type = other DNA
ggtacggtgtttgcggtgatcatcgctaaacagttgtatggcggtctggggcaaaacccattcaacccggcaatg

SEQ ID NO: 871566 - DNA, 75 bp, synthetic construct
  source 1..75: mol_type = other DNA
attggttatgtggtcttactgatctccttcccggtgcagatgaccagttggttaccgccgcatgaaattgcggtc

SEQ ID NO: 871567 - DNA, 75 bp, synthetic construct
  source 1..75: mol_type = other DNA
caactggctgacaccattgcggaggcgcaacttcagatagtggattcaccgcttacgcctgccaatgctaaggat

SEQ ID NO: 871568 - DNA, 75 bp, synthetic construct
  source 1..75: mol_type = other DNA
aagcctgtgctgattacccgtgtatcttctgttctggggaaggccgggaaagcgggcacgctttataaggccctt

SEQ ID NO: 871569 - DNA, 75 bp, synthetic construct
  source 1..75: mol_type = other DNA
attggttaccgcccgcgcattctggcggctcccggtctggataccgaagcagtcacatccgccctgtgcgtcatt

SEQ ID NO: 871570 - DNA, 75 bp, synthetic construct
  source 1..75: mol_type = other DNA
gatgtactgaatattgcctccgattatgctgatttcgtgacagaggttattttaagaaaagcgacggacggggat

SEQ ID NO: 871571 - DNA, 75 bp, synthetic construct
  source 1..75: mol_type = other DNA
cactcttcttccagcgccggctggtgatcgagggtgatacggagctggggttatatgtgaaaaacctgatggacg

SEQ ID NO: 871572 - DNA, 75 bp, synthetic construct
  source 1..75: mol_type = other DNA
ggcggtaacaaaatccctgtgcgtgattgcgggtaaactgcgcgcgtttgtgtatgcctcatgtcacggctgtaa

SEQ ID NO: 871573 - DNA, 75 bp, synthetic construct
  source 1..75: mol_type = other DNA
cgtgaggtgatgctcttatggccggacttcatcgcctacaacccgaaaagtggcaaaaacgaaacgttccccgcg

SEQ ID NO: 871574 - DNA, 75 bp, synthetic construct
  source 1..75: mol_type = other DNA
cagaaataccgactacacccaaaacagccgggaagcatttgctgaactggcaaaaacagcctttgaaaacagtgt

SEQ ID NO: 871575 - DNA, 75 bp, synthetic construct
  source 1..75: mol_type = other DNA
atggcacaggttaatatgagtttaagaattgacgctgaactgaaggatgcttttatggccctgcaaaaagcatgg

SEQ ID NO: 871576 - DNA, 75 bp, synthetic construct
  source 1..75: mol_type = other DNA
gcacagagatacagggctaaatattcttgatattgccgctaactatgctgatttcgtgacagaagttattttaag

SEQ ID NO: 871577 - DNA, 75 bp, synthetic construct
  source 1..75: mol_type = other DNA
ggaaggcgtgaagaccaaggtgctgatgctttcggccaccccggtgaacaaccgcttcaatgacctgcgcaacca

SEQ ID NO: 871578 - DNA, 75 bp, synthetic construct
  source 1..75: mol_type = other DNA
cacatactgaaggctgaccgcgaacggagcttgtacgggagtgagttcgaaattcagctgcgtaacaaactgacc

SEQ ID NO: 871579 - DNA, 75 bp, synthetic construct
  source 1..75: mol_type = other DNA
aatcagggtgagattattactttgattacaggaaaagatatcgatttttcaaaggtctataagcttaaatacaga

SEQ ID NO: 871580 - DNA, 75 bp, synthetic construct
  source 1..75: mol_type = other DNA
ggcggtgacaaaatccctgtgcgtgattgcaggtaaactgcgcgcgtttgtgtatgcctcatgtcacggctgtaa

SEQ ID NO: 871581 - DNA, 75 bp, synthetic construct
  source 1..75: mol_type = other DNA
ctcaatattgcgtcggactatgcggaatatgtggcagagacgcgttacagaagtaaattcccggagggggtgagc

SEQ ID NO: 871582 - DNA, 75 bp, synthetic construct
  source 1..75: mol_type = other DNA
agctggacacggaggcggtgacaaaatccctgtgcgtgattgcgggtaaactgcgcgcgtttgtgtatgcctcat

SEQ ID NO: 871583 - DNA, 75 bp, synthetic construct
  source 1..75: mol_type = other DNA
tgcgaacgtgaaggatgttatcagtgccatcagggcaaaactggattcactggttactgccgggaaactgattgg

SEQ ID NO: 871584 - DNA, 75 bp, synthetic construct
  source 1..75: mol_type = other DNA
atgtgctggggatgtccaggcatgtgttctggtcgttgcaggccgaagacagtgatgccaacagcctcaacaaca

SEQ ID NO: 871585 - DNA, 75 bp, synthetic construct
  source 1..75: mol_type = other DNA
cgtattctggccgcgccggagctggacacggaggcggtaacaaaatccctgtgcgtgattgcgggtaaactgcgc

SEQ ID NO: 871586 - DNA, 75 bp, synthetic construct
  source 1..75: mol_type = other DNA
atgaaattcattaatcctgtgctgatagcggcattatctgtaagttttgtcggggggtctgctgcatataccatc

SEQ ID NO: 871587 - DNA, 75 bp, synthetic construct
  source 1..75: mol_type = other DNA
aagatatgtgctggaactacttatggatagtgacatttctgcgatcagactatctgaattaacagaaaatgacgt

SEQ ID NO: 871588 - DNA, 75 bp, synthetic construct
  source 1..75: mol_type = other DNA
gtatgccggttacgatgggaagatctcgaccaggaacaaaaatctatactagtaagagacaggaaagatccacgt

SEQ ID NO: 871589 - DNA, 75 bp, synthetic construct
  source 1..75: mol_type = other DNA
atgcttaatgtaaatagcgatatccagtctgtgatgtctggggtcagtgccgctacgactacttcaggtattaat

SEQ ID NO: 871590 - DNA, 75 bp, synthetic construct
  source 1..75: mol_type = other DNA
cactcaataagaagaaatttcagtttcaggttccggccccgatcctgaatgaatacaaggaaaaaaaggagttac

SEQ ID NO: 871591 - DNA, 75 bp, synthetic construct
  source 1..75: mol_type = other DNA
ctcccgctattcgccctactggggtcggatttgcccgcgctattatgcgcacaggggcaattgcaggactcattt

SEQ ID NO: 871592 - DNA, 75 bp, synthetic construct
  source 1..75: mol_type = other DNA
ctgcaaaaccaggcgaattatatacagagggcttctcagctgatgtctgattctgcgcgagtgaataaccgtatt

SEQ ID NO: 871593 - DNA, 75 bp, synthetic construct
  source 1..75: mol_type = other DNA
gaagggttaaagaccgcagcaaaagtctttggtggactgtctatggctgcaagtattctgacagccggccttggc

SEQ ID NO: 871594 - DNA, 75 bp, synthetic construct
  source 1..75: mol_type = other DNA
aaatgaaagtgggtaagtatctgaaagctctagaatctgaacggaaaagccagaacatcacaaaaactggaactt

SEQ ID NO: 871595 - DNA, 75 bp, synthetic construct
  source 1..75: mol_type = other DNA
agtaaagataaacttccagaattatggcgtttctttgctgatgttgttggtccagagcattgggggcttaacgaa

SEQ ID NO: 871596 - DNA, 75 bp, synthetic construct
  source 1..75: mol_type = other DNA
tgcagctatttttaacccggcactctgggctgttgttgccgttagcgcaacagcaatggcactgcaaactgcagt

SEQ ID NO: 871597 - DNA, 75 bp, synthetic construct
  source 1..75: mol_type = other DNA
tgttgttgccgttagcgcaacagcaatggcactgcaaactgcagttgatgtaatgggcgataaggccccgcaggc

SEQ ID NO: 871598 - DNA, 75 bp, synthetic construct
  source 1..75: mol_type = other DNA
ttcaaacgttgtgaaaatcgtcgagaaggcggccgaagcgttggttaaaaacgtttttgcaagaattgcgtcggt

SEQ ID NO: 871599 - DNA, 75 bp, synthetic construct
  source 1..75: mol_type = other DNA
tagctcctgtagccagtgatcttgagcaactcgggacgaaagaaaaattctggttttctatggatacggaaccta

SEQ ID NO: 871600 - DNA, 75 bp, synthetic construct
  source 1..75: mol_type = other DNA
cgttttcgcttaagcgacggcttgtgcatggaagacgaacagttttccgtcaagcattacgaagcacgagtgaaa

SEQ ID NO: 871601 - DNA, 75 bp, synthetic construct
  source 1..75: mol_type = other DNA
cacagcaccgaactcgtaggcctgataagacgcggcagcgtcgcatcaggcaatgctgttattgtcggatgcggc

SEQ ID NO: 871602 - DNA, 75 bp, synthetic construct
  source 1..75: mol_type = other DNA
agcgtcgcatcaggcaatgctgttattgtcggatgcggcatgaacgccttatccgacctacacagcaccgaactc

SEQ ID NO: 871603 - DNA, 75 bp, synthetic construct
  source 1..75: mol_type = other DNA
aagaacttacaccgtgaatttattttcaatttagatggcgctgcaactgagcatgacacgctattaccacgattc

SEQ ID NO: 871604 - DNA, 75 bp, synthetic construct
  source 1..75: mol_type = other DNA
atgctgagactggggttgatatgggacgaacctcagccagaccgcgatcgcagacgtcagataaggacccgctgg

SEQ ID NO: 871605 - DNA, 75 bp, synthetic construct
  source 1..75: mol_type = other DNA
actgaaaccactgaaaccactgaaacccggcatcccgccgacaggaaaaagcacaatgaccatccgctacactgc

SEQ ID NO: 871606 - DNA, 75 bp, synthetic construct
  source 1..75: mol_type = other DNA
ggcacagacgaaatactcttccgtctgagtaaaaaccatcatttatatgagaaaaagaaaacaaaagagggatga

SEQ ID NO: 871607 - DNA, 75 bp, synthetic construct
  source 1..75: mol_type = other DNA
gctgtgagtgaggctaccgctgaggtagacgtcatttccgctgccgcactgagtgaacaacagctcgcgaaaatt

SEQ ID NO: 871608 - DNA, 75 bp, synthetic construct
  source 1..75: mol_type = other DNA
ctatcaagcctcctccgagtgtatatgatctaaccgggctaaatgcagcagatgtattttgtggatatttgatgc

SEQ ID NO: 871609 - DNA, 75 bp, synthetic construct
  source 1..75: mol_type = other DNA
aagcgttatcacgaattgccggttactgaattatggttggtggatgtcgaaggtggtaaagcgaaactggatatt

SEQ ID NO: 871610 - DNA, 75 bp, synthetic construct
  source 1..75: mol_type = other DNA
ctcaaccatatggtgttcattaaggatgtgctggtaaatggcaaatcacgctttgccgaattgcttgatggtgtg

SEQ ID NO: 871611 - DNA, 75 bp, synthetic construct
  source 1..75: mol_type = other DNA
ttttgccgaattgctcgatggtgtggcgtcagggcagttaaaagcctcttccgtaaaaaatattttcgatctgcc

SEQ ID NO: 871612 - DNA, 75 bp, synthetic construct
  source 1..75: mol_type = other DNA
cctgctgtcgatgattatgcaattgtcgatgagtatcggcgtcaccatcgccgggctgttgctggggctttttgg

SEQ ID NO: 871613 - DNA, 75 bp, synthetic construct
  source 1..75: mol_type = other DNA
tatcgcccttccggcgttcatctttgccagagttccgaacgatacacatcaaaatgtggctatttcgcggcgcaa

SEQ ID NO: 871614 - DNA, 75 bp, synthetic construct
  source 1..75: mol_type = other DNA
ctggcgagcagcggcaacagcctgctgtcgatgattatgcaattgtcgatgagtatcggcgtcaccatcgccggg

SEQ ID NO: 871615 - DNA, 75 bp, synthetic construct
  source 1..75: mol_type = other DNA
aaaagccctgaatgggatgaaagcgatcgcttgtggtctttcaatatttccgttccactaggccgggcctggagt

SEQ ID NO: 871616 - DNA, 75 bp, synthetic construct
  source 1..75: mol_type = other DNA
gcgtgggcggcgcgatgatggtgccagtcggaaggcttacggtgatgaaaattgttccgcgcgaacagtatatgg

SEQ ID NO: 871617 - DNA, 75 bp, synthetic construct
  source 1..75: mol_type = other DNA
aatattttctttaccgctatcgtgctgtttaccctcggttcgctgttttgcgcgctctccggcacccttaatgaa

SEQ ID NO: 871618 - DNA, 75 bp, synthetic construct
  source 1..75: mol_type = other DNA
ggtactggctaatttcggcttatcgttgcagacaactcatgtcatcgattttgttcccatacttaacgaacaagg

SEQ ID NO: 871619 - DNA, 75 bp, synthetic construct
  source 1..75: mol_type = other DNA
ttcgtaacggcggtgtggatgcgttctcgcagcgcatgtactcccttgtcgggctgggccaccgccagcttcgcg

SEQ ID NO: 871620 - DNA, 75 bp, synthetic construct
  source 1..75: mol_type = other DNA
ggaaaccctgcgcttcagcgccgacgccagccttgccttcccgtgtagtgatatcagttcgctgaaacgggatac

SEQ ID NO: 871621 - DNA, 75 bp, synthetic construct
  source 1..75: mol_type = other DNA
ctgttgctgggactttttggttcgcagcatgtcagcgtcgacagcggcaccacacaaaccgtctttatgtacacc

SEQ ID NO: 871622 - DNA, 75 bp, synthetic construct
  source 1..75: mol_type = other DNA
ccggcgctcggcggcctgctggtggagtacgcgtcgtggcactggatctttttgatcaacattccggtggggatt

SEQ ID NO: 871623 - DNA, 75 bp, synthetic construct
  source 1..75: mol_type = other DNA
ggcgtggtgtttattttattgaagagttttttgacacagcttgcggctgaagagaaaaacgcgagagatgaataa

SEQ ID NO: 871624 - DNA, 75 bp, synthetic construct
  source 1..75: mol_type = other DNA
catgacgcttatctccgcccccggcgcgcgcaacgctcgcgtggtcaataacggcggcgtacaagttgactggat

SEQ ID NO: 871625 - DNA, 75 bp, synthetic construct
  source 1..75: mol_type = other DNA
cctgttcacccgcgccagtatgagttctcgcgcctgaatctggaatacactgtgatgtccaagcgtaagctgaac

SEQ ID NO: 871626 - DNA, 75 bp, synthetic construct
  source 1..75: mol_type = other DNA
agttctgcaaacgcatcggcgtgaccaagcaggacaacaccattgaaatggcgtcgctggaatcctgcatccgtg

SEQ ID NO: 871627 - DNA, 75 bp, synthetic construct
  source 1..75: mol_type = other DNA
atcgatccggtgaaactggttatcgaaaactatcagggcgaaggcgaaatggttaccatgccgaaccatccgaac

SEQ ID NO: 871628 - DNA, 75 bp, synthetic construct
  source 1..75: mol_type = other DNA
ataccccctcacgcatcctgcgtatggctgaacttacccggctccttggtatatcaagatcgaccatctacgaaa

SEQ ID NO: 871629 - DNA, 75 bp, synthetic construct
  source 1..75: mol_type = other DNA
acgacgttgagtggttaggttttcactggtctggtaacgtccgttactcctccgattattttgatcagctccacg

SEQ ID NO: 871630 - DNA, 75 bp, synthetic construct
  source 1..75: mol_type = other DNA
gcgtcgctggaatcctgcatccgtgaagatcttaacgaaaacgcccctcgcgcaatggcagttatcgatccagta

SEQ ID NO: 871631 - DNA, 75 bp, synthetic construct
  source 1..75: mol_type = other DNA
aataattacaatgcatttgcattagggatagggaaaaactttggttatatcggggcgatttctatcgatgtgacg

SEQ ID NO: 871632 - DNA, 75 bp, synthetic construct
  source 1..75: mol_type = other DNA
tgccttagccggacgcaactggcagagatgggcgtgcgcgttgaaagctttccggccctcaatctggtgcctgcc

SEQ ID NO: 871633 - DNA, 75 bp, synthetic construct
  source 1..75: mol_type = other DNA
aataattacaatgcgtttgcgttaggcataggcaaaaactttggttatatcggggcgatttctatcgatgtgacg

SEQ ID NO: 871634 - DNA, 75 bp, synthetic construct
  source 1..75: mol_type = other DNA
tgcctcgacagtcgccattccactacggagaaaccggtatttaaccgcaccgtgggtctgcgtgatacctgggcg

SEQ ID NO: 871635 - DNA, 75 bp, synthetic construct
  source 1..75: mol_type = other DNA
gtgatggttccttcgaaccacaactggtgaagaaaaatcagacccgcattaccggcatggacaaccagatcctgg

SEQ ID NO: 871636 - DNA, 75 bp, synthetic construct
  source 1..75: mol_type = other DNA
acgatgtttgaaaaaggccaggaacagcagctacccggcacctatcgtgtctctgtgtatgtcaatgagcagaga

SEQ ID NO: 871637 - DNA, 75 bp, synthetic construct
  source 1..75: mol_type = other DNA
aatatagtctcgctgcaggggaatatcgcgcaggtaattatgacagtgcccgcccacattttgggcagtttaata

SEQ ID NO: 871638 - DNA, 75 bp, synthetic construct
  source 1..75: mol_type = other DNA
ctcggcctcgacgacgatgcgttaaccgtcgaatggtctgtcggcggcctgcctgatgtggcgctgtgggcgcag

SEQ ID NO: 871639 - DNA, 75 bp, synthetic construct
  source 1..75: mol_type = other DNA
ttcgatgaccgtgatattgatcggtttgccctgggtgttgctgacgccattaagtgatcgattaatcaccttttt

SEQ ID NO: 871640 - DNA, 75 bp, synthetic construct
  source 1..75: mol_type = other DNA
gattattggtctggtgatgctattaacagcagtagtactaaaccaactgggccaggtatttattccggtaaaacg

SEQ ID NO: 871641 - DNA, 75 bp, synthetic construct
  source 1..75: mol_type = other DNA
atccgcacggccgcaccactcaaaatccgtattgaatgtcacatgcccgaccgccggcgccgcgatctggataac

SEQ ID NO: 871642 - DNA, 75 bp, synthetic construct
  source 1..75: mol_type = other DNA
ctgctggtggttttaacggaaagttgagtttcccctgggagtcaagtccgcctctgagaaataatcaacagggta

SEQ ID NO: 871643 - DNA, 75 bp, synthetic construct
  source 1..75: mol_type = other DNA
tgaacagcttgaagactggctggagcagcaaaagcttcatctaagccgctataaccgtctggtaaaagaaaaagc

SEQ ID NO: 871644 - DNA, 75 bp, synthetic construct
  source 1..75: mol_type = other DNA
cggttgctatcacaccggaaagccagcaattgttagcaaaagcggtatctatcgcccagccggtaaaaggacgta

SEQ ID NO: 871645 - DNA, 75 bp, synthetic construct
  source 1..75: mol_type = other DNA
gcggggtatcccgttgacaagacgtttattgcctacggtgagttaagcgaacatattctggaagtatgtcacaaa

SEQ ID NO: 871646 - DNA, 75 bp, synthetic construct
  source 1..75: mol_type = other DNA
cgtgcgtgacaggcttgccattaaccacagcaaaatgctggcctacgccggaattctggcaacaccaggccgcgc

SEQ ID NO: 871647 - DNA, 75 bp, synthetic construct
  source 1..75: mol_type = other DNA
tgttgttgaacattgtcggcctcgtgctgtttctttcctggtacatacccgttaatcatggattctggttatcga

SEQ ID NO: 871648 - DNA, 75 bp, synthetic construct
  source 1..75: mol_type = other DNA
gcaccgatgcttgaagatttacgcagcgtgatgcatgaagaaacacaaaactttcttgataaattaattaaggat

SEQ ID NO: 871649 - DNA, 75 bp, synthetic construct
  source 1..75: mol_type = other DNA
gcgagcgtcctgctcagcgaaaagtgtgattgcctcaagtgaggttgatgtgctgttagttccgcttaaagggga

SEQ ID NO: 871650 - DNA, 75 bp, synthetic construct
  source 1..75: mol_type = other DNA
atgcaaacgaaaaaaaatgaaatttgggtgggtatctttttattagcagcactgctggcggcgctgtttgtttgc

SEQ ID NO: 871651 - DNA, 75 bp, synthetic construct
  source 1..75: mol_type = other DNA
accgcgataacgtcgcccgaatcattaaaaactccatgctggatatcggcctggctatgcctgtgaaaatccgca

SEQ ID NO: 871652 - DNA, 75 bp, synthetic construct
  source 1..75: mol_type = other DNA
catcaacggttcagcttctgaagccgatgccgcacgtaagcaactgcgcgaagaactgctggcgattgcgccggt

SEQ ID NO: 871653 - DNA, 75 bp, synthetic construct
  source 1..75: mol_type = other DNA
gtgaatacttacgacatcacaatgccctggcccccgagcaataaccgctagtaccgccataatcgcgggcgcaca

SEQ ID NO: 871654 - DNA, 75 bp, synthetic construct
  source 1..75: mol_type = other DNA
acagtttcagcggtagtaacagttctcatgatacaaaaagttataatcgctacattgatgaaaatggtaatcatc

SEQ ID NO: 871655 - DNA, 75 bp, synthetic construct
  source 1..75: mol_type = other DNA
gcagtgtacttcatcgccagtaaaatcttccgcgatcgcggcgctggcccgacaattatcatctctcctttgctt

SEQ ID NO: 871656 - DNA, 75 bp, synthetic construct
  source 1..75: mol_type = other DNA
gtgaatacttaccacatcacactaccctggcctccgagcaataaccgctattaccgccataatcgcgggcgcaca

SEQ ID NO: 871657 - DNA, 75 bp, synthetic construct
  source 1..75: mol_type = other DNA
ttaccgccataatcgcgggcgcacgcacatcagcgcagaagggcaggcataccgcgataacgtcacccgaatcat

SEQ ID NO: 871658 - DNA, 75 bp, synthetic construct
  source 1..75: mol_type = other DNA
ttttgaagatccagaactgggaactgctattctgaaagatggcgatacgattcaggacactaaatctgcgatggt

SEQ ID NO: 871659 - DNA, 75 bp, synthetic construct
  source 1..75: mol_type = other DNA
tgcttgcggcgctgtttgtttgcctgaaggcagcgaacgtgacgtctatacgtactgaaccgacctatacgcttt

SEQ ID NO: 871660 - DNA, 75 bp, synthetic construct
  source 1..75: mol_type = other DNA
gtgaatacttaccacatcacaataccctggcccccgagcaataaccgctagtaccgccataatcgcgggcgcacg

SEQ ID NO: 871661 - DNA, 75 bp, synthetic construct
  source 1..75: mol_type = other DNA
gtgaatacttactacatcacaattccctggcccccgagcaataaccgctagtaccgccataatcgcgggcgcacc

SEQ ID NO: 871662 - DNA, 75 bp, synthetic construct
  source 1..75: mol_type = other DNA
gtgaatacttacaacatcacaatcccctggcccccgagcaataaccgctagtaccgccataatcgcgggcgcacg

SEQ ID NO: 871663 - DNA, 75 bp, synthetic construct
  source 1..75: mol_type = other DNA
gtgcataacctgcgtacggtgaagtggcacggtgatagttcaccgtatccttgggcgatgtcgtttaatgagtat

SEQ ID NO: 871664 - DNA, 75 bp, synthetic construct
  source 1..75: mol_type = other DNA
gtggcaaacaaagcgcagaacgtgattgataaagaagagagcgaagaagatattgctaacgccctgaaattttaa

SEQ ID NO: 871665 - DNA, 75 bp, synthetic construct
  source 1..75: mol_type = other DNA
aaccccactggcatcgttgggtagcgtggtgggctgggcctatgtgatctttgttccactgctctggttcttcgg

SEQ ID NO: 871666 - DNA, 75 bp, synthetic construct
  source 1..75: mol_type = other DNA
cctgtcgccattcggttgccgccctcatcgtgtcctacggcggaacactgtatgacgttcaggctcaactggggc

SEQ ID NO: 871667 - DNA, 75 bp, synthetic construct
  source 1..75: mol_type = other DNA
gcagcggggaaatccgtggttgtttataggcaaaaaaccggggatgccgctgagtaacccggttaaggcctttca

SEQ ID NO: 871668 - DNA, 75 bp, synthetic construct
  source 1..75: mol_type = other DNA
acatcagattcacgcagcaccgatgccgaatacagcgataccgagatttcaggtctgaagtgtctggtcagtaaa

SEQ ID NO: 871669 - DNA, 75 bp, synthetic construct
  source 1..75: mol_type = other DNA
acactgccagccggtgcggaaattcgtggtgaaggtgtcagcgtgtccaccacagcagactgcaccatcggccac

SEQ ID NO: 871670 - DNA, 75 bp, synthetic construct
  source 1..75: mol_type = other DNA
ttcaacccgacgtttacccttcatctattagaagagagcattgctgaagcctgggttacccgtaaaccgaccagc

SEQ ID NO: 871671 - DNA, 75 bp, synthetic construct
  source 1..75: mol_type = other DNA
aaattcttgaatctgcacagcaggatggcaatgaaatcatggtgtttgttggcaaccgtggctgcgtacagattt

SEQ ID NO: 871672 - DNA, 75 bp, synthetic construct
  source 1..75: mol_type = other DNA
tgactaacattgcaccgtggaccatgccaaccggtctgggagccttctttaatactaacggtagcgtcgccgcat

SEQ ID NO: 871673 - DNA, 75 bp, synthetic construct
  source 1..75: mol_type = other DNA
tggcagaaatgtttacctttattgtccaccgcaactgggtgattaaattacccgacagtgtaccgacatcggtct

SEQ ID NO: 871674 - DNA, 75 bp, synthetic construct
  source 1..75: mol_type = other DNA
aacagcggcatccctttgcgtactgacagtaatttccctatccagcatgacaaggtgatcatcgtggataatgtg

SEQ ID NO: 871675 - DNA, 75 bp, synthetic construct
  source 1..75: mol_type = other DNA
ggtgaaagcctttcagcgtatcgtgcgtcgggcgggaattttcgacaaagaagtgtgtattcatacctgtcgcca

SEQ ID NO: 871676 - DNA, 75 bp, synthetic construct
  source 1..75: mol_type = other DNA
aatgctatttctgccgaaacgatgcgtacttttgacaaagcctgcctgaccagcgtgcaagacttacaacctgtt

SEQ ID NO: 871677 - DNA, 75 bp, synthetic construct
  source 1..75: mol_type = other DNA
ctgatggcacagctgggggtaacgcgtctggtggatctgattggtcgcaccgacctgctgaaagagctggacggt

SEQ ID NO: 871678 - DNA, 75 bp, synthetic construct
  source 1..75: mol_type = other DNA
attgatgaccttaatgggattgttgatcgtgctgtgttggctgccgctggcgacgcggatgtcgcagcagggaca

SEQ ID NO: 871679 - DNA, 75 bp, synthetic construct
  source 1..75: mol_type = other DNA
gcgcagcagacagaacggcgcaatcagcgggcgcagctgattgccgaaagacttgaaaaagcgcaaatacctggg

SEQ ID NO: 871680 - DNA, 75 bp, synthetic construct
  source 1..75: mol_type = other DNA
ggagtatttgtactgccaacgtatccaacatcactggctgccatggaatttgatactaccggcacaactcgtgta

SEQ ID NO: 871681 - DNA, 75 bp, synthetic construct
  source 1..75: mol_type = other DNA
ccatgcaggcgcaaatcatgcaggacgtgcagcggatgcaggccaacgcccaggcgccggtgctgcccgccatga

SEQ ID NO: 871682 - DNA, 75 bp, synthetic construct
  source 1..75: mol_type = other DNA
atttgaactcaacggcgcaattaccgacaactggcagctgacgtttggcgcaacgcgctatattgcagaggataa

SEQ ID NO: 871683 - DNA, 75 bp, synthetic construct
  source 1..75: mol_type = other DNA
tcgcgcttgatccgaatgctaacgtcatgtcacaggctgactgggaagcgcttccggcgctgctgtctggcttta

SEQ ID NO: 871684 - DNA, 75 bp, synthetic construct
  source 1..75: mol_type = other DNA
tgttgaacttgtacgtctgagcggtcgcgagacgttacggcaactggaagcgaaaacaggtgcgacaagatatct

SEQ ID NO: 871685 - DNA, 75 bp, synthetic construct
  source 1..75: mol_type = other DNA
cggaaacgcgtccggtcgatgcaccgcgcacgcgcctgcttaccagttataaaacgcttttcggtaacagcggtt

SEQ ID NO: 871686 - DNA, 75 bp, synthetic construct
  source 1..75: mol_type = other DNA
tgctattgatgttgatattactcgtagctgtcggtcagatggcacaaaccatttatattccagctattgccgata

SEQ ID NO: 871687 - DNA, 75 bp, synthetic construct
  source 1..75: mol_type = other DNA
acgccagctatacctctattttccagccgcaaatgatcgtgacagttcaggcaaatatctggctccaatcaccgg

SEQ ID NO: 871688 - DNA, 75 bp, synthetic construct
  source 1..75: mol_type = other DNA
caccagcatagtgaggagctcattgaatttgccattgattacctgaagaacaataaaaagcaggggctgatgaag

SEQ ID NO: 871689 - DNA, 75 bp, synthetic construct
  source 1..75: mol_type = other DNA
cagttaacttatccgcctctgattttcatacttcaagggtgattgccctaaccaatcaaaaaatcgagcaattta

SEQ ID NO: 871690 - DNA, 75 bp, synthetic construct
  source 1..75: mol_type = other DNA
tgttgtcggcagattacagcgctttagctctgggcctggggaaaaacttcggtaccattggcgcagtatcggtgg

SEQ ID NO: 871691 - DNA, 75 bp, synthetic construct
  source 1..75: mol_type = other DNA
gtggtggagtcattgttcacagtgaaggtatcactctctcgcaacccttgggtgaaagtctggcaattgtttctg

SEQ ID NO: 871692 - DNA, 75 bp, synthetic construct
  source 1..75: mol_type = other DNA
agcagtacgcaggcggcgaaggtgaaaaaaggcgacgccgttcccgttgtcgttaccgtgaaagacagtgtcggg

SEQ ID NO: 871693 - DNA, 75 bp, synthetic construct
  source 1..75: mol_type = other DNA
acagatataaatgggatagtgctcatgaaatggggcataaagtactcgatgaatatggagagggttctagccctg

SEQ ID NO: 871694 - DNA, 75 bp, synthetic construct
  source 1..75: mol_type = other DNA
aaaacgcttttcggtaacagcggttttaactgttatttgctgatgctgattggcggtctggccgggattgccgcc

SEQ ID NO: 871695 - DNA, 75 bp, synthetic construct
  source 1..75: mol_type = other DNA
ctgaaagaacagcacccggaaatgactcaatatcatattattcaaaactggctgtggctgggggcggttaattcg

SEQ ID NO: 871696 - DNA, 75 bp, synthetic construct
  source 1..75: mol_type = other DNA
ggcgggcatctgccatcgatgagtggctgatgttacatacggcaccagcctggtctgaacctgaaaacaaacgaa

SEQ ID NO: 871697 - DNA, 75 bp, synthetic construct
  source 1..75: mol_type = other DNA
aaaagctaaatcccgaatccaggtattacgacgaaacgtttccaaaacccgtgagactcggtgctgcctccgttg

SEQ ID NO: 871698 - DNA, 75 bp, synthetic construct
  source 1..75: mol_type = other DNA
attaacgatctctacgcaacctccggcagcggtgacttgacggtgatcattaaagaatctgacggaagtgaacaa

SEQ ID NO: 871699 - DNA, 75 bp, synthetic construct
  source 1..75: mol_type = other DNA
atgaccactatcatcatcaacccggaactcttcggcgcgccggattgtaacgcgcagaccgaagcctttgccgag

SEQ ID NO: 871700 - DNA, 75 bp, synthetic construct
  source 1..75: mol_type = other DNA
tggcctgttgggactggaaccgttaagtcgcggtcgtgcatgttttcgttcagcgctaaaacgttgcgccggagc

SEQ ID NO: 871701 - DNA, 75 bp, synthetic construct
  source 1..75: mol_type = other DNA
gcgtaatagcggggcgacgttgtatggcgatgtggatacaatggacgatttgactgtacaaccctcatccggtgc

SEQ ID NO: 871702 - DNA, 75 bp, synthetic construct
  source 1..75: mol_type = other DNA
ccgaagcgccagccaggaagaagaaaaagaaaagacaccgttttccacgtccctcccactggacccgtgagtata

SEQ ID NO: 871703 - DNA, 75 bp, synthetic construct
  source 1..75: mol_type = other DNA
cagcgcgtcagcatcgcgcgggcattgatgaacggtggtcaggtaattcttgccgatgaaccaaccgcgcactgg

SEQ ID NO: 871704 - DNA, 75 bp, synthetic construct
  source 1..75: mol_type = other DNA
cgttgatatttgttttatctgggtgtggagataataccgatcctgctgatacgtccaccacagctaaggagcacg

SEQ ID NO: 871705 - DNA, 75 bp, synthetic construct
  source 1..75: mol_type = other DNA
tcgtaattttaatactccaccctttaaaaaagtgccggcttactggcttcatcccggactgacttatctgaaagt

SEQ ID NO: 871706 - DNA, 75 bp, synthetic construct
  source 1..75: mol_type = other DNA
aaattttctaatattcgtaccaatgaagacaatagccaaattttctttgatgtttttgtaggtgatgttcataaa

SEQ ID NO: 871707 - DNA, 75 bp, synthetic construct
  source 1..75: mol_type = other DNA
cgatctctgtccacgtcatttaatcggccacgaactggctccccatttactagtacgtgcggttaactaccaaca

SEQ ID NO: 871708 - DNA, 75 bp, synthetic construct
  source 1..75: mol_type = other DNA
ggtaagtaataataatgagtcgtggtcataccttttttataccaataaagttacgccggattgcccggttgagta

SEQ ID NO: 871709 - DNA, 75 bp, synthetic construct
  source 1..75: mol_type = other DNA
tactctggctaattacgcttccgcgacagacacgctggacgctatttttacggtgccaaccagcccaaatgtttc

SEQ ID NO: 871710 - DNA, 75 bp, synthetic construct
  source 1..75: mol_type = other DNA
aaaccaccactgtccttgatgcgatcttcaccgttgtcaccagccctgattccgcaatggcggcctactggggtc

SEQ ID NO: 871711 - DNA, 75 bp, synthetic construct
  source 1..75: mol_type = other DNA
gatgggggcgttgatcggttcactggacagtccggtaaccaagactactggcggcctgttagtgttacccaaatc

SEQ ID NO: 871712 - DNA, 75 bp, synthetic construct
  source 1..75: mol_type = other DNA
tggcgaactggcgcgatgcgggacttactggcattaacgtcagtgtcgacagtctggacgcccgccagtttcacg

SEQ ID NO: 871713 - DNA, 75 bp, synthetic construct
  source 1..75: mol_type = other DNA
gcaccggcgttggcggcgtaatggcgcgtactttgccgcgcgatttatatgaacggacacagttgcgccacgcta

SEQ ID NO: 871714 - DNA, 75 bp, synthetic construct
  source 1..75: mol_type = other DNA
cgtgccaggaaaactacagacagcggatttgaagcgtttcttggtgtggaaaatgccggggacgatgaagcagaa

SEQ ID NO: 871715 - DNA, 75 bp, synthetic construct
  source 1..75: mol_type = other DNA
ttgaactgctctgtaaaattcgcacaggagaaacactgacgacaaaagaagttgttgttaatgagaagaaaacaa

SEQ ID NO: 871716 - DNA, 75 bp, synthetic construct
  source 1..75: mol_type = other DNA
tagcaaatgatattgttaaggcgcttgggggcaattttacccgtcatgatggctggtttgaaagtgataatacta

SEQ ID NO: 871717 - DNA, 75 bp, synthetic construct
  source 1..75: mol_type = other DNA
ctgacaaaaggtattacaggggagctaaaagggtttgttagttccaggacgaataaagaattttcggctaaagtt

SEQ ID NO: 871718 - DNA, 75 bp, synthetic construct
  source 1..75: mol_type = other DNA
ggtgactgcgcatactgcgataatcccgactgccagtgtgcctgatgttaacgcactcagcaccgacgagcgcaa

SEQ ID NO: 871719 - DNA, 75 bp, synthetic construct
  source 1..75: mol_type = other DNA
catcgaacagttcgttgacgaactgtacaatgatctgataccgatgatcagtaatgcgaacagtgctgaaataaa

SEQ ID NO: 871720 - DNA, 75 bp, synthetic construct
  source 1..75: mol_type = other DNA
accgctataaacaacgtttctttggcgactttctggagcttcccggcctgacggaaatcgccgtcaaccgtccag

SEQ ID NO: 871721 - DNA, 75 bp, synthetic construct
  source 1..75: mol_type = other DNA
atgttacaggtatacctagtccgccacggtgaaacgcagtggaacgccgagcgacgtattcagggccagtctgac

SEQ ID NO: 871722 - DNA, 75 bp, synthetic construct
  source 1..75: mol_type = other DNA
gggcgtgattaccgtggacgatttaccggcgggctggggactgttgtatgtgattaacgggcgggtcagaaagat

SEQ ID NO: 871723 - DNA, 75 bp, synthetic construct
  source 1..75: mol_type = other DNA
taacgataatatcgaggatatcaaaccaggactttctgcaacactggaatcaggagaacgatgtcaggttgtcgt

SEQ ID NO: 871724 - DNA, 75 bp, synthetic construct
  source 1..75: mol_type = other DNA
atcatggggcatagttcagggtctattacttacgaccgttatgctaaagaggtcgaggttgataggctggtcaat

SEQ ID NO: 871725 - DNA, 75 bp, synthetic construct
  source 1..75: mol_type = other DNA
aaccagaagttacgcctagcattaccatagcgagcctctttgagcaatacgaagcggagaactatcagaactgga

SEQ ID NO: 871726 - DNA, 75 bp, synthetic construct
  source 1..75: mol_type = other DNA
gtggtatggctgctgttgaacaaccggaaaaaccggctgctcagcctaaaaagcagcagcgtaaaggccgtaaat

SEQ ID NO: 871727 - DNA, 75 bp, synthetic construct
  source 1..75: mol_type = other DNA
aaagcaaggcgtttaacagtgcaaaggtgactgcgcatactgcgataatcccgaccgccagtgtgcctgatgtta

SEQ ID NO: 871728 - DNA, 75 bp, synthetic construct
  source 1..75: mol_type = other DNA
ccgaccgctaatgtgcctgatatcaacgcactaacacccgacgaacgcaatgtttacctggcgattgcacaacac

SEQ ID NO: 871729 - DNA, 75 bp, synthetic construct
  source 1..75: mol_type = other DNA
tggacgtgtccagacacctgttcttggcctgattgtgaatcgtacccgtgccaacaaaaatcataaatccagtgt

SEQ ID NO: 871730 - DNA, 75 bp, synthetic construct
  source 1..75: mol_type = other DNA
ttaagggatttaaaaagaaaagcggtggaacgtatgatacagttcttgttcttgaggataagaaaacagggaagc

SEQ ID NO: 871731 - DNA, 75 bp, synthetic construct
  source 1..75: mol_type = other DNA
tatggtgaactggcagacatgataactgatgttgacctgggtgatatgaagattgaacccgcagcgccagcggga

SEQ ID NO: 871732 - DNA, 75 bp, synthetic construct
  source 1..75: mol_type = other DNA
tgaaatagtctcttatatcgaccttggtggaagttttggtgaggtacaatctcttccaggcgaacctaaagaaag

SEQ ID NO: 871733 - DNA, 75 bp, synthetic construct
  source 1..75: mol_type = other DNA
aggctgctattgaaaatggtgatctgacggttgaagagtttattaatgagctttacggtgaactgagcggcatga

SEQ ID NO: 871734 - DNA, 75 bp, synthetic construct
  source 1..75: mol_type = other DNA
gataaaaaaacggctgcaccattgccctttaacctggtccggcttcagcagtacatgaacaaaaagttcaaactg

SEQ ID NO: 871735 - DNA, 75 bp, synthetic construct
  source 1..75: mol_type = other DNA
ctaacaaaaggtattacaggggagctaaaggggtttgttagttccaggacgaataaagaattttcggctaaagtt

SEQ ID NO: 871736 - DNA, 75 bp, synthetic construct
  source 1..75: mol_type = other DNA
aaaggaaaactcattccgacagataccggatatgcgcttattgatgctctgccggatatagctgttaatccagat

SEQ ID NO: 871737 - DNA, 75 bp, synthetic construct
  source 1..75: mol_type = other DNA
gacggttgaacagtttattaatgagttgtacggtgaactgacaggcatgatttctgacgttgacctaggcgaaat

SEQ ID NO: 871738 - DNA, 75 bp, synthetic construct
  source 1..75: mol_type = other DNA
agcgattacttataaccgctctgattgctcatatctttctgatgaacaattcagcgaagcgccgcaggttatcga

SEQ ID NO: 871739 - DNA, 75 bp, synthetic construct
  source 1..75: mol_type = other DNA
cgattatctgttcagtgcactacgccgactggaaatccggggtgtgacagagaacggtacagatgctgacaggat

SEQ ID NO: 871740 - DNA, 75 bp, synthetic construct
  source 1..75: mol_type = other DNA
cgttgatgaacgtcgctggatgcgctttggctgcgccacccgtccaatccccaacttgccagaagcgcgcgccag

SEQ ID NO: 871741 - DNA, 75 bp, synthetic construct
  source 1..75: mol_type = other DNA
gggttatcactggaaacggccgctaaactaagtgaagtcatgccaggagctggcggacgttcctgcctggaacgc

SEQ ID NO: 871742 - DNA, 75 bp, synthetic construct
  source 1..75: mol_type = other DNA
tgcctaaatcggttgctgcccgtggtgttgatgaacgccgctggatgcgcttcggttgcgctactcgcccaatcc

SEQ ID NO: 871743 - DNA, 75 bp, synthetic construct
  source 1..75: mol_type = other DNA
cgcatgattcgcaaaactcacaaaatcaaactgtgctgttagatccggctcagtttgatgccatcgttaccgcta

SEQ ID NO: 871744 - DNA, 75 bp, synthetic construct
  source 1..75: mol_type = other DNA
tggccgcacccttatcaacgtcaaagcatggcgtgacaaactgacccagcaagctatcgattgccgttatatcaa

SEQ ID NO: 871745 - DNA, 75 bp, synthetic construct
  source 1..75: mol_type = other DNA
ttcggttgcgctactcgcccaatcccgaatctaccagaagcgcgcgccagccggatgtgttcatcgccggaaacc

SEQ ID NO: 871746 - DNA, 75 bp, synthetic construct
  source 1..75: mol_type = other DNA
tgatcctcaggccaaagatatcagtcatttgctggcttttacttgtcaaccagaacgacatgatgaactgttaac

SEQ ID NO: 871747 - DNA, 75 bp, synthetic construct
  source 1..75: mol_type = other DNA
aagtttatttatactgaatgttgcagcattaccaacgttggaaaatagtcattcagtcaaaattgataatcaatt

SEQ ID NO: 871748 - DNA, 75 bp, synthetic construct
  source 1..75: mol_type = other DNA
atgcgtcagtatcgtttattgtcacctatgattaaggtagtcatagtattattttcccttttattctctacagca

SEQ ID NO: 871749 - DNA, 75 bp, synthetic construct
  source 1..75: mol_type = other DNA
tcatggcgatctagaaaaggcaaaagaactgaccaatgaagcttccgctttgctgtcagatgacagtaccgaatg

SEQ ID NO: 871750 - DNA, 75 bp, synthetic construct
  source 1..75: mol_type = other DNA
caaggtttatatgcgatgcgtgacgtgcaggtagcgcgcctggctctgtttcatggcgatctagaaaaggcaaaa

SEQ ID NO: 871751 - DNA, 75 bp, synthetic construct
  source 1..75: mol_type = other DNA
aagaactgaacgaataccagcaaaacgttcagcgcagcctcgatatccaacagcgtagcgttcaacaattagcga

SEQ ID NO: 871752 - DNA, 75 bp, synthetic construct
  source 1..75: mol_type = other DNA
tgactgacacatgcactaatactggtgtcctccaaacagaggtcaccttcaatgctcgatttcgcttgtatgtaa

SEQ ID NO: 871753 - DNA, 75 bp, synthetic construct
  source 1..75: mol_type = other DNA
agttatggtgctaatcctgttcttgtgcaagataaactaaaaaatgctaaggtagtaattcttggttgtgggggt

SEQ ID NO: 871754 - DNA, 75 bp, synthetic construct
  source 1..75: mol_type = other DNA
ccaggcgcgaatctttaaatttgcgcataaaacccgcagaacgcgatcttattgaccgggccgctaaagcccgag

SEQ ID NO: 871755 - DNA, 75 bp, synthetic construct
  source 1..75: mol_type = other DNA
cgaatgtgacggtgccttttaaagaagaagcttttgccagagcagatgaacttactgagcgggcggcgttggctg

SEQ ID NO: 871756 - DNA, 75 bp, synthetic construct
  source 1..75: mol_type = other DNA
ccaaaattaaaaagctgttacgccttgccagaggaacatcaagcccggaagaagccgctaacgctattgcaaaag

SEQ ID NO: 871757 - DNA, 75 bp, synthetic construct
  source 1..75: mol_type = other DNA
cccgtgatgtcattgcggtgtatgacgtctccccggaagaaaaaagccgccttgagctttacagaaagaacctgc

SEQ ID NO: 871758 - DNA, 75 bp, synthetic construct
  source 1..75: mol_type = other DNA
aaatttcggtgtctgaaatcgctttgaatataaacgattacactgatcttcataaggtaccagaagctgatatat

SEQ ID NO: 871759 - DNA, 75 bp, synthetic construct
  source 1..75: mol_type = other DNA
gaattaagccaaaaaccaggtgactctctggtctatggtccgttccagaaagacctgatcgttaaaatcaactac

SEQ ID NO: 871760 - DNA, 75 bp, synthetic construct
  source 1..75: mol_type = other DNA
tttaaccaattcaaattttttagcgcttatattcccggacaaagtgcagcaatagcaacccgcaattatcatgcc

SEQ ID NO: 871761 - DNA, 75 bp, synthetic construct
  source 1..75: mol_type = other DNA
cgattctttgcctgttttttaacgtttcagcttttgctgttgattgctatcaggatgggtacagaggaacaaccc

SEQ ID NO: 871762 - DNA, 75 bp, synthetic construct
  source 1..75: mol_type = other DNA
atccgattgcacatagcaaatcgccattcattcatcagcaatttgcgcagcagctgaatattgaacatccctatg

SEQ ID NO: 871763 - DNA, 75 bp, synthetic construct
  source 1..75: mol_type = other DNA
cattgttgcgttttcttattggtcttgttcctttgtttattggctatgtggcgagttttttagctcgacttgcta

SEQ ID NO: 871764 - DNA, 75 bp, synthetic construct
  source 1..75: mol_type = other DNA
ttaacctttggcgtgacttataatggtgtagattatgaagggataaatgaaagaattgatactcatgcatgcctg

SEQ ID NO: 871765 - DNA, 75 bp, synthetic construct
  source 1..75: mol_type = other DNA
aagctacctacgcaatgtacttgacgtcatagcagactggccggtgaaccgggtcagcgaactgctcccgtggcg

SEQ ID NO: 871766 - DNA, 75 bp, synthetic construct
  source 1..75: mol_type = other DNA
aagctacctacgcaatgtacttgacgtcatagcagactggccgctgaaccgggtcagcgaactgctcccctggcg

SEQ ID NO: 871767 - DNA, 75 bp, synthetic construct
  source 1..75: mol_type = other DNA
aagctacctacgcaatgtacttgacgtcatagcagactggccgatgaaccgggtcagcgaactgctcccatggcg

SEQ ID NO: 871768 - DNA, 75 bp, synthetic construct
  source 1..75: mol_type = other DNA
aagctacctacgcaatgtacttgacgtcatagcggactggccggtgaaccgggtcagcgaactgctcccatggcg

SEQ ID NO: 871769 - DNA, 75 bp, synthetic construct
  source 1..75: mol_type = other DNA
aagctacctacgcaatgtacttgacgtcatagccgactggccgctgaaccgggtcagcgaactgctcccatggcg

SEQ ID NO: 871770 - DNA, 75 bp, synthetic construct
  source 1..75: mol_type = other DNA
aagctacctacgcaatgtacttgacgtcatagctgactggccggtgaaccgggtcagcgaactgctcccttggcg

SEQ ID NO: 871771 - DNA, 75 bp, synthetic construct
  source 1..75: mol_type = other DNA
gtagatcgttagctcaggtggcttcacagactcttagacctgcgtttaccagagctgcaacgcaagcgggtatgg

SEQ ID NO: 871772 - DNA, 75 bp, synthetic construct
  source 1..75: mol_type = other DNA
ggaacttcaatggcttaaaagtcagtgatataaaagagattactcagaatgcgattttagagcatgtacaggata

SEQ ID NO: 871773 - DNA, 75 bp, synthetic construct
  source 1..75: mol_type = other DNA
ttacagcaacctcttgatataaacggggcgcaatcatcaattggtcacttcttgcagtctaataaatactttaat

SEQ ID NO: 871774 - DNA, 75 bp, synthetic construct
  source 1..75: mol_type = other DNA
tccgtatctcgtatcgttatcgagcgtccggccaagagcatccgtgtaaccattcacactgctcgcccgggtatc

SEQ ID NO: 871775 - DNA, 75 bp, synthetic construct
  source 1..75: mol_type = other DNA
cggctgttcagtgccaaacgtgaaggtgatgcacagacagaagttgcgtgctgggtccatgcccggcgaaaaata

SEQ ID NO: 871776 - DNA, 75 bp, synthetic construct
  source 1..75: mol_type = other DNA
acgaagaccgggcggttgtgggcgtatgttcgtgatgaccgcaatgccgggtcagcgttggcacctgcagtgtgg

SEQ ID NO: 871777 - DNA, 75 bp, synthetic construct
  source 1..75: mol_type = other DNA
ccagaaaaatggctgcgttacgttattgagcatatccaggactggccggcaaaccgggtacgcgatctgttgccc

SEQ ID NO: 871778 - DNA, 75 bp, synthetic construct
  source 1..75: mol_type = other DNA
cagaggaacggcaggcagtccggcaccaaaaagcgctgccgctgctggcgtcactggaggggtggctgcgggaga

SEQ ID NO: 871779 - DNA, 75 bp, synthetic construct
  source 1..75: mol_type = other DNA
agaaaacgaagaccgggcggttatggacctacgttcgtgacgaccgtaacgccgggtcaacgctggcgccggcga

SEQ ID NO: 871780 - DNA, 75 bp, synthetic construct
  source 1..75: mol_type = other DNA
cagagcacaccccgctgtatcgccagtcagaaatatacgaccggcaaggtgtggagctgagccgttcactgctgt

SEQ ID NO: 871781 - DNA, 75 bp, synthetic construct
  source 1..75: mol_type = other DNA
tgtcgcgacactcagagttggcgaaggcgttcgcgtacgcacttaaccagtggccggcactgaaccgccccggaa

SEQ ID NO: 871782 - DNA, 75 bp, synthetic construct
  source 1..75: mol_type = other DNA
ggtggtatggctgctgttgaacaaccggaaaaaccggctgctcagcctaaaaagcagcgtaaaggccgtaaataa

SEQ ID NO: 871783 - DNA, 75 bp, synthetic construct
  source 1..75: mol_type = other DNA
gaactgtacgccatcgaggcagagataaggggaatgacggcggagcaacgccttgccgaacgtcagttgaaaacg

SEQ ID NO: 871784 - DNA, 75 bp, synthetic construct
  source 1..75: mol_type = other DNA
gtctgggccgcaaaaactacctgttcttcggttcggatcatggaggagagcggggagcgctgctgtacagcctga

SEQ ID NO: 871785 - DNA, 75 bp, synthetic construct
  source 1..75: mol_type = other DNA
cgctgacgtactatgcagatgatggctgggctgaggcggacaataacatcgctgaaaatgcgttgcggatggtca

SEQ ID NO: 871786 - DNA, 75 bp, synthetic construct
  source 1..75: mol_type = other DNA
gaaagctaccttcgccatgtgcttggcgtcatagcagactggccggtcaaccgggtcagcgaactgcttccgtgg

SEQ ID NO: 871787 - DNA, 75 bp, synthetic construct
  source 1..75: mol_type = other DNA
ccggggctgctggcccgagtgctgacctcaaagtatgcagagcacacaccgctgtatcgccagtcggagatctat

SEQ ID NO: 871788 - DNA, 75 bp, synthetic construct
  source 1..75: mol_type = other DNA
atcgggacgtgcaaactgaaaggagtggagccagaaagctacctccgctatgtccttgacgtcattgctgactgg

SEQ ID NO: 871789 - DNA, 75 bp, synthetic construct
  source 1..75: mol_type = other DNA
tatggcaaactgactaatcagctactacagactgtagccaaacaaactcgtggtggcgatacccagcaatggttc

SEQ ID NO: 871790 - DNA, 75 bp, synthetic construct
  source 1..75: mol_type = other DNA
cgcggagatattacagtaggtggtgaaactgtcagtattgtgtatgatgctactaatgggcgcttttcatccagt

SEQ ID NO: 871791 - DNA, 75 bp, synthetic construct
  source 1..75: mol_type = other DNA
ttgtatgtagtttatttgatgttactgcattttctcggttagttagtgaaaaatcacctcacccactgacacgag

SEQ ID NO: 871792 - DNA, 75 bp, synthetic construct
  source 1..75: mol_type = other DNA
aatatctcaatgtaagttttctgttaatccagatgaccttcagtgcccgcctgaggctgctcaatgtccaattac

SEQ ID NO: 871793 - DNA, 75 bp, synthetic construct
  source 1..75: mol_type = other DNA
cgtctggagccgggtatctgcctgcatttaatcgccaaagaacaagcagaacgcgctgcggcgcaaagtgaaccg

SEQ ID NO: 871794 - DNA, 75 bp, synthetic construct
  source 1..75: mol_type = other DNA
gcgctggcggtgagaatgcaggagatgtttggtgaggccaccaatccgacgatcgcccaggggcgcgtgccgctg

SEQ ID NO: 871795 - DNA, 75 bp, synthetic construct
  source 1..75: mol_type = other DNA
gttgacggtgaaagtgcagccgctggcgaaaccctcggaagacgagttgcatcaggcgatgcttaacggcattcg

SEQ ID NO: 871796 - DNA, 75 bp, synthetic construct
  source 1..75: mol_type = other DNA
tgtacaggatgtgaatttaaaatctggaatgagttttctggcaagaaaatcacccaggcacaggccgaaaaactt

SEQ ID NO: 871797 - DNA, 75 bp, synthetic construct
  source 1..75: mol_type = other DNA
ttactacaccatgaccggacattttcagcgcggcgcagatattatcagggcgaactggaaacctggtgagtttgc

SEQ ID NO: 871798 - DNA, 75 bp, synthetic construct
  source 1..75: mol_type = other DNA
cttgatggcgattatcgcctgcgcagcggaatgaaaaccgcgaacggcaacgtggtgcgcttttttgaagtgatg

SEQ ID NO: 871799 - DNA, 75 bp, synthetic construct
  source 1..75: mol_type = other DNA
cccgaagaaggagtgtttgtcaaaaattcagatagttcaccagtatgcactttatgtgatgtttatgcactttct

SEQ ID NO: 871800 - DNA, 75 bp, synthetic construct
  source 1..75: mol_type = other DNA
aatccagatgaccttcagtgcccgccagagtctgctcaatgtcccattacattggagataccagaggaaggggtg

SEQ ID NO: 871801 - DNA, 75 bp, synthetic construct
  source 1..75: mol_type = other DNA
attcagatggttcagatgtatgtactttatttgatgccgctgcattttctcgtttggttggtgaaggcttacccc

SEQ ID NO: 871802 - DNA, 75 bp, synthetic construct
  source 1..75: mol_type = other DNA
caaccacatcagcttttcctgccgggactcagtcatccatttgtcgctgtactgccacaggaagcgggtaccttt

SEQ ID NO: 871803 - DNA, 75 bp, synthetic construct
  source 1..75: mol_type = other DNA
gggatgaataagtggctgcatcgtaatggtttcacctgcaaaaaaccgtcaggcgttccccataaattcagtgaa

SEQ ID NO: 871804 - DNA, 75 bp, synthetic construct
  source 1..75: mol_type = other DNA
tcagcgaattcctgaataaaggaaaactgaagcccgaaaacggcggctcagacagcaaactcagtgctgaaaaaa

SEQ ID NO: 871805 - DNA, 75 bp, synthetic construct
  source 1..75: mol_type = other DNA
cgggctcgataaagaccagtacagcattctgtgggtggagcacaccgacaaggggcggctggagctgaatttcct

SEQ ID NO: 871806 - DNA, 75 bp, synthetic construct
  source 1..75: mol_type = other DNA
cggcggcaaatgcaggcccgacgggtgttacagcagatgagtgatgaacggttgagggagactgggttatgctgg

SEQ ID NO: 871807 - DNA, 75 bp, synthetic construct
  source 1..75: mol_type = other DNA
cggcggcaaatgcaggcccgacgggtgttacagcagatgagtgatgaacggttgagggagattgggttacgctgg

SEQ ID NO: 871808 - DNA, 75 bp, synthetic construct
  source 1..75: mol_type = other DNA
actctggcaggcggtgagaagctggtggctgaaaaagcagacccggcgcgtgttacagcagatgagtgatgagcg

SEQ ID NO: 871809 - DNA, 75 bp, synthetic construct
  source 1..75: mol_type = other DNA
tcatcagcgttttgatgaagccgtggcggttgccaccgccgaattgctgcatcaggaaagcggctcattactgtt

SEQ ID NO: 871810 - DNA, 75 bp, synthetic construct
  source 1..75: mol_type = other DNA
agctggctggatcaaccgccaacggtgaatctacaggccgcgaaacggctgttacaaatgctgggggcactggac

SEQ ID NO: 871811 - DNA, 75 bp, synthetic construct
  source 1..75: mol_type = other DNA
gcgaaaccctcggaagacgagttgcatcaggcgatgcttaacggcattcgtgataaaggtttaagcgtgctcaac

SEQ ID NO: 871812 - DNA, 75 bp, synthetic construct
  source 1..75: mol_type = other DNA
cggcggcaaatgcagacccgacgagtgttacagcaaatgagtgatgaacggttgagggatattgggttacgcagg

SEQ ID NO: 871813 - DNA, 75 bp, synthetic construct
  source 1..75: mol_type = other DNA
gcgctggcggtgagaatgcaggagatgtttggtgaggcctctaatccgactatcgcccaggggcgcgtaccgttg

SEQ ID NO: 871814 - DNA, 75 bp, synthetic construct
  source 1..75: mol_type = other DNA
gcgctgccggtcgatattgatgagttagtacaacgctgcccgcagctggtacagcagtctgacaccgtggaatgg

SEQ ID NO: 871815 - DNA, 75 bp, synthetic construct
  source 1..75: mol_type = other DNA
ttatttatgcaggaaccgggtcaatcaatacatcagatgaaactcttaaaacaagatatgatattcttaatgcag

SEQ ID NO: 871816 - DNA, 75 bp, synthetic construct
  source 1..75: mol_type = other DNA
atgacagacattacagccaatgttgtggtaagcatgccatcgcaactcttcactatggcgcgttcttttaaagct

SEQ ID NO: 871817 - DNA, 75 bp, synthetic construct
  source 1..75: mol_type = other DNA
gcttcatcggcgctcgtatgcgccagcaacatgccgtggtcaccggtcactggcaggataaacaagctcatgaac

SEQ ID NO: 871818 - DNA, 75 bp, synthetic construct
  source 1..75: mol_type = other DNA
aaatcaccgctatttgccgcgacgcgaattacgacgatcgttgcgctggtctggtggtatggctgcacaccttct

SEQ ID NO: 871819 - DNA, 75 bp, synthetic construct
  source 1..75: mol_type = other DNA
cgcatggtgcgcagcctggtgatttcactgcgccagcgcgagtttgtgctggcatcacggctttctggcgcgggc

SEQ ID NO: 871820 - DNA, 75 bp, synthetic construct
  source 1..75: mol_type = other DNA
ggttcggtaatggcctgcctgctgctggtgctgacattagggctggttattggcggcagcgccgggctgattggc

SEQ ID NO: 871821 - DNA, 75 bp, synthetic construct
  source 1..75: mol_type = other DNA
cagcactggctgggtaccgatcatttagggcgcgatattttctcgcggctgatggcggcgacccgcgtgtcgctc

SEQ ID NO: 871822 - DNA, 75 bp, synthetic construct
  source 1..75: mol_type = other DNA
gacatagataactttggtatggcgggaaagcaattttttgattgctacattaccagcctgtatcaccacacacat

SEQ ID NO: 871823 - DNA, 75 bp, synthetic construct
  source 1..75: mol_type = other DNA
ataactcagcatgaaaacaatgctcttttcttaaatgtaaaacaatttggagcaattggggatgggaaatatcat

SEQ ID NO: 871824 - DNA, 75 bp, synthetic construct
  source 1..75: mol_type = other DNA
tgaccaacgtgattatcgccatcgccctgtcgcactgggcgtggtacgcgcgcatggtgcgcagcctggtgattt

SEQ ID NO: 871825 - DNA, 75 bp, synthetic construct
  source 1..75: mol_type = other DNA
cgttcagcatctcggtattggcggtaaagacgatcctgtccgcctgatcttcaacactcaaaccggtccagccat

SEQ ID NO: 871826 - DNA, 75 bp, synthetic construct
  source 1..75: mol_type = other DNA
tgcgcactgacggcacggtaacgcagccgcgtttaaaacaggttgccctgtcggcaatttcggaggtcaacgcag

SEQ ID NO: 871827 - DNA, 75 bp, synthetic construct
  source 1..75: mol_type = other DNA
gcagaggttccggcggagcagctggacggcaaaagtgagcgcattcagtactatttcaacgcggtttactgctgg

SEQ ID NO: 871828 - DNA, 75 bp, synthetic construct
  source 1..75: mol_type = other DNA
gcacgcgccatgctcaacgaacgataccaggactatgacgctacggcatccggtgtgaagcgaggcgaggaactg

SEQ ID NO: 871829 - DNA, 75 bp, synthetic construct
  source 1..75: mol_type = other DNA
ctggacgttattgctggcgaaagatggtgtggcgcagtggtttttacaacatctggggctggaaccactgctgac

SEQ ID NO: 871830 - DNA, 75 bp, synthetic construct
  source 1..75: mol_type = other DNA
tcggcaatttcggaggtcaacgctgagctgtatgagtttcgcagacgccagcagatgctggggtatgcctcgctg

SEQ ID NO: 871831 - DNA, 75 bp, synthetic construct
  source 1..75: mol_type = other DNA
gcacgcgccatgctcaacgagcgttatcaggactatgacgccacagcgtctggtgtgaagcgaggcgaggaactg

SEQ ID NO: 871832 - DNA, 75 bp, synthetic construct
  source 1..75: mol_type = other DNA
cgtacagcgtctgatgcagcagggttacggctttgcgggagaaggcgactggaaaaccgccgccctgcttcgcat

SEQ ID NO: 871833 - DNA, 75 bp, synthetic construct
  source 1..75: mol_type = other DNA
attgataacgacacccgcctgcccgcgtttaaagacgcgctgcgctggaacgaagtgtattacgggtttcgccgc

SEQ ID NO: 871834 - DNA, 75 bp, synthetic construct
  source 1..75: mol_type = other DNA
atacccgtttgctgaccgctcagcgcgaacaattggtgctggagcgagacgctttagacattgaatggcgcaacc

SEQ ID NO: 871835 - DNA, 75 bp, synthetic construct
  source 1..75: mol_type = other DNA
cggtgcgaagcggggcgaggaactggcggaagccagcggtgatttatggcgtgacgcccgctgggccatcagccg

SEQ ID NO: 871836 - DNA, 75 bp, synthetic construct
  source 1..75: mol_type = other DNA
ggtcggtacgcctggcgctgatcattatcgccctgctggcactgattgcgctcaccagccagtggtggctgccgt

SEQ ID NO: 871837 - DNA, 75 bp, synthetic construct
  source 1..75: mol_type = other DNA
gggtattccacgaatttttccagcaggccgcaaaagcggttgccagtaaaggcttaagcatcgccctcccccttt

SEQ ID NO: 871838 - DNA, 75 bp, synthetic construct
  source 1..75: mol_type = other DNA
cccggaagcgcgtaatttgtggctgatttcacttaagctctggagttgcgaaggcgagattattgatgaacaaaa

SEQ ID NO: 871839 - DNA, 75 bp, synthetic construct
  source 1..75: mol_type = other DNA
gggccgcgatctgcaaatcttcaactcgctgaaagcgaatatggcagattacctgctacttgatggtgagttatg

SEQ ID NO: 871840 - DNA, 75 bp, synthetic construct
  source 1..75: mol_type = other DNA
tatcactggcaattatctcatgcatttacggattactcgtcccgtttctgatatcaatgaaggatacggtagcgg

SEQ ID NO: 871841 - DNA, 75 bp, synthetic construct
  source 1..75: mol_type = other DNA
gctctggcgtgtctgaccccgccctgcatttatgccatttataagggtctttctttttctaaggataaaaggtaa

SEQ ID NO: 871842 - DNA, 75 bp, synthetic construct
  source 1..75: mol_type = other DNA
gaacgagatatgttctctgcaaatcagcaatatcaaaacatttgaaggggtgtggtgttttgaagtgacggaggg

SEQ ID NO: 871843 - DNA, 75 bp, synthetic construct
  source 1..75: mol_type = other DNA
cacgcaggctgcagaacacttaccggttcgtatgccccgtctctgctctgcagagcgcctctctgaaagtatggt

SEQ ID NO: 871844 - DNA, 75 bp, synthetic construct
  source 1..75: mol_type = other DNA
gttcgcatgccccgtctctgctctgcagaacgcctctctgaaagtatggtcgatgagatatttcagaagggggct

SEQ ID NO: 871845 - DNA, 75 bp, synthetic construct
  source 1..75: mol_type = other DNA
cgcggtaacgcagaatgtctttttttcaccagaactgattcgtcgcctggcggatcggcacctggggatagggtt

SEQ ID NO: 871846 - DNA, 75 bp, synthetic construct
  source 1..75: mol_type = other DNA
tatcgatgagttacgtgataaggttgacctcaccgtggcgctggttcatgaaggcgtaccggcgcgtcagtccag

SEQ ID NO: 871847 - DNA, 75 bp, synthetic construct
  source 1..75: mol_type = other DNA
cggttaaaagaggggctgagcggcgaaggtactgcacggcagaatgccatcaatgcttcgcttgcacagggcgtt

SEQ ID NO: 871848 - DNA, 75 bp, synthetic construct
  source 1..75: mol_type = other DNA
ggctgacacgcgggagcagttactcactctggcagaacaggttcatcagaaactgaatcatcttgaagaaaaaaa

SEQ ID NO: 871849 - DNA, 75 bp, synthetic construct
  source 1..75: mol_type = other DNA
tatcactggcaattatcacatgtatttacggattaatcgttccggccctcatatcaatgaaggatacggtagcag

SEQ ID NO: 871850 - DNA, 75 bp, synthetic construct
  source 1..75: mol_type = other DNA
tggccggtcttttccagccatacagtgtgggtaaatttaacgccacagcggcagtgggcgggtacagtgacaagc

SEQ ID NO: 871851 - DNA, 75 bp, synthetic construct
  source 1..75: mol_type = other DNA
agcgccactgctgttggttctggaacgcacgcctggtcagatcagtccacatcactgggaaccgcggcatacgtt

SEQ ID NO: 871852 - DNA, 75 bp, synthetic construct
  source 1..75: mol_type = other DNA
atgaaaaataatgacaggaaatatatcagtcttttatccctgattcctttgctgattgccggagctcctgcgttt

SEQ ID NO: 871853 - DNA, 75 bp, synthetic construct
  source 1..75: mol_type = other DNA
gtgaactttttcctctcttcccgctggtcggtacgcctggcgctgatcattatcgccctgctggcgctgattgcg

SEQ ID NO: 871854 - DNA, 75 bp, synthetic construct
  source 1..75: mol_type = other DNA
gcattgccgcacacgtgatgcgcgcgcttgctgcgaaacagtctgaggtgtcgccagaacagcgacatgccatct

SEQ ID NO: 871855 - DNA, 75 bp, synthetic construct
  source 1..75: mol_type = other DNA
actgcgtgattcaggtcgatgatgtcgatactgcggcggtagaaacactggggcctgttctggaaagccacgaac

SEQ ID NO: 871856 - DNA, 75 bp, synthetic construct
  source 1..75: mol_type = other DNA
atgaagcatgacggcaggcgtggagttttgcctgccgttttttctcatgtgagcatgaaacgggtgacagcgatg

SEQ ID NO: 871857 - DNA, 75 bp, synthetic construct
  source 1..75: mol_type = other DNA
ttacagggatgcgctggcggttgatccgaacgggcatcttttatcccgctacgagtctggagcgtggaaagtgat

SEQ ID NO: 871858 - DNA, 75 bp, synthetic construct
  source 1..75: mol_type = other DNA
ggctgaaaccatgcagatgctggctaaagaactgttcccgcaatttctcgcccttccccatcagcagatggaggg

SEQ ID NO: 871859 - DNA, 75 bp, synthetic construct
  source 1..75: mol_type = other DNA
tataccgggagtcaaagccgtgtcatcttgcccgtgaaatgggaattcacacgaagacagtgaacacctttctgt

SEQ ID NO: 871860 - DNA, 75 bp, synthetic construct
  source 1..75: mol_type = other DNA
actggatgcggaggagattacagggcgtctggaaacggacaggaaaatccgtaacggtgactgggaacagaacac

SEQ ID NO: 871861 - DNA, 75 bp, synthetic construct
  source 1..75: mol_type = other DNA
ttggatacgtgtaccgggagtcaaagccctgccatcttgcccgtgaaatggggataaacacgaagacggtgaaca

SEQ ID NO: 871862 - DNA, 75 bp, synthetic construct
  source 1..75: mol_type = other DNA
ttatttatcttacgtcaggtctggttaccgcactggcggtgatcctcgcgcggacacagttgcgtttaatcgact

SEQ ID NO: 871863 - DNA, 75 bp, synthetic construct
  source 1..75: mol_type = other DNA
tgggattttgggtgttatctgctgctgatgggaatgatgttgctgccgtggatacaacagagtctgcgtgagcgt

SEQ ID NO: 871864 - DNA, 75 bp, synthetic construct
  source 1..75: mol_type = other DNA
atgatgacagagtcattgtctatggctttgactcagccagaaaagaatgggacgcgcttgatatgagtttacttc

SEQ ID NO: 871865 - DNA, 75 bp, synthetic construct
  source 1..75: mol_type = other DNA
ataactggattgaacaacaagggtttagccaggctcaggcagcgtctgctttaggggtcactcaacctcgcatat

SEQ ID NO: 871866 - DNA, 75 bp, synthetic construct
  source 1..75: mol_type = other DNA
tgatgggagtgatgttgctgccgtggatacaacagagcctgcgtgtgcacaatgacattacccgctatagctatt

SEQ ID NO: 871867 - DNA, 75 bp, synthetic construct
  source 1..75: mol_type = other DNA
tggcgtttgatgggaagcaacatcttcagcagcaggtatcggaaaaagcattagccgataacgtgttaattgccc

SEQ ID NO: 871868 - DNA, 75 bp, synthetic construct
  source 1..75: mol_type = other DNA
ttgtacaaaataccgaccaggcgcaggcagttatgccttatggtccaaaatgtatttatgttcttgagcaaaacg

SEQ ID NO: 871869 - DNA, 75 bp, synthetic construct
  source 1..75: mol_type = other DNA
ccggaccggaaaggtatccatccacaaaatcaccaggccggttacagcggtgtgcttcaggccgatgcttacggt

SEQ ID NO: 871870 - DNA, 75 bp, synthetic construct
  source 1..75: mol_type = other DNA
atgaacaatgaactccccgacaatattgagctgcttaaagccatgttgcgtaggcaacagagtcggcttcgccag

SEQ ID NO: 871871 - DNA, 75 bp, synthetic construct
  source 1..75: mol_type = other DNA
acttgttggcatcaagtttttcaatacgctcttttttgcaaccgactggtttatgtatcttacattaggtctggt

SEQ ID NO: 871872 - DNA, 75 bp, synthetic construct
  source 1..75: mol_type = other DNA
gatacaacaaagccttcgtatctgcaatggcagtagccgctatagctacttttaccagtcagtatggcataacgt

SEQ ID NO: 871873 - DNA, 75 bp, synthetic construct
  source 1..75: mol_type = other DNA
catccacaaaatcacctggccggttacagcggtgtgcttcaggccgatgcttacggtggttaccgggcgttatac

SEQ ID NO: 871874 - DNA, 75 bp, synthetic construct
  source 1..75: mol_type = other DNA
gatctttagtatcgataaattgatcaccatgatggctcatgcaggactacatattcaacgtattgaagttcaata

SEQ ID NO: 871875 - DNA, 75 bp, synthetic construct
  source 1..75: mol_type = other DNA
actttagagatggacaatacaaacttgccatacaagagtataaaaaaatatcaaaagatagccctttgtacccat

SEQ ID NO: 871876 - DNA, 75 bp, synthetic construct
  source 1..75: mol_type = other DNA
gttctgatgatggtccccccttcgatgttgtccggtaatggttatgtgaaacatgctcgctgggtggagatctgg

SEQ ID NO: 871877 - DNA, 75 bp, synthetic construct
  source 1..75: mol_type = other DNA
cttaagaacgttctgcaactggagcgggaaacgaacgaggatttaatcatggcggatggcatggcagagggtaca

SEQ ID NO: 871878 - DNA, 75 bp, synthetic construct
  source 1..75: mol_type = other DNA
gctacgaatgggtgatccagcagcatgccagcgaaaacgatgtcgcgctgaaaaaacgcgttattgacttttgcg

SEQ ID NO: 871879 - DNA, 75 bp, synthetic construct
  source 1..75: mol_type = other DNA
ccagcgagcagaacgttactgcctgcatcctaaccgaggctgagtcactggctgacagccagttgctggcggtgc

SEQ ID NO: 871880 - DNA, 75 bp, synthetic construct
  source 1..75: mol_type = other DNA
ggcgctcgatgcttttaacgtcgcactggcaaaagatctacgcattaatattcgtgaacaggcatccggggcata

SEQ ID NO: 871881 - DNA, 75 bp, synthetic construct
  source 1..75: mol_type = other DNA
cgcgtcagtattggtgttcagagttttaacgatctggaacttgccacattacaccgccgccatagcgcggtaaat

SEQ ID NO: 871882 - DNA, 75 bp, synthetic construct
  source 1..75: mol_type = other DNA
cgcaatatagcgatggtgttccagaactacgcgttgtatccgcatatgacggtttacgacaacatggcgtttggc

SEQ ID NO: 871883 - DNA, 75 bp, synthetic construct
  source 1..75: mol_type = other DNA
catcagatttggtatgccgcagagcttggactaaaagtgcttggcattgattttgataaacaccttacagaggta

SEQ ID NO: 871884 - DNA, 75 bp, synthetic construct
  source 1..75: mol_type = other DNA
tattactggttttgattatttaagccctgccgcgaaaagaaaaattgcgacaggccaaaccgcgcaaaaaccttc

SEQ ID NO: 871885 - DNA, 75 bp, synthetic construct
  source 1..75: mol_type = other DNA
gctaacgataaatcccgtcaaacgtttgttgtccgttcaaaaattctggccgctatccgtcagttcatggtcgca

SEQ ID NO: 871886 - DNA, 75 bp, synthetic construct
  source 1..75: mol_type = other DNA
tcccagcctttacttccagataagatatttattgcgacgccaccattattagtacttaaacaagataaacatacc

SEQ ID NO: 871887 - DNA, 75 bp, synthetic construct
  source 1..75: mol_type = other DNA
aaagataaacatccttctatgttgctgctggccgcgacgaaacgcggtaaagctctggcagcacggttaagtgtg

SEQ ID NO: 871888 - DNA, 75 bp, synthetic construct
  source 1..75: mol_type = other DNA
tattcccgggtgacgaggtgtttgtcagaaccgttgaaggacacaacatgattaaggttcttggctatgacagag

SEQ ID NO: 871889 - DNA, 75 bp, synthetic construct
  source 1..75: mol_type = other DNA
caccgcaggcgtacggagcaggcaatgaagcgccgcaatgaccttatcgcccgcatcctggcacgttcagaaaac

SEQ ID NO: 871890 - DNA, 75 bp, synthetic construct
  source 1..75: mol_type = other DNA
aatattgcggtgatggcatcggtctatttttgggtgccagatattcgcgacgaggcgaaaggaaagctgcgcgaa

SEQ ID NO: 871891 - DNA, 75 bp, synthetic construct
  source 1..75: mol_type = other DNA
atgggcgtgcttacggagctggcacataacgtaggtatttcgattcctgccgccgggcatatgatctcgtattat

SEQ ID NO: 871892 - DNA, 75 bp, synthetic construct
  source 1..75: mol_type = other DNA
gtcttcgtgtaaaaggagacagcatgtggcccagaataaaatcaggagaatatgtactcattgagcctaacacca

SEQ ID NO: 871893 - DNA, 75 bp, synthetic construct
  source 1..75: mol_type = other DNA
tttcatgtcgggttaacctcctgcggcagtgctgtcagtgcagtgaagctgacatttacgggcacaccagataat

SEQ ID NO: 871894 - DNA, 75 bp, synthetic construct
  source 1..75: mol_type = other DNA
ggcgattggcaatatgccgatggcggcggcattcaccctggtgccgattgttctcatcgcactgtacctggcgtt

SEQ ID NO: 871895 - DNA, 75 bp, synthetic construct
  source 1..75: mol_type = other DNA
cttcacgtccaaatctgggtaaggtgtcaggattcttctggcggaaaccaggactggggctgtttttgctgctgc

SEQ ID NO: 871896 - DNA, 75 bp, synthetic construct
  source 1..75: mol_type = other DNA
ctggtgggtgcaaatatcgcgatggatatggtgaaaattttaagccgtgaaggggtaaaagatttccacttctat

SEQ ID NO: 871897 - DNA, 75 bp, synthetic construct
  source 1..75: mol_type = other DNA
caacctgagacgcaaagtggatgctggagccaaccgcgctatcactcaattcttctttgatgtcgaaagctacct

SEQ ID NO: 871898 - DNA, 75 bp, synthetic construct
  source 1..75: mol_type = other DNA
ttagtttaggacttattgctctggcggtgggtaatgcatatgtaacacaattgttggataattatagtataattt

SEQ ID NO: 871899 - DNA, 75 bp, synthetic construct
  source 1..75: mol_type = other DNA
ttcgcgacgaggcgaaaggaaagctgcgcgaacaatttcactttttgcgtagccccgcaccgtggttaatttttg

SEQ ID NO: 871900 - DNA, 75 bp, synthetic construct
  source 1..75: mol_type = other DNA
ggcgaaaagtgggcgcagtttcctgaaaggtttactgaccaatctcgctaatccgaaagcgattatctactttgg

SEQ ID NO: 871901 - DNA, 75 bp, synthetic construct
  source 1..75: mol_type = other DNA
ccgaaagcgattatctactttggctcggtgttctcattgtttgtcggtgataacgttggcactaccgcgcgctgg

SEQ ID NO: 871902 - DNA, 75 bp, synthetic construct
  source 1..75: mol_type = other DNA
gtctctcagaccgctgtcagtcgttcccgtaaagaagcgatgatgggcgtgctgggcattacctgcggcgtaatg

SEQ ID NO: 871903 - DNA, 75 bp, synthetic construct
  source 1..75: mol_type = other DNA
acgcgccaatctttaactatgccgactacggtctggtgggcgatatctacaacgtcgtccctgccctgattaacc

SEQ ID NO: 871904 - DNA, 75 bp, synthetic construct
  source 1..75: mol_type = other DNA
aaagataaacaccccgctatgttgctaatggccgcgacgaaacgtggtaaagctctggcagcacggttaagtgtg

SEQ ID NO: 871905 - DNA, 75 bp, synthetic construct
  source 1..75: mol_type = other DNA
tttgccggtgatgcggcgctaacatccgcgatgctgaaccggatcttacaccactcacacggtgttcaaataaaa

SEQ ID NO: 871906 - DNA, 75 bp, synthetic construct
  source 1..75: mol_type = other DNA
caatttgctgggcattccactgggaacgtatttaagtcaggaatttagctggcgttacacctttttattgatcgc

SEQ ID NO: 871907 - DNA, 75 bp, synthetic construct
  source 1..75: mol_type = other DNA
ttcgtttgctgcgatgtcgtcgttgctgctgtatggtcgctataagcgccagcaagcggcggatagtccggtgct

SEQ ID NO: 871908 - DNA, 75 bp, synthetic construct
  source 1..75: mol_type = other DNA
tattatgatgttagttgggctagggatggtgctggggaatgtgctaagtggccggatttcaggacgttattcacc

SEQ ID NO: 871909 - DNA, 75 bp, synthetic construct
  source 1..75: mol_type = other DNA
gagccccggtcccgatttcttttttgtctctcagaccgctgtcagtcgttcccgtaaagaagcgatgatgggcgt

SEQ ID NO: 871910 - DNA, 75 bp, synthetic construct
  source 1..75: mol_type = other DNA
gcgtatccggaagttcacccggaagcaaaaagcgctcaggcggatttgcttaatctgaaacgcaaagtggatgcc

SEQ ID NO: 871911 - DNA, 75 bp, synthetic construct
  source 1..75: mol_type = other DNA
aagtattcccgggtgatgaggtgtttgtcagaaccgttgaaggacacaacatgatcaaagttcttggctatgaca

SEQ ID NO: 871912 - DNA, 75 bp, synthetic construct
  source 1..75: mol_type = other DNA
gcccgcggtgatccgcgcggtgacgtacattattcccgcacgttatttcgtcagcactctgcaaagcctgttcct

SEQ ID NO: 871913 - DNA, 75 bp, synthetic construct
  source 1..75: mol_type = other DNA
tttcccccgctggtgacaggtattattctcgctgtctttgctctgctggcgatcactcgcggtcttcatggcgtc

SEQ ID NO: 871914 - DNA, 75 bp, synthetic construct
  source 1..75: mol_type = other DNA
tttccaccattgatgactggcatcatactcgcctctttcgccctgctggtgataacccgcggtatttgtgccgtc

SEQ ID NO: 871915 - DNA, 75 bp, synthetic construct
  source 1..75: mol_type = other DNA
ggcaactggctgatattattatggcgtgtatggctatcactaatctgaccgctattttgctgctctctccggtag

SEQ ID NO: 871916 - DNA, 75 bp, synthetic construct
  source 1..75: mol_type = other DNA
atcccattcagggaagtggatttgagatgaacggcaaaggagccagtgcaaggccaacgctgaaagtctctaatc

SEQ ID NO: 871917 - DNA, 75 bp, synthetic construct
  source 1..75: mol_type = other DNA
atgcaggatattcacgaagaaagtcttaacgagtcggttaagtcagagcagtcaccgcgggtggtgctctgggaa

SEQ ID NO: 871918 - DNA, 75 bp, synthetic construct
  source 1..75: mol_type = other DNA
gttccaccattagtaactggcatcattctcgccgtctttactctgttggcgataacccacggtattcatggcgta

SEQ ID NO: 871919 - DNA, 75 bp, synthetic construct
  source 1..75: mol_type = other DNA
atgtacccgatgaactggcgaagcagtgagaacggtgagtgcgaaaccttcatgctggcagaaatgatctgcggc

SEQ ID NO: 871920 - DNA, 75 bp, synthetic construct
  source 1..75: mol_type = other DNA
gcgctgaagcgggtatttatgcgaccagtgaggccgaacgcgcgtactggctgagccgcgaaaagtcatatctga

SEQ ID NO: 871921 - DNA, 75 bp, synthetic construct
  source 1..75: mol_type = other DNA
cgtcccacacttaaggtatctaacctgtatggcatggtcaccgggatggccgaagacctgcagagtctggtcggc

SEQ ID NO: 871922 - DNA, 75 bp, synthetic construct
  source 1..75: mol_type = other DNA
cctcatttcagtcattgtgtaccagtcttgcggcgcgcgtgggtagcggcaacctggccggcgttgcgctggcaa

SEQ ID NO: 871923 - DNA, 75 bp, synthetic construct
  source 1..75: mol_type = other DNA
accccattcagggggcgggatttgaactgaacggcaagggcagtgctgcccgtccgacactgacggtttctaacc

SEQ ID NO: 871924 - DNA, 75 bp, synthetic construct
  source 1..75: mol_type = other DNA
gaggttgaatatttttgtaactataaaaaaatggggtttggtcaaaataataatgaaatggtaagcaaaataatt

SEQ ID NO: 871925 - DNA, 75 bp, synthetic construct
  source 1..75: mol_type = other DNA
acactcttatatgagtttttattaattgctttgtttataatctttttctttatttatgctatagatataaatcgt

SEQ ID NO: 871926 - DNA, 75 bp, synthetic construct
  source 1..75: mol_type = other DNA
gtggtccgccgccgggtgtatgcccgttttctggatgcggtgaatttcgttgcgggcaatccggaggccgacccg

SEQ ID NO: 871927 - DNA, 75 bp, synthetic construct
  source 1..75: mol_type = other DNA
cgacaccgacggagacggacggggcgctgtttcccggtcgcatcatgctggcgaacacctgtatgtgggattacc

SEQ ID NO: 871928 - DNA, 75 bp, synthetic construct
  source 1..75: mol_type = other DNA
taaacccaccacggatatccgtaaggacagatgcagcaagtgcatgcgcgggtgtgaactgcgcaggaatgtcgg

SEQ ID NO: 871929 - DNA, 75 bp, synthetic construct
  source 1..75: mol_type = other DNA
ttcacgaccgaccctgacggtttctaacctggacggtatggtcaccggaatggcggaagatttgcagagtctggt

SEQ ID NO: 871930 - DNA, 75 bp, synthetic construct
  source 1..75: mol_type = other DNA
ttcacgacctaccctgacggtttctaacctggacggtatggtcaccggaatggcggaagatgtgcagagtctggt

SEQ ID NO: 871931 - DNA, 75 bp, synthetic construct
  source 1..75: mol_type = other DNA
cgtaaggacagatgcagcaagtgcatgcgcgggtgtgagctgcgcaggaatgtcggcaattttggcggtttcctt

SEQ ID NO: 871932 - DNA, 75 bp, synthetic construct
  source 1..75: mol_type = other DNA
tcgccggatctgctaagctgcctgcagctgcgtgcagacaaacagtacaaggcgaaaaacggcccgctggactgc

SEQ ID NO: 871933 - DNA, 75 bp, synthetic construct
  source 1..75: mol_type = other DNA
ccgtcaaccgtgttaccgacagagaaaccaacgctcttcacaaaactgacttctgcgcaactcacaacagcacag

SEQ ID NO: 871934 - DNA, 75 bp, synthetic construct
  source 1..75: mol_type = other DNA
gcccggcggtaaagccagcgatgttacacaagattttctcgcattgttgagcggagcattagcaggtgaaacaac

SEQ ID NO: 871935 - DNA, 75 bp, synthetic construct
  source 1..75: mol_type = other DNA
actgaatggcaagggcagtgctgcccgtccgacactgacggtttctaacctgcacggcatggtcaccgggatggc

SEQ ID NO: 871936 - DNA, 75 bp, synthetic construct
  source 1..75: mol_type = other DNA
tgatcgacctcggagaatgggctgctgaagaaaaacgaatccccagcagtagcgatctttccgaaagcgatgact

SEQ ID NO: 871937 - DNA, 75 bp, synthetic construct
  source 1..75: mol_type = other DNA
gttgaatgccaggtggttcagggtggggtccatttcaagggcgacacacggcttgtttaccagagcctgatgtgg

SEQ ID NO: 871938 - DNA, 75 bp, synthetic construct
  source 1..75: mol_type = other DNA
caaatgcccaactttaaccgcttcctgaaaagcaaagatattgatatcgaactgcacactgccgggcagtataag

SEQ ID NO: 871939 - DNA, 75 bp, synthetic construct
  source 1..75: mol_type = other DNA
aaaggcagtatggacgcgcatgaagttagctcgttacgcgaagagataaccgcagtactcgcggcatttaagcca

SEQ ID NO: 871940 - DNA, 75 bp, synthetic construct
  source 1..75: mol_type = other DNA
atgcctgttgtaaactgtgagccaaagcgttgtttaaccaaggtggggactcgtggattgttgtctgaatatggt

SEQ ID NO: 871941 - DNA, 75 bp, synthetic construct
  source 1..75: mol_type = other DNA
tacacccaaagtgactaatacgccgtcagccgtgttaccgacagagaggccaacgctcttcacaaaactgacttc

SEQ ID NO: 871942 - DNA, 75 bp, synthetic construct
  source 1..75: mol_type = other DNA
atcgattgttgttacgctggtggcagcgggggaaaaagccattgatgaaaaagacaaacgcgagggtaagacctc

SEQ ID NO: 871943 - DNA, 75 bp, synthetic construct
  source 1..75: mol_type = other DNA
aggcggtagagaaaggcctggttgacgaaatcaacaccagtgatgaagtgattcttaatctgatggacggtcgag

SEQ ID NO: 871944 - DNA, 75 bp, synthetic construct
  source 1..75: mol_type = other DNA
gctttcgcgcgatgttgagaagcgaccaaacaaacgcccgacaaacgcagatttgcgtgattcaggaagcattga

SEQ ID NO: 871945 - DNA, 75 bp, synthetic construct
  source 1..75: mol_type = other DNA
gccgcgccaaagctattttctgtgctggaacaccaggtgatcgcgttcccgtcacaccggagcaagaaactaagc

SEQ ID NO: 871946 - DNA, 75 bp, synthetic construct
  source 1..75: mol_type = other DNA
tggcaggggcggcagtatcaggtataccctattcaggggacgggatttgaactgaacggtaagggtagtgctgcc

SEQ ID NO: 871947 - DNA, 75 bp, synthetic construct
  source 1..75: mol_type = other DNA
cattaacaccgataacttcgccagtggaaagcaatgtttaaaatttgagcaacttgttcagggcgggagttatac

SEQ ID NO: 871948 - DNA, 75 bp, synthetic construct
  source 1..75: mol_type = other DNA
ctgggatatcggggtttttcgtctcgatttcagtgtcccgcaggcctgggtggaagaactggaaagtggctatgt

SEQ ID NO: 871949 - DNA, 75 bp, synthetic construct
  source 1..75: mol_type = other DNA
tggcggaggacctgcagagtctggtgggggccacggtggtccgccgccgggtgtatgcccgttttctggatgcgg

SEQ ID NO: 871950 - DNA, 75 bp, synthetic construct
  source 1..75: mol_type = other DNA
gtccgttgcgacatgatcgccagagccattattcatgctctgaatgaggccagcatcaccctgcctgtcgtggtg

SEQ ID NO: 871951 - DNA, 75 bp, synthetic construct
  source 1..75: mol_type = other DNA
agcctggtgggtgccacggtggtccgtcgccgggtgtatgcgcgttttctggatgcggtgaactttgtggcaggc

SEQ ID NO: 871952 - DNA, 75 bp, synthetic construct
  source 1..75: mol_type = other DNA
gtgctggcaacaccgacggagacggacggggcgctgtttcccggtcgcatcatgctggcgaacacctgtatgtgg

SEQ ID NO: 871953 - DNA, 75 bp, synthetic construct
  source 1..75: mol_type = other DNA
tgatcgagtcggttaaatcggagcagtcaccgcgggtggtgctctgggaaatcgacctgacggtgcagggtggtg

SEQ ID NO: 871954 - DNA, 75 bp, synthetic construct
  source 1..75: mol_type = other DNA
caaatgcagcaagtgtatgcgcgggtgtgagttgcgcaacaataccggtaatttcggcggtttcctttccatcaa

SEQ ID NO: 871955 - DNA, 75 bp, synthetic construct
  source 1..75: mol_type = other DNA
ttccgcgatcaatttttacgattagtagaccaggcacgacagcaaaaatttgcagtggctgtttatgaatcatgc

SEQ ID NO: 871956 - DNA, 75 bp, synthetic construct
  source 1..75: mol_type = other DNA
caacgcatagccttagagagcctgaatgtcgattcctttgctcaagcctggtttgccgagcgcaaacaacgcgac

SEQ ID NO: 871957 - DNA, 75 bp, synthetic construct
  source 1..75: mol_type = other DNA
atgaaaaaaattgctattgtgggtgccgggcctacggggatctacaccttattctcgcttctacagcaacaaact

SEQ ID NO: 871958 - DNA, 75 bp, synthetic construct
  source 1..75: mol_type = other DNA
actgaacgcggttagcgcggcctttgtgctgtccacgccgacggaaacggatggtgctgtttttccggggcgcat

SEQ ID NO: 871959 - DNA, 75 bp, synthetic construct
  source 1..75: mol_type = other DNA
tggcaggggtggcagtatcaggcctatcccattcagggaagtggatttgagatgaacggcaaaggagccagtgca

SEQ ID NO: 871960 - DNA, 75 bp, synthetic construct
  source 1..75: mol_type = other DNA
tgttcggtctggtcaccgggatggcggaagacctgcagagtctggtggggccacggtggtccgccgtcgggtgta

SEQ ID NO: 871961 - DNA, 75 bp, synthetic construct
  source 1..75: mol_type = other DNA
gccgtacaacgacgaagaaaactctaaattaatgctggcaaatattgccagcattgaaataccgccgatttattg

SEQ ID NO: 871962 - DNA, 75 bp, synthetic construct
  source 1..75: mol_type = other DNA
acccgattgacggcagtggctttgagatgaacggaaagggctgcagtgcccgcccgtcgctgacggtgtccaatc

SEQ ID NO: 871963 - DNA, 75 bp, synthetic construct
  source 1..75: mol_type = other DNA
atcgacctgacggtacagggtggtgagcggtattttttctgcaatgagctgaatgaaaaaggggaggcggttacc

SEQ ID NO: 871964 - DNA, 75 bp, synthetic construct
  source 1..75: mol_type = other DNA
gaacgaaaaaggtgagccggtcacctggcaggggcggcagtatcaggcataccccattcaggggtcggggtttga

SEQ ID NO: 871965 - DNA, 75 bp, synthetic construct
  source 1..75: mol_type = other DNA
gccacggtggtccgccgccgggtgtatgcgcgttttctggatgcggtgaattttgtggcgggcaatccggaagcg

SEQ ID NO: 871966 - DNA, 75 bp, synthetic construct
  source 1..75: mol_type = other DNA
cggtgtgcgcctgcggagtcgtgcggcttcgtgataagcacgccggagggggagtggtatatcccttgtgtgaat

SEQ ID NO: 871967 - DNA, 75 bp, synthetic construct
  source 1..75: mol_type = other DNA
atcagcgattctggcgcatgcccggcggtgtgcgcctgcggagtcgtgcggcttcgtgataagcacgccggaggg

SEQ ID NO: 871968 - DNA, 75 bp, synthetic construct
  source 1..75: mol_type = other DNA
gtgtggatcactattgcaccgttcgtgacaatcatcaccgatcaggcattaaatgctgagattcaaaaaggcgaa

SEQ ID NO: 871969 - DNA, 75 bp, synthetic construct
  source 1..75: mol_type = other DNA
acggagcgctgtttcccggtcgcattatgctggcgaatacctgtatgtggacctaccgctctgatgagtgtggtt

SEQ ID NO: 871970 - DNA, 75 bp, synthetic construct
  source 1..75: mol_type = other DNA
gctgacagccatgacggcctcgtttgtgctggctacaccgaccgagacggatggggcgctgtttcccggtcgaat

SEQ ID NO: 871971 - DNA, 75 bp, synthetic construct
  source 1..75: mol_type = other DNA
gctgacagccatgacggcctcgtttgtgctggcaacaccgaccgagacggagggggcgctgtttcccggtcgcat

SEQ ID NO: 871972 - DNA, 75 bp, synthetic construct
  source 1..75: mol_type = other DNA
gctgacagccatgacggcctcgtttgtgctggcaacaccgaccgagacggacggggcgctgtttcccggtcggat

SEQ ID NO: 871973 - DNA, 75 bp, synthetic construct
  source 1..75: mol_type = other DNA
ggcaatccggaagcggacccggagcaggagctgagcgaccgctgggtggtggagcagatgtcagagctgacggcc

SEQ ID NO: 871974 - DNA, 75 bp, synthetic construct
  source 1..75: mol_type = other DNA
atctgaagctgatgaagagccgcatttctgctcgtgcagaatttgaggatgtcattgagactgggatgggaatca

SEQ ID NO: 871975 - DNA, 75 bp, synthetic construct
  source 1..75: mol_type = other DNA
gctgacagccatgacggcctcgtttgtgctggcgacaccgaccgagacggatggggcgctgtttcccggtcgtat

SEQ ID NO: 871976 - DNA, 75 bp, synthetic construct
  source 1..75: mol_type = other DNA
cggaaggacagatgcagtaaatgcatgcgcgggtgtgagatgcgcggcatggaggaaaatttaggcggtttcctt

SEQ ID NO: 871977 - DNA, 75 bp, synthetic construct
  source 1..75: mol_type = other DNA
ggtgggtggtggagcagatgtcatcgctgacggccatgacggcctcgtttgtgctggccacaccgacggagacgg

SEQ ID NO: 871978 - DNA, 75 bp, synthetic construct
  source 1..75: mol_type = other DNA
gaatgaaaaaggggagcggtcacctggcaggggcgggaatatcaggcatacccgattgacggcagcggttttgag

SEQ ID NO: 871979 - DNA, 75 bp, synthetic construct
  source 1..75: mol_type = other DNA
atggcgctgtttttccggggcgcatcatgctggccaacacctgtacctggacctatcgcggtgatgagtgcggtt

SEQ ID NO: 871980 - DNA, 75 bp, synthetic construct
  source 1..75: mol_type = other DNA
ggacagatgcagcaagtgcatgcgcgggtgtgagatgcgcggcatggtggctaattttggcagtttcctttccat

SEQ ID NO: 871981 - DNA, 75 bp, synthetic construct
  source 1..75: mol_type = other DNA
atggtgacaagcccggactttgtcgcgattgacggcgttccgtacctgtcagcccgtgacactcgcgatctgaaa

SEQ ID NO: 871982 - DNA, 75 bp, synthetic construct
  source 1..75: mol_type = other DNA
agtgcgccgaccggggccgggaaatcaacctggctgccgctgcaactgctggcgcatcccggcattaacgggaaa

SEQ ID NO: 871983 - DNA, 75 bp, synthetic construct
  source 1..75: mol_type = other DNA
tcgttatcatgaagataacccgcccgcactggcggtgagaatgcaggagatgtttggtgaggccactaatccgac

SEQ ID NO: 871984 - DNA, 75 bp, synthetic construct
  source 1..75: mol_type = other DNA
gatcgcccaggggcgcgtgccgctggtgctggagttgctttcacctgcccaaaggccgctgcaaatcacgcgtga

SEQ ID NO: 871985 - DNA, 75 bp, synthetic construct
  source 1..75: mol_type = other DNA
aaaaaatggcagcgctgggtaacgatccgcgtttagcggcaatgctggttagcgcaaagagcgacgacgaagctg

SEQ ID NO: 871986 - DNA, 75 bp, synthetic construct
  source 1..75: mol_type = other DNA
attatcctgctggagcctcggcgtctggcggcacgtaatgttgcgcaacgactggcggagctgcttaacgaaaag

SEQ ID NO: 871987 - DNA, 75 bp, synthetic construct
  source 1..75: mol_type = other DNA
ttaagccgccacgagtggttgatcgctcctttgttattgcagggcagcgcctcgccggatgcgcgaattctactg

SEQ ID NO: 871988 - DNA, 75 bp, synthetic construct
  source 1..75: mol_type = other DNA
gtcaggaaagtggatcattactgttatttttacctggcgtcggagaaattcagcgtgtgcaggaacaactggctt

SEQ ID NO: 871989 - DNA, 75 bp, synthetic construct
  source 1..75: mol_type = other DNA
tggacaacgaccgcttgcagcaaatgctgccagaagcgcctgtcgtcatctcagaagggcgctcgtttccggttg

SEQ ID NO: 871990 - DNA, 75 bp, synthetic construct
  source 1..75: mol_type = other DNA
tcagaagggcgctcgtttccggttgaacgccgttatttaccgctgcccgcgcatcagcgttttgacgaagccgtt

SEQ ID NO: 871991 - DNA, 75 bp, synthetic construct
  source 1..75: mol_type = other DNA
ctgaacgatcagcgaaaagcgattcttcctgcaccgcaaggaatgcgcaaagtggtgctggcgaccaatattgcc

SEQ ID NO: 871992 - DNA, 75 bp, synthetic construct
  source 1..75: mol_type = other DNA
tgacgcagcgtgccgggcgcgccgggcgtctggagccgggtatctgcctgcatttaatcgccaaagaacaagcag

SEQ ID NO: 871993 - DNA, 75 bp, synthetic construct
  source 1..75: mol_type = other DNA
ttgccggggcgtttgccgatcgcattgctcgtcgccgtgggcaagatggacgctatcaactggcaaacggcatgg

SEQ ID NO: 871994 - DNA, 75 bp, synthetic construct
  source 1..75: mol_type = other DNA
tcgccatgtgcttggcgtcatagcagactggccggtcaaccgggtcagcgaactgcttccgtggcgcatagcact

SEQ ID NO: 871995 - DNA, 75 bp, synthetic construct
  source 1..75: mol_type = other DNA
ccgttgcgtcagacccgcacccgtaagccgttccctgaatcactaccccgtgacgaaaagcgactgttgcctgcg

SEQ ID NO: 871996 - DNA, 75 bp, synthetic construct
  source 1..75: mol_type = other DNA
acagcccggacagaaaaggcatccatccgcagactcatcttgcctgcttcagcggtgtgctgcaagcggatgcgt

SEQ ID NO: 871997 - DNA, 75 bp, synthetic construct
  source 1..75: mol_type = other DNA
tgaatacggttatgccaccgcagaaccacgcactctgactatctgggaagcacagttcggtgacttcgctaacgg

SEQ ID NO: 871998 - DNA, 75 bp, synthetic construct
  source 1..75: mol_type = other DNA
gcgttccgtgtctgggactccgtactgtctgaagaagcggtgctggcgtttgaatatggttatgccaccgcagaa

SEQ ID NO: 871999 - DNA, 75 bp, synthetic construct
  source 1..75: mol_type = other DNA
agttgaaatgcagtctcgcgttgccaagatttatggcgatcgccaggcgatggctgccggtgagaaactgttcga

SEQ ID NO: 872000 - DNA, 75 bp, synthetic construct
  source 1..75: mol_type = other DNA
gcctgcccgacctgtgacggccttggcgtacagcaatatttcgatcctgaccgcgtgatccagaatccggaactg

SEQ ID NO: 872001 - DNA, 75 bp, synthetic construct
  source 1..75: mol_type = other DNA
gctgggatcgacgtaatttctattacttccagatgctgaaatcgctggcggaacactacaagtttgacgtggaag

SEQ ID NO: 872002 - DNA, 75 bp, synthetic construct
  source 1..75: mol_type = other DNA
gagcggtaaacgcaagattgaagtgccgaagaaacgcgttccggcgaatccggaaaaagtgctgaagctgacagg

SEQ ID NO: 872003 - DNA, 75 bp, synthetic construct
  source 1..75: mol_type = other DNA
gtcagcactgacggaagaagccctggagcagatcggtcagttgtacgccatagaggcggatataaggggaatgcc

SEQ ID NO: 872004 - DNA, 75 bp, synthetic construct
  source 1..75: mol_type = other DNA
gtgaagggacgcgtctgcgccgtgaagcacgccacgtttatgttgagaatacaccgctgcctgccatctctgaca

SEQ ID NO: 872005 - DNA, 75 bp, synthetic construct
  source 1..75: mol_type = other DNA
gcagtggtggcggcgagatcctcgtctccggtacgccagaaaccgtcgcggagtgcgaagcatcacacacggcac

SEQ ID NO: 872006 - DNA, 75 bp, synthetic construct
  source 1..75: mol_type = other DNA
cgctgatgtatcagaaaatcaaaaaacatccgacgccgcgcaaaatctacgctgacaagctggagcaggaaaaag

SEQ ID NO: 872007 - DNA, 75 bp, synthetic construct
  source 1..75: mol_type = other DNA
gaacacgcgccgcccgaactcaaactattctgttgattactggcatcagcacgcaattcgcacggtaatccgtca

SEQ ID NO: 872008 - DNA, 75 bp, synthetic construct
  source 1..75: mol_type = other DNA
agagcacaccccgctgtaccgccagtctgaaatatacgcccgccagggtgtggagctgagccgttcactgctgtc

SEQ ID NO: 872009 - DNA, 75 bp, synthetic construct
  source 1..75: mol_type = other DNA
gggagcgcgaaatagaccatctgcaggcgcagctggataaactccgccggatgaacttcggcagtcgttccgaaa

SEQ ID NO: 872010 - DNA, 75 bp, synthetic construct
  source 1..75: mol_type = other DNA
ggtatcgccggaccggggctgctgtctccgctggaagaggcgcttcatggctatgtcatgactaacggcaaactc

SEQ ID NO: 872011 - DNA, 75 bp, synthetic construct
  source 1..75: mol_type = other DNA
tgtttaatcctggcgcgacctttgctgtccactttagcggtctgaatgacactatccgcaacagccaatacggtg

SEQ ID NO: 872012 - DNA, 75 bp, synthetic construct
  source 1..75: mol_type = other DNA
gtgaaccagtcgtttttttttgaattttataagagctataaaaacggtgcgaacgctgttttcttaagcactttt

SEQ ID NO: 872013 - DNA, 75 bp, synthetic construct
  source 1..75: mol_type = other DNA
gcgctgaatgcgcgccttagggagttactgacagacatgaataaccggccaatgaaggggtacggcaatcaaacc

SEQ ID NO: 872014 - DNA, 75 bp, synthetic construct
  source 1..75: mol_type = other DNA
tgcaggtattgcgccaatcaaagaaacactggcggcagccattgtgatgcgatctggctggcagccgggaacacc

SEQ ID NO: 872015 - DNA, 75 bp, synthetic construct
  source 1..75: mol_type = other DNA
gatgcccgttctacgccgtactgtactgatatcggcaagatggtacaggcaccgattttccacgttaatgcggat

SEQ ID NO: 872016 - DNA, 75 bp, synthetic construct
  source 1..75: mol_type = other DNA
caacatccggcatatgcttcagagcatgaaaacctgcgtggtccgggctactaccactgacagaaggaacaacag

SEQ ID NO: 872017 - DNA, 75 bp, synthetic construct
  source 1..75: mol_type = other DNA
cggaacggctggaaaaggcctgttacgttgccctgcactataacgcccctgacagacgctttatcgacaatctgc

SEQ ID NO: 872018 - DNA, 75 bp, synthetic construct
  source 1..75: mol_type = other DNA
tccatgcgccaggagcatcgtgccggcgaaaagctttttatcgacttctgtggtcctacggttcctgttattaat

SEQ ID NO: 872019 - DNA, 75 bp, synthetic construct
  source 1..75: mol_type = other DNA
ggtacgtgaagagttagctaagtttatcagcaatcgtccgtgcgccagttgtgaagggacgcgtctgcgccgtga

SEQ ID NO: 872020 - DNA, 75 bp, synthetic construct
  source 1..75: mol_type = other DNA
ggatatgtcgcgtacttatctggagtgggcagaacgcaacctgcgtctgaatggcttaaccggccgtgcgcatcg

SEQ ID NO: 872021 - DNA, 75 bp, synthetic construct
  source 1..75: mol_type = other DNA
gaagtacgcgatgccattcatctgttaacgccacgcgccatcaatgaagaagtgggcaggcgtctgctcgaagag

SEQ ID NO: 872022 - DNA, 75 bp, synthetic construct
  source 1..75: mol_type = other DNA
gcttcacaacagcagcagatctgttacttcagttatctacggcagtaagcgtcgtctcagcaccgtctggcagat

SEQ ID NO: 872023 - DNA, 75 bp, synthetic construct
  source 1..75: mol_type = other DNA
ccttatctgcctcgcgcagaacagcgagaactggggcaatatatccgtttatccatgctgcgcagtgtgctggcg

SEQ ID NO: 872024 - DNA, 75 bp, synthetic construct
  source 1..75: mol_type = other DNA
cggtattcaggaaggttgcattaaccatgcactgctaacagctcaggcgattgccaacgacgggctgccgctcat

SEQ ID NO: 872025 - DNA, 75 bp, synthetic construct
  source 1..75: mol_type = other DNA
tccggcaccgctcattggtgaactgccttatctgccgcgcgccgaacagcgtgaactggggcaatacatccgctt

SEQ ID NO: 872026 - DNA, 75 bp, synthetic construct
  source 1..75: mol_type = other DNA
catgttgatgttgcatcggaagatgcgctggtgccgctggcatcccatctggatgtacgttttgtgtcaaccaac

SEQ ID NO: 872027 - DNA, 75 bp, synthetic construct
  source 1..75: mol_type = other DNA
aaagctaccggttaaaggaaaaacgcaaagcgggagtgctggcaaaaaacgccacgccaatcagtgatgatgaaa

SEQ ID NO: 872028 - DNA, 75 bp, synthetic construct
  source 1..75: mol_type = other DNA
agtgcgatgccatcgtgcaggcccctgcgccttcgcggcccatcgagcggggtatcgccggaccggggctgctgg

SEQ ID NO: 872029 - DNA, 75 bp, synthetic construct
  source 1..75: mol_type = other DNA
ataacattgccgaaaacgccctacgacgggtcagtctggggagaaaaaactggctgttcttcggctcggatcatg

SEQ ID NO: 872030 - DNA, 75 bp, synthetic construct
  source 1..75: mol_type = other DNA
ctgactgacggcaagctccatgctgatgacacgcctgtcccggtgctgttgccaggtaataagaaaacgaagacc

SEQ ID NO: 872031 - DNA, 75 bp, synthetic construct
  source 1..75: mol_type = other DNA
ctgtacggactaatcgggagctgtcggttgaacggtatcgatccagaagcgtatctgcgccatatcctgagcgta

SEQ ID NO: 872032 - DNA, 75 bp, synthetic construct
  source 1..75: mol_type = other DNA
cgccgggtcaacgctggcgccggcggtgtggttcgcttacagcccggacagaaaaggcatccatccgcagaccca

SEQ ID NO: 872033 - DNA, 75 bp, synthetic construct
  source 1..75: mol_type = other DNA
ggcgggatgcgccagtccggcattctggctgccgccgggatgtatgccctgaaaaataacgtcgcacggttgcag

SEQ ID NO: 872034 - DNA, 75 bp, synthetic construct
  source 1..75: mol_type = other DNA
gaaaaataacgttgcacgcttgcaggaagaccacgataacgccgcctggatggcggagcaactgcgtgaagcagg

SEQ ID NO: 872035 - DNA, 75 bp, synthetic construct
  source 1..75: mol_type = other DNA
agcggtgctgggcagtattcagccgcaacccatcgacgctgctgccgacggcacgctaccgctggataaagtggc

SEQ ID NO: 872036 - DNA, 75 bp, synthetic construct
  source 1..75: mol_type = other DNA
tattcagcaactgctcgacgtactgcataaactgcgcgatcagggcaataccatcgtggtgattgagcacaatct

SEQ ID NO: 872037 - DNA, 75 bp, synthetic construct
  source 1..75: mol_type = other DNA
cgcgcgcggcaacaacctgaaagacgtgacgttaacgctgccggtcggcctgttcacctgcatcaccggggtttc

SEQ ID NO: 872038 - DNA, 75 bp, synthetic construct
  source 1..75: mol_type = other DNA
tgcgcgatctcggtaataccgtaattgtggtggagcacgacgaagacgccattcgcgcggctgaccatgtgatcg

SEQ ID NO: 872039 - DNA, 75 bp, synthetic construct
  source 1..75: mol_type = other DNA
tgcgtgaaaagatgaagaccctgtcgcgacactcagagttggcgaaggcgttcgcgtacgcacttaaccagtggc

SEQ ID NO: 872040 - DNA, 75 bp, synthetic construct
  source 1..75: mol_type = other DNA
ctctttattcagcgcctcgccggatttgttaagttgtctgcaattgcgcgcagacaaacagtacaaggcgaaaaa

SEQ ID NO: 872041 - DNA, 75 bp, synthetic construct
  source 1..75: mol_type = other DNA
aacagcgtctggcagcaagaaaagccagagcggctccactgatgcagtcactgtatgactggatacagactcaga

SEQ ID NO: 872042 - DNA, 75 bp, synthetic construct
  source 1..75: mol_type = other DNA
acggttccgacagcgatgcgcgggtgattcaacgtgcgcgtactaacgcccgcctggcggggattggcgaactga

SEQ ID NO: 872043 - DNA, 75 bp, synthetic construct
  source 1..75: mol_type = other DNA
cggtaagctccatgttgatgacacgcctgtcccggtgctgttgctaggcaataagaaaacgaagaccgggcggtt

SEQ ID NO: 872044 - DNA, 75 bp, synthetic construct
  source 1..75: mol_type = other DNA
ttgtctaattcgtcagattctgaccagacggttcaggctgtacgcttacgaaagatccacgatgtgcacgtccgc

SEQ ID NO: 872045 - DNA, 75 bp, synthetic construct
  source 1..75: mol_type = other DNA
tggatgaagcccttcagcactatgtcctgaccgacggcaaactccatgctgacgatatgcctgtcccggtgctgt

SEQ ID NO: 872046 - DNA, 75 bp, synthetic construct
  source 1..75: mol_type = other DNA
gttatccggacagtccgtgaaaagcatgcctgccgtcggtgcgatcgcatcgttcaggccccggctccttcgcgc

SEQ ID NO: 872047 - DNA, 75 bp, synthetic construct
  source 1..75: mol_type = other DNA
tgatcgccaccatgaaggcgggtgtcagctatgtggattaccacatccagttccatcagcgcatcgctaaactgt

SEQ ID NO: 872048 - DNA, 75 bp, synthetic construct
  source 1..75: mol_type = other DNA
gtttcagcggtgtcctgcacgcggatgcgtacgccgggttcaacgagctgtatcgcaatggtgggataacggaag

SEQ ID NO: 872049 - DNA, 75 bp, synthetic construct
  source 1..75: mol_type = other DNA
gattcaggggtgtcctgcatgcggatgcgtacgccgggttcaacgagctgtatcgcaatggtgggataacggaag

SEQ ID NO: 872050 - DNA, 75 bp, synthetic construct
  source 1..75: mol_type = other DNA
gattcagtggtgtcctgcaggcggatgcgtacgccgggttcaacgagctgtatcgcaatggtgggataacggaag

SEQ ID NO: 872051 - DNA, 75 bp, synthetic construct
  source 1..75: mol_type = other DNA
tgttcgatattatcgcagcaaccatttcggtgctggggattgcgccgaacaaactggtgcttaaaacccgtgaac

SEQ ID NO: 872052 - DNA, 75 bp, synthetic construct
  source 1..75: mol_type = other DNA
ttcaggactatgtcctgactgacggtaaactccatgccgatgataccccggtccaggtgctgttgccgggcaata

SEQ ID NO: 872053 - DNA, 75 bp, synthetic construct
  source 1..75: mol_type = other DNA
tggcgaaagcgttcgcatacgccctgaaccagtggccggcgctgacgtactatgcagatgatggctgggctgagg

SEQ ID NO: 872054 - DNA, 75 bp, synthetic construct
  source 1..75: mol_type = other DNA
aaaccgagtacgaactggcctgtatgcgtgaagcgcagaaaatggcggtcaacggtcatcgcgcggcagaagaag

SEQ ID NO: 872055 - DNA, 75 bp, synthetic construct
  source 1..75: mol_type = other DNA
tcgcttacagcccggacagaaaaggcatccatccgcagactcatcttgcttgcttcagcggtgtgctgcaagcgg

SEQ ID NO: 872056 - DNA, 75 bp, synthetic construct
  source 1..75: mol_type = other DNA
agaaaacgaagaccgggcggttaggacctacgttcgtgacgaccgtaacgccgggtcaacgctggcgccggcggt

SEQ ID NO: 872057 - DNA, 75 bp, synthetic construct
  source 1..75: mol_type = other DNA
ccgacaaacagtacaaagcgaaaaacggtccgctggattgcgtgcagaaaaattatcacgtcgctgaaagcacgc

SEQ ID NO: 872058 - DNA, 75 bp, synthetic construct
  source 1..75: mol_type = other DNA
ggtatcgccggaccggggctgctggcccgcgtgctgacctcaaagtatgcagagcacacaccgctgtatcgccag

SEQ ID NO: 872059 - DNA, 75 bp, synthetic construct
  source 1..75: mol_type = other DNA
tgaggcggacaatacatcgctgaaaatgcgttgcggatggtcagtctgggccgcaaaaactacctgttcttcggt

SEQ ID NO: 872060 - DNA, 75 bp, synthetic construct
  source 1..75: mol_type = other DNA
agaactggcgaaagcgttcgcatacgccctgaaccagtggccggcgctgacgtactatgcgaacgatggctgggc

SEQ ID NO: 872061 - DNA, 75 bp, synthetic construct
  source 1..75: mol_type = other DNA
gaaactgggcgagaagggcgagtttctggaagttaccgaatataacgctcacttgtgggtgaacctgacggatta

SEQ ID NO: 872062 - DNA, 75 bp, synthetic construct
  source 1..75: mol_type = other DNA
cgttcgcaccccgtcagccctgacggaggaagccctgaaacggatcggcgagttgtatgccatcgaggcggaaat

SEQ ID NO: 872063 - DNA, 75 bp, synthetic construct
  source 1..75: mol_type = other DNA
gcaactgaccaatccgctgccgaaagggccatacggtacagtgttgagcaacccgccatacggagaacgtctgga

SEQ ID NO: 872064 - DNA, 75 bp, synthetic construct
  source 1..75: mol_type = other DNA
tgcaaactgaatggagtagatccagaacgctaccttcaccatatccttgacgtcattgctgactggccggtaaag

SEQ ID NO: 872065 - DNA, 75 bp, synthetic construct
  source 1..75: mol_type = other DNA
cgaaagatccacgatgtgcacgtccgcatcccgtcagcactgacggaagaagccctggagcagatcggtcagttg

SEQ ID NO: 872066 - DNA, 75 bp, synthetic construct
  source 1..75: mol_type = other DNA
cggcttcagaaagagagcgatacgctgactggtagggtgtatgacccggcagtacagcgtccgttgcgtcagacc

SEQ ID NO: 872067 - DNA, 75 bp, synthetic construct
  source 1..75: mol_type = other DNA
cgtccgcatcccgtcagcaccgacggaagaagccctggagcagatcggtcagttgtacgccatagaggcggatat

SEQ ID NO: 872068 - DNA, 75 bp, synthetic construct
  source 1..75: mol_type = other DNA
gggtgagcaatatgacccggtactgccatcccccctgcgccagtcttcagcccgtaaaccgttaccggcttcact

SEQ ID NO: 872069 - DNA, 75 bp, synthetic construct
  source 1..75: mol_type = other DNA
gtgtagtgttgagtcgttctgtactgtcgggctgggtggatgcgtgttgtcgtctgctggcaccgctggatgaag

SEQ ID NO: 872070 - DNA, 75 bp, synthetic construct
  source 1..75: mol_type = other DNA
cggataataatgctgcggaaagagcgcttcgtgcagtctgtctcggaaagaaaaactttatgttctttggcagcg

SEQ ID NO: 872071 - DNA, 75 bp, synthetic construct
  source 1..75: mol_type = other DNA
tacagcccggacagaaaaggcatccacccgcagacccatcttgccggcttcagcggtgtgctgcaggtggatgca

SEQ ID NO: 872072 - DNA, 75 bp, synthetic construct
  source 1..75: mol_type = other DNA
ccctgcgggcggtcagtctgggtcgtaaaaacttcctgttcttcggctctgaccatggtggtgagcggggagcgc

SEQ ID NO: 872073 - DNA, 75 bp, synthetic construct
  source 1..75: mol_type = other DNA
tgctgacggacatgaataaccgaccaatgaagggatacggtaatcaaacccgcgcagaacgcttccgcatgctgg

SEQ ID NO: 872074 - DNA, 75 bp, synthetic construct
  source 1..75: mol_type = other DNA
ttttcctgctgaaacagcgcctggccgaacaggaagtgctgatccacgccctgcaggaaaagctgagcaaccggg

SEQ ID NO: 872075 - DNA, 75 bp, synthetic construct
  source 1..75: mol_type = other DNA
gtgcgatgccatcgtgcaggcacctgcaccttcgcggcccatcgagcggggtatcgccggaccggggctgctggc

SEQ ID NO: 872076 - DNA, 75 bp, synthetic construct
  source 1..75: mol_type = other DNA
ctaccttcgccatgtgcttggcgtcatagcagactggccggtcaaccgggtcagcgaactgcttccgtggcgtat

SEQ ID NO: 872077 - DNA, 75 bp, synthetic construct
  source 1..75: mol_type = other DNA
cggttgtgggcgtatgttcgtgatgaccgcaatgcagggtcagcgttggcacctgcagtgtggttcgcttacagc

SEQ ID NO: 872078 - DNA, 75 bp, synthetic construct
  source 1..75: mol_type = other DNA
ttcagtggtgtactgcaggcggatgcatacgccgggttcaacgagctgtaccgggatggccggataacggaagcc

SEQ ID NO: 872079 - DNA, 75 bp, synthetic construct
  source 1..75: mol_type = other DNA
ccagcaccgagaacgagaaagatctctaccagcgtcagctggaagtgttcctcgatccgaacgatccgaaagtca

SEQ ID NO: 872080 - DNA, 75 bp, synthetic construct
  source 1..75: mol_type = other DNA
gtcattacaaacgtgctgaaaccgttgacggtaaagttgatacccgtgcgctggaagaggtcggtctgaccgaag

SEQ ID NO: 872081 - DNA, 75 bp, synthetic construct
  source 1..75: mol_type = other DNA
gagtttgacaaactggcgaaagacaagaacttcgacaacatccagaaggcgatgtatagccagttcgaaaacacc

SEQ ID NO: 872082 - DNA, 75 bp, synthetic construct
  source 1..75: mol_type = other DNA
ggagtggaaaaaaacgcgacgtctctccatgcgccaggagcatcgtgccggcgaaaagctttttatcgacttctg

SEQ ID NO: 872083 - DNA, 75 bp, synthetic construct
  source 1..75: mol_type = other DNA
ggaagaagccctggagcagatcggtcagttgtacgccatagaggcggatataaggggaatgccggcagagcagcg

SEQ ID NO: 872084 - DNA, 75 bp, synthetic construct
  source 1..75: mol_type = other DNA
tggagctgagtcgttcactgccgtcgggctgggtggatgcatgctgccggctactgtcaccgctggaagaagcgc

SEQ ID NO: 872085 - DNA, 75 bp, synthetic construct
  source 1..75: mol_type = other DNA
agaacgccttacggggagtggccgtaggccggaaaaactggctcttcgcgggttccgacagcggtggcgaacatg

SEQ ID NO: 872086 - DNA, 75 bp, synthetic construct
  source 1..75: mol_type = other DNA
ccgtcgtatcggggcactgtacgctatcgagtctgagatctgcggcagtccggcagaagagcgactggcggtcag

SEQ ID NO: 872087 - DNA, 75 bp, synthetic construct
  source 1..75: mol_type = other DNA
acgaccgtaacgccgggtcaacgctggcgccggcggtgttgttcgcttacagcccggacagaaaaggcatccatc

SEQ ID NO: 872088 - DNA, 75 bp, synthetic construct
  source 1..75: mol_type = other DNA
gctgcccgaactgcggcggttcactgagctatctgggcgaggataccaccgaacagctggagttgatgcgtagcg

SEQ ID NO: 872089 - DNA, 75 bp, synthetic construct
  source 1..75: mol_type = other DNA
gaaagtgatacccttaccggtcgggttgacgacccggccgtgcagcgcccgctgcgtcagacccgcacccgcaaa

SEQ ID NO: 872090 - DNA, 75 bp, synthetic construct
  source 1..75: mol_type = other DNA
tcgctggtggtggcgcgagaatgggaacgcggcaccatggaggcgttactctctacggagataacccgcacggaa

SEQ ID NO: 872091 - DNA, 75 bp, synthetic construct
  source 1..75: mol_type = other DNA
cgattacccgcaaccagttcaacgccgctcaggtggcactgaacgccgctttcctgccgtcgattatgctttccg

SEQ ID NO: 872092 - DNA, 75 bp, synthetic construct
  source 1..75: mol_type = other DNA
tactcatcgaaccggcaggggaaacacccggagcaacacctccgccccttccggggtatcctgcaggcggatgcg

SEQ ID NO: 872093 - DNA, 75 bp, synthetic construct
  source 1..75: mol_type = other DNA
caaccgggagcgcgaaatagaccatctgcaggcgcagctggataaactccgccggatgaacttcggcagtcgttc

SEQ ID NO: 872094 - DNA, 75 bp, synthetic construct
  source 1..75: mol_type = other DNA
aacgcgaaatagaccatctgcaggcacagctggataagctgcgccggatgaacttcggcagccgctcggaaaaag

SEQ ID NO: 872095 - DNA, 75 bp, synthetic construct
  source 1..75: mol_type = other DNA
tgccctgtacgacatcaaaggcttgacgtatcaagggcatttgcaccagttctggcaggccgattttaaaccgga

SEQ ID NO: 872096 - DNA, 75 bp, synthetic construct
  source 1..75: mol_type = other DNA
tatgaaactgtttaagaagtttcgtgggtatttattggtgaagacgcaggttaatgcggtttattatggggggaa

SEQ ID NO: 872097 - DNA, 75 bp, synthetic construct
  source 1..75: mol_type = other DNA
taccgcgcgatccggatttttatcgtaagttaccagatatgcctgcgccgcacgttgagaacttaaaaccttcaa

SEQ ID NO: 872098 - DNA, 75 bp, synthetic construct
  source 1..75: mol_type = other DNA
ttaatggggtttattatggggatgtaaagaaagggttagtgtggattataagaacagatttttcttacatcaaaa

SEQ ID NO: 872099 - DNA, 75 bp, synthetic construct
  source 1..75: mol_type = other DNA
gggtatttattggttaagacacaggttaatggggtttattatggggagtcacagttacactgcgacactattaca

SEQ ID NO: 872100 - DNA, 75 bp, synthetic construct
  source 1..75: mol_type = other DNA
ttcagtgatgttgccgagtggctagagtcattaggccgtaacgctgtgaatgttgtattcaacggcggggatcgt

SEQ ID NO: 872101 - DNA, 75 bp, synthetic construct
  source 1..75: mol_type = other DNA
cgaccgttgtcggggagaatacggtctcactggtcagacggtgtatcaaagcggtggatgaggacaaaaaagtcc

SEQ ID NO: 872102 - DNA, 75 bp, synthetic construct
  source 1..75: mol_type = other DNA
ctgcaaaatctgagtacttcaacctgactatcaaaggcatcgggtatctcagcaacattcgccaggttaaccatc

SEQ ID NO: 872103 - DNA, 75 bp, synthetic construct
  source 1..75: mol_type = other DNA
catatcgatggactgggttacctgagcaatattcgcgaaattaatactgctacgggttcattcctgagctgtacg

SEQ ID NO: 872104 - DNA, 75 bp, synthetic construct
  source 1..75: mol_type = other DNA
agtcattaggccgtaacgctgtgaatgttgtcttcaacggtggggatcgtttttactgccgccatcgacaatacc

SEQ ID NO: 872105 - DNA, 75 bp, synthetic construct
  source 1..75: mol_type = other DNA
tggcttactaccaaacgccgaaagagtttcccggatggttacgggatctccaccggcaatatgactttgatacca

SEQ ID NO: 872106 - DNA, 75 bp, synthetic construct
  source 1..75: mol_type = other DNA
cgttattatcttgccgttttgcaggtgtataacgatagccagattcgtaaccacagcaattataacgatgtgcgt

SEQ ID NO: 872107 - DNA, 75 bp, synthetic construct
  source 1..75: mol_type = other DNA
gggtatttattgatgaagacccaggttaatgcggtttattatggggggaacacaaaaaaccgccaacataataca

SEQ ID NO: 872108 - DNA, 75 bp, synthetic construct
  source 1..75: mol_type = other DNA
accggtatgacggtcaccgaagtgaaaggttttggccgtcagaaaggccataccgagctgtatcgtggcgcggag

SEQ ID NO: 872109 - DNA, 75 bp, synthetic construct
  source 1..75: mol_type = other DNA
gctgccgttgaaactgcgcggatcaatctggcttacaccaaagtcacctctccgattagcggtcgcattggtaag

SEQ ID NO: 872110 - DNA, 75 bp, synthetic construct
  source 1..75: mol_type = other DNA
ccagtccagcaacgacttcttgcgtctgaaacaagaactcgctaacggcacgctgaagcaagagaacggcaaagc

SEQ ID NO: 872111 - DNA, 75 bp, synthetic construct
  source 1..75: mol_type = other DNA
gcaaaatcggtgacggtaaaatcttcgtctttgacgtggcacgcgtgatccgtattcgtacgggtgaagaggacg

SEQ ID NO: 872112 - DNA, 75 bp, synthetic construct
  source 1..75: mol_type = other DNA
tatatggtggattttctgccgaaggtgaaaattgagatcgtcgtacccgacgacattgtggatacctgtgtagac

SEQ ID NO: 872113 - DNA, 75 bp, synthetic construct
  source 1..75: mol_type = other DNA
tatatggtggattttctgccgaaggtgaaaattgagattgtcgtaccggacgacattgtcgatacctgtgtcgat

SEQ ID NO: 872114 - DNA, 75 bp, synthetic construct
  source 1..75: mol_type = other DNA
ttaatggggtttattatggggggaataaaggaaatacgagaacgtatttttatttaaatagtttagataaatatt

SEQ ID NO: 872115 - DNA, 75 bp, synthetic construct
  source 1..75: mol_type = other DNA
tgtataatgatagccagattcgtaaccacagtaattataacgatgtacgtgactatattaatgaagtcatatact

SEQ ID NO: 872116 - DNA, 75 bp, synthetic construct
  source 1..75: mol_type = other DNA
caccggcaatatgactttgataccatcctctgctttggtgactgccgcccattgcacaaagaagcaaaacgttgg

SEQ ID NO: 872117 - DNA, 75 bp, synthetic construct
  source 1..75: mol_type = other DNA
gcgactgcgctggcaaccgtgcagcaacttgatccgatctacgttgatgtgacccagtccagcaacgacttcctg

SEQ ID NO: 872118 - DNA, 75 bp, synthetic construct
  source 1..75: mol_type = other DNA
gggtatttattggtgaagacgcaggttaatggggtttattatggggggaacataacaaaccgccaacataatata

SEQ ID NO: 872119 - DNA, 75 bp, synthetic construct
  source 1..75: mol_type = other DNA
atgggaccttttttcaatgacgtcgccgaatggttagagtcattaggacgtaacgctgtgaatgttgtattcaac

SEQ ID NO: 872120 - DNA, 75 bp, synthetic construct
  source 1..75: mol_type = other DNA
aaagaggtggtatataaagccgagaaacaccagtcaacaccaccagagactgaacagccggtatccagagagtat

SEQ ID NO: 872121 - DNA, 75 bp, synthetic construct
  source 1..75: mol_type = other DNA
atggctcatcggcctacacccgcgacggctctttccaggtggatcagaacgggcagttggtgacggcgggtggtt

SEQ ID NO: 872122 - DNA, 75 bp, synthetic construct
  source 1..75: mol_type = other DNA
taacccagcaaggccaggcagctccggtacaggttgggcagctcaatctcaccacctttatgaacgacaccggac

SEQ ID NO: 872123 - DNA, 75 bp, synthetic construct
  source 1..75: mol_type = other DNA
cagccgggggcacagtcttccgaacaaaccaccttaccatccggattacaaatcggtacgggggtacgcccggtc

SEQ ID NO: 872124 - DNA, 75 bp, synthetic construct
  source 1..75: mol_type = other DNA
aacgttaaagcgcgcgtttgcaagtctgaaaacgctggggcttttgcgttgtgaaaagctcaataaatcaaagcg

SEQ ID NO: 872125 - DNA, 75 bp, synthetic construct
  source 1..75: mol_type = other DNA
cgcatgggccaatgatgtgcgcacaatgcggatgctggatggcagaactcacagacaaatttgcgaaatgtttgg

SEQ ID NO: 872126 - DNA, 75 bp, synthetic construct
  source 1..75: mol_type = other DNA
accattcgccagccgggggcacagtcttccgaacaaaccaccttaccctccggattacaaatcggcacgggggta

SEQ ID NO: 872127 - DNA, 75 bp, synthetic construct
  source 1..75: mol_type = other DNA
aaaactctcttgtccggacgcttcgcaaccggacgagctgacggctgaacaggcgtttttaacccgccatcctga

SEQ ID NO: 872128 - DNA, 75 bp, synthetic construct
  source 1..75: mol_type = other DNA
agcttcgcgaaaaatgggatgagctggttattcgtctggggcgttcgcctgtacagcgttgcgtgaatcacattt

SEQ ID NO: 872129 - DNA, 75 bp, synthetic construct
  source 1..75: mol_type = other DNA
atgtttatcgtggaatcgtatgctgtcgccataataatgtgttttattaccatgatttgcaggggggcatgggcg

SEQ ID NO: 872130 - DNA, 75 bp, synthetic construct
  source 1..75: mol_type = other DNA
gtggcggaagagctggtcaacatgatccaggtacagcgtgcttacgaaatcaacagtaaagcggtatctaccacc

SEQ ID NO: 872131 - DNA, 75 bp, synthetic construct
  source 1..75: mol_type = other DNA
tagcgtgtgcgcagtggatctggggacgaatcgtgagtctttacgagcaggctgccagcgatgatggcgaaatca

SEQ ID NO: 872132 - DNA, 75 bp, synthetic construct
  source 1..75: mol_type = other DNA
aaacacttttcgtccggaagcttcgcaaccggacccgcagacggctgaacaggattttttaatccggcaccctgg

SEQ ID NO: 872133 - DNA, 75 bp, synthetic construct
  source 1..75: mol_type = other DNA
gagaatacaacagagattactacagagaataaaaacacttttcgtccggaagcttcgcaaccggacccgcagacg

SEQ ID NO: 872134 - DNA, 75 bp, synthetic construct
  source 1..75: mol_type = other DNA
tcgtagcgtcgtgcaaaccgtacgttcctccttcaacaacattaatgcttctatcagtagtattaacgcctacaa

SEQ ID NO: 872135 - DNA, 75 bp, synthetic construct
  source 1..75: mol_type = other DNA
gtaattactacccggaactggcggcgctgaatgttgaaaactttaaaaccgacaaaccacagccggtgaacactc

SEQ ID NO: 872136 - DNA, 75 bp, synthetic construct
  source 1..75: mol_type = other DNA
cgttctggtcagagtcaacgttaaagcgcgcgtttgcaagtctgaaaacgctggggcttttgcgttgtgaaaagc

SEQ ID NO: 872137 - DNA, 75 bp, synthetic construct
  source 1..75: mol_type = other DNA
ggtaaaaggagcgagccataccatcgaagggaaaaaacaggccggaaaacgcctgtggatagcggagggttatgc

SEQ ID NO: 872138 - DNA, 75 bp, synthetic construct
  source 1..75: mol_type = other DNA
taaaaatagggatgaaaactatcagcatctgaagagtaaactgacagacgctggatggttcataaacagcaatta

SEQ ID NO: 872139 - DNA, 75 bp, synthetic construct
  source 1..75: mol_type = other DNA
ataccgtgctggcgaacgaagtgaccgcacgtaataaccttgataacgcggtagagcagctgcgccagatcaccg

SEQ ID NO: 872140 - DNA, 75 bp, synthetic construct
  source 1..75: mol_type = other DNA
tagctctggttccggtaaaagtaccttgctgcacctgctgggcgggctggatacgccaacctccggcgatgtgat

SEQ ID NO: 872141 - DNA, 75 bp, synthetic construct
  source 1..75: mol_type = other DNA
ccgaccgtgaccttaacggcgacggccagagcaaagccgttgtggccgcagatgcctgtgagggcgttgttgccc

SEQ ID NO: 872142 - DNA, 75 bp, synthetic construct
  source 1..75: mol_type = other DNA
aaatgaaacgttccattggttcaaaacgacccaatgtcatcgggtcaaaatggcccgatgatcctacagagaata

SEQ ID NO: 872143 - DNA, 75 bp, synthetic construct
  source 1..75: mol_type = other DNA
ggctatccggattaatgatttcaggttgtatcgtgaaattactgacggaaaaagcatcacgtgcatgatcgccgg

SEQ ID NO: 872144 - DNA, 75 bp, synthetic construct
  source 1..75: mol_type = other DNA
caacagagattactacagagaataaaaagacttctcgtccggaagcttcgcaaccggacccgcagacggttgaac

SEQ ID NO: 872145 - DNA, 75 bp, synthetic construct
  source 1..75: mol_type = other DNA
tggaagaagtcacagacaaatttgcgaaatgttcagccgggcacaacgggatccgttctggataaaaaacatcaa

SEQ ID NO: 872146 - DNA, 75 bp, synthetic construct
  source 1..75: mol_type = other DNA
tgccagagacgcagcgacgggtttttaccgggccattcagaaagtcagggaaacgcttcaggcattgcgtgacgc

SEQ ID NO: 872147 - DNA, 75 bp, synthetic construct
  source 1..75: mol_type = other DNA
ccactgtgccgggaacgcagcccggacgcgctggccgcttcctgaatttccttaccggggtaaatccggctgccg

SEQ ID NO: 872148 - DNA, 75 bp, synthetic construct
  source 1..75: mol_type = other DNA
atggcaaaaaacctgaaagcctccctgattgtcgatttactcggcaatatttccgccaaatcccgccagtggtca

SEQ ID NO: 872149 - DNA, 75 bp, synthetic construct
  source 1..75: mol_type = other DNA
tcagattttgaccgccttcagggcagcattaccggcaccatcgggcggataagcaacctttacgggatgctggcg

SEQ ID NO: 872150 - DNA, 75 bp, synthetic construct
  source 1..75: mol_type = other DNA
tgcccgtgatgcagtgacagggttttatcaggcgatcagaaaggtacgcgacacgcttcaggctctgcgggatgc

SEQ ID NO: 872151 - DNA, 75 bp, synthetic construct
  source 1..75: mol_type = other DNA
accacctgggggctggcgggggttatgcaggaatacgcctccagtcgcgggttcggcatgagtgacagggaagcc

SEQ ID NO: 872152 - DNA, 75 bp, synthetic construct
  source 1..75: mol_type = other DNA
ggtgctggatgcggcaaaagccgtggcgttgctggtgacgaacccggatagcacgctggcagagatgtcagaaac

SEQ ID NO: 872153 - DNA, 75 bp, synthetic construct
  source 1..75: mol_type = other DNA
tattccgcacggactggcgaacgccatgctgctgcccacggtgatggagtttaaccggatggtctgtcgcgaacg

SEQ ID NO: 872154 - DNA, 75 bp, synthetic construct
  source 1..75: mol_type = other DNA
gcacgctggcagaaatgtcagaaaccagcgttctgcaaccgcgcttgccgctgattgccattccaactaccgccg

SEQ ID NO: 872155 - DNA, 75 bp, synthetic construct
  source 1..75: mol_type = other DNA
ctaaatatccccattgagtggggcggcgactggaagacgctgaaagatggcccgcacttccagcttccttatgcg

SEQ ID NO: 872156 - DNA, 75 bp, synthetic construct
  source 1..75: mol_type = other DNA
ccggacattacggcgcatgggcgcaggccgcgcaggaagatatttgtctgcgcagcaacccgcgtaccgccagcc

SEQ ID NO: 872157 - DNA, 75 bp, synthetic construct
  source 1..75: mol_type = other DNA
cattgaagcatacagcgccctgaacgctacaccgtttaccgccagcctggagcagattgtcggcctgtacgcagc

SEQ ID NO: 872158 - DNA, 75 bp, synthetic construct
  source 1..75: mol_type = other DNA
ccccggaggggtggcaggcacgcagtattgatattgatgacacgtccggtcacgggctggatgtgaatgtctgga

SEQ ID NO: 872159 - DNA, 75 bp, synthetic construct
  source 1..75: mol_type = other DNA
gtggtgacgaatctcgacgtgctggaacgtatgcagccttctgaaagcctgctacgcgccgttttgcataccaaa

SEQ ID NO: 872160 - DNA, 75 bp, synthetic construct
  source 1..75: mol_type = other DNA
taacctgcaacactggcacccgcaacacggcaagttgtatatcgaatccccccgctttaacagccgcattaaacg

SEQ ID NO: 872161 - DNA, 75 bp, synthetic construct
  source 1..75: mol_type = other DNA
tgctttccgtcctgatcctgccgacaacagtcgcggccagcaccatcagcaacatgcaacagaataaccggcaac

SEQ ID NO: 872162 - DNA, 75 bp, synthetic construct
  source 1..75: mol_type = other DNA
tttgaaatgcctgtcgaatccaccgctgatattactgacaattgcgacagtggcggactcagcatgcagcaaatg

SEQ ID NO: 872163 - DNA, 75 bp, synthetic construct
  source 1..75: mol_type = other DNA
cccgcgtaattaccgtaaatacctctatcacgcctatctggcctacatggaggcaaacggctaccggaatgtact

SEQ ID NO: 872164 - DNA, 75 bp, synthetic construct
  source 1..75: mol_type = other DNA
ttcaatacccttctgtattttttcttcacaaaggccgaaaatacatattcatcccctgagtggtgggacaggctc

SEQ ID NO: 872165 - DNA, 75 bp, synthetic construct
  source 1..75: mol_type = other DNA
tgcagggcgtaaatcctgatctggtgaaagtgacccgacgggcactggaaatctcggaagtggattttggtatca

SEQ ID NO: 872166 - DNA, 75 bp, synthetic construct
  source 1..75: mol_type = other DNA
ccatttgacagcctgaaaaagagcctgaaaggcttcctggattatgccgatgcggcacagaaaagcggcttacag

SEQ ID NO: 872167 - DNA, 75 bp, synthetic construct
  source 1..75: mol_type = other DNA
ggtgccggtcggctgggcggtggtgccctgtgggccggtgccatggcggctcctgtactgctggacaacagcgcc

SEQ ID NO: 872168 - DNA, 75 bp, synthetic construct
  source 1..75: mol_type = other DNA
acttatcacgtggaaaaaatcacgccggacagtgtagtgctggaacagtctggcaccagaaaaaccctgcgacca

SEQ ID NO: 872169 - DNA, 75 bp, synthetic construct
  source 1..75: mol_type = other DNA
cgtgccggtgaccttgtggtgccactgtatgacgacagcggcgaactggttaaccttcagttaatcagtgctgac

SEQ ID NO: 872170 - DNA, 75 bp, synthetic construct
  source 1..75: mol_type = other DNA
tgctttccgtcctgatcctgccgacaacggtcgcggccggcaccatcagcaacatgcaacagaataaccggcaac

SEQ ID NO: 872171 - DNA, 75 bp, synthetic construct
  source 1..75: mol_type = other DNA
cttgggttatgccacgcgatggcgcatcagccaggggcggcgctgcatattccacacggtctggcgaacgccatg

SEQ ID NO: 872172 - DNA, 75 bp, synthetic construct
  source 1..75: mol_type = other DNA
tagggctggcaggtattaccgaaggggcgatcccgatggcgattgaagatccgctgcgggttattggttcgtttg

SEQ ID NO: 872173 - DNA, 75 bp, synthetic construct
  source 1..75: mol_type = other DNA
atgaggggtgtggctccctgcaactgaacggcgcagatcttctgacggataacagcctgctgacagcggtcatta

SEQ ID NO: 872174 - DNA, 75 bp, synthetic construct
  source 1..75: mol_type = other DNA
gacagcctgatgacagcggttctgatttcactgttcactgaccgccgggcactgacgtcggatgaaatccctgat

SEQ ID NO: 872175 - DNA, 75 bp, synthetic construct
  source 1..75: mol_type = other DNA
agcgttttaacggcattcccgcgctttctgtgcctgttgccgagccgattcgccatgcggaagcgttgatccaac

SEQ ID NO: 872176 - DNA, 75 bp, synthetic construct
  source 1..75: mol_type = other DNA
ataaacattgcagaggaaaagggtatttctcttgactggttacttacaggtaaaggcgaggataggagcgaggta

SEQ ID NO: 872177 - DNA, 75 bp, synthetic construct
  source 1..75: mol_type = other DNA
ggatggcccggaagcggttgatttagtggtgttgctggcgattcctcccaatgaagcgggtactacgcacatgca

SEQ ID NO: 872178 - DNA, 75 bp, synthetic construct
  source 1..75: mol_type = other DNA
tatcattacccagtttgcgctggggtcggtttatacctggagcctgtttaacggcgcgctttccgccaagctgga

SEQ ID NO: 872179 - DNA, 75 bp, synthetic construct
  source 1..75: mol_type = other DNA
atggacatggagtcgcaaaaaatattgtttgcactttccggtaatgactccaacttattgatagtgttttatgtt

SEQ ID NO: 872180 - DNA, 75 bp, synthetic construct
  source 1..75: mol_type = other DNA
tgatgaagcgctggcgtggctgcataaaagcggtgttgccacatccgtggtatgtcatgccatgcgtgtggggca

SEQ ID NO: 872181 - DNA, 75 bp, synthetic construct
  source 1..75: mol_type = other DNA
atggctgatattgcaattgtatgggatcaggggtgcggttcgctgcaactgaacggtgccgacttgctgacggat

SEQ ID NO: 872182 - DNA, 75 bp, synthetic construct
  source 1..75: mol_type = other DNA
gatatccgccaggctgtaactggttttccaggactggcgataatcggtaatgactccaacttattgatagtgttt

SEQ ID NO: 872183 - DNA, 75 bp, synthetic construct
  source 1..75: mol_type = other DNA
ggcagtctgatgctgtttgtggtgggggaacctgtcgcctggatcaataactcgcttaccgcctggctgaacggt

SEQ ID NO: 872184 - DNA, 75 bp, synthetic construct
  source 1..75: mol_type = other DNA
gattatcgacgcggtgagcgggcgcaagcaggtgttagcccatgcctcgctgatgccggatgtggcgattctcga

SEQ ID NO: 872185 - DNA, 75 bp, synthetic construct
  source 1..75: mol_type = other DNA
gtttagtcagattggtcgggcactgcgaactaaaaaatccgacgatcgtgacgctattaacgcggtaagtgagct

SEQ ID NO: 872186 - DNA, 75 bp, synthetic construct
  source 1..75: mol_type = other DNA
tgtcatctggcagaagtaagcccagaaagcatcggctacgttgaaacccacggtaccggcacccgtattggcgat

SEQ ID NO: 872187 - DNA, 75 bp, synthetic construct
  source 1..75: mol_type = other DNA
gtgcggtgagcagttgcggacagcaagcgcaaacgcgcgggttgaaacatctgttcgtgatggcagacagctttt

SEQ ID NO: 872188 - DNA, 75 bp, synthetic construct
  source 1..75: mol_type = other DNA
tctgcaacgggtaaaaacatttagcgtcccgccggtgacgctttgcggctctggcgcggtgagcagttgcggaca

SEQ ID NO: 872189 - DNA, 75 bp, synthetic construct
  source 1..75: mol_type = other DNA
tttttcaggcattcgataccctgaatttgcagcgggtgaaaacatttagtgttccaccggtgacgctttgcggtc

SEQ ID NO: 872190 - DNA, 75 bp, synthetic construct
  source 1..75: mol_type = other DNA
cagttatacaagcagttaatagtttacatccaacaacgttgtttcactttactaaaaatgaagaggcattctata

SEQ ID NO: 872191 - DNA, 75 bp, synthetic construct
  source 1..75: mol_type = other DNA
aggagtgatgatcgaccaccgtgcggccatgaacaccactggaagacatcaacgaacgctttggcctcaatgcgc

SEQ ID NO: 872192 - DNA, 75 bp, synthetic construct
  source 1..75: mol_type = other DNA
gggtctcacgcaattggagccgtcgctgcccgtgctgatcatcgacgacggaatgctggacacgcctgctgcgcc

SEQ ID NO: 872193 - DNA, 75 bp, synthetic construct
  source 1..75: mol_type = other DNA
aagtggattttggtatcaccgaaggattgcgcagtcgttatcgtcagaagcagctcgtgaccacaggcaagagcc

SEQ ID NO: 872194 - DNA, 75 bp, synthetic construct
  source 1..75: mol_type = other DNA
gggacgatactagtcctacaataactacccaatgttatggatatggtaatgggcgattcggacatcctgagcaaa

SEQ ID NO: 872195 - DNA, 75 bp, synthetic construct
  source 1..75: mol_type = other DNA
ccttaaacgaatcttgcactctttaccaggtggtacgtgggatgattggcctgaagaaattagagcggattgcca

SEQ ID NO: 872196 - DNA, 75 bp, synthetic construct
  source 1..75: mol_type = other DNA
tctttctcccagagcatttttggagtttttggctaagatatttaccctgggttatgtggattttagcaaacgctc

SEQ ID NO: 872197 - DNA, 75 bp, synthetic construct
  source 1..75: mol_type = other DNA
caaaattaacctgtctaatattcttattgattccttagatgatacaaaagttaatctcgaaaaggtcatcgattc

SEQ ID NO: 872198 - DNA, 75 bp, synthetic construct
  source 1..75: mol_type = other DNA
gcatggcttatattcacaaggcagaacacttggaagcccgcaaggcgatgatgcagtggtggtcggactatctgg

SEQ ID NO: 872199 - DNA, 75 bp, synthetic construct
  source 1..75: mol_type = other DNA
tcgcaggagttaaataattcacagaagttaaataattcgcaggagttaaataactcgcaggtgagttgtaaaggt

SEQ ID NO: 872200 - DNA, 75 bp, synthetic construct
  source 1..75: mol_type = other DNA
tcaatctaaagattttagctgcgatcaatctaaaattaaaatagctgagaccttattttttaatctcgataaaga

SEQ ID NO: 872201 - DNA, 75 bp, synthetic construct
  source 1..75: mol_type = other DNA
tgaattaaaaattagaacaagaatgatgaaaatcctccggaatggcaaaatcaatatatatgaatatatgaatat

SEQ ID NO: 872202 - DNA, 75 bp, synthetic construct
  source 1..75: mol_type = other DNA
taataatctggatgtttacagcaaaagcgaaggtgataaccgttacctgcgcagggagcagaacggcgcagacat

SEQ ID NO: 872203 - DNA, 75 bp, synthetic construct
  source 1..75: mol_type = other DNA
attactgaccaacaataatgagttgtacgcggcaggaagttgcgcggcgatcgagaagccagagaagggagtgac

SEQ ID NO: 872204 - DNA, 75 bp, synthetic construct
  source 1..75: mol_type = other DNA
ctggtcagggaggtataccgtgggacgatatccagactggccgtttcaccggagcaggaaaatcagtttatagcc

SEQ ID NO: 872205 - DNA, 75 bp, synthetic construct
  source 1..75: mol_type = other DNA
attggagtgcgttattccggccgcggggccaaaatgcgaatgccgcatatcgtacccctctcagaacagtccatc

SEQ ID NO: 872206 - DNA, 75 bp, synthetic construct
  source 1..75: mol_type = other DNA
agtgcattctgtgcggaagtcagatgcgttttacggggctgaagcggggttaccgactggcagagctggtcctga

SEQ ID NO: 872207 - DNA, 75 bp, synthetic construct
  source 1..75: mol_type = other DNA
accgcaaattcagccggtgcagcagccacaaattcaggctactcaacaaccgcaaatccagccagtgcagccagt

SEQ ID NO: 872208 - DNA, 75 bp, synthetic construct
  source 1..75: mol_type = other DNA
ccatattgtgtctattttgcttaaccgcaattacgggcaacattcagcgattatggcgggattcagtcacgttac

SEQ ID NO: 872209 - DNA, 75 bp, synthetic construct
  source 1..75: mol_type = other DNA
catcttatgctggcaaggtgcctgcatcgttcatgatgagtttaagactcaggcgttaacccgcttacaaaaaca

SEQ ID NO: 872210 - DNA, 75 bp, synthetic construct
  source 1..75: mol_type = other DNA
cagcgatttatcctttcccagcaaagccgacgccgttaagcattgatgaaaaagcgtattaccgcgagaaaataa

SEQ ID NO: 872211 - DNA, 75 bp, synthetic construct
  source 1..75: mol_type = other DNA
gattgggtggtaacttcaagcattgccgtcgaacttattgatcatctggatagtttgggtgaaaaaatcatctgg

SEQ ID NO: 872212 - DNA, 75 bp, synthetic construct
  source 1..75: mol_type = other DNA
tcgatatggccgatgcggtcggttccacaagtcagttgatcaatgctgcgaaaacattgccgcatcaacggctta

SEQ ID NO: 872213 - DNA, 75 bp, synthetic construct
  source 1..75: mol_type = other DNA
acaggcaattatcgcgaccgcagatggccgcgttgtttatgccggtaacgcgctgcgcgctgatgaatcccctaa

SEQ ID NO: 872214 - DNA, 75 bp, synthetic construct
  source 1..75: mol_type = other DNA
tatttctttataaatgaagctggatattacgaccttgaagatgataaaaaacattggaacaattatttatataga

SEQ ID NO: 872215 - DNA, 75 bp, synthetic construct
  source 1..75: mol_type = other DNA
acggctgtatgctgcgcgcttatcgtcgtcatattgtcgatgccatgttgcactgccatgaacgcagcaccttta

SEQ ID NO: 872216 - DNA, 75 bp, synthetic construct
  source 1..75: mol_type = other DNA
gaatttaagactcaggcgttaacccgcttgcaagaagaatacccggatgctgccatactggtgcatccagaatca

SEQ ID NO: 872217 - DNA, 75 bp, synthetic construct
  source 1..75: mol_type = other DNA
gtaccctgatgctgccatattggtgcatcctgaatcaccacaatccatcgttgagatggcagatgcgatcggttc

SEQ ID NO: 872218 - DNA, 75 bp, synthetic construct
  source 1..75: mol_type = other DNA
tcgatatggcggatgcggtcggttccacaagtcagttgatcaatgctgcgaaaacattgccgcatcggcgcctta

SEQ ID NO: 872219 - DNA, 75 bp, synthetic construct
  source 1..75: mol_type = other DNA
accggctcccggtctgcggacaatatcggtggggtctattatcgcccggttcagatttatattaataatgcctgg

SEQ ID NO: 872220 - DNA, 75 bp, synthetic construct
  source 1..75: mol_type = other DNA
tacactcgaagaagaggagattgccgctaccgtcgccaaatgtgtagaggcattaaaagagcgattccaggcatc

SEQ ID NO: 872221 - DNA, 75 bp, synthetic construct
  source 1..75: mol_type = other DNA
aggatattgcgctaacggttgggaggctgcgtgttgagctggaagccgcagagaacaaccttattgatagtgagt

SEQ ID NO: 872222 - DNA, 75 bp, synthetic construct
  source 1..75: mol_type = other DNA
aggtccgactaagtggtcaggccattgcgcaacacgttctgaaaaacaacgctgaatttattgctgcctttaatc

SEQ ID NO: 872223 - DNA, 75 bp, synthetic construct
  source 1..75: mol_type = other DNA
ttatcgaactgcctgcagatgcgccgattggcaccgacatccgcgaatacctgaaactcgatgacaacaccatcg

SEQ ID NO: 872224 - DNA, 75 bp, synthetic construct
  source 1..75: mol_type = other DNA
gatggaacgtgcgacccgtctgctgatcgacatctgcggtggtgaggctggcccggtaattgatatcaccaacga

SEQ ID NO: 872225 - DNA, 75 bp, synthetic construct
  source 1..75: mol_type = other DNA
gatgctgtgctccttttctgagctgggaatttctgacgatcataacggcattatcgagctgcctgcggatgcgcc

SEQ ID NO: 872226 - DNA, 75 bp, synthetic construct
  source 1..75: mol_type = other DNA
attatctgatttttaagcagggtttcataaaaagaagaatgcttgttaatccagtgacacatcctgtcggcgtga

SEQ ID NO: 872227 - DNA, 75 bp, synthetic construct
  source 1..75: mol_type = other DNA
tcactaataagctgggcatgcatgcccggcctgctatgaaattgtttgaattaatgcaaggttttgacgctgaag

SEQ ID NO: 872228 - DNA, 75 bp, synthetic construct
  source 1..75: mol_type = other DNA
tcacaaacaagctgggcatgcatgcccggcctgcaatgaagctgtttgaattaatgcagggttttgacgctgaag

SEQ ID NO: 872229 - DNA, 75 bp, synthetic construct
  source 1..75: mol_type = other DNA
tcctccttcaacaacattaatgcatctatcagtagcattaacgcctacaaacaagccgtggtttccgcccaaagc

SEQ ID NO: 872230 - DNA, 75 bp, synthetic construct
  source 1..75: mol_type = other DNA
gacaaacctcaaccggttaacacactgctgaaagaggccgaaaaacgcaacctgacgctattgcaggcgcgtttg

SEQ ID NO: 872231 - DNA, 75 bp, synthetic construct
  source 1..75: mol_type = other DNA
taccgcgacgcgaacggcatcaactctaacgcgaccagtgcgtccctgcagttaactcaatccatttttgatatg

SEQ ID NO: 872232 - DNA, 75 bp, synthetic construct
  source 1..75: mol_type = other DNA
gaaatgtcagcaatgcgtctttctctgtggaccggcctgctggcaaccgtggtgtacaaccagaaccgtcagcag

SEQ ID NO: 872233 - DNA, 75 bp, synthetic construct
  source 1..75: mol_type = other DNA
caccttccggttgtatgctttccggaattaacgtgcaggaaaccggctcccggtctgcggacaatatcggtgggg

SEQ ID NO: 872234 - DNA, 75 bp, synthetic construct
  source 1..75: mol_type = other DNA
accggcgcagagtaataccaccacctggtttactgaaggtgacggacaaaaaggtatcagctggattggtcagga

SEQ ID NO: 872235 - DNA, 75 bp, synthetic construct
  source 1..75: mol_type = other DNA
atcgccctgttcagtttctgataaatgttcgtggaaaacagcttccagcgcataaaagtgcagtagttcaaaaaa

SEQ ID NO: 872236 - DNA, 75 bp, synthetic construct
  source 1..75: mol_type = other DNA
tctgaatcttgatgtttacagtaaaggagaaggtgatgagcgttatctgcgcagggatcagaatggcggggatat

SEQ ID NO: 872237 - DNA, 75 bp, synthetic construct
  source 1..75: mol_type = other DNA
ttgcttgccattctgacagaagggaaggttcagccggataaggcaaaactgaaccagctggtgatagccattaag

SEQ ID NO: 872238 - DNA, 75 bp, synthetic construct
  source 1..75: mol_type = other DNA
tttgaagttttcattcacaacgacatggaagcggcaatgaaagtgaaatccgggcaactggattactacatcggc

SEQ ID NO: 872239 - DNA, 75 bp, synthetic construct
  source 1..75: mol_type = other DNA
actctggtcatcgccgaccacaacaaggcgctggcgatgggcggcatctttggtggcgaacattctggcgtaaat

SEQ ID NO: 872240 - DNA, 75 bp, synthetic construct
  source 1..75: mol_type = other DNA
aactgcgtggcgaaccgtctgaagggatgctgtgctctttctctgagctgggaatttctgacgatcacagcggta

SEQ ID NO: 872241 - DNA, 75 bp, synthetic construct
  source 1..75: mol_type = other DNA
tatcaccggtcgtgctcgtcgtcatggtctgcataccgatgcgtctcatcgttacgagcgtggtgttgatccggc

SEQ ID NO: 872242 - DNA, 75 bp, synthetic construct
  source 1..75: mol_type = other DNA
cggagactgggaaatgcgtagtggtgatgaccgtgtttattacagacagatacaatattgtattaatgggaattg

SEQ ID NO: 872243 - DNA, 75 bp, synthetic construct
  source 1..75: mol_type = other DNA
gcaccaaaagctgcgcatttcccccacctgagagcagatgagctccctgtttttctccggaagctcgctgaatat

SEQ ID NO: 872244 - DNA, 75 bp, synthetic construct
  source 1..75: mol_type = other DNA
ggcgaaatgctggagactcacgcgccgaacttctggcgctggctcgaccgtgcggccggtaaaaatccacaaaaa

SEQ ID NO: 872245 - DNA, 75 bp, synthetic construct
  source 1..75: mol_type = other DNA
actgccaggccatttcgatttttccgttggcggcaagattgtcaaaccagcgtttcccttcttcgacctgttgcg

SEQ ID NO: 872246 - DNA, 75 bp, synthetic construct
  source 1..75: mol_type = other DNA
gtttgacgacattaatcatccacggtacgccaaatttatcggtgactttgccaaagccatgcgcccagaaagttt

SEQ ID NO: 872247 - DNA, 75 bp, synthetic construct
  source 1..75: mol_type = other DNA
gctcaagcaaggacaggccgcctttgaacgggccatgcagaagatcgggccgtggtcgatggccgcgctgctgct

SEQ ID NO: 872248 - DNA, 75 bp, synthetic construct
  source 1..75: mol_type = other DNA
acgtatcaagggcatttgcaccaattctggcaggccgattttaaaccagatatgaaactgttggtaatgactcca

SEQ ID NO: 872249 - DNA, 75 bp, synthetic construct
  source 1..75: mol_type = other DNA
agattaatgctgtgtattatggcaagaagaaactatttgtgcccattcataatgatgaaaataatatcttagaaa

SEQ ID NO: 872250 - DNA, 75 bp, synthetic construct
  source 1..75: mol_type = other DNA
cagagccctgtacgacatcaaaggcctgacgtaccaggggcatctgcaccagttctggaccgcggacttcaagcc

SEQ ID NO: 872251 - DNA, 75 bp, synthetic construct
  source 1..75: mol_type = other DNA
agccgatgacaattaacaaaatacatttacaaacagcaaataacagcagtaccccattagtagttaaccataatg

SEQ ID NO: 872252 - DNA, 75 bp, synthetic construct
  source 1..75: mol_type = other DNA
gcgcccatcgtcggcctgctgctgggcatgtcctcgatctcggtgccttgggacacgctgctgatttcggtcgtg

SEQ ID NO: 872253 - DNA, 75 bp, synthetic construct
  source 1..75: mol_type = other DNA
ggtgccagcaacttcttcgagctggccgtggcggccgccatcagcttgttcggtctgcactccggcgctgcattg

SEQ ID NO: 872254 - DNA, 75 bp, synthetic construct
  source 1..75: mol_type = other DNA
aaaagaggtctgcacctgcgtcggcaatgtcgatttacagatgggacgtgacctgacaaccgtgcgtaaagtcgt

SEQ ID NO: 872255 - DNA, 75 bp, synthetic construct
  source 1..75: mol_type = other DNA
attgcacaaagaagcaaaacgttgggcgaagtctaaagggatccgctttctggcatttgaagaaggatatttacg

SEQ ID NO: 872256 - DNA, 75 bp, synthetic construct
  source 1..75: mol_type = other DNA
acgactcaatgtcatcgggtcaaaatggcctgatgatcttacagagaatacaacagagattactacagagaataa

SEQ ID NO: 872257 - DNA, 75 bp, synthetic construct
  source 1..75: mol_type = other DNA
cggcgagcgatttcttcggtagcaatttagatgtgctcaacacgctcaattcgctctctcaggagttgcaagacc

SEQ ID NO: 872258 - DNA, 75 bp, synthetic construct
  source 1..75: mol_type = other DNA
aactatcaggacgaagacgggcactacgtatttggcggtaccatcaacgatcagccgccgattgtggcggtggac

SEQ ID NO: 872259 - DNA, 75 bp, synthetic construct
  source 1..75: mol_type = other DNA
atgggcgaagccggtcgcagttttatacctgatattcagcaggcgagcagcagtagtctgatgtcggcaatactg

SEQ ID NO: 872260 - DNA, 75 bp, synthetic construct
  source 1..75: mol_type = other DNA
gccaaatccatagctgacgaactgatgaccgggtgcacgaattttgtgttcagcggtaaaaccggcaccgggaaa

SEQ ID NO: 872261 - DNA, 75 bp, synthetic construct
  source 1..75: mol_type = other DNA
aagccaggaagatttggcgtgtgcgcagtggatctgggggcgggttgtaaacctgtacgaacaggctgccagcga

SEQ ID NO: 872262 - DNA, 75 bp, synthetic construct
  source 1..75: mol_type = other DNA
atgcgagtaaccactcaacaaacctacgtctcgatgacgcaaagttttaataatctttctggcgaactggcgcac

SEQ ID NO: 872263 - DNA, 75 bp, synthetic construct
  source 1..75: mol_type = other DNA
gcgaacactgcaaccgttacctgttcaggcaaaacaaaaactacaatctacccgtcaatatagtctcgacaatct

SEQ ID NO: 872264 - DNA, 75 bp, synthetic construct
  source 1..75: mol_type = other DNA
gacgcaatggcgtacatgatttcatcctcgttcgtgctaccgctatcgtcctgacgctctacatcatttatatgg

SEQ ID NO: 872265 - DNA, 75 bp, synthetic construct
  source 1..75: mol_type = other DNA
acgtatttggcggcactatcaacgatcggccgccgattgtggcagtggacgatgacggcgatggcgtcaccgaca

SEQ ID NO: 872266 - DNA, 75 bp, synthetic construct
  source 1..75: mol_type = other DNA
cagatccgcaggtgcagagcgatattcagaatgccgttgatgtggtggacaccgcctcggacgacctcaacgcct

SEQ ID NO: 872267 - DNA, 75 bp, synthetic construct
  source 1..75: mol_type = other DNA
acgtctcaatgacacaaagttttaatcatctctccggcgatttggcgcacgtggttgagcagatggcaacgggca

SEQ ID NO: 872268 - DNA, 75 bp, synthetic construct
  source 1..75: mol_type = other DNA
gatatctgacgggctggaagccaaagcggggacggtttctgccgaattcagtcgttatatgacatggaaaaccgc

SEQ ID NO: 872269 - DNA, 75 bp, synthetic construct
  source 1..75: mol_type = other DNA
tcaggtattcatggtgattttctggcgaacacaccgccgtggtcaccgtaactggctggcactgctgctgttcgt

SEQ ID NO: 872270 - DNA, 75 bp, synthetic construct
  source 1..75: mol_type = other DNA
gaccgcggagaattttggcgatgcgctggaagatccgtcattcctcgcgatgctcgcggcgctggtcaatagcgg

SEQ ID NO: 872271 - DNA, 75 bp, synthetic construct
  source 1..75: mol_type = other DNA
tgttctgcaacgtgagctgggcggtaattattacagcgatccggatatccctcctcgcgcccatccggctgatgt

SEQ ID NO: 872272 - DNA, 75 bp, synthetic construct
  source 1..75: mol_type = other DNA
cactgttgacgttatgttattgtgtagttttcccttcccatttgagatctgaagcttttggaatttctttagtcg

SEQ ID NO: 872273 - DNA, 75 bp, synthetic construct
  source 1..75: mol_type = other DNA
tattacaagatcgtcatgatattatttctaataattacgcacagaaactaagagaaagaaattatacgcaagaaa

SEQ ID NO: 872274 - DNA, 75 bp, synthetic construct
  source 1..75: mol_type = other DNA
cgttttccgtatattggttctgatttaaatacaataaagccatttcttttattaatgcttcccagttgcgctatg

SEQ ID NO: 872275 - DNA, 75 bp, synthetic construct
  source 1..75: mol_type = other DNA
cgtcatgaactggatatcgcgccgccagagccgccttatcagccagatgaaatctacgatgcgctgaaacaaggt

SEQ ID NO: 872276 - DNA, 75 bp, synthetic construct
  source 1..75: mol_type = other DNA
gaccgctgcgctaatgcgaccgttccgtgaactaccggactggcgtattgatgatctgatgatctctttttctgt

SEQ ID NO: 872277 - DNA, 75 bp, synthetic construct
  source 1..75: mol_type = other DNA
cagcgtaagcgtgcagcaagaaccgtattgacggggatgtgttattcagtcggcagtgctacgcgccaggggagc

SEQ ID NO: 872278 - DNA, 75 bp, synthetic construct
  source 1..75: mol_type = other DNA
cgtcatgaactggatatcgctccgccggaaccgccgtatcagccagatgaaatttacgatgcgttgaaacaaggt

SEQ ID NO: 872279 - DNA, 75 bp, synthetic construct
  source 1..75: mol_type = other DNA
ggcccgattttcttgaacgccactggcagaaacgtccggtagtgttaaaacgcggctttaataattttattgacc

SEQ ID NO: 872280 - DNA, 75 bp, synthetic construct
  source 1..75: mol_type = other DNA
cacctcgcgctcatcctgcggatgttctgccgcaagagatggataaactgcgtgagatgatgctcgaattgatca

SEQ ID NO: 872281 - DNA, 75 bp, synthetic construct
  source 1..75: mol_type = other DNA
cgatcccactaataatgcatttctggtcattaatcagctcaccatcaaagaaggcaaccatacccgccgacctga

SEQ ID NO: 872282 - DNA, 75 bp, synthetic construct
  source 1..75: mol_type = other DNA
cgcaccttagtgagcagaagtgtgaagaagctctaaaacaggtgatgcagatcagctcacctgacctaatggcaa

SEQ ID NO: 872283 - DNA, 75 bp, synthetic construct
  source 1..75: mol_type = other DNA
atggcaaagatgaccgaatccgatattgaagtaatggcaattgagcacctgcaagggctgggctatgagtatgtt

SEQ ID NO: 872284 - DNA, 75 bp, synthetic construct
  source 1..75: mol_type = other DNA
tcttccgcgacccagctacttcgtcagacaccaaaacaggccgacaaccgggaagaactcaaagaatatttgcgc

SEQ ID NO: 872285 - DNA, 75 bp, synthetic construct
  source 1..75: mol_type = other DNA
ggtattttataccgggaagattgtactggcgctgaataatccaacagtggtagtgatcactgaccgtaacgattt

SEQ ID NO: 872286 - DNA, 75 bp, synthetic construct
  source 1..75: mol_type = other DNA
atcgggggcttataaccagattaaaacctatcagaaccaaatacccagcctgtttacctacaatgcgtttaatgt

SEQ ID NO: 872287 - DNA, 75 bp, synthetic construct
  source 1..75: mol_type = other DNA
gtaactacaccaacaacaccacgctggtggtcatgctgatggcgttagccttctttggcaaaggatttggcgcac

SEQ ID NO: 872288 - DNA, 75 bp, synthetic construct
  source 1..75: mol_type = other DNA
taatccgacagatcacccacgtatgtctgcggaagagctgaagtttatctcggaaaatggcgcggtggtcgatat

SEQ ID NO: 872289 - DNA, 75 bp, synthetic construct
  source 1..75: mol_type = other DNA
cggcgctgtggatcaagttgattcataatccgacagatcacccacgtatgtctgcggaagagctgaagtttatct

SEQ ID NO: 872290 - DNA, 75 bp, synthetic construct
  source 1..75: mol_type = other DNA
aatgtcacaccgtcagcagcagcggcggcaaccgcctccccaatccaggtcctgaccgttctgtccgtcacttcc

SEQ ID NO: 872291 - DNA, 75 bp, synthetic construct
  source 1..75: mol_type = other DNA
tcatttttttgtcgataagcattttgaacaggtggtaggttatgtgaaccagacgattgaatcactcgaaatagt

SEQ ID NO: 872292 - DNA, 75 bp, synthetic construct
  source 1..75: mol_type = other DNA
cctgctgctccgctaccaagcggtccagaaatgttttcggcagaatggttccgagaaaacttacccaagtacaaa

SEQ ID NO: 872293 - DNA, 75 bp, synthetic construct
  source 1..75: mol_type = other DNA
tccttattgtggcaattggccttgttggtctgatcatgctgcagcaaggcaaaggcgctgatatgggagcctcct

SEQ ID NO: 872294 - DNA, 75 bp, synthetic construct
  source 1..75: mol_type = other DNA
aaatcagcaacaactatatatgcgcgcaacgacaaaagatttgcttgccactaaaagaaagttaaacatagcatt

SEQ ID NO: 872295 - DNA, 75 bp, synthetic construct
  source 1..75: mol_type = other DNA
tttgcatgttaaagaattggccaaagctatacctggagctgtatttataattgaaaaaaggaaaaattatattaa

SEQ ID NO: 872296 - DNA, 75 bp, synthetic construct
  source 1..75: mol_type = other DNA
gtgttgatcctggatgaaataggctatctgccgatgaacagagaggaagccagcctgttcttccggctactgaac

SEQ ID NO: 872297 - DNA, 75 bp, synthetic construct
  source 1..75: mol_type = other DNA
ctgaagagttacctcattttattcgggaccttgaagcgtataccggtagccttatcaccaaaaatgctacaaaga

SEQ ID NO: 872298 - DNA, 75 bp, synthetic construct
  source 1..75: mol_type = other DNA
atttcctttggcgtatatggcgatgtgtcgttggcacaggcacgtaccaaacgtgatgaagcgcgttcgatgtta

SEQ ID NO: 872299 - DNA, 75 bp, synthetic construct
  source 1..75: mol_type = other DNA
attatgataataatgggaaaatagactcatttagtattgagtatgctcgtcggtccgagttagggtatgaagtca

SEQ ID NO: 872300 - DNA, 75 bp, synthetic construct
  source 1..75: mol_type = other DNA
taaatataatcatccttctttctgaaagtgaagagacaaatgatgagttttctgacatcaatcatatgctcaaaa

SEQ ID NO: 872301 - DNA, 75 bp, synthetic construct
  source 1..75: mol_type = other DNA
tgttgcataccatcatacaggtaatcaacaaaaagaacttggcacgtttggcgcattcgaccatgactggcatac

SEQ ID NO: 872302 - DNA, 75 bp, synthetic construct
  source 1..75: mol_type = other DNA
tttccgttgtcgccgcaaacgcggattcaggcgcaggcgagcggttactggctggagcgggagcagtggctggcg

SEQ ID NO: 872303 - DNA, 75 bp, synthetic construct
  source 1..75: mol_type = other DNA
tttatcgtcacatccttcaactacggtgaccgcgctacgctttctattgccggttcggaaatggccaaagatatc

SEQ ID NO: 872304 - DNA, 75 bp, synthetic construct
  source 1..75: mol_type = other DNA
caccactcaaccacactgaacatcaaaggagaaagctaccgattaaaggaaaaacgcaaagcgggagtgctggca

SEQ ID NO: 872305 - DNA, 75 bp, synthetic construct
  source 1..75: mol_type = other DNA
tcactcacctgactaaagtgaatccccacttacgcctgctggggctgactgccacgccttttcgattgggcaaag

SEQ ID NO: 872306 - DNA, 75 bp, synthetic construct
  source 1..75: mol_type = other DNA
gttatcagaactgccggacttgttaagagcagaacgggcgaaaatgtgcggctgattgtgatagacacgctggcc

SEQ ID NO: 872307 - DNA, 75 bp, synthetic construct
  source 1..75: mol_type = other DNA
gaaatcgttaatgatgaacgggtggaaaatctgtacctggtaaaccgcccgatttttccggcggtcccgcttgat

SEQ ID NO: 872308 - DNA, 75 bp, synthetic construct
  source 1..75: mol_type = other DNA
agttttctggcggtgtcctgggcttgtcacgttgcagccgggatgaagtgggcggggaagtcggtatcagccggc

SEQ ID NO: 872309 - DNA, 75 bp, synthetic construct
  source 1..75: mol_type = other DNA
cgacaagtgcacgatcccgctgttacgtgacgatatgaaaaagctggggtacgaaatgaaaaacttcagccgctg

SEQ ID NO: 872310 - DNA, 75 bp, synthetic construct
  source 1..75: mol_type = other DNA
agcggcaggcgtacaggatgcgaattattaccccgatgggatgcacagccagaagcgggagaactggcgcgaata

SEQ ID NO: 872311 - DNA, 75 bp, synthetic construct
  source 1..75: mol_type = other DNA
tattaccgaaagataaatacaccgatgcgattatttttgcgggtattgatgctcattcattcgcagagcattaca

SEQ ID NO: 872312 - DNA, 75 bp, synthetic construct
  source 1..75: mol_type = other DNA
ccgcatacgcgtacaccgggcatccctctgcgctggatcaccgctgccgatatcctcgcccaacaagcgttgctg

SEQ ID NO: 872313 - DNA, 75 bp, synthetic construct
  source 1..75: mol_type = other DNA
ggaactggcgcggctggctcgtggtcgcgtgctggtgctggcacacgttaaagaactggtggcgcaaaaccatgc

SEQ ID NO: 872314 - DNA, 75 bp, synthetic construct
  source 1..75: mol_type = other DNA
gtacaccgaaaggcaaaagtgacaacgttccggtacaggttttctgccctgcctgcggttttgccaacacctttt

SEQ ID NO: 872315 - DNA, 75 bp, synthetic construct
  source 1..75: mol_type = other DNA
acgccgcgctatggcagtgcatcagaacgcggacggcacacaaagagccatgcactatcgcccttctccgcgacg

SEQ ID NO: 872316 - DNA, 75 bp, synthetic construct
  source 1..75: mol_type = other DNA
gcacgtcgatcttatcgccattctgcgccctaccgaatcggtgagtctttaccaacaaattgtcgggcgcggtct

SEQ ID NO: 872317 - DNA, 75 bp, synthetic construct
  source 1..75: mol_type = other DNA
aagcgtaaaggagtgatgattttcgccgccaccgttgaacacgccaaggagatagtgggactgctgcctgccgaa

SEQ ID NO: 872318 - DNA, 75 bp, synthetic construct
  source 1..75: mol_type = other DNA
ttgtgcctggtgtatgaacatcgcagtggtgtttatcactatcgggcaagtcaggcgtttcatttgacggcagat

SEQ ID NO: 872319 - DNA, 75 bp, synthetic construct
  source 1..75: mol_type = other DNA
cttcctcatctggcgcaaaacgagcatatagaaaggggaatccgctttctgatgcagagaaacaaagattatcag

SEQ ID NO: 872320 - DNA, 75 bp, synthetic construct
  source 1..75: mol_type = other DNA
aaccctggccgagtggagctttgacgctggcctggataccagaacaggatgttggcgggaaaaacaataaacgca

SEQ ID NO: 872321 - DNA, 75 bp, synthetic construct
  source 1..75: mol_type = other DNA
ggtgaatctcaacggtaactggcaaccggcgaaaactggcgttttgcctgaagccgtgaacgaagcgttaagcgg

SEQ ID NO: 872322 - DNA, 75 bp, synthetic construct
  source 1..75: mol_type = other DNA
gtatctgtggcgtatgtaccaccactcacgcgctctcttctgttcgtgcggcagagagtgcgctgaacattgacg

SEQ ID NO: 872323 - DNA, 75 bp, synthetic construct
  source 1..75: mol_type = other DNA
atggccgggatgaaagcctttaccgctgcggtgctcggtgggattggcagcattccgggagcgatgattggcggg

SEQ ID NO: 872324 - DNA, 75 bp, synthetic construct
  source 1..75: mol_type = other DNA
ctgcgcgcaaacgatctgtatgtaaagagattaaggttttcgtcaggccagaactgaaaaactaccttaccagtc

SEQ ID NO: 872325 - DNA, 75 bp, synthetic construct
  source 1..75: mol_type = other DNA
gcgcaacgtataacgttgaactgaacggcgatctgaagaatgtgagcagtcacttaccttcaccgttagccaaac

SEQ ID NO: 872326 - DNA, 75 bp, synthetic construct
  source 1..75: mol_type = other DNA
gtgaggcggagaacgcgacgctggtttatggcggcaatccgcatctttttccatacaaacacaacgaaggtcagt

SEQ ID NO: 872327 - DNA, 75 bp, synthetic construct
  source 1..75: mol_type = other DNA
cgccatttgctatgccggtctggcattacctgaccctgcatcagcatgataaaacgcgtagcgacctgttaaacg

SEQ ID NO: 872328 - DNA, 75 bp, synthetic construct
  source 1..75: mol_type = other DNA
gccagtaaagtgctggggccgctgtggagcaaagtttccattttgcgctatcacatttcgggtccgctggacgat

SEQ ID NO: 872329 - DNA, 75 bp, synthetic construct
  source 1..75: mol_type = other DNA
gacagcgaactggtttaatcagccgttgaacgtggatttttccaccaaagaaggggcaaaagcctacctggtcgc

SEQ ID NO: 872330 - DNA, 75 bp, synthetic construct
  source 1..75: mol_type = other DNA
cagcggtgaacgaagcattgagtggcagcgtggcgtgggatggtaaagtgggcattgatctgccttatcatgctg

SEQ ID NO: 872331 - DNA, 75 bp, synthetic construct
  source 1..75: mol_type = other DNA
ggtaaaggtgcggtgaactacctgagcgtgccggagtttccaaccgacagcaaaaacggcagcttcctgttcccg

SEQ ID NO: 872332 - DNA, 75 bp, synthetic construct
  source 1..75: mol_type = other DNA
tggtgaaggtctgccgctgccggagacatatgaccgtccggacccgcgtattaaacagctggcgcgtcgcagtac

SEQ ID NO: 872333 - DNA, 75 bp, synthetic construct
  source 1..75: mol_type = other DNA
cacgccgtctgcgccggatgccggaatggtcagcgcttcatccgtctctgtgaccacaccactttctgcgggaag

SEQ ID NO: 872334 - DNA, 75 bp, synthetic construct
  source 1..75: mol_type = other DNA
atgagcggcgcttcatccgtctctgtggtcaccccactttctgcgggcagtacgccattaccggtgccaccggtg

SEQ ID NO: 872335 - DNA, 75 bp, synthetic construct
  source 1..75: mol_type = other DNA
atttggtaccggctggcatccttattttccgttgtcgccgcaaacgcggattcaggcacaggcgagcggttactg

SEQ ID NO: 872336 - DNA, 75 bp, synthetic construct
  source 1..75: mol_type = other DNA
cggtgagtaacagtgcgcagaaagacatgatcggaaaactcaggaaactgcggctcagacgcagggtggaaatga

SEQ ID NO: 872337 - DNA, 75 bp, synthetic construct
  source 1..75: mol_type = other DNA
gcgaacgacaggcgaaccacgaaacagtgcagtttaattttctggggtatacgttcagagcgcgaagagcacgta

SEQ ID NO: 872338 - DNA, 75 bp, synthetic construct
  source 1..75: mol_type = other DNA
gccagcgcgagaatactcttgcttattggctggaaacagcgataagtgggcctgtagctgagcttcgttttcaga

SEQ ID NO: 872339 - DNA, 75 bp, synthetic construct
  source 1..75: mol_type = other DNA
atgatcaccgaagatattgatattagctggaagctgcagttgaatcagtggacgattttttacgagccacgggca

SEQ ID NO: 872340 - DNA, 75 bp, synthetic construct
  source 1..75: mol_type = other DNA
gaagcgccgcgcggtatgctctcccattggatggtgattaaagacggcatcatcagcaactaccaggcggtcgtt

SEQ ID NO: 872341 - DNA, 75 bp, synthetic construct
  source 1..75: mol_type = other DNA
tgcccagccggtgcttccggatctttatccgtcagcgccggaagtggtgcgttatgaccgttaccggctggttga

SEQ ID NO: 872342 - DNA, 75 bp, synthetic construct
  source 1..75: mol_type = other DNA
gacttctcccgccccggaaaaccgacagataacccgtttattgaatcatttaacggcagcctgcgggatgaatgc

SEQ ID NO: 872343 - DNA, 75 bp, synthetic construct
  source 1..75: mol_type = other DNA
tcagggtaatggaggcactgcgggtgctggataagcggctgccggtacgtattcagacggataacggcagcgagt

SEQ ID NO: 872344 - DNA, 75 bp, synthetic construct
  source 1..75: mol_type = other DNA
gggtagtgctggaaatcaccgccgggagagactttgacccggtgaaccggggactactgcaacgtttcgcctgcc

SEQ ID NO: 872345 - DNA, 75 bp, synthetic construct
  source 1..75: mol_type = other DNA
aacggggaaggcgggaaaaagttttcttgggcgatgcaggtccgcgtcgtggatatggatccggccatcaccgag

SEQ ID NO: 872346 - DNA, 75 bp, synthetic construct
  source 1..75: mol_type = other DNA
aggcgcaggcggacgccgtggcagaccatacgggcatctggccgcgttttgtccgggcaataaaagggaaggcgg

SEQ ID NO: 872347 - DNA, 75 bp, synthetic construct
  source 1..75: mol_type = other DNA
tgcctggttatcggctttgtctcaccgttgctggccttcggtgacgttcgcccgtttgcgccgctttggctgcgt

SEQ ID NO: 872348 - DNA, 75 bp, synthetic construct
  source 1..75: mol_type = other DNA
tttcccgccgcacactggccgttgtcggcgtggtggtgctggcgttgctggtctggtttatcgggccgctggtgg

SEQ ID NO: 872349 - DNA, 75 bp, synthetic construct
  source 1..75: mol_type = other DNA
atgacgccctgcatgtttatctgctgctgaacctcgataaggaccacgaggacaaatacaacgccgcggagatcc

SEQ ID NO: 872350 - DNA, 75 bp, synthetic construct
  source 1..75: mol_type = other DNA
atgtcggaacgcatgttatcagcaatacagactattgaaaagggtgggcgtccagtttttcccttgatgccattc

SEQ ID NO: 872351 - DNA, 75 bp, synthetic construct
  source 1..75: mol_type = other DNA
gaatcggaagaattgcaataaagtcaggattggttaatcttgagcttacggacgatcaagtccgggaagaattcg

SEQ ID NO: 872352 - DNA, 75 bp, synthetic construct
  source 1..75: mol_type = other DNA
atcaagatattgcagttgaagatggtgagccaatgtatctagagggtggcgtgtacttatatcctgatggttcta

SEQ ID NO: 872353 - DNA, 75 bp, synthetic construct
  source 1..75: mol_type = other DNA
gggcgaaacaggccaggttaaccagctactggatattctcagacataaagcattaacgcagatggcacaggagag

SEQ ID NO: 872354 - DNA, 75 bp, synthetic construct
  source 1..75: mol_type = other DNA
gtggcacttgaagagcttcgctggggcgcgtttggtgatgtgatacgtcagggcgaaacaggccaggttaaccag

SEQ ID NO: 872355 - DNA, 75 bp, synthetic construct
  source 1..75: mol_type = other DNA
tcttcttttcctgagtacatggcattactcagaaaagccctggaaaagaaagaaacaaaagcactgataaaaaaa

SEQ ID NO: 872356 - DNA, 75 bp, synthetic construct
  source 1..75: mol_type = other DNA
gatggagcagaccgcgcatatcctcaccgtgccgggcggcggcacgctgcactgcgactggtggtttaccaacga

SEQ ID NO: 872357 - DNA, 75 bp, synthetic construct
  source 1..75: mol_type = other DNA
tgaaagatgaacttctggatttcagcgaagaccgtgaagatttggtcgacttctaccgtaagcaattcgccacct

SEQ ID NO: 872358 - DNA, 75 bp, synthetic construct
  source 1..75: mol_type = other DNA
atcccttcaataccagaaagaaagcgtcgagcgggctttaacgtgcgctaactgcggtcagaagctgcatgtgct

SEQ ID NO: 872359 - DNA, 75 bp, synthetic construct
  source 1..75: mol_type = other DNA
aactggctgtgattgttcgccagctcatgcagcgtttcagcgatccgatgagcgccagaacattgcttcagtcgc

SEQ ID NO: 872360 - DNA, 75 bp, synthetic construct
  source 1..75: mol_type = other DNA
aaactacgcaattacccgggtaaacgacagggtcagttcactggtcagtgatacagccaggctggcgcattattc

SEQ ID NO: 872361 - DNA, 75 bp, synthetic construct
  source 1..75: mol_type = other DNA
caatgcgtcgcttgcacagggcgttgaggcgtccctgcgctggctgacggagatgacaacgtcacttgccaccac

SEQ ID NO: 872362 - DNA, 75 bp, synthetic construct
  source 1..75: mol_type = other DNA
gcaagtgttttcttaaaggaggtcaggttaaggaggcctatcatctgatagaagggggcgggagttctgtaagaa

SEQ ID NO: 872363 - DNA, 75 bp, synthetic construct
  source 1..75: mol_type = other DNA
ccggtaatgcggggaaagcggtacagacggcgaagctgttgcaggacatccatccggaagaacgtctggagaaaa

SEQ ID NO: 872364 - DNA, 75 bp, synthetic construct
  source 1..75: mol_type = other DNA
cgccgcaggagttttcgctggttcgtgccgtgggcgcggatgcgggaacggtttttgtccgcacggatggtgcgc

SEQ ID NO: 872365 - DNA, 75 bp, synthetic construct
  source 1..75: mol_type = other DNA
gactctggatagcggaaggatatgccactgcactcactatcaaccttctgactggcgatgctgtcatggtggcct

SEQ ID NO: 872366 - DNA, 75 bp, synthetic construct
  source 1..75: mol_type = other DNA
cgcgtcattttcccctgccggacgttgttatgtggcacttgaagagcttcgctggggcgcgtttggtgatgtgat

SEQ ID NO: 872367 - DNA, 75 bp, synthetic construct
  source 1..75: mol_type = other DNA
tcgctccccgccagctggcgttgcaggctggtgagagtgagtattttaaattttactatcatggtccacaggata

SEQ ID NO: 872368 - DNA, 75 bp, synthetic construct
  source 1..75: mol_type = other DNA
agcgctggttatctcatgcaccaaaatgaaggacgcggaggaactcaaagaagccgcatatgacttacgcgtggt

SEQ ID NO: 872369 - DNA, 75 bp, synthetic construct
  source 1..75: mol_type = other DNA
ccgccagtggggaggccgcagggtggcgcatggcgctgttctctatgtggttggtgaaggcggtattggcgttcc

SEQ ID NO: 872370 - DNA, 75 bp, synthetic construct
  source 1..75: mol_type = other DNA
acggcttagggagacatgggaacgcggggaaagcctgagccaccagcgaaaaaccacgctaccgatgagcgttgg

SEQ ID NO: 872371 - DNA, 75 bp, synthetic construct
  source 1..75: mol_type = other DNA
aaagccacggtgatatgtcaggtaaaattggtgtgtggatttctggcttctttggctcgggtaaatcgcacttcc

SEQ ID NO: 872372 - DNA, 75 bp, synthetic construct
  source 1..75: mol_type = other DNA
aaaactggctgctactggttgagtctgtcaccagtcatggaccggttgatgggaagcggcatgctgagcttgcca

SEQ ID NO: 872373 - DNA, 75 bp, synthetic construct
  source 1..75: mol_type = other DNA
ggaggtaatacgctgtcaacttccgggctggggcgctttctggtgtttctctatatctggttgccgttcatgatc

SEQ ID NO: 872374 - DNA, 75 bp, synthetic construct
  source 1..75: mol_type = other DNA
aatgaaaaacttccggcgctggctgtacaagctggaaaaagatggggttattcgtatcgatggggatgatgtagc

SEQ ID NO: 872375 - DNA, 75 bp, synthetic construct
  source 1..75: mol_type = other DNA
ccctcccgttgaactggagcgcatcgaggaggcaggcaacaagacggaaaaccataccgcgctatgggggtgcat

SEQ ID NO: 872376 - DNA, 75 bp, synthetic construct
  source 1..75: mol_type = other DNA
cgctatgggggtgcatccgttcacgcacacagaacggcgacaagtgcacgatcccgctgttacgtgatgacatga

SEQ ID NO: 872377 - DNA, 75 bp, synthetic construct
  source 1..75: mol_type = other DNA
ataacctccagattgttgatgatgggcgatacagggcgacggtgatacgcgccggaaatattgaagagccgcagc

SEQ ID NO: 872378 - DNA, 75 bp, synthetic construct
  source 1..75: mol_type = other DNA
tgcgattatttttgcgggtattgatgctcattcattcgcagagcattacatcattgcacaggccaaaaaagcagg

SEQ ID NO: 872379 - DNA, 75 bp, synthetic construct
  source 1..75: mol_type = other DNA
cttaaggtcttcctcaaagtctttaatgagcgtgtaggatactgcgctgattttcctcatattgcgcacttagaa

SEQ ID NO: 872380 - DNA, 75 bp, synthetic construct
  source 1..75: mol_type = other DNA
gtaccgtggcattaccagatcttgcaaaaggtctttgaatcaatccgaaccaaaggggccgcaggtaaacagttg

SEQ ID NO: 872381 - DNA, 75 bp, synthetic construct
  source 1..75: mol_type = other DNA
atgccttccagtcggcagcagtccagatttctgcagatggactggatagcctggtcccgttctggcgtttctact

SEQ ID NO: 872382 - DNA, 75 bp, synthetic construct
  source 1..75: mol_type = other DNA
aaccgctaaaacgtaatattaacggcgtggttaaagccgagcagaccgatgacgaaagtgcctgggttgaactgg

SEQ ID NO: 872383 - DNA, 75 bp, synthetic construct
  source 1..75: mol_type = other DNA
attacgcacatcatacgggggacagacattaccggactttgctttctgttgctgatggccggctgcatgacactg

SEQ ID NO: 872384 - DNA, 75 bp, synthetic construct
  source 1..75: mol_type = other DNA
atgttcctcatcatcttactcgtgatctccgctacgctgaccatacagttacttgccatcagagtggccggacat

SEQ ID NO: 872385 - DNA, 75 bp, synthetic construct
  source 1..75: mol_type = other DNA
cctacgtactttaataaaaccgccattccttcagattgttggcaaattctctttttttcacccgatcattttaat

SEQ ID NO: 872386 - DNA, 75 bp, synthetic construct
  source 1..75: mol_type = other DNA
gtgcatcagaacgcgaacagcacacggggaggcgtgcactatcgcccttctccgcgatgatatgaaaaagctggg

SEQ ID NO: 872387 - DNA, 75 bp, synthetic construct
  source 1..75: mol_type = other DNA
tgcgcgatgatatgaaaaagctggggtatgagatgaaaaacttccggcgctggctgtacaagctggaaagagacg

SEQ ID NO: 872388 - DNA, 75 bp, synthetic construct
  source 1..75: mol_type = other DNA
gccatgggggagcgttcattacttgatgctttccaatcagctgcaaaacagatgaaggactctggccttgatgtg

SEQ ID NO: 872389 - DNA, 75 bp, synthetic construct
  source 1..75: mol_type = other DNA
aagcatgctggagatgcacgtccctgctgacttgcagcactcgcttttgcacccgatgcagcaatcgcgtaagaa

SEQ ID NO: 872390 - DNA, 75 bp, synthetic construct
  source 1..75: mol_type = other DNA
tggttatcgctgcccgtcaggtggaacgggaaacgggtaaaccggttcgaatgattattctggatacgctggcgc

SEQ ID NO: 872391 - DNA, 75 bp, synthetic construct
  source 1..75: mol_type = other DNA
tatgggggtgcatccgttcacgcacacagaacggcgacaagtgcacgatcccgctgttacgtgatgacatgaaaa

SEQ ID NO: 872392 - DNA, 75 bp, synthetic construct
  source 1..75: mol_type = other DNA
gcgtgcagcagatgatccaactggcgcgtaaagcgggcgttccggtgctgattgatccaaaaggcaccgattttg

SEQ ID NO: 872393 - DNA, 75 bp, synthetic construct
  source 1..75: mol_type = other DNA
tgaccgcttgattgttgccgtcaacagcgatgcctccaccaaacggctgaaaggggattcccgcccggtaaaccc

SEQ ID NO: 872394 - DNA, 75 bp, synthetic construct
  source 1..75: mol_type = other DNA
cctatctggcaaatgctcgcaaactgggtgaccgtctgattgtcgctgtgaacagcgatgcctccaccaaacggc

SEQ ID NO: 872395 - DNA, 75 bp, synthetic construct
  source 1..75: mol_type = other DNA
ggagccgcagtaccaccagcttgaattcgacactcgtctgtggctaacgcagttgtcacttgggcaggacaaaat

SEQ ID NO: 872396 - DNA, 75 bp, synthetic construct
  source 1..75: mol_type = other DNA
tggtgtcgtttgaagaagacacgccgcagcgcttgatcgccgggatcctgccagacctgctggtgaaaggcggcg

SEQ ID NO: 872397 - DNA, 75 bp, synthetic construct
  source 1..75: mol_type = other DNA
cagcgcgtaaacgcggtgaaaaagtggtgatgaccaacggtgtctttgacatcctgcacgccgggcacgtctctt

SEQ ID NO: 872398 - DNA, 75 bp, synthetic construct
  source 1..75: mol_type = other DNA
caatgcgttacgcacatttcgccccagaccatctggaggatgcagtaaggctaaacccactgaacaacaacagag

SEQ ID NO: 872399 - DNA, 75 bp, synthetic construct
  source 1..75: mol_type = other DNA
atataaaaatgactatgcgttatgcgcatctggcaccggatcatttggaaacggcgctccgtttcaatccactgg

SEQ ID NO: 872400 - DNA, 75 bp, synthetic construct
  source 1..75: mol_type = other DNA
tttgggcgacccaattgcatcccgctttaccgctaaagattgggctcattaccgcgaccgccgactccgtggtga

SEQ ID NO: 872401 - DNA, 75 bp, synthetic construct
  source 1..75: mol_type = other DNA
ttctccctgtatgcattgaggcggatggatcaatggagggtagaatacatcagccttgaagaagattcatatggc

SEQ ID NO: 872402 - DNA, 75 bp, synthetic construct
  source 1..75: mol_type = other DNA
tgatctaaaggctttgttttataagttttatggtgatccaaccttggggcattcagaacttatagaattgaatac

SEQ ID NO: 872403 - DNA, 75 bp, synthetic construct
  source 1..75: mol_type = other DNA
cgaagctgattgtgatcgatcctcgctttacacgtacagcggcggtggctgactactatgcccctatccgttccg

SEQ ID NO: 872404 - DNA, 75 bp, synthetic construct
  source 1..75: mol_type = other DNA
ggagccgcagtaccaccagcttgagttcgatacccgcctgtggctgacgcaactgtcgcttaggcaggacaaaat

SEQ ID NO: 872405 - DNA, 75 bp, synthetic construct
  source 1..75: mol_type = other DNA
tgtatcagcgccgcctgagcgcggttattgacggctatcttgctggcgttccggccgagtatcgggaagaactga

SEQ ID NO: 872406 - DNA, 75 bp, synthetic construct
  source 1..75: mol_type = other DNA
ccggccagaagtggaaaatacaggctttcatcaacacatttaacgacaagcccgactcattcaaagtcactgaag

SEQ ID NO: 872407 - DNA, 75 bp, synthetic construct
  source 1..75: mol_type = other DNA
aaatcaaactcggttgtcaaaaatgcttatgttaaatttaacctgttaaaagatggggttgtgatcggccagaca

SEQ ID NO: 872408 - DNA, 75 bp, synthetic construct
  source 1..75: mol_type = other DNA
tcagggatggaagcccgtcagggcggagacagcttcgctggctccgttcacgacagcccgccccgtcagggggac

SEQ ID NO: 872409 - DNA, 75 bp, synthetic construct
  source 1..75: mol_type = other DNA
tgcaaaagccattatgggactcttaaaccgaaatgatattgaaataacgatgtatcgtgctacggacagtagccc

SEQ ID NO: 872410 - DNA, 75 bp, synthetic construct
  source 1..75: mol_type = other DNA
atgaccacacaaaccgttgagcagatcatggatgattttcgtcgccagtgtgaaatttttgcgcgcgaacagcag

SEQ ID NO: 872411 - DNA, 75 bp, synthetic construct
  source 1..75: mol_type = other DNA
cttcagatgaatatttattaattccccttgggataataaaagaaactgcaaatgatattcctcgcccctacatgt

SEQ ID NO: 872412 - DNA, 75 bp, synthetic construct
  source 1..75: mol_type = other DNA
atggcaagaaataatgataaagactatcggatcaggaaagcgaaagggcagaatgaaaaaagtgctaaactgcct

SEQ ID NO: 872413 - DNA, 75 bp, synthetic construct
  source 1..75: mol_type = other DNA
acccggataacagattcttccttgcatatcatacagacaaggaacatcatccacatgttcacgctttactccgta

SEQ ID NO: 872414 - DNA, 75 bp, synthetic construct
  source 1..75: mol_type = other DNA
cggaagcgcaaaccatcacgcgatgaacgccacgctatccgggattttttaatcagcattgaccgctgggaggca

SEQ ID NO: 872415 - DNA, 75 bp, synthetic construct
  source 1..75: mol_type = other DNA
ttcttcctgcagcaatgagcggtagtgccacttatgtttctccaaatcaagcattgataaaatgccttaaccttg

SEQ ID NO: 872416 - DNA, 75 bp, synthetic construct
  source 1..75: mol_type = other DNA
aatgaaaatagttcgacgaataataaaaaatatcattttaacaatatactacctaagctattaataacaattaag

SEQ ID NO: 872417 - DNA, 75 bp, synthetic construct
  source 1..75: mol_type = other DNA
attgacccgccctcaactttctccatataaactgacgttcaccaaaaccaaaggtaagaagaatcgcacagttcc

SEQ ID NO: 872418 - DNA, 75 bp, synthetic construct
  source 1..75: mol_type = other DNA
cgaaattcaggtgaatgttgagaatggctcgtccttgatagaagttaatatggatgggttcatgggtgaggttat

SEQ ID NO: 872419 - DNA, 75 bp, synthetic construct
  source 1..75: mol_type = other DNA
agtttgactccttctgtcatgaagggttttgttgaaatgcaggcccaaataaaccgagcttatgcattgttaaag

SEQ ID NO: 872420 - DNA, 75 bp, synthetic construct
  source 1..75: mol_type = other DNA
aaaatgaatccggcagaggcttaccgactggctgcatgggctgatgatgaggcgttatcaatgacacaaaccagg

SEQ ID NO: 872421 - DNA, 75 bp, synthetic construct
  source 1..75: mol_type = other DNA
accgtcagtcatgccaccggggagaaaagcaggcagcgaatcatgaccgcatacagaacgctgccccgttacttt

SEQ ID NO: 872422 - DNA, 75 bp, synthetic construct
  source 1..75: mol_type = other DNA
agagtacggtccgtttaaaacggtggaggatctaaagcaggtgccgggatgggcaattcgctggtggaacgtaat

SEQ ID NO: 872423 - DNA, 75 bp, synthetic construct
  source 1..75: mol_type = other DNA
tcattaccctttccctggcctgtgccggaatgtctcatagtgcactggcggcagctcctgcggtgaaaagttcgg

SEQ ID NO: 872424 - DNA, 75 bp, synthetic construct
  source 1..75: mol_type = other DNA
ctttactgcattcgtggagtatatctaaacaaatgtgttaggaattgttgggatgaccgttggcatgtttggtat

SEQ ID NO: 872425 - DNA, 75 bp, synthetic construct
  source 1..75: mol_type = other DNA
tgcgcggcgtgtattactccggttgaactgaaaaaagtgttgtctgtcgacctgggggcactgacccgtatgctg

SEQ ID NO: 872426 - DNA, 75 bp, synthetic construct
  source 1..75: mol_type = other DNA
aaggtgactttcttcagcaatcctcagatgttcaggcagttgccacacttggtaatggtgccaacttactgattt

SEQ ID NO: 872427 - DNA, 75 bp, synthetic construct
  source 1..75: mol_type = other DNA
gcccgcaaaagcggccaacgcgtggcttttctggccgggctggcacttctgaaaatgaatccggcagaggcttaa

SEQ ID NO: 872428 - DNA, 75 bp, synthetic construct
  source 1..75: mol_type = other DNA
catgccagaacgggttttcactcggttcgctttggcggcgggctgccgtatcggcctaatccatcttctccacca

SEQ ID NO: 872429 - DNA, 75 bp, synthetic construct
  source 1..75: mol_type = other DNA
tctaaaagcaggtttgatagtgttagatgcatcacaaaacggtagtggtggagactatggatatatggcatttgc

SEQ ID NO: 872430 - DNA, 75 bp, synthetic construct
  source 1..75: mol_type = other DNA
acggactggagttgcttccggtttctggtagcgatctggccgttcggctggggatttctcactacccggtactga

SEQ ID NO: 872431 - DNA, 75 bp, synthetic construct
  source 1..75: mol_type = other DNA
aacacctcggcgcagttcctgaaaatcaccatcaaccatgacgtgctacgcaaaatgctggttcaggtgcgccag

SEQ ID NO: 872432 - DNA, 75 bp, synthetic construct
  source 1..75: mol_type = other DNA
tgccattgctgaaagacgcctggcagttgtcgaatcagaacggggagatcggcctgctgctggcagaaacgctga

SEQ ID NO: 872433 - DNA, 75 bp, synthetic construct
  source 1..75: mol_type = other DNA
atcccggtatctgcactggtatcgcgatttaccgtggaaccctcggtgcagcagcgttttgaaaacgcagtaaag

SEQ ID NO: 872434 - DNA, 75 bp, synthetic construct
  source 1..75: mol_type = other DNA
gggccaccagttatcaaagtaccggatcacctataccaagaccaaaggcaaaaaaaaccgcacagtaccgatatc

SEQ ID NO: 872435 - DNA, 75 bp, synthetic construct
  source 1..75: mol_type = other DNA
gatcgcagagggtgagttggcgttcctagcaccggaagaaattaagcgcctgctggatgcctgcgctgattccca

SEQ ID NO: 872436 - DNA, 75 bp, synthetic construct
  source 1..75: mol_type = other DNA
gcctgattttaaaatccctgtaactccagattcattagtgtctgatgaattaaggaatatgagttctaatgatga

SEQ ID NO: 872437 - DNA, 75 bp, synthetic construct
  source 1..75: mol_type = other DNA
attggtttcaacggggagtcacacgcgctgatttccgatcgtgccaccaaccctctcctgcaggacgtcaacccg

SEQ ID NO: 872438 - DNA, 75 bp, synthetic construct
  source 1..75: mol_type = other DNA
tggtggaagactacggcaaatgtgcgctgattgagggcatttctttcgccggtgaagatccggaagacaaggaag

SEQ ID NO: 872439 - DNA, 75 bp, synthetic construct
  source 1..75: mol_type = other DNA
tggtagcgatctggccgttcggctggggatttctcactacccggtactgattagcgagaaggggctggagcaatg

SEQ ID NO: 872440 - DNA, 75 bp, synthetic construct
  source 1..75: mol_type = other DNA
cccgtggcgctctggcgatgtatatgcagcagcaggcgggcatgaacaatgtttctcccgcagcgcttgctcagc

SEQ ID NO: 872441 - DNA, 75 bp, synthetic construct
  source 1..75: mol_type = other DNA
caccttcatctcctaccctcagcttgacatgtgggccggacaccctgacttccagctgcgtgtgagtcgccagat

SEQ ID NO: 872442 - DNA, 75 bp, synthetic construct
  source 1..75: mol_type = other DNA
tggaagactacggcaaatgtgcactgattgaggggatttcctttgccggtgaagatccggatgagaagccggaca

SEQ ID NO: 872443 - DNA, 75 bp, synthetic construct
  source 1..75: mol_type = other DNA
ctgctgcttaacatcaccttatccgaccgccagccgctgcaaccggcggttagcgcgatgcttgccgacttcacc

SEQ ID NO: 872444 - DNA, 75 bp, synthetic construct
  source 1..75: mol_type = other DNA
acgaaccgcaattgttcctcggttttgccaccgattaccgttttgcaggctggacgctgcgcgatgtggagatgg

SEQ ID NO: 872445 - DNA, 75 bp, synthetic construct
  source 1..75: mol_type = other DNA
gctacaaccacgattcaaacgggcgatctgacccgacgtcccgtagctggaaccgtatctatacccgcctgatgg

SEQ ID NO: 872446 - DNA, 75 bp, synthetic construct
  source 1..75: mol_type = other DNA
tccactcccctgaagatcgctaccagccctttgcgcttaccgacgtgcagcaggcttacctggtggggcgtcagc

SEQ ID NO: 872447 - DNA, 75 bp, synthetic construct
  source 1..75: mol_type = other DNA
tcgggccttccggccacaaggacaatttatcgcgatgggcggtgccaccgaggcgtctatctggtctaacgcctg

SEQ ID NO: 872448 - DNA, 75 bp, synthetic construct
  source 1..75: mol_type = other DNA
tgattgtcccggcaacacgctggcacgcctttagcaaccgggccggcgagtatggcgtgacgccgacaatggcac

SEQ ID NO: 872449 - DNA, 75 bp, synthetic construct
  source 1..75: mol_type = other DNA
catagccatcaaggacagaatagacacaaatgcgccagttataggggaaatctatacgcatctgatggcgatatt

SEQ ID NO: 872450 - DNA, 75 bp, synthetic construct
  source 1..75: mol_type = other DNA
taccgggcgtctgcgtgaccttagcccgtgcgtaatcatcgttgcgctgctgtttatcctgaagattgtatttat

SEQ ID NO: 872451 - DNA, 75 bp, synthetic construct
  source 1..75: mol_type = other DNA
gggatggtgcctggctacgccgcggcgggggcgttgatttacgttggcgtactgatgacttcaagtcttgctcgc

SEQ ID NO: 872452 - DNA, 75 bp, synthetic construct
  source 1..75: mol_type = other DNA
ctcgctctttttacttcatgataatggcgcgggcggtgttatggcggcaattggctggtttggtgcggcattggt

SEQ ID NO: 872453 - DNA, 75 bp, synthetic construct
  source 1..75: mol_type = other DNA
cagcctcgtgaccaaaagacgccggtcagagtgaataagcaagatgacaataaacgcgctttcacgcatatggga

SEQ ID NO: 872454 - DNA, 75 bp, synthetic construct
  source 1..75: mol_type = other DNA
agccagtttgatcggctgctgaaaaagctctgcgttgaagcagcacttaatgcagagatgactcatcatctcgga

SEQ ID NO: 872455 - DNA, 75 bp, synthetic construct
  source 1..75: mol_type = other DNA
ttcgcccgcctgaacggcgcactggacagcacgcgctggcatcggctgaaaaaacgggcggctgacgcccatctc

SEQ ID NO: 872456 - DNA, 75 bp, synthetic construct
  source 1..75: mol_type = other DNA
tgtggtcaaccgtgctctctgcatggagcgcgcagcctgagttcacgcttaatcttacgcttttcgacaggcgac

SEQ ID NO: 872457 - DNA, 75 bp, synthetic construct
  source 1..75: mol_type = other DNA
gtggctgtgtctggataacctgttacttgacgggctgagcatgcagattctgttggcggagctggagcacggcta

SEQ ID NO: 872458 - DNA, 75 bp, synthetic construct
  source 1..75: mol_type = other DNA
cgcgctggtgcctcccgttaagcaggcggagcaaggtacagagcgcacatcgcgcgtatgccctgagcactctca

SEQ ID NO: 872459 - DNA, 75 bp, synthetic construct
  source 1..75: mol_type = other DNA
tgcctatcgttcggagcagggatatattaaaaaagatgtgttgataaaagatatccttttttatctgaataataa

SEQ ID NO: 872460 - DNA, 75 bp, synthetic construct
  source 1..75: mol_type = other DNA
atgtatcaacgctgttttgataatgccagcgaaacgctgtttgtctctggaaaaacgccacggctttcacgtttt

SEQ ID NO: 872461 - DNA, 75 bp, synthetic construct
  source 1..75: mol_type = other DNA
ccaaactgtttttgcgccatgtcggttgttcgcccagcgattaccgcaggcaatttaaaaactgttttgcggaac

SEQ ID NO: 872462 - DNA, 75 bp, synthetic construct
  source 1..75: mol_type = other DNA
acgggatgcctgcccgcctgtggctgtgtctggataacctgttgcttgacggtctgagcatgcagatcctgctgg

SEQ ID NO: 872463 - DNA, 75 bp, synthetic construct
  source 1..75: mol_type = other DNA
ttgccaacagcttgcacagcgcttacagcgccggtacgcttgcgcgcagcgacgagctggcgcaatacggcatca

SEQ ID NO: 872464 - DNA, 75 bp, synthetic construct
  source 1..75: mol_type = other DNA
ctgccgggcaggtggagcgccagtttgaacagtattgcgcattgctaaaccgaatggccgaggatgaaagcggct

SEQ ID NO: 872465 - DNA, 75 bp, synthetic construct
  source 1..75: mol_type = other DNA
tttttgcgttaccgatcatcggaacccggcactgccgcaggcgtggcacacgcttgcgggaacgttgccctgttg

SEQ ID NO: 872466 - DNA, 75 bp, synthetic construct
  source 1..75: mol_type = other DNA
aacattgttcgacgcctactgccagttgattaaccaactctgcgatgacgaaagcgcctggcaaaagccgttcgc

SEQ ID NO: 872467 - DNA, 75 bp, synthetic construct
  source 1..75: mol_type = other DNA
gagccagaacctcaaccaccgcgatgtgtcagccatccgcgtgatgcgtcaactggcgcaacggcaaaacgtgcc

SEQ ID NO: 872468 - DNA, 75 bp, synthetic construct
  source 1..75: mol_type = other DNA
taccggacgtctgcgtgaccttagcccgtgcgtaatcatcgttgcgctgctgtttatcctgaagattgtgtttat

SEQ ID NO: 872469 - DNA, 75 bp, synthetic construct
  source 1..75: mol_type = other DNA
cagcatcaggttacggaatgactcacgtaaggaacatgcagatggcagctcagccacaaacagtacagcaggaaa

SEQ ID NO: 872470 - DNA, 75 bp, synthetic construct
  source 1..75: mol_type = other DNA
cagcatcaggttacgggatcacttacgtaagggacaggcagatggcagctcagctacagacagcattgcaggaaa

SEQ ID NO: 872471 - DNA, 75 bp, synthetic construct
  source 1..75: mol_type = other DNA
atgttttatgaagggagcaatgcctcagcatcaggttacggggtgactcacgtaagggacaggcagatggcagct

SEQ ID NO: 872472 - DNA, 75 bp, synthetic construct
  source 1..75: mol_type = other DNA
agttggccccccaaaaggcaaaagtgacaacgttccggtacaggttttctgccctgcctgcggctttgccaacac

SEQ ID NO: 872473 - DNA, 75 bp, synthetic construct
  source 1..75: mol_type = other DNA
tgcgacaccattctggttgatccggatgatatgttaaaagcggcgctacggttgaaagatgctctggtgctacgc

SEQ ID NO: 872474 - DNA, 75 bp, synthetic construct
  source 1..75: mol_type = other DNA
aagaactggtggcgcaaaaccatgcaaagtatcaggcgctggggctggaagccgatatttttgccgccgggctaa

SEQ ID NO: 872475 - DNA, 75 bp, synthetic construct
  source 1..75: mol_type = other DNA
cagtattgacaagcgtttgccgatgggcggcggtctgggcggcggttcatccaatgccgcgactgttctggtggc

SEQ ID NO: 872476 - DNA, 75 bp, synthetic construct
  source 1..75: mol_type = other DNA
tggggctgacgctgggcgcagatgttcctgtctttgttcgggggcatgccgcgtttgccgaaggcgttggtgaaa

SEQ ID NO: 872477 - DNA, 75 bp, synthetic construct
  source 1..75: mol_type = other DNA
cgtcagcgacaggcattactggcagaaggtgtgatggtgtcgggaagcgggcaaatcgacttgcagctttatcgc

SEQ ID NO: 872478 - DNA, 75 bp, synthetic construct
  source 1..75: mol_type = other DNA
gtcaccatggagatcaaactatattgagggtgttggtggttctgaaattagctctaaggagatggcagagtactt

SEQ ID NO: 872479 - DNA, 75 bp, synthetic construct
  source 1..75: mol_type = other DNA
ggtgtaagtattccgacaccggtgatttttaaagatcctgaactcccgcgcaacacgccgaaaaggtcaattgat

SEQ ID NO: 872480 - DNA, 75 bp, synthetic construct
  source 1..75: mol_type = other DNA
ttcttgattacggcgacaccatcagcattgaacttcgtgacgatggggatattcgtctgttaacgcccgttgaag

SEQ ID NO: 872481 - DNA, 75 bp, synthetic construct
  source 1..75: mol_type = other DNA
gaaaataacctattacgatgaagacggcgccgacgtgagtgagcgcttccgtctacaaacgccagctcagcgcac

SEQ ID NO: 872482 - DNA, 75 bp, synthetic construct
  source 1..75: mol_type = other DNA
ctggcgcgctgatttacgttggcgtgttgatgacctcaagtcttgctcgcgtgaactggcaggatcttaccgaat

SEQ ID NO: 872483 - DNA, 75 bp, synthetic construct
  source 1..75: mol_type = other DNA
taaaacaaggattgaccgcaaaagcacctattgacggttggcattatggccctaaagatatagttaaaaaattcc

SEQ ID NO: 872484 - DNA, 75 bp, synthetic construct
  source 1..75: mol_type = other DNA
cgggtgcgttttttctggggaactgacattcacggcaagccccaggtatatggtgttcatacgggtgaaggtacg

SEQ ID NO: 872485 - DNA, 75 bp, synthetic construct
  source 1..75: mol_type = other DNA
tggttgttggtttgctgttcctgctggttatcttcctgtcgccgttggcggggatggtgccaggctacgctgcag

SEQ ID NO: 872486 - DNA, 75 bp, synthetic construct
  source 1..75: mol_type = other DNA
gtgaactggcaggatcttactgaatctgttccggcgtttattaccgctgtgatgatgccgttcagcttctcgatt

SEQ ID NO: 872487 - DNA, 75 bp, synthetic construct
  source 1..75: mol_type = other DNA
cgtgaccttagcccgtgcgtaatcatcgttgcgctgatgtttatcctgaagattgtatttatcgacgctcattaa

SEQ ID NO: 872488 - DNA, 75 bp, synthetic construct
  source 1..75: mol_type = other DNA
agcaagaagccgtggatgccacgctcaaccattttcgtcgtcataaaactcctgccgttatcgtactccctaccg

SEQ ID NO: 872489 - DNA, 75 bp, synthetic construct
  source 1..75: mol_type = other DNA
acacggctatctgacgccgccagaacgactggatatgccagtagtgcaatacgatttcagccgattgcaggcaca

SEQ ID NO: 872490 - DNA, 75 bp, synthetic construct
  source 1..75: mol_type = other DNA
gccgatatttttgccgccgggctaaagcgcaaagagagccacggtaaagtggtatttggcagcgtgcagtcggtc

SEQ ID NO: 872491 - DNA, 75 bp, synthetic construct
  source 1..75: mol_type = other DNA
ttcgtatcgttttctatttttgcgcattgatttttattgtttacagtttcagtgattttttccagggcgtccctg

SEQ ID NO: 872492 - DNA, 75 bp, synthetic construct
  source 1..75: mol_type = other DNA
aaacgataataaaattgaactgcgaatggggcatgattcttttttctctattgaaacgattgataaaattaacaa

SEQ ID NO: 872493 - DNA, 75 bp, synthetic construct
  source 1..75: mol_type = other DNA
cagcgcatggcgcgggtgcatcagtacggcctcaaagaccggccaaaccgcaacagccgggatgtgcagtacgag

SEQ ID NO: 872494 - DNA, 75 bp, synthetic construct
  source 1..75: mol_type = other DNA
gctaaaggcggcaaggtgagcaatctcgatgcaatggatattactgcaccgtacaccccaggagcgctgcgcggc

SEQ ID NO: 872495 - DNA, 75 bp, synthetic construct
  source 1..75: mol_type = other DNA
acccagatgaaacatggcattacgatttccatcaccgtcgtggggtgattgccgaacaagggggaatcactaatc

SEQ ID NO: 872496 - DNA, 75 bp, synthetic construct
  source 1..75: mol_type = other DNA
atgaaacagataacctttgctccccgtaatcacctgctcaccaataccaataccaatacctggacgcccgacagc

SEQ ID NO: 872497 - DNA, 75 bp, synthetic construct
  source 1..75: mol_type = other DNA
gtaaatatcattccaaaacccctacctataagtataagtatatagaaaaagttaaaaaggaatatgaaagaataa

SEQ ID NO: 872498 - DNA, 75 bp, synthetic construct
  source 1..75: mol_type = other DNA
tcaacgtcccgcgccactgggtacgctgtaacccgcagggaacgcaaatcgcgtttttaatgcgcgatgattacg

SEQ ID NO: 872499 - DNA, 75 bp, synthetic construct
  source 1..75: mol_type = other DNA
atcctgatgaaatatggcattacgatttccatcaccgtcgaggtgtgattgctgaaggcggcaaagtgagtaatc

SEQ ID NO: 872500 - DNA, 75 bp, synthetic construct
  source 1..75: mol_type = other DNA
aactggagaaaaaacttgcagaattgagttctccgccaattgctatcgagcatacagctgtagaaattggcactg

SEQ ID NO: 872501 - DNA, 75 bp, synthetic construct
  source 1..75: mol_type = other DNA
aagaaagaaaatccggcgcaactcgagaagagtttaacgaagcgtgggcgcgattaagtgagagagggtatttgt

SEQ ID NO: 872502 - DNA, 75 bp, synthetic construct
  source 1..75: mol_type = other DNA
cgtaccagtgaaagcaacaagactgatattatggtgatgcttcaggtcagaaaggttgaccggagcagggcgacg

SEQ ID NO: 872503 - DNA, 75 bp, synthetic construct
  source 1..75: mol_type = other DNA
gaaatcaatcgtgcttatgaagaaggatgggtaggaaatcacgcgctggcatttattggcgacacactttcgcca

SEQ ID NO: 872504 - DNA, 75 bp, synthetic construct
  source 1..75: mol_type = other DNA
tagcaaccagagcaaagatgaactgtctgcattcattggtgagcgtgttattgacaggatgaatgatggcggcgg

SEQ ID NO: 872505 - DNA, 75 bp, synthetic construct
  source 1..75: mol_type = other DNA
gttgaataatcttgatattcctgaacgattcaagggttgcacactacagaactacgagccagtcaacgacgatgc

SEQ ID NO: 872506 - DNA, 75 bp, synthetic construct
  source 1..75: mol_type = other DNA
ctgccgccattgcctggaaaattatccgggcactgtggtactggctgcgcaaacctcagcaacctcataaggagt

SEQ ID NO: 872507 - DNA, 75 bp, synthetic construct
  source 1..75: mol_type = other DNA
tcgctgccgcattctatacaacatacccctcaacgctcattgcccgttacggcacgctgcccgtcgttggctgga

SEQ ID NO: 872508 - DNA, 75 bp, synthetic construct
  source 1..75: mol_type = other DNA
ctgcccttttatgccggacaagggacaaactttatcgttaacggaagtttgattctggtcgtttttttatttggt

SEQ ID NO: 872509 - DNA, 75 bp, synthetic construct
  source 1..75: mol_type = other DNA
agaagccagggcgaggatgaacaacctgcagcgtcaggacggcatatttggtgaatcatggattgacagcccaca

SEQ ID NO: 872510 - DNA, 75 bp, synthetic construct
  source 1..75: mol_type = other DNA
tttgttgataccgtggcggataacgcctcctgtggcgtgtatgtggtcggcggtccggcacagcgtccggcagga

SEQ ID NO: 872511 - DNA, 75 bp, synthetic construct
  source 1..75: mol_type = other DNA
ctaaatatcgagaatgggaatacgaacaggaagttaggattttgcaaacgaatgagtggttttacttagataaac

SEQ ID NO: 872512 - DNA, 75 bp, synthetic construct
  source 1..75: mol_type = other DNA
tggctgggaacgctgctgattctgtcatcggtaattttgatttcaatggattcccgtcgccgcgccagaaaaata

SEQ ID NO: 872513 - DNA, 75 bp, synthetic construct
  source 1..75: mol_type = other DNA
gaatgcgccagccaggtgctcgacatgccggacattttcgacatcagcgaagcggtttacaacctttacagcctg

SEQ ID NO: 872514 - DNA, 75 bp, synthetic construct
  source 1..75: mol_type = other DNA
taacagccgggaaaaagtcgtcggtgtcagaaagacgccgcgtattccggctgttcccctcgcagaacttaaccg

SEQ ID NO: 872515 - DNA, 75 bp, synthetic construct
  source 1..75: mol_type = other DNA
agcaaatttacgcgcgcctgcgcaataacagtcgggaaaaattagtcggcgtaagaaagacgccgcgtattcctg

SEQ ID NO: 872516 - DNA, 75 bp, synthetic construct
  source 1..75: mol_type = other DNA
ggcgtttcccttatctgtgtttccttgatgaagtgggggcatactatacggaccgtattgctgtggaagccactc

SEQ ID NO: 872517 - DNA, 75 bp, synthetic construct
  source 1..75: mol_type = other DNA
ggacgttccgggattcgatatgtcactggtgagaacgccgtcagcctggactgaggagccccgtaaacagcatgc

SEQ ID NO: 872518 - DNA, 75 bp, synthetic construct
  source 1..75: mol_type = other DNA
acgctcagccttgatgacccctcccaggacagaaaggtcaggcgaagcctcttcagcttctggcccaccctgttt

SEQ ID NO: 872519 - DNA, 75 bp, synthetic construct
  source 1..75: mol_type = other DNA
tttatttggatactaaaataactggagctttggagcaacttattggttatttccagacacaagtttttgactcaa

SEQ ID NO: 872520 - DNA, 75 bp, synthetic construct
  source 1..75: mol_type = other DNA
cgccgatgatcaacattctgctggcaaaaatctatttcgaagcgctggtgccgtcgataccgtcatgggtattcg

SEQ ID NO: 872521 - DNA, 75 bp, synthetic construct
  source 1..75: mol_type = other DNA
gaaaatctattttgaagctctggtgccttccatcccatcgtggatgtttgtggtggcgctggtggcctttatgac

SEQ ID NO: 872522 - DNA, 75 bp, synthetic construct
  source 1..75: mol_type = other DNA
ggcctttatgaccgcctttaacctgcgtagtctgaaatccgtagcgaacttcaacactgtaatcgtcgtgttgca

SEQ ID NO: 872523 - DNA, 75 bp, synthetic construct
  source 1..75: mol_type = other DNA
gctggagctgtggctgatgcgcctgggtatccgggtggggcactcccggccttatcatccgcagacgcaggggaa

SEQ ID NO: 872524 - DNA, 75 bp, synthetic construct
  source 1..75: mol_type = other DNA
ccgatgtgtggtgcgctgactgttggtgcgctgtgggttaacctggaagaaagctcaatggttctgggtctgatc

SEQ ID NO: 872525 - DNA, 75 bp, synthetic construct
  source 1..75: mol_type = other DNA
ctggtacgctggcgagcactcgtccgttctggtctggcgatgcgcatgttatcccgatgattaccggggcgacaa

SEQ ID NO: 872526 - DNA, 75 bp, synthetic construct
  source 1..75: mol_type = other DNA
acgatggttacgcagggctatgagtatcatcgtgatgacgatatggcattgtggagctctgcagatctgacttat

SEQ ID NO: 872527 - DNA, 75 bp, synthetic construct
  source 1..75: mol_type = other DNA
tacagcaaacaaccgggctacggcgtgaatgatttctacgtcagttatcaaggacagcaggcgctcaaaggcatg

SEQ ID NO: 872528 - DNA, 75 bp, synthetic construct
  source 1..75: mol_type = other DNA
ccgtcgatttcgcggcggcgacaaccatgtcttataacgttccgaacgccaaaatctggggttgggatgtgatga

SEQ ID NO: 872529 - DNA, 75 bp, synthetic construct
  source 1..75: mol_type = other DNA
tgggctgctatcggtctgatttacctggcttgcgtcaccaagagtttccgtaacccggttccgcagtacgaagac

SEQ ID NO: 872530 - DNA, 75 bp, synthetic construct
  source 1..75: mol_type = other DNA
aagctacccgctcgcggctaagtgagtatttgccggaagtccgtagccgtttgctgttactgttttcgcgtcagg

SEQ ID NO: 872531 - DNA, 75 bp, synthetic construct
  source 1..75: mol_type = other DNA
tggatacctttacggtcaatctgggcgatgcggatcgcgtgctttatatcggcataaccctgcgcctgaaagatg

SEQ ID NO: 872532 - DNA, 75 bp, synthetic construct
  source 1..75: mol_type = other DNA
ggttcgcagacagcggtgaactgcagcgcgccttcgaccactggcggacggtctataaccttgaacgcccgcacg

SEQ ID NO: 872533 - DNA, 75 bp, synthetic construct
  source 1..75: mol_type = other DNA
gaaacgctggagcataccaaagatacgttaataagtagcaaagcggcattgaatgctgctatccaggcttataaa

SEQ ID NO: 872534 - DNA, 75 bp, synthetic construct
  source 1..75: mol_type = other DNA
ttcagcgtgtaccggttgaagtttctcttgatccaaaagaactcatggaacatcccttgcgcattggtttatcga

SEQ ID NO: 872535 - DNA, 75 bp, synthetic construct
  source 1..75: mol_type = other DNA
tccatgcctgcttataccagtaaggctttagttatcgataccagtccgatagaaaaagaaattagcaacattatt

SEQ ID NO: 872536 - DNA, 75 bp, synthetic construct
  source 1..75: mol_type = other DNA
ctgccgggagaaatatatattccaaaaaaaataattcaattttacaatggaaattttttcgacacatttaaattt

SEQ ID NO: 872537 - DNA, 75 bp, synthetic construct
  source 1..75: mol_type = other DNA
gctattgaaatgtttaataaatatgatataccgtttaaatttatcaaaaaaaattcagacctatcatttatcaat

SEQ ID NO: 872538 - DNA, 75 bp, synthetic construct
  source 1..75: mol_type = other DNA
tgaaaccacacataagataataaaattttgtaaaatcaaaaaaataaatattctttatatacaagcacatccaaa

SEQ ID NO: 872539 - DNA, 75 bp, synthetic construct
  source 1..75: mol_type = other DNA
tcacctgcaatgcgctaaaaaacgctctctcaattccgctcactcctgaagaacaggagcttgaagcccaatggt

SEQ ID NO: 872540 - DNA, 75 bp, synthetic construct
  source 1..75: mol_type = other DNA
gctactcgtttccggctatacgtggcattcaggctggtcgccctttctatatcgccacatgcccgatgcgtatca

SEQ ID NO: 872541 - DNA, 75 bp, synthetic construct
  source 1..75: mol_type = other DNA
ccctcaatgctgattgcccgctatggcacgttaccggtcgtcggctggagtatgctcattggcggtctgatcttg

SEQ ID NO: 872542 - DNA, 75 bp, synthetic construct
  source 1..75: mol_type = other DNA
attggtgacacacggtaatccgacgtcattatcgatctctccggccgcgttattctggggcattgcctcggcatt

SEQ ID NO: 872543 - DNA, 75 bp, synthetic construct
  source 1..75: mol_type = other DNA
aattggcggtccaaaagccagcattttaagctgtgcagaaccattaagtagcgcgctgctctctttgctgttgct

SEQ ID NO: 872544 - DNA, 75 bp, synthetic construct
  source 1..75: mol_type = other DNA
tcatcggtgattttgatttcaatggattctcgtcgccgcgccagaaaaataaatcgtccggcgcggcatgagtga

SEQ ID NO: 872545 - DNA, 75 bp, synthetic construct
  source 1..75: mol_type = other DNA
gggtggtacaggaaaagataaatctggcgtcgtacagctacaggatgatgtttattcctatgatccattaaaaaa

SEQ ID NO: 872546 - DNA, 75 bp, synthetic construct
  source 1..75: mol_type = other DNA
atgtcaaatcagaataaaattaatgtatttcaggttgaatcaaaacataaaacacctgtgataaaacacgttcgc

SEQ ID NO: 872547 - DNA, 75 bp, synthetic construct
  source 1..75: mol_type = other DNA
gatcacattgctatagataaacataacggagaaataatgttatcacgcgaacttgccgaaatttactgtaacgtg

SEQ ID NO: 872548 - DNA, 75 bp, synthetic construct
  source 1..75: mol_type = other DNA
cttaagtgtaggctatcaataacggtgtatattgcaccgccagataacagacgccgcgatattgacaatgtaggg

SEQ ID NO: 872549 - DNA, 75 bp, synthetic construct
  source 1..75: mol_type = other DNA
ctatcttgccgactggcaatcgccatttatgccgcgccgccggataaccgggtcagagatcttgataatatccca

SEQ ID NO: 872550 - DNA, 75 bp, synthetic construct
  source 1..75: mol_type = other DNA
ccaccgatcagccttgctggtcatgtcagtttttcctggaaagggcagataatatcgacaggaggggttaacaaa

SEQ ID NO: 872551 - DNA, 75 bp, synthetic construct
  source 1..75: mol_type = other DNA
ttggtaacacgtctggcgtcattcccggcaaaaccattacggaacgacaggcagcagaagggctgatttccaacg

SEQ ID NO: 872552 - DNA, 75 bp, synthetic construct
  source 1..75: mol_type = other DNA
tgtcgtttgccttcaacgtggggacgggcaatgcctgtagttccacgctggtgaaattgctcaatcagcggcgct

SEQ ID NO: 872553 - DNA, 75 bp, synthetic construct
  source 1..75: mol_type = other DNA
agcgcgggtgtctggacagacggcattggtaatacatctggcgtcattccgggcaaaaccattacggaacgacag

SEQ ID NO: 872554 - DNA, 75 bp, synthetic construct
  source 1..75: mol_type = other DNA
atcagtgataacagcgattgaatgcgcccgtctgatggcgctcaatcctgatgaagatgctatcgagtgtcgaaa

SEQ ID NO: 872555 - DNA, 75 bp, synthetic construct
  source 1..75: mol_type = other DNA
ttggtaatacatctggcgtcattccaggcaaaaccattacggaacgacaggccgcggaagggctgatctccaacg

SEQ ID NO: 872556 - DNA, 75 bp, synthetic construct
  source 1..75: mol_type = other DNA
cagaaggtgtatgacgctgtggtgtcgtttgccttcaacgtgggtacgggcaatgcctgcagttccacgctggtg

SEQ ID NO: 872557 - DNA, 75 bp, synthetic construct
  source 1..75: mol_type = other DNA
cttttatccataatggtcatgcggtatctactggtggtgtaaatgagaatatttttaatggatacttttcagatg

SEQ ID NO: 872558 - DNA, 75 bp, synthetic construct
  source 1..75: mol_type = other DNA
cgtttggcaaaagtattgccgcgctggaggaacaaattggttatacgctgtttacccgtaaagataacaacatta

SEQ ID NO: 872559 - DNA, 75 bp, synthetic construct
  source 1..75: mol_type = other DNA
gccgctacgactgggctttcttgtttctcgccgttatgaagagcgacaagaacaggaactgctacaggagttgcc

SEQ ID NO: 872560 - DNA, 75 bp, synthetic construct
  source 1..75: mol_type = other DNA
caaaaacgggaaagtaatattaattcgtcatgttcatgacgatgaacttgtaggaagtctttcaacattcctgtt

SEQ ID NO: 872561 - DNA, 75 bp, synthetic construct
  source 1..75: mol_type = other DNA
cgcggaaccggttatcgaaccgcaggaagagacggtagctattgcagatgtcgacgaaacaactgaggttatggt

SEQ ID NO: 872562 - DNA, 75 bp, synthetic construct
  source 1..75: mol_type = other DNA
aacgatcagatggaaaccccgcactaccacgtgctgcgcgtgcgtaaaggggaagaaaccccaaccttaagctac

SEQ ID NO: 872563 - DNA, 75 bp, synthetic construct
  source 1..75: mol_type = other DNA
actcgtgagagccgtcagcaagctgatgtaacggaaaaagcacgtaccaccgacgaacagcaaacaccgcgtcgc

SEQ ID NO: 872564 - DNA, 75 bp, synthetic construct
  source 1..75: mol_type = other DNA
tgttgcaggaaagagagccgtagttgaaaatttgattaaaaatgctggtgggaacatcagtagtggaattactca

SEQ ID NO: 872565 - DNA, 75 bp, synthetic construct
  source 1..75: mol_type = other DNA
ttagtagacttcacaggatgtgacttggaaagtggggtggtggatggtttggcgaccaggctgcctattgatgta

SEQ ID NO: 872566 - DNA, 75 bp, synthetic construct
  source 1..75: mol_type = other DNA
tatccattgccaggattgcagcatcagtcagctttgcatcccgttcacactcaacgaacatgagcttgatcagct

SEQ ID NO: 872567 - DNA, 75 bp, synthetic construct
  source 1..75: mol_type = other DNA
gctacccaccttccggtcgttcgcctctgcgtgaaaaaatgaacggtattgccctgattctgacaccagattcat

SEQ ID NO: 872568 - DNA, 75 bp, synthetic construct
  source 1..75: mol_type = other DNA
aaagtctatctgctcgggtgtcggatattcttgcggatggaataatcacatcagaagaacgtgatgaccttaaaa

SEQ ID NO: 872569 - DNA, 75 bp, synthetic construct
  source 1..75: mol_type = other DNA
aaaggctatatcttatagggatgataatggtgcaaaacttaaaattatttctgaagaaatgcttttcgatgcatt

SEQ ID NO: 872570 - DNA, 75 bp, synthetic construct
  source 1..75: mol_type = other DNA
agcccgttcacccttattctatcggtttgcttaatgccgtaccgcgtcttgatgcggaaggtgaaacgatgttga

SEQ ID NO: 872571 - DNA, 75 bp, synthetic construct
  source 1..75: mol_type = other DNA
tttaagtttcagaaaatactactcagtcactccctgtcagtggttaaaacagtatggtattaaggacacaactgg

SEQ ID NO: 872572 - DNA, 75 bp, synthetic construct
  source 1..75: mol_type = other DNA
gcaggattcagccggataatcacagaagtacgtatgaaaaaggcaataactctgatgaagtgcgggaatgctaac

SEQ ID NO: 872573 - DNA, 75 bp, synthetic construct
  source 1..75: mol_type = other DNA
tttatgacagctggctggaaaccatccggattgggctgctgtcaggtcttctcccggacccggcccgcgactttt

SEQ ID NO: 872574 - DNA, 75 bp, synthetic construct
  source 1..75: mol_type = other DNA
cccatcgctcgttacaccgacccacaattaacgaccgtgcgttatcccattgcttcgatggcaaaattagctacc

SEQ ID NO: 872575 - DNA, 75 bp, synthetic construct
  source 1..75: mol_type = other DNA
gccactggtgcggcgtaccggtgggcttgctgatacggtttctgactgttctcttgagaaccttgcagatggcgt

SEQ ID NO: 872576 - DNA, 75 bp, synthetic construct
  source 1..75: mol_type = other DNA
aaaccatcagccgtctgctgggtcgcttccagaaaagcggtatgctggcagtcaaaggtaaatacatcactatcg

SEQ ID NO: 872577 - DNA, 75 bp, synthetic construct
  source 1..75: mol_type = other DNA
ggcgataaacaattggacatctttgatgcagggaactggtgaggtttctgaattttataaaagcatcctcgatag

SEQ ID NO: 872578 - DNA, 75 bp, synthetic construct
  source 1..75: mol_type = other DNA
gcagacggatggacctggcgaccgtacgcatgatggggaaaacggcggagattaacggcatcagttatgacgtga

SEQ ID NO: 872579 - DNA, 75 bp, synthetic construct
  source 1..75: mol_type = other DNA
atgtctgatctgtttacgcgaatgtgttgccggatggacgtggcgaccgttcggatgatgggcaaacaggcggag

SEQ ID NO: 872580 - DNA, 75 bp, synthetic construct
  source 1..75: mol_type = other DNA
atgtatttaaccattaagcagtttgcagaaagatttaatctttccgcatccacggttgcgtcagatatatcgcgc

SEQ ID NO: 872581 - DNA, 75 bp, synthetic construct
  source 1..75: mol_type = other DNA
gggaacaattattaaaagctattttgattgaaaaaaatggtgaagagtcaattttcaaaaaagaaaacaagcgag

SEQ ID NO: 872582 - DNA, 75 bp, synthetic construct
  source 1..75: mol_type = other DNA
gtcgaaactagcaaaagcattattaacaaaatctagagataatatgatgcttgctcttgaattatataatagacc

SEQ ID NO: 872583 - DNA, 75 bp, synthetic construct
  source 1..75: mol_type = other DNA
tcaggaaacagccaacagcaacaaagtagcaatcatcaaaatcatcctgaacacgacgattcaattcccttctaa

SEQ ID NO: 872584 - DNA, 75 bp, synthetic construct
  source 1..75: mol_type = other DNA
tttgcaacttcaggaaacagccaacagcaacaaagtaacaatcatcaaaatcatcctgaatacgacgattcaatt

SEQ ID NO: 872585 - DNA, 75 bp, synthetic construct
  source 1..75: mol_type = other DNA
agacgggcgtgccgggggcgtgtttgaaaccggctacaactggtcgctaaccgccgaccggcgggcttaccgcgt

SEQ ID NO: 872586 - DNA, 75 bp, synthetic construct
  source 1..75: mol_type = other DNA
cacaccaaagataagctttccggctctatcgacgccaaccgcgactttgacggcagcgccacttcccagcagcag

SEQ ID NO: 872587 - DNA, 75 bp, synthetic construct
  source 1..75: mol_type = other DNA
ggtgtgtttaatcaggggctggataaccgccgtgcgcgggagatggcctggtgccttaaaggagctggattatga

SEQ ID NO: 872588 - DNA, 75 bp, synthetic construct
  source 1..75: mol_type = other DNA
ggtgtacgtcaacgggcagcgtaataccggcctcgaaaatcgccgtcagcgtgagcgcgcttactgtctgcaggg

SEQ ID NO: 872589 - DNA, 75 bp, synthetic construct
  source 1..75: mol_type = other DNA
actaccgtagcgttctggttgagggtggcattgtggaaattaccggagaaaacatcagggtgaggtgtactggca

SEQ ID NO: 872590 - DNA, 75 bp, synthetic construct
  source 1..75: mol_type = other DNA
aaaacctgactatcagtgaactaccgccgctgcgattgggctttctcgtttctcgtcgttatgaagagcgacaag

SEQ ID NO: 872591 - DNA, 75 bp, synthetic construct
  source 1..75: mol_type = other DNA
ttccagccgcgttgtccgcatgcgatggaaatttgtaatagtgcgccggcgctggaagagttcactcctggccgt

SEQ ID NO: 872592 - DNA, 75 bp, synthetic construct
  source 1..75: mol_type = other DNA
tcgtaatgcgcgtctattttgaaaagccgcgtaccacggtgggctggaaagggctgattaacgatccgcatatgg

SEQ ID NO: 872593 - DNA, 75 bp, synthetic construct
  source 1..75: mol_type = other DNA
gaaactggctacaactggtcgctgaccgccgaccggcgggcttaccgcgtgggcgatatcctgacggtgatcctc

SEQ ID NO: 872594 - DNA, 75 bp, synthetic construct
  source 1..75: mol_type = other DNA
ataagctttccggctctatcgatgccaaccgcgactttgacggcagcgccacttcccagcagcagaacagcctgc

SEQ ID NO: 872595 - DNA, 75 bp, synthetic construct
  source 1..75: mol_type = other DNA
cgggccaatttcgaagcaatgattgatgcgaatatgcgtccttgtgggatcaatcccaccattatttatcgtccc

SEQ ID NO: 872596 - DNA, 75 bp, synthetic construct
  source 1..75: mol_type = other DNA
ctttccgctgtttgccctggtgtgggggctgaatctgtctgaaccgccccgggtttcctggagagtgttttatct

SEQ ID NO: 872597 - DNA, 75 bp, synthetic construct
  source 1..75: mol_type = other DNA
gctgatgcgcaggtgggtgtttctgccgttgcggcactgccgaatgacacgctgccggttgccctgatggtgaaa

SEQ ID NO: 872598 - DNA, 75 bp, synthetic construct
  source 1..75: mol_type = other DNA
ttcgtgattacgacaaagacgattttgacggtgacaagtaccacaacacgaaaaacggattcaacgccgatattg

SEQ ID NO: 872599 - DNA, 75 bp, synthetic construct
  source 1..75: mol_type = other DNA
ggtgttaactgtacaggctcctgcagctggaaaatctacgttaaaaaaggtctggtaacctgggaaaaccaacag

SEQ ID NO: 872600 - DNA, 75 bp, synthetic construct
  source 1..75: mol_type = other DNA
tgtttgtctggcgttctaacctgcttggttcctccggcaaaggccacgagtatatgcagaagtatctgctgggga

SEQ ID NO: 872601 - DNA, 75 bp, synthetic construct
  source 1..75: mol_type = other DNA
cgccagtatattgaaaccatcgcccgtgaatttgccgataccgcccataaaacgcatgggcgctcgatgattatt

SEQ ID NO: 872602 - DNA, 75 bp, synthetic construct
  source 1..75: mol_type = other DNA
gcaccatcattgcatctgctgtattattttcatttaacgctgcagcagcgacgtcatattttgaagcgcgtaacg

SEQ ID NO: 872603 - DNA, 75 bp, synthetic construct
  source 1..75: mol_type = other DNA
gcagcgcctgcaggagttccgcaatatccacgctgatgcgcaggtgggtgtttctgccgttgcggcactgccgaa

SEQ ID NO: 872604 - DNA, 75 bp, synthetic construct
  source 1..75: mol_type = other DNA
gatgtggttcacctggacatcgccggtctggtcggcactgaccatgactacggtgcgatggctcagctgcagttc

SEQ ID NO: 872605 - DNA, 75 bp, synthetic construct
  source 1..75: mol_type = other DNA
cacagggcgcgtacgtcggcgtggtgaccgttcatccgaagtcagagaagtatgtcttcatccacggcccggaaa

SEQ ID NO: 872606 - DNA, 75 bp, synthetic construct
  source 1..75: mol_type = other DNA
gtgactatgacaacagcgatttcagcgatgacaaataccacaacacgaaaaacggcgtgaacgccgacatcgggg

SEQ ID NO: 872607 - DNA, 75 bp, synthetic construct
  source 1..75: mol_type = other DNA
gtggcagcgcattcacggcaggtgtcggaatttcaccgtttgatgtggttcacctggacatcgccggtctggtcg

SEQ ID NO: 872608 - DNA, 75 bp, synthetic construct
  source 1..75: mol_type = other DNA
ggtgttaactgtacaggctcctgcagctggaaaatctacgttaaaaatggtctggttacctgggaaacccaacag

SEQ ID NO: 872609 - DNA, 75 bp, synthetic construct
  source 1..75: mol_type = other DNA
gggcagtttgcgctggcgtccggcacggatgcggaatttgaccgtgtgttcggggaaagctgccggaagtttaat

SEQ ID NO: 872610 - DNA, 75 bp, synthetic construct
  source 1..75: mol_type = other DNA
cgaccatgccgtgaagctgctgcgtcttctgagtgtgctgcgccgtctgcgagccctgcagcgcagtgtgttacc

SEQ ID NO: 872611 - DNA, 75 bp, synthetic construct
  source 1..75: mol_type = other DNA
ctgatggagtcagggctgggaggcccgcaggtcagaaacctgcttgcgttacgtcaggacgcagaacgtgtctgg

SEQ ID NO: 872612 - DNA, 75 bp, synthetic construct
  source 1..75: mol_type = other DNA
aagttcgcggtgaactgacctttattgagaaggcgcagggcatccacaaggcgcgcctgatttatgaagagcagt

SEQ ID NO: 872613 - DNA, 75 bp, synthetic construct
  source 1..75: mol_type = other DNA
ctggtggggctgaccggtgatgcaccgctgacagtgtctcccgtcagtctgacagacctgctgacaggtggcagt

SEQ ID NO: 872614 - DNA, 75 bp, synthetic construct
  source 1..75: mol_type = other DNA
tctgaggcaccggagtgtctgccggatacggacgcagagccggtgccggaaagcactgcccccggtactgagccc

SEQ ID NO: 872615 - DNA, 75 bp, synthetic construct
  source 1..75: mol_type = other DNA
gcctggcgaatggatctgcaccatgaaactggcccgtcgtttgtggccaggaattaaatacagcaacatggcgct

SEQ ID NO: 872616 - DNA, 75 bp, synthetic construct
  source 1..75: mol_type = other DNA
cggcgcgctggcgtgctttttgtacgcggtagactgcgcgataccgttgtatatgacgcgtaaaaagccacgtaa

SEQ ID NO: 872617 - DNA, 75 bp, synthetic construct
  source 1..75: mol_type = other DNA
ggtgttaactgtacaggctcctgcagctggaaaatctacgttaaaaacggtctggttacctgggaaatccaacag

SEQ ID NO: 872618 - DNA, 75 bp, synthetic construct
  source 1..75: mol_type = other DNA
acgctgtggaagcggggattgccggggccgctgtgccatccgttatgaccggagatacagcgccgtccggaacac

SEQ ID NO: 872619 - DNA, 75 bp, synthetic construct
  source 1..75: mol_type = other DNA
ggtggtgagccggtcttcagcggtgacgctgtggaagcggggattgccggggccgctgtgccatccgttatgacc

SEQ ID NO: 872620 - DNA, 75 bp, synthetic construct
  source 1..75: mol_type = other DNA
gattggtgatctgctgaaagcgttaccacatccggtgctggattatgaccgctggctgcttgaactggatccgcg

SEQ ID NO: 872621 - DNA, 75 bp, synthetic construct
  source 1..75: mol_type = other DNA
gtacacttgtcgcgtctgccgttttattttcctttaattcagcggccgccacctcatattctgaagcccgtaatg

SEQ ID NO: 872622 - DNA, 75 bp, synthetic construct
  source 1..75: mol_type = other DNA
agtggtgctggttggcgccggccctggcgatgccgggctactgacgctgaaaggtctgcaacaaattcagcaggc

SEQ ID NO: 872623 - DNA, 75 bp, synthetic construct
  source 1..75: mol_type = other DNA
cagacgctggtgttctatatggggctgaatcaggctgcaactattcagcaaaagctgattgaatacggtatgcct

SEQ ID NO: 872624 - DNA, 75 bp, synthetic construct
  source 1..75: mol_type = other DNA
gcattggcgaatgaatgttatatagagagcaatgctgaaggggattatcacatgaagataagctctactcagctt

SEQ ID NO: 872625 - DNA, 75 bp, synthetic construct
  source 1..75: mol_type = other DNA
tcctgcacaaagtggtgcagataatcatacagataacgccagctcaaagtgggcctatgagtatagtgacgatag

SEQ ID NO: 872626 - DNA, 75 bp, synthetic construct
  source 1..75: mol_type = other DNA
ggcacagttggtaccggatggcagtggtaatgcagtcggtgttggaacattttcaggaaacgcgaccttctcctt

SEQ ID NO: 872627 - DNA, 75 bp, synthetic construct
  source 1..75: mol_type = other DNA
aaaactgattgaacacggaatgccaggcgaaatgccagtggcgattgtcgaaaacgggacggcggtaacgcaacg

SEQ ID NO: 872628 - DNA, 75 bp, synthetic construct
  source 1..75: mol_type = other DNA
tgacgccgttagtcggctgggggatgggcatgttagccagtcgctttgtcctcgagtggaaccactggattgcgt

SEQ ID NO: 872629 - DNA, 75 bp, synthetic construct
  source 1..75: mol_type = other DNA
tgtcggctacgcctctgacctgctggtgcgctgcggcgcaacggtgatgttctccgaagtcactgatgtacacga

SEQ ID NO: 872630 - DNA, 75 bp, synthetic construct
  source 1..75: mol_type = other DNA
taataaaatgttctcggaataattccggtaattgccctcaatcagaaataacacgtatccagaatgaatctaatt

SEQ ID NO: 872631 - DNA, 75 bp, synthetic construct
  source 1..75: mol_type = other DNA
taaaacaacgggctctgcttcaggtgtggctgtaaaagtgcattcaacttacgaaaatagcaaagtcttattaaa

SEQ ID NO: 872632 - DNA, 75 bp, synthetic construct
  source 1..75: mol_type = other DNA
atgacaatagcaaagtattgttaaaagcagatggtagcaacacggttgactacaacttcgccgcctggtcaaaca

SEQ ID NO: 872633 - DNA, 75 bp, synthetic construct
  source 1..75: mol_type = other DNA
gtggctgtaaaagttcattcaacttacgacgacagcaaagtattgttaaaagcagatggtagcaacacggttgac

SEQ ID NO: 872634 - DNA, 75 bp, synthetic construct
  source 1..75: mol_type = other DNA
ttaaccgcgacaacgaattttcatgcgattatcgcaacatggcgcaagctattatcgacggatgtatcggacacg

SEQ ID NO: 872635 - DNA, 75 bp, synthetic construct
  source 1..75: mol_type = other DNA
taagggcagaagtgcaagcgatatgatgacgggtatgcccaaatcagccccccactattacctgctctttaaaac

SEQ ID NO: 872636 - DNA, 75 bp, synthetic construct
  source 1..75: mol_type = other DNA
acaatttcgaagtccgtggattcgctaccgtcaacaacgccgatatgccagttcgtctggttgttctgagaaacg

SEQ ID NO: 872637 - DNA, 75 bp, synthetic construct
  source 1..75: mol_type = other DNA
gcactacagacaaaaccgttcaataacatacatgaaaagtatgattattttacggataccgcttgcttgctgaca

SEQ ID NO: 872638 - DNA, 75 bp, synthetic construct
  source 1..75: mol_type = other DNA
ggatctctatcaccaatgccactgttctggaagttacgaagggcagaagtgccagcgatatgatgacgggaatgc

SEQ ID NO: 872639 - DNA, 75 bp, synthetic construct
  source 1..75: mol_type = other DNA
gtattgatgatgccgttcttacttacaagaaaggccagaaagtcagcgttactggaacggtgaaccgccccggga

SEQ ID NO: 872640 - DNA, 75 bp, synthetic construct
  source 1..75: mol_type = other DNA
aaggtcagtgttactggaacagtcaacaacttcgaagtccgtgggttcgctaccgtcaacaacgccgatatgcca

SEQ ID NO: 872641 - DNA, 75 bp, synthetic construct
  source 1..75: mol_type = other DNA
gcgcatcgacgtttatcgcgcgtccggcgcgggcggtcagcacgttaaccgtaccgaatctgcggtgcgtattac

SEQ ID NO: 872642 - DNA, 75 bp, synthetic construct
  source 1..75: mol_type = other DNA
tttttcgtgcgattatcgcaacatggcgcaagcaattattgatggatgtatcgtacacgttgaatacacggggga

SEQ ID NO: 872643 - DNA, 75 bp, synthetic construct
  source 1..75: mol_type = other DNA
taaggtaggcggtgaatcttatacgctgatggctaatacgtggcgctttgtgcgttactctgaaaaggatgatga

SEQ ID NO: 872644 - DNA, 75 bp, synthetic construct
  source 1..75: mol_type = other DNA
aacacctgcgccagccacagtgaacaggtattacaggcgacatggcagtggtggcgagtttccgctggcgcacca

SEQ ID NO: 872645 - DNA, 75 bp, synthetic construct
  source 1..75: mol_type = other DNA
gctggcggtgccgatttttcttgtaccagagtatgtgtttataccagcggcagcagggattgggctggcagtatc

SEQ ID NO: 872646 - DNA, 75 bp, synthetic construct
  source 1..75: mol_type = other DNA
ttgaccagaaagaaaaggcacttgctgaaattgctttcgcactggctactaaggttatcggtgaagatgcggcga

SEQ ID NO: 872647 - DNA, 75 bp, synthetic construct
  source 1..75: mol_type = other DNA
gctccacgacggatggcctatttcgttgtgtcctatatcgctggagttctgtgctccgggctggtcggttctaag

SEQ ID NO: 872648 - DNA, 75 bp, synthetic construct
  source 1..75: mol_type = other DNA
cgcctaaagctggtgggctacttcataacttcattcatcttcggtgtgattggtgctcctctgctggggtcttac

SEQ ID NO: 872649 - DNA, 75 bp, synthetic construct
  source 1..75: mol_type = other DNA
atgtcagcagaaccaatttccggtacggccgttgctgctggtggcctgatgggtgccagcgtttttggtattgca

SEQ ID NO: 872650 - DNA, 75 bp, synthetic construct
  source 1..75: mol_type = other DNA
acgtcgtccagccagcgtggcgatcgttgccatggcaaacaagctggcgcgaacggtgtgggcaatagccgctca

SEQ ID NO: 872651 - DNA, 75 bp, synthetic construct
  source 1..75: mol_type = other DNA
caactacatgcgacaaggcatcgattgtgtcgctgtcacggaccataattcaggcgcttggattgatccgctcaa

SEQ ID NO: 872652 - DNA, 75 bp, synthetic construct
  source 1..75: mol_type = other DNA
aaggggcgaaagtggaagtggttgaagcgcaaggcacaagcacaccagaagagaaagccaccagccgcgaatatg

SEQ ID NO: 872653 - DNA, 75 bp, synthetic construct
  source 1..75: mol_type = other DNA
aggcgctggtcagtgaaaccgaaggcaccattaaggctgatgaagcaagcgtcgccagcgcgcagctgcaactcg

SEQ ID NO: 872654 - DNA, 75 bp, synthetic construct
  source 1..75: mol_type = other DNA
aagcgatatcgctaccgtcgtgcaggcgcaaaaagccggaaaaccgctggtggtagaagcctgggatcgcaccaa

SEQ ID NO: 872655 - DNA, 75 bp, synthetic construct
  source 1..75: mol_type = other DNA
gcgatcgcgtggtgacagacggcattgatcgcctgaccgaaggggcgaaagtggaagtggtggaagcccagagcg

SEQ ID NO: 872656 - DNA, 75 bp, synthetic construct
  source 1..75: mol_type = other DNA
cgtggaacaggcggttccgcgttacctcaccgggcttggtacgattaccgctgctaacaccgttacggtgcgcag

SEQ ID NO: 872657 - DNA, 75 bp, synthetic construct
  source 1..75: mol_type = other DNA
tggcaaggccgcaatgaatcccagagcgcagcgccaggtgcgacgaagcaagcacagcagtcgccagccggtggc

SEQ ID NO: 872658 - DNA, 75 bp, synthetic construct
  source 1..75: mol_type = other DNA
atgcatgtgcttaacattctctgggtagtattcggcattggcctgatgctggtactgaatttgaagttcaaaatc

SEQ ID NO: 872659 - DNA, 75 bp, synthetic construct
  source 1..75: mol_type = other DNA
gagcttgatcagtggatggaaagccggatttatccggtgatgagtgcgatcccggcactggctggactgattacc

SEQ ID NO: 872660 - DNA, 75 bp, synthetic construct
  source 1..75: mol_type = other DNA
tggaaatttgtagcagtgcgccgccgctggaagagttcacgccaggtcgcctgcgcgcctgttttaaaccagtgg

SEQ ID NO: 872661 - DNA, 75 bp, synthetic construct
  source 1..75: mol_type = other DNA
cccagaggggaaaaagggaaaaaaacggatcgctgatgatatggtggagattatcgaagagtcctttgggttacc

SEQ ID NO: 872662 - DNA, 75 bp, synthetic construct
  source 1..75: mol_type = other DNA
cttcggcattactctatggcagtggcgcgctggggggggtgatctcctacgatacagtcgatgcaaaagatttat

SEQ ID NO: 872663 - DNA, 75 bp, synthetic construct
  source 1..75: mol_type = other DNA
tggctatgaccatcgcggcgtgttgatccttgttgatggtgttcgtcagggaaccgataccgggcacctgaatgg

SEQ ID NO: 872664 - DNA, 75 bp, synthetic construct
  source 1..75: mol_type = other DNA
cggagaactggcatacgcgctgaaacaacaactgaggattgcgataaaacgatgaaacatactgatatccgtgct

SEQ ID NO: 872665 - DNA, 75 bp, synthetic construct
  source 1..75: mol_type = other DNA
atgtgcttaacattctctgggtggtattcggtattcggcattggtctgatgctggtactgaatttgaagttcaaa

SEQ ID NO: 872666 - DNA, 75 bp, synthetic construct
  source 1..75: mol_type = other DNA
ggcgcgtctcggtctgcgctatgttcagatatcggtgattatcatcggcctgattttcggtctggcgatgttcta

SEQ ID NO: 872667 - DNA, 75 bp, synthetic construct
  source 1..75: mol_type = other DNA
gaacgcctttgaaagcgcggtaaaaagcattgcgatggtgattctgatcatcggtgcgggcggcgtgctgaagca

SEQ ID NO: 872668 - DNA, 75 bp, synthetic construct
  source 1..75: mol_type = other DNA
tgattttcggtctggcgatgttctatgaagtggcctttatcatgttagcgccgctggttattgtcattgccgccg

SEQ ID NO: 872669 - DNA, 75 bp, synthetic construct
  source 1..75: mol_type = other DNA
catcatcgacaccggcattggcgacaccatcggcatgttgatgtcccacggcaatatctcgccctacatcatggc

SEQ ID NO: 872670 - DNA, 75 bp, synthetic construct
  source 1..75: mol_type = other DNA
tgacgtcattcattgttggcgttcttgctgctggcctggttggttcaaagttgtcacaggctaccgggtatagtg

SEQ ID NO: 872671 - DNA, 75 bp, synthetic construct
  source 1..75: mol_type = other DNA
tgtttccgggccgggagccaccacgttaccgatgctggtcttttccagcgtgcggatgggggtgaatccggaaat

SEQ ID NO: 872672 - DNA, 75 bp, synthetic construct
  source 1..75: mol_type = other DNA
tggtatggcgaattattgcgcgatgacgcgatgatgagtgcggttggtttaagcctgacaattgcagcctgtgct

SEQ ID NO: 872673 - DNA, 75 bp, synthetic construct
  source 1..75: mol_type = other DNA
catctggctggcgcatgtcactttttgtacggcttatgtggcggtcgttatttcttcaagattgcgggaactgga

SEQ ID NO: 872674 - DNA, 75 bp, synthetic construct
  source 1..75: mol_type = other DNA
gatctcggcgcgacgccgctgaaggtatttttcgtcattacactaccgatgatcatgccggcgatcatttctggt

SEQ ID NO: 872675 - DNA, 75 bp, synthetic construct
  source 1..75: mol_type = other DNA
cgccctggcggattgtgattttgctgttgggcttcacctttctctacgcgccaatgctgatgctggttatctatt

SEQ ID NO: 872676 - DNA, 75 bp, synthetic construct
  source 1..75: mol_type = other DNA
cgatgacgcgatgatgagtgcggttggtttaagcctgacaattgcggcctgtgcggcgacggcggcggcgatcct

SEQ ID NO: 872677 - DNA, 75 bp, synthetic construct
  source 1..75: mol_type = other DNA
gcgacacaacgaaatctactgacgcttaaccgtgcttcagccgaggaaattcaggatcatgagtgtgagattttg

SEQ ID NO: 872678 - DNA, 75 bp, synthetic construct
  source 1..75: mol_type = other DNA
cagcagggtgttgcccgaccggagaacgctgtttctgacacaggcctcactgaaaaaggcgggcttccttccccc

SEQ ID NO: 872679 - DNA, 75 bp, synthetic construct
  source 1..75: mol_type = other DNA
tttgttgcaggcgctgccacatccctccctggactatgaccggtggctgctggagctggatccgaaagagcggaa

SEQ ID NO: 872680 - DNA, 75 bp, synthetic construct
  source 1..75: mol_type = other DNA
acgcgatgatgagtgcggttggtttaagcctgacaattgctgcctgtgcggcaacggcggcggcgatcctcggga

SEQ ID NO: 872681 - DNA, 75 bp, synthetic construct
  source 1..75: mol_type = other DNA
gtcgtaatgaattcccggcccaagtaaaacttggtgaaagagcaatagcattcttagagagtgatattgataagt

SEQ ID NO: 872682 - DNA, 75 bp, synthetic construct
  source 1..75: mol_type = other DNA
tgaaattcttcctcaacgcgacaacgacatgtctgccggttacgtcggggcaggtgagatgtgttctgaagccgc

SEQ ID NO: 872683 - DNA, 75 bp, synthetic construct
  source 1..75: mol_type = other DNA
atgaaccactacacacgctggcttgagttaaaagaacaaaatcccggaaagtacgcgcgtgacatcgcaggttta

SEQ ID NO: 872684 - DNA, 75 bp, synthetic construct
  source 1..75: mol_type = other DNA
caggcgtacgtaaacgtggcaaaattaccgatgcggtagagaagttctcggtaatcaaaacgttgcaggcaattg

SEQ ID NO: 872685 - DNA, 75 bp, synthetic construct
  source 1..75: mol_type = other DNA
cgctgggtttaggggaaatttatcccattgccgcttctcatggtcgtggcgtattaagtctgctggagcgcgttc

SEQ ID NO: 872686 - DNA, 75 bp, synthetic construct
  source 1..75: mol_type = other DNA
gtattaagtctgctggagcacgtgctgctgccgtggatggaagatctcgcaccgcaagaagaagtcgacgaagac

SEQ ID NO: 872687 - DNA, 75 bp, synthetic construct
  source 1..75: mol_type = other DNA
cgaaccagacgaaagcggcggcgaacaggcaatgaccgaacttttgggacgaggcagaaatttcactgcggtagc

SEQ ID NO: 872688 - DNA, 75 bp, synthetic construct
  source 1..75: mol_type = other DNA
gttaaaattacataatatcaatgctaatgcatctacgctatcacgtgatgaagtaattccctttctaaaagaatg

SEQ ID NO: 872689 - DNA, 75 bp, synthetic construct
  source 1..75: mol_type = other DNA
aatatgcccacgccggtggttacaacccgccgattgtggtaatccacggcaaccaggtaaaagacctgccggatt

SEQ ID NO: 872690 - DNA, 75 bp, synthetic construct
  source 1..75: mol_type = other DNA
atgaatatcagcgaagcagaactggcatttgcacgcgtcacgcacgacgcgtggcggatgcgcggcgatattcgt

SEQ ID NO: 872691 - DNA, 75 bp, synthetic construct
  source 1..75: mol_type = other DNA
tgtttgcccatgacggtacgcagattgcgcagctctatggtcaacgtacagaaggcgaacaggagcaagcgcaat

SEQ ID NO: 872692 - DNA, 75 bp, synthetic construct
  source 1..75: mol_type = other DNA
agatactggaatccgcccagcaagatggtaatgagatcatggtatttgttggcaaccgtggttgcgtacagatct

SEQ ID NO: 872693 - DNA, 75 bp, synthetic construct
  source 1..75: mol_type = other DNA
gagtttatctgtattgataccggcgggatcgacggcaccgaagaaggggtcgaaacccgtatggcggaacagtcg

SEQ ID NO: 872694 - DNA, 75 bp, synthetic construct
  source 1..75: mol_type = other DNA
ggcgccctaacgtaggaaaatccacgttatttaaccgtctaactcgcacccgagatgcgctggttgcggatttcc

SEQ ID NO: 872695 - DNA, 75 bp, synthetic construct
  source 1..75: mol_type = other DNA
atatcgttgctatgttaccggtatttgccatgctggcgaacgtctccggcgcaccgttaatgttaaccgcgctgg

SEQ ID NO: 872696 - DNA, 75 bp, synthetic construct
  source 1..75: mol_type = other DNA
ttagcgcgccagttattgaagaagtggctgaagtcgtagaagcccccgttcaggttgccgaaccgcaaccggaag

SEQ ID NO: 872697 - DNA, 75 bp, synthetic construct
  source 1..75: mol_type = other DNA
tatgactcaccgtgggcggcaatttgttccattgccccaaagattggctgtacgccagagactctgcgtgtctgg

SEQ ID NO: 872698 - DNA, 75 bp, synthetic construct
  source 1..75: mol_type = other DNA
cgttgaacgtcagcgtctgaaagagctggaacgtgaaaatcgtgaactgcgccgtagtaacgatatccttcgcca

SEQ ID NO: 872699 - DNA, 75 bp, synthetic construct
  source 1..75: mol_type = other DNA
atgagcgggataccgggggcggtggatggtgggctcaccagcgctgaacgtcagcgtctgaaagagctggaacgt

SEQ ID NO: 872700 - DNA, 75 bp, synthetic construct
  source 1..75: mol_type = other DNA
atgactcacaatgggcagcaatttgttctattgcccctaagattggctgtacaccggagactctgcacgtctggg

SEQ ID NO: 872701 - DNA, 75 bp, synthetic construct
  source 1..75: mol_type = other DNA
aaatcgtgaactgcgccgcagtaacgatatccttcgccaggcttccgcttattttgcgaaggcggagttcgaccg

SEQ ID NO: 872702 - DNA, 75 bp, synthetic construct
  source 1..75: mol_type = other DNA
gtgacagcattactgacactggaagaaatcaaggcacatctgcgtgttgaccatgacgcggatgatgagatgctg

SEQ ID NO: 872703 - DNA, 75 bp, synthetic construct
  source 1..75: mol_type = other DNA
gcggcggatgtccgccctctggtgcgtctttccgtgagcgttctggtcgaagaagatggtaaacgcgaacgtggt

SEQ ID NO: 872704 - DNA, 75 bp, synthetic construct
  source 1..75: mol_type = other DNA
aggtcggtgaactggtggcttctgaactgtgtactgtggtggatgacggtacgatagtcgatcgccgtggctcgg

SEQ ID NO: 872705 - DNA, 75 bp, synthetic construct
  source 1..75: mol_type = other DNA
ccgaagtccgtcaacgggcagtccgtatggttctggaaagtcagggagaatatgactcacaatgggcgacaattt

SEQ ID NO: 872706 - DNA, 75 bp, synthetic construct
  source 1..75: mol_type = other DNA
tacgccggagactctgcgtgtctggggtcgccagcatgagcgggataccgggggcggtgatggagggctcaccac

SEQ ID NO: 872707 - DNA, 75 bp, synthetic construct
  source 1..75: mol_type = other DNA
tacgccagagactctgcgtgtctgggttcgccagcatgagcggggataccggggggcggtgatggtggactcacc

SEQ ID NO: 872708 - DNA, 75 bp, synthetic construct
  source 1..75: mol_type = other DNA
gttccattgctccaaagactggctgtacgccagagactctgcgtgcctggattcgccagcatgagcgggataccg

SEQ ID NO: 872709 - DNA, 75 bp, synthetic construct
  source 1..75: mol_type = other DNA
gtacgccagcatgagcgggataccggaggcggtgatggtgggttcaccaccactgaacgtcagcgtctgaaagag

SEQ ID NO: 872710 - DNA, 75 bp, synthetic construct
  source 1..75: mol_type = other DNA
cgttgaacagagcggcctgtttcttggtgataacgctgtaagaaccctgacaggtttgatagagaaacagcatca

SEQ ID NO: 872711 - DNA, 75 bp, synthetic construct
  source 1..75: mol_type = other DNA
ttgtcgatctgctggagcaacagccgcgcacgcctggcgagctggcacaacagactggcgtttcgggcaggacca

SEQ ID NO: 872712 - DNA, 75 bp, synthetic construct
  source 1..75: mol_type = other DNA
ggcctgaatatcccggtagcgagataaaacagatcgttgaatatagcggcctgtttcttggtgataacgctgtaa

SEQ ID NO: 872713 - DNA, 75 bp, synthetic construct
  source 1..75: mol_type = other DNA
tacgccggagactctgcgtgtctgggttcgccagaagagctggagcgtgaaaatcgtgaactacgccgcagtaac

SEQ ID NO: 872714 - DNA, 75 bp, synthetic construct
  source 1..75: mol_type = other DNA
atgttttgatcgcctgcgccgccgccgatgcgcgtcatgagctaaaaatatttagctatctggcaagcgtattgt

SEQ ID NO: 872715 - DNA, 75 bp, synthetic construct
  source 1..75: mol_type = other DNA
atcattttgctctctgatcagaacgcgattgccactattaatcagctcgccattgagcgcgatgtcctgaattgt

SEQ ID NO: 872716 - DNA, 75 bp, synthetic construct
  source 1..75: mol_type = other DNA
gttccattgctccaaagattggctgtacgcccgagactctgcgtgtctgggttcgccagaatgagcgggataccg

SEQ ID NO: 872717 - DNA, 75 bp, synthetic construct
  source 1..75: mol_type = other DNA
gttccattgctccaaagattggctgtacgccagagactctgcgtgtctgggttcgccagcatgagcgggataccg

SEQ ID NO: 872718 - DNA, 75 bp, synthetic construct
  source 1..75: mol_type = other DNA
tatgactcacaatgggcggtaatttgttccattgccccaaagattggctgtacaccggagattctgcgtgtctgg

SEQ ID NO: 872719 - DNA, 75 bp, synthetic construct
  source 1..75: mol_type = other DNA
aacagccattatttactggatgacgcggtaaataattacatcaccgtaaaaaatatcattacggctgccggtatc

SEQ ID NO: 872720 - DNA, 75 bp, synthetic construct
  source 1..75: mol_type = other DNA
gttccattgctccaaagagtggctgtacgcccgagactctgcgtgtctgggttcgccagtatgagcgggataccg

SEQ ID NO: 872721 - DNA, 75 bp, synthetic construct
  source 1..75: mol_type = other DNA
gttccattgctccaaagagtggctgtacgcctgagactctgcgtgtctgggttcgccagcatgagcgggataccg

SEQ ID NO: 872722 - DNA, 75 bp, synthetic construct
  source 1..75: mol_type = other DNA
ttggcggcattgaaaatccacactttcgcagcgtaaaacacaatccgatactggtgcgccagcttccggtgaaaa

SEQ ID NO: 872723 - DNA, 75 bp, synthetic construct
  source 1..75: mol_type = other DNA
ggcttccgcgtattttgcgaaggcggagttcggccgcctgtggaaaaaaataacgcccctggtggataccctgcg

SEQ ID NO: 872724 - DNA, 75 bp, synthetic construct
  source 1..75: mol_type = other DNA
atcgcccgtgaagaagagttgcgccgtcaggatcaggtatatgtggatgagtccgggccggaagagcgccagaat

SEQ ID NO: 872725 - DNA, 75 bp, synthetic construct
  source 1..75: mol_type = other DNA
acacgctatacaatgaaaaggttcagtttaaactcacttatcccgccaggaatggaagacacaaagaaaatattg

SEQ ID NO: 872726 - DNA, 75 bp, synthetic construct
  source 1..75: mol_type = other DNA
gccccactgacaatatccttcaccaggcttcctcttattttgctaaggccgagttccaccgcctctggaacaaat

SEQ ID NO: 872727 - DNA, 75 bp, synthetic construct
  source 1..75: mol_type = other DNA
cgctgaacgtcagcgtctaaagagctggaacgtgaaaatcgtgaactgcgccgcagtaacgatatccttcgccag

SEQ ID NO: 872728 - DNA, 75 bp, synthetic construct
  source 1..75: mol_type = other DNA
ctgaagtccgtcaacgggcagaccgtatggttctggaaagtcagggcgaatatgactcacaatgggcgacaattt

SEQ ID NO: 872729 - DNA, 75 bp, synthetic construct
  source 1..75: mol_type = other DNA
ccgcgatgacgtggcgcgcattttcaacattcagcgttattcgctgaatgacggtgaaggcatccgcacggtggt

SEQ ID NO: 872730 - DNA, 75 bp, synthetic construct
  source 1..75: mol_type = other DNA
tcagttgtaatgttgtggaaacgcgccgcgatgacgtggcgcgtattttcaacattcagcgctattcgctgaatg

SEQ ID NO: 872731 - DNA, 75 bp, synthetic construct
  source 1..75: mol_type = other DNA
atgcagcaggcgctggacgtgctgatcccgctgaatatcaggcagatccatctgttaccgtttcatcagtacggc

SEQ ID NO: 872732 - DNA, 75 bp, synthetic construct
  source 1..75: mol_type = other DNA
cccttttagcagaacaagaatctcctcattttcaggacttgtttttatttttcgccaatagttattgcactatca

SEQ ID NO: 872733 - DNA, 75 bp, synthetic construct
  source 1..75: mol_type = other DNA
aatattgaatttcaggtagtaataaatttaagccctatttatttagataatttccgccatgatggggaaattaat

SEQ ID NO: 872734 - DNA, 75 bp, synthetic construct
  source 1..75: mol_type = other DNA
aatgaaagtgatttgaatgacgtgttgggtaatgactccaacttactgatagtgttttatgttcagataatgccc

SEQ ID NO: 872735 - DNA, 75 bp, synthetic construct
  source 1..75: mol_type = other DNA
tccattgccccaaagattggctgtacgccggagactctgcgtgtctgggttcgccagcatgagcgggataccggg

SEQ ID NO: 872736 - DNA, 75 bp, synthetic construct
  source 1..75: mol_type = other DNA
ccagcgacgggatcaaaccggaagaagtcgagtggcaaactgcggcgattgaaggcaagctcgacctgctggtga

SEQ ID NO: 872737 - DNA, 75 bp, synthetic construct
  source 1..75: mol_type = other DNA
aaccctgcttggtcaacatgacgccgttgcaggcgtggccttcccctactttggcggcattgaaaatccgcattt

SEQ ID NO: 872738 - DNA, 75 bp, synthetic construct
  source 1..75: mol_type = other DNA
atctggcgctgcacaaagaggacgagaagattcgctttcgcgatattcaggcgcagccacgtaaaattatctcca

SEQ ID NO: 872739 - DNA, 75 bp, synthetic construct
  source 1..75: mol_type = other DNA
gccgccggaacacgctatctgtcgctgttaggtggcacctgtttaagtttctatgactggtattgcgacctgccg

SEQ ID NO: 872740 - DNA, 75 bp, synthetic construct
  source 1..75: mol_type = other DNA
cgctgattgacaccgccattgacgcttcagaagtgattctggcactggcaccggaaaccaacggtcatgttgcag

SEQ ID NO: 872741 - DNA, 75 bp, synthetic construct
  source 1..75: mol_type = other DNA
aaccctgctcggtcaacatgacgccgttgcaggcgtggccttcccctactttggcggcatcgaaaatccgcattt

SEQ ID NO: 872742 - DNA, 75 bp, synthetic construct
  source 1..75: mol_type = other DNA
gatatgaactatcggggaatgatcaatatgttgatcttctgcggttgtgttgggcaaagcggcgggggctgggca

SEQ ID NO: 872743 - DNA, 75 bp, synthetic construct
  source 1..75: mol_type = other DNA
taaagaaactgacgtggtattgcagccattgttacatgactctccggcggaactttctcagccgtgcgaagtgct

SEQ ID NO: 872744 - DNA, 75 bp, synthetic construct
  source 1..75: mol_type = other DNA
ctgaacgtcagcgtctgaaagagctggaacgtgaaaatcgtgaactgcaccgcagtaacgatatccttcgccagg

SEQ ID NO: 872745 - DNA, 75 bp, synthetic construct
  source 1..75: mol_type = other DNA
caggtgcagaaaccgatttgtcattaaccctgctcggccaacacgacgctgtcgctggcgtggctttcccctact

SEQ ID NO: 872746 - DNA, 75 bp, synthetic construct
  source 1..75: mol_type = other DNA
tactttatcaactactgccgccgctacagcgacatgccgatgctggtaatgctggaacctcgcgacgatggcagc

SEQ ID NO: 872747 - DNA, 75 bp, synthetic construct
  source 1..75: mol_type = other DNA
ccaactgattgccgccgctaacgtctggaccatcaaaacctacggcccggatcgcgttgccggtttctcgccgat

SEQ ID NO: 872748 - DNA, 75 bp, synthetic construct
  source 1..75: mol_type = other DNA
atatccatctcgataccggggctggtgcgctgttactttttggtgccgtacagtttgcgatggtgatccacggat

SEQ ID NO: 872749 - DNA, 75 bp, synthetic construct
  source 1..75: mol_type = other DNA
ccccaacgtgtttgttatctgcacactcaagcatagtgataacaccatttcacgccgccaagaggtcgggcgcgg

SEQ ID NO: 872750 - DNA, 75 bp, synthetic construct
  source 1..75: mol_type = other DNA
gaacgagctggatcaataccgcgatgggtttgtggtatcggacatcaatgccaatacggacaccttgagctttac

SEQ ID NO: 872751 - DNA, 75 bp, synthetic construct
  source 1..75: mol_type = other DNA
gggcgattacgcgtttgcaggatatgggcgtggagcctttcctgctctcttccagtctgacgggcgtgatggcgc

SEQ ID NO: 872752 - DNA, 75 bp, synthetic construct
  source 1..75: mol_type = other DNA
cgtggtggacgccacattgcgtgatttgatccaccgtcaggccggggaactggagctggaacgttatgtccggca

SEQ ID NO: 872753 - DNA, 75 bp, synthetic construct
  source 1..75: mol_type = other DNA
gtgccgccgcctcagccggtgcatatgtattgtggtatacccttttaccctctctcggctctatcaccgccagta

SEQ ID NO: 872754 - DNA, 75 bp, synthetic construct
  source 1..75: mol_type = other DNA
gctgtaccatccgcagggctgccccgcctgtaatcacaaaggttttcgcggacgtaccgccatccatgagctgat

SEQ ID NO: 872755 - DNA, 75 bp, synthetic construct
  source 1..75: mol_type = other DNA
acaggctccggtaaaagcaccacgctctacgccatcctttcggcgctgaatactcccgaccgtaatattctgacg

SEQ ID NO: 872756 - DNA, 75 bp, synthetic construct
  source 1..75: mol_type = other DNA
atgaaacgtaaaacactgcctctgctggcgctggttgccatcactctgtttctcatcgcatgcgatgacagaagt

SEQ ID NO: 872757 - DNA, 75 bp, synthetic construct
  source 1..75: mol_type = other DNA
cttgatgagccgcagcgaatggagggaggcaaaacgctggattctttggctaatttcaacccattgatggtgttg

SEQ ID NO: 872758 - DNA, 75 bp, synthetic construct
  source 1..75: mol_type = other DNA
gcggtagatactggttttaaaaatgctgagctaacccttagtgaggttgcattgcttgataacatccagcaggtg

SEQ ID NO: 872759 - DNA, 75 bp, synthetic construct
  source 1..75: mol_type = other DNA
gcctgtaatcacaaaggttttcgcggacgtaccgccatccatgagctgatcgtggtggacgccacattgcgtgat

SEQ ID NO: 872760 - DNA, 75 bp, synthetic construct
  source 1..75: mol_type = other DNA
gggcgtggagcctttcctgctctcttccagtctgacgggcgtgatggcgcagcgactggttcgcacgctgtgccc

SEQ ID NO: 872761 - DNA, 75 bp, synthetic construct
  source 1..75: mol_type = other DNA
acccggaagaaatacaaaattccagagccctgggagaccgcattcccatctggctccgaaataattaaatacgct

SEQ ID NO: 872762 - DNA, 75 bp, synthetic construct
  source 1..75: mol_type = other DNA
atatctgggtgtgtcatgacgctgaagaagaagatattgttgagtcatcgctcggagagattgttcccggttcgc

SEQ ID NO: 872763 - DNA, 75 bp, synthetic construct
  source 1..75: mol_type = other DNA
ccagtaaatcataaatatgttattcctgaagactggaagaagcgttttccttctggaaacgaaattattcaatat

SEQ ID NO: 872764 - DNA, 75 bp, synthetic construct
  source 1..75: mol_type = other DNA
ggtagaggcagcccacttcaggatcctgaaaatacaggggctctgacgctcctggctttcaagcttgatgagcaa

SEQ ID NO: 872765 - DNA, 75 bp, synthetic construct
  source 1..75: mol_type = other DNA
gagggagtttctctggctcaatatcgggagatgcgggagtcgggtgtcagattggtcgtgccatcatctctgcac

SEQ ID NO: 872766 - DNA, 75 bp, synthetic construct
  source 1..75: mol_type = other DNA
cgctggggtagaggcagcccacttcagaatcctgaaaatacaggtgctctgacgctcctagctttcaagcttgat

SEQ ID NO: 872767 - DNA, 75 bp, synthetic construct
  source 1..75: mol_type = other DNA
ggatgtactggaatcagctgttggggagatcattccaggaactttaatgtttgggcctgccagtgaaatacttgg

SEQ ID NO: 872768 - DNA, 75 bp, synthetic construct
  source 1..75: mol_type = other DNA
ttcctgacactgggcgctgcgccagaggttgcagccagtgcagcaaacgcgatggtgcgtgaattgtccattgcc

SEQ ID NO: 872769 - DNA, 75 bp, synthetic construct
  source 1..75: mol_type = other DNA
aagtatgtctggccatgttggctttcgcggcaaactctattctttgccggttggcactcaagggtggacatattg

SEQ ID NO: 872770 - DNA, 75 bp, synthetic construct
  source 1..75: mol_type = other DNA
aaacgaaaaaagaattacgcgctgggggagaggaagtccattacagaaccctgaaaatacaggagccctcacaat

SEQ ID NO: 872771 - DNA, 75 bp, synthetic construct
  source 1..75: mol_type = other DNA
tccatcaacaatacccaagaactgaacccgtctgtttttcttactgcgcatgtttcatcacatgagtatccggac

SEQ ID NO: 872772 - DNA, 75 bp, synthetic construct
  source 1..75: mol_type = other DNA
tttctaatggttgaagaaattcacgtactggacatcatccgtcaaggatttggttctgtagatgattttatagct

SEQ ID NO: 872773 - DNA, 75 bp, synthetic construct
  source 1..75: mol_type = other DNA
ttaaggatctaaccccaccgcgtttcagtgatgtggtcagccaccaggatgatgtcagcgaagaatggtcacagg

SEQ ID NO: 872774 - DNA, 75 bp, synthetic construct
  source 1..75: mol_type = other DNA
acggccatggcattcgctgaaacgatgggcaaagcgtataaccttggcgtaaaacaacgcatgaagctggttacg

SEQ ID NO: 872775 - DNA, 75 bp, synthetic construct
  source 1..75: mol_type = other DNA
ccaaaagttatatcgccagatagaggacagtgttgaacgctacagcgggcaactggagaatgtactaactgaatt

SEQ ID NO: 872776 - DNA, 75 bp, synthetic construct
  source 1..75: mol_type = other DNA
attgcttccatcgttaattgcagcacaaggtgatcaacctccactagctgaacgctatcgggtgccggaaaaata

SEQ ID NO: 872777 - DNA, 75 bp, synthetic construct
  source 1..75: mol_type = other DNA
ccttcggggccgttcgacggctgcatgacgtacccggttatcccgtcaaagaaaatgcacccgaccggaaaacca

SEQ ID NO: 872778 - DNA, 75 bp, synthetic construct
  source 1..75: mol_type = other DNA
gcactgttgacttgaataaacaaatcagtaccgaggcaggtaaggctgaaatagatgtgattggttttagaggcg

SEQ ID NO: 872779 - DNA, 75 bp, synthetic construct
  source 1..75: mol_type = other DNA
aaccagtgatcattattttgaggtagcagcgcagcggcttcgggggagtattaccacaaccatttcgacgacata

SEQ ID NO: 872780 - DNA, 75 bp, synthetic construct
  source 1..75: mol_type = other DNA
ggcaatcagttggaaattgcgccagggcaatatattgattgcctctcctgcaatggtgttcagcttattcctgta

SEQ ID NO: 872781 - DNA, 75 bp, synthetic construct
  source 1..75: mol_type = other DNA
gagctatatggctggctttatcgcttttaatactattcttttccatgcatagactttcactattagactccgctc

SEQ ID NO: 872782 - DNA, 75 bp, synthetic construct
  source 1..75: mol_type = other DNA
ctggaacgtgaaaatcgtgaactgcgccgcagtaacgatatccttcgccaggcttcagcttcttttgcgaaggcg

SEQ ID NO: 872783 - DNA, 75 bp, synthetic construct
  source 1..75: mol_type = other DNA
atccagaaaccttccgtcaccagctcgaaaagttaatcacaacggacagcgcccgttctcaagtatcccgctgtt

SEQ ID NO: 872784 - DNA, 75 bp, synthetic construct
  source 1..75: mol_type = other DNA
acgcgatcaggtttctggccgcaatggcatttttgcccagacagcgttgttgattatccacaacagcatgctgga

SEQ ID NO: 872785 - DNA, 75 bp, synthetic construct
  source 1..75: mol_type = other DNA
aactggctggttacccgccagaagtgcaaaaccttgtggttgcactaacgctggatcttttttacgcgcagatgc

SEQ ID NO: 872786 - DNA, 75 bp, synthetic construct
  source 1..75: mol_type = other DNA
cgtgcaggagggaaaagttcccgtattatggcgtcagttcctttcgatgggaatccctgcttctttagcctcgaa

SEQ ID NO: 872787 - DNA, 75 bp, synthetic construct
  source 1..75: mol_type = other DNA
gagtattatgagacctttctttcacttcgttacgaaattgtaaagaacgaacgcggtgtagagtgtatacgctta

SEQ ID NO: 872788 - DNA, 75 bp, synthetic construct
  source 1..75: mol_type = other DNA
atgagtgatttaacagaacgcgataaaagaattaaatgggtgacggagccttttgaagataggttcaatgaaatt

SEQ ID NO: 872789 - DNA, 75 bp, synthetic construct
  source 1..75: mol_type = other DNA
gctttttttctgccggtccccggaaagagcaaaaggatgtcgccgcaggctccgctttacccggccatgcggggc

SEQ ID NO: 872790 - DNA, 75 bp, synthetic construct
  source 1..75: mol_type = other DNA
atttcgatatctcccccctaatattgcccgtctgtatgaaaatagactatccgtacagaatatagaacgtctggg

SEQ ID NO: 872791 - DNA, 75 bp, synthetic construct
  source 1..75: mol_type = other DNA
accgtgatttacgaagcgcatgtcaaagggttgacgtatttgcatccagacctgccggaagagattcgcggaacc

SEQ ID NO: 872792 - DNA, 75 bp, synthetic construct
  source 1..75: mol_type = other DNA
aaagcagacggtaaagtgaaattcgaagttaaaggcccgaaaaaccgtaaatttatcagcatcgaagctgaataa

SEQ ID NO: 872793 - DNA, 75 bp, synthetic construct
  source 1..75: mol_type = other DNA
tcgccatcagcaaacatattgaggcgatggatgaactttcgcgtgatggggtgaggcagaatctccgcgtagggg

SEQ ID NO: 872794 - DNA, 75 bp, synthetic construct
  source 1..75: mol_type = other DNA
cagggcgcaaatttattggtatagaaaccagtgatcattattttgatgtagcaacacaacggctcaaaacggcga

SEQ ID NO: 872795 - DNA, 75 bp, synthetic construct
  source 1..75: mol_type = other DNA
accctgacaatgctctgcaactctggcaggcttttgttgacttggctggtgacaatcatctggaaatagcgccag

SEQ ID NO: 872796 - DNA, 75 bp, synthetic construct
  source 1..75: mol_type = other DNA
cgccccgccgctggtttgaccgtggtgttctgcgggaggtggtccgggaagcccggagtgaaatccgcagcatgg

SEQ ID NO: 872797 - DNA, 75 bp, synthetic construct
  source 1..75: mol_type = other DNA
cattatgactggaacacgcatgtacggtattggtgatggtgttgatgaggaacatgtcgatgcctactgttgccc

SEQ ID NO: 872798 - DNA, 75 bp, synthetic construct
  source 1..75: mol_type = other DNA
actttagtgcttgaggcctgttatgaagcaaccctgctggctgcggtgctaaattatcacgacacaggtaatccc

SEQ ID NO: 872799 - DNA, 75 bp, synthetic construct
  source 1..75: mol_type = other DNA
tggcattcataagatgattaattatgttagtgtttatccagggcataagcaaggatatgggaataatatcatgga

SEQ ID NO: 872800 - DNA, 75 bp, synthetic construct
  source 1..75: mol_type = other DNA
ttagtgttgaagatattcttgtgcctaagggaaagatcgatagcgaaatctttgcagaggtagataaattaatta

SEQ ID NO: 872801 - DNA, 75 bp, synthetic construct
  source 1..75: mol_type = other DNA
ccagaagcaggcgaagacacaattctcacattattaaatgacaaccatctggcccatgtttcgcgtcgcaaagta

SEQ ID NO: 872802 - DNA, 75 bp, synthetic construct
  source 1..75: mol_type = other DNA
acaggggggatctcaggcacccacagggtgtgtggtcacctttgttgatggcggcgagaagatggaatatatcca

SEQ ID NO: 872803 - DNA, 75 bp, synthetic construct
  source 1..75: mol_type = other DNA
gtcataacagaaacagtgagaaaaacggcgaggcaaatcaccttgagagggatttaccagcggttactgaaggtt

SEQ ID NO: 872804 - DNA, 75 bp, synthetic construct
  source 1..75: mol_type = other DNA
tatatttcccggtttgtggaataaatctgagatcgccaagtggtttgcaaatacgcctcctaatttaatcaccac

SEQ ID NO: 872805 - DNA, 75 bp, synthetic construct
  source 1..75: mol_type = other DNA
atattctggcgaacccgccgttcaacctgaaagactggcgtaacgaagctgaattaaccaaagacccacgttttg

SEQ ID NO: 872806 - DNA, 75 bp, synthetic construct
  source 1..75: mol_type = other DNA
taccatcgacaacatcgaaacgctggcacacgaaactgacgttgaaacgttatcgaaagaagacctggtcggacg

SEQ ID NO: 872807 - DNA, 75 bp, synthetic construct
  source 1..75: mol_type = other DNA
ttgtctaattcgtcagattctgaccagacggttcaggctgtacgcttacatttaatccgtcatctctttctcggt

SEQ ID NO: 872808 - DNA, 75 bp, synthetic construct
  source 1..75: mol_type = other DNA
gattgtagacagcaacaaaggcgttggaaccgtgcgcttttataaagcggttactgatggggctggtaagccgat

SEQ ID NO: 872809 - DNA, 75 bp, synthetic construct
  source 1..75: mol_type = other DNA
ggtgcaatggctgttgctcttgcttttctgacacctttgaaagaggtgaaaccatatatcgcagaagtagatcag

SEQ ID NO: 872810 - DNA, 75 bp, synthetic construct
  source 1..75: mol_type = other DNA
ttgttgttgagcgcgaatcctacgactggaactcgatccaaaacaatctcgaccaggtaaaacttcgttccacac

SEQ ID NO: 872811 - DNA, 75 bp, synthetic construct
  source 1..75: mol_type = other DNA
tgttaagaatggaagacataaagaaaacattgaatttcaggtagtaataaatttaagccctatttatttagataa

SEQ ID NO: 872812 - DNA, 75 bp, synthetic construct
  source 1..75: mol_type = other DNA
caggcgcaaccttcactccgctattttcatattgatcactttaatagtgatatctataccgcgcctgaaaacgcg

SEQ ID NO: 872813 - DNA, 75 bp, synthetic construct
  source 1..75: mol_type = other DNA
cctttgtcgctatcagcctgttagcaagtgaatattatcaggccattggtaagccttgcccgctcgagcagttac

SEQ ID NO: 872814 - DNA, 75 bp, synthetic construct
  source 1..75: mol_type = other DNA
tggcgtctgctgcgtctttcacctcgtctgctgcgatggaatcaggaggcggtgcgctcccaacacttggatatg

SEQ ID NO: 872815 - DNA, 75 bp, synthetic construct
  source 1..75: mol_type = other DNA
tatttcccggccatgatgctggttgacccgaaacagggcagtgttcgcccgttatcatacggctttatttcgcag

SEQ ID NO: 872816 - DNA, 75 bp, synthetic construct
  source 1..75: mol_type = other DNA
gtggatggcgtgattaatccgctgttgccggattcccggactgaccaggggcaggcgcagcgcctcggcgtgaaa

SEQ ID NO: 872817 - DNA, 75 bp, synthetic construct
  source 1..75: mol_type = other DNA
acgctggggatcgtcggagagtcaggttcagggaaatcgcaaactgcatttgccttaatggggttgttagccgct

SEQ ID NO: 872818 - DNA, 75 bp, synthetic construct
  source 1..75: mol_type = other DNA
aacctcaaaattctccggaaatggggatgacgccattgcaacaggtgatatttacgatatctgggaagcatggct

SEQ ID NO: 872819 - DNA, 75 bp, synthetic construct
  source 1..75: mol_type = other DNA
acttcgaattccccgcctctcgcgggttacaggggaatacgcttattcttctgatgaacgttccagggcgaacct

SEQ ID NO: 872820 - DNA, 75 bp, synthetic construct
  source 1..75: mol_type = other DNA
gaatctcctcattttcagaacttgtttttatttttcgccaatatgttattgcactatcaccaatttatgaatccc

SEQ ID NO: 872821 - DNA, 75 bp, synthetic construct
  source 1..75: mol_type = other DNA
acatgggacgaatggttcgacggacacaacgtcagcgccgattttatggataacagggaacagcccggcatgcag

SEQ ID NO: 872822 - DNA, 75 bp, synthetic construct
  source 1..75: mol_type = other DNA
gcacaggggatggtgacgttcctgtctcagcacgacaccttcgcagaggtgacagacttcgagcacaacgtcgta

SEQ ID NO: 872823 - DNA, 75 bp, synthetic construct
  source 1..75: mol_type = other DNA
ccaacggtcattgcctccgttccggcgcagaaatctgctgcagaccgtctcgtcaaagttatcctggcgaaaagc

SEQ ID NO: 872824 - DNA, 75 bp, synthetic construct
  source 1..75: mol_type = other DNA
tgcctccattgaagacgacaaaacatggatcctgcatggtgtgaatcataaaaaatggttgaatggcaaagaaac

SEQ ID NO: 872825 - DNA, 75 bp, synthetic construct
  source 1..75: mol_type = other DNA
accaggcctgttaagccgtctcttcagcgccctgaaatcgctgttcagcggtggtgaagaaaccaaaccaaccga

SEQ ID NO: 872826 - DNA, 75 bp, synthetic construct
  source 1..75: mol_type = other DNA
tatcgacagcaccgaagcgttaaccgccatcgacatcaactccgctcgtgcaactcgcggcggcgatatcgaaga

SEQ ID NO: 872827 - DNA, 75 bp, synthetic construct
  source 1..75: mol_type = other DNA
ctgatcgaagaagaagcgctgaaagagaacactcaggaagttcacgccattgttcctgtgccaatcgcgtcttac

SEQ ID NO: 872828 - DNA, 75 bp, synthetic construct
  source 1..75: mol_type = other DNA
gctctacagcccgtgtgagatccgccatctggcgattatcgttaacctggaatatgacccgacagctgcgttccg

SEQ ID NO: 872829 - DNA, 75 bp, synthetic construct
  source 1..75: mol_type = other DNA
gcgagaatcaaaattgcctggtaggtagcgttgacctgctgtaccgcaactcgtggaacgaagtgcgtacgctgc

SEQ ID NO: 872830 - DNA, 75 bp, synthetic construct
  source 1..75: mol_type = other DNA
cgtaagctggatgtcttcagctttggcgagaatcaaaattgtctggtgggtagcgttgacctgctgtatcgcaac

SEQ ID NO: 872831 - DNA, 75 bp, synthetic construct
  source 1..75: mol_type = other DNA
agccgcttcttcggcgcactgaaagcgctgttcagcggtggtgaagaaaccaaaccgaccgagcaaccagcaccg

SEQ ID NO: 872832 - DNA, 75 bp, synthetic construct
  source 1..75: mol_type = other DNA
cacgctaccgcgccaatgacgcgcgctccggcaccggaatatgttccggaggcaccgcgtcacagtgactggcag

SEQ ID NO: 872833 - DNA, 75 bp, synthetic construct
  source 1..75: mol_type = other DNA
gccgaaaccatcgttcaggaagtgcctgctccgcgtacagaactggcgaaagtcccgctgccagtcgtagcgcaa

SEQ ID NO: 872834 - DNA, 75 bp, synthetic construct
  source 1..75: mol_type = other DNA
catcacgtctgcccgcgctgctccggtaccggtaccgtgcgtgacaacgaatcgttgtcgctctctattctgcgt

SEQ ID NO: 872835 - DNA, 75 bp, synthetic construct
  source 1..75: mol_type = other DNA
gcagccgatggtgactgaggtccctgtcgccgccgctgtcgaacctgttgttagcgcgccagttgttgaagaagt

SEQ ID NO: 872836 - DNA, 75 bp, synthetic construct
  source 1..75: mol_type = other DNA
cgtcgtgaacgtagccgccgccgtaatgatgataaacgtcaggcgcaacaagaagcgaaggcgctgaatgttgaa

SEQ ID NO: 872837 - DNA, 75 bp, synthetic construct
  source 1..75: mol_type = other DNA
tttgaagcattaccggggaaagtgacgctggtaaacccgcagatttcaccggatctttccgagccaaacctgacc

SEQ ID NO: 872838 - DNA, 75 bp, synthetic construct
  source 1..75: mol_type = other DNA
agcgtgcgattgacagtgtttctcattatctggtgctgaaaacagccatcagcatcatcaccggcctggtcgcct

SEQ ID NO: 872839 - DNA, 75 bp, synthetic construct
  source 1..75: mol_type = other DNA
tgggaatgctactttccgtaccgttgacgattattgtcaaaattgcccttgaacaaacggcaggaggccaaagca

SEQ ID NO: 872840 - DNA, 75 bp, synthetic construct
  source 1..75: mol_type = other DNA
aacgttgccgcagtatcgcaactctattatgacaccgctgcaagctctcgaaccgttgttgcaacgcgtggggat

SEQ ID NO: 872841 - DNA, 75 bp, synthetic construct
  source 1..75: mol_type = other DNA
gtgagcttaccgccattcgcagcatggggttttctatcttccgtattgcactggtggcgctggttgcagggatat

SEQ ID NO: 872842 - DNA, 75 bp, synthetic construct
  source 1..75: mol_type = other DNA
tgtggttacgctgttaactgaaatgctcgaaccctttcagggcaaaatttatgacccgtgctgcggctcggcagg

SEQ ID NO: 872843 - DNA, 75 bp, synthetic construct
  source 1..75: mol_type = other DNA
atgttatggagcagcaacgatgttacgcagcagggcagtcgccctaaaacaaagttaggccgcatggacacaacg

SEQ ID NO: 872844 - DNA, 75 bp, synthetic construct
  source 1..75: mol_type = other DNA
atgggacggaaacccttatatcgacagattgccgatcgcattcgtgagcaaattgcgcgtggcgagctaaaacct

SEQ ID NO: 872845 - DNA, 75 bp, synthetic construct
  source 1..75: mol_type = other DNA
atgggacacaagcccttataccggcagattgccgatcgcattcgtgagcaaattgcgcgtggggagcttaaacct

SEQ ID NO: 872846 - DNA, 75 bp, synthetic construct
  source 1..75: mol_type = other DNA
tgccaaccgaagagatgagccgtctgcttaatatcagccagacaaagccgattcttgaaaaagtatcgcgtgata

SEQ ID NO: 872847 - DNA, 75 bp, synthetic construct
  source 1..75: mol_type = other DNA
atgaataacacggatcttatctatctcattaaacattttatgcataacgaacttaaagcagtagaagaggttatt

SEQ ID NO: 872848 - DNA, 75 bp, synthetic construct
  source 1..75: mol_type = other DNA
atcttgggatggtggcgaaagatgatgttgttattcttatttcaaacagtggtgagacgacagaaatcctggcaa

SEQ ID NO: 872849 - DNA, 75 bp, synthetic construct
  source 1..75: mol_type = other DNA
tggctggttcacctaacagcgctatagctcatcctgatgggcttgattgctatggccgtgtccctgaaattaatt

SEQ ID NO: 872850 - DNA, 75 bp, synthetic construct
  source 1..75: mol_type = other DNA
atctcgaagagttatctatgccgggtaatagcttttctgtccgccagctcaaccattacatccattatttgcagg

SEQ ID NO: 872851 - DNA, 75 bp, synthetic construct
  source 1..75: mol_type = other DNA
gctggaaacattagataatcttgcctggcaatcggccttcaccagtatggatcttgaagagttatcgatgccggg

SEQ ID NO: 872852 - DNA, 75 bp, synthetic construct
  source 1..75: mol_type = other DNA
ttattatttgcgctgagtgcgcccgttgctgcactcggtttacctatggcatttgtgctggcggcgttgattctg

SEQ ID NO: 872853 - DNA, 75 bp, synthetic construct
  source 1..75: mol_type = other DNA
gagcgggaggctgaaagagaggctatgcgggccgaaagcgaacggcgcaagctgctggcaaaggaacgtcccaaa

SEQ ID NO: 872854 - DNA, 75 bp, synthetic construct
  source 1..75: mol_type = other DNA
gtacgcttatcgatcttggaccgtttatcgccttattaggcgggattgttggtcttggacagatgtcgaagaaca

SEQ ID NO: 872855 - DNA, 75 bp, synthetic construct
  source 1..75: mol_type = other DNA
acgaactggatgatgtcagcccgggtggttatcgctggactcaggcggtgctggtggtgctgatgaccttaccgc

SEQ ID NO: 872856 - DNA, 75 bp, synthetic construct
  source 1..75: mol_type = other DNA
tcccgtctcccgtctcccgtcaccatctggcagacactgctcacattatatggtggcggtatcggggacggatca

SEQ ID NO: 872857 - DNA, 75 bp, synthetic construct
  source 1..75: mol_type = other DNA
atgaaaacattacccgacacgcatgtacgggaggtatcgtgctgcccgtctcccgtctcccgtctcccgtcacca

SEQ ID NO: 872858 - DNA, 75 bp, synthetic construct
  source 1..75: mol_type = other DNA
tacagcgtcagccgcgcttgcgctaccagtttccaggcggttgcaaacgtcgcagaaagcctgatggcgggaact

SEQ ID NO: 872859 - DNA, 75 bp, synthetic construct
  source 1..75: mol_type = other DNA
atcttgaagaactgtcgatgccgggcaatagcttttccgttcgtcagctcaaccattacatcaattacttgcagg

SEQ ID NO: 872860 - DNA, 75 bp, synthetic construct
  source 1..75: mol_type = other DNA
tggatcctgcatggtgtgaatcataaaaaatggctgaatggcaaagaaacgctggaaacattagataatcttgcc

SEQ ID NO: 872861 - DNA, 75 bp, synthetic construct
  source 1..75: mol_type = other DNA
gctggagacgttagataagctggcatggcaatcgacattcaccagcatgaatcttcaggaactatcgatgccggg

SEQ ID NO: 872862 - DNA, 75 bp, synthetic construct
  source 1..75: mol_type = other DNA
gaacatatcgatgccggtatcactctggctaatgctgttaactttcttgtagaaaagcatgagttagtacgtatc

SEQ ID NO: 872863 - DNA, 75 bp, synthetic construct
  source 1..75: mol_type = other DNA
acaggcgattgctgatgtgttctgcgttaacggtgacagcgaatggcgcggactgggcgtgattgaatcttctgg

SEQ ID NO: 872864 - DNA, 75 bp, synthetic construct
  source 1..75: mol_type = other DNA
ctctgcggattatggaagtgtgcggtggtcatacccacgccatttttaaattcggcctcgaccagttactgcctg

SEQ ID NO: 872865 - DNA, 75 bp, synthetic construct
  source 1..75: mol_type = other DNA
gcccggcaccgcagcaggtttgcgatgatccacgcgcgcgctgtggcgaagtattgacgggcaaatgtaagccgc

SEQ ID NO: 872866 - DNA, 75 bp, synthetic construct
  source 1..75: mol_type = other DNA
aaaaataaatcaggaccaaactcggctgatggtgtgggtataagtctgatctatcaatcaactgaaataaatctt

SEQ ID NO: 872867 - DNA, 75 bp, synthetic construct
  source 1..75: mol_type = other DNA
cgattcgatgccgaagcacatttccgcccggcaccgcagcaggtctgcgatgacccgcgcgcgcgttgtggcgaa

SEQ ID NO: 872868 - DNA, 75 bp, synthetic construct
  source 1..75: mol_type = other DNA
gaaaatcagtatcggcgggtagtgccggatgccggtaacctgctggcgcaacaggcgattgcggatgtcttctgc

SEQ ID NO: 872869 - DNA, 75 bp, synthetic construct
  source 1..75: mol_type = other DNA
ggaaaagtacgggctggttcgtattgatcgcaggggattcgactggcaagaacagtccccatatctgcgggcagt

SEQ ID NO: 872870 - DNA, 75 bp, synthetic construct
  source 1..75: mol_type = other DNA
tgattcaagacatgataaaagactttaccagcgcacgtttaaagcgtgcaagagatgttattatactaaaacata

SEQ ID NO: 872871 - DNA, 75 bp, synthetic construct
  source 1..75: mol_type = other DNA
acacgaatataatcagccggatggctgattcaagacatgataaaagactttaccagcgcacgtttaaagcgtgca

SEQ ID NO: 872872 - DNA, 75 bp, synthetic construct
  source 1..75: mol_type = other DNA
aacaggcgaaagcgcgtgatgtgcagaatttttacttcttctgccagcatattacgcttatcccgacgctgcgca

SEQ ID NO: 872873 - DNA, 75 bp, synthetic construct
  source 1..75: mol_type = other DNA
tgagcatctgcgcgaacgagcttcacatctctcttacaccgccgaacgccctctgcggattatggaagtgtgtgg

SEQ ID NO: 872874 - DNA, 75 bp, synthetic construct
  source 1..75: mol_type = other DNA
gtttgctggaacagccggataacggtatcgacgcgttcctcgcgccgggccacgtcagtatggtgatcggcactg

SEQ ID NO: 872875 - DNA, 75 bp, synthetic construct
  source 1..75: mol_type = other DNA
gtggacgacagcaaatttaacgtgcttggcggctcgatagcttacgggcatccctttgcggcgactggcgcgcgg

SEQ ID NO: 872876 - DNA, 75 bp, synthetic construct
  source 1..75: mol_type = other DNA
gatgttatttagttctcgttattatggtgacaacattgaagattatgttgtcacttttggtagttggttcttatt

SEQ ID NO: 872877 - DNA, 75 bp, synthetic construct
  source 1..75: mol_type = other DNA
aagtctgtatatcaaccttaataatccctgcgtcatgcaactggtgacagcattacaacatcaacagcaaccagt

SEQ ID NO: 872878 - DNA, 75 bp, synthetic construct
  source 1..75: mol_type = other DNA
cagaaagcgaaattcacggcttcctggctacagtgggcgtgggttatacccgaatgctgcgccagcaggatgaca

SEQ ID NO: 872879 - DNA, 75 bp, synthetic construct
  source 1..75: mol_type = other DNA
ctgtgcagtgaactggtatttccgctggaaagaacgggaggatcggcgcaatggctatgccaccaaagctgaaga

SEQ ID NO: 872880 - DNA, 75 bp, synthetic construct
  source 1..75: mol_type = other DNA
attcgaggggaccataccctggctctatcgcgaaggggggaatgccacgattaactcggaagatgcggatcacat

SEQ ID NO: 872881 - DNA, 75 bp, synthetic construct
  source 1..75: mol_type = other DNA
ataaacgcctttactcaggggataccatcacgctgggttgggatatcggcgataccgaaggggatattgatgatg

SEQ ID NO: 872882 - DNA, 75 bp, synthetic construct
  source 1..75: mol_type = other DNA
ttgagatcctgaaagctgtttccaccttaccggaagatattctgaatatctctcaagtgtgtaagtttttaggga

SEQ ID NO: 872883 - DNA, 75 bp, synthetic construct
  source 1..75: mol_type = other DNA
atgggatttttctcatttttacgaaagataagtgataaagaaaaaggggtttttatcagtgaggagaattggttc

SEQ ID NO: 872884 - DNA, 75 bp, synthetic construct
  source 1..75: mol_type = other DNA
cgactggagtttattgacagaagatttcgggaattcatcagcattatgtctgaatataattgtaatgataaatct

SEQ ID NO: 872885 - DNA, 75 bp, synthetic construct
  source 1..75: mol_type = other DNA
gctctggctatatctgagaaccagagcgaaaaaaaagaaagtccagcaggttgttcagcagataaaagaaagcag

SEQ ID NO: 872886 - DNA, 75 bp, synthetic construct
  source 1..75: mol_type = other DNA
atggattttatttttgcatatggatgctgggcattaataattctcccattactctggctatatctgagaaccaga

SEQ ID NO: 872887 - DNA, 75 bp, synthetic construct
  source 1..75: mol_type = other DNA
ggcgcttgaacatgatttgtcacgattgccagaagagcgaagttatgcagcgtgtgctggcgttttatcagggaa

SEQ ID NO: 872888 - DNA, 75 bp, synthetic construct
  source 1..75: mol_type = other DNA
actggcaggttattgtgtggcacctgtggcgctggcggaagaaagcgcctgggtcgacagcggcgaaaccaatat

SEQ ID NO: 872889 - DNA, 75 bp, synthetic construct
  source 1..75: mol_type = other DNA
ttacagcgtcagccgcgcttgcgctaccagtttccaggcggttgcaaacgtcgcagaaagcctgatggcgggaac

SEQ ID NO: 872890 - DNA, 75 bp, synthetic construct
  source 1..75: mol_type = other DNA
cccgccagggcgatcgtatcgccattgttagcggtttacgtacgccttttgcccgccaggcgacggcttttcatg

SEQ ID NO: 872891 - DNA, 75 bp, synthetic construct
  source 1..75: mol_type = other DNA
atatttattgtggggacgtggtctttctataacatttttgatcaacaactttttcctgtcttttatgcaggttga

SEQ ID NO: 872892 - DNA, 75 bp, synthetic construct
  source 1..75: mol_type = other DNA
cgggaatgaatgtgcataccgatgcttacagcgtcagccgcgcttgcgctaccagtttccaggcggttgcaaacg

SEQ ID NO: 872893 - DNA, 75 bp, synthetic construct
  source 1..75: mol_type = other DNA
tggcagatctgacattgattgatatgcacgaagcctttgccgcccagacgttggccaatattcagctactgggta

SEQ ID NO: 872894 - DNA, 75 bp, synthetic construct
  source 1..75: mol_type = other DNA
cgtgctggttgatgtcaacaaagctcgaaccatgagccagcgcctgaaactcttctctcgcctgcgtttgcgcga

SEQ ID NO: 872895 - DNA, 75 bp, synthetic construct
  source 1..75: mol_type = other DNA
tcttttggctatgctattggcgcgttctttgccggcatattttttagtatcagtccccatatcaacttctggttg

SEQ ID NO: 872896 - DNA, 75 bp, synthetic construct
  source 1..75: mol_type = other DNA
acgcgccagatggtaacgttcaaagggtatgagataaatcatcatggtatagcggcgtattgctcccatcttcct

SEQ ID NO: 872897 - DNA, 75 bp, synthetic construct
  source 1..75: mol_type = other DNA
aaagaggcactttccatcccgaccaacggcgacggggtacagggttacaaacttcacattatttacaaacacaaa

SEQ ID NO: 872898 - DNA, 75 bp, synthetic construct
  source 1..75: mol_type = other DNA
cggtgttgtgattatggcgttgcgtatcctttcctgcgcgctgttcgttaatccctggattatttcattagtgaa

SEQ ID NO: 872899 - DNA, 75 bp, synthetic construct
  source 1..75: mol_type = other DNA
cctgtcgtcgacgatctttctgattggttttcaaattgccagttcgttggggattgtgttgctttcaacgccgac

SEQ ID NO: 872900 - DNA, 75 bp, synthetic construct
  source 1..75: mol_type = other DNA
cgtcgacgatctttctgattggttttcaaattgccagttcgttggggattgtgctgctttcaacgccgactggga

SEQ ID NO: 872901 - DNA, 75 bp, synthetic construct
  source 1..75: mol_type = other DNA
ctgtgatatagccccagagtctatttcgttagtaggtttgtttaatgataaggatggtaaagaatactctctcga

SEQ ID NO: 872902 - DNA, 75 bp, synthetic construct
  source 1..75: mol_type = other DNA
gctaaaattttaagccttactgcaactccttttcgttctgatggtaagcctctagatggcaaggttgtttatact

SEQ ID NO: 872903 - DNA, 75 bp, synthetic construct
  source 1..75: mol_type = other DNA
ctaatttagcaaacctaagagattgccagaaagaggcgtatttaacggttagagattactttgcagatcccgcta

SEQ ID NO: 872904 - DNA, 75 bp, synthetic construct
  source 1..75: mol_type = other DNA
atatctttagagggctttgaaagttatattaatgaaagtgcatcacggacagttatagagcgcaattcattagtg

SEQ ID NO: 872905 - DNA, 75 bp, synthetic construct
  source 1..75: mol_type = other DNA
cttatgtatgtttctgtgatctctaacggaagagtgattgagaaagaggttccttgtagtatatttatacagtaa

SEQ ID NO: 872906 - DNA, 75 bp, synthetic construct
  source 1..75: mol_type = other DNA
atgagtattaagaatttatataaaaatttaaactctgacatggaaagtatagctaaaagaaataagagtgatagt

SEQ ID NO: 872907 - DNA, 75 bp, synthetic construct
  source 1..75: mol_type = other DNA
tgcgtacccgcaaatggaccgatcaatccggccaggatcgctacaccacagaagtcgtggtgaacgttggcggca

SEQ ID NO: 872908 - DNA, 75 bp, synthetic construct
  source 1..75: mol_type = other DNA
ggcgcgcagtctcgcccgcagcagtctgctccggcagcaccgtctaatgagccgccgatggactttgatgacgat

SEQ ID NO: 872909 - DNA, 75 bp, synthetic construct
  source 1..75: mol_type = other DNA
tgagaaaatcatgcgtatctatgagaactctaatatgacaaaggaagatctcgaaacgctattaagcagattaaa

SEQ ID NO: 872910 - DNA, 75 bp, synthetic construct
  source 1..75: mol_type = other DNA
agttttgtggtagcgttaatctctatgattctgtttgatgttaaccccgaaggatttggtaaaacgtgctttatc

SEQ ID NO: 872911 - DNA, 75 bp, synthetic construct
  source 1..75: mol_type = other DNA
atggctacttttattacctatgctgtcatcattactattctggctgctatctctgcttataaactcggaaccgaa

SEQ ID NO: 872912 - DNA, 75 bp, synthetic construct
  source 1..75: mol_type = other DNA
ggcgcgcagtctcgcccgcagcagtccgctccggcagcaccgtctaacgagccgccgatggactttgatgacgat

SEQ ID NO: 872913 - DNA, 75 bp, synthetic construct
  source 1..75: mol_type = other DNA
acagataaccctgttaagaactttaactattacgaagatgtcagccagaaccacgaagattatctgtggggtaat

SEQ ID NO: 872914 - DNA, 75 bp, synthetic construct
  source 1..75: mol_type = other DNA
caggaaaacagtgaaaaactggccgccgatatgattatcagtcagaaacgcatggggggcctgcaggccgtgcgt

SEQ ID NO: 872915 - DNA, 75 bp, synthetic construct
  source 1..75: mol_type = other DNA
caggaaaacagtgaaaaactggctgccgatatgatgatcagtcagaaacgcatgggcggcctgcaggccgtgcgt

SEQ ID NO: 872916 - DNA, 75 bp, synthetic construct
  source 1..75: mol_type = other DNA
caggaaaacagtgaaaaactggctgccgatatgatcatcagtcagaaacgcatggggggcctgcaggccgtgcgt

SEQ ID NO: 872917 - DNA, 75 bp, synthetic construct
  source 1..75: mol_type = other DNA
aaaccgaaaaaggagaaaagcagcagccgtgaaggtgattatatggaaggcgcggaaggcaatgtgtttgtgtta

SEQ ID NO: 872918 - DNA, 75 bp, synthetic construct
  source 1..75: mol_type = other DNA
ctggatgcctgtacatgtctctttttcaatgtttgcttgttttttatgctgttatggcagtaatcgcctttctta

SEQ ID NO: 872919 - DNA, 75 bp, synthetic construct
  source 1..75: mol_type = other DNA
caggaaaacagtgaaaaactggcggccgatatgattatcagtcagaaacgcatgggcggcctgcaggccgtgcgt

SEQ ID NO: 872920 - DNA, 75 bp, synthetic construct
  source 1..75: mol_type = other DNA
gcgtctgaacggtgtggcagttgaagagctgtccagcaagttcaccgtggagccgtccgtgcagcagacgctgga

SEQ ID NO: 872921 - DNA, 75 bp, synthetic construct
  source 1..75: mol_type = other DNA
agccgtctgtgcagcagacgctggaagaccaaatccagcagtccgccgctttcctgacgctgattaacgtcacgc

SEQ ID NO: 872922 - DNA, 75 bp, synthetic construct
  source 1..75: mol_type = other DNA
tgtttattcgtctggattcggacagtttggtggtgaacccatcgctgccgtgttgggtgcctacgagtttaaaaa

SEQ ID NO: 872923 - DNA, 75 bp, synthetic construct
  source 1..75: mol_type = other DNA
caggaaaacagtgaaaaactggcagccgatatgataatcagtcagaaacgcatgggtggcctgcaggccgtgcgt

SEQ ID NO: 872924 - DNA, 75 bp, synthetic construct
  source 1..75: mol_type = other DNA
tacgctgatggtcgatgttgaatacaaatgcgagcagaccaactttgacacggtactgacctacgcgaagctgga

SEQ ID NO: 872925 - DNA, 75 bp, synthetic construct
  source 1..75: mol_type = other DNA
cgaaagagcgtgaacctgtcgatcctacgctgatggtcgatgttgaatacaaatgcgagcagaccaactttgaca

SEQ ID NO: 872926 - DNA, 75 bp, synthetic construct
  source 1..75: mol_type = other DNA
tgtgatattaaaaatacaaaacatacaaaacatacaaaatgaaacagtagattttaatgaaacaagagagagggt

SEQ ID NO: 872927 - DNA, 75 bp, synthetic construct
  source 1..75: mol_type = other DNA
atggtaacaagtgatccttcagcgatggtgaatgcaggtatttgtgcagtcatcgtcctcgtcctgatgttctac

SEQ ID NO: 872928 - DNA, 75 bp, synthetic construct
  source 1..75: mol_type = other DNA
tacgttgggggagtgctggaacgttcaggtatcacatcaagccgctttgaatcagccgcatcttatcttaattgg

SEQ ID NO: 872929 - DNA, 75 bp, synthetic construct
  source 1..75: mol_type = other DNA
aaggtcgtaaatatattggtgaaaaggaaattaaagggccagagcataacccgctaattttacagttctggaagg

SEQ ID NO: 872930 - DNA, 75 bp, synthetic construct
  source 1..75: mol_type = other DNA
accggttccgactgctgtgtttgtcaccataatattgctttgtgcttattttaaagcacaatcggaccaatgttt

SEQ ID NO: 872931 - DNA, 75 bp, synthetic construct
  source 1..75: mol_type = other DNA
gtcgaacctcctgatatgcgcagctgttatgaaggtccggggaaatctggcacgtctggttgatcttctgaggca

SEQ ID NO: 872932 - DNA, 75 bp, synthetic construct
  source 1..75: mol_type = other DNA
aaccttcttatttgcgctgccgtgttatgggctcgtgggaatgtggcgcgtctcgttgatacgctgaggcattaa

SEQ ID NO: 872933 - DNA, 75 bp, synthetic construct
  source 1..75: mol_type = other DNA
aagtaatcattaaatttatggcggaacgtgatacaacattattaccattaactacacgacagattgcggatggtt

SEQ ID NO: 872934 - DNA, 75 bp, synthetic construct
  source 1..75: mol_type = other DNA
ctgatcatcagctctgctatgaactgcctgaagaaaaaagatccgtacctgtgtacgctccttgagtggcattac

SEQ ID NO: 872935 - DNA, 75 bp, synthetic construct
  source 1..75: mol_type = other DNA
accactgggagcaggacctgacgcaagtgcctggtctggtcgagcaggttgctaatgacctggatgcgattctcg

SEQ ID NO: 872936 - DNA, 75 bp, synthetic construct
  source 1..75: mol_type = other DNA
acagtgaatattttgctgatgatacttccctttgccaaatgaaattaacctctttctctattaccgcgtttttcc

SEQ ID NO: 872937 - DNA, 75 bp, synthetic construct
  source 1..75: mol_type = other DNA
tggcaaacgcaattatctctgctgttatcgttattgcactgatgttctaccagcgcggcggggcgagacatcgcc

SEQ ID NO: 872938 - DNA, 75 bp, synthetic construct
  source 1..75: mol_type = other DNA
tgaactttaatgacttgtctggatacatatcaagtttatgggataatattaggggtagttttaccccttttcata

SEQ ID NO: 872939 - DNA, 75 bp, synthetic construct
  source 1..75: mol_type = other DNA
atattgagtttagctttaattcttttagtaaagatgtctatcgtgaacaaaatagtgatatatataaaatatttt

SEQ ID NO: 872940 - DNA, 75 bp, synthetic construct
  source 1..75: mol_type = other DNA
acaatattgacactgccagcacattatatcaaacaaaatacaatgacaatctaaaattatctaaccgtgatgatt

SEQ ID NO: 872941 - DNA, 75 bp, synthetic construct
  source 1..75: mol_type = other DNA
ttttaagaaaaacacaacgtatcattacaatgtccaatgagttaggcaataatagattaaaaaactcacagttag

SEQ ID NO: 872942 - DNA, 75 bp, synthetic construct
  source 1..75: mol_type = other DNA
tgtttaatggtagcgtctattttccttcccgtgatgatgaaaatagctcatcccccagcccaactctacctacta

SEQ ID NO: 872943 - DNA, 75 bp, synthetic construct
  source 1..75: mol_type = other DNA
atgattcatccaggttcttttttagataagacaattaacaatacaagaggtaaaaatgttaatgctaatatcaaa

SEQ ID NO: 872944 - DNA, 75 bp, synthetic construct
  source 1..75: mol_type = other DNA
aactgagagatattaacacattggagtcatttaaaaaaccacaagattattttttttatcaacaagagatgctat

SEQ ID NO: 872945 - DNA, 75 bp, synthetic construct
  source 1..75: mol_type = other DNA
tagattcatttgctaaagcaagtatctctgacagagaaaataatatatatcctgttatttgtgattctcctgatc

SEQ ID NO: 872946 - DNA, 75 bp, synthetic construct
  source 1..75: mol_type = other DNA
caattcatttgcagatatttccataccattattacagactatatgtcccagtataacaacaataataaaaaaaac

SEQ ID NO: 872947 - DNA, 75 bp, synthetic construct
  source 1..75: mol_type = other DNA
caacataattgcagaatacttattggctagttacggagtttctggacattattctcacggcgtggtatatccagc

SEQ ID NO: 872948 - DNA, 75 bp, synthetic construct
  source 1..75: mol_type = other DNA
tctattctaataacaacagaatatcactcactcgcgttacaacaagtatcttctttttggagagtaaccgatcct

SEQ ID NO: 872949 - DNA, 75 bp, synthetic construct
  source 1..75: mol_type = other DNA
acgagcaatggtaacttttcatctttatatggaagtggtattgttaaaattcactttagtgagtctcctaacaat

SEQ ID NO: 872950 - DNA, 75 bp, synthetic construct
  source 1..75: mol_type = other DNA
cagagcgcctgatgaacctgtcactgaccgacaaccggggatttgaagcagaccagctcaccatcacgctggatg

SEQ ID NO: 872951 - DNA, 75 bp, synthetic construct
  source 1..75: mol_type = other DNA
acagcattttagccgtgaggcgctggcggtggatcgcaccgatggcatcagcatgacctttgccaactggcgctt

SEQ ID NO: 872952 - DNA, 75 bp, synthetic construct
  source 1..75: mol_type = other DNA
cggtgaaaactggtttgaccgtacggtcagcgccgatgccgcaggcatcattctgacctcccttgtgattaaccg

SEQ ID NO: 872953 - DNA, 75 bp, synthetic construct
  source 1..75: mol_type = other DNA
atgcagtatgcaaaatctgtcattctgaacgttgaagaaatcgaccgcctttcttttctgccttacctgtttggc

SEQ ID NO: 872954 - DNA, 75 bp, synthetic construct
  source 1..75: mol_type = other DNA
tcagcgccgacgcggcgggcattattctgaccagcctggcgattaatcgccgtctggcggcccatcatgacagca

SEQ ID NO: 872955 - DNA, 75 bp, synthetic construct
  source 1..75: mol_type = other DNA
ttagcagtttatcaccctttcagctaacacagtatattgatgaccatcattttactactgaacagaaagtgcaga

SEQ ID NO: 872956 - DNA, 75 bp, synthetic construct
  source 1..75: mol_type = other DNA
tagctggtttccttctttggatgaagaatggcagggggggatcaggctaggaaaggaaaagcaagttaattttga

SEQ ID NO: 872957 - DNA, 75 bp, synthetic construct
  source 1..75: mol_type = other DNA
tttccagtcaggcagatcaggcgccgtcgctgcttgatcaaatcatggcgcagacccgcattcagcccggctcgg

SEQ ID NO: 872958 - DNA, 75 bp, synthetic construct
  source 1..75: mol_type = other DNA
aagaagccgaaagaacccgcctcaagcagcaaagaaggggattacatggcaggcgcggaaggcaacgtattcgtg

SEQ ID NO: 872959 - DNA, 75 bp, synthetic construct
  source 1..75: mol_type = other DNA
cggttgaatgtggaatcgcgcggtgatgtgccgctgatggaagaaaaaacaaaacttatccttgagttactgagt

SEQ ID NO: 872960 - DNA, 75 bp, synthetic construct
  source 1..75: mol_type = other DNA
gtgctgatgccgcaggcatcattttgacttcccttgtgattaaccgccagttgtggctgtaccacgacagcgggg

SEQ ID NO: 872961 - DNA, 75 bp, synthetic construct
  source 1..75: mol_type = other DNA
ttgtggctgtaccacgacagcggtgatgcaggactgactcacctgtacaggatgcgcgatgcgcagttgtggagc

SEQ ID NO: 872962 - DNA, 75 bp, synthetic construct
  source 1..75: mol_type = other DNA
atgcaatatgcgaaacctgtcactctgaatgttgaagaatgcgaccgtctctcctttctgccgtatctgtttggc

SEQ ID NO: 872963 - DNA, 75 bp, synthetic construct
  source 1..75: mol_type = other DNA
ccgcctgccggacggtggcggttacatgatgccggatggcgaccgttttcatctggtcaacggtgaaaactggtt

SEQ ID NO: 872964 - DNA, 75 bp, synthetic construct
  source 1..75: mol_type = other DNA
agggctgacacacctgtacaggatgcgtgatgcgcagttgtggagccacatcgaatttcaccccgaatgcaacgc

SEQ ID NO: 872965 - DNA, 75 bp, synthetic construct
  source 1..75: mol_type = other DNA
gatgcgtgatgcacagttgtggagccacatcgaatttcaccccgaatgcaacgcgatttacgcggcgctggactg

SEQ ID NO: 872966 - DNA, 75 bp, synthetic construct
  source 1..75: mol_type = other DNA
gtggcggttacatgatgccggatggcgaccgttttcatctggttaacggtgaaaacggcactgttgcaaatagtc

SEQ ID NO: 872967 - DNA, 75 bp, synthetic construct
  source 1..75: mol_type = other DNA
atgcagtatgcgaaacctgtcactctgaacgtagaagagtgcgaccgcctttcctttctgccgtatctgtttggc

SEQ ID NO: 872968 - DNA, 75 bp, synthetic construct
  source 1..75: mol_type = other DNA
atgatgccggatggcgaccgttttcatctggttaacggtgaaaactggtttgaccgcacggtcagtgctgatgcc

SEQ ID NO: 872969 - DNA, 75 bp, synthetic construct
  source 1..75: mol_type = other DNA
gatggcgaccgttttcatctggttaacggtgaaaactggtttgaccgtaccgtgagtgctgatgccgcaggaatc

SEQ ID NO: 872970 - DNA, 75 bp, synthetic construct
  source 1..75: mol_type = other DNA
tctggcacttcatccgcctgccggacggtgaccgttttcatctggttaacggtgcaaactggtttgaccgcacgg

SEQ ID NO: 872971 - DNA, 75 bp, synthetic construct
  source 1..75: mol_type = other DNA
cccttgtgattaaccgccagttgtggctgtaccacgacagcggtgatgcgggactgacacacctgtaccggatgc

SEQ ID NO: 872972 - DNA, 75 bp, synthetic construct
  source 1..75: mol_type = other DNA
gaaaactggtttgaccgcacggtcagtgccgatgctgcaggcatcatccttacctcccttgtgattaaccgccag

SEQ ID NO: 872973 - DNA, 75 bp, synthetic construct
  source 1..75: mol_type = other DNA
gatgcgcgatgcacagttgtggagccacatcgaatttcaccccgaatgtaacgcgatttacgcggcactggactg

SEQ ID NO: 872974 - DNA, 75 bp, synthetic construct
  source 1..75: mol_type = other DNA
gaatatcagggaggcttctggcacttcatccgcctgccggacggtggcggttacatgatgccggatggcgaccgt

SEQ ID NO: 872975 - DNA, 75 bp, synthetic construct
  source 1..75: mol_type = other DNA
catcacgcgcagcagtggagaccggcaccgcttccgggttgctgatcgtgacgcttataccggcgtccgcgcgta

SEQ ID NO: 872976 - DNA, 75 bp, synthetic construct
  source 1..75: mol_type = other DNA
gaaaaaagtcagcgtgaaacgccgtaaaccgccaaaacccaaaaaggagaaaagcagcagccgtgaaggtgacta

SEQ ID NO: 872977 - DNA, 75 bp, synthetic construct
  source 1..75: mol_type = other DNA
ggcggcaaagtggcagcagctacaacgcggagccgcatcattctccatcacactggcacgtggacgcgcagaact

SEQ ID NO: 872978 - DNA, 75 bp, synthetic construct
  source 1..75: mol_type = other DNA
gccaggcggtggcgtgaacgcacagggaaaaccattgccatcgtttgccatcacacgcagcagcggcgatcgcca

SEQ ID NO: 872979 - DNA, 75 bp, synthetic construct
  source 1..75: mol_type = other DNA
aatgccggattttgatattctcgcggagggtaaaacgctgtcaggcgtggcagagcgcctgatgagcctgtcact

SEQ ID NO: 872980 - DNA, 75 bp, synthetic construct
  source 1..75: mol_type = other DNA
cctacaacatcatgggctggcgttatcaggggatcgtgaaggcgctgaaagaaggcgatatccagaccgcgcaga

SEQ ID NO: 872981 - DNA, 75 bp, synthetic construct
  source 1..75: mol_type = other DNA
aaaccgccaaaacccaaaaaggagaaaagcagcagccgtgaaggtgattatatggaaggcgcggaaggcaatgtg

SEQ ID NO: 872982 - DNA, 75 bp, synthetic construct
  source 1..75: mol_type = other DNA
tcagtcagagcacagaccccgtaaaaatgccggattttgatattctcgcggagggtaaaacgctgtccggcgtgg

SEQ ID NO: 872983 - DNA, 75 bp, synthetic construct
  source 1..75: mol_type = other DNA
gcaatctgttattcatcatgccaggtggtggcgtgaacgcacagggccagccgttgccctcgttcgccattacac

SEQ ID NO: 872984 - DNA, 75 bp, synthetic construct
  source 1..75: mol_type = other DNA
ggaagactgggtgctggcgaaggtggagcacaacatcgacgacagcggcttcaccacgcggcttgaactggaatt

SEQ ID NO: 872985 - DNA, 75 bp, synthetic construct
  source 1..75: mol_type = other DNA
cacaccattgataacagtggctttaccacgcagcttgagcttgaggcaaaaatcccggaatggatagcggaaaca

SEQ ID NO: 872986 - DNA, 75 bp, synthetic construct
  source 1..75: mol_type = other DNA
tgacagaaaaaggcacttacattgttgatgaaatcgcacacgaaggaccgccggacaggctgactgtttcagcca

SEQ ID NO: 872987 - DNA, 75 bp, synthetic construct
  source 1..75: mol_type = other DNA
gctatttagggcttaccgcgccgcgcttcctgcttcgccaaccctattcgccgacggataaccctgttaagaact

SEQ ID NO: 872988 - DNA, 75 bp, synthetic construct
  source 1..75: mol_type = other DNA
tatccgccatcgctcatcggtacggcctgaaaccgcaaatcagcgaaatgctgatggatatcgaaatcgaccacg

SEQ ID NO: 872989 - DNA, 75 bp, synthetic construct
  source 1..75: mol_type = other DNA
aaaagaaaaaagtcagcgtgaaacgccgcaaaccgccaaaacccaaaaaggagaaaagcagcagccgtgaaggtg

SEQ ID NO: 872990 - DNA, 75 bp, synthetic construct
  source 1..75: mol_type = other DNA
catggcacggtaacaggatttaaaagcgagattgataatcaggactggattattgcaaaagccgagcacaccatt

SEQ ID NO: 872991 - DNA, 75 bp, synthetic construct
  source 1..75: mol_type = other DNA
acaaaagcaacaaaactccggcattcagcatcagtattgagggtagggatatcaccactgtgctggataaccgcc

SEQ ID NO: 872992 - DNA, 75 bp, synthetic construct
  source 1..75: mol_type = other DNA
atatcagcttcttaacgcgcatggccgaaatgctgggcgcggtggcaaccattaaaaacggtatgcttctgttta

SEQ ID NO: 872993 - DNA, 75 bp, synthetic construct
  source 1..75: mol_type = other DNA
acattgttgatgaaatcgctcacgaaggaccgccggacaggctgactgtttcagccagaagcgcagattttcggg

SEQ ID NO: 872994 - DNA, 75 bp, synthetic construct
  source 1..75: mol_type = other DNA
cattgataacagtggctttaccacgcagcttgagcttgaagcaaaaattccggaatggatagcagaaacagagtg

SEQ ID NO: 872995 - DNA, 75 bp, synthetic construct
  source 1..75: mol_type = other DNA
attgccggaaccactgataccaccgcaaaagagcgtgagcctgtcgatccgacgctgattgtcgatgtggaatat

SEQ ID NO: 872996 - DNA, 75 bp, synthetic construct
  source 1..75: mol_type = other DNA
tgaatccgttaacgaggcgtatgtggtcgaggactaccgttgtgcggcactggtggaaaacatcgaaattggtga

SEQ ID NO: 872997 - DNA, 75 bp, synthetic construct
  source 1..75: mol_type = other DNA
gctggggctgggcgtgggaagcaccattgccggaaccaccgataccaccaccaaagagcgcgagcctaccgatcc

SEQ ID NO: 872998 - DNA, 75 bp, synthetic construct
  source 1..75: mol_type = other DNA
gcgtctgaacggtgtggcagttgaagaactgtccagcaagttcaccgtcgaaccgtccgtgcagcagacgctgga

SEQ ID NO: 872999 - DNA, 75 bp, synthetic construct
  source 1..75: mol_type = other DNA
gcgtctgaactgtgtggcagttgaagaactgtccagcaagtttaccgtagagccgtccgtacagcagacgctgga

SEQ ID NO: 873000 - DNA, 75 bp, synthetic construct
  source 1..75: mol_type = other DNA
aaaggtggcgaatatgccaacctggacgctgtggtgatggatgcggtcaatgagcttatcgatgtggtctaccag

SEQ ID NO: 873001 - DNA, 75 bp, synthetic construct
  source 1..75: mol_type = other DNA
aagggcagcagtgcctggccgtcgctgacggtgtcgaatctgttcggtctggtcaccggtatggcggaggacctg

SEQ ID NO: 873002 - DNA, 75 bp, synthetic construct
  source 1..75: mol_type = other DNA
aagggcagcagtgcctgcccgtcgctgacggtgtcgaatctgtttggtctggtcaccgggatggcggaggacctg

SEQ ID NO: 873003 - DNA, 75 bp, synthetic construct
  source 1..75: mol_type = other DNA
acctatcgcggtgatgagtgcggttatcacggtccggcagtcgcggatgaatatgaccagccgacgtccgatatc

SEQ ID NO: 873004 - DNA, 75 bp, synthetic construct
  source 1..75: mol_type = other DNA
ggggcggcaatatcaggtatacccgattgacggcagcggttttgagatgaacgggaagggcagcagtgcccgccc

SEQ ID NO: 873005 - DNA, 75 bp, synthetic construct
  source 1..75: mol_type = other DNA
acctgcagagtctggtgggggccacggtggtccgccgccgggtgtatgcccgttttctggatgcggtgaattttg

SEQ ID NO: 873006 - DNA, 75 bp, synthetic construct
  source 1..75: mol_type = other DNA
aacacctgcacctggatctatcgcggtgatgagtgcggttataatggcccagctgtcgctgatgaatatgaccag

SEQ ID NO: 873007 - DNA, 75 bp, synthetic construct
  source 1..75: mol_type = other DNA
atcgacctgacggtgcagggtggtgagcggtattttttctgtaatgagctgaatgaaaaaggggaggcggtcacc

SEQ ID NO: 873008 - DNA, 75 bp, synthetic construct
  source 1..75: mol_type = other DNA
acgaaagataaatgcagcaaatgcctgagcggctgtaagtttcgcaataacatcggtaactttggcggctacctt

SEQ ID NO: 873009 - DNA, 75 bp, synthetic construct
  source 1..75: mol_type = other DNA
gccacggtggtccgccgccgggtgtatgcccgttttctggatgcggtgaattttgtggcgggcaatccggaggca

SEQ ID NO: 873010 - DNA, 75 bp, synthetic construct
  source 1..75: mol_type = other DNA
atcccattcaggggagtggttttgaactgaatggcaaagtaaagcgcgcaaaatcatttgataccgttttggatt

SEQ ID NO: 873011 - DNA, 75 bp, synthetic construct
  source 1..75: mol_type = other DNA
caatggcagggaaaccacagcgcctgcaggactgactggcgccctgaatatgagtctgcatgagctggaaaaaat

SEQ ID NO: 873012 - DNA, 75 bp, synthetic construct
  source 1..75: mol_type = other DNA
ggaagcctttaacggcggtatcgcgggaactggtaagctgctgattaactggtcgccggcaggtctgctctataa

SEQ ID NO: 873013 - DNA, 75 bp, synthetic construct
  source 1..75: mol_type = other DNA
ccagacattaacgctgctggagaaactcaacgaactggacgcggatgaacaggcagatatctgtgaatcgcttca

SEQ ID NO: 873014 - DNA, 75 bp, synthetic construct
  source 1..75: mol_type = other DNA
aaggccgagtaccgcgatcagcgccgggcaatgctacaggattgggcggacatgatcgacgagtggacaatcagg

SEQ ID NO: 873015 - DNA, 75 bp, synthetic construct
  source 1..75: mol_type = other DNA
gtcatcctggctgacagtacccgcgcaatgaagcaggcggtgatcgaccgtgacatacttccggttcttggcaac

SEQ ID NO: 873016 - DNA, 75 bp, synthetic construct
  source 1..75: mol_type = other DNA
aaatgggggtcgctcaaatccagtgtaaccggaatgggtgacagcatcagtagctggtttaaacagcgctgggct

SEQ ID NO: 873017 - DNA, 75 bp, synthetic construct
  source 1..75: mol_type = other DNA
ctgttggtcggtccggcacacccggattacggcgcgttttgcatgggcgcaggtcatggtatcggctttaacgat

SEQ ID NO: 873018 - DNA, 75 bp, synthetic construct
  source 1..75: mol_type = other DNA
tggcaggggcggcaatatcaggcgtacccgattgagggcagtggctttgagatgaacgggaagggcagcagtgcc

SEQ ID NO: 873019 - DNA, 75 bp, synthetic construct
  source 1..75: mol_type = other DNA
aggcagccgactgtgagcgaatgcacgaacaggcagaagcgctttatcagaagctgagcgcacgcttcggtatac

SEQ ID NO: 873020 - DNA, 75 bp, synthetic construct
  source 1..75: mol_type = other DNA
aatcgcttcacgaccacgccgacgagctttaccgcagctgcctcgcacgcttcggggatgacggtgaaaacctgt

SEQ ID NO: 873021 - DNA, 75 bp, synthetic construct
  source 1..75: mol_type = other DNA
ttaacatggcccgctttataagaagccagacattaacgctgctggaaaagctcaacgaactggacgcggatgaac

SEQ ID NO: 873022 - DNA, 75 bp, synthetic construct
  source 1..75: mol_type = other DNA
aggcccctgagggccggtggctccccgggcaccggtatcacctttatcgcctttctcacctttttctccctgcgg

SEQ ID NO: 873023 - DNA, 75 bp, synthetic construct
  source 1..75: mol_type = other DNA
catgctggccaacacctgcacctggatctaccgcggcgatgagtgcggttatgatggcccggcggtcgcggatga

SEQ ID NO: 873024 - DNA, 75 bp, synthetic construct
  source 1..75: mol_type = other DNA
atccgcgctggtcgatctctgggaaatcgatctgacagaggtcggtggagaacgttattttttctgtaatgagca

SEQ ID NO: 873025 - DNA, 75 bp, synthetic construct
  source 1..75: mol_type = other DNA
aggcaactagagttatttattcgtttctcaataattttacaggtaataataaaaatatcattgtcgttttctttt

SEQ ID NO: 873026 - DNA, 75 bp, synthetic construct
  source 1..75: mol_type = other DNA
ttcccgacccaccctgacggtttctaacctggacggtatggtcaccgggatggcggaagagctgcagagtctggt

SEQ ID NO: 873027 - DNA, 75 bp, synthetic construct
  source 1..75: mol_type = other DNA
ttcccggccgaccctgacggtttctaacctgaacggtatggtcaccgggatggcggaagagctgcagagtctggt

SEQ ID NO: 873028 - DNA, 75 bp, synthetic construct
  source 1..75: mol_type = other DNA
ttcccgtcctaccctgacggtttctaacctgcacggtatggtcaccgggatggcggaagagctgcagagtctggt

SEQ ID NO: 873029 - DNA, 75 bp, synthetic construct
  source 1..75: mol_type = other DNA
ggctgacagccatgacggcctcgtttgtgctggccacaccgaccgagacggacggggcgctgtttcccggtcgta

SEQ ID NO: 873030 - DNA, 75 bp, synthetic construct
  source 1..75: mol_type = other DNA
agctgacggccatgacggcctcgtttgtgctggccacaccgaccgagacggacggggcgctgtttcccggtcgta

SEQ ID NO: 873031 - DNA, 75 bp, synthetic construct
  source 1..75: mol_type = other DNA
tggcaggggcggcaatatcaggcatacccgattgacggcagtggctttgagatgaacggaaagggcagcagtgcc

SEQ ID NO: 873032 - DNA, 75 bp, synthetic construct
  source 1..75: mol_type = other DNA
tgggggccacggtggtccgccgccgggtgtatgcccgttttctggatgcggtgaatttagtagcgggcaatccgg

SEQ ID NO: 873033 - DNA, 75 bp, synthetic construct
  source 1..75: mol_type = other DNA
tcatgctggcgaacacctgtatgtggacctaccgctctgatgagtgtggttacacgggcggggctgtggcggatg

SEQ ID NO: 873034 - DNA, 75 bp, synthetic construct
  source 1..75: mol_type = other DNA
catgcttgctaatacctgcacctggacctatcgcggtgatgagtgcggttatcacggtccggcggtcgcggatga

SEQ ID NO: 873035 - DNA, 75 bp, synthetic construct
  source 1..75: mol_type = other DNA
tacacggcatggtcaccgggatggtggaggatttgcagagtctggtcggcggaacagtggtccggcgtaaggtct

SEQ ID NO: 873036 - DNA, 75 bp, synthetic construct
  source 1..75: mol_type = other DNA
tgctcatcggcctgtactgacgcggtgaatgcgccggaatggcggtattactggcaggtcaacatgccagctgcc

SEQ ID NO: 873037 - DNA, 75 bp, synthetic construct
  source 1..75: mol_type = other DNA
gggtgacactgttgccgagtgcgttatcaataaactttgcccgtcccatacctacgtaatattcaaatatccgta

SEQ ID NO: 873038 - DNA, 75 bp, synthetic construct
  source 1..75: mol_type = other DNA
caacactgttacgtaataccctggatgggggataaagttgtcaatacgattacagccttgctcatacgttgtggt

SEQ ID NO: 873039 - DNA, 75 bp, synthetic construct
  source 1..75: mol_type = other DNA
atgggcgtgacaaacgatgattacatccgtctgttgtcggcactgctgccgcccggtccggcgtggtcagccagc

SEQ ID NO: 873040 - DNA, 75 bp, synthetic construct
  source 1..75: mol_type = other DNA
tggtgctctataacggttacgacgaaatcttcgcctctggtcttctggcgggcgcagacggcggtatcggcagca

SEQ ID NO: 873041 - DNA, 75 bp, synthetic construct
  source 1..75: mol_type = other DNA
gtgaacaggtactggagattgtcgctgaagaagcaaaaggcaagattaaactcatcgctcacgtaggttgcgtca

SEQ ID NO: 873042 - DNA, 75 bp, synthetic construct
  source 1..75: mol_type = other DNA
agcaacggttcaacaggcgcttaaaaaaatgctgttatcaggtttaccatctgcatttgatcttgccacagatgt

SEQ ID NO: 873043 - DNA, 75 bp, synthetic construct
  source 1..75: mol_type = other DNA
atgatgaacgaataccagcggctggatccacgcatacagaagtggatataccagcagggatggacagatctccgg

SEQ ID NO: 873044 - DNA, 75 bp, synthetic construct
  source 1..75: mol_type = other DNA
ttacttatcggcaacaaatggtttgagccagctgatacccggcagatgcactattccaccctgttccatcagatc

SEQ ID NO: 873045 - DNA, 75 bp, synthetic construct
  source 1..75: mol_type = other DNA
gaaagcattgcggcaacgctgagcgacatgtgtgaggaacaaattgttccgaatgaatttttcccccaccatggt

SEQ ID NO: 873046 - DNA, 75 bp, synthetic construct
  source 1..75: mol_type = other DNA
gacgagtatttaccagaatccctgcttgcgaaaggatttggggaaaaagcgtatgacattgaggggacttgtgtt

SEQ ID NO: 873047 - DNA, 75 bp, synthetic construct
  source 1..75: mol_type = other DNA
tattcagtggtagcgggatgtctgttcatgatgttgttcgccaggaaatgctcactatctacagggaaaatgatt

SEQ ID NO: 873048 - DNA, 75 bp, synthetic construct
  source 1..75: mol_type = other DNA
ctggcaggtcaacatgccagctgccaccaacaccacctggatgacatgtggcgatccctgtgattccgcactgcg

SEQ ID NO: 873049 - DNA, 75 bp, synthetic construct
  source 1..75: mol_type = other DNA
gcacgaatgcagctggtaatcacagccatagagatggccgtcgatttaaccccagtgtttttaaagatacttatc

SEQ ID NO: 873050 - DNA, 75 bp, synthetic construct
  source 1..75: mol_type = other DNA
ggtttgctgtggccgcgtcggcgaacgttaaccattgctatcttgttggtctgggcaacgggagtcatgggaagc

SEQ ID NO: 873051 - DNA, 75 bp, synthetic construct
  source 1..75: mol_type = other DNA
gaaagcgtggagtggcaccgggtcgtcctgttcgggaagctcgcggaaattgcaggtgagtatctgcgtaaaggt

SEQ ID NO: 873052 - DNA, 75 bp, synthetic construct
  source 1..75: mol_type = other DNA
cgtggctggacgattaagggcaaacctgccagtggtcgtgccgtattgtctcaggaacaggacggcattaaatcg

SEQ ID NO: 873053 - DNA, 75 bp, synthetic construct
  source 1..75: mol_type = other DNA
tcaatcatttggttaggaaatccgcggcaacgcgcgccgagacagcagcaaaacgggcagaggatattgcatccg

SEQ ID NO: 873054 - DNA, 75 bp, synthetic construct
  source 1..75: mol_type = other DNA
cggaagtactgcagaaggcggtgaatgatgcggtcgcaaatattccacagccggcggacggtaaaagtctcaccc

SEQ ID NO: 873055 - DNA, 75 bp, synthetic construct
  source 1..75: mol_type = other DNA
tgcagtcaccgggcgtttccgtaacccgtacattaagcatcagctgctgtctatcgcgctcaacggtatgaccaa

SEQ ID NO: 873056 - DNA, 75 bp, synthetic construct
  source 1..75: mol_type = other DNA
ccctcctgccgtattccatgggaaaagcgagcacctgaacttagcgacgacgagcgtgattaccttgagcggcac

SEQ ID NO: 873057 - DNA, 75 bp, synthetic construct
  source 1..75: mol_type = other DNA
aaccacagtttagcggtggtggtgcgccagctgctgcaccgggggcgcaagggcagcaaccacaacagggcgcga

SEQ ID NO: 873058 - DNA, 75 bp, synthetic construct
  source 1..75: mol_type = other DNA
atccttgtgaaaaccacgggcaccatgcagatgctggggagtgcaccacagcagaacgctcaggtgcaaccgcag

SEQ ID NO: 873059 - DNA, 75 bp, synthetic construct
  source 1..75: mol_type = other DNA
caggacctgacgcaagtgcctggtctggtcgagcaggttgctaatgacctggatgcgattctcgaaaaagggatg

SEQ ID NO: 873060 - DNA, 75 bp, synthetic construct
  source 1..75: mol_type = other DNA
acaacatcgaaaattctattatatcaggtcatgaatcatttgatataatacgaagccatcaacatgagtggggag

SEQ ID NO: 873061 - DNA, 75 bp, synthetic construct
  source 1..75: mol_type = other DNA
tgtattgcaagtctatcgctgggctattgagcgcggtcagaaggttgagaatcccgctgatctggtgcggcctgc

SEQ ID NO: 873062 - DNA, 75 bp, synthetic construct
  source 1..75: mol_type = other DNA
cgatcagcgccgggcgatgctccaagattgggccgacatgatcgacgagtggacaatcaggaagacccgcctcaa

SEQ ID NO: 873063 - DNA, 75 bp, synthetic construct
  source 1..75: mol_type = other DNA
cgatcagcgccgggcaatgctacaggattgggcggacatgatcgacgagtggacaatcaggaagccccgcctcaa

SEQ ID NO: 873064 - DNA, 75 bp, synthetic construct
  source 1..75: mol_type = other DNA
gatccgtggcgctgagacattcgcggtacataccgacagctatatgaaacacgtcattctggctgacagtacccg

SEQ ID NO: 873065 - DNA, 75 bp, synthetic construct
  source 1..75: mol_type = other DNA
caggcgcaggacattctgattgctctaaaaatgtgcgcaggaagcagtgattgggttttaccttcatgcaatcag

SEQ ID NO: 873066 - DNA, 75 bp, synthetic construct
  source 1..75: mol_type = other DNA
ggatcacgcttgcagaagcgcgtgaacggctcaatgaagccaaaaaaatggttgccagtggaagatcgcctgcga

SEQ ID NO: 873067 - DNA, 75 bp, synthetic construct
  source 1..75: mol_type = other DNA
tatgtagctgtgcttacgtcaggcacggtctcgtttcgctatgactaccgtatcaacggtcgccgcgaaacactg

SEQ ID NO: 873068 - DNA, 75 bp, synthetic construct
  source 1..75: mol_type = other DNA
caacagcagtgcaggccagggagatcatcagcagcgtataccgtcacgccaatgaccgtggtcatggtttgttta

SEQ ID NO: 873069 - DNA, 75 bp, synthetic construct
  source 1..75: mol_type = other DNA
agacaggcaatggatattatgattgccctcaaaacctttgccggtagctctgattttatccttccttcgcggtac

SEQ ID NO: 873070 - DNA, 75 bp, synthetic construct
  source 1..75: mol_type = other DNA
ttgagaggaaacccaacccgaccatgctgactgataccaagctgcgcaacctcaagccaaaggacaagctctaca

SEQ ID NO: 873071 - DNA, 75 bp, synthetic construct
  source 1..75: mol_type = other DNA
tcgctgaaggtttaatttctttgatactattgattaaatttgttcctgaacttctaaaagagaataaatatgaaa

SEQ ID NO: 873072 - DNA, 75 bp, synthetic construct
  source 1..75: mol_type = other DNA
agaactcattgctgcaaaaaagctgttaaaggcaggccagtcgcctgctgcggctaaacgtgacggtatcaaaaa

SEQ ID NO: 873073 - DNA, 75 bp, synthetic construct
  source 1..75: mol_type = other DNA
cgcaatgaagcaggcggtgatcgaccgtgacatacttccggttcttggcaacaaaatgatgactgaaattaccac

SEQ ID NO: 873074 - DNA, 75 bp, synthetic construct
  source 1..75: mol_type = other DNA
acacatttgaacctgaaaatacaattaattttatttatgatttttatagtaaaaaacaagatgatttacttagcg

SEQ ID NO: 873075 - DNA, 75 bp, synthetic construct
  source 1..75: mol_type = other DNA
acattcacattggaatcttagaaaacaaggcaaatagagattttatatatgggaagttttcatctttgaatttgg

SEQ ID NO: 873076 - DNA, 75 bp, synthetic construct
  source 1..75: mol_type = other DNA
tacagctcgctcgtaaagcaggaaaactcaacagaagatgttgttttgataggaaaaatgatttcagatgaagtt

SEQ ID NO: 873077 - DNA, 75 bp, synthetic construct
  source 1..75: mol_type = other DNA
taatataacaccaatgggtataacgatacatgaaatagtcaatggggatgataagttgtttttttatcctacacc

SEQ ID NO: 873078 - DNA, 75 bp, synthetic construct
  source 1..75: mol_type = other DNA
aaattggaaaacatcttttttatgtaatcttgccagactgctatatagcatgtttaacggtagtgtctattttcc

SEQ ID NO: 873079 - DNA, 75 bp, synthetic construct
  source 1..75: mol_type = other DNA
ttttgtcttatgtttggttttattcggagcatgtttaataattggttacaatcgttattctccagtattctgaca

SEQ ID NO: 873080 - DNA, 75 bp, synthetic construct
  source 1..75: mol_type = other DNA
gccagacagcgcgcctacatgttgcagcagtgggccgatatgattgattcctggattaacggggagcatacggat

SEQ ID NO: 873081 - DNA, 75 bp, synthetic construct
  source 1..75: mol_type = other DNA
tcggttagcaagccgttatccaatggcgcactgaacaggctgatcaataccaccgtcgaagcggtgagcgaggct

SEQ ID NO: 873082 - DNA, 75 bp, synthetic construct
  source 1..75: mol_type = other DNA
aacttccggaagccattatctaatgccgctctgaactctctgatcgacagaacggtgaaaataataaatgaagat

SEQ ID NO: 873083 - DNA, 75 bp, synthetic construct
  source 1..75: mol_type = other DNA
taccaaaggaaaggatgaaacgacgtaatccacatttggtttttctttccagacaggcaatggatattatgattg

SEQ ID NO: 873084 - DNA, 75 bp, synthetic construct
  source 1..75: mol_type = other DNA
gattccgatgcgccaatgagtagcgctactttaaaccgggttttgacactgacgtatcgcctggctcagaaagaa

SEQ ID NO: 873085 - DNA, 75 bp, synthetic construct
  source 1..75: mol_type = other DNA
cacccatgccacatggtcagaggttgatttcaaaaaatggacatggaccataccttcagaccgcatgaagggaag

SEQ ID NO: 873086 - DNA, 75 bp, synthetic construct
  source 1..75: mol_type = other DNA
gcaggactgacccagctttaccggatgcgcgatgcgcagttgtggcgtcacatcgaatttcaccctgaatgcaac

SEQ ID NO: 873087 - DNA, 75 bp, synthetic construct
  source 1..75: mol_type = other DNA
gttgtgacctggctatgggcaccagaaactaaagccctcccgctggtggcggcgggaaatgtaggaggtgcgaat

SEQ ID NO: 873088 - DNA, 75 bp, synthetic construct
  source 1..75: mol_type = other DNA
ctgaatatcctgtatattatatttggtattcatggagggagctatttcctcggcatagtggaaactatcacattt

SEQ ID NO: 873089 - DNA, 75 bp, synthetic construct
  source 1..75: mol_type = other DNA
tgtttcagcctattttggcgagcaactcggcacaccgtcggtgatgaacatctggatcccggatggcatgaaaga

SEQ ID NO: 873090 - DNA, 75 bp, synthetic construct
  source 1..75: mol_type = other DNA
tgccatcatcagccaacctgtgggcgctcggtgattgttgagcacaacggcgacgtttacgcctgcgatcactat

SEQ ID NO: 873091 - DNA, 75 bp, synthetic construct
  source 1..75: mol_type = other DNA
tgctgcttgatgatgaatggtgtgcatttctggcagaaaatcattttcttgttgggttatcgctggatggtccgg

SEQ ID NO: 873092 - DNA, 75 bp, synthetic construct
  source 1..75: mol_type = other DNA
ccaatatctacggcggctccgggtcaattctcggtactgccatcgccgcgctgttggtgggctatctgcagcagg

SEQ ID NO: 873093 - DNA, 75 bp, synthetic construct
  source 1..75: mol_type = other DNA
tttaattgtacaggatggcctgatttgaataatgaatctgccgtcatgcagtttgccagagtggcacgaaaatca

SEQ ID NO: 873094 - DNA, 75 bp, synthetic construct
  source 1..75: mol_type = other DNA
tttaggtggtggatcagcagtatcacagtttgcaatgatggccagaaaatttggtaaacaacttattgtcgctgt

SEQ ID NO: 873095 - DNA, 75 bp, synthetic construct
  source 1..75: mol_type = other DNA
atgttgtcatatggtaaagaaaattttattgccatgagtcatacgaaaagcgagttaactggagggaaacgtcgg

SEQ ID NO: 873096 - DNA, 75 bp, synthetic construct
  source 1..75: mol_type = other DNA
atccggcaacaggcacggacgtccaattaacaggaacaccgaacatgcaaaacattactcagtcctggtttgtcc

SEQ ID NO: 873097 - DNA, 75 bp, synthetic construct
  source 1..75: mol_type = other DNA
gatacgccagcgggtagcgaatggctggagaacgtgcgggcttatgagaaagaaattttgagtcgccgcgggtaa

SEQ ID NO: 873098 - DNA, 75 bp, synthetic construct
  source 1..75: mol_type = other DNA
gggaactggcgaaacagcgtttcgcggcggtgggaattgatgtcgaggaggcactgcgccaacttgatcgtttac

SEQ ID NO: 873099 - DNA, 75 bp, synthetic construct
  source 1..75: mol_type = other DNA
gctcggtgattgttgagcacaacggtgacgtttacgcctgcgactctttgttttcccccatatgccatttcccga

SEQ ID NO: 873100 - DNA, 75 bp, synthetic construct
  source 1..75: mol_type = other DNA
aacaatcaggtcgatgtcttccgtgaaacgctgggcgatatcgatcctgaacgtgtccatttcatgatctgccaa

SEQ ID NO: 873101 - DNA, 75 bp, synthetic construct
  source 1..75: mol_type = other DNA
cacgcccacaatacgcgcacgaatctgagcgatctggatcagtatcgctatcaacctgattttcaggatctgcct

SEQ ID NO: 873102 - DNA, 75 bp, synthetic construct
  source 1..75: mol_type = other DNA
tgcgccaggatgttgctcgtggacataaatttgcgttaacggatatcgcaaaaggggccaacgtcatcaaatatg

SEQ ID NO: 873103 - DNA, 75 bp, synthetic construct
  source 1..75: mol_type = other DNA
tgcgccatccgaatgcgggcgcagtactggtgattggtctggggtgtgaaaacaaccaggttgatgctttccgcg

SEQ ID NO: 873104 - DNA, 75 bp, synthetic construct
  source 1..75: mol_type = other DNA
atgcattggcggatattgcggcggggggaacacgttcacgcccacaatacgcgcacgaatctgagcgatctggat

SEQ ID NO: 873105 - DNA, 75 bp, synthetic construct
  source 1..75: mol_type = other DNA
ggtatcaccacgctggaagacaaatcacttggctgtacccagaaagcgggttccagcgtcgtggttgacgtgctg

SEQ ID NO: 873106 - DNA, 75 bp, synthetic construct
  source 1..75: mol_type = other DNA
tgaatatcgaatgggcgttcgccaattttgtcggcgcaccgggcgcggtttgccatcatcagccaacctgtggac

SEQ ID NO: 873107 - DNA, 75 bp, synthetic construct
  source 1..75: mol_type = other DNA
cgctatttccgccatttgcctccgtatcttaaagcaatggctgatttgctggcgcacggccgcccggccagcgac

SEQ ID NO: 873108 - DNA, 75 bp, synthetic construct
  source 1..75: mol_type = other DNA
gttgggttatcgctggatggtccggctgagatccacaatcaatatcgcgtgaccaaaggtggcagacccacgcat

SEQ ID NO: 873109 - DNA, 75 bp, synthetic construct
  source 1..75: mol_type = other DNA
gtcgttctgccagcctgcatcgtcagcaaattaaagacttgctggcgcgtcgtcgcgctatccggaagaccgaaa

SEQ ID NO: 873110 - DNA, 75 bp, synthetic construct
  source 1..75: mol_type = other DNA
gtgtttggtgaagataaatttaagcagttaccggcgcagtgtcgcagttgtaacgtgttaaaagcatgttgggga

SEQ ID NO: 873111 - DNA, 75 bp, synthetic construct
  source 1..75: mol_type = other DNA
tgaatatcgaatgggcgtttgccaattttgtcggtgcgccgggcgcagtttgccatcatcagccgacctgtgggc

SEQ ID NO: 873112 - DNA, 75 bp, synthetic construct
  source 1..75: mol_type = other DNA
gggatgctatgaatagtgaagagcatataattgtttttaattgtgttgggtggcctgatttaggtggtgattcag

SEQ ID NO: 873113 - DNA, 75 bp, synthetic construct
  source 1..75: mol_type = other DNA
caatgtaaccgaagctttaccaagtttagattcagcaattcctacgcatctaaataaagatacaacaatggtatg

SEQ ID NO: 873114 - DNA, 75 bp, synthetic construct
  source 1..75: mol_type = other DNA
ttacaggatatcaaatcagacctgttgttattgaatataaccatcgaggacgagttaaaagtaatttcgctatta

SEQ ID NO: 873115 - DNA, 75 bp, synthetic construct
  source 1..75: mol_type = other DNA
ctctgaaagaaaaacaagggttaattgttgatacttcattatttgattccaagttcaaagagaaatttatcaaca

SEQ ID NO: 873116 - DNA, 75 bp, synthetic construct
  source 1..75: mol_type = other DNA
gttacgaaggcgcgcgtaaggcgctgaccgggctgtctccggacgaaatcgttaatcaggtaaaagacgctggtc

SEQ ID NO: 873117 - DNA, 75 bp, synthetic construct
  source 1..75: mol_type = other DNA
aaatctatcataaatatagggagcagcaagtctttaaaaatctttggattgataagaaatatcagtctgagttta

SEQ ID NO: 873118 - DNA, 75 bp, synthetic construct
  source 1..75: mol_type = other DNA
gaactgccgaacggtcagcgctggaaccctggccacatgtacaaattcaatggccagcagccgcgccgcccgtgg

SEQ ID NO: 873119 - DNA, 75 bp, synthetic construct
  source 1..75: mol_type = other DNA
ctgctgtgcctgcgcgaaagcggcgtgtatgccttcttcacccgcagctctgcggcgaacattccggtgaatatg

SEQ ID NO: 873120 - DNA, 75 bp, synthetic construct
  source 1..75: mol_type = other DNA
gtagaagtgatgcgcgggctggtaatgagcatggtttccaaccccatcgacgcgctgctgaaaggtaactacatc

SEQ ID NO: 873121 - DNA, 75 bp, synthetic construct
  source 1..75: mol_type = other DNA
tgtacgccttcttcacccgcagctctgcggcgaacattccggtgaatatggcgctgtgcgaaaagctgaatctgg

SEQ ID NO: 873122 - DNA, 75 bp, synthetic construct
  source 1..75: mol_type = other DNA
tggcgaagaagtgatgttgcactgggcaaataaggaccagtactacattaaaagcggtgaaaactttgctaatta

SEQ ID NO: 873123 - DNA, 75 bp, synthetic construct
  source 1..75: mol_type = other DNA
ttggctttataaccggtgccagtaacgaacctttcgcagtagatggaccacatctcacggacctggagttggaaa

SEQ ID NO: 873124 - DNA, 75 bp, synthetic construct
  source 1..75: mol_type = other DNA
tattccagcgtttcgctcatggcagcctggtaaagcaaattctggtcggtctcatactggggattcttctggcat

SEQ ID NO: 873125 - DNA, 75 bp, synthetic construct
  source 1..75: mol_type = other DNA
cccggaagctcgccgcattgcgattccgggagtggccttttgtgtaacctgccagcaaatcgccgagctcaaatc

SEQ ID NO: 873126 - DNA, 75 bp, synthetic construct
  source 1..75: mol_type = other DNA
atctatatcagccattcagtggacaacggcgagagttggtcggtgccgcaagcaaccgaattgcccaacaacaat

SEQ ID NO: 873127 - DNA, 75 bp, synthetic construct
  source 1..75: mol_type = other DNA
atggtgaaaaaagcgatagtgacagcgatggctgtaatcagcctctttactctgatgggatgtaataaccgggcc

SEQ ID NO: 873128 - DNA, 75 bp, synthetic construct
  source 1..75: mol_type = other DNA
atgaaatatgatgatgtatcagaattgatgattaagcgtgaacacaatattcttattgttgggaattctgcctcc

SEQ ID NO: 873129 - DNA, 75 bp, synthetic construct
  source 1..75: mol_type = other DNA
ggtaaacaacttattgtcgctgtaagtgaaaaggatgccatcaacttaaaagacaactttgatattattgggatg

SEQ ID NO: 873130 - DNA, 75 bp, synthetic construct
  source 1..75: mol_type = other DNA
gggaagttaacgggtaaggataatattgttgttgtaagttgtcagggaagcgtctgcccctgccatcagccaggt

SEQ ID NO: 873131 - DNA, 75 bp, synthetic construct
  source 1..75: mol_type = other DNA
gaagcaaaagattgtgatgctatttatgaagttcagggcttgaaagaaaaagataaagctaccgataagaaagag

SEQ ID NO: 873132 - DNA, 75 bp, synthetic construct
  source 1..75: mol_type = other DNA
ttatgctcggcattggcagttcccttagtagccacgatgtcatcaccctaatcccggtcctgggcaaccccgtgt

SEQ ID NO: 873133 - DNA, 75 bp, synthetic construct
  source 1..75: mol_type = other DNA
gcgcgatgacaaacagccagtgtggctggacgaatatcgcagcaaaaacggttacgaaggcgcgcgtaaggcgct

SEQ ID NO: 873134 - DNA, 75 bp, synthetic construct
  source 1..75: mol_type = other DNA
tggacaaagtgatctggggcccaaactgggaagaactgctgggcggcgaatttgaaaaacgagcccgcgaccgca

SEQ ID NO: 873135 - DNA, 75 bp, synthetic construct
  source 1..75: mol_type = other DNA
cgagcaccgagcgcgaagttgacctctatgaacgccagtgcgaagtgttcctcgatccacacgatccctcagtga

SEQ ID NO: 873136 - DNA, 75 bp, synthetic construct
  source 1..75: mol_type = other DNA
tggctggcgtttgtgcattagcggttgtccgtacaaaaaatctacttcaactggaaaagcggcaagtcagaaaaa

SEQ ID NO: 873137 - DNA, 75 bp, synthetic construct
  source 1..75: mol_type = other DNA
ggacgtttcagtgcgtgcgcaggtgctgaatctgatgatggatttgcagcaggagttggggctgtcttatgtctt

SEQ ID NO: 873138 - DNA, 75 bp, synthetic construct
  source 1..75: mol_type = other DNA
gtttaaccttgaacgtggcaaaacgctggcagtagtgggcgaatctggctgcggtaaatcgaccctcggtcggtt

SEQ ID NO: 873139 - DNA, 75 bp, synthetic construct
  source 1..75: mol_type = other DNA
aacaaccgctgttgcaggctatcgacctgaaaaaacattatccggtgaagaaaggcatgttcgcgccggaacgtc

SEQ ID NO: 873140 - DNA, 75 bp, synthetic construct
  source 1..75: mol_type = other DNA
attatcagcacgacttatattcagcaaacagggctttccccggtgcatgacagcgtttttattgaagataaaaat

SEQ ID NO: 873141 - DNA, 75 bp, synthetic construct
  source 1..75: mol_type = other DNA
ggacgtctcggtgcgtgcacaggtgctcaacctgatgatggatttgcagcaggaactggggctttcttatgtctt

SEQ ID NO: 873142 - DNA, 75 bp, synthetic construct
  source 1..75: mol_type = other DNA
cctgaacccggacgatcgccgcgagcgcatcaagctcaccggtgaactgccaagcccgctcaatccaccgccggg

SEQ ID NO: 873143 - DNA, 75 bp, synthetic construct
  source 1..75: mol_type = other DNA
gatgttagcgcttaacgtcaatattcctttcagccactggctgcgttctgacagtaaatctcagtggcgacatgc

SEQ ID NO: 873144 - DNA, 75 bp, synthetic construct
  source 1..75: mol_type = other DNA
tgacttgcaggtaacgattaaagaggctgacggcagcacgcagatctttaccgtaccctattcgtcagtcccgct

SEQ ID NO: 873145 - DNA, 75 bp, synthetic construct
  source 1..75: mol_type = other DNA
agtgaacaagggattgttccctgcctgacacgcgcgcaacttgcaagtatggagctgaatacggcttctgtctcc

SEQ ID NO: 873146 - DNA, 75 bp, synthetic construct
  source 1..75: mol_type = other DNA
tcccaaagttgatgtggcgattatcagcaccacttacattcagcagaccgggctttctccggtgcacgacagcgt

SEQ ID NO: 873147 - DNA, 75 bp, synthetic construct
  source 1..75: mol_type = other DNA
tcaggctcgttatagtgggcttgcatctgctgaagctacaggcgggcttgggtcaacggctactggaaatatgct

SEQ ID NO: 873148 - DNA, 75 bp, synthetic construct
  source 1..75: mol_type = other DNA
atagcgttgtgggtggcatcactggcgctaataaggccgccgatgctcagataggcgcggcgaaagactctaacc

SEQ ID NO: 873149 - DNA, 75 bp, synthetic construct
  source 1..75: mol_type = other DNA
gcatccccgacgtttgaactgttttatcaggagtatcagtctctggtattaaaatctgtttttaaactggaaccg

SEQ ID NO: 873150 - DNA, 75 bp, synthetic construct
  source 1..75: mol_type = other DNA
gacagcgtaaccatcggtaatacccaggcgatgcgcgccgcgcaaggtactggcgtgaaggttattaaacggaag

SEQ ID NO: 873151 - DNA, 75 bp, synthetic construct
  source 1..75: mol_type = other DNA
tccgtcgctgtattacccgattcaccgcacgccagagagatggcgaccaaagcgcataacagcggtcacgaagtg

SEQ ID NO: 873152 - DNA, 75 bp, synthetic construct
  source 1..75: mol_type = other DNA
gtggcaaaagagaaatatggcctcgatgttgaactggtaggatttagcggttcgttgctaccgaacgatgcgaca

SEQ ID NO: 873153 - DNA, 75 bp, synthetic construct
  source 1..75: mol_type = other DNA
taataaaatgttatcggaatcattccggtatttgccctcaaccagaaataacacgtatccagaatggatctaatt

SEQ ID NO: 873154 - DNA, 75 bp, synthetic construct
  source 1..75: mol_type = other DNA
ggtgctggcgatgccttccgctatctccgtcgctgtattacccgattcaccgcacgccagagagatggcgaccaa

SEQ ID NO: 873155 - DNA, 75 bp, synthetic construct
  source 1..75: mol_type = other DNA
aacactgtgcccgacacaccgcgtaatccgttccgtggcgtgaagctctgcaaaccgaagaaaccgctggaacct

SEQ ID NO: 873156 - DNA, 75 bp, synthetic construct
  source 1..75: mol_type = other DNA
atgaagtatgttgatggttttgtggttgccgttcctgccgataaaaaggatgcctatcgggaaatggccgctaag

SEQ ID NO: 873157 - DNA, 75 bp, synthetic construct
  source 1..75: mol_type = other DNA
ggtctggctgagtgaagctgatgccaaagagctgggtatcgccgataacgactggattgaagtcttcaacagcaa

SEQ ID NO: 873158 - DNA, 75 bp, synthetic construct
  source 1..75: mol_type = other DNA
agtttatgctcaagtacctgctggggacggagcacggtatccagggtaaagatctggggcagcagggcggcgtga

SEQ ID NO: 873159 - DNA, 75 bp, synthetic construct
  source 1..75: mol_type = other DNA
ccttggtcgcgcgcttttactgttgcaaaaagagaagctaattactctgaaagagggaaaagggttattacctac

SEQ ID NO: 873160 - DNA, 75 bp, synthetic construct
  source 1..75: mol_type = other DNA
aaaatcaaaaccgtggcgcaaataaaagaaggcgcgacagtggcgatccccaacgacccgaccaaccttggtcgc

SEQ ID NO: 873161 - DNA, 75 bp, synthetic construct
  source 1..75: mol_type = other DNA
tttaccggccgtgaccatacgcatctggcgctgaataaagaagacgagaagattcgcttccgcgatattcaggca

SEQ ID NO: 873162 - DNA, 75 bp, synthetic construct
  source 1..75: mol_type = other DNA
atgcgtacaattagctacatcgaagcgcgtcagaatttgtcggtaacaatgatgaaagccgttgaagatcatgcg

SEQ ID NO: 873163 - DNA, 75 bp, synthetic construct
  source 1..75: mol_type = other DNA
taacagtatgcagggtgatattcgctttgctgatgtgctggaaaaaatgggcgcgaccatttgctggggcgatga

SEQ ID NO: 873164 - DNA, 75 bp, synthetic construct
  source 1..75: mol_type = other DNA
gggatttttgtttatggccctggtcggagcgttgttaggtggtattgcgtggtacacccgaccacgacccgtgcg

SEQ ID NO: 873165 - DNA, 75 bp, synthetic construct
  source 1..75: mol_type = other DNA
tatggccctggttggggcgttattaggcggcattgcctggtatacccgcccgcggcctgtacgtagcagacgcta

SEQ ID NO: 873166 - DNA, 75 bp, synthetic construct
  source 1..75: mol_type = other DNA
cgccatatgctgaatgcattagcagcgttaggggtaagctatacgctttcagccgatcgtacgcgttgcgaaatt

SEQ ID NO: 873167 - DNA, 75 bp, synthetic construct
  source 1..75: mol_type = other DNA
cgatcgcctgtttgcgatggcaacagaactgcgtaaagtcggtgcggaagtagaagagggcacgattacattcgt

SEQ ID NO: 873168 - DNA, 75 bp, synthetic construct
  source 1..75: mol_type = other DNA
tctataactggcgtgttaaagagaccgatcgcctgtttgcgatggcaacagaactgcgtaaagtcggcgcggaag

SEQ ID NO: 873169 - DNA, 75 bp, synthetic construct
  source 1..75: mol_type = other DNA
tgtagaggatgtttttattcagaacagattctggacaatatctgtccagtcatttcttaatggacacagaaatat

SEQ ID NO: 873170 - DNA, 75 bp, synthetic construct
  source 1..75: mol_type = other DNA
tgtcggggtgcgtaacgagctgtggatcctgccaaccgtgggctgtgtcaacggcatcgcgcggcagatccagaa

SEQ ID NO: 873171 - DNA, 75 bp, synthetic construct
  source 1..75: mol_type = other DNA
acgcgttcatttcatgatctgccaacagcaggatgatgagatcgaggccgggatcgagcatttgcatcagctgta

SEQ ID NO: 873172 - DNA, 75 bp, synthetic construct
  source 1..75: mol_type = other DNA
atgattgatgaatttcatgtgatgtatatgtataaaaaaatccaagcggaagccgcaaccactgacatcaaaaca

SEQ ID NO: 873173 - DNA, 75 bp, synthetic construct
  source 1..75: mol_type = other DNA
atgacctgttttgaaactactgaccgtaacaacggcatcaaagagttgcaggaaggtgtagaagaaaacatccgt

SEQ ID NO: 873174 - DNA, 75 bp, synthetic construct
  source 1..75: mol_type = other DNA
agaaagtagctccggagccatatctggtggaagcgcatattggtgctcacgcgccgtttaccgtgccggatgccg

SEQ ID NO: 873175 - DNA, 75 bp, synthetic construct
  source 1..75: mol_type = other DNA
agaatgcgcgcagacttatggactcaatagaaagcctgaaaagtggtaatggtgtggaaagggaaatcattgagt

SEQ ID NO: 873176 - DNA, 75 bp, synthetic construct
  source 1..75: mol_type = other DNA
gatacgccagcaggtagcgaatggctggagagcgtgcgggcttatgagaaagaaattttgagtcgccgcgggtaa

SEQ ID NO: 873177 - DNA, 75 bp, synthetic construct
  source 1..75: mol_type = other DNA
gacgacagcattcgccagttctggattgatcactgcaaggccagccgtcgcgtttcggcctattttggcgagcaa

SEQ ID NO: 873178 - DNA, 75 bp, synthetic construct
  source 1..75: mol_type = other DNA
gggatcacctattcaggtcatgtgcatcacgataacggtgaaggcagcaaaacgggaggaccagagaatggctga

SEQ ID NO: 873179 - DNA, 75 bp, synthetic construct
  source 1..75: mol_type = other DNA
gccaatggtggtgatctgcaagtaaccataaaagaggcagacggcagtattcagacattatatgttccttattcg

SEQ ID NO: 873180 - DNA, 75 bp, synthetic construct
  source 1..75: mol_type = other DNA
gcgaattcccttgcagataatgttgaactggatgaaaccgtagtcactgtcatcccaactcacggtgctattgcc

SEQ ID NO: 873181 - DNA, 75 bp, synthetic construct
  source 1..75: mol_type = other DNA
cacagcaactaatgacgcctgtactaaaacctctgttgggcattccgggcatctgttcgctggcgctgatagcca

SEQ ID NO: 873182 - DNA, 75 bp, synthetic construct
  source 1..75: mol_type = other DNA
atgaaagtatgaccgttgacacacccagaaccacgtttaccggcgacgttgagatccagaaaggcctcagcgtta

SEQ ID NO: 873183 - DNA, 75 bp, synthetic construct
  source 1..75: mol_type = other DNA
gaacctgtaagccaaacttgcaagttgcctcccagatcatccaacgaagttaacgacgcggcatggaaattacac

SEQ ID NO: 873184 - DNA, 75 bp, synthetic construct
  source 1..75: mol_type = other DNA
gaaaggttgcttctatgaggcattaaaggtcgcaatgcgcaactatccggtaattccggatagttggataagctg

SEQ ID NO: 873185 - DNA, 75 bp, synthetic construct
  source 1..75: mol_type = other DNA
gacgttgaacgtccccagcagtacgggcaaatcagcgttcccctgccgggcgcggaagtttttctggcctgcgct

SEQ ID NO: 873186 - DNA, 75 bp, synthetic construct
  source 1..75: mol_type = other DNA
gcggttattgccgggatcacctattccggtcatgtgcatcatgataacggcgaaggcagtaagacaggagtgccg

SEQ ID NO: 873187 - DNA, 75 bp, synthetic construct
  source 1..75: mol_type = other DNA
ccggatcatcgtgacctgtaagacgctggaaatttatgccgatgaaagtgttcaggtggatacgccggaagccac

SEQ ID NO: 873188 - DNA, 75 bp, synthetic construct
  source 1..75: mol_type = other DNA
agtatactctgggggaaggtccagtcatcggtaatgctcgctgggtggttgattcacattttgatgttgtattgg

SEQ ID NO: 873189 - DNA, 75 bp, synthetic construct
  source 1..75: mol_type = other DNA
ggtcagatagaggatctataccaggataataaaaatggaaaatatcatcttacattatatgataatggattgact

SEQ ID NO: 873190 - DNA, 75 bp, synthetic construct
  source 1..75: mol_type = other DNA
ttgatgaacatttcagatttacatccagtctgtctttagattcacctgatggccagatagagaatctgtatcatg

SEQ ID NO: 873191 - DNA, 75 bp, synthetic construct
  source 1..75: mol_type = other DNA
ttttttttgcactggagttatcaggagttgcggtgcacatgggatcgtgcgatatgccggatggtgaaaggttgg

SEQ ID NO: 873192 - DNA, 75 bp, synthetic construct
  source 1..75: mol_type = other DNA
acgtgccaaaggtttttcccgtggcattgaagagatccagctgaccgttacggtagttatcccggaatccggcga

SEQ ID NO: 873193 - DNA, 75 bp, synthetic construct
  source 1..75: mol_type = other DNA
aatccagcacaacagcaagaagaggaagtgcaaccggcggcacaagaaacgcctaaaattgttgctgacttcctt

SEQ ID NO: 873194 - DNA, 75 bp, synthetic construct
  source 1..75: mol_type = other DNA
aatcatatttaggcgatatccttaaatttaaaatatatctgataattcattccagcaataatgataatcaaatga

SEQ ID NO: 873195 - DNA, 75 bp, synthetic construct
  source 1..75: mol_type = other DNA
gtatgactcttaatgaacatgatttagtgatagccccacttaacaccgaagttccattctacattgcaggccatc

SEQ ID NO: 873196 - DNA, 75 bp, synthetic construct
  source 1..75: mol_type = other DNA
accaacaatggaacgctgactgccggtaaaggcaacagtgttttcagcgcacagcgtcttttccttaacgcaccg

SEQ ID NO: 873197 - DNA, 75 bp, synthetic construct
  source 1..75: mol_type = other DNA
atgaaaataataggctgggttttaatcttgctcttgggtctggaacagaaaatcataaagaacgctacttttgta

SEQ ID NO: 873198 - DNA, 75 bp, synthetic construct
  source 1..75: mol_type = other DNA
gttagatccttggccgggcttgagcagttactctcgtcaatctatcaaatcagcgtgtcgattaatccttttcgt

SEQ ID NO: 873199 - DNA, 75 bp, synthetic construct
  source 1..75: mol_type = other DNA
cgtgtgttattgaaaaaaattctgaaacccgataaacgtattgatgacgttgttgatgaacatttcagattcaca

SEQ ID NO: 873200 - DNA, 75 bp, synthetic construct
  source 1..75: mol_type = other DNA
tcaatgaacccgaagaagctcgcctaatggcgggcttttttcgttctacgctctccgacgaaagatcgcaagtga

SEQ ID NO: 873201 - DNA, 75 bp, synthetic construct
  source 1..75: mol_type = other DNA
atactgtttggaaaaatagcccggattatgaaggagtaaaaattcctttggatcccgtaatggatgctgcgacag

SEQ ID NO: 873202 - DNA, 75 bp, synthetic construct
  source 1..75: mol_type = other DNA
cttagccgctgaaaaaacacaggatttagatggcgctaagtttggtgaggattggccgttaacttttgaaaaagc

SEQ ID NO: 873203 - DNA, 75 bp, synthetic construct
  source 1..75: mol_type = other DNA
ccatttattatttatgttattgaccatattcagaacaactttgaaagattcactgtccaagaaggaaatagtggt

SEQ ID NO: 873204 - DNA, 75 bp, synthetic construct
  source 1..75: mol_type = other DNA
tggaaatgctgcgccgacagattgccagcgtgggctgcatcaaaggcccgttatcgctggcgctgatgcgcaagc

SEQ ID NO: 873205 - DNA, 75 bp, synthetic construct
  source 1..75: mol_type = other DNA
atttatgtggtgttgaagttctggcacgctggaatatgccggatggcagagtgttatctcccgatttttttattt

SEQ ID NO: 873206 - DNA, 75 bp, synthetic construct
  source 1..75: mol_type = other DNA
cagttacaacccgtggcggagggaatactcccttttattgaggataattttgctacacttatgaccgggcaactt

SEQ ID NO: 873207 - DNA, 75 bp, synthetic construct
  source 1..75: mol_type = other DNA
aaatggatacctctcaattgcgtgaactggcaaattgcctccagcatgatatttttaatattcaacttgtggcca

SEQ ID NO: 873208 - DNA, 75 bp, synthetic construct
  source 1..75: mol_type = other DNA
ttgatcaatgcagctgcaaatgcctggcatttacctgcccccttacttgctggagtttgttggattgaagtaggg

SEQ ID NO: 873209 - DNA, 75 bp, synthetic construct
  source 1..75: mol_type = other DNA
acccgtcacgccaccacataccgggaactgccgccaaggtctaactcaaccaatctagccgcgctacatacggtt

SEQ ID NO: 873210 - DNA, 75 bp, synthetic construct
  source 1..75: mol_type = other DNA
actgccagaagcatttattcaatggctggatcaggctaacagcttctgttctacgctggtggaccgtatcgttac

SEQ ID NO: 873211 - DNA, 75 bp, synthetic construct
  source 1..75: mol_type = other DNA
gactacgatgaattcctgaagctggcgcacaatccggaaatgcgtttcgtcttctctaacaccaccgaagcgggc

SEQ ID NO: 873212 - DNA, 75 bp, synthetic construct
  source 1..75: mol_type = other DNA
cacctgacgaaagagcagataagaattattggtgcccgttataaccggggtatgtcgcttactctggagaaaata

SEQ ID NO: 873213 - DNA, 75 bp, synthetic construct
  source 1..75: mol_type = other DNA
aaaaaatagaatctgactggcagaagtataaaaaaatcattgataaagacgtcaaaacgctggtaagcgtcaacg

SEQ ID NO: 873214 - DNA, 75 bp, synthetic construct
  source 1..75: mol_type = other DNA
gcgcagacggaggaagtgagcgtgccgctggcctcgctgattaagtcaccactgaatgtgcgcacggtgccgtat

SEQ ID NO: 873215 - DNA, 75 bp, synthetic construct
  source 1..75: mol_type = other DNA
ctgcaccagcagaaataatatcaaggatgagtattattccaacatcagtgtctagagctctattcccccgactta

SEQ ID NO: 873216 - DNA, 75 bp, synthetic construct
  source 1..75: mol_type = other DNA
ggcatttcttatatttatgttacccaacatatcgggatgatgaagcatatcagcgaccaggttctggtcatgcat

SEQ ID NO: 873217 - DNA, 75 bp, synthetic construct
  source 1..75: mol_type = other DNA
atgaaataccacgtcagtgtgtgactcctggtgattatgttcttcatgaaggccggacatatattgcctcggcaa

SEQ ID NO: 873218 - DNA, 75 bp, synthetic construct
  source 1..75: mol_type = other DNA
tcttcctcggtcgtgtatggtttacctgtaaaggcggagtcatggtgatgactaagaaaataaaatgtgcttatc

SEQ ID NO: 873219 - DNA, 75 bp, synthetic construct
  source 1..75: mol_type = other DNA
caagccgaagaactacgatcaggttccggcgaacaaacccattgttgatgcgatcaaagcgaaaaaacaggaccc

SEQ ID NO: 873220 - DNA, 75 bp, synthetic construct
  source 1..75: mol_type = other DNA
tcagtgccgatgccgcaggcatcattttgacttcccttgtgattaaccgccagttgtggctgtaccacgacagcg

SEQ ID NO: 873221 - DNA, 75 bp, synthetic construct
  source 1..75: mol_type = other DNA
atggcgaccgttttcatcatggtcaacggtgaaaactggtttgaccgcactgtgagtgctgatgccgcaggtatc

SEQ ID NO: 873222 - DNA, 75 bp, synthetic construct
  source 1..75: mol_type = other DNA
ccgttatgtgaggcatcggtggcaaaggaggcgaaaaagaagaagacgctgaacaaagatcagatgatccaggtt

SEQ ID NO: 873223 - DNA, 75 bp, synthetic construct
  source 1..75: mol_type = other DNA
catgggaagaattgcttgaggagtacttcttcgcccgaaacctgcgtgctgcaacagaatggagttacgcaaagg

SEQ ID NO: 873224 - DNA, 75 bp, synthetic construct
  source 1..75: mol_type = other DNA
gtatcaaccacaatgggatatgtggagatgaatctggagactgccgcacaggcactggagcatgaactggaggtg

SEQ ID NO: 873225 - DNA, 75 bp, synthetic construct
  source 1..75: mol_type = other DNA
ttcagcggaatgctggatgcaccccagcaggacgggaaaatgtcctggctggtgacgttcacactggcggaacat

SEQ ID NO: 873226 - DNA, 75 bp, synthetic construct
  source 1..75: mol_type = other DNA
gacttacgggtattacaaattaatgcgcagcatcaagggttccatgaagaggatggtgttccgagtgatgccagc

SEQ ID NO: 873227 - DNA, 75 bp, synthetic construct
  source 1..75: mol_type = other DNA
attatggcaaggacttgccatctcattaaaaaacacatccgctactgaaggccagttacttaaccttgttggcac

SEQ ID NO: 873228 - DNA, 75 bp, synthetic construct
  source 1..75: mol_type = other DNA
cagatcaaatcatgatggagacacaaagcaaggcaatgcaggccagcacaacggcaagtgcggtagccgctcagg

SEQ ID NO: 873229 - DNA, 75 bp, synthetic construct
  source 1..75: mol_type = other DNA
gaaatggtggctattggctcccagtcttccggcgcgctggagttactccctgccaatgattatggtgacgactgg

SEQ ID NO: 873230 - DNA, 75 bp, synthetic construct
  source 1..75: mol_type = other DNA
gcacaagaaggggaaattccagaagcgcatcggactcaggaaacggcgatttggagcggcgctctggcaagcagt

SEQ ID NO: 873231 - DNA, 75 bp, synthetic construct
  source 1..75: mol_type = other DNA
gatgactctatgagtctgatgggctggtcactacctacatcaggaccaaaagagaggaaaagattattgcatcct

SEQ ID NO: 873232 - DNA, 75 bp, synthetic construct
  source 1..75: mol_type = other DNA
aaaaagacaagaaatctgaagctgatcggcttggtgatgaaggcataaaagtatccgaccagtacaacaaagacg

SEQ ID NO: 873233 - DNA, 75 bp, synthetic construct
  source 1..75: mol_type = other DNA
gacaaaccgaaaaaacagaaaaaagagaagaaatctgaagctgatcgtcttggcgataaaggtataagcgtttct

SEQ ID NO: 873234 - DNA, 75 bp, synthetic construct
  source 1..75: mol_type = other DNA
aggatgaggctgacgatggcaagatcaccggattcgatcagccagtcggtaagcctaaaaaagggaaaaagggca

SEQ ID NO: 873235 - DNA, 75 bp, synthetic construct
  source 1..75: mol_type = other DNA
atcttttcggtgtatcagatggcgtagtctcagctatcgacttgatcacaaaaggagttaatgggctaggtgagg

SEQ ID NO: 873236 - DNA, 75 bp, synthetic construct
  source 1..75: mol_type = other DNA
gcttatcgacctgggcgctaccgaagcgcaacagaaacaggcattgttagcctatgagcaacagatccgcgatct

SEQ ID NO: 873237 - DNA, 75 bp, synthetic construct
  source 1..75: mol_type = other DNA
gaattcatcgacatgtttgatgatgtggctgtgaaggctggcgaggtggcagagaagatcatcgcaatggtgacg

SEQ ID NO: 873238 - DNA, 75 bp, synthetic construct
  source 1..75: mol_type = other DNA
ctgttatagattctgttattaaaaaaagtgatattataatttgtggtttaggaacccctgcgcaggaagaattgg

SEQ ID NO: 873239 - DNA, 75 bp, synthetic construct
  source 1..75: mol_type = other DNA
aggattaatcggttctaaggattatgaaatagagcaagctgtaaagaatattagaaaaaaacatccgggaattga

SEQ ID NO: 873240 - DNA, 75 bp, synthetic construct
  source 1..75: mol_type = other DNA
ccattaacggttcacaactttatggtgttagtgactacattgccgatgctctgggcgggaatgctgtggtgaaca

SEQ ID NO: 873241 - DNA, 75 bp, synthetic construct
  source 1..75: mol_type = other DNA
agaccaataccgatggtgtagatgccagcgcgcagggtaaagatagcgtcgcgattggttctggttccattgctg

SEQ ID NO: 873242 - DNA, 75 bp, synthetic construct
  source 1..75: mol_type = other DNA
ggtttcccagaatacccagagcattactaacctgaacaatcaggtcactaatctggatactcgcgttactaatat

SEQ ID NO: 873243 - DNA, 75 bp, synthetic construct
  source 1..75: mol_type = other DNA
ggaccaaatcaaaggcaaatacagcgccgttcatggtagctcaacgaccagcgtaatcactgatgtggcgaacgg

SEQ ID NO: 873244 - DNA, 75 bp, synthetic construct
  source 1..75: mol_type = other DNA
ccgtagcagacgaagaaaacaccatctctgtgggttcttctaccaaccagcgtcgtatcaccaacgttgctgccg

SEQ ID NO: 873245 - DNA, 75 bp, synthetic construct
  source 1..75: mol_type = other DNA
accaaatactatcacgccaactcaacggctgaagactcactggcagtcggtgaagactcgctggcaatgggcgcg

SEQ ID NO: 873246 - DNA, 75 bp, synthetic construct
  source 1..75: mol_type = other DNA
caaggtagcagcagctccgttgataccggcattgccttgggtagcagctccgtttccagtcgcgtgattgttaaa

SEQ ID NO: 873247 - DNA, 75 bp, synthetic construct
  source 1..75: mol_type = other DNA
gatgacggtaaatatcgtcaaatcatcaacgtagccgatggttccgaagcccatgacgccgttacggttcgccag

SEQ ID NO: 873248 - DNA, 75 bp, synthetic construct
  source 1..75: mol_type = other DNA
gtagcagttctgtttccagccgtgtaatagttaaaggttctcgtgacaccagcgtgtcggaagaaggtgttgtga

SEQ ID NO: 873249 - DNA, 75 bp, synthetic construct
  source 1..75: mol_type = other DNA
gcgaagttgatacgggtatcgctctgggtagcagttccgtttccagccgtgtaatagttaaagggactcgtaaca

SEQ ID NO: 873250 - DNA, 75 bp, synthetic construct
  source 1..75: mol_type = other DNA
ataaaactgccagtgtaatcactaacgtcgctaacggtgcaatctctgctgccagcagcgacgcgattaacggct

SEQ ID NO: 873251 - DNA, 75 bp, synthetic construct
  source 1..75: mol_type = other DNA
tgttgacgctggctgcagttaatacgctgggtattccggttgatctgcccacagcgctgctgttgagcgtagtgg

SEQ ID NO: 873252 - DNA, 75 bp, synthetic construct
  source 1..75: mol_type = other DNA
gcgggcgcagcaatcactattaccgtgttgacgctggctgcggttaatacgctgggtatcccacggcgctgctgt

SEQ ID NO: 873253 - DNA, 75 bp, synthetic construct
  source 1..75: mol_type = other DNA
cgagcatttcgggaaaaccaacaacctttctgattttggaccgaaacaagtagttgagttcggcggcggcaccgg

SEQ ID NO: 873254 - DNA, 75 bp, synthetic construct
  source 1..75: mol_type = other DNA
gtcttcagctttgccttcccttctaccctgcacttatccagtagcgcgggtgatatttcgccgccgtcaggcatt

SEQ ID NO: 873255 - DNA, 75 bp, synthetic construct
  source 1..75: mol_type = other DNA
gggcagaaaaccaatatccgccctattttgttcctctatctgctgggcaccttctctgctgctctggccgcagta

SEQ ID NO: 873256 - DNA, 75 bp, synthetic construct
  source 1..75: mol_type = other DNA
gggattctggtgtgggctattggcctcggtttcgcgctgcgtcacggtaacgaaaccaccaaaaacctggtcaat

SEQ ID NO: 873257 - DNA, 75 bp, synthetic construct
  source 1..75: mol_type = other DNA
atgaatacatttaaaaataaaaatactgaaatcttttatgttgtgtccttgcatatctacgctgatctttttaac

SEQ ID NO: 873258 - DNA, 75 bp, synthetic construct
  source 1..75: mol_type = other DNA
cgaatatgatgattgagcagaacacccaaattatcaatcagctcgctggtaacaccgacgcaacctatattcaag

SEQ ID NO: 873259 - DNA, 75 bp, synthetic construct
  source 1..75: mol_type = other DNA
gcagaagtcaacgctgacggcaccatcaccgcaccgacttacaccattgcgaacgccgagtacaacaacgtcggt

SEQ ID NO: 873260 - DNA, 75 bp, synthetic construct
  source 1..75: mol_type = other DNA
tccgcatgaaaatgacggaagagatcaggaatatagcagataaaaaaacttatgaagtgctatggatggttggca

SEQ ID NO: 873261 - DNA, 75 bp, synthetic construct
  source 1..75: mol_type = other DNA
tgattataacgcatgtaatggatcatgagtttgtctgtaagctaatcgatctggcgatgagaaatgctgagaagc

SEQ ID NO: 873262 - DNA, 75 bp, synthetic construct
  source 1..75: mol_type = other DNA
gccctgcttcatcagtttatattgccagagccatacacgcctttcttttcagtattattatctttatttattatt

SEQ ID NO: 873263 - DNA, 75 bp, synthetic construct
  source 1..75: mol_type = other DNA
tggagtggcgtagtagatttcttggtgcattaaactgtattaataaattgtttggtaaaaaagcatttagaattc

SEQ ID NO: 873264 - DNA, 75 bp, synthetic construct
  source 1..75: mol_type = other DNA
tatcaccgtgaatgagattgaactgacgatgaactcgttaattgtccgcatgggcccacaacacttttcggttct

SEQ ID NO: 873265 - DNA, 75 bp, synthetic construct
  source 1..75: mol_type = other DNA
tctcgcccgttcggtgccgttctacgccgctaatcaaccgctggccgatatcagcgagatgcgcgtggtgcaggg

SEQ ID NO: 873266 - DNA, 75 bp, synthetic construct
  source 1..75: mol_type = other DNA
gcaaattgcggtcaccctgcgtgacgcacaggcttgctttaacctgaatgcccttgctcagccgacaacggcgtc

SEQ ID NO: 873267 - DNA, 75 bp, synthetic construct
  source 1..75: mol_type = other DNA
gaatggcactggtcgtggtgctggtattgctggcggtcatgatgctggtaaccatcacgctttccgggcggatgc

SEQ ID NO: 873268 - DNA, 75 bp, synthetic construct
  source 1..75: mol_type = other DNA
tcagcgagatgcgcgtggtgcagggaatggacgccggactttatcaaaaactgaaaccgctggtttgtgcgctgc

SEQ ID NO: 873269 - DNA, 75 bp, synthetic construct
  source 1..75: mol_type = other DNA
tctcgcccgttcggtgcctttctacgccgcgaatcaaccgctggccgatatcagcgagatgcgcgtggtgcaggg

SEQ ID NO: 873270 - DNA, 75 bp, synthetic construct
  source 1..75: mol_type = other DNA
taaagtttttatatgtggcaaaccagccgcacgaatgggtgatatctgttctcatggaggaacaattgttagcgg

SEQ ID NO: 873271 - DNA, 75 bp, synthetic construct
  source 1..75: mol_type = other DNA
acccaggcactttgtaccggggcaatggatgtcgtcattctgggaagttttaaagtttttatatgcggcaaaccg

SEQ ID NO: 873272 - DNA, 75 bp, synthetic construct
  source 1..75: mol_type = other DNA
atgcctcaacccgctgcaagagttactgatatgcatgtatgtcctatggtgacgccaggtttgccacctgttcct

SEQ ID NO: 873273 - DNA, 75 bp, synthetic construct
  source 1..75: mol_type = other DNA
ccgctgcgcgatggcattccagtgttgctggaaacggaagcccgcgtgctgactgctgatgagagtaaatcatga

SEQ ID NO: 873274 - DNA, 75 bp, synthetic construct
  source 1..75: mol_type = other DNA
atgaacgagacagaattaaaacacgttatcgctctactcctggaagatgcaaaacgcctccagcaactggagcca

SEQ ID NO: 873275 - DNA, 75 bp, synthetic construct
  source 1..75: mol_type = other DNA
gaacagcctgccgccttatggcatggagcttttcaaaaaactggtaaaaacggtacacaaccattacgacgacat

SEQ ID NO: 873276 - DNA, 75 bp, synthetic construct
  source 1..75: mol_type = other DNA
tgcacggcggggtgattgcgtcggcgctggatgtcgccgctggcctggtatgtgtaggcagcactttaacgcgtc

SEQ ID NO: 873277 - DNA, 75 bp, synthetic construct
  source 1..75: mol_type = other DNA
atattcgcgccagcgaacgtcgggtttatttacgggtgcgagagatctttgcgttagccgccgactatcaaccat

SEQ ID NO: 873278 - DNA, 75 bp, synthetic construct
  source 1..75: mol_type = other DNA
ccccggcaggcgaatttgttatgtttgccagcgatgacggtgaagttcgtgttgaatgccgctttgagcaagaga

SEQ ID NO: 873279 - DNA, 75 bp, synthetic construct
  source 1..75: mol_type = other DNA
ggctgaactgtacgataaagatgttcgcactattaacgaacatttaatcaatatattttccgaaggtgaacttgt

SEQ ID NO: 873280 - DNA, 75 bp, synthetic construct
  source 1..75: mol_type = other DNA
tgagtcgattacttctggcacttcggcgacgcaatcggttcattatcgtattagcacaatgaaaaatttcattga

SEQ ID NO: 873281 - DNA, 75 bp, synthetic construct
  source 1..75: mol_type = other DNA
ccggatgaagtcgacgtcgccactgtggtgaaagtgattgatacgtgcccgagtggcgcgctgaaataccgtcat

SEQ ID NO: 873282 - DNA, 75 bp, synthetic construct
  source 1..75: mol_type = other DNA
atgacaataagtattgtttcaccttccgcagcggctgtaaagccccgtcgtcatacccgtttcagacgcgaagac

SEQ ID NO: 873283 - DNA, 75 bp, synthetic construct
  source 1..75: mol_type = other DNA
ttgttattaattgcccgtatcgccgtggtcttaattttcattatttttggttttcccaaaatgatgggctttgac

SEQ ID NO: 873284 - DNA, 75 bp, synthetic construct
  source 1..75: mol_type = other DNA
caaatatgattaatttctggaagaatgtcagtatcgctggcgcattcctgctgctggcaattaccgggccggggg

SEQ ID NO: 873285 - DNA, 75 bp, synthetic construct
  source 1..75: mol_type = other DNA
ctttaccagaatttcgtcgttggttccgtcatgagtacctacctactaaattcccaaattacattcttggtaaag

SEQ ID NO: 873286 - DNA, 75 bp, synthetic construct
  source 1..75: mol_type = other DNA
ccccagcaggcgagtttattatgtttgccagcggtgacggaagagtgcgtgttgaatgtcgctttgagtcagaca

SEQ ID NO: 873287 - DNA, 75 bp, synthetic construct
  source 1..75: mol_type = other DNA
agtacaatatatggcctcactgggcgcaccgatgccaatgctggcagcaattattgcggtcattatggaagtgcc

SEQ ID NO: 873288 - DNA, 75 bp, synthetic construct
  source 1..75: mol_type = other DNA
gtgcccgccgcgatattaatcgtgcttggctttttcacccgtccgctggcggtgctgtttattttctacacgctg

SEQ ID NO: 873289 - DNA, 75 bp, synthetic construct
  source 1..75: mol_type = other DNA
tttaattttaaagaccttcctggcccgttaaaaaatgcattaagcaacagtaatatatcaaccactgcagtgtcg

SEQ ID NO: 873290 - DNA, 75 bp, synthetic construct
  source 1..75: mol_type = other DNA
atgcttcctgccgcactgcgtcccgtcaggccgggcattccatggcagaaggttatagcgtctgttattgccctg

SEQ ID NO: 873291 - DNA, 75 bp, synthetic construct
  source 1..75: mol_type = other DNA
gtctgccgggaaccatcttcaacacggtcagagtggcagcgtcaaaccagcttgccagcgcgaccagtaatgcag

SEQ ID NO: 873292 - DNA, 75 bp, synthetic construct
  source 1..75: mol_type = other DNA
aacacaacttcctgctgatgcttgctgagcaactgattcgtgaaccggacagcgtcgtggctcccctgtcggtga

SEQ ID NO: 873293 - DNA, 75 bp, synthetic construct
  source 1..75: mol_type = other DNA
ccgttccgggtatctctggtaaatatggtgtccagctaaacattgtaaaaccagatattcatcctacatcaggta

SEQ ID NO: 873294 - DNA, 75 bp, synthetic construct
  source 1..75: mol_type = other DNA
cgttaaaaaatgcattaagcaacagtaatatatcaaccactgcagtgtcgactattgcatctgctgcaacatctg

SEQ ID NO: 873295 - DNA, 75 bp, synthetic construct
  source 1..75: mol_type = other DNA
attatgagcgcatttcgccatatggtgctgccggtgataactctgtcggtagcgccaaccaccgaagtgatccgc

SEQ ID NO: 873296 - DNA, 75 bp, synthetic construct
  source 1..75: mol_type = other DNA
ccagcattaacggacaaccgatagccgaacagttaaaagaggtttttccggcaacgattgagctatgcatcctcg

SEQ ID NO: 873297 - DNA, 75 bp, synthetic construct
  source 1..75: mol_type = other DNA
gctcccttacgctgggctggctgccggtttcaggtcgcttcgacctgctttatgaagtgaaacctgtcaccggtt

SEQ ID NO: 873298 - DNA, 75 bp, synthetic construct
  source 1..75: mol_type = other DNA
cggactcggacaggagtggtatggcttcggacagactgtctttgttcgcccgatggagcaggcgtggcagcaggt

SEQ ID NO: 873299 - DNA, 75 bp, synthetic construct
  source 1..75: mol_type = other DNA
gatatgaccggtgatacagatgtctcccgcctcttttttacggatgaagtggtccccggtatgtttacccgccag

SEQ ID NO: 873300 - DNA, 75 bp, synthetic construct
  source 1..75: mol_type = other DNA
tgtatgaccagaactatgtgaaagcggcggcgacccgtggtttgtcacgctttactattttgcgtcgccatgtgc

SEQ ID NO: 873301 - DNA, 75 bp, synthetic construct
  source 1..75: mol_type = other DNA
ccggaatcaccacacaaaataatcaacatcctaccgcaggatcagagtctctccctaccccaataccgcaatccg

SEQ ID NO: 873302 - DNA, 75 bp, synthetic construct
  source 1..75: mol_type = other DNA
attaaagttgggttataaacgaaaagttgatgtatggtgcgaagaggatgctgcgctatatgcagaatttatagc

SEQ ID NO: 873303 - DNA, 75 bp, synthetic construct
  source 1..75: mol_type = other DNA
cactatttttatatgatttttgatattgaacgctatataaatgactgcagttactttgtttttctgctgctaaag

SEQ ID NO: 873304 - DNA, 75 bp, synthetic construct
  source 1..75: mol_type = other DNA
cgccattgacgatccacgcccggcactctctcatgaagaggccaaaagtctatttgctgcccgtaaaaaagcctt

SEQ ID NO: 873305 - DNA, 75 bp, synthetic construct
  source 1..75: mol_type = other DNA
actcgctgaaggcctggttggcagaattcgaacggaatcaggatcttcgccgaggctatcaacggataaaacggc

SEQ ID NO: 873306 - DNA, 75 bp, synthetic construct
  source 1..75: mol_type = other DNA
gcctgcggcagacgcggcccgacaagtacacgcaggtgcgtgaggtcattcggactatcttcgaggacaactacc

SEQ ID NO: 873307 - DNA, 75 bp, synthetic construct
  source 1..75: mol_type = other DNA
tcgcgactttcacgcgtcggcgccgaatacgaaatggttgaccgatctgacggaaatacacattccggcagggaa

SEQ ID NO: 873308 - DNA, 75 bp, synthetic construct
  source 1..75: mol_type = other DNA
ccagcgctgttaacccactaggccacacaattggtatcgctcagaatgtgaaggctgttaatgttcagacggcta

SEQ ID NO: 873309 - DNA, 75 bp, synthetic construct
  source 1..75: mol_type = other DNA
tggtaaatatggtgtccagctaaacattgtaaaaccagatattcatcctacatcaggtaattattttttacagat

SEQ ID NO: 873310 - DNA, 75 bp, synthetic construct
  source 1..75: mol_type = other DNA
tatcagaccgggagaagcagattttaaatatggtacatctccactacaggcaactctagggctggagtttggcgc

SEQ ID NO: 873311 - DNA, 75 bp, synthetic construct
  source 1..75: mol_type = other DNA
atgaaacaagcaaatcaagatagaggtacgctgctgctggcgttggttgctggcttatcgattaatggtactttc

SEQ ID NO: 873312 - DNA, 75 bp, synthetic construct
  source 1..75: mol_type = other DNA
cccgtgctgttaataatcgcggctataccgttggcatcacgcagaacgtgaaggccgaaaacgtccaggctgcaa

SEQ ID NO: 873313 - DNA, 75 bp, synthetic construct
  source 1..75: mol_type = other DNA
agtcctgatctccaaatggctgtgctgttgcccggaagtgattattttcgatgaacctacccgcggcatcgacgt

SEQ ID NO: 873314 - DNA, 75 bp, synthetic construct
  source 1..75: mol_type = other DNA
tcctcgcctgggcttacagttttctaccatgctgacgctggcgatgatcaccgaaatggtttttagctggccggg

SEQ ID NO: 873315 - DNA, 75 bp, synthetic construct
  source 1..75: mol_type = other DNA
tgaagatgccgtgacgtttatcggcgcatcaatcggttttatgggcgcagagaaagcacgcgacaaggttattgc

SEQ ID NO: 873316 - DNA, 75 bp, synthetic construct
  source 1..75: mol_type = other DNA
agtggagatgccggagccggagaagaagaaacgagaaatgattcagttgtggggggagtagcagtgagcaccatt

SEQ ID NO: 873317 - DNA, 75 bp, synthetic construct
  source 1..75: mol_type = other DNA
ctaatggatgaactgacgggcgatttgaaagcgttaattgacgagaaatcggcgctgattgccggttgggtcaaa

SEQ ID NO: 873318 - DNA, 75 bp, synthetic construct
  source 1..75: mol_type = other DNA
taggcagtcaggtggcggatatcgcgcggacgcagggtgaactgaatgcgttgaaggctgcgcaggataaatatg

SEQ ID NO: 873319 - DNA, 75 bp, synthetic construct
  source 1..75: mol_type = other DNA
ggagtactttgaacaagggcattcagtaaaaatggttgataaggaggtggtgttaataacattacgtgttaatca

SEQ ID NO: 873320 - DNA, 75 bp, synthetic construct
  source 1..75: mol_type = other DNA
tgatgcattcatggatagtatttataaggattgtatcaaaaatgcaagcgcatcttttaaaaaggtagtcagatg

SEQ ID NO: 873321 - DNA, 75 bp, synthetic construct
  source 1..75: mol_type = other DNA
tcctaattatttgatttctgtgcttgataaaaataatatcgtcaattcttcggagtatcttaataaaattgttca

SEQ ID NO: 873322 - DNA, 75 bp, synthetic construct
  source 1..75: mol_type = other DNA
gtgagattattggtgaaacaggtagtgattcaacaaatggcccttattttaagtttgatgaaatttacttcgggg

SEQ ID NO: 873323 - DNA, 75 bp, synthetic construct
  source 1..75: mol_type = other DNA
caatactaggtggtcaaaatgaccccgatttattaaacaggctcgattttgcaaatcacttggcaaatattctac

SEQ ID NO: 873324 - DNA, 75 bp, synthetic construct
  source 1..75: mol_type = other DNA
aagctggaagtctcccgtgattatccgcaggcttcgcgcctgttctgtatggagatgctggcaggcgcgccgctg

SEQ ID NO: 873325 - DNA, 75 bp, synthetic construct
  source 1..75: mol_type = other DNA
agcggcaaactcgcaccgattgacccgcagcatctgatttttatgatttgggcttccacccaacattacgctgat

SEQ ID NO: 873326 - DNA, 75 bp, synthetic construct
  source 1..75: mol_type = other DNA
actggtgttggtgtaggagtggcttataaatggctaagtaggcgtaatcttgaacgagcacatgatgccgctaac

SEQ ID NO: 873327 - DNA, 75 bp, synthetic construct
  source 1..75: mol_type = other DNA
cgcagggtggctgaaggtcctctgaatgtcacaacagtgtcggcggaagcgtttgaaaaacagctggtgagcagc

SEQ ID NO: 873328 - DNA, 75 bp, synthetic construct
  source 1..75: mol_type = other DNA
aaaaaaacacgcacgtcacgcggcctgaagggcagatcactcacagccgatgaacgccggatacagaccgctatc

SEQ ID NO: 873329 - DNA, 75 bp, synthetic construct
  source 1..75: mol_type = other DNA
actgacgaagaaaaacgcctgctgggaattaccgacgcccgtaccgtcactctgtaccatccgcaaggctgcccc

SEQ ID NO: 873330 - DNA, 75 bp, synthetic construct
  source 1..75: mol_type = other DNA
ggtttttgaggtgcgcaacgtcaccagccgtgacagaaaaaagatccgggatatctcatttagcgtctgccgggg

SEQ ID NO: 873331 - DNA, 75 bp, synthetic construct
  source 1..75: mol_type = other DNA
tacataacgcgttacctcctgtcatccctcgcctgggattacagttctccaccatgctgacactggcgatgatca

SEQ ID NO: 873332 - DNA, 75 bp, synthetic construct
  source 1..75: mol_type = other DNA
cgtttcagggcgtttcgatctgctctacgaagtgaaaccgattaccggttttgcgttgattgatgcctggctttc

SEQ ID NO: 873333 - DNA, 75 bp, synthetic construct
  source 1..75: mol_type = other DNA
cgcgcatatggatgttttaccgttgtgccggtggcatcaccaggacgcggccccaaaagcagatcgcgagcaata

SEQ ID NO: 873334 - DNA, 75 bp, synthetic construct
  source 1..75: mol_type = other DNA
cgtagtagctgcaaccggtaactacaaagttcgtatcgacaactcaactggtgctggcgcgattgctgattacaa

SEQ ID NO: 873335 - DNA, 75 bp, synthetic construct
  source 1..75: mol_type = other DNA
tacgcttcttactctgaagatggctggaatcgtgttgataacgctaacgcattccagagtggcgtattcgatgtt

SEQ ID NO: 873336 - DNA, 75 bp, synthetic construct
  source 1..75: mol_type = other DNA
atattcccccggaaaccacgatttggcagcctgccgggtgtcagcactgcagttttactggctatcacgggcgta

SEQ ID NO: 873337 - DNA, 75 bp, synthetic construct
  source 1..75: mol_type = other DNA
tggaaagtgacgacgatgcgccaatcatcaaactgatcaacgccatgctggcagaggcaatcaaagaaggcgctt

SEQ ID NO: 873338 - DNA, 75 bp, synthetic construct
  source 1..75: mol_type = other DNA
tatgcatggagtaatatctaatgaggtgtctctgcaccatatcgccggtcgtaccgcgccgggttgtcataaaaa

SEQ ID NO: 873339 - DNA, 75 bp, synthetic construct
  source 1..75: mol_type = other DNA
cggtaactacaaagttcgtatcgacaactccactggtgctggcgcgattgctgattacgcaggtaagcagctcat

SEQ ID NO: 873340 - DNA, 75 bp, synthetic construct
  source 1..75: mol_type = other DNA
tttgtcgaactgaactgcgattcgcatatgatcggtgaagcgatggccgaatttgaaagtcagtatctttttatt

SEQ ID NO: 873341 - DNA, 75 bp, synthetic construct
  source 1..75: mol_type = other DNA
ctgtcactggcgcaaactacgggcgtcttatgcgtgaagggtttacggcatttaatcctattggcgcgctcgaaa

SEQ ID NO: 873342 - DNA, 75 bp, synthetic construct
  source 1..75: mol_type = other DNA
tataaaaaatgttctctaagagattttaatgtagcatctataaatgtgacaaatttgtcacgaatatcagagaag

SEQ ID NO: 873343 - DNA, 75 bp, synthetic construct
  source 1..75: mol_type = other DNA
ccgcatcctgattttctatattggttcgttagccgttctgctctcactaatgccgtggacccgcgttaccgccga

SEQ ID NO: 873344 - DNA, 75 bp, synthetic construct
  source 1..75: mol_type = other DNA
attagcctggcgcatatgaaattccgtcgcgccaagcaggaacaaggcgtggtaactcgcttccctgctctgctt

SEQ ID NO: 873345 - DNA, 75 bp, synthetic construct
  source 1..75: mol_type = other DNA
taatgcgccaaaagcgctggcgtctgtcgataaacgcggcgtaccggttaacaccattctggtgtctgcactagt

SEQ ID NO: 873346 - DNA, 75 bp, synthetic construct
  source 1..75: mol_type = other DNA
gcgagcctgaacaggcagaagccatcgcgccggggctgaccgggcaacactggctggagggcgaccacacggtgc

SEQ ID NO: 873347 - DNA, 75 bp, synthetic construct
  source 1..75: mol_type = other DNA
ccgtccgttcccgtgcccgtgtggccatccacaccaccggtggtcgtgtaacgggacagcatcaccgtttacctg

SEQ ID NO: 873348 - DNA, 75 bp, synthetic construct
  source 1..75: mol_type = other DNA
atctttccaaaaagcaaatctggtgttctccgcaagaaattatgaccgttgacggtatgccggggtctgttgctg

SEQ ID NO: 873349 - DNA, 75 bp, synthetic construct
  source 1..75: mol_type = other DNA
gttcctgcattatggctaactcacgatgcgagaacacaagaattgacagagttttttaatctacccagtattgac

SEQ ID NO: 873350 - DNA, 75 bp, synthetic construct
  source 1..75: mol_type = other DNA
ttaactcaggctgaagttgccgagcgaatgggaacaaaagcgaccgcgatcaccagaatggaaagtaatctcgca

SEQ ID NO: 873351 - DNA, 75 bp, synthetic construct
  source 1..75: mol_type = other DNA
tttaataaagacactatccagattgcggagacagataccacaccagtgctgatatttgcccgcgcctgtgacatc

SEQ ID NO: 873352 - DNA, 75 bp, synthetic construct
  source 1..75: mol_type = other DNA
aacaaagtcttgagcaactctctcgcatctcgtcagagttcgaaccatctaaccaaaagcgcaggaaaatatctc

SEQ ID NO: 873353 - DNA, 75 bp, synthetic construct
  source 1..75: mol_type = other DNA
cgcccgctgacggacttcgggggaaaaacgagtatttttagtcatcctgtttacctctttctcagggagtttagt

SEQ ID NO: 873354 - DNA, 75 bp, synthetic construct
  source 1..75: mol_type = other DNA
cattgagtctcgttgctctctgcctttcttacacattgcggatgccactggacgtgcaattaccggggcaggaat

SEQ ID NO: 873355 - DNA, 75 bp, synthetic construct
  source 1..75: mol_type = other DNA
atacgatgcataaagtggcggatgccattgagtcacgttgcactctgcctttcttacacattgcggatgccaccg

SEQ ID NO: 873356 - DNA, 75 bp, synthetic construct
  source 1..75: mol_type = other DNA
atggatgaagaaagggtgttttcactcagctatgaacaactgacccggtttgcggaacgacgcatccgggaatgc

SEQ ID NO: 873357 - DNA, 75 bp, synthetic construct
  source 1..75: mol_type = other DNA
gtgaactgaaggcctcagctctgctgtggttgtggtatgaactggccattcatggtgcgccacagaacaatcacg

SEQ ID NO: 873358 - DNA, 75 bp, synthetic construct
  source 1..75: mol_type = other DNA
ctggcatgaactggccataaatggctattcttcaatgaatgccataaagagacaggagctcattgacgccgactt

SEQ ID NO: 873359 - DNA, 75 bp, synthetic construct
  source 1..75: mol_type = other DNA
aaatctgcacataccgaacttcgcagacttgaaaaaaagagagaatctcttatcgaatactttattgatgagcta

SEQ ID NO: 873360 - DNA, 75 bp, synthetic construct
  source 1..75: mol_type = other DNA
gctgttgagttccaacgttcaattgaacagagtcttgaccaactatctcgtatctcgtcagagttcgaaccatca

SEQ ID NO: 873361 - DNA, 75 bp, synthetic construct
  source 1..75: mol_type = other DNA
aacagagtcttgaccaactatctcgtatctcgtcagagttcgaaccatcaagccagaagcgcaggaaaatgtctc

SEQ ID NO: 873362 - DNA, 75 bp, synthetic construct
  source 1..75: mol_type = other DNA
gcaatttaccgaagcgtcacgcgcttattatgcgcaagtgattgctcgccttgcagaacagggcgcacagggcgt

SEQ ID NO: 873363 - DNA, 75 bp, synthetic construct
  source 1..75: mol_type = other DNA
atgaagcagcgaaaaaaggcttatggattttgggcattgatggtgggcattggctgaatcctggattcaggatag

SEQ ID NO: 873364 - DNA, 75 bp, synthetic construct
  source 1..75: mol_type = other DNA
aacagagtcttgagcaactatctcgtatctcgtcagagttcgaaccatcaaaccaaaagcgcaggaaaatgtctc

SEQ ID NO: 873365 - DNA, 75 bp, synthetic construct
  source 1..75: mol_type = other DNA
ttcgccgcaagaaattatggctgctgatggtatgcctggatctgttgctggtgttcactatcgagcaaatgttca

SEQ ID NO: 873366 - DNA, 75 bp, synthetic construct
  source 1..75: mol_type = other DNA
cccactatgatctgtatgatcgccctgaagcgacatcgcaggcactggcaggaataataccattctttaataaac

SEQ ID NO: 873367 - DNA, 75 bp, synthetic construct
  source 1..75: mol_type = other DNA
gtcttccattatctggctggggatatttcactggcggcagagaggaatgaactctggtccttatgggagggtaat

SEQ ID NO: 873368 - DNA, 75 bp, synthetic construct
  source 1..75: mol_type = other DNA
gaaattggcactgatgtgaactatggcgagatcacccgccagttgatcgcctccttacagaagaaatctaacttc

SEQ ID NO: 873369 - DNA, 75 bp, synthetic construct
  source 1..75: mol_type = other DNA
tcgcaattccactacgttctggccgatggttcccagggtaatggtattccgcaactgctgccgcaactggtactg

SEQ ID NO: 873370 - DNA, 75 bp, synthetic construct
  source 1..75: mol_type = other DNA
tcgctgttgtttatgcgccgcatcgcccgcatgacgcgcctggcgccgatagctgcagatgttcctgatgatgtg

SEQ ID NO: 873371 - DNA, 75 bp, synthetic construct
  source 1..75: mol_type = other DNA
cagttgcgcggcagattatctgatgacgttaccctttgtggatgaagagcgtatcggggttttaggggtttgtgg

SEQ ID NO: 873372 - DNA, 75 bp, synthetic construct
  source 1..75: mol_type = other DNA
agtcgtagacgttccagacgatgtcctggttctgcgcgttattggcccgctgttttttgctgccgcagaaggctt

SEQ ID NO: 873373 - DNA, 75 bp, synthetic construct
  source 1..75: mol_type = other DNA
gctgccgctgtatcacatttttgcactgaccattaactgcctgctgtttatcgaactgggtgggcagaacctgct

SEQ ID NO: 873374 - DNA, 75 bp, synthetic construct
  source 1..75: mol_type = other DNA
tacttggcaaagtgcccctaaaacccatgacaaagaagaaaggtgacacctcgctcgagcagcggcatgaggcac

SEQ ID NO: 873375 - DNA, 75 bp, synthetic construct
  source 1..75: mol_type = other DNA
cgtctgtaaccaaagagattttattgccgaatggtcatgaccagatgccattgcagcaaaatatcttcgaagtga

SEQ ID NO: 873376 - DNA, 75 bp, synthetic construct
  source 1..75: mol_type = other DNA
ggcagagcagggctgttatccgctatgacatggcggtgccgctcaatttgttggaacgaagcgtccggcaatcca

SEQ ID NO: 873377 - DNA, 75 bp, synthetic construct
  source 1..75: mol_type = other DNA
aagattgttaatctgctggaaccgctggcaacgctggcctggacgttgggttttgaataccaccacggcttgctg

SEQ ID NO: 873378 - DNA, 75 bp, synthetic construct
  source 1..75: mol_type = other DNA
tgatgggtctggcacgctttggtcgcctgattgagtatattccggtttccgtcaccttaggtttcacctcgggta

SEQ ID NO: 873379 - DNA, 75 bp, synthetic construct
  source 1..75: mol_type = other DNA
cctggatgaacgtgaaagtttttctaacctgcgccgtcttgcctggcagaacggtcattattttaccttgcgtac

SEQ ID NO: 873380 - DNA, 75 bp, synthetic construct
  source 1..75: mol_type = other DNA
ttgctgcgttagcccaaacggctcatcgtcttaaaggcgtgtttgccatgctaaatctggtacccggcaagcagt

SEQ ID NO: 873381 - DNA, 75 bp, synthetic construct
  source 1..75: mol_type = other DNA
cagcacggcggtcaataacgaattgcgcattttacgggcaatcaatgaagagatagtctcactgctgccgctcgg

SEQ ID NO: 873382 - DNA, 75 bp, synthetic construct
  source 1..75: mol_type = other DNA
tggtacgcctgaaagatgtcgcacgggttgaacttggcggtgaaaactataacgttatcgctcgcatcaacggta

SEQ ID NO: 873383 - DNA, 75 bp, synthetic construct
  source 1..75: mol_type = other DNA
aaacattggcgatgcgctgaaagaacccgcacggtcactggcggagagtgcggctaaactcaactccccggaaag

SEQ ID NO: 873384 - DNA, 75 bp, synthetic construct
  source 1..75: mol_type = other DNA
ggttacaccacctttcgccatttctccgggcgcagcacagaaagcgttcccagcaccgcagtgaataacgaactg

SEQ ID NO: 873385 - DNA, 75 bp, synthetic construct
  source 1..75: mol_type = other DNA
gcgtgccatggaagagctgcaacaggccggtaaaattcgcgctattggcgtcagtaacttccatcctgaccgact

SEQ ID NO: 873386 - DNA, 75 bp, synthetic construct
  source 1..75: mol_type = other DNA
tgatgagcttggtatttcattgatatctgttcgaggtactgggtttgaattgctatcttcattgtttcatgcaga

SEQ ID NO: 873387 - DNA, 75 bp, synthetic construct
  source 1..75: mol_type = other DNA
tctgggcattcgtttacccggtcaccttccggccttgctggctggttgcgcggtgatggggattgttaacctgct

SEQ ID NO: 873388 - DNA, 75 bp, synthetic construct
  source 1..75: mol_type = other DNA
cctgctggttcacgatcaagatgccaaccgcaccgttatcagcaataaaattgccgatcatctgctgccgcatct

SEQ ID NO: 873389 - DNA, 75 bp, synthetic construct
  source 1..75: mol_type = other DNA
caggatccacacttccgtcgtgagttttatcaggtgctgctgccgctgatgcaggagatgggtaaaactattttc

SEQ ID NO: 873390 - DNA, 75 bp, synthetic construct
  source 1..75: mol_type = other DNA
atgcaaactgtaagactgaacaacggtattgaaatgcccttgctgggttttggtgtatttcagatgaccgatgcc

SEQ ID NO: 873391 - DNA, 75 bp, synthetic construct
  source 1..75: mol_type = other DNA
taaaagactggcagaaacaacatgcggatattatcggcaccaccggagccggtaaaggggttgccaccggcatat

SEQ ID NO: 873392 - DNA, 75 bp, synthetic construct
  source 1..75: mol_type = other DNA
cgctggattatatcgacctgattaaaggcatttttactggcatggacagggagaacgaaccaatgtatctcccgt

SEQ ID NO: 873393 - DNA, 75 bp, synthetic construct
  source 1..75: mol_type = other DNA
cggattgctttcactgtaaccgggattatttttcatattatgcttcgccgggtattcacgccagaactggacaaa

SEQ ID NO: 873394 - DNA, 75 bp, synthetic construct
  source 1..75: mol_type = other DNA
tagagagcgtcagagaaacaatgcgctgcccgtactgggtgcaacttctgacacaaatccagcacgatatcagta

SEQ ID NO: 873395 - DNA, 75 bp, synthetic construct
  source 1..75: mol_type = other DNA
tgaccgtcgcgcagccagaaatacatctgcaatttatgaaaaaggaatgacgcttcgtgatttatttaacactga

SEQ ID NO: 873396 - DNA, 75 bp, synthetic construct
  source 1..75: mol_type = other DNA
tccagctcgcagaactacgtgatcgcgtagcaggtgatttacgcccgatagctatttttctggatgaattaaaat

SEQ ID NO: 873397 - DNA, 75 bp, synthetic construct
  source 1..75: mol_type = other DNA
aaagacgatgaatgggcaccgcatctttaccgcaaagcctgcgaggatgcaggcaagccttttgccttaattgac

SEQ ID NO: 873398 - DNA, 75 bp, synthetic construct
  source 1..75: mol_type = other DNA
tgatccgtctgattatccgcgatgaagcagtccacggttactacatcggctataaatatcagaaaaacctggaaa

SEQ ID NO: 873399 - DNA, 75 bp, synthetic construct
  source 1..75: mol_type = other DNA
ttcttttccggttcaggctcctcttatgtgatgggaaaagcggtcgaaacagaagatgaagactggaatttctga

SEQ ID NO: 873400 - DNA, 75 bp, synthetic construct
  source 1..75: mol_type = other DNA
tgaaggtgtgtttgttatggaccccaaggatgatgaatgggcaccgcatctttaccgcaaagcctgcgaggatgc

SEQ ID NO: 873401 - DNA, 75 bp, synthetic construct
  source 1..75: mol_type = other DNA
ggctcttttcttcgacaaaagcgaagtaaaaccgacaaagccaaaacctgatgatgaaaaagacctgtccccgct

SEQ ID NO: 873402 - DNA, 75 bp, synthetic construct
  source 1..75: mol_type = other DNA
tttatcggaaagcctgcgaggatgcaggaaaaccctttgccttaattgacctgcgaaaacagcaataccagctaa

SEQ ID NO: 873403 - DNA, 75 bp, synthetic construct
  source 1..75: mol_type = other DNA
atgatccgcacgggtgaactgaccggtaagctggatgaatgctgctttgaactggcgcgtcagcaaaaagcccag

SEQ ID NO: 873404 - DNA, 75 bp, synthetic construct
  source 1..75: mol_type = other DNA
gcgctgaaacagcttcagcaaaaaagctacacaccgcaaaaccgcagtaaagataacggtcgtgtggtagttgaa

SEQ ID NO: 873405 - DNA, 75 bp, synthetic construct
  source 1..75: mol_type = other DNA
tggctgatgccaatgtagtcagtgaagatgtactgcgtgaaagcgtcggtaagtcggtggtcaaccttattcacg

SEQ ID NO: 873406 - DNA, 75 bp, synthetic construct
  source 1..75: mol_type = other DNA
atttcgaagaatcctgggaagttcctgcggtatctgcagctagacgtgaggacctgaaccgccccgggaatcctg

SEQ ID NO: 873407 - DNA, 75 bp, synthetic construct
  source 1..75: mol_type = other DNA
tgtgaggctgtgcagcggccgcatatgcgctttgtacccgtcaaagacgaaagtcagcaggcaatgcagtgcttg

SEQ ID NO: 873408 - DNA, 75 bp, synthetic construct
  source 1..75: mol_type = other DNA
aaaattctgacggataccaggaaaaaaaatctgcggacgttctggcagaaattcggttttgaccagcagcgatgg

SEQ ID NO: 873409 - DNA, 75 bp, synthetic construct
  source 1..75: mol_type = other DNA
ggaactgcgctcccatgcgccagaacgcattgttgacgcggtatggggcgagagttactccgccggatattcgct

SEQ ID NO: 873410 - DNA, 75 bp, synthetic construct
  source 1..75: mol_type = other DNA
cattcggtaaaccagaacatcactgaactctccggcggtaaccagcagaaagtcctgatctccaaatggctgtgc

SEQ ID NO: 873411 - DNA, 60 bp, synthetic construct
  source 1..60: mol_type = other DNA
atgaaccgtttcatcattgctgacgcgagtaaatgtattggttgccgtacctgtgaagtg

SEQ ID NO: 873412 - DNA, 75 bp, synthetic construct
  source 1..75: mol_type = other DNA
ggggccaaaagctcacgcagatttttacgattctggcgctgacgcaaagcgcggggattacttttttgcagggag

SEQ ID NO: 873413 - DNA, 75 bp, synthetic construct
  source 1..75: mol_type = other DNA
tatcgctgaccagtgcgagattagcaaacgttctgtgatgagtcatattgcggccctttgtgagtccgggctggt

SEQ ID NO: 873414 - DNA, 75 bp, synthetic construct
  source 1..75: mol_type = other DNA
ggcaaccactatctcgccagcagccatggtaaccacatccacttcccctgaatctccaacgacagcaaatagcca

SEQ ID NO: 873415 - DNA, 75 bp, synthetic construct
  source 1..75: mol_type = other DNA
atggctggcataccccaaacgtgctggtggcaattcaaaatctgcagccttcaaagcctggaaagcccgtttgaa

SEQ ID NO: 873416 - DNA, 75 bp, synthetic construct
  source 1..75: mol_type = other DNA
aaatcacgatttcttttccggttctggctcctcttatgtgatgggaaaagcggtcgaaacagaagacgaagactg

SEQ ID NO: 873417 - DNA, 75 bp, synthetic construct
  source 1..75: mol_type = other DNA
ctgactattcgggcgcgaagtgctgattttcgtgaaacgctgaatccccgccgtgaaaagtcgtggcacaagacc

SEQ ID NO: 873418 - DNA, 75 bp, synthetic construct
  source 1..75: mol_type = other DNA
tactgtcagcccggataacggttttactaccagtctggagcttgaagtgaggattgatgatttcgaaatggaatg

SEQ ID NO: 873419 - DNA, 75 bp, synthetic construct
  source 1..75: mol_type = other DNA
aatggaccattaccaccctgacgcatactgtcagcccggataacggttttactaccagtctggagcttgaagtga

SEQ ID NO: 873420 - DNA, 75 bp, synthetic construct
  source 1..75: mol_type = other DNA
ttaggtgcagatggtcatttttgtggcaatttgccgaatacgacccatttccatgagcaaaccgtggagttcccg

SEQ ID NO: 873421 - DNA, 75 bp, synthetic construct
  source 1..75: mol_type = other DNA
catgtacgaatatctcatcactctggttaaaggtaagccctggtacgataactgctatttctacaatttcgatga

SEQ ID NO: 873422 - DNA, 75 bp, synthetic construct
  source 1..75: mol_type = other DNA
tcgcatcgaccagagatctccgtagcgcaactcgctcgtgaacatgggatcaacgataatttgctgttcaagtgg

SEQ ID NO: 873423 - DNA, 75 bp, synthetic construct
  source 1..75: mol_type = other DNA
cggaaggtcgggcagatctctacacggaaatgcctgtgaaggtcagcggctttaaacagccgatagatgatgcgg

SEQ ID NO: 873424 - DNA, 75 bp, synthetic construct
  source 1..75: mol_type = other DNA
atctgttattcatccgacagggacagggtaaaagcgccagcggtaaaccactgccggtgatcactatcacacgca

SEQ ID NO: 873425 - DNA, 75 bp, synthetic construct
  source 1..75: mol_type = other DNA
accttaacagcaaaagcccggctttcagtattaccattgaaggtaaggacgtgacaaccgcgctggatgcgcgcc

SEQ ID NO: 873426 - DNA, 75 bp, synthetic construct
  source 1..75: mol_type = other DNA
gggcaaaagcgccagcggtaaacctctgccggtgatcactatcacacgcaaggacgtcgacagtcaccgatttac

SEQ ID NO: 873427 - DNA, 75 bp, synthetic construct
  source 1..75: mol_type = other DNA
gcgttgcgtcattctcgttacaactggcggaagggcgggcagatctctacacggaaatgccagtgaaagtcagtg

SEQ ID NO: 873428 - DNA, 75 bp, synthetic construct
  source 1..75: mol_type = other DNA
ccatgagcaaaccgtggagttcccgatccagggagagatggtgatattgtggcgcatggcgagttgggcggcgac

SEQ ID NO: 873429 - DNA, 75 bp, synthetic construct
  source 1..75: mol_type = other DNA
cggttaccgaagatgttccagcttccgtgttgcagctgcatccttcgctgattgtcattgcagataaagccgctg

SEQ ID NO: 873430 - DNA, 75 bp, synthetic construct
  source 1..75: mol_type = other DNA
ttggatcgaagccaacgttaaaggggaagttgacgccctgcgtgcggccagtaaaacatttgccgacaaactggc

SEQ ID NO: 873431 - DNA, 75 bp, synthetic construct
  source 1..75: mol_type = other DNA
ctggacgagctccctgacagtgagacagatgaacttttaaaaactcttgaggagaaaaaacagaagtacaatgca

SEQ ID NO: 873432 - DNA, 75 bp, synthetic construct
  source 1..75: mol_type = other DNA
gttgaagagtttcgccttcgatttgctactggaactttacgacaacgagttgcaatacaccgatgagctctatgc

SEQ ID NO: 873433 - DNA, 75 bp, synthetic construct
  source 1..75: mol_type = other DNA
aaatcacgatttcttttccggttcaagctcttcatatgtgatgggaaaagcggtcgaaacagaagatgaagaggt

SEQ ID NO: 873434 - DNA, 75 bp, synthetic construct
  source 1..75: mol_type = other DNA
taaagatctggaggtgtggaatcgcctgaccagcaatttctggctgccggaaaaggtgccattatcgaacgatat

SEQ ID NO: 873435 - DNA, 75 bp, synthetic construct
  source 1..75: mol_type = other DNA
atgagactttttattgcagaaaaaccctctctggcgaaagcgatttttgaagggctgggtggtaacccaaatacg

SEQ ID NO: 873436 - DNA, 75 bp, synthetic construct
  source 1..75: mol_type = other DNA
atggtgaattaccgtcttatatcactggcgctgacaatagcgtccaccatatttggtgtccactattctctcagg

SEQ ID NO: 873437 - DNA, 75 bp, synthetic construct
  source 1..75: mol_type = other DNA
atcggcattgatatttcagactctgtaaccagtaccagaagtgatgttgcggcaagttcgctggcggttaaaaaa

SEQ ID NO: 873438 - DNA, 75 bp, synthetic construct
  source 1..75: mol_type = other DNA
gagacaattccccgtcgagagaaactgaaagaattggcagcacttatcggaacaacaccaacttaccttctgggg

SEQ ID NO: 873439 - DNA, 75 bp, synthetic construct
  source 1..75: mol_type = other DNA
tctttctggggatgctccagctaccctgaatgcaaaacaacattccctgacaaagatggcaggccggatatggaa

SEQ ID NO: 873440 - DNA, 75 bp, synthetic construct
  source 1..75: mol_type = other DNA
agcctttaatgccagcaagattgaggcgcaccacgccatcatcccgacgacaaaaagcggagccggtattcagct

SEQ ID NO: 873441 - DNA, 75 bp, synthetic construct
  source 1..75: mol_type = other DNA
gttctggcaagccgcatttgatgcgttacacgcccagcaggtgaaagaagatgaaatgcgctggggctggccggc

SEQ ID NO: 873442 - DNA, 75 bp, synthetic construct
  source 1..75: mol_type = other DNA
aaatgacagcattacgaatggcgtggaaaggtttcgcgcaacgtgatgatgaacagatggccgcgtttcgccagt

SEQ ID NO: 873443 - DNA, 75 bp, synthetic construct
  source 1..75: mol_type = other DNA
gtaccggtagagattgtcggtaagctgcgcagcagcggtgtgtactcctacaaagtgctctatttcgaaaacgac

SEQ ID NO: 873444 - DNA, 75 bp, synthetic construct
  source 1..75: mol_type = other DNA
tgaacccgattcatgcgctctatccggcaaatccggagagcgccagcccatacagcccgtcttctcgccgctggc

SEQ ID NO: 873445 - DNA, 75 bp, synthetic construct
  source 1..75: mol_type = other DNA
tgcgctgcataaatatggttgtctgccaaaacgtgccggacataaggcatcgctgatgtcgatgacgccgatgct

SEQ ID NO: 873446 - DNA, 75 bp, synthetic construct
  source 1..75: mol_type = other DNA
gaagaggcacaggcctggtggcagatgccgaccacgcaacagacgctgcaacaggcgcgggatgctgactgggtc

SEQ ID NO: 873447 - DNA, 75 bp, synthetic construct
  source 1..75: mol_type = other DNA
gttttctatcaagatgggcgtggtgcgtcaattcgacttgatgcgttgatggaagcacatgtttttgattttccg

SEQ ID NO: 873448 - DNA, 75 bp, synthetic construct
  source 1..75: mol_type = other DNA
ttttgctgctactggtcactctgttcttcctgacctttattggattcagcctgagctacttcacgcctcatgcac

SEQ ID NO: 873449 - DNA, 75 bp, synthetic construct
  source 1..75: mol_type = other DNA
ctggtcagcgctattcgtcatatggtgctcccggtgctgacgctctccgttgcgcccaccaccgaagtcatccgc

SEQ ID NO: 873450 - DNA, 75 bp, synthetic construct
  source 1..75: mol_type = other DNA
cgccgttgaagatttccatcttagcgaagaggctcaggcctggtggcagttgccgaccacgcaacagacgctgca

SEQ ID NO: 873451 - DNA, 75 bp, synthetic construct
  source 1..75: mol_type = other DNA
aacggcgtttgcttgacgcgatgcatcaacgtaccgccacgaaagtggcggtaacgccagtcccgaatgtcatgg

SEQ ID NO: 873452 - DNA, 75 bp, synthetic construct
  source 1..75: mol_type = other DNA
gtgatgacggctttgagtctgatgcagtaaaaatcaatgctgagcagattttcaagcaagtgtcgccacatactg

SEQ ID NO: 873453 - DNA, 75 bp, synthetic construct
  source 1..75: mol_type = other DNA
tgatttttacatatcgtatctgaggagaagtaaaaatgatgtgtctgatggtgatagcgaagaagactatgaaga

SEQ ID NO: 873454 - DNA, 75 bp, synthetic construct
  source 1..75: mol_type = other DNA
atcctcttcagatgacatatctaaatgccagttcagtgtttatgaaagatactgggaaatagttcagccaaataa

SEQ ID NO: 873455 - DNA, 75 bp, synthetic construct
  source 1..75: mol_type = other DNA
tttattgcttttttatcactcctgcttacatatttttcattcagaaaaataagtttaataccgatactatcgtta

SEQ ID NO: 873456 - DNA, 75 bp, synthetic construct
  source 1..75: mol_type = other DNA
atcgcctgcctgtgccgaggacaggggcacccggtaaaacccggaggcctccatattgtccaggtacaggttctg

SEQ ID NO: 873457 - DNA, 75 bp, synthetic construct
  source 1..75: mol_type = other DNA
atattctgcagccagggccaggagttggtggtcattgtattgctgtagatccttggtttatcgtatcacaaacgc

SEQ ID NO: 873458 - DNA, 75 bp, synthetic construct
  source 1..75: mol_type = other DNA
gagcgattgtggaagaagaacgcgatgggcagtcgctacccggccacataacctttaaacgccaggtctctggta

SEQ ID NO: 873459 - DNA, 75 bp, synthetic construct
  source 1..75: mol_type = other DNA
aaacctacccgcaacgcgtgggggctgattgggcctatcccgaccggacgcctgaagaaggccagtattgatgcg

SEQ ID NO: 873460 - DNA, 75 bp, synthetic construct
  source 1..75: mol_type = other DNA
gcggagatattcacgcagggctggtaccgttcgccctccggggtgcttatcacgaagccgcacgactccgctggc

SEQ ID NO: 873461 - DNA, 75 bp, synthetic construct
  source 1..75: mol_type = other DNA
tcaaacctattacactggcgacaacggctatgtcgccggctgggttgcaggttacaactttatgctgggcagcga

SEQ ID NO: 873462 - DNA, 75 bp, synthetic construct
  source 1..75: mol_type = other DNA
cccccggcagaccagccaccagggcagtgcactctttatctgcagccgccggtcggcctcgctcagccagggcag

SEQ ID NO: 873463 - DNA, 75 bp, synthetic construct
  source 1..75: mol_type = other DNA
cgctcaaaatccggcatatcaattcccgccagatggtatgcatcccggaacagcgtgtaacagtccgtcaccccg

SEQ ID NO: 873464 - DNA, 75 bp, synthetic construct
  source 1..75: mol_type = other DNA
cgatgaaaatccggcatttcagtccccgccagatggtatgcatcccggaacagggtgtaacagtccgtcaccccg

SEQ ID NO: 873465 - DNA, 75 bp, synthetic construct
  source 1..75: mol_type = other DNA
tctcactgaccctcggctggttacccgtttcagggcgttttgatcttctctacgaggtgaaacccgttaccggtt

SEQ ID NO: 873466 - DNA, 75 bp, synthetic construct
  source 1..75: mol_type = other DNA
ggcgccggtgcgatgctgtggcgactgatgcagtacacccctcagggttacgatgatgcggtgtcggtgatgcgg

SEQ ID NO: 873467 - DNA, 75 bp, synthetic construct
  source 1..75: mol_type = other DNA
cgggcagtgacacggagaaaatccgcgtcatggcagagattgcgtcggcggaagacgggacgtattacgaagggg

SEQ ID NO: 873468 - DNA, 75 bp, synthetic construct
  source 1..75: mol_type = other DNA
tcaggcctgctccgtgcgggaccggtcggcggcggaatcggcgatagcggcgctggatgacatctcgtccgtatc

SEQ ID NO: 873469 - DNA, 75 bp, synthetic construct
  source 1..75: mol_type = other DNA
ggtggaaccacgccagctggcgatgctgatctccgaagaacatctgcaattgcaggcggtgttcctcgcgtttct

SEQ ID NO: 873470 - DNA, 75 bp, synthetic construct
  source 1..75: mol_type = other DNA
tcggttatctcgccaccaatggcctaaataatttagttcctgaattccatttagataatgctgattatggagact

SEQ ID NO: 873471 - DNA, 75 bp, synthetic construct
  source 1..75: mol_type = other DNA
cagtacacgcagtttgtcacccactggcagacgaattatctgtcacaacaggaggtgatgaaggtgaccagccgc

SEQ ID NO: 873472 - DNA, 75 bp, synthetic construct
  source 1..75: mol_type = other DNA
atgcactgtcgcgatgcccacgatcggtttataaccttgctggagccgtggctggataaactgcctggtgcagtt

SEQ ID NO: 873473 - DNA, 75 bp, synthetic construct
  source 1..75: mol_type = other DNA
cgcactggcgaggggaggatgctgcgtggctggcggccaccacagatgccaatgtcaaaacgctgtttgggattg

SEQ ID NO: 873474 - DNA, 75 bp, synthetic construct
  source 1..75: mol_type = other DNA
gattggcgagtgcggcctcgactttaaccgcaacttttctacgccggaagagcaagaacgagcctttgtcgccca

SEQ ID NO: 873475 - DNA, 75 bp, synthetic construct
  source 1..75: mol_type = other DNA
ttggttatctcgccaccaatggcctaaataatttagttcctgaattccaaattttagataatgcagatcactatg

SEQ ID NO: 873476 - DNA, 75 bp, synthetic construct
  source 1..75: mol_type = other DNA
agagaatatccgaaaaatcattagttagtgaaattttgacatattgccattctctttatatgtccgagatgaact

SEQ ID NO: 873477 - DNA, 75 bp, synthetic construct
  source 1..75: mol_type = other DNA
cagtatccgcactgttggtcaacggcgggcgtgcatcctcatgacagcagccagtggcaagctgcgaccgaagaa

SEQ ID NO: 873478 - DNA, 75 bp, synthetic construct
  source 1..75: mol_type = other DNA
ttgaacgtggcctgtcggtactttcggaacatggctcgaaggtaaaaggcatcaaacaggcggcggatatcgtca

SEQ ID NO: 873479 - DNA, 75 bp, synthetic construct
  source 1..75: mol_type = other DNA
aacctgaaaacatcaaaccagctatgaatgcaatgctggagcgagacgatatttcagataaagttcatacgatca

SEQ ID NO: 873480 - DNA, 75 bp, synthetic construct
  source 1..75: mol_type = other DNA
agctgacgcaggcagaaaccacccgacttaacgctgtgctggattacattgacgcggtggcggcaacagatacca

SEQ ID NO: 873481 - DNA, 75 bp, synthetic construct
  source 1..75: mol_type = other DNA
agtgccgcagtagacgcggcagaagcacagcgccagtcactgattgatgcagcaatggcttccattagtctgatt

SEQ ID NO: 873482 - DNA, 75 bp, synthetic construct
  source 1..75: mol_type = other DNA
tcaaatgcacaaaatgattgcgcattctaagcttgaagtcattcccgacgcaaatcatgctctaaatatcactca

SEQ ID NO: 873483 - DNA, 75 bp, synthetic construct
  source 1..75: mol_type = other DNA
ggaaaatataatctcctcattattacccgtttttttcggaaataatgtctcagaagcagaaacatggagacaagt

SEQ ID NO: 873484 - DNA, 75 bp, synthetic construct
  source 1..75: mol_type = other DNA
tatacctgacgccaatcatgcattgaatgtcactcatgcaaaagaagtaaataccataataaaaaaatggttaca

SEQ ID NO: 873485 - DNA, 75 bp, synthetic construct
  source 1..75: mol_type = other DNA
gcgggttcgaccaatacctcgggaatttctaagtatgagttaagcagtttcattgctgactttaagcatttcaaa

SEQ ID NO: 873486 - DNA, 75 bp, synthetic construct
  source 1..75: mol_type = other DNA
acttaacgccgtgctggattacattgacggcggtgacggcaacagataccagcaccgcgccggatgtcatctggc

SEQ ID NO: 873487 - DNA, 75 bp, synthetic construct
  source 1..75: mol_type = other DNA
gcgtcacgacttcatgtgctgagtggtccatggcgtgaccggatcctgaacgttgtcgggctgcccgtgccggat

SEQ ID NO: 873488 - DNA, 75 bp, synthetic construct
  source 1..75: mol_type = other DNA
agctgacgcaggcagaaaccacccggcttaacgccgtgcttgattacattgacgcggtgacgacaacagatacca

SEQ ID NO: 873489 - DNA, 75 bp, synthetic construct
  source 1..75: mol_type = other DNA
ggtgacagacactgaggcacaacacagtgccgcagtagacgcggcagaagcacagcgccagttactaattgatgc

SEQ ID NO: 873490 - DNA, 75 bp, synthetic construct
  source 1..75: mol_type = other DNA
taatatgcgttgtttttattatgaggcagttacgtatgaatatactggctggtctgatgaatatattaatactgg

SEQ ID NO: 873491 - DNA, 75 bp, synthetic construct
  source 1..75: mol_type = other DNA
tcagctatgaacaactgacccggtttgcggaaaaacgcatccgggaatgcaatctggacagccacggcgtaactt

SEQ ID NO: 873492 - DNA, 75 bp, synthetic construct
  source 1..75: mol_type = other DNA
tcatcgggcgtgggcttctggtgcctgggcggggctgccgctaaaaactaccgtgaaaaatccgtggacgtggtc

SEQ ID NO: 873493 - DNA, 75 bp, synthetic construct
  source 1..75: mol_type = other DNA
tcatgtggaacccacgatcagggatgtgccggttttactcgatcttgcaccgtggtttgggtgtaaacatcgtga

SEQ ID NO: 873494 - DNA, 75 bp, synthetic construct
  source 1..75: mol_type = other DNA
tcagcgccgcggataatgaaattccgccgccgcgctccatcacattccatatctggacggcgtacagtccgttca

SEQ ID NO: 873495 - DNA, 75 bp, synthetic construct
  source 1..75: mol_type = other DNA
ccattcgcggctcgacgcctaaaataaaaggctcctgccagatcgaaaaagcggccaacgagtcggcgcatttca

SEQ ID NO: 873496 - DNA, 75 bp, synthetic construct
  source 1..75: mol_type = other DNA
atcttatcgcatggattgacgagcatatcgaccagccgctgaacattgatgtggtggcgaaaaaatcaggttatt

SEQ ID NO: 873497 - DNA, 75 bp, synthetic construct
  source 1..75: mol_type = other DNA
gtctgctgggatatcggggggatcgatggcgaaatcgtgtatcagaggtcaaaaaaacacggtattttccgggta

SEQ ID NO: 873498 - DNA, 75 bp, synthetic construct
  source 1..75: mol_type = other DNA
ggaaaacgtaaaaccttcgtgaacaccacgctcggtgagacatgggaagcgaaaattggcgaacgtccggatgct

SEQ ID NO: 873499 - DNA, 75 bp, synthetic construct
  source 1..75: mol_type = other DNA
atgaaagtaaacttaatgctttttagcttatttttattggtctctattatggcatgcaatgtttttgcattttcc

SEQ ID NO: 873500 - DNA, 75 bp, synthetic construct
  source 1..75: mol_type = other DNA
aagaaagttgaaatgaccgaaatgccagaactggtggcgatcctgcatagcttcgtgggtctggcggcagtgctg

SEQ ID NO: 873501 - DNA, 75 bp, synthetic construct
  source 1..75: mol_type = other DNA
ggctacgacgagcttgccgctttcgatgatgacatcgagaaagaaggttctcccacctttctgggagataagcgt

SEQ ID NO: 873502 - DNA, 75 bp, synthetic construct
  source 1..75: mol_type = other DNA
gacaccgcaaaagaaattctctatgcccgtatgaaagccgatccctcgcctgcggatgaagccacgtcgtatgcc

SEQ ID NO: 873503 - DNA, 75 bp, synthetic construct
  source 1..75: mol_type = other DNA
ttaccggggcatatgaacgtattgctggcagaagcgaaagtgccgtatgacatcgtgctggaaatggacgagatc

SEQ ID NO: 873504 - DNA, 75 bp, synthetic construct
  source 1..75: mol_type = other DNA
cgaaatcacagccgaagaaacggccgaactgctgaagaattcccattcagtgattatcaccccaggctatggaat

SEQ ID NO: 873505 - DNA, 75 bp, synthetic construct
  source 1..75: mol_type = other DNA
tgatcattactccggggtacggcatggcagtcgcgcaggcgcaatatcctgtcgctgaaattaccgagaaactgc

SEQ ID NO: 873506 - DNA, 75 bp, synthetic construct
  source 1..75: mol_type = other DNA
gtgggcgaaaaactcgatcaccaggtactgatggataaggtggtgcgttacacggcggcggtgcctgcccgggtg

SEQ ID NO: 873507 - DNA, 75 bp, synthetic construct
  source 1..75: mol_type = other DNA
ggacggcgtacagtccgttcaccacctgggtacagattgtctatgactggctggatgcactgaaagatcccaacg

SEQ ID NO: 873508 - DNA, 75 bp, synthetic construct
  source 1..75: mol_type = other DNA
taaatgggagaaggacagccctgaaagtgttttctacctctgtgaacatcatggctgcgtgatccatcagtctga

SEQ ID NO: 873509 - DNA, 75 bp, synthetic construct
  source 1..75: mol_type = other DNA
gtggaaaaagaaggttcgccaacactgcttggcgataaacgtattgaaggttcggtatggccaaaatccatacgc

SEQ ID NO: 873510 - DNA, 75 bp, synthetic construct
  source 1..75: mol_type = other DNA
gttcacgttatcgacctgctacaacagtcgctgcgcggcgaaccgcttaacctgcgtgtgttgattcgccagccg

SEQ ID NO: 873511 - DNA, 75 bp, synthetic construct
  source 1..75: mol_type = other DNA
acgttgcaggtggagagccatcgcgtacagaaggtgcagattattccgctgcataaggaagataatttggagtat

SEQ ID NO: 873512 - DNA, 75 bp, synthetic construct
  source 1..75: mol_type = other DNA
cgtccatgctggtggatcatggtaaccagcagatctttaatccgcaggaacggcggatgattgagcgggtactta

SEQ ID NO: 873513 - DNA, 75 bp, synthetic construct
  source 1..75: mol_type = other DNA
gttatcacaaccagtacctgcatcggcgacacggtgtcaggcatcttctctgccgggtcagcgggaacaaggaga

SEQ ID NO: 873514 - DNA, 75 bp, synthetic construct
  source 1..75: mol_type = other DNA
aaacaaaatggcgatggtaatctggatgtttatgctaataacgtccatgttatgcgctttgtctccggaagcatt

SEQ ID NO: 873515 - DNA, 75 bp, synthetic construct
  source 1..75: mol_type = other DNA
gctggcgatggtgatgcgtctcctgctgctggcctctatctcctggctggtcacccttactcaaccgctgttcag

SEQ ID NO: 873516 - DNA, 75 bp, synthetic construct
  source 1..75: mol_type = other DNA
taagagagcaatttattgagtttaatgaaattttactctttgaggatctggcgttgtttaaccagaagctggcgg

SEQ ID NO: 873517 - DNA, 75 bp, synthetic construct
  source 1..75: mol_type = other DNA
tcaggtgggggattatttgcttaaaacgttgcaggtggaaagccatcgcgtgcagaaggtgcagattattccgct

SEQ ID NO: 873518 - DNA, 75 bp, synthetic construct
  source 1..75: mol_type = other DNA
tgaaatgcgtcgctatatcattaccatgatcgacgaacacagcgattacgcactggcgctggctgtgccgtcgct

SEQ ID NO: 873519 - DNA, 75 bp, synthetic construct
  source 1..75: mol_type = other DNA
cctgttgatgattggctttagcctggtggcggaaggtttcggcttcgtcattccgaaaggctatctgtacgctgc

SEQ ID NO: 873520 - DNA, 75 bp, synthetic construct
  source 1..75: mol_type = other DNA
atgacgcccgtggaatatatgttaaaagagaacaaaaattgcaatatgtggtggacccatacattgcattttaga

SEQ ID NO: 873521 - DNA, 75 bp, synthetic construct
  source 1..75: mol_type = other DNA
caatgcgccggaaaaagagatccgcgagttgctggagcggaaccagcacacgcgcctggtggttacagacggtga

SEQ ID NO: 873522 - DNA, 75 bp, synthetic construct
  source 1..75: mol_type = other DNA
gcgacacagtgccaggcatcttctttgccggggcagcgggtaccaggagagtcatcggtatctgtgacatgtaaa

SEQ ID NO: 873523 - DNA, 75 bp, synthetic construct
  source 1..75: mol_type = other DNA
atgaggacacccttaaacgcgttgatgccgtgatccggaaaaaataccgtcatgcagatggcactgaaatttcca

SEQ ID NO: 873524 - DNA, 75 bp, synthetic construct
  source 1..75: mol_type = other DNA
acagcgccggtgatgaggaaatcccgccgccgcgctcaatctcgtaccacatctggacggcatacagcccgttca

SEQ ID NO: 873525 - DNA, 75 bp, synthetic construct
  source 1..75: mol_type = other DNA
ggagacggtgtattacctgtgtgaacataatggctgtgtgatccggcagtcggaacttgaccagaccgacgggcg

SEQ ID NO: 873526 - DNA, 75 bp, synthetic construct
  source 1..75: mol_type = other DNA
cacaggtgatgctgggttactggcagcgcccggatgccaccgatgaaatcatcaaaaatggttggcttcatactg

SEQ ID NO: 873527 - DNA, 75 bp, synthetic construct
  source 1..75: mol_type = other DNA
tccctaatatggttaccaaccgacggtgatgctgaaaacttcatgaagtctcatgtagaaccgaccattcgtgat

SEQ ID NO: 873528 - DNA, 75 bp, synthetic construct
  source 1..75: mol_type = other DNA
aaatcggctcgtgtcggctactcaaaaatgttgctcggcgtttacgcatatttcatccaacataaacagcgtaac

SEQ ID NO: 873529 - DNA, 75 bp, synthetic construct
  source 1..75: mol_type = other DNA
cagcagcaggcgctcgatcgcgtagatattgccaccatgacccgctatatgcaggaagggcatttcccacctggc

SEQ ID NO: 873530 - DNA, 75 bp, synthetic construct
  source 1..75: mol_type = other DNA
aaagtcctttaaagaacagttgagtcaatatatgaatggtatgaatgtatatccattcattagaataccttttga

SEQ ID NO: 873531 - DNA, 75 bp, synthetic construct
  source 1..75: mol_type = other DNA
tgaccgcgcagcagcgctatatcaacccgcttggcttccgtgtaacgagttaccgtaagaacgctgagaacgttg

SEQ ID NO: 873532 - DNA, 75 bp, synthetic construct
  source 1..75: mol_type = other DNA
gagattttttcgcagacagaggcgcagcaactggttgcggaagagcttgtggagaagtgggaaaaaggaaagatg

SEQ ID NO: 873533 - DNA, 75 bp, synthetic construct
  source 1..75: mol_type = other DNA
gtaaaaggcgcgtctgtctatggcaagccggtgatcaccatgccgaaaacccgcaatcagcggggcgtgtatctg

SEQ ID NO: 873534 - DNA, 75 bp, synthetic construct
  source 1..75: mol_type = other DNA
cgcagagcagcaccggaatcaggaaggagaaaaacgccgtgaagagatacgcaacgcactccgggaaaatccgtg

SEQ ID NO: 873535 - DNA, 75 bp, synthetic construct
  source 1..75: mol_type = other DNA
agggagtggtggcagctcaacgaggagccggggacgttccgcatcgttgttggcgtgcttgagcagggtattacc

SEQ ID NO: 873536 - DNA, 75 bp, synthetic construct
  source 1..75: mol_type = other DNA
ttgcctcagcatcgtgaacgcattgttctggtcggatttagacgagatctgaatattcacaaggggtttaccttg

SEQ ID NO: 873537 - DNA, 75 bp, synthetic construct
  source 1..75: mol_type = other DNA
ttctgtcactgacgaccttttctgcttttgcaaaacagaactcggctaacagtcagaaaacgggtgcaagtaata

SEQ ID NO: 873538 - DNA, 75 bp, synthetic construct
  source 1..75: mol_type = other DNA
gctaaaaaaccgattcgtacacctgaagacttgaaagggatgaagatccgcgtgccgaataacgtcatgcagatt

SEQ ID NO: 873539 - DNA, 75 bp, synthetic construct
  source 1..75: mol_type = other DNA
tttatccatgcgcataaagggacgataggtgcggtgcgtcgtgtggtcgagccgctcgggtatctgattaacgtg

SEQ ID NO: 873540 - DNA, 75 bp, synthetic construct
  source 1..75: mol_type = other DNA
atgagagctggccggaagaaaccaaacgcgaggttatccgcagcacgtggtttatccatgcgcataaagggacga

SEQ ID NO: 873541 - DNA, 75 bp, synthetic construct
  source 1..75: mol_type = other DNA
caggggtgggcaccaaagaaagaagagctagtgcttgcaagcacagtcgagttagaggggccagttgcactccct

SEQ ID NO: 873542 - DNA, 75 bp, synthetic construct
  source 1..75: mol_type = other DNA
tcccgaagagattcagttcaataagctggtcttcctcaagcactacagcggtaaatcacgacgacagttcgagga

SEQ ID NO: 873543 - DNA, 75 bp, synthetic construct
  source 1..75: mol_type = other DNA
aatgaagacatttcaaggacgagacattaccggtacagcagaacgccgctacctcttccctatgcagctgccggc

SEQ ID NO: 873544 - DNA, 75 bp, synthetic construct
  source 1..75: mol_type = other DNA
caaggttttactttgcgggatattgatcgtttctatccacagcaaagaccgctctttggtcaactactggaatcc

SEQ ID NO: 873545 - DNA, 75 bp, synthetic construct
  source 1..75: mol_type = other DNA
tgggagtacctttataactacgctaaaaagcaccaggcaaaaggtaatggatttggcttcggactggtaaatcca

SEQ ID NO: 873546 - DNA, 75 bp, synthetic construct
  source 1..75: mol_type = other DNA
atctgaagctccatgatggcttttcgttaagtggtgtatcggctctttatccttcacgacggccaacccttgggg

SEQ ID NO: 873547 - DNA, 75 bp, synthetic construct
  source 1..75: mol_type = other DNA
atgagtgattcgcgcctgctgccgatcggctcatctccgcttgaagtcgccgctgcaaaagcctgtgcggaaatt

SEQ ID NO: 873548 - DNA, 75 bp, synthetic construct
  source 1..75: mol_type = other DNA
tctctgaactcttagaacggaattatattaaatatatttttggcgctcgttttttacgcttgtatgagaaaatgc

SEQ ID NO: 873549 - DNA, 75 bp, synthetic construct
  source 1..75: mol_type = other DNA
tgctgcatattaagttattgaatgttttattaagttgcactgtgatcctcgcaagttcttattacgcagttgctt

SEQ ID NO: 873550 - DNA, 75 bp, synthetic construct
  source 1..75: mol_type = other DNA
ttgctgaactcttagagcgcaattatattaaatacatttttggcgctcgctttttacgcttgtatgagaaaatgc

SEQ ID NO: 873551 - DNA, 75 bp, synthetic construct
  source 1..75: mol_type = other DNA
gtttatccggacaacccgcagagtgttacgcgtacgctttctgcccgttattacaaagatggtgcggaaatttta

SEQ ID NO: 873552 - DNA, 75 bp, synthetic construct
  source 1..75: mol_type = other DNA
actcgtcagaaccgtattgatatttactgagagctcagatcaactttccagggcaacagatcgcgtacccggttt

SEQ ID NO: 873553 - DNA, 75 bp, synthetic construct
  source 1..75: mol_type = other DNA
cgggaacatttaccgttgaagtcggcacgctggacagtggcgtgacggaggaaatgtatctggaaatggagccgg

SEQ ID NO: 873554 - DNA, 75 bp, synthetic construct
  source 1..75: mol_type = other DNA
ctggcagatgacgtttacgaagtggtactgcgtgttaccgtaacggcctccttgggcgaagaaaccgcgttcctg

SEQ ID NO: 873555 - DNA, 75 bp, synthetic construct
  source 1..75: mol_type = other DNA
gcctgaacattacccgggacattcccggctacctgttcgccggtggtgtggcttacgacggcgatgtaattacgg

SEQ ID NO: 873556 - DNA, 75 bp, synthetic construct
  source 1..75: mol_type = other DNA
tttcttcgatcacgttgatattccagcagaaaatatcaaccttctcaacggcaacgccccggatatcgacgccga

SEQ ID NO: 873557 - DNA, 75 bp, synthetic construct
  source 1..75: mol_type = other DNA
ctgaaccatgggaaatatcaaaattaccagagattgcagatattaacatggggcaatcgccatcaagctcagatg

SEQ ID NO: 873558 - DNA, 75 bp, synthetic construct
  source 1..75: mol_type = other DNA
aaatattaataatattaagccagcaagctttgatttgataaatataccaatcccaccacttgccgaacaaaaaat

SEQ ID NO: 873559 - DNA, 75 bp, synthetic construct
  source 1..75: mol_type = other DNA
ttctggttggttttattgcaggttattttgttaatgccatcgcctatcacctctcgccgttggaggataaaacgg

SEQ ID NO: 873560 - DNA, 75 bp, synthetic construct
  source 1..75: mol_type = other DNA
atcgccaggcaatgaaaaaactctcttcaggtcgcggaaatgtgctggcgcaggcagaagcgtttcgcggtttag

SEQ ID NO: 873561 - DNA, 75 bp, synthetic construct
  source 1..75: mol_type = other DNA
acaattctattttgtgcgggtaagtaatgaggctggaggcgttgtggatatctcaatcatggtttacgcagttat

SEQ ID NO: 873562 - DNA, 75 bp, synthetic construct
  source 1..75: mol_type = other DNA
agctcttataatgggccgattttacacgcagataaacaatcagtatatcagcaggtaggtaagcagattttcaag

SEQ ID NO: 873563 - DNA, 75 bp, synthetic construct
  source 1..75: mol_type = other DNA
cggtgatcattatggtcacggcggccatctgcacgttgctgattgccacactgattaccccgttcgccacccgca

SEQ ID NO: 873564 - DNA, 75 bp, synthetic construct
  source 1..75: mol_type = other DNA
ctgcggtcggttccggagcagccgaatgatgaagcttatcaacgcgatgatgaatataatcagcagtcgcgctag

SEQ ID NO: 873565 - DNA, 75 bp, synthetic construct
  source 1..75: mol_type = other DNA
ggatgcaagggatttttctgcgcttgcgaatgctgccgtaaatttttatgtcggtggtgtgtcgacaaaaccgaa

SEQ ID NO: 873566 - DNA, 75 bp, synthetic construct
  source 1..75: mol_type = other DNA
tgaccttcaccggctcggtcgtggcattcggtaagttgtgcggcaaaatttcgtctaaaccgctgatgctgccaa

SEQ ID NO: 873567 - DNA, 75 bp, synthetic construct
  source 1..75: mol_type = other DNA
tgccagtggtggtgtcgatgctgaactcgtactccggctgggcggctgcggctgcgggctttatgctcagcaacg

SEQ ID NO: 873568 - DNA, 75 bp, synthetic construct
  source 1..75: mol_type = other DNA
ccacctgggtgcagattgtcaaagactggatgaaaacgaaaggggataaccgcgctgacagacaatacgcagggg

SEQ ID NO: 873569 - DNA, 75 bp, synthetic construct
  source 1..75: mol_type = other DNA
aactcataccagctactatattgcagatcaactggttagaaacagaaatgctgatgatttattcgaaattgttgt

SEQ ID NO: 873570 - DNA, 75 bp, synthetic construct
  source 1..75: mol_type = other DNA
cagttattgcgttggtgggtgtggcaattggctggctgtttgccagttatcaacatgcgcagcaaaaagccgagc

SEQ ID NO: 873571 - DNA, 75 bp, synthetic construct
  source 1..75: mol_type = other DNA
cgccgttcgtcgtgcagaccgtaaaccccgtatttgtatgctccgcaccgttgccggtgatgagcacgccgcacg

SEQ ID NO: 873572 - DNA, 75 bp, synthetic construct
  source 1..75: mol_type = other DNA
gtgactgcagccgttgcattaactgaccacgacggactgcgaattgcgctggatggcgttgccagtaaagccctg

SEQ ID NO: 873573 - DNA, 75 bp, synthetic construct
  source 1..75: mol_type = other DNA
aaagatgtggtgatcgacgccaaaatgacgctggtcgcctatgaacgctatttcaacgctgaagatgactacaca

SEQ ID NO: 873574 - DNA, 75 bp, synthetic construct
  source 1..75: mol_type = other DNA
acgggcgctaaaaggcgacaataaaacccagggtaactggggcgaagtggtattaacgcgagtactggaggcttc

SEQ ID NO: 873575 - DNA, 75 bp, synthetic construct
  source 1..75: mol_type = other DNA
acccagggcaactggggcgaggtagtattgacgcgggtgctggaggcttccggtctgcgtgaagggtatgaatat

SEQ ID NO: 873576 - DNA, 75 bp, synthetic construct
  source 1..75: mol_type = other DNA
aatcagtcgaccattggtggtgaaatcgccgcccggcaggaagagtcggtgctgcttcccgtcctgctggcactg

SEQ ID NO: 873577 - DNA, 75 bp, synthetic construct
  source 1..75: mol_type = other DNA
ttgccggtgatgaacacgccgcacgtctttccctcgttcgcgattacgtcctctcgtttgctggccgtctgccgg

SEQ ID NO: 873578 - DNA, 75 bp, synthetic construct
  source 1..75: mol_type = other DNA
tcaaagacaaaaatggtaatacgcacccaacgtgtataccaatggcgggatttcttgttgggggaaccggtcagc

SEQ ID NO: 873579 - DNA, 75 bp, synthetic construct
  source 1..75: mol_type = other DNA
gggataacggtgcattgcggattggcgcaatgtctcgcttgcaaacactgcgtgatgcacggtttattcctgcag

SEQ ID NO: 873580 - DNA, 75 bp, synthetic construct
  source 1..75: mol_type = other DNA
cgcaatgtctcgcttgcagtcactgcgtgatgcgcgatttattcctgcagcactgcgtgaagctctcggttttgt

SEQ ID NO: 873581 - DNA, 75 bp, synthetic construct
  source 1..75: mol_type = other DNA
caggaagatttgcggggcagcgtggcctataaacgctatatcacgggagttctggtagccgacctgtatgccgac

SEQ ID NO: 873582 - DNA, 75 bp, synthetic construct
  source 1..75: mol_type = other DNA
taaacactgcctccctcagcaatccgggtaaaatcaccgctgacacgctgaacgtcagggcgaccacgctggatg

SEQ ID NO: 873583 - DNA, 75 bp, synthetic construct
  source 1..75: mol_type = other DNA
gagatgtgaccaacagcggccggattcaggggcagaacatcactctggatgccagcagcctgaccagcagcggtg

SEQ ID NO: 873584 - DNA, 75 bp, synthetic construct
  source 1..75: mol_type = other DNA
ctgcttcggcaaccggtcagttgaccagtaccggcgatatcatgagccagggtgacaccacgctgaacgcagcca

SEQ ID NO: 873585 - DNA, 75 bp, synthetic construct
  source 1..75: mol_type = other DNA
gcagggggaggcctcactcaccgttaacacacagaggcttgataatcagcagaacggcacgctgtacagtgctgc

SEQ ID NO: 873586 - DNA, 75 bp, synthetic construct
  source 1..75: mol_type = other DNA
ctcacggtttactggcgcgttgccgtcgcgttttaagggattattaccatgcatcagcctcccgttcgcttcact

SEQ ID NO: 873587 - DNA, 75 bp, synthetic construct
  source 1..75: mol_type = other DNA
tgccggtgcaaaagacagtgcccgcgttaccgtcagcggtacacttgaaaaccgcggcagactcgtcagcgatga

SEQ ID NO: 873588 - DNA, 75 bp, synthetic construct
  source 1..75: mol_type = other DNA
gctgaaaatgtcacccttaccaccacgggtgataccacactgaaaggccgcagcgttgccgggaaaatactcacc

SEQ ID NO: 873589 - DNA, 75 bp, synthetic construct
  source 1..75: mol_type = other DNA
acccgatgtatcgctatcagcttgagaaaaaagcggaaaaagttgtctttcgcggtgagtgggcggaagtggcgg

SEQ ID NO: 873590 - DNA, 75 bp, synthetic construct
  source 1..75: mol_type = other DNA
gaatgtctgcgcgagcgaatgacccaggcggcgattgctgtggtggaagacccgtttgagatccgtcttgaacgc

SEQ ID NO: 873591 - DNA, 75 bp, synthetic construct
  source 1..75: mol_type = other DNA
ctgaagggcgaaggtgatgtgccgaaagttgctgttgataccggcgctctcggtggaatgtacgccaggcgtatt

SEQ ID NO: 873592 - DNA, 75 bp, synthetic construct
  source 1..75: mol_type = other DNA
atgtacgccaggcgtattcatctgacctccactgaaaatggtgtcggggttaatcttggtaacctttatgcccga

SEQ ID NO: 873593 - DNA, 75 bp, synthetic construct
  source 1..75: mol_type = other DNA
aacacgcagaccatcaccaacagcggcacgctgctgggtaatcagggcctgacaataaaagggaacaacctgaac

SEQ ID NO: 873594 - DNA, 75 bp, synthetic construct
  source 1..75: mol_type = other DNA
ttaattgcgactgtagataagagggctgatactaacaacgtcgtgacaccgggttcagtttttgctcgaggtgta

SEQ ID NO: 873595 - DNA, 75 bp, synthetic construct
  source 1..75: mol_type = other DNA
ctctgctctgcgccgtggtgctggatggtatgaccgggacgaaacacaaggcgaatagcgaactggttggacagg

SEQ ID NO: 873596 - DNA, 75 bp, synthetic construct
  source 1..75: mol_type = other DNA
tacggcattgtgcgtgctgattaactaccttgcaccggaatccgcattcggcctgttaatggcgctggtggtatc

SEQ ID NO: 873597 - DNA, 75 bp, synthetic construct
  source 1..75: mol_type = other DNA
gggctggtgatgatgatggcgattattatgttctcgtttggtggtctggagctagtggggatcaccgccgcagag

SEQ ID NO: 873598 - DNA, 75 bp, synthetic construct
  source 1..75: mol_type = other DNA
tgatgatgcagcactgtatgcgaacaccatcactgtaactaacgacggtctgctggatgtgaacgttgatcagtt

SEQ ID NO: 873599 - DNA, 75 bp, synthetic construct
  source 1..75: mol_type = other DNA
ggcgttgccgaccattaatgtgggtgatgctgccattggcattgtgacgcttggcattctggttttctggccgcg

SEQ ID NO: 873600 - DNA, 75 bp, synthetic construct
  source 1..75: mol_type = other DNA
ctggtcttgcgtgttattggcccgctgtttttcgcggcggctgaaggtctgttcaccgacctggaatcacgtctg

SEQ ID NO: 873601 - DNA, 75 bp, synthetic construct
  source 1..75: mol_type = other DNA
cagcccggggaaacacagtgtacggcggtatttaatattgttggggaagatggacaggtcaccgaagctgtactg

SEQ ID NO: 873602 - DNA, 75 bp, synthetic construct
  source 1..75: mol_type = other DNA
ccggcagataacgtgaaggataacagtgaagttaccggggttgccaaagatccgagcggtaatgaaagtgacccg

SEQ ID NO: 873603 - DNA, 75 bp, synthetic construct
  source 1..75: mol_type = other DNA
aaccacggagaacgtgacacataccgtgactaaagatgaagtggctgccggtaaagtatccatggatattccgaa

SEQ ID NO: 873604 - DNA, 75 bp, synthetic construct
  source 1..75: mol_type = other DNA
gggagagtgcccttggaggaggcggtagtgggggcggtctctgggtatctctgtctgtgggggctgtactggctt

SEQ ID NO: 873605 - DNA, 75 bp, synthetic construct
  source 1..75: mol_type = other DNA
gacgtccccgcgaccctcgccgcgctggcgcacaggctgactttgccggtgccctgcatttttggctcgcgtgga

SEQ ID NO: 873606 - DNA, 75 bp, synthetic construct
  source 1..75: mol_type = other DNA
tggacatctcgcattgtacctattgctgttcgccatcggcatcagcggctatctgatctcaactgccgatggtaa

SEQ ID NO: 873607 - DNA, 75 bp, synthetic construct
  source 1..75: mol_type = other DNA
aagtggtcgataaaaccgccgtccagcacgttattctgacccgtatgggcgatcagctatctacggcaaaaggca

SEQ ID NO: 873608 - DNA, 75 bp, synthetic construct
  source 1..75: mol_type = other DNA
tcgacgccatcctcaacggttcgctggataacgcagaaaccttcactttgccgatgtttaacctggcgatcccaa

SEQ ID NO: 873609 - DNA, 75 bp, synthetic construct
  source 1..75: mol_type = other DNA
agatggcactatcgactttgatgatggttcaaaaaccgagaacacccgcgtttcttatccgatctatcacatcga

SEQ ID NO: 873610 - DNA, 75 bp, synthetic construct
  source 1..75: mol_type = other DNA
gctgccgccggtttctcgtctgactgccgatcaaacccagtaccacttcctctctggcttcaccgccaaactggc

SEQ ID NO: 873611 - DNA, 75 bp, synthetic construct
  source 1..75: mol_type = other DNA
ggttcaaaaaccgagaacacccgcgtttcttatccgatctatcacatcgaaaacatcgttaagccggtttccaaa

SEQ ID NO: 873612 - DNA, 75 bp, synthetic construct
  source 1..75: mol_type = other DNA
cgacaacaaacctctctctccggaaacctggcagcatctgaaaggcctggtgaccaaacagctttccggcaaacg

SEQ ID NO: 873613 - DNA, 75 bp, synthetic construct
  source 1..75: mol_type = other DNA
gcttctccggaacagtggcaggaaaaagccgaaaccctggcgaaactgtttatcgacaacttcgataaatacacc

SEQ ID NO: 873614 - DNA, 75 bp, synthetic construct
  source 1..75: mol_type = other DNA
tccattaaagatacccgcgccattatcgacgctattctgaatggttcgctggataacgcagaaaccttcactctg

SEQ ID NO: 873615 - DNA, 75 bp, synthetic construct
  source 1..75: mol_type = other DNA
aaacgtcaccgtgcgtgaagatggcactatcgactttgatgatggttcaaaaaccgagaacacccgcgtttctta

SEQ ID NO: 873616 - DNA, 75 bp, synthetic construct
  source 1..75: mol_type = other DNA
ggcgaaatatccgtttaccgctatcactggcgttaacaccttgttcaatgcgttgctgaacaataaagagttcca

SEQ ID NO: 873617 - DNA, 75 bp, synthetic construct
  source 1..75: mol_type = other DNA
agctggcaggtttcaaaccagactttatcgttatgaacggcgcgaagtgcactaacccgcagtggaaagaacagg

SEQ ID NO: 873618 - DNA, 75 bp, synthetic construct
  source 1..75: mol_type = other DNA
aagccgaaaccctggcgaaactgtttatcgacaacttcgataaatacaccgacaccccagcgggtgccgcgctgg

SEQ ID NO: 873619 - DNA, 75 bp, synthetic construct
  source 1..75: mol_type = other DNA
cgacaacaaacctctctctccggaaacctggcagcatctgaaaggcctggtgaccaggcagctttccggcaaacg

SEQ ID NO: 873620 - DNA, 75 bp, synthetic construct
  source 1..75: mol_type = other DNA
tttcttatccgatctatcatatcgaaaacatcgttaagccagtctccaaagcgggccacgcgactaaagtgatct

SEQ ID NO: 873621 - DNA, 75 bp, synthetic construct
  source 1..75: mol_type = other DNA
ttaacaacccgttctttgtatcgctgaaagatggcgcgcagaaagaggcggataaacttggctataacctggtgg

SEQ ID NO: 873622 - DNA, 75 bp, synthetic construct
  source 1..75: mol_type = other DNA
tttttctggcgaaaagctaacttttaattttttcaagcttgataaacagagcggagaaaaagtggcggctactta

SEQ ID NO: 873623 - DNA, 75 bp, synthetic construct
  source 1..75: mol_type = other DNA
aatcacaggttgagggatttgagctggcttcgaaattcatcaaagatgttagttcttctcttagccttacaccgg

SEQ ID NO: 873624 - DNA, 75 bp, synthetic construct
  source 1..75: mol_type = other DNA
gtagataaatggcatggtctgatggagaacccaacaacagcagatgccatcctggacagactggtacataactca

SEQ ID NO: 873625 - DNA, 75 bp, synthetic construct
  source 1..75: mol_type = other DNA
ggccgggagcctgatacggcagcgggaaacgcctcagacctacgacgaactgtcgttcgaggaaaggctgacgct

SEQ ID NO: 873626 - DNA, 75 bp, synthetic construct
  source 1..75: mol_type = other DNA
ctggtaaatattatgaaatctttcgagggaaggatagattgattatggtgtcaaacggtgccggtcttttacacg

SEQ ID NO: 873627 - DNA, 75 bp, synthetic construct
  source 1..75: mol_type = other DNA
gagggaaatttcaaaggcgcaggattctttgatttctatgtatgcaaagaaaagaaatcatgcatggtttgattt

SEQ ID NO: 873628 - DNA, 75 bp, synthetic construct
  source 1..75: mol_type = other DNA
agactatcacttatttaagtgatactggttgtctggagattcagggggccagtctagtcaaccaaaagactgctt

SEQ ID NO: 873629 - DNA, 75 bp, synthetic construct
  source 1..75: mol_type = other DNA
tcaatcgtagtaatcatccggcattacttgctggcctcgatattatgaagagtaaagttgatgcacatccatatt

SEQ ID NO: 873630 - DNA, 75 bp, synthetic construct
  source 1..75: mol_type = other DNA
tccgtgatctaggaaaaagtgaaggatttaccatcgaacagcataaccaaattgctcgtgaggaaggggatgttt

SEQ ID NO: 873631 - DNA, 75 bp, synthetic construct
  source 1..75: mol_type = other DNA
atgcggaatattttaaggcagaaattgctggcatcaaggcaacaatcgacatgcttactaagaaagctccaaaag

SEQ ID NO: 873632 - DNA, 75 bp, synthetic construct
  source 1..75: mol_type = other DNA
cgtaatgatagtgtaaatattgaaaatagtgcaataattgttaaccgtagtaatcatcctgctctacttgaggga

SEQ ID NO: 873633 - DNA, 75 bp, synthetic construct
  source 1..75: mol_type = other DNA
tattcggaaatatcatgatattcctgctgaaacgccgtatgcgccgggagaacacattaagggagggcagcaata

SEQ ID NO: 873634 - DNA, 75 bp, synthetic construct
  source 1..75: mol_type = other DNA
actgagcgcgaagcacgcgcccagctgccgcacgcacatcttatttttgtcgcccgtatccgtcaggaggtgact

SEQ ID NO: 873635 - DNA, 75 bp, synthetic construct
  source 1..75: mol_type = other DNA
gtgcctgacagacagcattgcaatattcaccgttaccgctgccactgagcgcgaagcacgcgcccagctgccgca

SEQ ID NO: 873636 - DNA, 75 bp, synthetic construct
  source 1..75: mol_type = other DNA
aaaccgactcaggaagcaaaaaccacaaatacggcgaaaattcattcacggaacgaatgagcaaaacgtagtttt

SEQ ID NO: 873637 - DNA, 75 bp, synthetic construct
  source 1..75: mol_type = other DNA
ccccctcggcaatctatcagcctattcagaaactgcgcgttatattccctgacctattgtttattcgcaaaggcc

SEQ ID NO: 873638 - DNA, 75 bp, synthetic construct
  source 1..75: mol_type = other DNA
accactatcgcattcggcccgtggcttgcgctcggcagcatgataaacctggggtatctggcctggatctcttat

SEQ ID NO: 873639 - DNA, 75 bp, synthetic construct
  source 1..75: mol_type = other DNA
caaaccatcgacgtggtggtttcttctatggggaatgccaaaagtttgcgtggcggcacgttgttgatgacaccg

SEQ ID NO: 873640 - DNA, 75 bp, synthetic construct
  source 1..75: mol_type = other DNA
acttccaccatttggacgtcaggggcaaaccattgacgtggtggtctcttccatgggaaatgccaaaagtctgcg

SEQ ID NO: 873641 - DNA, 75 bp, synthetic construct
  source 1..75: mol_type = other DNA
gtgattaaatttctctctgcattaattcttctactggttacgacggcggctcaggctgagcgtattcgcgatctc

SEQ ID NO: 873642 - DNA, 75 bp, synthetic construct
  source 1..75: mol_type = other DNA
cgccctaacacaccacgctacagcgatgatggtttctgttgttgtaatttgttgcgttggttttttctgccactg

SEQ ID NO: 873643 - DNA, 75 bp, synthetic construct
  source 1..75: mol_type = other DNA
aagttctttacgtgttaattctgttgctcttgcctgttcgcgtgcagctttccgctttcgttcatgttcagttat

SEQ ID NO: 873644 - DNA, 75 bp, synthetic construct
  source 1..75: mol_type = other DNA
tggacggaacgcgaagcgcgtaaccgttgcccgtcaggttgcgttgctgtattcgccgcccgtatccgtcaggag

SEQ ID NO: 873645 - DNA, 75 bp, synthetic construct
  source 1..75: mol_type = other DNA
gaagcgtgctgttgatttggccgttgaccttcaggacggcaaagccgtccctcggagttctgtcaataactgtac

SEQ ID NO: 873646 - DNA, 75 bp, synthetic construct
  source 1..75: mol_type = other DNA
caagggatcaagtggtctgatatagaatctctggttaaagcgttaggcggagaaattaaggaaggtagggggggc

SEQ ID NO: 873647 - DNA, 75 bp, synthetic construct
  source 1..75: mol_type = other DNA
gttgcgtgtttccatcggcctcatccgtcgccagataccgataaaggcgctgtagaaagcgtgcgtgactggtga

SEQ ID NO: 873648 - DNA, 75 bp, synthetic construct
  source 1..75: mol_type = other DNA
aggcgatggttatactgtgtggctcccggtcccgcaggatcttgagctaaattacgcgctgctgatgcgtaattt

SEQ ID NO: 873649 - DNA, 75 bp, synthetic construct
  source 1..75: mol_type = other DNA
taagagagcaattcattgaatttaatgaaattttactctttgaggatctggcgttgtttaacctgaaactggcgg

SEQ ID NO: 873650 - DNA, 75 bp, synthetic construct
  source 1..75: mol_type = other DNA
ggacagccaatggcaccgatggtcaggcgtacatggacaataacggtaactggctttgcggtgcgcaaattattc

SEQ ID NO: 873651 - DNA, 75 bp, synthetic construct
  source 1..75: mol_type = other DNA
ggactaataatactcagatcgcaagcacggcttatgtgatggccgcgattgccgcacttgtagactcgtcgcctg

SEQ ID NO: 873652 - DNA, 75 bp, synthetic construct
  source 1..75: mol_type = other DNA
cagtcaacgaaccaatgcctttttaatcagcttctgcaaaaaggaattgccgcgtcttgaactggtcgcaaaaaa

SEQ ID NO: 873653 - DNA, 75 bp, synthetic construct
  source 1..75: mol_type = other DNA
gaacggtgccagcccgttggacacgcagagctatctcaccggcctttgggcgcgcattcgcgccaagctgcaccg

SEQ ID NO: 873654 - DNA, 75 bp, synthetic construct
  source 1..75: mol_type = other DNA
cagactcagggacaaaaaacgggtcatcgggcgtgattttgtccacggaacggataaacaaagcgcagcaattga

SEQ ID NO: 873655 - DNA, 75 bp, synthetic construct
  source 1..75: mol_type = other DNA
caacagcatcgccgcgaccgtatgttcgcggctttgctgcatgcgagaacggtgctttctctccagccagagtgt

SEQ ID NO: 873656 - DNA, 75 bp, synthetic construct
  source 1..75: mol_type = other DNA
aaggcaggctaccgtaacaccaaatggaatggatccaatccatccgatacgcaatgttatctcactggcctgtgg

SEQ ID NO: 873657 - DNA, 75 bp, synthetic construct
  source 1..75: mol_type = other DNA
aaatatcacgccaccaccaaagcaggctaccgtaacagcaaatggaacggcaccagcccgtcggacacgcagagc

SEQ ID NO: 873658 - DNA, 75 bp, synthetic construct
  source 1..75: mol_type = other DNA
gtattacgggtaaaaggattgagttatcaggcaatcgctgacgcaattcaagtatctcgacgctcggttattaat

SEQ ID NO: 873659 - DNA, 75 bp, synthetic construct
  source 1..75: mol_type = other DNA
cttctcccccccgacccccccattccccccgccgttaaaaatgcgattgccgcagctcgcgcccgtggcgtgaat

SEQ ID NO: 873660 - DNA, 75 bp, synthetic construct
  source 1..75: mol_type = other DNA
tgcgcgtattccgcaggaagtgaaagagaaatataccgtgctgaaaagtgcgccgtacttcctcgaaatcctcga

SEQ ID NO: 873661 - DNA, 75 bp, synthetic construct
  source 1..75: mol_type = other DNA
aacccgccatcctcgaccaggccatcgcgcgcattccgcaggaagtaaaagagaaatacaccgtgctgaaaagtg

SEQ ID NO: 873662 - DNA, 75 bp, synthetic construct
  source 1..75: mol_type = other DNA
tcagcgtggaagataaagctatcctgcgtggattaagcctcgccgttcgtcccggcgaagttcacgccattatgg

SEQ ID NO: 873663 - DNA, 75 bp, synthetic construct
  source 1..75: mol_type = other DNA
atgatttgacatcatttatagtaaatcatcttggcatcacagatgttggggcaaaactcaatggtcgcgctgtgt

SEQ ID NO: 873664 - DNA, 75 bp, synthetic construct
  source 1..75: mol_type = other DNA
atgaatccttcgttgccaccattccgctggtgttctgcgaagcggagaaaatggaccccaatacccagttcctga

SEQ ID NO: 873665 - DNA, 75 bp, synthetic construct
  source 1..75: mol_type = other DNA
tactggttggtttggtaataccggtaatgccagtgattacaatggtaatggctggaacgctgatgatatcgcatt

SEQ ID NO: 873666 - DNA, 75 bp, synthetic construct
  source 1..75: mol_type = other DNA
cgagtgcatgacaactgattgtgctgatcgtgcgaatgattattaccatgaccgtctggcgctgactgttgataa

SEQ ID NO: 873667 - DNA, 75 bp, synthetic construct
  source 1..75: mol_type = other DNA
ctgtcggtgttgataacatcaatactcaatatgacgaaaatggccatatcgtaggaaacgaagtttaccagagcg

SEQ ID NO: 873668 - DNA, 75 bp, synthetic construct
  source 1..75: mol_type = other DNA
cgctgccaacaggattttctgccagtcagtgctcatggagtgtgagcaatgcagaaaaccctcaaggttggaagc

SEQ ID NO: 873669 - DNA, 75 bp, synthetic construct
  source 1..75: mol_type = other DNA
cagataccgatggcgacggtgatgttgataacgatatccttgatggtaagatcgataaaaacagcccgttggatg

SEQ ID NO: 873670 - DNA, 75 bp, synthetic construct
  source 1..75: mol_type = other DNA
acaccatcactgttaaagactctactgtgacctctggttcatggtctgatgaaggtactactggttggttcggta

SEQ ID NO: 873671 - DNA, 75 bp, synthetic construct
  source 1..75: mol_type = other DNA
aaacgttggtttttccggcggcgagaaaaaagcgcaacgatattttgcaaatggcggtgctggaaccggagttat

SEQ ID NO: 873672 - DNA, 75 bp, synthetic construct
  source 1..75: mol_type = other DNA
ggatcaagacagccagactgcctacatctactcttctgctcacttcgcgaacaacgtctttgttgatggtagctt

SEQ ID NO: 873673 - DNA, 75 bp, synthetic construct
  source 1..75: mol_type = other DNA
gtgataacaggtgtctggaaatataggggcaaatccagcaactatgtaaactatagtggttttgtctattacaac

SEQ ID NO: 873674 - DNA, 75 bp, synthetic construct
  source 1..75: mol_type = other DNA
acaacgacctgtctgcaaccatgagcaacggtacttacgttgacggtagcactgaagtggtcaacaaaaactggc

SEQ ID NO: 873675 - DNA, 75 bp, synthetic construct
  source 1..75: mol_type = other DNA
tttagttatgggcttgggcgaaattgttggctcttcaatctgacccgtatctggtcatatacagcaatccggcag

SEQ ID NO: 873676 - DNA, 75 bp, synthetic construct
  source 1..75: mol_type = other DNA
atgggtgatgttgcctttaccagcacctggaatagtaattttgatccgaatggtcatgattccaacggtgacggg

SEQ ID NO: 873677 - DNA, 75 bp, synthetic construct
  source 1..75: mol_type = other DNA
gataacaatatctcagttaccgattccacagtgacttcaggttctgtaactactctggaagacagtggtttctat

SEQ ID NO: 873678 - DNA, 75 bp, synthetic construct
  source 1..75: mol_type = other DNA
gcaggcgaagggatctttatggcttttcagtatccagtggaaatccctggcgtcagtaaccagtttttcctgcaa

SEQ ID NO: 873679 - DNA, 75 bp, synthetic construct
  source 1..75: mol_type = other DNA
gaagattatgaagtgacgggcggaacggtggagtttaagggcaaagatttgctagagctgtcgccggaagatcgt

SEQ ID NO: 873680 - DNA, 75 bp, synthetic construct
  source 1..75: mol_type = other DNA
tccagtatccggtggaaatccctggcgtcagtaaccagtttttcctgcaaacggcgctcaatgcggtgcgcagct

SEQ ID NO: 873681 - DNA, 75 bp, synthetic construct
  source 1..75: mol_type = other DNA
gaactgggtgtagatgcaggttataccttcacctacagcgaagaccaggctctgactccgtacttcaaactggct

SEQ ID NO: 873682 - DNA, 75 bp, synthetic construct
  source 1..75: mol_type = other DNA
ggataacagctctgtagacaacgttgttgctgcaaccggtaactacaaagttcgtatcgacaacgcaactggcgc

SEQ ID NO: 873683 - DNA, 75 bp, synthetic construct
  source 1..75: mol_type = other DNA
aacgaaacttatactaccgaatctcatacttgggataacaatatctctgtaaaagattccacagtgacttctggt

SEQ ID NO: 873684 - DNA, 75 bp, synthetic construct
  source 1..75: mol_type = other DNA
ctcctgctgaaatagcttttttgacagatgcggccaggaagcaactggatagcaaacatttggctggccctgatt

SEQ ID NO: 873685 - DNA, 75 bp, synthetic construct
  source 1..75: mol_type = other DNA
cccgtttgctggctggtccggctggtggggcagtagcattaatccattatctgaatgaaatgtgtcaacacagag

SEQ ID NO: 873686 - DNA, 75 bp, synthetic construct
  source 1..75: mol_type = other DNA
atttatctaacccatttaagttaaaccctaaaggtacaccattaaaaaattacttaaatacaattggtaataaat

SEQ ID NO: 873687 - DNA, 75 bp, synthetic construct
  source 1..75: mol_type = other DNA
tttccagcctcttgacggtgggcctgtgcaatcgttatcagatgcgtatagcgattattcagtgctgctattgat

SEQ ID NO: 873688 - DNA, 75 bp, synthetic construct
  source 1..75: mol_type = other DNA
ttgttggtgaggactggcagcaagatttccagcctcttgacggtgggcctgtgcaatcgttatcagatgcgtata

SEQ ID NO: 873689 - DNA, 75 bp, synthetic construct
  source 1..75: mol_type = other DNA
gaccagcgcgagaaaacaatcgctttggcctggattggtgagattgcaggagaaatgcgacacgatcttagaaaa

SEQ ID NO: 873690 - DNA, 75 bp, synthetic construct
  source 1..75: mol_type = other DNA
ggacaaccatatcaaccagcaggctgaacgaattgaatcgctggagaagaagaatggagagctgggcagagagct

SEQ ID NO: 873691 - DNA, 75 bp, synthetic construct
  source 1..75: mol_type = other DNA
tgttagcagggttgatgtgggggcttatttttgtcgggccgttgatcgtaccggaatacccggcgatgttgcagt

SEQ ID NO: 873692 - DNA, 75 bp, synthetic construct
  source 1..75: mol_type = other DNA
ggaaaatcattaccccgtttctggcccggggattttttcccggtattctacgcctgtcatctggctgtgctgggc

SEQ ID NO: 873693 - DNA, 75 bp, synthetic construct
  source 1..75: mol_type = other DNA
gctggtggcagaccccagtgttgggggcggctcaagcatcgacgttgccaatgaacttggaatccgtttcaaagg

SEQ ID NO: 873694 - DNA, 75 bp, synthetic construct
  source 1..75: mol_type = other DNA
ctggcaagcaaaggtcaggcaagttcttcaagatgccaggttctttagtcgtatcgaggtaggtgcctatgcact

SEQ ID NO: 873695 - DNA, 75 bp, synthetic construct
  source 1..75: mol_type = other DNA
ccccggcggttttcgccgtatcacatgccgcatcatcctttttgatgaggtggacgggtatccggcagggggcgc

SEQ ID NO: 873696 - DNA, 75 bp, synthetic construct
  source 1..75: mol_type = other DNA
atgcactgtagaggcttcggttttatccgtgaggactggcagcaagatttccagccttttgacggtgggcctgtg

SEQ ID NO: 873697 - DNA, 75 bp, synthetic construct
  source 1..75: mol_type = other DNA
atgaccgctaagaatatttccctcgaccgctataaacagcgtttctttggcgactttctagagcttcccggcctg

SEQ ID NO: 873698 - DNA, 75 bp, synthetic construct
  source 1..75: mol_type = other DNA
acgggttccggtaaaacaacctatatgaagagtcttatcgatttcataccattgaatacgcggctgattacgatt

SEQ ID NO: 873699 - DNA, 75 bp, synthetic construct
  source 1..75: mol_type = other DNA
tcatacgctggcatcatttcggggagatgaaatcggcgagaccaagccattactttcagcaacactggaatcagg

SEQ ID NO: 873700 - DNA, 75 bp, synthetic construct
  source 1..75: mol_type = other DNA
tgtggttctggccgatcgacaaagccgatgagttaccggatcgcggtacctggttgtttgagattgaaaccctgc

SEQ ID NO: 873701 - DNA, 75 bp, synthetic construct
  source 1..75: mol_type = other DNA
tgctggcggatgataccgcgctacgtgcactcatcccacaacggctgatcgctttcgatgacgcggtacgtagca

SEQ ID NO: 873702 - DNA, 75 bp, synthetic construct
  source 1..75: mol_type = other DNA
aatgaaacctgacagaattttactggcggaaattaaaggtggcgatgcctgggattttgtgaaagttgctggttc

SEQ ID NO: 873703 - DNA, 75 bp, synthetic construct
  source 1..75: mol_type = other DNA
ccaatgaagacgttgaaattgcctcacagcgggcagggctgtatgagatggtgtgcaatctgccgcagggattcc

SEQ ID NO: 873704 - DNA, 75 bp, synthetic construct
  source 1..75: mol_type = other DNA
agataaacgaatcaaaccgttcattaagcgccgtaattttacaaaagaaggggcaggagatctgagcagcgtaaa

SEQ ID NO: 873705 - DNA, 75 bp, synthetic construct
  source 1..75: mol_type = other DNA
agaggttcgcgaaatggttaaaaaggaagggcaacgcccccagaatgggggcatttcaggcggcgggagtcgctt

SEQ ID NO: 873706 - DNA, 75 bp, synthetic construct
  source 1..75: mol_type = other DNA
ggaatgcttgatagtaagccttatccagttcaattatctgtggctcagactaatcgatatacatctcaggaacgg

SEQ ID NO: 873707 - DNA, 75 bp, synthetic construct
  source 1..75: mol_type = other DNA
caactggatagcgaggcgtgtcgggaactggcgcgtcaggcgtgcgagtgccgcagcgcgcaggaaattgaagcg

SEQ ID NO: 873708 - DNA, 75 bp, synthetic construct
  source 1..75: mol_type = other DNA
gaggtcgatttcttcagtatcggctccaacgatatgacccagtatctgtatgcggtcgatcgtaataacccgcgc

SEQ ID NO: 873709 - DNA, 75 bp, synthetic construct
  source 1..75: mol_type = other DNA
ctgattcaaatcaacattagcgatgaaaacagtaagtcaggcattcaactggcagagctggacgagctggcagca

SEQ ID NO: 873710 - DNA, 75 bp, synthetic construct
  source 1..75: mol_type = other DNA
atcaggcagtgcgtctggacgggttacgtttgctgttaattgaagataatccgctaactcagcgaattaccgttg

SEQ ID NO: 873711 - DNA, 75 bp, synthetic construct
  source 1..75: mol_type = other DNA
cgatgagccatgagatccgcacaccgctgtacggtattctcggcaccgcacagctgctggcagataaccccgcac

SEQ ID NO: 873712 - DNA, 75 bp, synthetic construct
  source 1..75: mol_type = other DNA
gcagcaatgttcatgcactgaatcgccaccgcgaacagctggcggcgcaggtcaaagcgcgtacagctgaattgc

SEQ ID NO: 873713 - DNA, 75 bp, synthetic construct
  source 1..75: mol_type = other DNA
agccagccaggcaaaatcggcgtttctggcggcgatgagccatgagatccgcacaccgctgtacggtattctcgg

SEQ ID NO: 873714 - DNA, 75 bp, synthetic construct
  source 1..75: mol_type = other DNA
ctctggcgcgtggtttatcgctcagtcacgcgtccacttgccgaacaaacgcaggcgctgcaacggttgctggac

SEQ ID NO: 873715 - DNA, 75 bp, synthetic construct
  source 1..75: mol_type = other DNA
cgctattgaacaacaggagcaggagatctcccgttcgttacgtcagcaaggggaactggtggggcggcgtctgca

SEQ ID NO: 873716 - DNA, 75 bp, synthetic construct
  source 1..75: mol_type = other DNA
atgcgtttttgccgtgtgctgacccgtggggatgtgcgtcacatagcccaggactggagtctgacagacgatgag

SEQ ID NO: 873717 - DNA, 75 bp, synthetic construct
  source 1..75: mol_type = other DNA
atccggtgttaagcagtatccaggctggctcgtggtgtgaagcatgcgaaccatacaccattaaagacatagatg

SEQ ID NO: 873718 - DNA, 75 bp, synthetic construct
  source 1..75: mol_type = other DNA
cgaagcaacattcaagaagctgataatcgacggcggaaataaatacctcaagggacttaatcctgcatggcctct

SEQ ID NO: 873719 - DNA, 75 bp, synthetic construct
  source 1..75: mol_type = other DNA
tgcgtagtcgcactgatggcgagcaatggctggtcgaagtggaagacagcggctgcggtattgatcccgcgaaac

SEQ ID NO: 873720 - DNA, 75 bp, synthetic construct
  source 1..75: mol_type = other DNA
ccagaactacagcaattgcatatatgggtgctgtagttaagttttactctttccacatcagaaatggctacaagt

SEQ ID NO: 873721 - DNA, 75 bp, synthetic construct
  source 1..75: mol_type = other DNA
gtgagaacgggggcgacggtgacgcattcgtcagggaggaacgcgaagcaatggacgttgtgttacaggcgctgg

SEQ ID NO: 873722 - DNA, 75 bp, synthetic construct
  source 1..75: mol_type = other DNA
cgctgctggaaagtaccctgcaattaatgagcggacgggtgaaaggtcgcccgattcgcctggcaacggcaattg

SEQ ID NO: 873723 - DNA, 75 bp, synthetic construct
  source 1..75: mol_type = other DNA
cggcaacaaatacgtggttggcgtgcgcaacatgctctctcctgctgactttggcccgaaactgctggaagtgat

SEQ ID NO: 873724 - DNA, 75 bp, synthetic construct
  source 1..75: mol_type = other DNA
catcatgcagatcgtcaatctgtttgaagatgaagagaatttcgaccgtttacgcgcctgccgtaccgagcagga

SEQ ID NO: 873725 - DNA, 75 bp, synthetic construct
  source 1..75: mol_type = other DNA
gttactaccaggcgattctggatgcggttgaacagcacggtccgtactttgtgctcgcaccaggcctggcaatgc

SEQ ID NO: 873726 - DNA, 75 bp, synthetic construct
  source 1..75: mol_type = other DNA
aagccgccattgcggcaggtagcacgatggttcgcatcggcactgccatctttggtgcacgtgattactctaaaa

SEQ ID NO: 873727 - DNA, 75 bp, synthetic construct
  source 1..75: mol_type = other DNA
tctggcgtgaagggtaccgctatatgaaggcaggagtcatgctggctgatttcacaccatcgggtatagcgcagc

SEQ ID NO: 873728 - DNA, 75 bp, synthetic construct
  source 1..75: mol_type = other DNA
tgacagtccctgcggtgctgctggaaaaagtgatggtgatggctggtagtgaaattatcgcctcatgctgtaggg

SEQ ID NO: 873729 - DNA, 75 bp, synthetic construct
  source 1..75: mol_type = other DNA
gcgaaccgtttgctgccgcactggtggattttgatctgccggatatcgacggtattacccttgcccgacaactgg

SEQ ID NO: 873730 - DNA, 75 bp, synthetic construct
  source 1..75: mol_type = other DNA
cgctgcgcaccagctaaaaagtagttgcgccagtctgggaatgcgcagtgccagccagttgtgcgggcaacttga

SEQ ID NO: 873731 - DNA, 75 bp, synthetic construct
  source 1..75: mol_type = other DNA
tggcaatggaaattgccgatgatataccgaccgcgttaatgggcgatccgcgacgtattcgccaggttattacca

SEQ ID NO: 873732 - DNA, 75 bp, synthetic construct
  source 1..75: mol_type = other DNA
atgcagcggctggacgatgcctttgaatatggtgcggatgtcagcattgttcacgacgttgttcgtggactgatg

SEQ ID NO: 873733 - DNA, 75 bp, synthetic construct
  source 1..75: mol_type = other DNA
tgcgttcgtcagggaagaacgcgaagcaatggacgttgtgttacaggcgcaaaacggatgttgcttcaacactcc

SEQ ID NO: 873734 - DNA, 75 bp, synthetic construct
  source 1..75: mol_type = other DNA
gatgctcagttaatggggacggagagtattcgcgaatggctgacattatttaaacaacatgccctgccacttctc

SEQ ID NO: 873735 - DNA, 75 bp, synthetic construct
  source 1..75: mol_type = other DNA
gcacttactcaacagtggcgagctgtcacggccagcctcaatatcaccttgcagccacaggacgatattcaaccg

SEQ ID NO: 873736 - DNA, 75 bp, synthetic construct
  source 1..75: mol_type = other DNA
gagaagctgcaagcgcaggccagcggcgtcgcattattagcgccagaacaggtgcaatcgctgacagaaagtttg

SEQ ID NO: 873737 - DNA, 75 bp, synthetic construct
  source 1..75: mol_type = other DNA
taaccgcgctgcaaaaccgtattcagcagctgacgccgattctggaaacgttgccgcaaagtgatgaactcccgc

SEQ ID NO: 873738 - DNA, 75 bp, synthetic construct
  source 1..75: mol_type = other DNA
atgaattacaagggcagattgccgcgcataatcagcaaattatccagtatcaacagcaaattgaacaacgccagc

SEQ ID NO: 873739 - DNA, 75 bp, synthetic construct
  source 1..75: mol_type = other DNA
ttaaccggcaccgaaatctacgggcaaatctcggcgatggtctttgaacagcacaaattggcccgtactgagctg

SEQ ID NO: 873740 - DNA, 75 bp, synthetic construct
  source 1..75: mol_type = other DNA
accgccgaatgtctggcggaggtggagtttgaagtgaaaggtgaagcgtatcgtgcgttctggagccagaatcgg

SEQ ID NO: 873741 - DNA, 75 bp, synthetic construct
  source 1..75: mol_type = other DNA
gtctggcacaaccggcacgaaatcttcgtccgcactgggaacgcatcgcagaacacagcgcggcgctggcgcata

SEQ ID NO: 873742 - DNA, 75 bp, synthetic construct
  source 1..75: mol_type = other DNA
gcacaaataaaagaatgcaggataatatatctgaatttctgggggtgtatggaataaatcactcagcatatatgg

SEQ ID NO: 873743 - DNA, 75 bp, synthetic construct
  source 1..75: mol_type = other DNA
tattctggcaacagcacagatttatggctttgaactggtaacgcgaaatacgagagattttgcgggaatagcagg

SEQ ID NO: 873744 - DNA, 75 bp, synthetic construct
  source 1..75: mol_type = other DNA
ccgttcgccagcaacggtctgtttgcgattaccggcccaaccggcgcggggaaaaccacgttgctcgatgccatc

SEQ ID NO: 873745 - DNA, 75 bp, synthetic construct
  source 1..75: mol_type = other DNA
ctaaccaaaagttgcgtgaaaacaccacgagtcagggcgagattcgtcaacagctgaaacaggatgcggaaaacc

SEQ ID NO: 873746 - DNA, 75 bp, synthetic construct
  source 1..75: mol_type = other DNA
caacgccagcagcagctcttaacggcattggcgggttatgcactgacattgccacaggaagatgaagaagagagc

SEQ ID NO: 873747 - DNA, 75 bp, synthetic construct
  source 1..75: mol_type = other DNA
ccaacgttataaagaaaagacgcagcagcttgccgatgtcaaaaccatttgcgagcaggaagcacacattaaaac

SEQ ID NO: 873748 - DNA, 75 bp, synthetic construct
  source 1..75: mol_type = other DNA
aatttgacggtttcgtacactctattggttttgcacctggcgatcagctggatggtgactatgttaacgccgtta

SEQ ID NO: 873749 - DNA, 75 bp, synthetic construct
  source 1..75: mol_type = other DNA
tcatatctaagctcgggtttgaatgccacccaatgagcgacacgttgctgcgcgttattagtccattcacatact

SEQ ID NO: 873750 - DNA, 75 bp, synthetic construct
  source 1..75: mol_type = other DNA
caacaattatgcttcgttcagttgctgacatagcaagaagtgaaggttttgatctggataaggtggagacaaaac

SEQ ID NO: 873751 - DNA, 75 bp, synthetic construct
  source 1..75: mol_type = other DNA
atccccggtggcggcatggtccgccggcggacgaaccgtggtggccctgaaactcaccagtacggtgagccggag

SEQ ID NO: 873752 - DNA, 75 bp, synthetic construct
  source 1..75: mol_type = other DNA
tggttttgcacctggcgatcagctggatggtgactatgttaacgccgttactcgtgaaggcttcaaaattgccca

SEQ ID NO: 873753 - DNA, 75 bp, synthetic construct
  source 1..75: mol_type = other DNA
tcgttctgcagtgcgatgttgccgaagatgccagcatcgacaccatgttcgctgaactgggtaaagtctggccga

SEQ ID NO: 873754 - DNA, 75 bp, synthetic construct
  source 1..75: mol_type = other DNA
caacaaaagataaaggcttttttgctttatcagcttatgtagcgggtactcgcagtttctatgcgaaaaaaccga

SEQ ID NO: 873755 - DNA, 75 bp, synthetic construct
  source 1..75: mol_type = other DNA
gggcaactggacgccttaacgaagcagcttcagcgggatgagaacgaagcacaaagcctccgacaagatgagcaa

SEQ ID NO: 873756 - DNA, 75 bp, synthetic construct
  source 1..75: mol_type = other DNA
ttggcgggcgcagttcgcccaacaggccagcgatcgcaagtatctgcggcaatggcaacagcaattaacccatgc

SEQ ID NO: 873757 - DNA, 75 bp, synthetic construct
  source 1..75: mol_type = other DNA
aaaaaagggcaattccgcattgccgctcacctttggcttcagtgtatggatgttgcttctggtgatgttgaacgt

SEQ ID NO: 873758 - DNA, 75 bp, synthetic construct
  source 1..75: mol_type = other DNA
agtctgacatctgaaggtatgttttttattcagaggctcactcttgcacaaagcatgtatctgaaagaaatctgg

SEQ ID NO: 873759 - DNA, 75 bp, synthetic construct
  source 1..75: mol_type = other DNA
taaagcaccattccgtgccgcagttcagcctctgtttgacgacttcaaaaaagatccaaaacaagctgctttgtt

SEQ ID NO: 873760 - DNA, 75 bp, synthetic construct
  source 1..75: mol_type = other DNA
aaaaggacggatagcagggaggatcgccgtgctaaaaaaattagtctgacatctgaaggtatgttttttattcag

SEQ ID NO: 873761 - DNA, 75 bp, synthetic construct
  source 1..75: mol_type = other DNA
agtcactgaagttgcggagcacaccaccggcgatctgtttgccgaagaaggtctgctgcgagaagagtcttcact

SEQ ID NO: 873762 - DNA, 75 bp, synthetic construct
  source 1..75: mol_type = other DNA
ggcgattaggggcagaaaaaggcgtgtcagggttcctgcacccggaagggatttatgatgacccgaaaggcgggc

SEQ ID NO: 873763 - DNA, 75 bp, synthetic construct
  source 1..75: mol_type = other DNA
tataaatgcttcctgccgcaggcatggcgcttaggggcagagaaaggcgtggcaggtttcctgcacccggaaggg

SEQ ID NO: 873764 - DNA, 75 bp, synthetic construct
  source 1..75: mol_type = other DNA
gaggggataacgcggtcagcgccatcggtgtgggcgcagtatctcccggcgatgcgtttatttctctggggacat

SEQ ID NO: 873765 - DNA, 75 bp, synthetic construct
  source 1..75: mol_type = other DNA
tatttttcgacccaacactggaatgaagttaatgctcaagaagatgggacaattcttcgacaaacgcagttccct

SEQ ID NO: 873766 - DNA, 75 bp, synthetic construct
  source 1..75: mol_type = other DNA
aagagattaaatgattttacaaacagctattatgcaacccagcattggaatgaagttaatgcacaaaatgacggc

SEQ ID NO: 873767 - DNA, 75 bp, synthetic construct
  source 1..75: mol_type = other DNA
tgacggaacaactaaacggcatacccaattcccggaagacgcatcccaatggattctgtctggtccgcacttcta

SEQ ID NO: 873768 - DNA, 75 bp, synthetic construct
  source 1..75: mol_type = other DNA
tctatatgacagcgaaggaacgccagcctggcaggcacgtttgccagccttacatgctaaacaacttgttgctgt

SEQ ID NO: 873769 - DNA, 75 bp, synthetic construct
  source 1..75: mol_type = other DNA
gttgagggctcattttcagtttcagaaccagagaatattgttccctattggcgatagagttaagtacagcattaa

SEQ ID NO: 873770 - DNA, 75 bp, synthetic construct
  source 1..75: mol_type = other DNA
atttgctcgtttgtatgatgaacccgacacaccagcattacaggctcgtcttcccgctttgcacgcagagcaact

SEQ ID NO: 873771 - DNA, 75 bp, synthetic construct
  source 1..75: mol_type = other DNA
ctcatgagctagaattatttgctcgactttatgacagcgaaggaactccagccaggcaggctcgtttgccagctt

SEQ ID NO: 873772 - DNA, 75 bp, synthetic construct
  source 1..75: mol_type = other DNA
tctgaacgaactttcatcgcaactataatacctcccggtatttctcatattaatacgtgtctaagcactattttt

SEQ ID NO: 873773 - DNA, 75 bp, synthetic construct
  source 1..75: mol_type = other DNA
tgcaagagagtggaacggctattgaacaatgttcgctggtgggaggcggggcgagaagtccgttctgggcgcaac

SEQ ID NO: 873774 - DNA, 75 bp, synthetic construct
  source 1..75: mol_type = other DNA
gcatctgatgtgcctactgaagtgactctaatagataaacaaacgttggtacgtaacaacggtgcagaggttcag

SEQ ID NO: 873775 - DNA, 75 bp, synthetic construct
  source 1..75: mol_type = other DNA
gcaatgggcccggaaggcgtgcgtgttaacgctatttctgctggtcctatccgtactctggccgcttccggcatc

SEQ ID NO: 873776 - DNA, 75 bp, synthetic construct
  source 1..75: mol_type = other DNA
cgggcgttctgtttgtggtgactgatgcttatcgtccggccccgcagtcagccgtccacgcattttgccatgtgc

SEQ ID NO: 873777 - DNA, 75 bp, synthetic construct
  source 1..75: mol_type = other DNA
aaataatcagacaccaaaaaaacaaagaccccgcatatccctttcgggaacatttgttgatgcaactctgtattc

SEQ ID NO: 873778 - DNA, 75 bp, synthetic construct
  source 1..75: mol_type = other DNA
aagaggatactttgccaccctttgaaaaagggaaactcaaacggtcatggctgtacagccagggggtattttttt

SEQ ID NO: 873779 - DNA, 75 bp, synthetic construct
  source 1..75: mol_type = other DNA
gcttatggcagggaatgttgcgttggcatctgatgtgcctactgaagtgactctaatagaaaaacaaacgctggt

SEQ ID NO: 873780 - DNA, 75 bp, synthetic construct
  source 1..75: mol_type = other DNA
ccgccagttagaagagattggcagctatgaatatgagggaacatatgaagaacaactatcagaagatgatgaagg

SEQ ID NO: 873781 - DNA, 75 bp, synthetic construct
  source 1..75: mol_type = other DNA
gcgaacgtaatcgaacccatgcgtaatggtgatgtaaaaggaatgattcataaagccacactacgcaaactagaa

SEQ ID NO: 873782 - DNA, 75 bp, synthetic construct
  source 1..75: mol_type = other DNA
gcgacggaatacctgatgtcaacgctacgggaaaaatgcggtcagcactggcaagcgattaaagcgattggcctt

SEQ ID NO: 873783 - DNA, 75 bp, synthetic construct
  source 1..75: mol_type = other DNA
gccacataacgatcctcatgcccggggattgttctgggcgctgacacactccagtcagcgtgcgctaatgggata

SEQ ID NO: 873784 - DNA, 75 bp, synthetic construct
  source 1..75: mol_type = other DNA
aattccggtagcagtagtacagcaaacattatcacaatatttctatcaactacgtcaggtactaagaagtatacc

SEQ ID NO: 873785 - DNA, 75 bp, synthetic construct
  source 1..75: mol_type = other DNA
aattcccgtggcagtagtacagcaaacattagcccaatacttctaccaactacgacaagtaattagaagtattcc

SEQ ID NO: 873786 - DNA, 75 bp, synthetic construct
  source 1..75: mol_type = other DNA
atggcaacggttaataaacaagccattgcggcggcatttggtcgggctgcctcacagtatgagcaacacgcagag

SEQ ID NO: 873787 - DNA, 75 bp, synthetic construct
  source 1..75: mol_type = other DNA
caggcgtggcaggcggtggacgagcgcccgcatgctaatcgctttttaccgccagataaaatcgaacagtcgcta

SEQ ID NO: 873788 - DNA, 75 bp, synthetic construct
  source 1..75: mol_type = other DNA
atacacccacgtactggacgcggggtgtgggccaggctggatgagccgccactggcgagagcgtcacgcgcaggt

SEQ ID NO: 873789 - DNA, 75 bp, synthetic construct
  source 1..75: mol_type = other DNA
tctggctaaccgtgaccagaacgaactgaacgaaatccgccgccagtgggttctggctttccgggaaaacgggat

SEQ ID NO: 873790 - DNA, 75 bp, synthetic construct
  source 1..75: mol_type = other DNA
tttaagttactgcgcacctatcgcgatcgcggcgaaaagtttgacgttatcgtgatggatccgccgaagtttgtc

SEQ ID NO: 873791 - DNA, 75 bp, synthetic construct
  source 1..75: mol_type = other DNA
acacgggcacaaaacgggctattatctggatcagcgcgacagccgtctggcaacacgccgctacgttgaaaataa

SEQ ID NO: 873792 - DNA, 75 bp, synthetic construct
  source 1..75: mol_type = other DNA
tgatgcgctcagtgccatgcgttcgctgaaaggcatcggtgccacgcatcttcatgaagggcgctacccacgaat

SEQ ID NO: 873793 - DNA, 75 bp, synthetic construct
  source 1..75: mol_type = other DNA
actggcgagagcgtcacgcacaggtgacggcgttagatctctcaccgccaatgcttgtgcaagcccgccagaaag

SEQ ID NO: 873794 - DNA, 75 bp, synthetic construct
  source 1..75: mol_type = other DNA
atatgactgcgagaattaaccgtggtgaggcgatccctgaacctgaaccgccccggaaatcctggagactaaact

SEQ ID NO: 873795 - DNA, 75 bp, synthetic construct
  source 1..75: mol_type = other DNA
taattctccgcgtttatatcccgttctgctggagccggagacaccggcacaatttgaaatctttgtgccagctcc

SEQ ID NO: 873796 - DNA, 75 bp, synthetic construct
  source 1..75: mol_type = other DNA
actgatgttatgtgaagactttggcgtcactcttcaggggcgagccggtgcatcctgtcatgcctatatgcgtaa

SEQ ID NO: 873797 - DNA, 75 bp, synthetic construct
  source 1..75: mol_type = other DNA
catcgaaacggtggacggataccgttttattgtgacggcatatgacacgaaggcgatgcattccctgaccgaatt

SEQ ID NO: 873798 - DNA, 75 bp, synthetic construct
  source 1..75: mol_type = other DNA
tgaggctatatgtaaccaggtgaatcatttgataccaacgagggttttagtgaaaggaggtgaaatcacctgtaa

SEQ ID NO: 873799 - DNA, 75 bp, synthetic construct
  source 1..75: mol_type = other DNA
gcacggacacaaaacgggctactacctggaccagcgtgacagccgcctggctacccgccgctacgttgaaaataa

SEQ ID NO: 873800 - DNA, 75 bp, synthetic construct
  source 1..75: mol_type = other DNA
gcctatataaatgcatttaactggatgtcagcagaactccgtaagtacagcgaaagttatgaagcagaacgaaac

SEQ ID NO: 873801 - DNA, 75 bp, synthetic construct
  source 1..75: mol_type = other DNA
ttccagatcgcaaaggcttttggtaagcgtcacgcggacgtattgagggcgctgaaaaattgtcattgctctgag

SEQ ID NO: 873802 - DNA, 75 bp, synthetic construct
  source 1..75: mol_type = other DNA
ttgcaatcgcgtgccgttgcgatggctgtcatcaatgctgtcggtaatgtaggttcagcagtcagtccattactt

SEQ ID NO: 873803 - DNA, 75 bp, synthetic construct
  source 1..75: mol_type = other DNA
tttcctgtgcggcaaaggttcatttcaaagagcagcacgctatgaaatattctaccgttgttaacggcattgatt

SEQ ID NO: 873804 - DNA, 75 bp, synthetic construct
  source 1..75: mol_type = other DNA
atcaatgacttagggatttttgacaagaaacagatttactaccgcatggactttagtggcttcgttatgctggtt

SEQ ID NO: 873805 - DNA, 75 bp, synthetic construct
  source 1..75: mol_type = other DNA
cgctggggaaaaattaagaagcctcagctgctggcgagaattgaacgccttgaacagcacgggcaaaccgtaatc

SEQ ID NO: 873806 - DNA, 75 bp, synthetic construct
  source 1..75: mol_type = other DNA
ggctggcggggacgtgcggaacagcgacaaaaccacacgatatgcaggcagcgattgcctgtagctcatgccacg

SEQ ID NO: 873807 - DNA, 75 bp, synthetic construct
  source 1..75: mol_type = other DNA
tatcaaaccgccagacctgattgccaccattgcatgttctgcctgccacgacgaaatcgaccgccgcacgcattt

SEQ ID NO: 873808 - DNA, 75 bp, synthetic construct
  source 1..75: mol_type = other DNA
gggctggcgatagataaagacggttatggcaccactgatccgtataagattgaaaacctgctacctttcggccaa

SEQ ID NO: 873809 - DNA, 75 bp, synthetic construct
  source 1..75: mol_type = other DNA
ggtagatgccgaatatgcaaaggagtgcgcgctggaaggcatggcccgcacgcaggttatctggctgaaagaggg

SEQ ID NO: 873810 - DNA, 75 bp, synthetic construct
  source 1..75: mol_type = other DNA
ggcaaccctgaaaccacggtattggcccatatccgcattgctggattgtgcgggacggggattaagccgcctgat

SEQ ID NO: 873811 - DNA, 75 bp, synthetic construct
  source 1..75: mol_type = other DNA
aaaaccagcgattacaccaaagaagaattgcgcctgatgcatgctgaagggggttttcgcacacaagaaatctgg

SEQ ID NO: 873812 - DNA, 75 bp, synthetic construct
  source 1..75: mol_type = other DNA
tggtgatgtccagccaatgtttaacatgacgaaagacggttacatgctggtcgttatggggtttactggtaagac

SEQ ID NO: 873813 - DNA, 75 bp, synthetic construct
  source 1..75: mol_type = other DNA
aaaatcatcgcggatgccgcaattgatgccggtcgtgatatacaatttatagagcagttccgtcaggcagccgat

SEQ ID NO: 873814 - DNA, 75 bp, synthetic construct
  source 1..75: mol_type = other DNA
ttctcctgactttctcctgttcaggcctgatgaccagcgatttatttcagaaaatcatcgcggatgccgcaattg

SEQ ID NO: 873815 - DNA, 75 bp, synthetic construct
  source 1..75: mol_type = other DNA
cattaattagtgccctgcaaacgctgtacccggaatgtgcgatttacgatcgcagcgacgttgcggtacgtaaaa

SEQ ID NO: 873816 - DNA, 75 bp, synthetic construct
  source 1..75: mol_type = other DNA
ctacccgccgctatgttgaaaataaacgcgtactgaactgtttctcctataccggcggtttcgccgtttcagcat

SEQ ID NO: 873817 - DNA, 75 bp, synthetic construct
  source 1..75: mol_type = other DNA
aaaatttgacgttatcgtgatggacccgccgaagtttgttgagaataaaagccagttgatgggcgcgtgtcgtgg

SEQ ID NO: 873818 - DNA, 75 bp, synthetic construct
  source 1..75: mol_type = other DNA
cccactgacggccaacgccgggagccgtgattatggcattcaggctctgctaaaaatgccagataacattccggc

SEQ ID NO: 873819 - DNA, 75 bp, synthetic construct
  source 1..75: mol_type = other DNA
cagcagggcaaaattcgtatgaaccgcgatccgggtacacaaatccaattagataacaacggacaactggttctg

SEQ ID NO: 873820 - DNA, 75 bp, synthetic construct
  source 1..75: mol_type = other DNA
tagggcatcagtttggcggtggtcgcggtaaggatgttgctacagtcgtcggggcgctcggtggtggatatgctg

SEQ ID NO: 873821 - DNA, 75 bp, synthetic construct
  source 1..75: mol_type = other DNA
gcagcgccggtatcgccgaaggggccgacaccggcagagcttttgaaagctaaatatcagcggatgaaagctgat

SEQ ID NO: 873822 - DNA, 75 bp, synthetic construct
  source 1..75: mol_type = other DNA
gtatgaccgcgcgaattaaccgtggtgaagcgatccctgaaccggtgaaacaacttcctgtcatgggcggcaggc

SEQ ID NO: 873823 - DNA, 75 bp, synthetic construct
  source 1..75: mol_type = other DNA
aacatacactgttgcgttcaccattccgctggcgctgtttatggggatctacctgcgctatctgcgtccgggtcg

SEQ ID NO: 873824 - DNA, 75 bp, synthetic construct
  source 1..75: mol_type = other DNA
atgagtatttcttccagggtaaaaagcaaaagaattcagcttggacttaaccaggctgaacttgctcaaaaggtg

SEQ ID NO: 873825 - DNA, 75 bp, synthetic construct
  source 1..75: mol_type = other DNA
tgctgactgggcatgaaaatgaggtggtatcagcgcagccggataccgtgattcaggatacggctgaactggtca

SEQ ID NO: 873826 - DNA, 75 bp, synthetic construct
  source 1..75: mol_type = other DNA
ggcggtgctgccggtgtggttgctgctggccccgcgtgactacctctctaccttcctgaaaatcgggactatcgt

SEQ ID NO: 873827 - DNA, 75 bp, synthetic construct
  source 1..75: mol_type = other DNA
gtgagtagctggggctttgcgattaccccggatacgctaaaccagattgccagcgaagtgggtgaacagtcgatc

SEQ ID NO: 873828 - DNA, 75 bp, synthetic construct
  source 1..75: mol_type = other DNA
ccgacgctgaccatgcctgcgctgaccaaatttgtcgatggcactggcccggtatggaccggtaacctgttcccg

SEQ ID NO: 873829 - DNA, 75 bp, synthetic construct
  source 1..75: mol_type = other DNA
gtgtgaagcttgtgagccctacgatatcaaggacattgatgaatggtatgacagtgacgttaacttattaggcga

SEQ ID NO: 873830 - DNA, 75 bp, synthetic construct
  source 1..75: mol_type = other DNA
cgtcattgcgtttgcaggcctatcggtacgatatcaaaggtctggtacttagcccgtttggtaacgcctcctttg

SEQ ID NO: 873831 - DNA, 75 bp, synthetic construct
  source 1..75: mol_type = other DNA
tcaggcaatcgccgcgcctgaatcccccccgcatgctgatatccgtgacagcggttttgtctattgcgtcagcgg

SEQ ID NO: 873832 - DNA, 75 bp, synthetic construct
  source 1..75: mol_type = other DNA
aggtggtatcagcgcagccggataccgtgactgatacggctgctctggtcacggtcgtggcactggtgacgctgc

SEQ ID NO: 873833 - DNA, 75 bp, synthetic construct
  source 1..75: mol_type = other DNA
tgctgcgcgctttatgttgcaggatctgctgggcgtggtgtctccgggcctgaaacggaccgattcactgcctgc

SEQ ID NO: 873834 - DNA, 75 bp, synthetic construct
  source 1..75: mol_type = other DNA
tggcagagctggaagaggagcttgatgacacggatgacgctgccggtcaggacacgtctgtcagcccggaaaatg

SEQ ID NO: 873835 - DNA, 75 bp, synthetic construct
  source 1..75: mol_type = other DNA
gacacccctctcagcccggaaaatgtgctgaccgggcatgaaaatgaggctgtatcagcgcagccggataccgtg

SEQ ID NO: 873836 - DNA, 75 bp, synthetic construct
  source 1..75: mol_type = other DNA
gaggagcttgatgacacggatgacgctgccggtcaggatacccctctcagaccggaaaatgcgctgaccggacat

SEQ ID NO: 873837 - DNA, 75 bp, synthetic construct
  source 1..75: mol_type = other DNA
gcagccggataccgtgactgatacggctgatctggtcacggttgtggcactggtgacgctgcatactgatgcact

SEQ ID NO: 873838 - DNA, 75 bp, synthetic construct
  source 1..75: mol_type = other DNA
tctctggcggctgggtggcagaaagcccgacctgggcaccgtactttgattttacgggtgtgcagctgacctgga

SEQ ID NO: 873839 - DNA, 75 bp, synthetic construct
  source 1..75: mol_type = other DNA
ccggggtgattgcgctggtggcctgctttatgatcatggtcattatccttgcagtactggcgatgatcgtggtga

SEQ ID NO: 873840 - DNA, 75 bp, synthetic construct
  source 1..75: mol_type = other DNA
aagtcggtgaacagtcgatcatttctcgtgcgggcggtgcgccaacactggcggtagggatggcctacatcctgc

SEQ ID NO: 873841 - DNA, 75 bp, synthetic construct
  source 1..75: mol_type = other DNA
ggtatcagcgcagccggataccgtgactgatacggctgatctggtcacggtttgtggcactggtgacgctgcata

SEQ ID NO: 873842 - DNA, 75 bp, synthetic construct
  source 1..75: mol_type = other DNA
gatctggctgcttgccggggtggttcttgccggtgcggtgcaggatttcatggtgctgtttgtttccacgcgccg

SEQ ID NO: 873843 - DNA, 75 bp, synthetic construct
  source 1..75: mol_type = other DNA
atccacaaatacactacaaagaaaaatgccagcgagaaggaattccggttcctgaaagcattttccattatctgg

SEQ ID NO: 873844 - DNA, 75 bp, synthetic construct
  source 1..75: mol_type = other DNA
gtaccagctttcggagaatcgtgcgggccaatatattcggttgcagcgacatgaaaaattctggcgtggcactcc

SEQ ID NO: 873845 - DNA, 75 bp, synthetic construct
  source 1..75: mol_type = other DNA
gacgcctcctttatgtggcatcttgccacacactatgcctccgtaatgtcggcggaatatgcggctaatctggca

SEQ ID NO: 873846 - DNA, 75 bp, synthetic construct
  source 1..75: mol_type = other DNA
tgaaaaaaatattgtttacttttttgtttgtcgtttcttcagtcgtgaatgctgaggtcaatacaagtgttgatg

SEQ ID NO: 873847 - DNA, 75 bp, synthetic construct
  source 1..75: mol_type = other DNA
cttgaaaaagccctggctattgcgtgccagcttcagaaaatggggatgacgccggagcagattaagcaggctacc

SEQ ID NO: 873848 - DNA, 75 bp, synthetic construct
  source 1..75: mol_type = other DNA
gatgtgtctggacaacctggtcagggcactgcaggacatccaggatgaagagcagattacagttcttttcaacta

SEQ ID NO: 873849 - DNA, 75 bp, synthetic construct
  source 1..75: mol_type = other DNA
tatataatggtgaaagttccgagtatcttaatgattgcttaagtagcattaattcgcaaatattaaaaccgaacc

SEQ ID NO: 873850 - DNA, 75 bp, synthetic construct
  source 1..75: mol_type = other DNA
taagaatatgatgcttaaattacagtctgaaaatcagaaactggagagtgaaataaaaaaaagtggatcatttat

SEQ ID NO: 873851 - DNA, 75 bp, synthetic construct
  source 1..75: mol_type = other DNA
taagaatatgatgcttaaattacagtctgaaaatcagaaactggagagtgaaataaaaaaagtggatcatttatc

SEQ ID NO: 873852 - DNA, 75 bp, synthetic construct
  source 1..75: mol_type = other DNA
cactccggtggtgatgatgtataccctggcgtatttctgcctgaccaacacacttagtgcgatcagcatctggac

SEQ ID NO: 873853 - DNA, 75 bp, synthetic construct
  source 1..75: mol_type = other DNA
tgtatcaccggaatttatgcgggcgctggctgagcgtctgccgcagcatgaggataaactgatgactattgccga

SEQ ID NO: 873854 - DNA, 75 bp, synthetic construct
  source 1..75: mol_type = other DNA
cgcttgaaaaagccctggctattgcgtgccagcttcagaaaatggggatgacgccggagcagattaagcaggcta

SEQ ID NO: 873855 - DNA, 75 bp, synthetic construct
  source 1..75: mol_type = other DNA
gacatctggagcagcacaaaacattgccactggtcattccggtgctgttctatcacggtgagcgcagcccgtacc

SEQ ID NO: 873856 - DNA, 75 bp, synthetic construct
  source 1..75: mol_type = other DNA
gaatacagcagggaatacagaaaggccgcatggaggagaagctggatattgcgcgtcagcttcagaaaacgggaa

SEQ ID NO: 873857 - DNA, 75 bp, synthetic construct
  source 1..75: mol_type = other DNA
tgaagcgcaactggcagctcgcctgctgcagtttgaagaaaccctcactgtggttgcccgtgaaggcacgccgca

SEQ ID NO: 873858 - DNA, 75 bp, synthetic construct
  source 1..75: mol_type = other DNA
acccggatatgccagctgacgagctggaaaaactggctaacgcggttggtattggtgcggtgaaatatgcggatc

SEQ ID NO: 873859 - DNA, 75 bp, synthetic construct
  source 1..75: mol_type = other DNA
actttgatcaactggcggaagaaaaagttcgcgacgcgctaaaaccgccatctatgtataaagtgatattagtca

SEQ ID NO: 873860 - DNA, 75 bp, synthetic construct
  source 1..75: mol_type = other DNA
tatcgtggcggacctgaaagccaaaggtctggcagtagaaagtgaaggcgcgaccgttgtattccttgatgagtt

SEQ ID NO: 873861 - DNA, 75 bp, synthetic construct
  source 1..75: mol_type = other DNA
aggtcgtcatctgccacgcagactacccgcacaacgaatacgcattcgataagccagtaccggaagaaatggtga

SEQ ID NO: 873862 - DNA, 75 bp, synthetic construct
  source 1..75: mol_type = other DNA
gaacctggtttgatcgcccggaactggaagtgcattatcagtttctcgaaagcgatgatttcagtttcggcctga

SEQ ID NO: 873863 - DNA, 75 bp, synthetic construct
  source 1..75: mol_type = other DNA
atagccggtgctgatctgtttatcttcggccacaccccagcgcgccagcccctgaagtatgccaaccagatgtac

SEQ ID NO: 873864 - DNA, 75 bp, synthetic construct
  source 1..75: mol_type = other DNA
gtcgaaaaagtgttagcgccgaacgatccgcaaatgcactacaaagaaaaatgccagcaggaaggtattccggtt

SEQ ID NO: 873865 - DNA, 75 bp, synthetic construct
  source 1..75: mol_type = other DNA
gttgaccgcggcgcggaaaacgtcgagtgcctggatctgattactatgccgtggttcagggcagtgcgcggtaac

SEQ ID NO: 873866 - DNA, 75 bp, synthetic construct
  source 1..75: mol_type = other DNA
ctctgaaccattaacggttacgccgctggcggcctggggggtggcaaaccgcaacgtggtggctctcaggctaac

SEQ ID NO: 873867 - DNA, 75 bp, synthetic construct
  source 1..75: mol_type = other DNA
cggactgcccgtttcattttataaccattcatgcagggcgagtttttatgatgcctttaccacaaaatcaggtaa

SEQ ID NO: 873868 - DNA, 75 bp, synthetic construct
  source 1..75: mol_type = other DNA
gtcaaaacaaaaaacggtgattatgtagcgacatggcaactgatggggattaactttgagtcaatctctgcggag

SEQ ID NO: 873869 - DNA, 75 bp, synthetic construct
  source 1..75: mol_type = other DNA
acagaatagctaataacctgaaaaaaaaggtatactatataaagaaaaggcaaggaagacgccactctgtgaaac

SEQ ID NO: 873870 - DNA, 75 bp, synthetic construct
  source 1..75: mol_type = other DNA
tggcgcgggtgcgcactctactgcggcgcggggcggcggtaattatcgaaagtcagtttcaggttgccgatttga

SEQ ID NO: 873871 - DNA, 75 bp, synthetic construct
  source 1..75: mol_type = other DNA
tatgcagcaccagtatttatctggctaaccctgatgccgattacaatgactatgtagaagggcttaagctgacac

SEQ ID NO: 873872 - DNA, 75 bp, synthetic construct
  source 1..75: mol_type = other DNA
taagtaaaattacggcagactttactgacttgggtattattccggcattgtcaaccatgtcactgccagcggcat

SEQ ID NO: 873873 - DNA, 75 bp, synthetic construct
  source 1..75: mol_type = other DNA
atccgaaaactaaatggtgtggtagggatggctactcagtctcttgacgaagcactcaagaataaagtagcaaaa

SEQ ID NO: 873874 - DNA, 75 bp, synthetic construct
  source 1..75: mol_type = other DNA
agaaattaacagcacgtcaggaactcgatctctttcgcgccaccgatgacgtgatggatttgcccctggagttga

SEQ ID NO: 873875 - DNA, 75 bp, synthetic construct
  source 1..75: mol_type = other DNA
aaaaatataaccgtgatgacagcttttcaccggatgccaggactaaacgactaaccacagtttacctcgataaag

SEQ ID NO: 873876 - DNA, 75 bp, synthetic construct
  source 1..75: mol_type = other DNA
aacatttcatattatgctatccgtcttataatacgatcacattacagtctcacatcctgcgccacggaatccgaa

SEQ ID NO: 873877 - DNA, 75 bp, synthetic construct
  source 1..75: mol_type = other DNA
gccaaagtatcccccgaacacttcgaaataatcaggaacattgaccctgaatcacgacaattacttgttgttaaa

SEQ ID NO: 873878 - DNA, 75 bp, synthetic construct
  source 1..75: mol_type = other DNA
ctggctgacaacctgatccatgaataccacggttttctacttctccagcaacagcgagaaattaagctcctgccc

SEQ ID NO: 873879 - DNA, 75 bp, synthetic construct
  source 1..75: mol_type = other DNA
ggctcgtctgttcagacaaaaaaacatcaatgatggggaacccacaccggaaaaaccgggcgaaattctgaagct

SEQ ID NO: 873880 - DNA, 75 bp, synthetic construct
  source 1..75: mol_type = other DNA
cagcaacgcaaaatttaaatttgtctgttgctgattcaaccatctactctgatgtcctggccctttctgaaagcg

SEQ ID NO: 873881 - DNA, 75 bp, synthetic construct
  source 1..75: mol_type = other DNA
aaatgaaaaaagtagtgcgacaggtatatctctggaaggggccacgggaaataatgtaacgctaaattatactgc

SEQ ID NO: 873882 - DNA, 75 bp, synthetic construct
  source 1..75: mol_type = other DNA
cactcttagtgttggttggatgcgcacaaaatatatcgccaaatagttattctgttggctctgtgggcatggtta

SEQ ID NO: 873883 - DNA, 75 bp, synthetic construct
  source 1..75: mol_type = other DNA
tctgatgtgaatgttgatagtgaccataaaaacacacagtgccccgccactgatgatgagatggaccccttcgat

SEQ ID NO: 873884 - DNA, 75 bp, synthetic construct
  source 1..75: mol_type = other DNA
caaaattttttactcagtcagtcaaaatctttgacacgtataataacagtaataacagtaataacagtaataaca

SEQ ID NO: 873885 - DNA, 75 bp, synthetic construct
  source 1..75: mol_type = other DNA
cgtgattctgacgcacatcagccaccagcttgatgcgtggctgatggagaacgcgctgccgtcagggtttgaggc

SEQ ID NO: 873886 - DNA, 75 bp, synthetic construct
  source 1..75: mol_type = other DNA
tgtgatttaaataccgtgcttgcgctgaatgaggttatccactcgccacgggtgattctgacccatatcatccac

SEQ ID NO: 873887 - DNA, 75 bp, synthetic construct
  source 1..75: mol_type = other DNA
aaaatcctgatagaccgaagcaatcatctggtttttgtcgaggccagcagtgctaaaaaagcagaggatcagctg

SEQ ID NO: 873888 - DNA, 75 bp, synthetic construct
  source 1..75: mol_type = other DNA
gacgactctggatcaagatgttgttattaacggtgataacaagattacagccgtaacaattgaaacatcagattc

SEQ ID NO: 873889 - DNA, 75 bp, synthetic construct
  source 1..75: mol_type = other DNA
tggtgattgattgcagccacccgccgcgcgaggatgcaccgcgtaatcactgtgatttaaacaccgtgctggcgc

SEQ ID NO: 873890 - DNA, 75 bp, synthetic construct
  source 1..75: mol_type = other DNA
ttacgcaataatcagccgcaggtaatggtgattgattgcagccacccgccgcgcgaagatgcgccgcgtaatcac

SEQ ID NO: 873891 - DNA, 75 bp, synthetic construct
  source 1..75: mol_type = other DNA
tgtatctcaacgtctggatctcgatgtggcacttgacctgctcacctccggtaaaatcgcctacggtaaacatca

SEQ ID NO: 873892 - DNA, 75 bp, synthetic construct
  source 1..75: mol_type = other DNA
ctttctattcgccagaatcccgccccagcctggtgctggcacacagtgcccgcacattaatggaccgctttaatg

SEQ ID NO: 873893 - DNA, 75 bp, synthetic construct
  source 1..75: mol_type = other DNA
atgatctccgacctggcccctgttgatttgctgattcagcgagcggggcgattacagcggcatatccgcgatatt

SEQ ID NO: 873894 - DNA, 75 bp, synthetic construct
  source 1..75: mol_type = other DNA
atggtgattgagtatcacctgatatatacggaagtaatagtgaatagtgaaataatattgttccgggtttatatg

SEQ ID NO: 873895 - DNA, 75 bp, synthetic construct
  source 1..75: mol_type = other DNA
acgttcagtcagggatgtgcggcctggtttgccgacagtaacaagaaggcgctactggctgaaattggcgtcggc

SEQ ID NO: 873896 - DNA, 75 bp, synthetic construct
  source 1..75: mol_type = other DNA
taataatctgcggcttctggggctgagtaacaaaatcctgctggctgatgagatccacgcctgtgacgcttacat

SEQ ID NO: 873897 - DNA, 75 bp, synthetic construct
  source 1..75: mol_type = other DNA
cagcgtgggttggcttcatagtgaacaagagtgtattgcgcgtatcgaatcggcggtaagtcaggggaaatgcat

SEQ ID NO: 873898 - DNA, 75 bp, synthetic construct
  source 1..75: mol_type = other DNA
gaagagttgccacgggtcagccaggtcagtagcggtatcagtttaggtttttgctatttaacgttgcgcaaaagt

SEQ ID NO: 873899 - DNA, 75 bp, synthetic construct
  source 1..75: mol_type = other DNA
agtatcaacgtctgtggcaaccttccgcgggagagacgcagtccgtgaccgtcagcgaactggccgaacgctgtt

SEQ ID NO: 873900 - DNA, 75 bp, synthetic construct
  source 1..75: mol_type = other DNA
gctgcttaaagcggttgagtactggataactccgccgcttttcgaaaaagatttgggaaccagttgtcggcatcc

SEQ ID NO: 873901 - DNA, 75 bp, synthetic construct
  source 1..75: mol_type = other DNA
tgcaaccgggatttttacccggtcgtgccgagcaacatcttgctggacaaattttttcaggcctgacccgtttcg

SEQ ID NO: 873902 - DNA, 75 bp, synthetic construct
  source 1..75: mol_type = other DNA
gtgcaagtaatgcctgatgaggaaaaccgatttaatgccctgaaaacggtttttagccagttaatggcagacgcg

SEQ ID NO: 873903 - DNA, 75 bp, synthetic construct
  source 1..75: mol_type = other DNA
atgcgattgctcaaccgtcttaaccagtatcaacgtctgtggcaaccttccgccggaaagccgcaagctgtcacc

SEQ ID NO: 873904 - DNA, 75 bp, synthetic construct
  source 1..75: mol_type = other DNA
gtttgtttagctcgatcaaccgcacgctgggtgaagggatcgcacaactcctttcggcacagatccttgccgggc

SEQ ID NO: 873905 - DNA, 75 bp, synthetic construct
  source 1..75: mol_type = other DNA
gggcgacacaatcccggtctacggtccaccggatgagcagggctgcgacgatctgtttaaacatccgggcctgct

SEQ ID NO: 873906 - DNA, 75 bp, synthetic construct
  source 1..75: mol_type = other DNA
ttcacaacgcagacctataacatcggaaaaaatattcgtaatttcagacttggtgtccatgcatattgtgcatgg

SEQ ID NO: 873907 - DNA, 75 bp, synthetic construct
  source 1..75: mol_type = other DNA
taaacgcgcgatgtttgaaaaatacacttcggctttttctgccactgcgctgaaagtggcggcctcgacggaagg

SEQ ID NO: 873908 - DNA, 75 bp, synthetic construct
  source 1..75: mol_type = other DNA
gtagtacccgcatcttcatggcgaaccagcaggcgaaggagtacgactacgtggacatgctgcgggtgccgaaag

SEQ ID NO: 873909 - DNA, 75 bp, synthetic construct
  source 1..75: mol_type = other DNA
tggcgtggctgtctgacactgcaggcctgccggaaaaaacgctgaaatttttacgcaataatcagccgcaggtaa

SEQ ID NO: 873910 - DNA, 75 bp, synthetic construct
  source 1..75: mol_type = other DNA
gggccgaaatgaccgagctttccaccaacgtgaagcgccacgacgcacaccgtttttacctgcggaaggctacga

SEQ ID NO: 873911 - DNA, 75 bp, synthetic construct
  source 1..75: mol_type = other DNA
atcaaattgtatgaagcgaaaaaccgcttgttcagttctatcaaccgcacgctgggcgaggggattgcgcaattg

SEQ ID NO: 873912 - DNA, 75 bp, synthetic construct
  source 1..75: mol_type = other DNA
gttgcatgatctcgaccatcgttgaaggattgctcggtggcctggtacacagcatcctgatccgtcgcgggcgca

SEQ ID NO: 873913 - DNA, 75 bp, synthetic construct
  source 1..75: mol_type = other DNA
ccggtgaagtggtctacgctgatggcaacgaagtaccttatcgttgctctttgcatccgcaatgcaaactggggt

SEQ ID NO: 873914 - DNA, 75 bp, synthetic construct
  source 1..75: mol_type = other DNA
tcaatgggggggatgaccgcgctaagttgcatgatctcgactatcgtcgaagggttgctcggtggcctggtacac

SEQ ID NO: 873915 - DNA, 75 bp, synthetic construct
  source 1..75: mol_type = other DNA
ctgccacggcgctgaaagtggcagcctcgacagaagggattttgcgccagggctttaatgaagtgaacagcatga

SEQ ID NO: 873916 - DNA, 75 bp, synthetic construct
  source 1..75: mol_type = other DNA
gctgggcgaggggattgcgcaattgctttcggcgcagatcctcgccggacaatatgaacggcaaaaagcgatgct

SEQ ID NO: 873917 - DNA, 75 bp, synthetic construct
  source 1..75: mol_type = other DNA
aatcaccaaaaacggcttcgttttcctggtgatggggttcaccggcaaaaaagccgcagctttcaaggaagccta

SEQ ID NO: 873918 - DNA, 75 bp, synthetic construct
  source 1..75: mol_type = other DNA
tcaatggcagctcaggcgggagcttctcacgaagcgccgggttccgatgtgaccggtaaggccaatcccgtctgg

SEQ ID NO: 873919 - DNA, 75 bp, synthetic construct
  source 1..75: mol_type = other DNA
agaacgggtggaattatagtgcacctgcacctcataaaacgggtgccgggattggcctcctgttaatcacattgg

SEQ ID NO: 873920 - DNA, 75 bp, synthetic construct
  source 1..75: mol_type = other DNA
gacactttccgcctttatctggagaaacagggctggactcttgtaaaccgaagcgcaattaaaaatatgaccgtc

SEQ ID NO: 873921 - DNA, 75 bp, synthetic construct
  source 1..75: mol_type = other DNA
ccggcaaaaaggccgctgcattcaaggaagcctacattgccgagttcgaccgcatggaggaagaactgcgccgga

SEQ ID NO: 873922 - DNA, 75 bp, synthetic construct
  source 1..75: mol_type = other DNA
ctggataccttccggttttatctggagaaacaaggatggactcttgtaaaccggagcgcaattaaaaatatgact

SEQ ID NO: 873923 - DNA, 75 bp, synthetic construct
  source 1..75: mol_type = other DNA
gccaccgggtttacgcgagcaagcaccgcaaggtccacgacgcgaacgctggctggcggggcgtgcattgctttc

SEQ ID NO: 873924 - DNA, 75 bp, synthetic construct
  source 1..75: mol_type = other DNA
tttgtggctcgctgttgccacagtgttttctggtgcgggaatgattatattctactggttgctccatgcatcaga

SEQ ID NO: 873925 - DNA, 75 bp, synthetic construct
  source 1..75: mol_type = other DNA
cgtctgtttggcccgctggcgttcaccaaaacgtatgcgatggcgggtgcggcgctgctggcgatcgtagtgatc

SEQ ID NO: 873926 - DNA, 75 bp, synthetic construct
  source 1..75: mol_type = other DNA
ggctggcggggcgtgcattgctttcgcacacgctttctccactaccggacatcatctacggtgaacaagggaaac

SEQ ID NO: 873927 - DNA, 75 bp, synthetic construct
  source 1..75: mol_type = other DNA
gctagaaaatttaagcctggcgatctgcacccctaccccctttacgctcaccgccgacagtgtgcaatggatcga

SEQ ID NO: 873928 - DNA, 75 bp, synthetic construct
  source 1..75: mol_type = other DNA
tgcaccctaccccctttacgctcaccgccgacagtgtgcaatggatcgattcagttaactgatccgcccacccga

SEQ ID NO: 873929 - DNA, 75 bp, synthetic construct
  source 1..75: mol_type = other DNA
cagattatggtggggcgtgcagggcagccgcaaggctggccggtttcggtagtcaccggttgtagcaaccctgtg

SEQ ID NO: 873930 - DNA, 75 bp, synthetic construct
  source 1..75: mol_type = other DNA
tggagaaactgcgcgaaatttatcctcaacgaaagtttgtgatgagccgctttgaagaggtattcgagcagattg

SEQ ID NO: 873931 - DNA, 75 bp, synthetic construct
  source 1..75: mol_type = other DNA
agcgtccggaaacttctcacctgacccgtgttgatctgaaagaagatggcaaaggcctgaagattgttcgccaga

SEQ ID NO: 873932 - DNA, 75 bp, synthetic construct
  source 1..75: mol_type = other DNA
gcttgaaaatttaagcctggcgatctgcacccccccccccctttacgctcaccgccgacagtgtgcaatggatcg

SEQ ID NO: 873933 - DNA, 75 bp, synthetic construct
  source 1..75: mol_type = other DNA
ttcaagcagccgatcgatgatgcagagtggaccattaccaccctgacgcattctgtcagcccggataatggattt

SEQ ID NO: 873934 - DNA, 75 bp, synthetic construct
  source 1..75: mol_type = other DNA
acgagtggtgtaacacctaccaggatatcgttgatttcaccgatgcaggcagttgtcatatggtgcaaattaaaa

SEQ ID NO: 873935 - DNA, 75 bp, synthetic construct
  source 1..75: mol_type = other DNA
gtactcgacgggcaaacggcgatcctcgaagattatttcgctgtcaaaccggagaacaaagatcgtgtgaagaag

SEQ ID NO: 873936 - DNA, 75 bp, synthetic construct
  source 1..75: mol_type = other DNA
atggcttatcaatcgcaagatatcattcgtcgttccgcgactaacggtccccccccccccccgggggcgggggac

SEQ ID NO: 873937 - DNA, 75 bp, synthetic construct
  source 1..75: mol_type = other DNA
caaccccaatgatttaagtgccaaatcgtggacggtgatgcgattctcggaagtggagcagaacgacaaactgga

SEQ ID NO: 873938 - DNA, 75 bp, synthetic construct
  source 1..75: mol_type = other DNA
tcgaacatcgcggcaattcctataatgcctaccagatcaccaaaaacggcttcgttttcctggtgatgggcttca

SEQ ID NO: 873939 - DNA, 75 bp, synthetic construct
  source 1..75: mol_type = other DNA
ttatggcagaagacaccagtatcgacaaattgatccgcgcgctggttggcgtgatcctgtttcagtcagcatatg

SEQ ID NO: 873940 - DNA, 75 bp, synthetic construct
  source 1..75: mol_type = other DNA
ttcgtcgctccgcgactaacggtctgacccccgcgcctcaggcgcgggacttccaggaagaagtagcgaagctca

SEQ ID NO: 873941 - DNA, 75 bp, synthetic construct
  source 1..75: mol_type = other DNA
tggcgtcggtggtacacacgtgatgtacgtgctgcaccatgctgacaagccgaatctgtatcatggcttgccgga

SEQ ID NO: 873942 - DNA, 75 bp, synthetic construct
  source 1..75: mol_type = other DNA
cgccaaccataagctgaaactcatggtgccgatgacgctgatgatcattttcgtgctgttatatctggcgttccg

SEQ ID NO: 873943 - DNA, 75 bp, synthetic construct
  source 1..75: mol_type = other DNA
ggtctattccgatcttgctgctgggcgcctggatgctgcgcttcaggatgaagtggctgccagtgaaggtttcct

SEQ ID NO: 873944 - DNA, 75 bp, synthetic construct
  source 1..75: mol_type = other DNA
ccaacgctggattcgctgaaaggtaaacacgtgggcgtgctgcaaggttctactcaggaagcttacgccaatgat

SEQ ID NO: 873945 - DNA, 75 bp, synthetic construct
  source 1..75: mol_type = other DNA
caaaggttcaccgattcagccaacgctggattcactgaaaggtaaacatgttggtgtgctgcagggatcaaccca

SEQ ID NO: 873946 - DNA, 75 bp, synthetic construct
  source 1..75: mol_type = other DNA
atgaagaagtcgattctcgctctgtctttgttagtcggtatttccgcagcggcctccagctatgcggcgctaccg

SEQ ID NO: 873947 - DNA, 75 bp, synthetic construct
  source 1..75: mol_type = other DNA
cggcacctacgacaagatggcgaaaaagtatttcgactttaatgtctacggtgactggtacgtcgctgggaagct

SEQ ID NO: 873948 - DNA, 75 bp, synthetic construct
  source 1..75: mol_type = other DNA
acaaaaaatacttcggcgatggtacaggtgtagggctgcgtaaagatgatacagaactgaaggccgcgtttgata

SEQ ID NO: 873949 - DNA, 75 bp, synthetic construct
  source 1..75: mol_type = other DNA
cagagccattcttcaaaacaacaagggaagatattaagctaagcgttgataaaggcatactatttaaggttggcg

SEQ ID NO: 873950 - DNA, 75 bp, synthetic construct
  source 1..75: mol_type = other DNA
aagaggaaatgaaaaattgtttgttgatgtttatgccagatttatagaaccattaattattaaaaacacaggaat

SEQ ID NO: 873951 - DNA, 75 bp, synthetic construct
  source 1..75: mol_type = other DNA
aggctttccatccggaaacctataagcgctgggcgaaagaagctatagaacgagcttgtgtcattgccgggatcg

SEQ ID NO: 873952 - DNA, 75 bp, synthetic construct
  source 1..75: mol_type = other DNA
actatgcagcaccacaatacaacctgcttgccatgaccggtaacaacgccgccaacataagctatagccagtggg

SEQ ID NO: 873953 - DNA, 75 bp, synthetic construct
  source 1..75: mol_type = other DNA
accccgccgccatgataacgacgaagacactgacactggtgaaaccaccgaaaaacagcatcccgccgacaagga

SEQ ID NO: 873954 - DNA, 75 bp, synthetic construct
  source 1..75: mol_type = other DNA
tgacatgaatcatattccttccggcgtccggcattttaccgccagacagctcgggattcgtgatatcaccgttct

SEQ ID NO: 873955 - DNA, 75 bp, synthetic construct
  source 1..75: mol_type = other DNA
agatcgggatgtaacgctgcctgcaggagctgagttgcttgccagcgaccaaacgccacttgcaattattaacag

SEQ ID NO: 873956 - DNA, 75 bp, synthetic construct
  source 1..75: mol_type = other DNA
gccgcagtgttttctggtgcaggaatgattatattctactggttactccagccatcagaaaccataatgaaataa

SEQ ID NO: 873957 - DNA, 75 bp, synthetic construct
  source 1..75: mol_type = other DNA
aaaagaaactatcatttggcacctatccaactattacattggctgaagctcgcaaacgtcgggatgaagccaaga

SEQ ID NO: 873958 - DNA, 75 bp, synthetic construct
  source 1..75: mol_type = other DNA
ggcaacggatgccgccagttttatggcgcggatggataccgttctgcagatatacggagaggaaaaaggtgcgaa

SEQ ID NO: 873959 - DNA, 75 bp, synthetic construct
  source 1..75: mol_type = other DNA
acgggcactggctttatcgccctcgccggggtcgccgccgaatttggcgtggtgatgctgatgtatttacgtcac

SEQ ID NO: 873960 - DNA, 75 bp, synthetic construct
  source 1..75: mol_type = other DNA
ccggcgatcgcccccgttctggctgacggagacagcaacagactcttccacggacaaaaacgtcccgagcgccgt

SEQ ID NO: 873961 - DNA, 75 bp, synthetic construct
  source 1..75: mol_type = other DNA
aatatgaaagatgctgtttactttaatgacttcatttatcttgacgtgaaatcttcaacgttcagcatttcttac

SEQ ID NO: 873962 - DNA, 75 bp, synthetic construct
  source 1..75: mol_type = other DNA
gagaaatggacctacaacccattatttcgaatgtcaagggacaagagcaaacactatgtattggcatataagcca

SEQ ID NO: 873963 - DNA, 75 bp, synthetic construct
  source 1..75: mol_type = other DNA
gccctgatcacttttgttctggtggtcgtcttcggtggcttgacgctgttcttccacaatgatgagtttattaaa

SEQ ID NO: 873964 - DNA, 75 bp, synthetic construct
  source 1..75: mol_type = other DNA
aactaccgcctctccagcagataaggagataacaaattatttcttaacctatttatttcccttaatcagtggtcc

SEQ ID NO: 873965 - DNA, 75 bp, synthetic construct
  source 1..75: mol_type = other DNA
aatatgaaagatgctgtttactttaatgacttcatttatcttaacgtaaaatcttcaacgttcagcatttcttac

SEQ ID NO: 873966 - DNA, 75 bp, synthetic construct
  source 1..75: mol_type = other DNA
ttatgtcgtaatgctgacctcccgaggtcaggatgtggcggaaggccgcgcccgcgttgccggtgtcaagcgtcc

SEQ ID NO: 873967 - DNA, 75 bp, synthetic construct
  source 1..75: mol_type = other DNA
ccgaataccctgtttgtgcttaaaaatagcgttagcagtggagtgaaaggcggttatcttgcggcctgtggtgta

SEQ ID NO: 873968 - DNA, 75 bp, synthetic construct
  source 1..75: mol_type = other DNA
ttacgatatcaaagggctggttcttagcccgtttggtaacgcctccttcgcaggggtgtaccgcgaaaagcaaaa

SEQ ID NO: 873969 - DNA, 75 bp, synthetic construct
  source 1..75: mol_type = other DNA
tcattatgtggtggcgttttttaatcctgatgaaaatacgctggttaatgacgttgattccagaactgaatcaca

SEQ ID NO: 873970 - DNA, 75 bp, synthetic construct
  source 1..75: mol_type = other DNA
gtgactgcacctgcttactttttttacagcacgctacgccgggaataaccggaatgtttattcacccgttttcgg

SEQ ID NO: 873971 - DNA, 75 bp, synthetic construct
  source 1..75: mol_type = other DNA
gatagcctttcgcagcgtgaccgccaggcattcgccgccgaactggaaaagtggtggctggaagtgcaacgtagt

SEQ ID NO: 873972 - DNA, 75 bp, synthetic construct
  source 1..75: mol_type = other DNA
gttgaaggcgttagggctggaaaacttaactctgaaactttgggtgcccacacgttcgcaggcgtggaaccccag

SEQ ID NO: 873973 - DNA, 75 bp, synthetic construct
  source 1..75: mol_type = other DNA
gggcaatatattcgcttacaacgtcatgatgatttctggcgtggtaagccgttgatgccacaagtggtggtggat

SEQ ID NO: 873974 - DNA, 75 bp, synthetic construct
  source 1..75: mol_type = other DNA
atgcttccggtgtactggtagtagatttaggcgattataatatgcgttatatgggtactgcgtcattagctattg

SEQ ID NO: 873975 - DNA, 75 bp, synthetic construct
  source 1..75: mol_type = other DNA
ttaacgctgaaactgtgggtgccgacgcgctcacaggcgtggaaccccagcccgctgaagaccgccgaactcatt

SEQ ID NO: 873976 - DNA, 75 bp, synthetic construct
  source 1..75: mol_type = other DNA
gggcaatatattcgcctgcaacgtcatgatgagttctggcgaggcaaaccgttgatgccgcaggtggtggtggat

SEQ ID NO: 873977 - DNA, 75 bp, synthetic construct
  source 1..75: mol_type = other DNA
acaacccgtggcataacgtcaacggtagcaatttcccctatttcgacagcctgcaatttgctgataacgtgaaaa

SEQ ID NO: 873978 - DNA, 75 bp, synthetic construct
  source 1..75: mol_type = other DNA
acaaaatgcgtaaactggcgagtctggttattgctatcgatccccagaagttggggaatccttttttcgccgcga

SEQ ID NO: 873979 - DNA, 75 bp, synthetic construct
  source 1..75: mol_type = other DNA
tttgccgaataatgttggggggtttggggatgtggagaaggccagtctcgtttttgttcgtaatgagttaatacc

SEQ ID NO: 873980 - DNA, 75 bp, synthetic construct
  source 1..75: mol_type = other DNA
tcatcatgtatatgaccgacgccgcgcagaaccaggaagatgtgaacaacctccgcaacgcgatgaaaagcgcca

SEQ ID NO: 873981 - DNA, 75 bp, synthetic construct
  source 1..75: mol_type = other DNA
actcctgacggagtttcttctggataagtgcaatgtcggcgagtgccgattgatattgaaatcaacaaaggaaag

SEQ ID NO: 873982 - DNA, 75 bp, synthetic construct
  source 1..75: mol_type = other DNA
gggatgccggaatacctgagcgcgctcaattcagcctggctgaatgaatcggcgaccctgttccgtcgcaagtat

SEQ ID NO: 873983 - DNA, 75 bp, synthetic construct
  source 1..75: mol_type = other DNA
tatctggtctttgccaacggctatcttgagaagcgcatgagcgtcaccggccagctcttaaaactggaaacctca

SEQ ID NO: 873984 - DNA, 75 bp, synthetic construct
  source 1..75: mol_type = other DNA
gttgatgggcggcaagccggagaacgtcgggtcgctgggtgatattgagaaagtggcaaaggtctttgtccgcaa

SEQ ID NO: 873985 - DNA, 75 bp, synthetic construct
  source 1..75: mol_type = other DNA
atcagtccactaccaacgcccacattaacactggcgacggcgtcggcatggctatccgtgcaggcgtaccagtgc

SEQ ID NO: 873986 - DNA, 75 bp, synthetic construct
  source 1..75: mol_type = other DNA
accggacattaaccaggagatctacggcctgcccggctatctttctgccattccgtccgccctgctcaatgagtc

SEQ ID NO: 873987 - DNA, 75 bp, synthetic construct
  source 1..75: mol_type = other DNA
cgtgatgacatgatggctgcgcaccgcgtaccgcctcagatgatggggattatgccaaataatgttgggggtttt

SEQ ID NO: 873988 - DNA, 75 bp, synthetic construct
  source 1..75: mol_type = other DNA
gcgtgccgccgcagatgatggggattatgcctaataatgttgggggatttggggatgtggagaaggcaagcaaag

SEQ ID NO: 873989 - DNA, 75 bp, synthetic construct
  source 1..75: mol_type = other DNA
atcggttataaattttacgaagctgaagatgacaccggcgtaggttttgtattgatttctaaatcagtcattact

SEQ ID NO: 873990 - DNA, 75 bp, synthetic construct
  source 1..75: mol_type = other DNA
gccaccggtcagctttaccggtctggcaaaaagcctgcgtgctgccgtgcatcacagctcaccgatttacgtcaa

SEQ ID NO: 873991 - DNA, 75 bp, synthetic construct
  source 1..75: mol_type = other DNA
gacacatcaagattaagcgattatgtggattttacagcgagagcaagtcgggatagcttcttgaaatcattaaca

SEQ ID NO: 873992 - DNA, 75 bp, synthetic construct
  source 1..75: mol_type = other DNA
gcccgtcaggatgccctgaaggattatgtcagtcttattcaacatccggaacgtggattgatatggcgggctatc

SEQ ID NO: 873993 - DNA, 75 bp, synthetic construct
  source 1..75: mol_type = other DNA
tggaatttatgccgtttgttttgcccgctttgtgctgcatggggcgagcgatgtgccggatgagtatgttcgtcg

SEQ ID NO: 873994 - DNA, 75 bp, synthetic construct
  source 1..75: mol_type = other DNA
tagggaaaacaggaagcaccgttgcgaatgataaagcagttggatggaactggagtagcggagcctataacgcaa

SEQ ID NO: 873995 - DNA, 75 bp, synthetic construct
  source 1..75: mol_type = other DNA
tactggcacaggactgtctggactccctgtcggtgaaccgggaaggaaacctgctcccggacgttttccggcgct

SEQ ID NO: 873996 - DNA, 75 bp, synthetic construct
  source 1..75: mol_type = other DNA
acacgagtgtagctcacgcagaggaagcagctacagctcttgatggaattggccaacgcgttaacgaaattaccg

SEQ ID NO: 873997 - DNA, 75 bp, synthetic construct
  source 1..75: mol_type = other DNA
aggttgcagatatggggcctgaatattcgaaagtctgtaaacacctcgtcgctcgtcaggatgcactgaaagact

SEQ ID NO: 873998 - DNA, 75 bp, synthetic construct
  source 1..75: mol_type = other DNA
gtagcggtgtcgctacatctacgcttgctgctgatgaagtgaagtcagtatgtgctgaatatggtattacgtcat

SEQ ID NO: 873999 - DNA, 75 bp, synthetic construct
  source 1..75: mol_type = other DNA
caggcggtcaagtaacaatattcgatgaagattacgacgaggtgggtcaatggcatcttgagcaatacgtcgagg

SEQ ID NO: 874000 - DNA, 75 bp, synthetic construct
  source 1..75: mol_type = other DNA
ctgtgggtcaagtaacattatttgatgaagaagatgacgaggtgggtaaatggcatcttgagcaatatgtcgagg

SEQ ID NO: 874001 - DNA, 75 bp, synthetic construct
  source 1..75: mol_type = other DNA
agcgcgcttgcgggtaagcaaccgaaagatgccaccctgacggcgctggccgggcttgctactgcggcagacagg

SEQ ID NO: 874002 - DNA, 75 bp, synthetic construct
  source 1..75: mol_type = other DNA
ggcagcacaaagcgggcaaaacaaatggaatttatgccgtttgttttgcccgctttgtgctgcatggggcgagcg

SEQ ID NO: 874003 - DNA, 75 bp, synthetic construct
  source 1..75: mol_type = other DNA
gatgagtgggaagaggaaacagggctttcacgatacgagcaggagggcgcgcgcaaaaaactacgtggtctcggc

SEQ ID NO: 874004 - DNA, 75 bp, synthetic construct
  source 1..75: mol_type = other DNA
ttcttgccctgagcgggatactgaccctgctgtccgttcagctggttccgcagttcgtcagaatcatcccgccgg

SEQ ID NO: 874005 - DNA, 75 bp, synthetic construct
  source 1..75: mol_type = other DNA
agcccccgttaagggaggatcagggaattccgccactatgggcgctctgttatttggaggcgctacagcggctgc

SEQ ID NO: 874006 - DNA, 75 bp, synthetic construct
  source 1..75: mol_type = other DNA
agggattgcttttcgatgataagtcttcttctgtgtcagatgtaaaaatgtcagtcagcgaagcaccgataacca

SEQ ID NO: 874007 - DNA, 75 bp, synthetic construct
  source 1..75: mol_type = other DNA
tcgctaatgctgaaacacaaggagagctaatccaacgtgcaaggcttggcggtgtagacgttaaccagatgtata

SEQ ID NO: 874008 - DNA, 75 bp, synthetic construct
  source 1..75: mol_type = other DNA
aaagactctattacaggcttaaaggaattcgcagagaacatcaagccagctaagttaagatttgatagcgtcact

SEQ ID NO: 874009 - DNA, 75 bp, synthetic construct
  source 1..75: mol_type = other DNA
taacgctattaatgaacttctaaacatcggtgttattaacaaaagcgaccttaaaaaatttgctgataatccagc

SEQ ID NO: 874010 - DNA, 75 bp, synthetic construct
  source 1..75: mol_type = other DNA
gctgaattggtgaaagacaagaaaaccggaaaatctgaatggaaaggcggtgataacgctattaatgaacttcta

SEQ ID NO: 874011 - DNA, 75 bp, synthetic construct
  source 1..75: mol_type = other DNA
gcgaatttatcgacttcaaatcaaaggcatcttccgctgagtttagcaagctattaacgcttggtgttatgtcag

SEQ ID NO: 874012 - DNA, 75 bp, synthetic construct
  source 1..75: mol_type = other DNA
tctcgaacgttgtcaccttcgaagttaaccgaccatcattagagaaagcaaaagcagaagtagaaaaacttcgta

SEQ ID NO: 874013 - DNA, 75 bp, synthetic construct
  source 1..75: mol_type = other DNA
ccggctgatgcagagcagtgttttcctgctcaacctctccacgctgattggtgcccgcatgacctttcaggatgc

SEQ ID NO: 874014 - DNA, 75 bp, synthetic construct
  source 1..75: mol_type = other DNA
ttaaaactcctcgatgtgtcaagctctatcagtgcaatgcaccgcctttctgtagctgaacaatacaaagctatt

SEQ ID NO: 874015 - DNA, 75 bp, synthetic construct
  source 1..75: mol_type = other DNA
gattgagcgaatttatcgacttcaaatctaaagcgtccgccgctgaattcagcaagctgttaaccctgggcgtta

SEQ ID NO: 874016 - DNA, 75 bp, synthetic construct
  source 1..75: mol_type = other DNA
aaactggtaaatctgaatggaaaggcggcgattctggtattacgcagatgttaaacgaaggcttatttactaaga

SEQ ID NO: 874017 - DNA, 75 bp, synthetic construct
  source 1..75: mol_type = other DNA
tttacctgcgggatcaacgccgctggacttcgcttaccacatccacagtgatgtcggacaccgctgcatcggggc

SEQ ID NO: 874018 - DNA, 75 bp, synthetic construct
  source 1..75: mol_type = other DNA
cctgtgttgatctggcgctgtgggatctgttcggcaaagtggtcgggctgccggtttacaaactcttaggcggtg

SEQ ID NO: 874019 - DNA, 75 bp, synthetic construct
  source 1..75: mol_type = other DNA
ccatgcggtgatcaccttcaccaatacgccattcagcgaattcctgatgaccagtccggattgttcaacgatgcg

SEQ ID NO: 874020 - DNA, 75 bp, synthetic construct
  source 1..75: mol_type = other DNA
ctgaggatgtaacaaaactcgtttttagccaaaacccatcagaacgttctcagctttacaggcttctggatgaca

SEQ ID NO: 874021 - DNA, 75 bp, synthetic construct
  source 1..75: mol_type = other DNA
gctgggcatagtgcacactcactatcgccacttgccggatgagttcgatgattacgttgcgaacccgaaaccgaa

SEQ ID NO: 874022 - DNA, 75 bp, synthetic construct
  source 1..75: mol_type = other DNA
acagccgaaccccagccgtgactggttaaacccaaacctcggttacgtcacaaccagccgtgggcgttcgaaaat

SEQ ID NO: 874023 - DNA, 75 bp, synthetic construct
  source 1..75: mol_type = other DNA
gcgcggggcgacagtgattatcgaaagtcagtttcaggttgccgacctgatggtcgatctcgtcagccgtaaggt

SEQ ID NO: 874024 - DNA, 75 bp, synthetic construct
  source 1..75: mol_type = other DNA
cacccgtagcggcacgcgtatcactttgaccagtaaagaatttaccctgctggagtttttcctccgtcatcaggg

SEQ ID NO: 874025 - DNA, 75 bp, synthetic construct
  source 1..75: mol_type = other DNA
ttcttcagaggagagcatgggaaacagcttgatgggataatgaaatatcttgattccactagacaggcagctaca

SEQ ID NO: 874026 - DNA, 75 bp, synthetic construct
  source 1..75: mol_type = other DNA
agttaacctcactcagcatggatgctctaaaagctcgatggtctcaacttttcggctctgacgcatctcaggaaa

SEQ ID NO: 874027 - DNA, 75 bp, synthetic construct
  source 1..75: mol_type = other DNA
agaggggcttgagcgttcagcagaacagggagccagtcttggggctgcgatgcgcgatgctataacaggcgaaag

SEQ ID NO: 874028 - DNA, 75 bp, synthetic construct
  source 1..75: mol_type = other DNA
tatgaaaaaagccgtagccaaaaatcttggagcagacgaagccattaaggaaggtgcgaacaagttcctgatatg

SEQ ID NO: 874029 - DNA, 75 bp, synthetic construct
  source 1..75: mol_type = other DNA
gataaaacctttatgcagagtcaggctcagacattaggcgaaagagttcctttttttggaaccggtaagaatcgg

SEQ ID NO: 874030 - DNA, 75 bp, synthetic construct
  source 1..75: mol_type = other DNA
agcacccgacaccgttacagcaaaaggtactggatctggatatcagacagccaggaccgcagttatttattctgg

SEQ ID NO: 874031 - DNA, 75 bp, synthetic construct
  source 1..75: mol_type = other DNA
gggaaatgagcgttgtcagagtgcgtcgaagctggtggaaaaaacatcgggatgagttttctttactggaagggg

SEQ ID NO: 874032 - DNA, 75 bp, synthetic construct
  source 1..75: mol_type = other DNA
gggtcagcaagaagctccgttcctggaaaaagaagattacccctggctgacgcatgtcacgaaatcggatgtgaa

SEQ ID NO: 874033 - DNA, 75 bp, synthetic construct
  source 1..75: mol_type = other DNA
tctactgacgggttacgctgggacttttatcttcgttcaaccctacactggcataacggcgatgcagtaaaagcc

SEQ ID NO: 874034 - DNA, 75 bp, synthetic construct
  source 1..75: mol_type = other DNA
aacgtgattttagtcaccgatgacgaaagttgtgggtattcggctacggagggattgattggcaaggttggttga

SEQ ID NO: 874035 - DNA, 75 bp, synthetic construct
  source 1..75: mol_type = other DNA
tggcattcgctggatgtagccgcgataggctatttaatggtcaaaaacaactgtttcgggctggctgactatttt

SEQ ID NO: 874036 - DNA, 75 bp, synthetic construct
  source 1..75: mol_type = other DNA
tcgtctggacgcgcggcaccactgaatccatcaacatggtggcacaatgctatgcgcgtccgcgtctgcaaccgg

SEQ ID NO: 874037 - DNA, 75 bp, synthetic construct
  source 1..75: mol_type = other DNA
tccagcttgttggcctttgatttcgcggatgttcaccacagcgatatggtgaccctgctggcagagtacggcatt

SEQ ID NO: 874038 - DNA, 75 bp, synthetic construct
  source 1..75: mol_type = other DNA
aagatgcgctggcaaaacgtcctggcttccgctcatttcgctgccaggattccagcctgctggcctttgattttg

SEQ ID NO: 874039 - DNA, 75 bp, synthetic construct
  source 1..75: mol_type = other DNA
ggctcaaaacgccttaaccgtctttcctccaaaagcacaaaccgcgcctttcaccggaattaatacgctgtttcc

SEQ ID NO: 874040 - DNA, 75 bp, synthetic construct
  source 1..75: mol_type = other DNA
tttctcaggtcacaagctttacggcccaacgggtatcggtgtgctatatggcaaaccagagctactggaagcgat

SEQ ID NO: 874041 - DNA, 75 bp, synthetic construct
  source 1..75: mol_type = other DNA
aacctcgtcccctggctgatggtcgcccaacaaactggagccaaagtggtgaaattgccgcttaatgcgcagcga

SEQ ID NO: 874042 - DNA, 75 bp, synthetic construct
  source 1..75: mol_type = other DNA
attcgattatttcgaagagaatcatgctacgccttcggatgttcacataactgacggattaagaagctatgatga

SEQ ID NO: 874043 - DNA, 75 bp, synthetic construct
  source 1..75: mol_type = other DNA
ctcgttactttactccctcgacaagaatcactgcaccgcagaattggttcctgcggatccgcagaacaccgcgca

SEQ ID NO: 874044 - DNA, 75 bp, synthetic construct
  source 1..75: mol_type = other DNA
ctttatctgattggcctgttaggactcacccaggctaacaaatacgtttcctcgcatactggtacgaacggcgca

SEQ ID NO: 874045 - DNA, 75 bp, synthetic construct
  source 1..75: mol_type = other DNA
cctggataaaactaacgctcaaggtgagccaggataatctcttcaatcatctgcacatcctcaccggtaaagccg

SEQ ID NO: 874046 - DNA, 75 bp, synthetic construct
  source 1..75: mol_type = other DNA
gcggcaccatcgatttccctgatgatgtcagccgtgcacgccagaagctgttccgcttcctcgataacaaattcg

SEQ ID NO: 874047 - DNA, 75 bp, synthetic construct
  source 1..75: mol_type = other DNA
aggaaattagtgaaggtattgtgtcgatgtttcgtgtggacccggatctggctggtccattgatggcgatggtta

SEQ ID NO: 874048 - DNA, 75 bp, synthetic construct
  source 1..75: mol_type = other DNA
atgaagagtactgagtttcatcctgcccattatgatgcgcacggacgcctgcgtttaccttttctcttctggctt

SEQ ID NO: 874049 - DNA, 75 bp, synthetic construct
  source 1..75: mol_type = other DNA
aaagacggacttcagattatcccattgtcagaagtcgcagcgaaggatgaatttctgaacatcaagaacgtcagc

SEQ ID NO: 874050 - DNA, 75 bp, synthetic construct
  source 1..75: mol_type = other DNA
tgtcagaagtcgcagcgaaggatgaatttctgaacatcaagaacgtgagccgggacgatatgatggcggcgcatc

SEQ ID NO: 874051 - DNA, 75 bp, synthetic construct
  source 1..75: mol_type = other DNA
atgggaaagagtaagaaaaaccgcgctgtgtcgacgaaccagattcagcataaaagccagacttcagccgaagca

SEQ ID NO: 874052 - DNA, 75 bp, synthetic construct
  source 1..75: mol_type = other DNA
aattgtggctttttttggcgtttatttaattcgaaagaatatagccgttataatcacattactaaaacagccaat

SEQ ID NO: 874053 - DNA, 75 bp, synthetic construct
  source 1..75: mol_type = other DNA
ggcctgcccggttatctttctgccattccgtcagctctgctcaacgagtccgccacgctgttccaccgcaagtat

SEQ ID NO: 874054 - DNA, 75 bp, synthetic construct
  source 1..75: mol_type = other DNA
atgggaaagagtaagaagaaccgcgctgcggcgacgaaacagacccagcataaaaaccagacttcagccgaagca

SEQ ID NO: 874055 - DNA, 75 bp, synthetic construct
  source 1..75: mol_type = other DNA
taacgtgcgtgaactgactccagcaattctggcagtactaccgctgaaatatcgcggccacctggttgcgcagga

SEQ ID NO: 874056 - DNA, 75 bp, synthetic construct
  source 1..75: mol_type = other DNA
tgtcgctatattttatggccgtggcaactggccagggctgcgggtggaaaagctttacgccgaatacctgttgcc

SEQ ID NO: 874057 - DNA, 75 bp, synthetic construct
  source 1..75: mol_type = other DNA
gatggcgcaatctgaaatcgaggccggacgccttgtctgcccgtttaatgatgttctggtcagtaaaaatgcttt

SEQ ID NO: 874058 - DNA, 75 bp, synthetic construct
  source 1..75: mol_type = other DNA
aagatctggctaaacatacgttattacatgatgcgtcacgccgtgactggcagacatatacccgacaattggggt

SEQ ID NO: 874059 - DNA, 75 bp, synthetic construct
  source 1..75: mol_type = other DNA
gctgggatatcatccgtatgctgcgcagtgccggaaaggggatgccggtattactgctgacggcccttggcacga

SEQ ID NO: 874060 - DNA, 75 bp, synthetic construct
  source 1..75: mol_type = other DNA
agccagtttaaggtggctgacctctctattgatctcgtatccagaaaagtcagccgcgccgggaaccgcattgtg

SEQ ID NO: 874061 - DNA, 75 bp, synthetic construct
  source 1..75: mol_type = other DNA
atgaaaatattgatcgtcgaagacgaaattaaaacaggtgaatatctcagcaaagggcttacagaggcagggttc

SEQ ID NO: 874062 - DNA, 75 bp, synthetic construct
  source 1..75: mol_type = other DNA
acgtgtttatatggtcaaatgacagggaacagccagaacgagtgtaatgctgcggttaaggctttcaaatccatt

SEQ ID NO: 874063 - DNA, 75 bp, synthetic construct
  source 1..75: mol_type = other DNA
tgtctctatggtcagcttacgggtaattcgcaaagcgaatgcaatcctgctgtaaaagcttttaaggcgattaaa

SEQ ID NO: 874064 - DNA, 75 bp, synthetic construct
  source 1..75: mol_type = other DNA
atcgcggccacctggttgagcaggatagcttcatggctcggctggctgaaatggaaaaggaactcagtgaggcaa

SEQ ID NO: 874065 - DNA, 75 bp, synthetic construct
  source 1..75: mol_type = other DNA
ctgtctgccctgaatatccgggaaagtgacttctggcagccgggaacccgtgccgtgatgttcagccagcctgcc

SEQ ID NO: 874066 - DNA, 75 bp, synthetic construct
  source 1..75: mol_type = other DNA
tgccgtgatgttcagccagcctgccagccagttactggcaggtgcgcgcatggatgtgtatgtcatccgtgacgg

SEQ ID NO: 874067 - DNA, 75 bp, synthetic construct
  source 1..75: mol_type = other DNA
aatggttgcccttcggcagatcctgatattgttaagcagattttgaaaaagttcggaaagctgaaaagtttttga

SEQ ID NO: 874068 - DNA, 75 bp, synthetic construct
  source 1..75: mol_type = other DNA
atcgatcgcggctgggatatggcgacaggtgagaaagactttgacgatccgcagaatcagcaacatcgtccacgt

SEQ ID NO: 874069 - DNA, 75 bp, synthetic construct
  source 1..75: mol_type = other DNA
cgcaacgaccttgcttacggcatgatcaccaaaggactgaagaaccttgccaaagagcttgattgcgttgttgtg

SEQ ID NO: 874070 - DNA, 75 bp, synthetic construct
  source 1..75: mol_type = other DNA
caaagagcttggctgcgtcgtcgtcctgctgacccagctcaaccgagaactggagaagcgagtgaataaacgccc

SEQ ID NO: 874071 - DNA, 75 bp, synthetic construct
  source 1..75: mol_type = other DNA
cccgcgccgccgatgaatgattttgaatttgctgattcatcctggcggcgttctgtgaactcgctggatgcaagt

SEQ ID NO: 874072 - DNA, 75 bp, synthetic construct
  source 1..75: mol_type = other DNA
ttgacctgggggagaccgagcttccggtgctcggcgagatcacctggcaggcttatgacccggcaaggagtaaat

SEQ ID NO: 874073 - DNA, 75 bp, synthetic construct
  source 1..75: mol_type = other DNA
ctgtcatcctgttgtttctggtacaggctgcagccgtacacacgttgtacgggtatatcgattatcttgccagaa

SEQ ID NO: 874074 - DNA, 75 bp, synthetic construct
  source 1..75: mol_type = other DNA
gatcgcgtcgcggccttcgctcatttggcgaggtcatggaagactgggttagcgaccttgagaagcgatttgacc

SEQ ID NO: 874075 - DNA, 75 bp, synthetic construct
  source 1..75: mol_type = other DNA
atgaatatgcaatcctgcggtaacaaaatgaatttattcgactccctgaacagcgcgcgccgtctgaccgaactt

SEQ ID NO: 874076 - DNA, 75 bp, synthetic construct
  source 1..75: mol_type = other DNA
cgggcaacttttatgggcacaacgcgacgttccctggttgttgaagatgattcagcctgactggctaaaatctaa

SEQ ID NO: 874077 - DNA, 75 bp, synthetic construct
  source 1..75: mol_type = other DNA
ctgttacgcggcgagagcaatctgttctatacgctggcgaaatgggaaaacaataagttgcatgtcgaattgcca

SEQ ID NO: 874078 - DNA, 75 bp, synthetic construct
  source 1..75: mol_type = other DNA
atgttgtctgtttctcgttccacctggtgcgaaacatactccctgcactgggtaggaatgaaagaggcggtgaga

SEQ ID NO: 874079 - DNA, 75 bp, synthetic construct
  source 1..75: mol_type = other DNA
tgtatgaggcctgctgccgcgagtggggtacgccctgcaatgcgcagggtgaagcgcaaccgctgctgattttag

SEQ ID NO: 874080 - DNA, 75 bp, synthetic construct
  source 1..75: mol_type = other DNA
accaaccaacggcgacggatgcctaccgtgatgaactgcgccagtatttgctgcgcgtgccggaagatgacgaag

SEQ ID NO: 874081 - DNA, 75 bp, synthetic construct
  source 1..75: mol_type = other DNA
tccgtctggcattaagtatgaccatcgatcgacatctgatgacggaaaaagtgttgggtacaggtgaaaaaccgg

SEQ ID NO: 874082 - DNA, 75 bp, synthetic construct
  source 1..75: mol_type = other DNA
gggccggttggtccggcaggtcctgcgggtaaaacggggccacagggccctgccggagggcgaggaccgatggga

SEQ ID NO: 874083 - DNA, 75 bp, synthetic construct
  source 1..75: mol_type = other DNA
atgacgatggatccgggggagtatacggtttcggtgacggtgaaagggaagacagctgtctacggacgtgtgcgt

SEQ ID NO: 874084 - DNA, 75 bp, synthetic construct
  source 1..75: mol_type = other DNA
gacacagaccaacagtctgctgaaatgcgccgccgtgaacgcgaggaaccgcagtccaagaagaaaggaggattc

SEQ ID NO: 874085 - DNA, 75 bp, synthetic construct
  source 1..75: mol_type = other DNA
tcttgttgaggttagcataccaggagaactgctgacagatttccggcagatacagaataatgtggctgatgacct

SEQ ID NO: 874086 - DNA, 75 bp, synthetic construct
  source 1..75: mol_type = other DNA
caacgtagaaagcagtaaagagtggacgaaacccggaaaactgatcggcaatggcgcttatgttcttaaagagcg

SEQ ID NO: 874087 - DNA, 75 bp, synthetic construct
  source 1..75: mol_type = other DNA
gatcatttaacgatgttcagatccgctcggataaacgcaacaagcgaaatctggtaaaactggataatgcgttag

SEQ ID NO: 874088 - DNA, 75 bp, synthetic construct
  source 1..75: mol_type = other DNA
tggatgatgaaggcatcactgcatgcgggattcaataaagtcatcacggatgtcgggccgggaaaactcaatctg

SEQ ID NO: 874089 - DNA, 75 bp, synthetic construct
  source 1..75: mol_type = other DNA
gtgctgggtacaggtgaaaaaccagcatggcatttcacgccagatgttactgccggatttacgccagaaccttcg

SEQ ID NO: 874090 - DNA, 75 bp, synthetic construct
  source 1..75: mol_type = other DNA
ggctaatcaagccgtggctgaaaggttatcccattaataacccggaagatgtggcttatagccggactatgtata

SEQ ID NO: 874091 - DNA, 75 bp, synthetic construct
  source 1..75: mol_type = other DNA
caaagagcttgattgcgttgttgtgcttctgacacagcttaaccgcgcactggaaagccgaaccaataaacgccc

SEQ ID NO: 874092 - DNA, 75 bp, synthetic construct
  source 1..75: mol_type = other DNA
gaaacgaaggcagccacacccaaagcaataaaagcacttaaggcgctgacagtaacaagaccaacagcccccctc

SEQ ID NO: 874093 - DNA, 75 bp, synthetic construct
  source 1..75: mol_type = other DNA
gcttcaggctggggaatccggtaacgtatgagttgcaggagggggaccatggctggtcagttaatctggctgatg

SEQ ID NO: 874094 - DNA, 75 bp, synthetic construct
  source 1..75: mol_type = other DNA
tctatattgtggtcgaggatgatggccccggtatcccgaaaagcaagcgtgaagtggtcttcgaccgtggtcaac

SEQ ID NO: 874095 - DNA, 75 bp, synthetic construct
  source 1..75: mol_type = other DNA
agagattgaggctattgaacaacgggatgacggtgtgcatgtgcgctggcggcagggtgagaagcgagaagaaag

SEQ ID NO: 874096 - DNA, 75 bp, synthetic construct
  source 1..75: mol_type = other DNA
accttcgccgggcggtacgtgtctcaatgtcggctgtattccgtcaaaatcgttgctgcaatcttccgaactgta

SEQ ID NO: 874097 - DNA, 75 bp, synthetic construct
  source 1..75: mol_type = other DNA
ttatggggggtgggccaggtggttacgtagcggcactgcgggctgcgcagaatgggctttccgtagtatgtattg

SEQ ID NO: 874098 - DNA, 75 bp, synthetic construct
  source 1..75: mol_type = other DNA
aactcggtcttgaagccgacaaccgtggcggtattgccgtcgataacttatgccgtaccgggaaagccgggctgt

SEQ ID NO: 874099 - DNA, 75 bp, synthetic construct
  source 1..75: mol_type = other DNA
attctctgtttgccggtaacggtcgcgccttagcattaggccaggaaggtgggcgttgcacgttatacagcgata

SEQ ID NO: 874100 - DNA, 75 bp, synthetic construct
  source 1..75: mol_type = other DNA
aatgtcggctgtattccgtcaaaatcgttgctgcaatcttccgagctgtacgcgcaagtacagcatgaggcaagc

SEQ ID NO: 874101 - DNA, 75 bp, synthetic construct
  source 1..75: mol_type = other DNA
ccgaactggttgcctgggccagaaaaaatgacttctccatctcgctgccggtagaccgactctcttttctgctgg

SEQ ID NO: 874102 - DNA, 75 bp, synthetic construct
  source 1..75: mol_type = other DNA
atttttcagtctgctcagccgattaactatggctatcaacctctgtttgaagatcgtcgaccccgcaatatcggt

SEQ ID NO: 874103 - DNA, 75 bp, synthetic construct
  source 1..75: mol_type = other DNA
tttactcagttaagcagtgcgaccaacagtacgtctgaaacgctcgccgcaacgccgaaagcggtaaaggccgcc

SEQ ID NO: 874104 - DNA, 75 bp, synthetic construct
  source 1..75: mol_type = other DNA
ggcgctgcccgttggtgtacctgttccgtggcccactgccacaccgccagcaggctggttaaagtgcgacgggcg

SEQ ID NO: 874105 - DNA, 75 bp, synthetic construct
  source 1..75: mol_type = other DNA
atcactcagctcagtagtgccactaacagcacgtctgaagtgctggccgctacaccgaaagctgtcaaggctgca

SEQ ID NO: 874106 - DNA, 75 bp, synthetic construct
  source 1..75: mol_type = other DNA
gttattgatcaggcggtacgcctcggcgtagcgcaagcagacttcaccggactgccagcgaaatggcagccgatt

SEQ ID NO: 874107 - DNA, 75 bp, synthetic construct
  source 1..75: mol_type = other DNA
cgcctgacaatgggcatcagcttgctgtttaagaaaaataaagtgaagcacctgtgcggcctcgcaacgttagaa

SEQ ID NO: 874108 - DNA, 75 bp, synthetic construct
  source 1..75: mol_type = other DNA
gtgcagaaaagaataaatggttaaaggagagaattcaggcaatacgaaaacatgtattatccggtcagaatctgg

SEQ ID NO: 874109 - DNA, 75 bp, synthetic construct
  source 1..75: mol_type = other DNA
cagcagatcggttgccttattttaccggagcagaccgcgcagcgctggcaacccttacagctattggtcgcgcga

SEQ ID NO: 874110 - DNA, 75 bp, synthetic construct
  source 1..75: mol_type = other DNA
tgacctctatcagaagcgggtatgcgaagggtatcactgtcagaccccgtagcattgcacttaattacattgtga

SEQ ID NO: 874111 - DNA, 75 bp, synthetic construct
  source 1..75: mol_type = other DNA
atgaaaaaattactgcgtctttttttcccgctttcgctgcgggtacgttttctgttagcgacggcggcggtagta

SEQ ID NO: 874112 - DNA, 75 bp, synthetic construct
  source 1..75: mol_type = other DNA
tttacgccccatcgaagccctggcaaaagaagtccgcgaactggaagaacataaccgcgaattgctcaatccagc

SEQ ID NO: 874113 - DNA, 75 bp, synthetic construct
  source 1..75: mol_type = other DNA
cttttagagcctgacaacaaaggtcgtaaagtctcatctattcatattttcagggtaaatgaatctggcaatata

SEQ ID NO: 874114 - DNA, 75 bp, synthetic construct
  source 1..75: mol_type = other DNA
ggacgggggaatagttaaaacagacgaacccggtttaagggtgccttcctcactacgagccattagctctcgtaa

SEQ ID NO: 874115 - DNA, 75 bp, synthetic construct
  source 1..75: mol_type = other DNA
accgcgtttacaagtgttggacgtgccattcttggtaaaaccagcactcagggagttcttgattaccttggtttg

SEQ ID NO: 874116 - DNA, 75 bp, synthetic construct
  source 1..75: mol_type = other DNA
gattaccttggtttgggagaaggctctgcattacctgttggtgtgcctgttccatggccttcagccacaccgcca

SEQ ID NO: 874117 - DNA, 75 bp, synthetic construct
  source 1..75: mol_type = other DNA
acactcacccgtggagtcagataacgggagtgcctgctgcctcgctgacggcaaaaggcaccgtacaattgagca

SEQ ID NO: 874118 - DNA, 75 bp, synthetic construct
  source 1..75: mol_type = other DNA
cagaccgcgcagcactgacaacccttacagctattggtcgcgctattatcgctatgggcagtataaaagaagtcc

SEQ ID NO: 874119 - DNA, 75 bp, synthetic construct
  source 1..75: mol_type = other DNA
caaccttgccaaagcatacccgtcagggaaactgctggatttacgcggtgagtttattcgtggatgggatgacgg

SEQ ID NO: 874120 - DNA, 75 bp, synthetic construct
  source 1..75: mol_type = other DNA
ggaagcggcacaggcacgttcattgtggcagcaggggatcgaccctaagcgcccgatgccgccggtgatcgtctc

SEQ ID NO: 874121 - DNA, 75 bp, synthetic construct
  source 1..75: mol_type = other DNA
cgctgcaaagtcaggacatggtggcaacctggcctgccgatactaaagagggctggtggcgctatcgtctgaaag

SEQ ID NO: 874122 - DNA, 75 bp, synthetic construct
  source 1..75: mol_type = other DNA
acagcggtgaggtgcgtgctgagaggcatgacgataacccggcgcacattatcggttatggatcggtgtttgact

SEQ ID NO: 874123 - DNA, 75 bp, synthetic construct
  source 1..75: mol_type = other DNA
ggagcagatcatggcgccatctaccgccgctgcagcgacgtctgtcgccacggatgatgtgcatcccgaagttac

SEQ ID NO: 874124 - DNA, 75 bp, synthetic construct
  source 1..75: mol_type = other DNA
cagccgaaaggcgagccggaatttaacatgaaatcgttgcaggctgcctgggatcaaatcatggcgccatcgact

SEQ ID NO: 874125 - DNA, 75 bp, synthetic construct
  source 1..75: mol_type = other DNA
tgctgaaagaggcgctctcttatctggcgaatgcgaccggcaagctgaccatcacaccagaaacggttaaccatg

SEQ ID NO: 874126 - DNA, 75 bp, synthetic construct
  source 1..75: mol_type = other DNA
actgccgttcgacctggcggaagccgagcaggagttgcaggaaggcccgctctctgaatacagcggcagcggctt

SEQ ID NO: 874127 - DNA, 75 bp, synthetic construct
  source 1..75: mol_type = other DNA
acgttgcgaaatccaaagcgccgaactctccggttgctggtcgcgctaccgtgttcatcttcccggatctgaaca

SEQ ID NO: 874128 - DNA, 75 bp, synthetic construct
  source 1..75: mol_type = other DNA
ctctccggttgcaggtcgcgctaccgtgttcatcttcccggatctgaacactggtaacaccacctacaaagcggt

SEQ ID NO: 874129 - DNA, 75 bp, synthetic construct
  source 1..75: mol_type = other DNA
tgttgcaccggatactccgactatttgtgacctggtgctgtctccaatgttgcgtggtgacattaaccagtcctc

SEQ ID NO: 874130 - DNA, 75 bp, synthetic construct
  source 1..75: mol_type = other DNA
tgatcaccttactgtatctctttgccatcgcgcgtttcttctttgccatttccggtctggataccggtagcccgt

SEQ ID NO: 874131 - DNA, 75 bp, synthetic construct
  source 1..75: mol_type = other DNA
gccgctgagccagagcatcccgctggtactggcgctttgtgcctgtgcgttcgccacctttatcgaaatgggcaa

SEQ ID NO: 874132 - DNA, 75 bp, synthetic construct
  source 1..75: mol_type = other DNA
tgcgtggtgacattaatcagtcctcgttcgcgtttcgcgtcgcccgtgacggagagagctggtatgaagacgacg

SEQ ID NO: 874133 - DNA, 75 bp, synthetic construct
  source 1..75: mol_type = other DNA
aattgaaaaaaagcaccccaacaaaaaatgaggtgcttgcagcagatgaaatgaaagaaactattcttgatcgcg

SEQ ID NO: 874134 - DNA, 75 bp, synthetic construct
  source 1..75: mol_type = other DNA
caggatgtgttgataacctacagaggaaaactaccgggaataattacgggttctctgaagactccaccgctggcc

SEQ ID NO: 874135 - DNA, 75 bp, synthetic construct
  source 1..75: mol_type = other DNA
gtgaaggggatggtccgttgccggaaaagcgccccgtaattttagaggcgcaggatgtgttgataacctacagag

SEQ ID NO: 874136 - DNA, 75 bp, synthetic construct
  source 1..75: mol_type = other DNA
tgagagagatagtgacccaccctaactacataatcctgtacagagtagctgcttcaagcattgagattgtaagcg

SEQ ID NO: 874137 - DNA, 75 bp, synthetic construct
  source 1..75: mol_type = other DNA
atgttgcccattttatggctaccatctgctcgcgatgatttgcgtcagatcataacttacatcgccaaggagaac

SEQ ID NO: 874138 - DNA, 75 bp, synthetic construct
  source 1..75: mol_type = other DNA
cactgatttgtcgtcacgcccgcgacctgctgctggcgcagggctggccggaagagacggatgttgaccagcgga

SEQ ID NO: 874139 - DNA, 75 bp, synthetic construct
  source 1..75: mol_type = other DNA
gagcgcgaacaactgttgagcgaagttcaggaacgaatgacgctaagcggccagcttgaaccggttctggcagaa

SEQ ID NO: 874140 - DNA, 75 bp, synthetic construct
  source 1..75: mol_type = other DNA
acgcggcgactatcagttgattgtgaaatacggtgaatttcttaacgaacagccggaactgaaacgcctggcaga

SEQ ID NO: 874141 - DNA, 75 bp, synthetic construct
  source 1..75: mol_type = other DNA
agccggagctgaaacgtctggcagaacagttagggcgttcacgggaagcaaaatcgatcccccgcaacgatgcgc

SEQ ID NO: 874142 - DNA, 75 bp, synthetic construct
  source 1..75: mol_type = other DNA
atggtccaaaactatgaaatgattgtgaaagggatccgcaattttgagaataaagttacggtaactttagcatta

SEQ ID NO: 874143 - DNA, 75 bp, synthetic construct
  source 1..75: mol_type = other DNA
gaactggaatatgaattttaccgtcggctggtggaaaagcagttgctcacctatcgcctgcatggtgaatcatgg

SEQ ID NO: 874144 - DNA, 75 bp, synthetic construct
  source 1..75: mol_type = other DNA
tgatgctggccgtcagcgaagagggattgatcgaagagatgatcatcgcgctgctggcctcaccgcagctggcgg

SEQ ID NO: 874145 - DNA, 75 bp, synthetic construct
  source 1..75: mol_type = other DNA
cagcgtcagccttggcgtgatccgtgcaatggaacgcaaaggcgttcgtctgagcgttttcaaacctatcgctca

SEQ ID NO: 874146 - DNA, 75 bp, synthetic construct
  source 1..75: mol_type = other DNA
gagaaaggcaaaaagcgattgaaatgatccagaattttcgtgagctacatctttatccattaatgctcatgaaaa

SEQ ID NO: 874147 - DNA, 75 bp, synthetic construct
  source 1..75: mol_type = other DNA
cattgtcagaaacttagaccagttgatacagctaaaggaacgtcttttaaaaagcaaatctgttcataggattgt

SEQ ID NO: 874148 - DNA, 75 bp, synthetic construct
  source 1..75: mol_type = other DNA
atatcagcctgagtgctcatagcaatgttttcacttcactcccctctcaaatgagaattataaaaaactttggta

SEQ ID NO: 874149 - DNA, 75 bp, synthetic construct
  source 1..75: mol_type = other DNA
agcggttgctgagatggaccgggtaactcaacagaacgccgcgctggtggaagaatctgccgccgccgccgccgc

SEQ ID NO: 874150 - DNA, 75 bp, synthetic construct
  source 1..75: mol_type = other DNA
caaattgcgcgtcgatattccgcccggaatcgcgaaaaatttgttcctgccacatttacccgatttcctgtatca

SEQ ID NO: 874151 - DNA, 75 bp, synthetic construct
  source 1..75: mol_type = other DNA
ggctggggattattcagatcccccgcatcgccgtgcgcgaagccctgcgcgccggacggcttattgaagtgttgc

SEQ ID NO: 874152 - DNA, 75 bp, synthetic construct
  source 1..75: mol_type = other DNA
ggaaaaaatgcaggttgcatatggaattctcccgggatggcacggcgttaaaaatatcaaccagtaatggcgata

SEQ ID NO: 874153 - DNA, 75 bp, synthetic construct
  source 1..75: mol_type = other DNA
gggaccaaaaggtgacaaaggcgatccgggggtggctggaccagcaggtccggcaggtgcgccggggccgaaagg

SEQ ID NO: 874154 - DNA, 75 bp, synthetic construct
  source 1..75: mol_type = other DNA
ctcaggggccgaagggcgacccgggggagacgcaaatacggttccgtctggggccgggaaacattattgagacaa

SEQ ID NO: 874155 - DNA, 75 bp, synthetic construct
  source 1..75: mol_type = other DNA
atgtcagtctgagtgctcatagcaatgtttttacctccgttccctctcatatgagaatcctgaaaaactttggtc

SEQ ID NO: 874156 - DNA, 75 bp, synthetic construct
  source 1..75: mol_type = other DNA
gaggtatatatcagcgccggttcatggcctgaaaatggcgttgatgttgatgatgaaacaatggcaatttacaca

SEQ ID NO: 874157 - DNA, 75 bp, synthetic construct
  source 1..75: mol_type = other DNA
tatcagaatggaaaaaataccgggtcttgctgatgcgcgttgatacatcaaatcccgtctggcctacgcctccgg

SEQ ID NO: 874158 - DNA, 75 bp, synthetic construct
  source 1..75: mol_type = other DNA
gctgaacggacggatgatgaactgatgcacctgggggaaggcatttccggaggagtgagatttgagccagatagc

SEQ ID NO: 874159 - DNA, 75 bp, synthetic construct
  source 1..75: mol_type = other DNA
gagatggtaaggcgtgggaccagcctgtgacaaaaggagtaggcattgccaaatttaccccggcatgggctggtg

SEQ ID NO: 874160 - DNA, 75 bp, synthetic construct
  source 1..75: mol_type = other DNA
gaggaaataggaggcgagcttgaggaactattccgcaagatggcagatctccgccttatcagtatgccagtcgat

SEQ ID NO: 874161 - DNA, 75 bp, synthetic construct
  source 1..75: mol_type = other DNA
ttaatgctgccttgtctcaacgccaggctgcatatgcccgctatgccgcagcccacccattcactatggggatag

SEQ ID NO: 874162 - DNA, 75 bp, synthetic construct
  source 1..75: mol_type = other DNA
acgtcaacgcattcagggaatatttcacgctttaacaatccggcatacgacaaagtactggcccaggcatcaacg

SEQ ID NO: 874163 - DNA, 75 bp, synthetic construct
  source 1..75: mol_type = other DNA
cctaaaggcagaaaaagcaggcgtgccagagggaggccgggcttaccaacaacggaaaaagaacaaaaagccgca

SEQ ID NO: 874164 - DNA, 75 bp, synthetic construct
  source 1..75: mol_type = other DNA
caacagccgatgcatgacccgcagggaggaaattgggggtgagcttgaagatctgtttagcaagatggcagcgct

SEQ ID NO: 874165 - DNA, 75 bp, synthetic construct
  source 1..75: mol_type = other DNA
tgaccaggcatatgacgacgatacgccccgtcttggctggctgacaacccgccagagtaaaccggtcctgacaga

SEQ ID NO: 874166 - DNA, 75 bp, synthetic construct
  source 1..75: mol_type = other DNA
cgtttctgacgtcaggacgacgggtgttcagtgcggaaagcacgctgcaggcagaatcattctgttcaccgccgc

SEQ ID NO: 874167 - DNA, 75 bp, synthetic construct
  source 1..75: mol_type = other DNA
cgtttctgacgtccggacgacgggtgttcagtgcggaaagcacgctgcaggcagagtcattctgttcgccaccgc

SEQ ID NO: 874168 - DNA, 75 bp, synthetic construct
  source 1..75: mol_type = other DNA
tactctggtctgttaattcatatcagagataacaagccgtgggatcagccagtgacaaaaggcgtaggcattgca

SEQ ID NO: 874169 - DNA, 75 bp, synthetic construct
  source 1..75: mol_type = other DNA
ctggaagaggaaaacgatgatgaaagtgaagaagataatcaggcgaatacctccagccgcgataatgccatctaa

SEQ ID NO: 874170 - DNA, 75 bp, synthetic construct
  source 1..75: mol_type = other DNA
actggctatctcgttcgataaagagattgatttccgttccctggctgcaacatacgattgcgacgttacagagct

SEQ ID NO: 874171 - DNA, 75 bp, synthetic construct
  source 1..75: mol_type = other DNA
aaacaaagtccgccctgaaatccgcgacaaggtaatccagtatcaggaagagtgtgacgatgtgctctacgagta

SEQ ID NO: 874172 - DNA, 75 bp, synthetic construct
  source 1..75: mol_type = other DNA
tcgaactattccggcagatgctacgactacggtcatgaattctcgtatgttatcggaatggcgagagacgtttta

SEQ ID NO: 874173 - DNA, 75 bp, synthetic construct
  source 1..75: mol_type = other DNA
aaatcagtgaggagcagtttaccgaagcactgtcacttgctgctcgcgttccacttgaaggtgagttcattggca

SEQ ID NO: 874174 - DNA, 75 bp, synthetic construct
  source 1..75: mol_type = other DNA
tgtgagcgcatacagagcgatatatcacagcgtattatcaataatggcgtacccgaaagcagcttcacgttaagt

SEQ ID NO: 874175 - DNA, 75 bp, synthetic construct
  source 1..75: mol_type = other DNA
ttgcatgtatagaacatcaagtatctctggaagcattcagggcaattgaggccgcgttagtaaagcacgataaga

SEQ ID NO: 874176 - DNA, 75 bp, synthetic construct
  source 1..75: mol_type = other DNA
gcgaggagcagtttaccgaagctctgtcacttgctgctcgcgttccgcttgaaggagagttaattggcaaacaag

SEQ ID NO: 874177 - DNA, 75 bp, synthetic construct
  source 1..75: mol_type = other DNA
cctgacgggccgacgaaccttctggcatgggaaaggcttaagaacaaagagttgccgccttcactgcatcactac

SEQ ID NO: 874178 - DNA, 75 bp, synthetic construct
  source 1..75: mol_type = other DNA
gtgtgcgagttccggtacagatcagcaagggcgttctgacccgttagaagggttcaaccgcaccatgtacaattt

SEQ ID NO: 874179 - DNA, 75 bp, synthetic construct
  source 1..75: mol_type = other DNA
gcttcacgctgcgtgatgacggtggtgatatggcggatggtctttacccggttctttcctggctgacctggccga

SEQ ID NO: 874180 - DNA, 75 bp, synthetic construct
  source 1..75: mol_type = other DNA
gccttgtatggttatgggattatgccaaccgctcacaggcattattccgcgaactgtatccggcattaaaacaaa

SEQ ID NO: 874181 - DNA, 75 bp, synthetic construct
  source 1..75: mol_type = other DNA
gaacctacgtgtgcaaggagcttgtttactcctacgctatgtggattagcgcagcctttgcgctgaaggttatcc

SEQ ID NO: 874182 - DNA, 75 bp, synthetic construct
  source 1..75: mol_type = other DNA
aaatcagcgatgagcagtttaccgaagctctgtcacttgcagctcgcgttccgcttgaaggcgagttaatcggca

SEQ ID NO: 874183 - DNA, 75 bp, synthetic construct
  source 1..75: mol_type = other DNA
tgattaccggagccgctcgtggtattggaaagggctgtgcgctggagcttgcgcgtggcggatttaatctgctga

SEQ ID NO: 874184 - DNA, 75 bp, synthetic construct
  source 1..75: mol_type = other DNA
ccagcgagagccgccggacgttgctggctgaagcggcaatggcggtgcgggcgctgctgggccgaccgcgtgcat

SEQ ID NO: 874185 - DNA, 75 bp, synthetic construct
  source 1..75: mol_type = other DNA
taataaagagcaaggtcattaatggagaattgacttatgaagaagctagacttgaggtatttaactattacactg

SEQ ID NO: 874186 - DNA, 75 bp, synthetic construct
  source 1..75: mol_type = other DNA
atgaacaaaaataaccctgctaattcattttctatagaagcaaggaaagaagcttttcggagagctgaagccagt

SEQ ID NO: 874187 - DNA, 75 bp, synthetic construct
  source 1..75: mol_type = other DNA
atcttacgtggagatgtgatttacgacatcgaacagggcttccctgttgcgccgaaaggtcaatttatccttaaa

SEQ ID NO: 874188 - DNA, 75 bp, synthetic construct
  source 1..75: mol_type = other DNA
tttacaacacgcccgtactgacagctatcttaatcaaagaatagcggaacgcgcatgtcagcacgcagggtttac

SEQ ID NO: 874189 - DNA, 75 bp, synthetic construct
  source 1..75: mol_type = other DNA
taaaacgcactttggctcataatcgagcctttagcgataatattaaccgcagtggcatagcctggtgctataaca

SEQ ID NO: 874190 - DNA, 75 bp, synthetic construct
  source 1..75: mol_type = other DNA
agcgtcagtgctggtgataaaagtgcaacaaaaatgctaatgcgcctggaagagaccgcaaaagcgaaagcccgc

SEQ ID NO: 874191 - DNA, 75 bp, synthetic construct
  source 1..75: mol_type = other DNA
tactcaagatgtaaaaaaattagttgagatattgcagttaaatggtcgtactgagcattatgttcaccaagaaag

SEQ ID NO: 874192 - DNA, 75 bp, synthetic construct
  source 1..75: mol_type = other DNA
caaaggtctggtgccgtggggacgttggggttatccggctgatattgcttccactgtccgcgcgatggcggaagg

SEQ ID NO: 874193 - DNA, 75 bp, synthetic construct
  source 1..75: mol_type = other DNA
gggattctactgcgaagtgacatcaataccctctttgacaattggcacttttcgatcgaccctgattcaatgaaa

SEQ ID NO: 874194 - DNA, 75 bp, synthetic construct
  source 1..75: mol_type = other DNA
gaattaccgcctgttcctgctaaatacgacaatacattcccttactatgctgaaatgagagagctaaattttaaa

SEQ ID NO: 874195 - DNA, 75 bp, synthetic construct
  source 1..75: mol_type = other DNA
atgccatctgaacatgatgaacaacgggatgttgctgatacgcagcttcccggcgagtatgacctttttgattta

SEQ ID NO: 874196 - DNA, 75 bp, synthetic construct
  source 1..75: mol_type = other DNA
aatggcggcgaactcaaaccgcaggaaaacccgaacgcgcaagcgattcaggatgagttaaaagatatcgattct

SEQ ID NO: 874197 - DNA, 75 bp, synthetic construct
  source 1..75: mol_type = other DNA
gaagccagcgccgcacttcgcgaatggaaaaaagctaaccccgacaaagcattagatgacaaacctttctggatg

SEQ ID NO: 874198 - DNA, 75 bp, synthetic construct
  source 1..75: mol_type = other DNA
gggcaaacaaacgacactttcgctgaagcagggctacggctttgttcgtgagcatggcgacgataaagtgctggt

SEQ ID NO: 874199 - DNA, 75 bp, synthetic construct
  source 1..75: mol_type = other DNA
taccactggacaatttgtaaggatttattttagccctaacgagtggacttatcagccttttaaggatgcactaac

SEQ ID NO: 874200 - DNA, 75 bp, synthetic construct
  source 1..75: mol_type = other DNA
attgcagaccgggtcaaaattgcagaacgggttgcggcagagctggccgggttgaatattcagatacgatctgtt

SEQ ID NO: 874201 - DNA, 75 bp, synthetic construct
  source 1..75: mol_type = other DNA
tcgatggatttaggtcatggagatggacgaggacgttatataaagcaagtgtattttaaagagggtttggatgaa

SEQ ID NO: 874202 - DNA, 75 bp, synthetic construct
  source 1..75: mol_type = other DNA
tggtcgaggtggctgatggcgaatatgacgtgatcgtactgcctggtggcattaaaggcgcagagtgttttcgcg

SEQ ID NO: 874203 - DNA, 75 bp, synthetic construct
  source 1..75: mol_type = other DNA
caggccaactttaaattaaaggccaaagattgcagcaatggttactcaaagatttttaccacacttacaggaaca

SEQ ID NO: 874204 - DNA, 75 bp, synthetic construct
  source 1..75: mol_type = other DNA
atgaaaaggatactactaacatccgcgttaataggtctgggtttaccggcagttgaagccgcaacaactctagat

SEQ ID NO: 874205 - DNA, 75 bp, synthetic construct
  source 1..75: mol_type = other DNA
ttaaacgggccaaatacgacccgctgaaacttcaggatgtgtttgatctgaccgggatgcaggggattaaggcgc

SEQ ID NO: 874206 - DNA, 75 bp, synthetic construct
  source 1..75: mol_type = other DNA
gtgcaggtgttatgggatgtttatcccttaatcctgccatggctgagtggactggcgatgcccgggatggcatgt

SEQ ID NO: 874207 - DNA, 75 bp, synthetic construct
  source 1..75: mol_type = other DNA
aatctagcgagtcatcggcacagttcgttgatgcgctatttgacaccaatcgtaaggctgtagagtctgttcaat

SEQ ID NO: 874208 - DNA, 75 bp, synthetic construct
  source 1..75: mol_type = other DNA
agttgtcactggagatgttgcagctcaagccaactttaaattactggcttccgattgcagcaatggttactcaaa

SEQ ID NO: 874209 - DNA, 75 bp, synthetic construct
  source 1..75: mol_type = other DNA
aaaaatattatctcagtcagggattcagtcaaaaagaatcttatgcattaacctccatggatttagggcatggtg

SEQ ID NO: 874210 - DNA, 75 bp, synthetic construct
  source 1..75: mol_type = other DNA
ctactatcaatgtaccattccacggaacaaatctgtttttggttggaattaacaatgagccttatgttcctatga

SEQ ID NO: 874211 - DNA, 75 bp, synthetic construct
  source 1..75: mol_type = other DNA
tgtggaaagtattgaagagcttgatgcatctcagataccgcaagcagtagagtacatccacagggtagtgcttga

SEQ ID NO: 874212 - DNA, 75 bp, synthetic construct
  source 1..75: mol_type = other DNA
ttccggcagatgtcatgactgcggttatgagttctcccgtattgaaccgccccgggtttcctggagagtgtttta

SEQ ID NO: 874213 - DNA, 75 bp, synthetic construct
  source 1..75: mol_type = other DNA
ggcgaactcaaaccgcaggaaaatccgaacgcgcaagcgattcaggatgatttaaaagatatcgattctgaataa

SEQ ID NO: 874214 - DNA, 75 bp, synthetic construct
  source 1..75: mol_type = other DNA
cttccagcgtcatgatttcatcgctaatggcggcgaactcaaaccgcaggaaaatccgaacgcgcaagcgattca

SEQ ID NO: 874215 - DNA, 75 bp, synthetic construct
  source 1..75: mol_type = other DNA
acgatttcaccatcttcaaattcggcgacagtgaaatcctcgtcatcaacaaatgcggtgagccgtggtttgtag

SEQ ID NO: 874216 - DNA, 75 bp, synthetic construct
  source 1..75: mol_type = other DNA
gtaaaggtatgagtgacgatgaggcaaaagcaatggtgtctatggatctgggacatggtgatggtcgaggacgtt

SEQ ID NO: 874217 - DNA, 75 bp, synthetic construct
  source 1..75: mol_type = other DNA
aaaagcaatggtgtctatggatctgggacatggtgatggtcgaggacgttatattgagcgtgtctataataaatc

SEQ ID NO: 874218 - DNA, 75 bp, synthetic construct
  source 1..75: mol_type = other DNA
acctccatggatttagggcatggtgacggtcgtggcgattatattaaacgagtttatagtcagaaaggggatgtt

SEQ ID NO: 874219 - DNA, 75 bp, synthetic construct
  source 1..75: mol_type = other DNA
atgaaaaaatcactgttaattatcccgcttcttctggttggatgcgcaaaagtaagtgactatcaagcaagttgc

SEQ ID NO: 874220 - DNA, 75 bp, synthetic construct
  source 1..75: mol_type = other DNA
aagataaaggtgtggcagctgttgttaaactgtcacgttatctcggtctgagaaatgaagaagctgtccagtcgg

SEQ ID NO: 874221 - DNA, 75 bp, synthetic construct
  source 1..75: mol_type = other DNA
gcaaacaactcgtcactcttgctcgtcaggggaggggaagttataaaacggtggctgaccgttcacgaattgcag

SEQ ID NO: 874222 - DNA, 75 bp, synthetic construct
  source 1..75: mol_type = other DNA
tcgtccgcccggtggagcagtcatggcggcaggtgctgacgcctgcggcagacagcctgaaccgacagtggcaac

SEQ ID NO: 874223 - DNA, 75 bp, synthetic construct
  source 1..75: mol_type = other DNA
ctgaaaaacttccgcctgccgggacaggtgttcctgaccggcaggagtatgaaggatgcggaagaatacggagaa

SEQ ID NO: 874224 - DNA, 75 bp, synthetic construct
  source 1..75: mol_type = other DNA
aatatttcaaccagaaagaacgctggcagcgttttaactggccggatgaacagtggcaacccggcgcatcgctga

SEQ ID NO: 874225 - DNA, 75 bp, synthetic construct
  source 1..75: mol_type = other DNA
attacaggccgggaggttccggcagaacgggcgtgtattaataaacttattgaggcacttgttgatgaaagcaac

SEQ ID NO: 874226 - DNA, 75 bp, synthetic construct
  source 1..75: mol_type = other DNA
agtcagaagaactggctccaacggatccaaaacaagacgatcataaacaaagaatcattgatttattgactcctg

SEQ ID NO: 874227 - DNA, 75 bp, synthetic construct
  source 1..75: mol_type = other DNA
atgaccaaaaagtttgaaatcgtatatcgcgacccggcagatcttattccctatgagatgaatgccaaaaagcat

SEQ ID NO: 874228 - DNA, 75 bp, synthetic construct
  source 1..75: mol_type = other DNA
ctttttctggcttgcctttttccggcatttgcggatatagtttttccgctgccgcaaaatcggcagccgggcgtg

SEQ ID NO: 874229 - DNA, 75 bp, synthetic construct
  source 1..75: mol_type = other DNA
gctatcgccattgagcgtggaaactccggcgatagcagttatttgctactcgaaggaggctgccatcatggctac

SEQ ID NO: 874230 - DNA, 75 bp, synthetic construct
  source 1..75: mol_type = other DNA
atgagacttctgattctgactctttccttaataacgctgacaggatgtacggttactcgccaggcccatgtgagc

SEQ ID NO: 874231 - DNA, 75 bp, synthetic construct
  source 1..75: mol_type = other DNA
gagctgaaaaacttccgcctgccgggacaggtatttctgaccggcaggagtatgaaggatgcggaagagtatggg

SEQ ID NO: 874232 - DNA, 75 bp, synthetic construct
  source 1..75: mol_type = other DNA
ccgtctgggctatcgccatcgagcgtgagaactccggcgatagcgttatttgctattcacaggaggctgccatca

SEQ ID NO: 874233 - DNA, 75 bp, synthetic construct
  source 1..75: mol_type = other DNA
atgacgcgccacgtctttttttgtgtcgcaatcaaaacgccacagcgccagattatggtgtggtgtgtggtcagt

SEQ ID NO: 874234 - DNA, 75 bp, synthetic construct
  source 1..75: mol_type = other DNA
atgagtcaaaccattttatttgtctgcgccacgggtattgccacatccacggcagtaacagaaaaagtcatggaa

SEQ ID NO: 874235 - DNA, 75 bp, synthetic construct
  source 1..75: mol_type = other DNA
gttctgcgggaggtggtccgggaagcacgggccaaaatccgcagcatggcggatgctctggcaaaaatcaggggc

SEQ ID NO: 874236 - DNA, 75 bp, synthetic construct
  source 1..75: mol_type = other DNA
gctaagggcagtataaaagatgtcctcaattaccttggtttaggagaaggctcggcgctacccgttggtgtgcct

SEQ ID NO: 874237 - DNA, 75 bp, synthetic construct
  source 1..75: mol_type = other DNA
cgccacaccgaaagcggtcaaggctgcatacgatctggcaaacggaaaacaaccggcagatgccacgctcactgc

SEQ ID NO: 874238 - DNA, 75 bp, synthetic construct
  source 1..75: mol_type = other DNA
ggaaattcaaatcacttctctcagtgaagactactggcagcgccactatgttggcgctcgtcgggtaatgacccc

SEQ ID NO: 874239 - DNA, 75 bp, synthetic construct
  source 1..75: mol_type = other DNA
gtggcagctcaccgcgtaccggttttgattgcagcggcctggtttattacgcttataaagatttggtgaaaattc

SEQ ID NO: 874240 - DNA, 75 bp, synthetic construct
  source 1..75: mol_type = other DNA
tgaagattccattacagaccttcgtgagggcagctttaaaatgccggacgggacaacattcagcgatcctgtcgt

SEQ ID NO: 874241 - DNA, 75 bp, synthetic construct
  source 1..75: mol_type = other DNA
cagaagaagtcacggtacgttttgaacagggtcatccggtggcgctgaacggcaaaacctttagcgatgatgtgg

SEQ ID NO: 874242 - DNA, 75 bp, synthetic construct
  source 1..75: mol_type = other DNA
ggtcatccggtagcgctgaacggtaaaacctttagcgacgacgtagaaatgatgctggaagctaaccgcatcggc

SEQ ID NO: 874243 - DNA, 75 bp, synthetic construct
  source 1..75: mol_type = other DNA
agcgaccagattgaaaaccgtatcatcgaagcgaaaagccgtggtatttacgaggctccggggatggcactgctg

SEQ ID NO: 874244 - DNA, 75 bp, synthetic construct
  source 1..75: mol_type = other DNA
tttttctggcggtctggacaccagtgccgcactgctgtggatgcgacaaaagggagcggttccttatgcatatac

SEQ ID NO: 874245 - DNA, 75 bp, synthetic construct
  source 1..75: mol_type = other DNA
ccggtattcacaacgaagacaccattgagcagtatcacgcacatggtcgtcagttgggccgtctgctgtaccagg

SEQ ID NO: 874246 - DNA, 75 bp, synthetic construct
  source 1..75: mol_type = other DNA
acctgacctacaagccagagcgtctgacgatggaaaaaggcgactcggtgttctcgccagatgatcgtattggtc

SEQ ID NO: 874247 - DNA, 75 bp, synthetic construct
  source 1..75: mol_type = other DNA
gaagttgacgcggcaacaggtattgtacggttggtttatgaccaggcttttttgcagcatgcccataccgatcgt

SEQ ID NO: 874248 - DNA, 75 bp, synthetic construct
  source 1..75: mol_type = other DNA
gacagccagtacggacttgcatcctcggtatggacgaaagatgtgggcagggcgcatcgcgtcagcgcacggctg

SEQ ID NO: 874249 - DNA, 75 bp, synthetic construct
  source 1..75: mol_type = other DNA
tggctccggcgctggcggcagggaattgtgtggtactcaagccctcggaaatcacgcccctcactgccctgaagc

SEQ ID NO: 874250 - DNA, 75 bp, synthetic construct
  source 1..75: mol_type = other DNA
cctgaaactggcggatgttatcgaagagaacggtcaggttttcgccgaactggagtcccgtaactgtggcaaacc

SEQ ID NO: 874251 - DNA, 75 bp, synthetic construct
  source 1..75: mol_type = other DNA
ttcttttatggaaaggcgtgctattcggatatctactcttttcagtatttgatttctggttccagaagcatgagg

SEQ ID NO: 874252 - DNA, 75 bp, synthetic construct
  source 1..75: mol_type = other DNA
catatgcaaatgagtttgctaatttcacaggactgaacgcatatcaagctcttgtcgttgttgccttttttgttt

SEQ ID NO: 874253 - DNA, 75 bp, synthetic construct
  source 1..75: mol_type = other DNA
attgtggatgcgtggctgggcgcacagtacgaaggcggtcgtcatcaacaacgcgtggaggcgattacggcaata

SEQ ID NO: 874254 - DNA, 75 bp, synthetic construct
  source 1..75: mol_type = other DNA
aaaaccgatatgacgattccggcaaccgcctattacgacgaattgattgccaaaggtctggtgccgtgggggcgt

SEQ ID NO: 874255 - DNA, 75 bp, synthetic construct
  source 1..75: mol_type = other DNA
tcatcactggagccgcacgcggcattggaaagggttgtgcactggagcttgcccgtagcggatttaacctgttga

SEQ ID NO: 874256 - DNA, 75 bp, synthetic construct
  source 1..75: mol_type = other DNA
aagtcatttgcttccctgccgatgtcggcgatctctccttgcatgaagagatgctcgacgcggcgcaaaaccagt

SEQ ID NO: 874257 - DNA, 75 bp, synthetic construct
  source 1..75: mol_type = other DNA
ccacagtacgggcaatggcggaaggcaaactgatttatacctgtggccaggcggtcgctatcgacggcggcttaa

SEQ ID NO: 874258 - DNA, 75 bp, synthetic construct
  source 1..75: mol_type = other DNA
atgctcgacgcggcgcaaaaccagtggggacgtctggactgcctgctcaacaacgcaggcatttcagtgaaaaaa

SEQ ID NO: 874259 - DNA, 75 bp, synthetic construct
  source 1..75: mol_type = other DNA
tggggacgttggggttatccggctgatattgcttccactgtccgcgcgatggcggaaggtaaactgatttacacc

SEQ ID NO: 874260 - DNA, 75 bp, synthetic construct
  source 1..75: mol_type = other DNA
gaatatacataaaggacaatatataacagaagacttttttgaacctgtggcacaattgattcgtattgcgataga

SEQ ID NO: 874261 - DNA, 75 bp, synthetic construct
  source 1..75: mol_type = other DNA
aggaagctccctttatcggccgtaagcccgtttttctgggcgatgatttaaccgatgaatctggcttcgcggtcg

SEQ ID NO: 874262 - DNA, 75 bp, synthetic construct
  source 1..75: mol_type = other DNA
cttattgagattagcgcaacgcattacccagatttggccgcaaatggcattacagcagggaaagtgtgtcgtcga

SEQ ID NO: 874263 - DNA, 75 bp, synthetic construct
  source 1..75: mol_type = other DNA
ttcccgttagcgggtgtgcatggggcggagcgccgtgacatcaatggtaaaacgcatatcgttcatctgccgaat

SEQ ID NO: 874264 - DNA, 75 bp, synthetic construct
  source 1..75: mol_type = other DNA
catgagcgtaggaactccagtggtagctgtaactgttacttcaaggaggctgccatcatggctacaacccttacc

SEQ ID NO: 874265 - DNA, 75 bp, synthetic construct
  source 1..75: mol_type = other DNA
accgatgaatctggcttcgcggtcgttaaccgactgggtggaatgtcagtgaaaattggcaccggagcgactcag

SEQ ID NO: 874266 - DNA, 75 bp, synthetic construct
  source 1..75: mol_type = other DNA
accgatgaatctggcttcgcggttattaatcgactggggggaatgtcagtaaaaattggtacaggcgcaactcag

SEQ ID NO: 874267 - DNA, 75 bp, synthetic construct
  source 1..75: mol_type = other DNA
atggagtatatatagagaacatttacatttgtcctttccaaaaacattatattatttttattatatgcttcaaat

SEQ ID NO: 874268 - DNA, 75 bp, synthetic construct
  source 1..75: mol_type = other DNA
atgattaacccaagaactattgcccaggaaatcgcttatgcggatgtcgctacccaggcggcaaatttgcaggaa

SEQ ID NO: 874269 - DNA, 75 bp, synthetic construct
  source 1..75: mol_type = other DNA
cgttatctggaggagtacaccaacacgctggtcgaggtgtacaccatgaaagccagcatggcggcattcgcgtaa

SEQ ID NO: 874270 - DNA, 75 bp, synthetic construct
  source 1..75: mol_type = other DNA
gcaaggactacagctactggcaaccgcaagtgatggtgcattggcattgatatcagggcgctcaatggtggagct

SEQ ID NO: 874271 - DNA, 75 bp, synthetic construct
  source 1..75: mol_type = other DNA
aaagtcccaaaataataacttatagagatatgttaaaaagtaatttcattggtaatttgacaggtatttacaacg

SEQ ID NO: 874272 - DNA, 75 bp, synthetic construct
  source 1..75: mol_type = other DNA
tgccgatgtacaatgctgaacattatgtcagagcgtcaatttgttcaattttaaatcagacgtttaaaaattttt

SEQ ID NO: 874273 - DNA, 75 bp, synthetic construct
  source 1..75: mol_type = other DNA
ttacatcattctgtaccgcgtgacaatttcaggcattgaaattgttaacgtagttcacgcccgccgacagttccc

SEQ ID NO: 874274 - DNA, 75 bp, synthetic construct
  source 1..75: mol_type = other DNA
gtggtctcctcagccaacagttacatcccacccagcgtgacgcttgatccctggagcgaggtgaccagttctgtt

SEQ ID NO: 874275 - DNA, 75 bp, synthetic construct
  source 1..75: mol_type = other DNA
gcagaccgatgatgacaaggcagcggccgtggttgcccagcgggtggctgacatcatcagccggaccggtgagcc

SEQ ID NO: 874276 - DNA, 75 bp, synthetic construct
  source 1..75: mol_type = other DNA
cacttcctcccccagacagtcgtttcaacctatgtcgcaccgggcggcaacccgtggcaggaaatggcgtttgtc

SEQ ID NO: 874277 - DNA, 75 bp, synthetic construct
  source 1..75: mol_type = other DNA
ataacgtgccttttttacacttggttcctcctgaagttttcattgaaagctataggaaacttgacccagtcctca

SEQ ID NO: 874278 - DNA, 75 bp, synthetic construct
  source 1..75: mol_type = other DNA
tttgctggaaatggcgaaagaaggtctaacaacagatgatgttcatgatctcataaatgagacaaaacagaatat

SEQ ID NO: 874279 - DNA, 75 bp, synthetic construct
  source 1..75: mol_type = other DNA
gtcttggagagaactaatctgtgatggaaaggtaacgggtgatcttcttgctcagttggatattacgcgattttt

SEQ ID NO: 874280 - DNA, 75 bp, synthetic construct
  source 1..75: mol_type = other DNA
tctggtcagtcaggcatccggcggtgtggagaacgccatcagcagcgggattgccgggttgtctgccggcggggg

SEQ ID NO: 874281 - DNA, 75 bp, synthetic construct
  source 1..75: mol_type = other DNA
cagctggcgggtcagcggaatttgctactggctgtactgctccgggttcagctgtaaggtcagaacatcggtgaa

SEQ ID NO: 874282 - DNA, 75 bp, synthetic construct
  source 1..75: mol_type = other DNA
caatagaacggatgaggagacagatacctgaaacaccagccaccgatgctttcctggctgaaatacgtgcggagg

SEQ ID NO: 874283 - DNA, 75 bp, synthetic construct
  source 1..75: mol_type = other DNA
ttcattccccagacagtcgtttcgacctatgtcgcgccgggcggtaacccgtggcaggaaatggcgtttgtcagc

SEQ ID NO: 874284 - DNA, 75 bp, synthetic construct
  source 1..75: mol_type = other DNA
gcacccgtaatcataaatggcagctgctcacgccgtcgctgtccacatcctgtgctgtttttccggacagcccca

SEQ ID NO: 874285 - DNA, 75 bp, synthetic construct
  source 1..75: mol_type = other DNA
gccagcctacagttagggatgtatctggctgcagtcatgcttctgttgccacgtatgacctctatcatgatggaa

SEQ ID NO: 874286 - DNA, 75 bp, synthetic construct
  source 1..75: mol_type = other DNA
ggacaaggctgcgaaggacaagcttgcagagctgaatgcagacaagctgatcacgccggaagagaaggcgcagct

SEQ ID NO: 874287 - DNA, 75 bp, synthetic construct
  source 1..75: mol_type = other DNA
gtctggcatcattatgccggaaaaggaaaaccgactgccgccgcgcagacggaaacggtggaaaccctggatgaa

SEQ ID NO: 874288 - DNA, 75 bp, synthetic construct
  source 1..75: mol_type = other DNA
cgtgcggctggatgtgccccggctggcgacgttacttatcaaccgtcacggcggcgtactgccgccgctcctggc

SEQ ID NO: 874289 - DNA, 75 bp, synthetic construct
  source 1..75: mol_type = other DNA
agtcaaaagcctcaaaactgaagaaagggcagaagatagttgttacttgcgaaaagatgcagttattcgttcgtg

SEQ ID NO: 874290 - DNA, 75 bp, synthetic construct
  source 1..75: mol_type = other DNA
gaaaacctgcccgtggtgctcgatgccatcctgaaccggggagcacgtttttcgtcggtggaaatgtatctggtc

SEQ ID NO: 874291 - DNA, 75 bp, synthetic construct
  source 1..75: mol_type = other DNA
actatccgggctggatcagcatttatgtgcggctggatgcgccccggctggcgacgttacttatcaaccgccacg

SEQ ID NO: 874292 - DNA, 75 bp, synthetic construct
  source 1..75: mol_type = other DNA
atggttgtttttagtcaacaaccattttcgtttgatgaaataaaaccttggttgtacatttggactatgaaaaca

SEQ ID NO: 874293 - DNA, 75 bp, synthetic construct
  source 1..75: mol_type = other DNA
cgcaaaactgcgtgtcacgttcgcactggactgttgcgatcgtgaagccatagactgggccgcaagcacgagggt

SEQ ID NO: 874294 - DNA, 75 bp, synthetic construct
  source 1..75: mol_type = other DNA
ttgatatcatcagcgatatgccgacatatggctatcgtcgtgtctgggccattctcagacgacagtcccgtaaca

SEQ ID NO: 874295 - DNA, 75 bp, synthetic construct
  source 1..75: mol_type = other DNA
cgaaaaactgcgtgttacgttcgtcctagattgttgcgatcgtgaagccatagactgggccgcaagcacgggagg

SEQ ID NO: 874296 - DNA, 75 bp, synthetic construct
  source 1..75: mol_type = other DNA
gcgcggaggaaatggagttcatcaggcgtttaattctcattcgcagagacattcatagccagttacacagcgtgg

SEQ ID NO: 874297 - DNA, 75 bp, synthetic construct
  source 1..75: mol_type = other DNA
atgccggatggtcgctatacgttatgtggtgaagaagtgcagatgcacggtggcgttgtccgtaccgcgtctggt

SEQ ID NO: 874298 - DNA, 75 bp, synthetic construct
  source 1..75: mol_type = other DNA
gatgagtatgatgtttcatgtggtttgaagattgatggtcaaatggatgagttcttatctaatctgaaatattta

SEQ ID NO: 874299 - DNA, 75 bp, synthetic construct
  source 1..75: mol_type = other DNA
ggagttgatcacccttggcgctcgtttgcagatgctggaaagtgaaacacaattaagtcgtggacggctgatcaa

SEQ ID NO: 874300 - DNA, 75 bp, synthetic construct
  source 1..75: mol_type = other DNA
ccgtttgcctggtgtggcaattgcacaaaatggaggagaaggtcagctctcaactatttttattcgaggcacgaa

SEQ ID NO: 874301 - DNA, 75 bp, synthetic construct
  source 1..75: mol_type = other DNA
tggtgtactccgtcacagccttttctgtctgggcacaggatacccctctggatactctcgttgttactgctaacc

SEQ ID NO: 874302 - DNA, 75 bp, synthetic construct
  source 1..75: mol_type = other DNA
agcaaaaggggatgataagtttatcaccaccgactatttgcaacagtgccctggaaagtcagggcgaatatgact

SEQ ID NO: 874303 - DNA, 75 bp, synthetic construct
  source 1..75: mol_type = other DNA
ggagcggatttgttcgtggctacggctatgataaccgaactaaatatgacgcctggtactctcccggttctccgc

SEQ ID NO: 874304 - DNA, 75 bp, synthetic construct
  source 1..75: mol_type = other DNA
actcatcagcaacttggtgaaaatacccgtgtaacacttctcggcgattatacctatactagggggtttgatgct

SEQ ID NO: 874305 - DNA, 75 bp, synthetic construct
  source 1..75: mol_type = other DNA
tgcctataccaggggatttgatgtcgttgcctatggcaacactgggatgcagccacagtcagacagagacggttt

SEQ ID NO: 874306 - DNA, 75 bp, synthetic construct
  source 1..75: mol_type = other DNA
tgtcggctgccgttctggcgctgattgccgcaggtgcttctgcgcctgaaattctcgaccagtttcttgacgaaa

SEQ ID NO: 874307 - DNA, 75 bp, synthetic construct
  source 1..75: mol_type = other DNA
taagtgtttcccgtcgacgttttacagacggattaatgctggtgatcgcaggggagcatgcgaggcgattcgctg

SEQ ID NO: 874308 - DNA, 75 bp, synthetic construct
  source 1..75: mol_type = other DNA
tgccgtattcgctcaaataactgttatggtcaggtatcccgtcgtgaccaggagagcgcgctggcgtgctgggga

SEQ ID NO: 874309 - DNA, 75 bp, synthetic construct
  source 1..75: mol_type = other DNA
catccctgagccaacccgcgccgcgctttactccttcacctataacgttggctctggtgcttttgccagctcgac

SEQ ID NO: 874310 - DNA, 75 bp, synthetic construct
  source 1..75: mol_type = other DNA
ccgcgatggttccggtatatggaccatctgtcgtggtgccacaatggtggatggtaagcccgtcataccgggaat

SEQ ID NO: 874311 - DNA, 75 bp, synthetic construct
  source 1..75: mol_type = other DNA
attctcgaccagtttcttgacgaaaaagaaggtaaccacaccacggcataccgtgatggtgcgggtatctggacc

SEQ ID NO: 874312 - DNA, 75 bp, synthetic construct
  source 1..75: mol_type = other DNA
taaagattacaactacgatccacattatggacgctatgacgcatcagctaacctggatgagatgaaacaatacaa

SEQ ID NO: 874313 - DNA, 75 bp, synthetic construct
  source 1..75: mol_type = other DNA
gactgccgtatccgttcaaacaactgttacggtcaggtatcaagacgtgaccaggagagtgcgctggcatgctgg

SEQ ID NO: 874314 - DNA, 75 bp, synthetic construct
  source 1..75: mol_type = other DNA
gattaaggacggtggcagagactgccgtatccgctcaaacaactgttacggccagatatcccgtcgtgaccagga

SEQ ID NO: 874315 - DNA, 75 bp, synthetic construct
  source 1..75: mol_type = other DNA
tgccgccagtgctcctgcccccgacattctcgatcagtttctggatgaaaaagaggggaatcacaccactgcata

SEQ ID NO: 874316 - DNA, 75 bp, synthetic construct
  source 1..75: mol_type = other DNA
cgttctccacggactggtttatgacctgggaacaaaatgtccatgcgtcgatgttttgtaatgcgtggcagtttc

SEQ ID NO: 874317 - DNA, 75 bp, synthetic construct
  source 1..75: mol_type = other DNA
atgatgagcgagaaaagcattgttcaggaagcgcgtgatatccagttggcaatggagttgattaccctcggcgct

SEQ ID NO: 874318 - DNA, 75 bp, synthetic construct
  source 1..75: mol_type = other DNA
gcagataacgatgctgctgttttggatgtagaccttgatcccaaggatgatggcgtgattgatgaaagtcagcag

SEQ ID NO: 874319 - DNA, 75 bp, synthetic construct
  source 1..75: mol_type = other DNA
tgagtgatatgcgcgaacaaaaagccaacgtcaatgaaattggcgcagctaccggtaaatcggaagcagaatccc

SEQ ID NO: 874320 - DNA, 75 bp, synthetic construct
  source 1..75: mol_type = other DNA
gccaccggattatctctgaatactgtaatgagtaacattgtcgtttcgcaggctattgctgatgcgatgcttcag

SEQ ID NO: 874321 - DNA, 75 bp, synthetic construct
  source 1..75: mol_type = other DNA
actatgcagcaggtttttgttccgctaccccggcgttaaggggaaacagagggtttctcagtgggcgaagtcaaa

SEQ ID NO: 874322 - DNA, 75 bp, synthetic construct
  source 1..75: mol_type = other DNA
aaggcgctggcatgggtggagcgcaatattaaagtaccactgaccgaaccacagaaagcgggtatagcgtcattt

SEQ ID NO: 874323 - DNA, 75 bp, synthetic construct
  source 1..75: mol_type = other DNA
ccgtgatggtgcgggtatctggaccatctgccgtggtgccacccaggtggatggtaagcctgtcgtccctggcat

SEQ ID NO: 874324 - DNA, 75 bp, synthetic construct
  source 1..75: mol_type = other DNA
tgttattggtgctgttggtggcgctgttgccgcagctacctgggcgtaccagttgtggggaggaacaattagctg

SEQ ID NO: 874325 - DNA, 75 bp, synthetic construct
  source 1..75: mol_type = other DNA
ggcacttcctggaagaatagaacgtcgctgccgtgatgttatgcggataatgctaccgctggtgaaggagctggc

SEQ ID NO: 874326 - DNA, 75 bp, synthetic construct
  source 1..75: mol_type = other DNA
ttatgcatctgttcagtacgcgtacctcttccggcattttgtatgaagtggatgctcgactgcgtccgtccgggg

SEQ ID NO: 874327 - DNA, 75 bp, synthetic construct
  source 1..75: mol_type = other DNA
gagtggctaacggaactggaaagccagccgccgcaggccgacgaatggcagcattacgctgcatggttgcagaag

SEQ ID NO: 874328 - DNA, 75 bp, synthetic construct
  source 1..75: mol_type = other DNA
accgttgcgccaccagtcatcctcacgctcaaaatccggcatatcaattcccgccagatggtacgcggtgaggac

SEQ ID NO: 874329 - DNA, 75 bp, synthetic construct
  source 1..75: mol_type = other DNA
tgggtgagggaacgatcatccacattgtgccgcgactggccggggccggaaagggtggactgcagattgtgctgg

SEQ ID NO: 874330 - DNA, 75 bp, synthetic construct
  source 1..75: mol_type = other DNA
ttttctgccaccacgatgctgttttcactgggtgccagcatgatactgggcggtgtggcccagatgctggccccg

SEQ ID NO: 874331 - DNA, 75 bp, synthetic construct
  source 1..75: mol_type = other DNA
gcgcttaagcatttgatttctctgtgtgccgcatcgccgatgattgccagccaactggcgcgttatccattattg

SEQ ID NO: 874332 - DNA, 75 bp, synthetic construct
  source 1..75: mol_type = other DNA
ttacgcattgcggcagcggatatcgccggtacgctaccggtaatgaaagtgagcgatcacttaacctggctggcg

SEQ ID NO: 874333 - DNA, 75 bp, synthetic construct
  source 1..75: mol_type = other DNA
aatgctggttggctcccggcgaatctcccaggacatcagtacccgtgatgaaggcggagacggaaagatagtggt

SEQ ID NO: 874334 - DNA, 75 bp, synthetic construct
  source 1..75: mol_type = other DNA
ttgccgattttcgcaaagagctggataagcgtaccatcgggccgcgcgggcgtcaggtgctcgaccatctgatgc

SEQ ID NO: 874335 - DNA, 75 bp, synthetic construct
  source 1..75: mol_type = other DNA
attgaatttatcgtccaggtattccagcttattcgcggcgggcgcgagccgtcgctgcaatcgcgctctttactg

SEQ ID NO: 874336 - DNA, 75 bp, synthetic construct
  source 1..75: mol_type = other DNA
ctgatttttgcctggccggaacatggttgtacgcagggtggacgccgggaactggataacgcgcagttttttacc

SEQ ID NO: 874337 - DNA, 75 bp, synthetic construct
  source 1..75: mol_type = other DNA
aagcaacaggtggattaggttccaccgcaaccagtaatcagttagcaacaatcgcaccaacgcttggtcagcaat

SEQ ID NO: 874338 - DNA, 75 bp, synthetic construct
  source 1..75: mol_type = other DNA
agacctgcagaatcagcagtggcagacgatcatgaaaaaccttgctccgttcacgccactcgctcagcagtacgt

SEQ ID NO: 874339 - DNA, 75 bp, synthetic construct
  source 1..75: mol_type = other DNA
ctcagcagtacgtatcacagttgcaaaatctttcctctcttcaggggcaaggtcaggcgcttaaccagtattaca

SEQ ID NO: 874340 - DNA, 75 bp, synthetic construct
  source 1..75: mol_type = other DNA
ggcgctggatgaaaccaaccagtatgacctcagcgatgagcgtattcagagctggtgcgagcaaattcttaatga

SEQ ID NO: 874341 - DNA, 75 bp, synthetic construct
  source 1..75: mol_type = other DNA
gcaccgttcacgccactcgctcagcagtacgtatcagagttgcagaatctttcctctcttcaggggcaaggtcag

SEQ ID NO: 874342 - DNA, 75 bp, synthetic construct
  source 1..75: mol_type = other DNA
gctggggctggacttgcgaaattaattggttcatcaactccgtggggggctgcgatcggcggcggtcttggtctg

SEQ ID NO: 874343 - DNA, 75 bp, synthetic construct
  source 1..75: mol_type = other DNA
atgattcttcttatgatttcatatgggataaggtaaatgccagatttatggcgtatatattaaaaaatgaatatg

SEQ ID NO: 874344 - DNA, 75 bp, synthetic construct
  source 1..75: mol_type = other DNA
gcccgccttcacgaaccactgggtgagggaacggttatccatattgtgccgcgactggccggagccggaaagggc

SEQ ID NO: 874345 - DNA, 75 bp, synthetic construct
  source 1..75: mol_type = other DNA
gggagattgtggctctggtccacagtcatcccggtggtctgccctggctgagcgaggcggaccggcggctgcaga

SEQ ID NO: 874346 - DNA, 75 bp, synthetic construct
  source 1..75: mol_type = other DNA
aatggtcgggagaccgaccgtccggggatttaccaaattgttgagcgtctgattgccgggatgaatggacagacg

SEQ ID NO: 874347 - DNA, 75 bp, synthetic construct
  source 1..75: mol_type = other DNA
gataaggtgatcatccatccgcttgagtttttttatcgttgctatggacattccgatgagttgaagagagttatt

SEQ ID NO: 874348 - DNA, 75 bp, synthetic construct
  source 1..75: mol_type = other DNA
acggatattgaacaactgaatccgcactatccgggctggatcagcatttatgtgcgactggatgtatcccggctg

SEQ ID NO: 874349 - DNA, 75 bp, synthetic construct
  source 1..75: mol_type = other DNA
atgacagagacagaatcagcgattctggcgctggtccacagtcatcccggtggtctgccctggctgagtgaggct

SEQ ID NO: 874350 - DNA, 75 bp, synthetic construct
  source 1..75: mol_type = other DNA
caagtcggcgattttacctttgaaggcgcagcacgcagtgacgataactcacagtttggtcgtcatggaacctag

SEQ ID NO: 874351 - DNA, 75 bp, synthetic construct
  source 1..75: mol_type = other DNA
gttagccaggctgctattcagaaaatcgaaacagggaaagctaaccaaacaactaaaatcgtggagatcgcgaac

SEQ ID NO: 874352 - DNA, 75 bp, synthetic construct
  source 1..75: mol_type = other DNA
gacaggcttccggggcatcccgccctttaccgcccattgctcaggcattaaaagatcatttagctgcctatgaaa

SEQ ID NO: 874353 - DNA, 75 bp, synthetic construct
  source 1..75: mol_type = other DNA
ccttaaaccaacccgtcaggcgccaccgccaccgacaagtgggcagacatccgggccagccaagcctttaccgcc

SEQ ID NO: 874354 - DNA, 75 bp, synthetic construct
  source 1..75: mol_type = other DNA
atgtgctgcgtatacctgatgaaccgtcccgtcgctgtttgaccgggattctgcgggagtggtcctggaacccgg

SEQ ID NO: 874355 - DNA, 75 bp, synthetic construct
  source 1..75: mol_type = other DNA
gatgacgaaaatctgcccgtggtgctcgatgccatcctgaaccgtggcgcacgtttttcgtcggtggaaatgtac

SEQ ID NO: 874356 - DNA, 75 bp, synthetic construct
  source 1..75: mol_type = other DNA
gcttggtggactaccgcccattgcacaggcattaaaagatcatttagctgcctatgagcaatcgaaaaaagtata

SEQ ID NO: 874357 - DNA, 75 bp, synthetic construct
  source 1..75: mol_type = other DNA
ttttaagcccgcccgtcaggcaccaccgccaccgacagggcctagtggactaccgccccttgcacaggcattaaa

SEQ ID NO: 874358 - DNA, 75 bp, synthetic construct
  source 1..75: mol_type = other DNA
tcacaaccgtgtacccaacattgccgtactgccggtattggcccagcagtgtttctcctctttgcaatgcgaaga

SEQ ID NO: 874359 - DNA, 75 bp, synthetic construct
  source 1..75: mol_type = other DNA
atgaaaacaacactctcagaaagacttaaagaagccagattagcgcgaggccttacacaaaaggcgcttggggat

SEQ ID NO: 874360 - DNA, 75 bp, synthetic construct
  source 1..75: mol_type = other DNA
atgaaaggaggcacagcaagaaatcaattaaccggaacagttagcgcagtagcaatgggcgctgtgaatgatgaa

SEQ ID NO: 874361 - DNA, 75 bp, synthetic construct
  source 1..75: mol_type = other DNA
gcgtgtcgacaatcaccgaaggcgcagtgaacgccactgtccatatcaaaacggatgcgggttttgaaattgtgg

SEQ ID NO: 874362 - DNA, 75 bp, synthetic construct
  source 1..75: mol_type = other DNA
atggcagtttcagcaagaaatcaattaaccggaacagttagcgcagtagcaatgggcgctgtgaatgatgaagta

SEQ ID NO: 874363 - DNA, 75 bp, synthetic construct
  source 1..75: mol_type = other DNA
atgcagggtgagattatggcgctggtccacagtcatcccggcggtctgccctggctgagtgaggccgacaggcgg

SEQ ID NO: 874364 - DNA, 75 bp, synthetic construct
  source 1..75: mol_type = other DNA
acaggatactgtacaggctaaagcgatactggaatatgaactgcgtaattacctcaaaatgggattaggtgctga

SEQ ID NO: 874365 - DNA, 75 bp, synthetic construct
  source 1..75: mol_type = other DNA
cgatcgagaaagacgagatgaaccgagtgttcatcttcgggaaagtcatcgggagcatgccgcagacgtacagga

SEQ ID NO: 874366 - DNA, 75 bp, synthetic construct
  source 1..75: mol_type = other DNA
tttcgtttgatgaaataaaaccttggttgtacatttggactatgaaaacaacactctcagaaagacttaaagaag

SEQ ID NO: 874367 - DNA, 75 bp, synthetic construct
  source 1..75: mol_type = other DNA
gatggcaggaaggcggaaaatatccgcatcattaacgtgcgcggtgacagcatgtcagggacgatcgaaccaggt

SEQ ID NO: 874368 - DNA, 75 bp, synthetic construct
  source 1..75: mol_type = other DNA
aagaacggtggaactgaaactgctcacagcaaattcggggtatttacgatcaataataaagtcgtcagctcaagg

SEQ ID NO: 874369 - DNA, 75 bp, synthetic construct
  source 1..75: mol_type = other DNA
ccaggttcgtcgaatattaatgcgagaacgacttttaatatgagtcatatgagtcatatgagtcagatgagtcag

SEQ ID NO: 874370 - DNA, 75 bp, synthetic construct
  source 1..75: mol_type = other DNA
ccaggttcgtcgaatgttaatgcgagaacgatttttaatgtgagcagccaggtgacttcatttactccctctcgt

SEQ ID NO: 874371 - DNA, 75 bp, synthetic construct
  source 1..75: mol_type = other DNA
tggtcaacctgatgaccgcccagcgtaactatcaggccaacaccaaagttatcgccaccagcacgcagctcgatg

SEQ ID NO: 874372 - DNA, 75 bp, synthetic construct
  source 1..75: mol_type = other DNA
gcatttcgcgcggcggttcgctggtctccaccggtaacgcgctggatctggcgattaacgacgacggcttttttg

SEQ ID NO: 874373 - DNA, 75 bp, synthetic construct
  source 1..75: mol_type = other DNA
aagtgcagtacaccttcgacggtcagcagcagactggcgttccggcgacgaccttaaccttcgacccgaacaccg

SEQ ID NO: 874374 - DNA, 75 bp, synthetic construct
  source 1..75: mol_type = other DNA
gagcatgcgaggcgattcgctggtggattaaggacggtggcagggactgccgtatccgctcaaataactgttacg

SEQ ID NO: 874375 - DNA, 75 bp, synthetic construct
  source 1..75: mol_type = other DNA
atatccagatcaaaaccggtaatattccggcgcaggccagcagcagcctgacctttaccgccaacttcgatgcca

SEQ ID NO: 874376 - DNA, 75 bp, synthetic construct
  source 1..75: mol_type = other DNA
ggctgaatgccgttaacgaacagctggacgggatcagtaacaacatcgccaacgccggaacggtaggctataagt

SEQ ID NO: 874377 - DNA, 75 bp, synthetic construct
  source 1..75: mol_type = other DNA
tcggcgtcacgctgtgggaagcgattcgcggtttccagttccagcaaacctgcgccctgatggtgctgattatcg

SEQ ID NO: 874378 - DNA, 75 bp, synthetic construct
  source 1..75: mol_type = other DNA
cggtggtttgaccgttgtgttctgcgggaagttgtccgggaagcccgggccgaaatccgtagcgtggcggatgcc

SEQ ID NO: 874379 - DNA, 75 bp, synthetic construct
  source 1..75: mol_type = other DNA
atgaacgaaaacacaacgctgaatgcactgatttgtcgtcacgcccgcaacctgctgctggcgcagggctggccg

SEQ ID NO: 874380 - DNA, 75 bp, synthetic construct
  source 1..75: mol_type = other DNA
agctcgtataccgacagctacaccaccacggtatatgactcattaggtaacgaacactcggtatgccagtatttc

SEQ ID NO: 874381 - DNA, 75 bp, synthetic construct
  source 1..75: mol_type = other DNA
cattcgcgccaccggagccaacaagctggaagagatcctctacggcgtactaccgcaggtcatgccgctgctgat

SEQ ID NO: 874382 - DNA, 75 bp, synthetic construct
  source 1..75: mol_type = other DNA
cgtattcgttccaatagctgctttgggcaagtttcgcgtcgggaccaagaaagtgtgctggcgtgctgggggata

SEQ ID NO: 874383 - DNA, 75 bp, synthetic construct
  source 1..75: mol_type = other DNA
gcccggtggaaggcattcgcgccaccggtgccaacaagctcgaagagatcctctacggcgtgctgccacaggtga

SEQ ID NO: 874384 - DNA, 75 bp, synthetic construct
  source 1..75: mol_type = other DNA
gtccttacaacattggcccaggtaagtgtttcccgtcgacgttttataaacgaattaatgcaggcgatcgcaggg

SEQ ID NO: 874385 - DNA, 75 bp, synthetic construct
  source 1..75: mol_type = other DNA
gcgctgctgttctgggactggtactcgccggtgcgccagcatcggttattctcgatcagttcctgaatgagaaag

SEQ ID NO: 874386 - DNA, 75 bp, synthetic construct
  source 1..75: mol_type = other DNA
cggtggcagagactgccgtattcgctcaaacaactgctacggtcaggtttcacggcgtgaccaggagagcgcgct

SEQ ID NO: 874387 - DNA, 75 bp, synthetic construct
  source 1..75: mol_type = other DNA
acgtataccgaagcagaatgcaaagccctcctgaataaagaccttgccacggtcgccagacaaattaacccgtac

SEQ ID NO: 874388 - DNA, 75 bp, synthetic construct
  source 1..75: mol_type = other DNA
gcgtatacctgatgaaccgtcccgtcgctggtttgaccgggatattctgcgggagatggtcctggaagcccggac

SEQ ID NO: 874389 - DNA, 75 bp, synthetic construct
  source 1..75: mol_type = other DNA
tcaaataactgctacggacaggttattcgtcgtgaccaggaaagcgcattagcctgttgggggatagatcagtga

SEQ ID NO: 874390 - DNA, 75 bp, synthetic construct
  source 1..75: mol_type = other DNA
acgcgggtgacgataatcgccgccgccgtggagagcagcagggaagggatctgcgccaccaggccgtcgccgatg

SEQ ID NO: 874391 - DNA, 75 bp, synthetic construct
  source 1..75: mol_type = other DNA
cagaaagcggggattgcgtcattctgtccgtacaacattggtcctggtaagtgtttcccgtcgacgttttacaga

SEQ ID NO: 874392 - DNA, 75 bp, synthetic construct
  source 1..75: mol_type = other DNA
gcgtataccggatgaaccgccccgccagtggtttgaccgtggtgttctgcgggaagttgtccgggaagcccgggc

SEQ ID NO: 874393 - DNA, 75 bp, synthetic construct
  source 1..75: mol_type = other DNA
caactggcaaaagcgatcggcattgagcagccttcactggttcgtacgctggaccaactggaagaaaaagggtta

SEQ ID NO: 874394 - DNA, 75 bp, synthetic construct
  source 1..75: mol_type = other DNA
cggcgccagcaacgaaaccgggatgctaacccaaaaatttgcccgctccctcgggatgctggcggtagacaacca

SEQ ID NO: 874395 - DNA, 75 bp, synthetic construct
  source 1..75: mol_type = other DNA
tcaaataactgttacggtcaggtatcccgtcgtgaccaggagagcgcgctggcgtgctggggtatcgacagataa

SEQ ID NO: 874396 - DNA, 75 bp, synthetic construct
  source 1..75: mol_type = other DNA
tcctgtccagtgggctggcctgcgatgtgctgcgtataccggatgaaccgccccgccgctggtttgaccgggata

SEQ ID NO: 874397 - DNA, 75 bp, synthetic construct
  source 1..75: mol_type = other DNA
aacggtgaagtggtgggaacggtcatgggcggttatgacgggcatcgcggatctgcttattaccttggtgtgcat

SEQ ID NO: 874398 - DNA, 75 bp, synthetic construct
  source 1..75: mol_type = other DNA
gtggttgatggcgcacagtgaaaaactggaagatcttctggaaggcaagccagttgtcattattgaagatggcga

SEQ ID NO: 874399 - DNA, 75 bp, synthetic construct
  source 1..75: mol_type = other DNA
tgccatggcgtaacagttatcgacggcaagcgtgtcgtaaaaggcatgactgctaccgaagcgcaatgtaagaag

SEQ ID NO: 874400 - DNA, 75 bp, synthetic construct
  source 1..75: mol_type = other DNA
gcgcagcagtgctggcgctaatcgcgtcaggggcatctgctccactcattttcgaccaattcatcagcgagaaag

SEQ ID NO: 874401 - DNA, 75 bp, synthetic construct
  source 1..75: mol_type = other DNA
ctttctgcccatataacatcggccccggaaaatgtttcccatcgaccttctataagcgcatcaacgcaggtgacc

SEQ ID NO: 874402 - DNA, 75 bp, synthetic construct
  source 1..75: mol_type = other DNA
tgcgtatacccgatgaaccgccccgccgctggtttgaccgtggtgttctgcgggaggtggtccgggaagcccgga

SEQ ID NO: 874403 - DNA, 75 bp, synthetic construct
  source 1..75: mol_type = other DNA
tggcgtgggcatcgattatgaatgatccgcaaaagtgcctgagctacaaacaagtgcgtgggcgcggcgggttta

SEQ ID NO: 874404 - DNA, 75 bp, synthetic construct
  source 1..75: mol_type = other DNA
tggcgcgggactgggaacaaccacttcagcaggaacggtcacgttgattgctcctactaactacatcaccaaaac

SEQ ID NO: 874405 - DNA, 75 bp, synthetic construct
  source 1..75: mol_type = other DNA
agtaaaaatcactggaaatgaggaaaaactcaacgaactgttaggttatatggacaactttgaattctggttcaa

SEQ ID NO: 874406 - DNA, 75 bp, synthetic construct
  source 1..75: mol_type = other DNA
ggaagagacattgaaagaagcgatagataaaggcgaagtcaaaatcagtggcaatgcagagaaactcaacgaaat

SEQ ID NO: 874407 - DNA, 75 bp, synthetic construct
  source 1..75: mol_type = other DNA
aatctcgatctatcaaatatgaccatcattgaaggcaaagagggtattaccgtcgttgatccccttgtttcagca

SEQ ID NO: 874408 - DNA, 75 bp, synthetic construct
  source 1..75: mol_type = other DNA
tgtcggctgccgttctggcgctgattgccgctggtgcgcctgacattctcgaccagtttctggatgaaaaggaag

SEQ ID NO: 874409 - DNA, 75 bp, synthetic construct
  source 1..75: mol_type = other DNA
aacagcatcagggttctgtaatgcaggcgctgggcgaacgtaaaggcgacctgaaaaacatgaatccagacggta

SEQ ID NO: 874410 - DNA, 75 bp, synthetic construct
  source 1..75: mol_type = other DNA
ttaccgtatcaacatcgttgataccccggggcacgccgacttcggtggtgaagttgaacgtgtaatgtccatggt

SEQ ID NO: 874411 - DNA, 75 bp, synthetic construct
  source 1..75: mol_type = other DNA
tattaaagttccactgaccgaaccacagaaagcgggtatagcgtcattctgtccctataacattggccccggtaa

SEQ ID NO: 874412 - DNA, 75 bp, synthetic construct
  source 1..75: mol_type = other DNA
gcatttgacggcccgatgccgcaaacgcgtttcgtaaccaaaaaagcgtttgcttacggcctgaagccgattgtt

SEQ ID NO: 874413 - DNA, 75 bp, synthetic construct
  source 1..75: mol_type = other DNA
ctcgacgcgaccgacgagcaactggacttcccgatcgtttacgcttctgcgctgaacggtatcgcgggtctggac

SEQ ID NO: 874414 - DNA, 75 bp, synthetic construct
  source 1..75: mol_type = other DNA
gatcccaagccgtggtctgattggcttccgttctgagttcatgaccatgacttccggtactggtctgctgtactc

SEQ ID NO: 874415 - DNA, 75 bp, synthetic construct
  source 1..75: mol_type = other DNA
gcacgtttttcggcggtggaaatgtatctggtcagcgattgtcttgaacatatcctgtccagtgggctggcctgc

SEQ ID NO: 874416 - DNA, 75 bp, synthetic construct
  source 1..75: mol_type = other DNA
cgaattaatgcaggagatcgaaaaggtgcctgcgaagcgattcgctggtggattaaggacggcggcagggactgt

SEQ ID NO: 874417 - DNA, 75 bp, synthetic construct
  source 1..75: mol_type = other DNA
gtcacggcggcgtactgccgccgctcctggcctctcctttctgccttacctgtttggcctgggttttctgtatgc

SEQ ID NO: 874418 - DNA, 75 bp, synthetic construct
  source 1..75: mol_type = other DNA
gaccagtttctggatgaaaaggaaggtaaccacaccacggcataccgtgatggcgcgggtatctggaccatctgc

SEQ ID NO: 874419 - DNA, 75 bp, synthetic construct
  source 1..75: mol_type = other DNA
ccgctggtttgacagggatattctgcgggaggtgatcctggaggcacgggatgaaatccgcagcatggcggatgc

SEQ ID NO: 874420 - DNA, 75 bp, synthetic construct
  source 1..75: mol_type = other DNA
gtgggctgttgccatagcgtctgtgctcatcactggtccgagtggtgacgatggcctggaaggtgtcagctacat

SEQ ID NO: 874421 - DNA, 75 bp, synthetic construct
  source 1..75: mol_type = other DNA
cggcgattacttccttgtttatccgatcaaagttaaccagcaccgccgcgtgattgagtccctgattcattcggg

SEQ ID NO: 874422 - DNA, 75 bp, synthetic construct
  source 1..75: mol_type = other DNA
ccagtcgatgccggatgcgtgggggatcgaccagttgttcccggttctgccgctggaagggctggatcaagtgcc

SEQ ID NO: 874423 - DNA, 75 bp, synthetic construct
  source 1..75: mol_type = other DNA
tctgaaatcgccattgtgctggatgaagcggaacgtctgaacgtgatccctcgtcttggcgtacgtgcgcgtctg

SEQ ID NO: 874424 - DNA, 75 bp, synthetic construct
  source 1..75: mol_type = other DNA
tttctatgtggagctgcacaagctgggcgtcaatattcagtgcttcgacgtcggcggcggtctgggcgtggacta

SEQ ID NO: 874425 - DNA, 75 bp, synthetic construct
  source 1..75: mol_type = other DNA
gcaagaacgtgcatgggcagaacaactctatctgagcatgtgccatgaagtgcagaagcaactggatccgcaaaa

SEQ ID NO: 874426 - DNA, 75 bp, synthetic construct
  source 1..75: mol_type = other DNA
ctgcaactggttgaaacgctgcgtgaagccggacgtctcgacagcctgcaactgctgcacttccacctcggttcg

SEQ ID NO: 874427 - DNA, 75 bp, synthetic construct
  source 1..75: mol_type = other DNA
cgatctggaaaaccagaaaggcatgtgggaaaaactgtttaacggtgaaatcgactgctggtttccgaccactca

SEQ ID NO: 874428 - DNA, 75 bp, synthetic construct
  source 1..75: mol_type = other DNA
gatattttcggtctgcagcaaaaaggccgtatcgccccaggaaaagatgccgacttcgtcttcattcagccgaat

SEQ ID NO: 874429 - DNA, 75 bp, synthetic construct
  source 1..75: mol_type = other DNA
atgaacaccaaaatcagatacggcctgtcggctgccgttctggcgctgattgccgcaggggcttctgcacctgaa

SEQ ID NO: 874430 - DNA, 75 bp, synthetic construct
  source 1..75: mol_type = other DNA
agcgcctgcctgcactgttctgctttccgcagatcctgcagcaccgtttgcgttctattaacgccgcgtttaaac

SEQ ID NO: 874431 - DNA, 75 bp, synthetic construct
  source 1..75: mol_type = other DNA
cgaagatatcgttggcgtatggactgtatgtcacggacacaccggaaaagacatcattcccggtaaaacgtatac

SEQ ID NO: 874432 - DNA, 75 bp, synthetic construct
  source 1..75: mol_type = other DNA
cgtccggtatttaccgaagtggaagcgattcgccgcgtactgtacctggcgaaagttgccggttgccgtctgcac

SEQ ID NO: 874433 - DNA, 75 bp, synthetic construct
  source 1..75: mol_type = other DNA
acgaaccgggaactcgccgttctctgcgtgagtggttgcatgacagccagatggatctgcacgatattcatatcg

SEQ ID NO: 874434 - DNA, 75 bp, synthetic construct
  source 1..75: mol_type = other DNA
tatcagcggtcgttctggcgctgattgctgcgggtgcttctgcgcctgaaatcctcgaccagtttcttgacgaaa

SEQ ID NO: 874435 - DNA, 75 bp, synthetic construct
  source 1..75: mol_type = other DNA
ctcgacgatggtctggcgcgtggttatgcggatgcggaaatcggcggctggttacaggaacgtttgcagttgatt

SEQ ID NO: 874436 - DNA, 75 bp, synthetic construct
  source 1..75: mol_type = other DNA
agtagacgctaccgcaggactggggcgcgatgcctttgtgctggcttcggtcggctgtcgtgtgcggatgctgga

SEQ ID NO: 874437 - DNA, 75 bp, synthetic construct
  source 1..75: mol_type = other DNA
cgggttaacgccattgagcgtgataaggcgctggcatgggtggagaaaaacatcaaagtgccgctgaccgaaccc

SEQ ID NO: 874438 - DNA, 75 bp, synthetic construct
  source 1..75: mol_type = other DNA
cagaaggcgggtatcgcgtcattttgtccttataacattggccccggtaagtgtttcccgtctacgttttacaga

SEQ ID NO: 874439 - DNA, 75 bp, synthetic construct
  source 1..75: mol_type = other DNA
atcctcgaccagtttcttgacgaaaaagaaggtaaccacaccacggcataccgtgatggtgcgggtatctggact

SEQ ID NO: 874440 - DNA, 75 bp, synthetic construct
  source 1..75: mol_type = other DNA
taaagatatcgttggtgtatggactgtatgtcacggacacaccggaaaagacatcattcccggtaaaacgtatac

SEQ ID NO: 874441 - DNA, 75 bp, synthetic construct
  source 1..75: mol_type = other DNA
agactgccgtattcgttcaaacaactgctacggtcaggtatcccgtcgtgaccaggagagcgcgctggcgtgctg

SEQ ID NO: 874442 - DNA, 75 bp, synthetic construct
  source 1..75: mol_type = other DNA
aggcgctggcatgggtggagcgcaatattaaagtaccactgaccgaaccacagaaagcgggtatagcgtcattat

SEQ ID NO: 874443 - DNA, 75 bp, synthetic construct
  source 1..75: mol_type = other DNA
cataagcagaaaagcgcgctggtgaaaaaagagatgcgtgtctttcagtcgctggtggggccggatcttgatgcc

SEQ ID NO: 874444 - DNA, 75 bp, synthetic construct
  source 1..75: mol_type = other DNA
ctcgacgacggcctggcgcgtggttatgcggatgcggaaatcggcggctggttgcaggagcgtttgcagttaatt

SEQ ID NO: 874445 - DNA, 75 bp, synthetic construct
  source 1..75: mol_type = other DNA
atggtaagcctgtcgtccccggcatgaagttgtcgaaggaaaaatgcgaccaggttaacgccattgaacgtgata

SEQ ID NO: 874446 - DNA, 75 bp, synthetic construct
  source 1..75: mol_type = other DNA
attaatgcaggtgatcgcaggggagcgtgtgaggcgattcgctggtggattaaggacggtggcagagactgccgt

SEQ ID NO: 874447 - DNA, 75 bp, synthetic construct
  source 1..75: mol_type = other DNA
tatcagctgtcgttctggcgctgattgccgcaggggcttctgcgcctgaaatcctggatcagtttctggatgaaa

SEQ ID NO: 874448 - DNA, 75 bp, synthetic construct
  source 1..75: mol_type = other DNA
aggcgctggcatgggtggcgaaaaacatcagagtgccactgactgaaccccagaaagcgggtattgcgtcattct

SEQ ID NO: 874449 - DNA, 75 bp, synthetic construct
  source 1..75: mol_type = other DNA
atctgccgtggagccacccgggtggatggtaagcctgtcctcccgggcatgaagttgtcgaaggaaaaatgcgac

SEQ ID NO: 874450 - DNA, 75 bp, synthetic construct
  source 1..75: mol_type = other DNA
cgtgataaggcgctggcatgggtggagaaaaacatcagagtgccactgaccgaaccccagaaagcggggattgcg

SEQ ID NO: 874451 - DNA, 75 bp, synthetic construct
  source 1..75: mol_type = other DNA
tatcggctgccgttctggcgctgattgccgcaggtgcttctgcgcctgaaatccttgaccagtttctggatgaaa

SEQ ID NO: 874452 - DNA, 75 bp, synthetic construct
  source 1..75: mol_type = other DNA
aataaagaccttgccacggtcgccagacaaattaacccgtacatcaaagtcgatataccggaaacaatgcgcggc

SEQ ID NO: 874453 - DNA, 75 bp, synthetic construct
  source 1..75: mol_type = other DNA
tgtcggctgccgttctggcgctgattggtgcagggacgtctgcgcctgaaatcctcgaccagtttcttgacgaaa

SEQ ID NO: 874454 - DNA, 75 bp, synthetic construct
  source 1..75: mol_type = other DNA
gctctttactcattcgtttacaacgtgggtgctggcaatttagactggccccctgaatctccagacaaccaatat

SEQ ID NO: 874455 - DNA, 75 bp, synthetic construct
  source 1..75: mol_type = other DNA
aagatgcccggcgtatccgggcggcgctgaccaccaccggtcagacgttgctgacccgccagacgcgccgctttc

SEQ ID NO: 874456 - DNA, 75 bp, synthetic construct
  source 1..75: mol_type = other DNA
taaggcgctggcatgggtggagaaaaacatcagagtgccactgaccgaaccccagaaagcggggattgcgtcatt

SEQ ID NO: 874457 - DNA, 75 bp, synthetic construct
  source 1..75: mol_type = other DNA
ggatcgcgtcattctgtccgtacaacattggccccggtaagtgcttcccgtcgacgttttataaacgaattaatg

SEQ ID NO: 874458 - DNA, 75 bp, synthetic construct
  source 1..75: mol_type = other DNA
gaaaaatgcgaccgggttaacgccattgagcgtgataaggcgctggcatgggtggagaaaaacatcagagtgcca

SEQ ID NO: 874459 - DNA, 75 bp, synthetic construct
  source 1..75: mol_type = other DNA
ggtggagaaaaacatccgggtgccgctgaccgaaccccagaaagcggggatcgcgtcattctgtccgtacaacat

SEQ ID NO: 874460 - DNA, 75 bp, synthetic construct
  source 1..75: mol_type = other DNA
atggcagaccagtagtccccggcatgaagctgacgaaggaaaaatgcgctcaggttaatgccattgaacgcgaca

SEQ ID NO: 874461 - DNA, 75 bp, synthetic construct
  source 1..75: mol_type = other DNA
atgaacgcaaaaatcaaatacggcctgtcggctgccgttctggcgctgattggtgcaggggcgtctgcgcctgaa

SEQ ID NO: 874462 - DNA, 75 bp, synthetic construct
  source 1..75: mol_type = other DNA
aagagggtaaccacacaacggcataccgcgatggttccggcatctggaccatctgtcggggggccacgatggtgg

SEQ ID NO: 874463 - DNA, 75 bp, synthetic construct
  source 1..75: mol_type = other DNA
caggttaacgccattgaacgtgataaggcactggcatgggtggaacgcaatattaacgtattactgaccgaacca

SEQ ID NO: 874464 - DNA, 75 bp, synthetic construct
  source 1..75: mol_type = other DNA
atggcataccgcgatggttctggcatatggaccatctgtcggggtgccacagtggtggatggaaaaaccgttttt

SEQ ID NO: 874465 - DNA, 75 bp, synthetic construct
  source 1..75: mol_type = other DNA
tggagcaggcgcatctgctcctcagatacttgaccagtttctggatgaaaaagagggtaaccacactacggcata

SEQ ID NO: 874466 - DNA, 75 bp, synthetic construct
  source 1..75: mol_type = other DNA
atggtaagcccgtcataccgggaatgaagctgtcgaaggaaaaatgcgaccaggttaatgccattgaacgggata

SEQ ID NO: 874467 - DNA, 75 bp, synthetic construct
  source 1..75: mol_type = other DNA
ccgtgatggtgcgggtatctggaccatctgccgtggagccacccgggggatggtaagcctgttattcctggcatg

SEQ ID NO: 874468 - DNA, 75 bp, synthetic construct
  source 1..75: mol_type = other DNA
cccatctatattgatggacacgaacgatgaattcccagacaacaaaagatattccctgcttccgttcttatttgc

SEQ ID NO: 874469 - DNA, 75 bp, synthetic construct
  source 1..75: mol_type = other DNA
accaaaggccagaagaatggctgctttgggcaggttgagcgacgggaccaggagagcgcgctggcgtgctggggg

SEQ ID NO: 874470 - DNA, 75 bp, synthetic construct
  source 1..75: mol_type = other DNA
atacttgaccagtttctggacgaaaaagaaggtaaccacacaatggcgtaccgcgatggttctggcatatggacc

SEQ ID NO: 874471 - DNA, 75 bp, synthetic construct
  source 1..75: mol_type = other DNA
ataaagaccttgccacggtcgccagacaaataaacccgtacatcaacgtcgatataccggaaacaacgcgcggcg

SEQ ID NO: 874472 - DNA, 75 bp, synthetic construct
  source 1..75: mol_type = other DNA
aggcacggtggtgcaaaacaataccgtgcagcaaaagccgatgctactgcgtgggaaaatgcactgagaccaaaa

SEQ ID NO: 874473 - DNA, 75 bp, synthetic construct
  source 1..75: mol_type = other DNA
ttgttatggaaggaatatgttaataatttaatgtcagtggatttgtccttaattccagaaataacctggccagaa

SEQ ID NO: 874474 - DNA, 75 bp, synthetic construct
  source 1..75: mol_type = other DNA
tatctgcagggattggctacgccagaattcaccagaaaacaaccggtatcagtacctgggattatgggtacggaa

SEQ ID NO: 874475 - DNA, 75 bp, synthetic construct
  source 1..75: mol_type = other DNA
atgtttttcacataatcagttcaaaattatgcaactgattctgaaaaataaaaatgaaagcaatatcacgtcgac

SEQ ID NO: 874476 - DNA, 75 bp, synthetic construct
  source 1..75: mol_type = other DNA
gcagtatcctttaaacgatatcgcacaaaaggaagttgccagtgggaagactaaagcccaacccatttcggtgat

SEQ ID NO: 874477 - DNA, 75 bp, synthetic construct
  source 1..75: mol_type = other DNA
gtggatgcaacgctatccttaatcaagggggacgttgccatgaaacgaagaactcggattaactacacgccagag

SEQ ID NO: 874478 - DNA, 75 bp, synthetic construct
  source 1..75: mol_type = other DNA
gcaaaaatcaaccctgtaccccgcatttctgtgccggcagctgaagtgccccgttcggttgctgcgctcaccccc

SEQ ID NO: 874479 - DNA, 75 bp, synthetic construct
  source 1..75: mol_type = other DNA
tgaagacggccggttgttatcaccatcctgccggtggaaagccggctgcccgttacaccgctgtggtcagacgtc

SEQ ID NO: 874480 - DNA, 75 bp, synthetic construct
  source 1..75: mol_type = other DNA
tggatcaactgcaagccaacggtgtggcggcggcgtgccttaactcgacgcagaaccgcgagcagcagcttgaag

SEQ ID NO: 874481 - DNA, 75 bp, synthetic construct
  source 1..75: mol_type = other DNA
gccgggaaaaatcagggaatgccatgtttatttccctgatgaccgaacaatcagaaacaacggagataaaaatga

SEQ ID NO: 874482 - DNA, 75 bp, synthetic construct
  source 1..75: mol_type = other DNA
tgcaaaaagtatgacgtcacagcagacagccatgctggcaccggctgcggattatatctggacagagccccggag

SEQ ID NO: 874483 - DNA, 75 bp, synthetic construct
  source 1..75: mol_type = other DNA
attcctgacgggtatgtgcaggtggcccgtgcacacggtattccggcagaagtgctgtatgccgtctccctgaca

SEQ ID NO: 874484 - DNA, 75 bp, synthetic construct
  source 1..75: mol_type = other DNA
ctggcttatgaaagccgccctaaagagattcgtgacggctggttgatgtggttaggtctcggtgaaccacgttaa

SEQ ID NO: 874485 - DNA, 75 bp, synthetic construct
  source 1..75: mol_type = other DNA
tttggatggcgatgccgactcacgttttcgcaccttacgcagccataaaaaccgcttcggcgcggtgaatgagct

SEQ ID NO: 874486 - DNA, 75 bp, synthetic construct
  source 1..75: mol_type = other DNA
cgtgctgggttagtgattgttgatttagccggacaaattgaacacccgcgagccgtttgtgagcattattattcg

SEQ ID NO: 874487 - DNA, 75 bp, synthetic construct
  source 1..75: mol_type = other DNA
ggtaaaggatggggcatcaaccagatagcttcgttgcttaagaaaagtaataaaactatcagcgcccaaaaaaac

SEQ ID NO: 874488 - DNA, 75 bp, synthetic construct
  source 1..75: mol_type = other DNA
tgcggatgctttttacgtgggggcttaatgagtaataaatattgccaggcgctggtggaactgcggaataaacca

SEQ ID NO: 874489 - DNA, 75 bp, synthetic construct
  source 1..75: mol_type = other DNA
acttgaggcatgtggtgaggcctttctggcgcaggttcgccagcaggcagaaaaactggtcagggagatggcggc

SEQ ID NO: 874490 - DNA, 75 bp, synthetic construct
  source 1..75: mol_type = other DNA
tcacggcctgctcagcaaataccgggataatcagtcactgacgctcgcgtttgggctgacagaggcaggcctgga

SEQ ID NO: 874491 - DNA, 75 bp, synthetic construct
  source 1..75: mol_type = other DNA
aaacagattgaatacactcaaatagctacggtagtagccgccagtttatcaagccaaggatatacacaagttaaa

SEQ ID NO: 874492 - DNA, 75 bp, synthetic construct
  source 1..75: mol_type = other DNA
cagaggcagtgccatatcaggagtttgcaagactgattggcaaatcggagcgtgccgtaaagggaatgattgata

SEQ ID NO: 874493 - DNA, 75 bp, synthetic construct
  source 1..75: mol_type = other DNA
cgtgcaggtgaatattgggtataccttccggcatggaataacggactaaaactggcttatgaaagccgtcctaaa

SEQ ID NO: 874494 - DNA, 75 bp, synthetic construct
  source 1..75: mol_type = other DNA
tgaaactcatgattttagctatcgctccgtcattctcactctttcagagcgcaaggtactgcggctattaggtaa

SEQ ID NO: 874495 - DNA, 75 bp, synthetic construct
  source 1..75: mol_type = other DNA
gctgattacaaagggttggcgagaatagccgctagctatgccgggaaaaatacagaagggagcctgtacatagat

SEQ ID NO: 874496 - DNA, 75 bp, synthetic construct
  source 1..75: mol_type = other DNA
ggccatttcaaatactcgtaatgtaaccatcccaatatacgggcaaactggtgtgagctcagcaacaacgtacgg

SEQ ID NO: 874497 - DNA, 75 bp, synthetic construct
  source 1..75: mol_type = other DNA
gctacggcgcaacctctgatggtgcagacatggttgctccgtctggcgaaggtgcagtgcgctgcatgaagatgg

SEQ ID NO: 874498 - DNA, 75 bp, synthetic construct
  source 1..75: mol_type = other DNA
atgaaatcaacctggacgcgaagcaatggacgatacctgccggacgcatgaagatgcgcagggatcacgttatcc

SEQ ID NO: 874499 - DNA, 75 bp, synthetic construct
  source 1..75: mol_type = other DNA
cctggctgatgccagaaaacgccgtagcgagtacaggacgttaatcagtgccggaactgacccgcaggaccacga

SEQ ID NO: 874500 - DNA, 75 bp, synthetic construct
  source 1..75: mol_type = other DNA
tggtgcttatgcgctggtggggggaatttgtagaggccgcagcaactggagtgaccatagccagtggtaaaaggg

SEQ ID NO: 874501 - DNA, 75 bp, synthetic construct
  source 1..75: mol_type = other DNA
aaatcgatcttcatgcaaagctctggacgattcctgccgaacggatgaaggctaaacgggaacacataattcctc

SEQ ID NO: 874502 - DNA, 75 bp, synthetic construct
  source 1..75: mol_type = other DNA
aagtgttaatgtgctggtggggtgattttgtggaagcagccgcaaccggaacaaccatcgccagcgggcacaggg

SEQ ID NO: 874503 - DNA, 75 bp, synthetic construct
  source 1..75: mol_type = other DNA
gcgggatgattgacagcaatccggctacgaatgtgcgtaaggcgttcccttccccgacaaaaaaacatatgccga

SEQ ID NO: 874504 - DNA, 75 bp, synthetic construct
  source 1..75: mol_type = other DNA
atgccaaccagaaagagcacgaagaacagcatcaaaaattatttgaataacttcgacagctacgagcaactgcca

SEQ ID NO: 874505 - DNA, 75 bp, synthetic construct
  source 1..75: mol_type = other DNA
attacaccgaggaaccgttacatgtcaaccagaaagagcacgaagaacagcatcaagaattatttgaataacttt

SEQ ID NO: 874506 - DNA, 75 bp, synthetic construct
  source 1..75: mol_type = other DNA
gttgggaatattgagccaatggaaaacgagcaaccagactttgaatttgacccgtatattttggaggaattttaa

SEQ ID NO: 874507 - DNA, 75 bp, synthetic construct
  source 1..75: mol_type = other DNA
gccgtgataaaagccatgaacattgggtgagcgtgatccgccagctgattcacctcggcctggtgacgcaaaata

SEQ ID NO: 874508 - DNA, 75 bp, synthetic construct
  source 1..75: mol_type = other DNA
gactaacagcattgatatgtcttctgtttctgctgttattctttctatcggtgttgcaggagttaacagtttatc

SEQ ID NO: 874509 - DNA, 75 bp, synthetic construct
  source 1..75: mol_type = other DNA
tctgtgatgacttacccggcggcgcatttctttatactaatcaacaaacgctctcgttagggattgtttgcccgc

SEQ ID NO: 874510 - DNA, 75 bp, synthetic construct
  source 1..75: mol_type = other DNA
ggcagaccagattactgattgaatggcagttactgaccgtaacccgtcccgccgaagcgtcatcaacgcggtggg

SEQ ID NO: 874511 - DNA, 75 bp, synthetic construct
  source 1..75: mol_type = other DNA
gttagtgctaattgatgaaccagagagccatcttcatccaccgttgctgtctgcttttattcgtgcactgtctga

SEQ ID NO: 874512 - DNA, 75 bp, synthetic construct
  source 1..75: mol_type = other DNA
cataggtcgtaatggtgtggggaaaacgacaattctaaacggaatgattgaagctgttaccagtaaaggtacgtc

SEQ ID NO: 874513 - DNA, 75 bp, synthetic construct
  source 1..75: mol_type = other DNA
acgttttcatctggagaataacgaaggtgcggcgctattgtttagcggcgaaatctgtgatgacttgcccggcgg

SEQ ID NO: 874514 - DNA, 75 bp, synthetic construct
  source 1..75: mol_type = other DNA
ttcctttctatggagcaggcaattgcagatgctggcctctccccggaagcttaccagaataacccgcgcgttggc

SEQ ID NO: 874515 - DNA, 75 bp, synthetic construct
  source 1..75: mol_type = other DNA
ggcgcagtacgttgtatgcagatggcgatgcacggtgttgatactccaatcgactacctgaactcccacggtact

SEQ ID NO: 874516 - DNA, 75 bp, synthetic construct
  source 1..75: mol_type = other DNA
gataatgattactttagtagtttagtctctgtgtcatttagcgcattcgatccattcgagccaccaagtgaataa

SEQ ID NO: 874517 - DNA, 75 bp, synthetic construct
  source 1..75: mol_type = other DNA
ttattggtgcgggtatagcaggcaccgcttgcgcgttacgctgcacgcgggcaggtttgtccgttctgttactgg

SEQ ID NO: 874518 - DNA, 75 bp, synthetic construct
  source 1..75: mol_type = other DNA
tgttccaccgctgcgccagttattctggcgtcatttacgtcgtcatggcctgtggcatctggcgggcgatgttat

SEQ ID NO: 874519 - DNA, 75 bp, synthetic construct
  source 1..75: mol_type = other DNA
gaagggaaatggatacggacatcatttcagttcgccatacgcggcaacaaatccacttgttcaacacctatcagg

SEQ ID NO: 874520 - DNA, 75 bp, synthetic construct
  source 1..75: mol_type = other DNA
gtgctggcggaaggtgccaatagcgtactggcagaacgccatgggttagttacccgccctgctagcgaagcgatg

SEQ ID NO: 874521 - DNA, 75 bp, synthetic construct
  source 1..75: mol_type = other DNA
ttatcggtgccggaattgcgggcaccgcctgcgcgttgcgctgcgcgcgagcgggtttatccgttctgttactgg

SEQ ID NO: 874522 - DNA, 75 bp, synthetic construct
  source 1..75: mol_type = other DNA
gctgctggtgggcgatgcgttacgcagttgcgtcaataccggaatttccgtgcgcggcatggatatggcgctgac

SEQ ID NO: 874523 - DNA, 75 bp, synthetic construct
  source 1..75: mol_type = other DNA
tgatgaaatttatcgccgccagcgggaaatgaaagatgcgttaaatgcactggatggtttgaactcgatcagaaa

SEQ ID NO: 874524 - DNA, 75 bp, synthetic construct
  source 1..75: mol_type = other DNA
ctcgacagcgtttctgaccgcgaccacgtgctggaactgctttctgctgccgctatcggcatggtgcatctgtcg

SEQ ID NO: 874525 - DNA, 75 bp, synthetic construct
  source 1..75: mol_type = other DNA
gatgaagcaagagctgaataacctggaggatttgtattcaatcaggaaactggtcgttagctcagaaaaaccttg

SEQ ID NO: 874526 - DNA, 75 bp, synthetic construct
  source 1..75: mol_type = other DNA
gacggagggttttaaaatccacgaacgtcagcgggagatgaaagaagtgttaaacactctggaggatttaggtga

SEQ ID NO: 874527 - DNA, 75 bp, synthetic construct
  source 1..75: mol_type = other DNA
cagcccgctaggctgtggcgcgctggcgggaacggcctatgaaatcgaccgtgaacagttagcaggctggctggg

SEQ ID NO: 874528 - DNA, 75 bp, synthetic construct
  source 1..75: mol_type = other DNA
caacaaagatatgcaggaagacaaagaaggtctgttcgacgcgctcgatacctggctggactgcctgcatatggc

SEQ ID NO: 874529 - DNA, 75 bp, synthetic construct
  source 1..75: mol_type = other DNA
tggcgcgcaggcggcggcacaaacgctgataagcgcctgccagcaccgcgagccgcaaaatctgtttgcgcttta

SEQ ID NO: 874530 - DNA, 75 bp, synthetic construct
  source 1..75: mol_type = other DNA
ctctggcgtcatttacgtcgtcacggcctgtggcatctggcgggcgatgttatcaggagtctgcgatgtctgtag

SEQ ID NO: 874531 - DNA, 75 bp, synthetic construct
  source 1..75: mol_type = other DNA
gatatcgttttctacaaagtgctgattgcactggagatgttgttacctgttggactgtatgtgtcagttggcgtg

SEQ ID NO: 874532 - DNA, 75 bp, synthetic construct
  source 1..75: mol_type = other DNA
cgcacctggaatgctggcccagactcactggcccgtctctatccggtggtaatggctgcaaaatctgatacggca

SEQ ID NO: 874533 - DNA, 75 bp, synthetic construct
  source 1..75: mol_type = other DNA
gtgaaattgccccgttcaccgtcacgcccgaacttatcgcagcggcaaaagatgccaaaaagatggaaatcgagg

SEQ ID NO: 874534 - DNA, 75 bp, synthetic construct
  source 1..75: mol_type = other DNA
tgaacgacgcatcactcacgaaagtctttctctgttaacgccggatggcgcaacgacgttttccagcttacagcc

SEQ ID NO: 874535 - DNA, 75 bp, synthetic construct
  source 1..75: mol_type = other DNA
ggccccgacaggccagcacatctggcaggagctgcaaagcgggaaatggggcgaaatcgccccgttcaccgtcac

SEQ ID NO: 874536 - DNA, 75 bp, synthetic construct
  source 1..75: mol_type = other DNA
tgaagtgacctccggtagctcagtgatggtggtatgggaaggaacgcgtccactgctggtggagattcaggcatt

SEQ ID NO: 874537 - DNA, 75 bp, synthetic construct
  source 1..75: mol_type = other DNA
tcgccttggcctgccgactgacaatctcaatatgttgtcggaaaccagcatcgagcagatctgcctgattgccga

SEQ ID NO: 874538 - DNA, 75 bp, synthetic construct
  source 1..75: mol_type = other DNA
tgaagtgacctccggtagctcagtgatggtggtatgggaaggaacgcgtccactgctggtggagatccaggcgct

SEQ ID NO: 874539 - DNA, 75 bp, synthetic construct
  source 1..75: mol_type = other DNA
agtcatcaccggggataatgaaatcagcatctgcatccctcttcatgcctgccatcattttcagttaattatgtc

SEQ ID NO: 874540 - DNA, 75 bp, synthetic construct
  source 1..75: mol_type = other DNA
tcagaaacgcacattatcttgaaaatggtgcggttgactgcgaggtgttatttgaaggtgaaacggagttcgccc

SEQ ID NO: 874541 - DNA, 75 bp, synthetic construct
  source 1..75: mol_type = other DNA
gcctgcgtgacagaccgctgccgcaggatctggtggtgtttggtgaagtcgggctggcaggggagatccgcccgg

SEQ ID NO: 874542 - DNA, 75 bp, synthetic construct
  source 1..75: mol_type = other DNA
cacgctatctcgaaaacggcgcaattgattgtgaggtgttattcgagggggacgctctcccggttccctatactg

SEQ ID NO: 874543 - DNA, 75 bp, synthetic construct
  source 1..75: mol_type = other DNA
tgaactgatggaacttgagtcggccatgttacaggcaatggttgtgcatgggttcaggatccatgagcgacagcg

SEQ ID NO: 874544 - DNA, 75 bp, synthetic construct
  source 1..75: mol_type = other DNA
gtcagcgggtatatgtaccttatactgccagagcttcagacccgacagaattcgggttaaggctctggtcagggc

SEQ ID NO: 874545 - DNA, 75 bp, synthetic construct
  source 1..75: mol_type = other DNA
aacaggtgaaactgtcaatgccggaactggaagaactggcggcagcaatggcgcaggcacaggtcgaacgcaacg

SEQ ID NO: 874546 - DNA, 75 bp, synthetic construct
  source 1..75: mol_type = other DNA
cgacgggtcagcaaatctggcaggaactgcaaagtggcaaatggggtgagatagccccattcactgtgacaccag

SEQ ID NO: 874547 - DNA, 75 bp, synthetic construct
  source 1..75: mol_type = other DNA
atttcgggctattaccgcgcccctgcccacaacgcgcaggcctttaccgcgcaagggttttaccgcacaggcgac

SEQ ID NO: 874548 - DNA, 75 bp, synthetic construct
  source 1..75: mol_type = other DNA
atttatacttctaccgccaatcgaacacgtattttccgcgcccgttcggtcgatgtggtcgacccatcacccgag

SEQ ID NO: 874549 - DNA, 75 bp, synthetic construct
  source 1..75: mol_type = other DNA
ccaatatcagcgtgattcagttaaagctgcaggccgggcgcaaactgacgcaagaagaaactacccgacttaacg

SEQ ID NO: 874550 - DNA, 75 bp, synthetic construct
  source 1..75: mol_type = other DNA
atacgccagaaaataaatgttcatggtattcctgtttatctctgtgaagcatgcggaaatcctattccggaagcc

SEQ ID NO: 874551 - DNA, 75 bp, synthetic construct
  source 1..75: mol_type = other DNA
tcctgttccggaagcccggcggaaaatatttcccggtgtgacgttatgtgttgaatgtcaggcgtatcaggaaag

SEQ ID NO: 874552 - DNA, 75 bp, synthetic construct
  source 1..75: mol_type = other DNA
cagtacaggtagtacctgctgcattacctgagaacgacgatgaggacgggcatgacattgattatcttgagccat

SEQ ID NO: 874553 - DNA, 75 bp, synthetic construct
  source 1..75: mol_type = other DNA
gaaaaacgcttcaaacaaggagtgaaactgtttcgctaaacagaactgttgatgaatatcgtgtcggcgcaacag

SEQ ID NO: 874554 - DNA, 75 bp, synthetic construct
  source 1..75: mol_type = other DNA
gcctggaatcggctgggcgtattccgatggtgtattttctgcaccgctcccaccagaacgatctcacgatgaaca

SEQ ID NO: 874555 - DNA, 75 bp, synthetic construct
  source 1..75: mol_type = other DNA
ggttacttaatttatcggagcctccatctgatgaactgattgatgtttatcttcaattctgcatgatttttccta

SEQ ID NO: 874556 - DNA, 75 bp, synthetic construct
  source 1..75: mol_type = other DNA
gcagctaccagcgaagtgtggtggccggaagatgcagatcatattgcttttattcgcgggcgtattggttttgaa

SEQ ID NO: 874557 - DNA, 75 bp, synthetic construct
  source 1..75: mol_type = other DNA
cgtattacactgcggaagacaacgcgctggcgcatgactggtcagaacgtcttgcggagcttaaaggtgctgcct

SEQ ID NO: 874558 - DNA, 75 bp, synthetic construct
  source 1..75: mol_type = other DNA
atgacggcctggagtttttgatggaagtcaccagggtagagcagagaagtgatgaggttgacgcgaattattccc

SEQ ID NO: 874559 - DNA, 75 bp, synthetic construct
  source 1..75: mol_type = other DNA
gcggcaggaacgccgcgtttccctttgttatcgatgttaccagcgacattattggtgagattaatcgccgtatcg

SEQ ID NO: 874560 - DNA, 75 bp, synthetic construct
  source 1..75: mol_type = other DNA
ggtatcagaatgcgatgcgcagaatgccagacgctggctggcagtaagggaaaaacagaagctaaagatgaaaac

SEQ ID NO: 874561 - DNA, 75 bp, synthetic construct
  source 1..75: mol_type = other DNA
acaattttctggcacgtcgtgagcggtgcttacagaaaagcagcaagcgcgctgcatcgggtgaagagtggtatc

SEQ ID NO: 874562 - DNA, 75 bp, synthetic construct
  source 1..75: mol_type = other DNA
taagtcgggtaaaaccgcggcaagggcgattttcaacgttattgccactgacgttgctgtttattgccatttttt

SEQ ID NO: 874563 - DNA, 75 bp, synthetic construct
  source 1..75: mol_type = other DNA
tctacggtatgggccgtgataaaagtcatgaacattgggtgagcgtgatccgccagttgattcacctcggcctgg

SEQ ID NO: 874564 - DNA, 75 bp, synthetic construct
  source 1..75: mol_type = other DNA
taatggaattattgaggtctacgccgctccgccagtaccggtagtacctgctgcattacctgagaacgacgatga

SEQ ID NO: 874565 - DNA, 75 bp, synthetic construct
  source 1..75: mol_type = other DNA
gcaccaccattgagctggtgaatgccggggatcagaccattctgagcggtgccgctgtggtagttggcagcatgg

SEQ ID NO: 874566 - DNA, 75 bp, synthetic construct
  source 1..75: mol_type = other DNA
ggtggctaacggcgcgattcccctcattcctggtttgtggttagtaccggctttgttgaataaatcgaacttttg

SEQ ID NO: 874567 - DNA, 75 bp, synthetic construct
  source 1..75: mol_type = other DNA
attccaggtttgtggttgataccaggggtgatgttgattggcttgctgttgctcatcgcccgcgacttctctttg

SEQ ID NO: 874568 - DNA, 75 bp, synthetic construct
  source 1..75: mol_type = other DNA
ccggaagatgccgagcatattgcttttattcgcgggcgtattggttttgaactgcctgactggtttatcccgaag

SEQ ID NO: 874569 - DNA, 75 bp, synthetic construct
  source 1..75: mol_type = other DNA
ccggaagatgctgaccatatttcttttattcgcgggcgtattggttttgaactgcctgactggtttatcccgaag

SEQ ID NO: 874570 - DNA, 75 bp, synthetic construct
  source 1..75: mol_type = other DNA
ctgcctgcctggtttatcccgaaggatgagaagcaggtgccgacaggcgctttcttcgctggtgctattgctgtt

SEQ ID NO: 874571 - DNA, 75 bp, synthetic construct
  source 1..75: mol_type = other DNA
gctccgccagtaccggtagtacctgctgcattacctgagaacgacgatgaggacgggcatgacattgattatctt

SEQ ID NO: 874572 - DNA, 75 bp, synthetic construct
  source 1..75: mol_type = other DNA
tggcctcgcttgaggcagagccagttggtgcattccacattgcagaacagcaagttgacggtacaagtgactaca

SEQ ID NO: 874573 - DNA, 75 bp, synthetic construct
  source 1..75: mol_type = other DNA
ccggaagatgcggaacatattacttttattcgcgggcgtattggttttgaactgcctgactggtttatcccgaag

SEQ ID NO: 874574 - DNA, 75 bp, synthetic construct
  source 1..75: mol_type = other DNA
gtcagcgatcgccagtaccctgaaatcagcgtcacttaccgacatcgaaatgcgtggtttcacctttgatcaaaa

SEQ ID NO: 874575 - DNA, 75 bp, synthetic construct
  source 1..75: mol_type = other DNA
ccgtggtcggcattgcaccggaagaactatctgcatgggctggtgcggacgccgaacgcctgaccgttacggctc

SEQ ID NO: 874576 - DNA, 75 bp, synthetic construct
  source 1..75: mol_type = other DNA
acccgcgctaccgtcgcgccagactggatgtccattccttgtggctatatggctggcgatgcgcaacgggttatc

SEQ ID NO: 874577 - DNA, 75 bp, synthetic construct
  source 1..75: mol_type = other DNA
agcgtttgagccagtagtgcagcggcatgaaatggcggtggccgccgaacgggcatacgagcagcgacagcatga

SEQ ID NO: 874578 - DNA, 75 bp, synthetic construct
  source 1..75: mol_type = other DNA
ttaccccacagataaaatatgaatttaatcacccggatacagcgatcagttttattcgacagggattaggcatcg

SEQ ID NO: 874579 - DNA, 75 bp, synthetic construct
  source 1..75: mol_type = other DNA
taaagaaaagccggtagaaggcagtccactgtttttactacaaacgtgtacggaacaactcgtggtgagtggaaa

SEQ ID NO: 874580 - DNA, 75 bp, synthetic construct
  source 1..75: mol_type = other DNA
acctctgggaagcggttggtatgttgcgccagcaattctcgcacaaagcagtaaagatcgttacgtcaaaggcga

SEQ ID NO: 874581 - DNA, 75 bp, synthetic construct
  source 1..75: mol_type = other DNA
ttgaaaaaatatcgcccgcaggccgacgatacccggctgctcgccgagttgtcagcgatagccagcaccctgaaa

SEQ ID NO: 874582 - DNA, 75 bp, synthetic construct
  source 1..75: mol_type = other DNA
gcctattccccgcttctggtggtgatcaacaaagcgaagtttgatggcttaagcccggagttccagcaggcgcta

SEQ ID NO: 874583 - DNA, 75 bp, synthetic construct
  source 1..75: mol_type = other DNA
attagcttacttggacagcatgtactttatgaagtgaatgatgaggccagtcgtgtcaatatcctggcggttgta

SEQ ID NO: 874584 - DNA, 75 bp, synthetic construct
  source 1..75: mol_type = other DNA
atggaaatcagtctgttgcaggcattcgcgttgggcattatcgcctttatcgctggcctggatatgtttaacggc

SEQ ID NO: 874585 - DNA, 75 bp, synthetic construct
  source 1..75: mol_type = other DNA
gcgtacatgcgttagttggtctgcacaatgacactttctgtcaacgacggatgaaaagtgatccacttatatctc

SEQ ID NO: 874586 - DNA, 75 bp, synthetic construct
  source 1..75: mol_type = other DNA
cgcgccgaccgtccgcgcattgatgcctggcagaccatcgtgaacggcaggctggggctgcatgacccgaacgcg

SEQ ID NO: 874587 - DNA, 75 bp, synthetic construct
  source 1..75: mol_type = other DNA
ataactgacagtaatactttgaagaatggattgtatagccaagcccacataggaactcaaccttatcagccaagt

SEQ ID NO: 874588 - DNA, 75 bp, synthetic construct
  source 1..75: mol_type = other DNA
gctagcggtaatgatgagcaggcgatgtataatgttacgcaagaagccgctcatattctgcacgaagctgaaacc

SEQ ID NO: 874589 - DNA, 75 bp, synthetic construct
  source 1..75: mol_type = other DNA
ggtcatgttccgcgcacagctcaatgagcaggaatcaccgctttcgttaaccgtggtcggcattgcaccggaaga

SEQ ID NO: 874590 - DNA, 75 bp, synthetic construct
  source 1..75: mol_type = other DNA
taatatcgacggcgtagtgctgttcggttttaccggcataacagaagaaatgttagcccactggcagtcatcgct

SEQ ID NO: 874591 - DNA, 75 bp, synthetic construct
  source 1..75: mol_type = other DNA
ggcggaaaatccctttgctatcaaattcctgccttattgctaaacggccttaccgtggttgtttcaccgctgatt

SEQ ID NO: 874592 - DNA, 75 bp, synthetic construct
  source 1..75: mol_type = other DNA
gatgctgaatgccgcaccggtaactatcaaaatcgcctatgaaagtaaccccggcgagccagcggatacagtagt

SEQ ID NO: 874593 - DNA, 75 bp, synthetic construct
  source 1..75: mol_type = other DNA
gaagaaaaagtcgtcctgaatacccgacagacggtaaaagcaccagaaaacatgagcgcctttcagattttctgc

SEQ ID NO: 874594 - DNA, 75 bp, synthetic construct
  source 1..75: mol_type = other DNA
gctgcgtgagggtgaacccggaagcgggacggttcggagaggattcgagctggatgatactggcggggaaatagc

SEQ ID NO: 874595 - DNA, 75 bp, synthetic construct
  source 1..75: mol_type = other DNA
gcaggaagccgctcaggcaattacacggggtttactggccttagcctcatccggggagctgaaaacccgccagga

SEQ ID NO: 874596 - DNA, 75 bp, synthetic construct
  source 1..75: mol_type = other DNA
ctgtggtcggcattgcgccggaagagctatcgacatgggctggcgtagacactgaacgcctgacagtgacggctc

SEQ ID NO: 874597 - DNA, 75 bp, synthetic construct
  source 1..75: mol_type = other DNA
acgccagacgcttcacctccagttacgggcggcgaattttgccagcttcgacaaactgcgtaccgcactggcggc

SEQ ID NO: 874598 - DNA, 75 bp, synthetic construct
  source 1..75: mol_type = other DNA
ttttgcaccgctgaaaattgaccaacagcaggctaccgtggcagtgatacaccagcaacatatgcgcaatattgc

SEQ ID NO: 874599 - DNA, 75 bp, synthetic construct
  source 1..75: mol_type = other DNA
ccccacttctggtggtgatcaacaaagcgaagtttgatggcttaaccccggagttccagcaggcgctgatctcat

SEQ ID NO: 874600 - DNA, 75 bp, synthetic construct
  source 1..75: mol_type = other DNA
cggagagtatgaaccaactatcagtatgcttatcccactggcaaatgttcttggttgcgacccgatatggctgtt

SEQ ID NO: 874601 - DNA, 75 bp, synthetic construct
  source 1..75: mol_type = other DNA
ggattaccttcctgttctcggtgatgtctggtgtgatgtcccgctgcgaccgaatggcggagaatgccgatacgc

SEQ ID NO: 874602 - DNA, 75 bp, synthetic construct
  source 1..75: mol_type = other DNA
tcatcctgggctttgttgccgcagcctggctcaagttaccggtgctggctattgctgccgccgcgctggcgatgg

SEQ ID NO: 874603 - DNA, 75 bp, synthetic construct
  source 1..75: mol_type = other DNA
agacaacatattaaagatggcgtttcaggatctacgtgagctgaaagtcgatgccgcctggccgttcctgttggt

SEQ ID NO: 874604 - DNA, 75 bp, synthetic construct
  source 1..75: mol_type = other DNA
atctttgaaagcatgaactcaacaggaaaagcgctgagtcaggcggatctggttcgcaactatgttctgatgggg

SEQ ID NO: 874605 - DNA, 75 bp, synthetic construct
  source 1..75: mol_type = other DNA
atgaaagctacagaagctcgcctactcgattttttaaaacgttcgcagcagtttgttattcccatttatcaacgg

SEQ ID NO: 874606 - DNA, 75 bp, synthetic construct
  source 1..75: mol_type = other DNA
gtgcagcaggcgcagcaacgggagagctggcagccagagcgatcggaatgctgtatcctggcgtgaagcagtcag

SEQ ID NO: 874607 - DNA, 75 bp, synthetic construct
  source 1..75: mol_type = other DNA
ctttgcagcggtggcaaaactgcttgagccaaaaatcaaacaggcggtggcgttgcgtcagcaagaggcacaaca

SEQ ID NO: 874608 - DNA, 75 bp, synthetic construct
  source 1..75: mol_type = other DNA
tctccagaccctgcggaatttactggcagaaggcctgagcagcggcgagcctgtggtgtgggaaaaggacgcgtt

SEQ ID NO: 874609 - DNA, 75 bp, synthetic construct
  source 1..75: mol_type = other DNA
gtctgagcagcggcgaacctgtggcttgggaaaaggacgcgttcctgaaaaaagttaaagctggcacgagggcaa

SEQ ID NO: 874610 - DNA, 75 bp, synthetic construct
  source 1..75: mol_type = other DNA
agtgggagcacagagcgggaagaatgctgttgagaataattaccttagtgaagagcagtctctgacttttgacaa

SEQ ID NO: 874611 - DNA, 75 bp, synthetic construct
  source 1..75: mol_type = other DNA
attgcggcgcatttgctggaactgccttcctaccgtcgtttcccggatgatgatgaatttcaacgtgaactgaaa

SEQ ID NO: 874612 - DNA, 75 bp, synthetic construct
  source 1..75: mol_type = other DNA
agttaaaggtgtcggctctgacggcgcgttacgctcgggggctaacacctggcgcttcgccagctacggcaccac

SEQ ID NO: 874613 - DNA, 75 bp, synthetic construct
  source 1..75: mol_type = other DNA
atgaaaggaatcatggtggatgccaacatttaatcgttgagagaaatggagggacaagtcagatttccctgatgc

SEQ ID NO: 874614 - DNA, 75 bp, synthetic construct
  source 1..75: mol_type = other DNA
gtatgggcacctgttctggcaacgatcctggtgttggttggggtaaaaattccggcagcatgggacccaaccttt

SEQ ID NO: 874615 - DNA, 75 bp, synthetic construct
  source 1..75: mol_type = other DNA
caggttcgcgacatgtttgttaaagatgttccgcagggtgctgatctgctgaaagccgtggatgaggtgcaataa

SEQ ID NO: 874616 - DNA, 75 bp, synthetic construct
  source 1..75: mol_type = other DNA
gtgcgtgagcgggatgaggcgcgtcaggtgctggcaaatcagcagcacaccctgcaactcatttcacaaatcagt

SEQ ID NO: 874617 - DNA, 75 bp, synthetic construct
  source 1..75: mol_type = other DNA
aataattacgccagcgatgacgcgctgggcagcagtggttttaaatcgggcggcgaatggtcgttcgggatgcag

SEQ ID NO: 874618 - DNA, 75 bp, synthetic construct
  source 1..75: mol_type = other DNA
ctgcgcgcgcgtattgctcgtgaaattgctgtacccaatagcgatgtccgaaaaaaacctccgttctcacatgaa

SEQ ID NO: 874619 - DNA, 75 bp, synthetic construct
  source 1..75: mol_type = other DNA
atgcgtagcgccgctgtaattaacaacggcctacggagatatgtcgcttactcgatattgaatctgtttgtagag

SEQ ID NO: 874620 - DNA, 75 bp, synthetic construct
  source 1..75: mol_type = other DNA
atggcgcagcgaattcccattgggaatatatcaaaaatgttaaatatacgagatccgtattacccgaataaacac

SEQ ID NO: 874621 - DNA, 75 bp, synthetic construct
  source 1..75: mol_type = other DNA
ccgggacggcatcactgccggaaagcataccttcggcgatccgacgtacagttttgaagagctggtcgccgaaat

SEQ ID NO: 874622 - DNA, 75 bp, synthetic construct
  source 1..75: mol_type = other DNA
agaaagtcaccgaccagattattgccgagctggaaaacggcaatgtgccgtggatccgcccgtggcacgatggcg

SEQ ID NO: 874623 - DNA, 75 bp, synthetic construct
  source 1..75: mol_type = other DNA
gtgaaattgctgtacccaatagtgatgtccgaaaaaacctccgttctcacatgaaacagccatatgcaactggta

SEQ ID NO: 874624 - DNA, 75 bp, synthetic construct
  source 1..75: mol_type = other DNA
cgcgatcttgcaagtatgggacaacttgtgaaattaccgacgagaagggaaagggccttcccgagagtggtaaag

SEQ ID NO: 874625 - DNA, 75 bp, synthetic construct
  source 1..75: mol_type = other DNA
agaagggaaagggccttcccgagagtggtaaaggagaggccctggaaataccccacagccccgaaaaagagccag

SEQ ID NO: 874626 - DNA, 75 bp, synthetic construct
  source 1..75: mol_type = other DNA
tgcatggcagaagtttgccaatctgcgagcctactatgcctggatgtgggcgtttccgggcaaaaaactgctgtt

SEQ ID NO: 874627 - DNA, 75 bp, synthetic construct
  source 1..75: mol_type = other DNA
ccgcgagcttactgggggatcatgaagttaacaaacgaacagtttaatagcattattaaacttggtggcgtcaat

SEQ ID NO: 874628 - DNA, 75 bp, synthetic construct
  source 1..75: mol_type = other DNA
gatgacaacacaattgatggttttttatacttgaaaattgagcgtggtattattgacgacgtaataccacctttg

SEQ ID NO: 874629 - DNA, 75 bp, synthetic construct
  source 1..75: mol_type = other DNA
tacctcagcacatgaccgccacatcagttcttattacgcctgatcgtgctgaaacaatcattactttttaccgcc

SEQ ID NO: 874630 - DNA, 75 bp, synthetic construct
  source 1..75: mol_type = other DNA
gaactgtttatccctggggcgcataacggtcagctctataaatacgagatgattgatgccaatggcaacttgcgt

SEQ ID NO: 874631 - DNA, 75 bp, synthetic construct
  source 1..75: mol_type = other DNA
ccctggaaataccccacagccccgaaaaagagccagtcagttgcttaactgactggcattacagcgcgaggctgg

SEQ ID NO: 874632 - DNA, 75 bp, synthetic construct
  source 1..75: mol_type = other DNA
ctggtgcggcctgaccctgctggccatcgatggtatgttctggcgcacaccggatacaccagagaacgatgcagc

SEQ ID NO: 874633 - DNA, 75 bp, synthetic construct
  source 1..75: mol_type = other DNA
cttatcgtcatcataaagcactgcatgagctggatttcgacgcgtatggctttgaatggctggtggtggatgacc

SEQ ID NO: 874634 - DNA, 75 bp, synthetic construct
  source 1..75: mol_type = other DNA
gctggatgcacgacacgctagactacatgaagctggacccgattcatcgtcagtaccatcacgacaagctgacct

SEQ ID NO: 874635 - DNA, 75 bp, synthetic construct
  source 1..75: mol_type = other DNA
tgattaatgcgctaattgcaggccattttgcggatcctttttccgtactcggtatgcaccaaactgatgctggac

SEQ ID NO: 874636 - DNA, 75 bp, synthetic construct
  source 1..75: mol_type = other DNA
tcacttatggtatgcagcgcccagcaaggcgcgcggctggtggctgattcagaatgacgatcgcgatgttgtagt

SEQ ID NO: 874637 - DNA, 75 bp, synthetic construct
  source 1..75: mol_type = other DNA
gttcgcccatctgcaaacgttgttacccattccaccggcacatcatccgcattatgcgtttcgctttatcgatct

SEQ ID NO: 874638 - DNA, 75 bp, synthetic construct
  source 1..75: mol_type = other DNA
gttattgaggcaatcaatcatcatgcggaaatgggaaatatcagccttacgaccagtgagccggatttcgagttt

SEQ ID NO: 874639 - DNA, 75 bp, synthetic construct
  source 1..75: mol_type = other DNA
catattaccgttggtaatatcagtcttacaaccagtgagccagactttgaatttgacgtgtacgcacaagcagaa

SEQ ID NO: 874640 - DNA, 75 bp, synthetic construct
  source 1..75: mol_type = other DNA
aaattgaagatataattatcggtacttgtcgcagtcttggaagggataattatcaccggaaagttttctatctat

SEQ ID NO: 874641 - DNA, 75 bp, synthetic construct
  source 1..75: mol_type = other DNA
cgtcaagcaaccagacttagctacgagctaccatctgataaatattgcgctaatttaactaccatttgcatgaaa

SEQ ID NO: 874642 - DNA, 75 bp, synthetic construct
  source 1..75: mol_type = other DNA
aattaccaagtgataaatattgcgctaacttaaccaccatttgcatgaaagttattgaggcaatcaatcatcatg

SEQ ID NO: 874643 - DNA, 75 bp, synthetic construct
  source 1..75: mol_type = other DNA
aggcattgacgaagtaattcgggcaattacaccgaggaaccgttatatgccaaccagaaagagcacgaagaatac

SEQ ID NO: 874644 - DNA, 75 bp, synthetic construct
  source 1..75: mol_type = other DNA
cttttcttattatcatattattaatctgcgggaaagtttctgctgataccggatggcactctggcagggactttc

SEQ ID NO: 874645 - DNA, 75 bp, synthetic construct
  source 1..75: mol_type = other DNA
ctgctgcgccctatcgcccgtgaaacgggaagtcgaatctaccttcaggaacaacccacctgtggtttctggtat

SEQ ID NO: 874646 - DNA, 75 bp, synthetic construct
  source 1..75: mol_type = other DNA
agctaccaagtgataaatattgcgctaacctaaacaccgtttgcatgaaagttattgaggcaatcaatcatcatg

SEQ ID NO: 874647 - DNA, 75 bp, synthetic construct
  source 1..75: mol_type = other DNA
gattctgtagaagtgaaggtcacccaaaatacaacagaaagctattttatattctaaagaatcttgatgaaatta

SEQ ID NO: 874648 - DNA, 75 bp, synthetic construct
  source 1..75: mol_type = other DNA
attacaccgaggaaccgttatatgccaaccagaaagagcacgaagaatactattaaaaattatctggctaacttt

SEQ ID NO: 874649 - DNA, 75 bp, synthetic construct
  source 1..75: mol_type = other DNA
gaccgcgtttccgggggatctgacgaaatgcagatcctgacgctgggtcgcgcggtgctgaagcaataccgctaa

SEQ ID NO: 874650 - DNA, 75 bp, synthetic construct
  source 1..75: mol_type = other DNA
aacgctgaaatgtatgcatggataaatagcgcgcagggtgcaagagaacttaacttgccttctgtttatggagat

SEQ ID NO: 874651 - DNA, 75 bp, synthetic construct
  source 1..75: mol_type = other DNA
agctgatgcgcgatcttgcaagtatgggacaacttgtgaaattaccgacaagaagggaaagggccttcccgagag

SEQ ID NO: 874652 - DNA, 75 bp, synthetic construct
  source 1..75: mol_type = other DNA
aacactctgacgttaatggataaaggttattactcactgggactgttaaatgcctggagcctggcgggagaacac

SEQ ID NO: 874653 - DNA, 75 bp, synthetic construct
  source 1..75: mol_type = other DNA
caggaaattgaagcatggcgcgcagaacaggaggcgaagccgttcacgtttgaatggaacggtcgtatctggaat

SEQ ID NO: 874654 - DNA, 75 bp, synthetic construct
  source 1..75: mol_type = other DNA
tgctgatgacattgcagggcgcttcaccgggacgtataccagagctgatgcgcgatcttgcaagtatgggacaac

SEQ ID NO: 874655 - DNA, 75 bp, synthetic construct
  source 1..75: mol_type = other DNA
atgaaaactttacctgcaacaactcagcgggcggcgaagccctgcctgtcacccgtggctgtctggcaaatgtta

SEQ ID NO: 874656 - DNA, 75 bp, synthetic construct
  source 1..75: mol_type = other DNA
atggactgctcctggcttgaaccagacagaaggatgcaaagctatctcggatctgttacattactattttcgtgc

SEQ ID NO: 874657 - DNA, 75 bp, synthetic construct
  source 1..75: mol_type = other DNA
ggctttgcttcagtctgttatgacgacgaaggggcgatcaaaatcctgatgcaacgactgtatgaccaggggcat

SEQ ID NO: 874658 - DNA, 75 bp, synthetic construct
  source 1..75: mol_type = other DNA
gcgacgccatgaggcctatctggcattttgcaaagcgcataaactgcatcccgtcgccgctctgccgggccttgc

SEQ ID NO: 874659 - DNA, 75 bp, synthetic construct
  source 1..75: mol_type = other DNA
acggctgcagccttcggcacgatgaagaacagcgaaaatgagcttgctgagcaacttatagaacaaaccggcgat

SEQ ID NO: 874660 - DNA, 75 bp, synthetic construct
  source 1..75: mol_type = other DNA
ccaatatcatggttgaaggctctattattggttatgaaagcaacgtcaaatcgggcggtgttggggcgagatatt

SEQ ID NO: 874661 - DNA, 75 bp, synthetic construct
  source 1..75: mol_type = other DNA
gtttataccgctggagcgtcagggcttacaaaacctgcttaacgagcgcaagattattcgtgcggcacaagaaaa

SEQ ID NO: 874662 - DNA, 75 bp, synthetic construct
  source 1..75: mol_type = other DNA
aactgactggcattacagaaccaagatgcctatttcgtttcagcatcaactgttaaattatctggttgccaacga

SEQ ID NO: 874663 - DNA, 75 bp, synthetic construct
  source 1..75: mol_type = other DNA
ggttcaccacgacatcattgacgctatcgaaaacatgaagcgtccgttcaaaggcgactggctggactgcgcgaa

SEQ ID NO: 874664 - DNA, 75 bp, synthetic construct
  source 1..75: mol_type = other DNA
cttctcaccagcgtatttccgtggtggaagtgatgggtcgttactgtggcgatctgacgctggctgcggccattg

SEQ ID NO: 874665 - DNA, 75 bp, synthetic construct
  source 1..75: mol_type = other DNA
ggttcaccacgacatcatcgacgctatcgaaaacatgaagcgtccgttcaaaggtgactggctggactgcgcgaa

SEQ ID NO: 874666 - DNA, 75 bp, synthetic construct
  source 1..75: mol_type = other DNA
gaggcctattttgccgagtgcgaccgtgacagcgtctacccggaacgttttgtcaaagcactggcggatatgggt

SEQ ID NO: 874667 - DNA, 75 bp, synthetic construct
  source 1..75: mol_type = other DNA
ctgacgtcgatgacggacgccatgcgcttccccggaggagaaatggcggatctgtacagtcatcgctgggaaatc

SEQ ID NO: 874668 - DNA, 75 bp, synthetic construct
  source 1..75: mol_type = other DNA
cgggagaacaccgccactggatgatacctctcagaaagggagcgcaatatgaagagctcagaaaactgggtaaag

SEQ ID NO: 874669 - DNA, 75 bp, synthetic construct
  source 1..75: mol_type = other DNA
tgacgttaatggataaaggttattactcactgggactgttaaatgcctggagcctggcgggagaacaccgccact

SEQ ID NO: 874670 - DNA, 75 bp, synthetic construct
  source 1..75: mol_type = other DNA
acgtataccggagctgatgcacgatcttgcaagtatgggacaacttgtgaaattaccgacaagaagggaaagggc

SEQ ID NO: 874671 - DNA, 75 bp, synthetic construct
  source 1..75: mol_type = other DNA
gatggcagagcagatgccgatcaccgccagcgaaatgttgagcgttaacggtgtcgggatgcgtaagctggaacg

SEQ ID NO: 874672 - DNA, 75 bp, synthetic construct
  source 1..75: mol_type = other DNA
ccgtggctatcgaaaacctgaaaaaacgtgggatcgacgcgctggtggttatcggcggtgacggttcctacatgg

SEQ ID NO: 874673 - DNA, 75 bp, synthetic construct
  source 1..75: mol_type = other DNA
ccggagctgatgcgcgatcttgcaagtatgggacaacttgtgaaattaccgacaagaagggaaagggccttcccg

SEQ ID NO: 874674 - DNA, 75 bp, synthetic construct
  source 1..75: mol_type = other DNA
gtggaagacaccgccgcgcgtctgcaaagcaaggggattagcgcagcagcgtatcacgccggactggaaaacgat

SEQ ID NO: 874675 - DNA, 75 bp, synthetic construct
  source 1..75: mol_type = other DNA
ataaagtcgttttagcctctcctttagtaatcaccgggggtaatgaaatcagcatctgcatccctcgtcatgcca

SEQ ID NO: 874676 - DNA, 75 bp, synthetic construct
  source 1..75: mol_type = other DNA
ctaatgcaaatcacgctgctgattaaaatcgaggggctgacgcaactggtccagcccctgaagcgtccgctttaa

SEQ ID NO: 874677 - DNA, 75 bp, synthetic construct
  source 1..75: mol_type = other DNA
tccgtcgcgatccgttgggggtcgtggcttctatcgcaccgtggaattatccgctgatgatggctgcgtggaaac

SEQ ID NO: 874678 - DNA, 75 bp, synthetic construct
  source 1..75: mol_type = other DNA
ggtgaacctgccgattattcattactccgtggagtggtggaacaccctgcatcagggatcaacgcggatgcagca

SEQ ID NO: 874679 - DNA, 75 bp, synthetic construct
  source 1..75: mol_type = other DNA
cagaaaccttaatgagctgttaccggttctgaaacggcggtgggatgtgacaccggcaatcatccgtgccgtgga

SEQ ID NO: 874680 - DNA, 75 bp, synthetic construct
  source 1..75: mol_type = other DNA
cctggtgagtttgttcatgggccgaaacgaccctagatttcagaccattaagaaaattttatccaaagccagtcc

SEQ ID NO: 874681 - DNA, 75 bp, synthetic construct
  source 1..75: mol_type = other DNA
atgtttcgttggggtatcatatttctggttatcgcgttaatcgccgccgcacttgggtttggtggtctggccggt

SEQ ID NO: 874682 - DNA, 75 bp, synthetic construct
  source 1..75: mol_type = other DNA
actattctgcaggaagaccagggacaattactgactcttgccggtgaacctgacggaaaactccgcgcagcaggt

SEQ ID NO: 874683 - DNA, 75 bp, synthetic construct
  source 1..75: mol_type = other DNA
aagaagacaccaccgaaacgccgatgtatgtcaatcgcggtggtcgcctgactattctgcaggaagaccagggac

SEQ ID NO: 874684 - DNA, 75 bp, synthetic construct
  source 1..75: mol_type = other DNA
aggtgattgatgctcataaaaattttcttttatttagagatttatgtagcgcaaccttagttatgtttttatgtg

SEQ ID NO: 874685 - DNA, 75 bp, synthetic construct
  source 1..75: mol_type = other DNA
cgccgcagttcgccgcgattgcccgacaattaccgccaaaattcatcatattgctgccgagtctgaacgcgatgc

SEQ ID NO: 874686 - DNA, 75 bp, synthetic construct
  source 1..75: mol_type = other DNA
cgcaaatggctattcgcgtgacacaacgttaatttccattcgacttttaaatcaatccgatgggggttttacatg

SEQ ID NO: 874687 - DNA, 75 bp, synthetic construct
  source 1..75: mol_type = other DNA
atgaaaaacaaattgttatttatgatgttaacagtactgggtgcgcctgggattgcagccgcggcaggttatgat

SEQ ID NO: 874688 - DNA, 75 bp, synthetic construct
  source 1..75: mol_type = other DNA
gtgaatttgaccacggcaccatgttctataccgcgccgaaagaaggtctgatcgacccgaatcattccgtgcaga

SEQ ID NO: 874689 - DNA, 75 bp, synthetic construct
  source 1..75: mol_type = other DNA
ttgccgcgccgtatatcacacatctggcgggtcgactgctaaatgaatacccggaaatgtctgccaatatgctgc

SEQ ID NO: 874690 - DNA, 75 bp, synthetic construct
  source 1..75: mol_type = other DNA
aaatcaaccttcaccttttacccgacatggcccatcaataaaaggggcgtttaaacccgacgttatggcacacgg

SEQ ID NO: 874691 - DNA, 75 bp, synthetic construct
  source 1..75: mol_type = other DNA
atgtgtagtatgtcctgactgcaatgaattcaaaggtaaaaatgaagtgttatttgaacccgtaataaatggggg

SEQ ID NO: 874692 - DNA, 75 bp, synthetic construct
  source 1..75: mol_type = other DNA
gagcactccgtgatcctgatccgtggtggtcgtgttaaaggcctcccgggtgttcgttaccacaccgtacgtggt

SEQ ID NO: 874693 - DNA, 75 bp, synthetic construct
  source 1..75: mol_type = other DNA
cagttacttcctgaaccctgacgattaccgcaaagcaggccgcaacctggtagatggtgacatcttcgggcgcgt

SEQ ID NO: 874694 - DNA, 75 bp, synthetic construct
  source 1..75: mol_type = other DNA
ttacttagtgcattcctggtcggaataacctggccaatgagtctgcctgtggcattacttttttctctcttttag

SEQ ID NO: 874695 - DNA, 75 bp, synthetic construct
  source 1..75: mol_type = other DNA
aaaaatgcccgaagcccacagaccagcggaaagacagcacaggcaaccgggaacaccccggcaggtggccccccg

SEQ ID NO: 874696 - DNA, 75 bp, synthetic construct
  source 1..75: mol_type = other DNA
gcggaaagacagaacagactcccgggagcgcccccgcaggcggccccccgccagccacacaactcacaggccccc

SEQ ID NO: 874697 - DNA, 75 bp, synthetic construct
  source 1..75: mol_type = other DNA
gatgctgtttggcctgatgattaagttctatcaaaaagcgctcgatgccgtcaccgcttccggggctgacagtag

SEQ ID NO: 874698 - DNA, 75 bp, synthetic construct
  source 1..75: mol_type = other DNA
ctctcacatgagaaaactaacatccgtttacttagtgcctttctggtggggataacctggccaataagtctgcct

SEQ ID NO: 874699 - DNA, 75 bp, synthetic construct
  source 1..75: mol_type = other DNA
cactgttgccctgtattgaacaggctagggaggatatccgtatcctgcgccaactgcagtttctgcaacaaaacc

SEQ ID NO: 874700 - DNA, 75 bp, synthetic construct
  source 1..75: mol_type = other DNA
ccaactacctccagtccattgaagaatctggtgctggatatcgactacaacgatgcagttgtcgtgattcatacc

SEQ ID NO: 874701 - DNA, 75 bp, synthetic construct
  source 1..75: mol_type = other DNA
ctgcgcctgccgctgttctacaacctgtcgcccgtcaatcagcgtacggtaattgcgactttgttgaactacttc

SEQ ID NO: 874702 - DNA, 75 bp, synthetic construct
  source 1..75: mol_type = other DNA
cacaccgatacctatgcgaacggttgtgaatttgaccacggcaccatgttctataccgcgccgaaagaaggtctg

SEQ ID NO: 874703 - DNA, 75 bp, synthetic construct
  source 1..75: mol_type = other DNA
aatggcagacctggattgaagctcgctttaatacgtttgacacaacgaaatctgcaggaacgactactccacagc

SEQ ID NO: 874704 - DNA, 75 bp, synthetic construct
  source 1..75: mol_type = other DNA
aatggcagacatggattgaagcacgctttaatacgtttgatgcgacaaagcctgccggaacaactccacagccgc

SEQ ID NO: 874705 - DNA, 75 bp, synthetic construct
  source 1..75: mol_type = other DNA
gcgcgagaacaagctgcatccggacgccacgctgccgcactatgacgctggcggtaagctgatgctgcccaccac

SEQ ID NO: 874706 - DNA, 75 bp, synthetic construct
  source 1..75: mol_type = other DNA
acaggttttgaaacactgttgcgctcagcagaacttcggcgcattcggatgcaggaccttgtgctgaatgaacag

SEQ ID NO: 874707 - DNA, 75 bp, synthetic construct
  source 1..75: mol_type = other DNA
tacctgacttttgatatcgactgtctggatcctgctttcgcgccgggaactggtacgccggtgattggcggcctg

SEQ ID NO: 874708 - DNA, 75 bp, synthetic construct
  source 1..75: mol_type = other DNA
atatagttggtgatactatctggattaatgatgtagagcaggttatgcataaatatcagcctgatatcgttatcc

SEQ ID NO: 874709 - DNA, 75 bp, synthetic construct
  source 1..75: mol_type = other DNA
ccagcttctttcacgctggtgggatgcttaccgtaaacagcttggcctgaaagatttttcgccagaaagtcagga

SEQ ID NO: 874710 - DNA, 75 bp, synthetic construct
  source 1..75: mol_type = other DNA
caaccgacacgtaaccacggttatgatgttattgttggtggtgaactgtttactgattactccgatcatcctcgc

SEQ ID NO: 874711 - DNA, 75 bp, synthetic construct
  source 1..75: mol_type = other DNA
cggacttgagaataaaaaccgcaactcaaacggcacatatgatataggccgtatgcagtttaatacggtttattt

SEQ ID NO: 874712 - DNA, 75 bp, synthetic construct
  source 1..75: mol_type = other DNA
ggggatttgttatcagcaaatcatccaagcacagtggtgcaaaatagaccgttattggagtatttagtctgccat

SEQ ID NO: 874713 - DNA, 75 bp, synthetic construct
  source 1..75: mol_type = other DNA
ttaaccaaatgcctggagtatttagtcgagcaccctatccccattttgtcaccttagatataaatggcctatata

SEQ ID NO: 874714 - DNA, 75 bp, synthetic construct
  source 1..75: mol_type = other DNA
cgatgcaggcgggggcgcattacgtcggcggcctggacccgaccagtgttgatggcgcgatggaaaaatccctcg

SEQ ID NO: 874715 - DNA, 75 bp, synthetic construct
  source 1..75: mol_type = other DNA
cgacagaaggtattgattacggggacacaatggttgtgtggccgtcaacaggacgaattccgggcggtgatgtga

SEQ ID NO: 874716 - DNA, 75 bp, synthetic construct
  source 1..75: mol_type = other DNA
attgccctacacgcattacatcgagcgcaattgaaagcaggtgaacatgtcgtcattattggtgcaggcgctatt

SEQ ID NO: 874717 - DNA, 75 bp, synthetic construct
  source 1..75: mol_type = other DNA
cttgatcggtatttcgctattgttactgctcttttggtctactggcggaaaattacacagtattgataccacctc

SEQ ID NO: 874718 - DNA, 75 bp, synthetic construct
  source 1..75: mol_type = other DNA
atggctgcgtgcagaacgcgcatatgttctacattaaactgcgggatattgatgaccggagcgcattgattaact

SEQ ID NO: 874719 - DNA, 75 bp, synthetic construct
  source 1..75: mol_type = other DNA
ggacgaattccgggcggtgatgtgaaacccggtggttcatcaggtctcgctccatccatgcctccgggatgggga

SEQ ID NO: 874720 - DNA, 75 bp, synthetic construct
  source 1..75: mol_type = other DNA
taaatgcaacggacaaagaagccattgtgaatgcgtggaaagcatttaatgctgaggatatggggaataaatttg

SEQ ID NO: 874721 - DNA, 75 bp, synthetic construct
  source 1..75: mol_type = other DNA
aagccaacctgcgcgtcgggctggaaaccttgctcggcgtactcaatgccagcagtcgccagggcttaaacgccg

SEQ ID NO: 874722 - DNA, 75 bp, synthetic construct
  source 1..75: mol_type = other DNA
caacaactcgctcaccaggggcattgtgatgccgatgcgctacacgtctcactcaacagtattattgatatgaac

SEQ ID NO: 874723 - DNA, 75 bp, synthetic construct
  source 1..75: mol_type = other DNA
atgtccacatttaatacgcgtaaagaccgggatcgtaatggtaaagcgaagccgcataagcattcagggatctca

SEQ ID NO: 874724 - DNA, 75 bp, synthetic construct
  source 1..75: mol_type = other DNA
tttggtattggtatcagcctggggtccacgctgcttgatacacaggcagcttcatggatggcgaactatgtggtg

SEQ ID NO: 874725 - DNA, 75 bp, synthetic construct
  source 1..75: mol_type = other DNA
taaatcattacagggtcagggcatcggtcgtgcgatggtcagagatgccggtctacgagtactacaggcggctga

SEQ ID NO: 874726 - DNA, 75 bp, synthetic construct
  source 1..75: mol_type = other DNA
aactggctaaagcagagagccctaaaaaatcagcttgccggcgcatcacgtacatttgttagctgtgatacgtat

SEQ ID NO: 874727 - DNA, 75 bp, synthetic construct
  source 1..75: mol_type = other DNA
agccgcgaaatctattggcgcaaccactcacgttggcgtaaccgcctcttctgataccttctacccaggccaaga

SEQ ID NO: 874728 - DNA, 75 bp, synthetic construct
  source 1..75: mol_type = other DNA
ggagccgtcgaagtttctgctggagcgtctttcgaagcgttggcaacaggtccatgaggccgatacagacagtaa

SEQ ID NO: 874729 - DNA, 75 bp, synthetic construct
  source 1..75: mol_type = other DNA
cgcgcattatgatgacgctttcaaatggtatccgtatctgttcctgagccgcagtaagcccgaaactcaccttgc

SEQ ID NO: 874730 - DNA, 75 bp, synthetic construct
  source 1..75: mol_type = other DNA
gggtaaccggtgcggggaaaggtattggctacgccacggcgctggcatttgttgaggccggagcgaaagttacag

SEQ ID NO: 874731 - DNA, 75 bp, synthetic construct
  source 1..75: mol_type = other DNA
caagagatcccgaatgctgagacgatgaaacaaactgaaagccatgcagtgaaaatcgtggtggaagcggcgcgc

SEQ ID NO: 874732 - DNA, 75 bp, synthetic construct
  source 1..75: mol_type = other DNA
gtaaacctgttatcgtctgttctaccggtatcggcggcccgtctacctctattgctgttgaagagctggcacagc

SEQ ID NO: 874733 - DNA, 75 bp, synthetic construct
  source 1..75: mol_type = other DNA
tgctcggctttgaggatattcctgttgaggaagcgactgccgaggcgcgaaagcatcagagcgtacaaccgaccg

SEQ ID NO: 874734 - DNA, 75 bp, synthetic construct
  source 1..75: mol_type = other DNA
caccaggcgaccgtcgaaattacggatgttatgcgactgacccgcgctgtgaaaaatacctggcgccacaattca

SEQ ID NO: 874735 - DNA, 75 bp, synthetic construct
  source 1..75: mol_type = other DNA
gcggaatgacagcgaaaaaacagcggatgaagttattgagcattatgcgtcattggatttgctgatcatcgacga

SEQ ID NO: 874736 - DNA, 75 bp, synthetic construct
  source 1..75: mol_type = other DNA
ttttctttgcctgctgatgacagctcatttgaacaggataagttacgccgtattcacctgacgattcttgccatc

SEQ ID NO: 874737 - DNA, 75 bp, synthetic construct
  source 1..75: mol_type = other DNA
ctaatgctgctcagcttaccgaccaacagctttataatgaaggcctgcaaggtcaatggcttcaagcattcagga

SEQ ID NO: 874738 - DNA, 75 bp, synthetic construct
  source 1..75: mol_type = other DNA
gggatttcccagcgaagcgattcatcatgcgctggcggcaggcgatgcgctgatgctgcgcgatattctgcttaa

SEQ ID NO: 874739 - DNA, 75 bp, synthetic construct
  source 1..75: mol_type = other DNA
ggtttatccttatgtggtcccgctgacggagggaaagcctgcggtatctccgccatggctggtgttttctgtggt

SEQ ID NO: 874740 - DNA, 75 bp, synthetic construct
  source 1..75: mol_type = other DNA
cctggctgatgcgctcaacagcgtggaccagaacactgtccagaactggttgcaggtcggtaaatatatggcgat

SEQ ID NO: 874741 - DNA, 75 bp, synthetic construct
  source 1..75: mol_type = other DNA
caggcgtttggtgttgacggacaggttgctgccgggctgatggcgcaattctgggaaaaaaacgtccggggcgct

SEQ ID NO: 874742 - DNA, 75 bp, synthetic construct
  source 1..75: mol_type = other DNA
agcaaggaagccagagccgctatttgtactaatgatgcccttgatattaaggatgcactttttgaattatcacac

SEQ ID NO: 874743 - DNA, 75 bp, synthetic construct
  source 1..75: mol_type = other DNA
tcgcacgggttcaggaaaacaacaaccgcccgacggtatggacggatatcaagaactggtttaactctctggaga

SEQ ID NO: 874744 - DNA, 75 bp, synthetic construct
  source 1..75: mol_type = other DNA
tcattgccggtgctctggagttttacgattttctgaccacgcaatacgccctgccgggtgaggttgacagtctca

SEQ ID NO: 874745 - DNA, 75 bp, synthetic construct
  source 1..75: mol_type = other DNA
tatgggcagtggcgggatgaatggtaataccggcggtctgccggatgcgccggattcatcgcgcaatccccgcaa

SEQ ID NO: 874746 - DNA, 75 bp, synthetic construct
  source 1..75: mol_type = other DNA
ctggatgttgctgatgccgggcaggtggcgcaagtctgccagcggctgttaggcgaaacgcagcgcctggacgtg

SEQ ID NO: 874747 - DNA, 75 bp, synthetic construct
  source 1..75: mol_type = other DNA
cgctgtgggtgagcgatgacgccgaagaacagcgtattcgcggctttggcgagcagtttaaactcggcattccgc

SEQ ID NO: 874748 - DNA, 75 bp, synthetic construct
  source 1..75: mol_type = other DNA
gaaaactggctgccgctacggtccgatgcgtgaaaacccgggcttgcagcgaccgttccggtcgcgccgcccctg

SEQ ID NO: 874749 - DNA, 75 bp, synthetic construct
  source 1..75: mol_type = other DNA
tacggttctcgcctgagcactatatggtctatattcgtgcgcatcatattattgtcgacggtttcggcatggcgt

SEQ ID NO: 874750 - DNA, 75 bp, synthetic construct
  source 1..75: mol_type = other DNA
cggaacctggtatgtttccggagctggatccgcaggccacgctcaatagcttaaccgactggatttctcacatcc

SEQ ID NO: 874751 - DNA, 75 bp, synthetic construct
  source 1..75: mol_type = other DNA
ctattcagcccagtcactgggtgccactgacaccggcacagttggatttttgggaagagtttacgtttcaccccc

SEQ ID NO: 874752 - DNA, 75 bp, synthetic construct
  source 1..75: mol_type = other DNA
cgggaagaccacgctgctgaaatcaatctccgcgcgcctgacgccgcagcagggggagattcactatgagagccg

SEQ ID NO: 874753 - DNA, 75 bp, synthetic construct
  source 1..75: mol_type = other DNA
ccggcgcaaaacattgttcacacggaatcactggcgctggggtctgcctcattcacaccaatgcaggtggcgcgc

SEQ ID NO: 874754 - DNA, 75 bp, synthetic construct
  source 1..75: mol_type = other DNA
gggcgatgggcgtcgactacgctgcagaatatctgcaacgcttcggcttcccggcgcaaaacattgtccacaccg

SEQ ID NO: 874755 - DNA, 75 bp, synthetic construct
  source 1..75: mol_type = other DNA
tcaacccgctctactcaatggatcgcgccgttgcacggcgtaacgtcgtgctatcgcgcatgctgaacgaagggt

SEQ ID NO: 874756 - DNA, 75 bp, synthetic construct
  source 1..75: mol_type = other DNA
aaatcgaacgtgcttgaaaacagcgacgttgaagacgtggctatctctcgcgaacagcagaatgtttctgttccg

SEQ ID NO: 874757 - DNA, 75 bp, synthetic construct
  source 1..75: mol_type = other DNA
tggtgaaccaggttggcagggcaccggctggcgcgcaggccgtgatttacaacgtcatgatattggcgggaaaac

SEQ ID NO: 874758 - DNA, 75 bp, synthetic construct
  source 1..75: mol_type = other DNA
gggctgcctaaagccccttccaccttcaacccgctctattcaatggatcgagccgtcgcgcggcgtaacgtcgtg

SEQ ID NO: 874759 - DNA, 75 bp, synthetic construct
  source 1..75: mol_type = other DNA
gggagcaggctcgatttatggcctataccgctacatcgagccacaactgccggatgtggcgacattaaaagatgt

SEQ ID NO: 874760 - DNA, 75 bp, synthetic construct
  source 1..75: mol_type = other DNA
taggtctgatgggcccgctggcaggcgtgggtgacccgatcttctggggtacggtacgtccggtttttgcagctc

SEQ ID NO: 874761 - DNA, 75 bp, synthetic construct
  source 1..75: mol_type = other DNA
cagtgccggggcattgcagggatcggctctcttgcagatggtccggaaattctcgccggagacaaaggcactctt

SEQ ID NO: 874762 - DNA, 75 bp, synthetic construct
  source 1..75: mol_type = other DNA
ttatctcggttaccgcgcctatggcgtcggcgccgctgcacaagtctatttcggtaaaaccgtcgaccaactgac

SEQ ID NO: 874763 - DNA, 75 bp, synthetic construct
  source 1..75: mol_type = other DNA
aatcgctggcgctgggttcagcgtccttcaccccaatgcaggtggcgcgcggctacgcggtcatggcgaacggtg

SEQ ID NO: 874764 - DNA, 75 bp, synthetic construct
  source 1..75: mol_type = other DNA
accgacgccgcgtaaagtgaccgatgttctgcaaacgggtcagcaaatctgggttcgtcaggttggcgatgcatg

SEQ ID NO: 874765 - DNA, 75 bp, synthetic construct
  source 1..75: mol_type = other DNA
gttaatttaaatatagaaattaaccaaacactcgaaaaaatgtcccaaaccctgttcaaatcatggtttgtggat

SEQ ID NO: 874766 - DNA, 75 bp, synthetic construct
  source 1..75: mol_type = other DNA
aattgtggatcgcgttactgatggtgggcgtaattgcctggtgtttggttgggaaagctaccgtgtacatatcag

SEQ ID NO: 874767 - DNA, 75 bp, synthetic construct
  source 1..75: mol_type = other DNA
acgatttgaccatggagctgtcgtccctcaaggcggaagagctgactgataacgccggaattgccctgcgttttc

SEQ ID NO: 874768 - DNA, 75 bp, synthetic construct
  source 1..75: mol_type = other DNA
tgcacacactgccagaccggaggattcagtattccccggacaactcaggaggaaatatgcgaattctgaactgtt

SEQ ID NO: 874769 - DNA, 75 bp, synthetic construct
  source 1..75: mol_type = other DNA
cgggaagaccacgctgctgaaatcaatctccgcgcgcctgacgccgcagcagggggagattcactatgaaaaccg

SEQ ID NO: 874770 - DNA, 75 bp, synthetic construct
  source 1..75: mol_type = other DNA
ctggatgtgtcggtgcaggcccgcctgctcgacctgctgcgcggcctggtggtggagctgaacctcgcggtagtg

SEQ ID NO: 874771 - DNA, 75 bp, synthetic construct
  source 1..75: mol_type = other DNA
gagagtgggttaaccgaccgcgtgctcgacgacccgcaccacccgtacacccagttgctggtgtcatcggttttg

SEQ ID NO: 874772 - DNA, 75 bp, synthetic construct
  source 1..75: mol_type = other DNA
atgcctgcgggcgaagaaaacaatctaaggaatttttcaaatggcaaagttaaaggtcaggttaagtggttcaac

SEQ ID NO: 874773 - DNA, 75 bp, synthetic construct
  source 1..75: mol_type = other DNA
tggtgacagaggcaaaaattatcctaaacataatgattttatggagaatggctattgtcttttcttatccgctaa

SEQ ID NO: 874774 - DNA, 75 bp, synthetic construct
  source 1..75: mol_type = other DNA
tgcttatcgtcttgacgtcataataccaacacaaacaatcattgcccaatatacaaatatagtacaaacgttcag

SEQ ID NO: 874775 - DNA, 75 bp, synthetic construct
  source 1..75: mol_type = other DNA
tttcaccctcagagagcggctgatgacgatgcagaagcaactggaaggggcgcaggaatatatccgtactcagtg

SEQ ID NO: 874776 - DNA, 75 bp, synthetic construct
  source 1..75: mol_type = other DNA
gttggaatgggcttcaaacctcttgatttctcgattaatgacattaccgcctggaacaaaagcatcattgggcat

SEQ ID NO: 874777 - DNA, 75 bp, synthetic construct
  source 1..75: mol_type = other DNA
gggtgcgtcagcctggataaggcgcgccagcttttcgataccgcgtctcaggtctgtgaaattgtcgacggtgtt

SEQ ID NO: 874778 - DNA, 75 bp, synthetic construct
  source 1..75: mol_type = other DNA
ggcatcatggttaatattccagcctattctttggtctattaccagaacggcaatcaggtgctggactcgcgagtg

SEQ ID NO: 874779 - DNA, 75 bp, synthetic construct
  source 1..75: mol_type = other DNA
gccggttttcagtcgcaatttaacaaatgggtggagttgctgaccgatcctggcgttaacggaatggcacgtgat

SEQ ID NO: 874780 - DNA, 75 bp, synthetic construct
  source 1..75: mol_type = other DNA
tatctgaccgcctttgttggtgcagatggtcgtacccaatatcgtacagatatttacaattatgatctgcctgct

SEQ ID NO: 874781 - DNA, 75 bp, synthetic construct
  source 1..75: mol_type = other DNA
gaaagccatggctatacggtgatgcgcggctggaacagcagagaagcgattgacccatggcaggttgactggtct

SEQ ID NO: 874782 - DNA, 75 bp, synthetic construct
  source 1..75: mol_type = other DNA
atgttgcttaacatgatgtgtggtcgtcggctgtcggcaatcagtttgtgcctggccgtaacattcgctccactg

SEQ ID NO: 874783 - DNA, 75 bp, synthetic construct
  source 1..75: mol_type = other DNA
tcagcccatccgctgttactgttgaaacagcagaaactaagccgatggacaagcaaacgacgtctcgtagtaaac

SEQ ID NO: 874784 - DNA, 75 bp, synthetic construct
  source 1..75: mol_type = other DNA
ctgcagcggagagtgctgattgtgctggctgcccttgatgaaaaacggccaggacccgtgctgacgcgggacata

SEQ ID NO: 874785 - DNA, 75 bp, synthetic construct
  source 1..75: mol_type = other DNA
ctgatctggcggtggagctgaacggcatggcgtatcaggcctgccgtggggattttgtgatacgtctcgacggca

SEQ ID NO: 874786 - DNA, 75 bp, synthetic construct
  source 1..75: mol_type = other DNA
atgatccggatttcacagaaaccggatctgcgcgcctcctgccggcgcatggaagcatcaggctggcttcgcacc

SEQ ID NO: 874787 - DNA, 75 bp, synthetic construct
  source 1..75: mol_type = other DNA
ggccctgcaaaaaccttatttgccgatcctcagcatccccgtacacgccagttccttgagaagtttctgttgcaa

SEQ ID NO: 874788 - DNA, 75 bp, synthetic construct
  source 1..75: mol_type = other DNA
ctgcgcgcctcttgccgtcgtctggaggatgccggccgggccatagcacaccctcttctgctggcagaacagaac

SEQ ID NO: 874789 - DNA, 75 bp, synthetic construct
  source 1..75: mol_type = other DNA
agggcgatccgctggaagtggcgcagtggctgcaggcctgtcatgatgccggaatggaggttcgcgtacagataa

SEQ ID NO: 874790 - DNA, 75 bp, synthetic construct
  source 1..75: mol_type = other DNA
gccggttttcaaccgcagtttaacaaatgggtggagttacttactgaccctggcgttaacggtatggcacgcgat

SEQ ID NO: 874791 - DNA, 75 bp, synthetic construct
  source 1..75: mol_type = other DNA
aacccttccggtctttgcccgtggcacatggatgaaacctacgtgaaggtcaatggccgctgggcgtatctgtac

SEQ ID NO: 874792 - DNA, 75 bp, synthetic construct
  source 1..75: mol_type = other DNA
tcctcccgtcgtaacagcaaagctgcataccggtttctgggtaaaatcctcaacaacgtgaagaagtggcagatc

SEQ ID NO: 874793 - DNA, 75 bp, synthetic construct
  source 1..75: mol_type = other DNA
ccacgctgggatttaaatccatgaagacggcttacgccaccatcaaaggtattgaggtgatgcgtgcactacgca

SEQ ID NO: 874794 - DNA, 75 bp, synthetic construct
  source 1..75: mol_type = other DNA
tacacggcgcgaattgctaaagttggcttcttcgccggtatcctgttacctgcatttattttgatcgcattagcg

SEQ ID NO: 874795 - DNA, 75 bp, synthetic construct
  source 1..75: mol_type = other DNA
agtcttcttcctgctattaggcgggattttatggtttattcccgtgggactttgtgctgcggaaatggctaccgt

SEQ ID NO: 874796 - DNA, 75 bp, synthetic construct
  source 1..75: mol_type = other DNA
cgccggggtgacgctgtcgggcacagtcatgcagaccatgcagaatgttgagttaaccatcacgctgagggagta

SEQ ID NO: 874797 - DNA, 75 bp, synthetic construct
  source 1..75: mol_type = other DNA
tgaggtgatgcgtgcattacgcaaaggccaggcctcagcattttattatggtgatctcctgggcgaaatgcgcct

SEQ ID NO: 874798 - DNA, 75 bp, synthetic construct
  source 1..75: mol_type = other DNA
ttagcgatgaggcagccttttgtcttattcaaaggccttacatttcaaaaactctgcttaccaggcgcatttcgc

SEQ ID NO: 874799 - DNA, 75 bp, synthetic construct
  source 1..75: mol_type = other DNA
tgcgatcatggcaaactgaaacggataatcggcgccacgctgggatttaaatccatgaagacggcttacgccacc

SEQ ID NO: 874800 - DNA, 75 bp, synthetic construct
  source 1..75: mol_type = other DNA
cagtgaaagtacacattcgcaatctgctgcgtaaactcaatgtccgctcacgcgtggcagcaactattttgttcc

SEQ ID NO: 874801 - DNA, 75 bp, synthetic construct
  source 1..75: mol_type = other DNA
cagtaaaagtacacattcgcaatctgctgcgtaaactcaatgtccgctcacgcgtggcggccaccattctgttcc

SEQ ID NO: 874802 - DNA, 75 bp, synthetic construct
  source 1..75: mol_type = other DNA
tatgcgacgcggtgttcgtcagttactggagcttgatcctggctttgaagtggtcgccgaagcgggcgacggcgc

SEQ ID NO: 874803 - DNA, 75 bp, synthetic construct
  source 1..75: mol_type = other DNA
cgatccgctggaagtggcgcagtggctgcaggcctgtcacgatgcaggaatagaagttcgtgtacaggttaatga

SEQ ID NO: 874804 - DNA, 75 bp, synthetic construct
  source 1..75: mol_type = other DNA
ctgcaaagcggaaaatggggtgaaataaccccgtttgccgtcacgccggaacttatcgcagcggcgaaggatgcc

SEQ ID NO: 874805 - DNA, 75 bp, synthetic construct
  source 1..75: mol_type = other DNA
gcccccgctacaccgaatccggtgcgattgactgcgaagttttatttgaagggatggatgaagccgttccgtaca

SEQ ID NO: 874806 - DNA, 75 bp, synthetic construct
  source 1..75: mol_type = other DNA
tcaaaaacgcccgcaggctggagaatggcgcaattgactgtgaagtgttatttgaggggatgaaagatttcatcc

SEQ ID NO: 874807 - DNA, 75 bp, synthetic construct
  source 1..75: mol_type = other DNA
atgcagataaaagagattaccagtccccgttataccgaaaatggtgcggttgactgcgaggtgttatttgaaggt

SEQ ID NO: 874808 - DNA, 75 bp, synthetic construct
  source 1..75: mol_type = other DNA
cagggtggcaaatggggcgaaatcgccccgttcaccattacacctgaacttatcgccgcggcgaaggatgccaaa

SEQ ID NO: 874809 - DNA, 75 bp, synthetic construct
  source 1..75: mol_type = other DNA
aacaggtgaaactgtcaatgccggaactggaagaactggcgacagcaatggcgcaggcacaggtcgatcgcaatg

SEQ ID NO: 874810 - DNA, 75 bp, synthetic construct
  source 1..75: mol_type = other DNA
caatggcccgtctttatccggtagtaatggcggcgaaatccaatacggcacgaaacacccttgcgtggggtgatg

SEQ ID NO: 874811 - DNA, 75 bp, synthetic construct
  source 1..75: mol_type = other DNA
tcagaaacgcccattatctcgaaaatggtgcggttgactgcgaggtgttatttgaaggtgaaacggaattcgtcc

SEQ ID NO: 874812 - DNA, 75 bp, synthetic construct
  source 1..75: mol_type = other DNA
aaaggtatcttgaaaccggagatgttgactgcatggtcgagttttcaggtatggaaatgccacttccatacacag

SEQ ID NO: 874813 - DNA, 75 bp, synthetic construct
  source 1..75: mol_type = other DNA
ccacgccagaagacaccgcgacgacaggtcagcaaatctggcaggaactgcaaagcggcaaatggggagaaatcg

SEQ ID NO: 874814 - DNA, 75 bp, synthetic construct
  source 1..75: mol_type = other DNA
tcagcgggagatgaaggaacaactgaataatctggatgatttgcgttcaatcagggaaatggtgattagcgataa

SEQ ID NO: 874815 - DNA, 75 bp, synthetic construct
  source 1..75: mol_type = other DNA
catggcgtacagaacaggaagcacagccgttcacgttcgaatggaacggccgcacctggaacgctggccccgact

SEQ ID NO: 874816 - DNA, 75 bp, synthetic construct
  source 1..75: mol_type = other DNA
aacaggtgaaactgtcaatgcagaaactggatgagctgcttactgcaatggtgcaggcacaggtcgatcgcaacg

SEQ ID NO: 874817 - DNA, 75 bp, synthetic construct
  source 1..75: mol_type = other DNA
tgcagcggagagtgctgattgtgctggctgcccttgatgaaaaacggccaggacccgtgctgacgcgggacatag

SEQ ID NO: 874818 - DNA, 75 bp, synthetic construct
  source 1..75: mol_type = other DNA
tgacgtatcaggcctgccgtggggattttgtggtacgtctcgacggcagcacctgtctgcagttatggaataaag

SEQ ID NO: 874819 - DNA, 75 bp, synthetic construct
  source 1..75: mol_type = other DNA
tgtggccagtggtcgatgcgcgggtgaaatatcgccacgccctcacctttgagcaacgcatccgcgtgcgtgcac

SEQ ID NO: 874820 - DNA, 75 bp, synthetic construct
  source 1..75: mol_type = other DNA
gctgcaggcctgtcacaatgcaggaatggaagttcgtgtgcaggttaatgaaagcgtcgccccgcaagaactggc

SEQ ID NO: 874821 - DNA, 75 bp, synthetic construct
  source 1..75: mol_type = other DNA
aacagcgcacggcggaagttgttgtactgccgctgatcccgttatcagttccgcccgcagaaggcacttctgcca

SEQ ID NO: 874822 - DNA, 75 bp, synthetic construct
  source 1..75: mol_type = other DNA
ttatggaataaagaaggcagggtggtacgcctggagggcgatccgctggaagtggcgcagtggctgcaggcctgt

SEQ ID NO: 874823 - DNA, 75 bp, synthetic construct
  source 1..75: mol_type = other DNA
gaactgtcgcactggggatgccacgactctgttcagcgcagcgtctggcgggggcaatggtcgaggaaatcttct

SEQ ID NO: 874824 - DNA, 75 bp, synthetic construct
  source 1..75: mol_type = other DNA
acccccgggccaaatgaagccgggcaaccgcatctgcaaaaaatgcttaaccagcagctggcacgcgcctcggcg

SEQ ID NO: 874825 - DNA, 75 bp, synthetic construct
  source 1..75: mol_type = other DNA
atgactgtattgaatggcatcgaagccaaggcaaggagattccattttgggtggcggtggagacctgggattttg

SEQ ID NO: 874826 - DNA, 75 bp, synthetic construct
  source 1..75: mol_type = other DNA
cgcagtaatcaacaacctcgacaaactgaaagccaaggcgctggaaactggtgactggacgccgtatttcgccgc

SEQ ID NO: 874827 - DNA, 75 bp, synthetic construct
  source 1..75: mol_type = other DNA
ccggatacaccattcaggtcgcggtcgacgagcaaagccgcgaactgtgctttgtcagccccgatattttgtttg

SEQ ID NO: 874828 - DNA, 75 bp, synthetic construct
  source 1..75: mol_type = other DNA
gggaagcggcctacgtgatccgtctggacggtaccacctgtctgcagctgacggatgccggaggcatacgccgga

SEQ ID NO: 874829 - DNA, 75 bp, synthetic construct
  source 1..75: mol_type = other DNA
ctccacgcagtgaaagcagtgatggatgatcacacctgcgcggtagtggttgagccgattcagggcgagggcggc

SEQ ID NO: 874830 - DNA, 75 bp, synthetic construct
  source 1..75: mol_type = other DNA
cctcgcactgcactggaaggctttttaactgaaagagggctctcttctttgttacgtcgcgtacagtctacagaa

SEQ ID NO: 874831 - DNA, 75 bp, synthetic construct
  source 1..75: mol_type = other DNA
aagctttcctcgatatgttggcgtggtcagaaggaacggataacagcagacagctaacccgcaatcacggctacg

SEQ ID NO: 874832 - DNA, 75 bp, synthetic construct
  source 1..75: mol_type = other DNA
tcaacatcaggcattattggtgtttgatgaagtgcagtgcgggatggggcggaccggcgatttgtttgcttacat

SEQ ID NO: 874833 - DNA, 75 bp, synthetic construct
  source 1..75: mol_type = other DNA
atcgcggcaatattcgtcaggcaatcgaccgttgcagcaatatctgggcgtctttacctggtgcaggttacggtc

SEQ ID NO: 874834 - DNA, 75 bp, synthetic construct
  source 1..75: mol_type = other DNA
cgaccgttgcagcaatatctgggcgtcgttacctggcgcaggttacggtcagtatgaacataaaatcggtgacct

SEQ ID NO: 874835 - DNA, 75 bp, synthetic construct
  source 1..75: mol_type = other DNA
agcgttttgttgaccatttgcagaagattgatcagcagtacgatgtgtttagcgatattcgcggtatggggctgt

SEQ ID NO: 874836 - DNA, 75 bp, synthetic construct
  source 1..75: mol_type = other DNA
atcttctttattacgttgcgtacagtctactgaaaaccttgattatagtaatgctatgatatcaaactctttctc

SEQ ID NO: 874837 - DNA, 75 bp, synthetic construct
  source 1..75: mol_type = other DNA
gcgaagccggtcacgaaggcaaggtttacgaactggcgggcgatagtgcctggacgttgacacagttagcggcag

SEQ ID NO: 874838 - DNA, 75 bp, synthetic construct
  source 1..75: mol_type = other DNA
tactcaatacttcgctgacaagtcaccatatgtcatggggcaagtttagcagaactcttcatgtattgaatgaag

SEQ ID NO: 874839 - DNA, 75 bp, synthetic construct
  source 1..75: mol_type = other DNA
atgaccatacctgtgcggtggtggttgagccgattcagggcgagggcggcgtgacggcagcgacgccagagtttt

SEQ ID NO: 874840 - DNA, 75 bp, synthetic construct
  source 1..75: mol_type = other DNA
aagcttttctggatatggtggcctggtcagaaggaacagataacgggcgacaaccgacacgtaatcacggttatg

SEQ ID NO: 874841 - DNA, 75 bp, synthetic construct
  source 1..75: mol_type = other DNA
gagcgcggcgctttgccgatgattgaccgcggtgatattcgtcaggctatcgaccgttgcagcaacatctgggct

SEQ ID NO: 874842 - DNA, 75 bp, synthetic construct
  source 1..75: mol_type = other DNA
aagacttctctccgaaaagccaggatgctgtggcattgcaacagattaaagagcgtggcgctttaccgatgattg

SEQ ID NO: 874843 - DNA, 75 bp, synthetic construct
  source 1..75: mol_type = other DNA
tgctgtagcactgcagcagattaaagagcgtggcgctttaccgatgattgaccgcggcgatattcgtcaggcaat

SEQ ID NO: 874844 - DNA, 75 bp, synthetic construct
  source 1..75: mol_type = other DNA
tactgattactccgatcatcctcgcaaacttgtcacactaaacccaaaactaaaatcaacagccgccggacgtta

SEQ ID NO: 874845 - DNA, 75 bp, synthetic construct
  source 1..75: mol_type = other DNA
cattctttgatccgcgtgataaccgcaccaacaccttgccgatggtctttgcgggtgcgccggatgttgggctgc

SEQ ID NO: 874846 - DNA, 75 bp, synthetic construct
  source 1..75: mol_type = other DNA
tcaaatcaacagcagccggacgttaccaactcctttcccgttggtgggatgattaccgtaaacagcttggactga

SEQ ID NO: 874847 - DNA, 75 bp, synthetic construct
  source 1..75: mol_type = other DNA
acgtcattgtaggcggagagctattcactgattactccgatcaccctcgtaaacttgtcacgctaaaccccaaac

SEQ ID NO: 874848 - DNA, 75 bp, synthetic construct
  source 1..75: mol_type = other DNA
aattgccggatcgcaatgccatcgtttttgccaccaatgacaaacgcccggacttcctgcgcgatcatccggcgg

SEQ ID NO: 874849 - DNA, 75 bp, synthetic construct
  source 1..75: mol_type = other DNA
cttccgccattgttgcctcgtggtttggttcccgttccggctggcgtgggcagaacttcccggtactctataatc

SEQ ID NO: 874850 - DNA, 75 bp, synthetic construct
  source 1..75: mol_type = other DNA
aatcagcgtcgtgctgctggcctgggtactgtggcgtctgctgcgaattattagtcgtcgtcgtcttaacccgga

SEQ ID NO: 874851 - DNA, 75 bp, synthetic construct
  source 1..75: mol_type = other DNA
gctgaatacggcgatgaggccgcactgacatctgcgcttcagggagtggaaaaactgctgctgatctcttccagc

SEQ ID NO: 874852 - DNA, 75 bp, synthetic construct
  source 1..75: mol_type = other DNA
taatggtgactgcagaagcgaagaaagaaaacattattgctgcggcgcaagcgggggccagtggctatgtggtga

SEQ ID NO: 874853 - DNA, 75 bp, synthetic construct
  source 1..75: mol_type = other DNA
ccattcccgataaccggcatgatgttgcgattcggtttatggacttcgttagtgctcacccgcatgaacaggtat

SEQ ID NO: 874854 - DNA, 75 bp, synthetic construct
  source 1..75: mol_type = other DNA
cggtaagaagattatcgttaacaatctggtgaagcatgacagatggggctacagcctgtactggggctggcggcg

SEQ ID NO: 874855 - DNA, 75 bp, synthetic construct
  source 1..75: mol_type = other DNA
gcagtcagtgggcaaagaacctggaggagggcgagctcccggcgattagcgaagccaacatcctgagtacctttg

SEQ ID NO: 874856 - DNA, 75 bp, synthetic construct
  source 1..75: mol_type = other DNA
ttgaccctgatggatgccgaagcccgcagtcagtgggcaaagaacctggaggagggcgatctcccggcgattagc

SEQ ID NO: 874857 - DNA, 75 bp, synthetic construct
  source 1..75: mol_type = other DNA
tcgaagatgagttgttcactattcgctactttcagaagggcagtgggcatatcactttcaaacgtttggatctgg

SEQ ID NO: 874858 - DNA, 75 bp, synthetic construct
  source 1..75: mol_type = other DNA
cgtgcggatcgtcgccagcatcgaggaaccggcactgttgcaaatagtcggtggtgataaacttatcatcccctt

SEQ ID NO: 874859 - DNA, 75 bp, synthetic construct
  source 1..75: mol_type = other DNA
cctccagcgttcgccaaaatgaacaaaaatggcgtgccggtcactttggttatttctcagttggtgatcacctct

SEQ ID NO: 874860 - DNA, 75 bp, synthetic construct
  source 1..75: mol_type = other DNA
tgcatttattttgatcgcattagcggctatttatctgcactccggtgcccccgttgctatcgaaatggattcgaa

SEQ ID NO: 874861 - DNA, 75 bp, synthetic construct
  source 1..75: mol_type = other DNA
tctgccaaaggtgcgctcgacactctgggtaaccggattaacggcctgcaacgccagctcgaacacttcgattta

SEQ ID NO: 874862 - DNA, 75 bp, synthetic construct
  source 1..75: mol_type = other DNA
aaagcccacaggtgcaggcgaaagttcgcgcaaccctgctggcaggcattcgcgccgccgtgctctggcaccagg

SEQ ID NO: 874863 - DNA, 75 bp, synthetic construct
  source 1..75: mol_type = other DNA
tgggtaaccggattaacggcctgcaacgtcagcttgaacatttcgatttacagtccgaaacgctgatgagtgcga

SEQ ID NO: 874864 - DNA, 75 bp, synthetic construct
  source 1..75: mol_type = other DNA
aacaactccaccacaataagcaggacgttttcgaacgtggaattatcaatgtgttcaggggattgagctgggact

SEQ ID NO: 874865 - DNA, 75 bp, synthetic construct
  source 1..75: mol_type = other DNA
atgccagcgcctcagtatggtgcggatgacccgcgccgctgttccggcaattccgtatcggaggtgctggataaa

SEQ ID NO: 874866 - DNA, 75 bp, synthetic construct
  source 1..75: mol_type = other DNA
atccgtatcggaggtgctggataaattcagaaaaaactacgacctgataatgtcactaccgcaggaaacgaaaga

SEQ ID NO: 874867 - DNA, 75 bp, synthetic construct
  source 1..75: mol_type = other DNA
gttgcagaagccgccacttttggcctggaagatgaacaagataaacgcctcgatggccaggccattcgcctgatt

SEQ ID NO: 874868 - DNA, 75 bp, synthetic construct
  source 1..75: mol_type = other DNA
atgttaataaatggttaattaaagtggcatcctcccgcatcctctctgataatgacgggatgccgggagcaatca

SEQ ID NO: 874869 - DNA, 75 bp, synthetic construct
  source 1..75: mol_type = other DNA
tgactgcggttgtggtcggcgttatgttcctgttggttatgttcttctcaccgctggtggcgatggttcctcctt

SEQ ID NO: 874870 - DNA, 75 bp, synthetic construct
  source 1..75: mol_type = other DNA
caggaaacgaaagaggaaaaggaatttcgccactgtatatggcttgcagagaaagaagaacgcgagcgaatttac

SEQ ID NO: 874871 - DNA, 75 bp, synthetic construct
  source 1..75: mol_type = other DNA
gcattgatgtcgataaatcaatattaatgaccgctgttattatgattggcgctccggtaggaatatttattgcgg

SEQ ID NO: 874872 - DNA, 75 bp, synthetic construct
  source 1..75: mol_type = other DNA
atgcaaacagaagctgaagttttaaccgatcataatgagctaatttgctcaaccagtatagaacgcatcgtcaca

SEQ ID NO: 874873 - DNA, 75 bp, synthetic construct
  source 1..75: mol_type = other DNA
ttgactctgatggatgccgaagcccgcagtcagtgggcaaagaatctggaggagggcgatctcccggcgattagc

SEQ ID NO: 874874 - DNA, 75 bp, synthetic construct
  source 1..75: mol_type = other DNA
gatgtggggcacctggtgggtatgggacgcacgcctgacttctgaactggtactgctgtttttgtatgtgggtgt

SEQ ID NO: 874875 - DNA, 75 bp, synthetic construct
  source 1..75: mol_type = other DNA
cggttctgatgacagccctcatcgtgtcctggctggagccagatacgggggtgaagatcgtcgaacaattcaggg

SEQ ID NO: 874876 - DNA, 75 bp, synthetic construct
  source 1..75: mol_type = other DNA
atgaatatgatgatctcatatcaggaacttgttcgcaccttccttaactccggcattgatgtcgataaatcaata

SEQ ID NO: 874877 - DNA, 75 bp, synthetic construct
  source 1..75: mol_type = other DNA
aatctggactgacagcccctttgtcttctgtgccgacaacgaccatcaacggaaaattaacaaaggtgtttcaag

SEQ ID NO: 874878 - DNA, 75 bp, synthetic construct
  source 1..75: mol_type = other DNA
cgcaggactggcaacactttgaggaggagatgaaacagcccgaaaatatcgctgggcacgacgcggatgaggcat

SEQ ID NO: 874879 - DNA, 75 bp, synthetic construct
  source 1..75: mol_type = other DNA
cagcctgttcaacaggcaacccctgaaccaacggaagaaaataaacctcaggaagagggcgttatgtctgccact

SEQ ID NO: 874880 - DNA, 75 bp, synthetic construct
  source 1..75: mol_type = other DNA
aggtgaatgctgtttctgccattgacagcaacgcaaagaatacctctgccgccaccactgacgaccgaaatgtat

SEQ ID NO: 874881 - DNA, 75 bp, synthetic construct
  source 1..75: mol_type = other DNA
aatgacactactgaccgccgtgaagctatcgtgatcggcaacctgatattcacaccggtaaaagatgagaagcca

SEQ ID NO: 874882 - DNA, 75 bp, synthetic construct
  source 1..75: mol_type = other DNA
cagtggcgatggttgtatgtgacgacattcatcaacgaagaagaagacaagaacggcacaattgatatcctgaat

SEQ ID NO: 874883 - DNA, 75 bp, synthetic construct
  source 1..75: mol_type = other DNA
gacgccatacgtcgtctggatgccggagaattcgatactcctaatgtgcgaggtttacgtatccttcagtgtctg

SEQ ID NO: 874884 - DNA, 75 bp, synthetic construct
  source 1..75: mol_type = other DNA
gttacgacgtttataaatgaagaggaagtcaggaacggcaccgttgatatccctaacgataatgggactacatat

SEQ ID NO: 874885 - DNA, 75 bp, synthetic construct
  source 1..75: mol_type = other DNA
caagaaacatgtttatcaagagaagttatcaagcggttaggcattaatagcgataacttcgccagcggtaagtaa

SEQ ID NO: 874886 - DNA, 75 bp, synthetic construct
  source 1..75: mol_type = other DNA
cgcggagcattaggaattattatcggtaataaagaacagcgcgatcgcctgttttgcagtgaattttgtgctgaa

SEQ ID NO: 874887 - DNA, 75 bp, synthetic construct
  source 1..75: mol_type = other DNA
gagccgtagcgaacatcgtgatcacctgcaccgtgttcgaatttcgtaaacataaccgggtggtggatgctgcat

SEQ ID NO: 874888 - DNA, 75 bp, synthetic construct
  source 1..75: mol_type = other DNA
gccctgaaacagcatcgcttttcagccgcctgcgccgttttctgaccggtggaaaatcacgtaccgccgaacctc

SEQ ID NO: 874889 - DNA, 75 bp, synthetic construct
  source 1..75: mol_type = other DNA
atgaaaagtaaatttgttgcgttggctctgtctctgttcctctcccagtcagttctggcggggggcgttgggctt

SEQ ID NO: 874890 - DNA, 75 bp, synthetic construct
  source 1..75: mol_type = other DNA
ctgccggatggtcaaccggtgacagacattcacagtggactggaatctttgcgtcagcaggcacctgcccatcct

SEQ ID NO: 874891 - DNA, 75 bp, synthetic construct
  source 1..75: mol_type = other DNA
ttaccgcgtttaccgatatgctcaccggatttttactcgactcgcggaaaaatattgggcctaaaggcaaatttc

SEQ ID NO: 874892 - DNA, 75 bp, synthetic construct
  source 1..75: mol_type = other DNA
aataacgactccgcttataacctgacctttaatcagttttccattaatggacaaaagattgaacgggcgggaatg

SEQ ID NO: 874893 - DNA, 75 bp, synthetic construct
  source 1..75: mol_type = other DNA
gtatcggtttcgttttgtcaatgaacgctgatgctgggcgtgggcggaagccatgttctggtagtaaaggtgggg

SEQ ID NO: 874894 - DNA, 75 bp, synthetic construct
  source 1..75: mol_type = other DNA
gggatctcacactgtacggcaggcggcaaatttgtctgtaatgatggttctattagtgcatcgaaaaaaacatga

SEQ ID NO: 874895 - DNA, 75 bp, synthetic construct
  source 1..75: mol_type = other DNA
tgagcctgcagtgtttcggccggtttcccgaaaaatttttattgttcatggccatgataatgatgcccttcagtc

SEQ ID NO: 874896 - DNA, 75 bp, synthetic construct
  source 1..75: mol_type = other DNA
tgacgatgataccgggcttgtgagttatcacgatcagcaaggtaacgctatgcaaattaaccgtgatgatgtctc

SEQ ID NO: 874897 - DNA, 75 bp, synthetic construct
  source 1..75: mol_type = other DNA
tgatgatgacaccggactggtgagctatcacgatcagcaaggtaacgctatgcaaattaatcgtgatgatatttc

SEQ ID NO: 874898 - DNA, 75 bp, synthetic construct
  source 1..75: mol_type = other DNA
ggccattaccaaaaacccgaatgagcgcgcgcagctcgcggcttaccgccagggtggtgcaaccatagggctatt

SEQ ID NO: 874899 - DNA, 75 bp, synthetic construct
  source 1..75: mol_type = other DNA
tcctcatcggcgtattactggtgccattaactgtaaaatgttttggtaaaaaacaggtttatttagctggcatgg

SEQ ID NO: 874900 - DNA, 75 bp, synthetic construct
  source 1..75: mol_type = other DNA
tgtatgtggaaaaccaacacgatcctgagcctgcagtgtttcggccggtttcccgaaaaatttttattgttcatg

SEQ ID NO: 874901 - DNA, 75 bp, synthetic construct
  source 1..75: mol_type = other DNA
agagcagagattgaatcatgctcttctatttatggtgtaaattgtaataatgacatattacttaataatacgtta

SEQ ID NO: 874902 - DNA, 75 bp, synthetic construct
  source 1..75: mol_type = other DNA
cgatagaggaattaaaaaactcggttatgacatgttcttcacccttgaatcaggtttggcaaatgcgtcgcaatt

SEQ ID NO: 874903 - DNA, 75 bp, synthetic construct
  source 1..75: mol_type = other DNA
atgaaacacggcagttcgccagagagttgaatctggagctctgcacgacggcagtcagtagccctcagagtaatg

SEQ ID NO: 874904 - DNA, 75 bp, synthetic construct
  source 1..75: mol_type = other DNA
cggaacagcttggtgcgacagtggttattaacggcgcaaaagaagacactattgcacgctgtcagcaatttaccg

SEQ ID NO: 874905 - DNA, 75 bp, synthetic construct
  source 1..75: mol_type = other DNA
tatcatatgactcaagatgaaaaccctctccgcgccgccatgattgtcttcctcatgatgcaggacgtcaataat

SEQ ID NO: 874906 - DNA, 75 bp, synthetic construct
  source 1..75: mol_type = other DNA
gcccattcttttagttgatggcatagcgtcgaaaattcccggcggggtgatgccgattgctgttttgaccgaagg

SEQ ID NO: 874907 - DNA, 75 bp, synthetic construct
  source 1..75: mol_type = other DNA
atgcctttgcggcatcgggcaatgcgtgtcggatgccgcatgaacgccttatccgacctacggttctacccctgc

SEQ ID NO: 874908 - DNA, 75 bp, synthetic construct
  source 1..75: mol_type = other DNA
ccaacaacctgatggcggatccgaataatcccaatttctcgattgaaggcggtgagattcgcgctcgtggtgtag

SEQ ID NO: 874909 - DNA, 75 bp, synthetic construct
  source 1..75: mol_type = other DNA
accgctgaaagaaattcagtttaaagccggtactgacagcctgttccagactggttttgatttcagtgatgcgct

SEQ ID NO: 874910 - DNA, 75 bp, synthetic construct
  source 1..75: mol_type = other DNA
ccggttttgacttcagcgatgcgctggatgatgacggcgtttactcttatcgtctgaccggtcttgcgcgctctg

SEQ ID NO: 874911 - DNA, 75 bp, synthetic construct
  source 1..75: mol_type = other DNA
aagtcactatccagacggtattccgctatgccaatcgttatcggcgttgttgctcaaatcagggaactatcccgc

SEQ ID NO: 874912 - DNA, 75 bp, synthetic construct
  source 1..75: mol_type = other DNA
cgttgcaagcgtgcaaatgcctgggagctacggatattgccgtcgttgatgtactggaaaaacgtctgacaatgg

SEQ ID NO: 874913 - DNA, 75 bp, synthetic construct
  source 1..75: mol_type = other DNA
cctgttcgatcgtgaatacgtcgccagctgctttaacacttatggttgcttctggggcgcagaacgtcaggtcgt

SEQ ID NO: 874914 - DNA, 75 bp, synthetic construct
  source 1..75: mol_type = other DNA
gttaacattctctgggactggaacgaaagcggtttgcacggtgcttctgccaaccctatttgggagcatgagcat

SEQ ID NO: 874915 - DNA, 75 bp, synthetic construct
  source 1..75: mol_type = other DNA
ttcgggcggtcttgatgtcatgctgcaaattgccgagaagctgctgcgccgcaacccgaaatatgtctcaattgt

SEQ ID NO: 874916 - DNA, 75 bp, synthetic construct
  source 1..75: mol_type = other DNA
aaaaaatgcgccgggagaaacggaaaaatatctcgctgtgctcgtttgcgaaacacgaatttgataaaacgcgcg

SEQ ID NO: 874917 - DNA, 75 bp, synthetic construct
  source 1..75: mol_type = other DNA
aaacaactggtggcaaaagtcgtggaaaaaatgcgccgggagaaacgaaaaattatcccgctgtgtccgtttgcg

SEQ ID NO: 874918 - DNA, 75 bp, synthetic construct
  source 1..75: mol_type = other DNA
atggaggtatcttcagaaaaaaaatcagagaacatcactctgaaggataatttcgaagaacaaaccagacgcaat

SEQ ID NO: 874919 - DNA, 75 bp, synthetic construct
  source 1..75: mol_type = other DNA
tttcagtgaaaaaatttctgcagaaaatctggtaaaacttatagagcaaacaacaggatacaaatccacatcgat

SEQ ID NO: 874920 - DNA, 75 bp, synthetic construct
  source 1..75: mol_type = other DNA
cagttggttccgtggtaaagatctggacaaagacgaagagttccagaaattcatctccgtaccggaaaaccgtga

SEQ ID NO: 874921 - DNA, 75 bp, synthetic construct
  source 1..75: mol_type = other DNA
gtcaaatgatgagttgcagatgatgaatgaacttttttattattcttttatcagtattctgaccgtaggctatgg

SEQ ID NO: 874922 - DNA, 75 bp, synthetic construct
  source 1..75: mol_type = other DNA
atctaagcgagctatacatgaaaatccccttcgcgccgccatgattgtctttctcatgatgcagagaatccaata

SEQ ID NO: 874923 - DNA, 75 bp, synthetic construct
  source 1..75: mol_type = other DNA
aaaaccggaatgcgtctggcgttaccgcttacactacgctgtgatgccattgggataacgttaaaagaagttatt

SEQ ID NO: 874924 - DNA, 75 bp, synthetic construct
  source 1..75: mol_type = other DNA
ctacagacaatcccttatttgcggagcagctctttattctgttgacccccgactgttaacactaatcagcggttt

SEQ ID NO: 874925 - DNA, 75 bp, synthetic construct
  source 1..75: mol_type = other DNA
tcccgatacaaatgcggggagacttctacagacaatctcttatttgcggagcagctctttattctgttgaccccc

SEQ ID NO: 874926 - DNA, 75 bp, synthetic construct
  source 1..75: mol_type = other DNA
ggcgggcgttaatctgttgcagcgtcgctatcaggtcgtttcatttattgtgttgctgataatgtttgtcaccac

SEQ ID NO: 874927 - DNA, 75 bp, synthetic construct
  source 1..75: mol_type = other DNA
gtggtcaaagaaagccggagctgatggggtgacagccggaatcggcattgttgccggaaaagacagcagcggagg

SEQ ID NO: 874928 - DNA, 75 bp, synthetic construct
  source 1..75: mol_type = other DNA
cgggtattgagattgacagtactttaatgactgttgattttcccacaaaaccgctgaattttaaggcgacaggag

SEQ ID NO: 874929 - DNA, 75 bp, synthetic construct
  source 1..75: mol_type = other DNA
ggaatgggatgtggccaattatcgggggcattcactgacagaaatctggcggggaacgaaggacgacctttcaga

SEQ ID NO: 874930 - DNA, 75 bp, synthetic construct
  source 1..75: mol_type = other DNA
tgtccatgtggtcaaaaaaagccggagcggatggagtgacggctggtatcgggattgtcgccggaaaagacagtg

SEQ ID NO: 874931 - DNA, 75 bp, synthetic construct
  source 1..75: mol_type = other DNA
aaggaagaagcggcgaactctcctgttgtggaggagttacggcaggaaattaaggatgccgaggggcgggcagtc

SEQ ID NO: 874932 - DNA, 75 bp, synthetic construct
  source 1..75: mol_type = other DNA
gcgctgattgaccagatcaaggaagaagcggcgaattctcctgttgtggaggagttacggcaggaaattaaggat

SEQ ID NO: 874933 - DNA, 75 bp, synthetic construct
  source 1..75: mol_type = other DNA
gtgatccgcaatgataaaattgaggtttatgatcagaatggacgactggctgttcgcataggcagattacgctga

SEQ ID NO: 874934 - DNA, 75 bp, synthetic construct
  source 1..75: mol_type = other DNA
atttatgacgcggtgattgaaacactggtgtcgcggaaggttgtggcggatgaagtaaaagccggggtaagtatc

SEQ ID NO: 874935 - DNA, 75 bp, synthetic construct
  source 1..75: mol_type = other DNA
gaccagagcgccaccatacagcagatacagcaggtccagtcagacacgaatgatgagctggcagcgctgtacatg

SEQ ID NO: 874936 - DNA, 75 bp, synthetic construct
  source 1..75: mol_type = other DNA
ccgctgaattttaaggtgactggaggatttggctcagttcttctggaatgggatatgccaaattatcggggacac

SEQ ID NO: 874937 - DNA, 75 bp, synthetic construct
  source 1..75: mol_type = other DNA
ggaaggatttatctgcggttgtggaaaatatggagattggcacagggcagcgtggtgacggacgtcacgcctttg

SEQ ID NO: 874938 - DNA, 75 bp, synthetic construct
  source 1..75: mol_type = other DNA
tgacccgtgaggaactggttggtcttaaactcgcccggcgtcgaacatcgggtggtgcctcatatgcactgaatc

SEQ ID NO: 874939 - DNA, 75 bp, synthetic construct
  source 1..75: mol_type = other DNA
tggtaatatattatctgcaatgccccatgttgatgctgttatttcattaactcataagcaaaaagaacatatttt

SEQ ID NO: 874940 - DNA, 75 bp, synthetic construct
  source 1..75: mol_type = other DNA
ggatcactaatcagatagtgtctgctgggtatattgttgtaagtgggttagcaataggcactgatgcgaatgccc

SEQ ID NO: 874941 - DNA, 75 bp, synthetic construct
  source 1..75: mol_type = other DNA
gggtttctaaaagataaaatatctgagactgattttctaatagcgaacgctgaattggagaaccaccatgttaat

SEQ ID NO: 874942 - DNA, 75 bp, synthetic construct
  source 1..75: mol_type = other DNA
tgtgattatgatcataaatgagtcccgggagtatttgttagagctaaaatggccagggaaacagagtacattaga

SEQ ID NO: 874943 - DNA, 75 bp, synthetic construct
  source 1..75: mol_type = other DNA
gtggcgattggcggttcgctcggcggctggattgacggcatgtttgacggccagggcgtatttctcgcgggcgca

SEQ ID NO: 874944 - DNA, 75 bp, synthetic construct
  source 1..75: mol_type = other DNA
atgaacgattataaaatgacgccaggcgagcggcgcgcgacctggggtttaggaaccgtattttcattgcgtatg

SEQ ID NO: 874945 - DNA, 75 bp, synthetic construct
  source 1..75: mol_type = other DNA
gaatcaatagacgtattaaagcaatcagacggaaatgatattgaaacagatgatgttattgaccggctaataaaa

SEQ ID NO: 874946 - DNA, 75 bp, synthetic construct
  source 1..75: mol_type = other DNA
ttattcgttctctacaatatgttgatgacgtatttcttgaggagtcacttgaattaaaaggtgagtatataaaaa

SEQ ID NO: 874947 - DNA, 75 bp, synthetic construct
  source 1..75: mol_type = other DNA
gcgtgtcatccgatgcattaagtttctctaaaaagcaaagatacccagtttacccagaaaatgagcgatgtgaaa

SEQ ID NO: 874948 - DNA, 75 bp, synthetic construct
  source 1..75: mol_type = other DNA
ccacttttaatatagataaaaatattcaacgagatccatatctctgtgtcgcgatatgtcgtctagtcccaatga

SEQ ID NO: 874949 - DNA, 75 bp, synthetic construct
  source 1..75: mol_type = other DNA
atcagcgtcattacccaggaagacctgcagcgaaaaccggtacagaatcgaaggatgtcctcaaagaagtgcctg

SEQ ID NO: 874950 - DNA, 75 bp, synthetic construct
  source 1..75: mol_type = other DNA
attgtccctattgtttgctttatattttttctatttagtatttatttttataaaagattaaaaaacataacaaaa

SEQ ID NO: 874951 - DNA, 75 bp, synthetic construct
  source 1..75: mol_type = other DNA
gacgaatggatttgcgaccgtagcggtgaaaccttctgggatttgctggaacaggcggcaacgcagcaggccggt

SEQ ID NO: 874952 - DNA, 75 bp, synthetic construct
  source 1..75: mol_type = other DNA
atgtttacagacactattactaagtgtgcggctaatgctgcgcgcattgcacgcctgtcggcaaataacccgctc

SEQ ID NO: 874953 - DNA, 75 bp, synthetic construct
  source 1..75: mol_type = other DNA
ctgcagaagagacagacaatcaggcatatgaagatgactatgcagcatatgcatccctgcagtcggtaactgccg

SEQ ID NO: 874954 - DNA, 75 bp, synthetic construct
  source 1..75: mol_type = other DNA
cggctaaagataaaccacaggagaacgtagtgtctgctactgataacgacgcagagaacacctcttccgccacca

SEQ ID NO: 874955 - DNA, 75 bp, synthetic construct
  source 1..75: mol_type = other DNA
caggcgagagaaacattccggctgtccggtgaaacgcgggatcgtatccgtaatatctgggccataaccccggtc

SEQ ID NO: 874956 - DNA, 75 bp, synthetic construct
  source 1..75: mol_type = other DNA
tgacggaagaaatgcgccgtaaattgctggatatttcccgcacatcggaaaaatcttcccgctttggtttcaacg

SEQ ID NO: 874957 - DNA, 75 bp, synthetic construct
  source 1..75: mol_type = other DNA
tcaaacatctgacggaagaaatgcgccgcacgctacaggatatttcaagactgtcagatcgaaattcccgaaaag

SEQ ID NO: 874958 - DNA, 75 bp, synthetic construct
  source 1..75: mol_type = other DNA
cgggacacagcacaccaccacaacgcagtctgaagaacaagtgcaggtctccatggccagcgctgacgactggag

SEQ ID NO: 874959 - DNA, 75 bp, synthetic construct
  source 1..75: mol_type = other DNA
acgacaggaggtattacatcgggaggccggaggcccaccaccaaagccaatggattacacagggcacgatggcac

SEQ ID NO: 874960 - DNA, 75 bp, synthetic construct
  source 1..75: mol_type = other DNA
atgtttggatagacttaatcagtataaaggtaatattgagaatatttgtgatccttttacgattgaaatcggctg

SEQ ID NO: 874961 - DNA, 75 bp, synthetic construct
  source 1..75: mol_type = other DNA
aaccgcagaattttgatttgaatgtaagacaaaagggtgctttatttcttaacaaggtgccaaatcccaactata

SEQ ID NO: 874962 - DNA, 75 bp, synthetic construct
  source 1..75: mol_type = other DNA
ctgcattcaaggaagcctacattgctgaattcgatcgcatggaaaaacagctatgggaacagaaacaactggccc

SEQ ID NO: 874963 - DNA, 75 bp, synthetic construct
  source 1..75: mol_type = other DNA
tattgcgatcgctgagttctttgacaagcagcatcaccatgttgttcagaaaatagaatccctcgaatgctctga

SEQ ID NO: 874964 - DNA, 75 bp, synthetic construct
  source 1..75: mol_type = other DNA
catgagattgctacctccggtggtgagttatttaaactgactatcgaggctgctattatggctactatccctgcc

SEQ ID NO: 874965 - DNA, 75 bp, synthetic construct
  source 1..75: mol_type = other DNA
cctgatatgcgcaaaacttattacacgctgcattgcctgaattgtggttacctgagcctttatcgtacgtctgcg

SEQ ID NO: 874966 - DNA, 75 bp, synthetic construct
  source 1..75: mol_type = other DNA
catggcgatgtggaagcctgggcggtctatcgcgtcatccttcaacagcccattactaacgatcaggcggcactg

SEQ ID NO: 874967 - DNA, 75 bp, synthetic construct
  source 1..75: mol_type = other DNA
aacccgcaggataaaatgtgcggtaacggcaaaatggaaaaacacatcctgcgtgaatgttttgagtcatacctg

SEQ ID NO: 874968 - DNA, 75 bp, synthetic construct
  source 1..75: mol_type = other DNA
aattctggcaggtccgtctgggcgggagaaccggtaaaaaaacgccacgggcagggaaaattttcctgaaccagg

SEQ ID NO: 874969 - DNA, 75 bp, synthetic construct
  source 1..75: mol_type = other DNA
aaagcgatgatttatgacgcggtgattgaaacactggtgtcgcggaaggttgtggcagatgaagtaaaagccggg

SEQ ID NO: 874970 - DNA, 75 bp, synthetic construct
  source 1..75: mol_type = other DNA
ctgggcgagcagttctcgttgttcggcgatggctgggaactggcggaatcggacgatgtacgccgcatgcttatc

SEQ ID NO: 874971 - DNA, 75 bp, synthetic construct
  source 1..75: mol_type = other DNA
acacacttataacgggctttttgtccacggcgatgcggaagcctgggcggtctatcgcgtcatccttcaacagcc

SEQ ID NO: 874972 - DNA, 75 bp, synthetic construct
  source 1..75: mol_type = other DNA
gcggacgcaacattgtcgcctgccaaggtaaccggatttgtcagaaagccaatacagacaccacaggtttatccc

SEQ ID NO: 874973 - DNA, 75 bp, synthetic construct
  source 1..75: mol_type = other DNA
agctgaatcccgaagccacggtggcggagcggatttactgggcagaagaggaatccgtcgcacgactccacctta

SEQ ID NO: 874974 - DNA, 75 bp, synthetic construct
  source 1..75: mol_type = other DNA
cctgagcctttaccgtacgtctgcggtgctgaagtggttggagaaagacaaagcgcaggatggtgaaaatgggta

SEQ ID NO: 874975 - DNA, 75 bp, synthetic construct
  source 1..75: mol_type = other DNA
cattattggtgtggccagaatgcgttttactgcagaacgttgcattggatgcggcgcctgtgtgaaagcctgtgc

SEQ ID NO: 874976 - DNA, 75 bp, synthetic construct
  source 1..75: mol_type = other DNA
agcttaaccccgaagccatggtcgccgaacgcatatactgggcggaagatgaatccatcgctcgtattcaccttc

SEQ ID NO: 874977 - DNA, 75 bp, synthetic construct
  source 1..75: mol_type = other DNA
aagagtcgctctgtatcggatgcggagaatgtgttctggcatgtcccaccctcgcctggcagcgtcagccacagg

SEQ ID NO: 874978 - DNA, 75 bp, synthetic construct
  source 1..75: mol_type = other DNA
ccgaacaacactgggggcctcgagagttggggcaatgcttgcttcaaattgttcaagctgctccacaactggagc

SEQ ID NO: 874979 - DNA, 75 bp, synthetic construct
  source 1..75: mol_type = other DNA
aacggaacaacactttcagaaattgagcgtgaggttttcgagcgtgggcaatttgacggcacattagatttgctg

SEQ ID NO: 874980 - DNA, 75 bp, synthetic construct
  source 1..75: mol_type = other DNA
tgctaggaatggctttcgttgttgggaaaaaacagcatattagtttaacaatattactggataaagctcccacaa

SEQ ID NO: 874981 - DNA, 75 bp, synthetic construct
  source 1..75: mol_type = other DNA
gaagcagacaggtggcattatttggtggctcattccgtctggttgtgtctagcgaagctcaggggagcgggcctt

SEQ ID NO: 874982 - DNA, 75 bp, synthetic construct
  source 1..75: mol_type = other DNA
tgagttgccatatcccaccttcaaacgtctggcactgtttgccgcaagccaagacaactgcataccacctgagcg

SEQ ID NO: 874983 - DNA, 75 bp, synthetic construct
  source 1..75: mol_type = other DNA
gagagtccgacgatcgtcacgaccgctcgcattgggatttgccgtccatcactccgcactggcagaaccgggggt

SEQ ID NO: 874984 - DNA, 75 bp, synthetic construct
  source 1..75: mol_type = other DNA
ctttgctgaacaccctcttctatttataggttacagcgcagaagactcgaacataaaaaacatactatctgatat

SEQ ID NO: 874985 - DNA, 75 bp, synthetic construct
  source 1..75: mol_type = other DNA
tcgaagacgttagtgatgatataaagacatgtcttgaaggaatgggatgccaacccatactttttgttggatcgg

SEQ ID NO: 874986 - DNA, 75 bp, synthetic construct
  source 1..75: mol_type = other DNA
aagatcactacggagtgcccgtcagagtcattcgttgggaaccggaaacacaacgggttatctacctccgcgaag

SEQ ID NO: 874987 - DNA, 75 bp, synthetic construct
  source 1..75: mol_type = other DNA
tcggcgttttctgcctgtgccaggaacggatgcgcttcccggagaaaggcaaaacctactccatcaacgaaggaa

SEQ ID NO: 874988 - DNA, 75 bp, synthetic construct
  source 1..75: mol_type = other DNA
gcactgaaagcgcgcgatatcgttgcaggcattgcatccgaagaagaagatggaattgtcgtctttgacgggtgt

SEQ ID NO: 874989 - DNA, 75 bp, synthetic construct
  source 1..75: mol_type = other DNA
gttcgctaatgaaaaactgaaagccgcactgaaagcacgcgatatcgttgcgggcattgcctctgaagaagaaga

SEQ ID NO: 874990 - DNA, 75 bp, synthetic construct
  source 1..75: mol_type = other DNA
ctctggatgcagcctgatggggacgctgcactgctgaactatcatattgttggcgtcacccgtgatggtattcct

SEQ ID NO: 874991 - DNA, 75 bp, synthetic construct
  source 1..75: mol_type = other DNA
tggcatggagtttaagacttcagaaaacaaagtctcactggatggtgcgaaagaatgcccggaatggatggaatg

SEQ ID NO: 874992 - DNA, 75 bp, synthetic construct
  source 1..75: mol_type = other DNA
aggagttcattgacgaagtttaccgagggccagcgtataaaaatgggcaaaatggcccttatgttgtcaatggcc

SEQ ID NO: 874993 - DNA, 75 bp, synthetic construct
  source 1..75: mol_type = other DNA
tctcgtgtcgcatttggtttctctggtatttatgaccaggatgaagctgaacgcatccgtgaaatggagcaggca

SEQ ID NO: 874994 - DNA, 75 bp, synthetic construct
  source 1..75: mol_type = other DNA
atggcgtggatcgcacaacggaaaacaacatcttttcgacagcttacaataattaccttattaatgcgtggatgg

SEQ ID NO: 874995 - DNA, 75 bp, synthetic construct
  source 1..75: mol_type = other DNA
atgcaaaccatgatgttttcgattatgtgatgctcagaaaggagtttacagaggataagcaaggtaaccccaccc

SEQ ID NO: 874996 - DNA, 75 bp, synthetic construct
  source 1..75: mol_type = other DNA
caacctaaaacacttaaagacgtgatctctcactatcagggggaatcgcgggttattgacggaagccatgaaatg

SEQ ID NO: 874997 - DNA, 75 bp, synthetic construct
  source 1..75: mol_type = other DNA
ttgccaccataataattgtttttaatgtacattactcacatattttacttatattttcatctctacttgttttat

SEQ ID NO: 874998 - DNA, 75 bp, synthetic construct
  source 1..75: mol_type = other DNA
gaaacccggggcggttcagtcattattccggctgaatatctgggaaaaacaggctatgaattaccggcggaactg

SEQ ID NO: 874999 - DNA, 75 bp, synthetic construct
  source 1..75: mol_type = other DNA
atcaggttaaaaatgctttcctgcgtgagggggattctgatctgctaatctggaacgtgaccggtaaccactggc

SEQ ID NO: 875000 - DNA, 75 bp, synthetic construct
  source 1..75: mol_type = other DNA
agttcattgatgaggtgtaccgtgaaccgtttcagggtcaaggtcgcaatggtgcttacactgttgatggcccct

SEQ ID NO: 875001 - DNA, 75 bp, synthetic construct
  source 1..75: mol_type = other DNA
gctattttagctgtagaaacctctgctctactggctgtatttgggactgttgatttcaaaagtgggctaaagagt

SEQ ID NO: 875002 - DNA, 75 bp, synthetic construct
  source 1..75: mol_type = other DNA
tatcctacactggaggaatactggcgcattcacccagatacgaaaacaaaaaatggaataaagtgttattactgt

SEQ ID NO: 875003 - DNA, 75 bp, synthetic construct
  source 1..75: mol_type = other DNA
actctggaagcacctgccttcaaaatcggatgtggtgggaaaggtgctaatcaagcggtggcggcggctaaattg

SEQ ID NO: 875004 - DNA, 75 bp, synthetic construct
  source 1..75: mol_type = other DNA
gcgacttatcaggacaagatgctggtgttttccagcacggatatgctgtttaaagatgaccagcaggataccgaa

SEQ ID NO: 875005 - DNA, 75 bp, synthetic construct
  source 1..75: mol_type = other DNA
atgagtggtgaaaaaaaggcgaaaggctggcggttttatggccttgttggttttggcgcaatagtactgctatcc

SEQ ID NO: 875006 - DNA, 75 bp, synthetic construct
  source 1..75: mol_type = other DNA
gtttacgcaaaatattggtgcgcacgaaagcaaagcgccagaaggtgttttgccggtaagccagactcagcaggg

SEQ ID NO: 875007 - DNA, 75 bp, synthetic construct
  source 1..75: mol_type = other DNA
tccgctgtttgtcggtcagtttgatggctctgccgaacaagtgcaattgccaggaaaactgtttacgcaaaatat

SEQ ID NO: 875008 - DNA, 75 bp, synthetic construct
  source 1..75: mol_type = other DNA
cccgctgtttgttggtcagtttgatggcactgacgaacaggcgcaattgccagggaaactgtttacccaaaatat

SEQ ID NO: 875009 - DNA, 75 bp, synthetic construct
  source 1..75: mol_type = other DNA
cgttccgctctatatcaatccacaaggaatggcgaaactgctgcgtaacgaaacgctgaccagtctgccgaagaa

SEQ ID NO: 875010 - DNA, 75 bp, synthetic construct
  source 1..75: mol_type = other DNA
tgtctttctttatttttatttctattctgtctttatttcgcgggtggtcgtttattaaacagtttcatctgtcgg

SEQ ID NO: 875011 - DNA, 75 bp, synthetic construct
  source 1..75: mol_type = other DNA
atgatgcaacatcaggtcaatgtatcggctcgcttcaatccggaaaacttagaacgtgtttttcgcgtggtgcgt

SEQ ID NO: 875012 - DNA, 75 bp, synthetic construct
  source 1..75: mol_type = other DNA
agaacgtgttttacgcgtggtgcgccatcgtggtttccatgtttgctcaatgaatatggccgccgccagtgatgc

SEQ ID NO: 875013 - DNA, 75 bp, synthetic construct
  source 1..75: mol_type = other DNA
ttatcagttgcgctataacggcaataacgccctgatgttcgcgacttatcaggacaagatgctggtgttttccag

SEQ ID NO: 875014 - DNA, 75 bp, synthetic construct
  source 1..75: mol_type = other DNA
gatcagcccgcacaggcggcgctatggcacgataaacaaggccatctttcacattacatggtgctgatccagcgc

SEQ ID NO: 875015 - DNA, 75 bp, synthetic construct
  source 1..75: mol_type = other DNA
tatgtcatgaagctggcccagatggaacccggtgccgcctggcagtggctacccataacctggcagccgctatga

SEQ ID NO: 875016 - DNA, 75 bp, synthetic construct
  source 1..75: mol_type = other DNA
gatggcacttaaaaagtacttttagatatttagccagaaaacgtattttatcaaatcgcaactttgatcgaattt

SEQ ID NO: 875017 - DNA, 75 bp, synthetic construct
  source 1..75: mol_type = other DNA
actggcgcgaaggcgagcgatattttatgtcgcaactgattgatggtgatttggctgccaataacggcggctggc

SEQ ID NO: 875018 - DNA, 75 bp, synthetic construct
  source 1..75: mol_type = other DNA
acggcatcttatggataacgtggccggacaatgtggcgcaacatggcaatttgtggacggtcagcgccagatggt

SEQ ID NO: 875019 - DNA, 75 bp, synthetic construct
  source 1..75: mol_type = other DNA
tacacggtcgcagatgtgaaccgtgcgctgatgaaagactttgaggccaaaggcgcgaccgaaggactgacgcct

SEQ ID NO: 875020 - DNA, 75 bp, synthetic construct
  source 1..75: mol_type = other DNA
ccgggcactggaaatgaaagcggtattaattaaattaaccgaagttcatgccgaacagggggggatttattttct

SEQ ID NO: 875021 - DNA, 75 bp, synthetic construct
  source 1..75: mol_type = other DNA
tgcgccggatttcgccacgccggtcattcgcgaactgctggcattgttgttgtgtctgttttccggcgggttggc

SEQ ID NO: 875022 - DNA, 75 bp, synthetic construct
  source 1..75: mol_type = other DNA
gcaggaaggcaaaacgggatacccgattgtcgatgccgccatgcgtcagcttaacagcactggctggatgcataa

SEQ ID NO: 875023 - DNA, 75 bp, synthetic construct
  source 1..75: mol_type = other DNA
agaccagatagggcaggtgaacggtcagaactacggcctgatttttgacggtgatattcgctttaccgtaaccgg

SEQ ID NO: 875024 - DNA, 75 bp, synthetic construct
  source 1..75: mol_type = other DNA
ttgagctgcaactgttggaccagaacgggcagggcgtttccctgtctgactttaaggtcacgttccagatcgagt

SEQ ID NO: 875025 - DNA, 75 bp, synthetic construct
  source 1..75: mol_type = other DNA
acaggagctaagagtggctgatatcgatgatggttacaccagattcgctaacgagctgctggaagctatcgcaag

SEQ ID NO: 875026 - DNA, 75 bp, synthetic construct
  source 1..75: mol_type = other DNA
tcaccgggcaggagttttcgaaagtgcgtctgattgccggttacgacggtatcgcgccggaggtgtcggcaagcg

SEQ ID NO: 875027 - DNA, 75 bp, synthetic construct
  source 1..75: mol_type = other DNA
aacactggacgcctgatgtacagccttgcagggcaatgtaaggctaactggtggtacgaaaacaaccaggtgcat

SEQ ID NO: 875028 - DNA, 75 bp, synthetic construct
  source 1..75: mol_type = other DNA
acgaagcgttcctctacgcgactaccatcactacgcttgccgctggctataccgttgcggatctgcaccgggcga

SEQ ID NO: 875029 - DNA, 75 bp, synthetic construct
  source 1..75: mol_type = other DNA
gagatggtgttgctgatagcactattgcaagctgggatgatgttgcattagctgtagttgcacatccgaatgttg

SEQ ID NO: 875030 - DNA, 75 bp, synthetic construct
  source 1..75: mol_type = other DNA
ttcaacgatcgacgacaactacgaacactacacatataacggcacctacaataatgccgctgacactcatgttgt

SEQ ID NO: 875031 - DNA, 75 bp, synthetic construct
  source 1..75: mol_type = other DNA
tactctggatcaggaagttgatctgtccatcactaataactctcacgttgcgggtattacgttgactcagggtta

SEQ ID NO: 875032 - DNA, 75 bp, synthetic construct
  source 1..75: mol_type = other DNA
ttccggaaaaccaaaagaaagcactatccgcaatatatgattgttttgataactgggatgtaaatttactcttta

SEQ ID NO: 875033 - DNA, 75 bp, synthetic construct
  source 1..75: mol_type = other DNA
aacatgacgctgttcgccctctcctggttcggcaaccacagcgaagcctacacgctggcgggcattggtcataac

SEQ ID NO: 875034 - DNA, 75 bp, synthetic construct
  source 1..75: mol_type = other DNA
ccagccttcccagcaatcgtcgattgttataccagtccacccacgttagtgtggccagttccacttctgcacggt

SEQ ID NO: 875035 - DNA, 75 bp, synthetic construct
  source 1..75: mol_type = other DNA
cgaccatgactccgccatggccgccatcaactttgccgaatccggtcacatcgtgctgaccacacaacacgccaa

SEQ ID NO: 875036 - DNA, 75 bp, synthetic construct
  source 1..75: mol_type = other DNA
gggtgggcgcgtcggatattcacatcaccgttttcgtcgcacagacgcgcatcgagatgcgtatcaacggcctcc

SEQ ID NO: 875037 - DNA, 75 bp, synthetic construct
  source 1..75: mol_type = other DNA
gacaacatagtgttagtaaaaggacttaaaaaggttgtaaatgttaaattctccagaaacaaacatcttatagag

SEQ ID NO: 875038 - DNA, 75 bp, synthetic construct
  source 1..75: mol_type = other DNA
gtgataacagatgtctggaaatataggggcaaatccactgattgtgctgatcgtgcggatgattactaccatgac

SEQ ID NO: 875039 - DNA, 75 bp, synthetic construct
  source 1..75: mol_type = other DNA
gaccgctggttcacgccacagcagcaggaagccctgcgtttccgcaatcctgacgggtgcagtgaatgcatccgt

SEQ ID NO: 875040 - DNA, 75 bp, synthetic construct
  source 1..75: mol_type = other DNA
gacaccggagcaacagcagttcacggaccgctggttcacgccacagcagcaggaagccctgcgtttccgcaatcc

SEQ ID NO: 875041 - DNA, 75 bp, synthetic construct
  source 1..75: mol_type = other DNA
gtcgaaaaattaacgaagagctggaagtaatcattatgaatgcctggcatgcagccagatatgcagaagataaat

SEQ ID NO: 875042 - DNA, 75 bp, synthetic construct
  source 1..75: mol_type = other DNA
aacctgagcgactactttgccaaagcgggatctggctggggtaattccaccagcaggaaaaactccgccaacatt

SEQ ID NO: 875043 - DNA, 75 bp, synthetic construct
  source 1..75: mol_type = other DNA
attaaaggcatgggttgatcgatatctgaaaatacaggacacgcgactgaaaaatggagatattgcagctacaac

SEQ ID NO: 875044 - DNA, 75 bp, synthetic construct
  source 1..75: mol_type = other DNA
gcgctgtctcgttttggccttgatgttcagtatgttgtgttgggaattcactcacctgaaacttataacgatgat

SEQ ID NO: 875045 - DNA, 75 bp, synthetic construct
  source 1..75: mol_type = other DNA
cccggtttccgtgctttacggtaaaagcagtcctggcggtctgttgaatatggtcagcaagcgtccgaccaccga

SEQ ID NO: 875046 - DNA, 75 bp, synthetic construct
  source 1..75: mol_type = other DNA
tggagcgcgctgaaatcatgcgtggcccggtttccgtgctgtatgggaaaagcagtcctggcggtctgttgaaca

SEQ ID NO: 875047 - DNA, 75 bp, synthetic construct
  source 1..75: mol_type = other DNA
taagagactttgcattaatactggacgagtggctggataaagacatggtcagcacagcgagagtaaatcgcggat

SEQ ID NO: 875048 - DNA, 75 bp, synthetic construct
  source 1..75: mol_type = other DNA
tcagcggatgaaaaaaacatataatcaaaatgtattccgtgaaaatattacaggtaaaaaagtgattaacacata

SEQ ID NO: 875049 - DNA, 75 bp, synthetic construct
  source 1..75: mol_type = other DNA
ttcagtactctacacctgttttgatagctgggatgtcgatttattctttaagatcaaaacactctcatcattaaa

SEQ ID NO: 875050 - DNA, 75 bp, synthetic construct
  source 1..75: mol_type = other DNA
ttccggaaacctataaggatgccctttcagtactctacacctgttttgatagctgggatgtcgatttattcttta

SEQ ID NO: 875051 - DNA, 75 bp, synthetic construct
  source 1..75: mol_type = other DNA
gtattgtgggtaaaccagttctgaccggtattagcgtcaggctaaaagacaatgtggataacgaggctgcaatca

SEQ ID NO: 875052 - DNA, 75 bp, synthetic construct
  source 1..75: mol_type = other DNA
gtattgcattgtcatatgccacaggcatgctctttaccgccctgggggatgaaatgttcacggtgatatattcgt

SEQ ID NO: 875053 - DNA, 75 bp, synthetic construct
  source 1..75: mol_type = other DNA
cagcttgacgacagctatcagctgctggcgcagatgacggactacaaagattcaccgtcctgcaaagaaaaacag

SEQ ID NO: 875054 - DNA, 75 bp, synthetic construct
  source 1..75: mol_type = other DNA
tgaaaactatccgctatcgaagccttattgctgaggctttacttgatagcctgtcttcctgcaaagatttaaaaa

SEQ ID NO: 875055 - DNA, 75 bp, synthetic construct
  source 1..75: mol_type = other DNA
aaaaatcatatcgattgggtgtgtgtacctcatgctgaaattttagcgaaacctgaaattactaaaaattttcgc

SEQ ID NO: 875056 - DNA, 75 bp, synthetic construct
  source 1..75: mol_type = other DNA
gagtacaacctgaggatgagaccagaattatctccatcagtagaaaatcttattagagaatctggcggtgttatc

SEQ ID NO: 875057 - DNA, 75 bp, synthetic construct
  source 1..75: mol_type = other DNA
ccgaactgtcaaaacttgataagaggtatcacgatgagattaaagctatcagatctgacattgccgatctgcgca

SEQ ID NO: 875058 - DNA, 75 bp, synthetic construct
  source 1..75: mol_type = other DNA
ggcgcagtaaaaaaagcctctgcccctggacaaatatcggtgaatgatttgcgcacagtattaactattttgcat

SEQ ID NO: 875059 - DNA, 75 bp, synthetic construct
  source 1..75: mol_type = other DNA
ccatgacttccataaaacgccggaagccgaagagattattgcccgtttacgtaaaatgcagtccttcgacgccga

SEQ ID NO: 875060 - DNA, 75 bp, synthetic construct
  source 1..75: mol_type = other DNA
gttagaagtatcgcggatccgttactcaattcgcgaacctaaagacggcatatgtggatgtatctggttcgagca

SEQ ID NO: 875061 - DNA, 75 bp, synthetic construct
  source 1..75: mol_type = other DNA
gccctctaattgaagttatacgtgattatcctggcattgtagcaaaaggcgtttgcgcaaaactgattgaagcct

SEQ ID NO: 875062 - DNA, 75 bp, synthetic construct
  source 1..75: mol_type = other DNA
gcattattcgcaatactcaatgcgacgttaacccctgaagcgatgatggactatggttggcgtattccattttta

SEQ ID NO: 875063 - DNA, 75 bp, synthetic construct
  source 1..75: mol_type = other DNA
tttgctgctgtgtttttaaaatatttatgctctgatgcatttatgccaggcaagtgtgtaaacaaaaacagaaga

SEQ ID NO: 875064 - DNA, 75 bp, synthetic construct
  source 1..75: mol_type = other DNA
tcagagaacaactaaaaacgaaagacgcacagatcactggcctacaggactacatcaaaacgcagtgcttacgca

SEQ ID NO: 875065 - DNA, 75 bp, synthetic construct
  source 1..75: mol_type = other DNA
attaaagctatcagatctgacattgccgatctgcgcactggcattgataacggtactatccggttgcgcgtcaac

SEQ ID NO: 875066 - DNA, 75 bp, synthetic construct
  source 1..75: mol_type = other DNA
tcgccgctatcgtttgtgtcgttgttgggcttgttgccgcgcttagtcactgccagtcagtgataaacacaatgc

SEQ ID NO: 875067 - DNA, 75 bp, synthetic construct
  source 1..75: mol_type = other DNA
gcgcaactggaaaaggccgacgcagactttttggtggagcgtgaagacgtggtcagtgacgaaggacgatttaac

SEQ ID NO: 875068 - DNA, 75 bp, synthetic construct
  source 1..75: mol_type = other DNA
atggctcaggttgccatttttaaacaaatattcaataaagtgcgaaataatttaaactatcactggttttattct

SEQ ID NO: 875069 - DNA, 75 bp, synthetic construct
  source 1..75: mol_type = other DNA
atggctcagattgccatttttaaacaaatattcgataaagtgcgaaataatttaaactatcactggttttattct

SEQ ID NO: 875070 - DNA, 75 bp, synthetic construct
  source 1..75: mol_type = other DNA
gctcagctcgaaaaagccgatccggattttatggcggagcgcgagaatgttgtcagcgacgaaggtcgatttgac

SEQ ID NO: 875071 - DNA, 75 bp, synthetic construct
  source 1..75: mol_type = other DNA
taaataacgttgattcatgtgtccctgatagtgaagaaattaaagtgcttatggcagaaatagggagtgtcaaat

SEQ ID NO: 875072 - DNA, 75 bp, synthetic construct
  source 1..75: mol_type = other DNA
tatctggcactctgctaaaccagaaaaccgcgcgaaagtgggcggtatcatgatctccgcggcgctgacctcgtt

SEQ ID NO: 875073 - DNA, 75 bp, synthetic construct
  source 1..75: mol_type = other DNA
tggctgccatctttactggcgttgtgctgtccttcatttggccgcctattggttctgcaatccagaccttctctc

SEQ ID NO: 875074 - DNA, 75 bp, synthetic construct
  source 1..75: mol_type = other DNA
cgtgagtatgttgccagttgcttccagacttatggctgcttctggggcgcagaacgtcaggtcgttgcaaccgca

SEQ ID NO: 875075 - DNA, 75 bp, synthetic construct
  source 1..75: mol_type = other DNA
tactgcgactaaaacggatacaccaattgaaaaaacgccgcagtctatttcggttgtgacaaatgaagagatgca

SEQ ID NO: 875076 - DNA, 75 bp, synthetic construct
  source 1..75: mol_type = other DNA
ggcaatggttacatcgcgccagcgcaaattagccgtgcttatgtacgttcagacgaagatttaaattcgtttact

SEQ ID NO: 875077 - DNA, 75 bp, synthetic construct
  source 1..75: mol_type = other DNA
aacggcaataaccgtgccatccgtctgccccgcgatctggattttgagggggtgagtgagctggagatcgtccgg

SEQ ID NO: 875078 - DNA, 75 bp, synthetic construct
  source 1..75: mol_type = other DNA
gaccactgttcgtgaaaactcttatacgccgactgaaggttatattgagcgcaatgatcatcagttcacctggcg

SEQ ID NO: 875079 - DNA, 75 bp, synthetic construct
  source 1..75: mol_type = other DNA
taagcgtctaccgactgatttcaatgaaggtgcatcgaataatacatactcccgtaaccagaaaatggtgggata

SEQ ID NO: 875080 - DNA, 75 bp, synthetic construct
  source 1..75: mol_type = other DNA
gtgaaaggcagtttcagtaaagtgctggcggaaccacgcctgctgaaactcaacttcggcattatgtgtctgcac

SEQ ID NO: 875081 - DNA, 75 bp, synthetic construct
  source 1..75: mol_type = other DNA
ttcaccccaacgtcgcgtcgcgcaaaatccgtaacggtgtagggattaataaacaaggtaacgcagtatttttgc

SEQ ID NO: 875082 - DNA, 75 bp, synthetic construct
  source 1..75: mol_type = other DNA
aattaatccacgcattcacccgaatgttgcctcgcgtaaaattcgtaacggtgtaggattaataaacaagggaac

SEQ ID NO: 875083 - DNA, 75 bp, synthetic construct
  source 1..75: mol_type = other DNA
atggcgcatcggctactcattggtaaaggaatgatcaccttgaatctcaaacggatttttctcaccctcacctta

SEQ ID NO: 875084 - DNA, 75 bp, synthetic construct
  source 1..75: mol_type = other DNA
ggcaattattcaggcgatcataaaatgctgtacatcacttgaaattcaagtctctgctatgggcgtggcaacacc

SEQ ID NO: 875085 - DNA, 75 bp, synthetic construct
  source 1..75: mol_type = other DNA
acgccctgaatgaaacctgtgaggcgcttgtccgggcaatgcatctgagcattctggtacaggaaaatccgctcg

SEQ ID NO: 875086 - DNA, 75 bp, synthetic construct
  source 1..75: mol_type = other DNA
gtgacagcacggccaccgcctaccggaaggcacatcatcacctgctgagtctgtatgcagagcatgagctggaac

SEQ ID NO: 875087 - DNA, 75 bp, synthetic construct
  source 1..75: mol_type = other DNA
atttgtcgatgataatcgagtgaaagtgaatagtgacggtaattttgtcaatgatttgtcgggcagacgtggaat

SEQ ID NO: 875088 - DNA, 75 bp, synthetic construct
  source 1..75: mol_type = other DNA
atggtaactggaacctgacgccgtatgcatcgttaacggggttaaccgctgacaaccccgaatatcatttatcca

SEQ ID NO: 875089 - DNA, 75 bp, synthetic construct
  source 1..75: mol_type = other DNA
gtggagccgccaacggcagttatcgcagcaacgggctgggcggtcacattgaaaccgggatgcgtatttaccgat

SEQ ID NO: 875090 - DNA, 75 bp, synthetic construct
  source 1..75: mol_type = other DNA
atttgtctgttactgatgatgtggttgttcctgctactgctactgctactgctactgttcttcttttttctgctg

SEQ ID NO: 875091 - DNA, 75 bp, synthetic construct
  source 1..75: mol_type = other DNA
gggcttctgtcttttcagaacggtcatttgtctgttactgatgatgttgctgttcctgctactgctactgctctt

SEQ ID NO: 875092 - DNA, 75 bp, synthetic construct
  source 1..75: mol_type = other DNA
tatccaatggcatggaatcgaaatcagtcgatacccgcagtatatatcgtgaactgggtgcaacgctgagttaca

SEQ ID NO: 875093 - DNA, 75 bp, synthetic construct
  source 1..75: mol_type = other DNA
aatctacacagcggatctcaaaagtaaggcgcttgcattcgcgatggcacacgcacttgagctcggtgataaaat

SEQ ID NO: 875094 - DNA, 75 bp, synthetic construct
  source 1..75: mol_type = other DNA
accacgcaacataaaatcggggcaacagcagccctgtcgggaatttacgacgcaatacatcgtgacggcaccgaa

SEQ ID NO: 875095 - DNA, 75 bp, synthetic construct
  source 1..75: mol_type = other DNA
actccattcattacacagatagttgtaagcgtcgtctgagtaccgtctggtcccgaatccaggatcctgtaactt

SEQ ID NO: 875096 - DNA, 75 bp, synthetic construct
  source 1..75: mol_type = other DNA
ctgatatcatggcggcgctgcgaaaacgcggtacatcgctggcggcggtttcccgcagggctgggctggcatctt

SEQ ID NO: 875097 - DNA, 75 bp, synthetic construct
  source 1..75: mol_type = other DNA
tttttattttctcagcaattgttggctttggttttactgctggagtgcagttttgtattgcgtggggaaaaatta

SEQ ID NO: 875098 - DNA, 75 bp, synthetic construct
  source 1..75: mol_type = other DNA
accagaacgttttgcttaacggtgctcagagcgatttggcgatatatgtggatacgcaacataaaatcggagcga

SEQ ID NO: 875099 - DNA, 75 bp, synthetic construct
  source 1..75: mol_type = other DNA
atccttgtgcgtatcctcactgacgggcgcaccacagacatcccgctggggcgttttctgcgggaatttacctgt

SEQ ID NO: 875100 - DNA, 75 bp, synthetic construct
  source 1..75: mol_type = other DNA
tactgtttaatggttctcattttttccagcttctggaaggtccggaagaacaggttaaaatgatatatcgggcta

SEQ ID NO: 875101 - DNA, 75 bp, synthetic construct
  source 1..75: mol_type = other DNA
tttggcgcaggttttgccggtttgttactcctgtcacgcttccagcctgacagaattaaaatcagtcaggaattg

SEQ ID NO: 875102 - DNA, 75 bp, synthetic construct
  source 1..75: mol_type = other DNA
cagtttattttccgcttgtcaatttgcttataaagatgcaaaaaataaagaggtgttcagtccatatatactagc

SEQ ID NO: 875103 - DNA, 75 bp, synthetic construct
  source 1..75: mol_type = other DNA
gatgcacatagcaacaggtatcgcgcaatgtatttccatcattggtattccggttggtattgcgaactttaaaat

SEQ ID NO: 875104 - DNA, 75 bp, synthetic construct
  source 1..75: mol_type = other DNA
atccttgtgcatatcctcgctgacgggcgcaccacagacatcccgctggggcgttttctgcgggaatttacctgt

SEQ ID NO: 875105 - DNA, 75 bp, synthetic construct
  source 1..75: mol_type = other DNA
ctgcctggaggaactggcgtttagccgccagctttgcgcgctttctggttacgacgagttgcatatttcccccgt

SEQ ID NO: 875106 - DNA, 75 bp, synthetic construct
  source 1..75: mol_type = other DNA
agttgggcaaaagtaacattctgctgattggcccgaccggctccggtaaaacgctgctggccgaaacgctggcgc

SEQ ID NO: 875107 - DNA, 75 bp, synthetic construct
  source 1..75: mol_type = other DNA
ttgggaagaaatgacctgcttattcgcaccttccctaatactcaggcacgacatattgctactttctttccggga

SEQ ID NO: 875108 - DNA, 75 bp, synthetic construct
  source 1..75: mol_type = other DNA
ctatgaggttcactacgaaatccgtgacaatgatatccatatcgtggatctctggcatacaaaagaagaacgata

SEQ ID NO: 875109 - DNA, 75 bp, synthetic construct
  source 1..75: mol_type = other DNA
ttcgcgacaacatccgcttcggtctggagtttgaaaaatcggcatctggtaagtacaacgtggataacgcggtga

SEQ ID NO: 875110 - DNA, 75 bp, synthetic construct
  source 1..75: mol_type = other DNA
ggagttatcgggaacgttaacgctgtattcccggccctctatcgcccaatgctggttggtgcccgcattaggtga

SEQ ID NO: 875111 - DNA, 75 bp, synthetic construct
  source 1..75: mol_type = other DNA
gcgaagtccgacaaagcaagcgaaggtgaactgctggcgcaggttgaaccggaagatctgatcaagtttggtctg

SEQ ID NO: 875112 - DNA, 75 bp, synthetic construct
  source 1..75: mol_type = other DNA
caaacaaggccaaaagtaatcgggtgaaacatggcatccgctttgaagatgcggtgttagtgtttgatgatccac

SEQ ID NO: 875113 - DNA, 75 bp, synthetic construct
  source 1..75: mol_type = other DNA
tcgagtacgttgacgatatgcgcgagaagctggaagccgcagagaagcgcaacgcaaaattacaaagagagaatg

SEQ ID NO: 875114 - DNA, 75 bp, synthetic construct
  source 1..75: mol_type = other DNA
ctcaggatgacctagaacgtatctatcgtttcgcccttcagtatagccgcaagcacgccgatgacattttggatc

SEQ ID NO: 875115 - DNA, 75 bp, synthetic construct
  source 1..75: mol_type = other DNA
acaacaccgttttttcatcgttgctggcccttcataaggggccaagattaccggatgactaataatgaatatact

SEQ ID NO: 875116 - DNA, 75 bp, synthetic construct
  source 1..75: mol_type = other DNA
aatggttggctgaaaacaactggaaaacactgtcatcagatgaactggagtttttttatcggggcggaaaacttc

SEQ ID NO: 875117 - DNA, 75 bp, synthetic construct
  source 1..75: mol_type = other DNA
taatcccaatttctcgattgaaggcggtgagattcgcgctcgtggtgtagaactggaagcaaaagcggcgctgtc

SEQ ID NO: 875118 - DNA, 75 bp, synthetic construct
  source 1..75: mol_type = other DNA
aagaagattttcggcaactgcaccaccatcgccacgaataataaatttgtggtgctgaaagcagtgaagctgggg

SEQ ID NO: 875119 - DNA, 75 bp, synthetic construct
  source 1..75: mol_type = other DNA
aagaagattttcggcaactgcaccactattgcgacgaataataaatttgtggtactgaaagcggtgaagctggga

SEQ ID NO: 875120 - DNA, 75 bp, synthetic construct
  source 1..75: mol_type = other DNA
atgagccacttagacaacggtttccgttcactgacactacaacgttttccggcgacggatgacgttaacccgcta

SEQ ID NO: 875121 - DNA, 75 bp, synthetic construct
  source 1..75: mol_type = other DNA
gattgcaggttgtaccggcagtctgactgacgtcgccttacgctatgccgggcaagaaaacactgccctactaag

SEQ ID NO: 875122 - DNA, 75 bp, synthetic construct
  source 1..75: mol_type = other DNA
atacagactattaaacacaagtaattttggcgtccctcaaaatagggttagaatatatataatagcctcattaga

SEQ ID NO: 875123 - DNA, 75 bp, synthetic construct
  source 1..75: mol_type = other DNA
cgtctcaacagggcgaactggactgtctttgcggtgcttattgcgtggttaacatgctgagctggctgtatgacg

SEQ ID NO: 875124 - DNA, 75 bp, synthetic construct
  source 1..75: mol_type = other DNA
tggcgctgcatgttaacaacctgttcgatcgtgaatacgtcgccagctgctttaacacctatggctgcttctggg

SEQ ID NO: 875125 - DNA, 75 bp, synthetic construct
  source 1..75: mol_type = other DNA
tggtcagcaagcgcccaaccaccgaaccgctgaaagaaatccaatttaaagcgggcacagacagcctgttccaga

SEQ ID NO: 875126 - DNA, 75 bp, synthetic construct
  source 1..75: mol_type = other DNA
ccagttgcagagcaagtttgccactggcgatatcgaccacaccctgctgaccggtgtcgactttatgcgtatgcg

SEQ ID NO: 875127 - DNA, 75 bp, synthetic construct
  source 1..75: mol_type = other DNA
ttcagtttaaagccggtactgacagcctgttccagactggttttgactttagcgatgcgctggatgatgacggcg

SEQ ID NO: 875128 - DNA, 75 bp, synthetic construct
  source 1..75: mol_type = other DNA
tggagcgcgctgaaatcatgcgtggcccggtttccgtgctgtatgggaaaagcagcccaggtggcctgttgaaca

SEQ ID NO: 875129 - DNA, 75 bp, synthetic construct
  source 1..75: mol_type = other DNA
aagtgggaagttatacggtcgtggatgcgttagtgcgttatgatctggcgcgagtcggcatggcgggctccaacg

SEQ ID NO: 875130 - DNA, 75 bp, synthetic construct
  source 1..75: mol_type = other DNA
gcacaacaactcggcatcggcaccgtctatcaggaagtcaacctgctacccaatatgtcggtcgctgataatcta

SEQ ID NO: 875131 - DNA, 75 bp, synthetic construct
  source 1..75: mol_type = other DNA
tgtttggcctgatgcggcagttgcgcgatcgcggcgtcagcctgatcttcgttacgcactttctcgatcaggttt

SEQ ID NO: 875132 - DNA, 75 bp, synthetic construct
  source 1..75: mol_type = other DNA
cggctggctgcgaccgatttcacgcaaagaacagcaggaaatagcagaacgatttatccgccagctcggtattcg

SEQ ID NO: 875133 - DNA, 75 bp, synthetic construct
  source 1..75: mol_type = other DNA
gtttctccctcgacgtgcgcgaaccgctcaaccgtttttcggtggcgatgcagcaaatcgtcgctatttgccggg

SEQ ID NO: 875134 - DNA, 75 bp, synthetic construct
  source 1..75: mol_type = other DNA
actgacccgaccgcaatttctgattctcgacgagccaacgcgcggaattgatgttggtgcccacgccgagatcat

SEQ ID NO: 875135 - DNA, 75 bp, synthetic construct
  source 1..75: mol_type = other DNA
aaagaacagcaagagattgccgaacgctttatccgccagcttggcattcgcacaccttccaccgaacaaccgatt

SEQ ID NO: 875136 - DNA, 75 bp, synthetic construct
  source 1..75: mol_type = other DNA
tacggcgcataccctatgaccctgacctgtacatcccggaaaacacctcgatcccctgttcactggatcgccgct

SEQ ID NO: 875137 - DNA, 75 bp, synthetic construct
  source 1..75: mol_type = other DNA
atgactgacgaaaataaatccccctatacggaagaagaaaagccagtgacgacacctgatcaggatgatattgct

SEQ ID NO: 875138 - DNA, 75 bp, synthetic construct
  source 1..75: mol_type = other DNA
gccctgattggcctgacatggggcggtaactgggtatatcaaaacttcctgacgcaagaagatggagagaaaaca

SEQ ID NO: 875139 - DNA, 75 bp, synthetic construct
  source 1..75: mol_type = other DNA
gcagcaaatcgtcgccatttgccgggctatcgatctctctgccaaagtgctgatcctcgatgaacccaccgccag

SEQ ID NO: 875140 - DNA, 75 bp, synthetic construct
  source 1..75: mol_type = other DNA
aaccgcaatttatctggattatcgccgcagttcgccgcgattgcccgacaattaccgccaaaattcatcatattg

SEQ ID NO: 875141 - DNA, 75 bp, synthetic construct
  source 1..75: mol_type = other DNA
ggcgagatcatcaacctgatcacaggcgaggatattgatttttcaaacatttacacactgaaaatcaaacaataa

SEQ ID NO: 875142 - DNA, 75 bp, synthetic construct
  source 1..75: mol_type = other DNA
cggtcagctaacattcttcggcatcacgccggacgcattctgctactggccgctgcgaacttgcatggtagaata

SEQ ID NO: 875143 - DNA, 75 bp, synthetic construct
  source 1..75: mol_type = other DNA
cgccaagaaagatgcgatggtgccgatgggcggcctgctgtgcgtgaaagacgacagcttcttcgatgtctatac

SEQ ID NO: 875144 - DNA, 75 bp, synthetic construct
  source 1..75: mol_type = other DNA
ggcagccgcagctactatgcgttagccgagtcagtaaaaaatatctttggttatcaatacactattccgactcac

SEQ ID NO: 875145 - DNA, 75 bp, synthetic construct
  source 1..75: mol_type = other DNA
ggcgatgaaattggtgagcaccaggggctgatgtatcacaccctcggtcagcgtaaaggtctgggtatcggtggc

SEQ ID NO: 875146 - DNA, 75 bp, synthetic construct
  source 1..75: mol_type = other DNA
tgacgctttatatcagctgtttaccgcgctgaatgtttttgggcgagtgtatctggcgcatgagggcattaacgc

SEQ ID NO: 875147 - DNA, 75 bp, synthetic construct
  source 1..75: mol_type = other DNA
acatgaaagcgatgtacagcattgcgaagaaatatgacattccagtggtgatggactccgcacgctttgccgaaa

SEQ ID NO: 875148 - DNA, 75 bp, synthetic construct
  source 1..75: mol_type = other DNA
gtattgcgcaggtgcagtatctggtcgatggtctggaagagattggtgttgtgtgtcagcaggcgggcggtcacg

SEQ ID NO: 875149 - DNA, 75 bp, synthetic construct
  source 1..75: mol_type = other DNA
tgaagctgaacacttctggcaaggaaaagcggatcatgcgccgcatgtcgcaattgaacgcctggaaatggacat

SEQ ID NO: 875150 - DNA, 75 bp, synthetic construct
  source 1..75: mol_type = other DNA
taaaaattgatttagtgcttacggaagatatcataccagaagataagttactggaaattattcaatctgatgata

SEQ ID NO: 875151 - DNA, 75 bp, synthetic construct
  source 1..75: mol_type = other DNA
caacaatatacagcttattaatgatgcaaacacaccgcataataaaattataatagaaaatgaatatattagaat

SEQ ID NO: 875152 - DNA, 75 bp, synthetic construct
  source 1..75: mol_type = other DNA
gcgtggtctggacagcaataaagaccagagctacttcctttatacgctcagccatgagcagattgcgcaaagcct

SEQ ID NO: 875153 - DNA, 75 bp, synthetic construct
  source 1..75: mol_type = other DNA
aagaatagaacgtcgctgccgtgatgttatgcggataatgctaccgctggtgaaggagctggcgaaggcgtcttg

SEQ ID NO: 875154 - DNA, 75 bp, synthetic construct
  source 1..75: mol_type = other DNA
acagttatgcagtgctggggctgggcgatgtggcgatggcgcgcaaagattaccccgccgctgaacgctattatc

SEQ ID NO: 875155 - DNA, 75 bp, synthetic construct
  source 1..75: mol_type = other DNA
cgcgatggaactgcctgaccttgtggaactggccggtaaggtggtcggttttttgtcgccgaactcggtgcagtg

SEQ ID NO: 875156 - DNA, 75 bp, synthetic construct
  source 1..75: mol_type = other DNA
tacattttgaatggactaacaaaaacagcatcacattatcaaataaccagaccagtttcaccagtggttattcag

SEQ ID NO: 875157 - DNA, 75 bp, synthetic construct
  source 1..75: mol_type = other DNA
gctcgcgtgaaactgtgggtaataacgcttcattccattgccataacggcaatggttacagttctgatatcgatc

SEQ ID NO: 875158 - DNA, 75 bp, synthetic construct
  source 1..75: mol_type = other DNA
gtggcacgttgattgccagtacatccctacagaaaacctgattgagccagattgcactgcgtatgtggcctacaa

SEQ ID NO: 875159 - DNA, 75 bp, synthetic construct
  source 1..75: mol_type = other DNA
tacattttgaatggaccaataaaaacaacattacgttgtcaaataatcagaccagtttcaccagtggttattcgg

SEQ ID NO: 875160 - DNA, 75 bp, synthetic construct
  source 1..75: mol_type = other DNA
agtaatgcaaaagtgaatgtttctgcggggggcggcggttcagtgatgattaatggtgttgcgacattatccagt

SEQ ID NO: 875161 - DNA, 75 bp, synthetic construct
  source 1..75: mol_type = other DNA
aattttaatgattcgtcatgcgtaagtacaaatactatcacccctatgagcccgtcggatattattgttggactt

SEQ ID NO: 875162 - DNA, 75 bp, synthetic construct
  source 1..75: mol_type = other DNA
tccaacatggagtgcatggagagttattacaagcgggactcgaccattaagcacgtcaattgacctgaattcttt

SEQ ID NO: 875163 - DNA, 75 bp, synthetic construct
  source 1..75: mol_type = other DNA
tgacgccacgctgacagaaaaaggttttactcagttaagtagcgcaacaaacagcaccagtgaagagctggcggc

SEQ ID NO: 875164 - DNA, 75 bp, synthetic construct
  source 1..75: mol_type = other DNA
ggcagccgccactgtccccggcgggaaaaaagtaactctgtctgcaatggccgtgggtgacggtaatggcaaatt

SEQ ID NO: 875165 - DNA, 75 bp, synthetic construct
  source 1..75: mol_type = other DNA
ttattgttcaggataccggctcaaactctgccgataacattggtggtgtatattacagaccggttcagaaataca

SEQ ID NO: 875166 - DNA, 75 bp, synthetic construct
  source 1..75: mol_type = other DNA
tcaggaaaaacaggagacaccgttgcgaatgataaagccgttggatggaactggagtagcggagcctataacgca

SEQ ID NO: 875167 - DNA, 75 bp, synthetic construct
  source 1..75: mol_type = other DNA
ggaagcattcaaagtaataaaaccataaatattacggggcgtgttaatccttcggattacggtaactttgattcc

SEQ ID NO: 875168 - DNA, 75 bp, synthetic construct
  source 1..75: mol_type = other DNA
aaggcacgaagtggcaaggtccgctggaattgtccgcactgcggaaaaatcagttggcagtacaacccatatgat

SEQ ID NO: 875169 - DNA, 75 bp, synthetic construct
  source 1..75: mol_type = other DNA
tctggcgctcgctggttcgctgataaacggaaaaaagatcctgacttccaggtgaaggcggcgaatagcgcaaaa

SEQ ID NO: 875170 - DNA, 75 bp, synthetic construct
  source 1..75: mol_type = other DNA
tatgaaggcgttaaaatcattcatccaaatattgaatacgttaacgtatggattgacagccatttcctggtgatg

SEQ ID NO: 875171 - DNA, 75 bp, synthetic construct
  source 1..75: mol_type = other DNA
catcgggcattatctgaacataaaacactatcagtaagttggagtcattaccgcgaatttgaatatatacaccag

SEQ ID NO: 875172 - DNA, 75 bp, synthetic construct
  source 1..75: mol_type = other DNA
atgaacaaagaaaacgtcattaccctggacaatccggtcaaacgtggtgagcaggttatcgaacaggtcacgctg

SEQ ID NO: 875173 - DNA, 75 bp, synthetic construct
  source 1..75: mol_type = other DNA
aagggttgaagccgtacttcacgataacggcttacagtattatcgcttcggtaggattttacctttaggtcaaat

SEQ ID NO: 875174 - DNA, 75 bp, synthetic construct
  source 1..75: mol_type = other DNA
agcagaaggcggcatacaacgcaaaactggtagaaacgcttgctgacatgtaccacgtcccgtggatggtggaaa

SEQ ID NO: 875175 - DNA, 75 bp, synthetic construct
  source 1..75: mol_type = other DNA
gagaatgatttcttgagagaaaagattgaagcagtaaaaaacaaaatgaattctcacgaactttattttgaaaaa

SEQ ID NO: 875176 - DNA, 75 bp, synthetic construct
  source 1..75: mol_type = other DNA
tacaaaaataaatattctttatagcaataagactgagcataatatttttataaaggatttattctccttcgcagt

SEQ ID NO: 875177 - DNA, 75 bp, synthetic construct
  source 1..75: mol_type = other DNA
catgagcaatgaggatctgcttgctgctgccaataccgcccaggcggcaggaaatggtgcggctcgcgatcgctg

SEQ ID NO: 875178 - DNA, 75 bp, synthetic construct
  source 1..75: mol_type = other DNA
agcctacggccagtttgagccgcctgcgctgtacgaccacgtggtgaaaatggtcgagatgggcaaatacgataa

SEQ ID NO: 875179 - DNA, 75 bp, synthetic construct
  source 1..75: mol_type = other DNA
catggtacaaaaaatggacgatggggagaatgatctcatttaacacatcttcgccttacgccaatgctaatggaa

SEQ ID NO: 875180 - DNA, 75 bp, synthetic construct
  source 1..75: mol_type = other DNA
ttggccgtatccgtgcgctgggcagtgagatccgcaatggtgaagccacccataccggagttattccattcctga

SEQ ID NO: 875181 - DNA, 75 bp, synthetic construct
  source 1..75: mol_type = other DNA
atttcgatattagaagcaggaatcaccaaaattgaatccggtgatttccaggtaaacgagtatcggcgtcattaa

SEQ ID NO: 875182 - DNA, 75 bp, synthetic construct
  source 1..75: mol_type = other DNA
tacaaagccactgttacaggcggcggagagggtatcgcaacgctgatccctgtattgaatggtgttcatcaagct

SEQ ID NO: 875183 - DNA, 75 bp, synthetic construct
  source 1..75: mol_type = other DNA
ctccagtcgttttgaccagcaataaagtcggtacatatacggtgactgcatctttccataacggcgtaacaatac

SEQ ID NO: 875184 - DNA, 75 bp, synthetic construct
  source 1..75: mol_type = other DNA
atgtggttggctttatgggcgatggtattaatgatgcgcccgcttgcgcgctgcggatatcggcatttctgtgga

SEQ ID NO: 875185 - DNA, 75 bp, synthetic construct
  source 1..75: mol_type = other DNA
cgaaaatggctggctggagatcccgatcgaccagctggtgcccggcgatattataaaactggcggcgggggatat

SEQ ID NO: 875186 - DNA, 75 bp, synthetic construct
  source 1..75: mol_type = other DNA
atatttctattatccccgattccaggcaagcctggaaagtggaacataaattgccagatattctatctgttaact

SEQ ID NO: 875187 - DNA, 75 bp, synthetic construct
  source 1..75: mol_type = other DNA
gtggacgaatatcccatcatcgacctgtcccacctgctgccggcggcccagggcttggcccgtcttccggcggac

SEQ ID NO: 875188 - DNA, 75 bp, synthetic construct
  source 1..75: mol_type = other DNA
aatgcgccactcatatctatctggcaaacccgaaagccaaacgtagtgaatatgttgatggtttgcaggtcaggg

SEQ ID NO: 875189 - DNA, 75 bp, synthetic construct
  source 1..75: mol_type = other DNA
cgatgattaccagaacagcctgatttcagatgcggttgaacgtcttatgcaacggtcagatcgctcttatcctgt

SEQ ID NO: 875190 - DNA, 75 bp, synthetic construct
  source 1..75: mol_type = other DNA
aggcaatccgatcaaagtttctgaagggatggaatttgtgcaatcaggtactaacgtgccctatataaaaattag

SEQ ID NO: 875191 - DNA, 75 bp, synthetic construct
  source 1..75: mol_type = other DNA
cgtcgccgtggagagcggcgaggaagcgatcaaccatcgcacactcagcatggcctgtcgacaacctctcgcgca

SEQ ID NO: 875192 - DNA, 75 bp, synthetic construct
  source 1..75: mol_type = other DNA
ttggaaaatcgcttcgagccgatgatgctgccggtatgggaggccaacgacgattgctgctcactgctggccagc

SEQ ID NO: 875193 - DNA, 75 bp, synthetic construct
  source 1..75: mol_type = other DNA
cgatgattgttacctcgacgctggcgcgtggcgcagtcaagctgtcgaaacagaaagtgatcgtcaaacatctgg

SEQ ID NO: 875194 - DNA, 75 bp, synthetic construct
  source 1..75: mol_type = other DNA
tcgctggcagaggatagtaacggtacgaaaggctatgtttttgttggagagtcgctggactacctgttgaccaac

SEQ ID NO: 875195 - DNA, 75 bp, synthetic construct
  source 1..75: mol_type = other DNA
atgagcttgaattttaagggattttttaaggctgccagtgtatgttctttggcattcgtgttgaccggatgtatc

SEQ ID NO: 875196 - DNA, 75 bp, synthetic construct
  source 1..75: mol_type = other DNA
atcgctggactacctgttgaccaccggcggcggtgaggtggttaaaatgctgaacgatccggcaattcatggcga

SEQ ID NO: 875197 - DNA, 75 bp, synthetic construct
  source 1..75: mol_type = other DNA
agacatccgaaacgaacgcgaaagcgtcggaaacccgtgcagaatcctcaaaaacggctgccgcatcgtccgcca

SEQ ID NO: 875198 - DNA, 75 bp, synthetic construct
  source 1..75: mol_type = other DNA
cttcaacagccacaacgaaggctggcgaagccactgaacaggccactgcagctgcgaggtctgcttccgcagcga

SEQ ID NO: 875199 - DNA, 75 bp, synthetic construct
  source 1..75: mol_type = other DNA
gccgctgcatcatcagcccgtgaagcatccattaaggctgaggaggcagccggtagtgccaccgccgccggaaaa

SEQ ID NO: 875200 - DNA, 75 bp, synthetic construct
  source 1..75: mol_type = other DNA
gcggcgaaagtgtgccatgaagtggggctggacgcgggagaagtggttactggtagtgatattgaaacgctaact

SEQ ID NO: 875201 - DNA, 75 bp, synthetic construct
  source 1..75: mol_type = other DNA
ccagtcgttggcagaaagtggatgaaattccgtttgatttcgagcgccgccggatgtcggtagtagtggcagaaa

SEQ ID NO: 875202 - DNA, 75 bp, synthetic construct
  source 1..75: mol_type = other DNA
gttactgatacgctgaatcgtcaggggctgcgcgtggttgcggtggcgacgaaatatctgccagcgcgtgaagga

SEQ ID NO: 875203 - DNA, 75 bp, synthetic construct
  source 1..75: mol_type = other DNA
cacacagccgggcgtctggcaggggcaggcgccgggtatgcctatggtggctccctgtatgcccgcacccaggtc

SEQ ID NO: 875204 - DNA, 75 bp, synthetic construct
  source 1..75: mol_type = other DNA
aagcattgaccgacaattatcttcaacctcaaaaatcagaactacattatgaaaaaaaacgacgatttaatcact

SEQ ID NO: 875205 - DNA, 75 bp, synthetic construct
  source 1..75: mol_type = other DNA
ctgtatcgctcgccggatcgatttcagtttctcgccgggctgaatcagttgctgccacaagagctggatgggtag

SEQ ID NO: 875206 - DNA, 75 bp, synthetic construct
  source 1..75: mol_type = other DNA
agtaccctcagtagtcttaattttgccgaaatggaaagttttcataatttcttttcaggaaaagaaaaaggaaat

SEQ ID NO: 875207 - DNA, 75 bp, synthetic construct
  source 1..75: mol_type = other DNA
ccttcagtagctgagcaggagggacaactgatggagatggaagccacgggagcacctcaaaaacaccatcataca

SEQ ID NO: 875208 - DNA, 75 bp, synthetic construct
  source 1..75: mol_type = other DNA
caccttccgatgcgacagataaatctttcactatcgagtcagatcatccggacattgtgagcgtagatggcaaaa

SEQ ID NO: 875209 - DNA, 75 bp, synthetic construct
  source 1..75: mol_type = other DNA
caactccccggcaaaaggcaccagctttactaacgaagttattctgattgtttccggtgactccggtgctgtgcg

SEQ ID NO: 875210 - DNA, 75 bp, synthetic construct
  source 1..75: mol_type = other DNA
gtttcattcccgtcgtcttgggttatatgaagaaaataatatagtttattcagaacagcttacgctgttccagaa

SEQ ID NO: 875211 - DNA, 75 bp, synthetic construct
  source 1..75: mol_type = other DNA
gccggagtcttttccacctgagaggaaattaaagaagttaactacagtatttttcgacaaagatcgggcagcgga

SEQ ID NO: 875212 - DNA, 75 bp, synthetic construct
  source 1..75: mol_type = other DNA
cagcaagatcccattcgtcaacagagtgatgaacgattattacgaatcgctttcggcggctgagtattttgaaaa

SEQ ID NO: 875213 - DNA, 75 bp, synthetic construct
  source 1..75: mol_type = other DNA
gtgtacttcttattgtaaggtctgcatctaaatacgacttcacattctttgtgaagaagaaaaagggaagcaaga

SEQ ID NO: 875214 - DNA, 75 bp, synthetic construct
  source 1..75: mol_type = other DNA
tcagggggtttttctggcaggtgcaatactggcggcggtgtggctggcggtcgccagtacgatgaaagaaccgcc

SEQ ID NO: 875215 - DNA, 75 bp, synthetic construct
  source 1..75: mol_type = other DNA
cgctgccgttatggcgctgctttccgatctcacgcgcgaacaaaaccgcaccaaagcgatggcgtttatcggcgt

SEQ ID NO: 875216 - DNA, 75 bp, synthetic construct
  source 1..75: mol_type = other DNA
atgaggaaacactgggatgtattgctttctctgatatcaaaagcaattaataatgatgaaaccattgttatgcat

SEQ ID NO: 875217 - DNA, 75 bp, synthetic construct
  source 1..75: mol_type = other DNA
gcgtacttcttatcgtaaggtctgtatctaaatacaacttcacattctttacgaaaaaaaaaggcagtaaagaat

SEQ ID NO: 875218 - DNA, 75 bp, synthetic construct
  source 1..75: mol_type = other DNA
ccagtggttacatctctttcggtaaaagtcaccagaccctgattgtctacgctgacacgccggaacgcctggtga

SEQ ID NO: 875219 - DNA, 75 bp, synthetic construct
  source 1..75: mol_type = other DNA
gctcattgatcctcttaggtggcaacgatgtttccgacgtgaaacgcggtattgaagttgccctgaaagaactcg

SEQ ID NO: 875220 - DNA, 75 bp, synthetic construct
  source 1..75: mol_type = other DNA
aagccggacatctggaactgcaatataccgcccgcgccagctatgcactggaaaaagcgtttggcgcaccactgg

SEQ ID NO: 875221 - DNA, 75 bp, synthetic construct
  source 1..75: mol_type = other DNA
tcgccagaagtccccgtctggccgctacccgcgaagaagatatgtgtagtggggataagcgggctgatggatttc

SEQ ID NO: 875222 - DNA, 75 bp, synthetic construct
  source 1..75: mol_type = other DNA
tgatgattaccagaaccgcctgatttctgatgccgttgagcgcctgatgcagaggtcaaaccgctcttatccgat

SEQ ID NO: 875223 - DNA, 75 bp, synthetic construct
  source 1..75: mol_type = other DNA
agttctatcagcagtctgaactttgccgaaatggaaagcttccataatttctttacgggcaaggagaaaggaaat

SEQ ID NO: 875224 - DNA, 75 bp, synthetic construct
  source 1..75: mol_type = other DNA
tcgacaaactcgaaatgaccgatgatgccgctaaatccttgctcgctgatttgaaagttggtctcgatatggtct

SEQ ID NO: 875225 - DNA, 75 bp, synthetic construct
  source 1..75: mol_type = other DNA
tatgtggacgagctgcaagtcagagagctttattttgacaaaattaaagccattgacccgctctctcgtcagttc

SEQ ID NO: 875226 - DNA, 75 bp, synthetic construct
  source 1..75: mol_type = other DNA
gagcctgatgatactgaaacccggcggcatgggcttaaagcacgcctgaatgcctgggtgcagggaggggaattt

SEQ ID NO: 875227 - DNA, 75 bp, synthetic construct
  source 1..75: mol_type = other DNA
cagcttattttgctcaactaccaggaaattatacgcttcgccctcgtctgagtaccctcagtagtcttaattttg

SEQ ID NO: 875228 - DNA, 75 bp, synthetic construct
  source 1..75: mol_type = other DNA
ctggatgtcttacgcaataacgccaccgaatttcgtgcagtgaatattgcccgtttccttgataacgaagaaaac

SEQ ID NO: 875229 - DNA, 75 bp, synthetic construct
  source 1..75: mol_type = other DNA
atgtggttggctttatgggcgatggtattaatgatgcgcccgccttacgcgctgcggatatcggcatttctgtgg

SEQ ID NO: 875230 - DNA, 75 bp, synthetic construct
  source 1..75: mol_type = other DNA
ggctgcgcgtggttgcggtggcgacgaaatacctgccagcgcgtgaaggagattaccagcgggcggatgaatccg

SEQ ID NO: 875231 - DNA, 75 bp, synthetic construct
  source 1..75: mol_type = other DNA
ttgaagccagagcattccctatcaagatatttgctgaggagggcttgaacgtaattgttccaacggctgattatg

SEQ ID NO: 875232 - DNA, 75 bp, synthetic construct
  source 1..75: mol_type = other DNA
gctcagcagtgcgactaacagcacttccgagtcactggcggcaacgccaaaagccgttaaggccgcgtatgacct

SEQ ID NO: 875233 - DNA, 75 bp, synthetic construct
  source 1..75: mol_type = other DNA
tgggtaggtaaatcatcttcagaaggaaaccatacacactcactgtccggcacagcagcatctgcgggtgcacac

SEQ ID NO: 875234 - DNA, 75 bp, synthetic construct
  source 1..75: mol_type = other DNA
accagcaccgtatcatgcaagccgggtaccattaaggtttccagaagcctccttcagaatggcattaatagcgtt

SEQ ID NO: 875235 - DNA, 75 bp, synthetic construct
  source 1..75: mol_type = other DNA
ggtaaggcgctttcagcggatataacactgacgccgaaagatattggtacgcttaactcaacaacaatgtcattc

SEQ ID NO: 875236 - DNA, 75 bp, synthetic construct
  source 1..75: mol_type = other DNA
ctcctgaaacgggcggattctggatccgggaaattggtgtatttgatgagcacggcgatttgatcgcggttggca

SEQ ID NO: 875237 - DNA, 75 bp, synthetic construct
  source 1..75: mol_type = other DNA
gtttctggtgttgagtttgatggttccaaagatattactttaaccgccgcgcatgtggctgcttttgccagaagg

SEQ ID NO: 875238 - DNA, 75 bp, synthetic construct
  source 1..75: mol_type = other DNA
agcgccagtgcatccagtacggatttggggacgaaaaccacatcgtcgtttgattacggcactaaatccacgaat

SEQ ID NO: 875239 - DNA, 75 bp, synthetic construct
  source 1..75: mol_type = other DNA
catacccatagtttaagtggcagcacgaatgcagctggtaatcacagccatagagatggccgtcgatttaacccc

SEQ ID NO: 875240 - DNA, 75 bp, synthetic construct
  source 1..75: mol_type = other DNA
catcctggacgcaacacatcagaaccgcattattgcagagctggttattcctcctgaaacgggcggattctggat

SEQ ID NO: 875241 - DNA, 75 bp, synthetic construct
  source 1..75: mol_type = other DNA
ctccagaaacgggcggattctggatcagggaaattggtgtgtttgatgagcacggcgatttaatcgcggtgggca

SEQ ID NO: 875242 - DNA, 75 bp, synthetic construct
  source 1..75: mol_type = other DNA
gtggtctgggacagtcgctatcctcagataagccgaagctggcaggctaactggccgaatcttgccacgttcttc

SEQ ID NO: 875243 - DNA, 75 bp, synthetic construct
  source 1..75: mol_type = other DNA
aaggattaacctcaggatcgaaatacgggacagctgttggcatcatcatgtttatgctggtgattggcggcgcgt

SEQ ID NO: 875244 - DNA, 75 bp, synthetic construct
  source 1..75: mol_type = other DNA
atggcgacgctcggtgtttgccgggtagatttccgtaactggctgaaagtgggtgcaacactgcttggactgctg

SEQ ID NO: 875245 - DNA, 75 bp, synthetic construct
  source 1..75: mol_type = other DNA
tgagccgctttattatcgaattcggtgaccgcttggacggtcacttcggagaaaaggcatttacacagaatcgtg

SEQ ID NO: 875246 - DNA, 75 bp, synthetic construct
  source 1..75: mol_type = other DNA
ggcgttctaccatccatttaaagtgcgattttatgaatactattcacccagaggcattccggatggtgtttccgc

SEQ ID NO: 875247 - DNA, 75 bp, synthetic construct
  source 1..75: mol_type = other DNA
ccacactgaaatggtttacaggcagcatcaggttcttgaggcactgcacaacgctggaataaacgtcaccgaagc

SEQ ID NO: 875248 - DNA, 75 bp, synthetic construct
  source 1..75: mol_type = other DNA
tggtgattggcatcatcggcgttgccttccgccttaacggtatgaccgttaacaccatggcctcgtcatttaccg

SEQ ID NO: 875249 - DNA, 75 bp, synthetic construct
  source 1..75: mol_type = other DNA
gcctgtacagtactggttgacggaacggcaatcgacagttgtttatacctggccgcatgggctgaaggaaaagag

SEQ ID NO: 875250 - DNA, 75 bp, synthetic construct
  source 1..75: mol_type = other DNA
tcgaatgcaccattaacgggataccttttcagcttcacgccgcaccaggcacgccgctctcggaattactccgcg

SEQ ID NO: 875251 - DNA, 75 bp, synthetic construct
  source 1..75: mol_type = other DNA
ttcttcgcttatccaacggacatccgcaaagtgatctatacgacgaatgccatcgagtcgctaaacagcgtgatc

SEQ ID NO: 875252 - DNA, 75 bp, synthetic construct
  source 1..75: mol_type = other DNA
ggacaatgccgttaagggactggcgaatggcaatgagccgctttattatcgagtttggtgaccgtcttgacggtc

SEQ ID NO: 875253 - DNA, 75 bp, synthetic construct
  source 1..75: mol_type = other DNA
tcgaatgtaccattaacgggatgccttttcagcttcacaccgcgccaggcatgccgctctcggaactacttcgcg

SEQ ID NO: 875254 - DNA, 75 bp, synthetic construct
  source 1..75: mol_type = other DNA
ttttcagctccgcgccgcgccgggtatgccgctttcagaactgctccgtgaacaaggattacttagcgtcaaaca

SEQ ID NO: 875255 - DNA, 75 bp, synthetic construct
  source 1..75: mol_type = other DNA
acgacagcacagaaagggatagttcagctcagcagcgcgaccaacagcacatctgaaatgctggcggcaacgcca

SEQ ID NO: 875256 - DNA, 75 bp, synthetic construct
  source 1..75: mol_type = other DNA
tgcgtctgcttcaaaagatgaggcgaccagacaggcgtcagcagcgaggggcagcgccacgacggcatccacgaa

SEQ ID NO: 875257 - DNA, 75 bp, synthetic construct
  source 1..75: mol_type = other DNA
cgaagccgctgtacaggccagcgcagcagcgaggtcagcttccgcagcgaagacatccgaaacgaacgcgaaagc

SEQ ID NO: 875258 - DNA, 75 bp, synthetic construct
  source 1..75: mol_type = other DNA
aagtctgaatccgaacttacggtggacgccagcataaccgcaaaacccttttttgaacgttatggttttcagaca

SEQ ID NO: 875259 - DNA, 75 bp, synthetic construct
  source 1..75: mol_type = other DNA
gcactgggtatcggaacatccagtgctcttggcggtaattcgattgtattgggtgataatgacacgggctttaaa

SEQ ID NO: 875260 - DNA, 75 bp, synthetic construct
  source 1..75: mol_type = other DNA
accagacaggcgtcagcagcaaagggcagcgccacgacggcatccacgaaggcgacagaggcagctggcagtgcg

SEQ ID NO: 875261 - DNA, 75 bp, synthetic construct
  source 1..75: mol_type = other DNA
aacagcacatctgaaacgcttgctgcgacaccgaaagcagtgaaagcagctaatgacaatgcgaatggtcgggta

SEQ ID NO: 875262 - DNA, 75 bp, synthetic construct
  source 1..75: mol_type = other DNA
gtgacggctatggctttgaagcggactgggagcgtctgttcacgacaacaggcgggaccctgaatggtgctgtgg

SEQ ID NO: 875263 - DNA, 75 bp, synthetic construct
  source 1..75: mol_type = other DNA
atccgtcaggcgtgatccctgatatgcgtggctggacgattaagggcaagcccgccagtggtcgtgccgtattgt

SEQ ID NO: 875264 - DNA, 75 bp, synthetic construct
  source 1..75: mol_type = other DNA
ccggacaggccgcgtcgtcggctcagtcagcatcttccagcgcaggaacggcatcaacaaaggccagtgaagcat

SEQ ID NO: 875265 - DNA, 75 bp, synthetic construct
  source 1..75: mol_type = other DNA
ccgtcaggcgtgatccctgatatgcgtggctggacgattaagggcaagcccgccagtggtcgtgccgtattgtct

SEQ ID NO: 875266 - DNA, 75 bp, synthetic construct
  source 1..75: mol_type = other DNA
gaggcactgcgccgttttgaagtgatggtggaagaggtggcgcgtaacgcgtccgcagtggcacagaacacggca

SEQ ID NO: 875267 - DNA, 75 bp, synthetic construct
  source 1..75: mol_type = other DNA
ttcagaccatgaagaaaggcgtgatgtatgaaaaatcaggccatgtaatcacggggcttggtattatcggtgaag

SEQ ID NO: 875268 - DNA, 75 bp, synthetic construct
  source 1..75: mol_type = other DNA
caggcctcagccagtgctagcgccgccggaaaatcggcagaaagcgctgcatcgtccgcttcaatagccacaacg

SEQ ID NO: 875269 - DNA, 75 bp, synthetic construct
  source 1..75: mol_type = other DNA
aataacaccggggcgcatacgcacagtctgagtggctctagcctggtatgcttcgatacagcaggagccgaatgg

SEQ ID NO: 875270 - DNA, 75 bp, synthetic construct
  source 1..75: mol_type = other DNA
gcggatatccctggcaaagatacctttacgaaaaatattggtgcctgccgtgccttcggtgggtcagtaagcaca

SEQ ID NO: 875271 - DNA, 75 bp, synthetic construct
  source 1..75: mol_type = other DNA
atctgcatacccgaaacttgcagccgcttatccgtcaggcgtgatccctgatatgcgtggctggacgattaaggg

SEQ ID NO: 875272 - DNA, 75 bp, synthetic construct
  source 1..75: mol_type = other DNA
acgtggggtcacctcaacaggcaggtatatctgaacttgttttgcgtgcaggtaatggtaatccgaaggggatta

SEQ ID NO: 875273 - DNA, 75 bp, synthetic construct
  source 1..75: mol_type = other DNA
gtgcggctaacgctgcgcgcattgcacgcctgtcggcaaataacccgctcggcttctgggtcagctccgcaatgg

SEQ ID NO: 875274 - DNA, 75 bp, synthetic construct
  source 1..75: mol_type = other DNA
gcggatatccctggcaaagacacctttacgaaaaatattggtgcctgccgtgcctttggtgggtcagtaagcaca

SEQ ID NO: 875275 - DNA, 75 bp, synthetic construct
  source 1..75: mol_type = other DNA
caagccgtccacatgccgagcaatggcggtcagacacgattaagggtttatcgctggcagaagatagtaacggta

SEQ ID NO: 875276 - DNA, 75 bp, synthetic construct
  source 1..75: mol_type = other DNA
ctgttgcgattggctcacatggacacaccatcaccgttaacgctgctggtaacgcggaaaacaccgtcaaaaaca

SEQ ID NO: 875277 - DNA, 75 bp, synthetic construct
  source 1..75: mol_type = other DNA
ttttgaacgttatggttttcagacagttaagcagcagcgcgttgaatgcaggggagcgtggtttactaatttttc

SEQ ID NO: 875278 - DNA, 75 bp, synthetic construct
  source 1..75: mol_type = other DNA
ggtcggctttattacctgcgttgaacactatatcgatatgttatttgttgccctgaatacccccgccgtggggtt

SEQ ID NO: 875279 - DNA, 75 bp, synthetic construct
  source 1..75: mol_type = other DNA
cacaacaaattgccgcctgggcgcagattgacgaatctcgctggaaagataaactcgcgaaatcacaagtgcggg

SEQ ID NO: 875280 - DNA, 75 bp, synthetic construct
  source 1..75: mol_type = other DNA
cgcgggtcgctgacgtttgcccagagtttcccggcgaatgtcagttacaacgagtatcagtttgccattgtacag

SEQ ID NO: 875281 - DNA, 75 bp, synthetic construct
  source 1..75: mol_type = other DNA
aacggatgcgtctgtggtcagtctctgggggaagtgcgtgttccgcaccggggaaatgtggtggacagagtcatt

SEQ ID NO: 875282 - DNA, 75 bp, synthetic construct
  source 1..75: mol_type = other DNA
gacgagcatcagcccgtcaccaccgctgatattctgacaccgcgacgccgggaggattacggtaaggacctgtgg

SEQ ID NO: 875283 - DNA, 75 bp, synthetic construct
  source 1..75: mol_type = other DNA
ggcaaaaggtggtcgcacgcacacccgcgccattaaaggcatcgacggcgatgtcaggctcaaccgcgccctgtg

SEQ ID NO: 875284 - DNA, 75 bp, synthetic construct
  source 1..75: mol_type = other DNA
cccgcacgctgcagctgcgtctggaagtcgacaacgccgacgaggcgctaaaaccgggcatgaacgcctggttgc

SEQ ID NO: 875285 - DNA, 75 bp, synthetic construct
  source 1..75: mol_type = other DNA
ccggagtccatcgcctggctggtgaaagatgcctcgcagtttacgctcaccgttccggcgcgaccggataaaaca

SEQ ID NO: 875286 - DNA, 75 bp, synthetic construct
  source 1..75: mol_type = other DNA
cgatttctgaaatggataaagtaacgcaacagaatgcctctctggtggaagaggcctctgcagcggcagtgtctc

SEQ ID NO: 875287 - DNA, 75 bp, synthetic construct
  source 1..75: mol_type = other DNA
tccactggcacgcgaagaactgatgtaccacgtcccgagtatttttggagaagaccggcacacctcccgcagtga

SEQ ID NO: 875288 - DNA, 75 bp, synthetic construct
  source 1..75: mol_type = other DNA
accgccgacattctgactccacgacgccgggaggattacggtaaggacctgtggagtacttatcagaccatccag

SEQ ID NO: 875289 - DNA, 75 bp, synthetic construct
  source 1..75: mol_type = other DNA
ccatacccgtgccattcacagcattgacactgacattaagctcaaccgcgcattgtgggtgatggcagaaacgct

SEQ ID NO: 875290 - DNA, 75 bp, synthetic construct
  source 1..75: mol_type = other DNA
gattaattgggcaaggagctaatgaggtgacgacagcagggaaaaccatgagtgccataatggacgctgtggcga

SEQ ID NO: 875291 - DNA, 75 bp, synthetic construct
  source 1..75: mol_type = other DNA
gagaagtgcgtgttccgcaccggggaaatgtggtggacagagtcattgaaggggcttacgaggtggtgggcgtgt

SEQ ID NO: 875292 - DNA, 75 bp, synthetic construct
  source 1..75: mol_type = other DNA
caccagccggtgacggaatcccagttgctggctccgcgccgctggcaggatgaatccggcgatctgtggacgacc

SEQ ID NO: 875293 - DNA, 75 bp, synthetic construct
  source 1..75: mol_type = other DNA
caccatgtaccggggattttcggggaagataaatacacgtcccgaagccagaactatacgtacatccccaccatc

SEQ ID NO: 875294 - DNA, 75 bp, synthetic construct
  source 1..75: mol_type = other DNA
ggccgccggggatacaccaaacacatgctgcgtctgcgccgtgacggggagataaacggacaacatgtccctgaa

SEQ ID NO: 875295 - DNA, 75 bp, synthetic construct
  source 1..75: mol_type = other DNA
aagataagcacacatccagaagccagaactatacctacatccccaccatcacagtactggaaagcctgcagcggg

SEQ ID NO: 875296 - DNA, 75 bp, synthetic construct
  source 1..75: mol_type = other DNA
cgtatccatacccgggccattcacagcatcgataccgatattaagctcaaccgggcgttgtgggtgatggcagaa

SEQ ID NO: 875297 - DNA, 75 bp, synthetic construct
  source 1..75: mol_type = other DNA
tccgctgacacacgaagaactgatgcgccatgtaccgagtattttttggggaaaaccgacatacctcccgcagtg

SEQ ID NO: 875298 - DNA, 75 bp, synthetic construct
  source 1..75: mol_type = other DNA
ttcggggaagataaacacacgtcccgaagccagaactatacgtacatccccaccatcaccgtactggaaagcctg

SEQ ID NO: 875299 - DNA, 75 bp, synthetic construct
  source 1..75: mol_type = other DNA
tacccagttcgccctttttggcgctggtgccgaacaaaatgaacccgtgctctcttccggtacatgggaaatttt

SEQ ID NO: 875300 - DNA, 75 bp, synthetic construct
  source 1..75: mol_type = other DNA
tgtttgaccggatagaggagaagcctgatgccatgcagtcgctggtcctgtcgccaccggcacgccaggcgctgg

SEQ ID NO: 875301 - DNA, 75 bp, synthetic construct
  source 1..75: mol_type = other DNA
acccgcgccattagtggtatcgatggagacgtgaagctcaatcgggcattatgggtaatggctgaaaatatgctg

SEQ ID NO: 875302 - DNA, 75 bp, synthetic construct
  source 1..75: mol_type = other DNA
gaacccgtgctctcttccggtacatgggaaattttaatggtccgcagcgcccaggttgatacttcgctgttaagt

SEQ ID NO: 875303 - DNA, 75 bp, synthetic construct
  source 1..75: mol_type = other DNA
tactgaaacgccctggcaaatgttgattgatgaagctcgtctgatccccccgggtacggatggtgtgaaaatgca

SEQ ID NO: 875304 - DNA, 75 bp, synthetic construct
  source 1..75: mol_type = other DNA
aaaattgttgcccgcgcctcaacgcctaatgccagcgatatcgcggttaatcggcagggaaaaattgttgcccgc

SEQ ID NO: 875305 - DNA, 75 bp, synthetic construct
  source 1..75: mol_type = other DNA
gataaacggacaacatgtccctgaaatcatcctgctgaactcccatgacggtacttccagctaccagatgctgcc

SEQ ID NO: 875306 - DNA, 75 bp, synthetic construct
  source 1..75: mol_type = other DNA
cctggaaaaagatatccagctggtttattggaccgccaataatacgaaaatcaatcctggcggagaacagcatat

SEQ ID NO: 875307 - DNA, 75 bp, synthetic construct
  source 1..75: mol_type = other DNA
tcaatcctggcggagaacagcatataaaagaattttggatttgcccctatatttccagacatctgttatcactta

SEQ ID NO: 875308 - DNA, 75 bp, synthetic construct
  source 1..75: mol_type = other DNA
gctgttttaaacgatgcctcaaagatcgctatcgctcctgatgcctgcattaagagcgggtttgtggtaggttca

SEQ ID NO: 875309 - DNA, 75 bp, synthetic construct
  source 1..75: mol_type = other DNA
ggggaaatgtggtggagaaagttatcgaaggtgcttacgaggtggtgggcgtgtttgaccggatagaggagaagc

SEQ ID NO: 875310 - DNA, 75 bp, synthetic construct
  source 1..75: mol_type = other DNA
gtggacagagtcattgaaggggcttacgaggtggtgggggtttttgaccggattgaagagaaacgtgatgccatg

SEQ ID NO: 875311 - DNA, 75 bp, synthetic construct
  source 1..75: mol_type = other DNA
acaggcggcactgacttaccgttatggtgacgaacatcagcccgtcaccaccgccgacattctgacgccacgacg

SEQ ID NO: 875312 - DNA, 75 bp, synthetic construct
  source 1..75: mol_type = other DNA
gagaggtacgggtgccacataaaggcaatgtcgttgagaaggtgattgaaggggcttacgaagtgctcggcgtat

SEQ ID NO: 875313 - DNA, 75 bp, synthetic construct
  source 1..75: mol_type = other DNA
aggcggcactgacttaccgttatggtgatgaacatcagcccgtcaccaccgctgacattctgacaccacgacgca

SEQ ID NO: 875314 - DNA, 75 bp, synthetic construct
  source 1..75: mol_type = other DNA
ttggcgaggtgcgggtgccgcacaagggggacgtggtaagtcaagtgattgaaggcgcgtatgaagtgctgggca

SEQ ID NO: 875315 - DNA, 75 bp, synthetic construct
  source 1..75: mol_type = other DNA
tgctcaaacccgtgcggtcaaaggtatcgacggagacgtaaagcttaatcgcgctctatgggtgatggctgagaa

SEQ ID NO: 875316 - DNA, 75 bp, synthetic construct
  source 1..75: mol_type = other DNA
aatcaccggtaagcaggtgccggaaatcattctgctcaacagccatgatggttccagcgcataccagatgttgcc

SEQ ID NO: 875317 - DNA, 75 bp, synthetic construct
  source 1..75: mol_type = other DNA
atcattttacttaacagtcatgacggctcatcaagctaccagatgctgccgggcctgtttcgtggcgtctgtacc

SEQ ID NO: 875318 - DNA, 75 bp, synthetic construct
  source 1..75: mol_type = other DNA
catacccgtgccattcacagcattgacactgacattaagctcaaccgcgcattgtgggtgatggcggaaacgctg

SEQ ID NO: 875319 - DNA, 75 bp, synthetic construct
  source 1..75: mol_type = other DNA
aatatgctgaaaggcgggatttccggtcgcagtgcaaaaggaaaacgtatccatacccgtgccattcacagcatt

SEQ ID NO: 875320 - DNA, 75 bp, synthetic construct
  source 1..75: mol_type = other DNA
gtgcgaaaagctggcgatcgaactgaccaactgttatgaacacaacggtttaccagacattaaaaacgtcaccgg

SEQ ID NO: 875321 - DNA, 75 bp, synthetic construct
  source 1..75: mol_type = other DNA
agcgcccgtaaaatccagcccggtgccgtcagccaacaccatattctggccatctacagctaccagcaggaactg

SEQ ID NO: 875322 - DNA, 75 bp, synthetic construct
  source 1..75: mol_type = other DNA
atcaccgtactggaaagcctgcagcaggaaggttttcagccattcttcgcctgccagacccgcgtgcgcgacccg

SEQ ID NO: 875323 - DNA, 75 bp, synthetic construct
  source 1..75: mol_type = other DNA
gagaattgcgtgttccacaccggggaaatgtggtggacagagtcattgaaggggcttacgaggtggtgggcgttt

SEQ ID NO: 875324 - DNA, 75 bp, synthetic construct
  source 1..75: mol_type = other DNA
cacaggcggcactgacttaccgttatggtgacgaacatcagccgccacaacagcggacatcctgacgcaacgacg

SEQ ID NO: 875325 - DNA, 75 bp, synthetic construct
  source 1..75: mol_type = other DNA
atgtctgataatcgttcccggcatgatcgcctgggcgtgtttgaccggatagaggagaagcgtgatgccatgcag

SEQ ID NO: 875326 - DNA, 75 bp, synthetic construct
  source 1..75: mol_type = other DNA
atgcgaaccagatacgccgtgatcgtcccttaactcgtgaagaactgatgcaggtcgtccccagcgtattcgggg

SEQ ID NO: 875327 - DNA, 75 bp, synthetic construct
  source 1..75: mol_type = other DNA
attttcatgatctatggcgggaatattgttgttgaaaaagcacaacatgttggacaaatctctccagtattaaaa

SEQ ID NO: 875328 - DNA, 75 bp, synthetic construct
  source 1..75: mol_type = other DNA
agcatcgacaccgacattaagctcaatcgcgcattgtgggtgatggcagaaacgctgctggagagcatgcgctga

SEQ ID NO: 875329 - DNA, 75 bp, synthetic construct
  source 1..75: mol_type = other DNA
ggggcttacgaagtggtgggcgtttttgaccggattgaggaaaagcgtgatggcatgcagtcgctggtcctgccg

SEQ ID NO: 875330 - DNA, 75 bp, synthetic construct
  source 1..75: mol_type = other DNA
ctacgattttaaagcatcctatgttcgtgcggatgcaagcaaagcagctactgccggttatgtaaaaaccaactc

SEQ ID NO: 875331 - DNA, 75 bp, synthetic construct
  source 1..75: mol_type = other DNA
aacggctgcgtctgtggccagtctctgggggaagtgcgtgttccgcaccggggaaatgtcgtggacacagttatt

SEQ ID NO: 875332 - DNA, 75 bp, synthetic construct
  source 1..75: mol_type = other DNA
aacggctgcgtctgtggtcagtctctgggggaagtgcgtgttccgcaccggggaaatgtcgtggagacagtaatt

SEQ ID NO: 875333 - DNA, 75 bp, synthetic construct
  source 1..75: mol_type = other DNA
attaccgtcctggaaaatctgcagcgggaaggctttcagccgttctttgcctgccagacccgcgtgcgcgaccag

SEQ ID NO: 875334 - DNA, 75 bp, synthetic construct
  source 1..75: mol_type = other DNA
gaaggggcttacgaggtggtgggagtctttgaccggatagaggacaagcgtgatgccatgcagtcgctgctactg

SEQ ID NO: 875335 - DNA, 75 bp, synthetic construct
  source 1..75: mol_type = other DNA
gaaggggcttacgaggtggtgggagtatttgaccggatcgaggacaagcgtgatgccatgcagtcgctgctactg

SEQ ID NO: 875336 - DNA, 75 bp, synthetic construct
  source 1..75: mol_type = other DNA
aacggctgcgtctgtgggcagtctctgggggaagtgcgtgttccgcaccggggaaatgtcgtggatacagtaatt

SEQ ID NO: 875337 - DNA, 75 bp, synthetic construct
  source 1..75: mol_type = other DNA
attgtaacgtttttatatctaccgtgaataatatgaacactatcgtatttgtggaagatgatcctgaagtcggtt

SEQ ID NO: 875338 - DNA, 75 bp, synthetic construct
  source 1..75: mol_type = other DNA
cgccgggggtataccaaacacatgctgcgtctgcggcgggacggagagataaacggacaacatgtccctgaaatt

SEQ ID NO: 875339 - DNA, 75 bp, synthetic construct
  source 1..75: mol_type = other DNA
aggtggtgggcgtgtttgaccggattgaggaaaagcgtgatgccatgcagtcgctgattctgccgccaccggcac

SEQ ID NO: 875340 - DNA, 75 bp, synthetic construct
  source 1..75: mol_type = other DNA
tgccagagggaaacgtatccatacccgtgccattcacagcatcgacaccgacattaagctcaaccgggcgttgtg

SEQ ID NO: 875341 - DNA, 75 bp, synthetic construct
  source 1..75: mol_type = other DNA
aataatgaggtttcgctttcgacggccgattttgaactattgtgggaattagcgacccatgcagggcaaattatg

SEQ ID NO: 875342 - DNA, 75 bp, synthetic construct
  source 1..75: mol_type = other DNA
ccgcgcggtgaccatgccgaagaggccatcctgcgtgaaaatccagatctggttctcctggatatcatgctgcca

SEQ ID NO: 875343 - DNA, 75 bp, synthetic construct
  source 1..75: mol_type = other DNA
gaaggggcttacgaggtggtgggtgtttttgaccggatcgaggacaagcgtgatgccatgcagtcgctgctactg

SEQ ID NO: 875344 - DNA, 75 bp, synthetic construct
  source 1..75: mol_type = other DNA
tataaagactacgcctcgctgtttcgcaacaacaaagagctggtgaaatccttaagcccctccaacagcattgtt

SEQ ID NO: 875345 - DNA, 75 bp, synthetic construct
  source 1..75: mol_type = other DNA
gcacggtctgccttatgccatcgccccggatagccaaaaacaggtgccgatgctgctgtggctgtcggaggatta

SEQ ID NO: 875346 - DNA, 75 bp, synthetic construct
  source 1..75: mol_type = other DNA
atgttgaagcgccttctaaaaagaccctctttaaatttattcgcctggttattactcgctgctttttatatctca

SEQ ID NO: 875347 - DNA, 75 bp, synthetic construct
  source 1..75: mol_type = other DNA
ggattcactgcataacgtgctggttttcttgtcgatgccggtcgtcgcattcagcgtgattaatattgtcctgac

SEQ ID NO: 875348 - DNA, 75 bp, synthetic construct
  source 1..75: mol_type = other DNA
gctgaatggttatccacgcgaaaccaatcctcgcctggcaaaagataacgtggtctatttccctaataccgcctc

SEQ ID NO: 875349 - DNA, 75 bp, synthetic construct
  source 1..75: mol_type = other DNA
ctgcgcagtgttcttttccgtggagccaatattctggtttctgtactgctgattttgctggtcgccgcactgttt

SEQ ID NO: 875350 - DNA, 75 bp, synthetic construct
  source 1..75: mol_type = other DNA
gaaggggcttacgaggtggtgggggtctttgaccggatggaggacaagcgtgatgccatgcagtcgctgctactg

SEQ ID NO: 875351 - DNA, 75 bp, synthetic construct
  source 1..75: mol_type = other DNA
gaaggggcttacgaggtggtgggcgtctttgaccggatcgaggacaagcgtgatgccatgcagtcgctgctactg

SEQ ID NO: 875352 - DNA, 75 bp, synthetic construct
  source 1..75: mol_type = other DNA
gaaggggcttacgaggtggtgggtgtctttgaccggattgaggacaagcgtgatgccatgcagtcgctgctactg

SEQ ID NO: 875353 - DNA, 75 bp, synthetic construct
  source 1..75: mol_type = other DNA
gcgggatttccggtcgcagtgccagaggaaaacgtatccatacccgggccattcacagcatcgataccgacatta

SEQ ID NO: 875354 - DNA, 75 bp, synthetic construct
  source 1..75: mol_type = other DNA
ctgacgccacgacgccgggaggattacggtaaggacctgtggagtgcttatcagaccatccaggaaatatgctga

SEQ ID NO: 875355 - DNA, 75 bp, synthetic construct
  source 1..75: mol_type = other DNA
gaaggggcttacgaggtggtgggggtgtttgaccggatcgaggacaagcgtgatgccatgcagtcgctgctactg

SEQ ID NO: 875356 - DNA, 75 bp, synthetic construct
  source 1..75: mol_type = other DNA
ttgaccggattgaggaaaagcgtgatgccatgcagtctctggtcctgtcgccaccggcacgccaggcgctggcac

SEQ ID NO: 875357 - DNA, 75 bp, synthetic construct
  source 1..75: mol_type = other DNA
taggtaaactgcctacggcgtcgattctcggtggtgtactgctcaaccagaaactgaatccggcgacactggaga

SEQ ID NO: 875358 - DNA, 75 bp, synthetic construct
  source 1..75: mol_type = other DNA
cgtaccgtttggtgcacagacgatggcgacaccggatgggcgtaaagcacatacgcctctggcggaaggtgcaag

SEQ ID NO: 875359 - DNA, 75 bp, synthetic construct
  source 1..75: mol_type = other DNA
tagctgctggttgaaattgctggaagtgaacaaaatccgctccggctcgcactcgaaagcctctgcgggaagtcc

SEQ ID NO: 875360 - DNA, 75 bp, synthetic construct
  source 1..75: mol_type = other DNA
actcaaaagcctctgcgggaagtccgctgtatcagaacgtcaccattggcggacaaaatctggttgatggtcaac

SEQ ID NO: 875361 - DNA, 75 bp, synthetic construct
  source 1..75: mol_type = other DNA
ggcctgactcatgagcaactgcgtcagcggctgattaacggtgcgccgaagtacggcaacgacgatgatactgtc

SEQ ID NO: 875362 - DNA, 75 bp, synthetic construct
  source 1..75: mol_type = other DNA
tctcggtggtgtactgctcaaccagaaactgaatccggcgacactggagaatgagtccgacaagcagaagctgat

SEQ ID NO: 875363 - DNA, 75 bp, synthetic construct
  source 1..75: mol_type = other DNA
gtacctccagctaccagatgctgccgggttacttcaggttcgtctgccagaacgggtgcgccgtgtcggcgtggt

SEQ ID NO: 875364 - DNA, 75 bp, synthetic construct
  source 1..75: mol_type = other DNA
gataaacggagaacatgtccctgaaattattctgctcaactcccatgacggtacctccagctaccagacgctgcc

SEQ ID NO: 875365 - DNA, 75 bp, synthetic construct
  source 1..75: mol_type = other DNA
cggcacgccaggcgctggcacaggcggcactgacttaccgttatggtgacgaacatcggcccgtcaccaccgccg

SEQ ID NO: 875366 - DNA, 75 bp, synthetic construct
  source 1..75: mol_type = other DNA
caacctcggcaacagcctggcggcagtgaagaaactggtatttgaacagggcgcgattggtcagcaacagctggc

SEQ ID NO: 875367 - DNA, 75 bp, synthetic construct
  source 1..75: mol_type = other DNA
acgtgttctgcatgaagtgtgcccgtggtggcgcggtcagaccgtacaggatcgctgctacggcatgtttaccga

SEQ ID NO: 875368 - DNA, 75 bp, synthetic construct
  source 1..75: mol_type = other DNA
gaccttgacgaaaagctggcggaagccggaattggcggtagcaataaaagtagcgtccaggatgtgctggcaaga

SEQ ID NO: 875369 - DNA, 75 bp, synthetic construct
  source 1..75: mol_type = other DNA
gatcctgctgcgcaccttctttgaagtgcataaaggctggcatattcagtacaacatcgtttcccgcgagacgct

SEQ ID NO: 875370 - DNA, 75 bp, synthetic construct
  source 1..75: mol_type = other DNA
cgcacggtatacctggataccaaccattaccgttcttgaaaacctgcagcgcgaaggcttccagcccttctttgc

SEQ ID NO: 875371 - DNA, 75 bp, synthetic construct
  source 1..75: mol_type = other DNA
gcgggcgtaatgttaaaggcgaacgaacgcatactcgtgccgtgcgtggcattgacggggacgtgaagcttaacc

SEQ ID NO: 875372 - DNA, 75 bp, synthetic construct
  source 1..75: mol_type = other DNA
aattaccggcaaacaagtgccggaaatcattctgctcaattctcacgatggctccagctcgtatcagatgctgcc

SEQ ID NO: 875373 - DNA, 75 bp, synthetic construct
  source 1..75: mol_type = other DNA
attctgctcaactctcatgacggttcatccagctaccagatgttacccggatattttcgtgccatctgtaccaat

SEQ ID NO: 875374 - DNA, 75 bp, synthetic construct
  source 1..75: mol_type = other DNA
gctggcaggatgagagcaatgacctttggaccacctatcagcggattcaagaaaacctgattaagggcggactca

SEQ ID NO: 875375 - DNA, 75 bp, synthetic construct
  source 1..75: mol_type = other DNA
aacgcatacccgcgccgtgcgtggtattgacggagatgtgaagctcaaccgggctctctgggtgatggcggaagc

SEQ ID NO: 875376 - DNA, 75 bp, synthetic construct
  source 1..75: mol_type = other DNA
caaacacgatgagttgatcattggcaaccaggcaagcgaagttcgcgccgcgccgatcttcccggaatataccgt

SEQ ID NO: 875377 - DNA, 75 bp, synthetic construct
  source 1..75: mol_type = other DNA
acgaatctgacaagcagaaactgatgatcctgctgcgcaccttcttcgaggtgcataaaggctggcatattcagt

SEQ ID NO: 875378 - DNA, 75 bp, synthetic construct
  source 1..75: mol_type = other DNA
ccgccggtctgtaccgagcgcgcgcagcactatactgagatgtatcaacaacatctcgataagccgatcccggta

SEQ ID NO: 875379 - DNA, 75 bp, synthetic construct
  source 1..75: mol_type = other DNA
attaccattcttgaaaacctgcagcgcgaaggctttcagcccttctttgcctgccagacccgagtgagagaccct

SEQ ID NO: 875380 - DNA, 75 bp, synthetic construct
  source 1..75: mol_type = other DNA
gggaggattacggtaaggacctgtggagtacttatcagaccatccaggagaatatgctgaaaggcgggatttccg

SEQ ID NO: 875381 - DNA, 75 bp, synthetic construct
  source 1..75: mol_type = other DNA
acccgtagtttcctgagccccgccgcgattttgcggcggggctttttgtatttattttccatcatgaggagtctg

SEQ ID NO: 875382 - DNA, 75 bp, synthetic construct
  source 1..75: mol_type = other DNA
cctatctcaagttcagtccggtggcgaaatcatttgaggtgttcgttaaccgtaaggtggtgcgccatcgcggcg

SEQ ID NO: 875383 - DNA, 75 bp, synthetic construct
  source 1..75: mol_type = other DNA
cccgaagagcaacagcctgctaaagccgctggcggcgaaagcgtccaccattgaagggactaaccccagcctggc

SEQ ID NO: 875384 - DNA, 75 bp, synthetic construct
  source 1..75: mol_type = other DNA
tctggtaatggagaagggccagcaggatatctatacggcggcggtgagccgggatcaggcccgaatcgtgttcga

SEQ ID NO: 875385 - DNA, 75 bp, synthetic construct
  source 1..75: mol_type = other DNA
acgggtaaaccctgaccttccacctcagccggatattaatgcctatctgtcagaagaaggcctggctaaatatga

SEQ ID NO: 875386 - DNA, 75 bp, synthetic construct
  source 1..75: mol_type = other DNA
aaactcaacatccctgactatcaggagaaagaagacgctttcatgcaactggttccgcctgcggttggagccgac

SEQ ID NO: 875387 - DNA, 75 bp, synthetic construct
  source 1..75: mol_type = other DNA
cgtaaggtggtgcgccatcgcggcgatccggttctggcctgggcgattggaaacgtggtgatggagtccgacgct

SEQ ID NO: 875388 - DNA, 75 bp, synthetic construct
  source 1..75: mol_type = other DNA
acgcgataaaaacgggcgaaattccggcctgtaagcgtgtaaaacaggccgtggagaggtacttttcagacctga

SEQ ID NO: 875389 - DNA, 75 bp, synthetic construct
  source 1..75: mol_type = other DNA
aaaagaacggttttagctgccagatagaaaccagtggtactcatgaagtacgctgtacaccgaatacctgggtca

SEQ ID NO: 875390 - DNA, 75 bp, synthetic construct
  source 1..75: mol_type = other DNA
agccgttcttcgcctgccagacccgtgtgcgcgaccagagccgccgggaatataccaaacatatgctgcgtctgc

SEQ ID NO: 875391 - DNA, 75 bp, synthetic construct
  source 1..75: mol_type = other DNA
gtacagcagcgcctttattgaggtgccgcgcaagaatgccaaatccaccgtggccgccatgctggctaactggtt

SEQ ID NO: 875392 - DNA, 75 bp, synthetic construct
  source 1..75: mol_type = other DNA
cttgatgttgagccattcccgcaaacctatctcaggttcagtccggtagcgaaatcctttgaagtgtttgttaac

SEQ ID NO: 875393 - DNA, 75 bp, synthetic construct
  source 1..75: mol_type = other DNA
ctgccagattctggcaggggaagagagcaacgattctctgtttgtcctgatatacgagctggacgacgaaattga

SEQ ID NO: 875394 - DNA, 75 bp, synthetic construct
  source 1..75: mol_type = other DNA
ggtctgccacagcctgcgcgacggctaccagttgccggtctcccagcttccgccgccggtcagcacctggtccgc

SEQ ID NO: 875395 - DNA, 75 bp, synthetic construct
  source 1..75: mol_type = other DNA
tggtgacgaacatcagccggtcaccaccgctgacattctgaccccgcgacgcggggaggattacggtgaggacct

SEQ ID NO: 875396 - DNA, 75 bp, synthetic construct
  source 1..75: mol_type = other DNA
tggtgacgaacatcagccggtcaccaccgctgacattctgaccccccgacgccgggaggattacggtgaggacct

SEQ ID NO: 875397 - DNA, 75 bp, synthetic construct
  source 1..75: mol_type = other DNA
tggtgacgaacatcagccggtcaccaccgctgacattctgacccctcgacgctgggaggattacggtgaggacct

SEQ ID NO: 875398 - DNA, 75 bp, synthetic construct
  source 1..75: mol_type = other DNA
gcgttatgtgccgctcgaccggttactggtagaaactgacgcgccttatctggcacctgtgccgcatcgaggaaa

SEQ ID NO: 875399 - DNA, 75 bp, synthetic construct
  source 1..75: mol_type = other DNA
tcgcgccagacgacgagcgtgtgctgcttggtgttgccggttttcaggcgcgcgccgcgctggcaaatctcttta

SEQ ID NO: 875400 - DNA, 75 bp, synthetic construct
  source 1..75: mol_type = other DNA
gaaggggcttacgaagtggtgggcgtttttgaccggattgaggaaaagcgtgatgccatgcagtcgctggtcctg

SEQ ID NO: 875401 - DNA, 75 bp, synthetic construct
  source 1..75: mol_type = other DNA
acaggtcgtcatgaataacgatatggaaccggacagcatcttccgcgtgcgtgacgatgcgaatacattgcgtat

SEQ ID NO: 875402 - DNA, 75 bp, synthetic construct
  source 1..75: mol_type = other DNA
ctgctatggtttgaacacccggcagaacgtttcctgatcgtaaccgatgaagctactgccaatatgctgaccgat

SEQ ID NO: 875403 - DNA, 75 bp, synthetic construct
  source 1..75: mol_type = other DNA
tcaggtagtcatgaataacgacatggaaccggacagcgttttccgcgttcgtgacgatgcgaatacattgcatat

SEQ ID NO: 875404 - DNA, 75 bp, synthetic construct
  source 1..75: mol_type = other DNA
tggtgacgaacatcagccggtcaccaccgctgacattctgaccccacgacgcagggaggattacggtgaggacct

SEQ ID NO: 875405 - DNA, 75 bp, synthetic construct
  source 1..75: mol_type = other DNA
tggtgacgaacatcagcccgtcaccaccgctgacattctgaccccgcgacgccgggaggattacggtgaggacct

SEQ ID NO: 875406 - DNA, 75 bp, synthetic construct
  source 1..75: mol_type = other DNA
tggtgacgaacatcagccagtcaccaccgctgacattctgaccccgcgacgcagggaggattacggtgaggacct

SEQ ID NO: 875407 - DNA, 75 bp, synthetic construct
  source 1..75: mol_type = other DNA
ggggaagtgcgtgttccgcatcggggaaatgtggtggacagagtcattgaaggggcttacgaggtggtgggcgtg

SEQ ID NO: 875408 - DNA, 75 bp, synthetic construct
  source 1..75: mol_type = other DNA
cggcaacctgccgttgcatgaaaacggtatgcaaatccacgcttataacggcgatgaagtcgtctacagcaaaac

SEQ ID NO: 875409 - DNA, 75 bp, synthetic construct
  source 1..75: mol_type = other DNA
gataaactgtctaacgatccgatgaatgtcatcgactgggtaaatatgtttgcgctggcggtaaacgaagaaaac

SEQ ID NO: 875410 - DNA, 75 bp, synthetic construct
  source 1..75: mol_type = other DNA
tatgggtcttgcaggtaacgaacctgccaccgtagatattgacagcatccctggttttattcgcgatgttgaaga

SEQ ID NO: 875411 - DNA, 75 bp, synthetic construct
  source 1..75: mol_type = other DNA
agtgggtgttgcctgttcaatggctgctgcgggtcttgcagaactgctgggcggtagcccggaacaggtttgcgt

SEQ ID NO: 875412 - DNA, 75 bp, synthetic construct
  source 1..75: mol_type = other DNA
gagacaatgtacgaaacaggtaaggacatgaacgccaaataccgtgaaacctctcgcggcggtctggcaattaaa

SEQ ID NO: 875413 - DNA, 75 bp, synthetic construct
  source 1..75: mol_type = other DNA
gcggtagcccggaacaggtttgtgtggcggcggaaattggcatggaacacaaccttggtctaacttgtgacccgg

SEQ ID NO: 875414 - DNA, 75 bp, synthetic construct
  source 1..75: mol_type = other DNA
gtcgttgccgccagcgcacttggactggcctttcctgttgggcgcccactgctggcatctgcgggaggcgcgtta

SEQ ID NO: 875415 - DNA, 75 bp, synthetic construct
  source 1..75: mol_type = other DNA
gggggcagcgagcagtgaagacttgctcgcagtcatcggtcgtcagggatacaccgcgcgtcacgtggtgattac

SEQ ID NO: 875416 - DNA, 75 bp, synthetic construct
  source 1..75: mol_type = other DNA
caagaaggaaatgtatggcattactgagcgccgtttccctgcaagcaaactccatccgacgttagggcaaatctc

SEQ ID NO: 875417 - DNA, 75 bp, synthetic construct
  source 1..75: mol_type = other DNA
ggtgtctcggtactacgcacgcggacattcactttgatcgcgatcgcgttgctttgcggtgctgccgtatcgata

SEQ ID NO: 875418 - DNA, 75 bp, synthetic construct
  source 1..75: mol_type = other DNA
ggcgtctctgtactccgcacgcgaacattcaccctgcttgcgatcgcgttgctctgtggcgcagccgtatcgatt

SEQ ID NO: 875419 - DNA, 75 bp, synthetic construct
  source 1..75: mol_type = other DNA
tggcctttccggttggacgcccactgctggcatctacgggcggcgcgttattgttcctgttgatattgctgcttt

SEQ ID NO: 875420 - DNA, 75 bp, synthetic construct
  source 1..75: mol_type = other DNA
gctgcgggtggtcgcgtggtaactgcgccaaccaacggtgcgtgtggcatcgttccggcagtgctggcttactat

SEQ ID NO: 875421 - DNA, 75 bp, synthetic construct
  source 1..75: mol_type = other DNA
aaacggagaacatgtccctgaaatcatcctgctgaactcccatgacggtacctccagctaccagatgctgccggg

SEQ ID NO: 875422 - DNA, 75 bp, synthetic construct
  source 1..75: mol_type = other DNA
atgcgcctcttcccggagaaatccgctgctctcatgtatcaccttggtgctaatcctgagaaaacacgccagttg

SEQ ID NO: 875423 - DNA, 75 bp, synthetic construct
  source 1..75: mol_type = other DNA
aaaccaaaacaagacccggcaactaatgctgaatttgcccgtcgccgcatcgaacgcaaacgccagcgtgagctt

SEQ ID NO: 875424 - DNA, 75 bp, synthetic construct
  source 1..75: mol_type = other DNA
accgccgacattctgacgccacgacgccgggaggattacggtaaggacctgtggagtactaaacaaaataaccat

SEQ ID NO: 875425 - DNA, 75 bp, synthetic construct
  source 1..75: mol_type = other DNA
aacaaaccaaaacaagacccggcaactaatgcgcagtttgcacagcgacgtattgagcgcaagcgtcagcgcgag

SEQ ID NO: 875426 - DNA, 75 bp, synthetic construct
  source 1..75: mol_type = other DNA
gggcattttcattgccctgctgtacccggcaggcgttgttcgctttttcagtaaatacattgaggaaatcaaacc

SEQ ID NO: 875427 - DNA, 75 bp, synthetic construct
  source 1..75: mol_type = other DNA
ggccgctggggcaattggcgcgttgtataaaatgaacgcttctatttccggtgctgaagtgggttgtcagggcga

SEQ ID NO: 875428 - DNA, 75 bp, synthetic construct
  source 1..75: mol_type = other DNA
gccgtatccgtttaaatctgcaaccgagttgctggcgtactgtaatgaaactggctattccctttccggcctggc

SEQ ID NO: 875429 - DNA, 75 bp, synthetic construct
  source 1..75: mol_type = other DNA
accggtaaggacatgaacgccaaataccgcgaaacctcacgcggtggtctggcaatcaaagtccagtgtgactaa

SEQ ID NO: 875430 - DNA, 75 bp, synthetic construct
  source 1..75: mol_type = other DNA
ggtgaaccctgagttaccaaaacaaccagaccctaacgattatctttccgaagacgcactggctaagtacgacta

SEQ ID NO: 875431 - DNA, 75 bp, synthetic construct
  source 1..75: mol_type = other DNA
gctgacattctgacaccacgacgcagggagggttacggtcaggacctgtggagcgcatatcagaccatccaggag

SEQ ID NO: 875432 - DNA, 75 bp, synthetic construct
  source 1..75: mol_type = other DNA
tcctgatcatcgcccctttcgtcattgcgaaagtggaccaatggcgcaaacgcggcattggagacacctgggcgt

SEQ ID NO: 875433 - DNA, 75 bp, synthetic construct
  source 1..75: mol_type = other DNA
aaccagtcagcatgtgcctgaaattattctgctcaactcccatgacggtacctccagctaccagatgttacccgg

SEQ ID NO: 875434 - DNA, 75 bp, synthetic construct
  source 1..75: mol_type = other DNA
agtacaggcaatggcatctggccatccgtctgtgaccggaacggttacgcgtacggctgtccggaatttcagccg

SEQ ID NO: 875435 - DNA, 75 bp, synthetic construct
  source 1..75: mol_type = other DNA
aaatgtggtggagaaagttattgaaggggcttacgaggtggtgggtgtgtttgaccggatagaggacaagcgtga

SEQ ID NO: 875436 - DNA, 75 bp, synthetic construct
  source 1..75: mol_type = other DNA
aaatgtggtggagaaagttatagaaggggcttacgaggtggtgggtgtgtttgaccggatggaggataagcgtga

SEQ ID NO: 875437 - DNA, 75 bp, synthetic construct
  source 1..75: mol_type = other DNA
agcatcgacaccgatattaagctcaatcgtgcattatgggtgatggcggaaacgctgctggagaacatgcgctga

SEQ ID NO: 875438 - DNA, 75 bp, synthetic construct
  source 1..75: mol_type = other DNA
cttaacgctgtgcttggtgaggtgattgccgccgaaagtggctatgagcgggaaattgataccgcgcttgagccg

SEQ ID NO: 875439 - DNA, 75 bp, synthetic construct
  source 1..75: mol_type = other DNA
ccgggaattgcgccggaacaacgtaagcacctgttccagccgtttgttcgcggcgacagtgcgcgcaccattagc

SEQ ID NO: 875440 - DNA, 75 bp, synthetic construct
  source 1..75: mol_type = other DNA
gaccgttggtcgatctcgaacacgcagccttgcaggttggtaaagggattattccgccgccgctgcgtgaatatg

SEQ ID NO: 875441 - DNA, 75 bp, synthetic construct
  source 1..75: mol_type = other DNA
cacaggcggcactgacttaccgttatggtgacgaacatcggcccgtcaccaccgccgacattctgacgccacgac

SEQ ID NO: 875442 - DNA, 75 bp, synthetic construct
  source 1..75: mol_type = other DNA
gggaaggctttcagccgttcttcgcctgccagacccgtgtgcgcgaccagagccgccgggaatataccaaacaca

SEQ ID NO: 875443 - DNA, 75 bp, synthetic construct
  source 1..75: mol_type = other DNA
aggcggcgctgacttaccgttatggtgatgaacatcagcccgtcaccactaccgacattctgacgccacgacgca

SEQ ID NO: 875444 - DNA, 75 bp, synthetic construct
  source 1..75: mol_type = other DNA
aaatgtggtggagaaagttatcgaaggggcttacgaggtggtgggtgtgtttgaccggattgaggagaagcgtga

SEQ ID NO: 875445 - DNA, 75 bp, synthetic construct
  source 1..75: mol_type = other DNA
atgcgattagccagccgctttggccgtataaaccagatacgccgtgaccggcctctgacccacgaagagctgatg

SEQ ID NO: 875446 - DNA, 75 bp, synthetic construct
  source 1..75: mol_type = other DNA
gcctctgacccacgaagagctgatgagtcatgtacccagcgtgttcgggagtgacaagcatgaatctcgttcaga

SEQ ID NO: 875447 - DNA, 75 bp, synthetic construct
  source 1..75: mol_type = other DNA
tgacgaacatcagcccgtcattaagctcaaccgcgcattgtgggtgatggcggaaaccctgctggagagcctgcg

SEQ ID NO: 875448 - DNA, 75 bp, synthetic construct
  source 1..75: mol_type = other DNA
atctccctgctcgacagcctggaaagcgaaggctttcagccgttctttgcctgccagacccgggtgcgtgacccg

SEQ ID NO: 875449 - DNA, 75 bp, synthetic construct
  source 1..75: mol_type = other DNA
acgtaaatcaaatccgtcgcgatcgcccattaacgcatgacgaactgatgcagtatgtccccagcgtattcgggg

SEQ ID NO: 875450 - DNA, 75 bp, synthetic construct
  source 1..75: mol_type = other DNA
cctgtttcgtggcgtctgtaccaacggcctggtctgcggtcagtcattcggagaagtgcgggtaccgcataaagg

SEQ ID NO: 875451 - DNA, 75 bp, synthetic construct
  source 1..75: mol_type = other DNA
aaggctttcagccgttctttgcctgccagacccgcgtacgtgacccgggccgccgggggtataccaaacacatgc

SEQ ID NO: 875452 - DNA, 75 bp, synthetic construct
  source 1..75: mol_type = other DNA
aaggctttcagccgttcttcgcctgccagacccgtgtgcgcgaccagagccgccgggaatacaccaaacacatgc

SEQ ID NO: 875453 - DNA, 75 bp, synthetic construct
  source 1..75: mol_type = other DNA
aaatgtggtggagaaagttatggaaggggcttacgaggtggtgggtgtgtttgaccggattgaggacaagcgtga

SEQ ID NO: 875454 - DNA, 75 bp, synthetic construct
  source 1..75: mol_type = other DNA
cgccgggaatataccaaacatatgctgcgtctgcggcgggacggacagataaccggtcagcatgtgcctgaaatt

SEQ ID NO: 875455 - DNA, 75 bp, synthetic construct
  source 1..75: mol_type = other DNA
caggattatctatgtttaccagaaatagatggaggaatgctggtggagtctgatgtagtaaggctgattttgaag

SEQ ID NO: 875456 - DNA, 75 bp, synthetic construct
  source 1..75: mol_type = other DNA
ggtgcttacgaagtggtgggcgtgtttgacctgattgaggaaaagcgtgatgccatgcagtcgctgttactgccg

SEQ ID NO: 875457 - DNA, 75 bp, synthetic construct
  source 1..75: mol_type = other DNA
gttgggcaaaatcggctcgttacggaaggcgggattattgttgcggtcactcttcttctgactgggactatctag

SEQ ID NO: 875458 - DNA, 75 bp, synthetic construct
  source 1..75: mol_type = other DNA
ggggtatcagttaccggcaggccagctggcacccgtaccggcttctccggcaatcatggtcccggtggcgcaacc

SEQ ID NO: 875459 - DNA, 75 bp, synthetic construct
  source 1..75: mol_type = other DNA
atcaccgtactggaaagtctgcagcgggaaggttttcagccctttttcgcctgccagacctgtgtgcgcgacccg

SEQ ID NO: 875460 - DNA, 75 bp, synthetic construct
  source 1..75: mol_type = other DNA
ttgcgccggtaccgcatcgaggaaaagagaatcaacctgcgatggttcgtgacgttgcagaatacatggctgtgt

SEQ ID NO: 875461 - DNA, 75 bp, synthetic construct
  source 1..75: mol_type = other DNA
ccacacccgtaccattcacagcatcgacacggacattaagctcaatcgcgcattgtgggtgatggcagaaacgct

SEQ ID NO: 875462 - DNA, 75 bp, synthetic construct
  source 1..75: mol_type = other DNA
ccaccggcacgtcaggcgctggcacaggcggcgctgacttaccgttatggcgacgaacatcagcccgtcaccacc

SEQ ID NO: 875463 - DNA, 75 bp, synthetic construct
  source 1..75: mol_type = other DNA
ggccgggtgtaacagcccacaaaaacttcagcaacgtgcgccggccatgccggtaccttccgtcagcgtttcccg

SEQ ID NO: 875464 - DNA, 75 bp, synthetic construct
  source 1..75: mol_type = other DNA
tttacgagctggacgacgaaaacgaggttgatgatccggcgatgtggataaaggctaaccctaacatcgatgttt

SEQ ID NO: 875465 - DNA, 75 bp, synthetic construct
  source 1..75: mol_type = other DNA
aggacagagaaacggcgggcaaattactggatctcggattttacatctccttttccggcattgtgaccttccgta

SEQ ID NO: 875466 - DNA, 75 bp, synthetic construct
  source 1..75: mol_type = other DNA
acgtcgtattttcttgcggcgtgcatccactcaaccagaatgatccctacgatgtagaagatttacgccgtctgg

SEQ ID NO: 875467 - DNA, 75 bp, synthetic construct
  source 1..75: mol_type = other DNA
aatatgctgaaaggggggatttccggccgcagtgccagaggaaaacgtatccatacccgtgccattcacaacatc

SEQ ID NO: 875468 - DNA, 75 bp, synthetic construct
  source 1..75: mol_type = other DNA
ggagaatatgctgaaaggcggaatttcaggtcgcagcgctaaaggaaaacgtatccatacccgtgccattcacag

SEQ ID NO: 875469 - DNA, 75 bp, synthetic construct
  source 1..75: mol_type = other DNA
ggcacattccaggcagagcatgaagaatttgcatttgatatgagcgacaaccacaaagagcggcttgcgacgttt

SEQ ID NO: 875470 - DNA, 75 bp, synthetic construct
  source 1..75: mol_type = other DNA
ggaaggttatcagttgccgccgggccagctggcgccggtaccggccggtgtcaggggcgcaggagcggggcttaa

SEQ ID NO: 875471 - DNA, 75 bp, synthetic construct
  source 1..75: mol_type = other DNA
ttttataactatcagtatgaggtgaatgagcgggcgcgggatgtgcaggttgagagaacgctgcgtaacgtggtg

SEQ ID NO: 875472 - DNA, 75 bp, synthetic construct
  source 1..75: mol_type = other DNA
actgacttaccgttatggtgacgaacatcagcccgtcaccaccgccgacattctgacgccgcgacgccgggagga

SEQ ID NO: 875473 - DNA, 75 bp, synthetic construct
  source 1..75: mol_type = other DNA
taccacgtcccgagtatttttgcggaagaccggcacacctcccgcagtgaacggtatgcgtacattcccaccatc

SEQ ID NO: 875474 - DNA, 75 bp, synthetic construct
  source 1..75: mol_type = other DNA
cgctcggtatacctggataccaaccattaccgttcttgaaaacctgcagcgagagggctttcagccgttctttgc

SEQ ID NO: 875475 - DNA, 75 bp, synthetic construct
  source 1..75: mol_type = other DNA
gggcgattctgggaatagctggtgcagcgatagcaacacagtttgcttcaggtacgggcacataccataaaaacc

SEQ ID NO: 875476 - DNA, 75 bp, synthetic construct
  source 1..75: mol_type = other DNA
caggctaaacttatcaatgctcaactgaatgggctacgaatagcgctggcggaaaaaggtattcctttattgttc

SEQ ID NO: 875477 - DNA, 75 bp, synthetic construct
  source 1..75: mol_type = other DNA
aaccagatacgccgtgaccgtccgctgacacacgaagaactgatgcactatgttcccagtattttcggtgaagac

SEQ ID NO: 875478 - DNA, 75 bp, synthetic construct
  source 1..75: mol_type = other DNA
ggtggtggcgctgagcgggcggcgtaataacggtgtgcctgtttccctttccgtatcaacaggagcagagaatgg

SEQ ID NO: 875479 - DNA, 75 bp, synthetic construct
  source 1..75: mol_type = other DNA
gagaggtgcgtgtgccacaccggggaaacgtggtggacagggtcatcgaaggggcttacgaagtggtgggggttt

SEQ ID NO: 875480 - DNA, 75 bp, synthetic construct
  source 1..75: mol_type = other DNA
gcaatcccgcccatttaaaggcctggcaggaaggcaaaacgggatacccgattgttgatgcggccatgcgtcagc

SEQ ID NO: 875481 - DNA, 75 bp, synthetic construct
  source 1..75: mol_type = other DNA
gggaaatgtagtggagaaagttatcgaaggggcttacgaggtggtgggggtttttgaccggatagaggagaagcg

SEQ ID NO: 875482 - DNA, 75 bp, synthetic construct
  source 1..75: mol_type = other DNA
cgggttacttcaggttcgtctgccagaacggatgcgtctgtggtcagtctctgggggaagtgcgtgttccgcacc

SEQ ID NO: 875483 - DNA, 75 bp, synthetic construct
  source 1..75: mol_type = other DNA
gagctggcacaacaccaggaaggcgtgctggatatcattcagcgggcaggcatcaacgtactatggaatgacaac

SEQ ID NO: 875484 - DNA, 75 bp, synthetic construct
  source 1..75: mol_type = other DNA
ttatgtcaggcccaataatgctgcccggtctgacctcatttaccggcggcgtattgttgacgccgtttgtctatc

SEQ ID NO: 875485 - DNA, 75 bp, synthetic construct
  source 1..75: mol_type = other DNA
tgatttcgctgtttattgtgctggcctggggaagcggctggctgatgttgtggacgctcagcttttatctgacca

SEQ ID NO: 875486 - DNA, 75 bp, synthetic construct
  source 1..75: mol_type = other DNA
tgatttatgcagatcccccctgggaatacaaagacaagtgtaaggatgggaatcgtggagctggttttaagtatc

SEQ ID NO: 875487 - DNA, 75 bp, synthetic construct
  source 1..75: mol_type = other DNA
atggctgctggacaattattatctgatgaggaacaaatccgcactgtccgccagcatctgccgaaaagctttggc

SEQ ID NO: 875488 - DNA, 75 bp, synthetic construct
  source 1..75: mol_type = other DNA
accgccgagcgacaggcgaatccatagaaactttgttgatgcaggaggctggattctcattcgccagcctggcgg

SEQ ID NO: 875489 - DNA, 75 bp, synthetic construct
  source 1..75: mol_type = other DNA
tatatggcggcatcttttatcgtttttcctagctatatcgaatcatatgggttaccactcatcgaagctgctagt

SEQ ID NO: 875490 - DNA, 75 bp, synthetic construct
  source 1..75: mol_type = other DNA
ataataagctagtagaaaacttcatcgacactctggaaagctggagagaccagaagcagattatttcggtcatct

SEQ ID NO: 875491 - DNA, 75 bp, synthetic construct
  source 1..75: mol_type = other DNA
actgtatagctactcagcatctgagctatctgatgaagcgctaagggtccgtagcaattgctctaaaaatgtcac

SEQ ID NO: 875492 - DNA, 75 bp, synthetic construct
  source 1..75: mol_type = other DNA
ttctattattacgagttttaaagcttctaaagatgttggtatttcaaatggtctgagaatccagctaacttttca

SEQ ID NO: 875493 - DNA, 75 bp, synthetic construct
  source 1..75: mol_type = other DNA
acagtggtaaagatggcgtttacttccatctacaaggccaaccagataatttcttgtcactatcagcaactgaaa

SEQ ID NO: 875494 - DNA, 75 bp, synthetic construct
  source 1..75: mol_type = other DNA
aaatggtttacgtattcagatgacattccaaggtgtagagttccgttctattgttggtcaaactgatgtttcatc

SEQ ID NO: 875495 - DNA, 75 bp, synthetic construct
  source 1..75: mol_type = other DNA
acatggaatttgacagccctatgcaggtaactacacagaacatgcaatcagggcaaaccgtcacagataatgtgc

SEQ ID NO: 875496 - DNA, 75 bp, synthetic construct
  source 1..75: mol_type = other DNA
cgcgttcctcgacccttgccggggatggatttttcagccggtattcccgctgacagtgccaccatgttagtcatt

SEQ ID NO: 875497 - DNA, 75 bp, synthetic construct
  source 1..75: mol_type = other DNA
tgggttatcgaaaatgccgaactggagcagcagattcagggcggtaaagagctgaaagacgcactggctcagtta

SEQ ID NO: 875498 - DNA, 75 bp, synthetic construct
  source 1..75: mol_type = other DNA
ttaaacgagccaacggttacagcgagctggaaatcagccagaagcgcagcatgttagaaaacgtaatgttgactg

SEQ ID NO: 875499 - DNA, 75 bp, synthetic construct
  source 1..75: mol_type = other DNA
tggacgctcagcttttatctgaccaataacggtcaacaggcggcgctgtttctgccgcacggggtttatctcgcc

SEQ ID NO: 875500 - DNA, 75 bp, synthetic construct
  source 1..75: mol_type = other DNA
tgcgtatcaaacactatatggcgctttatcctgacgcctggctttcagggcagcgttatttcgaactacgagatt

SEQ ID NO: 875501 - DNA, 75 bp, synthetic construct
  source 1..75: mol_type = other DNA
tctttcgacgtaagcgatgcagagggtaacgatattaatggttacactaccgtcgattttatcagtagttggctg

SEQ ID NO: 875502 - DNA, 75 bp, synthetic construct
  source 1..75: mol_type = other DNA
atcagtacactgaaaacaagattgatgatttcatcggctacgcgcagcaacggcagattgccgccgggaaggcta

SEQ ID NO: 875503 - DNA, 75 bp, synthetic construct
  source 1..75: mol_type = other DNA
ctcagccagtgggtcagccacagccaggacagcagtcaggccagatccaccgttgcacgtttttatcaggcgatg

SEQ ID NO: 875504 - DNA, 75 bp, synthetic construct
  source 1..75: mol_type = other DNA
caacgccatcattctgcagccagggcagccggttacgattgatatcatttatggcatcagcgagacccgtcagca

SEQ ID NO: 875505 - DNA, 75 bp, synthetic construct
  source 1..75: mol_type = other DNA
ttatctggagggacgctcgcttcagcctggtgaagagtctgtctatgacacgccggtcatcagcggcaccgaaga

SEQ ID NO: 875506 - DNA, 75 bp, synthetic construct
  source 1..75: mol_type = other DNA
ccatcttcccctgacaaagagcgtgaacgtcagcgacagtaagctggaaggcgtgaaagtcgattcttatgaact

SEQ ID NO: 875507 - DNA, 75 bp, synthetic construct
  source 1..75: mol_type = other DNA
gaacaaccataagatttacaccaccgggcgctatccgtcatatgacatcaccaatctggcggccttcctgcaatc

SEQ ID NO: 875508 - DNA, 75 bp, synthetic construct
  source 1..75: mol_type = other DNA
tctcagaggcagggcaggcctatacctggtatgagaatgcccatgaataccggttgacgccgtgggagaacgatc

SEQ ID NO: 875509 - DNA, 75 bp, synthetic construct
  source 1..75: mol_type = other DNA
cgacactcttgaaagctggcgtgaccagaagcagattatttctgtcatctgtcgagacggaattaaaattgatga

SEQ ID NO: 875510 - DNA, 75 bp, synthetic construct
  source 1..75: mol_type = other DNA
catatcgttgatgaactggcgatgccagatactgctttttatgcatgggatgcccgagggcatggacaaacttcg

SEQ ID NO: 875511 - DNA, 75 bp, synthetic construct
  source 1..75: mol_type = other DNA
acagttacacgatatggtcgtgcgtgtagataccagcagtatgcagccaatcgattctacctgccggtttcagta

SEQ ID NO: 875512 - DNA, 75 bp, synthetic construct
  source 1..75: mol_type = other DNA
aatattgcaaaatgtgagctggagtggtcctcctcctgccccttcggttaagctgattggctaccatcaaaatat

SEQ ID NO: 875513 - DNA, 75 bp, synthetic construct
  source 1..75: mol_type = other DNA
gatgcaatggttgcgcatattgaaaatggcgcggcgttccagtgggccaacgatgcgcaagatacggcattcctc

SEQ ID NO: 875514 - DNA, 75 bp, synthetic construct
  source 1..75: mol_type = other DNA
cacgcttggcgatccgatggcgtatctggtggcaccgccgctggaagcgacctatggcattgatgcagcgttgaa

SEQ ID NO: 875515 - DNA, 75 bp, synthetic construct
  source 1..75: mol_type = other DNA
atgccagctttagatttgattcgaccgtcggtaaccgccatgcgggtgattgcctccgttaacgctgaatttgcg

SEQ ID NO: 875516 - DNA, 75 bp, synthetic construct
  source 1..75: mol_type = other DNA
agcgatatcacaatcatcttgtccggggcttgcagagtatgacagccgtgcgcaaaggacgatgtggacttgtta

SEQ ID NO: 875517 - DNA, 75 bp, synthetic construct
  source 1..75: mol_type = other DNA
ggtcatgggatggttagatatgcaaagctggacggggcctggtcctgcaccatcattaaaggtcatatcaatgac

SEQ ID NO: 875518 - DNA, 75 bp, synthetic construct
  source 1..75: mol_type = other DNA
cgatactgacgatcgtggtgcttattgtcgttgggtgtcgcagatgctcaccttcacctcatcgggctgtgacaa

SEQ ID NO: 875519 - DNA, 75 bp, synthetic construct
  source 1..75: mol_type = other DNA
actgcaaccggttgataagcaaatgctgaataatttaaaaacaaatgcgacaagagcgactcaggcaagtgaata

SEQ ID NO: 875520 - DNA, 75 bp, synthetic construct
  source 1..75: mol_type = other DNA
cagaagaggttttgacaccgtatcttatgggggcttcaccccaatctatgggcaatggaataattgaaacattag

SEQ ID NO: 875521 - DNA, 75 bp, synthetic construct
  source 1..75: mol_type = other DNA
atgaaaatactacgctcgttagtttgtatatttttattggggggggggtcgggggcacaggcggccacaaaaatc

SEQ ID NO: 875522 - DNA, 75 bp, synthetic construct
  source 1..75: mol_type = other DNA
tgcctccgttaacgctgattttgcgcgtgaactgaaattgccgccgcatattcgtagcctcgggctgatttccgc

SEQ ID NO: 875523 - DNA, 75 bp, synthetic construct
  source 1..75: mol_type = other DNA
atactggcaaagatggcgtttacttccacttaagagataatgtagatgccttcttaaccttatcagcaactgaaa

SEQ ID NO: 875524 - DNA, 75 bp, synthetic construct
  source 1..75: mol_type = other DNA
gtgattttatttcgctgattggcttgttgattgcgctgattgtgacgctctcaatcacctccgttgccggttctg

SEQ ID NO: 875525 - DNA, 75 bp, synthetic construct
  source 1..75: mol_type = other DNA
accatcaacaccgccgttcagcagcgtacgactgtagggcttgtcggtctggcagtggcactttattccggcatc

SEQ ID NO: 875526 - DNA, 75 bp, synthetic construct
  source 1..75: mol_type = other DNA
cagtggtgtcgttgtagttggctatgaaggaagcttactcttaactcgtcagggtcaattagtagagaacttcat

SEQ ID NO: 875527 - DNA, 75 bp, synthetic construct
  source 1..75: mol_type = other DNA
ttccattattacgagttttaaagcctctaaagatgttggaatttcaaacggattaagaatccaactaacttttca

SEQ ID NO: 875528 - DNA, 75 bp, synthetic construct
  source 1..75: mol_type = other DNA
atgtttgatacaaaacaacttagatatagcggaaaagatggggtttatttccatctacaaggtaacccagataac

SEQ ID NO: 875529 - DNA, 75 bp, synthetic construct
  source 1..75: mol_type = other DNA
atgacgcaggaaaacgagattaaacgtcccacccaggatctggagctcgagccgattaaaccgctggataatagc

SEQ ID NO: 875530 - DNA, 75 bp, synthetic construct
  source 1..75: mol_type = other DNA
actacaacctgttgataaagtgatgttgaacaacctgaaaatcaatgccacaaaatcgacacaggcagcaactaa

SEQ ID NO: 875531 - DNA, 75 bp, synthetic construct
  source 1..75: mol_type = other DNA
ttcgtagccttgggctgatttctgccgactccgatgacgtcacctacattgccgctgatgaagcgaccaagcagg

SEQ ID NO: 875532 - DNA, 75 bp, synthetic construct
  source 1..75: mol_type = other DNA
cgctggaaaccgtcaccactactgccgaaaaagtccaacgccaaccggttattgcgcacctgattcgcgcgacag

SEQ ID NO: 875533 - DNA, 75 bp, synthetic construct
  source 1..75: mol_type = other DNA
gccgcaagatcaggaaaaattctgggttaaatatctgcgtgattttatttcactgattggcttgctgattgcgct

SEQ ID NO: 875534 - DNA, 75 bp, synthetic construct
  source 1..75: mol_type = other DNA
aactggatgggtaacctgcgtgaagcgattcgtgcccagtcgcgcgatgtctgggaacgctcgccgcaagatcag

SEQ ID NO: 875535 - DNA, 75 bp, synthetic construct
  source 1..75: mol_type = other DNA
tgcgcttggggttcaggcattacgcgtcgcgattccggcgctcatagtctctctgttcgtcagcgccgatatggt

SEQ ID NO: 875536 - DNA, 75 bp, synthetic construct
  source 1..75: mol_type = other DNA
gaatttgtgacccgtggactgcagattgctggcggttttatcgtggtggtcggttacgccatggtgcttcgcatg

SEQ ID NO: 875537 - DNA, 75 bp, synthetic construct
  source 1..75: mol_type = other DNA
atgggcgtgaaatatttgatgcctttctttttcctcggtttcctcgcaggtggctacctcgatctcagtctgctg

SEQ ID NO: 875538 - DNA, 75 bp, synthetic construct
  source 1..75: mol_type = other DNA
attcagtttgttgaagactataattctcataatacccgtcgtttagatgttgatgaaatggttgctcttcttaga

SEQ ID NO: 875539 - DNA, 75 bp, synthetic construct
  source 1..75: mol_type = other DNA
aggcgagcaaagatattagcatcaaaaaactatattctctggaggatggtaagactggtaaatagaataaacgtt

SEQ ID NO: 875540 - DNA, 75 bp, synthetic construct
  source 1..75: mol_type = other DNA
acctgatcgccggtttcctgtttgtttgctacatccaggtcagcaacctgttgccggttgccgtactgggcgcag

SEQ ID NO: 875541 - DNA, 75 bp, synthetic construct
  source 1..75: mol_type = other DNA
cgaaggtctggtactaccggaactgaaagatattcagaaagtctcccgcgcaattgcgtttgcggttggcaaaat

SEQ ID NO: 875542 - DNA, 75 bp, synthetic construct
  source 1..75: mol_type = other DNA
aaggattaagcgaggaagcggcgcggcagaaagtctttatggtcgatcgctttggcttgctgaccgacaagatgc

SEQ ID NO: 875543 - DNA, 75 bp, synthetic construct
  source 1..75: mol_type = other DNA
atcccggccattgaccaggacacacttttcgagctccgccgtctcggggcactgcagaaacacctgtttctggag

SEQ ID NO: 875544 - DNA, 75 bp, synthetic construct
  source 1..75: mol_type = other DNA
gaaaaatccgatggcgacagtcagcgccggtgatggtttcccggtcgctatcctgaaccgtaatcagcctgcttt

SEQ ID NO: 875545 - DNA, 75 bp, synthetic construct
  source 1..75: mol_type = other DNA
gaaagaatgctcgatgccttggataaccaggagttggtgaagctggttactgaacgcaacagtcagccactgcat

SEQ ID NO: 875546 - DNA, 75 bp, synthetic construct
  source 1..75: mol_type = other DNA
accaggagctggtgaaactggttactgagcgcagcaatcagccactacatgatgtggacctggacagttatttat

SEQ ID NO: 875547 - DNA, 75 bp, synthetic construct
  source 1..75: mol_type = other DNA
agtgataagttaaaattttatataggggatgtgagggactatagcagtgttttaacagcgactcgtggggttgat

SEQ ID NO: 875548 - DNA, 75 bp, synthetic construct
  source 1..75: mol_type = other DNA
gtgccagcaaaggcattggtcgcgccatcgcctgccaactggcggcagacggctttaacattggcgttcactatc

SEQ ID NO: 875549 - DNA, 75 bp, synthetic construct
  source 1..75: mol_type = other DNA
atgaaatcacgcactctttccctttcacttcgggtagcgttgtatcgccgcgcggtagcctgcgcctggttgagt

SEQ ID NO: 875550 - DNA, 75 bp, synthetic construct
  source 1..75: mol_type = other DNA
acgcttgaagatgctgtcgatctggtcctatatgcgtttgaacatggtaataatggcgatatatttgtccaaaaa

SEQ ID NO: 875551 - DNA, 75 bp, synthetic construct
  source 1..75: mol_type = other DNA
gctggaagattcattatgaaacagcgcgtttaaattatattcttgaatgttttggggataaccttgctgctgagg

SEQ ID NO: 875552 - DNA, 75 bp, synthetic construct
  source 1..75: mol_type = other DNA
atgaaaatttcccgcctcggagaagcgcccgattaccgcttctcgctggctaatgagcgtacttttctggcgtgg

SEQ ID NO: 875553 - DNA, 75 bp, synthetic construct
  source 1..75: mol_type = other DNA
atgatcggcgctcgccagggtggtcgcatcatcacgctttcctcggtttccggcgtaatgggcaatcgcggtcag

SEQ ID NO: 875554 - DNA, 75 bp, synthetic construct
  source 1..75: mol_type = other DNA
actctcataatactcaacggttagatgttgaaggcatgaaagagctcttgctaaaattagcctttattcgagcaa

SEQ ID NO: 875555 - DNA, 75 bp, synthetic construct
  source 1..75: mol_type = other DNA
aacaatttgaagcactatgcagtagagaggaaatgttagtagcggaggatcaaggtcgctattatcgcatccctg

SEQ ID NO: 875556 - DNA, 75 bp, synthetic construct
  source 1..75: mol_type = other DNA
gaccttcacttagttcaagattataattcaaataacacagaacagcttgatgtcgaaggaatgaaaaatctttta

SEQ ID NO: 875557 - DNA, 75 bp, synthetic construct
  source 1..75: mol_type = other DNA
ttactggcggaacagggtctttcggtaacgctgtacttaatcgttttcttgaaactgatattaaagaaataagga

SEQ ID NO: 875558 - DNA, 75 bp, synthetic construct
  source 1..75: mol_type = other DNA
taatggtgatatttttgtccaaaaggcacctgcggctaccatcgaaacgttggctattgcactcaaagaattact

SEQ ID NO: 875559 - DNA, 75 bp, synthetic construct
  source 1..75: mol_type = other DNA
gcacctgcggctactattcaaactttagccgttgctattacagagttaatgggagtgcccgatcataaaattgat

SEQ ID NO: 875560 - DNA, 75 bp, synthetic construct
  source 1..75: mol_type = other DNA
cttgagccacatggcatcagccacggttcggccggagcaagaagcatcgccacaatggcaacccggagaggttac

SEQ ID NO: 875561 - DNA, 75 bp, synthetic construct
  source 1..75: mol_type = other DNA
catgagggcaaactttacggcttaggcaccgccgatatgaaagggttctttgcgtttatccttgatgcattacgc

SEQ ID NO: 875562 - DNA, 75 bp, synthetic construct
  source 1..75: mol_type = other DNA
taccgtatcccacgctcaacctcgggcatattcacggcggtgacgcatctaaccgaatttgcgcctgctgtgagt

SEQ ID NO: 875563 - DNA, 75 bp, synthetic construct
  source 1..75: mol_type = other DNA
atttaatcactctgctggcggactggtttaaagatttaggcttcaatgtggaagtgcagcctgtgccaggaactc

SEQ ID NO: 875564 - DNA, 75 bp, synthetic construct
  source 1..75: mol_type = other DNA
ccagattgggagcctgaatgataccgtagctgaacaaaatcttctcccggtattactgtccttaccgatactttc

SEQ ID NO: 875565 - DNA, 75 bp, synthetic construct
  source 1..75: mol_type = other DNA
cgaaaaaaaagcgggaaaagccgaagagaaaacaatcgagtacagcatcctgcaacaactgctctataaagagaa

SEQ ID NO: 875566 - DNA, 75 bp, synthetic construct
  source 1..75: mol_type = other DNA
aaccgtatctgtgcttgctgtgaattacatatggatattcgtccactgccgggcatgacactcaatgaactgaat

SEQ ID NO: 875567 - DNA, 75 bp, synthetic construct
  source 1..75: mol_type = other DNA
acagcactgaactgcaacagcaactgcgaacacatcagggctttgcaccgctgctggcgctggatgtggacgccc

SEQ ID NO: 875568 - DNA, 75 bp, synthetic construct
  source 1..75: mol_type = other DNA
tgcatcataagcctgcccgactgcggcttggctgggataaggaagacggcattgtgctggaatttgatgagaaat

SEQ ID NO: 875569 - DNA, 75 bp, synthetic construct
  source 1..75: mol_type = other DNA
tcatcggtctgctgatgaacataccatcactgactccgatgctgtttctccgtaagacgcaaaagaacgtgaagg

SEQ ID NO: 875570 - DNA, 75 bp, synthetic construct
  source 1..75: mol_type = other DNA
gcatattcacggtggcgacgcttctaaccgtatttgcgcttgctgtgagttgcatatggatattcgtccgctgcc

SEQ ID NO: 875571 - DNA, 75 bp, synthetic construct
  source 1..75: mol_type = other DNA
atgaaaaacaaattaccgccatttatcgagatttaccgtgctctgattgccacaccttcaataagcgccacggaa

SEQ ID NO: 875572 - DNA, 75 bp, synthetic construct
  source 1..75: mol_type = other DNA
tctccgaatatcaggagccgcataccgtctcccagcttaagggggctcctccgggctacgttggctacggtcagg

SEQ ID NO: 875573 - DNA, 75 bp, synthetic construct
  source 1..75: mol_type = other DNA
atattgcatttggtggtacagaaaaaattgtggacctattccacgttaaacctgcaaaacatttgtttctcactt

SEQ ID NO: 875574 - DNA, 75 bp, synthetic construct
  source 1..75: mol_type = other DNA
aagcccgtgtagcaccctgcgccgcatctgggctgaacatcgtgcggagttctgcgctaacgctcacctgaaggg

SEQ ID NO: 875575 - DNA, 75 bp, synthetic construct
  source 1..75: mol_type = other DNA
tggccgaggctgtaaacctgatactacgccccactggcttgcagcaagttggaagaaggaaaagaaaaacaaata

SEQ ID NO: 875576 - DNA, 75 bp, synthetic construct
  source 1..75: mol_type = other DNA
aagaaatgatgttgttgaatacctgaaaggcaggggagcggggcagaacatggccgaggctgtaaacctgatact

SEQ ID NO: 875577 - DNA, 75 bp, synthetic construct
  source 1..75: mol_type = other DNA
acggataatcaacccctggagacgtatctggaggagacctattaccatcgactcaacccggagcaggggttctgc

SEQ ID NO: 875578 - DNA, 75 bp, synthetic construct
  source 1..75: mol_type = other DNA
gcatgccgatctgcttagctggtttaaagggaacgatcgtccgcccgcccccgccggaaaaccgctggagttcag

SEQ ID NO: 875579 - DNA, 75 bp, synthetic construct
  source 1..75: mol_type = other DNA
atctgggctgaacatcgtgcggagttctgcgctaacgctcacctgaagggctggaggccacgccatgaatgcgaa

SEQ ID NO: 875580 - DNA, 75 bp, synthetic construct
  source 1..75: mol_type = other DNA
ccagtatccgcgctgatcatgatggtgttgtttgcgctgtttgtgttcatcagccgcaaaaccgccttcgggcgc

SEQ ID NO: 875581 - DNA, 75 bp, synthetic construct
  source 1..75: mol_type = other DNA
cgccctgcgcggaatggggctgtttatgaccaacgccctgccagtgccgattgacgaaaacgaagtgctggactg

SEQ ID NO: 875582 - DNA, 75 bp, synthetic construct
  source 1..75: mol_type = other DNA
tataaaagtattatgccgctgcaaagtttgtaatcatgagtggttgccgcggcctagctttcttaaacgggggag

SEQ ID NO: 875583 - DNA, 75 bp, synthetic construct
  source 1..75: mol_type = other DNA
acctccaaccagatgttcttcgacctggctcaggcaagcgcttccggagggctgaacaacaagaagatttacacc

SEQ ID NO: 875584 - DNA, 75 bp, synthetic construct
  source 1..75: mol_type = other DNA
aacgtcaacaagtgaagtccgtagtggcgaaagaagccacccgcgctactaaaaactttggctatgaagagatgt

SEQ ID NO: 875585 - DNA, 75 bp, synthetic construct
  source 1..75: mol_type = other DNA
gccagccagtgaagcccgtggtggcgaaagaacctgctcgcaccgccaaaaattttggctatgaagagatgttga

SEQ ID NO: 875586 - DNA, 75 bp, synthetic construct
  source 1..75: mol_type = other DNA
ttgtcgttgtatctggttttactggttgcgggaaaagcgccattgccggggaaatagaaattgcgatgaaggcta

SEQ ID NO: 875587 - DNA, 75 bp, synthetic construct
  source 1..75: mol_type = other DNA
tgagatgtacaaaccaacagtgcgcatcgtggaagttaatgtgccacacgccgcgggcattcgtatcaaaggaga

SEQ ID NO: 875588 - DNA, 75 bp, synthetic construct
  source 1..75: mol_type = other DNA
gatgtacaaaccaactgtgcgcatcgtggaagttaatgtgccccgcgccgcaggcattcgcatcaaaggagagtg

SEQ ID NO: 875589 - DNA, 75 bp, synthetic construct
  source 1..75: mol_type = other DNA
gtatgccttatgcgcacggcgtcagtacgttaccgccgtgggatgaaagccgagttgagcatcctgacgaactgg

SEQ ID NO: 875590 - DNA, 75 bp, synthetic construct
  source 1..75: mol_type = other DNA
gcacaacgggttgtcggtgcatgggtatggaatcgtaataaagaagctgtagaaacctgtcatgcaaaagcggtg

SEQ ID NO: 875591 - DNA, 75 bp, synthetic construct
  source 1..75: mol_type = other DNA
tgctgcatgtgctgtaaatatgaactcagtagatcagacagttttgctcggtcaagttcgtacgaaaaagttagc

SEQ ID NO: 875592 - DNA, 75 bp, synthetic construct
  source 1..75: mol_type = other DNA
gcgattaatgcacagtatgcttatgcccgcggatataatggatacgggatcaacattggtgtactggacgcaaag

SEQ ID NO: 875593 - DNA, 75 bp, synthetic construct
  source 1..75: mol_type = other DNA
aacactaataaatcagactgggatgctaacaccccaaaatatgtcaaagtttaaatccgaagctgctaaagtcaa

SEQ ID NO: 875594 - DNA, 75 bp, synthetic construct
  source 1..75: mol_type = other DNA
caagcaaaactacctttagtaaagctaatagcatcggttttaatgttgatgataaactagttgcaataattatca

SEQ ID NO: 875595 - DNA, 75 bp, synthetic construct
  source 1..75: mol_type = other DNA
gttttatcacgctcgccacgccaactgttgttcttggattgcttgatgagctttctgaagctaaagctgccgaag

SEQ ID NO: 875596 - DNA, 75 bp, synthetic construct
  source 1..75: mol_type = other DNA
ttttttgatatgaatactgaaagttactacgcaaaatatacattaaattttttagctgcttttatcattatgatt

SEQ ID NO: 875597 - DNA, 75 bp, synthetic construct
  source 1..75: mol_type = other DNA
taatgaacagaatattccaaaaaatgaaggaatcagactcacatggaaattcaaaaataattcttataattataa

SEQ ID NO: 875598 - DNA, 75 bp, synthetic construct
  source 1..75: mol_type = other DNA
caaataatttgctggagctgcgtaatctggtgcaggttgcggaattgattgttcgctgtgcgatgatgcgcaagg

SEQ ID NO: 875599 - DNA, 75 bp, synthetic construct
  source 1..75: mol_type = other DNA
tgagcttccgttttcttaacgtcagcccgacggtggagcggcaattacagcggattattttctctctcgagcgag

SEQ ID NO: 875600 - DNA, 75 bp, synthetic construct
  source 1..75: mol_type = other DNA
aataaaattccgttccaggctctttatattgctactggtcaatcaacagctggtacagccaacgccgacgccacc

SEQ ID NO: 875601 - DNA, 75 bp, synthetic construct
  source 1..75: mol_type = other DNA
catgaaatcgacgaactgaatattctacacgcgaccatgctggcgatgcagcgtgcggttgcgggactgcatatc

SEQ ID NO: 875602 - DNA, 75 bp, synthetic construct
  source 1..75: mol_type = other DNA
gtagcgccactggatttcacctctctgcgtaatgctgtaaccgagttcgaacagcatcgcgacgagcacgcctgg

SEQ ID NO: 875603 - DNA, 75 bp, synthetic construct
  source 1..75: mol_type = other DNA
tccgctcgctaaattgtgtcagacgcaccaacatcctttttctgtcattcaggtcgaccttgaccattttaaagc

SEQ ID NO: 875604 - DNA, 75 bp, synthetic construct
  source 1..75: mol_type = other DNA
aatactggcaataagccctgataaactggtgctggatcacggcagtcaaccagaagacaataatgcagcgcttaa

SEQ ID NO: 875605 - DNA, 75 bp, synthetic construct
  source 1..75: mol_type = other DNA
acacggcgctaaccgcatggcctcgaattcattgctggagtgtctggtctatggctggtcggcggcagaagatat

SEQ ID NO: 875606 - DNA, 75 bp, synthetic construct
  source 1..75: mol_type = other DNA
gtgagttataccggcttacacggcgctaaccgcatggcctctaattcattgctggagtgtctggtctatggctgg

SEQ ID NO: 875607 - DNA, 75 bp, synthetic construct
  source 1..75: mol_type = other DNA
atgaatactctccctgatcattcatgtgacgtgttgattatcggtagcggcgcagccggactttcactggcgctg

SEQ ID NO: 875608 - DNA, 75 bp, synthetic construct
  source 1..75: mol_type = other DNA
cggcgtctatcctggcgaaagtgacacgcgatgctgaaatggcggagctggacatcatttacccacaatatggat

SEQ ID NO: 875609 - DNA, 75 bp, synthetic construct
  source 1..75: mol_type = other DNA
ggcggaattgccgccgtgtttgatgaaactgacagcatcgattcccatgtggaagataccttaattgctggtgcc

SEQ ID NO: 875610 - DNA, 75 bp, synthetic construct
  source 1..75: mol_type = other DNA
atgaaacgcctcggtgcggattgtatgtatctcgacatcagccataagcctgccgattttattcgccagcatttc

SEQ ID NO: 875611 - DNA, 75 bp, synthetic construct
  source 1..75: mol_type = other DNA
gggatgatagccgctatcaggctggtgggcaatgctatcagtctggttcagttcgttgccatacctgcaatgggc

SEQ ID NO: 875612 - DNA, 75 bp, synthetic construct
  source 1..75: mol_type = other DNA
aggaaaaaggcaagctggccgaacaggtggaaagcctgaacgggcaaatcagcgagctggagaacctgaaaagcg

SEQ ID NO: 875613 - DNA, 75 bp, synthetic construct
  source 1..75: mol_type = other DNA
aacaggtcgcgcaggagctgcagcagaagtttgacgacttcaaagcaaagaacgacaagcgcgtggaggcgattg

SEQ ID NO: 875614 - DNA, 75 bp, synthetic construct
  source 1..75: mol_type = other DNA
cgccgtgccggaagagctggatcgcacgatccttaatcttctgaaagatgaagtggtgatgcgccaggaggcgac

SEQ ID NO: 875615 - DNA, 75 bp, synthetic construct
  source 1..75: mol_type = other DNA
tccgcctggggcttctcatccccccggtgtatgcaatatacgaaaaaaaagctcgtactttcgtacgagctcttc

SEQ ID NO: 875616 - DNA, 75 bp, synthetic construct
  source 1..75: mol_type = other DNA
tacaccaataaaccgtttgtcggtttttataccaccaagcgcaccggcgggatgctggtcgattcgcaggccatc

SEQ ID NO: 875617 - DNA, 75 bp, synthetic construct
  source 1..75: mol_type = other DNA
cccgacggtggagcggcaattacagcggattattttctctctcgagcgagaagcccggaaaaaagcggacaatgt

SEQ ID NO: 875618 - DNA, 75 bp, synthetic construct
  source 1..75: mol_type = other DNA
ctcagcgagctggaaaacctcaaaagcgaccttgaaaaagagctgcttgagctgaaacgtccggcaggtggtgcg

SEQ ID NO: 875619 - DNA, 75 bp, synthetic construct
  source 1..75: mol_type = other DNA
gctgaaacgtccggcaggtggtgcgcaaaataaactggccaccgagcataaagaagcgtttgtgggcttcctgcg

SEQ ID NO: 875620 - DNA, 75 bp, synthetic construct
  source 1..75: mol_type = other DNA
ctggctgagctggaaaatctcaaaaacgatcttgaggctgaactggctgaagtcaagcgtccggcaggtggcacg

SEQ ID NO: 875621 - DNA, 75 bp, synthetic construct
  source 1..75: mol_type = other DNA
ggtttctacaccaccaaacgaaccgggggaatgctggtggattctcaggccattaaactgctgcagatcggcact

SEQ ID NO: 875622 - DNA, 75 bp, synthetic construct
  source 1..75: mol_type = other DNA
aagaagcgtttgtgggcttcctgcgtaaaggccgtgaagatggtctgcgcgatctggagcgcaaggcattacagg

SEQ ID NO: 875623 - DNA, 75 bp, synthetic construct
  source 1..75: mol_type = other DNA
taaaggccgtgaagacggtctgcgcgatctggagcgcaaggcattacaggtgggcaccgatgaagacggtggcta

SEQ ID NO: 875624 - DNA, 75 bp, synthetic construct
  source 1..75: mol_type = other DNA
atagaattatcagaaagtaaaggttatatctacggatggagagaattgctgtgcacatcgccattagatgcattt

SEQ ID NO: 875625 - DNA, 75 bp, synthetic construct
  source 1..75: mol_type = other DNA
caactaatgttaagctggcatggtttgaaggcgatgagcttcagacccgggtttctgcgaactccttccggcatg

SEQ ID NO: 875626 - DNA, 75 bp, synthetic construct
  source 1..75: mol_type = other DNA
aactggatacctctggactcctcctacgaagcgatagtgtcccgtaaacttgatgccgaacaccggcactatgtt

SEQ ID NO: 875627 - DNA, 75 bp, synthetic construct
  source 1..75: mol_type = other DNA
tttcgaccttgatgccaggcatacagggttaaagggttatgccagcaatgttgtacgcatcaacaatgaggggac

SEQ ID NO: 875628 - DNA, 75 bp, synthetic construct
  source 1..75: mol_type = other DNA
gtgcgtgcttcaccattcaggatgtcaccgttatgccggagtcactgcctgcagcgttcagttatctcgccggca

SEQ ID NO: 875629 - DNA, 75 bp, synthetic construct
  source 1..75: mol_type = other DNA
gtcattgctggccgcatttgcgccagtaatggtgtgatcgtcaatggcagaccgacagaagtttcatggcaggtt

SEQ ID NO: 875630 - DNA, 75 bp, synthetic construct
  source 1..75: mol_type = other DNA
tcacaggtcacccgagcagctgcaggcgcactgcgcgctgcagacagtgaaaccagcgcgctcattgctgacacg

SEQ ID NO: 875631 - DNA, 75 bp, synthetic construct
  source 1..75: mol_type = other DNA
caaaataaagttgccggtgaacacaaagaagcgtttatcggatttatgcgcaaggggcgtgaagacggtctgcgt

SEQ ID NO: 875632 - DNA, 75 bp, synthetic construct
  source 1..75: mol_type = other DNA
tggtcgctttcaattgaaccagtcgctgttgataaggattcatcagatgttgaccagatatggatgcttatgacg

SEQ ID NO: 875633 - DNA, 75 bp, synthetic construct
  source 1..75: mol_type = other DNA
atgcataagtacacaagtatctgaaggaactttatataaatataagaataaacatataagagaatttttgtccga

SEQ ID NO: 875634 - DNA, 75 bp, synthetic construct
  source 1..75: mol_type = other DNA
atcacaaagtcaatttaatgagcctcgcggtgcggggcttttttatatctgaatttcacagcgcatctcacgcgc

SEQ ID NO: 875635 - DNA, 75 bp, synthetic construct
  source 1..75: mol_type = other DNA
tgaagccgcgcgggccggtgagcaagggcgcggatttgctgtcgttgccagtgaagtgcgtacactcgccagccg

SEQ ID NO: 875636 - DNA, 75 bp, synthetic construct
  source 1..75: mol_type = other DNA
tacaaaaaactggtgaatctgggcggtacggcttccggatgggttggcgagactgacgcgcgctcccagactgcc

SEQ ID NO: 875637 - DNA, 75 bp, synthetic construct
  source 1..75: mol_type = other DNA
cgcagggcaagagcgtctcgctcaaacaatttgtcagtcgccatattaatgagatcggtttgctggtggtaatcg

SEQ ID NO: 875638 - DNA, 75 bp, synthetic construct
  source 1..75: mol_type = other DNA
tcggtgtttgctgttggcggtaatgccacagcggcgcagttatgcggtattaacgttcgtcgggtgcgcattctt

SEQ ID NO: 875639 - DNA, 75 bp, synthetic construct
  source 1..75: mol_type = other DNA
cactacgcccctttacgcttaatctcagaactggtcgcataactatggggcatggtctggatgttacaggagata

SEQ ID NO: 875640 - DNA, 75 bp, synthetic construct
  source 1..75: mol_type = other DNA
caaaagcaaggcaaagaaacagcgccagcgtgacgccgcggcggtaatagatgctgattttgacgatctgagcgc

SEQ ID NO: 875641 - DNA, 75 bp, synthetic construct
  source 1..75: mol_type = other DNA
tcaacatggcgcgatttatcaaaagccagagcctgacgttgctcgaaaaactggatgcactggatgcagacgaac

SEQ ID NO: 875642 - DNA, 75 bp, synthetic construct
  source 1..75: mol_type = other DNA
tcaacatggcaaaattcataaaaagccagagcctgacgctgctcgaaaaactggactcactcgatgctgatgcac

SEQ ID NO: 875643 - DNA, 75 bp, synthetic construct
  source 1..75: mol_type = other DNA
ggaagatttaaatctacaggaatttattaataaagcaaataatgccgttcagcgttcaggcgatatcttgtccgg

SEQ ID NO: 875644 - DNA, 75 bp, synthetic construct
  source 1..75: mol_type = other DNA
gtattccgtctgcacaaacattctgtgtcggcagaacctcgcggagcgggtgaaccagttagtttcgctacggtg

SEQ ID NO: 875645 - DNA, 75 bp, synthetic construct
  source 1..75: mol_type = other DNA
acaccgggtgggtataccatgtcggtggcaatgaccaactgtggacgtcttggctggacgactaaccagcaaggc

SEQ ID NO: 875646 - DNA, 75 bp, synthetic construct
  source 1..75: mol_type = other DNA
caaggacagccaatggcaccgatggtcaggcgtacatggataataacggtaactggctttgtggctcgcaagtta

SEQ ID NO: 875647 - DNA, 75 bp, synthetic construct
  source 1..75: mol_type = other DNA
tacttttgaaaacgactcaatccttgcctggattcgaaatactgactgggcaaagattggatttaaaaatgatgc

SEQ ID NO: 875648 - DNA, 75 bp, synthetic construct
  source 1..75: mol_type = other DNA
aataagcaatttggcatctacatgattaataattcaaggacagccaatggcaccgatggtcaggcgtacatggat

SEQ ID NO: 875649 - DNA, 75 bp, synthetic construct
  source 1..75: mol_type = other DNA
tcaacatggcaggattcataaaaagccagagcctgacgctgctcgaaaagctggacgcactcgatgctgacgaac

SEQ ID NO: 875650 - DNA, 75 bp, synthetic construct
  source 1..75: mol_type = other DNA
tggagtggattgccgaatccaatggcagtgtggcactcacagagctggcgcaacaagccgggttacccaattcca

SEQ ID NO: 875651 - DNA, 75 bp, synthetic construct
  source 1..75: mol_type = other DNA
gatgacgaggcctgtggcgaaatcgaaacggctcatccgggatatctgggttcgcaggacacgttctatgtaggc

SEQ ID NO: 875652 - DNA, 75 bp, synthetic construct
  source 1..75: mol_type = other DNA
tacggtatgccggagcaagtccagttctggtcggtggccgataacgttcgctttggcggcgcgctgatggcagta

SEQ ID NO: 875653 - DNA, 75 bp, synthetic construct
  source 1..75: mol_type = other DNA
atggtcgtgcgtgttgataccagcagtatgcagccaatcgattctacctgcacgttccagtacgtactgaatgag

SEQ ID NO: 875654 - DNA, 75 bp, synthetic construct
  source 1..75: mol_type = other DNA
ctttcaacctatctgatgaaagacggcaaactatgtgatggctcgcaaatgaatgaagagggcgcttactgtcgc

SEQ ID NO: 875655 - DNA, 75 bp, synthetic construct
  source 1..75: mol_type = other DNA
tgcgcaatctaatggaagagtctggcgaaacggtcaatatggcggtgcttgatcaaagcgatcacgaagcgatta

SEQ ID NO: 875656 - DNA, 75 bp, synthetic construct
  source 1..75: mol_type = other DNA
ctgccatcctgctgtttctggtagtggtggtggattttaccggacggctgatgtcggtactggcagatggtgtgc

SEQ ID NO: 875657 - DNA, 75 bp, synthetic construct
  source 1..75: mol_type = other DNA
gctttggtgcttccagcctgctggcaagcctgctgaaagctctgggccacggcgacggtaagagcgccagcagct

SEQ ID NO: 875658 - DNA, 75 bp, synthetic construct
  source 1..75: mol_type = other DNA
tctggtcggtggccgacaacgtccgttttgggggggcactgatggcggtgaagatcgctgaaaaactggtgcagg

SEQ ID NO: 875659 - DNA, 75 bp, synthetic construct
  source 1..75: mol_type = other DNA
tttcagcctccgcccagggcaaaaaagcggtcgatgcgttagcggggcagagtgcgaaattgctcaacggcattc

SEQ ID NO: 875660 - DNA, 75 bp, synthetic construct
  source 1..75: mol_type = other DNA
ttgaatttaaagatacacatccgggctttactttcgcagtcgccgtaagccggagttttgacacccaatcaaaac

SEQ ID NO: 875661 - DNA, 75 bp, synthetic construct
  source 1..75: mol_type = other DNA
atgttggatctgtttgccgatgctgaaccgtggcaagagccactggcggctggagcggtaattttgcaccgtttt

SEQ ID NO: 875662 - DNA, 75 bp, synthetic construct
  source 1..75: mol_type = other DNA
tgatcacctgttcggttatatcaatgtcaaaaacctcacgccgctcaagctggtgattaactccgggaacggcgc

SEQ ID NO: 875663 - DNA, 75 bp, synthetic construct
  source 1..75: mol_type = other DNA
gaaaaacgctgggcgaactggtgcgcgaccggatggcagcgtttccggcaagcggtgagatcaacagcaaactgg

SEQ ID NO: 875664 - DNA, 75 bp, synthetic construct
  source 1..75: mol_type = other DNA
cggtggtggacgccatcgaagcccgctttaacgccctcggcgcaccggtggaattcatcaaagtacacaacacgc

SEQ ID NO: 875665 - DNA, 75 bp, synthetic construct
  source 1..75: mol_type = other DNA
gaaaaacgctgggcgaactggtgcgtgaccgtatggcggcattcccggcgagcggcgagatcaacagcaaactgg

SEQ ID NO: 875666 - DNA, 75 bp, synthetic construct
  source 1..75: mol_type = other DNA
aaggaaaaacgctgggcgaactggtgcgcgaccggatggcggcattcccggcaagcggtgagatcaacagcaaac

SEQ ID NO: 875667 - DNA, 75 bp, synthetic construct
  source 1..75: mol_type = other DNA
ccggcaagcggtgagatcaacagcaaactggcgcaacccgttgaggcgattaaccgcgtggaacagcattttagc

SEQ ID NO: 875668 - DNA, 75 bp, synthetic construct
  source 1..75: mol_type = other DNA
tgcggtgatggaaagcttcttcggcacgctgaaatctgagtgtttttacctgatggaacacaagaatatcagcga

SEQ ID NO: 875669 - DNA, 75 bp, synthetic construct
  source 1..75: mol_type = other DNA
aacagagctggttgaagaagctcgcacgccgtctgggaccaggtcatgtcgttaatctctgttttatcgtcgtgt

SEQ ID NO: 875670 - DNA, 75 bp, synthetic construct
  source 1..75: mol_type = other DNA
accattttaaagcgattaatgaccgctttggtcatcaggcgggcgaccgtgtgctttctcatgctgccggattaa

SEQ ID NO: 875671 - DNA, 75 bp, synthetic construct
  source 1..75: mol_type = other DNA
ctttaaagccctcggcgcacccgtggaattaatcaaagtacacaacacaccggacggcaatttccccaacggtat

SEQ ID NO: 875672 - DNA, 75 bp, synthetic construct
  source 1..75: mol_type = other DNA
aactccggtaacggtgcggcaggcccggtgattgatgcgctggaagcgcgctttaaagccctgaacgtgccggtg

SEQ ID NO: 875673 - DNA, 75 bp, synthetic construct
  source 1..75: mol_type = other DNA
gtcacggaatttaaaatcagcggaaaaaaactgtatctgtcccccgttctggatctgtataacggagaaatagtt

SEQ ID NO: 875674 - DNA, 75 bp, synthetic construct
  source 1..75: mol_type = other DNA
tccggtcacccttcagcatcaatgtcgggctggatgctggcgtggctaaactcgccacgctgtcagatggcacag

SEQ ID NO: 875675 - DNA, 75 bp, synthetic construct
  source 1..75: mol_type = other DNA
tttaaaaatgatgccgacagcgatactgattcatacatgtggtttgaaacaggcgacaacggcaatgaatatttc

SEQ ID NO: 875676 - DNA, 75 bp, synthetic construct
  source 1..75: mol_type = other DNA
ggccattaaggccattcggcatcaacttaagaacaggagttgtgtctgttggtaatggtgccaggattgatggcg

SEQ ID NO: 875677 - DNA, 75 bp, synthetic construct
  source 1..75: mol_type = other DNA
ttattgctaatgcggttatctgttcatgtatagcgatccgcgtcggtacgttccggcgtaacggttcacaacatc

SEQ ID NO: 875678 - DNA, 75 bp, synthetic construct
  source 1..75: mol_type = other DNA
tggcgatgaccaactgtgggcatctgggctggacgagccatcggcaaggttatctctattcgcccattgatccgc

SEQ ID NO: 875679 - DNA, 75 bp, synthetic construct
  source 1..75: mol_type = other DNA
ggaatcaggacacctctggtaatgcggctacagcgaccaaattgcagacagcacgtactattaacggtgtctcgt

SEQ ID NO: 875680 - DNA, 75 bp, synthetic construct
  source 1..75: mol_type = other DNA
ggactggggaacaagcaatttggcatctacatgattaataactcaaggacagccaatggcaccgatggtcaggcg

SEQ ID NO: 875681 - DNA, 75 bp, synthetic construct
  source 1..75: mol_type = other DNA
atgacaactcatgagctgcttttactgattgccaatgcggttatctgttctgcgatagcaatccgcgtcggaacc

SEQ ID NO: 875682 - DNA, 75 bp, synthetic construct
  source 1..75: mol_type = other DNA
gccgtcatgtttgctgcggtttttaaaactcgcggtaacgtcgttcagattttcaaaataacgaggtctaaagat

SEQ ID NO: 875683 - DNA, 75 bp, synthetic construct
  source 1..75: mol_type = other DNA
gctgtcatgcttgccgctgttctgaagacgcgcggcaatgtcgtgcagatattcaaaatatcgaggtctcaacat

SEQ ID NO: 875684 - DNA, 75 bp, synthetic construct
  source 1..75: mol_type = other DNA
cttgctgcggttcttaaaactcgcggtaacgtcgttcagattttcaaaataacgaggtctaaacatggagattaa

SEQ ID NO: 875685 - DNA, 75 bp, synthetic construct
  source 1..75: mol_type = other DNA
atggctatcatcccaaaaaactatgcgcggttagaaaacggttatcgcgaaaaggcgctgaaactctatccgtgg

SEQ ID NO: 875686 - DNA, 75 bp, synthetic construct
  source 1..75: mol_type = other DNA
ttaccaccaatgcggttatttgcgccggtatagcagttcgagttgccacatttcggagaaacggttctcaacaca

SEQ ID NO: 875687 - DNA, 75 bp, synthetic construct
  source 1..75: mol_type = other DNA
caatttgacgccagtaacgtcggggaatatctacaagcggcggaagtgaacgccatgcttgacgatccagatacg

SEQ ID NO: 875688 - DNA, 75 bp, synthetic construct
  source 1..75: mol_type = other DNA
cacccagatgaactcgaaagccgatgaggatgtccgtaaagagcttaatgccattgctgacgtatcagccggccg

SEQ ID NO: 875689 - DNA, 75 bp, synthetic construct
  source 1..75: mol_type = other DNA
cacccagatgaactcgaaagccgatgatgaagtccgtaaagagcttaatgccattgctgacgtatcagccggccg

SEQ ID NO: 875690 - DNA, 75 bp, synthetic construct
  source 1..75: mol_type = other DNA
cacccagatgaactctaaagccgatgaggaagtccgtaaagagcttaatgccattgctgacgtatcagccggccg

SEQ ID NO: 875691 - DNA, 75 bp, synthetic construct
  source 1..75: mol_type = other DNA
gcctgagcgaaccgatcgggaaattttcgatgactactgtctggcagccgtcgccggattttcgacaacgggcag

SEQ ID NO: 875692 - DNA, 75 bp, synthetic construct
  source 1..75: mol_type = other DNA
tcaggcggtattggatcagtttgctaaaatcgttccaaccgtactgaaagaagaaggttgccacggctatgcgcc

SEQ ID NO: 875693 - DNA, 75 bp, synthetic construct
  source 1..75: mol_type = other DNA
tttgtgatgaagccgaccgacttttgcaactgaacattaatctgctccggcaaatggttgatgaaccagatgtgt

SEQ ID NO: 875694 - DNA, 75 bp, synthetic construct
  source 1..75: mol_type = other DNA
gctgacagaaaaaccgatgaattcgaaatggcccattctgcaattaacaaagcattaggagtgatactgatgaac

SEQ ID NO: 875695 - DNA, 75 bp, synthetic construct
  source 1..75: mol_type = other DNA
gacacatccagaatatgaaaagttctgtgacggtcgggaatatatttcaacggaagagtttagcgcctggatgaa

SEQ ID NO: 875696 - DNA, 75 bp, synthetic construct
  source 1..75: mol_type = other DNA
gaatttgacgcatggatggagaaaaataaccttcaatgggccatcatttacagagatgaaggatgtgctgaccct

SEQ ID NO: 875697 - DNA, 75 bp, synthetic construct
  source 1..75: mol_type = other DNA
tttctcaatggtccggtatcaacaacccgggctgggaagattacaggaaacgagactttgacccggaaaaccccg

SEQ ID NO: 875698 - DNA, 75 bp, synthetic construct
  source 1..75: mol_type = other DNA
cggaagaatttaatgcctggatgaaggcgaataatcttcagtggaccattcgcgcaatggatgaagatgatttta

SEQ ID NO: 875699 - DNA, 75 bp, synthetic construct
  source 1..75: mol_type = other DNA
atgaacgaaatcaaagaaatgccggtagaacgtgatgcatatggctgctggacgcatcctgaatatgaaaaattc

SEQ ID NO: 875700 - DNA, 75 bp, synthetic construct
  source 1..75: mol_type = other DNA
gccgcattccgggattactggatggcggaggggaaggttttcacgcaggttcagtgggagcagaaatttgcccgc

SEQ ID NO: 875701 - DNA, 75 bp, synthetic construct
  source 1..75: mol_type = other DNA
agtgagcaggaagttttgtcgttacaggcagcaccccctgtattcctggatggcctgagcgaacccatcggaaaa

SEQ ID NO: 875702 - DNA, 75 bp, synthetic construct
  source 1..75: mol_type = other DNA
ttcgaaccgctggatccagaagaacggggccgcaccttcgaagctctggattgcacagattggcgcgatgactga

SEQ ID NO: 875703 - DNA, 75 bp, synthetic construct
  source 1..75: mol_type = other DNA
ttcccgatgagcgatagctggtatccgtcacgggattttcgacgacgggctgcgttgtgggggatggctttgccg

SEQ ID NO: 875704 - DNA, 75 bp, synthetic construct
  source 1..75: mol_type = other DNA
agcccaagtctgtttattaaaacgtttaagaagttaacgtcatttacgcctaatagctatcgtaagaaattaact

SEQ ID NO: 875705 - DNA, 75 bp, synthetic construct
  source 1..75: mol_type = other DNA
gaaaacggatttatcagcaacggaaacggcctggaagctgtgggaactcatgggggaggtgtattcgaaccgctg

SEQ ID NO: 875706 - DNA, 75 bp, synthetic construct
  source 1..75: mol_type = other DNA
gtcacgtgcagcacgtcagggcacaggtaaaaccagtcagcaagggggtaagccatgcagcaccaggtggcaccg

SEQ ID NO: 875707 - DNA, 75 bp, synthetic construct
  source 1..75: mol_type = other DNA
ggttgagtatttctggaaagggatggcttttttgttgattttcttcatgttgatgcaaattattatctattttgc

SEQ ID NO: 875708 - DNA, 75 bp, synthetic construct
  source 1..75: mol_type = other DNA
ggtattcttctttatgcattagtggaagaaaatcgcattacagaatatatggggtattttgtcaagttcagtaat

SEQ ID NO: 875709 - DNA, 75 bp, synthetic construct
  source 1..75: mol_type = other DNA
tgaggagggtaaagttttcacgcaggttcagtgggagcagaaattcgcccgtcacgtaaatcatgtcagggcgca

SEQ ID NO: 875710 - DNA, 75 bp, synthetic construct
  source 1..75: mol_type = other DNA
atggagaatgttcggttcttgcaaggagttaaaaaatatttttgtactaaggcattagatgtcattctgctagtt

SEQ ID NO: 875711 - DNA, 75 bp, synthetic construct
  source 1..75: mol_type = other DNA
gtccgttagcggacatcaacacaatctttactgagatggaagaaggcaaaatccgtggccgtatggtgattgatt

SEQ ID NO: 875712 - DNA, 75 bp, synthetic construct
  source 1..75: mol_type = other DNA
gggttgagtatttctggaaagggatggcttttatgttgcttttctttatgttaatgcaacttgttatctattttg

SEQ ID NO: 875713 - DNA, 75 bp, synthetic construct
  source 1..75: mol_type = other DNA
aagcatcgcgcatcttgaagcgcatctgcaaaccccgcacatgaaggcgtatagcgaagccgtaaaaggtgacgt

SEQ ID NO: 875714 - DNA, 75 bp, synthetic construct
  source 1..75: mol_type = other DNA
tacccgcctggaggatgagggctttaccgtaaaaatcagttttccggcagtcagccagttacagacccggctcgc

SEQ ID NO: 875715 - DNA, 75 bp, synthetic construct
  source 1..75: mol_type = other DNA
tttgataatctttcatcatattttgataaaacatatgagttaaaaaaaagagaaatcgatgcattggttttacaa

SEQ ID NO: 875716 - DNA, 75 bp, synthetic construct
  source 1..75: mol_type = other DNA
ctgataacggaagtcatacagagctcccattccagagcggcggcactggcggttgattctgccgccgcaaaactg

SEQ ID NO: 875717 - DNA, 75 bp, synthetic construct
  source 1..75: mol_type = other DNA
gtatccatacccgtgccattcacagcatcgacaccgacattaagctcaaccgcgcattgtgggtgatggctgaaa

SEQ ID NO: 875718 - DNA, 75 bp, synthetic construct
  source 1..75: mol_type = other DNA
atgattgaagaggtagttattgacaaggtaggctcatataatggccctacgcagcttttacatggactttctaaa

SEQ ID NO: 875719 - DNA, 75 bp, synthetic construct
  source 1..75: mol_type = other DNA
ctgaaaagaattgaggagctggagggcgaacaaatcaaaaccgcccgcagggagatggtgcttgctgtggtcggc

SEQ ID NO: 875720 - DNA, 75 bp, synthetic construct
  source 1..75: mol_type = other DNA
gaatgaaggtgcagatccctcgcgttttctgtttgttctcagccatgccgatcgcgtgtttcctgctgaagaatg

SEQ ID NO: 875721 - DNA, 75 bp, synthetic construct
  source 1..75: mol_type = other DNA
attttggagaattactttaagatattaggtgggatggatattaggaagcttgagtgtcatttttatggtgatgaa

SEQ ID NO: 875722 - DNA, 75 bp, synthetic construct
  source 1..75: mol_type = other DNA
ccgcgcaagtgaaatcatatctgacgtttcttcctgaagaaatacgccagaaaatccttgaacatctccacggtg

SEQ ID NO: 875723 - DNA, 75 bp, synthetic construct
  source 1..75: mol_type = other DNA
cggacaaccgcagatggaagtgatgatgcgggatcaactgcagaaagcctctgcggtgctggcggtgatggatta

SEQ ID NO: 875724 - DNA, 75 bp, synthetic construct
  source 1..75: mol_type = other DNA
gcatcaggtgttttagatgatcgtgttgtagtatttgatgatccaatttcaagtttagatagtgatattctgttt

SEQ ID NO: 875725 - DNA, 75 bp, synthetic construct
  source 1..75: mol_type = other DNA
acgctgattcagagctctgaagatcataaacgcgatcagcaggcacaggaacggcttaccgggagacttcaggca

SEQ ID NO: 875726 - DNA, 75 bp, synthetic construct
  source 1..75: mol_type = other DNA
ggttgactctgccgccgcaaaactgatgcagaatgcagaaaatatcagcgaatatctgtcattacgccatcaggg

SEQ ID NO: 875727 - DNA, 75 bp, synthetic construct
  source 1..75: mol_type = other DNA
ccaaaaccggggaattactgacgaaggtctgtgcctcactggaggaggagctgaacgactatttcagaagcggta

SEQ ID NO: 875728 - DNA, 75 bp, synthetic construct
  source 1..75: mol_type = other DNA
gctgctttttgataaacggaaagcgctgaaaagaattgaggagctggagggcgaacaaatcaaaaccgcccgcag

SEQ ID NO: 875729 - DNA, 75 bp, synthetic construct
  source 1..75: mol_type = other DNA
ggaacggcttaccgggcgacttcaggcattaaatgaaagggttcctgagctcattactgacagtaaggcgctgag

SEQ ID NO: 875730 - DNA, 75 bp, synthetic construct
  source 1..75: mol_type = other DNA
aggacagcaagtcgcacagaccctgcagcaaaccggggatacccgcgaactactggatattctggcggatgatgt

SEQ ID NO: 875731 - DNA, 75 bp, synthetic construct
  source 1..75: mol_type = other DNA
cccgtcaccgtcggcagaatggcgtctggggaaccttttgtcgatggtttggtaccagtgactggggctgggaaa

SEQ ID NO: 875732 - DNA, 75 bp, synthetic construct
  source 1..75: mol_type = other DNA
actataacgtggatgtgagccgcagtgttatcaatatcaacaaggtcaggaaggaagtgatgtcactgacccggg

SEQ ID NO: 875733 - DNA, 75 bp, synthetic construct
  source 1..75: mol_type = other DNA
ccatcaacgccattgtggggcaggaaattctgcccaaccgtaaccgccccatgacctcggtgccgacattgatcc

SEQ ID NO: 875734 - DNA, 75 bp, synthetic construct
  source 1..75: mol_type = other DNA
agacagtcacccgtcgccgtcggaaggatagcttcattggaaagatttgtggatggattggcaccaaagaatggg

SEQ ID NO: 875735 - DNA, 75 bp, synthetic construct
  source 1..75: mol_type = other DNA
cagcaaaccggggatacctgcgaactgctggatattctggcaaatgatggctggctcaaaaatgaataccacggg

SEQ ID NO: 875736 - DNA, 75 bp, synthetic construct
  source 1..75: mol_type = other DNA
gtctggggtacgctttgtcgatgggcaaacaccagtgactggggctggaaagagtacagtgtggatgtgagccgc

SEQ ID NO: 875737 - DNA, 75 bp, synthetic construct
  source 1..75: mol_type = other DNA
atccggacagccccgaaataaaattcagtgatcgcagggcagcccttgaactgatgacgcaaatcgaatcgaccg

SEQ ID NO: 875738 - DNA, 75 bp, synthetic construct
  source 1..75: mol_type = other DNA
gtgggaaggctcacttatcgatcaactgataacggaagtcatacagagtgaaccgccccgggtttcctggagagt

SEQ ID NO: 875739 - DNA, 75 bp, synthetic construct
  source 1..75: mol_type = other DNA
gaactcgataataaagcggctcattgccattcgccagttcttcaacggcatcgtccatttccgggacgcagactg

SEQ ID NO: 875740 - DNA, 75 bp, synthetic construct
  source 1..75: mol_type = other DNA
aacccgactcgctgagttggagcgtcaggatttgcaagaaacgctaaccaagctaaggccctccgttgaaagttt

SEQ ID NO: 875741 - DNA, 75 bp, synthetic construct
  source 1..75: mol_type = other DNA
agaattatcaggagctaaaacgtagggttatccatcgagaattcagcgagcaacatattgattttctcctcaacc

SEQ ID NO: 875742 - DNA, 75 bp, synthetic construct
  source 1..75: mol_type = other DNA
aaatgataaaaagtggccgttattatatgagtttgaacgtttaataaaagacacgaaaccagaaatagttacaat

SEQ ID NO: 875743 - DNA, 75 bp, synthetic construct
  source 1..75: mol_type = other DNA
aaagatatatctctggtgacaaaagatgaaatcgaaaatctttttgaaggggcaagtgttaaagtattggccgga

SEQ ID NO: 875744 - DNA, 75 bp, synthetic construct
  source 1..75: mol_type = other DNA
acttcattaagtctcttaaaaatgatggctattttgtttggtatggggtggtgttttgtccagactatggaatgg

SEQ ID NO: 875745 - DNA, 75 bp, synthetic construct
  source 1..75: mol_type = other DNA
caccagtgactggggctgggaagaatatgttgatatcgtgcatcgcagcgtgatcaatatgaacacggtcagaga

SEQ ID NO: 875746 - DNA, 75 bp, synthetic construct
  source 1..75: mol_type = other DNA
cttcaggcattaaatgaaagggttcctgagctcattactgacagtaaggcgctgagggaagagctggagacaatg

SEQ ID NO: 875747 - DNA, 75 bp, synthetic construct
  source 1..75: mol_type = other DNA
agaatggccatggaggagatcgatgctaaaacccgggaattactgacgggggtctgcacctcactggaagaggag

SEQ ID NO: 875748 - DNA, 75 bp, synthetic construct
  source 1..75: mol_type = other DNA
ccatcaagacaccgcacggtgttctcagcaaacagttccgctacccggcgttaaggggtaatgaggtcagcatgg

SEQ ID NO: 875749 - DNA, 75 bp, synthetic construct
  source 1..75: mol_type = other DNA
ttcaccgcgatgacgtataccaaaagcaaaacgtttaaaaccgaatctggcgcgcgtcgctggctggaaagaaat

SEQ ID NO: 875750 - DNA, 75 bp, synthetic construct
  source 1..75: mol_type = other DNA
cattcaatggtgccattatcgcggcctctcccgatctgtcagaagctgccgtacgcctggaggcgctctgggatc

SEQ ID NO: 875751 - DNA, 75 bp, synthetic construct
  source 1..75: mol_type = other DNA
aaggttgtaccaaaagttgccctgcgtccgttagcggacatcaacaccatctttaccgagatggaagaaggcaaa

SEQ ID NO: 875752 - DNA, 75 bp, synthetic construct
  source 1..75: mol_type = other DNA
atggatactatcgatcttgacaacaacgaatccctggtgtgtggcgtgtttcccaaccaggacggcacgttcacc

SEQ ID NO: 875753 - DNA, 75 bp, synthetic construct
  source 1..75: mol_type = other DNA
tggccctggagtaacttcattgaaaccaggcgatcgcgcaagcgtagcatggttctttgaaggatgcggtcattg

SEQ ID NO: 875754 - DNA, 75 bp, synthetic construct
  source 1..75: mol_type = other DNA
atgtttattgttcgcacagttactcagggaaccggtggcttaatatcaggatcgggacggcagactacaaaggga

SEQ ID NO: 875755 - DNA, 75 bp, synthetic construct
  source 1..75: mol_type = other DNA
gcgccgtcggtcatgaaaccgatgtgacgattgccgactttgttgccgatctgcgcgcaccaacgccctctgccg

SEQ ID NO: 875756 - DNA, 75 bp, synthetic construct
  source 1..75: mol_type = other DNA
caaaatccacaaccgcgtattcatcgcgcgcaaacgcgcattcagcaactggaatatcgcctggcggaaaccctg

SEQ ID NO: 875757 - DNA, 75 bp, synthetic construct
  source 1..75: mol_type = other DNA
aaattgttcgcgccattgaactggcgaatcagcgcaatgagtgcgacgtgttgatcgttgggcgcggcggcggtt

SEQ ID NO: 875758 - DNA, 75 bp, synthetic construct
  source 1..75: mol_type = other DNA
atcatcatgttgacgttacggataaaacgctacgctcgctgaaacatggcgaagctctgttgaaaatggaatgct

SEQ ID NO: 875759 - DNA, 75 bp, synthetic construct
  source 1..75: mol_type = other DNA
acaaatctctggtatgtggcgtgtttccaaaccaggacggtacgttcaccgcgatgacgtataccagaagcaaaa

SEQ ID NO: 875760 - DNA, 75 bp, synthetic construct
  source 1..75: mol_type = other DNA
tgttccgctaccccggcgttaaggggaaatgaggtcagcatggatactatcgatcttggcaacagcgaatctctg

SEQ ID NO: 875761 - DNA, 75 bp, synthetic construct
  source 1..75: mol_type = other DNA
aatactcaaatacacaagagaggaatacattatcaaaagaactatcggtagtcaagcagagctcatcacttaatc

SEQ ID NO: 875762 - DNA, 75 bp, synthetic construct
  source 1..75: mol_type = other DNA
gcgggatggcggaagagtgcatcgtggtcgccgattacgcggtaaaagtgccagatggtctggactcggcggcgg

SEQ ID NO: 875763 - DNA, 75 bp, synthetic construct
  source 1..75: mol_type = other DNA
gattccaaagtggtgtattgaccgtatcccttccgatgctcaaattataggtgaaacggaactacattatcttgt

SEQ ID NO: 875764 - DNA, 75 bp, synthetic construct
  source 1..75: mol_type = other DNA
catcgttaaacgatctggttcgtcttgctgcggcaatggggactgaatttccttttgacgaatacgcagaagtgc

SEQ ID NO: 875765 - DNA, 75 bp, synthetic construct
  source 1..75: mol_type = other DNA
taccactaactgtgttacaggtcgatataaatcctgagcttgggcagccaaatggttatacagaatgggagccaa

SEQ ID NO: 875766 - DNA, 75 bp, synthetic construct
  source 1..75: mol_type = other DNA
cgataccggctcgtgttcagagtcatgtgaaatctggggtgatcaattggagttgaaattcgaagaggtggtggc

SEQ ID NO: 875767 - DNA, 75 bp, synthetic construct
  source 1..75: mol_type = other DNA
gcgcgcaaacgcgcattcagcaactggaatatcgtttagcagaaaccctgcgcgcacagcttagcgccacgcgtg

SEQ ID NO: 875768 - DNA, 75 bp, synthetic construct
  source 1..75: mol_type = other DNA
tctactttggcgcgactgcgtgaacgcgacattaccctcacttttgccacggggcgtcatgcgctggagatgcag

SEQ ID NO: 875769 - DNA, 75 bp, synthetic construct
  source 1..75: mol_type = other DNA
gcaaaattgatgatgcagcaactgaaaaacttagtaaaacagcgcaggccgcctcactcccaaaagacccgaccc

SEQ ID NO: 875770 - DNA, 75 bp, synthetic construct
  source 1..75: mol_type = other DNA
gggaactgtgttttctgcatcaaaaagtcaacgcaaaagctggggcttgcatgtaaagacgaacctggtctgatg

SEQ ID NO: 875771 - DNA, 75 bp, synthetic construct
  source 1..75: mol_type = other DNA
agtatgcagcctgccggtgaagggttgctgcaacaaaaatacgaacagcttaaagcgaaattgcaggctgaaggt

SEQ ID NO: 875772 - DNA, 75 bp, synthetic construct
  source 1..75: mol_type = other DNA
gcgattaacacagaggctaaaccagcaaaatccgcagccgcgtattcaccgcgcacagacgcgaattcaacaact

SEQ ID NO: 875773 - DNA, 75 bp, synthetic construct
  source 1..75: mol_type = other DNA
atttgcggcatcgttttgcttgctggtcgtctgatgcattattacggttttcatcaccgtctgtttcgctggcga

SEQ ID NO: 875774 - DNA, 75 bp, synthetic construct
  source 1..75: mol_type = other DNA
agctccggctggcacgtcagcaaactatgctcgaacgtctgcaaaagcggatgagctttgcgctggagaatcagc

SEQ ID NO: 875775 - DNA, 75 bp, synthetic construct
  source 1..75: mol_type = other DNA
ggtgagacactgaccacacgactgggagatggtgtggtgattagtgaagtcagcgccgtaacaaaaaacccgcaa

SEQ ID NO: 875776 - DNA, 75 bp, synthetic construct
  source 1..75: mol_type = other DNA
gctgtgcgatgttccgcaacagcaatcgccgggtgacctttcgcccacagcatgggcagcaggtattagttcgcg

SEQ ID NO: 875777 - DNA, 75 bp, synthetic construct
  source 1..75: mol_type = other DNA
gcgattaattgtctggaagtattgccagtagggtgtaataaaggcgctgcgctggcggtgcttgctgaccattta

SEQ ID NO: 875778 - DNA, 75 bp, synthetic construct
  source 1..75: mol_type = other DNA
gaacacatctgtaaagacagcgaactggcaaccgaaggggcaacagaactgtgggaaggctccctgatcgataaa

SEQ ID NO: 875779 - DNA, 75 bp, synthetic construct
  source 1..75: mol_type = other DNA
tccgatcccggaacagtttgcgatgccagaagaaaccatcaatgcagcaattgatcaagccgttgctgaagccga

SEQ ID NO: 875780 - DNA, 75 bp, synthetic construct
  source 1..75: mol_type = other DNA
gttattggtaaagaaagtacgccattcctgctggcgcgcgttgctgaactgaccggtggtgacagcctgaaatcc

SEQ ID NO: 875781 - DNA, 75 bp, synthetic construct
  source 1..75: mol_type = other DNA
caaatcaaccaccatcaacgccattgtggggcaggaaattctgcctaaccgtaaccgccccatgacctctgtacc

SEQ ID NO: 875782 - DNA, 75 bp, synthetic construct
  source 1..75: mol_type = other DNA
ttcagtcactgcagtcgcatatcaccagcctgcttgcggatatccgggaaatcgcggactgtcaggagcaggtga

SEQ ID NO: 875783 - DNA, 75 bp, synthetic construct
  source 1..75: mol_type = other DNA
ctctgcggtgctggcggtgatggattacacccagatgaactcgaaagccgatgaggaggttcgtaaagagcttaa

SEQ ID NO: 875784 - DNA, 75 bp, synthetic construct
  source 1..75: mol_type = other DNA
atgaacccaacacgttatgcacgcatctgcgaaatgctcgccaggcggcagcctgatctgaccgtctgcatggag

SEQ ID NO: 875785 - DNA, 75 bp, synthetic construct
  source 1..75: mol_type = other DNA
attaggcgagcgtgcacatttgtgtttttccgccacggattgcctcgaagtgctgccggtgggctgcaataaagg

SEQ ID NO: 875786 - DNA, 75 bp, synthetic construct
  source 1..75: mol_type = other DNA
gcgtcaccaagatctgcttctgtggcgatcacgacgatcttacacgcttgcagatccagctatacgaagcattag

SEQ ID NO: 875787 - DNA, 75 bp, synthetic construct
  source 1..75: mol_type = other DNA
ttctgataacgctgtcgatttccgcgaaattgattacactcgcccgacctgcattttgatgggacaggagaaaac

SEQ ID NO: 875788 - DNA, 75 bp, synthetic construct
  source 1..75: mol_type = other DNA
gcctgacctgaccgtctgcatggaacaggttcacaaaccccataacgtttctgcgattattcgtaccgcagatgc

SEQ ID NO: 875789 - DNA, 75 bp, synthetic construct
  source 1..75: mol_type = other DNA
tgtatctgcgtgaaaacagcatgttgccggaagcagagcaacaacgcctgctgtttgaaggcggctatccggtgc

SEQ ID NO: 875790 - DNA, 75 bp, synthetic construct
  source 1..75: mol_type = other DNA
ctgcgcgaacacaaagtacagaagatgattatcgccaaccgcactcgcgaacgtgcccaaattctggcagatgaa

SEQ ID NO: 875791 - DNA, 75 bp, synthetic construct
  source 1..75: mol_type = other DNA
ttgaagagcaggacaacctgcaagaggcgttaatccgctggctttgcgattatcacaatcttaatgaagaagatc

SEQ ID NO: 875792 - DNA, 75 bp, synthetic construct
  source 1..75: mol_type = other DNA
aaagcaatgactctgcatttgcaggaaataagtgaatccgtgcagctgattcgccaggaaaatagcgactggttt

SEQ ID NO: 875793 - DNA, 75 bp, synthetic construct
  source 1..75: mol_type = other DNA
gggaacataccatctaaatatttgctcaatgtgcgtatttatcggttgctgtcctccggtttaaccaaacctgga

SEQ ID NO: 875794 - DNA, 75 bp, synthetic construct
  source 1..75: mol_type = other DNA
ttgtgatttacggaaaactggctgagattgtcggtgaataccttcgtaaaggttcacaggtgtatattgaaggtc

SEQ ID NO: 875795 - DNA, 75 bp, synthetic construct
  source 1..75: mol_type = other DNA
tcatactgattggtcatctgggacaggatccggaaatccgttatttccccaacggcggaggtgcagtggcaaatc

SEQ ID NO: 875796 - DNA, 75 bp, synthetic construct
  source 1..75: mol_type = other DNA
acgggtggcgcaaattattgcagaacgcgaatacctgattgccgcactgaaagagatcccctgcgtggagcaggt

SEQ ID NO: 875797 - DNA, 75 bp, synthetic construct
  source 1..75: mol_type = other DNA
ataacccaaccggccagctaattaacccgcaggatctgcgttcactgctcgacatgacgcagggtaaagctatcg

SEQ ID NO: 875798 - DNA, 75 bp, synthetic construct
  source 1..75: mol_type = other DNA
aagaagtcatcaacctgctgatgaaagtgatcgccccctacccgctctcgacgccggttgccgacattgcggccc

SEQ ID NO: 875799 - DNA, 75 bp, synthetic construct
  source 1..75: mol_type = other DNA
cattgagtgcgccgtagtccgcagagcggcgaccatgattaccgatagccagtgctacctgcttgagcaaaatct

SEQ ID NO: 875800 - DNA, 75 bp, synthetic construct
  source 1..75: mol_type = other DNA
ttgttcttcagtcatggtactgttctgatgtacctgctgtgtgttttcctggtataccgccgttggatagctccg

SEQ ID NO: 875801 - DNA, 75 bp, synthetic construct
  source 1..75: mol_type = other DNA
tcgcgctttttgtgaaccagggaaagacgccattctctattgcccgccaacttacggcatgtacagcgtcagcgc

SEQ ID NO: 875802 - DNA, 75 bp, synthetic construct
  source 1..75: mol_type = other DNA
cgtgcaatgacgcaacatttgcaggaaatcagcgaatccgtgcgccagatccgtcaggaaaacagcgactggttt

SEQ ID NO: 875803 - DNA, 75 bp, synthetic construct
  source 1..75: mol_type = other DNA
tgcgggatgttgcccgcgtgcagaccgggcctgaaatgcggcgtggtattgccgagctgaacggccagggcgaag

SEQ ID NO: 875804 - DNA, 75 bp, synthetic construct
  source 1..75: mol_type = other DNA
atgaaaattattaatgcacctgatgcaagaagtgtacggatcgccggaattgaaattatcgatagtgccaaagcg

SEQ ID NO: 875805 - DNA, 75 bp, synthetic construct
  source 1..75: mol_type = other DNA
gtcataatttctgctgaaatcgacctttccgtcggctcaatgatggggctgttaggtggcgtcgcggcgatttgt

SEQ ID NO: 875806 - DNA, 75 bp, synthetic construct
  source 1..75: mol_type = other DNA
aagctgcagcgctcctgcagacgacggacaagttaatcaaaagcgttcctgaagtggcctctgtatttggcaaga

SEQ ID NO: 875807 - DNA, 75 bp, synthetic construct
  source 1..75: mol_type = other DNA
ggatttttgaatatgcccttgtcgatcgcaacggaaaacacgacctttcagaactgcgctctctgcaggactggt

SEQ ID NO: 875808 - DNA, 75 bp, synthetic construct
  source 1..75: mol_type = other DNA
tcagggaaaactgcctgctggtgtgagttctgaaatcggtcctgatgccacgggtgtgggctggatttttgaata

SEQ ID NO: 875809 - DNA, 75 bp, synthetic construct
  source 1..75: mol_type = other DNA
aaagcgctggggattgagggcgacacgcccgccgataccgtcgccacgctggtcggccagatgaaactctggcgc

SEQ ID NO: 875810 - DNA, 75 bp, synthetic construct
  source 1..75: mol_type = other DNA
ttatcgtattcttcgtcgcgacattgtccattgcctgattgctccaggcacaccgttgtcggaaaaagaagtttc

SEQ ID NO: 875811 - DNA, 75 bp, synthetic construct
  source 1..75: mol_type = other DNA
gggggaatgccgatggattttgacgacgacattcctttcagtggaccgggatatggcgctgaacggcggattatc

SEQ ID NO: 875812 - DNA, 75 bp, synthetic construct
  source 1..75: mol_type = other DNA
tgaaagaaggtgcacaaagtggatctgaccgcgaaccagttaacgctggcgaccgcgaaacagacattaacttat

SEQ ID NO: 875813 - DNA, 75 bp, synthetic construct
  source 1..75: mol_type = other DNA
ttcgtttcacttccagaggacgtgaatacgaggtcgacgaacgcctgattaccacaatcgacaaacaccgttcag

SEQ ID NO: 875814 - DNA, 75 bp, synthetic construct
  source 1..75: mol_type = other DNA
ctgactttccagaaccatacggactgcccgttgacggacttcgggggaaaaacgagtatttttagtcatcctgtt

SEQ ID NO: 875815 - DNA, 75 bp, synthetic construct
  source 1..75: mol_type = other DNA
cgtacggcatgtacagcgtcagcgctgaaaccattggcgtcgagtgccgcacagtgccgacgctggacaactggc

SEQ ID NO: 875816 - DNA, 75 bp, synthetic construct
  source 1..75: mol_type = other DNA
aaatttgcggtgagatcctcacgcagccgtatccgacagcattccgggtacgtagtgcgctggatatggagcaca

SEQ ID NO: 875817 - DNA, 75 bp, synthetic construct
  source 1..75: mol_type = other DNA
aaattcgcggcgagatcctcacgcagccctacccgatggcattccgggtacgcagcgcgctggatatggaacaga

SEQ ID NO: 875818 - DNA, 75 bp, synthetic construct
  source 1..75: mol_type = other DNA
gcaaacacttactacccactctgtttgaccgcctgtgcgacgacaccccaaaccagaagcgcgaccacgatatca

SEQ ID NO: 875819 - DNA, 75 bp, synthetic construct
  source 1..75: mol_type = other DNA
gtacaacaactggcggctgagtccggtgacgaccgcagcgtggtgattggcgtcggcggcggcgcactgctcgac

SEQ ID NO: 875820 - DNA, 75 bp, synthetic construct
  source 1..75: mol_type = other DNA
tcatcccggcagtctcaatcacctgcatgattttttcactgatgaacagctttcttgcgcagtgtggatctacgg

SEQ ID NO: 875821 - DNA, 75 bp, synthetic construct
  source 1..75: mol_type = other DNA
gcaaccacctgatgcctacattgtttgatcgactgtgtgacgatgctccacagcagaagcgcgaccacgatatca

SEQ ID NO: 875822 - DNA, 75 bp, synthetic construct
  source 1..75: mol_type = other DNA
tggtggctactgcgagagggcatatattcaatgatgccaataagcgtaccgcgctaaacagtgcgctgttatttc

SEQ ID NO: 875823 - DNA, 75 bp, synthetic construct
  source 1..75: mol_type = other DNA
taaactgctggaacatatacgcaacagaggtgaccagacaccagttctggtgatatctgccactgaaaatatggc

SEQ ID NO: 875824 - DNA, 75 bp, synthetic construct
  source 1..75: mol_type = other DNA
ccaactcaataggagaggttcccaaaacatactccagcaacggtgaaactgcagtaaatactccttatggaaaag

SEQ ID NO: 875825 - DNA, 75 bp, synthetic construct
  source 1..75: mol_type = other DNA
aagccgctacggcggcctgccgggaatgtctgatccgggtagggcagaggccattatcgggagagttcaggccag

SEQ ID NO: 875826 - DNA, 75 bp, synthetic construct
  source 1..75: mol_type = other DNA
taacggaatagcagagagcttcgtgaaaacgataaagcgtgactacatcagtatcatgcccaaaccagacgggtt

SEQ ID NO: 875827 - DNA, 75 bp, synthetic construct
  source 1..75: mol_type = other DNA
tgccgatcagcaaaatcagcaattaacgcaatcattttgcgatgtggtggatgcgattatcgccggaggcggaat

SEQ ID NO: 875828 - DNA, 75 bp, synthetic construct
  source 1..75: mol_type = other DNA
actggcgtttggcgcaggtacattacgcgcggcagtggcgtcttatgcgcagtctccgcgctattaccgtgcgtt

SEQ ID NO: 875829 - DNA, 75 bp, synthetic construct
  source 1..75: mol_type = other DNA
ttgcaaaagcctataaaggccgccgcgtggtagaagacgtcagcctgaccgtcaactccggggaaattgtcggtc

SEQ ID NO: 875830 - DNA, 75 bp, synthetic construct
  source 1..75: mol_type = other DNA
cgtggtggaagacgtcagcctgaccgttaactccggggaaattgtcgggctgctggggccaaacggtgccggtaa

SEQ ID NO: 875831 - DNA, 75 bp, synthetic construct
  source 1..75: mol_type = other DNA
ctacccgctctcgacgccggttgccgacattgccgcacaggcgttaagcccgcagggaatcgtcgccatgcgcga

SEQ ID NO: 875832 - DNA, 75 bp, synthetic construct
  source 1..75: mol_type = other DNA
atgacgctttatagcgggatgaacaataccagcggcaaagccattactgatattgaccatctgcgccagtcggtg

SEQ ID NO: 875833 - DNA, 75 bp, synthetic construct
  source 1..75: mol_type = other DNA
aatgttcttcagtggttgtgctgttctggtgtacctgctgtgtgttttcctggtttaccgccgctgggttgcacc

SEQ ID NO: 875834 - DNA, 75 bp, synthetic construct
  source 1..75: mol_type = other DNA
ccgtggcgtctgttttaatttctgcggtgattgcgacggctggctctgtgtatattacgtcgaaatatctaaaac

SEQ ID NO: 875835 - DNA, 75 bp, synthetic construct
  source 1..75: mol_type = other DNA
tggacaccgctctccgtctggtataacgatgccggacaggcgctacattatgaaattttcgacgacgccaatttt

SEQ ID NO: 875836 - DNA, 75 bp, synthetic construct
  source 1..75: mol_type = other DNA
ccattcattacctgccagtcacgctgacaccagatacgttgcgtgcagcgttcgaaaaagtggaatcgtttaaag

SEQ ID NO: 875837 - DNA, 75 bp, synthetic construct
  source 1..75: mol_type = other DNA
gcactggcagcgaatccgaaatttatcctgctcgatgaaccatttgctggggtcgatccgatctcggttatcgac

SEQ ID NO: 875838 - DNA, 75 bp, synthetic construct
  source 1..75: mol_type = other DNA
gcactggctgcgaatccgaaatttattctgctcgacgaaccgtttgccggggttgacccgatctcggttatcgac

SEQ ID NO: 875839 - DNA, 75 bp, synthetic construct
  source 1..75: mol_type = other DNA
cggacctgataatgcggccgtcgctgttattgagtttttcgactaccagtgtcatttctgtatgcaggtagcgcc

SEQ ID NO: 875840 - DNA, 75 bp, synthetic construct
  source 1..75: mol_type = other DNA
ctggctaccggatgttgaaattattgaaccagtatggctgaaagaagccgtgttaacaatgttaggaaaatacct

SEQ ID NO: 875841 - DNA, 75 bp, synthetic construct
  source 1..75: mol_type = other DNA
ggcacgccagtcacagcacaagactttgtgtatagctggcaacgttctgttgatccgaacactgcttctccgtat

SEQ ID NO: 875842 - DNA, 75 bp, synthetic construct
  source 1..75: mol_type = other DNA
atctggccactgagtcaggtgggcggcgagtttttaccgaagattaacgaaggtgacctgttgtatatgccgtca

SEQ ID NO: 875843 - DNA, 75 bp, synthetic construct
  source 1..75: mol_type = other DNA
agtttcttcgattttgcattaacggccttcgttgccatatctggattcctctttattaggtggctgacagtatac

SEQ ID NO: 875844 - DNA, 75 bp, synthetic construct
  source 1..75: mol_type = other DNA
ccacacagcctgtcaatcagcagatttatcgtatccttcgtcgcgacattgtccattgcctgattgcaccaggca

SEQ ID NO: 875845 - DNA, 75 bp, synthetic construct
  source 1..75: mol_type = other DNA
gtccattgcctgattgctccaggcacaccgttgtcggaaaaagaagtttctgttcgtttcaatgtgtcacgccag

SEQ ID NO: 875846 - DNA, 75 bp, synthetic construct
  source 1..75: mol_type = other DNA
tgatgattgaaaatgcgcacaaacggcttgaggagtgggatcatcagcatccgggtgagcagattgacaacgcca

SEQ ID NO: 875847 - DNA, 75 bp, synthetic construct
  source 1..75: mol_type = other DNA
ctgatgagtctgccgttcgccctggttggcgggatatggttcctgtactggcagggcttccatatgtcagtcgca

SEQ ID NO: 875848 - DNA, 75 bp, synthetic construct
  source 1..75: mol_type = other DNA
gaagcagcagatcacgctgggcgatgtcgcggatattaaggtcgtttcagggccgactatgctgaaaacggaaaa

SEQ ID NO: 875849 - DNA, 75 bp, synthetic construct
  source 1..75: mol_type = other DNA
tgcgtgatgttgcccgcgtgcaaacggggccggaaatgcgtcgcggtattgccgagcttaacggccagggtgaag

SEQ ID NO: 875850 - DNA, 75 bp, synthetic construct
  source 1..75: mol_type = other DNA
accaccattcagctgaaacctgaggatcagtggcggccaggcatgacgattgacaagattatcgatgaacttgat

SEQ ID NO: 875851 - DNA, 75 bp, synthetic construct
  source 1..75: mol_type = other DNA
cccgctacggtatgacggtaggtgatgtccagctcttcgtctcatcagccatcggcggcgcgatggtaggagaaa

SEQ ID NO: 875852 - DNA, 75 bp, synthetic construct
  source 1..75: mol_type = other DNA
tcattgcctcaatttttttactgagtggctgtaataatgagccctccgagcaagatctttataatgcaatgaata

SEQ ID NO: 875853 - DNA, 75 bp, synthetic construct
  source 1..75: mol_type = other DNA
atgtcattcagccattcttccctctcctcgcaagttaaatcacatctgacgtttcttcctgaagaaattcgccag

SEQ ID NO: 875854 - DNA, 75 bp, synthetic construct
  source 1..75: mol_type = other DNA
atgtcattcagccattcttccctctcctcccaagttaaatcagatctgacgtttcttcctgaagaaattcgccag

SEQ ID NO: 875855 - DNA, 75 bp, synthetic construct
  source 1..75: mol_type = other DNA
atgtcattcagccattcttccctctcctcccaagtaaaatcatatctgacgtttcttcctgaagaaattcgccag

SEQ ID NO: 875856 - DNA, 75 bp, synthetic construct
  source 1..75: mol_type = other DNA
gtttttactgaatgaaggtgcagatccctcgcgttttctgtttgttctcagccatgccgatcgcgtgtttcctgc

SEQ ID NO: 875857 - DNA, 75 bp, synthetic construct
  source 1..75: mol_type = other DNA
cagtaatagcccgggtggccaccctgttcccttcatcatttccggtactccctgtagccgcgcctgcaggctgga

SEQ ID NO: 875858 - DNA, 75 bp, synthetic construct
  source 1..75: mol_type = other DNA
ttcagtcccgtgtctgcgccacgcatccgctgaacggctgcacccgtcaggctcatcgtcttacctttcagcccg

SEQ ID NO: 875859 - DNA, 75 bp, synthetic construct
  source 1..75: mol_type = other DNA
tgaaagaaggtgcacaagtggatctgaccgcgaaccagttaacgctggcgaccgcgaaacagacattaacttata

SEQ ID NO: 875860 - DNA, 75 bp, synthetic construct
  source 1..75: mol_type = other DNA
cgctaagcctgctgatggcgggatgtgtaagtaatgacaaaattgctgtaacgccagaacagttacagcatcatc

SEQ ID NO: 875861 - DNA, 75 bp, synthetic construct
  source 1..75: mol_type = other DNA
tggctgtaataatgagccctccgagcaagatctttataatgcaatgaataaggtcgtggagcagacgaatgccat

SEQ ID NO: 875862 - DNA, 75 bp, synthetic construct
  source 1..75: mol_type = other DNA
atgtcattcagccattcttccctctcctctcaagtgaaatcaaatctgacgtttcttcctgaagaaattcgccag

SEQ ID NO: 875863 - DNA, 75 bp, synthetic construct
  source 1..75: mol_type = other DNA
tcaggctgcaaattatggtggcgtgctattcggctatccagaagtgggagccgcgcatcaggcttaccgccatca

SEQ ID NO: 875864 - DNA, 75 bp, synthetic construct
  source 1..75: mol_type = other DNA
atgtcattcagccattcttccctctccgcgcaagtgaagtcacatctgacgtttcttcctgaagaaattcgccag

SEQ ID NO: 875865 - DNA, 75 bp, synthetic construct
  source 1..75: mol_type = other DNA
acttgaaggcgggcgttacatcgatatcgatatcaaccgggaaaaagcgtcccgttacggtatgactgttggtga

SEQ ID NO: 875866 - DNA, 75 bp, synthetic construct
  source 1..75: mol_type = other DNA
tgcgcgacggctatccgccttgccgaacagggtaagcaggttttgctggtcagtaccgatcctgcctcgaatgtc

SEQ ID NO: 875867 - DNA, 75 bp, synthetic construct
  source 1..75: mol_type = other DNA
tgcggcgtttgatgagttcaccggcttattgacagacgcttccctgctgacccgcttcgatcacatcatttttga

SEQ ID NO: 875868 - DNA, 75 bp, synthetic construct
  source 1..75: mol_type = other DNA
tttcaggagcctgtaccactgagattgcggcgtttgacgagttcaccggcttattgacagacgctaccctgctga

SEQ ID NO: 875869 - DNA, 75 bp, synthetic construct
  source 1..75: mol_type = other DNA
ggccttaaaaatcagtatttagtcattaacggtgtcctgcctgcgagcgaagcagaacgtgatgcactggccgct

SEQ ID NO: 875870 - DNA, 75 bp, synthetic construct
  source 1..75: mol_type = other DNA
aatggctgcggctatcgccgtcagtttggcagataagggttttgatgtgcatctcactacctcagatcctgctgc

SEQ ID NO: 875871 - DNA, 75 bp, synthetic construct
  source 1..75: mol_type = other DNA
agcagtatgctcatgcagtagaggcgttatccgatcctgaacgtacccgcatggttctggttgcacgactgcaaa

SEQ ID NO: 875872 - DNA, 75 bp, synthetic construct
  source 1..75: mol_type = other DNA
gttcaatgagtctggaacaccgttatatccatgcaattaagactgaccttgcattaactctggcaattgaagcta

SEQ ID NO: 875873 - DNA, 75 bp, synthetic construct
  source 1..75: mol_type = other DNA
aggcttgtcattcgatattaatcgactgattcagtctccgatgggtgttagggatgtatttcggtcacaaagcga

SEQ ID NO: 875874 - DNA, 75 bp, synthetic construct
  source 1..75: mol_type = other DNA
ttaaaactgatgtgttgatgggttttaatgagggcaccttcgtaaatgttgatgatatttctttattgccgaatg

SEQ ID NO: 875875 - DNA, 75 bp, synthetic construct
  source 1..75: mol_type = other DNA
cgcctcaaaacttatcgctctctggtctggtcgatgatatcgctcgcagtgagcacggcctgattatgttgatgg

SEQ ID NO: 875876 - DNA, 75 bp, synthetic construct
  source 1..75: mol_type = other DNA
gataccgaatcagaagataaatcgcttacgtcgactgatagtcgtgaggatgattctgaggacgatagtgaaggt

SEQ ID NO: 875877 - DNA, 75 bp, synthetic construct
  source 1..75: mol_type = other DNA
aagaggagcagtcgaaagacccgcatgacgatacagatgaatcatctggctctgagaatgaacctgataccgaac

SEQ ID NO: 875878 - DNA, 75 bp, synthetic construct
  source 1..75: mol_type = other DNA
ggtcattttaccactccgatgatgcagcttcaggaccaggaacgtaccaaagttttgctggtcactctgcctgaa

SEQ ID NO: 875879 - DNA, 75 bp, synthetic construct
  source 1..75: mol_type = other DNA
gccgagctgaacggccagggagaagtcgctggcggcgtggtgatcctgcggtcgggtaaaaatgcgcgcgacgtt

SEQ ID NO: 875880 - DNA, 75 bp, synthetic construct
  source 1..75: mol_type = other DNA
tgcccgacccgccagctggatctatattgatgcccgcgaccgggacatggtgtcagtggtaaacgacatcaagac

SEQ ID NO: 875881 - DNA, 75 bp, synthetic construct
  source 1..75: mol_type = other DNA
atcagcctgcccgaagtgaaacaggctcttgaatcgtctaaccaggaggccggtggttcatccgttgaaatggcc

SEQ ID NO: 875882 - DNA, 75 bp, synthetic construct
  source 1..75: mol_type = other DNA
ccggtaaagcagagaccgcaacggattccgcaccgcttgaaatggtggaaaccacgatccagctcaaacctgagg

SEQ ID NO: 875883 - DNA, 75 bp, synthetic construct
  source 1..75: mol_type = other DNA
ctgatgagtctgccgttcgcactcgtcggaggaatatggttcctctactggcagggcttccatatgtctgtggcc

SEQ ID NO: 875884 - DNA, 75 bp, synthetic construct
  source 1..75: mol_type = other DNA
cagggcagtttgaattacttgagcatgccaataaaaagctgaaactgatggtaccgatgacggtgatgatcattt

SEQ ID NO: 875885 - DNA, 75 bp, synthetic construct
  source 1..75: mol_type = other DNA
gttgttaacagtatcagcgagcaactttcaggagcctgtaccactgaaattgcggcgtttgatgagttcaccggc

SEQ ID NO: 875886 - DNA, 75 bp, synthetic construct
  source 1..75: mol_type = other DNA
cttcctgaacaaagcatacaaaacaaaccagagaatatgtcgttctctgtcctggtcgatgatatcgcccgcagt

SEQ ID NO: 875887 - DNA, 75 bp, synthetic construct
  source 1..75: mol_type = other DNA
attgaggctgttaagaatcagcacgctgagcgtatatcgcttgttccggtgctggcgtcagagcccgccggtatt

SEQ ID NO: 875888 - DNA, 75 bp, synthetic construct
  source 1..75: mol_type = other DNA
tcttctgcagactacattcagcaacgtcctgatattccatcgctctctgcgctagttgatgacattgcccgtaat

SEQ ID NO: 875889 - DNA, 75 bp, synthetic construct
  source 1..75: mol_type = other DNA
ggacacccgctcagagagattacccctcccagcaatgaacgtcccgtgcacgcctcaaaacttatcgctctctgg

SEQ ID NO: 875890 - DNA, 75 bp, synthetic construct
  source 1..75: mol_type = other DNA
acgagtctctggtatacggcgtgtttccaaaccaagacggcacgttcacggcgatgacgtataccaaaagcaaaa

SEQ ID NO: 875891 - DNA, 75 bp, synthetic construct
  source 1..75: mol_type = other DNA
gcagcgatgacccaacgctgattaacgatgagcgttttgctccagctggcgtgctggccccgaaatcaaaagcgg

SEQ ID NO: 875892 - DNA, 75 bp, synthetic construct
  source 1..75: mol_type = other DNA
aacaacatcctgaccgatgcccatatcgaaaaaattatgcaggtattttccagcaaagaagatgttgcccatctg

SEQ ID NO: 875893 - DNA, 75 bp, synthetic construct
  source 1..75: mol_type = other DNA
cagcacgtctctaagctgattgcacaactggcaatgcacggccagacccacgttaacaaaatctacgacccggca

SEQ ID NO: 875894 - DNA, 75 bp, synthetic construct
  source 1..75: mol_type = other DNA
aatggattagatcagcatggccgagagactattggatgggaaatagtccctgtgaaaacacctgaagaagcactt

SEQ ID NO: 875895 - DNA, 75 bp, synthetic construct
  source 1..75: mol_type = other DNA
tcgaacagattatgcaggtatttgccagcaaggaagatgttgctcatctggcgaaatctgtcgcgtttgagaccg

SEQ ID NO: 875896 - DNA, 75 bp, synthetic construct
  source 1..75: mol_type = other DNA
gaaaatccgtcagtatctggttgacaataactatgtcgaaaccgtgatttcactggcaccgaacctgttctttgg

SEQ ID NO: 875897 - DNA, 75 bp, synthetic construct
  source 1..75: mol_type = other DNA
gcgaaatctgttgcgtttgagactgttgtcgcgaatgactataacctgtcggtgagcagctatgtggaagcgaaa

SEQ ID NO: 875898 - DNA, 75 bp, synthetic construct
  source 1..75: mol_type = other DNA
cgcctggctgcggttctgaaaggggttgaagggttaaaacttggtgacttcaacgaacatcagattgacctgttc

SEQ ID NO: 875899 - DNA, 75 bp, synthetic construct
  source 1..75: mol_type = other DNA
aattactgatgacattaaagacgatgccatcaaaactaaaggctacttcatctacccaagtcagcttttctgcaa

SEQ ID NO: 875900 - DNA, 75 bp, synthetic construct
  source 1..75: mol_type = other DNA
ctaactatgcggcaaatgccggtaagtctggaggggagttcttcacacctcagcacgtctccaagctgattgctc

SEQ ID NO: 875901 - DNA, 75 bp, synthetic construct
  source 1..75: mol_type = other DNA
gcaaaatctgtcgcgtttgaaaccattgtagcgaatgactataacctgtcagtgagcagctatgtggaagcgaaa

SEQ ID NO: 875902 - DNA, 75 bp, synthetic construct
  source 1..75: mol_type = other DNA
ctggcaaaagaccggaacggagcagatattcccaataagccgctgtttatccaaaacctcggtttgcaggaaacg

SEQ ID NO: 875903 - DNA, 75 bp, synthetic construct
  source 1..75: mol_type = other DNA
agaaaaatttgttgaagcgcatcagggaaatattgacgatatttcgatttacggtcaggaatccaaccagaccac

SEQ ID NO: 875904 - DNA, 75 bp, synthetic construct
  source 1..75: mol_type = other DNA
cgtgctgcagtaaaagcgggccttggtgtgacggcaagaccggttgagatgatgagtcctgacctgcgcgttttg

SEQ ID NO: 875905 - DNA, 75 bp, synthetic construct
  source 1..75: mol_type = other DNA
atgttcagtaatcttcagggcgtgttaactatcggtgcttcagatgaatctgccgatacgatcttacctttcctg

SEQ ID NO: 875906 - DNA, 75 bp, synthetic construct
  source 1..75: mol_type = other DNA
ctgaaaaaccgcggtctgaacgatatcctcatcgcctgtgtggatggcctgaaaggcttcccggatgccatcaac

SEQ ID NO: 875907 - DNA, 75 bp, synthetic construct
  source 1..75: mol_type = other DNA
tggagtatgccgatccggaactggcggctggcgatgagccgttttattatcgaattcggtgaacgcctgagcgtt

SEQ ID NO: 875908 - DNA, 75 bp, synthetic construct
  source 1..75: mol_type = other DNA
tcggcaggcgataaagaagcgcaaggtgttcccaacggacgactcggtgcgaaaagtgatttatctggcgataca

SEQ ID NO: 875909 - DNA, 75 bp, synthetic construct
  source 1..75: mol_type = other DNA
ctatgacccgtccagtaataatgagctggcccaggtgatctatcaggcgatggagagctaccataatccgtggca

SEQ ID NO: 875910 - DNA, 75 bp, synthetic construct
  source 1..75: mol_type = other DNA
gccgttatgttggccttgctgacgaagaagacgattttgactttaaagaacgctttacggctcttaaagccgagt

SEQ ID NO: 875911 - DNA, 75 bp, synthetic construct
  source 1..75: mol_type = other DNA
caaaacaatttccgatacctaccataactggcgtaacaaaggtggcgactatcaagatatcgctggcttctgtgc

SEQ ID NO: 875912 - DNA, 75 bp, synthetic construct
  source 1..75: mol_type = other DNA
acctgcaaaactgtttctgaacacccagatccctgcggccttatggtttatgcgccgtgatcgtgaaaacagcag

SEQ ID NO: 875913 - DNA, 75 bp, synthetic construct
  source 1..75: mol_type = other DNA
agcgtgattcgccatgcgatcaaaaagcgtaaagtgttcccgacagacgactcggtgaaaaaagtggtgtggctt

SEQ ID NO: 875914 - DNA, 75 bp, synthetic construct
  source 1..75: mol_type = other DNA
gctttacagctctcaaagctgagtttgaagcacaactcgaagaagaagctctcttgaataaagctatcgctgaga

SEQ ID NO: 875915 - DNA, 75 bp, synthetic construct
  source 1..75: mol_type = other DNA
atggcaagaaaacctaaagaaatcaaaacagacccgttagaggtcatcctgtggaaagcagctgacaagctacgt

SEQ ID NO: 875916 - DNA, 75 bp, synthetic construct
  source 1..75: mol_type = other DNA
gctgcgattgtctgcttcccggggattttttaccgtggcggcgcggagcagaaaatccgtcaatatctggtcgac

SEQ ID NO: 875917 - DNA, 75 bp, synthetic construct
  source 1..75: mol_type = other DNA
gtaattttcaaggaaatgctgtagttaattatattgattcaagctatgaatttactcgaattattgagcataaac

SEQ ID NO: 875918 - DNA, 75 bp, synthetic construct
  source 1..75: mol_type = other DNA
caggtctttttggttcggtatttgcatatgaaatgaaaaaaaaaggatactcgataaaagtaatagaaaaaagag

SEQ ID NO: 875919 - DNA, 75 bp, synthetic construct
  source 1..75: mol_type = other DNA
tgaacaatctgatcatctgcgtgctcgtcaggccacggcggatattttacgtgaagcgggtgtcccggtgaccga

SEQ ID NO: 875920 - DNA, 75 bp, synthetic construct
  source 1..75: mol_type = other DNA
gttcatctggtgtatggtcacggtggcgatctgcttaaacaggcgctgaaagatgacaacctgaattgggtattt

SEQ ID NO: 875921 - DNA, 75 bp, synthetic construct
  source 1..75: mol_type = other DNA
ccgacgagcagcgtcagattcaggagatcaacaccggcattctgatcgctaacggcgcagatatgaaacgctggc

SEQ ID NO: 875922 - DNA, 75 bp, synthetic construct
  source 1..75: mol_type = other DNA
tcagcccatatacagtggtggaagacgcgaatctggcagcggcctgtaccattggcccgtttgcccgtctgcgcc

SEQ ID NO: 875923 - DNA, 75 bp, synthetic construct
  source 1..75: mol_type = other DNA
gcgaaaggccgcccggagcgcgaatatttacagaccggagatgcggtggatagctggaaagtgattgtcgttgaa

SEQ ID NO: 875924 - DNA, 75 bp, synthetic construct
  source 1..75: mol_type = other DNA
gcgaccggagtacggttatttcgccaaacaggcggggtttaccgttaaaacgtccgccagccttgcggctttatg

SEQ ID NO: 875925 - DNA, 75 bp, synthetic construct
  source 1..75: mol_type = other DNA
gtgccgcaacgcattttagttctcggtgccagtggctacattggtcagcatctggtgcgcacactcagccagcaa

SEQ ID NO: 875926 - DNA, 75 bp, synthetic construct
  source 1..75: mol_type = other DNA
atttgcaaaccggcgatgcggtggatagctggaaagtgattgtcgtcgagcctgaaaaacagcttaccttattgt

SEQ ID NO: 875927 - DNA, 75 bp, synthetic construct
  source 1..75: mol_type = other DNA
ctggtcaactccagcgactggggctacgacgctcaggcctttgcccgctggcgaccggagtacggttatttcgcc

SEQ ID NO: 875928 - DNA, 75 bp, synthetic construct
  source 1..75: mol_type = other DNA
aaatcggcggtaaagagcgttatttctttggcaatattttgtggcagacacgggcgttgatggaccgcgcgatcg

SEQ ID NO: 875929 - DNA, 75 bp, synthetic construct
  source 1..75: mol_type = other DNA
aacaggctatttcacttgttggtcgggatatttatgagaagctcataaagggatatactgaaaaacaatggggaa

SEQ ID NO: 875930 - DNA, 75 bp, synthetic construct
  source 1..75: mol_type = other DNA
atgacaagccttcagcagcgtgcagagctacaccgccaaatctgggccattgccaatgatgtcagaggctccgta

SEQ ID NO: 875931 - DNA, 75 bp, synthetic construct
  source 1..75: mol_type = other DNA
gaacacagtcaaagacaaaaacacccgtcttgccgccgttctcaaaggcgttgaggggctaaaactggggaattt

SEQ ID NO: 875932 - DNA, 75 bp, synthetic construct
  source 1..75: mol_type = other DNA
accggcatggacaaccagatcctggcgctgtatgccagagggatgactacccgcgaaattacctcagtcttcaaa

SEQ ID NO: 875933 - DNA, 75 bp, synthetic construct
  source 1..75: mol_type = other DNA
tgtggcgaagcgtgccaatacgaatgaccacctgaatgctgatttaaacagtatctttgtcgcgattgaaagctc

SEQ ID NO: 875934 - DNA, 75 bp, synthetic construct
  source 1..75: mol_type = other DNA
ggccccggtaacagtaggcaaaggcgcgaccattgctgcgggtacaactgtgacgcgtaatgtcggcgaaaatgc

SEQ ID NO: 875935 - DNA, 75 bp, synthetic construct
  source 1..75: mol_type = other DNA
actgtgacgcgtaatgtcggcgaaaatgctctggcaatcagccgtgtgccgcagtcgcaaaaagaaggctggcgt

SEQ ID NO: 875936 - DNA, 75 bp, synthetic construct
  source 1..75: mol_type = other DNA
atgcgacttgataaatttatcgcacagcaactcggcgttagccgtgctattgccgggcgtgaaatccgcggcact

SEQ ID NO: 875937 - DNA, 75 bp, synthetic construct
  source 1..75: mol_type = other DNA
agattgttaaataaccaaatgaccgccctacgcgacaccctgctcccgaaactcatctccggcgagctatccctg

SEQ ID NO: 875938 - DNA, 75 bp, synthetic construct
  source 1..75: mol_type = other DNA
actatcaagggaatgcagtggtaaattatattgataaggagtttgattttactcggatcatcgaacataagcatt

SEQ ID NO: 875939 - DNA, 75 bp, synthetic construct
  source 1..75: mol_type = other DNA
acggggatgcggacgatttcttggactgctttatcattccagtccgcattgttggcggtacgttttgggactgac

SEQ ID NO: 875940 - DNA, 75 bp, synthetic construct
  source 1..75: mol_type = other DNA
tggctaacgaactggccaaaaacctcaaaacccctgaagacctcagtcagtttgatcggctgctaaaaaagctca

SEQ ID NO: 875941 - DNA, 75 bp, synthetic construct
  source 1..75: mol_type = other DNA
atctcactaagcctgcggtgctggaagtgattaccccaacgcaggttcgtttgaccattagtgaagggcgttatc

SEQ ID NO: 875942 - DNA, 75 bp, synthetic construct
  source 1..75: mol_type = other DNA
tcgggggcgctcctgtaaatcgtgattctggtacgatgcgtggtcgacgaaccatttttggtggacgagctggag

SEQ ID NO: 875943 - DNA, 75 bp, synthetic construct
  source 1..75: mol_type = other DNA
ttatcgatgctctgttggttcataagatggccatggctttattgccgttggtggatgctggcgatacaagcgagg

SEQ ID NO: 875944 - DNA, 75 bp, synthetic construct
  source 1..75: mol_type = other DNA
atttttggtcaggcctgtatcgatcaacattcaatgatcgtcgccgcacaagggttaacgcccgaccaccatctt

SEQ ID NO: 875945 - DNA, 75 bp, synthetic construct
  source 1..75: mol_type = other DNA
atgaataaatttattaaagtaacactgataggtgcagtactggctacattaactgcatgtactggtcatattgaa

SEQ ID NO: 875946 - DNA, 75 bp, synthetic construct
  source 1..75: mol_type = other DNA
ttattgatgcactgttggttcataagatggccagggctttattgtcgttggtggacgctggtgatacaagcgagg

SEQ ID NO: 875947 - DNA, 75 bp, synthetic construct
  source 1..75: mol_type = other DNA
aactatccggtaactccggatggttggataagctgtagtgagcgaatgccagaaatgggagagcgacaatgctat

SEQ ID NO: 875948 - DNA, 75 bp, synthetic construct
  source 1..75: mol_type = other DNA
ccgcagtatcgcttttcacatcgatgaagacgattaccacggcaaacatattgcgtatttcatgcgacaagcatt

SEQ ID NO: 875949 - DNA, 75 bp, synthetic construct
  source 1..75: mol_type = other DNA
agtgaaatcagccagggtgcatatataagtgacagcgtcaccattcatgactcactggtttgcgggcaatgtaga

SEQ ID NO: 875950 - DNA, 75 bp, synthetic construct
  source 1..75: mol_type = other DNA
gcgcaagggttagcgcctcgcgtattgtccaccaggcacaaatttatggcgatgccgtcgtccggtatgctttta

SEQ ID NO: 875951 - DNA, 75 bp, synthetic construct
  source 1..75: mol_type = other DNA
ttattgatgcactattggttcataagatggccagggctttattgccgctggtggctgataagcatgaggcgggcc

SEQ ID NO: 875952 - DNA, 75 bp, synthetic construct
  source 1..75: mol_type = other DNA
gtgctgatgctttctcctggccccggagtgccaagcgaagccggttgtatgccggaactcctcacccgcctgcgc

SEQ ID NO: 875953 - DNA, 75 bp, synthetic construct
  source 1..75: mol_type = other DNA
gagatcgccggagcagcaaccgcgctactggaaaacgccgcgccgttcccgcgcccggattatctgtttgctgat

SEQ ID NO: 875954 - DNA, 75 bp, synthetic construct
  source 1..75: mol_type = other DNA
gcgggcgaaattcttcacggtaaagcgtcgagcattgaacatgacggtcaggcgatgtttgccggattaacaaac

SEQ ID NO: 875955 - DNA, 75 bp, synthetic construct
  source 1..75: mol_type = other DNA
gcctaggtcatcaggcgattgtcgaagcttacggggggtatgtcggtcaggcgggcgaaattctgcacggtaaag

SEQ ID NO: 875956 - DNA, 75 bp, synthetic construct
  source 1..75: mol_type = other DNA
ggcgaccatgagcaatccggtgctgatgctttctcctggccccggtgtgccgagcgaagccggttgtatgccgga

SEQ ID NO: 875957 - DNA, 75 bp, synthetic construct
  source 1..75: mol_type = other DNA
cagcggcgggatggatgaagtttcattacacgcgccgacaatcgttgccgaactgcatgacggcgaaattaagag

SEQ ID NO: 875958 - DNA, 75 bp, synthetic construct
  source 1..75: mol_type = other DNA
cggctgaaagcccgctttggcaacatccacgagtgacgataacgccgcatgttgcagctataacccggcccgcag

SEQ ID NO: 875959 - DNA, 75 bp, synthetic construct
  source 1..75: mol_type = other DNA
attgacaagacgccctacaaagtatggctctcagaagtgatgttgcaacaaactcaggttgcgaccgttatcccc

SEQ ID NO: 875960 - DNA, 75 bp, synthetic construct
  source 1..75: mol_type = other DNA
ggaaaccggaaaacatattggtgaagggctggcgatagataaaaacggttatggcaccactgatccgtataagat

SEQ ID NO: 875961 - DNA, 75 bp, synthetic construct
  source 1..75: mol_type = other DNA
aaacgttgattgccgactggaagacgagtctgaaactgagtgcgcgcatgtgtgagatcatgcgacaagccctgg

SEQ ID NO: 875962 - DNA, 75 bp, synthetic construct
  source 1..75: mol_type = other DNA
tgtcgatgctgagtacgcaaaagaatgcgcgctggaaggtatggcgagaacgcaggttatctggctgaaagaggg

SEQ ID NO: 875963 - DNA, 75 bp, synthetic construct
  source 1..75: mol_type = other DNA
attgaaggtggcctggagatgaagtacggctcctggttcggcctgatttacggcgaaggctggaccgtgcaggcc

SEQ ID NO: 875964 - DNA, 75 bp, synthetic construct
  source 1..75: mol_type = other DNA
aagtggaatatgccgattcgcgactggcgtttagccatgagccgctttattattgaattcggtgaccgcttaagc

SEQ ID NO: 875965 - DNA, 75 bp, synthetic construct
  source 1..75: mol_type = other DNA
gctaattaaaaagaatcagactcgtatcacgcaaatggatagccaaattctatccctttatgccaaaggcatgac

SEQ ID NO: 875966 - DNA, 75 bp, synthetic construct
  source 1..75: mol_type = other DNA
cagcgtcattcggcaggcgataaagaagtgcaaggtgttcccaacggacgactcggtgcgaaaagtgatttatct

SEQ ID NO: 875967 - DNA, 75 bp, synthetic construct
  source 1..75: mol_type = other DNA
tgcgaaaagtgatttatctggcgatacagtcggcgtcaaaaaaatggagtatgccaatccagaactggcggctgg

SEQ ID NO: 875968 - DNA, 75 bp, synthetic construct
  source 1..75: mol_type = other DNA
cccgcagacgcatattcagctctgcatcatccatatggtgcgcaacagcctgaaattcgtgtcgtggaaggatta

SEQ ID NO: 875969 - DNA, 75 bp, synthetic construct
  source 1..75: mol_type = other DNA
acggacatccgcaaagtgaaccgccccgggtttcctggagagtattttatctgtgaactcaggctgccagatcat

SEQ ID NO: 875970 - DNA, 75 bp, synthetic construct
  source 1..75: mol_type = other DNA
cgtcattcaccggctgcatggatgaaggcaatgcgctctggtataacttagcgcaaccgccgtcagttggcctgg

SEQ ID NO: 875971 - DNA, 75 bp, synthetic construct
  source 1..75: mol_type = other DNA
aaaaaccagcctaaaccgggtgccaactcccgcaatggctattccacaaagaccgttatcaccggtgatggccac

SEQ ID NO: 875972 - DNA, 75 bp, synthetic construct
  source 1..75: mol_type = other DNA
aaaaatcagcccaaatcgggaaccaactcccgtaatggctattccacgaaaaccgtcaccactactgacgggctg

SEQ ID NO: 875973 - DNA, 75 bp, synthetic construct
  source 1..75: mol_type = other DNA
tcccggaagcgataaatagcgtgtacccgcagacgcatattcagctctgcatcatccatatgtgcgcaacagcct

SEQ ID NO: 875974 - DNA, 75 bp, synthetic construct
  source 1..75: mol_type = other DNA
cgttgccacgttcaaagaaatgtacgacgccgatgtctcgcccacgctgatatccaaagtgaccgatgcggttaa

SEQ ID NO: 875975 - DNA, 75 bp, synthetic construct
  source 1..75: mol_type = other DNA
cccgcgcgcgcaatctgcataaagcggcacagcaagttgccaccttacacggcggtaaattcccggaaacctttg

SEQ ID NO: 875976 - DNA, 75 bp, synthetic construct
  source 1..75: mol_type = other DNA
cagcgtgatccgccatgcgatcaaaaagcgtaaagtgttcccgacagacgactcggtgaaaaaagtggtatggct

SEQ ID NO: 875977 - DNA, 75 bp, synthetic construct
  source 1..75: mol_type = other DNA
ttgcgattgatgactttggcaccggatatgccaactacgaacggttaaagcgtttgcaggctgatatcatcaaaa

SEQ ID NO: 875978 - DNA, 75 bp, synthetic construct
  source 1..75: mol_type = other DNA
gcaacaaagagggtgaaggttatgatgagatcctcgcgcgactgaaatatgacggcggcattatgaccccggata

SEQ ID NO: 875979 - DNA, 75 bp, synthetic construct
  source 1..75: mol_type = other DNA
aggtataactcagcatatctcggccatgaaggctggtatctcagtccgttctggtcgtcggatcgaaaaaggaga

SEQ ID NO: 875980 - DNA, 75 bp, synthetic construct
  source 1..75: mol_type = other DNA
aatttccacgacgatatgttcctgtacggtatcggctacaatttcaccggcaacggttggtggttcaaaccgttc

SEQ ID NO: 875981 - DNA, 75 bp, synthetic construct
  source 1..75: mol_type = other DNA
cggtcagaaagagctgctggatatgtggctggccgaaaatgaaggtgcaaagttctggctgaatgtactgacgga

SEQ ID NO: 875982 - DNA, 75 bp, synthetic construct
  source 1..75: mol_type = other DNA
ctggccgaatcttgccacgttcttcgcttatccaacggacatccgcaaagtgatctatacgacgaatgccatcga

SEQ ID NO: 875983 - DNA, 75 bp, synthetic construct
  source 1..75: mol_type = other DNA
attattaaccaaagcattacatttattgaaattgaagaaaaaaaaacgcacaagcctgtatcacacttaagaatt

SEQ ID NO: 875984 - DNA, 75 bp, synthetic construct
  source 1..75: mol_type = other DNA
cgagtttgaccgtgacacgacctatgcggcaggtaatggcggtaaagaagggctgaacggtgcggtcgccctctg

SEQ ID NO: 875985 - DNA, 75 bp, synthetic construct
  source 1..75: mol_type = other DNA
tatctcatgcagaatttaaaggcggttttgcagatatcggcgtgcattatctggactggaccagccggactaccg

SEQ ID NO: 875986 - DNA, 75 bp, synthetic construct
  source 1..75: mol_type = other DNA
aaatacaggtattgcaaacgttaaattaacaacctcgctaatgataaaccctgagttcaacatagaacataacct

SEQ ID NO: 875987 - DNA, 75 bp, synthetic construct
  source 1..75: mol_type = other DNA
cttggatttggagcctgtacgagagatgtagctcgctggggttgtcctcatgcgcttaagtgtcagtctggtcta

SEQ ID NO: 875988 - DNA, 75 bp, synthetic construct
  source 1..75: mol_type = other DNA
taaatctgttcaagaattgaccgctgggttccgtaaaacgattcagggcttcagagattctaatttcactaatat

SEQ ID NO: 875989 - DNA, 75 bp, synthetic construct
  source 1..75: mol_type = other DNA
atcgaactggcaacgaaaaccatcgccgaaggcgagctcgacaaagttgtgcttgctcgggcaaccgacctgcat

SEQ ID NO: 875990 - DNA, 75 bp, synthetic construct
  source 1..75: mol_type = other DNA
gggcgcgattacccgttttacgtcgttggaccaggcacaacgttttcttcgtcagcacccggaacacgccgactt

SEQ ID NO: 875991 - DNA, 75 bp, synthetic construct
  source 1..75: mol_type = other DNA
gaaaaaattgctctggcatcaaacggattattttctgctgatgcggttttgactattggcaggattaagcctaca

SEQ ID NO: 875992 - DNA, 75 bp, synthetic construct
  source 1..75: mol_type = other DNA
tttatctattttagggctctatatttattcaccaataattgctttaggccagttgaatgaagtaaatagtagtca

SEQ ID NO: 875993 - DNA, 75 bp, synthetic construct
  source 1..75: mol_type = other DNA
ttaattatttatgacttcaaacatagattaaaagtaaaaaaaacaataaagtttacattgttgataattatatta

SEQ ID NO: 875994 - DNA, 75 bp, synthetic construct
  source 1..75: mol_type = other DNA
attttcaatattaacgccaatattgacatatttaattatttatgacttcaaacatagattaaaagtaaaaaaaac

SEQ ID NO: 875995 - DNA, 75 bp, synthetic construct
  source 1..75: mol_type = other DNA
gatatcctaaaaattaaggatacaggtgactggaagccactatttcttacattagagaagaaagctgtagatgct

SEQ ID NO: 875996 - DNA, 75 bp, synthetic construct
  source 1..75: mol_type = other DNA
ggggcaggtaattattactcttttgaatggtactcctgacgggagtggctctggcggcggaggtggaaaaggagg

SEQ ID NO: 875997 - DNA, 75 bp, synthetic construct
  source 1..75: mol_type = other DNA
cttaataccgcctatttagatgctaataatgagaaagatttcactgccgggattaacgcgctgtggaaacgtttc

SEQ ID NO: 875998 - DNA, 75 bp, synthetic construct
  source 1..75: mol_type = other DNA
atggcggcggcgtgacaaagcgctgcgtactgaagcgctggcgggaacggtagcaaatcatcctgatgataagca

SEQ ID NO: 875999 - DNA, 75 bp, synthetic construct
  source 1..75: mol_type = other DNA
gcgaaggtactaatggcgaatctgtctggacgcttcatgagtcatggaataccagccgtgatgatattcctctgg

SEQ ID NO: 876000 - DNA, 75 bp, synthetic construct
  source 1..75: mol_type = other DNA
gccagaatcaggttaaacctgttgttaaatttcggcgtaaagctgatttcattcgctacgaacgccctgttcccg

SEQ ID NO: 876001 - DNA, 75 bp, synthetic construct
  source 1..75: mol_type = other DNA
atgaacagggaaattcagcagcggctacagtgggtaaaactctatgaaacgtctggtgacgcggggttcgtatgc

SEQ ID NO: 876002 - DNA, 75 bp, synthetic construct
  source 1..75: mol_type = other DNA
cgctaccgtagatctttctgctgatgacctgaaggaactgctggcagaatggcagcattactataactgggaacg

SEQ ID NO: 876003 - DNA, 75 bp, synthetic construct
  source 1..75: mol_type = other DNA
attaatgttgtccgctttccgccatttcatcatcactgattggcgtggcgttttttgccagcactcccgctttgc

SEQ ID NO: 876004 - DNA, 75 bp, synthetic construct
  source 1..75: mol_type = other DNA
gggtaagcgtcgtctcagcaccgtctggcagatcctgaaattccctgagagaatagtggacaccaaatatggtgg

SEQ ID NO: 876005 - DNA, 75 bp, synthetic construct
  source 1..75: mol_type = other DNA
gcgactcaggaattgctcaaatacggcctgctggaagaggccagtaagcccaatctgtaccgcatcgtactgagc

SEQ ID NO: 876006 - DNA, 75 bp, synthetic construct
  source 1..75: mol_type = other DNA
caagtccggtcaatgcggcagcgatgatggctgccagtcgtcggctcaatctgaattgctaccatttttacatgg

SEQ ID NO: 876007 - DNA, 75 bp, synthetic construct
  source 1..75: mol_type = other DNA
tcttgcacgggcgaccgacctgcattttgcaagcccggttaacgcagcggcgatgatggcagccagccgtcggct

SEQ ID NO: 876008 - DNA, 75 bp, synthetic construct
  source 1..75: mol_type = other DNA
caagctctgattggggataattatattgatgaagatgaagtaatagatctttataataagctaaaagctggactt

SEQ ID NO: 876009 - DNA, 75 bp, synthetic construct
  source 1..75: mol_type = other DNA
agtacatcggtgaatccgaaggtggtaacgtcgatgtccgcaccgagctggatgtcgagtcgaaagagttcaatc

SEQ ID NO: 876010 - DNA, 75 bp, synthetic construct
  source 1..75: mol_type = other DNA
taataacggtaattatcatggacgatatatggagcagcagaaaaatgtcgcttatctgcgcccggtaattgcctg

SEQ ID NO: 876011 - DNA, 75 bp, synthetic construct
  source 1..75: mol_type = other DNA
ctaaaagaacctttttacgtggatggttgcgatttcttcgtagcgttgagagagctaagaaaaaaaagcctgcgc

SEQ ID NO: 876012 - DNA, 75 bp, synthetic construct
  source 1..75: mol_type = other DNA
attcaggcgctcttcttgccgggttaggcggcatgaactccaacgctccaagagcaagtgatgcagacgccacgc

SEQ ID NO: 876013 - DNA, 75 bp, synthetic construct
  source 1..75: mol_type = other DNA
cgaggcaggctggcagagacaatccgcagcaatcaggctggagaagcactaacagcgcgtggtcagaacatcacg

SEQ ID NO: 876014 - DNA, 75 bp, synthetic construct
  source 1..75: mol_type = other DNA
ggatatcgacgcgatcgcaaatgcagacgcttctgctctcgatttcatgacaggaatgacaggaggtgcaggtaa

SEQ ID NO: 876015 - DNA, 75 bp, synthetic construct
  source 1..75: mol_type = other DNA
tggagaaaattaaaagagaacctgagcttttggtgcaatctgggactctggccgatgctcgacggaaagatgtta

SEQ ID NO: 876016 - DNA, 75 bp, synthetic construct
  source 1..75: mol_type = other DNA
ccaattcattttccaccggaatgcaggttcttcgtgctcaaatgctcgccagtggcggtggagaaattacagtag

SEQ ID NO: 876017 - DNA, 75 bp, synthetic construct
  source 1..75: mol_type = other DNA
gctgcttctggtcgagcttatgatgctttgcgggttatttcagcagttgacagaggaacttcttcttcgtcgcag

SEQ ID NO: 876018 - DNA, 75 bp, synthetic construct
  source 1..75: mol_type = other DNA
gccatgacatataccaaaagcaaaacgtttaaaaccgaaggtggcgcgcgtcgctggttggtcaaaacattaacg

SEQ ID NO: 876019 - DNA, 75 bp, synthetic construct
  source 1..75: mol_type = other DNA
accgcgatgacgtataccaaaagcaaaacgtttaaaaccgaaaatggtgcccgtcgctggctggaaagaaactca

SEQ ID NO: 876020 - DNA, 75 bp, synthetic construct
  source 1..75: mol_type = other DNA
acgaatctctggtatgtggcgtgttccccaaccaggatggaacgttcaccgccatgacttataccaaaagcaaga

SEQ ID NO: 876021 - DNA, 75 bp, synthetic construct
  source 1..75: mol_type = other DNA
acgaatctcttgtatacggcgtgtttcccaaccagaacggcacgttcatcgcgatgacgtataccaaaagcaaaa

SEQ ID NO: 876022 - DNA, 75 bp, synthetic construct
  source 1..75: mol_type = other DNA
acgaatctctggcatacggtgtgtttcccaaccaggacggtacgttcaccgctatgacgtataccaaaagcaaaa

SEQ ID NO: 876023 - DNA, 75 bp, synthetic construct
  source 1..75: mol_type = other DNA
gccatgacttatacccaaagcaagacattcaaaactgaaacgggcgcacgtcgctggcttgccagaaatacttgc

SEQ ID NO: 876024 - DNA, 75 bp, synthetic construct
  source 1..75: mol_type = other DNA
gttcagaaactccgttcatgacgtgatgcagcaggaaaaagactgggtcgcgccggaaggtgacaatatctgcac

SEQ ID NO: 876025 - DNA, 75 bp, synthetic construct
  source 1..75: mol_type = other DNA
acatatagacagaagtgagggggctagatatattggtgttattgccggatattatccatttcccgggaaacaaca

SEQ ID NO: 876026 - DNA, 75 bp, synthetic construct
  source 1..75: mol_type = other DNA
taactatagtattaccttttttcattactgcctgttctgataagtattctgaacaggataaaatgcaggccatta

SEQ ID NO: 876027 - DNA, 75 bp, synthetic construct
  source 1..75: mol_type = other DNA
atagctgtactttattattcttacaggcctcaggtaaaaaaacattacaggacttaatgaataatccagtgttaa

SEQ ID NO: 876028 - DNA, 75 bp, synthetic construct
  source 1..75: mol_type = other DNA
gcagcagagccagccggtaaattgcatgaatacaaaccagtgggatatcagcgtctggtcgatgagttatctgga

SEQ ID NO: 876029 - DNA, 75 bp, synthetic construct
  source 1..75: mol_type = other DNA
caggtaaagcagttagcctggcaactgaggaaagcgaagccggactgcaaactgccggataaggcgatggactac

SEQ ID NO: 876030 - DNA, 75 bp, synthetic construct
  source 1..75: mol_type = other DNA
caactgaggaaagcgaaaccgggctgcaaattaccggataaagcgatggactatctggagcgaaacggacttata

SEQ ID NO: 876031 - DNA, 75 bp, synthetic construct
  source 1..75: mol_type = other DNA
gtagggtggcatcacgttcaaaccttttcatgggcggggaccgtgaaatggttatgttttcaatcctcctggcag

SEQ ID NO: 876032 - DNA, 75 bp, synthetic construct
  source 1..75: mol_type = other DNA
tagcgattaactcacgcaccgaagacgccgccaaaattgtgcaggaaaaaaaccggtggcgctcacgctgcggtg

SEQ ID NO: 876033 - DNA, 75 bp, synthetic construct
  source 1..75: mol_type = other DNA
aacaactggcaaaaatagttcatgactacgccagccggtttcctctgactgaggatggtgacgcgcaattattgc

SEQ ID NO: 876034 - DNA, 75 bp, synthetic construct
  source 1..75: mol_type = other DNA
atcatgatgccatcagcgaaggtcaggccgcgttagggaaggtgcgaataagcaggtcatttcttcccaagctga

SEQ ID NO: 876035 - DNA, 75 bp, synthetic construct
  source 1..75: mol_type = other DNA
ctggatcgctgttggtataggcatagtgatgtgggggggatcacttttcctgttaaggaaaatggctaaatcaga

SEQ ID NO: 876036 - DNA, 75 bp, synthetic construct
  source 1..75: mol_type = other DNA
gtagggcggcttcaagaacgaacctcttcatgggcggggaccgtgaattggttatgttttcaatcctactggcag

SEQ ID NO: 876037 - DNA, 75 bp, synthetic construct
  source 1..75: mol_type = other DNA
caaccacttttcatgatcttaagcttctttctgaatgtttcataagcctgattgaatgtgcacaggaagaaaacg

SEQ ID NO: 876038 - DNA, 75 bp, synthetic construct
  source 1..75: mol_type = other DNA
actgggggggacggaaatatataaaaaaaaagaaaaaagattatttttttcttggtgcttgcgtgtcttttttag

SEQ ID NO: 876039 - DNA, 75 bp, synthetic construct
  source 1..75: mol_type = other DNA
actgggggggacggaaatatataaaaaaaaaagaaaaaaagattattttttttcttggtgcttgcgtgtcttttt

SEQ ID NO: 876040 - DNA, 75 bp, synthetic construct
  source 1..75: mol_type = other DNA
aaatcgggttcgtggtgaaagaaacggtccccatgccagcgagcggagactatcaggatctccccttgtggaggg

SEQ ID NO: 876041 - DNA, 75 bp, synthetic construct
  source 1..75: mol_type = other DNA
tatcaggatctccccttgtggaggggacttacgatcgcggcggtcagggagattcgaaggaattactcgcaggac

SEQ ID NO: 876042 - DNA, 75 bp, synthetic construct
  source 1..75: mol_type = other DNA
agactttcccgcaggtgatgcgcgtggaacgatatcggcgatgcgttttcgacctgaaaacggcgaggttatttt

SEQ ID NO: 876043 - DNA, 75 bp, synthetic construct
  source 1..75: mol_type = other DNA
ccattctttcttttgttggcagccggggcatcgcgctctggcaaacgcttaagattgaagatcaacttcagcatc

SEQ ID NO: 876044 - DNA, 75 bp, synthetic construct
  source 1..75: mol_type = other DNA
actaatgtcaccgttgtttgtgccggggcgaaatctattctcgatttaggattaaccactgagtatttagaaacc

SEQ ID NO: 876045 - DNA, 75 bp, synthetic construct
  source 1..75: mol_type = other DNA
gctgagttgaccggcggtgacagcctgaaatccaacatccagctggtgttcaacaacgccatcctggcgagtgaa

SEQ ID NO: 876046 - DNA, 75 bp, synthetic construct
  source 1..75: mol_type = other DNA
tcatttgcaaacactcttactggaacatcctgaactgcaattaatggaagccaattacagtcagaagcaaaaatc

SEQ ID NO: 876047 - DNA, 75 bp, synthetic construct
  source 1..75: mol_type = other DNA
tgataggtatccagtcggaaaaactcagtcgttatcttgaccgtttacacactgccggactaaacgtgacgcggg

SEQ ID NO: 876048 - DNA, 75 bp, synthetic construct
  source 1..75: mol_type = other DNA
gatagcgtatcttcggtacatacgctcacagacgatcttccgctggagtcgctggccgatcagcccggtgccgga

SEQ ID NO: 876049 - DNA, 75 bp, synthetic construct
  source 1..75: mol_type = other DNA
gctggtccgctggtcggtccggttctcgccgcacagatgggctacctgcctggcacgctgtggctgctggcgggg

SEQ ID NO: 876050 - DNA, 75 bp, synthetic construct
  source 1..75: mol_type = other DNA
gccgtcaggcgctgcgttcagcttcccactggtatgccgtgctaagcggcgagcgcgtcagcccacaacaagaag

SEQ ID NO: 876051 - DNA, 75 bp, synthetic construct
  source 1..75: mol_type = other DNA
aacaaacgctggcctgggcgcagcaaaagctggaacccaccaacacgctgcaaccgattctggaaaaactgtatc

SEQ ID NO: 876052 - DNA, 75 bp, synthetic construct
  source 1..75: mol_type = other DNA
ccgaaatatcacaccggattccgccatgcaatgccggttcgccagcaactaaaaacccgcacactgttcaatgtg

SEQ ID NO: 876053 - DNA, 75 bp, synthetic construct
  source 1..75: mol_type = other DNA
tttgccatttaatatgaatacattctatcaactttggggtgttaaaacaccaacagacgccatagatattatcaa

SEQ ID NO: 876054 - DNA, 75 bp, synthetic construct
  source 1..75: mol_type = other DNA
atgaccatacagcaatggttattctcgtttaaagggcgtattggacgccgcgatttctggatttggattggcctc

SEQ ID NO: 876055 - DNA, 75 bp, synthetic construct
  source 1..75: mol_type = other DNA
gcatttctgatgattgtggcgtggatgctgctggcgggtaactgggcgattttaccgggtgtctggcaatgggcg

SEQ ID NO: 876056 - DNA, 75 bp, synthetic construct
  source 1..75: mol_type = other DNA
tttctggcgaaaccgaatggcgtagctcgtcgatgtccacccgcacggcgcaaaattctgttaccgatttactgt

SEQ ID NO: 876057 - DNA, 75 bp, synthetic construct
  source 1..75: mol_type = other DNA
ccacgtacctgcgggtaaatgggttttctacggtctggctgctatcctgacagttgtcacactgattggtgtcgt

SEQ ID NO: 876058 - DNA, 75 bp, synthetic construct
  source 1..75: mol_type = other DNA
ccacgctaacccgttaccgcaacggcgtgctgcgctgcgatcccgccgttgccggactgcgcctgagcgggacgt

SEQ ID NO: 876059 - DNA, 75 bp, synthetic construct
  source 1..75: mol_type = other DNA
gtgtgccgagcgaagcgggttgtatgccggagctgcttactcgtctgcgcggcaagctgccaattattggcattt

SEQ ID NO: 876060 - DNA, 75 bp, synthetic construct
  source 1..75: mol_type = other DNA
agattctttcagaaagatagctgataaaattatttatactgggccgatagatgagttttatgattactgctttgg

SEQ ID NO: 876061 - DNA, 75 bp, synthetic construct
  source 1..75: mol_type = other DNA
aaaagagattgtcttgtgcgcagaagcggcacgaaagcagggggcaacggtgattgccattacttctctggctga

SEQ ID NO: 876062 - DNA, 75 bp, synthetic construct
  source 1..75: mol_type = other DNA
tggcagggaatgtcgcgctggcagctgatgtacccgcaggcgtcacactggcggaaaaacaaacgctggtacgta

SEQ ID NO: 876063 - DNA, 75 bp, synthetic construct
  source 1..75: mol_type = other DNA
gaacgctgaatgaagtacgggaaatcacggaaaaatggttatcagaatataactgtgaacgcccgcatgaatcgc

SEQ ID NO: 876064 - DNA, 75 bp, synthetic construct
  source 1..75: mol_type = other DNA
atgttgggtggagcggacaatccaaatggtgaattaccgtcttatatcactggcgctgacaacatcgttgatgac

SEQ ID NO: 876065 - DNA, 75 bp, synthetic construct
  source 1..75: mol_type = other DNA
tcgatctgaatatcccggcacagcgggtggtcagggtgctggacagaatcgtggcaaaccggggttatccacaga

SEQ ID NO: 876066 - DNA, 75 bp, synthetic construct
  source 1..75: mol_type = other DNA
gcggcggcagggatacccgtggaatcacaaaaggatccatcgtatttattgtctgctgaagctgaactttcgccg

SEQ ID NO: 876067 - DNA, 75 bp, synthetic construct
  source 1..75: mol_type = other DNA
tggtcactcatctgataacgacgttcgtgcttagtatccgtcaggcctgtcggagccttgacctgagtagaacgg

SEQ ID NO: 876068 - DNA, 75 bp, synthetic construct
  source 1..75: mol_type = other DNA
ttgaaaccagcctttaagcatgagctggtcactcatctgataacgacgttcgtgcttagtatccgtcaggcctgt

SEQ ID NO: 876069 - DNA, 75 bp, synthetic construct
  source 1..75: mol_type = other DNA
gccctgtatcgtgccaggcaaaaccgggcgaaacataccgcccctgattctgtattgcacaatacagaatcagcc

SEQ ID NO: 876070 - DNA, 75 bp, synthetic construct
  source 1..75: mol_type = other DNA
aaagggcttgagatggcactgtatagaacgcggcaaaaccgaaaaaatgtattgcacaatacacatgataagagt

SEQ ID NO: 876071 - DNA, 75 bp, synthetic construct
  source 1..75: mol_type = other DNA
gtgatcgggtccagatggatacctgtaaaattggccccggtttgtatcagtacacatctgttgatgactgcactc

SEQ ID NO: 876072 - DNA, 75 bp, synthetic construct
  source 1..75: mol_type = other DNA
aatccggctccgctggcgacgccagaagcgatgaaccagagctggtccatcgattcgctgatgtgcggcagacgc

SEQ ID NO: 876073 - DNA, 75 bp, synthetic construct
  source 1..75: mol_type = other DNA
tcgtttcatagatgaagatggtgatgaagttatggggtattacgctccggtattttcgctgattgatggtcagtt

SEQ ID NO: 876074 - DNA, 75 bp, synthetic construct
  source 1..75: mol_type = other DNA
gtcaccgggtatcatcggaaaggaattttttgacgaggcaagagccgagttcgatcctaatgagttcatcaaaaa

SEQ ID NO: 876075 - DNA, 75 bp, synthetic construct
  source 1..75: mol_type = other DNA
cctgaatgaagtgcgggaaatcaccgagcgctggctgacggaatataacagcgagcggcctcatgaatccctgaa

SEQ ID NO: 876076 - DNA, 75 bp, synthetic construct
  source 1..75: mol_type = other DNA
atctggttttcgctcgccgtactgaccggttgtattctgctggcatcaggcatcgcaattaccctcacccgccat

SEQ ID NO: 876077 - DNA, 75 bp, synthetic construct
  source 1..75: mol_type = other DNA
tgctccatgttgtttatatgaacgcatcccgtttgcaaggcttccgtgtttttgacgttgacggtagattgctgc

SEQ ID NO: 876078 - DNA, 75 bp, synthetic construct
  source 1..75: mol_type = other DNA
atacctgtccaaattgcgcattgccactaacaaatcttttcgacgttgacctgaaggcaacgggtcttagcgata

SEQ ID NO: 876079 - DNA, 75 bp, synthetic construct
  source 1..75: mol_type = other DNA
gatgtggcccgtgctggctggtgtgccgactataacgaaccgacttccttcctgaataccatgctgtctaacagt

SEQ ID NO: 876080 - DNA, 75 bp, synthetic construct
  source 1..75: mol_type = other DNA
gccagttatctgcaatatgggcatatcgccggtattgatgaaattcttgaagggaaaaaaccgattaccgatctc

SEQ ID NO: 876081 - DNA, 75 bp, synthetic construct
  source 1..75: mol_type = other DNA
catcgcaattaccctcacccgccatttgcacaatggcctggtagaagcgctgaaaaatatcaccgatgtcgtaca

SEQ ID NO: 876082 - DNA, 75 bp, synthetic construct
  source 1..75: mol_type = other DNA
cgatattgaacaatatggcgaagggataatttacgcgtttatctgcccggagtgccggacaacagcgacgtctta

SEQ ID NO: 876083 - DNA, 75 bp, synthetic construct
  source 1..75: mol_type = other DNA
atggctacatacggcggtcagtttacgcttacgctcaagctgctggaagcaaaaggtcagaaagtggcgctgaat

SEQ ID NO: 876084 - DNA, 75 bp, synthetic construct
  source 1..75: mol_type = other DNA
gtgctgcaaatggtggtgaatagcatcgattatggaatgaacgtcgccgaagcgaccaatgcgccgcatttccac

SEQ ID NO: 876085 - DNA, 75 bp, synthetic construct
  source 1..75: mol_type = other DNA
ccgccgccgtggcgcagttcactttacatcgcgccagaagaatatgcgcatgaggccggttgggagctaaccgct

SEQ ID NO: 876086 - DNA, 75 bp, synthetic construct
  source 1..75: mol_type = other DNA
tgatattgaacaatatggcgaaggaatgctttatgcgtttatctgcctggagtgccggacaacggcgacgtccta

SEQ ID NO: 876087 - DNA, 75 bp, synthetic construct
  source 1..75: mol_type = other DNA
accctgattgctcaaaccgtattctgccacaaaccgcagcgcgcaccggtgggttttgtatgccctgcattcagg

SEQ ID NO: 876088 - DNA, 75 bp, synthetic construct
  source 1..75: mol_type = other DNA
gatctgaccgcgcgcattaaagaagccagcgcacagggtaagccaccgctggatattcacgtcctgccgcgcgat

SEQ ID NO: 876089 - DNA, 75 bp, synthetic construct
  source 1..75: mol_type = other DNA
ttatctgggctgcactgtcgctctactgggcgcagatggccaatctgatccccggcaaagcccgcgctgaatacg

SEQ ID NO: 876090 - DNA, 75 bp, synthetic construct
  source 1..75: mol_type = other DNA
aagaaaagaaggctaagtatggtagaatttccatacgcacagaccttgttatccgactatacagcctggaaggca

SEQ ID NO: 876091 - DNA, 75 bp, synthetic construct
  source 1..75: mol_type = other DNA
cgggcataaatggttgggcatcacgcctgaaaaattcatgcagcatgtggatgcttacatcagatggtataacga

SEQ ID NO: 876092 - DNA, 75 bp, synthetic construct
  source 1..75: mol_type = other DNA
tcacccgcgtcatgctggataaaagttttattcagcaacaaatcacgcatcgctctgagagatcccctcataatt

SEQ ID NO: 876093 - DNA, 75 bp, synthetic construct
  source 1..75: mol_type = other DNA
tccccttgtgttaggtaatttgggagcaggcaatagcacaatgaaagcggtttttgatggtcttttcacccgcgt

SEQ ID NO: 876094 - DNA, 75 bp, synthetic construct
  source 1..75: mol_type = other DNA
atcgaaacccgtcgtgtgagcctggtattacgcaaaaaagatctggccttattagaagtggaagcggtttcctgt

SEQ ID NO: 876095 - DNA, 75 bp, synthetic construct
  source 1..75: mol_type = other DNA
atgatgctgaaaggaaaagcccgacgtcatttatttttgtgtattcagattatcgttattatcttcgctaccatc

SEQ ID NO: 876096 - DNA, 75 bp, synthetic construct
  source 1..75: mol_type = other DNA
cgcaaaccttatgggtaagtgagcgtccgccgatccgtttgcgagccatgcaaacacaatggggaaattgctctg

SEQ ID NO: 876097 - DNA, 75 bp, synthetic construct
  source 1..75: mol_type = other DNA
atgaagaaaatttcgaccgtttacgtgcctgccgtaccgagcaggaagtactggatctcattgaccgcaccaacg

SEQ ID NO: 876098 - DNA, 75 bp, synthetic construct
  source 1..75: mol_type = other DNA
atgaggcagccttttgtcttattcaaaggccttacatttcaaaaactctgcttaccaggcgcatttcgcccaggg

SEQ ID NO: 876099 - DNA, 75 bp, synthetic construct
  source 1..75: mol_type = other DNA
cgtgagaacaatctgatgttgctcgaatatgccggggagcgaatgctctctcacatcgttgccgagcacggcgac

SEQ ID NO: 876100 - DNA, 75 bp, synthetic construct
  source 1..75: mol_type = other DNA
atttggcgcggcgcagatggcgaatgtgctggagccggagtgggcgaaatcgctgaccctggcggtggcgctgtc

SEQ ID NO: 876101 - DNA, 75 bp, synthetic construct
  source 1..75: mol_type = other DNA
agggatggttgtacctcgctggcatcaaagatgtttatacgtgcgaaattgtcggctacgccatgggagagcaca

SEQ ID NO: 876102 - DNA, 75 bp, synthetic construct
  source 1..75: mol_type = other DNA
ctgacgacgccggtattaatcagtaatagcgatgattttacggacgtattaccccacggcacggcgcagataagc

SEQ ID NO: 876103 - DNA, 75 bp, synthetic construct
  source 1..75: mol_type = other DNA
agtgataacctattgtgccatatctatattaaatcatgtgagatagttgatgaatataagcgtgaaacattaaaa

SEQ ID NO: 876104 - DNA, 75 bp, synthetic construct
  source 1..75: mol_type = other DNA
atcacgccagcactgttaatttgccaggcgctgggtttaccagcacaggacacgcaacacattattagtatgtcg

SEQ ID NO: 876105 - DNA, 75 bp, synthetic construct
  source 1..75: mol_type = other DNA
cagggcaccagcttcaactttgttgccccgctgattatgggcggcacagcgctgaagaccggtggtgctgatgtt

SEQ ID NO: 876106 - DNA, 75 bp, synthetic construct
  source 1..75: mol_type = other DNA
actggctgaaaaacctgctctcttccgggattgccgctggcggcatcacagccattgtattgaacctgatttttc

SEQ ID NO: 876107 - DNA, 75 bp, synthetic construct
  source 1..75: mol_type = other DNA
ggtgctggtggtattgctggggcgctatgtcacgcgtccggcgctgcgttttgttgcccgctctggcttgcggga

SEQ ID NO: 876108 - DNA, 75 bp, synthetic construct
  source 1..75: mol_type = other DNA
aattcaacggcatggctggcagggaaccgaagaagggaaacataccggcaacatggcggatgagccagaaactaa

SEQ ID NO: 876109 - DNA, 75 bp, synthetic construct
  source 1..75: mol_type = other DNA
gcctcgacgacgatgggcgcatttgctctctcggcgttaaaagtggcgggtgcgctggtgctggtggtattgctg

SEQ ID NO: 876110 - DNA, 75 bp, synthetic construct
  source 1..75: mol_type = other DNA
aaaaaagctaatgatagtgttacgtctattgatgactatattcatcgtttgatcggttgcagagtcgcgtcgatt

SEQ ID NO: 876111 - DNA, 75 bp, synthetic construct
  source 1..75: mol_type = other DNA
aacgcaccagcgcgatgttaagtgagatcattaccgaggaccgcgaacatctgtcattaattcaacgacatggct

SEQ ID NO: 876112 - DNA, 75 bp, synthetic construct
  source 1..75: mol_type = other DNA
atatcgaaacgttgcgcaaattcggcatgaaagtgttttacggcgatgccacgcggatggatttactggaatctg

SEQ ID NO: 876113 - DNA, 75 bp, synthetic construct
  source 1..75: mol_type = other DNA
atgagtgagaaaaagtcactatctatgaatgctgtacgttttgtttatggtgatgaaaccatcgtggttcagtgt

SEQ ID NO: 876114 - DNA, 75 bp, synthetic construct
  source 1..75: mol_type = other DNA
tatgagctgctgtgggaaatgccgggtaacgatggctacctgcaactggtgggtatcatgcagaaatttatcgat

SEQ ID NO: 876115 - DNA, 75 bp, synthetic construct
  source 1..75: mol_type = other DNA
attcttcgccgatcaggaagagtttgaacgcctgtataccaaatatgagaaagacgacagcatccgcaagcagcg

SEQ ID NO: 876116 - DNA, 75 bp, synthetic construct
  source 1..75: mol_type = other DNA
gcgatcgatgttattcacgcccaggtgagcggcggcggccgtctgatttacatcggtgcggggacctctggtcgt

SEQ ID NO: 876117 - DNA, 75 bp, synthetic construct
  source 1..75: mol_type = other DNA
caacctgggcgcaattaatagcctggatgaactggaagagctggcgattctggcggtacgcgcactcgacgcgct

SEQ ID NO: 876118 - DNA, 75 bp, synthetic construct
  source 1..75: mol_type = other DNA
tcatgcagaaatttatcgatcagtcgatctctgctaacaccaactacgatccgtcacgcttcccgtcaggaaaag

SEQ ID NO: 876119 - DNA, 75 bp, synthetic construct
  source 1..75: mol_type = other DNA
acggcctgcgtaactccacgctttctgctctgatgccgtccgagacctcttcgcagatctctaacgccactaacg

SEQ ID NO: 876120 - DNA, 75 bp, synthetic construct
  source 1..75: mol_type = other DNA
acccgacgtctgatttggggcgtttatagcgccgacaaccagctacaggcgtgctttagggtagcggaagataac

SEQ ID NO: 876121 - DNA, 75 bp, synthetic construct
  source 1..75: mol_type = other DNA
ggttaaccgctacaaattgctgaaaaaagatgcgcgtaccatcgccgcccagcaggtagcaaggctggaatccgc

SEQ ID NO: 876122 - DNA, 75 bp, synthetic construct
  source 1..75: mol_type = other DNA
gtgagtgtcagcctcaacggcgcatatggtgttgaagccacggggctgttattcctttcccttctgacgggatta

SEQ ID NO: 876123 - DNA, 75 bp, synthetic construct
  source 1..75: mol_type = other DNA
cgcttgtaatgtttggcaccatcgccgcctccggtgtgcgtatcgtttctcgtgagccgctgaaccgtcgggcga

SEQ ID NO: 876124 - DNA, 75 bp, synthetic construct
  source 1..75: mol_type = other DNA
cgagcaatattatcccgcggtgtttaaggcgattggagaggcacaagaacgcatcattcttgaaacgtttatctg

SEQ ID NO: 876125 - DNA, 75 bp, synthetic construct
  source 1..75: mol_type = other DNA
ataccagttggcatcgtacttaacctgattctggtgcgtctgaaattaaccaaaacgttaaatgttgatatctgg

SEQ ID NO: 876126 - DNA, 75 bp, synthetic construct
  source 1..75: mol_type = other DNA
accgcgtaaccggcgagatctacgaaagcgcccagttcctgtatattctggttgctgcctgcctgttctcaaact

SEQ ID NO: 876127 - DNA, 75 bp, synthetic construct
  source 1..75: mol_type = other DNA
gcagcttgataatttcctcactaccggatttctcgacatcatcccgctaagtcagccgctggagtttcggcagga

SEQ ID NO: 876128 - DNA, 75 bp, synthetic construct
  source 1..75: mol_type = other DNA
gtggtttcgacaatgcaagtatagcagttatagacctttttaatactctaaaagagttagatgtttcatctggag

SEQ ID NO: 876129 - DNA, 75 bp, synthetic construct
  source 1..75: mol_type = other DNA
gagcaagcggaagcggcgttaattgcttgcgagcgcaactgtaaaacggccattgtgatggtgctgaaaaatctc

SEQ ID NO: 876130 - DNA, 75 bp, synthetic construct
  source 1..75: mol_type = other DNA
atgagtgaaaaagaatcgccatcaatgaaagcgttacgcattgtctatggtggtgaggtcatcgtcgtacagtgt

SEQ ID NO: 876131 - DNA, 75 bp, synthetic construct
  source 1..75: mol_type = other DNA
gttgcggggccgtctggaagtcaccgtcagacacaaatccgctgaacgcgttaaggcggtgctggttgagtggta

SEQ ID NO: 876132 - DNA, 75 bp, synthetic construct
  source 1..75: mol_type = other DNA
gcctggctttcagggcagcgttatttcgaactttggccgcgtgtgattaacttgcgccatgcaggagttttatga

SEQ ID NO: 876133 - DNA, 75 bp, synthetic construct
  source 1..75: mol_type = other DNA
cctgcgaccgtcactgcaaaacggccattgtgatggtgctgaaaaatctcgatgccgcagaagcgaaaaaacaac

SEQ ID NO: 876134 - DNA, 75 bp, synthetic construct
  source 1..75: mol_type = other DNA
gatgtggtcgccccaacgaaaaactgcatgtgcgccaggtcaatatcgtcaaaaacgctaccggatgtaatgccg

SEQ ID NO: 876135 - DNA, 75 bp, synthetic construct
  source 1..75: mol_type = other DNA
gggcctggtagttggtttgattgctggcggcgaatatgccattcagcacgcggtggaaggcgcagaagatagccg

SEQ ID NO: 876136 - DNA, 75 bp, synthetic construct
  source 1..75: mol_type = other DNA
cttcctgatgggcacaggaatgggggcgctgattatggttggctatgcttcgtttacggagtttatccccgcggc

SEQ ID NO: 876137 - DNA, 75 bp, synthetic construct
  source 1..75: mol_type = other DNA
ttcaggctcatgaaatgaaaatggcagaaagtcgccgtgctgataaagaattacgcgaagcaaagacccggttac

SEQ ID NO: 876138 - DNA, 75 bp, synthetic construct
  source 1..75: mol_type = other DNA
acggcacaggatgtggtggttggcattgctgccagcggtcgcacgccgtatgtgattgccggactggaatacgca

SEQ ID NO: 876139 - DNA, 75 bp, synthetic construct
  source 1..75: mol_type = other DNA
aaagccgcaggtggtgatgatgaagcgctgaaaactttacgccagcggaatgcacagcaggcccgtaaagaggcc

SEQ ID NO: 876140 - DNA, 75 bp, synthetic construct
  source 1..75: mol_type = other DNA
taacgaagcactgcgcttggcaaaggttaaacgtgatcgcctcattgaaaacgccaaaaggtcaggccggttaaa

SEQ ID NO: 876141 - DNA, 75 bp, synthetic construct
  source 1..75: mol_type = other DNA
atgacctgaacaacgccaacgatgtcatgacccagttgctcaatatcgactggtatcgcggcctgattcagggca

SEQ ID NO: 876142 - DNA, 75 bp, synthetic construct
  source 1..75: mol_type = other DNA
ccccctacaacgattacaaaacccgttcagcggtatgcctggcactcgaaaaggaatttggccttgaaagcgaca

SEQ ID NO: 876143 - DNA, 75 bp, synthetic construct
  source 1..75: mol_type = other DNA
gccgcccacagcaaaaaaccgtctgcgagcaatgtccgaactcggtatggttcgcatcgccggaggaagtgaagt

SEQ ID NO: 876144 - DNA, 75 bp, synthetic construct
  source 1..75: mol_type = other DNA
gttactacagcaggaagccagccaggaaggaatgatgacacccgtacagggggaagtcgaacagccgaaccaaat

SEQ ID NO: 876145 - DNA, 75 bp, synthetic construct
  source 1..75: mol_type = other DNA
ggccattcttctcgacgcgtctcggcatgctggagatggtcttcgccaaagcagacctgtggctggcggaatact

SEQ ID NO: 876146 - DNA, 75 bp, synthetic construct
  source 1..75: mol_type = other DNA
ccgctttaaatatggtctgccagaaatcaccgtcagcagcctgtcgctgtacaccggggcgattctggaagccaa

SEQ ID NO: 876147 - DNA, 75 bp, synthetic construct
  source 1..75: mol_type = other DNA
gctaaccgccaggagttactcaccaccttacaaaatttgtcgaacgacgagctgctgcccgttgcgcgtgcgttt

SEQ ID NO: 876148 - DNA, 75 bp, synthetic construct
  source 1..75: mol_type = other DNA
tggcgctggtcggcgaagaaggcgccgcagaaccgtatcgctatctgatgaaaaatctgcgttcccgtctgatgg

SEQ ID NO: 876149 - DNA, 75 bp, synthetic construct
  source 1..75: mol_type = other DNA
ctgctcgacaccctgcgccgcgtgaaatgtttcggtgtaccgctggtccgtattgatatccgtcaggagagcacc

SEQ ID NO: 876150 - DNA, 75 bp, synthetic construct
  source 1..75: mol_type = other DNA
ctggagatggtcttcgccaaagcagacctgtggctggcggaatactatgatcaacgtctggtagacaaagcactg

SEQ ID NO: 876151 - DNA, 75 bp, synthetic construct
  source 1..75: mol_type = other DNA
ccgcgcagcgcttgaaaagaaattaggctcgtttgagtcttccatacccgacacgaaaccttccagaccttcccc

SEQ ID NO: 876152 - DNA, 75 bp, synthetic construct
  source 1..75: mol_type = other DNA
agattaaagtggtcgatgacgcacgcaagaccttaccgccaggttgcgaaggtgaagaagcctcgcgtggcccca

SEQ ID NO: 876153 - DNA, 75 bp, synthetic construct
  source 1..75: mol_type = other DNA
gaattaaccgcccgtgcgctggatgaagaaggctggtattacagcggcgatctctgccgtatggatgaggctggc

SEQ ID NO: 876154 - DNA, 75 bp, synthetic construct
  source 1..75: mol_type = other DNA
tgcgtgtctcgcgctgcttgagcagcagcgttgcacctgtatgctaggcgcaacgccgtttgtctatgatctttt

SEQ ID NO: 876155 - DNA, 75 bp, synthetic construct
  source 1..75: mol_type = other DNA
agtgctgtttacctccggaactgaaggtatgccaaagggcgtgatgctgacacataataatattctcgccagcga

SEQ ID NO: 876156 - DNA, 75 bp, synthetic construct
  source 1..75: mol_type = other DNA
attgtccgcggcggcgaaaatattagcagccgtgaagtggaagatattttattgcagcatcctaaaattcacgat

SEQ ID NO: 876157 - DNA, 75 bp, synthetic construct
  source 1..75: mol_type = other DNA
gcccgatgaacgtttaggtgaacgctcatgcgcttatgtcgtgctgaaagcaccgcatcattcattatcgctgga

SEQ ID NO: 876158 - DNA, 75 bp, synthetic construct
  source 1..75: mol_type = other DNA
gaccatgccgcccagcacggtgtcggtcagacttacttaattcaacactcagccggttcaggtaagtctaactcg

SEQ ID NO: 876159 - DNA, 75 bp, synthetic construct
  source 1..75: mol_type = other DNA
aacgtgagcaaaaacgccttaaagggttcgatataccgaaacatagagggtataattctactgataaaggtctgt

SEQ ID NO: 876160 - DNA, 75 bp, synthetic construct
  source 1..75: mol_type = other DNA
tggcgaacgaggacatagtaagcccaacgttgcgcgacctggacgccagccgccgcccacagcaaaaaaccgtct

SEQ ID NO: 876161 - DNA, 75 bp, synthetic construct
  source 1..75: mol_type = other DNA
tgcctgcgccactcggccacgcaacgggctttctgcatggcgtaacggcaccattcttaattggcgctcgcagcg

SEQ ID NO: 876162 - DNA, 75 bp, synthetic construct
  source 1..75: mol_type = other DNA
aactggctcccgccacctcttccctctcattaagtcagattatcgccgacaataccccactgaccacggcgataa

SEQ ID NO: 876163 - DNA, 75 bp, synthetic construct
  source 1..75: mol_type = other DNA
gatcgcatcgcatttcaactgcctggctggtgtgaatttaccgttatctatcttgcctgcctgaaaatcggtgcg

SEQ ID NO: 876164 - DNA, 75 bp, synthetic construct
  source 1..75: mol_type = other DNA
atgacttatacggtaaaattcagggatgatgcgctcaaggaatggctgaaactggataagaccattcaacaacag

SEQ ID NO: 876165 - DNA, 75 bp, synthetic construct
  source 1..75: mol_type = other DNA
ccacagacaatagaatatctggattatctggaatcaaagctgggcaagattattcgcgtcaaagcggatttcaca

SEQ ID NO: 876166 - DNA, 75 bp, synthetic construct
  source 1..75: mol_type = other DNA
tctggttcaggaatgcggtatgtcgccggatgaagcagcagaacgcattcatcgggcactggaaatccttaaacc

SEQ ID NO: 876167 - DNA, 75 bp, synthetic construct
  source 1..75: mol_type = other DNA
tcttaccgtgactgggccatgaccaccagaggcggtgctcaatttgacctgctggcagagtcaaatgacaaatca

SEQ ID NO: 876168 - DNA, 75 bp, synthetic construct
  source 1..75: mol_type = other DNA
gaactggcggaacgtgcgcgactgattaagccgtcaacgtgccatcacgatgatgatctgcattttaccgggtgt

SEQ ID NO: 876169 - DNA, 75 bp, synthetic construct
  source 1..75: mol_type = other DNA
cgcaacatgacacttttgcagaagtcactgacttcgagcacaacgttgttccgtcaaagtcaaacatgtgggtga

SEQ ID NO: 876170 - DNA, 75 bp, synthetic construct
  source 1..75: mol_type = other DNA
ttgaatttcccgcatcacgaggaacgcagggaagcactgtaatacttatgatgacagtaccagcaagagcactat

SEQ ID NO: 876171 - DNA, 75 bp, synthetic construct
  source 1..75: mol_type = other DNA
acgtcacaagttctcaaatgaccatgcaggatctgcaaactcatctcgattactgtgcggaacagttacgtaagc

SEQ ID NO: 876172 - DNA, 75 bp, synthetic construct
  source 1..75: mol_type = other DNA
atggctaaaccaaaatctgaaattgatgctattcgagcattaacagaagtaacaattaaaggttttgagcaagtt

SEQ ID NO: 876173 - DNA, 75 bp, synthetic construct
  source 1..75: mol_type = other DNA
ctggtctttatgatcacctcgctggaaactattggcgatatcaccgccacctccgacgtttccgaacaaccggtt

SEQ ID NO: 876174 - DNA, 75 bp, synthetic construct
  source 1..75: mol_type = other DNA
aagcaaccagcacaatcaacgttatttccgtatctggcgggaaagacagccttgctcaatggatccttgccgttg

SEQ ID NO: 876175 - DNA, 75 bp, synthetic construct
  source 1..75: mol_type = other DNA
atttaaggccttcgcaacggcctgtggagcgtcgtgtggcagaagttgaagatggttatacccgtcttgcaaatg

SEQ ID NO: 876176 - DNA, 75 bp, synthetic construct
  source 1..75: mol_type = other DNA
gtggtgttgctggcgattccccccaatgaagctgtctcttatacacaaatccccacccggggatttgtgatgtct

SEQ ID NO: 876177 - DNA, 75 bp, synthetic construct
  source 1..75: mol_type = other DNA
ttaaccgcatccagtttcgtgagaaattcaccgggcagttgctagtcaatgtggataaaggtcgcgtggtgagta

SEQ ID NO: 876178 - DNA, 75 bp, synthetic construct
  source 1..75: mol_type = other DNA
gggacctcgcgttttgcgtacagagacaactgcgctcaccgccatcaccgcactacaggtgcgttttggcgattt

SEQ ID NO: 876179 - DNA, 75 bp, synthetic construct
  source 1..75: mol_type = other DNA
aaccatatcgggcgcgtactgcgcatggggccggggcaggcgttgcaattatttgacggcagcaaccaggtcttt

SEQ ID NO: 876180 - DNA, 75 bp, synthetic construct
  source 1..75: mol_type = other DNA
ctatatagaagatgatgattttgatatggtatcacaggaaattctattaaatggttcttttgataagtggagtga

SEQ ID NO: 876181 - DNA, 75 bp, synthetic construct
  source 1..75: mol_type = other DNA
atgaccgctgttattatgattggcgctccggtaggaatatttattgcggcattaattattgatcattttcctcgt

SEQ ID NO: 876182 - DNA, 75 bp, synthetic construct
  source 1..75: mol_type = other DNA
gaatgccaacttcgtgaagtagagcagcaaattgaaagagagaagagtattcgtttacccccgcttacttcgtag

SEQ ID NO: 876183 - DNA, 75 bp, synthetic construct
  source 1..75: mol_type = other DNA
gcctgcgcggttcgggtttcgttaatgccgtcggacggatcgtcgcggtcttcacgccttatggcgttgcggcac

SEQ ID NO: 876184 - DNA, 75 bp, synthetic construct
  source 1..75: mol_type = other DNA
gacatattgaatcactcggttctatgctcaaatgggctaagagcgaacgttatctttttgataatcctgctgaga

SEQ ID NO: 876185 - DNA, 75 bp, synthetic construct
  source 1..75: mol_type = other DNA
gccccgttattagcgggggctggcaaaatcagcttggctctgttttgcgaatcatttgatgtggggcttgaaacg

SEQ ID NO: 876186 - DNA, 75 bp, synthetic construct
  source 1..75: mol_type = other DNA
tgtcgcaacaagggaatcattacaggaactcgcagaacatgccggaatgattaacgcgaatattcagggggtgcg

SEQ ID NO: 876187 - DNA, 75 bp, synthetic construct
  source 1..75: mol_type = other DNA
cgggtattcgcgcgatcgccgtcaaatgtgacctttgtagctttgatgaacaaggtccggcctgcgtgcggatgt

SEQ ID NO: 876188 - DNA, 75 bp, synthetic construct
  source 1..75: mol_type = other DNA
gaaaactactttggcaaagtcctcggttttccccgtgacggtaaaaaaacattccactccctgcgtcatacgttc

SEQ ID NO: 876189 - DNA, 75 bp, synthetic construct
  source 1..75: mol_type = other DNA
cgtaggacatgttcgcggcagcaccactgcgatgacaacctatcgtaaggatgctgatgtgggcgagcaatttgg

SEQ ID NO: 876190 - DNA, 75 bp, synthetic construct
  source 1..75: mol_type = other DNA
atgagcgtaatcatcgtcggtggcggcatggcgggcgcgacgctggcgctggctatttcccggttaagtcacggg

SEQ ID NO: 876191 - DNA, 75 bp, synthetic construct
  source 1..75: mol_type = other DNA
catgttagatgatacaattgatgtgggggggaatgcctggggaatgaataatcatcgctgggatgaccgttggta

SEQ ID NO: 876192 - DNA, 75 bp, synthetic construct
  source 1..75: mol_type = other DNA
ggatggcagaacaactgagccgccgcatggcaattggcgaagaaatgcagcaccgctacgccatcaaagaaacac

SEQ ID NO: 876193 - DNA, 75 bp, synthetic construct
  source 1..75: mol_type = other DNA
tttgaacgctttacgcaacatggcccgctggcgatgttgccgatgtctgacggacgctgttcgctggtctggtgt

SEQ ID NO: 876194 - DNA, 75 bp, synthetic construct
  source 1..75: mol_type = other DNA
cccgattgccgggcaagggttcaacctcggtatgcgagatgtcatgagccttgcggaaaccctgactcaggcgca

SEQ ID NO: 876195 - DNA, 75 bp, synthetic construct
  source 1..75: mol_type = other DNA
cgttatcagcagcgtcgacagagcgatcgcgaagcaaccatcggcgtcacggacagccttgtacatctttttgcc

SEQ ID NO: 876196 - DNA, 75 bp, synthetic construct
  source 1..75: mol_type = other DNA
cagttatggtcgtatacagaaattgcttttagatctgcgtgtcgcaacagttgaaattataacgccagagctgga

SEQ ID NO: 876197 - DNA, 75 bp, synthetic construct
  source 1..75: mol_type = other DNA
agagtacgcttgggtgttgcattggtaatgttgttgaagcgagatttgcattttcatcatgatccaggtcctatt

SEQ ID NO: 876198 - DNA, 75 bp, synthetic construct
  source 1..75: mol_type = other DNA
ggctccatgcgcaacgttatattccagctcagccagaactcgcgctgaacgatctcactcgttcaatcaatatag

SEQ ID NO: 876199 - DNA, 75 bp, synthetic construct
  source 1..75: mol_type = other DNA
aaaaattatccgaaaggcactgggtgttgtaatgacgcagaaatattcgacaaagcgggcattgctgtactttcg

SEQ ID NO: 876200 - DNA, 75 bp, synthetic construct
  source 1..75: mol_type = other DNA
tccgatgacttcacccagcgcaattttgcgcccattgatttcattgataaaaatggcgatgttcagcctatgtat

SEQ ID NO: 876201 - DNA, 75 bp, synthetic construct
  source 1..75: mol_type = other DNA
agagcggaatctgtggagagttcggcttggtatcgccttggtcatgctattggagcatgacttcagcctgtacta

SEQ ID NO: 876202 - DNA, 75 bp, synthetic construct
  source 1..75: mol_type = other DNA
ggctatttcccggttaagtcacggggcgctgccggtacatttgattgaagcgaccgcgccagagtctcatgctca

SEQ ID NO: 876203 - DNA, 75 bp, synthetic construct
  source 1..75: mol_type = other DNA
gttactggccgcgctggcaggcgccaaatacgttgctccatatgttaaccgcgtagacgctcagggcggcgacgg

SEQ ID NO: 876204 - DNA, 75 bp, synthetic construct
  source 1..75: mol_type = other DNA
gttattagccgcactggcaggggcaaaatacgttgctccgtatgttaaccgcgtcgacgcccagggcggagacgg

SEQ ID NO: 876205 - DNA, 75 bp, synthetic construct
  source 1..75: mol_type = other DNA
gcgctgttagaaatgcacgcgccagaaagcatggtgctggcggccagctttaaaacgccgcgtcaggcgctggac

SEQ ID NO: 876206 - DNA, 75 bp, synthetic construct
  source 1..75: mol_type = other DNA
acaactaacccgagcattatcgcggccagcaaggagtccatctgggaagtgctgccgcgtttgcaaaaagcgatt

SEQ ID NO: 876207 - DNA, 75 bp, synthetic construct
  source 1..75: mol_type = other DNA
cgcgacgccattccgggcattgtggtgaaaatcccggtgacttccgaaggtctggcagcaattaaaatactgaaa

SEQ ID NO: 876208 - DNA, 75 bp, synthetic construct
  source 1..75: mol_type = other DNA
gttactggccgcgctggcaggggcaaaatacgttgctccgtatgttaaccgcgtagatgcccagggcggagacgg

SEQ ID NO: 876209 - DNA, 75 bp, synthetic construct
  source 1..75: mol_type = other DNA
tccgattgccggacaaggatttaacctcggtatgcgtgatgttatgagccttgcagaaaccctgactcaggcgca

SEQ ID NO: 876210 - DNA, 75 bp, synthetic construct
  source 1..75: mol_type = other DNA
gcgctggcagcaggcacttgtcagcagctggcgcgcatcggtgtctggcaatctctggccgattgcgcaaccgcc

SEQ ID NO: 876211 - DNA, 75 bp, synthetic construct
  source 1..75: mol_type = other DNA
tacggcgtattgtgccgttatcagcagcgtcggcagagcgatcgcgaagcaaccatcggcgtcacggacagtctg

SEQ ID NO: 876212 - DNA, 75 bp, synthetic construct
  source 1..75: mol_type = other DNA
atgtcggacgccaacaggttgtcagaacgtattacgatgcttcagcatgcgatctatgagcagtatgaggaatac

SEQ ID NO: 876213 - DNA, 75 bp, synthetic construct
  source 1..75: mol_type = other DNA
gagctgagcaatgagatcgaacatcttgatgtcctgatccaggaacatattaaaactcaccctgagctcaaccag

SEQ ID NO: 876214 - DNA, 75 bp, synthetic construct
  source 1..75: mol_type = other DNA
tacggcgtattgtgccgctaccagcagcgtcggcagagcgatcgcgaagcgactatcggcgttacggacagtctg

SEQ ID NO: 876215 - DNA, 75 bp, synthetic construct
  source 1..75: mol_type = other DNA
tttaatggcgcgactggcttcgctgttggaaaagcatccttacctggcgaccccggcaaaagtggcgattttatc

SEQ ID NO: 876216 - DNA, 75 bp, synthetic construct
  source 1..75: mol_type = other DNA
tttcctcggtgcagtggcgattagcggtttttatccttatgccgaagtgagtggtatctcaagattatgggatag

SEQ ID NO: 876217 - DNA, 75 bp, synthetic construct
  source 1..75: mol_type = other DNA
ggctttattacctttgtgttggtagtgatgctattccgcccggcgcaacagttagaagtgatctccaccggctta

SEQ ID NO: 876218 - DNA, 75 bp, synthetic construct
  source 1..75: mol_type = other DNA
tccgtaaccagttgcctgaactcggcgctgtataccgcttccaggatgctctactccttaagccgtcgcggtgat

SEQ ID NO: 876219 - DNA, 75 bp, synthetic construct
  source 1..75: mol_type = other DNA
gtatgccgggaatggacgggctggcgctgctcaagcagattaaacagcgccatccgatgcttccggtcatcatta

SEQ ID NO: 876220 - DNA, 75 bp, synthetic construct
  source 1..75: mol_type = other DNA
ccaggatgctctactccttaagccgtcgcggtgatgcgcccgcggtaatgggtaaaatcaaccgcagtaaaaccc

SEQ ID NO: 876221 - DNA, 75 bp, synthetic construct
  source 1..75: mol_type = other DNA
ctgaactcagcgctgtataccgcctcgcgaatgctttactcactgagccgtcgcggtgatgcacctgcagtaatg

SEQ ID NO: 876222 - DNA, 75 bp, synthetic construct
  source 1..75: mol_type = other DNA
gcgttttattggcaaaaattttgtttttgacgagcggatgggcgaacgtatatctgatgagattatcgcgcattg

SEQ ID NO: 876223 - DNA, 75 bp, synthetic construct
  source 1..75: mol_type = other DNA
atctggcgcatgagggcattaacgcgcaaatcagcgtacctgcgagcaatgttgaaacatttcgcgcacagctct

SEQ ID NO: 876224 - DNA, 75 bp, synthetic construct
  source 1..75: mol_type = other DNA
aagaaagcgcgttaccgccagaagaacagcgacgtctccgtgccgggcgggaaaatggcaataagatctttaata

SEQ ID NO: 876225 - DNA, 75 bp, synthetic construct
  source 1..75: mol_type = other DNA
taccatcggctggttgtactggtggttttgggtactggttatcccgctggaagccaacatcgccgccatgatcct

SEQ ID NO: 876226 - DNA, 75 bp, synthetic construct
  source 1..75: mol_type = other DNA
gaatccgacacgccggaaaaacatattgtccgcgccaccaactcggttatctggcgtatttctatcttctatttg

SEQ ID NO: 876227 - DNA, 75 bp, synthetic construct
  source 1..75: mol_type = other DNA
ccaccagtgcggtgcgccgtgcgacagccataccaactgtaaaaatgatggctgccatctgctgtttattcagtg

SEQ ID NO: 876228 - DNA, 75 bp, synthetic construct
  source 1..75: mol_type = other DNA
ggtgcttgaacgtgcgctcgctggggcaggtttaacctgtacgacgtttgagaacggcgcagaagtgctggaggc

SEQ ID NO: 876229 - DNA, 75 bp, synthetic construct
  source 1..75: mol_type = other DNA
tttaatggcgcgactggcgtctctgctggaaagtcatccttacctggcaacgccggcgaaggtggcgattttatc

SEQ ID NO: 876230 - DNA, 75 bp, synthetic construct
  source 1..75: mol_type = other DNA
aacagatggtaatgattggctattccgactcagcaaaagatgcgggcgtgatggcggcatcctgggcgcagtatc

SEQ ID NO: 876231 - DNA, 75 bp, synthetic construct
  source 1..75: mol_type = other DNA
gtggccgttaggtaaagagttacgcaatctgcaagaagaagacatcaaagtggtgctggcgattgccaacgattc

SEQ ID NO: 876232 - DNA, 75 bp, synthetic construct
  source 1..75: mol_type = other DNA
tctaatggcgcgactggcgtctctgctggaaagtcatccttacctggcaactccggcgaaagtggcgattttatc

SEQ ID NO: 876233 - DNA, 75 bp, synthetic construct
  source 1..75: mol_type = other DNA
tggccgctggcagaagcgttattcagtgaatcacggcaacaaaatacattaaacgcagctgagcgccgtcagtgg

SEQ ID NO: 876234 - DNA, 75 bp, synthetic construct
  source 1..75: mol_type = other DNA
tctggatgacatgcctgcgacgcagcattacgcccggctggtgattgatgacattgataatcaggcgctgataac

SEQ ID NO: 876235 - DNA, 75 bp, synthetic construct
  source 1..75: mol_type = other DNA
ggctgatgtatcacactctcggtcagcgtaaaggtctgggtatcggtggcaccaaagaaggcaccgaagaaccgt

SEQ ID NO: 876236 - DNA, 75 bp, synthetic construct
  source 1..75: mol_type = other DNA
aacggtgatggctgccggacaggaagtgttgattcaggatttgcctggcgaactgtttgaatcaaacgtaccgga

SEQ ID NO: 876237 - DNA, 75 bp, synthetic construct
  source 1..75: mol_type = other DNA
aggacataaacaggaagcggcgcgactgcttggttggggacgtaacaccctgacgcgtaagttaaaagagctggg

SEQ ID NO: 876238 - DNA, 75 bp, synthetic construct
  source 1..75: mol_type = other DNA
tttgcctgatgtggtgggtattccatgccaacacgccggaaacgcaaacgctgttccagtcgggatggtttgtgg

SEQ ID NO: 876239 - DNA, 75 bp, synthetic construct
  source 1..75: mol_type = other DNA
gctgcggatatcggcatttctgtggatggcgcggtagatattgcccgtgaagcagcggatatcattctgctggaa

SEQ ID NO: 876240 - DNA, 75 bp, synthetic construct
  source 1..75: mol_type = other DNA
ggcccgcgctggttctgctgctggctttcatggtggtagcggtggacttcaccagttatctgctctcagcagtag

SEQ ID NO: 876241 - DNA, 75 bp, synthetic construct
  source 1..75: mol_type = other DNA
aggaaatgtcggctttacttgggatcggccgcactacgctgtggcggaaaatgaagcaacatggcattgatgcag

SEQ ID NO: 876242 - DNA, 75 bp, synthetic construct
  source 1..75: mol_type = other DNA
gttaacggacaaacttaaactcaacctgaaagtgtaccgtgccactgaaagcgccgcctggcaggaggcacgcta

SEQ ID NO: 876243 - DNA, 75 bp, synthetic construct
  source 1..75: mol_type = other DNA
gccagtgctggctatccagcgtggtgtatttaaagtcctgccgattatcgactgggataaccgaactatttatca

SEQ ID NO: 876244 - DNA, 75 bp, synthetic construct
  source 1..75: mol_type = other DNA
ctgcaaaagaagaatatcagcttgtcacgcagctttttaaaaatgaaattttagataagctaagacaaacaacag

SEQ ID NO: 876245 - DNA, 75 bp, synthetic construct
  source 1..75: mol_type = other DNA
tggcgtgccagagatcaatctgttccagcagacctggaaagtcgcagtcaggaaaaataccaaaaacagcaatca

SEQ ID NO: 876246 - DNA, 75 bp, synthetic construct
  source 1..75: mol_type = other DNA
gggggcagacattgccggcagcgccagcagcggcggcgactttctgcaccgctattccgtgccgggacattccga

SEQ ID NO: 876247 - DNA, 75 bp, synthetic construct
  source 1..75: mol_type = other DNA
tcttccagtttcggcattcaggcggcggtgagcctgcatctggtgaatcagattcacccggatatcccggtgatc

SEQ ID NO: 876248 - DNA, 75 bp, synthetic construct
  source 1..75: mol_type = other DNA
tctggtgatattattgataatattaaagttttcaagacactagctgaatcgttacacgatgtcgatttcactgtc

SEQ ID NO: 876249 - DNA, 75 bp, synthetic construct
  source 1..75: mol_type = other DNA
tttatgccggatgcggcgttaacgccttatccggcctacaaaatcgtgcaaattcaatacattgcagaattttcg

SEQ ID NO: 876250 - DNA, 75 bp, synthetic construct
  source 1..75: mol_type = other DNA
cggaaacctaccgctttattgacgagttaacggacaaactcaaactaaatctgaaggtctacagggcaaaagaaa

SEQ ID NO: 876251 - DNA, 75 bp, synthetic construct
  source 1..75: mol_type = other DNA
atgggttaaaagtgacattagaatatgggagccacaatattggtgcgcataatgtatattatgttaaatgggatt

SEQ ID NO: 876252 - DNA, 75 bp, synthetic construct
  source 1..75: mol_type = other DNA
tgattactgggatgaagataaaattgaaaagcaagaagtactattcgaaaacataaaaaatgaaaaagcaataat

SEQ ID NO: 876253 - DNA, 75 bp, synthetic construct
  source 1..75: mol_type = other DNA
gtttctgttgaagagaatgatttgtcaaccgggaataagcacattccattaagctcgggtatggctgtcactgca

SEQ ID NO: 876254 - DNA, 75 bp, synthetic construct
  source 1..75: mol_type = other DNA
cccagcataaacgcgccaccgttgggttggatattctcgctgctatcggtagtgatatcgccctgatgcagctta

SEQ ID NO: 876255 - DNA, 75 bp, synthetic construct
  source 1..75: mol_type = other DNA
caaagccggtgaagcacaggataacgcccgcgctgccttgcgtatgcttaccgaaaacggtcatcagccattact

SEQ ID NO: 876256 - DNA, 75 bp, synthetic construct
  source 1..75: mol_type = other DNA
ctcgaccgtaacagctacgccctgacagaagccgagcgcaatgccagtgaactgacccgctgggcaggcagaaaa

SEQ ID NO: 876257 - DNA, 75 bp, synthetic construct
  source 1..75: mol_type = other DNA
aacacactccactcataatcaccgccgcagcctccggagcatttctgtttatcctcattttctgccgtcgcagac

SEQ ID NO: 876258 - DNA, 75 bp, synthetic construct
  source 1..75: mol_type = other DNA
caccaacgttttgatgcacgttcagggttattttcgcccgcatattgattccacagaacgccagcagctggctgc

SEQ ID NO: 876259 - DNA, 75 bp, synthetic construct
  source 1..75: mol_type = other DNA
gaaaacttccagctcttcctggttgagcatccgctggttcgtcacttaacccgccgtctgatttggggcgtttat

SEQ ID NO: 876260 - DNA, 75 bp, synthetic construct
  source 1..75: mol_type = other DNA
taattggttcggtaataacaaatagcgatttattcgtgtttcactcaactagtgaaggttttgggagaccaatta

SEQ ID NO: 876261 - DNA, 75 bp, synthetic construct
  source 1..75: mol_type = other DNA
tgttaaaccgcagttttgaagtaggtctggcagaagtcagccagtatgaaggggtcgaactgctggcctattcgt

SEQ ID NO: 876262 - DNA, 75 bp, synthetic construct
  source 1..75: mol_type = other DNA
atatccgcgaagcgctgcatgacagcctcaagcgtctgcagactgattacctcgatctttatcaggtgcactggc

SEQ ID NO: 876263 - DNA, 75 bp, synthetic construct
  source 1..75: mol_type = other DNA
ctgtatatcagggatgttgatttcatcaggcaatgctttgagaaaagaaaactgaaccagccagaatacatcatt

SEQ ID NO: 876264 - DNA, 75 bp, synthetic construct
  source 1..75: mol_type = other DNA
taaggccacttatgtgccgacatatctggacgaaaagcttaagcccgccttgctcaaaggcgagtttaagctcgt

SEQ ID NO: 876265 - DNA, 75 bp, synthetic construct
  source 1..75: mol_type = other DNA
caggagaccgcgtctcatccttttctcgagtgcctgtctcaggcgctggtcctgctttatgactccggcgaaggg

SEQ ID NO: 876266 - DNA, 75 bp, synthetic construct
  source 1..75: mol_type = other DNA
attgatacctcaggaatgttggcgaaaataacgccgtatggtttccatgccctacaaggaagcttatggccagcc

SEQ ID NO: 876267 - DNA, 75 bp, synthetic construct
  source 1..75: mol_type = other DNA
atggtgcaggatatccgcgtcatcctcatcaaacttgccgaccgtacccacaacatgcgcacgctgggctcactt

SEQ ID NO: 876268 - DNA, 75 bp, synthetic construct
  source 1..75: mol_type = other DNA
atgttaaacatcagaatgggttccgatacgggaggtaaagcagctattgagaggctgcttgcggcttatggattc

SEQ ID NO: 876269 - DNA, 75 bp, synthetic construct
  source 1..75: mol_type = other DNA
atacagggggtagagaggctatccataggttgatggctgcctatgatttcaagtcccgacagcagctatgcgatc

SEQ ID NO: 876270 - DNA, 75 bp, synthetic construct
  source 1..75: mol_type = other DNA
atccaccatgaatcctgccgtaacatccgtggctaccagaaagagccagagaagtttatggctgtggaatgggat

SEQ ID NO: 876271 - DNA, 75 bp, synthetic construct
  source 1..75: mol_type = other DNA
agctgggttttgaggcgctgtatcccaaccgttaccgcgtaatcaaagaagtggtgaaagccgcgcgcggcaacc

SEQ ID NO: 876272 - DNA, 75 bp, synthetic construct
  source 1..75: mol_type = other DNA
cctgccggtgcaacgcccgtcgacttcgcttatgcagtgcataccgatatcggtcatgcctgcgtgggcgcacgc

SEQ ID NO: 876273 - DNA, 75 bp, synthetic construct
  source 1..75: mol_type = other DNA
gaaacggctctgtgggcgggggctgcggcgacgatcctttacacctttattggcggtttcctcgcggtgagctgg

SEQ ID NO: 876274 - DNA, 75 bp, synthetic construct
  source 1..75: mol_type = other DNA
ggctacggcgcgtaacctggcaacacagcagagccttttcaatgctgtgggtatggccttacccgctgccgtcgg

SEQ ID NO: 876275 - DNA, 75 bp, synthetic construct
  source 1..75: mol_type = other DNA
aggacaggttctctcatccaacagctatgaccttatggctgccagggacatgaaccgccccgggaatcctggaga

SEQ ID NO: 876276 - DNA, 75 bp, synthetic construct
  source 1..75: mol_type = other DNA
cttccgggaaacaaattagtagtgcatcaggatgattcatcgtttgagtgtggcctagatgacattgaggtagta

SEQ ID NO: 876277 - DNA, 75 bp, synthetic construct
  source 1..75: mol_type = other DNA
actgtggctaactaccggacagggcgatccaggttcaaacattgaccctaaaaaaaatatcaattccgtgaactc

SEQ ID NO: 876278 - DNA, 75 bp, synthetic construct
  source 1..75: mol_type = other DNA
gtgattcttgttaacggtgccggtgttttgcgtgccgttcctgcatccagttttaattacaaagggatgttgatg

SEQ ID NO: 876279 - DNA, 75 bp, synthetic construct
  source 1..75: mol_type = other DNA
ttctgaaatcgaagggcgtttgcaggaagcgggaataccgtgccgcgtcagtggtcgcgagaagcatctttattc

SEQ ID NO: 876280 - DNA, 75 bp, synthetic construct
  source 1..75: mol_type = other DNA
aagatgacacttcatttgaatgctctgtagatgatgtggaagttgtaggacgagcagccaaagtaatcaagagcc

SEQ ID NO: 876281 - DNA, 75 bp, synthetic construct
  source 1..75: mol_type = other DNA
gctgatgacagcctatggtttcaacactcagatagcgttggttgaacacctcgaagcatcaaaaagcaccatggc

SEQ ID NO: 876282 - DNA, 75 bp, synthetic construct
  source 1..75: mol_type = other DNA
ctgcatacttacactattaaggagtgggaagggttgcaggacaccgtctttgcctctcctccctgtcgtggagca

SEQ ID NO: 876283 - DNA, 75 bp, synthetic construct
  source 1..75: mol_type = other DNA
gaatcacaccgtatggttttcatgccctacaaggatgcttatggcctgctgttcccgtcagtcaagtaacaacgc

SEQ ID NO: 876284 - DNA, 75 bp, synthetic construct
  source 1..75: mol_type = other DNA
tcattgaattgcggattaatgaaaattatccacaacttaatgaaggaaaagacaattgtaatctcttgcgcttat

SEQ ID NO: 876285 - DNA, 75 bp, synthetic construct
  source 1..75: mol_type = other DNA
tacgtcatcgctatgcgccgggcgtaacgcgtaatacggaatcttggttctgtcttgcactcccgcacgagcgcc

SEQ ID NO: 876286 - DNA, 75 bp, synthetic construct
  source 1..75: mol_type = other DNA
tgaaactcgactatgaaacgctcatggcggcgctactgcatgacgtgattgaagataccccggccacctaccagg

SEQ ID NO: 876287 - DNA, 75 bp, synthetic construct
  source 1..75: mol_type = other DNA
cgttgaaatcattaccgcaccgggcgctcgcccgaatgccgcgtggctgaactttgtcgttagctcgaaagcgcg

SEQ ID NO: 876288 - DNA, 75 bp, synthetic construct
  source 1..75: mol_type = other DNA
tgaaactcgactatgaaacgctaatggcggcgctacttcatgacgtgattgaagatactcccgccacctaccagg

SEQ ID NO: 876289 - DNA, 75 bp, synthetic construct
  source 1..75: mol_type = other DNA
caccgaacgttatcctgatgcaacgggagaaattattgttgtggataatgatgatgtacttaaagcagatttctt

SEQ ID NO: 876290 - DNA, 75 bp, synthetic construct
  source 1..75: mol_type = other DNA
taaatactttgttaggttttgtattccggtcattgattattaaattcttcgtattctttgcgctgtattttgtag

SEQ ID NO: 876291 - DNA, 75 bp, synthetic construct
  source 1..75: mol_type = other DNA
gtgttgccgcgcactgggcttataaagagcacggcgaaaccagcacgactgcacaaatccgcgcccagcgctgga

SEQ ID NO: 876292 - DNA, 75 bp, synthetic construct
  source 1..75: mol_type = other DNA
ctcattaagtcagattctcgccgacaatactcctctgaccacggcgataacggtccacggcgatgaattagccgc

SEQ ID NO: 876293 - DNA, 75 bp, synthetic construct
  source 1..75: mol_type = other DNA
attaccagaataagatcgtggccggggataacgttatcgggcaaaccgcttcaggcgcatatatcctcaagtggc

SEQ ID NO: 876294 - DNA, 75 bp, synthetic construct
  source 1..75: mol_type = other DNA
atatttttccgttaggtttactcatacccagcgttgctaacgcagccgctgattttgaattacctgttaatatgc

SEQ ID NO: 876295 - DNA, 75 bp, synthetic construct
  source 1..75: mol_type = other DNA
tggcaaaaaaggcaacaagagaataaacccgtcagaacaatggtggatattctgtacagagaaaagaataaatac

SEQ ID NO: 876296 - DNA, 75 bp, synthetic construct
  source 1..75: mol_type = other DNA
cgcgaaaaggccttgtccagctcagcagtgccactaacagcacgtcagaaacgcaggctgccacaccaaaagccg

SEQ ID NO: 876297 - DNA, 75 bp, synthetic construct
  source 1..75: mol_type = other DNA
gcatcgttaattgctcctggtggcgcaggtggcgggaaagtgggaattacaaacacaaacggcggtaacggaggt

SEQ ID NO: 876298 - DNA, 75 bp, synthetic construct
  source 1..75: mol_type = other DNA
tcaacttctcatcgccagcattgaagaaatgcaatacggatttagaaattccttcaatgaattctatgtagaggc

SEQ ID NO: 876299 - DNA, 75 bp, synthetic construct
  source 1..75: mol_type = other DNA
acttatcaccgtgcatgaatttggtcatttctgggttgcccggcgttgtggtgttcgcgttgagcgtttctcaat

SEQ ID NO: 876300 - DNA, 75 bp, synthetic construct
  source 1..75: mol_type = other DNA
ggcaaatctataagggtctacatggcagacggtcgcgaaattgagggaacgtcagatggcgttgacgcctgtcta

SEQ ID NO: 876301 - DNA, 75 bp, synthetic construct
  source 1..75: mol_type = other DNA
agtcgggcatagaagaggttgacacttcattcacaggtcgactaacgctaaacaatgaacagatggttaatcagc

SEQ ID NO: 876302 - DNA, 75 bp, synthetic construct
  source 1..75: mol_type = other DNA
caaagcctatttcaaagcccacgatcgcaacgacgaaacctgcctgctggcggccgccctggccccgaaagtcaa

SEQ ID NO: 876303 - DNA, 75 bp, synthetic construct
  source 1..75: mol_type = other DNA
tgtttgctgaagagggtttagtgatcgaacgcttcacccagcgtgcccctcagctgtttaatgccaataagaatt

SEQ ID NO: 876304 - DNA, 75 bp, synthetic construct
  source 1..75: mol_type = other DNA
cagctggatgccttacccgcagaagagagtccacagaaaagcgactcctggctggcgacccgcgttaaaaagtta

SEQ ID NO: 876305 - DNA, 75 bp, synthetic construct
  source 1..75: mol_type = other DNA
tcgcagattttaaaactgaaacccggcgacgtcctgccgatagaaaaacccgaccgcatcatcgcccatgttgac

SEQ ID NO: 876306 - DNA, 75 bp, synthetic construct
  source 1..75: mol_type = other DNA
actgcactgggcggtcactaccggcggcttcaacagtgaaacagtacaggacgtcatgctgggagcggtggaacg

SEQ ID NO: 876307 - DNA, 75 bp, synthetic construct
  source 1..75: mol_type = other DNA
ggattcagcctggcgaaaatccaggggatatatctcgcgaagccctcactttatatgttgcagtctcggcaccga

SEQ ID NO: 876308 - DNA, 75 bp, synthetic construct
  source 1..75: mol_type = other DNA
tcattctttccgggttattcccgaaccgtaaatcacatccgatggtgaacccgtggatagtggtgagctttaacc

SEQ ID NO: 876309 - DNA, 75 bp, synthetic construct
  source 1..75: mol_type = other DNA
agtggagtggctgacggataatggttcatgctaccgggctaatgaaacacgtcagtttgcccggatgctggggct

SEQ ID NO: 876310 - DNA, 75 bp, synthetic construct
  source 1..75: mol_type = other DNA
agtggagtggctgacggataatggttcatgctaccgggctaatgaaacacgacagtttgcccggatgatgggtct

SEQ ID NO: 876311 - DNA, 75 bp, synthetic construct
  source 1..75: mol_type = other DNA
agggattgttcagctcagtagcgccacgaacagcacgtctgaaacactggcagcgacaccaaaagccgttaaggt

SEQ ID NO: 876312 - DNA, 75 bp, synthetic construct
  source 1..75: mol_type = other DNA
aacgagctggcggcggcgctgggtaacgacccgaattttgcgacaaccatgactaacgcgcttgcgggtaagcaa

SEQ ID NO: 876313 - DNA, 75 bp, synthetic construct
  source 1..75: mol_type = other DNA
cgcctggaaggcgattaatccgctggaagttgagtacgtgcgttcggaaatgcaggtgaaatttaccaatatcac

SEQ ID NO: 876314 - DNA, 75 bp, synthetic construct
  source 1..75: mol_type = other DNA
gtgttgatcaacaaagacgaacaggcgcagaagaacattggggacagttcggagtttaccggcaaatttacccag

SEQ ID NO: 876315 - DNA, 75 bp, synthetic construct
  source 1..75: mol_type = other DNA
gacagacagtaaagtccattttggtcatctggcggcgatggattccatgccgtttcagctcgatcctacgcggat

SEQ ID NO: 876316 - DNA, 75 bp, synthetic construct
  source 1..75: mol_type = other DNA
ccgtggcgtggatatcccggtcgaaaacacagacacgggaaaaaccggcaaacccggtaacgaccagaaacgcac

SEQ ID NO: 876317 - DNA, 75 bp, synthetic construct
  source 1..75: mol_type = other DNA
caaattttacaattcggataactctgccgcccctgccagcaggcacgggcggcgttctcatgcattcaaatctga

SEQ ID NO: 876318 - DNA, 75 bp, synthetic construct
  source 1..75: mol_type = other DNA
attccgataattcagccgtctttgccagcaggcacgggcggcgttctctcacattcaaatctgactggttccagc

SEQ ID NO: 876319 - DNA, 75 bp, synthetic construct
  source 1..75: mol_type = other DNA
attcgccatcacggcaaaccgtttctgtattactcggataacggctccggggaaaccgccgacatcctggataag

SEQ ID NO: 876320 - DNA, 75 bp, synthetic construct
  source 1..75: mol_type = other DNA
tttgcaccggaagtgacctttgttatcgacggtggcacgcgctttgtggtgggctggagcatggacctggctgaa

SEQ ID NO: 876321 - DNA, 75 bp, synthetic construct
  source 1..75: mol_type = other DNA
gagttaagaacattatcaggcagccgttacgatctggttcagcgtaataacaatattattctggagtacaagaag

SEQ ID NO: 876322 - DNA, 75 bp, synthetic construct
  source 1..75: mol_type = other DNA
gataccattacctataccgcgatggttaaaaagaatggggtaactcaggctaatgtccctgtttcatttaatatt

SEQ ID NO: 876323 - DNA, 75 bp, synthetic construct
  source 1..75: mol_type = other DNA
taatgcccctgtaacatttagtattgtatccgggactgcaactcttggggcaaatagtgccagaacggatggtaa

SEQ ID NO: 876324 - DNA, 75 bp, synthetic construct
  source 1..75: mol_type = other DNA
agtgaaatcacgctgaaacgctggattgcggcctttaacaaggcgcagaacgccgctgaacgcctgcttttactg

SEQ ID NO: 876325 - DNA, 75 bp, synthetic construct
  source 1..75: mol_type = other DNA
cgatgaacctgatgaagaatacgagcgtaatttccagcggggattgcaactgctcgaagcaaaattaaaagaaag

SEQ ID NO: 876326 - DNA, 75 bp, synthetic construct
  source 1..75: mol_type = other DNA
acggcatgaagctgaaatgcgcgcacccggttcacgggcggccatttgcaccggaagtaacctttgttatcgatg

SEQ ID NO: 876327 - DNA, 75 bp, synthetic construct
  source 1..75: mol_type = other DNA
aatgaaaaaattgccggaagtggtgaaacaaaaaggccgggtgaccggcagtgaataccgccagcttgagggatt

SEQ ID NO: 876328 - DNA, 75 bp, synthetic construct
  source 1..75: mol_type = other DNA
aacccggtttcagctgcgctaaagctatctggttcatcgttgaccgcctgtcacactcgcaactggatgagcgca

SEQ ID NO: 876329 - DNA, 75 bp, synthetic construct
  source 1..75: mol_type = other DNA
caaaccgtttctgtattactcggataacggttccggggaaaccgccgacatcctggataaggaagttgtggggat

SEQ ID NO: 876330 - DNA, 75 bp, synthetic construct
  source 1..75: mol_type = other DNA
aaattattttaaattgagttcagattcaaaactgttaactcaaaatgccgctcaggatcgccttttttatacgtt

SEQ ID NO: 876331 - DNA, 75 bp, synthetic construct
  source 1..75: mol_type = other DNA
aatctctgtcaggctcccttattccgaacatccaccgcgtccgtcccgcacattccagcaacgtatctggaggta

SEQ ID NO: 876332 - DNA, 75 bp, synthetic construct
  source 1..75: mol_type = other DNA
acggagcaggataaaaaagacagcgtcgcaacgacatatgatatcgtcactgataatacggtaataaatgttgat

SEQ ID NO: 876333 - DNA, 75 bp, synthetic construct
  source 1..75: mol_type = other DNA
tggaagactaccatcttcacagcgtgaattagaaaacgtctttaatctctggggggctgcaaataactatagata

SEQ ID NO: 876334 - DNA, 75 bp, synthetic construct
  source 1..75: mol_type = other DNA
agggcggtgttcgcacgtatttaaaaccgactggttccagcatcccctatgcactgaagaacaggccgaatggct

SEQ ID NO: 876335 - DNA, 75 bp, synthetic construct
  source 1..75: mol_type = other DNA
attctgccgaccttgccagcaggcatgggcggcgttctcacacattcaaatctgactggttccagcatgacccgt

SEQ ID NO: 876336 - DNA, 75 bp, synthetic construct
  source 1..75: mol_type = other DNA
ggccgaatggctgattcagcgctaccgcagacacggatacgagattaagaaagccctcagcctcgattatcgtca

SEQ ID NO: 876337 - DNA, 75 bp, synthetic construct
  source 1..75: mol_type = other DNA
atttctaaatcacagggtatcagtttatcggtaatttggtcactgaataaacatttatacagttccgaaagcgaa

SEQ ID NO: 876338 - DNA, 75 bp, synthetic construct
  source 1..75: mol_type = other DNA
atatacatggcgctcagcaaatccagcaattgcttcggtggatgcttcttctggtcaggtcaccttaaaagagaa

SEQ ID NO: 876339 - DNA, 75 bp, synthetic construct
  source 1..75: mol_type = other DNA
taatgaaagatggtaagccgttatccggtgaagaagtgacctttacgacgaccttagggacgttaagtaagtcca

SEQ ID NO: 876340 - DNA, 75 bp, synthetic construct
  source 1..75: mol_type = other DNA
gacttaataacacaaaaccctcataaggatgttacgctaaacgctccaaatgtctatgcagtttgtgtagaataa

SEQ ID NO: 876341 - DNA, 75 bp, synthetic construct
  source 1..75: mol_type = other DNA
aacagcttggattacacaaactgaagctgataaaatatcaggagtatcaactacttatgacttaataacacaaaa

SEQ ID NO: 876342 - DNA, 75 bp, synthetic construct
  source 1..75: mol_type = other DNA
acagctcactattaccgttttaccgaatgggcaggttgtggaccaggttggggtaacggactttacggctgataa

SEQ ID NO: 876343 - DNA, 75 bp, synthetic construct
  source 1..75: mol_type = other DNA
gagtggctgacggataatggttcatgctaccgggctaatgaaacacggcagtttgcccggatgttggggcttgaa

SEQ ID NO: 876344 - DNA, 75 bp, synthetic construct
  source 1..75: mol_type = other DNA
acggccgccgcagccgtcctacggatgatacggatgtgcttcgccgtatacactatgttatcggagagctaccca

SEQ ID NO: 876345 - DNA, 75 bp, synthetic construct
  source 1..75: mol_type = other DNA
tgagttccgctgtgataacggagaaaaactgcgggtcacgttcgcgctggactgctgtgaccgtgaggcactgca

SEQ ID NO: 876346 - DNA, 75 bp, synthetic construct
  source 1..75: mol_type = other DNA
ggcatccgcatagtgcactgggttatcgctcgccacgggaatatctgcggcagcaggccagtaatgggttaagtg

SEQ ID NO: 876347 - DNA, 75 bp, synthetic construct
  source 1..75: mol_type = other DNA
tcgagcattataacgaatggcatccgcatagtgcactgggttatcgctcgccacgggaatatctgcggcagcagg

SEQ ID NO: 876348 - DNA, 75 bp, synthetic construct
  source 1..75: mol_type = other DNA
gacgaagaaatactgtcggctatcctcgacatcatcagcgatatgccgagttatggttatcgacgcgtgtggggc

SEQ ID NO: 876349 - DNA, 75 bp, synthetic construct
  source 1..75: mol_type = other DNA
tgcgctgggttatcgctcgccacgggaatatctgcggcagcgggcttgtaatgggttaagtgataacagatgtct

SEQ ID NO: 876350 - DNA, 75 bp, synthetic construct
  source 1..75: mol_type = other DNA
tcatgctaccgggctaatgaaacacggcagtttgcccggatgttggggcttgaaccgaagagcacggcggtgcgg

SEQ ID NO: 876351 - DNA, 75 bp, synthetic construct
  source 1..75: mol_type = other DNA
tatcgctcgccacgggaatatctgcggcagcgggcctgtaatgggttaagtgataacagatgtctggaaatatag

SEQ ID NO: 876352 - DNA, 75 bp, synthetic construct
  source 1..75: mol_type = other DNA
gaaccgatgactggaaggacggccgccgcagccgtcacacggatgatacggatgtgcttcgccgtatacaccatg

SEQ ID NO: 876353 - DNA, 75 bp, synthetic construct
  source 1..75: mol_type = other DNA
attctcagacgaaccgatgactggatggatggccgccgcagtcgtcacactgatgatacggatgtgcttctccgt

SEQ ID NO: 876354 - DNA, 75 bp, synthetic construct
  source 1..75: mol_type = other DNA
gacatctgcctctgatcttggttctaagacaacatcgtcgttcaatcacggaagtaaatcgtcgaccagcacagg

SEQ ID NO: 876355 - DNA, 75 bp, synthetic construct
  source 1..75: mol_type = other DNA
acgcggtgacgcttttgatcgacccttcagtcgttgtggcaaccagggaatatgtcgatgacgcgttgaaaacac

SEQ ID NO: 876356 - DNA, 75 bp, synthetic construct
  source 1..75: mol_type = other DNA
aactaaataccttaaagattgcgcctgataatccagcctgggttatcgcagagactattattcctgaacaagtag

SEQ ID NO: 876357 - DNA, 75 bp, synthetic construct
  source 1..75: mol_type = other DNA
ggggctgcaactggtgaaatccccgtatcttcagtagcggaaaaactacgtgaactatatggttccaatatttga

SEQ ID NO: 876358 - DNA, 75 bp, synthetic construct
  source 1..75: mol_type = other DNA
ctcttttcacgtcgaatgggacgtttacggtgccagtcggggtaacgaaagtgatggtggaaatgattggaggtg

SEQ ID NO: 876359 - DNA, 75 bp, synthetic construct
  source 1..75: mol_type = other DNA
attgctggatatggacggcgtgctgattgccatcggcaagttcccggaaacctataagccgaagctgcctgccgg

SEQ ID NO: 876360 - DNA, 75 bp, synthetic construct
  source 1..75: mol_type = other DNA
tgggagcggtggaacgccgcttcggcaacgagcttccggcgtctccagtagagtggctgacggataatggttcat

SEQ ID NO: 876361 - DNA, 75 bp, synthetic construct
  source 1..75: mol_type = other DNA
ctgggttatcgctcgccacgggaatatctgcggcggcgtaccagtaatgggttaagtgataacaggtgtctggaa

SEQ ID NO: 876362 - DNA, 75 bp, synthetic construct
  source 1..75: mol_type = other DNA
atgaactccttaaagaagccgttgaatacgggcgtgcaaaaagtggatagcgcacgcgcccttattgcccgggga

SEQ ID NO: 876363 - DNA, 75 bp, synthetic construct
  source 1..75: mol_type = other DNA
cggttaaagatcttaatcgcctgcgtgagatggtttttgcttgtctttatcccagcatgtttaactcccgggttg

SEQ ID NO: 876364 - DNA, 75 bp, synthetic construct
  source 1..75: mol_type = other DNA
agatattgcgaaagcattacggctgggtgtggaagatgttttgctgaaaccagttaaagatcttaatcgcttgcg

SEQ ID NO: 876365 - DNA, 75 bp, synthetic construct
  source 1..75: mol_type = other DNA
ctgggttatcgctcgccacgggaatatctgcggcagcgggcttgtaatgggttaagtgataacagatgtctggat

SEQ ID NO: 876366 - DNA, 75 bp, synthetic construct
  source 1..75: mol_type = other DNA
attataacgaatggcatccgcatagtgcgctgggttatcgctcgccacgggaatatctgcggcagcgggcttgta

SEQ ID NO: 876367 - DNA, 75 bp, synthetic construct
  source 1..75: mol_type = other DNA
gtcccggcatcggaagtaggacgagcgttgtttgctccagaaaacgtaagcacagacgcacgttatattgtgcag

SEQ ID NO: 876368 - DNA, 75 bp, synthetic construct
  source 1..75: mol_type = other DNA
tacgtccactacgtgttggtaagttttcgacactggtacgccctaaaaatctggtgttgcttggtgggctgtttc

SEQ ID NO: 876369 - DNA, 75 bp, synthetic construct
  source 1..75: mol_type = other DNA
ttatcgctcgccacgggaatatctgcggcagcgggcttgtaatgggttaagtgataacagatgtctggaaatata

SEQ ID NO: 876370 - DNA, 75 bp, synthetic construct
  source 1..75: mol_type = other DNA
gacgatctgcaaagcattatttcgcataacctggcgcagcgtaaagccgcagcaattgaggcggaaactattgtc

SEQ ID NO: 876371 - DNA, 75 bp, synthetic construct
  source 1..75: mol_type = other DNA
gcgatatcgacgaacgtctgcgcgaagccgatatcatcattagttccactgcaagcccgttaccgattatcggta

SEQ ID NO: 876372 - DNA, 75 bp, synthetic construct
  source 1..75: mol_type = other DNA
ttcgccgccggtatcggtgtatttatgaccactgcagatgttcgagatgtacaaactgcattgatgtggttatcg

SEQ ID NO: 876373 - DNA, 75 bp, synthetic construct
  source 1..75: mol_type = other DNA
agtggagtggctgacggataatggttcatgctaccgggctaatgaaacacggcagtttgcccggatgttgggcct

SEQ ID NO: 876374 - DNA, 75 bp, synthetic construct
  source 1..75: mol_type = other DNA
agtggagtggctgacggataatggttcatgctaccgggctaatgaaacacgccagtttgcccggatgttggggct

SEQ ID NO: 876375 - DNA, 75 bp, synthetic construct
  source 1..75: mol_type = other DNA
agtggagtggctgacggataatggttcatgctaccgggctaatgaaacacgtcagtttgcccggatggtgggcct

SEQ ID NO: 876376 - DNA, 75 bp, synthetic construct
  source 1..75: mol_type = other DNA
tgctcattaacaacgaccaaaaccccatatcttacttaataccgtattctcggcttaaccggtcgtgcaacctca

SEQ ID NO: 876377 - DNA, 75 bp, synthetic construct
  source 1..75: mol_type = other DNA
ctgggagcagtggaacgccgctttggcagcgagcttccggcgtctccagtggagtggctgacggataatggttca

SEQ ID NO: 876378 - DNA, 75 bp, synthetic construct
  source 1..75: mol_type = other DNA
gagactgcgtgtcacgttcgcgctggactgcagtgatcgtgaggcactgcactgggcggtcactaccggcggctt

SEQ ID NO: 876379 - DNA, 75 bp, synthetic construct
  source 1..75: mol_type = other DNA
gcggaagtgattgccctgagcgatatcgacgaacgtctgcgcgaagccgatatcatcatcagttccaccgccagc

SEQ ID NO: 876380 - DNA, 75 bp, synthetic construct
  source 1..75: mol_type = other DNA
ttgcaggcgacgaccggtcatgcagaagaagctgtggcgagttacaacaaactgttcaacggtgcgccgccggaa

SEQ ID NO: 876381 - DNA, 75 bp, synthetic construct
  source 1..75: mol_type = other DNA
gtggcggctgcacaatcgcaactggcagaacagcaaaaacagctggccgatcctgctttccgcgctcgtgcgcaa

SEQ ID NO: 876382 - DNA, 75 bp, synthetic construct
  source 1..75: mol_type = other DNA
cattgctgtcgagtactggagtacggtggcgaaaattccggctcgccgtggcgaagcgattaatcagctaaaacg

SEQ ID NO: 876383 - DNA, 75 bp, synthetic construct
  source 1..75: mol_type = other DNA
tcatgctaccgggctaatgaaacacggcagtttgcccggatgttggggcttgaaccgaaaaacacggcggtgcgg

SEQ ID NO: 876384 - DNA, 75 bp, synthetic construct
  source 1..75: mol_type = other DNA
gttccgctgtgataacggagaagaactgcgggtcacgttcgcgctggactgctgtgaccgtgaggcactgcactg

SEQ ID NO: 876385 - DNA, 75 bp, synthetic construct
  source 1..75: mol_type = other DNA
gccaatccagtggctgacagataacggttcagcgtacagagcgcatgaaacacggcagttcgccagagagttgaa

SEQ ID NO: 876386 - DNA, 75 bp, synthetic construct
  source 1..75: mol_type = other DNA
gctgattcgcaaaaaggccatatgaaggcgagcgagctggaacgcatgttccagaaatctttctctgtagcgaaa

SEQ ID NO: 876387 - DNA, 75 bp, synthetic construct
  source 1..75: mol_type = other DNA
cgtggctgcgtgcacaaagcgccagtgaaaccattcgcgattatcgcagtcaggcagagcaggttcgcgatgagt

SEQ ID NO: 876388 - DNA, 75 bp, synthetic construct
  source 1..75: mol_type = other DNA
tcgcaaccaaccgatgctgctggtggatattgccgttccgcgcgatgttgagccggaagttggcaaactggcgaa

SEQ ID NO: 876389 - DNA, 75 bp, synthetic construct
  source 1..75: mol_type = other DNA
tgattacaccgccgcccgcgctgcatatcagaatgtcctgacgcgggagccaactaacgccgatgccattctggg

SEQ ID NO: 876390 - DNA, 75 bp, synthetic construct
  source 1..75: mol_type = other DNA
ctcactcggtcagggcggttactacagcccgcaggaatacctgtcgtttgccataccggtgatgtggcgggagcg

SEQ ID NO: 876391 - DNA, 75 bp, synthetic construct
  source 1..75: mol_type = other DNA
taccgccatcgaaacgggcacatactggcaaagtggccgtgaaagaaagcaatcaacgatggtgctctgacgggt

SEQ ID NO: 876392 - DNA, 75 bp, synthetic construct
  source 1..75: mol_type = other DNA
gtttggtatgaaaacatcaatgtcgcgtaaaggtaactgttacgacaacgctccgatggaaagcttctggggaac

SEQ ID NO: 876393 - DNA, 75 bp, synthetic construct
  source 1..75: mol_type = other DNA
ttatggcgctcaggagccagcgcccacctgccgggctaatccaccactctgatcgaggttcactgtcagcgccaa

SEQ ID NO: 876394 - DNA, 75 bp, synthetic construct
  source 1..75: mol_type = other DNA
cggagctggcagagaatggcatcatcgttggtcgtgaccgactggcacgtcttcgtaaggagctaaggctacgct

SEQ ID NO: 876395 - DNA, 75 bp, synthetic construct
  source 1..75: mol_type = other DNA
gtgaataccggctttactgagaacgccgatctgtttggctggtttggtattggtcgtccgctgggcgtaccgacg

SEQ ID NO: 876396 - DNA, 75 bp, synthetic construct
  source 1..75: mol_type = other DNA
gtctggatcatggggattgtgttcctcgcggcctggtacatgctgcatcacacacgtttggggcgttacatctac

SEQ ID NO: 876397 - DNA, 75 bp, synthetic construct
  source 1..75: mol_type = other DNA
cctgacgtcgggtatcgacttgtcggtaggttctctgttggcgctgaccggcgcagttgctgcatctatcgtcgg

SEQ ID NO: 876398 - DNA, 75 bp, synthetic construct
  source 1..75: mol_type = other DNA
cgtttgcggtgccggtgatgtggcgggaacggacggaaaactggtcgtgggagctgggcgcttcaggctcatggt

SEQ ID NO: 876399 - DNA, 75 bp, synthetic construct
  source 1..75: mol_type = other DNA
gatacgccgggcaatacgggcctgcaaaacaatctggcgctattgctgtttagtagcgatcgccgtgacgaaggt

SEQ ID NO: 876400 - DNA, 75 bp, synthetic construct
  source 1..75: mol_type = other DNA
gcggcaatcgcagtcagtcagattctggcgccagcgttgcggttggctggcgtaacgatacctggagctgggata

SEQ ID NO: 876401 - DNA, 75 bp, synthetic construct
  source 1..75: mol_type = other DNA
acagctatgcggtgttggggctgggcgatgtggcgatggcgcgaaaagattattccgccgccgaacgctattacc

SEQ ID NO: 876402 - DNA, 75 bp, synthetic construct
  source 1..75: mol_type = other DNA
gccgagttcaaatgcgtataaatcatcgcgtaccacaatgctactttccacgccggatggtcgccaggcactgca

SEQ ID NO: 876403 - DNA, 75 bp, synthetic construct
  source 1..75: mol_type = other DNA
atatcgggccgctgggttacaccgttaacgcccaccgtcggcccatctccagttctttgctggcctttggtgggc

SEQ ID NO: 876404 - DNA, 75 bp, synthetic construct
  source 1..75: mol_type = other DNA
ttgggacgttgatcggcgcattaattcttggcttccttaataatggattgaatttgttaggtgtttcctcctatt

SEQ ID NO: 876405 - DNA, 75 bp, synthetic construct
  source 1..75: mol_type = other DNA
gcgcgacaaacccacccgttattccgcactggtggaagcgccaaccgcttattcccaaccttctgtcgcaggaac

SEQ ID NO: 876406 - DNA, 75 bp, synthetic construct
  source 1..75: mol_type = other DNA
ttattatcagcggtgcctgtgggatgttccgtaccgatgtattgcgtaaatttggtttctcggatcgtaccaaag

SEQ ID NO: 876407 - DNA, 75 bp, synthetic construct
  source 1..75: mol_type = other DNA
cggaaattgagcgtggtgctgatgccgtaggcggcattccctccacagcattaaaaggcgcaggtttgctgccac

SEQ ID NO: 876408 - DNA, 75 bp, synthetic construct
  source 1..75: mol_type = other DNA
tttcctatgctgttggttgtgctttatggcgttgggatttatctcactacctggtttaatgaattcattaccacc

SEQ ID NO: 876409 - DNA, 75 bp, synthetic construct
  source 1..75: mol_type = other DNA
tgatggtgggtctgggtgaaaccaatgaagaaattattgaggtaatgcgcgacctgcgccgtcatggtgtgacga

SEQ ID NO: 876410 - DNA, 75 bp, synthetic construct
  source 1..75: mol_type = other DNA
ctgcgaggaagcctcctgccctaacctggcggaatgcttcaaccacggcacagcaacgtttatgatcctcggcgc

SEQ ID NO: 876411 - DNA, 75 bp, synthetic construct
  source 1..75: mol_type = other DNA
ccactatcgttttaataaccgggatgaagccatctcagtaatacgggaatacattgagattttctacaatcgtca

SEQ ID NO: 876412 - DNA, 75 bp, synthetic construct
  source 1..75: mol_type = other DNA
acctgtttggctggtttggtattggtcgtccgctgggcgtaccgacgccagtctggatcatggggattgtcttcc

SEQ ID NO: 876413 - DNA, 75 bp, synthetic construct
  source 1..75: mol_type = other DNA
tcgcggcctggtacatgctgcatcacacgcgtctggggcgttacatctacgcgctgggcggcaacgcgtctttct

SEQ ID NO: 876414 - DNA, 75 bp, synthetic construct
  source 1..75: mol_type = other DNA
tgcagggaattgccgacaatctggacggcgtgaaggtgatctttgtctgtagccccaacaacccaaccgggcaaa

SEQ ID NO: 876415 - DNA, 75 bp, synthetic construct
  source 1..75: mol_type = other DNA
cgttatccggagtgtcagccaaaagcagtgattgaaaactatgcgcaatatgcgggcgtgaagccggagcaggtg

SEQ ID NO: 876416 - DNA, 75 bp, synthetic construct
  source 1..75: mol_type = other DNA
acattgagattttctacaatcgtcagcgtcgtcactctcgtctggggaatatctccccggcagccttcagggaaa

SEQ ID NO: 876417 - DNA, 75 bp, synthetic construct
  source 1..75: mol_type = other DNA
cgatggaaagcgcgatggtactgcgcgatggcgcaaaatttgaggcgcaggcaggtgaaccgcaacaggcgctgg

SEQ ID NO: 876418 - DNA, 75 bp, synthetic construct
  source 1..75: mol_type = other DNA
caactccccggtaattttcgacgttacccacgcactgcaatgccgcgatccgtttggtgcagcttctggtggtcg

SEQ ID NO: 876419 - DNA, 75 bp, synthetic construct
  source 1..75: mol_type = other DNA
ctggtttgtttattgaagcgcatccggatccggaacatgcgaaatgcgatggtccatccgcgctgccgctggcga

SEQ ID NO: 876420 - DNA, 75 bp, synthetic construct
  source 1..75: mol_type = other DNA
gaagggatgaaaatcttccaggagttgaagcagacttttggcgtgaaaattatcaccgacgttcacgaaccaagc

SEQ ID NO: 876421 - DNA, 75 bp, synthetic construct
  source 1..75: mol_type = other DNA
gctgaaaaatgagagcctgagccactatcgttttaataaccgggatgaagccatctcagtagtaagcgtcaacgg

SEQ ID NO: 876422 - DNA, 75 bp, synthetic construct
  source 1..75: mol_type = other DNA
tatcgttttaataaccgggatgaagccatctcagtaatacgggaatacatagagattttctacaatcgtcagcgt

SEQ ID NO: 876423 - DNA, 75 bp, synthetic construct
  source 1..75: mol_type = other DNA
caggtatttggtgtatccaagagcggttattacaaccgggtacagcatgaaccctcagacagaaaacaaagtgat

SEQ ID NO: 876424 - DNA, 75 bp, synthetic construct
  source 1..75: mol_type = other DNA
gctggtgtgaatttaccgttatctatcttgcctgcctgaaaaccggtgcggtttccgtgccgctgttgccttcct

SEQ ID NO: 876425 - DNA, 75 bp, synthetic construct
  source 1..75: mol_type = other DNA
gacctttctgctctacgcttcttcctttgcggcgggaccacgatcccccaaaaagtgatgcgtgaatgccaacaa

SEQ ID NO: 876426 - DNA, 75 bp, synthetic construct
  source 1..75: mol_type = other DNA
aagagacctcgcgcggccccaatgtgtttatgggttattttgatgaacctgaattaaccgcccgtgcgctggatg

SEQ ID NO: 876427 - DNA, 75 bp, synthetic construct
  source 1..75: mol_type = other DNA
ggtccatccgcgctgccgttggctaaactggagccgttcctcaagcagatgaaagcgattgatgatctggttaaa

SEQ ID NO: 876428 - DNA, 75 bp, synthetic construct
  source 1..75: mol_type = other DNA
ccacgatgtttgaccgttatttgccattttcatgcccgctaaatactttcgttactgatgctgtccgctttccac

SEQ ID NO: 876429 - DNA, 75 bp, synthetic construct
  source 1..75: mol_type = other DNA
gacctttcagcactccgcttctttctttgcggcggcaccacgatccccaaaaaggtggcgcgtgaatgccaacaa

SEQ ID NO: 876430 - DNA, 75 bp, synthetic construct
  source 1..75: mol_type = other DNA
cagcatgaaccctcagacagaaaacaaagtgatgagcggctaaaactggagattaaggtggcacatatccgcact

SEQ ID NO: 876431 - DNA, 75 bp, synthetic construct
  source 1..75: mol_type = other DNA
ctggggttcgagcggcaccggtggttactccgatctgaaagcgcacactaccatgttgcaggtggatgcgccgta

SEQ ID NO: 876432 - DNA, 75 bp, synthetic construct
  source 1..75: mol_type = other DNA
tgaacgccgaaaccggcgaaacgctcaccgataacgagcatatttctcagtccatcaatgacattttgttaacgc

SEQ ID NO: 876433 - DNA, 75 bp, synthetic construct
  source 1..75: mol_type = other DNA
agaggcatcacccagcaacccagcaaaccctgcgaagcggagttgacgcgcgcattgctttttaccgtattgtct

SEQ ID NO: 876434 - DNA, 75 bp, synthetic construct
  source 1..75: mol_type = other DNA
caggggaaatgggcgcaggcggcagcacttcagcggcaacgactggcgctggaccccggcagtgtgtgggtaact

SEQ ID NO: 876435 - DNA, 75 bp, synthetic construct
  source 1..75: mol_type = other DNA
accgagttcaaacgcctataagtcgtcgcgtaccatcatgctgctttccacgccagagggtcgtcaggcgctgca

SEQ ID NO: 876436 - DNA, 75 bp, synthetic construct
  source 1..75: mol_type = other DNA
aacagctggccgatcctgctttccgcgctcgtgcgcaaggtttagcggcggtggactctggtatggcggggaaag

SEQ ID NO: 876437 - DNA, 75 bp, synthetic construct
  source 1..75: mol_type = other DNA
ggagcggttattacaactgggtacagcatgaaccctcagacagaaaacaaagtgatgagcgactaaaactggaga

SEQ ID NO: 876438 - DNA, 75 bp, synthetic construct
  source 1..75: mol_type = other DNA
taaagccctgtttatggcgctcaggagccagcgcccacctgccgggctaatccatcactctgatcgaggttcaca

SEQ ID NO: 876439 - DNA, 75 bp, synthetic construct
  source 1..75: mol_type = other DNA
cgcgaaacatatggaacccggcggctccagacggagctggcagagaatggcatcatcgttggtcgtgaccgactg

SEQ ID NO: 876440 - DNA, 75 bp, synthetic construct
  source 1..75: mol_type = other DNA
cagcagcgtccgcgacagcgtctgccgcattattcaaagcgatattcagcattactggaatctgcgaattgtcgc

SEQ ID NO: 876441 - DNA, 75 bp, synthetic construct
  source 1..75: mol_type = other DNA
tcatcagatggctgtgcttaaaaaaagaacaaatggtagtgtccgctattgccagtacacctcagttatgaggat

SEQ ID NO: 876442 - DNA, 75 bp, synthetic construct
  source 1..75: mol_type = other DNA
gtgtgccacttcagaacccggcggctccagacggagctggcagagaatggcatcatcgttggtcgtgaccgactg

SEQ ID NO: 876443 - DNA, 75 bp, synthetic construct
  source 1..75: mol_type = other DNA
cgaagcgcggtggcagcaggaactggagttggttcgcagtttacaggagcaacgcggcgcagcgcctggcgagcg

SEQ ID NO: 876444 - DNA, 75 bp, synthetic construct
  source 1..75: mol_type = other DNA
tctatggcggtgagcagaacctgatcaccatcaacatgagcgagtttcaggagtcccacaccgtttccacgctga

SEQ ID NO: 876445 - DNA, 75 bp, synthetic construct
  source 1..75: mol_type = other DNA
tgcgagagtccagtatctgcgccagcagctcaacgctgccgaactggagcaggagttgttattaaagcaggaaaa

SEQ ID NO: 876446 - DNA, 75 bp, synthetic construct
  source 1..75: mol_type = other DNA
acaaccgcccacattctgaattgccgatgaaaccaaacggaaaacattacagcccggcagagttcagaaaaaaac

SEQ ID NO: 876447 - DNA, 75 bp, synthetic construct
  source 1..75: mol_type = other DNA
cgtccattttcgccggaagttacgtttgtcattgatggtggaacccggtttgtggttggctggagtcttgatctt

SEQ ID NO: 876448 - DNA, 75 bp, synthetic construct
  source 1..75: mol_type = other DNA
gaaagcgttgctggaagaggccgcgcgctcgccgcagccggtaatcctttttgttgatgaagttcacacgctggt

SEQ ID NO: 876449 - DNA, 75 bp, synthetic construct
  source 1..75: mol_type = other DNA
atcacaaacaacagcagcgtattaaaggaatgcgcaaacgcgctgaggaaaaaattcgtgatgctgaggatgaaa

SEQ ID NO: 876450 - DNA, 75 bp, synthetic construct
  source 1..75: mol_type = other DNA
ctggcaccaggaaagcgcgacgaaataaaaccggaagaaattagctggctgcctgaatttctggcgcagtatcgt

SEQ ID NO: 876451 - DNA, 75 bp, synthetic construct
  source 1..75: mol_type = other DNA
agagcatgatgatgaatacgaaactgagcgtgatgaatatctgaatcattcgctggatattctggaacagaacag

SEQ ID NO: 876452 - DNA, 75 bp, synthetic construct
  source 1..75: mol_type = other DNA
gcatcttgacaggctgatggatcggatggcagagcagcatggcgtttcactcgtctatggcgatgaattaattac

SEQ ID NO: 876453 - DNA, 75 bp, synthetic construct
  source 1..75: mol_type = other DNA
gaaggcgctgttggaagaggctgcgcgttcgccgcagccggttattctgtttgtcgatgaagttcacaccctggt

SEQ ID NO: 876454 - DNA, 75 bp, synthetic construct
  source 1..75: mol_type = other DNA
tgtagagaatgcgttaattcgacaactggagatattgcctgccggggcgagtgtaattaacgatttttcccatca

SEQ ID NO: 876455 - DNA, 75 bp, synthetic construct
  source 1..75: mol_type = other DNA
aggctcaaaagccattgagtaccacattgattgcctaccggaaataacacaaaaggcactacgtgaacgttatgt

SEQ ID NO: 876456 - DNA, 75 bp, synthetic construct
  source 1..75: mol_type = other DNA
ggatgttgggccttgaaccgaagaccacggcggtgcggagtccggagagtaacggcatagcagagagcttcgtga

SEQ ID NO: 876457 - DNA, 75 bp, synthetic construct
  source 1..75: mol_type = other DNA
ggatgttgggtcttgaaccgaagaccacggcggtgcggagtccggagagtaacggtatagcagagagcttcgtga

SEQ ID NO: 876458 - DNA, 75 bp, synthetic construct
  source 1..75: mol_type = other DNA
ggatgttgggacttgaaccgaagaccacggcggtgcggagtccggagagtaacggaatagcagagagcttcgtga

SEQ ID NO: 876459 - DNA, 75 bp, synthetic construct
  source 1..75: mol_type = other DNA
atgaagcagtttcttgattttttaccgttggttgtcttcttcgcgttctacaagatttatgacatctatgcggca

SEQ ID NO: 876460 - DNA, 75 bp, synthetic construct
  source 1..75: mol_type = other DNA
ggatgttggggcttgaaccgaagagcacggcggtgcggagtccggagagtaacggcatagcagagagcttcgtga

SEQ ID NO: 876461 - DNA, 75 bp, synthetic construct
  source 1..75: mol_type = other DNA
ggatgttggggcttgaaccgaagaccacggcggtgcggagtccggagagtaacgggatagcagagagcttcgtga

SEQ ID NO: 876462 - DNA, 75 bp, synthetic construct
  source 1..75: mol_type = other DNA
gcgtattaaaggaatgcacaaacgcgcagaagaaaaaatccgtgatgccgtggatgaaggtattcaggttattga

SEQ ID NO: 876463 - DNA, 75 bp, synthetic construct
  source 1..75: mol_type = other DNA
ctgcgttcagcatttaatgccctgcaacaggacaaaccgctgaatgctcgccagaaatctgcaatgcgtgagctg

SEQ ID NO: 876464 - DNA, 75 bp, synthetic construct
  source 1..75: mol_type = other DNA
taacgccaatgcaaaacgtggcgctaatcgcactatcagccgtgatccgctttaccagtgggtactgaaatacaa

SEQ ID NO: 876465 - DNA, 75 bp, synthetic construct
  source 1..75: mol_type = other DNA
ggatgttgggacttgaaccgaagaacacggcggtgcggagtccggagagtaacggcatagcagagagcttcgtga

SEQ ID NO: 876466 - DNA, 75 bp, synthetic construct
  source 1..75: mol_type = other DNA
cttgaaccgaagaacacggcggtgcggagtccggagagtaacggaatagcagagagcttcgtgaaaacgataaag

SEQ ID NO: 876467 - DNA, 75 bp, synthetic construct
  source 1..75: mol_type = other DNA
cccttagcctcgactaccgtcactggataatctccgtcaggcttccttactctgaacgcccaccgcgtccgtccc

SEQ ID NO: 876468 - DNA, 75 bp, synthetic construct
  source 1..75: mol_type = other DNA
agccactgagcgcccgtcagaaagccgcaatgcgcgagctgccgtcttggtcagaactgattgaggctatccgtg

SEQ ID NO: 876469 - DNA, 75 bp, synthetic construct
  source 1..75: mol_type = other DNA
ggctgcaaaaaaccggggcaattacgccgcgtttgaagttttatatcccgcagtttggtatgcctggcgggggaa

SEQ ID NO: 876470 - DNA, 75 bp, synthetic construct
  source 1..75: mol_type = other DNA
gacggataatggttcatgctaccgggcgaatgaaacacgacagttggccaggatgttgggccttgaaccgaagaa

SEQ ID NO: 876471 - DNA, 75 bp, synthetic construct
  source 1..75: mol_type = other DNA
gacggataatggttcatgctaccgggccaatgaaacacgacagttggccgggatgttgggccttgaaccgaagag

SEQ ID NO: 876472 - DNA, 75 bp, synthetic construct
  source 1..75: mol_type = other DNA
gtgttcggtctgaccgccctcaccttaatcttcacgctgttaagcggtatctatatctaccgccacatgccacag

SEQ ID NO: 876473 - DNA, 75 bp, synthetic construct
  source 1..75: mol_type = other DNA
gcaagaatgtttcggtcagcgatgaaccttttgaaccgcgtccgctactggaaagtaccctgcaattaatgaacg

SEQ ID NO: 876474 - DNA, 75 bp, synthetic construct
  source 1..75: mol_type = other DNA
acctgctgatgaaagtgatcgccccctacccgctctcgacgccggttgccgacattgcggcccaggcgttaagcc

SEQ ID NO: 876475 - DNA, 75 bp, synthetic construct
  source 1..75: mol_type = other DNA
tgattaaaaaaggacatggcaagatcattaatatctgttccatgatgagcgaattgggtcgcgaaaccgttgtag

SEQ ID NO: 876476 - DNA, 75 bp, synthetic construct
  source 1..75: mol_type = other DNA
gacggataatggttcatgctaccgggctaatgaaacacgacagttggcctggatgttgggccttgaaccgaagac

SEQ ID NO: 876477 - DNA, 75 bp, synthetic construct
  source 1..75: mol_type = other DNA
gaaattttacgtaccggagtttggcatgcctggcggcggtaacatcgctgccattgccgccaacagcccacatcc

SEQ ID NO: 876478 - DNA, 75 bp, synthetic construct
  source 1..75: mol_type = other DNA
tttgttgccgtcacgcaaaaaaacaccggtaaaggtggcgcactaatgcatggactaaaatacgccacgtgtgat

SEQ ID NO: 876479 - DNA, 75 bp, synthetic construct
  source 1..75: mol_type = other DNA
atggaaattaacgaaaaattactgcgtcagattatcgaaggcgtgctggcagaaatgcaaaccagcgacaagtcc

SEQ ID NO: 876480 - DNA, 75 bp, synthetic construct
  source 1..75: mol_type = other DNA
tgaatatgagagtgaccgcgacgaatatctgaatcattcgctggatattctggaacagaacagacgtaaaaaagc

SEQ ID NO: 876481 - DNA, 75 bp, synthetic construct
  source 1..75: mol_type = other DNA
caatgatggtggagtggttgcatcatcgtggattgacgctggcaacggcgcaaagcggcgacttacaggcattac

SEQ ID NO: 876482 - DNA, 75 bp, synthetic construct
  source 1..75: mol_type = other DNA
ttaaacggtgtgtcgattgacgtactgtttcccagccagcgcgcgcagcaaatgacgcggcagactttctggcat

SEQ ID NO: 876483 - DNA, 75 bp, synthetic construct
  source 1..75: mol_type = other DNA
aatgttttcgccgtagccggtgccatacagcacggtattcgccatcatggcaaaccgtttctgtattactcggat

SEQ ID NO: 876484 - DNA, 75 bp, synthetic construct
  source 1..75: mol_type = other DNA
tacagaccagtggagaaagtcgtgccagtgctggcagatgaaccggacgatgaatatgaaagcgaccgcgacgaa

SEQ ID NO: 876485 - DNA, 75 bp, synthetic construct
  source 1..75: mol_type = other DNA
gcgtcttggaattgatcaccgtcttggtataccggaaaacccgcaagggcgagggattatagagcgtctgaaccg

SEQ ID NO: 876486 - DNA, 75 bp, synthetic construct
  source 1..75: mol_type = other DNA
ggcgcagaccgtcaatattatcggcattccgcataaaaacatattgcgcgaggtgattgccggtatcgaagaaga

SEQ ID NO: 876487 - DNA, 75 bp, synthetic construct
  source 1..75: mol_type = other DNA
cgtgagtctccacaaccagtgccgaccctcaacgatcaaatggcgcggccgaaataccaggccaaatctgccatt

SEQ ID NO: 876488 - DNA, 75 bp, synthetic construct
  source 1..75: mol_type = other DNA
caaaaacgctgcgcgttatgcgaagcgtgaatctccacaaccagttccgaccctcaacgatcaaatggcgcggcc

SEQ ID NO: 876489 - DNA, 75 bp, synthetic construct
  source 1..75: mol_type = other DNA
tggcagaacggctggagggggggtataaagccaccagttcagcacgtttgctgagtgcggtgcgccgattgttcc

SEQ ID NO: 876490 - DNA, 75 bp, synthetic construct
  source 1..75: mol_type = other DNA
tgctgacgaaatatgcccttgtggcagtcatagtgctgtgtttaacggtgctgggatttacgcttctggtcggag

SEQ ID NO: 876491 - DNA, 75 bp, synthetic construct
  source 1..75: mol_type = other DNA
atgaagccccaggacgatatttctatcaaccctggggccgccactccaaaccagacaatttggatggtagtccct

SEQ ID NO: 876492 - DNA, 75 bp, synthetic construct
  source 1..75: mol_type = other DNA
tcgatgtttggccctggttacggtacggcaatcggtgcaggtatcggtggtttgattggtggtgccagctctcta

SEQ ID NO: 876493 - DNA, 75 bp, synthetic construct
  source 1..75: mol_type = other DNA
cggttataaaggccagcctgtcacccggcttgccgttatgctgaatttactggtttttattcgttccagtgaact

SEQ ID NO: 876494 - DNA, 75 bp, synthetic construct
  source 1..75: mol_type = other DNA
ggagcgtaatggtgtacgtgctgcgtatatccataaagccgaacatctggaagaacgtcgacttatgctacagtg

SEQ ID NO: 876495 - DNA, 75 bp, synthetic construct
  source 1..75: mol_type = other DNA
gttacgccgtacagtctggcatcatcagatataacccggctctggatatggctggtgcattgaccacggtaaaac

SEQ ID NO: 876496 - DNA, 75 bp, synthetic construct
  source 1..75: mol_type = other DNA
cgataaagtaatcaaaagcctcgagacacacgttttcccctttatcggcaaccgggatatcacaacactcaatac

SEQ ID NO: 876497 - DNA, 75 bp, synthetic construct
  source 1..75: mol_type = other DNA
attgcacgacgctggcatgccagtaataaacaatggacacaatcacacagcgataaagtactcaaaagcctcgag

SEQ ID NO: 876498 - DNA, 75 bp, synthetic construct
  source 1..75: mol_type = other DNA
gggctgcaaagcccactgacaaggcgtataaactcactgacggagctggcatgctcatgctggtacatcccaata

SEQ ID NO: 876499 - DNA, 75 bp, synthetic construct
  source 1..75: mol_type = other DNA
aaaattctcacaccggggctccaagatgcgaacaccacatcttgtgccactcagcaaacaggctgtagccatact

SEQ ID NO: 876500 - DNA, 75 bp, synthetic construct
  source 1..75: mol_type = other DNA
gtttgtggtcccgcgatgctgtggaacgtcagatgagccatcaggagcgtaatggtgtacgtgctgcgtatatcc

SEQ ID NO: 876501 - DNA, 75 bp, synthetic construct
  source 1..75: mol_type = other DNA
tggcgtaaaattctcacaccggggctccaagatgcgaacaccacatcttgtgccactcagcaaacaggctgtagc

SEQ ID NO: 876502 - DNA, 75 bp, synthetic construct
  source 1..75: mol_type = other DNA
gtcggtagtggtcgcgcatcgtaccgaacgctgaccgatgattttaataaattgatggtcgaagccgatacgtgt

SEQ ID NO: 876503 - DNA, 75 bp, synthetic construct
  source 1..75: mol_type = other DNA
gtgattgatatctcggtcggttcgccgttctccattccggaaatgttctccgcacgtctcggtattgccacgatg

SEQ ID NO: 876504 - DNA, 75 bp, synthetic construct
  source 1..75: mol_type = other DNA
cctccggcaagcctgcccgtgcggaagcgaaaaaacgttatcagaaggcttatgctgcaagccttcatgtgcagg

SEQ ID NO: 876505 - DNA, 75 bp, synthetic construct
  source 1..75: mol_type = other DNA
gatgctacagtggtgggcagattttctggatgcaaacagggaggagtgtatcagtccgtttgaatatgcaaagat

SEQ ID NO: 876506 - DNA, 75 bp, synthetic construct
  source 1..75: mol_type = other DNA
aacatctggaagaacggcgactgatgctacagtggtgggcagattttctggatgcgaacagagaacaatgtatca

SEQ ID NO: 876507 - DNA, 75 bp, synthetic construct
  source 1..75: mol_type = other DNA
atgttcctgctggttcatcctaatggttcccgttactggcgtctccgttatcgtattctgggtaaggagaagact

SEQ ID NO: 876508 - DNA, 75 bp, synthetic construct
  source 1..75: mol_type = other DNA
gattttctgaatgcaaacagagaaagatttatcagtccatttgaatatgcaaagattaataatccgttaaaacag

SEQ ID NO: 876509 - DNA, 75 bp, synthetic construct
  source 1..75: mol_type = other DNA
gggccgattttcttgatgcgaaccgggagaaggggatcagtccgtttgaatacgcaaatgttaacaatccgctga

SEQ ID NO: 876510 - DNA, 75 bp, synthetic construct
  source 1..75: mol_type = other DNA
ggacgatacccggaattcgtaaacctattcccggcgtaaaacactctgagcgtgggatgaagatgaaaactgaac

SEQ ID NO: 876511 - DNA, 75 bp, synthetic construct
  source 1..75: mol_type = other DNA
gccctgagggtgatggggtatgacacaacccaggaagtctgtggccatggattccgggcgatggcgtgcagtgca

SEQ ID NO: 876512 - DNA, 75 bp, synthetic construct
  source 1..75: mol_type = other DNA
acttcagacatgggctggtgaaaatggtctgatctttacgggagcacatgacccacgtaaaccaatcagtgaaaa

SEQ ID NO: 876513 - DNA, 75 bp, synthetic construct
  source 1..75: mol_type = other DNA
attgaaaactacgaacctggtaagggaagaatcaccatcatctgctacggaaaagcgtggactgcggcttggttt

SEQ ID NO: 876514 - DNA, 75 bp, synthetic construct
  source 1..75: mol_type = other DNA
tcagatacgcccgctggtctgaaattgatattgacaatgccatgtggactattccagccgaacgcgaacctctgc

SEQ ID NO: 876515 - DNA, 75 bp, synthetic construct
  source 1..75: mol_type = other DNA
cgattttctggatgcaaacagagaaaaatttatcagtccatttgaatatgcaaaaattaacaatccattaaaata

SEQ ID NO: 876516 - DNA, 75 bp, synthetic construct
  source 1..75: mol_type = other DNA
gctggtgaaaatggtctgatctttacgggtgcacatgacccgcgtaaaccaatcagtgaaaatactgtaaataaa

SEQ ID NO: 876517 - DNA, 75 bp, synthetic construct
  source 1..75: mol_type = other DNA
gccgaacgcgaacctctgccaggcgtaaaattctcacaccggggctccaagatgcgaacaccacatcttgtgcca

SEQ ID NO: 876518 - DNA, 75 bp, synthetic construct
  source 1..75: mol_type = other DNA
attttctggatgcaaacagagaaagatttatcagtccatttgaatatgcaaagattaataatccattaaaactgt

SEQ ID NO: 876519 - DNA, 75 bp, synthetic construct
  source 1..75: mol_type = other DNA
attgaccacggtaaaacgccagcatcgccctgctctggagctttcacgcctgcctgaacttttgtcacgtattag

SEQ ID NO: 876520 - DNA, 75 bp, synthetic construct
  source 1..75: mol_type = other DNA
gcgcttgatgaaatcacaaagaaaaaatccccggctgccaccgaggattttaagcaaattgatatgcaattctga

SEQ ID NO: 876521 - DNA, 75 bp, synthetic construct
  source 1..75: mol_type = other DNA
ttcctcctgagcggaaacctattgaaggggtcaagtattcccatcgtggctcaaaaatgcgaacagagcatcttg

SEQ ID NO: 876522 - DNA, 75 bp, synthetic construct
  source 1..75: mol_type = other DNA
gcattgaccacggtaaaacgccagcatcgccccgctcttgatctttcacgcctgcctgaacttctgtcgcgtatt

SEQ ID NO: 876523 - DNA, 75 bp, synthetic construct
  source 1..75: mol_type = other DNA
gcattgaccacggtaaaacgccagcatcgcccagctcttgatctttcccgcctgcctgaacttctgtcgcgtatt

SEQ ID NO: 876524 - DNA, 75 bp, synthetic construct
  source 1..75: mol_type = other DNA
acagtggtgggctgattttctggatgcgaacagagataagggtatcagtccgtttgactatgcaaaaattaacaa

SEQ ID NO: 876525 - DNA, 75 bp, synthetic construct
  source 1..75: mol_type = other DNA
acaacccagaaaatctgtggccatagattccgggcgatggcatgcagtgcgttaatagaatcaggtttatggtcc

SEQ ID NO: 876526 - DNA, 75 bp, synthetic construct
  source 1..75: mol_type = other DNA
ccatactgacagaacttaagacatgggctggtgaaaatggtctgatctttacgggaacacatgacccgcgtaaac

SEQ ID NO: 876527 - DNA, 75 bp, synthetic construct
  source 1..75: mol_type = other DNA
gcagtgaacggtataaaaatcgagtttttctttcggttggctttctaagctgcctgtacggcagtgaactcaaat

SEQ ID NO: 876528 - DNA, 75 bp, synthetic construct
  source 1..75: mol_type = other DNA
gccccaccttatccaaactggacggcggtgggcgttacatggctggcaggctttgattttgaaattaaagtgata

SEQ ID NO: 876529 - DNA, 75 bp, synthetic construct
  source 1..75: mol_type = other DNA
agaacgtaactcagtgagggctgcttatattcataaggcagaacatatagatcaacgccgattaatggtgcagtg

SEQ ID NO: 876530 - DNA, 75 bp, synthetic construct
  source 1..75: mol_type = other DNA
tgagagggatattcgagacgggttatgtgataaagactcccacctttatgagtctgattatctactaggtgttca

SEQ ID NO: 876531 - DNA, 75 bp, synthetic construct
  source 1..75: mol_type = other DNA
gcattgaccacggtaaaacgccagcatcgccccgctcttgatctttcccgcctgcctgaacttatgtcgcgtatt

SEQ ID NO: 876532 - DNA, 75 bp, synthetic construct
  source 1..75: mol_type = other DNA
tgttaaagcaagggggcagcgccgaagaaattgcgcatattctgggacatacctcacttactgttgccaagtatt

SEQ ID NO: 876533 - DNA, 75 bp, synthetic construct
  source 1..75: mol_type = other DNA
aggcgtaaatttctcgcaccggggttccaagatgagaactccgcatcttgttctcctcagcaagcaggctgtagc

SEQ ID NO: 876534 - DNA, 75 bp, synthetic construct
  source 1..75: mol_type = other DNA
tgtcgcagcgcgatatcgatcgcgctgaaacggatttacttatcaacctgtcagctctgacgcaaaggggactgg

SEQ ID NO: 876535 - DNA, 75 bp, synthetic construct
  source 1..75: mol_type = other DNA
tgggccgattttctggatgcgaaccgggagaagggtatcagtccgtttgaatatgcaaaaattaacaatccatta

SEQ ID NO: 876536 - DNA, 75 bp, synthetic construct
  source 1..75: mol_type = other DNA
tgccatgtggactattccagccgaacgcgaacctctgccaggcgtaaaattctcacaccggggatccaagatgcg

SEQ ID NO: 876537 - DNA, 75 bp, synthetic construct
  source 1..75: mol_type = other DNA
tcatcagatataacccggctctggatatggctggtgcattgaccacggtaaaacgccagcatcgccccgctctga

SEQ ID NO: 876538 - DNA, 75 bp, synthetic construct
  source 1..75: mol_type = other DNA
ctggccgttatgctgaatttactggtttttattcgttccagtgaactcagataggcccgttggtctgaaattgat

SEQ ID NO: 876539 - DNA, 75 bp, synthetic construct
  source 1..75: mol_type = other DNA
ctcgcggttatgctgaatttactggtttttattcgttccagtgaactcagataggcccgttggtctgaaattgat

SEQ ID NO: 876540 - DNA, 75 bp, synthetic construct
  source 1..75: mol_type = other DNA
cttgcagttatgctgaatttactggtttttattcgttccagtgaactcagatatgcccgttggtctgaaattgat

SEQ ID NO: 876541 - DNA, 75 bp, synthetic construct
  source 1..75: mol_type = other DNA
ggtttgtggtcccgcgatgctgtggaacgtcagatgagccatcaggagcgtaatggtgtacgtgctgcgtatatc

SEQ ID NO: 876542 - DNA, 75 bp, synthetic construct
  source 1..75: mol_type = other DNA
atggaacaaacaagttacagcaaactatcacagcgtgacgttgatcgcgcagaaacagatttactcatcaacctg

SEQ ID NO: 876543 - DNA, 75 bp, synthetic construct
  source 1..75: mol_type = other DNA
ctggcggttatgctgaatttactggtttttattcgttccagtgaactcagatacgcccgttggtctgaaattgat

SEQ ID NO: 876544 - DNA, 75 bp, synthetic construct
  source 1..75: mol_type = other DNA
actttgccaggaaaggattcaacctcgatatcacaccagaagataacgcgattcttgccagaggttgtgtcgact

SEQ ID NO: 876545 - DNA, 75 bp, synthetic construct
  source 1..75: mol_type = other DNA
ggcttgctgccgtagatattcccgtggcgagcgataacccagtgcactatgcggatgccattcgttataatgctc

SEQ ID NO: 876546 - DNA, 75 bp, synthetic construct
  source 1..75: mol_type = other DNA
tatggggcggtgcggtagccgcgcatcagttggaaggtggctggaatgaaggaggaaaaggcatcagtatcgctg

SEQ ID NO: 876547 - DNA, 75 bp, synthetic construct
  source 1..75: mol_type = other DNA
acaaagagaagggctatttggatggtgtcggaaatcaagtcttggttttaggaaaagacgagaatggtaaaactg

SEQ ID NO: 876548 - DNA, 75 bp, synthetic construct
  source 1..75: mol_type = other DNA
tgtgtacagaagcagtaattattatgaggagttttatgatgccagaccattattgaaagtactattggtcaacgg

SEQ ID NO: 876549 - DNA, 75 bp, synthetic construct
  source 1..75: mol_type = other DNA
atatcgttaccgtatcagagcaaataatattttttatcctattcaaccgtcagtcaattatctaacccagcgcgg

SEQ ID NO: 876550 - DNA, 75 bp, synthetic construct
  source 1..75: mol_type = other DNA
attgattgccgccgttgccagcatgaagattttcgccggcagtgaagtgtcgatcttcactctggagaaagcgta

SEQ ID NO: 876551 - DNA, 75 bp, synthetic construct
  source 1..75: mol_type = other DNA
ttatatgaaccgtcgcgaggcggggagtatcgcttttggtctgagcattggttttgtggcctcggtggggatctc

SEQ ID NO: 876552 - DNA, 75 bp, synthetic construct
  source 1..75: mol_type = other DNA
atcaaaaacttaccgtatatcgccatcgtgggagcattgattgccgccgttgccagcatgaagattttcgccggt

SEQ ID NO: 876553 - DNA, 75 bp, synthetic construct
  source 1..75: mol_type = other DNA
gttattcactcaactggttctgggatcatttccagttgccgctgtttatggggtcgtttgcgggagggggcggaa

SEQ ID NO: 876554 - DNA, 75 bp, synthetic construct
  source 1..75: mol_type = other DNA
cggcacctgtggtggcagtgatgatcaccggcattctgctgaatgttctttactggcttggcttgtttgttccgg

SEQ ID NO: 876555 - DNA, 75 bp, synthetic construct
  source 1..75: mol_type = other DNA
gccttacccggtgggtgcagagtcgaaatatgaaatcccgccgctcttttatcgcctttccggaacgtttcgcca

SEQ ID NO: 876556 - DNA, 75 bp, synthetic construct
  source 1..75: mol_type = other DNA
ttggtgaaatcattggtggaagtgagtaaggctagcattcgcactgtactgctttccgcaacctggggtcaggcg

SEQ ID NO: 876557 - DNA, 75 bp, synthetic construct
  source 1..75: mol_type = other DNA
caaccagatccgttcagcaaaacgataaggatgccagtccacccgtgccatcccctgaaatctcccggcagtgga

SEQ ID NO: 876558 - DNA, 75 bp, synthetic construct
  source 1..75: mol_type = other DNA
tggaactacagacgctggtctgttacgtactggcgataaccagacggcaggggctggcagggatggcagacggac

SEQ ID NO: 876559 - DNA, 75 bp, synthetic construct
  source 1..75: mol_type = other DNA
ggttaatcgccgctggcggctgctgtcccgagacggcggccagaactgggaagtaatgagccatgaacgatacag

SEQ ID NO: 876560 - DNA, 75 bp, synthetic construct
  source 1..75: mol_type = other DNA
caataaccatcaaaaaccttgacacactcatcgtggatcgtctgaaaaaaattgttaactcgcgttttcgtattg

SEQ ID NO: 876561 - DNA, 75 bp, synthetic construct
  source 1..75: mol_type = other DNA
tctacgttgcctgcatgatgacctaccgtctggctgattttctcggaatcgatattgttgagctggtggcagaaa

SEQ ID NO: 876562 - DNA, 75 bp, synthetic construct
  source 1..75: mol_type = other DNA
gtcggcacaatggtggccatcaaaggcggcatctcgacgggcatgagttactacacccaagagcagagtgttgat

SEQ ID NO: 876563 - DNA, 75 bp, synthetic construct
  source 1..75: mol_type = other DNA
ctgatttcaagagaaacaacagatgacgaatctgacattaataccctgtaccttgattcatttaaaagtaaaaac

SEQ ID NO: 876564 - DNA, 75 bp, synthetic construct
  source 1..75: mol_type = other DNA
gttggcaaaaaatgcatcaaaaccgggaatcggaatcacctggtcatttctccgtttatctggataccaagcacg

SEQ ID NO: 876565 - DNA, 75 bp, synthetic construct
  source 1..75: mol_type = other DNA
tatcggtgtcgaactccatcgtgaaggtcatcttgatgagttggagtggaatggcactttaaaagaacttcgctc

SEQ ID NO: 876566 - DNA, 75 bp, synthetic construct
  source 1..75: mol_type = other DNA
aaataaaaacataacaacagtacatgactttacatatgaaaaatatatgtcaggtttacgtaaatacgttcattg

SEQ ID NO: 876567 - DNA, 75 bp, synthetic construct
  source 1..75: mol_type = other DNA
taagacaacaagaaacaaaagtggagaaggtcttgtcaggcttcatgcccgccattatggaggcgatcaagctgg

SEQ ID NO: 876568 - DNA, 75 bp, synthetic construct
  source 1..75: mol_type = other DNA
gcgctgatctgcaaatccgccgtcaatcgccccatacactattaatccacgtcaatcgctcaggcgtgacacttt

SEQ ID NO: 876569 - DNA, 75 bp, synthetic construct
  source 1..75: mol_type = other DNA
agaaagcatattccgcaggcgtaacgccggaacaatcgcaaacgctgattaatcaggcggctctggcagaattta

SEQ ID NO: 876570 - DNA, 75 bp, synthetic construct
  source 1..75: mol_type = other DNA
ctggctgttatgctgaatttactggtttttattcgttccagtgaactcagataagcccggtggtctgaaattgat

SEQ ID NO: 876571 - DNA, 75 bp, synthetic construct
  source 1..75: mol_type = other DNA
ctcgctgttatgctgaatttactggtttttattcgttccagtgaactcagataagcccgctggtctgaaattgat

SEQ ID NO: 876572 - DNA, 75 bp, synthetic construct
  source 1..75: mol_type = other DNA
ctagctgttatgctgaatttactggtttttattcgttccagtgaactcagataagcccgatggtctgaaattgat

SEQ ID NO: 876573 - DNA, 75 bp, synthetic construct
  source 1..75: mol_type = other DNA
atggcactgactgacgcaaaaatccgggctgcaaagcacactgacaaggcttataaactcactgacggggctggc

SEQ ID NO: 876574 - DNA, 75 bp, synthetic construct
  source 1..75: mol_type = other DNA
gtacagtctggcatcatcagatataacccggccctggatatggctggtgcattgaccacggtaaaacgcaagcat

SEQ ID NO: 876575 - DNA, 75 bp, synthetic construct
  source 1..75: mol_type = other DNA
accgagatatcacaacactcagtaccccggacctgcttatccctgttcgtgctgcagaagctaaacaaatttatg

SEQ ID NO: 876576 - DNA, 75 bp, synthetic construct
  source 1..75: mol_type = other DNA
gcattgaccacggtaaaacgccagcatcgccctgctctagatctttcgcgcctgcctgaacttatgtcgcgtatt

SEQ ID NO: 876577 - DNA, 75 bp, synthetic construct
  source 1..75: mol_type = other DNA
gcattgaccacggtaaaacgccagcatcgccctgctctagatctttctcgcctgcctgaacttttgtcgcgtatt

SEQ ID NO: 876578 - DNA, 75 bp, synthetic construct
  source 1..75: mol_type = other DNA
gcattgaccacggtaaaacgccagcatcgccctgctctagatctttcacgcctgcctgaacttgtgtcgcgtatt

SEQ ID NO: 876579 - DNA, 75 bp, synthetic construct
  source 1..75: mol_type = other DNA
gcattgaccacggtaaaacgccagcatcgccctgctctggatctttcgcgcctgcctgaacttgtgtcgcgtatt

SEQ ID NO: 876580 - DNA, 75 bp, synthetic construct
  source 1..75: mol_type = other DNA
gcattgaccacggtaaaacgccagcatcgccctgctctcgatctttcgcgcctgcctgaacttctgtcgcgtatt

SEQ ID NO: 876581 - DNA, 75 bp, synthetic construct
  source 1..75: mol_type = other DNA
gcattgaccacggtaaaacgccagcatcgccctgctctcgatctttcccgcctgcctgaacttgtgtcgcgtatt

SEQ ID NO: 876582 - DNA, 75 bp, synthetic construct
  source 1..75: mol_type = other DNA
gaaaacaccgtaaataaagccctgagggttatggggtatgacacaacccaggatgtctgtggtcatggattccgg

SEQ ID NO: 876583 - DNA, 75 bp, synthetic construct
  source 1..75: mol_type = other DNA
aatgaggaagaaataaaacgctatgatcagtttcattttgtgagtgataaagaactctatattttaagccgtatc

SEQ ID NO: 876584 - DNA, 75 bp, synthetic construct
  source 1..75: mol_type = other DNA
agtaaacagcagcaacaaatgagttcgtcagagcgcgaaagcgaactggccgctgaaaatgtccgccttaaatga

SEQ ID NO: 876585 - DNA, 75 bp, synthetic construct
  source 1..75: mol_type = other DNA
caactggcggagcaggcagaggaactgactatcctccaaaaggccgcgacatactttgcgaagcgcctgaaatgt

SEQ ID NO: 876586 - DNA, 75 bp, synthetic construct
  source 1..75: mol_type = other DNA
ttacttgcctgttgccagtaaaccagctgctgaccgcgctgccggtggatgtattaggtagcctgggggaattaa

SEQ ID NO: 876587 - DNA, 75 bp, synthetic construct
  source 1..75: mol_type = other DNA
tccgggcgtcttcgcgcccgtgatcgagaacgccaagcggcccgatgccggcgccgtcatggcgtggggtgtcgc

SEQ ID NO: 876588 - DNA, 75 bp, synthetic construct
  source 1..75: mol_type = other DNA
gccagaagtggaatacgctttgttccaatcccgatcacagcagatgcagaacttcatctgtttggtgaaattctt

SEQ ID NO: 876589 - DNA, 75 bp, synthetic construct
  source 1..75: mol_type = other DNA
cggcaatcacaacgcaactggcggacaggttgcctcgtcatctcttacctgtagctcgtgttccgcgcattgaac

SEQ ID NO: 876590 - DNA, 75 bp, synthetic construct
  source 1..75: mol_type = other DNA
ccgcgcattgaacgcgcgcgccacggtgatgcgggaggaatgcgtggtgcggccttcctacatctaaccgattaa

SEQ ID NO: 876591 - DNA, 75 bp, synthetic construct
  source 1..75: mol_type = other DNA
agaaaagagctaaaaaagtagcccctggtttacaactctcttttgaacatattgcacgacgctggcatgccagta

SEQ ID NO: 876592 - DNA, 75 bp, synthetic construct
  source 1..75: mol_type = other DNA
aaaaaacacgtaaacagcattctcctgaatttcgcagtgaagccctgaagcttgctgaacgcatcggtgttgctg

SEQ ID NO: 876593 - DNA, 75 bp, synthetic construct
  source 1..75: mol_type = other DNA
tatctgtcaatggcatgcataaatgtcgttattataatgacactatgggtgtcattgataataaaatagagtcta

SEQ ID NO: 876594 - DNA, 75 bp, synthetic construct
  source 1..75: mol_type = other DNA
gaaaagcgggtgccgacaccgcgtgacagctatgacgcatttttagatgcagtgtgcgagctggtagctgaagct

SEQ ID NO: 876595 - DNA, 75 bp, synthetic construct
  source 1..75: mol_type = other DNA
ccccgtaaaaacagtgaaaagttaatgaaaacactcgatgaactgaaccagtcgggaaaagggaaagtgtggttt

SEQ ID NO: 876596 - DNA, 75 bp, synthetic construct
  source 1..75: mol_type = other DNA
atggaaagaacaagttacagcaaactatcacagcgtgacgttgatcgcgcagaaacagatttacttatcaatctg

SEQ ID NO: 876597 - DNA, 75 bp, synthetic construct
  source 1..75: mol_type = other DNA
atgctgaaatgtgcaaagacagcatgtgcaaagatgccatgaacaaggatcatatgaggaaaggcaatatgggca

SEQ ID NO: 876598 - DNA, 75 bp, synthetic construct
  source 1..75: mol_type = other DNA
atgtcacaaacaagttacagcaaactatcacagcgagaaattgatcgcgctgaaactgatttactcatcaacctg

SEQ ID NO: 876599 - DNA, 75 bp, synthetic construct
  source 1..75: mol_type = other DNA
gtcatctgatgatggcttttcggtaattgattatcatcaggtcgccagtgaagcggggggagtggcaggatattc

SEQ ID NO: 876600 - DNA, 75 bp, synthetic construct
  source 1..75: mol_type = other DNA
cagaagcagaagccaaactctccagcttaaatcaccgtaagaagcaaatccgcgacagaattactcagggacgcg

SEQ ID NO: 876601 - DNA, 75 bp, synthetic construct
  source 1..75: mol_type = other DNA
accacgacggttgctgcggtggtcatggccacgatcacggtcatgaacacggtggcgaaggctgctgtggcggta

SEQ ID NO: 876602 - DNA, 75 bp, synthetic construct
  source 1..75: mol_type = other DNA
taatggaaaagacggtgtagctcagatgtcattacctatatatgcatactcaacatgtcgtttttggacaaaaga

SEQ ID NO: 876603 - DNA, 75 bp, synthetic construct
  source 1..75: mol_type = other DNA
aattgtcagacaataggataaatataaccccaatggggataaagatacaggaaacagtcaatggaaatgacaggt

SEQ ID NO: 876604 - DNA, 75 bp, synthetic construct
  source 1..75: mol_type = other DNA
ccagtcgggaaaagggaaagtgtggtttgcggggcgaggaaccgcccctgaatggcaaatgaaacgggaaatgtt

SEQ ID NO: 876605 - DNA, 75 bp, synthetic construct
  source 1..75: mol_type = other DNA
ggcgcaatcgccggttgaattaaaacgtgcctatggtgaatcggcttccctcgggaacctggcggctgacgcttt

SEQ ID NO: 876606 - DNA, 75 bp, synthetic construct
  source 1..75: mol_type = other DNA
cccagttggcgttaaccaactctggcgggattcgcaatgagatcccggcgggtgcaattacgatgggtggcgtca

SEQ ID NO: 876607 - DNA, 75 bp, synthetic construct
  source 1..75: mol_type = other DNA
gttaagaccgactggcggcactggctgggtaaaggccccggattaacgccgagtcatgatgacacgctgagcgga

SEQ ID NO: 876608 - DNA, 75 bp, synthetic construct
  source 1..75: mol_type = other DNA
ctgcacgattttatgcagtggaaaggcccgattcttaccgactccggcggcttccaggtcttcagccttggcgat

SEQ ID NO: 876609 - DNA, 75 bp, synthetic construct
  source 1..75: mol_type = other DNA
cctacggcactgtaaaagggatgacgccggaagaagttgaagccactggcgcacaaattattctcggtaacacct

SEQ ID NO: 876610 - DNA, 75 bp, synthetic construct
  source 1..75: mol_type = other DNA
gtaaccagtgcggttaataacaatggagttgcagaactttttgccttgctgcatacagaagaaggctgtcgctaa

SEQ ID NO: 876611 - DNA, 75 bp, synthetic construct
  source 1..75: mol_type = other DNA
ttaggtgcaatttccatgacataaaagccaaagggatatcagattacgagggaagcagtcgcgacaaacaaattt

SEQ ID NO: 876612 - DNA, 75 bp, synthetic construct
  source 1..75: mol_type = other DNA
cctgcatttacagaactggccccccgaacccaaaaagattatcgacaacatcagaaggcgttgctgatggtattc

SEQ ID NO: 876613 - DNA, 75 bp, synthetic construct
  source 1..75: mol_type = other DNA
cgctgaaaatgtccgccttaaacgacaactggcggagcaggctgaggaactgtccatcctccaaaaggccgtgac

SEQ ID NO: 876614 - DNA, 75 bp, synthetic construct
  source 1..75: mol_type = other DNA
gtgttggcgctaagcgatccgctacccgctgaattgcgccagtttcgtcactgttttcagaccgcactcaatggc

SEQ ID NO: 876615 - DNA, 75 bp, synthetic construct
  source 1..75: mol_type = other DNA
ccagccgtagcgcaccgaattatcgccagtcctggcggttagcgggagtgtggcgacgggcgattaacctgatga

SEQ ID NO: 876616 - DNA, 75 bp, synthetic construct
  source 1..75: mol_type = other DNA
ccgcctgcgcatcctcaaccgcttgccgctgcatggatgcaacgcgcggaggaaaccgggctttttgggccactg

SEQ ID NO: 876617 - DNA, 75 bp, synthetic construct
  source 1..75: mol_type = other DNA
aaataattttaaaaaagtcttcaggcaatatggtggtatcctcagtggaatggtggtgttaatcattctgttcag

SEQ ID NO: 876618 - DNA, 75 bp, synthetic construct
  source 1..75: mol_type = other DNA
ttcaggtgtcgataattgcaattaccgcctatggaatgacttatgttcttttacttggcgatattgatttatcgg

SEQ ID NO: 876619 - DNA, 75 bp, synthetic construct
  source 1..75: mol_type = other DNA
ctgctgaattacgccagtttcgtcactgttttcaggccgcgctcaatggcgtgaagaccgactggcggcactggc

SEQ ID NO: 876620 - DNA, 75 bp, synthetic construct
  source 1..75: mol_type = other DNA
tacttcttacgagtaacaggttcatcgatggtagaggcacgtattcacgaaggcgatctggtcatcgtggatagc

SEQ ID NO: 876621 - DNA, 75 bp, synthetic construct
  source 1..75: mol_type = other DNA
tttcaattccagataaccatactattgaacaagtatcaatggagtggaaaggattaaaaagaggacgcgataatg

SEQ ID NO: 876622 - DNA, 75 bp, synthetic construct
  source 1..75: mol_type = other DNA
catacaaacacggaatgaaggaacatcaacttaatgcgcagttgacaaagattgaccgggagcgttctgacggtg

SEQ ID NO: 876623 - DNA, 75 bp, synthetic construct
  source 1..75: mol_type = other DNA
acgggcaatgaaacctggcaaaaaattatgccaggcgaatggcgcttattttgcctcggggagcgtgtagtttga

SEQ ID NO: 876624 - DNA, 75 bp, synthetic construct
  source 1..75: mol_type = other DNA
gacgccttcccgcgtgagaagaaacgccatcaccgcaggggcaaacagaaaaaagaggtcgccattgttaaggtc

SEQ ID NO: 876625 - DNA, 75 bp, synthetic construct
  source 1..75: mol_type = other DNA
gctgcacgctgaccctgtccgggcgtgatgatgccgccattctggtggactgtgccgcgccggtgttcagcgcca

SEQ ID NO: 876626 - DNA, 75 bp, synthetic construct
  source 1..75: mol_type = other DNA
atgccgataccgtacaaatttctcgcgccagggaagcccgacgcgaactggaagagattttccagcgtgaaatgc

SEQ ID NO: 876627 - DNA, 75 bp, synthetic construct
  source 1..75: mol_type = other DNA
taatggagatctggctattaccgttcaggccaaaaatggatcccgaaagattgaggttttcaaactcaaacatgt

SEQ ID NO: 876628 - DNA, 75 bp, synthetic construct
  source 1..75: mol_type = other DNA
ctttcatctgaccgcgctatcaaaacgctgatcgatatgatgtcgccagaacaaaaacaaaaaacattatacctg

SEQ ID NO: 876629 - DNA, 75 bp, synthetic construct
  source 1..75: mol_type = other DNA
gctgaatttattgctgcctttaatcccaagattgctttggcactactggatgaacgggaaagaaaccagcaatac

SEQ ID NO: 876630 - DNA, 75 bp, synthetic construct
  source 1..75: mol_type = other DNA
atttacactggatcacccgccgcgcgccgtttggcgtggcaacgttgctggatcaggatgtggaaatcgacttca

SEQ ID NO: 876631 - DNA, 75 bp, synthetic construct
  source 1..75: mol_type = other DNA
gcgaggtggcgctggaaaatactcacccatttacccgcgagttatgggggcgtaactggacttatgcccataacg

SEQ ID NO: 876632 - DNA, 75 bp, synthetic construct
  source 1..75: mol_type = other DNA
gtggtttcgaatcagagatctgttgaagatggaaggggcaacagcagtcgtggaatggcgaaacgagaaaagttt

SEQ ID NO: 876633 - DNA, 75 bp, synthetic construct
  source 1..75: mol_type = other DNA
gctggcccagagccacgcccgccgcgcagacagcaagaaacaggtggccgtggtgccgctggatatctggaacga

SEQ ID NO: 876634 - DNA, 75 bp, synthetic construct
  source 1..75: mol_type = other DNA
aagtcggtaatacattaattctgtcaactgacagtggtggtattgatgtcggaaaactggtgctggattacaaag

SEQ ID NO: 876635 - DNA, 75 bp, synthetic construct
  source 1..75: mol_type = other DNA
cgggcggttattacgtttatcacgccgtggttgattacttcaaagcgggcaataccattacggatgaacagatca

SEQ ID NO: 876636 - DNA, 75 bp, synthetic construct
  source 1..75: mol_type = other DNA
aattgatctgacaaaagtggccgctgacgttaagaaactcgtattcgcagtcaccattcatgaagcagacagccg

SEQ ID NO: 876637 - DNA, 75 bp, synthetic construct
  source 1..75: mol_type = other DNA
aatcaccaggccaattcccgttgttcgttgagcctgtcagcgcaggtttcccttcagtcgcttccgattatgttg

SEQ ID NO: 876638 - DNA, 75 bp, synthetic construct
  source 1..75: mol_type = other DNA
agtggttgattatttcaaggcgggtaatgccattacggacgaacaacttaacggtatgcgtgttgctgatgtgaa

SEQ ID NO: 876639 - DNA, 75 bp, synthetic construct
  source 1..75: mol_type = other DNA
gaataaaaagcttgatgaagtggtgcaacaaacggtggcgcaatcgccggttgaattaaaacgtgcctatggtga

SEQ ID NO: 876640 - DNA, 75 bp, synthetic construct
  source 1..75: mol_type = other DNA
tttttgattaaatgctttaatggtgatgattatgttcgttattacaaaaaagtagaaatcagcgcaaataaacag

SEQ ID NO: 876641 - DNA, 75 bp, synthetic construct
  source 1..75: mol_type = other DNA
actggcttcaatcccatcagtttaatgggattacgtaaacttgtgccggtattgcgaaaaacatcgccctataat

SEQ ID NO: 876642 - DNA, 75 bp, synthetic construct
  source 1..75: mol_type = other DNA
gcgttaccatgaccgtgatgtgggcactggaagctgatactgtagaatacggtgaatacctgaccggcgtgcgaa

SEQ ID NO: 876643 - DNA, 75 bp, synthetic construct
  source 1..75: mol_type = other DNA
aacggtaaagtgctgtccgattcgcatttcgtattttataacaacaccaccagcccggatggcgcagtacagcat

SEQ ID NO: 876644 - DNA, 75 bp, synthetic construct
  source 1..75: mol_type = other DNA
actttgcgacagcctggttgccgagtgactgtgagcgcgccgcaatgcccttagcactcgacttgggcggcttgt

SEQ ID NO: 876645 - DNA, 75 bp, synthetic construct
  source 1..75: mol_type = other DNA
gcgtgtaataacgttgaatgcggtcacacgtttgttgtaaatatgactttttcccacacactcagccccagcgcg

SEQ ID NO: 876646 - DNA, 75 bp, synthetic construct
  source 1..75: mol_type = other DNA
tatggcgatgcaaaccctgcgcctgttcagtattttgctgacggggcctgccatcgcacggtttatttcaaccta

SEQ ID NO: 876647 - DNA, 75 bp, synthetic construct
  source 1..75: mol_type = other DNA
tgcttacaattttactggtgacgctgctttccagcgccattgttgggtggctactggtgcgctatagctcattac

SEQ ID NO: 876648 - DNA, 75 bp, synthetic construct
  source 1..75: mol_type = other DNA
tatgtgtgttgtcacttctcctttctattggcttcctcgcggtacatctcccggcggcgctattgctcggaccga

SEQ ID NO: 876649 - DNA, 75 bp, synthetic construct
  source 1..75: mol_type = other DNA
ttctctggcttgcaaatgataagaattatcatatgatattagttatcattatcaatgaaagagatgaaaccatgt

SEQ ID NO: 876650 - DNA, 75 bp, synthetic construct
  source 1..75: mol_type = other DNA
tgctcatcccgatgctggcgggcgcagtgctccagtctggtcagctcatcaccatcgaactcccggaatggctgc

SEQ ID NO: 876651 - DNA, 75 bp, synthetic construct
  source 1..75: mol_type = other DNA
tgctctgctggctatttgtgcaggtatggcgtgggggctgacccggtttatgcatattgattttatgaccgccta

SEQ ID NO: 876652 - DNA, 75 bp, synthetic construct
  source 1..75: mol_type = other DNA
ggcttacggtggtgatggctacgacaaacagctgaaagtgctggaaagcggcgttgacattctgattggcaccac

SEQ ID NO: 876653 - DNA, 75 bp, synthetic construct
  source 1..75: mol_type = other DNA
ccattcaggcactggctcttccgctaacgctggaaggtcgtgacgtagccgggcaggcgcaaaccggtaccggga

SEQ ID NO: 876654 - DNA, 75 bp, synthetic construct
  source 1..75: mol_type = other DNA
gtttcattatcttctctctcatcctgcgattgccgatcgcaaggtgaatcaaccgcgtgccttaattatggcacc

SEQ ID NO: 876655 - DNA, 75 bp, synthetic construct
  source 1..75: mol_type = other DNA
ccagtctggtcagctcatcaccatcgaactaccggaatggctgctggcgatggcgtatatggcaattggttggcg

SEQ ID NO: 876656 - DNA, 75 bp, synthetic construct
  source 1..75: mol_type = other DNA
atgccagttttgcagtggggaatgttatgtgtgctatcacttctcctttctattggtttcctcgcggtacatctc

SEQ ID NO: 876657 - DNA, 75 bp, synthetic construct
  source 1..75: mol_type = other DNA
attttgcaaacaggaacatattctggtgtcttcagaaggtagcttctccggtgttacagatgaagcactggctaa

SEQ ID NO: 876658 - DNA, 75 bp, synthetic construct
  source 1..75: mol_type = other DNA
gccaacccgtaatgcccgaaatggccatttgttcgtgaccgatggcgtggtgaaaattcgtaatgcgaagtataa

SEQ ID NO: 876659 - DNA, 75 bp, synthetic construct
  source 1..75: mol_type = other DNA
gaatgccaaagccagcgaaactgcggcgaaaagtagtcaggctgcagcagccgaaagcgagagtgctgcagctgg

SEQ ID NO: 876660 - DNA, 75 bp, synthetic construct
  source 1..75: mol_type = other DNA
cggcaccgtttccgttgcgccgccgtttggctatgaattgtgccaacgccgcgtgaatgaaaaagatctcgctga

SEQ ID NO: 876661 - DNA, 75 bp, synthetic construct
  source 1..75: mol_type = other DNA
agcgggattcctggagcgccaaactccagggtttactggcaagttgccaacccgcagccattatcactggtgatg

SEQ ID NO: 876662 - DNA, 75 bp, synthetic construct
  source 1..75: mol_type = other DNA
tacggcagtgaaccatcaacatccacttcatttgccgaatacagctttctaagctgcctgtacggcagtgaacgc

SEQ ID NO: 876663 - DNA, 75 bp, synthetic construct
  source 1..75: mol_type = other DNA
tttgttactggctttaagtttacagaagataaacagttgcaggttgttgttgatggaattttaggtggcagctcc

SEQ ID NO: 876664 - DNA, 75 bp, synthetic construct
  source 1..75: mol_type = other DNA
aagcagcaaaaaccagtgaaaccaacgcaaaggcgagcgaaacagcggctgcgaactcagcgaaagcatcggcag

SEQ ID NO: 876665 - DNA, 75 bp, synthetic construct
  source 1..75: mol_type = other DNA
aacgagattcctggagcgccaaattgcagggcttactggcaagctgtcagccagccgcgattatcaccggcgatg

SEQ ID NO: 876666 - DNA, 75 bp, synthetic construct
  source 1..75: mol_type = other DNA
atctgttgccgccccacagtattccccgaacatcctccggcaagcctgcccgtgcggaagcgaaaaaacgttatc

SEQ ID NO: 876667 - DNA, 75 bp, synthetic construct
  source 1..75: mol_type = other DNA
gcgtagccgtgagcgttttgacagtcttggtaacaaaaatgcgttatttggtataattcagggcagtatttacga

SEQ ID NO: 876668 - DNA, 75 bp, synthetic construct
  source 1..75: mol_type = other DNA
taccgcccaggaaaatattattttgcagatccagtgccggatcagcgacgaaaagcgccgcacgcagcttatcca

SEQ ID NO: 876669 - DNA, 75 bp, synthetic construct
  source 1..75: mol_type = other DNA
tcctgacccccgtcgccacgcagctttcagtggattacttgcgcactcaggatttcgccatgcgcccgctgcaat

SEQ ID NO: 876670 - DNA, 75 bp, synthetic construct
  source 1..75: mol_type = other DNA
aatctacgtgctatcagccacgatggcattaaattacgccctggcgaccgctgcgtctcctggctgcctttctac

SEQ ID NO: 876671 - DNA, 75 bp, synthetic construct
  source 1..75: mol_type = other DNA
tccggtaaataaagcgacatttaaaaaattgctggtaaatcgcagtggcaatggtttggtgataaaaatgactca

SEQ ID NO: 876672 - DNA, 75 bp, synthetic construct
  source 1..75: mol_type = other DNA
acagaaaaatgcctcacaccatgacgggcaggaagggcagcgccgcaggcgcggccctcctgcatttcaggcagg

SEQ ID NO: 876673 - DNA, 75 bp, synthetic construct
  source 1..75: mol_type = other DNA
cgccatcaggcgcagtggccttacacaccgtcaggtgtgcagggagcgccgtttccggcgcgacaggggcggcgc

SEQ ID NO: 876674 - DNA, 75 bp, synthetic construct
  source 1..75: mol_type = other DNA
tgtaagaaggttcttaaacgacaggtctgtaacaggtacttcctgaaacaacgcctgtcaccaacaggaagggta

SEQ ID NO: 876675 - DNA, 75 bp, synthetic construct
  source 1..75: mol_type = other DNA
ctggccattggcaatattgaactggttaagcctaaccagaaagaactcagtgcactggttaaccgcgaactcacc

SEQ ID NO: 876676 - DNA, 75 bp, synthetic construct
  source 1..75: mol_type = other DNA
cttggtgggagcgccacggcaatcttcccggctggcggagcgactggcgaacatctggtttcactgctgtctgat

SEQ ID NO: 876677 - DNA, 75 bp, synthetic construct
  source 1..75: mol_type = other DNA
ctgttcctggcatacagccatacactaccttctgaccggaaagtcgggccggcagcgccgcaggcgctgcccccc

SEQ ID NO: 876678 - DNA, 75 bp, synthetic construct
  source 1..75: mol_type = other DNA
ctattttttagcaaatcaaatataatagataaaatttcatacatctcagataacagcacatggaaaactgttatg

SEQ ID NO: 876679 - DNA, 75 bp, synthetic construct
  source 1..75: mol_type = other DNA
gcaaaacaaaacaggcaccaaacaaatcaaggaatggtctccgcgattacgtacggcgatccagttagcccgaaa

SEQ ID NO: 876680 - DNA, 75 bp, synthetic construct
  source 1..75: mol_type = other DNA
catcaccgatgaacagtatgcagcgatatatgcggaagcaattccacagttacgcattgcaatggagatttccta

SEQ ID NO: 876681 - DNA, 75 bp, synthetic construct
  source 1..75: mol_type = other DNA
ttgttccctctggtattcaccatcacctgtttgagaaccctcgccgcaaggggcatcactgccacggcctgacgc

SEQ ID NO: 876682 - DNA, 75 bp, synthetic construct
  source 1..75: mol_type = other DNA
tcctttggcaacaaataatacaattgctaatgggtttgtaggtctaaaatcattacaagaccttaatgagtccgt

SEQ ID NO: 876683 - DNA, 75 bp, synthetic construct
  source 1..75: mol_type = other DNA
cgcgcagcacaagctcgtattttagaattatctaaggttattcatgaaacaacatctaaactagaaaatctagaa

SEQ ID NO: 876684 - DNA, 75 bp, synthetic construct
  source 1..75: mol_type = other DNA
ctgtcgattggtaatattgaattagttaaacctaaccagaaagagctcagtgcgctggttaatcgcgaactcacc

SEQ ID NO: 876685 - DNA, 75 bp, synthetic construct
  source 1..75: mol_type = other DNA
gggaaaaagccctgacgcaccgtgtcaccgattcagttggccgctttgccggtttcacgcacgtcatggttgtcg

SEQ ID NO: 876686 - DNA, 75 bp, synthetic construct
  source 1..75: mol_type = other DNA
attagtccgaatagttttaagccggaatggtctatgacgctgcagggactgactgatgccactgtacccgcttcc

SEQ ID NO: 876687 - DNA, 75 bp, synthetic construct
  source 1..75: mol_type = other DNA
gatgtggcaaaggttcaggggcaactggcaggtatcagccaggtgttttgcgatccacacgtaggcgtttctctt

SEQ ID NO: 876688 - DNA, 75 bp, synthetic construct
  source 1..75: mol_type = other DNA
ctcttgtagcaaccgttggaattatcagtacagcccactcggcttcaaccggtacaatcacatttaatggcgaat

SEQ ID NO: 876689 - DNA, 75 bp, synthetic construct
  source 1..75: mol_type = other DNA
tattgatggcatctttgggtatggtgactttgaatgcaaatgctgcatcaacagggactattacttttaatggcg

SEQ ID NO: 876690 - DNA, 75 bp, synthetic construct
  source 1..75: mol_type = other DNA
ctacaagttctacctggaagtgcttatgaatgcagccgccagtactcaacataaagaacagttacagtatctatt

SEQ ID NO: 876691 - DNA, 75 bp, synthetic construct
  source 1..75: mol_type = other DNA
gcggtaagtcagaaaaatgtattttctgttatccgcgaattgagtccggtcagccaacagtctgctccgaaacct

SEQ ID NO: 876692 - DNA, 75 bp, synthetic construct
  source 1..75: mol_type = other DNA
gcatccggtatctgggcgtgctgctttacgacgccgaccgcatcgaggaagcggcgagcaccgagcgcgaagttg

SEQ ID NO: 876693 - DNA, 75 bp, synthetic construct
  source 1..75: mol_type = other DNA
taggagccatgacgctgaagttagcagaaaatgcctctctggaagaaatggtccgctttggggtagctgcaggca

SEQ ID NO: 876694 - DNA, 75 bp, synthetic construct
  source 1..75: mol_type = other DNA
gccgtattgaaaaatatcagaagacatttctgcgccactgccgccctgtattgcagcagatgctggcagtttatc

SEQ ID NO: 876695 - DNA, 75 bp, synthetic construct
  source 1..75: mol_type = other DNA
catagttctccgcagggatattccacacggtctgacaacgatgccaaaaacatctgaactggtttctgctgaacc

SEQ ID NO: 876696 - DNA, 75 bp, synthetic construct
  source 1..75: mol_type = other DNA
ctgcactggctgggattcaccattgaagaaccacagccgtacggcattaacaacctaccgtttcaccgattccac

SEQ ID NO: 876697 - DNA, 75 bp, synthetic construct
  source 1..75: mol_type = other DNA
gataaaaaatttaaaaattataaaaatgcagaattaatctatttgccgataaatgccaatggcgtctctagcata

SEQ ID NO: 876698 - DNA, 75 bp, synthetic construct
  source 1..75: mol_type = other DNA
gcagacgacagaccgtgcgcaggggaaaccgcacatgaacccgcggggcaacacggccctgttgcgtctgcagct

SEQ ID NO: 876699 - DNA, 75 bp, synthetic construct
  source 1..75: mol_type = other DNA
acttcgcatatctactcggctatctatcggttgcaggacaaacacggcaatattctggtcaataccccctatcgc

SEQ ID NO: 876700 - DNA, 75 bp, synthetic construct
  source 1..75: mol_type = other DNA
acttcgcatatctactcggctatctatcggttgctggacaaacacggcaatattctggtcaatatcccctgtcgc

SEQ ID NO: 876701 - DNA, 75 bp, synthetic construct
  source 1..75: mol_type = other DNA
agcaatcacgttggcaactatggttaacaccaaaacaaaaactgagtcgtgaatgggttcaggctgctgggctac

SEQ ID NO: 876702 - DNA, 75 bp, synthetic construct
  source 1..75: mol_type = other DNA
gacggaacgtatgcaggaaaaaccgcacatgaacctgcggggcaacactgctctgttgcgtctgcggctggatta

SEQ ID NO: 876703 - DNA, 75 bp, synthetic construct
  source 1..75: mol_type = other DNA
tcagtgggtaaatgaacgtaatggtcgtaccgggatgctgacagtcagtggcaccctgctgtcatctccgtgcac

SEQ ID NO: 876704 - DNA, 75 bp, synthetic construct
  source 1..75: mol_type = other DNA
atgaaaaaagtattaggcgttattcttggtggtctgcttcttctgcctgtagtgagcaatgcagctgatgcgcaa

SEQ ID NO: 876705 - DNA, 75 bp, synthetic construct
  source 1..75: mol_type = other DNA
ttatccaggcttgtaaccaggataaaaaagccaactttaaagataaagttaaaggcgaatgggacaagattaaga

SEQ ID NO: 876706 - DNA, 75 bp, synthetic construct
  source 1..75: mol_type = other DNA
cgcgcgaaaaagatgtggtattgcaaatagctcgccgtttgcgctctctgatcgagaaagagggcaatatgaagg

SEQ ID NO: 876707 - DNA, 75 bp, synthetic construct
  source 1..75: mol_type = other DNA
gcagaacaggctcaggcgctgaaggcggatattgacagccagatacagatgtttgagcagcggctgaaaccgctc

SEQ ID NO: 876708 - DNA, 75 bp, synthetic construct
  source 1..75: mol_type = other DNA
tgatggcggagatccggatcgtccctacatcgcttatgccctgcatgattcagagcatccggacattgtcaccag

SEQ ID NO: 876709 - DNA, 75 bp, synthetic construct
  source 1..75: mol_type = other DNA
cctggctgtagacgaatccttccagccgactgctgtcggttttgctgaggctctgaataataaagacaaaccgga

SEQ ID NO: 876710 - DNA, 75 bp, synthetic construct
  source 1..75: mol_type = other DNA
caggaaattacagcgtggtgatcggttggttagcagatgatctgacagaagaagaacatgctgaacttgtggatg

SEQ ID NO: 876711 - DNA, 75 bp, synthetic construct
  source 1..75: mol_type = other DNA
taggtgaacaattacaaggtgggcgtaatggcgaggatggagttggtgagcacgggtatacttctccaactgaat

SEQ ID NO: 876712 - DNA, 75 bp, synthetic construct
  source 1..75: mol_type = other DNA
ttaagcttcggaaatcagtgtcttctggaaataagttcggcttaagtgatctctggaaaaatcgagcaagcagaa

SEQ ID NO: 876713 - DNA, 75 bp, synthetic construct
  source 1..75: mol_type = other DNA
ttacaccgtcgatggtggtggcgtaggcgaactggagtttgaaaacttcaacgccgcatcggtgaatatcaaaat

SEQ ID NO: 876714 - DNA, 75 bp, synthetic construct
  source 1..75: mol_type = other DNA
cttatcgatctcgatgaactgcgtcgttacgatctcaatatcgtgcagcactggcagcagataaccgagcaccgt

SEQ ID NO: 876715 - DNA, 75 bp, synthetic construct
  source 1..75: mol_type = other DNA
gacaaagttgtgaacacatcacaaccacaacctcgtcagcgtgccagcacgactatcaatgacccatctcttgac

SEQ ID NO: 876716 - DNA, 75 bp, synthetic construct
  source 1..75: mol_type = other DNA
cctaccaagaaacagagattacgtataaacaacactagcgagatagataatccgcaaaaagcagcagcagatcac

SEQ ID NO: 876717 - DNA, 75 bp, synthetic construct
  source 1..75: mol_type = other DNA
cgtcatcacgccaatccgcccaaaagttgaaaggttctgtgccagtagccgctaattctgctcctcttgaaccac

SEQ ID NO: 876718 - DNA, 75 bp, synthetic construct
  source 1..75: mol_type = other DNA
atcaaaaagattgaggcagacttaaccaggcaggcttcaactggcgagcccgccctgacactgaatgcttttgtg

SEQ ID NO: 876719 - DNA, 75 bp, synthetic construct
  source 1..75: mol_type = other DNA
aagcctttgaaggcaataacctggtactggtggatgaaggccaccgcggcaccggtacagccgcaggtgcctgga

SEQ ID NO: 876720 - DNA, 75 bp, synthetic construct
  source 1..75: mol_type = other DNA
gacgcatctaagggtattgctaaagaaacaaaaaacacaacaaaggcagttaagtcagcaggtgttgttgccgaa

SEQ ID NO: 876721 - DNA, 75 bp, synthetic construct
  source 1..75: mol_type = other DNA
aaaggggattgcaaaggaaacaaaaaatactgctaaggccgtgaagtcagctggtgttgtggctgaagatgccac

SEQ ID NO: 876722 - DNA, 75 bp, synthetic construct
  source 1..75: mol_type = other DNA
gtggtccgttgtggatggctgctcgcggcatgtacgacattactaaagagatcacaggtaaagcagtatctctta

SEQ ID NO: 876723 - DNA, 75 bp, synthetic construct
  source 1..75: mol_type = other DNA
acgaggaaaaatcccgggccaaggagcgcatcttctcgttccgctcggccaaccaccgctgggatccgaagaacc

SEQ ID NO: 876724 - DNA, 75 bp, synthetic construct
  source 1..75: mol_type = other DNA
cggtcaccatgcgtgcaatccaaaaagccatcgcgttgattgaactcaagtttaccccacagggcgaatcccatt

SEQ ID NO: 876725 - DNA, 75 bp, synthetic construct
  source 1..75: mol_type = other DNA
gaagggtgtcgtctgcaacttcattcgcaaggcatcgatgatggaaggcgctgccagtactgcggaaaccagcaa

SEQ ID NO: 876726 - DNA, 75 bp, synthetic construct
  source 1..75: mol_type = other DNA
atggtcgccatgagcatcgggtgcatcgcgaagtgtatcgtccgtggggcaaatatgactctatcgacgcgggcg

SEQ ID NO: 876727 - DNA, 75 bp, synthetic construct
  source 1..75: mol_type = other DNA
cactccgtaacatccgcgacaaggtggatgggcttagcttcctgaacagcgcttttaaccctctggtcaagctgc

SEQ ID NO: 876728 - DNA, 75 bp, synthetic construct
  source 1..75: mol_type = other DNA
tcggttcttttctcttcagtctggtagggattattgccctcaatatgggagcttatgaagaaagggggagagtca

SEQ ID NO: 876729 - DNA, 75 bp, synthetic construct
  source 1..75: mol_type = other DNA
ggtgggagatatgaaccgccccgggtttcctggagagtgttttatctgtgaactcaggctgccagatcatcgttt

SEQ ID NO: 876730 - DNA, 75 bp, synthetic construct
  source 1..75: mol_type = other DNA
gccgccatatccatcttacgttatgcaatggcaaaaggcatcacctacgcgggtttactttaaggtaaatatcga

SEQ ID NO: 876731 - DNA, 75 bp, synthetic construct
  source 1..75: mol_type = other DNA
ttctgcgctggccgggcgtaatggcagcccaggaacaggatctcgacgctattgccgctgaaattcttgctgctc

SEQ ID NO: 876732 - DNA, 75 bp, synthetic construct
  source 1..75: mol_type = other DNA
gtctggaaggcgtcaccgccgaagtggtcaaagtccgcgcccatatgccggaaatcctgcaatggcaacgtgagc

SEQ ID NO: 876733 - DNA, 75 bp, synthetic construct
  source 1..75: mol_type = other DNA
tttatgaatgttatcaacctgatgatggcgataagttaatccgtgagctgccgttcagttcattaatttttgccc

SEQ ID NO: 876734 - DNA, 75 bp, synthetic construct
  source 1..75: mol_type = other DNA
catttatgagtgttatcaacctgatgatggcgataagttaatccgtgagctgccgttcagttcattaatttttgc

SEQ ID NO: 876735 - DNA, 75 bp, synthetic construct
  source 1..75: mol_type = other DNA
atcgtattacccccattgtcggcatgttacagggtgtagtagagaagggcggtgaactgcgtgttgaagttgccg

SEQ ID NO: 876736 - DNA, 75 bp, synthetic construct
  source 1..75: mol_type = other DNA
gaaaaacactattgacgtggctgacacctgtcactagtatagtggctgacacctttattaaggtaatcgatgaaa

SEQ ID NO: 876737 - DNA, 75 bp, synthetic construct
  source 1..75: mol_type = other DNA
ggactcgtacaacctgaataaatacatctggcgttttatcgccctgagcacggcacaaccgcgtgtgattaccat

SEQ ID NO: 876738 - DNA, 75 bp, synthetic construct
  source 1..75: mol_type = other DNA
gactcgcacgacctgaataaatacatctggcgttttatcgccctgagcaccgcacaaccgcgcgtgattcacatc

SEQ ID NO: 876739 - DNA, 75 bp, synthetic construct
  source 1..75: mol_type = other DNA
accagcgaacaggaagcacgccagcaatccccggctggctgcgtgatggtattcgctgcccgtattcgccagggg

SEQ ID NO: 876740 - DNA, 75 bp, synthetic construct
  source 1..75: mol_type = other DNA
acggcacaaccgcgcgtgattaccattgaggccagcagcgaacaggaagcacgccagcaatccccggctggctgc

SEQ ID NO: 876741 - DNA, 75 bp, synthetic construct
  source 1..75: mol_type = other DNA
cctcggcggctttgattccgagtttttccacctgcgccagtgcatcgagcgaagaaactaggggattttctccac

SEQ ID NO: 876742 - DNA, 75 bp, synthetic construct
  source 1..75: mol_type = other DNA
cattaataacgggatgcagtgtaatacaaaagtgaataccaaaaaagacttgaaatggtattcacctaaatgtaa

SEQ ID NO: 876743 - DNA, 75 bp, synthetic construct
  source 1..75: mol_type = other DNA
tttgattttggtctgcgtccatcgttaggttatgtattatcaaaaggaaaagatattgaaggcatcggtgatgag

SEQ ID NO: 876744 - DNA, 75 bp, synthetic construct
  source 1..75: mol_type = other DNA
gcggttttgctaataaaacacaaaactttgaagccgtcgcgcaatatcaatttgattttggtctgcgtccatcgt

SEQ ID NO: 876745 - DNA, 75 bp, synthetic construct
  source 1..75: mol_type = other DNA
caggcatttttaccgcctcaacattgttcataacttcatgcggaacccttgccgcaactgtttgtgattttgcgt

SEQ ID NO: 876746 - DNA, 75 bp, synthetic construct
  source 1..75: mol_type = other DNA
gtgtttaacaccagggcttaaattggtgttcaacaccttactgatgcaaggtgcagaaacgacgaaacccggcag

SEQ ID NO: 876747 - DNA, 75 bp, synthetic construct
  source 1..75: mol_type = other DNA
gtcttaaatacgatgctaataatatttacctggcaaccttctattctgaaacgcgtaacatgacgccaatttctg

SEQ ID NO: 876748 - DNA, 75 bp, synthetic construct
  source 1..75: mol_type = other DNA
gtgctacgtattatttcaacaaaaatatgtcggcatttgttgattataaaataaaccaactggatagcgataata

SEQ ID NO: 876749 - DNA, 75 bp, synthetic construct
  source 1..75: mol_type = other DNA
cagcgatctgctgactcttcaggcgctgaacgctgcgcgtctgaaagaagcgggggcagttgacgccactttcgt

SEQ ID NO: 876750 - DNA, 75 bp, synthetic construct
  source 1..75: mol_type = other DNA
accgcccagggtgcagatgctgaacaggcgctgaaagcaatcggcgacgctatcgctgctggtcttggggagggc

SEQ ID NO: 876751 - DNA, 75 bp, synthetic construct
  source 1..75: mol_type = other DNA
ctcgccgatctgttactcgacaataaagctgaccgtttgctgaaagcggatgcggcaacattgctggcactgctg

SEQ ID NO: 876752 - DNA, 75 bp, synthetic construct
  source 1..75: mol_type = other DNA
tcacccattacaaagtatatttccttccatagtaactgatagagatggcagagttcttgctaaaacaaacggtgt

SEQ ID NO: 876753 - DNA, 75 bp, synthetic construct
  source 1..75: mol_type = other DNA
aatcgagctatagaacttgtttcagaacaaaaggatataattcattctctttacaatttttgttttattgcccat

SEQ ID NO: 876754 - DNA, 75 bp, synthetic construct
  source 1..75: mol_type = other DNA
ctgttgcgctctggttctgttttgccgggaacctgcaaaatgctctgataattgccggtctgggtgttttgtgtg

SEQ ID NO: 876755 - DNA, 75 bp, synthetic construct
  source 1..75: mol_type = other DNA
atgaggcagtgtcgtgggcggaagatgtggtggagcaagttgaagatgcgattgatgacgtactttcaccgctgg

SEQ ID NO: 876756 - DNA, 75 bp, synthetic construct
  source 1..75: mol_type = other DNA
ccggatgttgaactggcgcggctgcgtggcgcatcaggcgctggcgctggtgttcggcaacggggactatcgcgg

SEQ ID NO: 876757 - DNA, 75 bp, synthetic construct
  source 1..75: mol_type = other DNA
agccagcagaccgatggcctcggtaatgtgcaggcgttaagtgcagagctgtcgctgaaggagtacatcggcgat

SEQ ID NO: 876758 - DNA, 75 bp, synthetic construct
  source 1..75: mol_type = other DNA
ccgcgatcaggtgctgaaaaccggcgttcaggtatttcagttcccggaaggcgtcacctggggtgacggtcaggt

SEQ ID NO: 876759 - DNA, 75 bp, synthetic construct
  source 1..75: mol_type = other DNA
gaatcgaaatacgaaaaagtgatcatcaaccagatcgtcgatcgtcgttcttcttccaaacgcccgaccgggatg

SEQ ID NO: 876760 - DNA, 75 bp, synthetic construct
  source 1..75: mol_type = other DNA
cgttgagcaaagcgcgccagtatgtcgacgagttcgacggcaacatcgccagctttatcttttctggcaagcctg

SEQ ID NO: 876761 - DNA, 75 bp, synthetic construct
  source 1..75: mol_type = other DNA
gcgcgttatctccggtaaggaggcggttttcagcgtggggtctgatgtgccggttctgtcatcggtgtcatggca

SEQ ID NO: 876762 - DNA, 75 bp, synthetic construct
  source 1..75: mol_type = other DNA
ctaccgtggtgaacatcgcattgccaatatcgtaatgacactggcggcggctactgcgctgtggttctgcttcgc

SEQ ID NO: 876763 - DNA, 75 bp, synthetic construct
  source 1..75: mol_type = other DNA
gtcgtctggcaatggtcaccagtatcgttctcttctcggtcgggacgctggcttgcggcttcgcgccaggctaca

SEQ ID NO: 876764 - DNA, 75 bp, synthetic construct
  source 1..75: mol_type = other DNA
cccattaaaaatgtgtttccgcttttgtttttcgttcttgtcttaattactaattataatatttacttccgataa

SEQ ID NO: 876765 - DNA, 75 bp, synthetic construct
  source 1..75: mol_type = other DNA
atccgaaaaatcagcgcccggagctgtggcacaactacaacgggcaaattaacaaaggcgaaagcatccgcgtct

SEQ ID NO: 876766 - DNA, 75 bp, synthetic construct
  source 1..75: mol_type = other DNA
ttttatccgggtacgctacctttcccgctgctgcatgtcgacaccggctggaaattccgcgagatgtatgagttc

SEQ ID NO: 876767 - DNA, 75 bp, synthetic construct
  source 1..75: mol_type = other DNA
tgcggcaactggaggcggaaagcatccacattattcgcgaggtggcggcagaattctcaaatccggtgatgctct

SEQ ID NO: 876768 - DNA, 75 bp, synthetic construct
  source 1..75: mol_type = other DNA
ttatcaagcgtgatgtaacaaccgaagtcagccttgcagatggtgatattattttacttggtggccttgctgaac

SEQ ID NO: 876769 - DNA, 75 bp, synthetic construct
  source 1..75: mol_type = other DNA
gtcagcttccggccgcacaacagccggttcagggggcaaacggtgagcagacatggcaggcggtcagcagtggta

SEQ ID NO: 876770 - DNA, 75 bp, synthetic construct
  source 1..75: mol_type = other DNA
ttcgggtaaaacccaccgtgacgcaggatgtgataggtctggatatcgttcagcagctgagtaactttgcaaaaa

SEQ ID NO: 876771 - DNA, 75 bp, synthetic construct
  source 1..75: mol_type = other DNA
tggacatatctggccggttttcttcggttttaaaggggggaaaggcgttgccaccgcttttggtgcaatagcccc

SEQ ID NO: 876772 - DNA, 75 bp, synthetic construct
  source 1..75: mol_type = other DNA
tgcgtcatcatgacaacatccagcgtctgtggcgtcgtcaggagacaaaaatctggacgaaattcaaaagaaagc

SEQ ID NO: 876773 - DNA, 75 bp, synthetic construct
  source 1..75: mol_type = other DNA
ggcaagggagcagccgtagcagtactgattttcgacgttctgaaaggaatgttgcctgtctggggcgcgtatgaa

SEQ ID NO: 876774 - DNA, 75 bp, synthetic construct
  source 1..75: mol_type = other DNA
cgtgggcgcagggaacagcattcaccgacgcgtatatgaatgagatggaacggcatatgcgcggtattgcggtgc

SEQ ID NO: 876775 - DNA, 75 bp, synthetic construct
  source 1..75: mol_type = other DNA
tgttccatcagaaactgaaattcgtaaagcggcgcaagaattgaatctgatagcctcgatacatgatggtaaaac

SEQ ID NO: 876776 - DNA, 75 bp, synthetic construct
  source 1..75: mol_type = other DNA
tcgcctaatgaaaaaatagacgtcagcaacccagaggttatgacgcaattagttcgtgcaatagcgacgaaagaa

SEQ ID NO: 876777 - DNA, 75 bp, synthetic construct
  source 1..75: mol_type = other DNA
gggtatacttccccggctgaatttaatgcgcctaccagtaacaccattgctgcggatctgaatattggtggcagc

SEQ ID NO: 876778 - DNA, 75 bp, synthetic construct
  source 1..75: mol_type = other DNA
ggtatcagcgatggcgcgattgacgtcgtcgcgactgaccactgcaccttctcaatggcccaacgccagcaaatc

SEQ ID NO: 876779 - DNA, 75 bp, synthetic construct
  source 1..75: mol_type = other DNA
ggcgcactaactaccgtgcacccggaaaatgacgcggcaattgccagtaagcgagcggagtttatcgcctccggg

SEQ ID NO: 876780 - DNA, 75 bp, synthetic construct
  source 1..75: mol_type = other DNA
ccattcttgatgaaattccaatgatggtcgaagaagggcttagcagttttaaactctatttaacctatcaataca

SEQ ID NO: 876781 - DNA, 75 bp, synthetic construct
  source 1..75: mol_type = other DNA
agcgcccttcaaaggcacgattgaagtcattgatatcaataaacttgatgataaaatgggcgacaaaactgttgc

SEQ ID NO: 876782 - DNA, 75 bp, synthetic construct
  source 1..75: mol_type = other DNA
tgcgggtaatttttatccggattttttgttgtggttagtcgatgataaaagtggtaaacaatggctgagtcttat

SEQ ID NO: 876783 - DNA, 75 bp, synthetic construct
  source 1..75: mol_type = other DNA
gaagccagaaatgtgctttttattgaggatactggccccgtttatctggagaagttatttagtaagatggttagt

SEQ ID NO: 876784 - DNA, 75 bp, synthetic construct
  source 1..75: mol_type = other DNA
cggctcgcggcatttatgacattacaaaagagatcaccgggaaagcagaatcgcttaaagagtggagtgataaag

SEQ ID NO: 876785 - DNA, 75 bp, synthetic construct
  source 1..75: mol_type = other DNA
tgcgggtaatttttatccggatttcttattgtggttagtcgatgataaaagtggtaaacaatggttaagtcttat

SEQ ID NO: 876786 - DNA, 75 bp, synthetic construct
  source 1..75: mol_type = other DNA
caaactgagctttcataagcaactggttttgaaccgctttatgttccatttttttaaagatggcacattgcaagg

SEQ ID NO: 876787 - DNA, 75 bp, synthetic construct
  source 1..75: mol_type = other DNA
ggtcgaagaagggctgactagttttaaactctatttaacctatcaatacaaactcaacgatgacgaagtgttaca

SEQ ID NO: 876788 - DNA, 75 bp, synthetic construct
  source 1..75: mol_type = other DNA
ccggaagcggatgtgacgctgatagacctggggcacctggcccgtgaggggtatgaggcgcagatggctctgacg

SEQ ID NO: 876789 - DNA, 75 bp, synthetic construct
  source 1..75: mol_type = other DNA
ccgtacatgacgaaggttgtgaagatgtggcgtaagctgggagcgtggctgtggctggcgacacagaacctgaag

SEQ ID NO: 876790 - DNA, 75 bp, synthetic construct
  source 1..75: mol_type = other DNA
gacatggacctacacctatgcccctgttggtacaggaaagccgagcctgttggcctcggttgatggtccgcgcac

SEQ ID NO: 876791 - DNA, 75 bp, synthetic construct
  source 1..75: mol_type = other DNA
ctggaagactcgccggaagaggcgctgaacaccgtttgcgaacggatgatttccgcactggcgggcgcaggtatt

SEQ ID NO: 876792 - DNA, 75 bp, synthetic construct
  source 1..75: mol_type = other DNA
gggtgcgctgtatccgtatgaacggtctgcaggtgcatggctggctgctcaggctgttcaatccccggccggcgt

SEQ ID NO: 876793 - DNA, 75 bp, synthetic construct
  source 1..75: mol_type = other DNA
cggtcatcccggattcagtttctttaaccggggtggggatgtgctgacctttgatccgctgaataaactggatcg

SEQ ID NO: 876794 - DNA, 75 bp, synthetic construct
  source 1..75: mol_type = other DNA
taagtatctaggtgctactggcgattatgaccccactacctgcactggcgacccagctacggtctactggcgctc

SEQ ID NO: 876795 - DNA, 75 bp, synthetic construct
  source 1..75: mol_type = other DNA
cgattttctgtgacggcacctttacaggcaaagccggacggggacgtttcctgcgacgcaaaccgtttgtccctc

SEQ ID NO: 876796 - DNA, 75 bp, synthetic construct
  source 1..75: mol_type = other DNA
gcgggcggagtttatcgccgcagggttaaccgcgccgcgttatcatgccttgagtcgacctctggaatgcgaagc

SEQ ID NO: 876797 - DNA, 75 bp, synthetic construct
  source 1..75: mol_type = other DNA
gggggcgcagagaaaactcaggtaagctacaacgctgacggaagcgtctctgtcaccaatgccctcggccacgtt

SEQ ID NO: 876798 - DNA, 75 bp, synthetic construct
  source 1..75: mol_type = other DNA
cgcctatgacaccttcaagaccatcaccagtgattgtgcgacctcaagagaaaagtggatttccggggggctttt

SEQ ID NO: 876799 - DNA, 75 bp, synthetic construct
  source 1..75: mol_type = other DNA
atctcggcttaccaacaacgaccatgtgtgtagggaaccctatccatcttggcaccggcaacaagttccaggctg

SEQ ID NO: 876800 - DNA, 75 bp, synthetic construct
  source 1..75: mol_type = other DNA
cacaggtcaggaacgatgagcaggatgtgattctcgctgaccatgagcagcgaatttctgctgcggaagcaacgc

SEQ ID NO: 876801 - DNA, 75 bp, synthetic construct
  source 1..75: mol_type = other DNA
tggtaacgtggcgaacaaggccaacgaagcagggaagggggcttatgatgcacaggtgaagaatgatgagcagga

SEQ ID NO: 876802 - DNA, 75 bp, synthetic construct
  source 1..75: mol_type = other DNA
caagcttgcgaccattctaaataccattgccgaaaaatatgatctgccagtcattgtatccacacatccgcggac

SEQ ID NO: 876803 - DNA, 75 bp, synthetic construct
  source 1..75: mol_type = other DNA
ccagcacttaatttacgtgaggttcatgaacgtccagaaggtttcgaagaagcctcagtaatgtttgtcggtctg

SEQ ID NO: 876804 - DNA, 75 bp, synthetic construct
  source 1..75: mol_type = other DNA
gttgtcagtgcccacagagaggaaaacattgataacgataaaaacattaataaacttgtcaatattttaaataca

SEQ ID NO: 876805 - DNA, 75 bp, synthetic construct
  source 1..75: mol_type = other DNA
cgtgctgttttatcggatagcgggactattacagaagagtcctccattatgaacttccctgcactcaatatacga

SEQ ID NO: 876806 - DNA, 75 bp, synthetic construct
  source 1..75: mol_type = other DNA
gcgggaaacttgccaccagaccacggcagcaaagacatagaaaacttattatttggttctattatttctactaga

SEQ ID NO: 876807 - DNA, 75 bp, synthetic construct
  source 1..75: mol_type = other DNA
gccgaattgaccggtctggaagcgggtacgcccgttgtcggcggtctgtttgatgtggtttccaccgcgctctgc

SEQ ID NO: 876808 - DNA, 75 bp, synthetic construct
  source 1..75: mol_type = other DNA
cctgctgccggatatgaccgcccatcagctttaccaacaaaaataccaacgctatcagcatctcattgccgcact

SEQ ID NO: 876809 - DNA, 75 bp, synthetic construct
  source 1..75: mol_type = other DNA
gaatctacagtctggtgagttttttgtagtaagtgcgcatcgtgaagagaatgttgattctccaaaacagctcgt

SEQ ID NO: 876810 - DNA, 75 bp, synthetic construct
  source 1..75: mol_type = other DNA
gatgatctaggtattcgtacgcctgatgtttttttagaatgtgctgggagcagtgctgctgaaactatggcacaa

SEQ ID NO: 876811 - DNA, 75 bp, synthetic construct
  source 1..75: mol_type = other DNA
tgccgtaagtgggcctatggtagcaaaccctggaacagtaagaagaggagatacacccaaacctataggaagtca

SEQ ID NO: 876812 - DNA, 75 bp, synthetic construct
  source 1..75: mol_type = other DNA
ttttgcctcccgcccaactcacaaaccttaatgagttgggttatttaaccatgacgccggtgcaggccgccgcgc

SEQ ID NO: 876813 - DNA, 75 bp, synthetic construct
  source 1..75: mol_type = other DNA
aagatgagccggttacccaggcgcgattacagtcttacttcgctcaggaggggtataccgtttccgttacggcga

SEQ ID NO: 876814 - DNA, 75 bp, synthetic construct
  source 1..75: mol_type = other DNA
ttaacaaagcgacgtgatagggcaggggccgcagctcttgaagaagctgtcctgagagcgctgagagcgcccatc

SEQ ID NO: 876815 - DNA, 75 bp, synthetic construct
  source 1..75: mol_type = other DNA
agccgaagccttggcgcgaagcgagaaacttgaagccgacgataggaagcgcaatgaactcgaagagctgatgct

SEQ ID NO: 876816 - DNA, 75 bp, synthetic construct
  source 1..75: mol_type = other DNA
gctattgttgtcaccgatccacatggaaaacgcgtaaaatttgatggtgcgacagcaacaggtgtttcctattta

SEQ ID NO: 876817 - DNA, 75 bp, synthetic construct
  source 1..75: mol_type = other DNA
attgttgttactgattcgagtggaaaacgggtgaaatttgatggagccactgagaccggggcttcaaatctgatt

SEQ ID NO: 876818 - DNA, 75 bp, synthetic construct
  source 1..75: mol_type = other DNA
gctttggttaaaaaagacacaagtggtggtgatgtagctgaaggtgctttctcagcagttgcgaatttcaacctg

SEQ ID NO: 876819 - DNA, 75 bp, synthetic construct
  source 1..75: mol_type = other DNA
tgttttgtctggtggggttgcgttacgaccaatgtccattgaagactttatttatatgaaagatgctgtagataa

SEQ ID NO: 876820 - DNA, 75 bp, synthetic construct
  source 1..75: mol_type = other DNA
tgttcgccagcacgaaggagcagtttgaagatgatccgattacaggcgaacgtcgcgcgcaaccggtgtggaatg

SEQ ID NO: 876821 - DNA, 75 bp, synthetic construct
  source 1..75: mol_type = other DNA
gtttgcgatgattctagttattatatttatagtattatattcgctgaaatcgaaataaaatgcatttgtattgag

SEQ ID NO: 876822 - DNA, 75 bp, synthetic construct
  source 1..75: mol_type = other DNA
atattaatatcgtttcgagtttcgagaaaatttgcttcaaatacaatttgcatatgtaaaaatattactaccctg

SEQ ID NO: 876823 - DNA, 75 bp, synthetic construct
  source 1..75: mol_type = other DNA
gattacgctcaatatattcatatgcatgggtaaataaagaacccacaattgctttcgagacatgtattggtcgag

SEQ ID NO: 876824 - DNA, 75 bp, synthetic construct
  source 1..75: mol_type = other DNA
caatggcgtgcttgctgtggctgtgtttccgaacggagagtatgactcaacgcagatagcgcaaaccgtaaagcc

SEQ ID NO: 876825 - DNA, 75 bp, synthetic construct
  source 1..75: mol_type = other DNA
aaataccaacgctatcaacatctcattgccgcacttcagggttatcacgcccgcatcaaggagcacacattatga

SEQ ID NO: 876826 - DNA, 75 bp, synthetic construct
  source 1..75: mol_type = other DNA
cggtgttcactggccgctggacatgctcggtggattgttggcaggaatgattggttgccttagcgcccagattat

SEQ ID NO: 876827 - DNA, 75 bp, synthetic construct
  source 1..75: mol_type = other DNA
ctggcaagctgtgggatccaggctctaccagcggctgcaattgtggtatcgcatctgtttcgccttaccaatacg

SEQ ID NO: 876828 - DNA, 75 bp, synthetic construct
  source 1..75: mol_type = other DNA
cctgcatcatgcagcagatgactctttcccgagcgatcatggcacggtgatatttacctttgcgctggcattttt

SEQ ID NO: 876829 - DNA, 75 bp, synthetic construct
  source 1..75: mol_type = other DNA
gcatctggtcactgttgaccaaagactggatgacgtagaaaacgatgtctctggcattaagagtgattacgtatc

SEQ ID NO: 876830 - DNA, 75 bp, synthetic construct
  source 1..75: mol_type = other DNA
ctgcgtagcgatgttgattacttgctggatgaggttattgatattcaggcgcatctggtcactgttgaccaaaga

SEQ ID NO: 876831 - DNA, 75 bp, synthetic construct
  source 1..75: mol_type = other DNA
gaggccggacagggcgcttatgatgcacaggtcaggaacgatgagcaggatgtcacccttgcagaccatgaatcc

SEQ ID NO: 876832 - DNA, 75 bp, synthetic construct
  source 1..75: mol_type = other DNA
ccgatatgctgccagaatttggtggtgatactgcatacagcgatgacttcttcgttggtcgtgttggcggcgttg

SEQ ID NO: 876833 - DNA, 75 bp, synthetic construct
  source 1..75: mol_type = other DNA
tcactccccctgaattaccccgccgggaaatgaatcaaccgaaaaagtcagaagaaagtccacagccggtttttg

SEQ ID NO: 876834 - DNA, 75 bp, synthetic construct
  source 1..75: mol_type = other DNA
cgccagctacgccagcttgatgccctgtggccggataatcctcaggtcagggcgctgaacgtgcagtggcgtaaa

SEQ ID NO: 876835 - DNA, 75 bp, synthetic construct
  source 1..75: mol_type = other DNA
aaatcgctatcgcgctggcggtcagcctgtttgtgtcctggacgatgggacatctttttccgcacgaccgaccct

SEQ ID NO: 876836 - DNA, 75 bp, synthetic construct
  source 1..75: mol_type = other DNA
acttcggccgcaatagctgtgcctggcttctttctgatgtgctctggtgggttcgtaatccgcctgtagtagaga

SEQ ID NO: 876837 - DNA, 75 bp, synthetic construct
  source 1..75: mol_type = other DNA
ttattactcacgatgacacggttttgttattaagaggaaccaggaacctgttaaaagttagtacgaccaagaacc

SEQ ID NO: 876838 - DNA, 75 bp, synthetic construct
  source 1..75: mol_type = other DNA
catcatattcagttgatggaattcaggttgttggagcaagaaataccggatggactgcagccacaggtacacctc

SEQ ID NO: 876839 - DNA, 75 bp, synthetic construct
  source 1..75: mol_type = other DNA
atcggtgaaatcaatcacgccctgccgcctgttgttggatctgccgaaatctgcggggagatcaccgctcagaca

SEQ ID NO: 876840 - DNA, 75 bp, synthetic construct
  source 1..75: mol_type = other DNA
gtacgcccattgttggcggcctgtttgatgtggtttccaccgcactctgcgccgggatcgaagacgaatttaccc

SEQ ID NO: 876841 - DNA, 75 bp, synthetic construct
  source 1..75: mol_type = other DNA
gagatgaccagcggtttctacgggatgcaggccattcacacccgcgcgcacctgttgcaggccatctatgaaggg

SEQ ID NO: 876842 - DNA, 75 bp, synthetic construct
  source 1..75: mol_type = other DNA
tgtttgtaaaagatgttccgcagggtgctgatctactgaaagccgggctgtatgaccgcgaaggccgggaggcag

SEQ ID NO: 876843 - DNA, 75 bp, synthetic construct
  source 1..75: mol_type = other DNA
atcggtatctccgcacagggaaagggcttgtttttgctggataaaaacgacaagccgctcgggaatgctattttg

SEQ ID NO: 876844 - DNA, 75 bp, synthetic construct
  source 1..75: mol_type = other DNA
tgcgcaccctgctgccggatatgaccgcccatcagctttaccaacaaaaatatcaacgttatcagcatctcattg

SEQ ID NO: 876845 - DNA, 75 bp, synthetic construct
  source 1..75: mol_type = other DNA
aaacattgttaggtgccgatgacaaagcaggtattgctgaaatcatgaccgcgctggcggtattgcaacaaaaaa

SEQ ID NO: 876846 - DNA, 75 bp, synthetic construct
  source 1..75: mol_type = other DNA
cttctccgtaccgctggaaacagccagtatgatgggaatggttgtaacgctattgattcggctggcggctattcg

SEQ ID NO: 876847 - DNA, 75 bp, synthetic construct
  source 1..75: mol_type = other DNA
acgttggcaccattcttcgacaccgttaacaacaagatggttgtgttcaacgagaacaaaaccttgttcttcaag

SEQ ID NO: 876848 - DNA, 75 bp, synthetic construct
  source 1..75: mol_type = other DNA
cctgttgcaggccatttatgaaggcgtagtgttcagccatatgacccatctcaaccggatgcgcgaacgttttac

SEQ ID NO: 876849 - DNA, 75 bp, synthetic construct
  source 1..75: mol_type = other DNA
cgatgtgcatacccttcgcgtcactggtggccctgcgcattctgatgtctggatgcaaatgctggcagatgtcag

SEQ ID NO: 876850 - DNA, 75 bp, synthetic construct
  source 1..75: mol_type = other DNA
cgtaaaaccgccgagagctttaatgttgctccttcaacggtacagcgaattaagaaggaagaagaggaggcgtaa

SEQ ID NO: 876851 - DNA, 75 bp, synthetic construct
  source 1..75: mol_type = other DNA
ggagacagccggtagccgtacggaatatgtccatgatgcggcagaccagctactggaaatccgccgccggaggcc

SEQ ID NO: 876852 - DNA, 75 bp, synthetic construct
  source 1..75: mol_type = other DNA
gcagggcggcaaatggcgctatgtgtatgaccggcaggggcatatcacggagacgcacgacccgctgggacgggt

SEQ ID NO: 876853 - DNA, 75 bp, synthetic construct
  source 1..75: mol_type = other DNA
gggccactttccgctggactggcagcgcgtgtacagcagtcgtgacgaccgcacggaagggatgttcgggcaggg

SEQ ID NO: 876854 - DNA, 75 bp, synthetic construct
  source 1..75: mol_type = other DNA
tcgctgaccattgccgacagccttaagtttggtaaagcggtgctgaataagctcggtaaaatcaacaagctgcat

SEQ ID NO: 876855 - DNA, 75 bp, synthetic construct
  source 1..75: mol_type = other DNA
ctgcccgcatgatactctccctggacagggcccggatttgtgaagccctgctcaacgaccgtcagctgcagccca

SEQ ID NO: 876856 - DNA, 75 bp, synthetic construct
  source 1..75: mol_type = other DNA
tccccgtgcagtctccctgcgccctgctgccgctgaggcgctcattgcaggaagaatattaccggcactctgtct

SEQ ID NO: 876857 - DNA, 75 bp, synthetic construct
  source 1..75: mol_type = other DNA
actgacgggttttcgcccggagggcgatatccggttcaccctgcccgcacatgaaggacgccttctgttgcgcgc

SEQ ID NO: 876858 - DNA, 75 bp, synthetic construct
  source 1..75: mol_type = other DNA
cgccgataatatagaaggagctaatcagctaggtattaccggcattctggtgaaagataaaaccaccattccgga

SEQ ID NO: 876859 - DNA, 75 bp, synthetic construct
  source 1..75: mol_type = other DNA
atgtgattgtcgatatcgacttcaaccgtgtgctgggaacgtggagcgatttaacgcgtataccgctggctacgc

SEQ ID NO: 876860 - DNA, 75 bp, synthetic construct
  source 1..75: mol_type = other DNA
atgaccctaaaggcacagggcatggttctttgcctcatataaatattaaacgttctgatgggacaatggtgagga

SEQ ID NO: 876861 - DNA, 75 bp, synthetic construct
  source 1..75: mol_type = other DNA
gcggtggaaaaggagggccggagcggaacgcagagttaccgttatgatgcggaacaccggatggtggaagtgacg

SEQ ID NO: 876862 - DNA, 75 bp, synthetic construct
  source 1..75: mol_type = other DNA
gaagatgtaaacctgaactcggtgctcaaggggatggctgcgcaaatccgcgctgacgacccgttcatcaagtcg

SEQ ID NO: 876863 - DNA, 75 bp, synthetic construct
  source 1..75: mol_type = other DNA
ccggacagccaccacctttccggacggcagaacgcagcgccatctgtactacggcagcggccatctccagcagat

SEQ ID NO: 876864 - DNA, 75 bp, synthetic construct
  source 1..75: mol_type = other DNA
agataaagaaaagaatcctcatggagtttggagaagcaaggatgatctgaaatatgctggagaacaagctgccac

SEQ ID NO: 876865 - DNA, 75 bp, synthetic construct
  source 1..75: mol_type = other DNA
cggctcacggcaaaggagacagccgatagccatacggaatacgtccatgatgcggcagaccagctactggaaatc

SEQ ID NO: 876866 - DNA, 75 bp, synthetic construct
  source 1..75: mol_type = other DNA
tcaggttcagttggaaaataaccgtctggagcaggagttggttctactggcacaacgaattgacgttgccgaaga

SEQ ID NO: 876867 - DNA, 75 bp, synthetic construct
  source 1..75: mol_type = other DNA
gcactacaatttgcacaggtactatgatccggatgtcgggcggttcatggtaacggatccgatcagtttagctgg

SEQ ID NO: 876868 - DNA, 75 bp, synthetic construct
  source 1..75: mol_type = other DNA
atgatgacttcgatttcagtctgccgggccactttccgctggactggcagcgcgtgtacagcagtcgtgacgaac

SEQ ID NO: 876869 - DNA, 75 bp, synthetic construct
  source 1..75: mol_type = other DNA
tacgggtatgacgacagcggtcacctgacggaggtgatactggcggacggccgcacggtgaattaccagtcagac

SEQ ID NO: 876870 - DNA, 75 bp, synthetic construct
  source 1..75: mol_type = other DNA
actgtctgaatctgtactacgacgaccggggccgcattgtggaaatcagcggcgaacagcagcgtccgtgcatcc

SEQ ID NO: 876871 - DNA, 75 bp, synthetic construct
  source 1..75: mol_type = other DNA
gcagcggggcacgctgtacctgcgaggccagggtggtgaatgagccggggaacggggcgtttgtgtcaccggatg

SEQ ID NO: 876872 - DNA, 75 bp, synthetic construct
  source 1..75: mol_type = other DNA
gcgttcgggtacgatgcttacgggcgtctggtcacgctcacgaacgagaacggagaaagctaccggttccgccat

SEQ ID NO: 876873 - DNA, 75 bp, synthetic construct
  source 1..75: mol_type = other DNA
cgacccgctgcagcagaacacccggtatcagtatgaccgccacggccaggtggtgcagataaccgatgcccgtgg

SEQ ID NO: 876874 - DNA, 75 bp, synthetic construct
  source 1..75: mol_type = other DNA
gcattacaatctgcacaggtactatgatccggatgtcgggcggttcatggtaacggacccgatagggctggcggg

SEQ ID NO: 876875 - DNA, 75 bp, synthetic construct
  source 1..75: mol_type = other DNA
gtaatggacataaaggtgttgatgctgaccgcgtaaattatatcgaagttggtacctggtactacttcaataaga

SEQ ID NO: 876876 - DNA, 75 bp, synthetic construct
  source 1..75: mol_type = other DNA
tttatcaatctgaagtccgatccacaaaaatctctgttaaatcagcaaatatatccgagcattaagcctgggtat

SEQ ID NO: 876877 - DNA, 75 bp, synthetic construct
  source 1..75: mol_type = other DNA
gtcgtcggagctgcgcggcgtcccctttatcaatctgaagtccgatccacaaaaatccctgttaaatcagcaaat

SEQ ID NO: 876878 - DNA, 75 bp, synthetic construct
  source 1..75: mol_type = other DNA
ctgaccacctatattgaccgccagatagccttgatgaaaaaaaacctgggccagcaccgggtactttcgcgggga

SEQ ID NO: 876879 - DNA, 75 bp, synthetic construct
  source 1..75: mol_type = other DNA
gcggcggtcctgcatggaatggcgatctcgatcggcaaatatgtattgatacgattcttgaagcccatcgttgcg

SEQ ID NO: 876880 - DNA, 75 bp, synthetic construct
  source 1..75: mol_type = other DNA
gcaccatatgaggtaggttatctattctctgttttttgccttgttctttcccttctttacctatggatgagagca

SEQ ID NO: 876881 - DNA, 75 bp, synthetic construct
  source 1..75: mol_type = other DNA
cattatcactggtgatgagtggttgccactggtcaatgccgcgacgcataacaacaaccccgaattacatgtttt

SEQ ID NO: 876882 - DNA, 75 bp, synthetic construct
  source 1..75: mol_type = other DNA
acagctatcgttgttgtcgatccgcatggcaaacgtgtgaagtttgatggggcgaccactaccggtccttcaaat

SEQ ID NO: 876883 - DNA, 75 bp, synthetic construct
  source 1..75: mol_type = other DNA
atgtggtattgaaacgcagtctgcaagacaggaaattgattttggccagatctctaaatccttcctgcaggaggg

SEQ ID NO: 876884 - DNA, 75 bp, synthetic construct
  source 1..75: mol_type = other DNA
gaatttggcgtaaccgcggctatcgatctgttgccgccccacagtattccccgaacatcctccggcaagcctgcc

SEQ ID NO: 876885 - DNA, 75 bp, synthetic construct
  source 1..75: mol_type = other DNA
gcgcggtggtccattgcgccgggcaagtgcgcgggcacaaagaagagatttttacccgctgtaacgttgacggca

SEQ ID NO: 876886 - DNA, 75 bp, synthetic construct
  source 1..75: mol_type = other DNA
taccgcccaggaaaaaatcattttgcagatccagtgtcggatcagcgacgaagaacgtcgcgggcagcttatcca

SEQ ID NO: 876887 - DNA, 75 bp, synthetic construct
  source 1..75: mol_type = other DNA
atggaattttctccccctctacagcgcgcgacgctaattcagcgttacaaacgttttttagccgatgtgatcaca

SEQ ID NO: 876888 - DNA, 75 bp, synthetic construct
  source 1..75: mol_type = other DNA
cttcaataagaacatgaacgtctacacagcatacaaatttaacctgctggataaagacgatgcagcgattaccga

SEQ ID NO: 876889 - DNA, 75 bp, synthetic construct
  source 1..75: mol_type = other DNA
ctgatttctttggtctggtcgatggactgaattttgcaattcagtatcaaggcaagaacagcaatcgtggcgtta

SEQ ID NO: 876890 - DNA, 75 bp, synthetic construct
  source 1..75: mol_type = other DNA
gaaattagcgacgaagcgttcgcagaggcgctgtgtcatgagatggccctgccgctaagctatgagcagttctcc

SEQ ID NO: 876891 - DNA, 75 bp, synthetic construct
  source 1..75: mol_type = other DNA
aattccgacgacggtgatgttgtgaacaaaacacaaaacttcgaagctgttctgcaatatcagttcgacttcggt

SEQ ID NO: 876892 - DNA, 75 bp, synthetic construct
  source 1..75: mol_type = other DNA
gatactgaagagaatgtgtttattgctgaaggtggcaatgaatatgacggcgcgaaatgctgggttgtctttcag

SEQ ID NO: 876893 - DNA, 75 bp, synthetic construct
  source 1..75: mol_type = other DNA
aacagcgaaaacgaggatacctcctatgctcgtttcggcgttaaaggtgaaactcagattaccagcgaactgact

SEQ ID NO: 876894 - DNA, 75 bp, synthetic construct
  source 1..75: mol_type = other DNA
agcggctgaaggccagcgtgcggttatcttttttgtccgtgctgcattcagccattacacggttttcacccgcgc

SEQ ID NO: 876895 - DNA, 75 bp, synthetic construct
  source 1..75: mol_type = other DNA
ttgaagtgaaatcggttacgttagcggagaatgaacagggattctttcccgatgcggtcactgaaagaggtcaga

SEQ ID NO: 876896 - DNA, 75 bp, synthetic construct
  source 1..75: mol_type = other DNA
tatccttgatggggaaatttcggagctgtcaggctatagctcgctgaaaagcgaagtaaaatacggcgccgaacg

SEQ ID NO: 876897 - DNA, 75 bp, synthetic construct
  source 1..75: mol_type = other DNA
agtatggtaggaatggttgtgacactattgattcggctggcagctatccgttggcatctcagactgccggcgttt

SEQ ID NO: 876898 - DNA, 75 bp, synthetic construct
  source 1..75: mol_type = other DNA
gaggtttgcaaactacctcagggatatagtgatctagattctattaaggaacttgtacaaacttatgataaaaga

SEQ ID NO: 876899 - DNA, 75 bp, synthetic construct
  source 1..75: mol_type = other DNA
gcatttatttgcgtcaatacactttgggcaaacagattgacgaaagaggctatccttaatgggaatatttcggag

SEQ ID NO: 876900 - DNA, 75 bp, synthetic construct
  source 1..75: mol_type = other DNA
gtgaagaaaacacgctgtttattcagaaatgcgaaaacaatttcatctggcgttttatcgccctgagtacggcac

SEQ ID NO: 876901 - DNA, 75 bp, synthetic construct
  source 1..75: mol_type = other DNA
caccagcgaacaggaagcacgccagcaatctcctgatggctgcgtgatggtattcgctgcccgtattcgccagga

SEQ ID NO: 876902 - DNA, 75 bp, synthetic construct
  source 1..75: mol_type = other DNA
atggctggaacacagcatacccaaactcaccctaaatttatatacacctttctggcactacaccacgaccgcatg

SEQ ID NO: 876903 - DNA, 75 bp, synthetic construct
  source 1..75: mol_type = other DNA
gacagcgtaatcaatactcaaacggtgcggccaggaggaagcagacgcgaaaccacaggtacacagggtaatcag

SEQ ID NO: 876904 - DNA, 75 bp, synthetic construct
  source 1..75: mol_type = other DNA
ggaagcacgccagcaatctcctgatggctgcgtgatggtattcgccgcccgtattcgccagggagaaattttgtg

SEQ ID NO: 876905 - DNA, 75 bp, synthetic construct
  source 1..75: mol_type = other DNA
ggaagcgcgccagcaatctcctgatggctgcgtgatggtattcgccgcccgtattcgccaggaggtgcaccatgt

SEQ ID NO: 876906 - DNA, 75 bp, synthetic construct
  source 1..75: mol_type = other DNA
agggctggtatcagcgtttacgtgcgatgcccgcgttaattattccgctaacacacaatgcgcttaacgatctgg

SEQ ID NO: 876907 - DNA, 75 bp, synthetic construct
  source 1..75: mol_type = other DNA
ggagtaaatctcggctttatggatgctgcagagctgattgctgaactgaaacggttgcatcgtcaggggaaagac

SEQ ID NO: 876908 - DNA, 75 bp, synthetic construct
  source 1..75: mol_type = other DNA
atcgggcagtacatttacttgcgtcgctatgaacgcagccgcaagcacagtgcggcgctgatgctggcaagtatg

SEQ ID NO: 876909 - DNA, 75 bp, synthetic construct
  source 1..75: mol_type = other DNA
ccgcgctttgtttgcttctcgcctgccgccgggcgtcgcttatctgttcgccgggccgttgttggtcgttgagca

SEQ ID NO: 876910 - DNA, 75 bp, synthetic construct
  source 1..75: mol_type = other DNA
acagtaaattacaaaaagtgtctcgttacaccatgatattgctgatactggcagaacccggagtgtggctatggt

SEQ ID NO: 876911 - DNA, 75 bp, synthetic construct
  source 1..75: mol_type = other DNA
ctggctaacagaatggctaagcggcacgccgcgttcgccggagcgttggacgcatgctattacgctctggttgcg

SEQ ID NO: 876912 - DNA, 75 bp, synthetic construct
  source 1..75: mol_type = other DNA
catagtaccagtacttgatgcttttggaattattgtgatccaagttccattaggacaacttttgcaagtgctatt

SEQ ID NO: 876913 - DNA, 75 bp, synthetic construct
  source 1..75: mol_type = other DNA
cactggtgaaactgccgggcattggtaaaaaaaccgccgagcgtttaattgtcgaaatgaaagaccgatttaaag

SEQ ID NO: 876914 - DNA, 75 bp, synthetic construct
  source 1..75: mol_type = other DNA
cactggtgaaattacctggcataggtaaaaaaactgccgaacggctgattgttgaaatgaaagatcgctttaaag

SEQ ID NO: 876915 - DNA, 75 bp, synthetic construct
  source 1..75: mol_type = other DNA
cctgccagcccggcgaccgacgatgctgaacaggaagcggttgccgcgctggtggcgctgggctataaaccacaa

SEQ ID NO: 876916 - DNA, 75 bp, synthetic construct
  source 1..75: mol_type = other DNA
agtacgcagagtactgcttcaggcggcggcggagcatccaagggtgatgcacgaacccatgccggaagtcttctt

SEQ ID NO: 876917 - DNA, 75 bp, synthetic construct
  source 1..75: mol_type = other DNA
ttgtctcgggtttgatcatcctgttcgaacgtccggtgcgcattggcgacacagtaaccatcggcactttctccg

SEQ ID NO: 876918 - DNA, 75 bp, synthetic construct
  source 1..75: mol_type = other DNA
cgtgcaaaatgcgatgtataccgcctcgcagcagttgcaacaaattcgcagccgtctggatggcactgaggttgg

SEQ ID NO: 876919 - DNA, 75 bp, synthetic construct
  source 1..75: mol_type = other DNA
attttttagatagagaatatgttggcttttttacagaaagtgcaaaggaagatctcacagatgtgattaatctcg

SEQ ID NO: 876920 - DNA, 75 bp, synthetic construct
  source 1..75: mol_type = other DNA
aaggataagctgcatttgtcagtgatgtccgaagttaaccgtcaggttatgcgtctgcaaacagagatggcttaa

SEQ ID NO: 876921 - DNA, 75 bp, synthetic construct
  source 1..75: mol_type = other DNA
aaatgtcaataaaatcgattgcgatggcgtgatcacaaatattcctgtcagtacgtaccaaaaaatgatttacgc

SEQ ID NO: 876922 - DNA, 75 bp, synthetic construct
  source 1..75: mol_type = other DNA
catctttctggcggcattttttcatggcgtcaggctgaagccgcagggattgcccggaaacaagaagtaacgagt

SEQ ID NO: 876923 - DNA, 75 bp, synthetic construct
  source 1..75: mol_type = other DNA
atgtctgaaaatcagaattacgcaaatcttttacataaagaatatgttggtttttttacagaggatgcaaaagaa

SEQ ID NO: 876924 - DNA, 75 bp, synthetic construct
  source 1..75: mol_type = other DNA
actgtacaaagcgatgaaatggaatcattaactaacattctttatcgggaattacgagcgattaaatcaggaatg

SEQ ID NO: 876925 - DNA, 75 bp, synthetic construct
  source 1..75: mol_type = other DNA
ctttatgcgcgacggtccgctggacatgcgtatggatccgacacgcggccagtctgccgccgagtggctacaaag

SEQ ID NO: 876926 - DNA, 75 bp, synthetic construct
  source 1..75: mol_type = other DNA
gctgcacccgctccggcaccggtgaagaaaagcgagccgatgctcaacgacacggaaagttattttaataccgcg

SEQ ID NO: 876927 - DNA, 75 bp, synthetic construct
  source 1..75: mol_type = other DNA
cggccaacaactgaacgttcccggcatcagtggtccggttgctgcgtacagcgtcccggcaaacattggcgaact

SEQ ID NO: 876928 - DNA, 75 bp, synthetic construct
  source 1..75: mol_type = other DNA
atcagtggtccggttgctgcgtacagcgtcccggcaaacattggcgaactgaccctgacgctgaccagcgaagtg

SEQ ID NO: 876929 - DNA, 75 bp, synthetic construct
  source 1..75: mol_type = other DNA
aaaagcacgaattaaaaaaagaagcggcagtacagggattaaaagataaagaaataaaaaccaaacgatatgtgg

SEQ ID NO: 876930 - DNA, 75 bp, synthetic construct
  source 1..75: mol_type = other DNA
taatactatggattcagaacaatatcaatatatgaagcaatgtataaagaacgcaaatgcactggtaaatcttaa

SEQ ID NO: 876931 - DNA, 75 bp, synthetic construct
  source 1..75: mol_type = other DNA
ccctctgtttatcagcagggttgctggcaagcgcgcctggaatcagccttgccgatgttaactacgtaccgcaaa

SEQ ID NO: 876932 - DNA, 75 bp, synthetic construct
  source 1..75: mol_type = other DNA
ccggctcaacgccaggcaattgccaactcttttgcccgcgccttacagtcctctatcaacgaagacaaagcgcac

SEQ ID NO: 876933 - DNA, 75 bp, synthetic construct
  source 1..75: mol_type = other DNA
gtgtggagcgtcttgaaaaccggatgaccgaaatggaaacccgctacgccagcatccctggcacagaagatgtac

SEQ ID NO: 876934 - DNA, 75 bp, synthetic construct
  source 1..75: mol_type = other DNA
aggtgccagatggactattgatattaaggggaataaacaactttctgacattgcatataaatacaaagatgtgga

SEQ ID NO: 876935 - DNA, 75 bp, synthetic construct
  source 1..75: mol_type = other DNA
atgaaacggaaaatctggcgagcattttgctcttattacgcccagtatcccttcgagaaagacgatgaagttatc

SEQ ID NO: 876936 - DNA, 75 bp, synthetic construct
  source 1..75: mol_type = other DNA
ggtcacgctacgctgggcggcccgaataccacctatgtgtttaaggctggtgaagaagcggttccgctggaagct

SEQ ID NO: 876937 - DNA, 75 bp, synthetic construct
  source 1..75: mol_type = other DNA
tggctggagcgcaggcgctaaccttgcttgcccaaccattcgtaccaccaacgatatgccgattgtcgatccgca

SEQ ID NO: 876938 - DNA, 75 bp, synthetic construct
  source 1..75: mol_type = other DNA
tgtgaagcaaataacgatgattatcttgcctatcttcgcatacataatgagataacgatcacgtcaggtttagcc

SEQ ID NO: 876939 - DNA, 75 bp, synthetic construct
  source 1..75: mol_type = other DNA
ttcgaactgacagatatgctggtacaacgtggttatcagaatatcggcctgctgtgcgctaaccaggaacagtgg

SEQ ID NO: 876940 - DNA, 75 bp, synthetic construct
  source 1..75: mol_type = other DNA
ttcgagctgacggatatgctggtacaacgtggttatcagaatatcggtttgctatgcgctaaccaggaacagtgg

SEQ ID NO: 876941 - DNA, 75 bp, synthetic construct
  source 1..75: mol_type = other DNA
ctctatgactacttccgcagtcagcatatttacccgcaacgtacgcgttcccgcgttagcgccaggatgccggat

SEQ ID NO: 876942 - DNA, 75 bp, synthetic construct
  source 1..75: mol_type = other DNA
tcgatgatgctgaacgcggtttttcctttatgcgcgatggcccgctggacatgcgtatggatccgacgcgcggtc

SEQ ID NO: 876943 - DNA, 75 bp, synthetic construct
  source 1..75: mol_type = other DNA
ggagatagagcaggcgctaaaaagctcgctcaatgtgctggccccggggggcggctttcgatcatcagcttccac

SEQ ID NO: 876944 - DNA, 75 bp, synthetic construct
  source 1..75: mol_type = other DNA
gggccaggtagcccctgacgcccgtgaaaatgtcgcgccaaataacgtcgacaataacggggtaaataccggttc

SEQ ID NO: 876945 - DNA, 75 bp, synthetic construct
  source 1..75: mol_type = other DNA
aattcgtgtttgtgatattaacgatggtgaagtagatttaaatcatcttcgtaaaatttcaaaggaaatagattt

SEQ ID NO: 876946 - DNA, 75 bp, synthetic construct
  source 1..75: mol_type = other DNA
taatcagcggggaaaacagcgccgccgcgttgctggaaaaaatcaaagctgaacgcgcagccagcgggggtaaaa

SEQ ID NO: 876947 - DNA, 75 bp, synthetic construct
  source 1..75: mol_type = other DNA
tttgaggtgtgcctgctggatggtgaggttaagggaccggttcctgccgaatgccagcgcattaaacattctgaa

SEQ ID NO: 876948 - DNA, 75 bp, synthetic construct
  source 1..75: mol_type = other DNA
gatcaagcaagtggcgcttgaccaacagcaacggcctattgagtacagcatcagccactgtcgcagcgatctata

SEQ ID NO: 876949 - DNA, 75 bp, synthetic construct
  source 1..75: mol_type = other DNA
tggatcaacgaagcggcattccgtcaggaaggcgtagcggtattgttggcggtggtcatcgcctgctggctggat

SEQ ID NO: 876950 - DNA, 75 bp, synthetic construct
  source 1..75: mol_type = other DNA
tcgccgcgtcgagcaactcttcgcctacgccgactccatagaaaaacaggtcaacaacgccttagcccgcgtcaa

SEQ ID NO: 876951 - DNA, 75 bp, synthetic construct
  source 1..75: mol_type = other DNA
aaaattaccgtcacagatggcatcagaccctgatgattccgataatcagtcttatgactcttttccgccagagcc

SEQ ID NO: 876952 - DNA, 75 bp, synthetic construct
  source 1..75: mol_type = other DNA
cggccataaggtggcggggggttttaatacttctgcgctgggtaatgctctttctacggtgggcggctcttttgg

SEQ ID NO: 876953 - DNA, 75 bp, synthetic construct
  source 1..75: mol_type = other DNA
gggccgccgctaatgggcaaaatacacgatgctaacggtgactggtccacgccactgattgttgtcgcaattctt

SEQ ID NO: 876954 - DNA, 75 bp, synthetic construct
  source 1..75: mol_type = other DNA
gaccagatgcgtgtactgatggccttgctcgcagagctggattacgagaactacatccaggtcgcgcagatagat

SEQ ID NO: 876955 - DNA, 75 bp, synthetic construct
  source 1..75: mol_type = other DNA
ttaaggatggtcagacgttgttattggggggcttatcgattcatcgttcagcaatgccgagcgttcagttccagt

SEQ ID NO: 876956 - DNA, 75 bp, synthetic construct
  source 1..75: mol_type = other DNA
accgcgcattcttactcagtccggtcagactggttatatttccgtaggtaagaatgtgccgtttatcacaggaaa

SEQ ID NO: 876957 - DNA, 75 bp, synthetic construct
  source 1..75: mol_type = other DNA
tacatcgagaacaggatgtaccgcacgccgcgtaacctcaaaaaactgaacgtcattgatgagggatggcgtctg

SEQ ID NO: 876958 - DNA, 75 bp, synthetic construct
  source 1..75: mol_type = other DNA
aggcctccagtgctgcccgcgcggcatggggtaactcctcctacaaaattatcctcaaacagagtgcgaaggagt

SEQ ID NO: 876959 - DNA, 75 bp, synthetic construct
  source 1..75: mol_type = other DNA
accgtaaccagctggcgtttatcgatattttcttccggggaatgaataacaccaactacaacatggcggtctgtg

SEQ ID NO: 876960 - DNA, 75 bp, synthetic construct
  source 1..75: mol_type = other DNA
gttttggttccggagcaacaatgatacttggactaacgtttatcggactgcgagcaagctctgcgcatcaggctg

SEQ ID NO: 876961 - DNA, 75 bp, synthetic construct
  source 1..75: mol_type = other DNA
ctgctgctcccggtttgctgatcccacttttcttacatcatgtgaaagatcagcgcggtattgccgctctggtcg

SEQ ID NO: 876962 - DNA, 75 bp, synthetic construct
  source 1..75: mol_type = other DNA
gttgtttctcggtatcaactcactggtctattacgtgattatcggctggcttccggcgatcctcatcagccacgg

SEQ ID NO: 876963 - DNA, 75 bp, synthetic construct
  source 1..75: mol_type = other DNA
aaggcgtttatcgcggtgcgggtgctgggcctgcggcagggcggtatcagtgaagaaacacaaaatgacagctgt

SEQ ID NO: 876964 - DNA, 75 bp, synthetic construct
  source 1..75: mol_type = other DNA
agcacatgttcacgactggcagggcaaaccgctggattacactccgcgcgaatccttcctgaatcctggattccg

SEQ ID NO: 876965 - DNA, 75 bp, synthetic construct
  source 1..75: mol_type = other DNA
cacggaatgcaggcgatgccattatgcaggtctacgacgggacgaaaccgatggacgtcgtcagcaaagcggaca

SEQ ID NO: 876966 - DNA, 75 bp, synthetic construct
  source 1..75: mol_type = other DNA
tgctattaccgtcctcggttatctgttttatatcggtgatcggaccaaaaccgatcttccttatctggaaaatac

SEQ ID NO: 876967 - DNA, 75 bp, synthetic construct
  source 1..75: mol_type = other DNA
agcgcacgttcacgactggcagggtaaaccgctggattataccccgcgcgagtcgttcctgaatcctgggttcag

SEQ ID NO: 876968 - DNA, 75 bp, synthetic construct
  source 1..75: mol_type = other DNA
tctgcctggtggcggaagggcaggcgcagctttacccgcgtttcgggccaaccaatatttgggacaccgccgccg

SEQ ID NO: 876969 - DNA, 75 bp, synthetic construct
  source 1..75: mol_type = other DNA
gcggcagaaggcaaagcgtggaaagaagagtgcggcgtgtgcaagcagattcaggtccgcgatgcgcgcccgcca

SEQ ID NO: 876970 - DNA, 75 bp, synthetic construct
  source 1..75: mol_type = other DNA
ccgcctttgcacttaattattcaacccagaatatggggttaccgcgcgaacttttccttaatattggtttgctgg

SEQ ID NO: 876971 - DNA, 75 bp, synthetic construct
  source 1..75: mol_type = other DNA
ggaacgttgagcgcatttcctttctttatggcgcttgaagcacaatctattttctggatagttttcttctccata

SEQ ID NO: 876972 - DNA, 75 bp, synthetic construct
  source 1..75: mol_type = other DNA
cacagaatcgccggctggaagaagcacccggcaagctcttcgaactgccggaagtcctggcaaccgcgggaagcc

SEQ ID NO: 876973 - DNA, 75 bp, synthetic construct
  source 1..75: mol_type = other DNA
acgatagcatgttgcttaatattggtggggcacataacgcatatttcacccgcaatattgtggtactcaccgata

SEQ ID NO: 876974 - DNA, 75 bp, synthetic construct
  source 1..75: mol_type = other DNA
ggaccggtcagggtcgtacaccgaagccaatcgctcaggcgctggcagaaggtaaatctctcgacgatttcctga

SEQ ID NO: 876975 - DNA, 75 bp, synthetic construct
  source 1..75: mol_type = other DNA
gtctggatgatgggcatcgcgacagccttgattggtattcttccttcattctcgaccattgggtggtgggcacct

SEQ ID NO: 876976 - DNA, 75 bp, synthetic construct
  source 1..75: mol_type = other DNA
aaaaactgacccgtcgaaatctggcaaaaacggcggttttgacccgtcagaatctggcggggatccgtcagtaaa

SEQ ID NO: 876977 - DNA, 75 bp, synthetic construct
  source 1..75: mol_type = other DNA
actggaactactcaaagcacagtccgcagtagcaggttgctcaatgattcaggtgttaagcgctaaggttcatca

SEQ ID NO: 876978 - DNA, 75 bp, synthetic construct
  source 1..75: mol_type = other DNA
ggatctcgctttttctcggcgacacgattctgcaactttttggaatatcgattgattcgttccgcatcgcgggtg

SEQ ID NO: 876979 - DNA, 75 bp, synthetic construct
  source 1..75: mol_type = other DNA
atgtgtacgatgcgctggggaggcggacggaaaaacagcacatcagccccgacggtaaaccgtacaaccggacaa

SEQ ID NO: 876980 - DNA, 75 bp, synthetic construct
  source 1..75: mol_type = other DNA
ctggcgaagcagcagatcgccatgtctgccccgtctggatgggttgccactccgcttaactttgccgcaaacctt

SEQ ID NO: 876981 - DNA, 75 bp, synthetic construct
  source 1..75: mol_type = other DNA
ctgaattcaataccccaaacattgaactctcagcagttagccaaaagtactttggcatgagtccagccacggcag

SEQ ID NO: 876982 - DNA, 75 bp, synthetic construct
  source 1..75: mol_type = other DNA
aataccacctataacctgtgggattacggctatggtgcattctggccggaaccgggctgggggctccttactaca

SEQ ID NO: 876983 - DNA, 75 bp, synthetic construct
  source 1..75: mol_type = other DNA
tttggtccgatttgatcaccgtgttcagctatctcgacagcatcaccctgtggcattacaacggcactgaagccg

SEQ ID NO: 876984 - DNA, 75 bp, synthetic construct
  source 1..75: mol_type = other DNA
tgctatggtcgttcagcaaaaaactggcgattttctggctggtatttggcctgtgctggaaagtactggaaaaaa

SEQ ID NO: 876985 - DNA, 75 bp, synthetic construct
  source 1..75: mol_type = other DNA
agtgcatctgcacaacgagaagggcgatgaggtgacggaagtcaaacgcgactacaaaggcgacgatccgacacc

SEQ ID NO: 876986 - DNA, 75 bp, synthetic construct
  source 1..75: mol_type = other DNA
ctccaaatggaacttatacgctaggtactaatgtgacaccatccaaggctgttgatttaatagaggtttggctca

SEQ ID NO: 876987 - DNA, 75 bp, synthetic construct
  source 1..75: mol_type = other DNA
agtcctactccgaaaagttctgattatgcaaaaacaggtaagcaggcgaatttccacgaacgaagaaatgtaaat

SEQ ID NO: 876988 - DNA, 75 bp, synthetic construct
  source 1..75: mol_type = other DNA
tggctggttgttgttcttgttctgtatgtatataaacactatcgacatattatgaccgggaacattccttacccc

SEQ ID NO: 876989 - DNA, 75 bp, synthetic construct
  source 1..75: mol_type = other DNA
cgacgacctggccccgttaatcgatcagcgcgcacagcagatccgcgagagcatgcagatgtcaccggtcgccgg

SEQ ID NO: 876990 - DNA, 75 bp, synthetic construct
  source 1..75: mol_type = other DNA
ggcgtagaccacggctcataagcaatgatcaaccacttactgataatgcactggagataatcggtgaaatgctga

SEQ ID NO: 876991 - DNA, 75 bp, synthetic construct
  source 1..75: mol_type = other DNA
ccgttcaaccacaactggcagaagacgtgaggccatggttaagtgcagaagcacaaaccgtgctggatagttatg

SEQ ID NO: 876992 - DNA, 75 bp, synthetic construct
  source 1..75: mol_type = other DNA
taccgctatttcatgtattaatcctgatgtagaatcagaggttattccatttaaacacttgataataaacttggt

SEQ ID NO: 876993 - DNA, 75 bp, synthetic construct
  source 1..75: mol_type = other DNA
gcgagctggcttccagagtgattataacgaccacatctgccagtggtgattacgcaatgaataactgcgaattca

SEQ ID NO: 876994 - DNA, 75 bp, synthetic construct
  source 1..75: mol_type = other DNA
aaaagttagatgggattacgtgggggaaaaggtcacggaagaatggggactttggttggttgccatctataccga

SEQ ID NO: 876995 - DNA, 75 bp, synthetic construct
  source 1..75: mol_type = other DNA
acacaccgcctcgaggaggccaggaaaagcttcagcgtgccggactccatctgcagtgaatccgcgtccggcatt

SEQ ID NO: 876996 - DNA, 75 bp, synthetic construct
  source 1..75: mol_type = other DNA
ttatcagggtgttgacactaaactaattcttcgttgtaagtgccacggaaagattcacaagaaaggtgatttaca

SEQ ID NO: 876997 - DNA, 75 bp, synthetic construct
  source 1..75: mol_type = other DNA
gacatagaacgagatttatcgcagtggatgaatgcaccgttagctgatttaacaccggaagacttagaactcgat

SEQ ID NO: 876998 - DNA, 75 bp, synthetic construct
  source 1..75: mol_type = other DNA
ccgtattgaatggtgttcatcaggcgggcctgagtaccacgatagaattcattagcgcggaaaccagaccaatga

SEQ ID NO: 876999 - DNA, 75 bp, synthetic construct
  source 1..75: mol_type = other DNA
atgtattggtcatctagtcccgcaaactcaaacgaacaatacgtagtttccctggcaacaggtgatcaaagcgta

SEQ ID NO: 877000 - DNA, 75 bp, synthetic construct
  source 1..75: mol_type = other DNA
gcacgatatatcaggccatccgatcaaagtttctgaagggctggaatttgtgcagtcaggtaccaacgtgcccta

SEQ ID NO: 877001 - DNA, 75 bp, synthetic construct
  source 1..75: mol_type = other DNA
acaggttatcagaaacaagtttgcacagcgccctatgcacttttatctaattcgtgttggcgagaagtttttcaa

SEQ ID NO: 877002 - DNA, 75 bp, synthetic construct
  source 1..75: mol_type = other DNA
gaacatcagtttccgttacaagccggatatcccgcgcgttcttgagaacgtcagctttaacatagcggccggtga

SEQ ID NO: 877003 - DNA, 75 bp, synthetic construct
  source 1..75: mol_type = other DNA
agatggggtaacaccatttggtaattcatatcagttcgaactttttcaactagacaataagaaaataaaaaagaa

SEQ ID NO: 877004 - DNA, 75 bp, synthetic construct
  source 1..75: mol_type = other DNA
ccaactgtctctgctaattcattagcttcaagcggaaaagtggtgggacttactcctttcacaattttgctggaa

SEQ ID NO: 877005 - DNA, 75 bp, synthetic construct
  source 1..75: mol_type = other DNA
tgtgggtcagtcgctttcctggaagttcttccaccaatgatttgcaggggacttttcgtgcatcggtagataatt

SEQ ID NO: 877006 - DNA, 75 bp, synthetic construct
  source 1..75: mol_type = other DNA
tgatgatcattacgttatggttaggtgcccatcttgttattgaggggcagctgaccattggtcagctaattgcct

SEQ ID NO: 877007 - DNA, 75 bp, synthetic construct
  source 1..75: mol_type = other DNA
aagggcgctggtgaacaaccctaaaatactcatttttgatgaagcaaccagtgctctggattatgagtcggagca

SEQ ID NO: 877008 - DNA, 75 bp, synthetic construct
  source 1..75: mol_type = other DNA
atcctcgacgatacctatcagcgattcgttgtaaatcctcccgatgatatttgtctgctgacggtgaactacacc

SEQ ID NO: 877009 - DNA, 75 bp, synthetic construct
  source 1..75: mol_type = other DNA
aacaacccgacgaagattaaatcgctcgaaggcattgatatctgctgggtggaggaagcggaagcggtaacgaag

SEQ ID NO: 877010 - DNA, 75 bp, synthetic construct
  source 1..75: mol_type = other DNA
cggaagcgttctccggcaagaaaatcaccgccacgatgttcaagggcagcgaatcgccattcgatgaagatgcgc

SEQ ID NO: 877011 - DNA, 75 bp, synthetic construct
  source 1..75: mol_type = other DNA
gaatactggcggctgcatcatcttctgctacgcttgcttatgacggtcaaattacttttaatggaaaagttgttg

SEQ ID NO: 877012 - DNA, 75 bp, synthetic construct
  source 1..75: mol_type = other DNA
atttctggtcatgcagtggttatatgaaatgtgctggcatttaagttgtgattatgtcgacgcaggcgggcaacg

SEQ ID NO: 877013 - DNA, 75 bp, synthetic construct
  source 1..75: mol_type = other DNA
ggtggtcatggcgaaggtgaatacgataccggtgatctcgctttctaccattaccattattacgcctttccgctt

SEQ ID NO: 877014 - DNA, 75 bp, synthetic construct
  source 1..75: mol_type = other DNA
ggtatgaataatctgaatgtcgcgcctgcactgagctccaaccatacacgcggtactgcgatagatatgaatatc

SEQ ID NO: 877015 - DNA, 75 bp, synthetic construct
  source 1..75: mol_type = other DNA
attcagcacaggtattggtgggcgtcattttcatggcgtgaattttccggggaatgagcgacctttctcgccgga

SEQ ID NO: 877016 - DNA, 75 bp, synthetic construct
  source 1..75: mol_type = other DNA
tcacgagctggcgggaacggtggtaataacgatgccccgccaacgccgcaggagcgaaagctacagggtaaaggc

SEQ ID NO: 877017 - DNA, 75 bp, synthetic construct
  source 1..75: mol_type = other DNA
agtctgtggcgtgaatattcgcccgtcacgtatgccagaaccgatgcactgttgttctggctgggtattgatttc

SEQ ID NO: 877018 - DNA, 75 bp, synthetic construct
  source 1..75: mol_type = other DNA
cacttgcagatccagaatggttacgacgccagattggtgttgtattgcaggaaaatatactattaaatcgtagta

SEQ ID NO: 877019 - DNA, 75 bp, synthetic construct
  source 1..75: mol_type = other DNA
tctatggatgggagcacatcttgtcatatcgggagagataagcatcgggcagttaatcgcgtttaatatgcttgc

SEQ ID NO: 877020 - DNA, 75 bp, synthetic construct
  source 1..75: mol_type = other DNA
ggttccgtgttggtgatgtgatttacgtcatgacagggatgactcccgcacagggccgcatgactgaaatcctct

SEQ ID NO: 877021 - DNA, 75 bp, synthetic construct
  source 1..75: mol_type = other DNA
tgctttgaaggggtagagaaggtgctgcatatgctggaggcgcgtaagcataaagaggatccggcacagagtcag

SEQ ID NO: 877022 - DNA, 75 bp, synthetic construct
  source 1..75: mol_type = other DNA
atgtcgctaaaatatttgagagaattgtataacgaaaatataactaacttgagtaaaaataatgctggatataca

SEQ ID NO: 877023 - DNA, 75 bp, synthetic construct
  source 1..75: mol_type = other DNA
agctggttctctccaccgataacgccaccgcgctgaccaacaaaatcatcccgggcgacagcacccagcctaaag

SEQ ID NO: 877024 - DNA, 75 bp, synthetic construct
  source 1..75: mol_type = other DNA
tggcattaccggaaattaatggtaatatcacttttcgtaatatccggtttcgctataagcctgactctccggtta

SEQ ID NO: 877025 - DNA, 75 bp, synthetic construct
  source 1..75: mol_type = other DNA
actgttttaaatctgattcttggttttatcatcggtagcatcgtcgtattggcagtgaaagcagtagcgaaaatg

SEQ ID NO: 877026 - DNA, 75 bp, synthetic construct
  source 1..75: mol_type = other DNA
tcgctatcacgctggggattgtggcggaagcgccgttgcttaatcaggtgctggtactttcagggatcgcactgg

SEQ ID NO: 877027 - DNA, 75 bp, synthetic construct
  source 1..75: mol_type = other DNA
aactgacgcagattcagcgcaaattcaataacaacgggaagctggagctaatgactaaggtcgaaatgaagcaga

SEQ ID NO: 877028 - DNA, 75 bp, synthetic construct
  source 1..75: mol_type = other DNA
ttccgtcagccctgctcaacgaatccgccacgctgttccgccgcaagtattacattaacggtagtcatgcaggct

SEQ ID NO: 877029 - DNA, 75 bp, synthetic construct
  source 1..75: mol_type = other DNA
ctccgcaacgcgatgaaaagtgccaaaggtcctggtaacttccgtaacctgtttatgtactcgcctaacggtaaa

SEQ ID NO: 877030 - DNA, 75 bp, synthetic construct
  source 1..75: mol_type = other DNA
actgcaaaagcggctgcaagagctgaacaactggctaggtgaaaaagtgatttgctttgaatcttacaacttaga

SEQ ID NO: 877031 - DNA, 75 bp, synthetic construct
  source 1..75: mol_type = other DNA
tatcggaggttgcggcaaaggatgagtttctgaacatcaagaacgtgagccgcgatgacatgatggcagcgcacc

SEQ ID NO: 877032 - DNA, 75 bp, synthetic construct
  source 1..75: mol_type = other DNA
tctttgtgcgaaatgagctaacaccactgcaaaagcatatacaagaagtaaataaatggcttggtaaagttatta

SEQ ID NO: 877033 - DNA, 75 bp, synthetic construct
  source 1..75: mol_type = other DNA
cgggatgacatgatggcagcgcaccgcgtgccgcctcagatgatggggattatgcctaataatgttggggggttt

SEQ ID NO: 877034 - DNA, 75 bp, synthetic construct
  source 1..75: mol_type = other DNA
gcgtgccgcctcagatgatggggattatgcctagcaatgttgggggttttggtgatgtggaaaaagcaagcaaag

SEQ ID NO: 877035 - DNA, 75 bp, synthetic construct
  source 1..75: mol_type = other DNA
ggggatgtggaaaaagcgagcttggtctttgttcgtaatgaacttattcctttacaaaaaaggcttgaggaggta

SEQ ID NO: 877036 - DNA, 75 bp, synthetic construct
  source 1..75: mol_type = other DNA
aacgcgatgaaaagcgccaaaggtccaggcaacttccgcaacctgtttatgtactcacctaacggcaaaaaagac

SEQ ID NO: 877037 - DNA, 75 bp, synthetic construct
  source 1..75: mol_type = other DNA
ccttcaaaaaagatttgaggagctgaatgaatggatagaagaaacagtaattaagtttaatgaatataaattaaa

SEQ ID NO: 877038 - DNA, 75 bp, synthetic construct
  source 1..75: mol_type = other DNA
gagtggtgggcgtggcgctggtccgcacatttcggactttgcgaagatgagaatgaaattgccagcggcaatagt

SEQ ID NO: 877039 - DNA, 75 bp, synthetic construct
  source 1..75: mol_type = other DNA
attgcaaaaaagattggatgagttaaataattggttagacgataaaataataacatttaacacatacaattttta

SEQ ID NO: 877040 - DNA, 75 bp, synthetic construct
  source 1..75: mol_type = other DNA
ttccgtcagccctgctcaacgagtccgccacgctgttccgccggaagtattatattaacggcagtcatgcaggct

SEQ ID NO: 877041 - DNA, 75 bp, synthetic construct
  source 1..75: mol_type = other DNA
tttggggatgtggagaaggctagtaaggtttttgtgataaatgaattaattcctttgcaaaaacgatttatggaa

SEQ ID NO: 877042 - DNA, 75 bp, synthetic construct
  source 1..75: mol_type = other DNA
atttctgaacatcaagaacgtcagccgtgatgacatgatggcggcgcaccgtgtaccgcctcagatgatggggat

SEQ ID NO: 877043 - DNA, 75 bp, synthetic construct
  source 1..75: mol_type = other DNA
ttctggaccgccgagaattactggactatgtggaatgcatacagatggaccgttggtatgagccgcccgtcagct

SEQ ID NO: 877044 - DNA, 75 bp, synthetic construct
  source 1..75: mol_type = other DNA
ttatttctggtcatgcagtggttatatgaaatgtgctggcatttaagttgtgattatgtcgacgcaggcgggcaa

SEQ ID NO: 877045 - DNA, 75 bp, synthetic construct
  source 1..75: mol_type = other DNA
gcagaaccaggaggacgtgaacaacctccgcaacgcaatgaaaagcgccaaaggcccgggcaacttccgcaacct

SEQ ID NO: 877046 - DNA, 75 bp, synthetic construct
  source 1..75: mol_type = other DNA
tatgccgaataatgttggggggtttggggatgtggagaaagcaagtaaagtgtttgtacgaaacgaacttatacc

SEQ ID NO: 877047 - DNA, 75 bp, synthetic construct
  source 1..75: mol_type = other DNA
ggggatgtggaaaaggccagccgcgtttttgtgcgaaatgagttaattcctttacaaaagcgacttgaagaactt

SEQ ID NO: 877048 - DNA, 75 bp, synthetic construct
  source 1..75: mol_type = other DNA
ggcctgcctggctatctttctgctattccatccgctctgctcaacgagtccgccacgctgttccgccgtaagtat

SEQ ID NO: 877049 - DNA, 75 bp, synthetic construct
  source 1..75: mol_type = other DNA
gacgacatgatggctgcacaccgcgtaccgcctcagatgatgggaattttgccgaataatgttggggggtttggg

SEQ ID NO: 877050 - DNA, 75 bp, synthetic construct
  source 1..75: mol_type = other DNA
tatttgttcggaatgaactgatgcctttacaaaaacgcattgccgaaattaatgaatggttagatgaagaggtag

SEQ ID NO: 877051 - DNA, 75 bp, synthetic construct
  source 1..75: mol_type = other DNA
ggggatgtggagaaggcgagtcgagtttttgtgcgaaatgaactcattccccttcaagaacgaatgaaagaatta

SEQ ID NO: 877052 - DNA, 75 bp, synthetic construct
  source 1..75: mol_type = other DNA
ggggatatagaaaaagccagttgcgtttttgtgcgaaatgagttaactcctttacaaaaaagacttgtagaaatt

SEQ ID NO: 877053 - DNA, 75 bp, synthetic construct
  source 1..75: mol_type = other DNA
actgctggacgatatctccgtgatgggcaaactggcggcgaagaaaaccgccggtgtattaggggatgacttatc

SEQ ID NO: 877054 - DNA, 75 bp, synthetic construct
  source 1..75: mol_type = other DNA
tcggtgcctgcacaaccatcgatcgcggcgcgctggatgacactattattggcaatggcgtgatcattgataacc

SEQ ID NO: 877055 - DNA, 75 bp, synthetic construct
  source 1..75: mol_type = other DNA
atacctgggcaagctggttgattccgtcaggcatcccattatcagtgcttcaggaaatgggcggatgggagtcca

SEQ ID NO: 877056 - DNA, 75 bp, synthetic construct
  source 1..75: mol_type = other DNA
atacaaatttccaaaaccaacacatggtgatggcttgaaaccatattcaacaattcgtgatgctattggtcatat

SEQ ID NO: 877057 - DNA, 75 bp, synthetic construct
  source 1..75: mol_type = other DNA
actgttttaaatctgattcttggttttattatcggtggtatcgtggtgctgggagtgaaagctgtagcaaaacta

SEQ ID NO: 877058 - DNA, 75 bp, synthetic construct
  source 1..75: mol_type = other DNA
aggtaaagggttattgattatcgcgccctggctgatgaaagcgttatcgattgtcggcacgctggcgatgttcct

SEQ ID NO: 877059 - DNA, 75 bp, synthetic construct
  source 1..75: mol_type = other DNA
ggttttagctggacatctgtattcgagcgatcgcctggaaaatgacgcggtatacaaccccgttcatgctctgga

SEQ ID NO: 877060 - DNA, 75 bp, synthetic construct
  source 1..75: mol_type = other DNA
gctgaaacgagatccacagctttatcacctttatgggccgtggtggcctgcgcttaaaacgttattgctggagcg

SEQ ID NO: 877061 - DNA, 75 bp, synthetic construct
  source 1..75: mol_type = other DNA
aaaccacggtattacaagatttacgtaaaatttgcacgccacaggcgtcattatcagatgaacgtgggaaaagtt

SEQ ID NO: 877062 - DNA, 75 bp, synthetic construct
  source 1..75: mol_type = other DNA
cctgaaaaaaaccgtcgaacaatatggcaatgaggctgtatatattcagtactcttcggggatttgttggcggca

SEQ ID NO: 877063 - DNA, 75 bp, synthetic construct
  source 1..75: mol_type = other DNA
tttcctctgctggctctttttttatggctgccacagtggcgaagtcaacaacatgcaaatttgagtacctcacgc

SEQ ID NO: 877064 - DNA, 75 bp, synthetic construct
  source 1..75: mol_type = other DNA
accactgctgggtgttgcaatactttcactactgatggcgattttcggactttgcgccgggagagacaaagaaat

SEQ ID NO: 877065 - DNA, 75 bp, synthetic construct
  source 1..75: mol_type = other DNA
gtttgcacgtgcattaaccaatattcaacctaaagcatttattgtcgaaaatgtttcaggtatgagaaatagtac

SEQ ID NO: 877066 - DNA, 75 bp, synthetic construct
  source 1..75: mol_type = other DNA
cgagcaggaactggcggatggttaccacattgaatattccggtatgaagttcggtctgttcttcgtgggtgaata

SEQ ID NO: 877067 - DNA, 75 bp, synthetic construct
  source 1..75: mol_type = other DNA
ttctcacgctgcattttctgtggtctgtgcgaagaagcctgtccgaccacggcgattcagttaaccccggatttc

SEQ ID NO: 877068 - DNA, 75 bp, synthetic construct
  source 1..75: mol_type = other DNA
ccctggcaccgatgattgcctttacctcactgctgctggcctttgcgattgtgcctgtcagcccgggttgggtgg

SEQ ID NO: 877069 - DNA, 75 bp, synthetic construct
  source 1..75: mol_type = other DNA
ggataaacagatccacaattacgcacaacagttggcaggagatacaccgctgaaagaggttcggccggggatcta

SEQ ID NO: 877070 - DNA, 75 bp, synthetic construct
  source 1..75: mol_type = other DNA
aggacgtggcgagcgctacggacaaggagaaagctgagcttggtggtgcaggtgctggaacaccggggggatggg

SEQ ID NO: 877071 - DNA, 75 bp, synthetic construct
  source 1..75: mol_type = other DNA
atcaccatccgggacagggacaatcagaagcagaatctggcagacctcagccgtgacccggaacatgccaacgac

SEQ ID NO: 877072 - DNA, 75 bp, synthetic construct
  source 1..75: mol_type = other DNA
tccacttgcccaaatgcagtactggactgcagtaagaaatataattgatgacactaatgaagtgaccattgaatt

SEQ ID NO: 877073 - DNA, 75 bp, synthetic construct
  source 1..75: mol_type = other DNA
ctatctctgctctcattgccgtaaaacatggcaactacagttcacttacaccgcctctcagcccggtaagcacca

SEQ ID NO: 877074 - DNA, 75 bp, synthetic construct
  source 1..75: mol_type = other DNA
ggcaatattgctgatgtaactacttttcctaaatctgatttgctggtaggttgttatccatgtcagggattcagc

SEQ ID NO: 877075 - DNA, 75 bp, synthetic construct
  source 1..75: mol_type = other DNA
acgtgatagctactgaaacagcagctaatacggcagcagcaatagctggtgctacaggtaatgccagtaaggata

SEQ ID NO: 877076 - DNA, 75 bp, synthetic construct
  source 1..75: mol_type = other DNA
ggaatctatgttttctggtcgaaaggcgaggaagcgactgtctataaacgcgaccgcatcgtcttgaataactgt

SEQ ID NO: 877077 - DNA, 75 bp, synthetic construct
  source 1..75: mol_type = other DNA
ttgcctccagaccaggaaagtcttcgggatatgtctatgaaaaaactgttactgatctgtttgccggtgcttctc

SEQ ID NO: 877078 - DNA, 75 bp, synthetic construct
  source 1..75: mol_type = other DNA
tctatcaacgagccgggatcgtcctggccgaccataaacgcgacatggtttacaaccgactggttcgtcgtttgc

SEQ ID NO: 877079 - DNA, 75 bp, synthetic construct
  source 1..75: mol_type = other DNA
tgccggacacgctgtggccggtgttcggaagcaaccgttggctgctgaatgacgtgtgccgtctggcggtggaga

SEQ ID NO: 877080 - DNA, 75 bp, synthetic construct
  source 1..75: mol_type = other DNA
gcctttcgttatatggaacatggcccggcgcgagttattgcccagcgggcactgttgcaaatagtcggtggtgat

SEQ ID NO: 877081 - DNA, 75 bp, synthetic construct
  source 1..75: mol_type = other DNA
cgtcatcacccgctcttccctgcagcggttcggatacaaaatggagcgacaactggcccgcatccgcgccgccac

SEQ ID NO: 877082 - DNA, 75 bp, synthetic construct
  source 1..75: mol_type = other DNA
tttaggacaatgggttaccgccgcaagaaaaggactcaatacaccaggctcccgcacatgtcacgaacggtgcaa

SEQ ID NO: 877083 - DNA, 75 bp, synthetic construct
  source 1..75: mol_type = other DNA
ttcctggatgcgggcggtctgcgcgatatcggggttgaggctgtcacaaaaatgctggcctgcggcacgcggata

SEQ ID NO: 877084 - DNA, 75 bp, synthetic construct
  source 1..75: mol_type = other DNA
gaaaatactggcatgtgtacatgtcgaaaaaaacggccggcgggaggaatacggcgcgctacctgggtcgttatc

SEQ ID NO: 877085 - DNA, 75 bp, synthetic construct
  source 1..75: mol_type = other DNA
gttgaaaaaagagtaatcgatgcggataaaataagaagaatgtgtggattacttattcactttatcatgaaaaat

SEQ ID NO: 877086 - DNA, 75 bp, synthetic construct
  source 1..75: mol_type = other DNA
ttaacgaaaaaagaaaatatgatcgttctattttggcaaggtcattaaaagaaagaaatctcaactatgcagcta

SEQ ID NO: 877087 - DNA, 75 bp, synthetic construct
  source 1..75: mol_type = other DNA
ataaaataagaagaatgtgtggattactcattcacttcatcatgaagaacaaagttaattcagaaactgttttta

SEQ ID NO: 877088 - DNA, 75 bp, synthetic construct
  source 1..75: mol_type = other DNA
atgggacgtcgcagcagtattgataccctcccgacagaagtacgccgctggctggagcgggcgctgacagagaat

SEQ ID NO: 877089 - DNA, 75 bp, synthetic construct
  source 1..75: mol_type = other DNA
acagcataacgattaatgatacacgtacaggtaaccagtatcagcggaaactggatcgcaccacctgtggaatag

SEQ ID NO: 877090 - DNA, 75 bp, synthetic construct
  source 1..75: mol_type = other DNA
acagcataacgattaatgatacacgtacaggtaaccagtatcagcggaaactggatcgcactacttgtggaatag

SEQ ID NO: 877091 - DNA, 75 bp, synthetic construct
  source 1..75: mol_type = other DNA
gacgtgtgccgtctggcggtggagaatctgctgtatgccgcccgaaaacgggggctggaacccggtatcttctgc

SEQ ID NO: 877092 - DNA, 75 bp, synthetic construct
  source 1..75: mol_type = other DNA
cacaaagtagcggcacgacggtaaaaatgaccattatcagcgaagcggggactcagaccacgcagacgcctgacg

SEQ ID NO: 877093 - DNA, 75 bp, synthetic construct
  source 1..75: mol_type = other DNA
tctgcgggatataccttagtgctggcacaaagtagcggcacgacggtaaaaatgaccattatcagcgaagcgggg

SEQ ID NO: 877094 - DNA, 75 bp, synthetic construct
  source 1..75: mol_type = other DNA
ctgagcttccgttacctggaccacaaaacgggagaaacggcgacggaaacgctgacacagcgtgagctggtcgcg

SEQ ID NO: 877095 - DNA, 75 bp, synthetic construct
  source 1..75: mol_type = other DNA
aataaacttctgttaaattctgaaagaacagatagtatatctgaaatgagcggctatgcctcacaatggctggaa

SEQ ID NO: 877096 - DNA, 75 bp, synthetic construct
  source 1..75: mol_type = other DNA
ttctcgattgtagcggtggcgatttaggaaatgacgcattggggcaggcatttttacaaatcctacgcaacgaag

SEQ ID NO: 877097 - DNA, 75 bp, synthetic construct
  source 1..75: mol_type = other DNA
agatcgctcacttcttcgagcactacaaagacctcgaaaaaggtaagtgggttaaagttgaaggctgggataacg

SEQ ID NO: 877098 - DNA, 75 bp, synthetic construct
  source 1..75: mol_type = other DNA
ttatctgaagaagctgccgatagcagcctcccggctggcgcattacaacggaggggctagcctgagcttccgtta

SEQ ID NO: 877099 - DNA, 75 bp, synthetic construct
  source 1..75: mol_type = other DNA
gcgatgccggagtcgttgtcacatatcacgacggaatcacagtggagaagcctggtgctgaaagccggcggaaaa

SEQ ID NO: 877100 - DNA, 75 bp, synthetic construct
  source 1..75: mol_type = other DNA
ggaaacgctgacacagcgtgagctggtcgcgaggctgaaacagcacatcccggagaagttttttaagatggtgag

SEQ ID NO: 877101 - DNA, 75 bp, synthetic construct
  source 1..75: mol_type = other DNA
cgccgggccattgcggggctgaatgtggaggggctgaagaaaaacgcgcgggatatcagtctgctgaggtatatg

SEQ ID NO: 877102 - DNA, 75 bp, synthetic construct
  source 1..75: mol_type = other DNA
gaacccggtatcttctgcgccatccacacgtatggccgtcgtctcaactggcatccgcatgtacatgtgtctgta

SEQ ID NO: 877103 - DNA, 75 bp, synthetic construct
  source 1..75: mol_type = other DNA
ataaacctgagtgcccccacgtcagatacgtcactaactcatgtggcagccgtgcctgcccgtcctgcggaaaaa

SEQ ID NO: 877104 - DNA, 75 bp, synthetic construct
  source 1..75: mol_type = other DNA
agcgcatgtgcacgactggttgggcaaaacgctggattacaccccgcgtgaatcgttcctgaatccaggattcag

SEQ ID NO: 877105 - DNA, 75 bp, synthetic construct
  source 1..75: mol_type = other DNA
ataatttatttcttaaggatgttatgtctggtaaaggtccggaaaaaacattctcattccatcttgataacgtta

SEQ ID NO: 877106 - DNA, 75 bp, synthetic construct
  source 1..75: mol_type = other DNA
atcttaaaaatgtttatctttgcctgacgcaagacaagaatgaagaaagaatgtcattctctctttatccgtttc

SEQ ID NO: 877107 - DNA, 75 bp, synthetic construct
  source 1..75: mol_type = other DNA
ttctttgattttgttatgcctgttattccagtgatggataaccagaatgcttatgagcattttgttaaaaaattc

SEQ ID NO: 877108 - DNA, 75 bp, synthetic construct
  source 1..75: mol_type = other DNA
gtattctctggcggctgggtatccggcttccgccattaccctttatggcgttctggcaggtcacggtgctgacgg

SEQ ID NO: 877109 - DNA, 75 bp, synthetic construct
  source 1..75: mol_type = other DNA
cgctataagcaggaacaaacgccgctggcggtgattgccgggaaagagtatggatcaggctcaagccgtgactgg

SEQ ID NO: 877110 - DNA, 75 bp, synthetic construct
  source 1..75: mol_type = other DNA
gggtcaaagcgtcgctggcaccaggctcgaaagttgtttctgattatctggcaaaagcgaaattgacaccgtatc

SEQ ID NO: 877111 - DNA, 75 bp, synthetic construct
  source 1..75: mol_type = other DNA
gaagcactgactccgacagaactcgactcagataaagcaggctgttatatcagcgcgcttaattatgcttatgaa

SEQ ID NO: 877112 - DNA, 75 bp, synthetic construct
  source 1..75: mol_type = other DNA
accgcccggaagagttcccgcgtcatctggactttctggagcgtatgaccgttaccaaaggcacggttgaagact

SEQ ID NO: 877113 - DNA, 75 bp, synthetic construct
  source 1..75: mol_type = other DNA
accgccctgaagagtttccgcgtcatctggactttctggagcgaatgactgttacaaagggaactgtagaggact

SEQ ID NO: 877114 - DNA, 75 bp, synthetic construct
  source 1..75: mol_type = other DNA
ttaccttcttgaatgcccgtttggggtgcgtgtgtccggtgcagtggcatctgtgatgggatcgttatgcctgct

SEQ ID NO: 877115 - DNA, 75 bp, synthetic construct
  source 1..75: mol_type = other DNA
atttattcagccgccaaaaatggggtcagggcgtgatgaacacaaaattgttattactcccgtacgctatgtccg

SEQ ID NO: 877116 - DNA, 75 bp, synthetic construct
  source 1..75: mol_type = other DNA
gatgaagaactggcaagcgaactttttcgtcacaagctaatcggtatgaatataaaagttgccgctttacgctgg

SEQ ID NO: 877117 - DNA, 75 bp, synthetic construct
  source 1..75: mol_type = other DNA
tcgttgccgtcgaggccggtgccgcgattgccagggggctgaacgttcagtcggatgcaaatgcctgcgccgttc

SEQ ID NO: 877118 - DNA, 75 bp, synthetic construct
  source 1..75: mol_type = other DNA
aaatcttcctcggtagggatgatcatcgtcagctcctgagtgaacaggtcatcgccttccatgctctggcagcat

SEQ ID NO: 877119 - DNA, 75 bp, synthetic construct
  source 1..75: mol_type = other DNA
aaatcttcctcggtagggatgatcatcgtcagctcctgagcgaacaagtcagcgccttccatgctctggcagcat

SEQ ID NO: 877120 - DNA, 75 bp, synthetic construct
  source 1..75: mol_type = other DNA
tgggcggggccggggtttggtaacctggcgataccgcgcgtgggccaggaggtgattgttgacttcctgaacggg

SEQ ID NO: 877121 - DNA, 75 bp, synthetic construct
  source 1..75: mol_type = other DNA
tgcgtgacggtatggcggcagacggcgtgtcgcagcgcaaatataactatatgcgcgccgaacagatctatcgcg

SEQ ID NO: 877122 - DNA, 75 bp, synthetic construct
  source 1..75: mol_type = other DNA
gcggagccgttctttcgttggtcggagtttcaactgcaacggctgatacccaatgcgggccatatcgcctcaccg

SEQ ID NO: 877123 - DNA, 75 bp, synthetic construct
  source 1..75: mol_type = other DNA
aatacctcactgctggaagtggtgaaaaacctcccctccccgacaatcgtgccaggcgataaattcgatactgtc

SEQ ID NO: 877124 - DNA, 75 bp, synthetic construct
  source 1..75: mol_type = other DNA
gcggctttaatgaactgcggtttgaagacgcaacgggcggtgaacaggtctatatccacgcgcagaagaacatgg

SEQ ID NO: 877125 - DNA, 75 bp, synthetic construct
  source 1..75: mol_type = other DNA
ctagcaaacatgaaattaaagtgaagttgctatttgcgaatgatgattttctctcaatggaaggacactatggac

SEQ ID NO: 877126 - DNA, 75 bp, synthetic construct
  source 1..75: mol_type = other DNA
gctctacatcaaaaagaagttagacgtcttggggctagttatctttccgacagcggtgtttcatgggcttcaaaa

SEQ ID NO: 877127 - DNA, 75 bp, synthetic construct
  source 1..75: mol_type = other DNA
tggtcatccattcagggggcgtggacatcgtcgggccgaaaatcaatctcaatagcggcggtagtccgggaacgc

SEQ ID NO: 877128 - DNA, 75 bp, synthetic construct
  source 1..75: mol_type = other DNA
ctatatccacgcgcagaagaacatggatacggaggtgctgaataatcggacgacggatgtgaaggctgaccacac

SEQ ID NO: 877129 - DNA, 75 bp, synthetic construct
  source 1..75: mol_type = other DNA
agcggctttaatgaactgcggtttgaagacgccacgggcggtgaacaggtctatatccacgcgcagaagaacatg

SEQ ID NO: 877130 - DNA, 75 bp, synthetic construct
  source 1..75: mol_type = other DNA
aacgatccgctgattcaaatcagcagttttgaccgtccgaatattcgctacatgctgatggagaaattcaaaccg

SEQ ID NO: 877131 - DNA, 75 bp, synthetic construct
  source 1..75: mol_type = other DNA
gtgaaaaaattcgcgggttactggcagccaggattgcccaaactggacagcataacctggcgtccggtggcggat

SEQ ID NO: 877132 - DNA, 75 bp, synthetic construct
  source 1..75: mol_type = other DNA
ttttccgcgtttattaatattctcgctcatccggcgacagcaatgatttcacctgcggcactggaaaaatatggt

SEQ ID NO: 877133 - DNA, 75 bp, synthetic construct
  source 1..75: mol_type = other DNA
acaaagctatcgcttctgccttggactcctgaaccttcataaaaaatacagtaaagccagacttaatgcagcatg

SEQ ID NO: 877134 - DNA, 75 bp, synthetic construct
  source 1..75: mol_type = other DNA
atggcaagagctgtacaccgtagtgggttagtggcgctgggtattgtcacagcgttgatggcatcttgtgcattc

SEQ ID NO: 877135 - DNA, 75 bp, synthetic construct
  source 1..75: mol_type = other DNA
ggtgaaagttgcctttgcgggctatgcaacgccagctactggtgtggtaccgccaagtatcgcctacgcgcaaag

SEQ ID NO: 877136 - DNA, 75 bp, synthetic construct
  source 1..75: mol_type = other DNA
aaaccggtgaagcgcaatttgcttttcccatcccttatgaacaagcggcgctactggagaaaaacaaaaatatcg

SEQ ID NO: 877137 - DNA, 75 bp, synthetic construct
  source 1..75: mol_type = other DNA
atgaattttgacgatcaattcccatcaagagtatctctggcaagacagtccaggggtatgacgcaggcgcagttg

SEQ ID NO: 877138 - DNA, 75 bp, synthetic construct
  source 1..75: mol_type = other DNA
ggtggcgacggtggcgttcggcatgggcatcaataaaccaaacgttcgcttcgtggtccactttgatattccgcg

SEQ ID NO: 877139 - DNA, 75 bp, synthetic construct
  source 1..75: mol_type = other DNA
cggtatacgttcatcccgatcatcaaggtaaaggtcttgggcgcaaattgttaagccgcttaattgatgaagcac

SEQ ID NO: 877140 - DNA, 75 bp, synthetic construct
  source 1..75: mol_type = other DNA
ctttagcatcgatggtaaaacggtgtttatcggctctttcaatttcgatccgcgttcaacattgctcaatactga

SEQ ID NO: 877141 - DNA, 75 bp, synthetic construct
  source 1..75: mol_type = other DNA
aaactggtcatttcttttacgaccagcaaggtattttaagatttcaaactaaactacctattcactcttttgctg

SEQ ID NO: 877142 - DNA, 75 bp, synthetic construct
  source 1..75: mol_type = other DNA
agaccgcgcaaatagcgaccaattcatagccgatgggattggattagaggttaaagggtataaatatcaaaatgg

SEQ ID NO: 877143 - DNA, 75 bp, synthetic construct
  source 1..75: mol_type = other DNA
tatcgcctatgcgcaaaactataaaccgtggccttatgacccggcgaaagcgcgggagttgttgaaagaggcggg

SEQ ID NO: 877144 - DNA, 75 bp, synthetic construct
  source 1..75: mol_type = other DNA
gtggagaacatggcttttgtggtgccaatgttcctattccttgttacacctgcatgcatttccagccttggctgg

SEQ ID NO: 877145 - DNA, 75 bp, synthetic construct
  source 1..75: mol_type = other DNA
ctgatcttgatgtgctagcgaccatccaatccccttatgaattctaccaactgcttgccactgacaaactccaca

SEQ ID NO: 877146 - DNA, 75 bp, synthetic construct
  source 1..75: mol_type = other DNA
aaggcagtaccagacgtcagataaatgcttcattactcctgaaagaaattgaacatcataccatgaaaaggctgc

SEQ ID NO: 877147 - DNA, 75 bp, synthetic construct
  source 1..75: mol_type = other DNA
gaaggtatgaccggcgatccgagtattttaatcgccaagtcatttcttgatttttttacggcaatgatcttcgcc

SEQ ID NO: 877148 - DNA, 75 bp, synthetic construct
  source 1..75: mol_type = other DNA
ttccagatcttgatgtgttagctaccgtccagtctccttatgaattccgccaactgtttgctaccgacaaactcc

SEQ ID NO: 877149 - DNA, 75 bp, synthetic construct
  source 1..75: mol_type = other DNA
tatttcggtatcagtaaggatgtgatccgcttgctagatggctggacactgaagggtaatcgtaagggggatgcg

SEQ ID NO: 877150 - DNA, 75 bp, synthetic construct
  source 1..75: mol_type = other DNA
gccagaacgccaccggcggcatgggacatggacaccggaacgccttatcgagcagggaaaccgtacaggtccgtc

SEQ ID NO: 877151 - DNA, 75 bp, synthetic construct
  source 1..75: mol_type = other DNA
aactggtgtcggcacacagtaaaaacctgaccggtttttggatcatgccagataccggcttcagctttgaagacg

SEQ ID NO: 877152 - DNA, 75 bp, synthetic construct
  source 1..75: mol_type = other DNA
acgcaaaagccgttcgataacccgaaggtccgtgaggcgctgaattacgccattaaccgcccggcgctggtgaaa

SEQ ID NO: 877153 - DNA, 75 bp, synthetic construct
  source 1..75: mol_type = other DNA
cgcactgaagcctcttcctgaagccagttacaccctggtgaagaaagtcagagttcatgccgattaccacgtgga

SEQ ID NO: 877154 - DNA, 75 bp, synthetic construct
  source 1..75: mol_type = other DNA
tggaacacgaaaacgtacgcggcagtgagtattaccactgatacgggatccaatgatgaatcatctttacgaaca

SEQ ID NO: 877155 - DNA, 75 bp, synthetic construct
  source 1..75: mol_type = other DNA
gtaagatcgcaagcgtccagaacacgcaaaagatcactaaagcgatggagatggtagccgcttccaaaatgcgta

SEQ ID NO: 877156 - DNA, 75 bp, synthetic construct
  source 1..75: mol_type = other DNA
gcatcaacccggatgttgttgagcagtttctggcccttatgaatacacattgtaaatcctcagaagaggcactcg

SEQ ID NO: 877157 - DNA, 75 bp, synthetic construct
  source 1..75: mol_type = other DNA
ccaccgcagcaggcattttgctgatggctttcctctcttgcctgctgctgcccgcccccgcactggggctgacgc

SEQ ID NO: 877158 - DNA, 75 bp, synthetic construct
  source 1..75: mol_type = other DNA
ggaggttcgacagcttaaaaaggaaaaccggggactgcgtgaacgactgaaagtgctgcctgatactgcacagga

SEQ ID NO: 877159 - DNA, 75 bp, synthetic construct
  source 1..75: mol_type = other DNA
atgcagaccttcagtgaaacagatcttcgcgatgcgcaggcactgctgcccgattccgtgcagcaactgattagc

SEQ ID NO: 877160 - DNA, 75 bp, synthetic construct
  source 1..75: mol_type = other DNA
tccatggacagccagatgctcaatgggcatgggatatccatacaacttcaggggattgatattgccgaaaggcca

SEQ ID NO: 877161 - DNA, 75 bp, synthetic construct
  source 1..75: mol_type = other DNA
atgaaggatgaaatacacagtaccagcattaacccggatgttgttgagcagtttctggcccttatgaatacacat

SEQ ID NO: 877162 - DNA, 75 bp, synthetic construct
  source 1..75: mol_type = other DNA
accattgtttccgtggcatcctgtaccactaactgtcttgctccgatggcaaaagccttgcatgacagtttcgga

SEQ ID NO: 877163 - DNA, 75 bp, synthetic construct
  source 1..75: mol_type = other DNA
acgcaacttatcgcagcaatgtttgtaacgctcaggactgtaatggtaaccgaatgcccgggatcgcccgcaata

SEQ ID NO: 877164 - DNA, 75 bp, synthetic construct
  source 1..75: mol_type = other DNA
ttatggcagatgatgaaaatacggcaaaagcgccgtcttatactctcgtcggcttattcaccgggtataaataca

SEQ ID NO: 877165 - DNA, 75 bp, synthetic construct
  source 1..75: mol_type = other DNA
gcctctgccataaaagagggaggttcaggtggaaaaacggacagtgtcgccaggtctgtcggaaaaggtgaagca

SEQ ID NO: 877166 - DNA, 75 bp, synthetic construct
  source 1..75: mol_type = other DNA
cagaagtggcttctggtacctgattgaacatggaggagatggcgggctgattagtggcgacagcaccgttgttga

SEQ ID NO: 877167 - DNA, 75 bp, synthetic construct
  source 1..75: mol_type = other DNA
ccctgaatcgccaggaattgttaaatgaaaatgttctgcaaacagccctgtcgcaggccgggcaaagtattcgca

SEQ ID NO: 877168 - DNA, 75 bp, synthetic construct
  source 1..75: mol_type = other DNA
cacgctttccattggtcaggaaatgcagatgggcgactattatgtccgccagttacgcggcagcgcgccgttaat

SEQ ID NO: 877169 - DNA, 75 bp, synthetic construct
  source 1..75: mol_type = other DNA
ggatacctgcccaagagcgccagcgggcgtgtggaaattggcgagaagaaatacaccaaatcacagatcgtcgag

SEQ ID NO: 877170 - DNA, 75 bp, synthetic construct
  source 1..75: mol_type = other DNA
tcttgaaccaggtgcgtaccaaaattggtgtgatgtttggcgatccgactacgtctccgggtggcgactctccga

SEQ ID NO: 877171 - DNA, 75 bp, synthetic construct
  source 1..75: mol_type = other DNA
cccgataaaatcctgttcggtggtggctcatattcgccaggccaatcggggcgaggtggcgctggaaaatactca

SEQ ID NO: 877172 - DNA, 75 bp, synthetic construct
  source 1..75: mol_type = other DNA
tcccgcgaccaggagaacgaggatattgcgctaacggtagggaagttgcgcgttgagcttgaggcagaaaaacag

SEQ ID NO: 877173 - DNA, 75 bp, synthetic construct
  source 1..75: mol_type = other DNA
tttattgttaccgtcgccttactggtcgcgcgggataagcgtctgggaaaaaataagtatgagccagtaagtgcc

SEQ ID NO: 877174 - DNA, 75 bp, synthetic construct
  source 1..75: mol_type = other DNA
ttgatatcgactatttcaaaagcattaacgataactatggacatgaatgtggcgataaagtgttaagcgtgtttg

SEQ ID NO: 877175 - DNA, 75 bp, synthetic construct
  source 1..75: mol_type = other DNA
gcgttaggttctattttactggcgatggccagtccgcaggcggggatggcggcgctgaccggtacactggcggga

SEQ ID NO: 877176 - DNA, 75 bp, synthetic construct
  source 1..75: mol_type = other DNA
actcgatcaggccatttccttgttgagtagcgccagttcgcaggtgaaattaggcagcctgcaacaagcgcgtta

SEQ ID NO: 877177 - DNA, 75 bp, synthetic construct
  source 1..75: mol_type = other DNA
ctctgccctgttccgttattccgataacgaaagtcaactggcttcagttatggcgcacgaaatctcccacgtcac

SEQ ID NO: 877178 - DNA, 75 bp, synthetic construct
  source 1..75: mol_type = other DNA
attgcgacacagccgttgacgggcaatgaaacctggcaaaagattatgccaggtgaatggcgcttattttgcctc

SEQ ID NO: 877179 - DNA, 75 bp, synthetic construct
  source 1..75: mol_type = other DNA
tgatgcagcagataagacgtctgcagaatcagtcagcattacgcccggtagttgcaccgcaaccggtaaataccg

SEQ ID NO: 877180 - DNA, 75 bp, synthetic construct
  source 1..75: mol_type = other DNA
gttgcgccgcaaccggtaaataacgtggtgaaaacctgcgatggcgaaaccctgcgcgaccgtgccagaaaaatt

SEQ ID NO: 877181 - DNA, 75 bp, synthetic construct
  source 1..75: mol_type = other DNA
caatgaacaggattgtaacggtaatcggatgccagggatcgcccgtaatatgggctttgcgtcgataggttatgt

SEQ ID NO: 877182 - DNA, 75 bp, synthetic construct
  source 1..75: mol_type = other DNA
tggtttaaagatgatgttgtggaacgttttgattttcgtcagactgcaagtaagacttcacgtggtttgatggat

SEQ ID NO: 877183 - DNA, 75 bp, synthetic construct
  source 1..75: mol_type = other DNA
caactatctaactacataccgggccttgctctgttgaccaatagcagcacggcacacattaaatcactggatatc

SEQ ID NO: 877184 - DNA, 75 bp, synthetic construct
  source 1..75: mol_type = other DNA
aatcgtacagtaatgggagttctgcattcgttatacttaatagcgggcagactgatgactttgaaattaatgtag

SEQ ID NO: 877185 - DNA, 75 bp, synthetic construct
  source 1..75: mol_type = other DNA
ggtaagcaggtaaacggcgtcatcgacaaacttcatgcctctctggcagaacaaagtagtattggtatgaatgat

SEQ ID NO: 877186 - DNA, 75 bp, synthetic construct
  source 1..75: mol_type = other DNA
acctgccaggcaaaatactggaataacggcaccggctggagtgaggtcgttgctcacctgaaatcgctgggctac

SEQ ID NO: 877187 - DNA, 75 bp, synthetic construct
  source 1..75: mol_type = other DNA
ggtatttggcttgcatatatttaccctgcagctgtaagttcaattgtaaagccatcaacaataactagtataaac

SEQ ID NO: 877188 - DNA, 75 bp, synthetic construct
  source 1..75: mol_type = other DNA
tttcagaatgcatttttgatggcgaagggtcatgccaccttacaaccacgaggctgaaacttgcgctcaaagtgt

SEQ ID NO: 877189 - DNA, 75 bp, synthetic construct
  source 1..75: mol_type = other DNA
caacgcacagtggttgcaagccagcatggattcgccgcgtcagtatgcaacatacgactgcgtgaaggtgaaatg

SEQ ID NO: 877190 - DNA, 75 bp, synthetic construct
  source 1..75: mol_type = other DNA
ggaactggcatagcgtcgccatttatttgctggctggatgcctgatttctgcaataaccgctttgttgatgaaag

SEQ ID NO: 877191 - DNA, 75 bp, synthetic construct
  source 1..75: mol_type = other DNA
tgtgcgcggaaacagatgacggcagtgaaagcgtattgttaacgccggaacggatgatgccgacaggcgtacgaa

SEQ ID NO: 877192 - DNA, 75 bp, synthetic construct
  source 1..75: mol_type = other DNA
ccgtattacagcgaagacgagttgatgggtaaagcggtggtggtgctgtgcaatctgcaaaaagcgaaaatgcgt

SEQ ID NO: 877193 - DNA, 75 bp, synthetic construct
  source 1..75: mol_type = other DNA
cgcaattcgatgcgttatgcggtggattatgcggcaatgaacgaccacaggttgtggctcaagggattcgcctcg

SEQ ID NO: 877194 - DNA, 75 bp, synthetic construct
  source 1..75: mol_type = other DNA
acagggaagagtggagcgagagtaaaaaatgcgtatgttttcctgctattgtgaatggtatgcaattgacttgtg

SEQ ID NO: 877195 - DNA, 75 bp, synthetic construct
  source 1..75: mol_type = other DNA
atcgcctttgaggaaggcaacccggacaggccgtatatcgccggggtaaagcacgactcggcgcacaccgaccat

SEQ ID NO: 877196 - DNA, 75 bp, synthetic construct
  source 1..75: mol_type = other DNA
atgaaacatcctttagaaaccttgaccgccgcagcaggcattttgttgatggctttcctctcttgcctgctgctg

SEQ ID NO: 877197 - DNA, 75 bp, synthetic construct
  source 1..75: mol_type = other DNA
ccatctgatggatcttagccagctttacactttattgttttgtctgtggtttttagtgctgggcgctattgagta

SEQ ID NO: 877198 - DNA, 75 bp, synthetic construct
  source 1..75: mol_type = other DNA
gaggtcaatatcgaccagttaactacgccaattcaggaattgctcttaaccccgaatgtgcccgcaacgcgtgaa

SEQ ID NO: 877199 - DNA, 75 bp, synthetic construct
  source 1..75: mol_type = other DNA
attcgccgctcagaaggcggtattgcctggggcgatatgcgcaactgcctcaaccagctgataactgaacccagc

SEQ ID NO: 877200 - DNA, 75 bp, synthetic construct
  source 1..75: mol_type = other DNA
cgatcaggggcatgaagtttacggcgaggtcaatatcgaccagttaactacgccgattcaggagttactgttaac

SEQ ID NO: 877201 - DNA, 75 bp, synthetic construct
  source 1..75: mol_type = other DNA
ggcaagagccagctaaacctcggtcatcttgttgatgccgggaaacagcagcgcggggaaggctttgaactgcgt

SEQ ID NO: 877202 - DNA, 75 bp, synthetic construct
  source 1..75: mol_type = other DNA
gtgcattgctacacagtccacctgccaagctaaatactggaacaacggcacaggttggagtgaggtcattactca

SEQ ID NO: 877203 - DNA, 75 bp, synthetic construct
  source 1..75: mol_type = other DNA
caggacaaggcgcagggtcaggtgcgcgaaatggctccggcgatggcaatactggatggcgcacagtcacagatg

SEQ ID NO: 877204 - DNA, 75 bp, synthetic construct
  source 1..75: mol_type = other DNA
gtgcattacgggcgtatgggaaaagcacatgagcctgttgagttacaaatgttggcagagaaagtagatgagcca

SEQ ID NO: 877205 - DNA, 75 bp, synthetic construct
  source 1..75: mol_type = other DNA
ctgcaactggcggcgtcgaagaatgtgatagcgaacgcaggcaacaacgcagatatcggcgtagtaaaaaatatg

SEQ ID NO: 877206 - DNA, 75 bp, synthetic construct
  source 1..75: mol_type = other DNA
aacagcctgatgcccttcgctacgaccgccagactatttttggccttgtccgtgaacgcccgatcgacattcaca

SEQ ID NO: 877207 - DNA, 75 bp, synthetic construct
  source 1..75: mol_type = other DNA
ctacttcgtgcccagcgatgatttgcttcacgctatttgcacggcagcgcaacgtggtgttgatgtcagtattat

SEQ ID NO: 877208 - DNA, 75 bp, synthetic construct
  source 1..75: mol_type = other DNA
gagcaggccagcggtcatacgatccataccattgcttctggccccggcttcccggaagacctgattcaccaggca

SEQ ID NO: 877209 - DNA, 75 bp, synthetic construct
  source 1..75: mol_type = other DNA
ttcgtctcggtattaatgaagaaatggcaacaacgttagcgacgctgacgcttccgcaaatggttaaactggcag

SEQ ID NO: 877210 - DNA, 75 bp, synthetic construct
  source 1..75: mol_type = other DNA
gtggagtcatcgacggcggtgttgtacttgtttagcgagcgatttatgacctatggcaaggcttatggcttatgc

SEQ ID NO: 877211 - DNA, 75 bp, synthetic construct
  source 1..75: mol_type = other DNA
atgaatttaagttcattttgtcggaaatggatatcggcttgttttttctttccgctagacactcttcccataatt

SEQ ID NO: 877212 - DNA, 75 bp, synthetic construct
  source 1..75: mol_type = other DNA
aattttcggtaactgctgctgcaaagtcaattgaacaaagactggaggctgattatgcgtgtcatcacttgtacc

SEQ ID NO: 877213 - DNA, 75 bp, synthetic construct
  source 1..75: mol_type = other DNA
gaagtctcaattcggaaaaaacttgaaaaagaaaataataattttaacaatttgattctggatattagaatgcaa

SEQ ID NO: 877214 - DNA, 75 bp, synthetic construct
  source 1..75: mol_type = other DNA
atcgccgcaactggcagctgattgccggagaattacagcattttggtggcgatagtatcgccaacaaactgcgcg

SEQ ID NO: 877215 - DNA, 75 bp, synthetic construct
  source 1..75: mol_type = other DNA
ccataatattgagatggtgttttatatctggcaacccggcggcatggcggaccaggtggctgaatcattaatggc

SEQ ID NO: 877216 - DNA, 75 bp, synthetic construct
  source 1..75: mol_type = other DNA
gagtctgatgatgtgatgcaggcgttaatccgcgacatccagctcgcccggcataatattgagatggtgttttat

SEQ ID NO: 877217 - DNA, 75 bp, synthetic construct
  source 1..75: mol_type = other DNA
cgctgcgcgacgcggcattcattgccgattgatgcttgactccgccggcagtgtggcttttttccgcagcccgtg

SEQ ID NO: 877218 - DNA, 75 bp, synthetic construct
  source 1..75: mol_type = other DNA
tttactacttgcacagcgtttgattgttcaggacaaagcgtccgctatgtttcgtctcggcataaatgaagaaat

SEQ ID NO: 877219 - DNA, 75 bp, synthetic construct
  source 1..75: mol_type = other DNA
agtagccaggagagtgcattgcagttagatgccttccactggaaagaagacggcatcagtgataaaggtgtgatg

SEQ ID NO: 877220 - DNA, 75 bp, synthetic construct
  source 1..75: mol_type = other DNA
agtgttaagtaaccgcttcagcatgctgtccgatgcagcaccggaagttgcaaacggtctggccttcaacgtggt

SEQ ID NO: 877221 - DNA, 75 bp, synthetic construct
  source 1..75: mol_type = other DNA
ccaatggacagtgcagactctcacatgggggctattccggagaatctggatctgctgacagcactgacaggcagc

SEQ ID NO: 877222 - DNA, 75 bp, synthetic construct
  source 1..75: mol_type = other DNA
tggtgcagggatggcggtaggttcagatagctatggtagcccggatgcaaatgtcacagctattaaccaattagg

SEQ ID NO: 877223 - DNA, 75 bp, synthetic construct
  source 1..75: mol_type = other DNA
cttacgtctcaacgtcgatattttgcagttacaggaactgttgatggacattggtgaagacgagcatttccagcc

SEQ ID NO: 877224 - DNA, 75 bp, synthetic construct
  source 1..75: mol_type = other DNA
tgccgcttgctggcggataaagttaataaactgaaaaataaagaaaatagtttgtcagagctgttgcccgatgtg

SEQ ID NO: 877225 - DNA, 75 bp, synthetic construct
  source 1..75: mol_type = other DNA
tgagactgaggttagaacttttgatgctattgtttattattcgccatcaattttttttggtccattaataagaaa

SEQ ID NO: 877226 - DNA, 75 bp, synthetic construct
  source 1..75: mol_type = other DNA
ctgggccacattgggtacggccctttcggtgagttaggaatgaatacgattgacgacgacggcgacagcaggacg

SEQ ID NO: 877227 - DNA, 75 bp, synthetic construct
  source 1..75: mol_type = other DNA
ccgttttgacagccaccagacgattactcagttgacgcaagattcccgcgttgacgatctccagcaaattcatac

SEQ ID NO: 877228 - DNA, 75 bp, synthetic construct
  source 1..75: mol_type = other DNA
tgcgagttttgcgtggatatcaccagtatgaaagtcgctgagcgcaccggcagcactgacaaactgctggcggtg

SEQ ID NO: 877229 - DNA, 75 bp, synthetic construct
  source 1..75: mol_type = other DNA
atggggttaccgccgctgagcaaaattcctttcattttacgtccgcaggcgtggctacatcgtcgtcattatggc

SEQ ID NO: 877230 - DNA, 75 bp, synthetic construct
  source 1..75: mol_type = other DNA
aagcattgatattgatacctgctttaaaactctggttaaagagtcctctttaaccagaataaacatcgaaacatg

SEQ ID NO: 877231 - DNA, 75 bp, synthetic construct
  source 1..75: mol_type = other DNA
tggttgggaaggaatggagtgtgggatattttttgaaagtgatcatactcaccagcaattgcaagctttggggtt

SEQ ID NO: 877232 - DNA, 75 bp, synthetic construct
  source 1..75: mol_type = other DNA
aaattcaggacatcgtggttgtgggtattaaagattcgattcgcgatgaagccatcaaagcatttgtggtgctga

SEQ ID NO: 877233 - DNA, 75 bp, synthetic construct
  source 1..75: mol_type = other DNA
gggaaaaccatcttcaaagagtactttctcaacccacaagccactgcgaaagtgctggaagccgatggctggctg

SEQ ID NO: 877234 - DNA, 75 bp, synthetic construct
  source 1..75: mol_type = other DNA
gcgaacaaaatatggcgaaatttaaagtgccctcttatctggagatcagaaaagatctgccacgtaattgctcgg

SEQ ID NO: 877235 - DNA, 75 bp, synthetic construct
  source 1..75: mol_type = other DNA
ccggttgatcacggttatctgcaacaaattgcgcaagcggcggatcgtctgggctataccggtgtgctgatcccg

SEQ ID NO: 877236 - DNA, 75 bp, synthetic construct
  source 1..75: mol_type = other DNA
aggcgacggcgtgttccttgatcatagcgagcgctacgcagcctcggcggaatttacccaggtctggcggcgctt

SEQ ID NO: 877237 - DNA, 75 bp, synthetic construct
  source 1..75: mol_type = other DNA
acatccgaaaattcaggacatcgtagttgttggtattaaagattcgattcgtgatgaagctatcaaagcatttgt

SEQ ID NO: 877238 - DNA, 75 bp, synthetic construct
  source 1..75: mol_type = other DNA
cagacccgtcgccaggcggggcctttacaagccgtcacgcaactcgtcgctgtcgtgggcatcgcattgtgtgtc

SEQ ID NO: 877239 - DNA, 75 bp, synthetic construct
  source 1..75: mol_type = other DNA
tcacgcaaatctggtgcggctttttcatcattaacggtggaattgccctctttaccgcgctttatgccgatatgt

SEQ ID NO: 877240 - DNA, 75 bp, synthetic construct
  source 1..75: mol_type = other DNA
gttgctgcttttgttgcgtctgcgccagacccgtcgccaggcggggcctttacaagccgtcacgcaactcgtcgc

SEQ ID NO: 877241 - DNA, 75 bp, synthetic construct
  source 1..75: mol_type = other DNA
atttgtcgcgccattgctcatgtcgttcgttttgagtgccagacgtatccgcgaccctacaaagtcgccatgctg

SEQ ID NO: 877242 - DNA, 75 bp, synthetic construct
  source 1..75: mol_type = other DNA
gcagcggcgtgttgaaacactatccgtcggttctgcattcggaggatgccattgaagggccgctggcgtttgccg

SEQ ID NO: 877243 - DNA, 75 bp, synthetic construct
  source 1..75: mol_type = other DNA
gagcaaaactgctcttcccgccgattcaacagccctatcctccgctttactttggcggctcgtcagacgtcgccc

SEQ ID NO: 877244 - DNA, 75 bp, synthetic construct
  source 1..75: mol_type = other DNA
cgagttactgttcccacatctggatgtcgccatcccggaaattccccagccacaaccgctgaatccgcaaggcga

SEQ ID NO: 877245 - DNA, 75 bp, synthetic construct
  source 1..75: mol_type = other DNA
tcatggtggtgatggcgcaaatccctccacgcgtttatgaaggctgggcaccctatctctacatcatctgtatta

SEQ ID NO: 877246 - DNA, 75 bp, synthetic construct
  source 1..75: mol_type = other DNA
tctgctggggcgcagcggctgcggaaaaagcactctcgcgcggctgctggtaggcttagagtctccctcacaagg

SEQ ID NO: 877247 - DNA, 75 bp, synthetic construct
  source 1..75: mol_type = other DNA
ggtcgaaccgaaactgctgattctggatgaagcggtttcgaaccttgatctcgtgttacaggcgggcgtcattcg

SEQ ID NO: 877248 - DNA, 75 bp, synthetic construct
  source 1..75: mol_type = other DNA
cccaacaattacaggtagtaggcttagatgaaatggctaaagttattgttgtggcgagaaatcgttatgatgagt

SEQ ID NO: 877249 - DNA, 75 bp, synthetic construct
  source 1..75: mol_type = other DNA
agaatgttttgctggcggcaaactacgatatggcagaagctcttcggcgtattgatgaacagcgttatacactga

SEQ ID NO: 877250 - DNA, 75 bp, synthetic construct
  source 1..75: mol_type = other DNA
atctctaaaggcgctcaacgctggctggacctcggtattgttcgttttcagccgtcggaaattgccaaaatagcc

SEQ ID NO: 877251 - DNA, 75 bp, synthetic construct
  source 1..75: mol_type = other DNA
taatgttgagctttccgcttctggctagtgcggctcccggtagtgatccgcttgcagaccagtatttttccaaaa

SEQ ID NO: 877252 - DNA, 75 bp, synthetic construct
  source 1..75: mol_type = other DNA
ccctcagatggggctgttatcacaacatcggcgtcttatcaggaacttgaccgtatagcgaaaactgcctttatc

SEQ ID NO: 877253 - DNA, 75 bp, synthetic construct
  source 1..75: mol_type = other DNA
agaaagatcgcgatgctgatttgcgctggattcatggcgtaatagttcaggccgcgtggtttgtaaaagcgtcac

SEQ ID NO: 877254 - DNA, 75 bp, synthetic construct
  source 1..75: mol_type = other DNA
gcgggagcggctggctatatggatgtcgctcaaaaagctgctaacagagcggtatcttttggcgagcataacagg

SEQ ID NO: 877255 - DNA, 75 bp, synthetic construct
  source 1..75: mol_type = other DNA
atgcgagttaaaaccagccgcaccaaatttatgccgtatgtgtcatttacctacccggaagacgcgcaggctaaa

SEQ ID NO: 877256 - DNA, 75 bp, synthetic construct
  source 1..75: mol_type = other DNA
cagaacgattgtcgatggcctgtttgacaaggcatatctggtaattggcgtcggttcgagccaggaaaaagtgac

SEQ ID NO: 877257 - DNA, 75 bp, synthetic construct
  source 1..75: mol_type = other DNA
tacattcaccttcggagcctggaagtcatccctgaactggaatgagacggaaaataaaggccgtcagcttgtacg

SEQ ID NO: 877258 - DNA, 75 bp, synthetic construct
  source 1..75: mol_type = other DNA
ggtacgggtaaaacaggtgggctggaaatcagcatccgcggaatgcctgccagttatacgctgatactgatcgat

SEQ ID NO: 877259 - DNA, 75 bp, synthetic construct
  source 1..75: mol_type = other DNA
cgcgacaatctggagatcagccccaatttatgggcgggcgttggcttagtgcgcggcggtgccggaacggcgctg

SEQ ID NO: 877260 - DNA, 75 bp, synthetic construct
  source 1..75: mol_type = other DNA
taaccgaattatccacaagattgtattacgccaagaaacttaaaatgcttagcgtacggaatttgttatatatat

SEQ ID NO: 877261 - DNA, 75 bp, synthetic construct
  source 1..75: mol_type = other DNA
acagtgctggtaagagtacgctttatgccggtgattacttccagacgggagcatcgacaacgggctatgtgatac

SEQ ID NO: 877262 - DNA, 75 bp, synthetic construct
  source 1..75: mol_type = other DNA
tatcacgggctttatgacagaattctccaacaagatcgtatcttattccattgatgataatacccgcagctacac

SEQ ID NO: 877263 - DNA, 75 bp, synthetic construct
  source 1..75: mol_type = other DNA
tcaacagccgtatcctccgctttactttggcggatcgtcagacgtcgcccaggagctggcggcagaacaagttga

SEQ ID NO: 877264 - DNA, 75 bp, synthetic construct
  source 1..75: mol_type = other DNA
gtcgccatcccacagattccccaaccgcagccgctgaacctgcaaggcgaagcggtggcaaatgagtttatccca

SEQ ID NO: 877265 - DNA, 75 bp, synthetic construct
  source 1..75: mol_type = other DNA
tcaacaaccttatcctccgctttactttggcggatcgtcagacgtcgcccaggatctggccgcagaacaagttga

SEQ ID NO: 877266 - DNA, 75 bp, synthetic construct
  source 1..75: mol_type = other DNA
gtcgccatcccggaaattccccagccgcagccgttaaatctgcaaggcgaagctgtggcgaatgattttatcccc

SEQ ID NO: 877267 - DNA, 75 bp, synthetic construct
  source 1..75: mol_type = other DNA
ggtgacgcagcggctgaagtttcttgtcgccctgcgtcccagcgtaacctcacctaccgttgccgctcgccaggc

SEQ ID NO: 877268 - DNA, 75 bp, synthetic construct
  source 1..75: mol_type = other DNA
aactgtggcagcatctggcgatcagttcctggcgggcgctgattggcttttcaattggcggatcgctgggcctga

SEQ ID NO: 877269 - DNA, 75 bp, synthetic construct
  source 1..75: mol_type = other DNA
cttcatgtgtgcaaagtaaaacagcagaatacagtgcagtagccgggcctttagccaaacaaatggcagagcaat

SEQ ID NO: 877270 - DNA, 75 bp, synthetic construct
  source 1..75: mol_type = other DNA
cggatgccctgacgctgaatgctgcggtgaataacctgctcaacaaggattacagtgacgtgagcctgtacagtg

SEQ ID NO: 877271 - DNA, 75 bp, synthetic construct
  source 1..75: mol_type = other DNA
agaaaaagctgactaacgcagccgccagtgtttctgtgattagccaggaggaattgcagtccagccagtaccacg

SEQ ID NO: 877272 - DNA, 75 bp, synthetic construct
  source 1..75: mol_type = other DNA
accagtggccgcgaccaactgcccgcaagcccgctgagctacccagagttaccgcaagagcacgagaacatccgt

SEQ ID NO: 877273 - DNA, 75 bp, synthetic construct
  source 1..75: mol_type = other DNA
gcggctatctggaatgaccaaacggtggatgcagataaccgcattgcctggtttgaagcgcggactttagctggt

SEQ ID NO: 877274 - DNA, 75 bp, synthetic construct
  source 1..75: mol_type = other DNA
gccacaggtaggcactaaatttggtcgctggttggatctcacctttatgcaattacaactcgacgatcgtagcga

SEQ ID NO: 877275 - DNA, 75 bp, synthetic construct
  source 1..75: mol_type = other DNA
agcgttatgataaccgggatggtcaactgggcagtctgacagggggatatgaccatactctgcgctatgagcgaa

SEQ ID NO: 877276 - DNA, 75 bp, synthetic construct
  source 1..75: mol_type = other DNA
tctggtgtcgatgtttgtcggctggctggagcgcaaacgctcaccgctcgatccagtagtgcgatcgcttgtcag

SEQ ID NO: 877277 - DNA, 75 bp, synthetic construct
  source 1..75: mol_type = other DNA
tgacgctcaggcgctcaccgaactgacggcattgatcggcctgcaaaatctgtcggctcgttttaattctgccat

SEQ ID NO: 877278 - DNA, 75 bp, synthetic construct
  source 1..75: mol_type = other DNA
gcgttatgaactgggtgtagatgcaggttataccttcacctacagcgaagaccaggctctgactccgtacttcaa

SEQ ID NO: 877279 - DNA, 75 bp, synthetic construct
  source 1..75: mol_type = other DNA
tgagcacgctccctgagcacatgccggaacgtcacagcaagcagcaacgctggaccccagggcgtcttaaacagt

SEQ ID NO: 877280 - DNA, 75 bp, synthetic construct
  source 1..75: mol_type = other DNA
tgacgctcaggcgctcaccgaactgacggcattgatcggcctgcaaaacctgtcggctcgttttaattctgctat

SEQ ID NO: 877281 - DNA, 75 bp, synthetic construct
  source 1..75: mol_type = other DNA
atgaaagtcgccgagcgcaccggcagcagcgataaactgctggcagtggctgactggcggcaaagcccgctcttt

SEQ ID NO: 877282 - DNA, 75 bp, synthetic construct
  source 1..75: mol_type = other DNA
gggcttgccggtaaaccgcgggagcttaaggagtctaaccttatcctgaattcattgctgcttacccctctggga

SEQ ID NO: 877283 - DNA, 75 bp, synthetic construct
  source 1..75: mol_type = other DNA
aaagataatgtccagtcggtgtttaccgttggcggctttggcttcagcggccaggggcaaaacaacggcctggcg

SEQ ID NO: 877284 - DNA, 75 bp, synthetic construct
  source 1..75: mol_type = other DNA
ctctggcacgatggcaccgctttctgcctactcgtctaccgaatggacctatggttcaccgcgactggaacgcta

SEQ ID NO: 877285 - DNA, 75 bp, synthetic construct
  source 1..75: mol_type = other DNA
aaaatgttaggcattgttcggggaacagaagacgtttccatatttgagagactgtttacagtacttaattttaat

SEQ ID NO: 877286 - DNA, 75 bp, synthetic construct
  source 1..75: mol_type = other DNA
tcaaccagtggtatgtacgcaacgcctccggcacgatggcaccgctttccgcttattcttcaacagaatggacct

SEQ ID NO: 877287 - DNA, 75 bp, synthetic construct
  source 1..75: mol_type = other DNA
cgtcgagctgggggcggaagattattccaccgtggcgcgctataacggcaaacctgctgccggtatcgccatcaa

SEQ ID NO: 877288 - DNA, 75 bp, synthetic construct
  source 1..75: mol_type = other DNA
ttatcactggctgcgcaatcgccgaaccaggttaccggggtacgcccgaacggcctggaagatacgccaatgttc

SEQ ID NO: 877289 - DNA, 75 bp, synthetic construct
  source 1..75: mol_type = other DNA
ttcgtcgctatgctgtgagtaccgcgcttgaagatttaacaattccagatgtcggtaaaaaacaggcaaaaaaag

SEQ ID NO: 877290 - DNA, 75 bp, synthetic construct
  source 1..75: mol_type = other DNA
ctatcgaatactggatacgtgaatatgcagaagagaatcgcgcgaatgttgagcggcataaagcggagctacgca

SEQ ID NO: 877291 - DNA, 75 bp, synthetic construct
  source 1..75: mol_type = other DNA
tatgggggctaccccagataatctggatctgctgtcagcactaacaggcagcggcgaaacggatatgcgaactgc

SEQ ID NO: 877292 - DNA, 75 bp, synthetic construct
  source 1..75: mol_type = other DNA
cctcctgaatttcgcccccggctcgtggtttgccaacctgcgaaaaaaactcaatcttgggagtctggtaacagg

SEQ ID NO: 877293 - DNA, 75 bp, synthetic construct
  source 1..75: mol_type = other DNA
gggctttatccctggtggcattggttgctggagagagaaaacccccgtacgttgcaggtatgcacctgacaacat

SEQ ID NO: 877294 - DNA, 75 bp, synthetic construct
  source 1..75: mol_type = other DNA
gatttacaaccgtagtctgtacttgcctgagaaactggatgcgctgaataaatggtatgaccgattagaacttct

SEQ ID NO: 877295 - DNA, 75 bp, synthetic construct
  source 1..75: mol_type = other DNA
ttaggagaggccgctgctggaaaaagtaccggtgacgcgatgaagtttatggcagaactggtggctaaacttccg

SEQ ID NO: 877296 - DNA, 75 bp, synthetic construct
  source 1..75: mol_type = other DNA
gaacaactggcgcgcgccagcgaaatgctgaaggcggtcgatcttgacgatagcgtgctcgacaaacgcccaccg

SEQ ID NO: 877297 - DNA, 75 bp, synthetic construct
  source 1..75: mol_type = other DNA
atgactttacttaacgtctgcgacctttcacatcactatgcgcacggtggatttagcggaaaacatcagcatcag

SEQ ID NO: 877298 - DNA, 75 bp, synthetic construct
  source 1..75: mol_type = other DNA
cttctgtcagcgggtgatggtgatggacaacggacaaatcgtcgaaacccaggtggtgggagagaaattaacctt

SEQ ID NO: 877299 - DNA, 75 bp, synthetic construct
  source 1..75: mol_type = other DNA
ccataaatgataacaccaatagctatgtaaacagcggaaaggcccggttgcatggtgtggaatttgccggcacat

SEQ ID NO: 877300 - DNA, 75 bp, synthetic construct
  source 1..75: mol_type = other DNA
cagattgaagaaacactgctgcgttatgaaccacgcctgagtcagatacaggtggaattactcccccagccccgt

SEQ ID NO: 877301 - DNA, 75 bp, synthetic construct
  source 1..75: mol_type = other DNA
tgatgcgatctatcactcgcacgacactatcggtccgtactatgtggttggccctggtattgcgatgcctcatgc

SEQ ID NO: 877302 - DNA, 75 bp, synthetic construct
  source 1..75: mol_type = other DNA
attatatcgctccagttgccccaggagctttgcttgagaggattgaagaaacgcttgttacgtctaattttgagc

SEQ ID NO: 877303 - DNA, 75 bp, synthetic construct
  source 1..75: mol_type = other DNA
aaatatgaatgggcttgatggcctgatgtacatgtcttcaaccagcgatgcggcgggtaatgcctccatcactct

SEQ ID NO: 877304 - DNA, 75 bp, synthetic construct
  source 1..75: mol_type = other DNA
caggtcggattgctgaccaccatcgggctttccgccaagaacgccatcctgatcgtcgaatttgcggttgagatg

SEQ ID NO: 877305 - DNA, 75 bp, synthetic construct
  source 1..75: mol_type = other DNA
tttcccatcactatgcgcacggtggatttagcggcaaacatcaacaccaggcggtgctgaataacgtttctttga

SEQ ID NO: 877306 - DNA, 75 bp, synthetic construct
  source 1..75: mol_type = other DNA
atggacttgatgagttgtgccctaatctttttttgcgggatggaatgccgtatcgcgtcgaatttggtaaaggct

SEQ ID NO: 877307 - DNA, 75 bp, synthetic construct
  source 1..75: mol_type = other DNA
atgatgctttcaacagccctcagcggcccaccttggacggggttcggggctaatgagtttggtgcacgaccaaga

SEQ ID NO: 877308 - DNA, 75 bp, synthetic construct
  source 1..75: mol_type = other DNA
atctcgctgctgaacgtccggttctggaacgcgacggtatgttgatgatgattgatgacaaccgtatcgacctgc

SEQ ID NO: 877309 - DNA, 75 bp, synthetic construct
  source 1..75: mol_type = other DNA
cgatttgcctggctacgcctgcgcctgttgccgtgctacccgccatgaaccagcagatgttccgtgctgcggcta

SEQ ID NO: 877310 - DNA, 75 bp, synthetic construct
  source 1..75: mol_type = other DNA
cgatccgttaaccattgttgatatggcggtagcgcatttttcgcccgtcaacgacctgaaacatctgaacattat

SEQ ID NO: 877311 - DNA, 75 bp, synthetic construct
  source 1..75: mol_type = other DNA
aaaagaccatcgaccctacgtcgttggatttgccgccgaaacaaataatgtggaagaatacgcccggcaaaaacg

SEQ ID NO: 877312 - DNA, 75 bp, synthetic construct
  source 1..75: mol_type = other DNA
ggcgcgaagaaactggctgacagcggcctgaatattattgcagcaaaaggtctgacggatgcagctcagcaggtt

SEQ ID NO: 877313 - DNA, 75 bp, synthetic construct
  source 1..75: mol_type = other DNA
aactacgttgcgctggacggtaacatcggttgtatggttaacggcgcaggcctggcgatgggcaccatggacatc

SEQ ID NO: 877314 - DNA, 75 bp, synthetic construct
  source 1..75: mol_type = other DNA
caaaatcagaccgcagaaaattttgttctggaacccggagaaacgcttttcaaaattccccgttacgtgccccat

SEQ ID NO: 877315 - DNA, 75 bp, synthetic construct
  source 1..75: mol_type = other DNA
gcaatggcggaagggcgccatgcggcgcagggaattattgactggctggggataaaatcagtcaaatctcactaa

SEQ ID NO: 877316 - DNA, 75 bp, synthetic construct
  source 1..75: mol_type = other DNA
cgttggcgtcggcacttaccgttccatgaaagcgggcttacccaatgaagatgcgccgggcgtttatgacgctct

SEQ ID NO: 877317 - DNA, 75 bp, synthetic construct
  source 1..75: mol_type = other DNA
gataaatctctgctggcgcgtcgtcgggaaatcttcagcgcgatgggaattcacttcgaactcaattgtgaagtg

SEQ ID NO: 877318 - DNA, 75 bp, synthetic construct
  source 1..75: mol_type = other DNA
cgacaggttgacagcagacgtgccggatggtgccgaggcactcatactggatctgtatcgccgaatgccgtccgt

SEQ ID NO: 877319 - DNA, 75 bp, synthetic construct
  source 1..75: mol_type = other DNA
gtcgctggctggaaagaaactcaggtgagtgatatggatttcgacacaatcatggaaaaggcttacgaagaatac

SEQ ID NO: 877320 - DNA, 75 bp, synthetic construct
  source 1..75: mol_type = other DNA
gtcttcgttggcgtaggcacttaccgttccatgaaagcgggtttacccaatgaagatgcgccgggcgtttatgac

SEQ ID NO: 877321 - DNA, 75 bp, synthetic construct
  source 1..75: mol_type = other DNA
cgcatggagtgcggacgcggtaaggggcttggcgggtcatcactgatcaacggcatgtgttacatccgtggtaac

SEQ ID NO: 877322 - DNA, 75 bp, synthetic construct
  source 1..75: mol_type = other DNA
ggcgtatgtcacactcgaaccctgtagccatcatggtcgtacgccaccgtgttgtgatgcattaattgctgcggg

SEQ ID NO: 877323 - DNA, 75 bp, synthetic construct
  source 1..75: mol_type = other DNA
atggcgaaattgtcggtgaaggttaccatcaacgagcgggtgaaccgcatgccgaggtacacgcgttgcgcatgg

SEQ ID NO: 877324 - DNA, 75 bp, synthetic construct
  source 1..75: mol_type = other DNA
tgcgtatgtgacactcgaaccttgcagccatcacggccgtacgccgccttgctgtgatgcattaattgccgcagg

SEQ ID NO: 877325 - DNA, 75 bp, synthetic construct
  source 1..75: mol_type = other DNA
atggcaaaacactaccatcgtctgaaacctgtgaaagattaccaggatattgatgatgtactgttcaagttttcg

SEQ ID NO: 877326 - DNA, 75 bp, synthetic construct
  source 1..75: mol_type = other DNA
atgagcgtaaaagttatcgtcacagacatggacggtacttttcttaacgatgccaaaacgtacaatcgggcacgt

SEQ ID NO: 877327 - DNA, 75 bp, synthetic construct
  source 1..75: mol_type = other DNA
acctggtttgcccgaacgcaggatgacacccgcgagtggccggaaacagtgcgcaccttgctgatcccggaacat

SEQ ID NO: 877328 - DNA, 75 bp, synthetic construct
  source 1..75: mol_type = other DNA
gcgtcgagtggctggaaggcgacagcaccattccaacccgcgcgacagcgaataaagaggtgctgttatgtgcag

SEQ ID NO: 877329 - DNA, 75 bp, synthetic construct
  source 1..75: mol_type = other DNA
gcgctggatctcgataactgggcgcaagaacccggtctggagaactggagctacctcgactgcctgccctactac

SEQ ID NO: 877330 - DNA, 75 bp, synthetic construct
  source 1..75: mol_type = other DNA
gcgtcgagtggctggaaggcgacagcaccattccgacccgcgcggcggcgaataaagaagtgctgttatgtgcag

SEQ ID NO: 877331 - DNA, 75 bp, synthetic construct
  source 1..75: mol_type = other DNA
gccaaaggtgcgaccgcctatgtcacactcgaaccctgtagccatcatggtcgtacgccaccgtgctgtgacgca

SEQ ID NO: 877332 - DNA, 75 bp, synthetic construct
  source 1..75: mol_type = other DNA
gagccagtggatcacgtctcctcaggcgcgacgcgatgtacaacgtctgcgtgcgcaaagtcatgccattttaac

SEQ ID NO: 877333 - DNA, 75 bp, synthetic construct
  source 1..75: mol_type = other DNA
gggcgctaaagctggcgcaacgaggacgttttaccacgcatcccaacccgaatgtcgggtgcgtcattgtcaaag

SEQ ID NO: 877334 - DNA, 75 bp, synthetic construct
  source 1..75: mol_type = other DNA
agcaaaagtgtattggctgtaaatcctgcgtggtggcctgtccatttggtacgatgcaaatcgtcctgacacccg

SEQ ID NO: 877335 - DNA, 75 bp, synthetic construct
  source 1..75: mol_type = other DNA
cggccacgcgggcccggaagacgcttgttctgaacagtgtacttcgccagattctggcaaacagtcgtttcaccg

SEQ ID NO: 877336 - DNA, 75 bp, synthetic construct
  source 1..75: mol_type = other DNA
cgttgtctgaggtgcatgtccgtgccaggccgccactgcgcgcagcagaggtgctgccgctggccgtgcgtctct

SEQ ID NO: 877337 - DNA, 75 bp, synthetic construct
  source 1..75: mol_type = other DNA
ctgctctttgctctcgcggctgtaccactgctcttctttcgccagtatgaagcgatggaaggtcgtatccaacac

SEQ ID NO: 877338 - DNA, 75 bp, synthetic construct
  source 1..75: mol_type = other DNA
gcgcttcatttgattacaacctgccgtgtatcgctgaaaaaagcctgattgtcgtggcatcagtggcagagtatt

SEQ ID NO: 877339 - DNA, 75 bp, synthetic construct
  source 1..75: mol_type = other DNA
cgcttttcttcttaaccgggaacaaactgaccaattgcgtgctatttgccttcctggcaatgttgccaacaaaaa

SEQ ID NO: 877340 - DNA, 75 bp, synthetic construct
  source 1..75: mol_type = other DNA
aaaaacctatacagctgaactttcgtccattgcaggtacccccatcgaggctgggcccttcgatacagtggtgct

SEQ ID NO: 877341 - DNA, 75 bp, synthetic construct
  source 1..75: mol_type = other DNA
gaaggcttatgacatcaacctgactgacctgctggaagaagagatcgacccggcgctgggtaacggtggtctggg

SEQ ID NO: 877342 - DNA, 75 bp, synthetic construct
  source 1..75: mol_type = other DNA
ggagtttttgattgggcgtctgacgggcaacaacctgttaaacctcggctggtatcaggctgttcaggattcact

SEQ ID NO: 877343 - DNA, 75 bp, synthetic construct
  source 1..75: mol_type = other DNA
cgggcaacaacctgttgaatctcggctggtatcaggatgtacaggattcgttgaaggcttatgacatcaatctga

SEQ ID NO: 877344 - DNA, 75 bp, synthetic construct
  source 1..75: mol_type = other DNA
aatcatccgcatccgattcactgcctttaatacaacggatcagctatggttcgctggatgttgcaggtaatctgc

SEQ ID NO: 877345 - DNA, 75 bp, synthetic construct
  source 1..75: mol_type = other DNA
tcgcccccagcaccaatccgaccgaaactatcattaacaacaccatcagtatgctggccgctggtaatgctgtct

SEQ ID NO: 877346 - DNA, 75 bp, synthetic construct
  source 1..75: mol_type = other DNA
caggttggcgacaaattgaaggtggtgttcctgccggattattgcgtttcggcggcggaaaaactgatcccggcg

SEQ ID NO: 877347 - DNA, 75 bp, synthetic construct
  source 1..75: mol_type = other DNA
tgccagacggtagcgccaacaaaaaactggttgggaaaagcccatcagccttgctggaagcggcaggcctccctt

SEQ ID NO: 877348 - DNA, 75 bp, synthetic construct
  source 1..75: mol_type = other DNA
taaccttaatattgatacaggttttggcccccatccttttatacaaaaacaagaagtggaaaattttcaacagaa

SEQ ID NO: 877349 - DNA, 75 bp, synthetic construct
  source 1..75: mol_type = other DNA
catctttcgtaccaatatgtccgtactctacagtgccggtcgctgggcggagcagatggagaacgtcgacgacag

SEQ ID NO: 877350 - DNA, 75 bp, synthetic construct
  source 1..75: mol_type = other DNA
gggaggagatgtggcaggatgcccatgcccgcgcctttaccgtcgccaaagtgacccgccttgatatcctggaag

SEQ ID NO: 877351 - DNA, 75 bp, synthetic construct
  source 1..75: mol_type = other DNA
gggcgagaaaatggtccggcctgtgtcgaaaactgtccagcggatgcgctgcaactggttactgacaccgcgctc

SEQ ID NO: 877352 - DNA, 75 bp, synthetic construct
  source 1..75: mol_type = other DNA
aacgtccagccggtggcgcttgagctgaatgaacaaggtcacgtctgcgggattcgtttcctgcgcacgcgtctt

SEQ ID NO: 877353 - DNA, 75 bp, synthetic construct
  source 1..75: mol_type = other DNA
tgcgcaccgcgcgtcaggaacatcaaccgtggcatgccagtaccgcggcgcaagaaatgccggtaatgagtaaag

SEQ ID NO: 877354 - DNA, 75 bp, synthetic construct
  source 1..75: mol_type = other DNA
gcctgtatctgctggtaagtggccaggagtttgtcatgcccttcggctgggtacagttcagtgagttactgcgca

SEQ ID NO: 877355 - DNA, 75 bp, synthetic construct
  source 1..75: mol_type = other DNA
tgtcaaaaacggcccctcctgggcgggtattggcgtcggcggcgaaggctttacgacctttaccattgcaacacc

SEQ ID NO: 877356 - DNA, 75 bp, synthetic construct
  source 1..75: mol_type = other DNA
atccccccgccttaccgaactggcagaagagagcgctatcgaaacggggatgggaaataaagaagataagtatct

SEQ ID NO: 877357 - DNA, 75 bp, synthetic construct
  source 1..75: mol_type = other DNA
cgtatagtttgacgctcccgccagagagggcgattggctatctggagtcgaagggatacgtcctgtcgcatgact

SEQ ID NO: 877358 - DNA, 75 bp, synthetic construct
  source 1..75: mol_type = other DNA
tggatcagatgtatgccgagcacctgctgcgcccgctggcgagcggctgctttgaacttacggaggttccagacg

SEQ ID NO: 877359 - DNA, 75 bp, synthetic construct
  source 1..75: mol_type = other DNA
agccttcctgcgcgggcataacaggctggccaccctgccggctctgggcacgctgctcgatatcacccatgacct

SEQ ID NO: 877360 - DNA, 75 bp, synthetic construct
  source 1..75: mol_type = other DNA
tattttgtccaacaaccacagccatcgtcgcgatatggatgtaacgatcgttgttcattcgcctggcagcattgg

SEQ ID NO: 877361 - DNA, 75 bp, synthetic construct
  source 1..75: mol_type = other DNA
tggttcagacctggtagggaaggttgaaatgactgagtggttagttgactttgctgcccagcttcgcaaaggagg

SEQ ID NO: 877362 - DNA, 75 bp, synthetic construct
  source 1..75: mol_type = other DNA
cagttcaggcattctgcgatgttgttggcgacaacaccgaggttatcgctgaggtagttgggcgagatggcgttc

SEQ ID NO: 877363 - DNA, 75 bp, synthetic construct
  source 1..75: mol_type = other DNA
ttatcgcacagagttgctacgtgtttgatggcgagcaggatgaactatctgatgcgtatatctgcgcaacagacg

SEQ ID NO: 877364 - DNA, 75 bp, synthetic construct
  source 1..75: mol_type = other DNA
gaaaaattgtcgattgaactggatgccgcaaaacagcgcattgcagagctggatggtaatcgcacggcgctggca

SEQ ID NO: 877365 - DNA, 75 bp, synthetic construct
  source 1..75: mol_type = other DNA
tcatgctggttgtactgctgtctgcccaaattgctctcatgaagaacccagtgaaacagacgacattgtttggtc

SEQ ID NO: 877366 - DNA, 75 bp, synthetic construct
  source 1..75: mol_type = other DNA
ctggagcaattacttaaacagagtccaatagagatttacccggcacgcattccaaaagcccctgatttctggcat

SEQ ID NO: 877367 - DNA, 75 bp, synthetic construct
  source 1..75: mol_type = other DNA
cggtgacgctctggaaattatcggcgaaatgctgcgctttacccagggggacgtttttatagcgggctggaacaa

SEQ ID NO: 877368 - DNA, 75 bp, synthetic construct
  source 1..75: mol_type = other DNA
aaaagacaactgggcatttctggcgttaagtctctttggtgacgaaagcacggcacgggatctgacgacacagat

SEQ ID NO: 877369 - DNA, 75 bp, synthetic construct
  source 1..75: mol_type = other DNA
atgaaattctccaaattttctgagttggtgaatcgtattttgtccaacaaccacagccatcgtcgcgatatggat

SEQ ID NO: 877370 - DNA, 75 bp, synthetic construct
  source 1..75: mol_type = other DNA
cagagagcgattgagtcaattaagcaggctgattcggctgttaagttggcacacgagaagttttcagcgctggca

SEQ ID NO: 877371 - DNA, 75 bp, synthetic construct
  source 1..75: mol_type = other DNA
gcgtaagcatctctctctggcagaggaaagctgctggcagcgttgcgccgacaaactcattgccgcactgccaag

SEQ ID NO: 877372 - DNA, 75 bp, synthetic construct
  source 1..75: mol_type = other DNA
gcgcagggggtggatgctgctatagaagctgcaaaaaatctggtggcccaagaatatgagtataaggatttcaaa

SEQ ID NO: 877373 - DNA, 75 bp, synthetic construct
  source 1..75: mol_type = other DNA
ttgctgttggtatggatcttggtagaagctatagtgctggctatactgacaaaaaatatgtgacatcaacgggag

SEQ ID NO: 877374 - DNA, 75 bp, synthetic construct
  source 1..75: mol_type = other DNA
atcgcatctgcccttgtgcacagtggtgttgatgctatagagggagggatcttaaaaataactggtacatctaat

SEQ ID NO: 877375 - DNA, 75 bp, synthetic construct
  source 1..75: mol_type = other DNA
caagaggcctttaataatgcaaaagcccatttagaaaaggcactaaatactgtctatcagccaaatgatgacctt

SEQ ID NO: 877376 - DNA, 75 bp, synthetic construct
  source 1..75: mol_type = other DNA
gcggttccggcggtgacggataaggacggcaacggtaaggcggacacggcagacaaggctctggcggatgcggaa

SEQ ID NO: 877377 - DNA, 75 bp, synthetic construct
  source 1..75: mol_type = other DNA
aagcgaaggaaaaagaagcagaagcggcgctgactcaggcgaaggctgacaataagatcacccagcaggagcatg

SEQ ID NO: 877378 - DNA, 75 bp, synthetic construct
  source 1..75: mol_type = other DNA
atctgaagatggtgttaactataatgtgtatacacatgaggcagcgccagacattaaaatattaatcgatgaaca

SEQ ID NO: 877379 - DNA, 75 bp, synthetic construct
  source 1..75: mol_type = other DNA
gagacagatacctgaaacgccaaccactgatgctttcctggctgaagtccgggcgcagggattggagatgatgcg

SEQ ID NO: 877380 - DNA, 75 bp, synthetic construct
  source 1..75: mol_type = other DNA
ggcctgaatattattgcagcaaaaggtctgacggatgcagctcagcaagttgttgccgcagtggaggggaaataa

SEQ ID NO: 877381 - DNA, 75 bp, synthetic construct
  source 1..75: mol_type = other DNA
agaaactggctgacagcggcctgaatattattgcagcaaaaggtctgacggatgcagctcagcaagttgttgccg

SEQ ID NO: 877382 - DNA, 75 bp, synthetic construct
  source 1..75: mol_type = other DNA
agccagtatatgcagcttaatggcggtccacagttatttgtcgttttggccttcgctgaagacggacaacaaaaa

SEQ ID NO: 877383 - DNA, 75 bp, synthetic construct
  source 1..75: mol_type = other DNA
agcaggtgcgctacgccaccgcacgctcggtcttcaaatgggctggcaccgataccgtcaaagtcggcagcgatg

SEQ ID NO: 877384 - DNA, 75 bp, synthetic construct
  source 1..75: mol_type = other DNA
atgaaattttccaaattttctgagttggtgaatcgtatcttgtccaacaaacacagccagcgttgcgatatggat

SEQ ID NO: 877385 - DNA, 75 bp, synthetic construct
  source 1..75: mol_type = other DNA
aacccagcctgcaacgtgtggctaaatacagtaaaaacttcccccatgcgacactcgccgcactggcagaactgc

SEQ ID NO: 877386 - DNA, 75 bp, synthetic construct
  source 1..75: mol_type = other DNA
gaagaggtcgatagtatttgctggggaatcatcatgcaatcgtcaacgaaggttggcgaacgaccacgcaacgag

SEQ ID NO: 877387 - DNA, 75 bp, synthetic construct
  source 1..75: mol_type = other DNA
ggctggctgaatggcaggaagaggaagcgataccaccaagaaataacatccgaaataaacataccggcacatctg

SEQ ID NO: 877388 - DNA, 75 bp, synthetic construct
  source 1..75: mol_type = other DNA
cagagtaaatatgccagcgcacctgccaccggaagcaatcacagcactagcgagataagaaagaacattcagtca

SEQ ID NO: 877389 - DNA, 75 bp, synthetic construct
  source 1..75: mol_type = other DNA
ctacaacaagcaggcaagaagaaaaatatcacctggcattatgataaatgttcactgaagtggcaatccgctatc

SEQ ID NO: 877390 - DNA, 75 bp, synthetic construct
  source 1..75: mol_type = other DNA
catccagacactgggtgatgaattgctacaaaaagctgagaagaaaaaaaacattgtctggcgttatgaaaattt

SEQ ID NO: 877391 - DNA, 75 bp, synthetic construct
  source 1..75: mol_type = other DNA
aatgcgccggaaggcgattttgaccgctcattctctgatggcgttctcgaagatatcgccgcccagcttcgcaaa

SEQ ID NO: 877392 - DNA, 75 bp, synthetic construct
  source 1..75: mol_type = other DNA
aatcgcgccctaacctgaccattcgtactcacgccatgaccgatcacatcatttttgacggcaaacgcgcggtgg

SEQ ID NO: 877393 - DNA, 75 bp, synthetic construct
  source 1..75: mol_type = other DNA
gcagtgaaagagcacggtttccagtgccacgtcggctcaatgcgctcgccaagccgtgggcatgtgcggattaaa

SEQ ID NO: 877394 - DNA, 75 bp, synthetic construct
  source 1..75: mol_type = other DNA
gcgagaacgactaccacggtggcgatggcccggtgagcgtcaccacctccaaacccggcgtcaatccgctgtttg

SEQ ID NO: 877395 - DNA, 75 bp, synthetic construct
  source 1..75: mol_type = other DNA
ggatggccgaatggccaaaggataacctccccttcaataccattagcaccaaggaaacataccaggataatccgc

SEQ ID NO: 877396 - DNA, 75 bp, synthetic construct
  source 1..75: mol_type = other DNA
gcgctggatctcgacaactgggcgcaagaacctggccttgagaactggagttatctcgactgtctgccctactat

SEQ ID NO: 877397 - DNA, 75 bp, synthetic construct
  source 1..75: mol_type = other DNA
aataaagaagtgctgttatgtgcaggcgcgattgcttcaccgcagatcctgcaacgctccggcgtcggcaacgct

SEQ ID NO: 877398 - DNA, 75 bp, synthetic construct
  source 1..75: mol_type = other DNA
gaatatacttactcagatgaataatgatatggcactgatacagctgcatcatatatcgcaacgggcgaaatcccg

SEQ ID NO: 877399 - DNA, 75 bp, synthetic construct
  source 1..75: mol_type = other DNA
gatgtatggctgttcctgaattatatactgcccggtaaactggatgcggcgcgcgaatcattagtggttcagtgg

SEQ ID NO: 877400 - DNA, 75 bp, synthetic construct
  source 1..75: mol_type = other DNA
cgtcttgatttggcaccgctcgaattaactccgcaagtttactggcaaccaggcgaacaagagaggcttgccgcc

SEQ ID NO: 877401 - DNA, 75 bp, synthetic construct
  source 1..75: mol_type = other DNA
ttcactggagtggcggtccgccatccagcaggcgatcaatttgattggtgagcataaaccgtcaatcccagcccg

SEQ ID NO: 877402 - DNA, 75 bp, synthetic construct
  source 1..75: mol_type = other DNA
ctgtttctgaattatatactccccggaaaactggatgctgcacgcaattcactcattgttcagtggcattactac

SEQ ID NO: 877403 - DNA, 75 bp, synthetic construct
  source 1..75: mol_type = other DNA
gcgcaaaatgacagccagcagttacttgatgaaatcgtgcaacaagaggggctggaatatgcgacggatgtagtg

SEQ ID NO: 877404 - DNA, 75 bp, synthetic construct
  source 1..75: mol_type = other DNA
ttacgcgaacagggaattgcagccgttccccgcctggcgatgtatgctcataaagaagactgtggcagcctgctg

SEQ ID NO: 877405 - DNA, 75 bp, synthetic construct
  source 1..75: mol_type = other DNA
gcccaggccgtgctgaagagttatttatcggcaccgccgaaacctgctttcgagagtactcatagcaacgacctg

SEQ ID NO: 877406 - DNA, 75 bp, synthetic construct
  source 1..75: mol_type = other DNA
tatttagcgatcgagaagccagctacatgtcgcatgaaaaccacttcggctacgcggcctgcgctgcccttttgc

SEQ ID NO: 877407 - DNA, 75 bp, synthetic construct
  source 1..75: mol_type = other DNA
atgagcttccgttctcttcgagtgtaccgtgacaataaatccgtcacttttgccgaacttgatgtgtttgatttg

SEQ ID NO: 877408 - DNA, 75 bp, synthetic construct
  source 1..75: mol_type = other DNA
ctacaacaagcaggcaagaagcaaaatatcacctggcattacgataaatgttcactggagtggcggtccgccatc

SEQ ID NO: 877409 - DNA, 75 bp, synthetic construct
  source 1..75: mol_type = other DNA
cggacgacgcgcaactggaactgaaatttaaaaaaggcaaaacgccgctaagccatcgccgctggccgggcgaac

SEQ ID NO: 877410 - DNA, 75 bp, synthetic construct
  source 1..75: mol_type = other DNA
tggcgaattactgcaaaccgtggcaaaccgctggcagcgtacagatgtatggcctgccctggagcaattacttaa

SEQ ID NO: 877411 - DNA, 75 bp, synthetic construct
  source 1..75: mol_type = other DNA
ggatgaactggaacaacgccctgcgctatgacgtgcataacctcgacagcagccgctcggtggcttacggcgacg

SEQ ID NO: 877412 - DNA, 75 bp, synthetic construct
  source 1..75: mol_type = other DNA
tctggtggcgtaacaacagggggagatgcgactggcagcggtagcaacaacctcaacggttatgtggtcggtacc

SEQ ID NO: 877413 - DNA, 75 bp, synthetic construct
  source 1..75: mol_type = other DNA
gaataagaacatcaccattctggtgcaaattgaaagccagcaaggcgttgataacgttgatgctatcgccgcaac

SEQ ID NO: 877414 - DNA, 75 bp, synthetic construct
  source 1..75: mol_type = other DNA
ctctataactctgcggtagtgaataacgcggggacctggaaaatgggttatcaggatgaaaataacaatgccggg

SEQ ID NO: 877415 - DNA, 75 bp, synthetic construct
  source 1..75: mol_type = other DNA
tgggttatcaggatgaaaacaacaatgccgggacgctggatattgacgataagtcaacgttcaacaacagcggca

SEQ ID NO: 877416 - DNA, 75 bp, synthetic construct
  source 1..75: mol_type = other DNA
atgcaactggatgccaacgctaccgcagacgcggtgatcgagaacaacggcacgattaatatctatgctaacgat

SEQ ID NO: 877417 - DNA, 75 bp, synthetic construct
  source 1..75: mol_type = other DNA
gccgtatgcagtcccggcgatatcaccccgtcctggatggtggtgtttattcctgccagcggtcgcccgttctcc

SEQ ID NO: 877418 - DNA, 75 bp, synthetic construct
  source 1..75: mol_type = other DNA
tttttccggtacaggtccgcttcacgccatctcacggcaacttccatatcgccgtatgcagtcccggcgatatca

SEQ ID NO: 877419 - DNA, 75 bp, synthetic construct
  source 1..75: mol_type = other DNA
tcctgccagcggtcgcccgttttctgttatcagcaccctgcctgcctggtcgccggaggttatttctcacacact

SEQ ID NO: 877420 - DNA, 75 bp, synthetic construct
  source 1..75: mol_type = other DNA
atagaaagtcagcagggcgtagataacgtcgatgctattgccgctaccgaaggtgtagacggcatcttcgtcggc

SEQ ID NO: 877421 - DNA, 75 bp, synthetic construct
  source 1..75: mol_type = other DNA
tatctggaatggggtgcgacgtttgtggctgtcggcagcgatctcggcgtcttccgctctgccactcagaaactg

SEQ ID NO: 877422 - DNA, 75 bp, synthetic construct
  source 1..75: mol_type = other DNA
aagtctgacggcgcgtctcgatgcagacggttacagccaggccagcatcatcagcattatgataacggagggtgc

SEQ ID NO: 877423 - DNA, 75 bp, synthetic construct
  source 1..75: mol_type = other DNA
gcgacgggtgttaatgtttcgggtgatggcaatacgattgaaatcgcaggcagcattctggttgataaagatcag

SEQ ID NO: 877424 - DNA, 75 bp, synthetic construct
  source 1..75: mol_type = other DNA
ccttgtcggcctggtgattccattagtctggccgattttcgccatgggtattagcggcttgggccatatgataaa

SEQ ID NO: 877425 - DNA, 75 bp, synthetic construct
  source 1..75: mol_type = other DNA
ccgcggataacgaagggcaaatcaccctggatacgctgtgggtcgatgaaaatgatgaaacatcgctgcgtaata

SEQ ID NO: 877426 - DNA, 75 bp, synthetic construct
  source 1..75: mol_type = other DNA
atgcttgccagctactcgtcatccattctgaacggcgaaacgggcattattgagatgtatggtcgtggcagcgtg

SEQ ID NO: 877427 - DNA, 75 bp, synthetic construct
  source 1..75: mol_type = other DNA
ggccgaatcgcgtgaactctggcgtgaagccgctcgatttttgcaaactaagtgcgttgacatttgccgcaccgg

SEQ ID NO: 877428 - DNA, 75 bp, synthetic construct
  source 1..75: mol_type = other DNA
gtctgtgctcggcgtcaccatcggtaataccgacggcaatatcatcgacttcgtgggtgatgctgccaacttact

SEQ ID NO: 877429 - DNA, 75 bp, synthetic construct
  source 1..75: mol_type = other DNA
acttctggttgaccaataaaggcattctgccaaccacggacgccgcggttctgaaagccaataacatccagagca

SEQ ID NO: 877430 - DNA, 75 bp, synthetic construct
  source 1..75: mol_type = other DNA
atctttgatggcgtaaatacggcaggtggcatcacctggagctacgacgatgatgggctcatccatatcactaaa

SEQ ID NO: 877431 - DNA, 75 bp, synthetic construct
  source 1..75: mol_type = other DNA
cacactggaaggtggctatcaggagcgcaatgccggagactttaacctgaatatgaacagtggcagcgaaacggc

SEQ ID NO: 877432 - DNA, 75 bp, synthetic construct
  source 1..75: mol_type = other DNA
ctctgcggtagtgaataacgcggggacctggaaaatgggttatcaggatgaaaataacaatgccgggacgctgga

SEQ ID NO: 877433 - DNA, 75 bp, synthetic construct
  source 1..75: mol_type = other DNA
ggtgatacgccagttccgccagatgacggcggtgatacgccggttccgccagatgacggcggtgatacgccggtt

SEQ ID NO: 877434 - DNA, 75 bp, synthetic construct
  source 1..75: mol_type = other DNA
gctgacgcgacgtttgatatgagtgatgtggattccttcacctattattatcgcgtggcgttatccaccattagt

SEQ ID NO: 877435 - DNA, 75 bp, synthetic construct
  source 1..75: mol_type = other DNA
aaaccacctttacctacagccaaaatgccgatggaagttacaccttaacggcgcctgatggcatgacgacgatag

SEQ ID NO: 877436 - DNA, 75 bp, synthetic construct
  source 1..75: mol_type = other DNA
cctcgctgcgcattggcgcgaagaccgatggtgcgatggatataaccgtcgggccgctggtgaatctgtggggct

SEQ ID NO: 877437 - DNA, 75 bp, synthetic construct
  source 1..75: mol_type = other DNA
catgcaaaccggatcaacaaaacggcatctggattgtgcaggcgcatgagtggggcaaatacgtgggacgggctg

SEQ ID NO: 877438 - DNA, 75 bp, synthetic construct
  source 1..75: mol_type = other DNA
tcgcggtatgccggggcatcaggcacatattgacgccagttgcatggattatttgtaccgcactggttgcataca

SEQ ID NO: 877439 - DNA, 75 bp, synthetic construct
  source 1..75: mol_type = other DNA
ttaatgacagttgcagcctgaacattagcggcagcgatgaagagcaggcgaagcgcgtgttggaagagtacatcc

SEQ ID NO: 877440 - DNA, 75 bp, synthetic construct
  source 1..75: mol_type = other DNA
gaagtgtctccacaagccaataacgatctgctttccgcaggcatggaactgctgaaagggaaactcttccgctaa

SEQ ID NO: 877441 - DNA, 75 bp, synthetic construct
  source 1..75: mol_type = other DNA
ccgtcgatccggcgaaaacttaccgtatggcgacgttaaacttcggtgcctccggcggtgatggttatccgcgtc

SEQ ID NO: 877442 - DNA, 75 bp, synthetic construct
  source 1..75: mol_type = other DNA
tacctgattcgcaccacgttcggtgatatacgccacttcatcgtcataatgggcgcgggcaataatctcaatatc

SEQ ID NO: 877443 - DNA, 75 bp, synthetic construct
  source 1..75: mol_type = other DNA
ttttcactgaaagcgctgctgggcgtaacctgtattgcgagcggattaatgctgattttccttcccacgacaaaa

SEQ ID NO: 877444 - DNA, 75 bp, synthetic construct
  source 1..75: mol_type = other DNA
gatacttcccggctgggaaggaactttttcgctgaaggctatgctgggcgtagcctgtattatgtgcggattaac

SEQ ID NO: 877445 - DNA, 75 bp, synthetic construct
  source 1..75: mol_type = other DNA
acatcctcgaatatgccaggcagcagaaatgtattgggcaactttgtaaaattccaccaggggatatggttgaga

SEQ ID NO: 877446 - DNA, 75 bp, synthetic construct
  source 1..75: mol_type = other DNA
taagccgcctgaacccggatttactgtacggcaacgtgctggcaagcggcgttggcgtgggtacactgaccctgt

SEQ ID NO: 877447 - DNA, 75 bp, synthetic construct
  source 1..75: mol_type = other DNA
ggacgagcaggagcaatttgaagcctaccagcaggtactactggcagcgggcgacaagccgattatcttccgcac

SEQ ID NO: 877448 - DNA, 75 bp, synthetic construct
  source 1..75: mol_type = other DNA
tggtgctggaaaaaccgactattctggtagccgaggatttaaccccaagccagtttttgagcctcgatttaaaaa

SEQ ID NO: 877449 - DNA, 75 bp, synthetic construct
  source 1..75: mol_type = other DNA
aaaaggggagcacgcaatgcgcgttgcatcccccttttccctcgggtgttgtactgatttttgagcggaatcgcg

SEQ ID NO: 877450 - DNA, 75 bp, synthetic construct
  source 1..75: mol_type = other DNA
atgcagttagcctcggatgcgacgacgaatggcgtgattgaaaataacggcacaattaacatctatgccagcaat

SEQ ID NO: 877451 - DNA, 75 bp, synthetic construct
  source 1..75: mol_type = other DNA
gataccgacgtgaaacagcagtacctggagttccgcagcgaaggggcgaagactttcgaaccgagcgaaggactg

SEQ ID NO: 877452 - DNA, 75 bp, synthetic construct
  source 1..75: mol_type = other DNA
agcaaccgctttagtatgctggcagatgccgcgccgaaagtgggtaacggtctggcgttcaacgttgtcgcgaaa

SEQ ID NO: 877453 - DNA, 75 bp, synthetic construct
  source 1..75: mol_type = other DNA
atctggtatccgtgacggtgattgccccgacggcgctggaagccgatgcctgggatactggcttaatggtactcg

SEQ ID NO: 877454 - DNA, 75 bp, synthetic construct
  source 1..75: mol_type = other DNA
ctttcgacctataaaaaagactctgcgctgatgcgctttaacgactcgcaaagtctgacaccgtggccggtaagt

SEQ ID NO: 877455 - DNA, 75 bp, synthetic construct
  source 1..75: mol_type = other DNA
ttttcggcctgaaacatcagatgtcttttgaaaacggcatgagctggaataacgcgctgcgctatgacgtgcata

SEQ ID NO: 877456 - DNA, 75 bp, synthetic construct
  source 1..75: mol_type = other DNA
ctgtcttgctcgcatgaaatcttaataagtcaggcggcttgtttctggcttttgtattttgaagatttcatgaaa

SEQ ID NO: 877457 - DNA, 75 bp, synthetic construct
  source 1..75: mol_type = other DNA
gccatgaaggtgaacaactacttctccacaactgatgcggaatatgagcgtatgaaaaatattcgaacggtaaag

SEQ ID NO: 877458 - DNA, 75 bp, synthetic construct
  source 1..75: mol_type = other DNA
aacgtcagatataaggcaattactaacaaacaagccagtattccaacagttttgacgttttgtccaagattaaag

SEQ ID NO: 877459 - DNA, 75 bp, synthetic construct
  source 1..75: mol_type = other DNA
gagtccatcggtatccagattgacggcgaccaggccatcgtcaataacgaaggcgagagcactatcaccaatggc

SEQ ID NO: 877460 - DNA, 75 bp, synthetic construct
  source 1..75: mol_type = other DNA
tctcttggtaagtcattaccactttttataaaagagacatctgagcataatatacagaaacgtgtcaatcgcctt

SEQ ID NO: 877461 - DNA, 75 bp, synthetic construct
  source 1..75: mol_type = other DNA
tgaaatcatatgcctctttacgaacagaagcggcggcttctgggtttatcaaatgcattcagtcttatatcagta

SEQ ID NO: 877462 - DNA, 75 bp, synthetic construct
  source 1..75: mol_type = other DNA
gacattggtccaggtctggcgaaagcctgtatcgcagggcgcgttaatggcgaactggtagatgcgtgcgatttg

SEQ ID NO: 877463 - DNA, 75 bp, synthetic construct
  source 1..75: mol_type = other DNA
aatgaatcttgtacatgccggatttaccgcaacgaccgaaatcatccgatctgcgttaccgactggatggatgaa

SEQ ID NO: 877464 - DNA, 75 bp, synthetic construct
  source 1..75: mol_type = other DNA
ggttgcgctggaagaaaacaacatcccgtttgaatatcaactgggtgaaggcgctttctacggtccgaaaattga

SEQ ID NO: 877465 - DNA, 75 bp, synthetic construct
  source 1..75: mol_type = other DNA
cgcatatcttctgtactgaagaacaaattcgcgatgaagttaacggatgtatccgtttagtctatgatatgtaca

SEQ ID NO: 877466 - DNA, 75 bp, synthetic construct
  source 1..75: mol_type = other DNA
cgaagcgcgtgaaacgtttgttaaacgcggcgagagctataaagtctccatcctggacgaaaatattgcccatga

SEQ ID NO: 877467 - DNA, 75 bp, synthetic construct
  source 1..75: mol_type = other DNA
gcagatgcagaaaggcttggccttgtatctgagctgattcgcctggcagagatcgacgccgaacaagaggatcac

SEQ ID NO: 877468 - DNA, 75 bp, synthetic construct
  source 1..75: mol_type = other DNA
ccttccttgtacaaaaggaacatgcctgctttggtgtgaagattgaaaatgagggaagcgatacctctataccat

SEQ ID NO: 877469 - DNA, 75 bp, synthetic construct
  source 1..75: mol_type = other DNA
acagcaacaataaaatgttgcagcgtatttacgggactgcgtgggcggataaaaaagctctcaacgcttacctgc

SEQ ID NO: 877470 - DNA, 75 bp, synthetic construct
  source 1..75: mol_type = other DNA
atggagcctggcaaactaacgataacgttgtgtttaatatctaagaaaactggaactcctatgtcacaacccatt

SEQ ID NO: 877471 - DNA, 75 bp, synthetic construct
  source 1..75: mol_type = other DNA
gaacaaattccataacgtcaccaacggtattaccccacgtcgctggatcaaacagtgcaacccggcactggcggc

SEQ ID NO: 877472 - DNA, 75 bp, synthetic construct
  source 1..75: mol_type = other DNA
gcgcatccgtttgatctgactaaatttaacgatggtgatttcctgcgtgccgaacagcagggcatcaacgcggaa

SEQ ID NO: 877473 - DNA, 75 bp, synthetic construct
  source 1..75: mol_type = other DNA
gcgtaccgcgcgtgttcctgttcggggcgaaagccgcgccgggctactatctggcgaagaacattatttttgcga

SEQ ID NO: 877474 - DNA, 75 bp, synthetic construct
  source 1..75: mol_type = other DNA
gtcgatggcaaacaggttgaagcgccggatgactggcatcgcagtaactacccgtggttccgccacaacgaagca

SEQ ID NO: 877475 - DNA, 75 bp, synthetic construct
  source 1..75: mol_type = other DNA
tagcacagccgctacgtttgtggcaggcgactcatgctcatccgttcaatcttaccaaatttaatgacggtgatt

SEQ ID NO: 877476 - DNA, 75 bp, synthetic construct
  source 1..75: mol_type = other DNA
ggtattggcggtaaagtgacaaaagatggacgctgggaacccgaatttactattactggtcaggcgtgggatctc

SEQ ID NO: 877477 - DNA, 75 bp, synthetic construct
  source 1..75: mol_type = other DNA
atgaggtggaatggcacaagagacttacaaaagaatcaggcaaaacgcctgattgatgagagccccgaactactg

SEQ ID NO: 877478 - DNA, 75 bp, synthetic construct
  source 1..75: mol_type = other DNA
gtccgggtcacgtgcagattttcaaccaggggctgaagtcttatcgcgacctgccgctgcgtatggccgagttcg

SEQ ID NO: 877479 - DNA, 75 bp, synthetic construct
  source 1..75: mol_type = other DNA
tgccttcgagtcgatgctgcacagtatcggcaaacaggggggggatccgtatctggtcatggcggattttgcagc

SEQ ID NO: 877480 - DNA, 75 bp, synthetic construct
  source 1..75: mol_type = other DNA
tgatcaatctggaaaaattcgctgatgatgcgaaattccgtcagcaatatcgcgagatcaagcaggcgaataaag

SEQ ID NO: 877481 - DNA, 75 bp, synthetic construct
  source 1..75: mol_type = other DNA
gtccagatcaaacgtttgcacgagtacaaacgtcagcacctgaatctgctgcatattctggcgttgtacaaagaa

SEQ ID NO: 877482 - DNA, 75 bp, synthetic construct
  source 1..75: mol_type = other DNA
aacagatggataagctgtggctggcactggcaggtgcaaaacgagaacaatcccccacactggaaatcaatcatc

SEQ ID NO: 877483 - DNA, 75 bp, synthetic construct
  source 1..75: mol_type = other DNA
actcactcaggcgcatctgtggctttcgccactcaacgatgaaacccgggcgcaaatggataaactatggttggc

SEQ ID NO: 877484 - DNA, 75 bp, synthetic construct
  source 1..75: mol_type = other DNA
cgcattacaggggcagaccgacccgctggaaattattgccgatcgctttaaagcagaaactgacgtgctctgttt

SEQ ID NO: 877485 - DNA, 75 bp, synthetic construct
  source 1..75: mol_type = other DNA
tcctgcaattgatgccattaaacagtattgtgatgttatgaacgtggacgccggtgttgattatcggctgcgtac

SEQ ID NO: 877486 - DNA, 75 bp, synthetic construct
  source 1..75: mol_type = other DNA
ggccattggcgacaatgggcgtcgagaaccagacgctggcggtttcttttactaccttgtgcgtcgatgcccgca

SEQ ID NO: 877487 - DNA, 75 bp, synthetic construct
  source 1..75: mol_type = other DNA
taaaaccatactgctggccaacaaagaatcactggtcacctgtggacgtctgtttatggacgccgtaaagcagag

SEQ ID NO: 877488 - DNA, 75 bp, synthetic construct
  source 1..75: mol_type = other DNA
agatgttgatcaggtgatggcggcgattgtcggtgctgcaggcctgttacctacgcttgctgctatccgcgcggg

SEQ ID NO: 877489 - DNA, 75 bp, synthetic construct
  source 1..75: mol_type = other DNA
ctacgcttgctgcgatccgcgcgggtaaaaccattttgctggccaataaagaatcactggtcacttgcggacgtc

SEQ ID NO: 877490 - DNA, 75 bp, synthetic construct
  source 1..75: mol_type = other DNA
catcgtcagaactgacacaagtcgaagcagtgaaagctcttggattcctgaaacaaaaagccactgaacagaagg

SEQ ID NO: 877491 - DNA, 75 bp, synthetic construct
  source 1..75: mol_type = other DNA
aaactgagtgctttgacatttgccgcaccggattatgatcgctatccatgcctgaaactggcgatggatgctttc

SEQ ID NO: 877492 - DNA, 75 bp, synthetic construct
  source 1..75: mol_type = other DNA
aagcgcgttggttgtttaacgccagtgccagccagatggaagtgctgattcacccgcagtcagtgattcactcaa

SEQ ID NO: 877493 - DNA, 75 bp, synthetic construct
  source 1..75: mol_type = other DNA
acgcaacatcagcatgaccagcatatttatcactatgacgctgatttggctgctgctttccgtgacgtcagtact

SEQ ID NO: 877494 - DNA, 75 bp, synthetic construct
  source 1..75: mol_type = other DNA
ctgactcgcgaacacgcttctgcggaaaaattacaagagcttgccgatcgtaatatgtatcaggccaaacatcag

SEQ ID NO: 877495 - DNA, 75 bp, synthetic construct
  source 1..75: mol_type = other DNA
gaagaacgtatcgctgagtttcaccgcttcgctctcgacttcaacagtctgctggatgaaatggaagagtggcag

SEQ ID NO: 877496 - DNA, 75 bp, synthetic construct
  source 1..75: mol_type = other DNA
atgcgtttacccatctgagaaccggggctccatgtcgcgaccggatcggtctgctcaacgtcctgctcgctgaag

SEQ ID NO: 877497 - DNA, 75 bp, synthetic construct
  source 1..75: mol_type = other DNA
taccgcactacatgacccattaaccgggctggctaaccgcgcagcgtttcgtagcggtatcaacacgttgatgaa

SEQ ID NO: 877498 - DNA, 75 bp, synthetic construct
  source 1..75: mol_type = other DNA
tgggaaattgttgttttcgatgaacaggggcggcgttgctgcacctgtcggctgggtacggcagttttgggatga

SEQ ID NO: 877499 - DNA, 75 bp, synthetic construct
  source 1..75: mol_type = other DNA
gcgatgaccattgagcacgcctctgcggaaaaattacaagagcttgccgatcacaatatgtatcaggccaaacac

SEQ ID NO: 877500 - DNA, 75 bp, synthetic construct
  source 1..75: mol_type = other DNA
gtctgccagccgctgcatcttggacgacaaaatcagagctgggaaatcgtcgttttcgatgaacaggggcggcgt

SEQ ID NO: 877501 - DNA, 75 bp, synthetic construct
  source 1..75: mol_type = other DNA
attggtacattttttagtcttattgtaaccgtgataatatctgtgttagccagaatgtacttgattgagattggt

SEQ ID NO: 877502 - DNA, 75 bp, synthetic construct
  source 1..75: mol_type = other DNA
cagttgatgcgtgaaaacgcctcgctggatcatcccattatcattaccacacatagcgagtcggtaatcagaaat

SEQ ID NO: 877503 - DNA, 75 bp, synthetic construct
  source 1..75: mol_type = other DNA
gatcattattggcatggtgtggagtattcgctttaaaacgatttcgccacacaaccatcgcaagatattacgttt

SEQ ID NO: 877504 - DNA, 75 bp, synthetic construct
  source 1..75: mol_type = other DNA
aatccctaactactcgtcagatatgacggcactaatgctactggggaaaagtgaactgtacgcttttttgaccaa

SEQ ID NO: 877505 - DNA, 75 bp, synthetic construct
  source 1..75: mol_type = other DNA
agttactgaatgccaaaattaaaagccccagcgcgcaaaaactggaggcgttgcaccgttttttggggcttgaat

SEQ ID NO: 877506 - DNA, 75 bp, synthetic construct
  source 1..75: mol_type = other DNA
agaatgaaaaatcatcaaccacttctcttcctggctactctcaggacatgaccgcgttgatgttgcttggcaaaa

SEQ ID NO: 877507 - DNA, 75 bp, synthetic construct
  source 1..75: mol_type = other DNA
aaaacaggcgccactcaggcaattcgcgattttggtggttttcagcagatccattgctacaaactgcgtaaagag

SEQ ID NO: 877508 - DNA, 75 bp, synthetic construct
  source 1..75: mol_type = other DNA
gtggctgatatctggacctggtatgcaaatcatcaaagtctctgcaacccactgtataacctaatgtatcaggca

SEQ ID NO: 877509 - DNA, 75 bp, synthetic construct
  source 1..75: mol_type = other DNA
atggaagaagatattagcaatgcaatggaacaacttttagatctgactatctcactacaaacaagaataaatcaa

SEQ ID NO: 877510 - DNA, 75 bp, synthetic construct
  source 1..75: mol_type = other DNA
cccaagggcgaatgtctggttgagccttttgtaggtgccgggggggggggggggtttctttcgtcctcttttttt

SEQ ID NO: 877511 - DNA, 75 bp, synthetic construct
  source 1..75: mol_type = other DNA
aacatggataaaaaaccaacaatcactgaaaagttggtcattgatggagatatttatattgatcgtaagcaccct

SEQ ID NO: 877512 - DNA, 75 bp, synthetic construct
  source 1..75: mol_type = other DNA
ttcgtcgagaaaagctggaagtttcaggccagatgatcaccggcttatggtgtggagcggtcagtcattatatgc

SEQ ID NO: 877513 - DNA, 75 bp, synthetic construct
  source 1..75: mol_type = other DNA
agatccgcgaaattttaatcagcgagtcaacttgggaagaaatgacctgcttattcgcaccttccttagatttcc

SEQ ID NO: 877514 - DNA, 75 bp, synthetic construct
  source 1..75: mol_type = other DNA
gccgaccgtgccggatcgtctgcgctggttattgcaaacttttaaatatcagaaaaatattcgcattcatgcttt

SEQ ID NO: 877515 - DNA, 75 bp, synthetic construct
  source 1..75: mol_type = other DNA
tgcttgatttcagccctcgactgaaaaagctcgctggagtgccgtgtcaggtctacgttcgcaccgtagcggcaa

SEQ ID NO: 877516 - DNA, 75 bp, synthetic construct
  source 1..75: mol_type = other DNA
gactccaggcgcagcaggaaatgaaaaaaaatgcatctgttgtttctgatattgaacaggtcattgcaaataaac

SEQ ID NO: 877517 - DNA, 75 bp, synthetic construct
  source 1..75: mol_type = other DNA
agcgttacctgcgtccattccactgtctgtaccaaccagcagggcagctttatctgctatggcaatcagccaggc

SEQ ID NO: 877518 - DNA, 75 bp, synthetic construct
  source 1..75: mol_type = other DNA
ggggttgccggttgccattccgctgtcagttccaaccaccagggcggcattgtctgcggcggctgtcagccaggc

SEQ ID NO: 877519 - DNA, 75 bp, synthetic construct
  source 1..75: mol_type = other DNA
tttgtgctcgaatttctggaattgaaagatgaatactcagaatccgattttgaggaggcgctgatcaaccacctg

SEQ ID NO: 877520 - DNA, 75 bp, synthetic construct
  source 1..75: mol_type = other DNA
tttttatatttgttttcaaagaattgaaattgtgcagacactgtctgcacaattcacccccacaattctccagac

SEQ ID NO: 877521 - DNA, 75 bp, synthetic construct
  source 1..75: mol_type = other DNA
tgcgggttgaagaagacgattatgacagccgtttcctgcgctgcgtggagctggtgcgggagatgatgggggagc

SEQ ID NO: 877522 - DNA, 75 bp, synthetic construct
  source 1..75: mol_type = other DNA
atggaatcgctctcagagagaacctcaacaggctaccagcaaatccatgacggtattattcacctggtcgatagc

SEQ ID NO: 877523 - DNA, 75 bp, synthetic construct
  source 1..75: mol_type = other DNA
gttaacagccatccccctactgacattgccgcaatttattatgctgcaatacgtcaaagggaaagcggaaagttg

SEQ ID NO: 877524 - DNA, 75 bp, synthetic construct
  source 1..75: mol_type = other DNA
accgtttccaatatcatcggcaccaccgacgaaaacggtcagtacaccggactgaaagccctgatgggcgctgag

SEQ ID NO: 877525 - DNA, 75 bp, synthetic construct
  source 1..75: mol_type = other DNA
acagaattacgacaggggcgcgtgcgtattcgctataaatatacgcccgttcctccgctggaagatatggagctt

SEQ ID NO: 877526 - DNA, 75 bp, synthetic construct
  source 1..75: mol_type = other DNA
cgtatggctgcaagacggtgcaggaggcgatcacttaccgtgaaaacttcagtcagcgtgaagggatgctgatct

SEQ ID NO: 877527 - DNA, 75 bp, synthetic construct
  source 1..75: mol_type = other DNA
tccggactggcaacccgatgccgattttatccgcctggcggcgctatggggcgtggcgctaagagagccggtgac

SEQ ID NO: 877528 - DNA, 75 bp, synthetic construct
  source 1..75: mol_type = other DNA
tccggactggcaacccgatgccgactttatccgcctggcggctctatggggcgtggcactaagagagccggtgac

SEQ ID NO: 877529 - DNA, 75 bp, synthetic construct
  source 1..75: mol_type = other DNA
atgagaataattattacgattttggttttattattgaccgggtgttcttctgatgtggtaaatcaacgagggctt

SEQ ID NO: 877530 - DNA, 75 bp, synthetic construct
  source 1..75: mol_type = other DNA
gcgtcctggcggtgccggaatacgataccgaagaagtaacatcacagctttgcgtgatcgccaaacagcttcgcg

SEQ ID NO: 877531 - DNA, 75 bp, synthetic construct
  source 1..75: mol_type = other DNA
gccagtaccgccgatggaagatttaacgctgatccagacgttcaccgatgaatattttgaaggcgcgttttcgtc

SEQ ID NO: 877532 - DNA, 75 bp, synthetic construct
  source 1..75: mol_type = other DNA
gccggaggaagggaaaacggcggaaacacagtcgcagttgattattggtggctctgatgctgacggtaactacac

SEQ ID NO: 877533 - DNA, 75 bp, synthetic construct
  source 1..75: mol_type = other DNA
tgcgcgttgttgaagtcagcgaaggcactcgatccattaccacggtgagcaccgccatcgtgggcatggtctgca

SEQ ID NO: 877534 - DNA, 75 bp, synthetic construct
  source 1..75: mol_type = other DNA
gaggcgaagacgtaccgcgagaattttgcccaacgtgaaatgatggtgatctggcctaacttcatttgctacgac

SEQ ID NO: 877535 - DNA, 75 bp, synthetic construct
  source 1..75: mol_type = other DNA
tacccgaaccgcgcagatcgttgcggataccgtcgccgaagcccatttcgcctatgttgataaaccgcttacccc

SEQ ID NO: 877536 - DNA, 75 bp, synthetic construct
  source 1..75: mol_type = other DNA
ggaagtggagaacgccgatatcaaccaacgcctgctggaggtcattgaacagatcggcagttattcaaaacagat

SEQ ID NO: 877537 - DNA, 75 bp, synthetic construct
  source 1..75: mol_type = other DNA
gcgtggcactaagagaacccgctaccgccgaagaactggcctcattcattgcctactggcaggcggaaggtaaag

SEQ ID NO: 877538 - DNA, 75 bp, synthetic construct
  source 1..75: mol_type = other DNA
ttaatgatgagttgtatctgtcaatttcgaagctccaggagcatgcagcactggtctacaaaatcttttgcgctc

SEQ ID NO: 877539 - DNA, 75 bp, synthetic construct
  source 1..75: mol_type = other DNA
ttcgaagctccaggagcatgcagcactggtctacaaaatcttctgcgctccagaaaagagtaacgcccgcgagtg

SEQ ID NO: 877540 - DNA, 75 bp, synthetic construct
  source 1..75: mol_type = other DNA
gcgttgccgggtggttacgctgaagctgctgactggctggatgtaacagagaacgcattatttaaccgccttcgt

SEQ ID NO: 877541 - DNA, 75 bp, synthetic construct
  source 1..75: mol_type = other DNA
tactcaaagcagattcgttcggcaatcgaagatggggtagtggagccacacgagcagacagcaattaatgatgag

SEQ ID NO: 877542 - DNA, 75 bp, synthetic construct
  source 1..75: mol_type = other DNA
aaactatcgcggcgttgccggggggttacgctgaagctgctgagtggctggatgtaacagagaacgctttattca

SEQ ID NO: 877543 - DNA, 75 bp, synthetic construct
  source 1..75: mol_type = other DNA
ggaagtagagaacgccgatataaaccagcgcctgctggaagtcatcgaacagatcgggaattactcaaagcagat

SEQ ID NO: 877544 - DNA, 75 bp, synthetic construct
  source 1..75: mol_type = other DNA
gcatgagaagacagcaattaacgatgagctgtacctctcaatttcgaagctgcaggagcatgcagcactggtcta

SEQ ID NO: 877545 - DNA, 75 bp, synthetic construct
  source 1..75: mol_type = other DNA
aaaaacagcctgagtggtacgtgaaagctgtcagaaaaactatcgcggcattgccggggggttacgctgaagctg

SEQ ID NO: 877546 - DNA, 75 bp, synthetic construct
  source 1..75: mol_type = other DNA
tgatccgcattggacggtggcatgtcgagggcgaagcctatgaccgggcgctggccatggtggtcgaggcacagg

SEQ ID NO: 877547 - DNA, 75 bp, synthetic construct
  source 1..75: mol_type = other DNA
tagtagccggaatcaactggccaagccgcgtcgctgattaccgcgataacatggctaaacaaacgcaaatcaatt

SEQ ID NO: 877548 - DNA, 75 bp, synthetic construct
  source 1..75: mol_type = other DNA
agttattcaaaacagattcgttcagcaatcgaagacggtgtagtggaaccgcatgagaagacagcaattaatgac

SEQ ID NO: 877549 - DNA, 75 bp, synthetic construct
  source 1..75: mol_type = other DNA
atgcaaaaagcacaacggatcattaaaacctatcgccgtaatcgaatgattgtttgtacaatttgcgcactcttt

SEQ ID NO: 877550 - DNA, 75 bp, synthetic construct
  source 1..75: mol_type = other DNA
tcatcattgcgctggggcagagactgaatattgagctggtggctgaaggcgtggaaacccaggaacaggcgaaat

SEQ ID NO: 877551 - DNA, 75 bp, synthetic construct
  source 1..75: mol_type = other DNA
agcaactgatcctcgaaatcaccgaacgcgatgccttactggatgttgattatcggattgcccgcgagctacatc

SEQ ID NO: 877552 - DNA, 75 bp, synthetic construct
  source 1..75: mol_type = other DNA
accaatgaagaagccatttctaccgcgcgtcgtctgatggaagaagaaggtattcttgcaggtatctcttctgga

SEQ ID NO: 877553 - DNA, 75 bp, synthetic construct
  source 1..75: mol_type = other DNA
tattcttgcaggtatctcttctggagcagctgttgctgcggcgttgaaactacaagaagatgaaagctttaccaa

SEQ ID NO: 877554 - DNA, 75 bp, synthetic construct
  source 1..75: mol_type = other DNA
gcggttacaaactcaccctgaccatgccagaaaccatgagtattgaacgccgcaagctgctgaaagcgttaggtg

SEQ ID NO: 877555 - DNA, 75 bp, synthetic construct
  source 1..75: mol_type = other DNA
agccccaatttatgggcaggcgttggtctggtacgcggcggtgcggggacggcgctggtaggcgatggtccgaca

SEQ ID NO: 877556 - DNA, 75 bp, synthetic construct
  source 1..75: mol_type = other DNA
tgccggaaaccgcagcagcgcggtggtggtggcgtccgggcatcagtcataccggattaacggtctgaacagcgg

SEQ ID NO: 877557 - DNA, 75 bp, synthetic construct
  source 1..75: mol_type = other DNA
ggtaggcatcccggtcgtgcccattggcattggcttcggtgcgctgtttgcgctggcaataacggcgctgtggat

SEQ ID NO: 877558 - DNA, 75 bp, synthetic construct
  source 1..75: mol_type = other DNA
catcatttaattgtgccactgacccgctatgtgatggcagaaaccattcgtcagcgccatgttttcccgatgagt

SEQ ID NO: 877559 - DNA, 75 bp, synthetic construct
  source 1..75: mol_type = other DNA
ctaagtttactggtgggctacatcgcctggctggcgaccgcttaccggatgagcttttcccgcgaaatcaatctg

SEQ ID NO: 877560 - DNA, 75 bp, synthetic construct
  source 1..75: mol_type = other DNA
cctctcaggatatccacatcgggaagaagcgtatcgggttggcgaattactgttcccacatctggatgttgccat

SEQ ID NO: 877561 - DNA, 75 bp, synthetic construct
  source 1..75: mol_type = other DNA
gaaattcatgaaaaaaccaccggtccggagatctgggaagataccgacggtcaggttgatgtatttattgctggc

SEQ ID NO: 877562 - DNA, 75 bp, synthetic construct
  source 1..75: mol_type = other DNA
aatggacgttgtagaactgatctctgcaatggaagaaaaattcggtgtttctgctgctgctgctgctgtagctgt

SEQ ID NO: 877563 - DNA, 75 bp, synthetic construct
  source 1..75: mol_type = other DNA
ggctgctctgaaagaaggcgtgagcaaagacgatgcagaagcactgaaaaaagctctggaagaagctggcgctga

SEQ ID NO: 877564 - DNA, 75 bp, synthetic construct
  source 1..75: mol_type = other DNA
tgctatcggtcacagcccgaataccgccatctttgaagggcaactggaactggaaaacggctacatcaaagtaca

SEQ ID NO: 877565 - DNA, 75 bp, synthetic construct
  source 1..75: mol_type = other DNA
gtggcggatgcggtatggacgggaaatcacctgaagatggtccgctttgccgtggaaaataaaacgctgtctgcc

SEQ ID NO: 877566 - DNA, 75 bp, synthetic construct
  source 1..75: mol_type = other DNA
ataaaagtaaaaaccccgtttgttggcaccaagcggggttttgtgttttctgactctggaaaagtcaaaggagaa

SEQ ID NO: 877567 - DNA, 75 bp, synthetic construct
  source 1..75: mol_type = other DNA
gcccaaaaatcaagataatacaattaactggtcccgagttagccggatacggttagtgttcataggtgacgtgaa

SEQ ID NO: 877568 - DNA, 75 bp, synthetic construct
  source 1..75: mol_type = other DNA
atgaatacagccctttccatcatcgacgatgccaactcaaacactgctatcgactatcggcaggaaatgaacgtc

SEQ ID NO: 877569 - DNA, 75 bp, synthetic construct
  source 1..75: mol_type = other DNA
atgagcagtaacttcagacatcacctgttgagtctgtcgttactggttggcatagcggccccctgggccgctttt

SEQ ID NO: 877570 - DNA, 75 bp, synthetic construct
  source 1..75: mol_type = other DNA
catcgtggtttcgatgttgatgggagcggtctatggttacttcctcgattactgccgtcgattgttcaaagtcag

SEQ ID NO: 877571 - DNA, 75 bp, synthetic construct
  source 1..75: mol_type = other DNA
tttgaaactgaaatcatctttgatcacattaacaaagtagatttgcagaatcgtccgttccgcctgactggcgac

SEQ ID NO: 877572 - DNA, 75 bp, synthetic construct
  source 1..75: mol_type = other DNA
tggcctggcgatccaaacgatctgaccggtccgttattaatggagcgcatgcacgaacatgccaccaagtttgaa

SEQ ID NO: 877573 - DNA, 75 bp, synthetic construct
  source 1..75: mol_type = other DNA
atgggcacgaccaaacacagtaaactgcttatcctgggttcaggcccggcgggatacaccgctgctgtctacgcg

SEQ ID NO: 877574 - DNA, 75 bp, synthetic construct
  source 1..75: mol_type = other DNA
gtggtgatccgcgcattgcgcagccagaaggtcgatttgcagaaactggttcacgaagatatggcgaagaatttt

SEQ ID NO: 877575 - DNA, 75 bp, synthetic construct
  source 1..75: mol_type = other DNA
tgaataaggatgcgataaaaaagaagctgccgctagcgataatctcattaagcgtgtttttagttggggtgatat

SEQ ID NO: 877576 - DNA, 75 bp, synthetic construct
  source 1..75: mol_type = other DNA
ttattttttaccggttcgatatttagtccggaatatgcatttttaattgtttgtccttttattctgcgtaaagcg

SEQ ID NO: 877577 - DNA, 75 bp, synthetic construct
  source 1..75: mol_type = other DNA
tttcttccgtaatgtcagtgacttgctggatgttttcgagcgtggggaagtacgcaccgaattgttgaaagagct

SEQ ID NO: 877578 - DNA, 75 bp, synthetic construct
  source 1..75: mol_type = other DNA
cgcaaattatccttactggcggcagcagtattatggagtcgatttcgaaatacctgatttacagtaacagctatg

SEQ ID NO: 877579 - DNA, 75 bp, synthetic construct
  source 1..75: mol_type = other DNA
cgcaaattatcctcaccggcggcagcagtattatggagtcgatttcgaaatatctgatttacagcaacagctatg

SEQ ID NO: 877580 - DNA, 75 bp, synthetic construct
  source 1..75: mol_type = other DNA
gtggcgctggcggcggtggagatggcgcaaattatcctcaccggcggcagcagtattatggagtcgatttcgaaa

SEQ ID NO: 877581 - DNA, 75 bp, synthetic construct
  source 1..75: mol_type = other DNA
atccgatgtcgatctggcatacacactgatacaggtaaatgaaaagtctcctgaagaggccgagaagcttatcgc

SEQ ID NO: 877582 - DNA, 75 bp, synthetic construct
  source 1..75: mol_type = other DNA
cgtaagcgtggtgatacccacattgatatttatgtgggtaaaccaccacgggaaagaaaagaacgcatcatcggt

SEQ ID NO: 877583 - DNA, 75 bp, synthetic construct
  source 1..75: mol_type = other DNA
tcgcaaaaacaatgggtaaacctacctcatttgttagtaaacaccttcgtctcattgatgcaccggataatgtta

SEQ ID NO: 877584 - DNA, 75 bp, synthetic construct
  source 1..75: mol_type = other DNA
gctgattgccggtgttgactggcagcaggttaagggacatgacctgacgaaatgggtctggcagaatgaacctga

SEQ ID NO: 877585 - DNA, 75 bp, synthetic construct
  source 1..75: mol_type = other DNA
ctcggaatggcaggcgatgttggccgacgcagtggtcgaaacccacgaccggatcgtcggccgtctctaccgtgc

SEQ ID NO: 877586 - DNA, 75 bp, synthetic construct
  source 1..75: mol_type = other DNA
tactttcgaaaccatagggatgcttaccccgcctcgttgttatccccgcgacagacgtggataccagatatggtt

SEQ ID NO: 877587 - DNA, 75 bp, synthetic construct
  source 1..75: mol_type = other DNA
gaaccggcattttttgctctggcattaatctcaatttggctttgcatcaaacagtttggtatcaaaaccccgaag

SEQ ID NO: 877588 - DNA, 75 bp, synthetic construct
  source 1..75: mol_type = other DNA
acaagaattaaataaagtaaccattaacttgaatcgttatcagcgagagttagactctgcaataaaggctgatta

SEQ ID NO: 877589 - DNA, 75 bp, synthetic construct
  source 1..75: mol_type = other DNA
cagatgcgctaaacatgatgaattgtcttttccgctcattatcctgtacagcagacaaagcagaaaagcatctgt

SEQ ID NO: 877590 - DNA, 75 bp, synthetic construct
  source 1..75: mol_type = other DNA
agcgtgggttctctgcaaaaaacttacgccaaatgaggcttttttacctcttttttcaacatgttgaaattcgcc

SEQ ID NO: 877591 - DNA, 75 bp, synthetic construct
  source 1..75: mol_type = other DNA
acagcaaatcggcagcacgctattttacgatccggcgtatgtgcagcttacctatcctggcggtgatgtcccgca

SEQ ID NO: 877592 - DNA, 75 bp, synthetic construct
  source 1..75: mol_type = other DNA
cgcagaggccgctaaagctatcggtattcatggcactgtatcggctcacagtttccgcaaagctggcgggaatgc

SEQ ID NO: 877593 - DNA, 75 bp, synthetic construct
  source 1..75: mol_type = other DNA
tcagagaactggctcggtgttataattttgtggaaaatagcaaagatatcatagtttctttattaaagaaaaaca

SEQ ID NO: 877594 - DNA, 75 bp, synthetic construct
  source 1..75: mol_type = other DNA
gggcgtgggttaagcgattgtggtatccagactcgctggcgttttgacggccagcgctttcgtctggtgcgttac

SEQ ID NO: 877595 - DNA, 75 bp, synthetic construct
  source 1..75: mol_type = other DNA
cggatttcgccgtggttattagtgaccgatgatacggcgaccatcaccgcgtttttgcagatgattcaggaaggg

SEQ ID NO: 877596 - DNA, 75 bp, synthetic construct
  source 1..75: mol_type = other DNA
taatattatcaggatcgttttcaggggtaatgacgtttattttgttttatctcctggagtgggcgttccagtacc

SEQ ID NO: 877597 - DNA, 75 bp, synthetic construct
  source 1..75: mol_type = other DNA
ctcaactacgccaaagagcactggacgctaccggatgaaaatccgcccatcggtctggttctctgtgcagagaaa

SEQ ID NO: 877598 - DNA, 75 bp, synthetic construct
  source 1..75: mol_type = other DNA
tgatcaaccacctgatggatttcatgctggaacttggggatgattttgcctttgttggtcggcagcgaaggttac

SEQ ID NO: 877599 - DNA, 75 bp, synthetic construct
  source 1..75: mol_type = other DNA
ttgatttggcatggattgtgtcgcgtaaaaagccgctagcctcgcgcccggttcggttgcgtttgccgttcaaca

SEQ ID NO: 877600 - DNA, 75 bp, synthetic construct
  source 1..75: mol_type = other DNA
ggaagcgcccatgcaacgggtaacatatttgctgatggtcagaactctaatcaccattccattgaaccttcttaa

SEQ ID NO: 877601 - DNA, 75 bp, synthetic construct
  source 1..75: mol_type = other DNA
ggcatgtcgagggcgaagcctatgaccgggcgctggccatggtggtcgaggcacaggcagcgttacccatggccc

SEQ ID NO: 877602 - DNA, 75 bp, synthetic construct
  source 1..75: mol_type = other DNA
cctgagtgcgataacctgcgcactaactggcttaacgtactgcagcgcaacacccaggataacaaggattactgg

SEQ ID NO: 877603 - DNA, 75 bp, synthetic construct
  source 1..75: mol_type = other DNA
atctcactggaagggaaaagcattgacctcacgggagttaccacaatcaacggcaacgcgacactcaacggtgat

SEQ ID NO: 877604 - DNA, 75 bp, synthetic construct
  source 1..75: mol_type = other DNA
tactcagacgtcgataaaccgccgttcagcgacaaaaacgtccggggcacgaaatacgcggatggtgcagagttc

SEQ ID NO: 877605 - DNA, 75 bp, synthetic construct
  source 1..75: mol_type = other DNA
actggcttaacgtgctgcagcgcaacacccaggataacaaggattactggctccctgacgtgggggagcaggttg

SEQ ID NO: 877606 - DNA, 75 bp, synthetic construct
  source 1..75: mol_type = other DNA
tggtaaagcctttcctcagccagcaggtgttgcgttaccagtacaggaagctgcaacacaggaagatattaaaac

SEQ ID NO: 877607 - DNA, 75 bp, synthetic construct
  source 1..75: mol_type = other DNA
aagctgcatccgtagcggaaacggatggtaaagcctttcctcagccagcaggagttgcgttaccggtacaggaag

SEQ ID NO: 877608 - DNA, 75 bp, synthetic construct
  source 1..75: mol_type = other DNA
agaaactgtggctgatattgtgcaatcgttgccatcggtcaccgaaacgaaagcagatgacctgattctaccatc

SEQ ID NO: 877609 - DNA, 75 bp, synthetic construct
  source 1..75: mol_type = other DNA
tggaaactgaatattctagccgatgagttcaatgtatcagaaataaccatcagaaaaagactcgaaattgagaat

SEQ ID NO: 877610 - DNA, 75 bp, synthetic construct
  source 1..75: mol_type = other DNA
atcaggcacaagcgaatcaccttgaaattgttctgcatctcagggcggatctgttctggtttcgcggtcattttg

SEQ ID NO: 877611 - DNA, 75 bp, synthetic construct
  source 1..75: mol_type = other DNA
agtacgtcaactgttaccagcggttttctgatgaacctgttaccgcaggttgctgatgacgggaatatattgttg

SEQ ID NO: 877612 - DNA, 75 bp, synthetic construct
  source 1..75: mol_type = other DNA
ccatcgatgcaccggaaaccgaaatcaccggcaatcttctggtcggcggtaaactcacttatgaggggggcatgg

SEQ ID NO: 877613 - DNA, 75 bp, synthetic construct
  source 1..75: mol_type = other DNA
atcgatcatccgaaggtgttgagttatctcgacgtactgcgcgacaaagcgcctgtgggcaaaaaggtagcaatc

SEQ ID NO: 877614 - DNA, 75 bp, synthetic construct
  source 1..75: mol_type = other DNA
atcgcaccattactgaagcggtacatcaggaaggcggcaaaattgccctgcaaattttgcataccgggcgctata

SEQ ID NO: 877615 - DNA, 75 bp, synthetic construct
  source 1..75: mol_type = other DNA
cacaaccgctcattgatagcgggaaaaccgtgcatttaattggcggctgcgatgtggctatggagctggacgcac

SEQ ID NO: 877616 - DNA, 75 bp, synthetic construct
  source 1..75: mol_type = other DNA
cgccaaacagatccccggcaaagaggagttttacgaaacgctgcgctattaccgccggatgatcgaagtgacggg

SEQ ID NO: 877617 - DNA, 75 bp, synthetic construct
  source 1..75: mol_type = other DNA
aaccgtgcatttaatcggcggttgcgatgtggctacggagctggacgcacgacgggcgatcgcgcagggaacacg

SEQ ID NO: 877618 - DNA, 75 bp, synthetic construct
  source 1..75: mol_type = other DNA
tttgatcaacgaatttctgactctgcgcaccaaccagcgtagtgaccagtggggcggcgattaccgcaaccggat

SEQ ID NO: 877619 - DNA, 75 bp, synthetic construct
  source 1..75: mol_type = other DNA
ttttaatctgttgttctgcgtgctggtaatacgtgctcgcgggaacgtttcaaaaatcctttcatcccggaggtg

SEQ ID NO: 877620 - DNA, 75 bp, synthetic construct
  source 1..75: mol_type = other DNA
tgaagcgggcaatcagcttccaccgccgcggtgaaatccgcgaccgttccgccgaaggccagcattaccgcatcg

SEQ ID NO: 877621 - DNA, 75 bp, synthetic construct
  source 1..75: mol_type = other DNA
cgtgctgacgctctttttttatcgtcgccgtgattccagacataaaccgctgatgtcatggctggcctggctgct

SEQ ID NO: 877622 - DNA, 75 bp, synthetic construct
  source 1..75: mol_type = other DNA
aacgacgccagccagatcccacaccatcgcaccattaccgaagcggtacatcaggaaggcggcaaaatagccctg

SEQ ID NO: 877623 - DNA, 75 bp, synthetic construct
  source 1..75: mol_type = other DNA
gcttaatctgctgttctgcgtgttggtgattcgcgcacgcgggaacgtttcaaaaatctttgtattacgaaggcg

SEQ ID NO: 877624 - DNA, 75 bp, synthetic construct
  source 1..75: mol_type = other DNA
tgaatgcggcgttatgtacggttatcgtactgacgctttttttctaccgcagaaaagagtcccgacacaaaccgc

SEQ ID NO: 877625 - DNA, 75 bp, synthetic construct
  source 1..75: mol_type = other DNA
aagaaattaaaactgaaagtgtggcggtcacagtgcagtcacagccgtcgttcaccagaaagcatccggatggtc

SEQ ID NO: 877626 - DNA, 75 bp, synthetic construct
  source 1..75: mol_type = other DNA
accgataaaagtgctgcatcccttgttaaccgccactcaggaaggtaactacaacgggacggaaggtatctccgc

SEQ ID NO: 877627 - DNA, 75 bp, synthetic construct
  source 1..75: mol_type = other DNA
tggaatttgtcgagatgtttaaagcaccgataaaagtgctgcatcccctgttgaccgccacccaggaaggtaact

SEQ ID NO: 877628 - DNA, 75 bp, synthetic construct
  source 1..75: mol_type = other DNA
taaaaatggaagtactaccgttgtaaaaaatacaaatactaatgaacgcgttgaaatccaaccaaaatatgaaca

SEQ ID NO: 877629 - DNA, 75 bp, synthetic construct
  source 1..75: mol_type = other DNA
atgcagatttctggattcaggatcaggagtatcgcgacccggataccgggcagctatttgaccgcgaatctctca

SEQ ID NO: 877630 - DNA, 75 bp, synthetic construct
  source 1..75: mol_type = other DNA
ttcaatccgcaggaagatgcgcagattctggaaaaagagtatggcattcctcgccgttatctcggcaccatcatg

SEQ ID NO: 877631 - DNA, 75 bp, synthetic construct
  source 1..75: mol_type = other DNA
ttgactcacgccccatgcgcccctggcactctcgaaacactgtcacgtttttccattctttcgcgcctgaaagag

SEQ ID NO: 877632 - DNA, 75 bp, synthetic construct
  source 1..75: mol_type = other DNA
cctctcaggggattacccgatgacatagaacttcaatgggatgaggatggatgtgatgactactggggtgagcat

SEQ ID NO: 877633 - DNA, 75 bp, synthetic construct
  source 1..75: mol_type = other DNA
tcggtagttgcggagttttgtgcggaggttcagcgacttcatgggctgcatgggacggtaagaattgttctaggc

SEQ ID NO: 877634 - DNA, 75 bp, synthetic construct
  source 1..75: mol_type = other DNA
cgtttttactaaagccttcatctattatagtttacttattctttaaatcatcaggtattggtgatggttcagaga

SEQ ID NO: 877635 - DNA, 75 bp, synthetic construct
  source 1..75: mol_type = other DNA
atggcttaagtccggagttccagcaggcgctagtttcatctgcacaagaagcgggtaactatcagcgcaaactgg

SEQ ID NO: 877636 - DNA, 75 bp, synthetic construct
  source 1..75: mol_type = other DNA
tgatacttttgccctatcatgtgagactggcctcctgctgattacgcaaaaaaatgcggcaccggttatcaggca

SEQ ID NO: 877637 - DNA, 75 bp, synthetic construct
  source 1..75: mol_type = other DNA
aagggcagccatttaatattgttgcagtcggcggttcaggaaaagtacatggtgaacatcacgatcatgaagctc

SEQ ID NO: 877638 - DNA, 75 bp, synthetic construct
  source 1..75: mol_type = other DNA
cagcggacgcaatccgaactggaccagttatgaaaaactgcgcacggttattgagaaaaaaatgttttccaatac

SEQ ID NO: 877639 - DNA, 75 bp, synthetic construct
  source 1..75: mol_type = other DNA
gccggaccgggcagccgcagtcattttgctcatgccaccagcccgctgaccggatttctggaggcatcggcatga

SEQ ID NO: 877640 - DNA, 75 bp, synthetic construct
  source 1..75: mol_type = other DNA
cagcggtgatgccgctcggcgcgccgattggctcgaatcagggactggaaacccgcgccatgctggagattatta

SEQ ID NO: 877641 - DNA, 75 bp, synthetic construct
  source 1..75: mol_type = other DNA
ccatcgaaaccctgaaagccgccgaaacactggtgcagcagggatttgtcgtgctgccctactgcagtgccgatc

SEQ ID NO: 877642 - DNA, 75 bp, synthetic construct
  source 1..75: mol_type = other DNA
gcgggagctgaacaagtgccgggatattgttcgacagattgtcgattcatccggtcgtattgtgtcggaaaagtg

SEQ ID NO: 877643 - DNA, 75 bp, synthetic construct
  source 1..75: mol_type = other DNA
attgaacagcatggccctaaagcggctgatgaacttgcactgatattcagaattacttcccgcagggtgaactca

SEQ ID NO: 877644 - DNA, 75 bp, synthetic construct
  source 1..75: mol_type = other DNA
gccggcctgctggcacgtcagtccgggccgggcagtcgcagtcattttgctcatgccactagcccgctgaccgga

SEQ ID NO: 877645 - DNA, 75 bp, synthetic construct
  source 1..75: mol_type = other DNA
agcaggtacgctacgccaccgcgcgctcagtcttcaaatggaatggcaccgataccgtcaaggtcggcagcgatg

SEQ ID NO: 877646 - DNA, 75 bp, synthetic construct
  source 1..75: mol_type = other DNA
aatcgttgatggcgcaagctggacgcgcacgatgggctggaccgagtaccagcaggtacgctacgccaccgcacg

SEQ ID NO: 877647 - DNA, 75 bp, synthetic construct
  source 1..75: mol_type = other DNA
tctcgagttcctgaaaggttacttgattccgaaatatgccgagtttatcggtaaagagattcagactgcgtatct

SEQ ID NO: 877648 - DNA, 75 bp, synthetic construct
  source 1..75: mol_type = other DNA
gaagaagccattttcgccgcccatctggctcgtgaagcgttaggcacaaactggttaaaattagagattcaccct

SEQ ID NO: 877649 - DNA, 75 bp, synthetic construct
  source 1..75: mol_type = other DNA
gaaacgcgtcaacttgctccagcacaacgacgctatcctcgaaccgcttatcgcggcgggtgtgaccctgctgcc

SEQ ID NO: 877650 - DNA, 75 bp, synthetic construct
  source 1..75: mol_type = other DNA
aatgctggtacaacagggatttgtcgtgctgccttactgcggggccgatccggtattgtgtaaacgtctggaaga

SEQ ID NO: 877651 - DNA, 75 bp, synthetic construct
  source 1..75: mol_type = other DNA
gtttgtatgcaatgcaaattcagcgttaccaacaggctgtgcgatcaacaatggtcctttcactgacagagctga

SEQ ID NO: 877652 - DNA, 75 bp, synthetic construct
  source 1..75: mol_type = other DNA
cattgaattcaacataggggctgtcaccatgactactctcccaacccaatctcaccctgaaatcacgattatcaa

SEQ ID NO: 877653 - DNA, 75 bp, synthetic construct
  source 1..75: mol_type = other DNA
tggcttcggtggatgacagccgtgaaaaattcacccctgcgcagaacatgattttttcgcgtaaaagtgcgcaac

SEQ ID NO: 877654 - DNA, 75 bp, synthetic construct
  source 1..75: mol_type = other DNA
ctacaattccgggacgttacactgttccggcaccttataaagcgggtgccgggcgtggaaacccggaattcaata

SEQ ID NO: 877655 - DNA, 75 bp, synthetic construct
  source 1..75: mol_type = other DNA
actgcccgcaatttttcggtgagtgattacaccgattgcacaggccgcaaactaccttgctatcaaataacccgc

SEQ ID NO: 877656 - DNA, 75 bp, synthetic construct
  source 1..75: mol_type = other DNA
tttaaaactcatttacgggttgggtgtcattaaccgccaggaatacgaagatgcggaactgctgatggcattgcg

SEQ ID NO: 877657 - DNA, 75 bp, synthetic construct
  source 1..75: mol_type = other DNA
gagcgtctggtagcggaaggcgcagggtttgcagagctgttaagcagtctgcaacccccggagattaaaagcgat

SEQ ID NO: 877658 - DNA, 75 bp, synthetic construct
  source 1..75: mol_type = other DNA
tccgcaccggttggcgaccgttcgctggcattacgggcggaatatcgcgtcaagcaactgaccaaacgacagaaa

SEQ ID NO: 877659 - DNA, 75 bp, synthetic construct
  source 1..75: mol_type = other DNA
ctgcgtgaagccctcctgtcctggcttgcgaagggtgaaaaaattaattattccgcacaggatagcgacatttta

SEQ ID NO: 877660 - DNA, 75 bp, synthetic construct
  source 1..75: mol_type = other DNA
acaaacagcttcccgcagtaaagcagagcgccatgcagcactcggttgattatctgcgtgaagccctgtcggtgt

SEQ ID NO: 877661 - DNA, 75 bp, synthetic construct
  source 1..75: mol_type = other DNA
ctggcacctgagctgatgggatatcacaaacagcttcccgcagtaaagcagagcgccatgcagcactcggttgat

SEQ ID NO: 877662 - DNA, 75 bp, synthetic construct
  source 1..75: mol_type = other DNA
cctttgaggcctgtcagacgaacaaaaacacctggctgaaacgtaaagccgaactggcagaccttgaacgggaat

SEQ ID NO: 877663 - DNA, 75 bp, synthetic construct
  source 1..75: mol_type = other DNA
gcattagccgcagaacattagttaaatctaccgctattggttcgttggcattggcagcaggcggtttttcattac

SEQ ID NO: 877664 - DNA, 75 bp, synthetic construct
  source 1..75: mol_type = other DNA
atgataacctcagcaatagttggcctggatttaggtaatgaaatagataattatcatacaacttaccgccgttgg

SEQ ID NO: 877665 - DNA, 75 bp, synthetic construct
  source 1..75: mol_type = other DNA
acccgacaacaaaacaggatggtacgacttttacaacgacgaatggttctgtggtggtcaatggataacaatcga

SEQ ID NO: 877666 - DNA, 75 bp, synthetic construct
  source 1..75: mol_type = other DNA
gtttgaagatgatggtgaaagttggggatatacagaaggtaatgctctgtggcttgaatgggaactggactgcac

SEQ ID NO: 877667 - DNA, 75 bp, synthetic construct
  source 1..75: mol_type = other DNA
tggaacgatgaccataccgtaaacgaaccgtggatgtatccgggcgtcactccggcgatccgcagcgctattgag

SEQ ID NO: 877668 - DNA, 75 bp, synthetic construct
  source 1..75: mol_type = other DNA
tgggacggtgaagcacgctgtcacggctttggtcagacgatcgcgatcaaacatattcgcccggtgatgccactg

SEQ ID NO: 877669 - DNA, 75 bp, synthetic construct
  source 1..75: mol_type = other DNA
acttgatatcaccaaagcctttgttcgcttgacggggaaaacactcttcggtccaaaatggagtcttgggtacag

SEQ ID NO: 877670 - DNA, 75 bp, synthetic construct
  source 1..75: mol_type = other DNA
ttggttgccagcgtcgtagagcaaggcgagcgccagcgccgtgtatggctgccagataacgaaactggctggtac

SEQ ID NO: 877671 - DNA, 75 bp, synthetic construct
  source 1..75: mol_type = other DNA
gacggacagttcttcgtcgctacagagcaaggtgaggccatgaacctggtcaacgcgaaatatggcaataccccg

SEQ ID NO: 877672 - DNA, 75 bp, synthetic construct
  source 1..75: mol_type = other DNA
ggatggcgtggtttcatcctaagattgataggggttaacctgccagataaaaggactgagtttacacaacgtctc

SEQ ID NO: 877673 - DNA, 75 bp, synthetic construct
  source 1..75: mol_type = other DNA
gggcatcacgttgcttataaagctttccgtgaagatccgcaggcaaatccactgaccacgccatcggggaaaatt

SEQ ID NO: 877674 - DNA, 75 bp, synthetic construct
  source 1..75: mol_type = other DNA
gccggaagaaatcaccgcacgttgcgatgagttcactccagactcgctgaaagcgctggcgttgtggatgaagcg

SEQ ID NO: 877675 - DNA, 75 bp, synthetic construct
  source 1..75: mol_type = other DNA
ccgcacgtcgcgaagcggaagaagagttgggcattgccggtgtcccctttgccgagcacgggcagttctatttcg

SEQ ID NO: 877676 - DNA, 75 bp, synthetic construct
  source 1..75: mol_type = other DNA
ttccgcacaggatagtgacattttaacgaccatcggattcaggcctgacgcggcttcggtggatgatgcgtatta

SEQ ID NO: 877677 - DNA, 75 bp, synthetic construct
  source 1..75: mol_type = other DNA
gcggctggttgcgtaaagcggcattaggacgcgcgctggtgagcaatccgcgcgtattgctgctcgacgaaccga

SEQ ID NO: 877678 - DNA, 75 bp, synthetic construct
  source 1..75: mol_type = other DNA
catggctgtcgttcagcgacgcgccgcttctcgataacgcagaactgcatatcgaagataacgaacgtgtttgtc

SEQ ID NO: 877679 - DNA, 75 bp, synthetic construct
  source 1..75: mol_type = other DNA
aaagcagaaactgtaaaacgcagcagtagcaaactaagctataaattgcagcgcgaactggagcagctaccgcaa

SEQ ID NO: 877680 - DNA, 75 bp, synthetic construct
  source 1..75: mol_type = other DNA
gcttctcgataacgcagaactgcatatcgaagataacgaacgtgtttgtctggtaggccgtaacggcgcaggcaa

SEQ ID NO: 877681 - DNA, 75 bp, synthetic construct
  source 1..75: mol_type = other DNA
tggaagaagccagccgctccggtaagatcgttttcgaaatggaagacgtttgctaccaggttgacggtaagcaac

SEQ ID NO: 877682 - DNA, 75 bp, synthetic construct
  source 1..75: mol_type = other DNA
tggcgctcaaacagcctgcggtgaaaaaaaaccgaagaagccgccgcggcaaaagcagaaactgtaaaacgcagc

SEQ ID NO: 877683 - DNA, 75 bp, synthetic construct
  source 1..75: mol_type = other DNA
cgcaccaaccagcgtagcgaccagtggggcggcgattaccgcaaccggatgcggtttgccgtcgaagtagtgcgt

SEQ ID NO: 877684 - DNA, 75 bp, synthetic construct
  source 1..75: mol_type = other DNA
caaattttgcataccggacgctacagctaccagccgcacctggttgcaccctctccgttgcaggcaccaattaac

SEQ ID NO: 877685 - DNA, 75 bp, synthetic construct
  source 1..75: mol_type = other DNA
gttttatgctgaacgcgcccgtcacggcgtggcgctgattgtcagcggcggcattgcaccagatttcacaggcgt

SEQ ID NO: 877686 - DNA, 75 bp, synthetic construct
  source 1..75: mol_type = other DNA
acagctatcagggcacggtattgctggttagccacgatcgtcagtttgtcgataacaccgttacagaatgttgga

SEQ ID NO: 877687 - DNA, 75 bp, synthetic construct
  source 1..75: mol_type = other DNA
tgctgtcaaaagcgcaatcggggcgagccgatgagatcaacacctgcattggctgcaatcaggcctgcctcgatc

SEQ ID NO: 877688 - DNA, 75 bp, synthetic construct
  source 1..75: mol_type = other DNA
atctcgacgtactgcgcgacaaagcgcaggtagcaacaaagttgccatcatcggttgtggcgggattggttttga

SEQ ID NO: 877689 - DNA, 75 bp, synthetic construct
  source 1..75: mol_type = other DNA
cgactggctggaaggattcctcaaaactttcaatgggacgattattttcatctcccacgaccgttcatttattcg

SEQ ID NO: 877690 - DNA, 75 bp, synthetic construct
  source 1..75: mol_type = other DNA
ggctgaccgctggaaatgacattaattattctgcactggataacgacatcttaacggccatcggatacaggcctg

SEQ ID NO: 877691 - DNA, 75 bp, synthetic construct
  source 1..75: mol_type = other DNA
cctttgaggcctgtcagaagaacaaaaacacctggctgaaatgtaaagccgaactggcagatcttgaacgggaat

SEQ ID NO: 877692 - DNA, 75 bp, synthetic construct
  source 1..75: mol_type = other DNA
agatgggcgacattccgctggatatcaaagactggtcgcaggtcgagcaaaatccgttttttgcccggaccccga

SEQ ID NO: 877693 - DNA, 75 bp, synthetic construct
  source 1..75: mol_type = other DNA
atgcggcttcgtgggatgataatcgcgagaaattcaccccggcacagaacctgatttacacccgccgacgtgcag

SEQ ID NO: 877694 - DNA, 75 bp, synthetic construct
  source 1..75: mol_type = other DNA
ggctgtccgccggtgaaaaaattaattattccgcgcaggacagcgatattttaacggccatcggattcaggcctg

SEQ ID NO: 877695 - DNA, 75 bp, synthetic construct
  source 1..75: mol_type = other DNA
cttttgaggtctgccagaataacaaagcagcatggctgcaacgcaaaaatgagctggcagcggccgaacaggaat

SEQ ID NO: 877696 - DNA, 75 bp, synthetic construct
  source 1..75: mol_type = other DNA
tctctccggtgtttttgaaggcgttactaccggcaccagcattggcttgttgatcgaaaataccgaccagcgttc

SEQ ID NO: 877697 - DNA, 75 bp, synthetic construct
  source 1..75: mol_type = other DNA
ttccgctgacggaagcggacctgcaacatgacctcgaccgtcgtcgccctgggacatcgcgctataccacccagc

SEQ ID NO: 877698 - DNA, 75 bp, synthetic construct
  source 1..75: mol_type = other DNA
gcccgtggtcagcaagagcagtatgtggcgctcaaacagcctgcggtgaaaaaaaccgagaagccgccgcggcaa

SEQ ID NO: 877699 - DNA, 75 bp, synthetic construct
  source 1..75: mol_type = other DNA
gcgatatggggatgcccgctggtgggcgtttcaacggcggtcatgccagccaccagaccggactggatgtcgata

SEQ ID NO: 877700 - DNA, 75 bp, synthetic construct
  source 1..75: mol_type = other DNA
acgaacagcttcccgcagtaaaacagagcgccatgcagcactcggttgattatctgcgtgaagccctgtcggtgt

SEQ ID NO: 877701 - DNA, 75 bp, synthetic construct
  source 1..75: mol_type = other DNA
acacctacgaacaaaaatacggcctgcgcgattatcgcggcggcgggcgctcttccgcccgcgaaaccgccatgc

SEQ ID NO: 877702 - DNA, 75 bp, synthetic construct
  source 1..75: mol_type = other DNA
aaacaggatgcagcgccaccgccgcctcatgcaatagaagatggctatcgcggaaccgatgatgcaaaaaaaatg

SEQ ID NO: 877703 - DNA, 75 bp, synthetic construct
  source 1..75: mol_type = other DNA
ggctgattgccgatgccaaacccgcaagtcgccatcttatcggtctgaacattatccaggacattcccggctatc

SEQ ID NO: 877704 - DNA, 75 bp, synthetic construct
  source 1..75: mol_type = other DNA
caacaccactggagcgccgactggcgcaaacctgcagcgggatttctgatctgcaggtgccgcttcgtgacttgt

SEQ ID NO: 877705 - DNA, 75 bp, synthetic construct
  source 1..75: mol_type = other DNA
ggttggcagagatgtacccgaaactggtggcctatcacgactggtggttacgtaaccgcgatcacaacggcaacg

SEQ ID NO: 877706 - DNA, 75 bp, synthetic construct
  source 1..75: mol_type = other DNA
aagaatacatcaactttatggccagcaatttcgatcgcctgaccgtctggcaagacggcaagaaagtcgacttca

SEQ ID NO: 877707 - DNA, 75 bp, synthetic construct
  source 1..75: mol_type = other DNA
cattggggcagaagagcaggagcaattgaagaaaattgcccaggctcttcaattgccactggaacagtatatctg

SEQ ID NO: 877708 - DNA, 75 bp, synthetic construct
  source 1..75: mol_type = other DNA
attcaggagattcagggagatattttcgcggcggcagcaacttacgacggcgaagtcattaccatttatccaggc

SEQ ID NO: 877709 - DNA, 75 bp, synthetic construct
  source 1..75: mol_type = other DNA
acaggtgattcgtgatgcatggctgatacaccgacacaaagggaccatcagcgcactgcgcagggccattgaacc

SEQ ID NO: 877710 - DNA, 75 bp, synthetic construct
  source 1..75: mol_type = other DNA
tgattgccgatgccaaacccgcaagtcggcaccttatcggcctgaacattatccaggacattcccggctatctgt

SEQ ID NO: 877711 - DNA, 75 bp, synthetic construct
  source 1..75: mol_type = other DNA
cagccagcaatttcatgcgttgtgccgaagccgtcgggacacgcattacagacattccggtagacctcaacacgc

SEQ ID NO: 877712 - DNA, 75 bp, synthetic construct
  source 1..75: mol_type = other DNA
tttcctgccttatctcgcctgggcgttctctgtggatcgctgggatgagggctggactgaaagcgtcaagcgcca

SEQ ID NO: 877713 - DNA, 75 bp, synthetic construct
  source 1..75: mol_type = other DNA
tgggcgttttcggttgacaggtgggatgaaaagtggccggaagcgaccaaacgcgccgtgattcgcgatgcgtat

SEQ ID NO: 877714 - DNA, 75 bp, synthetic construct
  source 1..75: mol_type = other DNA
ccggacgctggttctccggcaatcagacctggccgtgggatacctggaagcaggcgtttgcgatggcgcatttca

SEQ ID NO: 877715 - DNA, 75 bp, synthetic construct
  source 1..75: mol_type = other DNA
gcgcaggggcgtctgccctttattgaaccaggggaaacaaagaaatactgctttgagctgggaattgttgatggc

SEQ ID NO: 877716 - DNA, 75 bp, synthetic construct
  source 1..75: mol_type = other DNA
ctaacccggcatttatagcaaaccagatgggccatgcagatgcgcaaatggtatttcaggtatacggaaaatgga

SEQ ID NO: 877717 - DNA, 75 bp, synthetic construct
  source 1..75: mol_type = other DNA
agtttggtgttgataacggttatctggcagacaatccatttaaggggatctcaccattaaaggagtcgagaacca

SEQ ID NO: 877718 - DNA, 75 bp, synthetic construct
  source 1..75: mol_type = other DNA
ggggataacccggtggcaatgggggaaataggcagctggtttgcgccgctatttcctgatgcgctggtggtgagt

SEQ ID NO: 877719 - DNA, 75 bp, synthetic construct
  source 1..75: mol_type = other DNA
gcaataaattaacaaagcagggatattacagttgtgtaatttcccgtgacggaaaaattaaacaggaagcaagaa

SEQ ID NO: 877720 - DNA, 75 bp, synthetic construct
  source 1..75: mol_type = other DNA
tagttttcctgacggtcgtgataaagaacgagcgcaggggcgtctgccctttattgagccaggggaaacaaagaa

SEQ ID NO: 877721 - DNA, 75 bp, synthetic construct
  source 1..75: mol_type = other DNA
gccttgatattgccgatcaggatggcattggtcgagtaggcagcctgacggctgcggcttgtcatggtctgcaat

SEQ ID NO: 877722 - DNA, 75 bp, synthetic construct
  source 1..75: mol_type = other DNA
aaatgactctgcgcttcgccacgccgcgcacgtcactactggaaactaaaatcatcagcaataaaccgctggatc

SEQ ID NO: 877723 - DNA, 75 bp, synthetic construct
  source 1..75: mol_type = other DNA
acgaacgtaataccaaacccagccttgccgcctggtcagtaatggaagtgtataacgtcacccaggataaagcct

SEQ ID NO: 877724 - DNA, 75 bp, synthetic construct
  source 1..75: mol_type = other DNA
ggccatgcagatgcgcaaatggtgtttcaggtgtacgggaaatggatgtcagaaaataataatgcgcaggtaacg

SEQ ID NO: 877725 - DNA, 75 bp, synthetic construct
  source 1..75: mol_type = other DNA
cggaaaatggatgtctgaaaacaataatgcacaggtagctttgttagtaagcgtacagcctgaaccgtctggtca

SEQ ID NO: 877726 - DNA, 75 bp, synthetic construct
  source 1..75: mol_type = other DNA
gtttgtttatagaggcgtaagagtcagggaaaatcttggggtccctgacacagccaaaaacagacgcattgcagg

SEQ ID NO: 877727 - DNA, 75 bp, synthetic construct
  source 1..75: mol_type = other DNA
tctccggctgactcgactcagcgcctggaagaacgccagaaaaagctgcagcagcagacggcgcttgtgcgtgct

SEQ ID NO: 877728 - DNA, 75 bp, synthetic construct
  source 1..75: mol_type = other DNA
ttcctttctcttggggctgccccggaaattgccgccagtgcctctaatgccatggtgcgtgaactgtccattgcc

SEQ ID NO: 877729 - DNA, 75 bp, synthetic construct
  source 1..75: mol_type = other DNA
aggaccagaaacgtgacctgctggcctttgcatccacggcggcaaaagctgcaacggcctttgagctgcccgccg

SEQ ID NO: 877730 - DNA, 75 bp, synthetic construct
  source 1..75: mol_type = other DNA
gaagctggccaaagaccagaacggcgctgatattcctgacccggcgctctttgtcaaaaaccttggtttgggaga

SEQ ID NO: 877731 - DNA, 75 bp, synthetic construct
  source 1..75: mol_type = other DNA
ggtaagatagatggtttccgcaaagccagtgcgcaactggctgtcacgggcaacagcctgaaagccgcacgtgaa

SEQ ID NO: 877732 - DNA, 75 bp, synthetic construct
  source 1..75: mol_type = other DNA
agagctgcagagtgcggcatcaatggggcgtttgttcggggaaatgctggcggaagggctgaacgtggcactgca

SEQ ID NO: 877733 - DNA, 75 bp, synthetic construct
  source 1..75: mol_type = other DNA
cgccatgtcaaagggcggggatattatcaacgtcctgcagcgcatggggggcgtggctgaccgcctcgacttccg

SEQ ID NO: 877734 - DNA, 75 bp, synthetic construct
  source 1..75: mol_type = other DNA
cgccatcgaaaagacgctttcgctggccaacggggatgccgcaactggcggcgctattgctggtactgttggtcg

SEQ ID NO: 877735 - DNA, 75 bp, synthetic construct
  source 1..75: mol_type = other DNA
gtgtttaactgtccaactttttggggtcagtacaaggtggtgctccaggatgggcgtttattcggtagccccata

SEQ ID NO: 877736 - DNA, 75 bp, synthetic construct
  source 1..75: mol_type = other DNA
cggggtgttaatccggacaccggtaacagcgataacaccatgaaggcggataacccgcgcaatgctttctactgg

SEQ ID NO: 877737 - DNA, 75 bp, synthetic construct
  source 1..75: mol_type = other DNA
gtggccaaagcacttgcggcgcttgctggcagcgctcctgagacgctggatacgctcaaagagctggctgatgcc

SEQ ID NO: 877738 - DNA, 75 bp, synthetic construct
  source 1..75: mol_type = other DNA
atgcctcaatctctcccggacactacgccgtcgaaaaggcgctttcgctggccgacggggatgccgcaactggta

SEQ ID NO: 877739 - DNA, 75 bp, synthetic construct
  source 1..75: mol_type = other DNA
cggagccacaacggctgcgatgacggtcgcgggattcagcctgccaattgttttgttaagcgccctgggcactgg

SEQ ID NO: 877740 - DNA, 75 bp, synthetic construct
  source 1..75: mol_type = other DNA
cgctatgtcaaagggcggggatatcatcgacgtgctgcagcgtatgggcggcgtggctgatcgcctggactatcg

SEQ ID NO: 877741 - DNA, 75 bp, synthetic construct
  source 1..75: mol_type = other DNA
agcaacctgcgacggtgaatgcagacggtaaagtgatgatgccatcgggtggttttccctcatggggatatggct

SEQ ID NO: 877742 - DNA, 75 bp, synthetic construct
  source 1..75: mol_type = other DNA
agcaacctgcgacggtgaatgcagacggaaaagtgatgatcccatcgggtggttttccttcatggggatatggct

SEQ ID NO: 877743 - DNA, 75 bp, synthetic construct
  source 1..75: mol_type = other DNA
atgagtgataataacctgcgcctgcaggtcattcttaatgcggttgacaaactcacccgcccatttcgatctgcg

SEQ ID NO: 877744 - DNA, 75 bp, synthetic construct
  source 1..75: mol_type = other DNA
cccgcgaaaggcggcgaagcgatggtgagtcgtgcagccactgtgccgcccgttcaacggattgaggcaccgacg

SEQ ID NO: 877745 - DNA, 75 bp, synthetic construct
  source 1..75: mol_type = other DNA
agcaacctgcgacggtgaatgcagacgggaaagtgatgattccatcgggtggttttccctcatggggatatggct

SEQ ID NO: 877746 - DNA, 75 bp, synthetic construct
  source 1..75: mol_type = other DNA
agcaacctgcgacggtgaatgcagacggcaaagtgatgataccatcgggtggttttccttcatggggatatggct

SEQ ID NO: 877747 - DNA, 75 bp, synthetic construct
  source 1..75: mol_type = other DNA
gagggttttataaaaccattctgattaaaaccagtgtttttggggattattttttgacttttgcaattcagtttg

SEQ ID NO: 877748 - DNA, 75 bp, synthetic construct
  source 1..75: mol_type = other DNA
gggtgtggctgcagcacctgcagaagcggcaccgcttcatccgttcagccttccggcccgtgcatatcagacgca

SEQ ID NO: 877749 - DNA, 75 bp, synthetic construct
  source 1..75: mol_type = other DNA
ggctaacaacctgccggagctgcagcgacagctgatactcacatcaggcagtaacgcaaacggctccatgcagaa

SEQ ID NO: 877750 - DNA, 75 bp, synthetic construct
  source 1..75: mol_type = other DNA
acgtgctgttgctgtgatgtttatgaatcctctggcggtactgcgcggtggactggccgccgcaggcacggtgct

SEQ ID NO: 877751 - DNA, 75 bp, synthetic construct
  source 1..75: mol_type = other DNA
agcttccaccgttgcatcctttggcgcttcccgcaaaaggcggtgaagcgatggtgagtcgtgcagctactgtgc

SEQ ID NO: 877752 - DNA, 75 bp, synthetic construct
  source 1..75: mol_type = other DNA
atccagtattgccgaaaccatttacccgcgtgtgggttaaaacggatagcggacgccaggtggcggcctacctca

SEQ ID NO: 877753 - DNA, 75 bp, synthetic construct
  source 1..75: mol_type = other DNA
attgcaaggtgctttgctggtggttgattcctcacttactccggttgatggttcactgcttatatgcgctatgga

SEQ ID NO: 877754 - DNA, 75 bp, synthetic construct
  source 1..75: mol_type = other DNA
tagatattgatgggaactggatatttgacggagaaaatgtggttgaaagagtaagaaccgcagatgagttaaaaa

SEQ ID NO: 877755 - DNA, 75 bp, synthetic construct
  source 1..75: mol_type = other DNA
caggacgctatcatcaacatcatggaaggaggccaggaagccttcaaccgacgcaaagaggtttataacttatgg

SEQ ID NO: 877756 - DNA, 75 bp, synthetic construct
  source 1..75: mol_type = other DNA
ttgctgaatatggtgcggatgcacggtaatgactccaacttattgatagtgttttatgttcagataatgcccgat

SEQ ID NO: 877757 - DNA, 75 bp, synthetic construct
  source 1..75: mol_type = other DNA
gaacgtgatgagtttgctgacgccggtgtatgttgcagggcagctaaaagggattgtgctgctggatattaacaa

SEQ ID NO: 877758 - DNA, 75 bp, synthetic construct
  source 1..75: mol_type = other DNA
gaagcatcagacacatctcctccggtgttcggggtaatcacctacatcatcaacgatgcgcgttctggtgagttt

SEQ ID NO: 877759 - DNA, 75 bp, synthetic construct
  source 1..75: mol_type = other DNA
ggtcgtgaatcgttgtcacgttcaggctctgctgacaacttcgcatggagccttggcgcgggtgtccgctatgac

SEQ ID NO: 877760 - DNA, 75 bp, synthetic construct
  source 1..75: mol_type = other DNA
tctgcattacattactcgggatatgataacaacttcgcatggagcattggggcaggtgttcgctatgacgtaact

SEQ ID NO: 877761 - DNA, 75 bp, synthetic construct
  source 1..75: mol_type = other DNA
atggtcacacgcaattgctggatatgcagtttgattccggttactggataaccagtttgtatcaggtaaaagagg

SEQ ID NO: 877762 - DNA, 75 bp, synthetic construct
  source 1..75: mol_type = other DNA
tagtggaaaacaagtcgctgttttaggtccagcatttaaggatgagaaaactggaaaaataacaggtgcaattca

SEQ ID NO: 877763 - DNA, 75 bp, synthetic construct
  source 1..75: mol_type = other DNA
gataaactttcatttaatcatcgtatatatttatttatccgcctgccattatttatagttgtccacacacttaat

SEQ ID NO: 877764 - DNA, 75 bp, synthetic construct
  source 1..75: mol_type = other DNA
acagcgcattcacaccatgggtatctgcagggattggctacgccagaattcaccagaaaacaaccggtatcagta

SEQ ID NO: 877765 - DNA, 75 bp, synthetic construct
  source 1..75: mol_type = other DNA
tcgccagaacagcgacgggccatctgtgaggcttttgagtctgccaacaatacccatggcttaaacctgactgcc

SEQ ID NO: 877766 - DNA, 75 bp, synthetic construct
  source 1..75: mol_type = other DNA
tggtgttcagtttggttatccgcatgttcaacctgaaaacgccgggtcgtgaagataaagaagacgagatcgtta

SEQ ID NO: 877767 - DNA, 75 bp, synthetic construct
  source 1..75: mol_type = other DNA
gtagcagctgcgtcagctgaagcaactccggcaactgccgcgcctgtagcaaaaccgcaggctgtaccaaacgcg

SEQ ID NO: 877768 - DNA, 75 bp, synthetic construct
  source 1..75: mol_type = other DNA
acactgaagaaggtctgactcaactggcgaccaactatattgctgcggttggcggtagcgacaacctgaaagcga

SEQ ID NO: 877769 - DNA, 75 bp, synthetic construct
  source 1..75: mol_type = other DNA
taccgtccatcttggtcatgccgtcacggagcggcggaacgaagggttggatgttccccctgaatttcttcccca

SEQ ID NO: 877770 - DNA, 75 bp, synthetic construct
  source 1..75: mol_type = other DNA
gtcagtctgccgttatcggtttttgatccccaggactaccatccactgctgattaccgtttccggaaaaaatgtt

SEQ ID NO: 877771 - DNA, 75 bp, synthetic construct
  source 1..75: mol_type = other DNA
gataacggcggaagtggcgaaggattcggacctttgacactctccctgcgcctgaaagataaagggggaaacacg

SEQ ID NO: 877772 - DNA, 75 bp, synthetic construct
  source 1..75: mol_type = other DNA
gaacaaacagactattcaggtgattgttggcgcgaaagcagaatccatcggcgatgcaatgaagaaagttgttgc

SEQ ID NO: 877773 - DNA, 75 bp, synthetic construct
  source 1..75: mol_type = other DNA
acgtgttctgctgcaactggctctgacgcaaaccaaagatccgcagcagatccagcagatattcaatcagtacta

SEQ ID NO: 877774 - DNA, 75 bp, synthetic construct
  source 1..75: mol_type = other DNA
ttatgagccggttaatgttgaatactttgcgatgaataactggtccttcctgcagtcaggaagtattggcatcga

SEQ ID NO: 877775 - DNA, 75 bp, synthetic construct
  source 1..75: mol_type = other DNA
ttgacgcctgtatcacccgtctgcgccttacagtggctgactctgcccgcgttaacgatacgatgtgtaaacgtc

SEQ ID NO: 877776 - DNA, 75 bp, synthetic construct
  source 1..75: mol_type = other DNA
ggtttgcagcaatatcgacgatttcagcggcttgatcattaaagctcagggccatgtcgtggcgggtcaaacacc

SEQ ID NO: 877777 - DNA, 75 bp, synthetic construct
  source 1..75: mol_type = other DNA
ctggtatcgccgattaccggtgatgttgtggcactggatcaggttcctgacgaagcattcgccagcaaagcggtg

SEQ ID NO: 877778 - DNA, 75 bp, synthetic construct
  source 1..75: mol_type = other DNA
accgtaaactcgtcctcaaacccatcgccgggcgcgacccgcaaacggaagatctggcgcagacgcagcgttgct

SEQ ID NO: 877779 - DNA, 75 bp, synthetic construct
  source 1..75: mol_type = other DNA
ctatcttcattattcctatcgtcggcacactgattaccgcaggcatcatgatgtggggcttgggcgagcctgtag

SEQ ID NO: 877780 - DNA, 75 bp, synthetic construct
  source 1..75: mol_type = other DNA
ctggattatctggaggcactggagctggttgatacctccagtgcgccagatattgaatggcctacgcctccggca

SEQ ID NO: 877781 - DNA, 75 bp, synthetic construct
  source 1..75: mol_type = other DNA
ttatatcaatagtaagcagtggcccggtaaagccgctattggtcgtctgaaaggtgacgaactggcgcaatataa

SEQ ID NO: 877782 - DNA, 75 bp, synthetic construct
  source 1..75: mol_type = other DNA
ggctgattgcagtggatccgcacggtgacataaccgccatcaaccgtaacgcaagaaaaatgctggggctgagtt

SEQ ID NO: 877783 - DNA, 75 bp, synthetic construct
  source 1..75: mol_type = other DNA
cattctgatgctgttgtcgtggttcttagccgcgcatattcgccgccagatgatggggatggaaccgaagcaaat

SEQ ID NO: 877784 - DNA, 75 bp, synthetic construct
  source 1..75: mol_type = other DNA
acagcctgcgcgaagcctttgccgatcgccaggtggcggggctgttgtttggtaaagtacagcgcgcccgcgaac

SEQ ID NO: 877785 - DNA, 75 bp, synthetic construct
  source 1..75: mol_type = other DNA
caggcgatgtcagaggtggttccgttcatctggatgcacagaccgtgatgcgcattaagcagtacagaatcgacc

SEQ ID NO: 877786 - DNA, 75 bp, synthetic construct
  source 1..75: mol_type = other DNA
caggcgaggtaaaaggtggttccgttcatctggatgcgcagaccgttatgcgccttaagcagtacaggatcgacc

SEQ ID NO: 877787 - DNA, 75 bp, synthetic construct
  source 1..75: mol_type = other DNA
ttcagtcagtatattgccccccccccgaaaatcttcacccaaaaagaattcaatttcaatttgttttaccggatt

SEQ ID NO: 877788 - DNA, 75 bp, synthetic construct
  source 1..75: mol_type = other DNA
ttttattaatttttacccctttaacttatgccaccggatttccatgtgctggctgtggaattgttgataatatga

SEQ ID NO: 877789 - DNA, 75 bp, synthetic construct
  source 1..75: mol_type = other DNA
tatttttaatgtttacccctttaacttatgccaccggtattccgtgtgccagctgtgcaacggttgagaatgcga

SEQ ID NO: 877790 - DNA, 75 bp, synthetic construct
  source 1..75: mol_type = other DNA
attaccaggtgtggcgcagattgtcagacacgcagttaacgcgtggcttgataagaatggttttgcatctggggg

SEQ ID NO: 877791 - DNA, 75 bp, synthetic construct
  source 1..75: mol_type = other DNA
tgatgtagtgattgaagtcgccgatcagggctgcggtgttccagaagcattacgcgacaaaatatttgagcaggg

SEQ ID NO: 877792 - DNA, 75 bp, synthetic construct
  source 1..75: mol_type = other DNA
tcagctatcgctatcttgatgcaggtgatgccagtgtgagttacaaggatgagtggggcgataaatataaatcag

SEQ ID NO: 877793 - DNA, 75 bp, synthetic construct
  source 1..75: mol_type = other DNA
ccgccatgcgccgcgtgtcctgctggctgacgaagtcggtttagggaaaaccattgaagctgggatgatcctgca

SEQ ID NO: 877794 - DNA, 75 bp, synthetic construct
  source 1..75: mol_type = other DNA
gctctctggcgctgctgaacgtgtgctgattatcgtcccggaaaccttacagcatcagtggctggtagaaatgct

SEQ ID NO: 877795 - DNA, 75 bp, synthetic construct
  source 1..75: mol_type = other DNA
ttgcatggagccttggggcaggtgtccgctatgacgtaaccccgtatatcgctcttgacctcagttatcgctatc

SEQ ID NO: 877796 - DNA, 75 bp, synthetic construct
  source 1..75: mol_type = other DNA
atgaaaaaggtttttgctgtttcagtggtggccgcagcctgtgtatttgcagcaaatgcaggtgctgaggaaggt

SEQ ID NO: 877797 - DNA, 75 bp, synthetic construct
  source 1..75: mol_type = other DNA
ggatgcagaaggggataaatataaatcagaggctgacgttaaaagtcatgacatcatgtttggtgtgacttataa

SEQ ID NO: 877798 - DNA, 75 bp, synthetic construct
  source 1..75: mol_type = other DNA
cgggataaggtcgctgaactgaaaaaacagcgcagactttcagcattacgtgacccgtcagaatctgaaccgtca

SEQ ID NO: 877799 - DNA, 75 bp, synthetic construct
  source 1..75: mol_type = other DNA
tatcagggagggaataaaaccggagaacatgcttgatggcgtgaagcggtatgccgcctgggtgcgtgtctctgg

SEQ ID NO: 877800 - DNA, 75 bp, synthetic construct
  source 1..75: mol_type = other DNA
ttccggttcgtacagaactggagttttacgctcgtggaaaagctgattcgaagtataacgtagataaagacagct

SEQ ID NO: 877801 - DNA, 75 bp, synthetic construct
  source 1..75: mol_type = other DNA
agccctgcgtgaagttttccttgatagcaaactggtgttcagcaaaccgcaggaccgcctgtttgccgggcagat

SEQ ID NO: 877802 - DNA, 75 bp, synthetic construct
  source 1..75: mol_type = other DNA
gttatgccgaagctcagcacgatgcttacaacccgttcgacaccgaacagctggtgatttgctcgctggattttg

SEQ ID NO: 877803 - DNA, 75 bp, synthetic construct
  source 1..75: mol_type = other DNA
gaatttgaaggcgataacgccacctggtggaacttcgacccgcgcgttgagtggctgatgggttacctgaccagc

SEQ ID NO: 877804 - DNA, 75 bp, synthetic construct
  source 1..75: mol_type = other DNA
acctcaaccgtcgatatcgttaccggcgcggacgtgctcgagtactacgccgggctgatcccgtcgctggaaggc

SEQ ID NO: 877805 - DNA, 75 bp, synthetic construct
  source 1..75: mol_type = other DNA
tgcgtgaagagatcttcgggccggtgatgtccattctgacctacgagtcggaagacgaagtcattcgccgcgcca

SEQ ID NO: 877806 - DNA, 75 bp, synthetic construct
  source 1..75: mol_type = other DNA
gcatttgagcagaaaattctggcgcgcgttgagcgcattcgcgcgggcgacgttttcgatccgcaaactaacttc

SEQ ID NO: 877807 - DNA, 75 bp, synthetic construct
  source 1..75: mol_type = other DNA
aggacggcaggtcgtgcccccgcaggcagtcagatccatcgtctggttcccctttccgatcaccactatgtcagc

SEQ ID NO: 877808 - DNA, 75 bp, synthetic construct
  source 1..75: mol_type = other DNA
aaggttttgcagtggtggcaggggaagtgcgtcatttagccagccgcagcgccaatgctgccaacgatattcgca

SEQ ID NO: 877809 - DNA, 75 bp, synthetic construct
  source 1..75: mol_type = other DNA
gtttaccaaaatggatgttgccagtgctggacgccgttggtctggcggtgttcgtcggtattggcgtcaacaaag

SEQ ID NO: 877810 - DNA, 75 bp, synthetic construct
  source 1..75: mol_type = other DNA
aattgatcgccctgttagcgaacggcgaatttcactccggcgagcaactgggtgaaacgttgggaatgagtcggg

SEQ ID NO: 877811 - DNA, 75 bp, synthetic construct
  source 1..75: mol_type = other DNA
cccggcggcggcgattggtttaagtctggttatcggtatcgtgatggcggaagtattacgcaagctgggagcaga

SEQ ID NO: 877812 - DNA, 75 bp, synthetic construct
  source 1..75: mol_type = other DNA
ggatgggcggtgaaatatccctgcgtagtgcgaaaaaaaaagataggggagcattagcccccctgaaaattattt

SEQ ID NO: 877813 - DNA, 75 bp, synthetic construct
  source 1..75: mol_type = other DNA
cgctgaaagttctgcaaagcctgatgggacataagtccatcagttcaacggaagtctacacgaaggtttttgcgc

SEQ ID NO: 877814 - DNA, 75 bp, synthetic construct
  source 1..75: mol_type = other DNA
cagctgcagacgatggtggcaacactgaaaatccccatggaacggcgtaataaacgaacaggcaggacagagaaa

SEQ ID NO: 877815 - DNA, 75 bp, synthetic construct
  source 1..75: mol_type = other DNA
tggcaaaaccggcgatgcggcgcaaatagtcattggtgccgggatcaacatggcaatgcgtcgtgttgaagagag

SEQ ID NO: 877816 - DNA, 75 bp, synthetic construct
  source 1..75: mol_type = other DNA
gacagaacggtcaggacctggattggggaggcggttgccgccgctgccgctgatggtgtgacgttctctgtcccg

SEQ ID NO: 877817 - DNA, 75 bp, synthetic construct
  source 1..75: mol_type = other DNA
acccgcatactgtcgccaatgtgctgttctttagtggctttggggcggctgtgggttgctgtgtcggcggcttcc

SEQ ID NO: 877818 - DNA, 75 bp, synthetic construct
  source 1..75: mol_type = other DNA
tgaacatcgcattgccaatatcgtaatgacactggcggcggctactgcgctgtggttctgcttcgccggtaacct

SEQ ID NO: 877819 - DNA, 75 bp, synthetic construct
  source 1..75: mol_type = other DNA
ctggtggttccggtctggggctggcgtgcgctgttctttatcggcattttgccaatcatctttgctctctggctg

SEQ ID NO: 877820 - DNA, 75 bp, synthetic construct
  source 1..75: mol_type = other DNA
caactgaaatttgggaggctttgatgaaattgaaaggcttgctctatagtgaagttaacatagctgataaattat

SEQ ID NO: 877821 - DNA, 75 bp, synthetic construct
  source 1..75: mol_type = other DNA
taaacaggatttaattaaaagtaaagcaagtgacttccttctcgattatacattatacatgacaccacaaattca

SEQ ID NO: 877822 - DNA, 75 bp, synthetic construct
  source 1..75: mol_type = other DNA
tcattgcagtcggtggtactttaggcggtgcattaatagctgcgggtgtaacattggcaagccaattaatcacta

SEQ ID NO: 877823 - DNA, 75 bp, synthetic construct
  source 1..75: mol_type = other DNA
atgcccgccggtcagcagactcaccggctggttccgctctctgacgcctggtacgtcagccagctgcagacgatg

SEQ ID NO: 877824 - DNA, 75 bp, synthetic construct
  source 1..75: mol_type = other DNA
tgttcattttcagcagcgattaaagagtgtttaaagctaggggctcctgttttaaacaggataaatgaaaatatt

SEQ ID NO: 877825 - DNA, 75 bp, synthetic construct
  source 1..75: mol_type = other DNA
gaacggtcaggacctggattggggaggcggttgccaccgctgctgctgacggtgtgacgttctctgttccggtca

SEQ ID NO: 877826 - DNA, 75 bp, synthetic construct
  source 1..75: mol_type = other DNA
gcgtactcatgacgctatcgacggcaaaccatttagcggtgccgtaccgtttggcagcgctaaaaacgatttagt

SEQ ID NO: 877827 - DNA, 75 bp, synthetic construct
  source 1..75: mol_type = other DNA
ctgcaaagcctgatgggacataagtccatcagttcaacggaagtctacacgaaggtttttgcgctggacgtggct

SEQ ID NO: 877828 - DNA, 75 bp, synthetic construct
  source 1..75: mol_type = other DNA
aaggtttttgcgctggatgtggctgcccggcaccgggtgcagtttgcgatgccggagtctgatgcggttgcgatg

SEQ ID NO: 877829 - DNA, 75 bp, synthetic construct
  source 1..75: mol_type = other DNA
tttaccgttccgggtaaaggatacagcctgcctgagcccatccagttacttaatgctgaacagatattgggtcag

SEQ ID NO: 877830 - DNA, 75 bp, synthetic construct
  source 1..75: mol_type = other DNA
cttggaccgaaacaactggcgagtctggaagacacgcaaatcatcgacaaagggcgcaattacgtgcgcgtttat

SEQ ID NO: 877831 - DNA, 75 bp, synthetic construct
  source 1..75: mol_type = other DNA
gtctggcggggtatctggtgagagggcgacgtgatgacggattaccggaataccacatcataccgtcagtatttg

SEQ ID NO: 877832 - DNA, 75 bp, synthetic construct
  source 1..75: mol_type = other DNA
aaaatatcaggttatcagtcgcgcccgcgatttcattcagcgtcacgcccttagccgttttcagccgtacacata

SEQ ID NO: 877833 - DNA, 75 bp, synthetic construct
  source 1..75: mol_type = other DNA
atgaagcgcgcgcagatatggttatcgcaccgcacgtagcggttttccctgcactggcaatcttcctgaccgtgc

SEQ ID NO: 877834 - DNA, 75 bp, synthetic construct
  source 1..75: mol_type = other DNA
gactggttgcgcgaagtgatcgtgaagctcaatgactggccgtcgaaccgtgtgcatgaactgcagccccggaac

SEQ ID NO: 877835 - DNA, 75 bp, synthetic construct
  source 1..75: mol_type = other DNA
tttttattctcttttaaaatatattccacgggcgtcattagtgcgagcgccttgtggggtcttttgctgttatac

SEQ ID NO: 877836 - DNA, 75 bp, synthetic construct
  source 1..75: mol_type = other DNA
ttgaaagcgaaggacgaaaacacggcgataacgtgccacctgtttatctggggccaaagcaactggcagacctgg

SEQ ID NO: 877837 - DNA, 75 bp, synthetic construct
  source 1..75: mol_type = other DNA
ttcttaaaagaaatatgcaatcttgactatgcacatattcaagatttagctcctacaaaagaaattttagatccc

SEQ ID NO: 877838 - DNA, 75 bp, synthetic construct
  source 1..75: mol_type = other DNA
acgcggcggctgtcgcgtatccggaactggcctgcgcggtgccgttttatggtcgtcaggcacccactgccgatg

SEQ ID NO: 877839 - DNA, 75 bp, synthetic construct
  source 1..75: mol_type = other DNA
aaaatgcatcgtcacaggtcagacgtgtggcttcacgctttgccatgctggatgcggccggagaacttgccaccg

SEQ ID NO: 877840 - DNA, 75 bp, synthetic construct
  source 1..75: mol_type = other DNA
gcgactttcatcaaattattgtggagctgcggggcgtgagtgggtgcgctggttatccgctcataaggaactggc

SEQ ID NO: 877841 - DNA, 75 bp, synthetic construct
  source 1..75: mol_type = other DNA
ttcctgttaaaaggggggatcaccccaaaagccgggcaactggtgcggctgctaagcgttccctttaccgataca

SEQ ID NO: 877842 - DNA, 75 bp, synthetic construct
  source 1..75: mol_type = other DNA
atgtgaatgccccctatgtatccctgcagaaatatgcagagataacaggtatccctcttaatacgtgcaaaaaga

SEQ ID NO: 877843 - DNA, 75 bp, synthetic construct
  source 1..75: mol_type = other DNA
gctcgttttataggtgtagttgctgaacctcaacttccaataaatgttaacccaaaactgagacggataattagc

SEQ ID NO: 877844 - DNA, 75 bp, synthetic construct
  source 1..75: mol_type = other DNA
gctacagggtgcacgcacggcgtttattcttgagtgcaagaaagcctcgccgtcaaaaggcgtgatccgtgatga

SEQ ID NO: 877845 - DNA, 75 bp, synthetic construct
  source 1..75: mol_type = other DNA
gatcccctggcgattgaaatagacacaacagatgcactgccgcctattgaacaacaattttatgagacctccagc

SEQ ID NO: 877846 - DNA, 75 bp, synthetic construct
  source 1..75: mol_type = other DNA
cggggggcaccagtgagcgttcgtcaattatggtgggcgaagtggacgccacgaccgcaagcggtattcatggtc

SEQ ID NO: 877847 - DNA, 75 bp, synthetic construct
  source 1..75: mol_type = other DNA
gggtgcggcgctggcgatgtacttcgcagcaccgaaagagcgtcgtccgatggttggcgggatgctgctttctgt

SEQ ID NO: 877848 - DNA, 75 bp, synthetic construct
  source 1..75: mol_type = other DNA
atgaatattttaggttttttccagcgactcggtagggcgttacagctccctatcgcggtgctgccggtggcggcg

SEQ ID NO: 877849 - DNA, 75 bp, synthetic construct
  source 1..75: mol_type = other DNA
gtgaactatttggcgatatgcaagttcagaactttgttcgtccgatgattcaaaactggaaggaataccagagaa

SEQ ID NO: 877850 - DNA, 75 bp, synthetic construct
  source 1..75: mol_type = other DNA
agcatcatttacattaagtgactcattgaagattgatccatctcaaatgaagtctgcaatggggattctggttca

SEQ ID NO: 877851 - DNA, 75 bp, synthetic construct
  source 1..75: mol_type = other DNA
gatattcaggccgctcagggttttctcgtcgctgctgggcaggattataaagaggctcaggcgaatctactaact

SEQ ID NO: 877852 - DNA, 75 bp, synthetic construct
  source 1..75: mol_type = other DNA
ccggctggctcgttttctgccgaataccaaaattctgaccttatgcggcggtcagccgttcggcattcagcgtga

SEQ ID NO: 877853 - DNA, 75 bp, synthetic construct
  source 1..75: mol_type = other DNA
acaacaattttatgagacatccagcaaaggcaaaattccgctgttgcaacggttattaagtttgcatcagccatc

SEQ ID NO: 877854 - DNA, 75 bp, synthetic construct
  source 1..75: mol_type = other DNA
gcagctaaaagagcattagatgcgggatattctgattttgagaagaaattgagtgctcatatgttccaacaacgg

SEQ ID NO: 877855 - DNA, 75 bp, synthetic construct
  source 1..75: mol_type = other DNA
cggcggtggaatgccggtaggcgcattcggtggtcgtcgtgatgtgatggatgcgctggccccgaccggtccggt

SEQ ID NO: 877856 - DNA, 75 bp, synthetic construct
  source 1..75: mol_type = other DNA
cgggactggaagacatcagccgtgatttgcagcttctgagtggtgcggaaaacaaccgggtgctgcgtgaggcaa

SEQ ID NO: 877857 - DNA, 75 bp, synthetic construct
  source 1..75: mol_type = other DNA
ttatcgtaccaatgatggcaccgaaatcatgctcagtctgcgtcaggattcctcgctggatgacctgcaatggtg

SEQ ID NO: 877858 - DNA, 75 bp, synthetic construct
  source 1..75: mol_type = other DNA
caggattattacggtgtcgtgccggatctcacctgcctgggtaaaatcattggcggcgggatgcctgttggtgcc

SEQ ID NO: 877859 - DNA, 75 bp, synthetic construct
  source 1..75: mol_type = other DNA
atggtgctgggccataaccatccggcgatccgcaatgccgtgattgaagccgccgagcgtggtttaagctttggt

SEQ ID NO: 877860 - DNA, 75 bp, synthetic construct
  source 1..75: mol_type = other DNA
gcccgtggttttaccggtcgcgacaaaattattaaatttgaaggttgttaccacggtcacgctgactgcctgctg

SEQ ID NO: 877861 - DNA, 75 bp, synthetic construct
  source 1..75: mol_type = other DNA
gcaatggtttcttgataccacagagggaacaccgtggatccagtccgtgctgggcaggcaaaaaccagaaactta

SEQ ID NO: 877862 - DNA, 75 bp, synthetic construct
  source 1..75: mol_type = other DNA
tgatgacacctggctgattaactcgcctgaggccgtagcgcaggctgtgaaaacgcgattcgaattgtggtatgg

SEQ ID NO: 877863 - DNA, 75 bp, synthetic construct
  source 1..75: mol_type = other DNA
ggtactccctatatccagtcggttcttggaaagcagaggccagaagtttacaacctggcaataagagaccgcatc

SEQ ID NO: 877864 - DNA, 75 bp, synthetic construct
  source 1..75: mol_type = other DNA
cttacccctaactttgccgctcgcgcctggcaccataccggacgcgccgacgggctggacgtaccgggaagtgaa

SEQ ID NO: 877865 - DNA, 75 bp, synthetic construct
  source 1..75: mol_type = other DNA
ggttatcgtaccaacgatggcaccgaaatcatgctcagtctgcgtcaggattcctcgctggatgacctgcaatgg

SEQ ID NO: 877866 - DNA, 75 bp, synthetic construct
  source 1..75: mol_type = other DNA
atgcactgcttgagcgcgcacggaataaagtgcagaggcattgagttcgccttaacacagagtgcattcgctgag

SEQ ID NO: 877867 - DNA, 75 bp, synthetic construct
  source 1..75: mol_type = other DNA
cctgttccgtggccctcagccacaccaccaacaggatggctgaaatgtaacggtgcagcattttcttctgaaatg

SEQ ID NO: 877868 - DNA, 75 bp, synthetic construct
  source 1..75: mol_type = other DNA
atgaaagatgttgtgattgtcggtgcgttacgaacacctatcggctgctttcgtggtgcgttggctggtcattct

SEQ ID NO: 877869 - DNA, 75 bp, synthetic construct
  source 1..75: mol_type = other DNA
ggtgtatgcgacccgccgttgcctggagcgtgtaggctggcagttggctgatgtcgatcttatcgaggctaatga

SEQ ID NO: 877870 - DNA, 75 bp, synthetic construct
  source 1..75: mol_type = other DNA
acagccacgcactgacgccagtgcagaaggcttagcccgtttaaatccttcatttgatagtctcggttctgtgac

SEQ ID NO: 877871 - DNA, 75 bp, synthetic construct
  source 1..75: mol_type = other DNA
ggaccgtgaatatgccaccgcacccgtttgtgcgcccggcatttgatgtgcgcagtgaacaggcagcacaggtgg

SEQ ID NO: 877872 - DNA, 75 bp, synthetic construct
  source 1..75: mol_type = other DNA
atgtggtggtcctttcccggcgctcccgcgatggcgggatggaatccggtgtgcatatccgtggtgttaatccgg

SEQ ID NO: 877873 - DNA, 75 bp, synthetic construct
  source 1..75: mol_type = other DNA
catttgatagtcacggttctgttaccgcaggaaatgcctcatccatcaatgatggcgcggctgcggtaatgatga

SEQ ID NO: 877874 - DNA, 75 bp, synthetic construct
  source 1..75: mol_type = other DNA
cctgttccgtggccctcagccacacccccaaccggatggctgaaatgtaacggtgcagcattttcttctgaaatg

SEQ ID NO: 877875 - DNA, 75 bp, synthetic construct
  source 1..75: mol_type = other DNA
cctgttccgtggccctcagccacacccccaacaggctggctgaaatgtaacggtgcagcattttcttctgaaatg

SEQ ID NO: 877876 - DNA, 75 bp, synthetic construct
  source 1..75: mol_type = other DNA
cctgttccgtggccctcagccacacctccaacaggttggctgaaatgtaacggtgcagcattttcttctgaaatg

SEQ ID NO: 877877 - DNA, 75 bp, synthetic construct
  source 1..75: mol_type = other DNA
tcgtggagcattggcaggccattccgccgtggaattaggcagcctggtcgtgaaagcattattagatcgcactgg

SEQ ID NO: 877878 - DNA, 75 bp, synthetic construct
  source 1..75: mol_type = other DNA
cctgttccgtggccctcagccacaccgccaacgggatggctgaaatgtaacggtgcagcattttcttctgaaatg

SEQ ID NO: 877879 - DNA, 75 bp, synthetic construct
  source 1..75: mol_type = other DNA
cctgttccgtggccctcagccacaccgccaacagggtggctgaaatgtaacggtgcagcattttcttctgaaatg

SEQ ID NO: 877880 - DNA, 75 bp, synthetic construct
  source 1..75: mol_type = other DNA
tcggtcaggaccgtcgcttcctgtttaaatacatgccggagctggaagcctacttccactaccgttatcttgatg

SEQ ID NO: 877881 - DNA, 75 bp, synthetic construct
  source 1..75: mol_type = other DNA
atttctttgccggtatccgcgatatcgttggcggacgctccggtgcgtatgaaaaagaactgcgtaaagcgcggg

SEQ ID NO: 877882 - DNA, 75 bp, synthetic construct
  source 1..75: mol_type = other DNA
aatttacagcatcactttcttattgccatacctgctctccaggatccgattttccgtcgttccgtggtctacatt

SEQ ID NO: 877883 - DNA, 75 bp, synthetic construct
  source 1..75: mol_type = other DNA
ttgccatgcctgctctccaggatccgattttccgccgttccgtggtctacatttgcgaacataatgcagatggag

SEQ ID NO: 877884 - DNA, 75 bp, synthetic construct
  source 1..75: mol_type = other DNA
acggcggtctactctaccgaaacggcaatggcgaagctggcgttgaccgaatggctggtaagcaaagcctggcag

SEQ ID NO: 877885 - DNA, 75 bp, synthetic construct
  source 1..75: mol_type = other DNA
cgcgaaaaatggctggtggcggtcgatgacagccgaattgaaatcgctctcgatcagggggaggtgaaagcgggg

SEQ ID NO: 877886 - DNA, 75 bp, synthetic construct
  source 1..75: mol_type = other DNA
cgcgaaaaatggttggtggaggtcgatggcagcagcattgaaatcgctctcgatcagggcgaggtgaaagcgggt

SEQ ID NO: 877887 - DNA, 75 bp, synthetic construct
  source 1..75: mol_type = other DNA
acagaactcttcttatctgaaaccgaaaaatcccaaacaatacctttcaatcagcaagaaattaccatccctgtc

SEQ ID NO: 877888 - DNA, 75 bp, synthetic construct
  source 1..75: mol_type = other DNA
tttggatcgatcttgagatgaccggtctggatcccgagcgcgatcgcataattgagattgccacgttggtgaccg

SEQ ID NO: 877889 - DNA, 75 bp, synthetic construct
  source 1..75: mol_type = other DNA
cggacgatttaaagatgagatcgtcccggtaataacccaaagtaacggtcagacgttggttgttgataccgatga

SEQ ID NO: 877890 - DNA, 75 bp, synthetic construct
  source 1..75: mol_type = other DNA
ttgcctttcaattccgcaaagtctatacaactgactaaccactataaaaatatcaccaatgaaattacagaactc

SEQ ID NO: 877891 - DNA, 75 bp, synthetic construct
  source 1..75: mol_type = other DNA
gaatatggaacaacaccgcacaagaagaacccaaaacctgaagtgtatatacgagcaaagtacaaaatagtgaaa

SEQ ID NO: 877892 - DNA, 75 bp, synthetic construct
  source 1..75: mol_type = other DNA
tagatgccctattgctcagcactttctttggctacgaagatatcatccgcttttcacattttaaaattagcccgg

SEQ ID NO: 877893 - DNA, 75 bp, synthetic construct
  source 1..75: mol_type = other DNA
tggcgggttactacgatcctgtcgtcgcgcaagcctggctggagaactggcaggggctgcgtcacgctattgcga

SEQ ID NO: 877894 - DNA, 75 bp, synthetic construct
  source 1..75: mol_type = other DNA
atgaaatatccgacaggcgtggaaaaccatggagggaaattacgtatctggtttgtttataaaggtgtaagagtc

SEQ ID NO: 877895 - DNA, 75 bp, synthetic construct
  source 1..75: mol_type = other DNA
ttgaaacggagatagtcgaaggaaatctaaatgatgatcatgaaaaattagaacaaatagaaaaacttagaaagt

SEQ ID NO: 877896 - DNA, 75 bp, synthetic construct
  source 1..75: mol_type = other DNA
tgacggtgatcagcgaatccggcatcaatacttacgcccaggtgcgcgaattaggccacttcgctaacggctttt

SEQ ID NO: 877897 - DNA, 75 bp, synthetic construct
  source 1..75: mol_type = other DNA
acctgaatattctggcagaagggccgaccattgcagtacaccagtctgatgaacagctggcgctgatggatgact

SEQ ID NO: 877898 - DNA, 75 bp, synthetic construct
  source 1..75: mol_type = other DNA
agagactgatgtcgcatcgacatcgattaagacataccggacgattatcaaaaacgttcttctcattctcggtga

SEQ ID NO: 877899 - DNA, 75 bp, synthetic construct
  source 1..75: mol_type = other DNA
ctgactggataccagatccccaaaagtaactatattgttacacaaccagggagatcggctgttaccgtaaataat

SEQ ID NO: 877900 - DNA, 75 bp, synthetic construct
  source 1..75: mol_type = other DNA
aaaccatctggtacttgatacagcaaacagtgaaagtgaaacagaattgcagggcaatcgtcaaattattgcgcc

SEQ ID NO: 877901 - DNA, 75 bp, synthetic construct
  source 1..75: mol_type = other DNA
ctgccgatcttgcttcccgcgtgcagccgctgttcagtaccgatttttatcgcgaaaaatggctggtggaggttg

SEQ ID NO: 877902 - DNA, 75 bp, synthetic construct
  source 1..75: mol_type = other DNA
atggcagccgaattgaaatcgctctcgatcagggtgaggtgaaagcgggtgaatttgctgaacctatctgtgagc

SEQ ID NO: 877903 - DNA, 75 bp, synthetic construct
  source 1..75: mol_type = other DNA
tttaattctgctgtagagtcacaaccgggtataaaagacgcacatcttttggcctcggttttccagacgctgcgc

SEQ ID NO: 877904 - DNA, 75 bp, synthetic construct
  source 1..75: mol_type = other DNA
atgcaaaccgttttagcgaaaatcgtcgcggacaaggcgatttgggtagaagcccgtaaacagcagcaaccactt

SEQ ID NO: 877905 - DNA, 75 bp, synthetic construct
  source 1..75: mol_type = other DNA
taaggattatcagttgagttattccaacaacctgcgacggataagctataccctcgcggcaagccaggcttatga

SEQ ID NO: 877906 - DNA, 75 bp, synthetic construct
  source 1..75: mol_type = other DNA
tttacctctttctcagggagtttagtctccaggattcccggggcggttcacaatacagatacgatatggctcccg

SEQ ID NO: 877907 - DNA, 75 bp, synthetic construct
  source 1..75: mol_type = other DNA
gacaacaatgggggactgggatgtaaccatttacgctcagaaaagtgtttatggaaaagatccagaaacaggccg

SEQ ID NO: 877908 - DNA, 75 bp, synthetic construct
  source 1..75: mol_type = other DNA
gtatcaaccaacaggattcacgcttaaaaactttgagaaagacatcacattgtactcacgagttcggcagtatac

SEQ ID NO: 877909 - DNA, 75 bp, synthetic construct
  source 1..75: mol_type = other DNA
gatgatagtggggattcagcaactcagcgtacgaccgtttatggtctggatgagggcgcgtcaaagtccgtagat

SEQ ID NO: 877910 - DNA, 75 bp, synthetic construct
  source 1..75: mol_type = other DNA
ttgttgtttattgagtggtgaggatattgttcttgatgtgttcagatttaaaaagtatctttcattatctgggca

SEQ ID NO: 877911 - DNA, 75 bp, synthetic construct
  source 1..75: mol_type = other DNA
cttcgagttaaagaacagcagcgcgctgggctccgagcttatcgattacgccctgccgctcgcgaaggtgagcca

SEQ ID NO: 877912 - DNA, 75 bp, synthetic construct
  source 1..75: mol_type = other DNA
tgagtgccattctgttgctggcctgcgcctcttgcgcggcctttgctgccccgactaaagaagaagcccaggcct

SEQ ID NO: 877913 - DNA, 75 bp, synthetic construct
  source 1..75: mol_type = other DNA
ggatgttacggcacagaacacctgaaagcatcgagaaccttctggcctgtgcggaaaacggagacaacggttttc

SEQ ID NO: 877914 - DNA, 75 bp, synthetic construct
  source 1..75: mol_type = other DNA
gagcgtgaggcagcagaacgcgcagaacgcgaaagaaagcgccaggaactgctccagctgatcgccggagaaggt

SEQ ID NO: 877915 - DNA, 75 bp, synthetic construct
  source 1..75: mol_type = other DNA
gatatcgagaatatgatgcgtacatttgaacaaattatttctatcaataatgaaatacttaaacttactcatgat

SEQ ID NO: 877916 - DNA, 75 bp, synthetic construct
  source 1..75: mol_type = other DNA
taacattaaactggcgcactctgctgacagtattgatactgtgacatacaaagtaaacggcgaggttgttcctgg

SEQ ID NO: 877917 - DNA, 75 bp, synthetic construct
  source 1..75: mol_type = other DNA
ttatttttctggatcagaaaggcagaaagtagaagtggttaatggggagtatacagttaatgctcttgtaccggt

SEQ ID NO: 877918 - DNA, 75 bp, synthetic construct
  source 1..75: mol_type = other DNA
gactgcctgggcacaggcgatgcgctggaatgatattgcccaggatgatatcgctgcggagtaccgtcaggaggc

SEQ ID NO: 877919 - DNA, 75 bp, synthetic construct
  source 1..75: mol_type = other DNA
ttaataggtttaatttattcagggataatagattttcacgaaagtatttgttgcgtttgatttcattcttactaa

SEQ ID NO: 877920 - DNA, 75 bp, synthetic construct
  source 1..75: mol_type = other DNA
aagcgcgtctttggtatgcgtcacttcgacgttcagttactcggcggtatggttcttaacgaacgctgcatcgcc

SEQ ID NO: 877921 - DNA, 75 bp, synthetic construct
  source 1..75: mol_type = other DNA
tgccagaacgggtgcgtctgtggtcagtctctgggggaagtgcgtgttccgcaccggggaaatgtggtggacaga

SEQ ID NO: 877922 - DNA, 75 bp, synthetic construct
  source 1..75: mol_type = other DNA
acggtaccgtaactaacgttagttcacctgggatatacattggtgactctgcagaacaatatttttcgtggtata

SEQ ID NO: 877923 - DNA, 75 bp, synthetic construct
  source 1..75: mol_type = other DNA
ggtacgtcacgatgcggtactggcagcaggtggcctgcatatcatcggtaccgagcgtcacgaatcccgtcgtat

SEQ ID NO: 877924 - DNA, 75 bp, synthetic construct
  source 1..75: mol_type = other DNA
tccggcccggcagaagatagctcggaaatgtataagcgagtaaacaaaattattccgcatctgattcgtcaggaa

SEQ ID NO: 877925 - DNA, 75 bp, synthetic construct
  source 1..75: mol_type = other DNA
gccggtgctggtgggtactatctccatcgaaaaatcggagctggtgtcaaacgaactgaccaaagccggtattaa

SEQ ID NO: 877926 - DNA, 75 bp, synthetic construct
  source 1..75: mol_type = other DNA
atgcagcacgtccacatagtgaagccattcgcgacgcgcagcggaaaaaaccgaaagttccggtacatgccgtgt

SEQ ID NO: 877927 - DNA, 75 bp, synthetic construct
  source 1..75: mol_type = other DNA
atgattttagacagccgcccggttcatgcagcacgtccacacagtgaagctattcgcgacgctcaacgaaaaaaa

SEQ ID NO: 877928 - DNA, 75 bp, synthetic construct
  source 1..75: mol_type = other DNA
atgattactgcgccagttgaggccctgggttttgaactggttggcatcgagtttattcgcggtcgcacatccaca

SEQ ID NO: 877929 - DNA, 75 bp, synthetic construct
  source 1..75: mol_type = other DNA
actcaggtaaaatgtatggctcccataaattatttaatacatcagttcctggtttgtattacacattattaattt

SEQ ID NO: 877930 - DNA, 75 bp, synthetic construct
  source 1..75: mol_type = other DNA
tcaacagatcaaattatccagctcatcaaattatccagctcatcaaattatctgtattcatttaaagcctatggc

SEQ ID NO: 877931 - DNA, 75 bp, synthetic construct
  source 1..75: mol_type = other DNA
aaacatgtggtcagcttacggtaccgtaactaacgttagttcacctgggatatacattggtgactctgcagaaca

SEQ ID NO: 877932 - DNA, 75 bp, synthetic construct
  source 1..75: mol_type = other DNA
atctttacaatgcgatggagaaaagcggtctgcgaggtgtcagtgttaaatatctctgcagcaccgcagccggta

SEQ ID NO: 877933 - DNA, 75 bp, synthetic construct
  source 1..75: mol_type = other DNA
atatagaaacaaaactcatgtcaaacaaggtgggtagtgtaagcaaagaacttctggctaacacactcacaggaa

SEQ ID NO: 877934 - DNA, 75 bp, synthetic construct
  source 1..75: mol_type = other DNA
tttttttagcactatgctcttgttgttatacagcaagcgccggcaccgatgataacgtcggctatgttgttggga

SEQ ID NO: 877935 - DNA, 75 bp, synthetic construct
  source 1..75: mol_type = other DNA
gattatctctactcattcaaagcatatggtgctggtgtcggcatcaatgagcacagttattttcttagaataaat

SEQ ID NO: 877936 - DNA, 75 bp, synthetic construct
  source 1..75: mol_type = other DNA
cgatggggtttaccctaatcaaggtaacggcacatcacagcctcttcatttccaggcaacattaaagcaagacgg

SEQ ID NO: 877937 - DNA, 75 bp, synthetic construct
  source 1..75: mol_type = other DNA
ttacctttattcgtttaaggcctacagtcctggtacaaaagttgtagatcacagcaaccacatttatgtcaattt

SEQ ID NO: 877938 - DNA, 75 bp, synthetic construct
  source 1..75: mol_type = other DNA
accgaaaatggtcgcagaacaccgctgaccgtctgcttgccagcatgaacaatcacatctttccggtcattggca

SEQ ID NO: 877939 - DNA, 75 bp, synthetic construct
  source 1..75: mol_type = other DNA
atgcaaactctcacgattaaattttataccgataccgactttaacccgacaacgaaccaacgggtaacattatcc

SEQ ID NO: 877940 - DNA, 75 bp, synthetic construct
  source 1..75: mol_type = other DNA
ggtctcattatccaggtcaggagactatctctacgcattttgggccaacggtgcaggcgtaggtattaacgagta

SEQ ID NO: 877941 - DNA, 75 bp, synthetic construct
  source 1..75: mol_type = other DNA
ttttctttactgtaccaaaaatggaaacgcaagtggtggtcctatggacataaaaaataccatgaaatactcggg

SEQ ID NO: 877942 - DNA, 75 bp, synthetic construct
  source 1..75: mol_type = other DNA
aaacatttggtcatcatacaccacaaccaatgtcagttcaccaggtatatatgttggcgactccccaagtcaaaa

SEQ ID NO: 877943 - DNA, 75 bp, synthetic construct
  source 1..75: mol_type = other DNA
ctcacgattgaattttataccgataccgactttaacccgacaacgaatcaacgggtaacattatccagaacagat

SEQ ID NO: 877944 - DNA, 75 bp, synthetic construct
  source 1..75: mol_type = other DNA
tttttttagcactgtgctcttgttgttatacagcaagtgccggtaccgatgatcacgtcggctatgttgttggga

SEQ ID NO: 877945 - DNA, 75 bp, synthetic construct
  source 1..75: mol_type = other DNA
aacattaaagcaagacgggaatattgctatcgaacccggcgaatttaaagccaccagtactttccaggtaaccta

SEQ ID NO: 877946 - DNA, 75 bp, synthetic construct
  source 1..75: mol_type = other DNA
tcggcgcaatgcgtccgtccacctccatgagcgcagacggtccattcaacctctataacgcggtagtgaccgcag

SEQ ID NO: 877947 - DNA, 75 bp, synthetic construct
  source 1..75: mol_type = other DNA
ctgtataacgcggtagttaccgcagctgataaagcctccgctaatcgtggcgtactggtagtaatgaacgacact

SEQ ID NO: 877948 - DNA, 75 bp, synthetic construct
  source 1..75: mol_type = other DNA
acggtaccgacacgatggaagaaacggcttacttccttgacctgacggtgaaatgggacaaaccggtggtgatgg

SEQ ID NO: 877949 - DNA, 75 bp, synthetic construct
  source 1..75: mol_type = other DNA
aagttggattaaagaccacttcaaattatttatatagttttaaatcctatggtgctggacaatatatcagcagtg

SEQ ID NO: 877950 - DNA, 75 bp, synthetic construct
  source 1..75: mol_type = other DNA
gtgtataaagcatatgaagatgaaattgatacttcaggtggcatctacccaggcaaaggccagggaacaacgcag

SEQ ID NO: 877951 - DNA, 75 bp, synthetic construct
  source 1..75: mol_type = other DNA
cgcttacttcctcgacctgacggtgaaatgcgacaaaccggtggtgatggtcggtgcaatgcgcccgtccacgtc

SEQ ID NO: 877952 - DNA, 75 bp, synthetic construct
  source 1..75: mol_type = other DNA
acggtaccgacacgatggaagaaactgcttacttcctagacctgacggtgaaatgagacaaaccggtggtgatgg

SEQ ID NO: 877953 - DNA, 75 bp, synthetic construct
  source 1..75: mol_type = other DNA
acggtaccgacacgatggaagaaacagcttacttccttgacctgacggtgaaatgagacaaaccggtggtgatgg

SEQ ID NO: 877954 - DNA, 75 bp, synthetic construct
  source 1..75: mol_type = other DNA
cttcaagtctgttaacttcggtccactgggttacattcacaacggtaaaatcgactatcagcgtactccggcgcg

SEQ ID NO: 877955 - DNA, 75 bp, synthetic construct
  source 1..75: mol_type = other DNA
acggtaccgacacgatggaagaaaccgcttacttccttgacctgacggtgaaatgcgacaaaccggtggtgatgg

SEQ ID NO: 877956 - DNA, 75 bp, synthetic construct
  source 1..75: mol_type = other DNA
acggtaccgacacgatggaagaaactgcttacttcctggacctgacggtgaaatgggacaaaccggtggtgatgg

SEQ ID NO: 877957 - DNA, 75 bp, synthetic construct
  source 1..75: mol_type = other DNA
acggtaccgacacgatggaagaaactgcttacttcctcgacctgacggtgaaatgcgacaaaccggtggtgatgg

SEQ ID NO: 877958 - DNA, 75 bp, synthetic construct
  source 1..75: mol_type = other DNA
aaaagttttccgcccggaccttcgcaacgaaccggtcatcgtactcagcaataacgatggctgtgtgatcgcacg

SEQ ID NO: 877959 - DNA, 75 bp, synthetic construct
  source 1..75: mol_type = other DNA
gtcgtcggactggcagggtatctgctctcagtttattgctggtataaaacgctgcatcaactggcactcagcaag

SEQ ID NO: 877960 - DNA, 75 bp, synthetic construct
  source 1..75: mol_type = other DNA
aatacttcccggctgggaaggtacttattcactgaaagccgcgttgggcgtcgcctgtatcattggtggattaat

SEQ ID NO: 877961 - DNA, 75 bp, synthetic construct
  source 1..75: mol_type = other DNA
aatggcgacctaggccgggtggccggattgctgaaattgtggctcgctgagaaacgcggtcagggcgcgcgaccg

SEQ ID NO: 877962 - DNA, 75 bp, synthetic construct
  source 1..75: mol_type = other DNA
ttgaaccacccgattcggtcggtgctcgacctgcgggcggtcgccgagctgggcaaagtcaacggcgacctcggc

SEQ ID NO: 877963 - DNA, 75 bp, synthetic construct
  source 1..75: mol_type = other DNA
gccatgcggtacgcgatataaaccagtggattaatggttattacaacgtttatcgacctcacacgaacaacgatg

SEQ ID NO: 877964 - DNA, 75 bp, synthetic construct
  source 1..75: mol_type = other DNA
gtcatctccgtccatcgccgcgtattttacaggggcaggcactgcgcgatctggcaaattcagctatcgatctct

SEQ ID NO: 877965 - DNA, 75 bp, synthetic construct
  source 1..75: mol_type = other DNA
cagagctttccaaagaacgccgcgatatctctaaaaagctgaaagctatgggtgaaatgaaaaacggcgaagcaa

SEQ ID NO: 877966 - DNA, 75 bp, synthetic construct
  source 1..75: mol_type = other DNA
gagctggcacaaagccgcccgcgcaaaaccctgacttctgccacgaaatctaacggtttagccattagtatgccg

SEQ ID NO: 877967 - DNA, 75 bp, synthetic construct
  source 1..75: mol_type = other DNA
tttaattatcaagatgttaatcacgccgtttcaaaagcatctgcatccgggatttcaaaagttatcttccttaaa

SEQ ID NO: 877968 - DNA, 75 bp, synthetic construct
  source 1..75: mol_type = other DNA
gctccactcctctgataaccctgtgcgcagaggaaatgataaggttttacaacaactttcaattgatatattaca

SEQ ID NO: 877969 - DNA, 75 bp, synthetic construct
  source 1..75: mol_type = other DNA
tcgatcctgcggatctggcgtataaagcactggcagtaaacttaagcgatctggcggcgatgggcgctgatccgg

SEQ ID NO: 877970 - DNA, 75 bp, synthetic construct
  source 1..75: mol_type = other DNA
tggccgaccgggctgctcagtccggtttgtcgttgtccgcctacatgaaagcggccggactgaacgcgcctatcc

SEQ ID NO: 877971 - DNA, 75 bp, synthetic construct
  source 1..75: mol_type = other DNA
atccagactgcaaattaccggagaaggcgatggactaccttaagcggaacgaactgataagcgcggaggatgttt

SEQ ID NO: 877972 - DNA, 75 bp, synthetic construct
  source 1..75: mol_type = other DNA
ttccccgatgggctttgaggatgatgacaggctctggccaaaaggtgagtcagctttcagcggttaccagttgct

SEQ ID NO: 877973 - DNA, 75 bp, synthetic construct
  source 1..75: mol_type = other DNA
tgcgccacgatgctcctgaacgttattaccacacccgtgtgaaacggggaccctccggcctgtatgacacatggt

SEQ ID NO: 877974 - DNA, 75 bp, synthetic construct
  source 1..75: mol_type = other DNA
ggcatgaaaaggcagggcaggcaaaaccagtggcatggcgatatcgctacgtgaaaaaaggcgttacggactttc

SEQ ID NO: 877975 - DNA, 75 bp, synthetic construct
  source 1..75: mol_type = other DNA
cgaaaccggagcgtggaaagatgccgttgattgggtgctcaaagaggcctgccaggctgtaaacattggcatcaa

SEQ ID NO: 877976 - DNA, 75 bp, synthetic construct
  source 1..75: mol_type = other DNA
agggggagccgtgggttggtgactggaaatatgtaccgacaaaagaggattgcaacgacaggccgagctatgaaa

SEQ ID NO: 877977 - DNA, 75 bp, synthetic construct
  source 1..75: mol_type = other DNA
caaggagaacctacgcccagcggcgatcgaaacatttgttgatgagtggttccggcagccctttaccctgctggc

SEQ ID NO: 877978 - DNA, 75 bp, synthetic construct
  source 1..75: mol_type = other DNA
gctcgagcagttacacaacaggctgcatacattaatccagcagcagccagctttgcacagtgcgctggacgctga

SEQ ID NO: 877979 - DNA, 75 bp, synthetic construct
  source 1..75: mol_type = other DNA
cgggcagggtgcccggccggtggacgtggaagccatgatgaaggactttcgcgccctacaggatgaagtccgctc

SEQ ID NO: 877980 - DNA, 75 bp, synthetic construct
  source 1..75: mol_type = other DNA
gatgctaacgaaacgccagtcggcgttgtatatgcgcctgcccggtcagactgagcgcatccgtcttgacgggta

SEQ ID NO: 877981 - DNA, 75 bp, synthetic construct
  source 1..75: mol_type = other DNA
tgaaagtgaatatctgctgcgtcctaaacggctgcaggacgggcataccgagatttatgctgtggattcggttac

SEQ ID NO: 877982 - DNA, 75 bp, synthetic construct
  source 1..75: mol_type = other DNA
accaatttaaccagcttaccctcattatccagccagaaggaaaatgcatccggtggaaagagaaccacagcccgc

SEQ ID NO: 877983 - DNA, 75 bp, synthetic construct
  source 1..75: mol_type = other DNA
taccgccatcacggcaaaatgatgccggacgactggcatgagcaactcagcgagttcgacgctatctacttcggc

SEQ ID NO: 877984 - DNA, 75 bp, synthetic construct
  source 1..75: mol_type = other DNA
ctacttacgagagagcaagatgtctgtgtgagcacattcgcgaaactcctatcaatgaattgaaagccctctgcc

SEQ ID NO: 877985 - DNA, 75 bp, synthetic construct
  source 1..75: mol_type = other DNA
cccggagtagagataacagacaactccttggcaggccgtaaacaaatccgcattcgtggctggatttgcccctat

SEQ ID NO: 877986 - DNA, 75 bp, synthetic construct
  source 1..75: mol_type = other DNA
gttttaacaacaaaagccaggcgcttctgaactctacgcctcctgagatccgccaggtcattgaaagaaaggtga

SEQ ID NO: 877987 - DNA, 75 bp, synthetic construct
  source 1..75: mol_type = other DNA
acgaatgccagatatctgcttggcctgacggcaacaccaatccgacgggatggcctgcaccccattatttttatg

SEQ ID NO: 877988 - DNA, 75 bp, synthetic construct
  source 1..75: mol_type = other DNA
aaatcgaaaaattgacaaaagagcttatcacgcagatctgtatcagcaaatcagttactctaagtgagaatcttt

SEQ ID NO: 877989 - DNA, 75 bp, synthetic construct
  source 1..75: mol_type = other DNA
ctaaaactatttcctcactacttagatggtgaaaaaaagttttatcttcctactgcccttgacctgcctttgatt

SEQ ID NO: 877990 - DNA, 75 bp, synthetic construct
  source 1..75: mol_type = other DNA
gaacgcaaagttggacgtaatgatccttgcccgtgcggttctggtaaaaaatacaagcagtgccacggtcgcctg

SEQ ID NO: 877991 - DNA, 75 bp, synthetic construct
  source 1..75: mol_type = other DNA
cacctgatccgtcaggaaaaagaagactccgaaaccttccagggcgaaggccacttctcggtggacgaaaaatct

SEQ ID NO: 877992 - DNA, 75 bp, synthetic construct
  source 1..75: mol_type = other DNA
gaccgcgtgtccggcatgatgcgtaaactggggatgaaaccaggcgaagccattgagcacccgtgggtgactaaa

SEQ ID NO: 877993 - DNA, 75 bp, synthetic construct
  source 1..75: mol_type = other DNA
ctcaggtcgtagatgcccttgaaaaagaaagacatttctttgcaatggagccggaaggcgaactctatcgcgcac

SEQ ID NO: 877994 - DNA, 75 bp, synthetic construct
  source 1..75: mol_type = other DNA
cgaatcggtaccttgcagccttctcggcgattttaacttatatcgtgttcgtgacctggaaaaacaccagccaag

SEQ ID NO: 877995 - DNA, 75 bp, synthetic construct
  source 1..75: mol_type = other DNA
cgaatcggtgccttgcagccttctcggcgactttagcttatatcgtgttcgtgacctggaaaaacatcagccaag

SEQ ID NO: 877996 - DNA, 75 bp, synthetic construct
  source 1..75: mol_type = other DNA
ttatcgggggaggtaaacataaaccctgtggcaatattgatattgcggtggtgcagtccatatccagacacggag

SEQ ID NO: 877997 - DNA, 75 bp, synthetic construct
  source 1..75: mol_type = other DNA
aaagacaccgtttctgaaatgtggccagaaagaacgctggaaatgacgtggggcgagttctggaaagcagttaag

SEQ ID NO: 877998 - DNA, 75 bp, synthetic construct
  source 1..75: mol_type = other DNA
caatgggttgacctgcttaccgaagaagaaaaagataatccacgccgagcaaggcaggtgctaagtcaactaaga

SEQ ID NO: 877999 - DNA, 75 bp, synthetic construct
  source 1..75: mol_type = other DNA
atggatgatcttatctggacgactccagcagagcattccaagatgggtaacgttatccgtcgcccggtgttcgat

SEQ ID NO: 878000 - DNA, 75 bp, synthetic construct
  source 1..75: mol_type = other DNA
taaggaatcggtatttacgcgtcgtggtgtcgatcgcattttgcgttatgccttcgaacttgcgcaaagccgccc

SEQ ID NO: 878001 - DNA, 75 bp, synthetic construct
  source 1..75: mol_type = other DNA
aaaacaccggatatgaaaggcaatgccaccacgccacaggttgccgacgcgatttgcaaaattattttgcgttaa

SEQ ID NO: 878002 - DNA, 75 bp, synthetic construct
  source 1..75: mol_type = other DNA
tgcgagaaaatccaaaaagtacgcacggcttttcctcagaccgagtgctgggccgacggtggaattacgctggca

SEQ ID NO: 878003 - DNA, 75 bp, synthetic construct
  source 1..75: mol_type = other DNA
taaaagcgatgtcaggatcattgattttgtggataccgcgtatccagtgctgctcagaatgtgggataaacgcca

SEQ ID NO: 878004 - DNA, 75 bp, synthetic construct
  source 1..75: mol_type = other DNA
ggatattttttgcttcacgagtttcggcccgcgaagctcgccgtctggggactgctattattagctatacgtgca

SEQ ID NO: 878005 - DNA, 75 bp, synthetic construct
  source 1..75: mol_type = other DNA
tacatccggcagcaaaacttccagcttatgccacctccggatcggcggcgatggattttgaggctgttgaaataa

SEQ ID NO: 878006 - DNA, 75 bp, synthetic construct
  source 1..75: mol_type = other DNA
gcggcctgaaacccaatactcagacgctttatagatctgttgtgtacaacactatgtacacacagtttgaagact

SEQ ID NO: 878007 - DNA, 75 bp, synthetic construct
  source 1..75: mol_type = other DNA
caagaaagcctcaacaagaaaaaggctcgtgttttgttgttacaactgcgttcagttattaactggtgtatcagc

SEQ ID NO: 878008 - DNA, 75 bp, synthetic construct
  source 1..75: mol_type = other DNA
cgtccgtaattgaagcctgcaagcgcagcgaaatcatgaagagaattctgtttatctacggcgctggcgaagagc

SEQ ID NO: 878009 - DNA, 75 bp, synthetic construct
  source 1..75: mol_type = other DNA
gacagcgggcaatgatgcgctcggttccatgcagaaagaatccgacatcaacaaagactcactttccgctcagtg

SEQ ID NO: 878010 - DNA, 75 bp, synthetic construct
  source 1..75: mol_type = other DNA
cgccatgtcgaaaggggcggacatcattgatgtcatgcaacgcctgggcggtgtggctgatcgtctggattatcg

SEQ ID NO: 878011 - DNA, 75 bp, synthetic construct
  source 1..75: mol_type = other DNA
agccactactacggctgcagggctggcaatgggtgcaccagtgatggcagcagtaaaaagctataccagcatgga

SEQ ID NO: 878012 - DNA, 75 bp, synthetic construct
  source 1..75: mol_type = other DNA
tcagcgcaggatgaatgcggcgcgtgccagttatgctcgttcgctggaggtgcgcgatcgtattgcaggagccgg

SEQ ID NO: 878013 - DNA, 75 bp, synthetic construct
  source 1..75: mol_type = other DNA
tggtctgttaggtgctctgcttagtccaataggtcttgtggttacagcactggcgggtgtggcactggttgtctg

SEQ ID NO: 878014 - DNA, 75 bp, synthetic construct
  source 1..75: mol_type = other DNA
cgcaccactggcactgctgcgacacgggcttgcttcatcgggtaacgcagcgggtttacttactgcgccgttgtc

SEQ ID NO: 878015 - DNA, 75 bp, synthetic construct
  source 1..75: mol_type = other DNA
atgcgctgaattatctggatgataacgccatgtcgaaaggtgcagacatcattgatgtcatgcaacgcctgggcg

SEQ ID NO: 878016 - DNA, 75 bp, synthetic construct
  source 1..75: mol_type = other DNA
tgctgcgcgttgccctgtatgccgtatctggtctgtcaggtgctctgctcagtcagataggtcttgtggttactg

SEQ ID NO: 878017 - DNA, 75 bp, synthetic construct
  source 1..75: mol_type = other DNA
gctgaatatggttatgcatccgctggactccctgaaatctggcgtttcctggttgctggataaactcggcattgt

SEQ ID NO: 878018 - DNA, 75 bp, synthetic construct
  source 1..75: mol_type = other DNA
acagctgcactggctgcggttgttgtcggaatgatgggtgttgctgccgcaccagcagagcttccaccgttgcac

SEQ ID NO: 878019 - DNA, 75 bp, synthetic construct
  source 1..75: mol_type = other DNA
gtcgcaaaccctgacgacagctgggaagaccagaaacgtgacctgctggccttcgccagcacggcggcaaaggcg

SEQ ID NO: 878020 - DNA, 75 bp, synthetic construct
  source 1..75: mol_type = other DNA
tgcgcgatcgtatcgcaggagccggagccaccaccacggctgcagggctggtaatgggcgcaccagtgatggcgg

SEQ ID NO: 878021 - DNA, 75 bp, synthetic construct
  source 1..75: mol_type = other DNA
tgcgcgatcgtattgcaggagccggagccactaccacggctgcagggctggcaatggggacgccagtgacggcgg

SEQ ID NO: 878022 - DNA, 75 bp, synthetic construct
  source 1..75: mol_type = other DNA
tgagccggatgctggtcaatggtggtgaaccggagctggatctgtctgaacatctggtcagcgtgggcatccgct

SEQ ID NO: 878023 - DNA, 75 bp, synthetic construct
  source 1..75: mol_type = other DNA
taaagcctcaacagattacgttattgatgagtacaaaacttttaacgatctattatcagctcttatcaacacagt

SEQ ID NO: 878024 - DNA, 75 bp, synthetic construct
  source 1..75: mol_type = other DNA
ccatccagttactggaagggggaaccattgttgcggtcgtaccggcgtcatccggaccagatacgctggtggttt

SEQ ID NO: 878025 - DNA, 75 bp, synthetic construct
  source 1..75: mol_type = other DNA
ccgggttcccgccgcgaagtgaaaaacgcgcgggaagaaggcgtagagttcaaattcaacgtccagccactgggg

SEQ ID NO: 878026 - DNA, 75 bp, synthetic construct
  source 1..75: mol_type = other DNA
aaagcggacgatatggtagtggtcgatatgagcggcaacgtggtggaaggggagtatcgtccgtcttccgacact

SEQ ID NO: 878027 - DNA, 75 bp, synthetic construct
  source 1..75: mol_type = other DNA
gaatgtgtcaatgatgttaaaaggaatatactagcatctatgtgtagtggttgtagtggcacagtaaatttggcc

SEQ ID NO: 878028 - DNA, 75 bp, synthetic construct
  source 1..75: mol_type = other DNA
ttctggagacggccaccggcgcgcgcctgcaatcgctgcttttcggtatcaccaccgccggcttcaacaaagaag

SEQ ID NO: 878029 - DNA, 75 bp, synthetic construct
  source 1..75: mol_type = other DNA
atggcgaaggttgcagaaggcatccgctacgccgagagggtggttgctggggagattattgcctgtgagtatgtg

SEQ ID NO: 878030 - DNA, 75 bp, synthetic construct
  source 1..75: mol_type = other DNA
gggcttgcttcatcgggcaacgctgcggggttacttactgcaccgttgtcatctttgcgccgcacggcatcactg

SEQ ID NO: 878031 - DNA, 75 bp, synthetic construct
  source 1..75: mol_type = other DNA
tgagtcggatgctggtcaatggtggtgaaccggagccggatctgtctgaacatctggtcagcgtgggcatccgct

SEQ ID NO: 878032 - DNA, 75 bp, synthetic construct
  source 1..75: mol_type = other DNA
gacctgtcaaacaaaattgatatctgtgcggccgctaaagtctggcgcgcgccagatggccacgttcatgcggat

SEQ ID NO: 878033 - DNA, 75 bp, synthetic construct
  source 1..75: mol_type = other DNA
cgatccctttgatgaaaaagtctggcagaaggcgaatccggggctgggtatctgtaagcgctgggatgacctgcg

SEQ ID NO: 878034 - DNA, 75 bp, synthetic construct
  source 1..75: mol_type = other DNA
gccagcgaacagttgccgatggtaaacggtgcggtggatttcgctgcactggttgaaggtggtgcacgcatgaac

SEQ ID NO: 878035 - DNA, 75 bp, synthetic construct
  source 1..75: mol_type = other DNA
ggcagcgatctctatcgcgcgggtcagtccgttgaacaaacagcacggcaggccgccgcattcgttaaggcatat

SEQ ID NO: 878036 - DNA, 75 bp, synthetic construct
  source 1..75: mol_type = other DNA
ttgcagtggcaggcgtggcacgacaccttaacgcgtttatataaccgtggcgcactgttcgaaaaagcccgtccg

SEQ ID NO: 878037 - DNA, 75 bp, synthetic construct
  source 1..75: mol_type = other DNA
ggcaaccggaggaatatcagaaggcgcaacggcaaccaaccctaaaactggtcagaaaattatttacaggaacgg

SEQ ID NO: 878038 - DNA, 75 bp, synthetic construct
  source 1..75: mol_type = other DNA
gccagttatgcccgttcgctggaggtgcgcgatcgcatcgcaggagccggagccactaccacggctgcagggctg

SEQ ID NO: 878039 - DNA, 75 bp, synthetic construct
  source 1..75: mol_type = other DNA
gtccgcaatacatcaaagcgttaaaagcggtattaccaccggacatcgcagtctttgccgttggcggcgtgacgc

SEQ ID NO: 878040 - DNA, 75 bp, synthetic construct
  source 1..75: mol_type = other DNA
tgatcgccattttgcgcggcattacgcccgacgaggcgctggtgcatgttggcgcggtgattgacgccgggttcg

SEQ ID NO: 878041 - DNA, 75 bp, synthetic construct
  source 1..75: mol_type = other DNA
tttctgaaagcctgcgcggaccttcgaaaaccatcaccggtcgcgctagaaggctggaaacttaccggtggaaca

SEQ ID NO: 878042 - DNA, 75 bp, synthetic construct
  source 1..75: mol_type = other DNA
tgtccactattctctcaggaatttcaggatctgccagacggtgctgagacgacgcttacagatacgatatggctc

SEQ ID NO: 878043 - DNA, 75 bp, synthetic construct
  source 1..75: mol_type = other DNA
atatttgtgcttaccagttccggctggataatggcggaaacgatgaaggatttggccccctcaccatcactctgc

SEQ ID NO: 878044 - DNA, 75 bp, synthetic construct
  source 1..75: mol_type = other DNA
atcttcaactacatgaaatctcttgacccgcagtcagtcgttcgtgaaggcgaacaggttcaggtaatgcggtct

SEQ ID NO: 878045 - DNA, 75 bp, synthetic construct
  source 1..75: mol_type = other DNA
caggttcatgatagataatgagcaggagatgcgtcgtttaggtatccctccagaaactattgctgaaatgcaggt

SEQ ID NO: 878046 - DNA, 75 bp, synthetic construct
  source 1..75: mol_type = other DNA
aagatgaaatgcgtcgcttgggaatttctcctgagtctgttgccgaaatgcatgttaatgatccacaggggttcc

SEQ ID NO: 878047 - DNA, 75 bp, synthetic construct
  source 1..75: mol_type = other DNA
agcaaccaccacggctgcagggctggcagtgggtgcaccagtaatggcggcggtaaaaagctataccagcatgga

SEQ ID NO: 878048 - DNA, 75 bp, synthetic construct
  source 1..75: mol_type = other DNA
gttgctgtgatgtttatgaatcctctggcagtactgcgcggtggactgaccgccgcaggtacggtgctgcgagta

SEQ ID NO: 878049 - DNA, 75 bp, synthetic construct
  source 1..75: mol_type = other DNA
gctctatgccgaagcagaacagaccagcgcactgctgagacaacgacaacaccggatcgaggaactgaaacgtga

SEQ ID NO: 878050 - DNA, 75 bp, synthetic construct
  source 1..75: mol_type = other DNA
gctgcgagtactggcatctggtccactggcgatgctgcgcgttgccctgtatgccatatctggtctgttaggtgc

SEQ ID NO: 878051 - DNA, 75 bp, synthetic construct
  source 1..75: mol_type = other DNA
gtcatgcatccgctggactccctgaaatctggcgtttcctggttgctggagaagctcggcattgtcagtaaagag

SEQ ID NO: 878052 - DNA, 75 bp, synthetic construct
  source 1..75: mol_type = other DNA
acaggcacggatgaacgctgtcagagaacaatactcaagacggcttgaagtgcgcgatcgcatcgcaggagccgg

SEQ ID NO: 878053 - DNA, 75 bp, synthetic construct
  source 1..75: mol_type = other DNA
tgcgcgatcgcatcgtaggagccggagccactactacggctgcagggctggcaatgggtgcgccagtgatggcag

SEQ ID NO: 878054 - DNA, 75 bp, synthetic construct
  source 1..75: mol_type = other DNA
ttgcaggtgccgctgcgtgacttgtggaatccggctatccagcgtgtgctggagaaggtgaacgcactgccgcag

SEQ ID NO: 878055 - DNA, 75 bp, synthetic construct
  source 1..75: mol_type = other DNA
atgcgctgaactatctggatgataatgccatgtcgaaaggggcagacatcattgatgtgatgcaacgtctgggcg

SEQ ID NO: 878056 - DNA, 75 bp, synthetic construct
  source 1..75: mol_type = other DNA
taagggatcgtattgccggggccggagccactaccacggcggcagggctggcaatgggcgcgccagtgatggcgg

SEQ ID NO: 878057 - DNA, 75 bp, synthetic construct
  source 1..75: mol_type = other DNA
acctctgccgaactgcagagtgcagcggcaatggggcggagattcggggaggcactggcggtagggctgaatatg

SEQ ID NO: 878058 - DNA, 75 bp, synthetic construct
  source 1..75: mol_type = other DNA
caggtcaatggtctgcgtgacgatagtggcaaccgcactgcgcgtttttatgaaatgcaggatgccatcaaagct

SEQ ID NO: 878059 - DNA, 75 bp, synthetic construct
  source 1..75: mol_type = other DNA
aaccaggaactgtcgaaacaggaggtgcggttgaagcgactgggggaagctcagcgcaggatgaatgcagcgcgt

SEQ ID NO: 878060 - DNA, 75 bp, synthetic construct
  source 1..75: mol_type = other DNA
taaaaatagtctggttattgaacagaatccaggggcattaacggcagaacaaatacagcagtcgttgtccaaatt

SEQ ID NO: 878061 - DNA, 75 bp, synthetic construct
  source 1..75: mol_type = other DNA
acggcacatgatcaacaaacagaggttaattttaaaatctaccagggtgaaagcaggatggtgggtgataatatt

SEQ ID NO: 878062 - DNA, 75 bp, synthetic construct
  source 1..75: mol_type = other DNA
tttgcccttatacacttggcgttgatacctctaaatcgctggggcatacccgcgaatcaggctattttgcacccg

SEQ ID NO: 878063 - DNA, 75 bp, synthetic construct
  source 1..75: mol_type = other DNA
acagttaccgtcgaaggtaaagatgaagtgttcgcgctgagtaatatccagaaggcgaacctggttccccacttt

SEQ ID NO: 878064 - DNA, 75 bp, synthetic construct
  source 1..75: mol_type = other DNA
agcgatgatctccgctcaaaaacaagatggtctggcggtattcctcgatcatgaaaacagttttgacgttggcct

SEQ ID NO: 878065 - DNA, 75 bp, synthetic construct
  source 1..75: mol_type = other DNA
atggcgtgatagagaagacctcacacctgacatggaacaaccgtcgcaaattcaagcgtattaagctggcatcag

SEQ ID NO: 878066 - DNA, 75 bp, synthetic construct
  source 1..75: mol_type = other DNA
atgattagttacgaaattattatttccacaactgaatacagaaacgatgtatcagttagcacggatgtatctgtc

SEQ ID NO: 878067 - DNA, 75 bp, synthetic construct
  source 1..75: mol_type = other DNA
aaacagcggaacgtaaagcagcggagatgtgtgaaaccatcgcaatgaaaagcagtccggttaaatacatcacta

SEQ ID NO: 878068 - DNA, 75 bp, synthetic construct
  source 1..75: mol_type = other DNA
gcagagatgtgtgaaaccatctcaatgaaaggtagcccggttaaatacgtaactacggtggaggtgcgtccatga

SEQ ID NO: 878069 - DNA, 75 bp, synthetic construct
  source 1..75: mol_type = other DNA
tgaaagccgtattcactctgcgcctgttctggctgcggcggtggagctggtcacaaccaacgccaccggcctgat

SEQ ID NO: 878070 - DNA, 75 bp, synthetic construct
  source 1..75: mol_type = other DNA
actgaacccagcgcaaccgcaccgcctgacctgtgatgaacttttggctatcacggattacaccgaagatgcgcg

SEQ ID NO: 878071 - DNA, 75 bp, synthetic construct
  source 1..75: mol_type = other DNA
tgaaagccgtatccagtctgcgcccgttttggccgcagcggtggatctggtgacggctaatgcgaccggcttgat

SEQ ID NO: 878072 - DNA, 75 bp, synthetic construct
  source 1..75: mol_type = other DNA
attaaagcgcctattgttcatgccctgcgcggtaaagaacatgtcgaatacgataacccgtatgatgttggaatg

SEQ ID NO: 878073 - DNA, 75 bp, synthetic construct
  source 1..75: mol_type = other DNA
acttggtggtgtaggaaatggagttatttattgtaacaccagtaataatgccagtggtggaccgatgacacttac

SEQ ID NO: 878074 - DNA, 75 bp, synthetic construct
  source 1..75: mol_type = other DNA
ccttttgatattaacttacaaaactgcatccgtgttcgtaatattgaaacaaaactcgtctccacaaaaatcggc

SEQ ID NO: 878075 - DNA, 75 bp, synthetic construct
  source 1..75: mol_type = other DNA
cgacggtcctgtactggtggatgtggtcgtcgcgaaagaagagttagctatcccaccgcagattaaactcgaaca

SEQ ID NO: 878076 - DNA, 75 bp, synthetic construct
  source 1..75: mol_type = other DNA
ttactgctgtacttaccggaaaatcagtaagtggttcgacggtaaaaatgggagaatatgcaccagggcagatta

SEQ ID NO: 878077 - DNA, 75 bp, synthetic construct
  source 1..75: mol_type = other DNA
atgaagacattcttcaaatactttgtttttttagtactatcctgctcttgctttacagcgattagtaaggataca

SEQ ID NO: 878078 - DNA, 75 bp, synthetic construct
  source 1..75: mol_type = other DNA
tgatgcgctttctcgccatgttgaaccagaacaggcgctacgttgggcgctctctggcggtgaagattacgagtt

SEQ ID NO: 878079 - DNA, 75 bp, synthetic construct
  source 1..75: mol_type = other DNA
cacgttagtgctactcggtactcagttcccctaccgtgcgttctacccgaccgatgcaaaaatcattcagattga

SEQ ID NO: 878080 - DNA, 75 bp, synthetic construct
  source 1..75: mol_type = other DNA
cgagtggatgtccccccgccacgaagaagtggcggcctttgccgctggcgctgaagcacaacttagcggagaact

SEQ ID NO: 878081 - DNA, 75 bp, synthetic construct
  source 1..75: mol_type = other DNA
tttccctaccgcgccttctacccgaccgatgccaaaatcattcagattgatatcaacccagccagcatcggcgcg

SEQ ID NO: 878082 - DNA, 75 bp, synthetic construct
  source 1..75: mol_type = other DNA
caaactggcgcaactgctgcgttactcaagcaatatcgccctgatgtgcggtagcggctgcgcgggggcgcataa

SEQ ID NO: 878083 - DNA, 75 bp, synthetic construct
  source 1..75: mol_type = other DNA
acagccttaatcgtatgggcactatcgagtggatgtccacccgccatgaagaagtcgcggcctttgccgctggcg

SEQ ID NO: 878084 - DNA, 75 bp, synthetic construct
  source 1..75: mol_type = other DNA
taacaccggaagaagaagaattacgcaagctggcgcaactgctgcattattccgacaatatcactctgatgtgcg

SEQ ID NO: 878085 - DNA, 75 bp, synthetic construct
  source 1..75: mol_type = other DNA
attccctgcacccgcaaaatgaccgacgcagaaatcaacggcgaatatgagtgggaaaccggtaacgtcatcgta

SEQ ID NO: 878086 - DNA, 75 bp, synthetic construct
  source 1..75: mol_type = other DNA
cccgatgtcagcaaagttgttccccgtatcgaaaaagtggcggtgattggcgctggacctgcaggattagggtgt

SEQ ID NO: 878087 - DNA, 75 bp, synthetic construct
  source 1..75: mol_type = other DNA
ttagtaaccaaatgaaagaaaaagattttttcttgttcgtcgtttttgttttttctggatggttctggctgtttt

SEQ ID NO: 878088 - DNA, 75 bp, synthetic construct
  source 1..75: mol_type = other DNA
gacgcccggtgatggtgcgccggttccggacggcatacaacgaagtcgcccgtaaaaacgcaaaatctacgctgt

SEQ ID NO: 878089 - DNA, 75 bp, synthetic construct
  source 1..75: mol_type = other DNA
ttcccggcgaccataatccgtacaagccaatgagcgaaaacaccaccaaccgggcgctgcgtctgatggggtatg

SEQ ID NO: 878090 - DNA, 75 bp, synthetic construct
  source 1..75: mol_type = other DNA
gatctactagaggcagagggtagagagtttgttgcggaggtacggagcaagctggatcacgccttagccgttctt

SEQ ID NO: 878091 - DNA, 75 bp, synthetic construct
  source 1..75: mol_type = other DNA
atgttcagccgcaatatatcgcttgtgatgaagatggacgcttaacggcggtgggcctgattcgtaccgctatgg

SEQ ID NO: 878092 - DNA, 75 bp, synthetic construct
  source 1..75: mol_type = other DNA
ggataccgctggtggaggttccgcagacggtccgcaatctgtcagaggccatgaaggaaacggaatcactggtct

SEQ ID NO: 878093 - DNA, 75 bp, synthetic construct
  source 1..75: mol_type = other DNA
gaaacacatgaatgtgtgggtcactgccgagtctgcctggatggacatgattaagtgggagaaatgcgaatatat

SEQ ID NO: 878094 - DNA, 75 bp, synthetic construct
  source 1..75: mol_type = other DNA
agatgcagtgatcatggcgtttggtttccgtccacacaacatggaatggctggcaaaacacagcgtcgagctgga

SEQ ID NO: 878095 - DNA, 75 bp, synthetic construct
  source 1..75: mol_type = other DNA
ccaggagcagagcgcatcaaaatttgaaccgctttcttcggatgcaaacaacctggatggtctgaacatccactg

SEQ ID NO: 878096 - DNA, 75 bp, synthetic construct
  source 1..75: mol_type = other DNA
ggggatttattttagtgaaccccgtgcgcagcacatccttaatttctacaaatttgtgccccatgtgaaaggggc

SEQ ID NO: 878097 - DNA, 75 bp, synthetic construct
  source 1..75: mol_type = other DNA
aattctggcttccggaaggacggctggaacgatgctcacggcagcaggcagaactttaccggaagtgggcggaga

SEQ ID NO: 878098 - DNA, 75 bp, synthetic construct
  source 1..75: mol_type = other DNA
aaccatatcttcccggcaattggtcatctgcccgttactacgcttaaaacacaggatttcactgccctgctgcgg

SEQ ID NO: 878099 - DNA, 75 bp, synthetic construct
  source 1..75: mol_type = other DNA
aagaaggcgcaatgcagggcaaacacgaagaagccctgcgtattgctcaggagatgctggatagaggtttagaca

SEQ ID NO: 878100 - DNA, 75 bp, synthetic construct
  source 1..75: mol_type = other DNA
tggggtaaaaatgccgaagatgcggtgcacaacgccatcgtgctggaagaagtcgcttatatggggattttctgc

SEQ ID NO: 878101 - DNA, 75 bp, synthetic construct
  source 1..75: mol_type = other DNA
acgcagaaatcaacggcgaatatgagtgggaaaccggtaacgtcatcgttgaaaccttcgaaaaacaggggatcg

SEQ ID NO: 878102 - DNA, 75 bp, synthetic construct
  source 1..75: mol_type = other DNA
tgtgagaaaggcattctgacgccagatgtcggtggaacggccagtaccgcggacgtcacccgtgctgtagtggaa

SEQ ID NO: 878103 - DNA, 75 bp, synthetic construct
  source 1..75: mol_type = other DNA
atgcactatctttgcgctcaatgctatgaatcttctgtgaaatccatacttcaatacgaaggatttgcaccacct

SEQ ID NO: 878104 - DNA, 75 bp, synthetic construct
  source 1..75: mol_type = other DNA
gagatgctggatagaggtttagacagagagttagttatgatggtgacccgactttcaccagacgatcttatcgcg

SEQ ID NO: 878105 - DNA, 75 bp, synthetic construct
  source 1..75: mol_type = other DNA
atgtcccttaacgacgcaaaaatccgtagtctcaagcccactgataaaccctttaaagtctccgattcccacggt

SEQ ID NO: 878106 - DNA, 75 bp, synthetic construct
  source 1..75: mol_type = other DNA
ggccgcggggcaaaaatgcgaatgccgcatatcgtccccctctcagaacagtccatcgccattctgaaacagatt

SEQ ID NO: 878107 - DNA, 75 bp, synthetic construct
  source 1..75: mol_type = other DNA
tcagagattgatttcacaaaccgagtctggacgatacccgcgacgcgagaacccattattggcgtgcgttattcc

SEQ ID NO: 878108 - DNA, 75 bp, synthetic construct
  source 1..75: mol_type = other DNA
gccatattctgagcgtactgccggaatggccctccaaccgtgttggcgaactcctgccatggaacgtagttctca

SEQ ID NO: 878109 - DNA, 75 bp, synthetic construct
  source 1..75: mol_type = other DNA
ctgtatctgctggtcaaaccaggcggttcccgtctctggtatcttaaataccgtattaatggcaaagaatcccgt

SEQ ID NO: 878110 - DNA, 75 bp, synthetic construct
  source 1..75: mol_type = other DNA
ctctattctgaaaaggattaaggaaatatctggcgggtatgaactggtgttccccggctatcatgacccctacaa

SEQ ID NO: 878111 - DNA, 75 bp, synthetic construct
  source 1..75: mol_type = other DNA
gggtatcaactctggaacagacaaccaaaaatcaacgtcgggaaatcgaaagtgcaggtttttacatcaaatctc

SEQ ID NO: 878112 - DNA, 75 bp, synthetic construct
  source 1..75: mol_type = other DNA
ggtcagcatcagcgccattgcccgggaatttaatactacccggcaaaccatactccgggtaaaagcaggacagca

SEQ ID NO: 878113 - DNA, 75 bp, synthetic construct
  source 1..75: mol_type = other DNA
cattcaaaaaccatcgctcgcaacctgtcgccgggaagttgacgaaatcctcaatgcctcgttgtttatgattta

SEQ ID NO: 878114 - DNA, 75 bp, synthetic construct
  source 1..75: mol_type = other DNA
ggcaagtataagcgctattgccagggaattccgaaccacacggcaaacaattctgagagttagagcgaaacagca

SEQ ID NO: 878115 - DNA, 75 bp, synthetic construct
  source 1..75: mol_type = other DNA
ttcagcggtcgctgaatttgaacgagaccttttacttgaacgaatttattcagggatagcaagagcacgggatgc

SEQ ID NO: 878116 - DNA, 75 bp, synthetic construct
  source 1..75: mol_type = other DNA
caaaaatcaacgtcgggaaatcgaaagtgcaggttttaacatcaaatctcagcaaataattgaagaacaaattag

SEQ ID NO: 878117 - DNA, 75 bp, synthetic construct
  source 1..75: mol_type = other DNA
gcaaaaaggtcgcccagtgggcgcaaactcttggctggccgctgattggcgacgtactgtcgcaaaccggacagc

SEQ ID NO: 878118 - DNA, 75 bp, synthetic construct
  source 1..75: mol_type = other DNA
acccattttgatgagcgtgggctggggcatctggcactggggctggcgaaggtcagcaaacagccggtggcggtg

SEQ ID NO: 878119 - DNA, 75 bp, synthetic construct
  source 1..75: mol_type = other DNA
accatcgaccacgctttaggcacgctgcatgcgggtggggtccatatcaactgcccgtttgccgaaccgctttat

SEQ ID NO: 878120 - DNA, 75 bp, synthetic construct
  source 1..75: mol_type = other DNA
gctttgtaaatgtcgatttggaaccagctgatggcgttgttgactttggtaaaattaatgcccgagaaattataa

SEQ ID NO: 878121 - DNA, 75 bp, synthetic construct
  source 1..75: mol_type = other DNA
atgtctcgaatttatgcttactgtcgggtatcaactctggaacaaacaaccaaaaatcaacgtcgggaaatcgaa

SEQ ID NO: 878122 - DNA, 75 bp, synthetic construct
  source 1..75: mol_type = other DNA
cgcctggctgaacaggcaatgcaggcggttgttgcgcgccgtgatgcatttggtgaagcgcaactggcgcaccgc

SEQ ID NO: 878123 - DNA, 75 bp, synthetic construct
  source 1..75: mol_type = other DNA
aagatgcgatggtgttcgcctttaacctgccagcgattgtggaactgggtacggcaaccggctttgactttgagc

SEQ ID NO: 878124 - DNA, 75 bp, synthetic construct
  source 1..75: mol_type = other DNA
ttctcagcgttctcttcttctcgttgggaatacggttcaccgcgtctggaacgttacaacggtctgccatccatg

SEQ ID NO: 878125 - DNA, 75 bp, synthetic construct
  source 1..75: mol_type = other DNA
ggcaatcttcttcgttccggtgttctttgtggtggttcgccgccgctttagtcgcaagaatgaagatatcgaaca

SEQ ID NO: 878126 - DNA, 75 bp, synthetic construct
  source 1..75: mol_type = other DNA
aagatgcgatggtgttcgcctttaacctgccagcgattgtagaactgggtacggcaaccggttttgactttgagt

SEQ ID NO: 878127 - DNA, 75 bp, synthetic construct
  source 1..75: mol_type = other DNA
ttctacagtgctgaactaaattatgtgacacgctggatcctttataacggagagcaacaggtagccgcctttgca

SEQ ID NO: 878128 - DNA, 75 bp, synthetic construct
  source 1..75: mol_type = other DNA
tcgtggtgcattttgatattccgcgcaacattgaatcctattatcaggaaaccggacgcgccgggcgtgatggcc

SEQ ID NO: 878129 - DNA, 75 bp, synthetic construct
  source 1..75: mol_type = other DNA
aggaacaacgcggtaagtcggggattatttactgtaatagtcgtgcgaaagtagaagacaccgccgcgcgtctgc

SEQ ID NO: 878130 - DNA, 75 bp, synthetic construct
  source 1..75: mol_type = other DNA
tccaaacggtctggaagataccccgcagtttaagattgatatcgaccaggaaaaagcgcaggcgctgggtgtttc

SEQ ID NO: 878131 - DNA, 75 bp, synthetic construct
  source 1..75: mol_type = other DNA
cctgcctgcgattgtggaactgggtacggcaaccggcttcgactttgagctgattgaccaggcgggccttggtca

SEQ ID NO: 878132 - DNA, 75 bp, synthetic construct
  source 1..75: mol_type = other DNA
tccgaacggcctggaagatacgccgcagtttaagattgatatcgaccaggaaaaagctcaggcactgggtgtttc

SEQ ID NO: 878133 - DNA, 75 bp, synthetic construct
  source 1..75: mol_type = other DNA
tcgtcagttctccattaccattgtttcggcaatggcgctgtcggtactggtggcgttgatcctgactccggcact

SEQ ID NO: 878134 - DNA, 75 bp, synthetic construct
  source 1..75: mol_type = other DNA
gtgggtgatcgccattatcatcatgttggcagggggctggcgatcctcaaactgccggtggcgcaatatcctacg

SEQ ID NO: 878135 - DNA, 75 bp, synthetic construct
  source 1..75: mol_type = other DNA
acgttacaacggcctgccatccatggaaatcttaggccaggcggcaccgggtaaaagtaccggtgaagcaatgga

SEQ ID NO: 878136 - DNA, 75 bp, synthetic construct
  source 1..75: mol_type = other DNA
agcgtgagcgtttctatctgatgccgcaaaacgtccattttgagcacgccgctgcgatgttcgagctgaaatatc

SEQ ID NO: 878137 - DNA, 75 bp, synthetic construct
  source 1..75: mol_type = other DNA
gaagacggtgatacgtaccgtgcgtgatgcggtggtgtccgtggcccgcgcggtctgggactggattttcttctg

SEQ ID NO: 878138 - DNA, 75 bp, synthetic construct
  source 1..75: mol_type = other DNA
ccatcgggtctgtgtggtgtcagcgctgaccggatggggcgtggaagcgatggtggcaaccatgatgcgctccct

SEQ ID NO: 878139 - DNA, 75 bp, synthetic construct
  source 1..75: mol_type = other DNA
tatcgtcgttcctgccgacaacactgaaagtggtgctacgtaccgtgcgtgatgtagtggtgtcagttgcgcgga

SEQ ID NO: 878140 - DNA, 75 bp, synthetic construct
  source 1..75: mol_type = other DNA
taatggtgtggatttgaacagaaactttcctgcagcgaactggaaagaaggtgaaacggtgtaccgctggaacag

SEQ ID NO: 878141 - DNA, 75 bp, synthetic construct
  source 1..75: mol_type = other DNA
agcactggatggggcattgaggatatggtggcagccatgatgcgctgtctgcctgaccgcgccaccagcccggtg

SEQ ID NO: 878142 - DNA, 75 bp, synthetic construct
  source 1..75: mol_type = other DNA
cctgctatgaatgggataccctcaccagcaaaccttcaacacaccaacagggaaatcttaaagcgaagcaggctg

SEQ ID NO: 878143 - DNA, 75 bp, synthetic construct
  source 1..75: mol_type = other DNA
tgttctggcacagggtaatgaaaaatcatcgccagcaggtactgttcgtcatcaatcaggcggacaaaatggaac

SEQ ID NO: 878144 - DNA, 75 bp, synthetic construct
  source 1..75: mol_type = other DNA
cgatgcagcagttgttcctgccgcaccatcctgtctgtgtggtgtcagcccgcacagggtggggcgtggaaaccc

SEQ ID NO: 878145 - DNA, 75 bp, synthetic construct
  source 1..75: mol_type = other DNA
gaccgggcgctgtcggtggacgagcagttctggcgcggtgtgatgcagccttaccagcagcaggtggtgttcgtg

SEQ ID NO: 878146 - DNA, 75 bp, synthetic construct
  source 1..75: mol_type = other DNA
ctgaatcaggccgacaaaatcgaaccctgccatgaatgggatatccgtaccggcaccccctcgccacagcagcag

SEQ ID NO: 878147 - DNA, 75 bp, synthetic construct
  source 1..75: mol_type = other DNA
tcacgccggtacccgggaagtgcagcgcttccgtctgagtggccacggttgcagcctagttatcgctgacctgcc

SEQ ID NO: 878148 - DNA, 75 bp, synthetic construct
  source 1..75: mol_type = other DNA
gagaaattagtagccgacattaatgccgaacgtaaagcgggtaatgactccaacttactgatagtgttttatgtt

SEQ ID NO: 878149 - DNA, 75 bp, synthetic construct
  source 1..75: mol_type = other DNA
gctcagaacctgaaacccaggcgctgtgccagcttatacaccgcattcaacctgcctgggtggtctcattccacg

SEQ ID NO: 878150 - DNA, 75 bp, synthetic construct
  source 1..75: mol_type = other DNA
agtagagagaatcgatatatctgttactactgaaaattttaagcatattaaaaatgctatagtcaaaaatgtggt

SEQ ID NO: 878151 - DNA, 75 bp, synthetic construct
  source 1..75: mol_type = other DNA
acttgaagccgtgaagctaggacgaaaggcaatcagtattgatgctaatccactttctgccctcattggtcgagt

SEQ ID NO: 878152 - DNA, 75 bp, synthetic construct
  source 1..75: mol_type = other DNA
ttgctaatttgacggatatggaagtcataaataatgaaccagcacttcatctgagaccagttatggaggttgctc

SEQ ID NO: 878153 - DNA, 75 bp, synthetic construct
  source 1..75: mol_type = other DNA
attctcttaaccgccgatcgcccgccggagctaattgactgcggcgcgaatcaggcaattcgccagccgggaatg

SEQ ID NO: 878154 - DNA, 75 bp, synthetic construct
  source 1..75: mol_type = other DNA
acctgcatgggcaatggactgctatgctgaacatgaaggtggaaataccgttgtcattggttacgtaccaagaat

SEQ ID NO: 878155 - DNA, 75 bp, synthetic construct
  source 1..75: mol_type = other DNA
aatccattaaaattaatggacattttaaatggggaggaaaactggattcttgctgaattcatacagcaatctccc

SEQ ID NO: 878156 - DNA, 75 bp, synthetic construct
  source 1..75: mol_type = other DNA
ttttcaatcatgagcataaacccggcgcgcgcctttctggctggtatgattttaatgataactggcgtattggtt

SEQ ID NO: 878157 - DNA, 75 bp, synthetic construct
  source 1..75: mol_type = other DNA
ttaataacgcctatgatgcattgattattgaagctcgcaagggaaatactcagccagctttgttatggtttgcac

SEQ ID NO: 878158 - DNA, 75 bp, synthetic construct
  source 1..75: mol_type = other DNA
ccgaacctgaaactcaggctttgtgccagctcattcatcgtatccaccccgcctggattgtctcttttcacgatc

SEQ ID NO: 878159 - DNA, 75 bp, synthetic construct
  source 1..75: mol_type = other DNA
ttaatatggcgaagtttattaaggggcagaccctgcttttgctggaaaaacttaatgaactcgagctcgatgctg

SEQ ID NO: 878160 - DNA, 75 bp, synthetic construct
  source 1..75: mol_type = other DNA
aaattattccgccctgggcgcaatattgggttgcgtcggcttatctcaaagatcatcagccgaaaaaagcacagt

SEQ ID NO: 878161 - DNA, 75 bp, synthetic construct
  source 1..75: mol_type = other DNA
atgtattcaagtagcagaaaaaggtgcccgaaaaccaaatgggctttgaaaattcttactgccgcatttttagca

SEQ ID NO: 878162 - DNA, 75 bp, synthetic construct
  source 1..75: mol_type = other DNA
aaccggccgcgcggcggccgctaactcgcagtacggcgccgcgacccgcaggcggccgccgtacccgcgcgcagg

SEQ ID NO: 878163 - DNA, 75 bp, synthetic construct
  source 1..75: mol_type = other DNA
aaccggccgcgcggcggccgctaactcgcagtacggcgccgcgacccgcaggcgggccgccgtacccgcgcgcag

SEQ ID NO: 878164 - DNA, 75 bp, synthetic construct
  source 1..75: mol_type = other DNA
aatccgcacctaaggtcactaataaagataaaaccgccgcccgcacaatggatgttgaactgttcaggcctgcag

SEQ ID NO: 878165 - DNA, 75 bp, synthetic construct
  source 1..75: mol_type = other DNA
cttaatgcgatttggctgataaccctcggcctgtgcggtctgtttgtcagcctctacaacattgactggcatcgc

SEQ ID NO: 878166 - DNA, 75 bp, synthetic construct
  source 1..75: mol_type = other DNA
cagtgaatccggactccgccgctacctgcttgagtggctctccggtgccggcagacaccctgaattccgggatat

SEQ ID NO: 878167 - DNA, 75 bp, synthetic construct
  source 1..75: mol_type = other DNA
cggtttccggcaaatcctaccgcggcgacgtccagccgctaccggtcaccctggtgtggagcgtggtcgccatac

SEQ ID NO: 878168 - DNA, 75 bp, synthetic construct
  source 1..75: mol_type = other DNA
gatgaacagggacgtatgttcggctttctggaagctggacgaggagtcgtggatgtattaattgcgtccggcgct

SEQ ID NO: 878169 - DNA, 75 bp, synthetic construct
  source 1..75: mol_type = other DNA
atgaagaatcagcactaaccgccggacaaggtggttttattaccgaaacgggtgcgcatatcattaacatcaccg

SEQ ID NO: 878170 - DNA, 75 bp, synthetic construct
  source 1..75: mol_type = other DNA
ttggcagtaaccgctcaaggcttgaacaacatcgcgcttatcgttaaggtaagcgcgtttttttacccgccagga

SEQ ID NO: 878171 - DNA, 75 bp, synthetic construct
  source 1..75: mol_type = other DNA
aaagcccagtgggatcatgaacacgggctgttcgaggcttctcttaataatgttcaccagcgttacctgcacgca

SEQ ID NO: 878172 - DNA, 75 bp, synthetic construct
  source 1..75: mol_type = other DNA
ctgcgtgaggcgggagcaattcgtgacctgatggagagttccgttccccgccgctatcggctaggagatgaaatc

SEQ ID NO: 878173 - DNA, 75 bp, synthetic construct
  source 1..75: mol_type = other DNA
ctatcgccaacatggttgccagcctcaaagataaagacaatcgctctaaaaacgtaagccagaatcatgcagatg

SEQ ID NO: 878174 - DNA, 75 bp, synthetic construct
  source 1..75: mol_type = other DNA
gttccgtaccggtcatcgcgatatcgaaaaactcggtggtattggcaagaaaatgccggttatctccatcgccat

SEQ ID NO: 878175 - DNA, 75 bp, synthetic construct
  source 1..75: mol_type = other DNA
acagcctcgaagagtttctgacgttcaaactgcaacgcgccggtaagcagctgtctgacatcatggacgccagcg

SEQ ID NO: 878176 - DNA, 75 bp, synthetic construct
  source 1..75: mol_type = other DNA
tggccgtcagtaacctggtgatagccgccatgaatctggctgctgaaatcggggtcccgcaggtcaacgccgacg

SEQ ID NO: 878177 - DNA, 75 bp, synthetic construct
  source 1..75: mol_type = other DNA
ttgatacagtgaaaagttttgatgctgcacagggcgctgtcacgccccgtacagcgggtactaccgataaaacca

SEQ ID NO: 878178 - DNA, 75 bp, synthetic construct
  source 1..75: mol_type = other DNA
ggcgaatatggcgtagccatcgcctatggttcgattctgatcgtggtgatgctggcgattattttcctctttgac

SEQ ID NO: 878179 - DNA, 75 bp, synthetic construct
  source 1..75: mol_type = other DNA
cacattttactgccgctgttacgcccggccattctctcggccctgatttacagctttgtgcgggccatcactaca

SEQ ID NO: 878180 - DNA, 75 bp, synthetic construct
  source 1..75: mol_type = other DNA
gaacgtatcaaccgcgagaatgcgccggtaattgttatcgagccatacatcattgccatggaagacaacgatgtg

SEQ ID NO: 878181 - DNA, 75 bp, synthetic construct
  source 1..75: mol_type = other DNA
ctgtatgcgttgatggaacataatatccaacgtctgctggcttaccacaccctggaaaatatcggcattatcctg

SEQ ID NO: 878182 - DNA, 75 bp, synthetic construct
  source 1..75: mol_type = other DNA
tttcattgataggtattattgctttccccattctttatattttagggagaatagttcgggctggtggcgcatggc

SEQ ID NO: 878183 - DNA, 75 bp, synthetic construct
  source 1..75: mol_type = other DNA
atgctggtactgaagcagcaactgaaagaggcccgtatcccacaggcggtggtggcgagagctgtcgatgtttct

SEQ ID NO: 878184 - DNA, 75 bp, synthetic construct
  source 1..75: mol_type = other DNA
attattatcgagccatacgtcatcgccatggaagacaacgatgtgaaagggaaaaccctgaaggcagcagcgatt

SEQ ID NO: 878185 - DNA, 75 bp, synthetic construct
  source 1..75: mol_type = other DNA
cagtggatgccatacgtgcccgcctgagcaatccgggaagtcatcgtaaaaatatggtcagcctgctgtatccgc

SEQ ID NO: 878186 - DNA, 75 bp, synthetic construct
  source 1..75: mol_type = other DNA
gcgttgtatctggaaagtaaggggattgatacagcgaaaagttttgatgctgcacagggcgctgtcacaccccgt

SEQ ID NO: 878187 - DNA, 75 bp, synthetic construct
  source 1..75: mol_type = other DNA
gccaggatccactgaccaaacgcgaacgtcaggtggcggaaaagctggcgcaagggatggcagtaaaagagatcg

SEQ ID NO: 878188 - DNA, 75 bp, synthetic construct
  source 1..75: mol_type = other DNA
gagctggtcgatacttccggtgcgccagatattgaatggcctacgcctacgcctccggcagttcaggccagatga

SEQ ID NO: 878189 - DNA, 75 bp, synthetic construct
  source 1..75: mol_type = other DNA
gggcgctttttggcgagaaacctcgtatcttgctggaaaatagtgattttactgtcacgtcttttcgctatgaca

SEQ ID NO: 878190 - DNA, 75 bp, synthetic construct
  source 1..75: mol_type = other DNA
ccaccgtaagcctgagtgaaggcactacctggactaaagcaccgtggcggtttgaagccggtacacccaataccg

SEQ ID NO: 878191 - DNA, 75 bp, synthetic construct
  source 1..75: mol_type = other DNA
gatcaacagcaaatacttaaagatatgaaggaaaaaaaagagacaatggatcgtatagttgcaaggtggctagca

SEQ ID NO: 878192 - DNA, 75 bp, synthetic construct
  source 1..75: mol_type = other DNA
ttagaattaagatgcttctattagaaaaaggctggagtcaagcagagcttgcgcgcagaattggtattgctcaac

SEQ ID NO: 878193 - DNA, 75 bp, synthetic construct
  source 1..75: mol_type = other DNA
ctcgataagctttccgaagtgacgggctttcctccgtattggtttatgttaccgccaagcgaagaagagcaagtc

SEQ ID NO: 878194 - DNA, 75 bp, synthetic construct
  source 1..75: mol_type = other DNA
aaacagtcgtggacatttaattattcttccctggatggggcagatgatttgggatgcgcaatttgatggacacag

SEQ ID NO: 878195 - DNA, 75 bp, synthetic construct
  source 1..75: mol_type = other DNA
caccggcctgcgtccgaacctgatgaccatgggggcaagcgtcatgtcgctgctgaagttccacccggcgattca

SEQ ID NO: 878196 - DNA, 75 bp, synthetic construct
  source 1..75: mol_type = other DNA
cgtaaccaatctggcttctgtagatatgccactacaatatatgtgccacatgaattatgcatatataccaaatgc

SEQ ID NO: 878197 - DNA, 75 bp, synthetic construct
  source 1..75: mol_type = other DNA
gtcggcaaaccgcagccgggggcggacagcgcggacgagaacgagccgtccttcggctacaccctgcgtcgtaag

SEQ ID NO: 878198 - DNA, 75 bp, synthetic construct
  source 1..75: mol_type = other DNA
ggcgatcggcgagccggtctccatggcctccatgaaagacgcgcagaacaaggacaaagtcccgaccgatatctg

SEQ ID NO: 878199 - DNA, 75 bp, synthetic construct
  source 1..75: mol_type = other DNA
cttcggctacaccctgcgccgtaaagggatgccggtggcggataaatacgacggcgtcggcggcaaggtgaagta

SEQ ID NO: 878200 - DNA, 75 bp, synthetic construct
  source 1..75: mol_type = other DNA
ctagataaactatctgaagtaacgggttttccccaacattggtttttcttaccattaaatgaagaaaaagaagac

SEQ ID NO: 878201 - DNA, 75 bp, synthetic construct
  source 1..75: mol_type = other DNA
tatggctgtttgtgctgaaaaacttgcccgccagtattgccagcttaagtacactggcggttcccgtttgcggcg

SEQ ID NO: 878202 - DNA, 75 bp, synthetic construct
  source 1..75: mol_type = other DNA
ctggcgacggcgctggcgtggagcttatggttgtttgtattgaaaaacttgcctgccagtattgccagcttaagc

SEQ ID NO: 878203 - DNA, 75 bp, synthetic construct
  source 1..75: mol_type = other DNA
tctccggcgtcagttgggggcgagcgcgattgttgctaaacgtctgtatgcccgtcatccgcgcgtggatttatt

SEQ ID NO: 878204 - DNA, 75 bp, synthetic construct
  source 1..75: mol_type = other DNA
tgcgggcgcgcgcggttttctctccaaacgttgtagcccggacgaactgatcgccgccgtgcatacagttgccac

SEQ ID NO: 878205 - DNA, 75 bp, synthetic construct
  source 1..75: mol_type = other DNA
agctgaccggcggtaagctcacgatgctggcgctttatgcaatggctgaacaggggcgcgcatggccgcttatct

SEQ ID NO: 878206 - DNA, 75 bp, synthetic construct
  source 1..75: mol_type = other DNA
ataattttaggggctgaagttgccaaggctcttgattgtgatgtttttacggtggataaggatcttgttttaggt

SEQ ID NO: 878207 - DNA, 75 bp, synthetic construct
  source 1..75: mol_type = other DNA
atgggtcataaaattatcacgttgtccggcgcggcgacggatgttctgtatgcgctgtttttccgtggcgcgttg

SEQ ID NO: 878208 - DNA, 75 bp, synthetic construct
  source 1..75: mol_type = other DNA
ggcacggcttcaaaaacatcgataacgagcacatgtatcttgacccgatcaaagtcaccctgctgactccgggga

SEQ ID NO: 878209 - DNA, 75 bp, synthetic construct
  source 1..75: mol_type = other DNA
ttcgggtggcagtcgagccgcagcttggcgcacccctgcgttcgcggcggcatggcggcaagcctcgatcagcgc

SEQ ID NO: 878210 - DNA, 75 bp, synthetic construct
  source 1..75: mol_type = other DNA
ttactggtgccgcaacgtgaaattgactggcagcccaccgtgttctgggcgctggcctacagtgcgattctggcg

SEQ ID NO: 878211 - DNA, 75 bp, synthetic construct
  source 1..75: mol_type = other DNA
gatcttcccggtttgatgttgcgggcatttgataccttgccggagatgatcatgacgccacatcaggcatggcag

SEQ ID NO: 878212 - DNA, 75 bp, synthetic construct
  source 1..75: mol_type = other DNA
gcaaaaaatagcatcagcgcagatgcgtttgaatcgcctcaagaccaaagagaaatctttatccaaaagcgctga

SEQ ID NO: 878213 - DNA, 75 bp, synthetic construct
  source 1..75: mol_type = other DNA
atacaaaagcatgggtggcacgctgtgcctgggcatacgctgacagcgcctccataccagacagtgaaacaggct

SEQ ID NO: 878214 - DNA, 75 bp, synthetic construct
  source 1..75: mol_type = other DNA
aatacaatcattcctcaccggaagagcaaacattacgccagcaaattcttaccgatttactcggtcaagtgatgg

SEQ ID NO: 878215 - DNA, 75 bp, synthetic construct
  source 1..75: mol_type = other DNA
gagccgtcgtcaccaaagatgttcctgataatgttgtcgtaggcggtaacccggccagagtcattaaaaaactgt

SEQ ID NO: 878216 - DNA, 75 bp, synthetic construct
  source 1..75: mol_type = other DNA
caacggtaaccatgccacaggcgagttctgttgtttcaattacgttgattggtggcgcgggatttaacgtggggt

SEQ ID NO: 878217 - DNA, 75 bp, synthetic construct
  source 1..75: mol_type = other DNA
cgaagccactgagcaggccacggcagcagcgaggtctgcttccgcagcgaagacatccgaaacgaacgcgaaagc

SEQ ID NO: 878218 - DNA, 75 bp, synthetic construct
  source 1..75: mol_type = other DNA
gagttccatcgtttacatcgcattgattggtggcgctggttacaacgtcggttccccacatcaggcaggcatttc

SEQ ID NO: 878219 - DNA, 75 bp, synthetic construct
  source 1..75: mol_type = other DNA
ttgctggtgagttgtatcgctcggcagatgagacgttatctcgcgatcgcctgcgcgctcgtcagcttattcacc

SEQ ID NO: 878220 - DNA, 75 bp, synthetic construct
  source 1..75: mol_type = other DNA
cctaaccctctccccggaggggcgaggggactgtccgggcacatttttagactttgtcatcagtctgagcctgcc

SEQ ID NO: 878221 - DNA, 75 bp, synthetic construct
  source 1..75: mol_type = other DNA
tgaagagatcgacatcgacgaagttgaagccgtccttaagcggatccaacggtttgatccggtcggtgtggcggc

SEQ ID NO: 878222 - DNA, 75 bp, synthetic construct
  source 1..75: mol_type = other DNA
gtgccgtcgtcaccaaagatgtccctgataatgttgtcgtaggcggtaacccagccagagtcattaaaaaactgt

SEQ ID NO: 878223 - DNA, 75 bp, synthetic construct
  source 1..75: mol_type = other DNA
ccctattcgcatcggtgataactgtatgttggcaccaggcgttcatatctacacggcaacacatcccatcgaccc

SEQ ID NO: 878224 - DNA, 75 bp, synthetic construct
  source 1..75: mol_type = other DNA
ccctattcgcatcggtgataactgtatgttggcaccaggcgctgatgaatcccctaatgattttggtaaaaatca

SEQ ID NO: 878225 - DNA, 75 bp, synthetic construct
  source 1..75: mol_type = other DNA
tgtactgcaaatgcgtcagtttctgtttatacctcgccaacatattcagcgagtaagccttccagcgttacctat

SEQ ID NO: 878226 - DNA, 75 bp, synthetic construct
  source 1..75: mol_type = other DNA
ggcggaatccgcggcaacgcgcgccgagacagcggcaaaacgggcagaggatattgcatccgccgtggcgcttga

SEQ ID NO: 878227 - DNA, 75 bp, synthetic construct
  source 1..75: mol_type = other DNA
accacgaaagcgtcagaagcagccacttcagcacgggatgcggcggcctcaaaagaggcagcgaagacatccgaa

SEQ ID NO: 878228 - DNA, 75 bp, synthetic construct
  source 1..75: mol_type = other DNA
aacagcggctgcatcatctgccagtgccgcgtcaacaagtgccgggcaggcctcagccagtgccaccgctgccgg

SEQ ID NO: 878229 - DNA, 75 bp, synthetic construct
  source 1..75: mol_type = other DNA
aactggttctacgagcaggcaatggaaaccccaaagggattaccggagctttgtggaagcgtacagccgtcggat

SEQ ID NO: 878230 - DNA, 75 bp, synthetic construct
  source 1..75: mol_type = other DNA
atttgcccgacgttcgacgggggcttatgcggattcgaatggagccgttccctggaatgccgaatcaggcgctta

SEQ ID NO: 878231 - DNA, 75 bp, synthetic construct
  source 1..75: mol_type = other DNA
aacccatgcgactgatgctgcaggctcagcgcgcgcagccagcacgtcagccggacaggccgcttcgtcggctca

SEQ ID NO: 878232 - DNA, 75 bp, synthetic construct
  source 1..75: mol_type = other DNA
acaccatcacttttattgcgctgaaaccaggcttgctcactggaaaagcgcgggatgttaccggacaactgcatt

SEQ ID NO: 878233 - DNA, 75 bp, synthetic construct
  source 1..75: mol_type = other DNA
cttacaatgtcacccgctctggcgacagctatattctggttaacttctataccggagtcggaagttgccggaccc

SEQ ID NO: 878234 - DNA, 75 bp, synthetic construct
  source 1..75: mol_type = other DNA
gcgcatacgcacagtctgagtggctctacggggtctgccggtgctcatactcatggtaatggtattcgttggcca

SEQ ID NO: 878235 - DNA, 75 bp, synthetic construct
  source 1..75: mol_type = other DNA
tcagccggacaggccgcgtcgtcggctcagtcagcgtcttccagcgcaggaacggcatcaacaaaggccagtgaa

SEQ ID NO: 878236 - DNA, 75 bp, synthetic construct
  source 1..75: mol_type = other DNA
agctgacgtactggcggcgcgttttggaacgcgcgggatgctggcaaccgatctcttttccacgctacagcgtat

SEQ ID NO: 878237 - DNA, 75 bp, synthetic construct
  source 1..75: mol_type = other DNA
gaatattgtctggcccgagtcggtagatctgattgttgatgcgctgctcggcaccggcttgcagcaagcgccccg

SEQ ID NO: 878238 - DNA, 75 bp, synthetic construct
  source 1..75: mol_type = other DNA
ggtttgacccggtcggtgtagcggcgaaagatctgcgcgactgcctgctgatccaactctcccaattcgacaaaa

SEQ ID NO: 878239 - DNA, 75 bp, synthetic construct
  source 1..75: mol_type = other DNA
ccgcagaaagtttgcgcgagtttcgccagggcgaactgtctattgcctgcctgccggtcttttcgcagtcttttt

SEQ ID NO: 878240 - DNA, 75 bp, synthetic construct
  source 1..75: mol_type = other DNA
agtgccgcgtcagtctgcgcgatggtacgggcgggagcgggcgtttcgatagttaacccactcaccgctctggat

SEQ ID NO: 878241 - DNA, 75 bp, synthetic construct
  source 1..75: mol_type = other DNA
taacgccggatgattttcagggtgagaactacatcagcctttcccgtactgacagctatcgccagttgctggatc

SEQ ID NO: 878242 - DNA, 75 bp, synthetic construct
  source 1..75: mol_type = other DNA
tgatccgcgcgaagaaacaagatctgaccagcgaagagatcaccaaccacattgaagccggaaaagtggtgacta

SEQ ID NO: 878243 - DNA, 75 bp, synthetic construct
  source 1..75: mol_type = other DNA
gccagaaggtgagcacagtgcacacgaaggtatggaaggcatggaaggcatggacatgagccacgcggaatccgc

SEQ ID NO: 878244 - DNA, 75 bp, synthetic construct
  source 1..75: mol_type = other DNA
catcgtccgtcatcagcactggctcagacatttagtgagcacttacaaacaggcttaccaaaactggttgcctcg

SEQ ID NO: 878245 - DNA, 75 bp, synthetic construct
  source 1..75: mol_type = other DNA
tacatattaccgacgaacaggttttaatgactccggaacaactgaaggccgcttttccattgagcctgcaacaag

SEQ ID NO: 878246 - DNA, 75 bp, synthetic construct
  source 1..75: mol_type = other DNA
gaatgatgtggtccagagtgccgtagggcagtatgaggcgatacaggcagccctaaccgaaggttccgcgcttgc

SEQ ID NO: 878247 - DNA, 75 bp, synthetic construct
  source 1..75: mol_type = other DNA
gcatggactacatggaacaaaaaagagctgatgagctggcttacaagctggctactgggcaagccgaggataacg

SEQ ID NO: 878248 - DNA, 75 bp, synthetic construct
  source 1..75: mol_type = other DNA
agcgccgcgtcagtctgcgcgatggtacgggcgggggcgggagtttccgtggttaacccgctcaccgcactggat

SEQ ID NO: 878249 - DNA, 75 bp, synthetic construct
  source 1..75: mol_type = other DNA
aagtggatcgtagttttggcgatattccgttagttcacggcatgccttttgtttctggtgtcggtatcgaagcat

SEQ ID NO: 878250 - DNA, 75 bp, synthetic construct
  source 1..75: mol_type = other DNA
tcttaccgcgctttgcgcaaggagaagaaggccatgaaactaccacgcagctctcttgtctggtgtgtgttgatc

SEQ ID NO: 878251 - DNA, 75 bp, synthetic construct
  source 1..75: mol_type = other DNA
cgagctgaaatcgctgctggaagatggcggcgtgatccgcgcgaagaaacaagatctgaccagcgaagagatcac

SEQ ID NO: 878252 - DNA, 75 bp, synthetic construct
  source 1..75: mol_type = other DNA
catagctcaaaaattgtatatggatggttagacagtgaacataattctaattttgattctacattgaagcgtata

SEQ ID NO: 878253 - DNA, 75 bp, synthetic construct
  source 1..75: mol_type = other DNA
ggtcaacaaaagatggtcagatcttaaatcttattctttatttattcccttttttccatattgagccacgacaca

SEQ ID NO: 878254 - DNA, 75 bp, synthetic construct
  source 1..75: mol_type = other DNA
tgagcggtgcttctcagaccctgtacgagcagcagatcagcgccaacaacctggcgaacgtcaacaccaacggtt

SEQ ID NO: 878255 - DNA, 75 bp, synthetic construct
  source 1..75: mol_type = other DNA
actgggttacagggacgggatgacaacgatccggtcatttaaggaactggtgaatgagaaagaaaaaccaacgaa

SEQ ID NO: 878256 - DNA, 75 bp, synthetic construct
  source 1..75: mol_type = other DNA
ccctgaagttcacatccctgacatttgtcattctgctgtttttcctcggactaagcctgtccgccaacgttcttg

SEQ ID NO: 878257 - DNA, 75 bp, synthetic construct
  source 1..75: mol_type = other DNA
tcattgatgtttctgcgacttaatgtcacgccggaatctgtaaaagcccagcatcaggccctgttgcgttatttc

SEQ ID NO: 878258 - DNA, 75 bp, synthetic construct
  source 1..75: mol_type = other DNA
tatctcatgttgataatgacatcgatggtcagatttttcgctgcaaagtaaaagcattacaggaaggtgagaaat

SEQ ID NO: 878259 - DNA, 75 bp, synthetic construct
  source 1..75: mol_type = other DNA
ggcctacagtgatgagttgtcaaacagtgatgtggcaaacccggaacatttccttactgcatatcagaatcaaca

SEQ ID NO: 878260 - DNA, 75 bp, synthetic construct
  source 1..75: mol_type = other DNA
ccattctactggccggatttgtgctgttactcaggcaggttcgttcagccagccatccactcctgttgtcgttgc

SEQ ID NO: 878261 - DNA, 75 bp, synthetic construct
  source 1..75: mol_type = other DNA
gtgagcggcgtatcgcgggcaaccagtgactttgtcatcaccaccggcaccagcacatccgggcgcaccgccacg

SEQ ID NO: 878262 - DNA, 75 bp, synthetic construct
  source 1..75: mol_type = other DNA
ttcacgcggtcgcatttatgctgatgtgaacggttttctggacccggtagatttccgtggacaactggttacggt

SEQ ID NO: 878263 - DNA, 75 bp, synthetic construct
  source 1..75: mol_type = other DNA
attttcgtggacaactggtgacggttgtcgggccaatcactggcacagtggatggcaaagtaaataatgcaccat

SEQ ID NO: 878264 - DNA, 75 bp, synthetic construct
  source 1..75: mol_type = other DNA
atgtatgaggagggtgtgacatttttcatgatagtaaaacaggtgataacctcctttcgtaaggggcattcacag

SEQ ID NO: 878265 - DNA, 75 bp, synthetic construct
  source 1..75: mol_type = other DNA
atgtatgaggagtgtgtgacatttttcatgacagtaaaacaggtgataacctcctttcgtaagggggattcacag

SEQ ID NO: 878266 - DNA, 75 bp, synthetic construct
  source 1..75: mol_type = other DNA
ccatcagtgcagcactttctccgttctttgcctggtgtttgcggtatcctgatgaggagattaatgaaggtatat

SEQ ID NO: 878267 - DNA, 75 bp, synthetic construct
  source 1..75: mol_type = other DNA
gtgcaggataaatggaagtcagaaggcaaagatattgctatctggtacaccttgccaattctgccgactggcctg

SEQ ID NO: 878268 - DNA, 75 bp, synthetic construct
  source 1..75: mol_type = other DNA
gtggatgatatcgcgaaactcgccgggcaaaagcttgtagaacgggccaaacccggggaatatgtacaagggata

SEQ ID NO: 878269 - DNA, 75 bp, synthetic construct
  source 1..75: mol_type = other DNA
gggaaacattttatggttatctggttgcgctgaaaacagatgctgaaactgagaaattagtaaccgacatcaatg

SEQ ID NO: 878270 - DNA, 75 bp, synthetic construct
  source 1..75: mol_type = other DNA
atattagtaagagagattaatgaagcacgtaaagcgaactaccaacaactggcaaagcaaaataatgtttcagtc

SEQ ID NO: 878271 - DNA, 75 bp, synthetic construct
  source 1..75: mol_type = other DNA
ttgtcattaatgccttatttagcaccagtgcgatggctctgacgctgaatgacgctcgaactcaggggcgtgttg

SEQ ID NO: 878272 - DNA, 75 bp, synthetic construct
  source 1..75: mol_type = other DNA
ggacttccaagcctgaggggccatttgtattaatcacttttgagggggacgaatttctttttgatgacagacata

SEQ ID NO: 878273 - DNA, 75 bp, synthetic construct
  source 1..75: mol_type = other DNA
cttacgtctccttttgttataagtacatggttatacatacttgctcagcggcgctgtatgtcatcccatatctga

SEQ ID NO: 878274 - DNA, 75 bp, synthetic construct
  source 1..75: mol_type = other DNA
cctatgtttaccacttcagcgattgccagcgtaacacttgatgaaagtggaaacggccaattcaactggcagatg

SEQ ID NO: 878275 - DNA, 75 bp, synthetic construct
  source 1..75: mol_type = other DNA
cctgtgtaacgcttgatgaaagcggaaacggtacattcaactggcaaatgagcccatgtaatctgaagatggcga

SEQ ID NO: 878276 - DNA, 75 bp, synthetic construct
  source 1..75: mol_type = other DNA
gtggcgtgtttttgttgactggaccggaaccaaagagcgcgtaggtacgccgaagaaagcgtggccgaaacacgt

SEQ ID NO: 878277 - DNA, 75 bp, synthetic construct
  source 1..75: mol_type = other DNA
ttgaatgcgcattgtgaagagttgtatgagcttatcgcctcgttaaacaacattctcaatctctacatgcctgcc

SEQ ID NO: 878278 - DNA, 75 bp, synthetic construct
  source 1..75: mol_type = other DNA
gggatgttcgaggcgcaaagcaaactctggcggctggcgtctctggcgcaatcttccggtgcgccggtgaccaaa

SEQ ID NO: 878279 - DNA, 75 bp, synthetic construct
  source 1..75: mol_type = other DNA
gctgtggcgcagtattccgcacattattgtcacctccgcaaccttgcgttcgctgaacagtttttcgcgtttgca

SEQ ID NO: 878280 - DNA, 75 bp, synthetic construct
  source 1..75: mol_type = other DNA
gataaaaatctgaccttcaggattcgcggattaaataacattcatgtccttgactgctttgttaatgttgatctg

SEQ ID NO: 878281 - DNA, 75 bp, synthetic construct
  source 1..75: mol_type = other DNA
aaggtcggtcagccgcttccctcggaacgtcgactgtgtgaaaagctcggcttctcacgctccgcactgcgtgaa

SEQ ID NO: 878282 - DNA, 75 bp, synthetic construct
  source 1..75: mol_type = other DNA
ggcgcaaagcaaactctggcggctggcgtctctggcgcaatcttccggtgcgccagtgaccaaatgggcgacgcg

SEQ ID NO: 878283 - DNA, 75 bp, synthetic construct
  source 1..75: mol_type = other DNA
ccctgcagcaaccgctttccagcctgccccagtgggtctctgaacgcattctgcagcagataaatcagttaaccc

SEQ ID NO: 878284 - DNA, 75 bp, synthetic construct
  source 1..75: mol_type = other DNA
ctgaaccaggccgacaaaatcgaaccctgtcacgaatgggacacccgcaccagcacgccgtcaccacaacagcag

SEQ ID NO: 878285 - DNA, 75 bp, synthetic construct
  source 1..75: mol_type = other DNA
gaagggatgaatgtcctgagcgatgccaaagcgaaaggtgttgagctggcgggtgtgaacgtgatgacaatggac

SEQ ID NO: 878286 - DNA, 75 bp, synthetic construct
  source 1..75: mol_type = other DNA
tgtgcgaagctgaagggcgatctcgacacttataaatgggatggtctgcgcgatcatactgatatcgctatagat

SEQ ID NO: 878287 - DNA, 75 bp, synthetic construct
  source 1..75: mol_type = other DNA
tcgggcagtcattcataccgtgcgggaaaccgttgtgtcagtcgcacgggccgtctgggactggatgttcttctg

SEQ ID NO: 878288 - DNA, 75 bp, synthetic construct
  source 1..75: mol_type = other DNA
tcataccggccccggttcggacagtcattcagtctgtgcgcaacatcgtggtatcagtcgcccgtgcagtctgga

SEQ ID NO: 878289 - DNA, 75 bp, synthetic construct
  source 1..75: mol_type = other DNA
gtaaagcgaaatactggacactggatattaatgaggcccatgtatttcccactctggatgccgcgaccgaacagc

SEQ ID NO: 878290 - DNA, 75 bp, synthetic construct
  source 1..75: mol_type = other DNA
ccacctcagcccgggatgcggcggcctcaaaagaggcagcgaaatcatcagaaacgagcgcagcctcgagcgcca

SEQ ID NO: 878291 - DNA, 75 bp, synthetic construct
  source 1..75: mol_type = other DNA
ttacatcgcattgattggtggcgctggttacaacgtcggttccccacatcaggcaggcatttcagaactggttct

SEQ ID NO: 878292 - DNA, 75 bp, synthetic construct
  source 1..75: mol_type = other DNA
tcagcggatataacactgacgccgaaagatattggtacgcttaactcaacaacaatgtcattcagcggtggtgct

SEQ ID NO: 878293 - DNA, 75 bp, synthetic construct
  source 1..75: mol_type = other DNA
tgataatatccgctgtcacatcatgctcgtcagtttacgccgctacattaccggccaatgaggtgggctcataca

SEQ ID NO: 878294 - DNA, 75 bp, synthetic construct
  source 1..75: mol_type = other DNA
agggcaaacctgccagtggtcgtgccgtattgtctcaggaacaggacggcattaaatcgcacacccacagcgcca

SEQ ID NO: 878295 - DNA, 75 bp, synthetic construct
  source 1..75: mol_type = other DNA
cgttggccaggaggcggcggttctgcgttagcattttatgatggcggtgggttcacttatgtccagaattcacag

SEQ ID NO: 878296 - DNA, 75 bp, synthetic construct
  source 1..75: mol_type = other DNA
ggtagtggccagactcgtaatgcagggaagacatcatcagatggtgctcatacccactcgctgtccggcactgct

SEQ ID NO: 878297 - DNA, 75 bp, synthetic construct
  source 1..75: mol_type = other DNA
aatctgcttacccgaaacttgcagtggcttatccgtcaggcgttattcctgatatgcgtggctggacgattaagg

SEQ ID NO: 878298 - DNA, 75 bp, synthetic construct
  source 1..75: mol_type = other DNA
gccgcgaagaagtcagccagcgatgccagcatatctgccagtgaggcggcaacccatgcgactgatgctgcaggc

SEQ ID NO: 878299 - DNA, 75 bp, synthetic construct
  source 1..75: mol_type = other DNA
tcactggcggcaacgccaaaagccgttaaggccgcgtatgacctggctaacgggaaatacaccgcacaggacgct

SEQ ID NO: 878300 - DNA, 75 bp, synthetic construct
  source 1..75: mol_type = other DNA
aggtcaggacttttataatcaaaactcatatactcttggtgtaacctataatggagtcgattatgattcaacctc

SEQ ID NO: 878301 - DNA, 75 bp, synthetic construct
  source 1..75: mol_type = other DNA
tggattctcagggagcatttaaccatccatactggatgtgcaagggttcctggtcttatggcaataataaaatca

SEQ ID NO: 878302 - DNA, 75 bp, synthetic construct
  source 1..75: mol_type = other DNA
ctttgcagtgggtttctgaattgactgatgaactcatggcaaaaatcagaagccacgaatacaaccgctcaatgg

SEQ ID NO: 878303 - DNA, 75 bp, synthetic construct
  source 1..75: mol_type = other DNA
gggggatgtgatacagggggcgacgggggcggtggccagtctgccggcgatggtcatccagcgggcgaatccggg

SEQ ID NO: 878304 - DNA, 75 bp, synthetic construct
  source 1..75: mol_type = other DNA
aacctgccggttaccagtacatcaacggtcgggagtaccagttgtaccggaagtgtgtgcagtaagttcagtaat

SEQ ID NO: 878305 - DNA, 75 bp, synthetic construct
  source 1..75: mol_type = other DNA
atgaagcataaaccacaactgacaaacatcgtggcactggcggtcatgctggcctgcagcaccatggccggtgcg

SEQ ID NO: 878306 - DNA, 75 bp, synthetic construct
  source 1..75: mol_type = other DNA
ctggcgaagctgaaaacaggcggactgccggtgacggccggcgtgattaaagccctgcagcgtgatccggataat

SEQ ID NO: 878307 - DNA, 75 bp, synthetic construct
  source 1..75: mol_type = other DNA
atgaccagcccggtacgaccgttgccggcaccggctttgccccactgctggaagaggcaaccaaagccaacgctg

SEQ ID NO: 878308 - DNA, 75 bp, synthetic construct
  source 1..75: mol_type = other DNA
acgagatggagctgaagcgtgaactggcccgcaacagcgtactgaccattattgagcgtgagaatcagcgagttg

SEQ ID NO: 878309 - DNA, 75 bp, synthetic construct
  source 1..75: mol_type = other DNA
ggatggtgatgcggtgggaacaatgaatcaggtggaaaaaaaaccggacggcaaggccggcgtgccgtggatagg

SEQ ID NO: 878310 - DNA, 75 bp, synthetic construct
  source 1..75: mol_type = other DNA
ggtaatggtctgctattgaagatatttcataacgatggaacagcaacggaatttaaccgcttctcacaatttgct

SEQ ID NO: 878311 - DNA, 75 bp, synthetic construct
  source 1..75: mol_type = other DNA
tgtagtgatgaagagaaggggctggccctgcagtgggtttctgaactaacagatgagctcatggcaaaaatcaga

SEQ ID NO: 878312 - DNA, 75 bp, synthetic construct
  source 1..75: mol_type = other DNA
ggacctctgttgccggaacggggtttgccccgatgctggaagaggccgtaaaagtgaatacggagcaactggtga

SEQ ID NO: 878313 - DNA, 75 bp, synthetic construct
  source 1..75: mol_type = other DNA
gggcgtctggccggtgaactggcaatggcagatacggtggagacggcactgctgatgcgcaggatgattatgacg

SEQ ID NO: 878314 - DNA, 75 bp, synthetic construct
  source 1..75: mol_type = other DNA
aaaaaatcagctaaacggtgtgaccagcggctttaaggacatgatgagtaacgtgatcagcagtgctaccggcgc

SEQ ID NO: 878315 - DNA, 75 bp, synthetic construct
  source 1..75: mol_type = other DNA
gccattattggccgcatcttttccattctgcccatcgttacgccaccgtttgtggtcggcttaggcgtgacgctc

SEQ ID NO: 878316 - DNA, 75 bp, synthetic construct
  source 1..75: mol_type = other DNA
atccctggcttctgctggcgctgtttccgctgtgcagcgccgtcgccctgcgggcgatctgtcgcccgctggcgg

SEQ ID NO: 878317 - DNA, 75 bp, synthetic construct
  source 1..75: mol_type = other DNA
agcaaggacagcagcagaaagcgccgccgcagcagcagaataataacgggaataatccgcctccgatggacttcg

SEQ ID NO: 878318 - DNA, 75 bp, synthetic construct
  source 1..75: mol_type = other DNA
atgagtttgaattcaattacgctgggcgggaatatcggaaacgacatggaagttcgctacacgcaaaacggtaaa

SEQ ID NO: 878319 - DNA, 75 bp, synthetic construct
  source 1..75: mol_type = other DNA
tctgcccgccgacgggcacacgacaacaacgcgcagacgagtcccatggtggacgcctttgcgccagccgcgctt

SEQ ID NO: 878320 - DNA, 75 bp, synthetic construct
  source 1..75: mol_type = other DNA
tccgctgtgcagcgccgtcgccctgcgggcgatctgtcgccctgcgggcgatctgtcgcccgctggcggcaacat

SEQ ID NO: 878321 - DNA, 75 bp, synthetic construct
  source 1..75: mol_type = other DNA
tgcggtgaactgggagcggtgatcggcccggtggccggaggcgtgctgagcgggatcggctttcggcatatcgcc

SEQ ID NO: 878322 - DNA, 75 bp, synthetic construct
  source 1..75: mol_type = other DNA
gctggctggtgacaggctttggtgccgtcgccagaggagccagaacactggggggtgtgctctcaggggggctgg

SEQ ID NO: 878323 - DNA, 75 bp, synthetic construct
  source 1..75: mol_type = other DNA
ccactgctgtcgaaagccgcaccgcctgcgccctctgcggcgggtatggcgctggccggagcagcgggcgcagtg

SEQ ID NO: 878324 - DNA, 75 bp, synthetic construct
  source 1..75: mol_type = other DNA
ccgccagtcagcaaatggcggcggcgttaattcctccactgccggatatcagcgtaccggggctggatgttgctc

SEQ ID NO: 878325 - DNA, 75 bp, synthetic construct
  source 1..75: mol_type = other DNA
gtatttggtgagcgtgcggaaaaattagcgccacatatccgcaagggtggaaaaatagtggtaagcggtcgcctg

SEQ ID NO: 878326 - DNA, 75 bp, synthetic construct
  source 1..75: mol_type = other DNA
gatggggagctggtatttgcaggcgcataccctgattccggcgttgatccttccggctacagcatgtggcctgct

SEQ ID NO: 878327 - DNA, 75 bp, synthetic construct
  source 1..75: mol_type = other DNA
gatttcaggctggtttaaggagacgctggggattcattcccccagccaggtgtttgccgggttcggcgacaatat

SEQ ID NO: 878328 - DNA, 75 bp, synthetic construct
  source 1..75: mol_type = other DNA
ccaacgttccggcggccgcgagcaggatctggcgccgctctttatgctggcctcgctgttgattatcaccctcca

SEQ ID NO: 878329 - DNA, 75 bp, synthetic construct
  source 1..75: mol_type = other DNA
agcacaagccgctaaatctgctgccactgctgctggcctgtctgccactgttagcaagctgcagcaacaagccaa

SEQ ID NO: 878330 - DNA, 75 bp, synthetic construct
  source 1..75: mol_type = other DNA
aatgcccagcgttttgtcaacgaagtggattcctccgctgtttacgttaacgcctctacgcgttttaccgacggc

SEQ ID NO: 878331 - DNA, 75 bp, synthetic construct
  source 1..75: mol_type = other DNA
gtcagttcagcagagaaagcatcgctttcctgggtgaagtaaaacggcaaaacagtaaagagtggtacgagaaaa

SEQ ID NO: 878332 - DNA, 75 bp, synthetic construct
  source 1..75: mol_type = other DNA
acggttgatgttgcttccctgtgcctgaaaaccggtaacgcggtgatcctgcgcggcggcaaagaaacctgtcgc

SEQ ID NO: 878333 - DNA, 75 bp, synthetic construct
  source 1..75: mol_type = other DNA
gtagtggctgttaaagccgaagagtatgacgatgagttcctgtcattagacttgaacgtcaaaatcgtcagcgat

SEQ ID NO: 878334 - DNA, 75 bp, synthetic construct
  source 1..75: mol_type = other DNA
gcaactctccagccgcgaaaaaaatcgtgtgctggaaaaaatcgccgatgaactggaagcacaaagcgaaagcat

SEQ ID NO: 878335 - DNA, 75 bp, synthetic construct
  source 1..75: mol_type = other DNA
atggagagtgggaatgaattgatgattagacaagtttcaggtcttcctaggggggatgcaattgcgtttggtgca

SEQ ID NO: 878336 - DNA, 75 bp, synthetic construct
  source 1..75: mol_type = other DNA
aggtattccaaatgtaaagcacactattctaggggaatccccaaatgttgatagtttggaaaaaaatcagcaaaa

SEQ ID NO: 878337 - DNA, 75 bp, synthetic construct
  source 1..75: mol_type = other DNA
cttattgggttcgatgcaggtaatatattagttgtcgcaagagtgacagatatggcatttgttgaagcggataaa

SEQ ID NO: 878338 - DNA, 75 bp, synthetic construct
  source 1..75: mol_type = other DNA
gccgcgtaccaaagaagccgaaaacgccacctgtgcgccgctcctgatgagcgtaagcgtagtggcactggcgat

SEQ ID NO: 878339 - DNA, 75 bp, synthetic construct
  source 1..75: mol_type = other DNA
aagcgcttggttttgcagggttgataaaattactacgtcctagcgataaaacacagttgccagcgttgaggaatg

SEQ ID NO: 878340 - DNA, 75 bp, synthetic construct
  source 1..75: mol_type = other DNA
ttgattggttttgatgctggaaatattttggtcgttgcccgagttacagatatggcgtttgtcgaggctgataaa

SEQ ID NO: 878341 - DNA, 75 bp, synthetic construct
  source 1..75: mol_type = other DNA
acggcaggcggtaaagcaccgctgggcgtggcgtcggtggcgaagcagtttaatgtcccggtgattgggattgct

SEQ ID NO: 878342 - DNA, 75 bp, synthetic construct
  source 1..75: mol_type = other DNA
tttttttataacacccgttttgtgacggcaagtaagggtggtacggccaatattgatgttggtgctggtttcata

SEQ ID NO: 878343 - DNA, 75 bp, synthetic construct
  source 1..75: mol_type = other DNA
tgaaggatgaggttactggcgcttctcaaacacttcaagtgtttgatactgactctttctcacaacgcgatgcgg

SEQ ID NO: 878344 - DNA, 75 bp, synthetic construct
  source 1..75: mol_type = other DNA
gtgtctggggcaatgttggtgttcaggctggcgataaagggtacagtgatgcccaggcaatgctgggtattaaat

SEQ ID NO: 878345 - DNA, 75 bp, synthetic construct
  source 1..75: mol_type = other DNA
gggtaaggccggacatcaaccacgcccttcaggaggtagtggatgcctggcgaaaaccaaagaacatacaagtca

SEQ ID NO: 878346 - DNA, 75 bp, synthetic construct
  source 1..75: mol_type = other DNA
atgaatggattcagaaacagttcacggaacggtcaggtctggcgttaccagcgtgccggcgggcgggccgttatt

SEQ ID NO: 878347 - DNA, 75 bp, synthetic construct
  source 1..75: mol_type = other DNA
atgataacagttccattgtgaataatggcacaatctatgcctgggataacaataataagtattcactgcatggtg

SEQ ID NO: 878348 - DNA, 75 bp, synthetic construct
  source 1..75: mol_type = other DNA
gcaatcagcaatggctaggcttttaggtgtatcacctccaagcgtaaatcaatggatcaaaggtgtacgtcagtt

SEQ ID NO: 878349 - DNA, 75 bp, synthetic construct
  source 1..75: mol_type = other DNA
ccgctggcgcacacggttgtgctgctcaatagtggaggcgacgctacccaggcggccgctattttaagtggttta

SEQ ID NO: 878350 - DNA, 75 bp, synthetic construct
  source 1..75: mol_type = other DNA
ccgccgataaaccgagccgttatttgttaaccgtctccgccagtgacggcgcggcgtatcgagtcaccaccacca

SEQ ID NO: 878351 - DNA, 75 bp, synthetic construct
  source 1..75: mol_type = other DNA
agtgcgtctgatgataataaggcgcatcagtttgagccatttgtggaagttaactggatccataatacacggagc

SEQ ID NO: 878352 - DNA, 75 bp, synthetic construct
  source 1..75: mol_type = other DNA
gatggcagtattacacaaacgaatactggctcggttattaccaatgaggcagatatctcttcgccgctgaataat

SEQ ID NO: 878353 - DNA, 75 bp, synthetic construct
  source 1..75: mol_type = other DNA
ataactcgggaaatctcgttctcaaggggggagataatgctaaccgtacaacgggtataaaagcatctggtacaa

SEQ ID NO: 878354 - DNA, 75 bp, synthetic construct
  source 1..75: mol_type = other DNA
aaatagatgttcaacgtgacgagcatgatttagcgacagtcagacgaatccaggcttttcacatgcaggaattac

SEQ ID NO: 878355 - DNA, 75 bp, synthetic construct
  source 1..75: mol_type = other DNA
tgaaacgccagataaattctcactactcggtgaagcagaaggtatcagtctgcagatactggacaatcaagggta

SEQ ID NO: 878356 - DNA, 75 bp, synthetic construct
  source 1..75: mol_type = other DNA
caggtgatagctccggcctgcacgctggctatggctgacacctggcaggttattgatatgggtaatacacctgtt

SEQ ID NO: 878357 - DNA, 75 bp, synthetic construct
  source 1..75: mol_type = other DNA
gcggttgcataactgcgagctggcggaaacaggtaaacgggtttatacggcgagtcgtgtccgggttacctttga

SEQ ID NO: 878358 - DNA, 75 bp, synthetic construct
  source 1..75: mol_type = other DNA
gatattaaaccgggtattgagattgtactgcgggcggtcaacctggagcaggcggtgcagggtgcagcgctggtg

SEQ ID NO: 878359 - DNA, 75 bp, synthetic construct
  source 1..75: mol_type = other DNA
gtttcgctatacaatttgattcgcgccggatcaatcgtattgagccgattctgccagtgccggaactgctgcaat

SEQ ID NO: 878360 - DNA, 75 bp, synthetic construct
  source 1..75: mol_type = other DNA
aagacgaactgaagtatatgctgcggattgtccggaatggttatccgctgaaggcaggaaattattataccatat

SEQ ID NO: 878361 - DNA, 75 bp, synthetic construct
  source 1..75: mol_type = other DNA
gaatgccgagccgcagcagctggtcaccgtcgggcgcaaatttggtttctttatcgctatcgtttcggtgctggt

SEQ ID NO: 878362 - DNA, 75 bp, synthetic construct
  source 1..75: mol_type = other DNA
acgcacgctggcgtcaaaaagcctggcggaagggcaaaagggggcgctgttaacggcggtgctgaaaatgctcga

SEQ ID NO: 878363 - DNA, 75 bp, synthetic construct
  source 1..75: mol_type = other DNA
gaacgtgacgtgcgcatcaacagcaacgaagaactggcgctgccgaaagagaagttgcaggaactgcacatctag

SEQ ID NO: 878364 - DNA, 75 bp, synthetic construct
  source 1..75: mol_type = other DNA
gcgcgtcccatggcagcgtaaaaacctacatgacaggctttatcctgtcgataatcctgacggtgattccgttct

SEQ ID NO: 878365 - DNA, 75 bp, synthetic construct
  source 1..75: mol_type = other DNA
tccagcgtctactggcttaccacaccctggaaaatatcggcattatcctgctggggctgggcgctggcgtaacgg

SEQ ID NO: 878366 - DNA, 75 bp, synthetic construct
  source 1..75: mol_type = other DNA
tgggtttcttctacaaattgcccgggaaaagcgaaagcaaatgatgcaactaacccgtggcgggtaatgactcca

SEQ ID NO: 878367 - DNA, 75 bp, synthetic construct
  source 1..75: mol_type = other DNA
gcctttttcgttttatccagccacaaatccacattgaaaaacgccttatacaaaaaaacctgccagcaaactggc

SEQ ID NO: 878368 - DNA, 75 bp, synthetic construct
  source 1..75: mol_type = other DNA
cccccctgcatcgtgatgcgccattgcataccctgccggacctgctgctgccggtgattaagcaccgacagtatg

SEQ ID NO: 878369 - DNA, 75 bp, synthetic construct
  source 1..75: mol_type = other DNA
aaactggaaagtggtatacggtggttatgacactaaaacgcaaccagcgatgcctgccaatatggagctcaccga

SEQ ID NO: 878370 - DNA, 75 bp, synthetic construct
  source 1..75: mol_type = other DNA
accgggatgccaataccgctcaatagtctgcgtcagtggattttaggtttgccgggagacgcgaccgactacaaa

SEQ ID NO: 878371 - DNA, 75 bp, synthetic construct
  source 1..75: mol_type = other DNA
ataccctgccggacctgctgctgccggtgattaagcaccgacagtatgtggtggcaacagagcagggacgaccgg

SEQ ID NO: 878372 - DNA, 75 bp, synthetic construct
  source 1..75: mol_type = other DNA
aaattgtcatggcgcagatcacaaaggcggttgaattactcgatcaaaagccacctgcaaaaagttgggaaaccc

SEQ ID NO: 878373 - DNA, 75 bp, synthetic construct
  source 1..75: mol_type = other DNA
aaaccgtaatggagaagattacaacggtagttgaaaaacttgatattaaaccacctagcaaaggttgggatacac

SEQ ID NO: 878374 - DNA, 75 bp, synthetic construct
  source 1..75: mol_type = other DNA
ttggtaactatcacaacgggaaaatagcctgctttatgagtgactgttcaccgcactggggtacacagcagttta

SEQ ID NO: 878375 - DNA, 75 bp, synthetic construct
  source 1..75: mol_type = other DNA
ggaactggagctgaatgctcagccgggtaacgtacaattagtcgacaataaaggtcagcgttacaccgccgatga

SEQ ID NO: 878376 - DNA, 75 bp, synthetic construct
  source 1..75: mol_type = other DNA
gcggcgacattattcttgcgggcatcaccggcatcgccggcggcccgtcatccgcgtttctgattgcatcggcca

SEQ ID NO: 878377 - DNA, 75 bp, synthetic construct
  source 1..75: mol_type = other DNA
cttactacgtcgcgttaatccgcctcctgattgtcttcggagccaggacggtagaactgaggttatcggagatca

SEQ ID NO: 878378 - DNA, 75 bp, synthetic construct
  source 1..75: mol_type = other DNA
cggcaggaacgctcgctgccttcgctctgatccgctactacgacgatcattccggacggctgaaccgtcgggata

SEQ ID NO: 878379 - DNA, 75 bp, synthetic construct
  source 1..75: mol_type = other DNA
gtatcagacactccaccagcggcctattaacctggtatttcacctacagggcaggaacaggacgccaggtatcac

SEQ ID NO: 878380 - DNA, 75 bp, synthetic construct
  source 1..75: mol_type = other DNA
agggaaaaagcggcacagtgtcgcgcatggctggcagaaggaaaaaatccacgccatgagcttaattactccata

SEQ ID NO: 878381 - DNA, 75 bp, synthetic construct
  source 1..75: mol_type = other DNA
aatctgcaacgtcacggggccagcaaaaaagctatttcccgtgcatttgatgacgatgtcgattttcaggaacgc

SEQ ID NO: 878382 - DNA, 75 bp, synthetic construct
  source 1..75: mol_type = other DNA
tggacagagcggttagagatactggcgggtactcacgaaaacgtaaccacactgccaatagccagagaaatataa

SEQ ID NO: 878383 - DNA, 75 bp, synthetic construct
  source 1..75: mol_type = other DNA
tggtaagccggcggagaaaaatacgttttatagtgatggcggaaatctgagcgtgaaatatttaacatcagggaa

SEQ ID NO: 878384 - DNA, 75 bp, synthetic construct
  source 1..75: mol_type = other DNA
gcgacacattgttaagaaaacttcatggtaagccggcggagaaaaatacgttttatagtgatggcggaaatctga

SEQ ID NO: 878385 - DNA, 75 bp, synthetic construct
  source 1..75: mol_type = other DNA
ctgaacgtctgaggctgggaaattatccagatttgagcctgaaagcagccagggaaaaagcgtcgcagtgtcgcg

SEQ ID NO: 878386 - DNA, 75 bp, synthetic construct
  source 1..75: mol_type = other DNA
ttaaggaagcgctcacttactggcttgaatcgtacgcaaaggaaaagcgcactgactacgaatcactgaaaagcc

SEQ ID NO: 878387 - DNA, 75 bp, synthetic construct
  source 1..75: mol_type = other DNA
attaacctggtatttccggtaccgaacgggaggccgtgaggttgccgcagagcggttaaagctgggggcttaccc

SEQ ID NO: 878388 - DNA, 75 bp, synthetic construct
  source 1..75: mol_type = other DNA
tctcattcatgggagttgaagcaaaagccaattataaaaatacagttctggctgatgtgctcccggttacgatgt

SEQ ID NO: 878389 - DNA, 75 bp, synthetic construct
  source 1..75: mol_type = other DNA
cgcgcggcaacctttctgaattgctcaacaatgttgaagccggggaagaggttgaaatcacccgcagaggccgtg

SEQ ID NO: 878390 - DNA, 75 bp, synthetic construct
  source 1..75: mol_type = other DNA
ggtgattgacggcggtgtgctggacagcggtctgcgtctggagcgtcgtcgtgtgccgctgggggtgattggtgt

SEQ ID NO: 878391 - DNA, 75 bp, synthetic construct
  source 1..75: mol_type = other DNA
cgaagcaagcctcgtataaattagcgcaactctccagccgcgaaaaaaatcgcgtgctggaaaagatcgccgatg

SEQ ID NO: 878392 - DNA, 75 bp, synthetic construct
  source 1..75: mol_type = other DNA
gacgcgctgcttcaacgaggtattgagcttatggaggaggaactggtggcggcacatatccagacgcaatccaac

SEQ ID NO: 878393 - DNA, 75 bp, synthetic construct
  source 1..75: mol_type = other DNA
ttcggaacttccgttctattcgtttactgacctggcagccttcgccagggctcaactgcctcattggtccagggg

SEQ ID NO: 878394 - DNA, 75 bp, synthetic construct
  source 1..75: mol_type = other DNA
agatccggctgcctttatcaaaaccggactggacgccgcaggtatgagtcaggccgattttgaagccgcgctgaa

SEQ ID NO: 878395 - DNA, 75 bp, synthetic construct
  source 1..75: mol_type = other DNA
tagatactatgctgggcgagctgatgaaagttacttggctggaatgacatgtgaacacatttacggctcagtgag

SEQ ID NO: 878396 - DNA, 75 bp, synthetic construct
  source 1..75: mol_type = other DNA
cgtcaacgcgaaaactcagcgtccgagcacatgtaatacggttgaaacgttgctggtgaataaaaaacatcgccg

SEQ ID NO: 878397 - DNA, 75 bp, synthetic construct
  source 1..75: mol_type = other DNA
tgctggtgaataaaaacatcgcagatagcttcctgcccgcattaagcaaacaaatggcggaaagcggcgtgacgt

SEQ ID NO: 878398 - DNA, 75 bp, synthetic construct
  source 1..75: mol_type = other DNA
gccgatgctcgtgccaatggccttagcgaagcgatgcttgatcgcctggcactgacgccagcccgtctgaaaagc

SEQ ID NO: 878399 - DNA, 75 bp, synthetic construct
  source 1..75: mol_type = other DNA
caaatggcggaaagcggcgtggcattacacgcagatgcagctgcgctggcgcagttgcagacaggccctgcgaag

SEQ ID NO: 878400 - DNA, 75 bp, synthetic construct
  source 1..75: mol_type = other DNA
agcggcctgcgtctggagcgtcgccgcgtgccgctgggtgttataggtgtaatttatgaagcgcgtccgaacgtg

SEQ ID NO: 878401 - DNA, 75 bp, synthetic construct
  source 1..75: mol_type = other DNA
gaagaggatcttattaattttgataaaaacttaaaggagcagaagcaatatactgatttattcaattttttattg

SEQ ID NO: 878402 - DNA, 75 bp, synthetic construct
  source 1..75: mol_type = other DNA
gctatcgcatggcatatgccgtttgatgacgagcagtatcaccgtttactctccgctgccgggttatcgaaaagc

SEQ ID NO: 878403 - DNA, 75 bp, synthetic construct
  source 1..75: mol_type = other DNA
aggcaaacccagcgcaattgccaaaatccaggttgatggcgaattgatgcttacagagctggggctggaaggtga

SEQ ID NO: 878404 - DNA, 75 bp, synthetic construct
  source 1..75: mol_type = other DNA
atgatgagcacatgcccgatttttgatcgcattgaagagctggcatggtcacgccactaccagaagatcgttcgc

SEQ ID NO: 878405 - DNA, 75 bp, synthetic construct
  source 1..75: mol_type = other DNA
cagagggtgttattgcacacagccatcacaacctgaacatccagttattaaagggttctctgaatatcctttttt

SEQ ID NO: 878406 - DNA, 75 bp, synthetic construct
  source 1..75: mol_type = other DNA
tggtagtaatactttcctgctacaaaatgatactttttatcagcttcgcataaaaccaaacgctctcgaactgat

SEQ ID NO: 878407 - DNA, 75 bp, synthetic construct
  source 1..75: mol_type = other DNA
ctccgctgccgggttatcgaaaagctggacgcggacgatgcagaaacgccgactgagcggcaaaatcgaagattt

SEQ ID NO: 878408 - DNA, 75 bp, synthetic construct
  source 1..75: mol_type = other DNA
aaaatgaagatgtcgctcttcataattggttaaataataaatcatttatgagcagggggaactataatcagttta

SEQ ID NO: 878409 - DNA, 75 bp, synthetic construct
  source 1..75: mol_type = other DNA
aaaggtaataagcttcctgtaggcattgaaataatatttacagataaagcaaaaaaatgtaacgttttcatcgat

SEQ ID NO: 878410 - DNA, 75 bp, synthetic construct
  source 1..75: mol_type = other DNA
tctgttgataaccctgattttggtctggctgtaaaatattatttggatctaggatatttagatgcagcgttctcg

SEQ ID NO: 878411 - DNA, 75 bp, synthetic construct
  source 1..75: mol_type = other DNA
gaagaaaaagaaacggaactggcggacgacctggaaaaaggtctgccccagcacctgtttgaatcgctctgcatc

SEQ ID NO: 878412 - DNA, 75 bp, synthetic construct
  source 1..75: mol_type = other DNA
ccgtgcacaaaccatctcgtttgaagatttcatcacttacaaaggtgaacaaggcgcgaaagaagcaggcaaaat

SEQ ID NO: 878413 - DNA, 75 bp, synthetic construct
  source 1..75: mol_type = other DNA
gcccggcatctaatacagaattagttatccagaaacaagagcaaagtaatctgaaagggacgatatcagattcat

SEQ ID NO: 878414 - DNA, 75 bp, synthetic construct
  source 1..75: mol_type = other DNA
gagagccacgtttctacctttaaggatgtttcgacctgtgagggccaggcgcgcaccttcatgctctacaacccg

SEQ ID NO: 878415 - DNA, 75 bp, synthetic construct
  source 1..75: mol_type = other DNA
gagcactatgtgacgacattccgggatgtctcaacgcaggaaggcgatgagcgcacgttccagttatacaacccg

SEQ ID NO: 878416 - DNA, 75 bp, synthetic construct
  source 1..75: mol_type = other DNA
gccagatacaccacctgcttcaaagacatcactcccgatcacggggagaacaagacctggttcatgtacaacccg

SEQ ID NO: 878417 - DNA, 75 bp, synthetic construct
  source 1..75: mol_type = other DNA
aatgatgtcgccagcctggcaactctgacaaaagtcgggcgggatattcttgcgaaatcgaccgttgccgctgtt

SEQ ID NO: 878418 - DNA, 75 bp, synthetic construct
  source 1..75: mol_type = other DNA
atagcacatctgaaacgcaggctgcaacgccgaaagcagtaaaggccgcgtatgaccttgctggcgcaaaatata

SEQ ID NO: 878419 - DNA, 75 bp, synthetic construct
  source 1..75: mol_type = other DNA
taggcggtattgatatgacagagcgtcctggttggctaggaagtattggcgctgatgtcatgaccagtgatgagg

SEQ ID NO: 878420 - DNA, 75 bp, synthetic construct
  source 1..75: mol_type = other DNA
cactcgttgttgcatctgttctggtgttctctctcgcaggttgtggtgacaaagaagaatcgaaaaaatttagcg

SEQ ID NO: 878421 - DNA, 75 bp, synthetic construct
  source 1..75: mol_type = other DNA
gagggctacgtgacaacattccgcgacgtctcaacgcaggaaggtgacgatcgtacgttccagctttacaaccca

SEQ ID NO: 878422 - DNA, 75 bp, synthetic construct
  source 1..75: mol_type = other DNA
cagctcctgtctgagcggtcgtcctaacgcctgtaaaaacaaccaaactcttggtgtgcaacgtcaggggggatg

SEQ ID NO: 878423 - DNA, 75 bp, synthetic construct
  source 1..75: mol_type = other DNA
atgacaaacagttatgaagaaaaaaccgatgtgaaaagggaaaagttagatcggattattagccggagcacaata

SEQ ID NO: 878424 - DNA, 75 bp, synthetic construct
  source 1..75: mol_type = other DNA
ggatggttcaaactggcaactgtaacaatgccacaagccagttccgtggtttacataagcctgattggtggcgca

SEQ ID NO: 878425 - DNA, 75 bp, synthetic construct
  source 1..75: mol_type = other DNA
acttgtagattcgtcacctgacgcactgaacacgctgaacgagctggcggcggcgctgggcaacgacccgaattt

SEQ ID NO: 878426 - DNA, 75 bp, synthetic construct
  source 1..75: mol_type = other DNA
ccgttcatgggggttgaaaaactttgatcctacggcggggttcgacgtcgttacggctgacgtcagcggggaaat

SEQ ID NO: 878427 - DNA, 75 bp, synthetic construct
  source 1..75: mol_type = other DNA
gattaccttggtttgggagaaggttcggcattacccgttggtgtgcctgttccgtggccttccgccactccgcca

SEQ ID NO: 878428 - DNA, 75 bp, synthetic construct
  source 1..75: mol_type = other DNA
tgggtgtgggaagacgatggtgaatttctcggttttgtcagcattatggaggggcgatttctggcagcaatgttc

SEQ ID NO: 878429 - DNA, 75 bp, synthetic construct
  source 1..75: mol_type = other DNA
cactgctgcaaatcgacacaattatccgtaagcgtaaactgaccgccgtatgtagccatcagacgagaattggta

SEQ ID NO: 878430 - DNA, 75 bp, synthetic construct
  source 1..75: mol_type = other DNA
ccgggattattccgctgcacggctgggtgccgcaggcacatgctaacgcctctgcgccagctgccgcgctgtttt

SEQ ID NO: 878431 - DNA, 75 bp, synthetic construct
  source 1..75: mol_type = other DNA
ggcgttgtttgctgtatactcacaagaacaagcaataataaataaagcatcatctactatcgctttaatatcaag

SEQ ID NO: 878432 - DNA, 75 bp, synthetic construct
  source 1..75: mol_type = other DNA
cgattctgaaacgcttgcggcaacgccaaaggcggttaagacagcgtatgaccttgctaacgggaaatacactgc

SEQ ID NO: 878433 - DNA, 75 bp, synthetic construct
  source 1..75: mol_type = other DNA
ggcagcatatgacctcgctaacgggaaatataccgcacaggatgccaccaccgcgcgaaaaggtcttgtccagct

SEQ ID NO: 878434 - DNA, 75 bp, synthetic construct
  source 1..75: mol_type = other DNA
ttctgccgataatatagcgggcgtttattacagacccgttcaaaagtatataaatggcacctggtataatgtagc

SEQ ID NO: 878435 - DNA, 75 bp, synthetic construct
  source 1..75: mol_type = other DNA
catccagtgctcttggtggtaactcgattgttttgggtgataatgacacgggatttaaacaaaatggcgacgggt

SEQ ID NO: 878436 - DNA, 75 bp, synthetic construct
  source 1..75: mol_type = other DNA
tgttgatggcgatgatccggctgtattcagaccaatacaaaaatacatcaatggcacatggtataacgtcgcaca

SEQ ID NO: 878437 - DNA, 75 bp, synthetic construct
  source 1..75: mol_type = other DNA
gaccacgctgatgggctacacgcaatggtgctgttcgtcaccggactgttgccacaccaaaaagatctgcttccg

SEQ ID NO: 878438 - DNA, 75 bp, synthetic construct
  source 1..75: mol_type = other DNA
gtgaggcgctgtaccagacagcccgtcatggcgggtttatggccgtcatcggtgagtccggtgcgggtaaatcca

SEQ ID NO: 878439 - DNA, 75 bp, synthetic construct
  source 1..75: mol_type = other DNA
accacgccggacattcgctacgtgcgtgaggcgctgtaccagacagcccgtcatggtgggtttatggccgtcatc

SEQ ID NO: 878440 - DNA, 75 bp, synthetic construct
  source 1..75: mol_type = other DNA
accactccggacattcgctacgtgcgtgaggcgctgtaccagacagcccgtcatggagggtttatggccgtcatc

SEQ ID NO: 878441 - DNA, 75 bp, synthetic construct
  source 1..75: mol_type = other DNA
aggcggggttcagccacgttctggtgattgaggacgcccacagtctgccccttccgacactgaaacacctcaaac

SEQ ID NO: 878442 - DNA, 75 bp, synthetic construct
  source 1..75: mol_type = other DNA
tcaggacgcccgctttcgccagatgcatcgcgtcctgaaagacagccgccaggcggggttcagccacgttctggt

SEQ ID NO: 878443 - DNA, 75 bp, synthetic construct
  source 1..75: mol_type = other DNA
tatcaaccgcgagaatgcgccggttattgttatcgagccatacatcatcgcgatggaagacaacgatgtgaaagg

SEQ ID NO: 878444 - DNA, 75 bp, synthetic construct
  source 1..75: mol_type = other DNA
tattttgcttggtctggcgggaattttgtatgcggtgatcggcggactgcgcgcaatggcagtggcggactccat

SEQ ID NO: 878445 - DNA, 75 bp, synthetic construct
  source 1..75: mol_type = other DNA
gtgcaacgcacactggcgtcaaaaagcctggcggaagggcaaaagggggcgctgttaacggcggtgctgaaaatg

SEQ ID NO: 878446 - DNA, 75 bp, synthetic construct
  source 1..75: mol_type = other DNA
gtcagcgccattgtgttcctcgtcacgccggatacccgcgtagcgacggcttacatcctcaaccgcgtggaagat

SEQ ID NO: 878447 - DNA, 75 bp, synthetic construct
  source 1..75: mol_type = other DNA
actcaaaaaacaggtgttatttccagcaaccaaaaaagcgtttggtcttttccgtgaccccttcgccgacgaagc

SEQ ID NO: 878448 - DNA, 75 bp, synthetic construct
  source 1..75: mol_type = other DNA
atcataacgcgtggccccgcacctgccccggagaagtgcgccggcgtcttgcgtcctggctggaaagtcagggga

SEQ ID NO: 878449 - DNA, 75 bp, synthetic construct
  source 1..75: mol_type = other DNA
ggtgagtccggtgcgggtaaatccacgctgcgccgcgacctgactgaacgtatcaaccgcgagaatgcgccggta

SEQ ID NO: 878450 - DNA, 75 bp, synthetic construct
  source 1..75: mol_type = other DNA
tcctgatgtttgtggaatacgcacgtaacgccgtacgtatggcagcgctgatgaaacagcgtcaggtgatggttt

SEQ ID NO: 878451 - DNA, 75 bp, synthetic construct
  source 1..75: mol_type = other DNA
ggcctgctcagtgatggtccggtccgtacttccgcagacgcaaaggagtattcccatgatgagtgtcagtccctg

SEQ ID NO: 878452 - DNA, 75 bp, synthetic construct
  source 1..75: mol_type = other DNA
cctctggagcggccagggctttgtcatgcctgatgccctaatggacgaatcattaggcaagccagataacagaat

SEQ ID NO: 878453 - DNA, 75 bp, synthetic construct
  source 1..75: mol_type = other DNA
gaaagggctaattttcgaagtgctactccgaatggattcgcaaaagcagttttcgaagcaaataagggggtgctc

SEQ ID NO: 878454 - DNA, 75 bp, synthetic construct
  source 1..75: mol_type = other DNA
ctttcgtatctgactcgaaatggaactcagtaccagctaaacgtttatttacgagtagcaaagaaatcaatcaag

SEQ ID NO: 878455 - DNA, 75 bp, synthetic construct
  source 1..75: mol_type = other DNA
cacatggttacgctttggggaaattatgaggggatctctcagcacctggcgagtttttgtaggtgacccctctgg

SEQ ID NO: 878456 - DNA, 75 bp, synthetic construct
  source 1..75: mol_type = other DNA
atgctggaaaaatctctggcaacacttttcgcgttgttaattttagcaacgctgataaaccgttttctgatatgg

SEQ ID NO: 878457 - DNA, 75 bp, synthetic construct
  source 1..75: mol_type = other DNA
gaaagcggctcttgcagcttacgaacacggcctggacgaaaacggaaaaatcactggattctacagtcagccagg

SEQ ID NO: 878458 - DNA, 75 bp, synthetic construct
  source 1..75: mol_type = other DNA
aaactggttattgcaaatcaatcctgaggatgaggcctttaaacaggcgagggtgagtgtaaagcgaatgctggt

SEQ ID NO: 878459 - DNA, 75 bp, synthetic construct
  source 1..75: mol_type = other DNA
aaactggttattgcaaatcaaccctgaggatgaggcctttcaacaggcgagagagagtgtaaagcgaatgctggt

SEQ ID NO: 878460 - DNA, 75 bp, synthetic construct
  source 1..75: mol_type = other DNA
gcaacgatgaagtactataatgtgcagcctgaagcctgggctccattaggcggtggaagacataagccatttgaa

SEQ ID NO: 878461 - DNA, 75 bp, synthetic construct
  source 1..75: mol_type = other DNA
tagcgtgtacacagcagcagcaggtttcaccgtgctgacgggggcggtcggcgtgagcggtacgctgtcactggt

SEQ ID NO: 878462 - DNA, 75 bp, synthetic construct
  source 1..75: mol_type = other DNA
gtagcagaagaatcagctgaaggcttgcgcgagcacttctactggcaaaagtcgcgcaaaccggaagcggaccag

SEQ ID NO: 878463 - DNA, 75 bp, synthetic construct
  source 1..75: mol_type = other DNA
ccggcaatcaaggtgttaccgctgtcactggcgaaaggggagttaggtcaccattaccgcttcggctggctggag

SEQ ID NO: 878464 - DNA, 75 bp, synthetic construct
  source 1..75: mol_type = other DNA
tgtcgcgcgggatattccttgcgaaatgtgtgaggacgttccgtgcgccaaagtgtgccccagtggtgcgctgga

SEQ ID NO: 878465 - DNA, 75 bp, synthetic construct
  source 1..75: mol_type = other DNA
attcccgtacgagaatatggaagggaagattgatcgcccggaagagtacgctgatatcgccactaagtgtgtgac

SEQ ID NO: 878466 - DNA, 75 bp, synthetic construct
  source 1..75: mol_type = other DNA
tcgtgtagtacccgccgataacccgcaatacgaactgacggcgtcactctcctggtatgcggatgaaaataatgc

SEQ ID NO: 878467 - DNA, 75 bp, synthetic construct
  source 1..75: mol_type = other DNA
cgggtaatgtcgttgatggcggaaccctgtatctcggcggcactgaagactgggcgctgaacagcggcaacgtga

SEQ ID NO: 878468 - DNA, 75 bp, synthetic construct
  source 1..75: mol_type = other DNA
tgtggcgcgcgatattccttgcgaaatgtgtgaggacgtaccgtgtgccaaagtgtgcccgagtggtgcgctgga

SEQ ID NO: 878469 - DNA, 75 bp, synthetic construct
  source 1..75: mol_type = other DNA
gttcttgttgatgattttgcaggccattgctgcaccgctacctgcgtttttgatcacctttgccaatgcgtcgct

SEQ ID NO: 878470 - DNA, 75 bp, synthetic construct
  source 1..75: mol_type = other DNA
cggcgctgtgcttttttatcgccagagtgatgggccgcgaagtggtggaaaaattaaccggcaaaaccgtgcttg

SEQ ID NO: 878471 - DNA, 75 bp, synthetic construct
  source 1..75: mol_type = other DNA
gtatgccggttattgccttttgtgccttttgatcccgtaagctatgctgccggtctgacttcaattcgttttcgg

SEQ ID NO: 878472 - DNA, 75 bp, synthetic construct
  source 1..75: mol_type = other DNA
atgattatctatttacacggttttgactctaacagtccgggtaaccacgagaaagtcttacaattgcagtttatt

SEQ ID NO: 878473 - DNA, 75 bp, synthetic construct
  source 1..75: mol_type = other DNA
gcatgggcgctgcttcccggcgtccatgattttatcaatcgcagcgttgcggcgtttgccgccgtggaccaacag

SEQ ID NO: 878474 - DNA, 75 bp, synthetic construct
  source 1..75: mol_type = other DNA
cgatttattcagtcttacggcacactggcggcagttgtctcattcttgttgatgattttgcaggccattgccgca

SEQ ID NO: 878475 - DNA, 75 bp, synthetic construct
  source 1..75: mol_type = other DNA
aacggcaaactgcgaccactgggtatccccgcgttgcgggatcgtataagcatccgtgccaaggtggagcacccg

SEQ ID NO: 878476 - DNA, 75 bp, synthetic construct
  source 1..75: mol_type = other DNA
cggcttaattctcgccgggttaagtcatgcggtcagtggtaagggcagcatggcgcatgcgggtacggtagatat

SEQ ID NO: 878477 - DNA, 75 bp, synthetic construct
  source 1..75: mol_type = other DNA
acaacctgacgttacgcgataaagacggcttaattctcgccgggttaagccatgcagtcagcggtaagggcagca

SEQ ID NO: 878478 - DNA, 75 bp, synthetic construct
  source 1..75: mol_type = other DNA
aaccacactcatgcgctccattcttggcgttataccgttattaaaaggcgagatcttactggatagcctccctgt

SEQ ID NO: 878479 - DNA, 75 bp, synthetic construct
  source 1..75: mol_type = other DNA
tgtggataacagctggcccgttgaacagcagaaaaatgtcatgctcggcggtggcgataacgcgctgatgttgcc

SEQ ID NO: 878480 - DNA, 75 bp, synthetic construct
  source 1..75: mol_type = other DNA
acgcgctgcaaccggaaatcgcgccgaatatcggcaaatttttctatccgctggggcgtaacaatgtgcgtacca

SEQ ID NO: 878481 - DNA, 75 bp, synthetic construct
  source 1..75: mol_type = other DNA
ggcatttcggtcaataaaccgaacgccggaaaacagcaggggcaattgctggaaaaagcgcgaaatgaaatgggc

SEQ ID NO: 878482 - DNA, 75 bp, synthetic construct
  source 1..75: mol_type = other DNA
gcacccgtttcgcatcatcaagcggcggttcggcttcgtgaaagccagatacagggggctgctgaaaaacgataa

SEQ ID NO: 878483 - DNA, 75 bp, synthetic construct
  source 1..75: mol_type = other DNA
gcacccgtttcgcatcatcaagcggccgttcggcttcgtgaaagccagatacaggggggtgctgaaaaacgataa

SEQ ID NO: 878484 - DNA, 75 bp, synthetic construct
  source 1..75: mol_type = other DNA
aagccagcatccgtgccagggtggagcacccgtttcgcatcatcaagcggcagttcggcttcgtgaaagccagat

SEQ ID NO: 878485 - DNA, 75 bp, synthetic construct
  source 1..75: mol_type = other DNA
accgaacaaagaagtgatgccagaaaaaggcatccatactctggaacatctgtttgctggttttatgcgtaacca

SEQ ID NO: 878486 - DNA, 75 bp, synthetic construct
  source 1..75: mol_type = other DNA
ctgtaccatctgcttaaccatagcctgttcaaaagcgtactgttccttggggcggggagcgtctggttccgtacc

SEQ ID NO: 878487 - DNA, 75 bp, synthetic construct
  source 1..75: mol_type = other DNA
tcgctacggcaaacacaccatcctggtatgtcggttattgccttttgtccctttcgatccaatcagctatgctgc

SEQ ID NO: 878488 - DNA, 75 bp, synthetic construct
  source 1..75: mol_type = other DNA
ctgggggatgatacttctgccactgacaaactgattgtcacgggtaacacctccggtgataccggcgtggtggtg

SEQ ID NO: 878489 - DNA, 75 bp, synthetic construct
  source 1..75: mol_type = other DNA
cgtgtgcagaaagatgctgctctgcgggcttcagatgaaaaacacctgggcaccgggctgattgacagtgatggt

SEQ ID NO: 878490 - DNA, 75 bp, synthetic construct
  source 1..75: mol_type = other DNA
tcgccgacggtagcggagtcagcagtaacctgagtaaatcgctttccggagaaggttcagtgggtatactgaaca

SEQ ID NO: 878491 - DNA, 75 bp, synthetic construct
  source 1..75: mol_type = other DNA
gtggttgatacccgtaagaatctgcttgagcaggacgatgcgcagaccctggtcacactggtggatgctaaggga

SEQ ID NO: 878492 - DNA, 75 bp, synthetic construct
  source 1..75: mol_type = other DNA
aatgttcgcccatttaaaaatgctttcgctccagaggggattaacaccgcaattgttgttagtaatgggggcatg

SEQ ID NO: 878493 - DNA, 75 bp, synthetic construct
  source 1..75: mol_type = other DNA
gttatttgatgacggcagcacactgacaggtgaagcgactgcaggaaacggcaataacaatgtaacgcttaacgg

SEQ ID NO: 878494 - DNA, 75 bp, synthetic construct
  source 1..75: mol_type = other DNA
gggaacgttctgtacttttccgtattgaagatggggcaaaacaggccggctctctgctgatgaaaacctccggga

SEQ ID NO: 878495 - DNA, 75 bp, synthetic construct
  source 1..75: mol_type = other DNA
aatattcgcccatttaaaaatgctttcgcaccagaggggattaacaccgcaattgttgttagcaatggaggcatg

SEQ ID NO: 878496 - DNA, 75 bp, synthetic construct
  source 1..75: mol_type = other DNA
gatctcagtggtctgagcgcaaccatcaacatagaacaaggcgcccaggtaattagcgagacgaccaaccttggc

SEQ ID NO: 878497 - DNA, 75 bp, synthetic construct
  source 1..75: mol_type = other DNA
cattcagcttgatagcggtagtgtactaacggtcagcggcacgcagcgtcagccgggggatgataatggtggcat

SEQ ID NO: 878498 - DNA, 75 bp, synthetic construct
  source 1..75: mol_type = other DNA
attaatatccggccatataaagttgcaacagttaatcaggatggcatcaacacggcaatgctagtggctggtggc

SEQ ID NO: 878499 - DNA, 75 bp, synthetic construct
  source 1..75: mol_type = other DNA
acgctggatatccgggggaaaggcacaattcaggtcaccatgccagatgaagtgattaatgatattccggctgtt

SEQ ID NO: 878500 - DNA, 75 bp, synthetic construct
  source 1..75: mol_type = other DNA
atagacgctgtggggcaggttgtcacactgtccaacggtggtaataactacaccggtgatacgctggtgcgcagc

SEQ ID NO: 878501 - DNA, 75 bp, synthetic construct
  source 1..75: mol_type = other DNA
tggcgttgcgagcgcccgcaagagtggtttttccggatgcgttagaccagcgtgtgctgaaagctgcgcaatatc

SEQ ID NO: 878502 - DNA, 75 bp, synthetic construct
  source 1..75: mol_type = other DNA
tgtatcaacaaagtctggcgacgcccgttcttatcgccaatccgtttgaacttcgccagtttgcgctcagccacg

SEQ ID NO: 878503 - DNA, 75 bp, synthetic construct
  source 1..75: mol_type = other DNA
tccgtcgctggaggcaggaaatattggctacaaaatcgcacaacgacttggcggatatcgtgccgtcgggccatt

SEQ ID NO: 878504 - DNA, 75 bp, synthetic construct
  source 1..75: mol_type = other DNA
tgtttattctgtttgccctgaccgtggtgatttttatggcgaaaaaaatatggcttgaacgccagaagaggaatg

SEQ ID NO: 878505 - DNA, 75 bp, synthetic construct
  source 1..75: mol_type = other DNA
atgagtttatcaatcgcagcgttgcggcgtttgccgccgtggaccaacagggtatagaacgctttattcagtctt

SEQ ID NO: 878506 - DNA, 75 bp, synthetic construct
  source 1..75: mol_type = other DNA
ttcctgatgctgccacagtacagcggtccagcattgggctttgccgattgcagcgtagtgccacagccgacggcg

SEQ ID NO: 878507 - DNA, 75 bp, synthetic construct
  source 1..75: mol_type = other DNA
gcgggtacgctcaatgctgatcatactggcgcgctggggaccggtgatgtggcaaactacgctacgctgaatctg

SEQ ID NO: 878508 - DNA, 75 bp, synthetic construct
  source 1..75: mol_type = other DNA
gtggcggatgcatcagcgctgggggcgggtaatattatcaacggcggaaccctgacgctgggcggtgcagaggac

SEQ ID NO: 878509 - DNA, 75 bp, synthetic construct
  source 1..75: mol_type = other DNA
tacgatctgaacggaatgagtcagaacgttgattacgtgattgtgaatgaggggagtacgcttgatctggacggt

SEQ ID NO: 878510 - DNA, 75 bp, synthetic construct
  source 1..75: mol_type = other DNA
tccacggcgaatgtgttacgcgccggattacgcattattggcttgcagccatgctgcaaaacgctctcctccatt

SEQ ID NO: 878511 - DNA, 75 bp, synthetic construct
  source 1..75: mol_type = other DNA
atgattattgaacgttgtcgtgaactggcgttgcgagcgcccgccagagtggtttttccggatgcgttagatcaa

SEQ ID NO: 878512 - DNA, 75 bp, synthetic construct
  source 1..75: mol_type = other DNA
gtggataatgtgctggaactggaaagtggcaatgcttacattctgaacggtgagagtcagagctttgattctgta

SEQ ID NO: 878513 - DNA, 75 bp, synthetic construct
  source 1..75: mol_type = other DNA
gttgcagcgattgtcgggtcatttttcactggtggtgcaacactggcggcatggggcgcagccctgagtgccgga

SEQ ID NO: 878514 - DNA, 75 bp, synthetic construct
  source 1..75: mol_type = other DNA
gtcctgtgcacaggcaggcgatatcctgctgtgctgctttggcgcatcggtgccgaatcatgccgccatttactg

SEQ ID NO: 878515 - DNA, 75 bp, synthetic construct
  source 1..75: mol_type = other DNA
tgccttacggtgaaatgctggttggctcccggcgaatctcccaggacatcagtacccgtgatgaaggcggtgacg

SEQ ID NO: 878516 - DNA, 75 bp, synthetic construct
  source 1..75: mol_type = other DNA
acgatgctgttttcactgggtgccagcatgatactgggtggtgtggcacagatgctggccccgaagccaaaaaca

SEQ ID NO: 878517 - DNA, 75 bp, synthetic construct
  source 1..75: mol_type = other DNA
ggcaccccggagggcgaacggtaccagccctgcgtgaatatctccgcagagccggaggcgtattttcgtattgcg

SEQ ID NO: 878518 - DNA, 75 bp, synthetic construct
  source 1..75: mol_type = other DNA
agggaacggtcatccacattgtgccgcgactggccggcgccggaaagggcggactgcagattgtgctgggggctg

SEQ ID NO: 878519 - DNA, 75 bp, synthetic construct
  source 1..75: mol_type = other DNA
agggaacggtcatccacattgtgccgcgactggccggcgccggaaagggtggactgcagattgtgctgggggccg

SEQ ID NO: 878520 - DNA, 75 bp, synthetic construct
  source 1..75: mol_type = other DNA
agggaacggtcatccacattgtgccgcgactggccggtgccggaaagggcggactgcagattgtgctgggggccg

SEQ ID NO: 878521 - DNA, 75 bp, synthetic construct
  source 1..75: mol_type = other DNA
atggctccggaggactggctgcaggcagaaatgcagggtgagattgtggcactggtccacagtcatccctgtggt

SEQ ID NO: 878522 - DNA, 75 bp, synthetic construct
  source 1..75: mol_type = other DNA
atggctccggaggactggctgcgggcagagatgcagggtgagattgtggcgctggtccacagtcaccccggtgct

SEQ ID NO: 878523 - DNA, 75 bp, synthetic construct
  source 1..75: mol_type = other DNA
ctttcgccgtcagatgaacgaaggctggtaccagatacgcattgccggtgaggatacggcaccggaggcggtgta

SEQ ID NO: 878524 - DNA, 75 bp, synthetic construct
  source 1..75: mol_type = other DNA
acggggaaatgctggttggctcccgccgtatatcccaggacatcagtacccgtgatgaaggcgggggcggaaagg

SEQ ID NO: 878525 - DNA, 75 bp, synthetic construct
  source 1..75: mol_type = other DNA
agaacaccacgctggcagctgttgcggggcggattgccagaaagcaccgactgaaactggtgggcagcattgagt

SEQ ID NO: 878526 - DNA, 75 bp, synthetic construct
  source 1..75: mol_type = other DNA
aagacgtatcagcgttaaccggcgtcagcgatgtgctgacgccggtgttcactctgtggtatctgcagaaaaata

SEQ ID NO: 878527 - DNA, 75 bp, synthetic construct
  source 1..75: mol_type = other DNA
gccggtgagtatggttatgccgtgaaagtggtcagtgaccagctgattttttctcatctgacctcgttgcgcagt

SEQ ID NO: 878528 - DNA, 75 bp, synthetic construct
  source 1..75: mol_type = other DNA
aggcgaagaaaggtaaaaaaatcggcaaaacccggatgctgaccatctataaaccggacggcagcacgtccacag

SEQ ID NO: 878529 - DNA, 75 bp, synthetic construct
  source 1..75: mol_type = other DNA
cgcagctgcaacaggcgtggtacgaacatatcccgctaagtgaaaaaatgggcgtgcgcattcagcaatataccg

SEQ ID NO: 878530 - DNA, 75 bp, synthetic construct
  source 1..75: mol_type = other DNA
atcaaaagcgagtccgataccattgaggtggagctggacgacaccgatggccgctggctggataagtggtatccg

SEQ ID NO: 878531 - DNA, 75 bp, synthetic construct
  source 1..75: mol_type = other DNA
cggccaggcacaaaacgccggtatggccttcgtcagtctgaaaccgtgggaagagcgtaatagtgatgaaaacag

SEQ ID NO: 878532 - DNA, 75 bp, synthetic construct
  source 1..75: mol_type = other DNA
tcgaattgcttttgtatacagttgaggaagagcaattggttagttctgtaataccgatagtcaataatattttaa

SEQ ID NO: 878533 - DNA, 75 bp, synthetic construct
  source 1..75: mol_type = other DNA
ggtgcgattaatacccatcgtggtcgttttgaaattgccgatggcggcacgttgtttctcgatgaaattggcgat

SEQ ID NO: 878534 - DNA, 75 bp, synthetic construct
  source 1..75: mol_type = other DNA
ctcgcagggacgccgcaactgaccgccggtaataaaattgaattatccggtttcgggcagttatccggggactgg

SEQ ID NO: 878535 - DNA, 75 bp, synthetic construct
  source 1..75: mol_type = other DNA
attttctgtatcaggtatgacgattgtgccgagccgtgaagctgatgaagacttttttagtgactcagatttaga

SEQ ID NO: 878536 - DNA, 75 bp, synthetic construct
  source 1..75: mol_type = other DNA
acggttttgtcattccattcaatatgccagccattgttgaactgggcacggcaacgggtttcgactttgagttaa

SEQ ID NO: 878537 - DNA, 75 bp, synthetic construct
  source 1..75: mol_type = other DNA
gggcgctggtcatgcagatcccggcgtttcgtcagaagctgagctacggctggtatcaggtacgcattgccgggc

SEQ ID NO: 878538 - DNA, 75 bp, synthetic construct
  source 1..75: mol_type = other DNA
aattccgctgcgttccgcacctgaccggacggcgctttgaacacggggtgacggactgttacaccctgttccggg

SEQ ID NO: 878539 - DNA, 75 bp, synthetic construct
  source 1..75: mol_type = other DNA
gcgggtgtgagatgcgcggcatggtggctaattttggcggtttcctttccattaataaactttcgcagtaaatcc

SEQ ID NO: 878540 - DNA, 75 bp, synthetic construct
  source 1..75: mol_type = other DNA
gagtgccctgccctggtggctggtctgccggggggaaattcataaattccgctgtgtgccgcacctgaccgggcg

SEQ ID NO: 878541 - DNA, 75 bp, synthetic construct
  source 1..75: mol_type = other DNA
cggctatcgcctgcctgggcggttattccgtgtggctggctgttaacggcatgggcggcctggacgcattaaaag

SEQ ID NO: 878542 - DNA, 75 bp, synthetic construct
  source 1..75: mol_type = other DNA
attgtggtgctggggctgaatatctggaccaccaacgataacgcactctatgcgtcgggtttaggtttcgccaac

SEQ ID NO: 878543 - DNA, 75 bp, synthetic construct
  source 1..75: mol_type = other DNA
taagcggcgatctcgaccgtctggcgcgcggacgtaaagcacgggtgcagatgcaggtcgaaatctttggcgacg

SEQ ID NO: 878544 - DNA, 75 bp, synthetic construct
  source 1..75: mol_type = other DNA
ccgggatgcttaccatctggcggggattgagatgccggattttcatcgcggggatgactggtggcgtcacggtca

SEQ ID NO: 878545 - DNA, 75 bp, synthetic construct
  source 1..75: mol_type = other DNA
attccgaaaaatggcaacgacgaacgcattctgtctggcgtcaccgccactggcacgcatctgccttcacgggga

SEQ ID NO: 878546 - DNA, 75 bp, synthetic construct
  source 1..75: mol_type = other DNA
acgcacgcactccctctggcggcaccgggcatggtccgcatctgcctttacggggatttgcaacgatttggccgc

SEQ ID NO: 878547 - DNA, 75 bp, synthetic construct
  source 1..75: mol_type = other DNA
atgggcggcctggacgcattaaaagcggtcgttcccgcacaaccgttagatttcaatgtcgcgctggcgctggtt

SEQ ID NO: 878548 - DNA, 75 bp, synthetic construct
  source 1..75: mol_type = other DNA
ggtgacggactgttacacgctgttccgggatgcataccatctggcggggattgagatgccggattttcaccgcga

SEQ ID NO: 878549 - DNA, 75 bp, synthetic construct
  source 1..75: mol_type = other DNA
gccgtggtggctggtctgccggggggcgattcacaagttccgctgtgtgccacatcttaccgggcgacgctttga

SEQ ID NO: 878550 - DNA, 75 bp, synthetic construct
  source 1..75: mol_type = other DNA
ccgatgccggtgccttacggtgaaatgctggttggctcccggcgaatctcccaggacatcagtacccgtgatgaa

SEQ ID NO: 878551 - DNA, 75 bp, synthetic construct
  source 1..75: mol_type = other DNA
tacctggacaatatggagggaacgggcttttaccgggtgcccctgtcctctgcacaggcgggcgatattctgctg

SEQ ID NO: 878552 - DNA, 75 bp, synthetic construct
  source 1..75: mol_type = other DNA
atgctctatagcaatatattggcgcacgcccggcgatgtgcgccagcggagtcgtgcggcttcgtggtgagaacg

SEQ ID NO: 878553 - DNA, 75 bp, synthetic construct
  source 1..75: mol_type = other DNA
gccggaggagtattttcgtatcgcaccggaagactggctgcgggcagagatgcagggggagattgtggctctggt

SEQ ID NO: 878554 - DNA, 75 bp, synthetic construct
  source 1..75: mol_type = other DNA
ctggatatcaatttgctgattgccgtttccggtttactgatgaccgttaccgtcttctttggtatttcggcgctg

SEQ ID NO: 878555 - DNA, 75 bp, synthetic construct
  source 1..75: mol_type = other DNA
aaaaccggcctgaccactcatcttcttgctcgcttctcgtttggtgttaaaggctcatggctgccttcactgctg

SEQ ID NO: 878556 - DNA, 75 bp, synthetic construct
  source 1..75: mol_type = other DNA
tatctggataatctggaggccacagggctgtatcaggtgccgttgtcatcagcacaaccgggcgatgtgctgctg

SEQ ID NO: 878557 - DNA, 75 bp, synthetic construct
  source 1..75: mol_type = other DNA
gccggaggtgtattttcgtatcgcaccggaagactggctgcgggcagagatgcagggggagattgtggcgctggt

SEQ ID NO: 878558 - DNA, 75 bp, synthetic construct
  source 1..75: mol_type = other DNA
gccggaggagtattttcgtatcgctccggaagactggctgcgggcagagatgcagggggagattgtggcgctggt

SEQ ID NO: 878559 - DNA, 75 bp, synthetic construct
  source 1..75: mol_type = other DNA
cctctggggtttgccggggttattcgggtacaggataaagctttgctggaaattggcagtggcgctacgctaaca

SEQ ID NO: 878560 - DNA, 75 bp, synthetic construct
  source 1..75: mol_type = other DNA
gctttgcgttctgatccggatataataatgccaggggaagccagggatgctgaagtgataaaccttcttttcact

SEQ ID NO: 878561 - DNA, 75 bp, synthetic construct
  source 1..75: mol_type = other DNA
cagatctgatgtttgaacgatttaagcgcaatgtatctgaaatcgtcacgggagatgggggggagcttgagctta

SEQ ID NO: 878562 - DNA, 75 bp, synthetic construct
  source 1..75: mol_type = other DNA
ccctctaaatcgaggattaatattcctgaatctattcaggctatacgtcttcaatttaatcctatgggcaatggt

SEQ ID NO: 878563 - DNA, 75 bp, synthetic construct
  source 1..75: mol_type = other DNA
tctatacgttttgccaatgaaagtggatgtgattgttgttatgctggatatacaggacgtacagttattgcagag

SEQ ID NO: 878564 - DNA, 75 bp, synthetic construct
  source 1..75: mol_type = other DNA
agtttgaagctttatcgtcgcgttcagataatcttccaatggagataatggctggtaggttaataacagaatgtg

SEQ ID NO: 878565 - DNA, 75 bp, synthetic construct
  source 1..75: mol_type = other DNA
gcacaacttcctgttactaacgttgagactgaacaacagaggggtgaagaataccgtaaagctataacagcagca

SEQ ID NO: 878566 - DNA, 75 bp, synthetic construct
  source 1..75: mol_type = other DNA
caaaaatggccggaagagaacggtgccaatttcacaggcggtttgtgaggcgatcagaaccagagaaacaggcaa

SEQ ID NO: 878567 - DNA, 75 bp, synthetic construct
  source 1..75: mol_type = other DNA
ctcagaaaacgccagcaaaagaaatcgatctcgccaaaaagcggttagcggaggtacttaatgaaactggtaagc

SEQ ID NO: 878568 - DNA, 75 bp, synthetic construct
  source 1..75: mol_type = other DNA
ccctggctgcccgccaacgccagccgccacgctgtacggctttgcaatggcgctcggcctgctggagcagaaaat

SEQ ID NO: 878569 - DNA, 75 bp, synthetic construct
  source 1..75: mol_type = other DNA
accggcgcggtcacccgtgcaatgcgatcccctgcgctgcgtgcgtggcagtccgcgccggacccgaaaatctgt

SEQ ID NO: 878570 - DNA, 75 bp, synthetic construct
  source 1..75: mol_type = other DNA
ctgatatttatattcgcaaagatggagatatgcaattattacggcagatagaagccgaacttgctcattcaatac

SEQ ID NO: 878571 - DNA, 75 bp, synthetic construct
  source 1..75: mol_type = other DNA
cgacactaaaaaatatgcttgaacttctttatgaagagaagaagaagaaagttaatattatcagtatcgaggatc

SEQ ID NO: 878572 - DNA, 75 bp, synthetic construct
  source 1..75: mol_type = other DNA
ttggagtcattacctgctgcgggcgtagttgaagggaaactgattccagaattgaagaacaagttaaaatctgtg

SEQ ID NO: 878573 - DNA, 75 bp, synthetic construct
  source 1..75: mol_type = other DNA
cgccatactgatggggctgatgagattgaagttgaagataatattcactgcgctatagcagaggggtatcagtat

SEQ ID NO: 878574 - DNA, 75 bp, synthetic construct
  source 1..75: mol_type = other DNA
agtaagttcgagcaattttggtattcaggaatacacaccagtcaatgaggcactgcaagacgtttttacaggctg

SEQ ID NO: 878575 - DNA, 75 bp, synthetic construct
  source 1..75: mol_type = other DNA
actgcgccggctgacgcggcgcggcataaacgctgcctgtggtcagtgtcccgcgtccggcggacacgggacggg

SEQ ID NO: 878576 - DNA, 75 bp, synthetic construct
  source 1..75: mol_type = other DNA
agtggattgcacaggttaatacagagaaaaacattctcagtttgcttctgcatccacgtcttggtgcggtaatac

SEQ ID NO: 878577 - DNA, 75 bp, synthetic construct
  source 1..75: mol_type = other DNA
tctaatcttcaaagtaagataacacattatactactatcactattgccctcacaggggcagtggtttatctataa

SEQ ID NO: 878578 - DNA, 75 bp, synthetic construct
  source 1..75: mol_type = other DNA
aagccagacgtaaggtcatcaaagagacaatccttagctggcttttggttgacccttcatctaccgcgcacgaat

SEQ ID NO: 878579 - DNA, 75 bp, synthetic construct
  source 1..75: mol_type = other DNA
cttcctctgaagccagacctaaacgggcatatagaaaaggtgcaccgttaagcgttaatgagcgaaagaggttgt

SEQ ID NO: 878580 - DNA, 75 bp, synthetic construct
  source 1..75: mol_type = other DNA
ctatgcttctccggcagtcgctgaagcactgaaaggtgaagaatctcactcgctggcggaagtggaaatttttgt

SEQ ID NO: 878581 - DNA, 75 bp, synthetic construct
  source 1..75: mol_type = other DNA
cgtcgtttcacaaagtctttttaaggaagtttggctgcacgccgggtgaataccgcagacgcgtgaaagctttag

SEQ ID NO: 878582 - DNA, 75 bp, synthetic construct
  source 1..75: mol_type = other DNA
gtgatgttaactgcctgccagaacgttactccactacttcaggttgcggagcaccgcgaagccggccgctttact

SEQ ID NO: 878583 - DNA, 75 bp, synthetic construct
  source 1..75: mol_type = other DNA
aataaaacatttgattgattggaagaaagaagcttttaatgactttatttgcgaaatatcacatgatgaagataa

SEQ ID NO: 878584 - DNA, 75 bp, synthetic construct
  source 1..75: mol_type = other DNA
gttttggttggtgatgacttgctggtcgcgcttttgtgcctgagcactggcggaagatggacggaagttgccacg

SEQ ID NO: 878585 - DNA, 75 bp, synthetic construct
  source 1..75: mol_type = other DNA
ttggtacaagccccagtttaagaaggaatatcagacactccactatgagaatgctaggtattacgttcttgcacg

SEQ ID NO: 878586 - DNA, 75 bp, synthetic construct
  source 1..75: mol_type = other DNA
tttttctggcaatattgttgcttcttgttcctcctgctctggagtttccagtaattcatcggcacattacgccag

SEQ ID NO: 878587 - DNA, 75 bp, synthetic construct
  source 1..75: mol_type = other DNA
cttgacgggcgcgggacgtggatttgcagccagtgcggcaatggtgatggtctggatctggttaagctcatgacc

SEQ ID NO: 878588 - DNA, 75 bp, synthetic construct
  source 1..75: mol_type = other DNA
atattgggctggataaagccgcgtttcttcatgcatccgatatcatgccgcacactgaatgtgtggcgggtgaag

SEQ ID NO: 878589 - DNA, 75 bp, synthetic construct
  source 1..75: mol_type = other DNA
ggcccacatagatgttaagagcaaagatagccagcttactcatacagaacttttcgctgtgaagcggcaactgga

SEQ ID NO: 878590 - DNA, 75 bp, synthetic construct
  source 1..75: mol_type = other DNA
atttatgctataaaaaaagaaaagataataatgaaattagatttgttactgttggctctttgaatcaacgaaaga

SEQ ID NO: 878591 - DNA, 75 bp, synthetic construct
  source 1..75: mol_type = other DNA
caaggcgctggccggaaaccccggcaagcgagccctgaacaaagatgaacctgtttttacgcccatcaaaggtgt

SEQ ID NO: 878592 - DNA, 75 bp, synthetic construct
  source 1..75: mol_type = other DNA
actgacctcgcagtgcttgagcggtggtgcgtggcctatgagttctggcgacgtgccgtgaaaaatattgccaga

SEQ ID NO: 878593 - DNA, 75 bp, synthetic construct
  source 1..75: mol_type = other DNA
ctcaactgacagcaggcaacaaaattgaactggtgggctttggacaattatccggtccatggctgataatcactg

SEQ ID NO: 878594 - DNA, 75 bp, synthetic construct
  source 1..75: mol_type = other DNA
ctgcggtcagggcctgctgtgcgtgactgacctcgcggtgcttgagcggtggtgcgtggcctacgagttctggcg

SEQ ID NO: 878595 - DNA, 75 bp, synthetic construct
  source 1..75: mol_type = other DNA
tgctcggactcgaccccggcagccgccagcgtctgattggcctggcggggcagaagaaagccactaacccgtttc

SEQ ID NO: 878596 - DNA, 75 bp, synthetic construct
  source 1..75: mol_type = other DNA
gtcaaaaatccggagctgaccgccaagaaagaacaggagtccgagatgagcagcacgggggcaatgctcggactc

SEQ ID NO: 878597 - DNA, 75 bp, synthetic construct
  source 1..75: mol_type = other DNA
tcagcgttcggttaaacgaagaagaattatctattctcgatagtaaaagaggcccttataaaaaaggggaatggc

SEQ ID NO: 878598 - DNA, 75 bp, synthetic construct
  source 1..75: mol_type = other DNA
ccagggctggctggcctcgctctggcaatcacttggtctggagtggaccttttcgccctacggcctgcaaggcat

SEQ ID NO: 878599 - DNA, 75 bp, synthetic construct
  source 1..75: mol_type = other DNA
gtcgccgtctgagcgatggggacgtgatcctctctaaaaaggatgagggcgcgccagagaaacaatcattaccta

SEQ ID NO: 878600 - DNA, 75 bp, synthetic construct
  source 1..75: mol_type = other DNA
gcgcttaaagcgcaaattgccgcctggtataaggcacttcaggaacagatccccgactttattccccgtgcgccg

SEQ ID NO: 878601 - DNA, 75 bp, synthetic construct
  source 1..75: mol_type = other DNA
gaatggaaaatcccgcacggttcctgtttctgatacggtgctttcgttgataaaaacccgaaaaaccgggctatt

SEQ ID NO: 878602 - DNA, 75 bp, synthetic construct
  source 1..75: mol_type = other DNA
actgctcaacaacactatcggcctgccacaatctgctgacggcattgtgattttcaccaatgcgttaatggcaat

SEQ ID NO: 878603 - DNA, 75 bp, synthetic construct
  source 1..75: mol_type = other DNA
cattgcgcctggcaccacgctgctgcaaggttggcgcgacccggacgatcgtctgcatagccgcatttgcgacac

SEQ ID NO: 878604 - DNA, 75 bp, synthetic construct
  source 1..75: mol_type = other DNA
taaaaaagagaaggatattgagactaaaagcattacaagtttgagaactcactgtattagtgtaaggttgaatga

SEQ ID NO: 878605 - DNA, 75 bp, synthetic construct
  source 1..75: mol_type = other DNA
gcttctctggataagcttcccttgtccattcctgccatcaacataaaagcatggaaatcattagctgaaatatca

SEQ ID NO: 878606 - DNA, 75 bp, synthetic construct
  source 1..75: mol_type = other DNA
atacaaataattttaagcctattaacgataataaatctcaatcattgcgaatacactgtgtaagtgtacgattaa

SEQ ID NO: 878607 - DNA, 75 bp, synthetic construct
  source 1..75: mol_type = other DNA
ggggcgaagtggttatctacgacaaacgcttgctgaccaaaaattatggcaagcgactactggatgcattaccgg

SEQ ID NO: 878608 - DNA, 75 bp, synthetic construct
  source 1..75: mol_type = other DNA
tgaaccgcgcgttggggatgttcgaggcgcaaagcaaactctggcggctggcgtctctggcgcaatcttccggtg

SEQ ID NO: 878609 - DNA, 75 bp, synthetic construct
  source 1..75: mol_type = other DNA
ccaaaacgctggccggagaagaagggcggcatctggcgattgaagcccccaccggcgttgggaaaacgctctcct

SEQ ID NO: 878610 - DNA, 75 bp, synthetic construct
  source 1..75: mol_type = other DNA
aatcccgcagagttgcggaactgcgggagcgttacgaagattgagtgtaaggaattattcttatgtcaccgacaa

SEQ ID NO: 878611 - DNA, 75 bp, synthetic construct
  source 1..75: mol_type = other DNA
gggcggcagggtaaaaagaataaaaaatcccgcagagttgcggaactgcgggagcgttacgaagattgagtgtaa

SEQ ID NO: 878612 - DNA, 75 bp, synthetic construct
  source 1..75: mol_type = other DNA
ccgggattccgccgtcagatgaacgaaggctggtaccagatacgtattgccggtgaagacatggcaccggaggcg

SEQ ID NO: 878613 - DNA, 75 bp, synthetic construct
  source 1..75: mol_type = other DNA
gctgatgctgcgcgaacgccacctcggcggaacgattattctggcggatgcgcatatccgctatagcaaaccgat

SEQ ID NO: 878614 - DNA, 75 bp, synthetic construct
  source 1..75: mol_type = other DNA
ggcgctgtcgttacaggtgcccggattccgccgtcagatgaacgaaggctggtaccagatacgtattgccggtga

SEQ ID NO: 878615 - DNA, 75 bp, synthetic construct
  source 1..75: mol_type = other DNA
ggttaatgcttatgctgaaaaggtgaagatgatttacattgatcctccatacaatacaggtaaggatcgattcgc

SEQ ID NO: 878616 - DNA, 75 bp, synthetic construct
  source 1..75: mol_type = other DNA
atcgtcaaatcatcggatgttgaactctccaaagaatcatacagcctgaactggcttggtaaatcctatgcccgt

SEQ ID NO: 878617 - DNA, 75 bp, synthetic construct
  source 1..75: mol_type = other DNA
ctgccagcggtctctctcggcctgaaattcgccccggcgatattttccgggataaatacggcagtcagataacgg

SEQ ID NO: 878618 - DNA, 75 bp, synthetic construct
  source 1..75: mol_type = other DNA
cggccggggcatcaatggcgttatgggggtcagccctggcagccggtggtttttctgccaccacgatgctgtttt

SEQ ID NO: 878619 - DNA, 75 bp, synthetic construct
  source 1..75: mol_type = other DNA
atatcaataaatatgataatagtgatattagggattgttttgtggagatgcttcaggataaaaatgaggaagtcc

SEQ ID NO: 878620 - DNA, 75 bp, synthetic construct
  source 1..75: mol_type = other DNA
atgagcatccgtctgtcagcattgacgagtacgaacaggcttataagaccgatcctaacgaaagccatttttaca

SEQ ID NO: 878621 - DNA, 75 bp, synthetic construct
  source 1..75: mol_type = other DNA
gtcccgtgcacaggcaggcgatattctgctgtgctgctttggcgcatcggtgccgaatcatgccgccatttactg

SEQ ID NO: 878622 - DNA, 75 bp, synthetic construct
  source 1..75: mol_type = other DNA
caacggataacggtaaacagaacacgtatttttcgtcactggataacatgattgcccaggggaactcgatgccgg

SEQ ID NO: 878623 - DNA, 75 bp, synthetic construct
  source 1..75: mol_type = other DNA
gagggggcggtcatccatattgtgccgcgactggccggagccggaaagggcggactgcagattgtgctgggggca

SEQ ID NO: 878624 - DNA, 75 bp, synthetic construct
  source 1..75: mol_type = other DNA
gccgtggtggctggtctgtcggggggctctccataaattccgctgcgtgccacatctgaccggaaggcgctttga

SEQ ID NO: 878625 - DNA, 75 bp, synthetic construct
  source 1..75: mol_type = other DNA
ctggatcacttcgccgctcacggctgtaaagtgtctgaccacgcgctggacgtggtgatgtttgctgaagcgaac

SEQ ID NO: 878626 - DNA, 75 bp, synthetic construct
  source 1..75: mol_type = other DNA
tatgacatctggctgaaaggcgatcactacaaatggcgcgctatgcgtaccaacggtgtggctgagcgtctgtgt

SEQ ID NO: 878627 - DNA, 75 bp, synthetic construct
  source 1..75: mol_type = other DNA
cgcagctgcaacaggcgtggtatgaacacatcccgctgagtgaaaaaatgggcgtgcgcattcagcaatataccg

SEQ ID NO: 878628 - DNA, 75 bp, synthetic construct
  source 1..75: mol_type = other DNA
ataccatctggcggggataacgctgccggattttgtgcgtgaggatgactggtggcgcaacggtcagaaccttta

SEQ ID NO: 878629 - DNA, 75 bp, synthetic construct
  source 1..75: mol_type = other DNA
agtcctgcgtgaatatctccgcagagccggaggcgtattttcgtattgcgccggaagactggctgcaggcacaga

SEQ ID NO: 878630 - DNA, 75 bp, synthetic construct
  source 1..75: mol_type = other DNA
cacctaccgtcgtgaaggctacgaatatgattgcgtgatgcctgtttatcagtttcggcgtgatttttctctggt

SEQ ID NO: 878631 - DNA, 75 bp, synthetic construct
  source 1..75: mol_type = other DNA
cccccggaccgaaggtgccaaaagcggtggtgtgtttcaggcggtgctgggagcagcactggttgttgcctccat

SEQ ID NO: 878632 - DNA, 75 bp, synthetic construct
  source 1..75: mol_type = other DNA
atggattaaaggaccaaagcagatgaaggcgctgaataagattttcggctcgttgtttatgctggtgggagcgct

SEQ ID NO: 878633 - DNA, 75 bp, synthetic construct
  source 1..75: mol_type = other DNA
agaggtattctgaaaaatggcaacgacgaacgcattctgtctggcgtcaccgccactggcacgcatctgccttca

SEQ ID NO: 878634 - DNA, 75 bp, synthetic construct
  source 1..75: mol_type = other DNA
gcaggtcctggtatttggtttcgacggtatcgaatacggtctcaagtgggatgacagcctgcagaccaacgagtc

SEQ ID NO: 878635 - DNA, 75 bp, synthetic construct
  source 1..75: mol_type = other DNA
cctgtattcactaaacctcgatggatggggcgagattgtcagcgagtggctgaaagcgaaaggcgacccgctcaa

SEQ ID NO: 878636 - DNA, 75 bp, synthetic construct
  source 1..75: mol_type = other DNA
aaagtctatttgtcgttaatcggtactgatacggcaaaagatttgctcgcaatgcgcctgccgctggaacccgat

SEQ ID NO: 878637 - DNA, 75 bp, synthetic construct
  source 1..75: mol_type = other DNA
ctcaacaaacatttacccgagcgttcaaaaagcagtttgcccagactcccgcgctttaccgtcgttctccagaat

SEQ ID NO: 878638 - DNA, 75 bp, synthetic construct
  source 1..75: mol_type = other DNA
gagtttagcgcagataatgagatttatgacaggggaaagccacgatgagaagaggcttaaatcatcattaaaagc

SEQ ID NO: 878639 - DNA, 75 bp, synthetic construct
  source 1..75: mol_type = other DNA
tgctattggtggcagtgttggtggtccatggggagcagcaattggtgcaggtgtaggtgctctcggctctcttct

SEQ ID NO: 878640 - DNA, 75 bp, synthetic construct
  source 1..75: mol_type = other DNA
cacaaattccgctgcgttccgcacctgaccggacggcgctttgcgcacggggtgacggactgttacacgctgttc

SEQ ID NO: 878641 - DNA, 75 bp, synthetic construct
  source 1..75: mol_type = other DNA
aaaaaatgaggtgcttgcagcagatgaaatgaaagaaactattcttgaattagctgcgcgcctgaactgcgcttc

SEQ ID NO: 878642 - DNA, 75 bp, synthetic construct
  source 1..75: mol_type = other DNA
gagacgctcgctgagcaacggaaaaaatcacaaaacaaactgtctctcgaggagatggccagaatgctcggaggg

SEQ ID NO: 878643 - DNA, 75 bp, synthetic construct
  source 1..75: mol_type = other DNA
ttcacaaattccgctgcgtgccgcacctgacgggacggcgctttgagcacggggtgacggactgttacaccctgt

SEQ ID NO: 878644 - DNA, 75 bp, synthetic construct
  source 1..75: mol_type = other DNA
gtgccctgtcgctgcagatgccggggtttcgccgtcagatgaacgaaggctggtaccagatacgtattgccgggc

SEQ ID NO: 878645 - DNA, 75 bp, synthetic construct
  source 1..75: mol_type = other DNA
gggttcagccctggcagccggtggtttttctgccaccacgatgctgttttcactgggtgccagcatgattctggg

SEQ ID NO: 878646 - DNA, 75 bp, synthetic construct
  source 1..75: mol_type = other DNA
gcccgccttcacgaacaactgggtgagggggcggtcatccatattgtgccgcgactggccggtgcagggaaaggc

SEQ ID NO: 878647 - DNA, 75 bp, synthetic construct
  source 1..75: mol_type = other DNA
cagcaacattatgttttccatgggggcagcaatggcgctggggggtgtcgcacaactgctggccccgaaggcaaa

SEQ ID NO: 878648 - DNA, 75 bp, synthetic construct
  source 1..75: mol_type = other DNA
cccgtgaagacgcggtggagtttttcgccaagctggggtttgttaatcagggagaaatcaccacgccaaccacca

SEQ ID NO: 878649 - DNA, 75 bp, synthetic construct
  source 1..75: mol_type = other DNA
atggacaagaagctgaaaatcgccgatatcgccgcacgtaccggattatcgccgagtacggtttcgcgggtgctg

SEQ ID NO: 878650 - DNA, 75 bp, synthetic construct
  source 1..75: mol_type = other DNA
gagggaacggttatccatattgtgccgcgactgaccggggccgaaaagggtggactgcagattgtgctgggggcg

SEQ ID NO: 878651 - DNA, 75 bp, synthetic construct
  source 1..75: mol_type = other DNA
actagtgtatggctgaatcgcgcagaagaagagggaagagttatccgattgggcgaaggtcattatcagttcagg

SEQ ID NO: 878652 - DNA, 75 bp, synthetic construct
  source 1..75: mol_type = other DNA
cctttccattaataaactttcgcagtaaatcccgttttatgacacagactgaatcagcgattctggcgcatgccc

SEQ ID NO: 878653 - DNA, 75 bp, synthetic construct
  source 1..75: mol_type = other DNA
cacaagttccgctgtgtgccacatcttaccgggcggcgctttgagcacggggtgacggactgttacacgctgttc

SEQ ID NO: 878654 - DNA, 75 bp, synthetic construct
  source 1..75: mol_type = other DNA
cgcacacactccctctggcgtcaccaggcatggcccgcatctgcctttacggggatttgcaacgatttggccgcc

SEQ ID NO: 878655 - DNA, 75 bp, synthetic construct
  source 1..75: mol_type = other DNA
agcggagtcgtgcggcttcgtgataagcaccccggagggcgagcggtaccagccctgcgtgaatatctccgcaga

SEQ ID NO: 878656 - DNA, 75 bp, synthetic construct
  source 1..75: mol_type = other DNA
cgcacacactccctctggcgtcacccggcatggctcgcatctgcctttacggggattttcaacgatttggccgcc

SEQ ID NO: 878657 - DNA, 75 bp, synthetic construct
  source 1..75: mol_type = other DNA
cgcacacactccctctggcgtcacccggcatggcacgcatctgcctttacggggatttgcaacgatttggccgcc

SEQ ID NO: 878658 - DNA, 75 bp, synthetic construct
  source 1..75: mol_type = other DNA
agaggtattccgaaaaatggcaacgacgaacgcattctgtctggcgtcaccgccactggcacgcatccgccttca

SEQ ID NO: 878659 - DNA, 75 bp, synthetic construct
  source 1..75: mol_type = other DNA
catggggcgcagccctgagtgccggagggctgactgccaccacgatgctgttctcactgggtgccagcatgatac

SEQ ID NO: 878660 - DNA, 75 bp, synthetic construct
  source 1..75: mol_type = other DNA
tggggcgcagccctgagtgccggagggctgactgccaccacgatgctgttctcactgggtgtcagcatgatactg

SEQ ID NO: 878661 - DNA, 75 bp, synthetic construct
  source 1..75: mol_type = other DNA
acgatcatccacattgtgccgcgactggccggggccggaaagggtggactgcagattgtgctgggggcggcagcc

SEQ ID NO: 878662 - DNA, 75 bp, synthetic construct
  source 1..75: mol_type = other DNA
agcaccccggagggcgaacggtaccagccctgcatgaatatctccgcagagccggaggcgtattttcgtattaca

SEQ ID NO: 878663 - DNA, 75 bp, synthetic construct
  source 1..75: mol_type = other DNA
acacggcagcggaagccatccgtgccctgtcgatgcagatgccgggattccgccgtcagatgaacgaaggctggt

SEQ ID NO: 878664 - DNA, 75 bp, synthetic construct
  source 1..75: mol_type = other DNA
tgaacacggcagcggaagccattcgcgccctgtcgatgcagatgccgggctttcgccttcagatgaacgaaggct

SEQ ID NO: 878665 - DNA, 75 bp, synthetic construct
  source 1..75: mol_type = other DNA
aacacgtacttttcgtcgctggataacatgattgcccaggggaacccgatgccggtgccttacggtgaaatgctg

SEQ ID NO: 878666 - DNA, 75 bp, synthetic construct
  source 1..75: mol_type = other DNA
acatgattgcccaggggaacccgatgccggtgccttacggtgaaatgctggttggctcccgccgtatatcccagg

SEQ ID NO: 878667 - DNA, 75 bp, synthetic construct
  source 1..75: mol_type = other DNA
acgatgctgttttcactgggggccagcatgatactgggtggtgtggcacagatgcttgccccgaagccaaaaaca

SEQ ID NO: 878668 - DNA, 75 bp, synthetic construct
  source 1..75: mol_type = other DNA
agcaccccggagggcgaacggtaccagccctgcgtgaatatctccgcagagccggaggcgtattttcgtattgca

SEQ ID NO: 878669 - DNA, 75 bp, synthetic construct
  source 1..75: mol_type = other DNA
aacctgtatctggacaatatggaggccactggtttttaccgggtgcccctgtcctcggcacaggcaggcgatatc

SEQ ID NO: 878670 - DNA, 75 bp, synthetic construct
  source 1..75: mol_type = other DNA
acaccctgttccgggatgcctaccatctggcggggataacgctgccggattttgtgcgtgaggatgactggtggc

SEQ ID NO: 878671 - DNA, 75 bp, synthetic construct
  source 1..75: mol_type = other DNA
ttcacgacggatatcccaggacatcagcacccgtgatgaaggcggagacgggaaagtggtggttatcgggcgggg

SEQ ID NO: 878672 - DNA, 75 bp, synthetic construct
  source 1..75: mol_type = other DNA
gcacggggtgacggactgttatacgctgttccgggatgcctatcatcttgcaggtatcgatttgccggattttta

SEQ ID NO: 878673 - DNA, 75 bp, synthetic construct
  source 1..75: mol_type = other DNA
cacgtatttttcgtcactggacaacatgattgcccaggggaatccgatgccggtgccttacggtgaaatgctggt

SEQ ID NO: 878674 - DNA, 75 bp, synthetic construct
  source 1..75: mol_type = other DNA
cgccgattcgccattttctgatgataaaacctgttgccactctggatgatattcttcatcgcggcgactggtgcg

SEQ ID NO: 878675 - DNA, 75 bp, synthetic construct
  source 1..75: mol_type = other DNA
gaccccgaaacgtttaatgctcttttactcaacgggcttgccagcctgttacatcaccgcgaagccgccctgtaa

SEQ ID NO: 878676 - DNA, 75 bp, synthetic construct
  source 1..75: mol_type = other DNA
gcggcggcgcgcaggcatgggtggaagcgcagccgttgttcctctaccccgccgactggatggcggcccgcgccc

SEQ ID NO: 878677 - DNA, 75 bp, synthetic construct
  source 1..75: mol_type = other DNA
gttgatttcgggtcttggcggtagcggcagttactggttaccgcaactggcggtgctggagcaggagtatcaggt

SEQ ID NO: 878678 - DNA, 75 bp, synthetic construct
  source 1..75: mol_type = other DNA
gggctgactgccaccacgatgctgttctcgctgggtgccagcatgatactgggtggcgtggcccagatgctggcc

SEQ ID NO: 878679 - DNA, 75 bp, synthetic construct
  source 1..75: mol_type = other DNA
aacgtctgcgcccggcgctttccagcggcaatctacaaaaaaccctgaccgcgcccgtcaccgctatcgttgcct

SEQ ID NO: 878680 - DNA, 75 bp, synthetic construct
  source 1..75: mol_type = other DNA
ttactcaacgggcttgccagcctgttacatcaccgcgaagccgccctgtatggaattgctatgaacgaagccgtt

SEQ ID NO: 878681 - DNA, 75 bp, synthetic construct
  source 1..75: mol_type = other DNA
aggcgggcgatattctgctgtgctgctttggtgcttcggtaccgaaccatgccgccatttactgcggcaacggtg

SEQ ID NO: 878682 - DNA, 75 bp, synthetic construct
  source 1..75: mol_type = other DNA
tttctgccaccacgatgctgttttcactgggtgccagcatgatactgggcggtgtggctcagatgctggccccga

SEQ ID NO: 878683 - DNA, 75 bp, synthetic construct
  source 1..75: mol_type = other DNA
gttggctcccggcgaatctcccaggacatcagtacccgtgatgaaggcgggggcggaaaggtcgtggttatcggg

SEQ ID NO: 878684 - DNA, 75 bp, synthetic construct
  source 1..75: mol_type = other DNA
cgggaattgagatgccggattttcatcgcggggatgactggtggcgtcacggtcagaatctctatctggataatc

SEQ ID NO: 878685 - DNA, 75 bp, synthetic construct
  source 1..75: mol_type = other DNA
tggtgtggctcagatgcttgccccgaaggcaaaaacaccggattaccgcgcaacggataacggcagacagaacac

SEQ ID NO: 878686 - DNA, 75 bp, synthetic construct
  source 1..75: mol_type = other DNA
tggctcccgccgtatatcccaggacatcagtacccgtgatgaaggcgggggcggaaaggtcgtggttatcgggcg

SEQ ID NO: 878687 - DNA, 75 bp, synthetic construct
  source 1..75: mol_type = other DNA
agggggcggtcatccatattgtgccgcgactggccggagccggaaagggcggactgcagattgtgctgggggcgg

SEQ ID NO: 878688 - DNA, 75 bp, synthetic construct
  source 1..75: mol_type = other DNA
gaggactggctgcgggcagaaatgcagggggagattgtggcactggtccacagtcatcccggtggtctgccctgg

SEQ ID NO: 878689 - DNA, 75 bp, synthetic construct
  source 1..75: mol_type = other DNA
gtttcctttccattaataaactttcgcagtaaataccattttatgacacagactgaatcagcgattctggcgcac

SEQ ID NO: 878690 - DNA, 75 bp, synthetic construct
  source 1..75: mol_type = other DNA
gagggggagtggtatatcccttgtgtgaatatttctgcagagccggaggcgtattttcgtatcgcaccggaagac

SEQ ID NO: 878691 - DNA, 75 bp, synthetic construct
  source 1..75: mol_type = other DNA
atgattttttatcgcgttttcaacttttgcgcccacaaatcaaccgtgaaaccttaaatcatcgtcaggctgccg

SEQ ID NO: 878692 - DNA, 75 bp, synthetic construct
  source 1..75: mol_type = other DNA
ttcagccgttgaagttatcggcgtgctgccgcccgtcgatagcgtaacgggttaccaggtaacccctgtcgtcgg

SEQ ID NO: 878693 - DNA, 75 bp, synthetic construct
  source 1..75: mol_type = other DNA
gcagtatcctgagtggctcacaatgaagggcattcctgaatgttttatcagcaacgacctgtccccgcgcgtatt

SEQ ID NO: 878694 - DNA, 75 bp, synthetic construct
  source 1..75: mol_type = other DNA
gtccactgctgttgtaactgaagggggctcagtctccaccggaggtactgaacgggatattgaacaggatttacc

SEQ ID NO: 878695 - DNA, 75 bp, synthetic construct
  source 1..75: mol_type = other DNA
ctatttttgcagaaggcgcagagcgcatgcgccaggacaaagaccgcagctacaacaaatttctacgtactcttc

SEQ ID NO: 878696 - DNA, 75 bp, synthetic construct
  source 1..75: mol_type = other DNA
agcgacggtgaggttgtggatttcgccgcgtatgaggcatgggctcagacctcacaccagacccgcgatatgacc

SEQ ID NO: 878697 - DNA, 75 bp, synthetic construct
  source 1..75: mol_type = other DNA
aactggagaatgccagtgcaaccttgatcccggccagcagtggtgaagatccgttctggcagggcagtgcgcgta

SEQ ID NO: 878698 - DNA, 75 bp, synthetic construct
  source 1..75: mol_type = other DNA
ttgcccggatgatgaaaaaacgtggggaagcatccgatatccgcatcgatgacctgccgctgaagctggattctg

SEQ ID NO: 878699 - DNA, 75 bp, synthetic construct
  source 1..75: mol_type = other DNA
ttccagtgctgttgcagcggaaggtggctccacctccaccggaggaactgagcgggatattgagcaggatttacc

SEQ ID NO: 878700 - DNA, 75 bp, synthetic construct
  source 1..75: mol_type = other DNA
acggcaaaaccttccggatgaatgctgctcaggtaatgcatgataaatatatgatctggtgcggagagcagctat

SEQ ID NO: 878701 - DNA, 75 bp, synthetic construct
  source 1..75: mol_type = other DNA
aatatctggcacaggagctttaagcttaattattgatggagatggccctcttgttattcaatcaaacggcaattc

SEQ ID NO: 878702 - DNA, 75 bp, synthetic construct
  source 1..75: mol_type = other DNA
gggccgagcttgcccggcagggaaggcctgttggaccttttgaccagatgatagcgggacatgctcgcagtcgcg

SEQ ID NO: 878703 - DNA, 75 bp, synthetic construct
  source 1..75: mol_type = other DNA
ttaatgcgtaagatcctgaagcagctgcgtgaccggggagacctggtgattatttatgataagggctgcactttt

SEQ ID NO: 878704 - DNA, 75 bp, synthetic construct
  source 1..75: mol_type = other DNA
gctcggtgggtgatctgatggcaggattaaaaaacagcgcgtcgtcggccctgtcgtcggcgtcctctgcgctgt

SEQ ID NO: 878705 - DNA, 75 bp, synthetic construct
  source 1..75: mol_type = other DNA
aaatcaccggcggggaggtgtcactgactgccctgaacaccctggcctacacaggattaccctggccactgattg

SEQ ID NO: 878706 - DNA, 75 bp, synthetic construct
  source 1..75: mol_type = other DNA
tccacgctggttgacggcaagattgagaagactgccatctccatccgaagtgtgctgaccaactatgtgaaagcg

SEQ ID NO: 878707 - DNA, 75 bp, synthetic construct
  source 1..75: mol_type = other DNA
tgcatttttcatcttgcgcgacagcatccgtgttgaaaccccagccaccgacgcttttctggctgaagtacgggc

SEQ ID NO: 878708 - DNA, 75 bp, synthetic construct
  source 1..75: mol_type = other DNA
ttcaaataaaggtatacggtaagaaatacagcgcccacaggatagttgcgaaagcattctgtacagggttctgtg

SEQ ID NO: 878709 - DNA, 75 bp, synthetic construct
  source 1..75: mol_type = other DNA
cgggatgcatccggagagaaacgttttgaaggtgaaaaggacagcagaatgctgatgaatgtggggatgaatgcg

SEQ ID NO: 878710 - DNA, 75 bp, synthetic construct
  source 1..75: mol_type = other DNA
aaagacgctgaattcgatgccgattacgaagcagagccaggtatggagcgtggtggattcagtgatgcgcttaac

SEQ ID NO: 878711 - DNA, 75 bp, synthetic construct
  source 1..75: mol_type = other DNA
gatgtttgctgacaatctgttgtgcccagaccttgatgacactatccgtgactttgctgcccagcttcgcaaagg

SEQ ID NO: 878712 - DNA, 75 bp, synthetic construct
  source 1..75: mol_type = other DNA
gcgctggcggcggagaatgcggggctgaagtctgcaattcctcaactacgggatattgatgctgacaatgacaat

SEQ ID NO: 878713 - DNA, 75 bp, synthetic construct
  source 1..75: mol_type = other DNA
acctggtggctgccgttctcgcggaagcaaacacgcctcctgagacgcgcccaatacagacagaagacgctgccg

SEQ ID NO: 878714 - DNA, 75 bp, synthetic construct
  source 1..75: mol_type = other DNA
gtgcttaatgcgctggatgcccgttgcccgaactgggatttgtgggaagagtgccgcacgatttccgaactggag

SEQ ID NO: 878715 - DNA, 75 bp, synthetic construct
  source 1..75: mol_type = other DNA
aataatctgatttcttattacgttatcatgggtacggtgttatttggtattgccgttctgctgatgcgaataagc

SEQ ID NO: 878716 - DNA, 75 bp, synthetic construct
  source 1..75: mol_type = other DNA
aatactgattattgatgaaggggattcaattgcagcttcccgttctcaaaaccacagccatcatgaagataaagt

SEQ ID NO: 878717 - DNA, 75 bp, synthetic construct
  source 1..75: mol_type = other DNA
gataagcctttatcatacgagattatccttcagacagctatctcactaaaagcctcaccggttatggaggatcga

SEQ ID NO: 878718 - DNA, 75 bp, synthetic construct
  source 1..75: mol_type = other DNA
gatttgccgcttaagctggattctgaaattcagaatatggctatgcatggcacagtatcaaccggtaaatccacc

SEQ ID NO: 878719 - DNA, 75 bp, synthetic construct
  source 1..75: mol_type = other DNA
aatggaactggtcaggctggcccttgaacaagatgtcacgaacggtgcaaatagtggttcttccgcaacttgggt

SEQ ID NO: 878720 - DNA, 75 bp, synthetic construct
  source 1..75: mol_type = other DNA
tatcaatgatcagaacgctctattagctagtggacaagttggggcagcaggacaagcctttattggtaatcaact

SEQ ID NO: 878721 - DNA, 75 bp, synthetic construct
  source 1..75: mol_type = other DNA
aagtagtgataactggtgacagtaccggattatcgaaatcactacaggaagcagaaaataagattaatcagtttg

SEQ ID NO: 878722 - DNA, 75 bp, synthetic construct
  source 1..75: mol_type = other DNA
atgctgaagtttatgctcgataccaacatctgcatttttacgataaagaacaaccccgccagcgtcagagagcgt

SEQ ID NO: 878723 - DNA, 75 bp, synthetic construct
  source 1..75: mol_type = other DNA
agtccagtggggaattacttaaagttagcccacgcaatgagctaacgggaatcatcaccactttgcgcactgcgg

SEQ ID NO: 878724 - DNA, 75 bp, synthetic construct
  source 1..75: mol_type = other DNA
aatgcactgtggctgaatgaacatggcccgcgcggtggtgatgaaattaatatcccgcaaaaaggcaaaaactac

SEQ ID NO: 878725 - DNA, 75 bp, synthetic construct
  source 1..75: mol_type = other DNA
ccgtttttcgccagacgccaaaactttctaccggtaatcattttggcgggcggctggtattcgatggtaaaggct

SEQ ID NO: 878726 - DNA, 75 bp, synthetic construct
  source 1..75: mol_type = other DNA
ggaccggttatcccgaaagggaaggtcgagatcaccatcagtaagtacgagaaaacggcgggtgcagccgcctga

SEQ ID NO: 878727 - DNA, 75 bp, synthetic construct
  source 1..75: mol_type = other DNA
atgaagctgatcctgcctttccctcccagcgtgaacacgtactggcgacaccccaacaaaggggagtttgctggt

SEQ ID NO: 878728 - DNA, 75 bp, synthetic construct
  source 1..75: mol_type = other DNA
atgaagctgatcatgcctttccctcccagcgtgaacacgtactggcgacaccccaacaaaggggcgtttgctggt

SEQ ID NO: 878729 - DNA, 75 bp, synthetic construct
  source 1..75: mol_type = other DNA
acatctgcatttttacgataaagaacaaacccgccagcgtcagggagcgttttaacctgaaccaggggagaatgt

SEQ ID NO: 878730 - DNA, 75 bp, synthetic construct
  source 1..75: mol_type = other DNA
attgccggtcatgcccgcagtcgtgggctgattatcgtcacaaacaatacccgggaatttgaacgaatcgcaggc

SEQ ID NO: 878731 - DNA, 75 bp, synthetic construct
  source 1..75: mol_type = other DNA
atgctggtggagtggggaccggttatcccggaagggaaggtcgagatcactatcagtaagtacgagaaatcggcg

SEQ ID NO: 878732 - DNA, 75 bp, synthetic construct
  source 1..75: mol_type = other DNA
tgccccttctctgtattccttccgctctttgggcggcacccgaaacggtaaatgtcgaagtactgcaggataaac

SEQ ID NO: 878733 - DNA, 75 bp, synthetic construct
  source 1..75: mol_type = other DNA
aaggatgcgcaagctgagaggctgggcatccaggaggattattacagtcaaattgatgcgctgcagtctgactgg

SEQ ID NO: 878734 - DNA, 75 bp, synthetic construct
  source 1..75: mol_type = other DNA
gaatcaccagataagcagttgctggctatcagcaatgcgctcggcaagattaaaacaaacgctgaaaagaccaca

SEQ ID NO: 878735 - DNA, 75 bp, synthetic construct
  source 1..75: mol_type = other DNA
atggctggtaaatccctcggaacgctgaccattgacctcgtagctaaggttggtggatttgtatctggtctaagc

SEQ ID NO: 878736 - DNA, 75 bp, synthetic construct
  source 1..75: mol_type = other DNA
tcacaatgccagcacggcaccgtatcgcacggctttctatctggaagttgagaacgacgccttgcccggtgcggt

SEQ ID NO: 878737 - DNA, 75 bp, synthetic construct
  source 1..75: mol_type = other DNA
caattcaacgccaaaggcggcgtttactcttctgccgatctcagtcagtacagtaactctgtcgtcagctctcca

SEQ ID NO: 878738 - DNA, 75 bp, synthetic construct
  source 1..75: mol_type = other DNA
ccggggaaacaaacggtaagccgcaaaaaaatacctctggtcagaaactggattcagcgtttaaaagcgctgagc

SEQ ID NO: 878739 - DNA, 75 bp, synthetic construct
  source 1..75: mol_type = other DNA
aggttttccacagaacatcccagcttacgcacagattgcagctatgggtatgtctatcattagtacagctaaggg

SEQ ID NO: 878740 - DNA, 75 bp, synthetic construct
  source 1..75: mol_type = other DNA
gtagtgatgatgataaacaattccaagaaaaattgaagaaacatcaaaacagtattgtacaggcggtgcgtgatt

SEQ ID NO: 878741 - DNA, 75 bp, synthetic construct
  source 1..75: mol_type = other DNA
tgattttgcccagtcgcgccgtatctggttaagtttttctgaagtcggtgatgatggtaaagccggaactgccgt

SEQ ID NO: 878742 - DNA, 75 bp, synthetic construct
  source 1..75: mol_type = other DNA
aaaaaggcaaatataccaatcgctcaacagatcgcagcacttgaagcgatggcgagtgatgcaagtcgtctacgt

SEQ ID NO: 878743 - DNA, 75 bp, synthetic construct
  source 1..75: mol_type = other DNA
gggaatcaccataagcatgaccatcatgaagattcaagaagcactagcaggtgctttagcaattcagccgtggta

SEQ ID NO: 878744 - DNA, 75 bp, synthetic construct
  source 1..75: mol_type = other DNA
atgaaaactctctctatttctgccgatgcaatgtctcaaatgggggcaggtatggcggcggcttttggtgagtca

SEQ ID NO: 878745 - DNA, 75 bp, synthetic construct
  source 1..75: mol_type = other DNA
ctggcgaatattggtgatctgcaagatattgaggctgcgctatctcacggggctgagggcgtgggtttactgcgc

SEQ ID NO: 878746 - DNA, 75 bp, synthetic construct
  source 1..75: mol_type = other DNA
gcgtccgctgtggcgatgaaatcatcttccaggccgaaggcaccgatgccagtgacgctctcaaggcaattgaaa

SEQ ID NO: 878747 - DNA, 75 bp, synthetic construct
  source 1..75: mol_type = other DNA
caactgacaaatgagataaaaaatcttaaacgtgaatttgaacgttatataatgttatgtaaggggaggacaatc

SEQ ID NO: 878748 - DNA, 75 bp, synthetic construct
  source 1..75: mol_type = other DNA
aataaaagaaatcaaagacgctatatccgactccataggggttatacaggaaatatcaaatcaaataattggaac

SEQ ID NO: 878749 - DNA, 75 bp, synthetic construct
  source 1..75: mol_type = other DNA
gaaggtggcgtaggaaaaactgcgctggcacttaaagttgcttatgaaatactcgaggatgaagataatcctttt

SEQ ID NO: 878750 - DNA, 75 bp, synthetic construct
  source 1..75: mol_type = other DNA
tattctgaagcaatgtcatatctagagaaaatgcttgagcaatttgaggaactacccgattattacaaagatgtg

SEQ ID NO: 878751 - DNA, 75 bp, synthetic construct
  source 1..75: mol_type = other DNA
atggctggaatttatcaagagaatgtcgctaccgaatccagacgacacttgaaaatgaactcgatttcttcgatc

SEQ ID NO: 878752 - DNA, 75 bp, synthetic construct
  source 1..75: mol_type = other DNA
aacgaacgtgcgcgtatgttatctggcgggatgaagcgccgtttaatgattgcccgtgcgttaatgcatgaacct

SEQ ID NO: 878753 - DNA, 75 bp, synthetic construct
  source 1..75: mol_type = other DNA
accgaagctcgatggctaccagtatcggctggtggataccgctacgcttgaagttgaagtgttgcgcgagcaggg

SEQ ID NO: 878754 - DNA, 75 bp, synthetic construct
  source 1..75: mol_type = other DNA
aattttattgactggaagatctatcaatcggtagccgctgaaggtaatgctgttgaaaagcaaattccccagcca

SEQ ID NO: 878755 - DNA, 75 bp, synthetic construct
  source 1..75: mol_type = other DNA
aattttattgactggaagatctatcaatcggtagccgctgaattatatgcacacgatctggagcggctttgttaa

SEQ ID NO: 878756 - DNA, 75 bp, synthetic construct
  source 1..75: mol_type = other DNA
gaaaatgaacttgatttcttcgatcaggaacttctggtgatgaatcgttgccgtaatgcaatagataaaatcggg

SEQ ID NO: 878757 - DNA, 75 bp, synthetic construct
  source 1..75: mol_type = other DNA
gagttattgtgaaaatgcttagagactctcagtcatttataagaaatggtcatcacgataaagcatttgaattac

SEQ ID NO: 878758 - DNA, 75 bp, synthetic construct
  source 1..75: mol_type = other DNA
gtcttacgcagccaccgtaaaaacaaactcaacatctactccactcactatcttgataaacagcatcccgctcac

SEQ ID NO: 878759 - DNA, 75 bp, synthetic construct
  source 1..75: mol_type = other DNA
ctgcaacggtcgtcgctcaggaaggtgaagatgaatatcaactgattgttcgcgtattaaaagagactaatggcg

SEQ ID NO: 878760 - DNA, 75 bp, synthetic construct
  source 1..75: mol_type = other DNA
tttggtcatgagcgtggggcttttaccggtgccagcgcccagcgcattggtcgttttgaactggcggataaaagc

SEQ ID NO: 878761 - DNA, 75 bp, synthetic construct
  source 1..75: mol_type = other DNA
ttcacgcgggcgcatttatgccgatgtgaacggttttcttgatccggtcgattttcgtggacaactggtgacggt

SEQ ID NO: 878762 - DNA, 75 bp, synthetic construct
  source 1..75: mol_type = other DNA
ttctcgcggtcgcatttatgccgatgtgaacggttttctggacccggtggatttccgcggacaactggtgacggt

SEQ ID NO: 878763 - DNA, 75 bp, synthetic construct
  source 1..75: mol_type = other DNA
gcactcttgtatcagtcattacgtttttcgtaagcatcattattcttatctataaaatcaaaagaatgtatgcag

SEQ ID NO: 878764 - DNA, 75 bp, synthetic construct
  source 1..75: mol_type = other DNA
atcaagggctataaaattaacccaacagatgatgtgctgccaaagaaaaaacactatccacagttcgtagctggt

SEQ ID NO: 878765 - DNA, 75 bp, synthetic construct
  source 1..75: mol_type = other DNA
tcaggaagatacagaatttggtacggacccaacagtaatacttaattcaatccagaagggaagtattcctggttt

SEQ ID NO: 878766 - DNA, 75 bp, synthetic construct
  source 1..75: mol_type = other DNA
gttacccagcgtgtggaacaggtgctggctgatgcatttcacgcacaggctgcggcgctggtgcagggcgcgggg

SEQ ID NO: 878767 - DNA, 75 bp, synthetic construct
  source 1..75: mol_type = other DNA
tacgcagcattttgtcgcgccctgatacgctgcattgcagttacgaagaattttgtgaaacctggccgcagctgg

SEQ ID NO: 878768 - DNA, 75 bp, synthetic construct
  source 1..75: mol_type = other DNA
tggcgattaatctcgccgtactttcctgtattgtgtttataaacattattttaagatatggttttcagacaagca

SEQ ID NO: 878769 - DNA, 75 bp, synthetic construct
  source 1..75: mol_type = other DNA
ttccttacctgagtttattgatatgccagaagtgctcgcttaccaggtcagggatgaaattcttgcttttaacac

SEQ ID NO: 878770 - DNA, 75 bp, synthetic construct
  source 1..75: mol_type = other DNA
tgaaaccgtgcagcaaattgtggtgaatcaggcggggtactacggtgtggagcgcaaagaagcgtatatccgcag

SEQ ID NO: 878771 - DNA, 75 bp, synthetic construct
  source 1..75: mol_type = other DNA
ctgtcgactacgccatcatggcgacgacgcctttcctttgggttctctatatcgggcggatcgtggccggcatca

SEQ ID NO: 878772 - DNA, 75 bp, synthetic construct
  source 1..75: mol_type = other DNA
gtgaagatgtagcgcagcgactggacgcagatttcttcctgttgaccagtgaaatttcgtgcctggttgatgctc

SEQ ID NO: 878773 - DNA, 75 bp, synthetic construct
  source 1..75: mol_type = other DNA
tattgcttaatgatttttttgaagaaattatatcgaaccatgaaaaagataaaaaaataaaggatgctttatcct

SEQ ID NO: 878774 - DNA, 75 bp, synthetic construct
  source 1..75: mol_type = other DNA
tacgtcaaatgtgggacgatcttgcggacgtttacggtcataaaacggcgctgatttgtgaatccagcggcggag

SEQ ID NO: 878775 - DNA, 75 bp, synthetic construct
  source 1..75: mol_type = other DNA
gtgcttccgtgcactcagtggtcatcaagcggatagccgagcgcggggagaatatccaggtctggatagaaccag

SEQ ID NO: 878776 - DNA, 75 bp, synthetic construct
  source 1..75: mol_type = other DNA
gaaccagctgatggcgttgtcgactttggtaaaataaattcccgaacaattaaaaataccagcgtgaggggtctt

SEQ ID NO: 878777 - DNA, 75 bp, synthetic construct
  source 1..75: mol_type = other DNA
ctatgggggaaacgcaacgaacgtgcgcgcatgttatctggcgggatgaagcgccgtttaatgattgcccgtgcg

SEQ ID NO: 878778 - DNA, 75 bp, synthetic construct
  source 1..75: mol_type = other DNA
cttgatgcttacagtcgaaatttttctaaaaaaaaatatatgtatgagtccttcatgcctgaccatacatcattg

SEQ ID NO: 878779 - DNA, 75 bp, synthetic construct
  source 1..75: mol_type = other DNA
tctggctcccgttctccagggattatttgatctttacatccgtggtcgtgacaacagagcacgcactacaaaacc

SEQ ID NO: 878780 - DNA, 75 bp, synthetic construct
  source 1..75: mol_type = other DNA
ggcgcatcgcactgctggcgggtgtgcctcgctgagtgaatacaccgctgaatttaaccgcctttctgccctctt

SEQ ID NO: 878781 - DNA, 75 bp, synthetic construct
  source 1..75: mol_type = other DNA
gcctcgctgagtgaatactccgctgaatttaaccgcctttccgccctcttctcacaggagtggcagcgcgtgacg

SEQ ID NO: 878782 - DNA, 75 bp, synthetic construct
  source 1..75: mol_type = other DNA
tgctgtttctcctgtcgatgtttctatggtggctacatacccggataatctgggaaaattagaagaacaacttaa

SEQ ID NO: 878783 - DNA, 75 bp, synthetic construct
  source 1..75: mol_type = other DNA
gtatcttcacttataattaataaaaacaaaaaaactaggcaggtcttgcttgctttttcattcatatatttaatt

SEQ ID NO: 878784 - DNA, 75 bp, synthetic construct
  source 1..75: mol_type = other DNA
ttttacaccaccaccagaaagccttcagcaggagatgttggtgcactgccgttatctggtggtcaactgaatggt

SEQ ID NO: 878785 - DNA, 75 bp, synthetic construct
  source 1..75: mol_type = other DNA
ttgggtgataatgacacgggctttaaacaaaatggcgatggtaatctggatgtttatgctaataacgtccatgtt

SEQ ID NO: 878786 - DNA, 75 bp, synthetic construct
  source 1..75: mol_type = other DNA
gtatgcgtaacaaagctaaccgactggaagagttgtttgtttcactggttaacgaaaaacaaggagatcgcgcat

SEQ ID NO: 878787 - DNA, 75 bp, synthetic construct
  source 1..75: mol_type = other DNA
attcccaccagcttgatcatcgcatttttggaaatgcgtcatctgtaccggcaattaacaaaccatcccagccat

SEQ ID NO: 878788 - DNA, 75 bp, synthetic construct
  source 1..75: mol_type = other DNA
acttttatttgtctggttaacctttattggcgcaatcgttgcttatatggacaacagccatgtgcaggttacttt

SEQ ID NO: 878789 - DNA, 75 bp, synthetic construct
  source 1..75: mol_type = other DNA
ctggcacagggtgactggtggcatattgtcccttccgcaatcctgacgtgtttgttaccggacatcgatcaccca

SEQ ID NO: 878790 - DNA, 75 bp, synthetic construct
  source 1..75: mol_type = other DNA
ctatacctgatacaggtcttcgccctagctctggtgaaaaggaaggattgctaattctgctatgggttcctcgtt

SEQ ID NO: 878791 - DNA, 75 bp, synthetic construct
  source 1..75: mol_type = other DNA
tgctgttcctcctgtcgatgtttctacggtggctacatacccggataatctgggaaaattagaagaacaacttaa

SEQ ID NO: 878792 - DNA, 75 bp, synthetic construct
  source 1..75: mol_type = other DNA
attcgggacagaggaggaccgagactggacaatcaatacgttgacgctgacgctggctgaaaacggattctctgc

SEQ ID NO: 878793 - DNA, 75 bp, synthetic construct
  source 1..75: mol_type = other DNA
gcacctgatgtcgagactagcaacacgattcgatgcggtgagcaaacccgcaggagggtactggatattcctgcc

SEQ ID NO: 878794 - DNA, 75 bp, synthetic construct
  source 1..75: mol_type = other DNA
aatgtggaagaaaacagctactggttccgccgtatagcggcgggggatgtggtacgtgttaaacaggataaggct

SEQ ID NO: 878795 - DNA, 75 bp, synthetic construct
  source 1..75: mol_type = other DNA
ataatattgtgcaatatatattgggatttggtcccacggtaatgttgccgttggtgttatttattcttgctctct

SEQ ID NO: 878796 - DNA, 75 bp, synthetic construct
  source 1..75: mol_type = other DNA
atggccagaacaatgacagttgctctcggagatgaactctgggagtacatagaatcaggtgattatcgtacacag

SEQ ID NO: 878797 - DNA, 75 bp, synthetic construct
  source 1..75: mol_type = other DNA
gctccccgtcgtggtgatcgctgagtcagtaggctatgccagtgaatcatcctttcacaaggcttttgttcgcga

SEQ ID NO: 878798 - DNA, 75 bp, synthetic construct
  source 1..75: mol_type = other DNA
gattacgcgtgggtcggcgatgacgtcaatttatataccctcggtgaaataaccattggcgcacattcggtgata

SEQ ID NO: 878799 - DNA, 75 bp, synthetic construct
  source 1..75: mol_type = other DNA
ccccggcgcaaacaacgccgtgatgaataactttgttcctcctggtgggccagggcaattaggcaaatttgtcat

SEQ ID NO: 878800 - DNA, 75 bp, synthetic construct
  source 1..75: mol_type = other DNA
atcccaaaaacgggatgttgaatgatcccaaaaacgggatccagaaccagtcatataaccagtcatttaaccaag

SEQ ID NO: 878801 - DNA, 75 bp, synthetic construct
  source 1..75: mol_type = other DNA
cacaggcagccggaaaggtggcagaggtctctgaagcgactcagtccggactcagagaagtgaaggataccgctc

SEQ ID NO: 878802 - DNA, 75 bp, synthetic construct
  source 1..75: mol_type = other DNA
atgcctaaagttatagcatttttaaatggtaaggggggggtgtctaagacaacctcggcagtcaatattgctact

SEQ ID NO: 878803 - DNA, 75 bp, synthetic construct
  source 1..75: mol_type = other DNA
atgctgaccgatgtcccgatgaaactgggccgtgcggcgaaatccactattgccgatctggtttatgccattctg

SEQ ID NO: 878804 - DNA, 75 bp, synthetic construct
  source 1..75: mol_type = other DNA
atggatgcccttagccgtttgttgatgcttaacgctccacaaggaacgatcgataaaaattgcgagttaggaagt

SEQ ID NO: 878805 - DNA, 75 bp, synthetic construct
  source 1..75: mol_type = other DNA
ttaccattggggggcgccaaacatgcgtcgccgtctgctcctggacagaatcaggccaattaaacaggtagcaac

SEQ ID NO: 878806 - DNA, 75 bp, synthetic construct
  source 1..75: mol_type = other DNA
gcgcaaaacataaatttaaacaaaagcattatatagcaggcattcttaattatttaaaatattataaagaaaaat

SEQ ID NO: 878807 - DNA, 75 bp, synthetic construct
  source 1..75: mol_type = other DNA
tcaatttatataccctcggtgaaataaccattggcgcacattcgggtaatgactccaacttattgatagtgtttt

SEQ ID NO: 878808 - DNA, 75 bp, synthetic construct
  source 1..75: mol_type = other DNA
gtgctgtggcaggcgctgtggacctcgttgcgtattgcgctggcggcaggcgtattgtgcgtggtgctgaccatg

SEQ ID NO: 878809 - DNA, 75 bp, synthetic construct
  source 1..75: mol_type = other DNA
gttacagtatgttgtgtcagtcgctgggcattgaaggctggtcacgcttaaaagtggtggagctgcgcgccctga

SEQ ID NO: 878810 - DNA, 75 bp, synthetic construct
  source 1..75: mol_type = other DNA
ggcgctttcctggacgcctggcgctgctgcgtctgtgcgccatgaccttgatccttccggtgctggtcgccgttt

SEQ ID NO: 878811 - DNA, 75 bp, synthetic construct
  source 1..75: mol_type = other DNA
cccgtgggcacatcgtgttaatgtccatacggcagatattcagcagtggatatcccgacagaccacgcgttttga

SEQ ID NO: 878812 - DNA, 75 bp, synthetic construct
  source 1..75: mol_type = other DNA
agttttactgagctggcattaagcatggggtggcatttacgtttgcgaacggatgtggcagaaaacgaagcgcga

SEQ ID NO: 878813 - DNA, 75 bp, synthetic construct
  source 1..75: mol_type = other DNA
tgattattcctgcctgtactgtacaaaatgctgaagttaactggggtgatattgaaattcagaatctggtacaga

SEQ ID NO: 878814 - DNA, 75 bp, synthetic construct
  source 1..75: mol_type = other DNA
ccgaactctgtttacgagtttaaacgtacccgcagctggtggaagttaaaagacgaagattcagaagatggtgaa

SEQ ID NO: 878815 - DNA, 75 bp, synthetic construct
  source 1..75: mol_type = other DNA
cggccattactgctgttgagtctatcgtggcgtcaatgtgcgccgatgggcaggacgtgttccgtcgtttcctct

SEQ ID NO: 878816 - DNA, 75 bp, synthetic construct
  source 1..75: mol_type = other DNA
gtgattggcgagaaatgctggctggcaaccgatgtttttgttgcccctggcgtcacgatcggcgacggcaccgtc

SEQ ID NO: 878817 - DNA, 75 bp, synthetic construct
  source 1..75: mol_type = other DNA
atgctgctatggagcagtcgcgaactgcgggcgcggcaaaaaatgctggcgggccaggcgctggagatgagcggc

SEQ ID NO: 878818 - DNA, 75 bp, synthetic construct
  source 1..75: mol_type = other DNA
acggcgacaaatcccgccagttgctgcgcttatctttatgctctgtttcgccagcttcgccaccgtgctatcgct

SEQ ID NO: 878819 - DNA, 75 bp, synthetic construct
  source 1..75: mol_type = other DNA
aaagtggtcgagctgcgcgccctgaaacgtccactggcgcaggcgctggcttttgcctgcgtgctgtcgattggt

SEQ ID NO: 878820 - DNA, 75 bp, synthetic construct
  source 1..75: mol_type = other DNA
ggggcctctgtgggctacagatatgtcaattatcttatgctcaggaagcattgactgaaaaatattctcagtcag

SEQ ID NO: 878821 - DNA, 75 bp, synthetic construct
  source 1..75: mol_type = other DNA
tcatttgccagggggctattgagccactaatcgatttctcgtttccagactataaagtcgcaatggttgttacgg

SEQ ID NO: 878822 - DNA, 75 bp, synthetic construct
  source 1..75: mol_type = other DNA
tttggcgaaactcgcccgggaactgggctggaatgacattaaggtcgccgataacgctgacaacgatgcgctatt

SEQ ID NO: 878823 - DNA, 75 bp, synthetic construct
  source 1..75: mol_type = other DNA
actggcactacataccgtaagcggacagaagattctctacccgcaggatcgggaaatcagcgaagtcttgctaca

SEQ ID NO: 878824 - DNA, 75 bp, synthetic construct
  source 1..75: mol_type = other DNA
aagatactatttttattcattatattgggccaaccaaaccctggcatgactgggcctgggattatcctgtatcac

SEQ ID NO: 878825 - DNA, 75 bp, synthetic construct
  source 1..75: mol_type = other DNA
gcatcccgatcaggatgtattgaatatgctattagcagataaacttatttttgctgatataaaatataatactca

SEQ ID NO: 878826 - DNA, 75 bp, synthetic construct
  source 1..75: mol_type = other DNA
gaactgacaaaaattttctatttggttgcggaatttcgattgcttcaatattaaagtataatgaaggaagtcgat

SEQ ID NO: 878827 - DNA, 75 bp, synthetic construct
  source 1..75: mol_type = other DNA
tcaacgtggttcgtgcaactattgatggcctggaaaatatgaattctccagaaatggtcgctgccaagcgtggta

SEQ ID NO: 878828 - DNA, 75 bp, synthetic construct
  source 1..75: mol_type = other DNA
gcagtatcctgagtggcccacagtgaagggcattcctgaatgttttatcagcaacgacctgtcccccgcgcgtat

SEQ ID NO: 878829 - DNA, 75 bp, synthetic construct
  source 1..75: mol_type = other DNA
ggtggcgcagaatcggggctggctgcgcagcattatcagagttttgttgagcaacttgggatcaaacagggggca

SEQ ID NO: 878830 - DNA, 75 bp, synthetic construct
  source 1..75: mol_type = other DNA
tatcgtgagcactggttactacgctgtcgactattggtcgtcagtgagcgtttggcgaaactcgcccgggaactg

SEQ ID NO: 878831 - DNA, 75 bp, synthetic construct
  source 1..75: mol_type = other DNA
ttaccagcggtgaaatgttgcagcaactctggtcgctgatcccacaatggtatcgtgagcactggttactacact

SEQ ID NO: 878832 - DNA, 75 bp, synthetic construct
  source 1..75: mol_type = other DNA
ctgttaaaggtgttcacacgggttctcgcgtattcatgcagccggcttccgagggtaccggtatcatcgccggtg

SEQ ID NO: 878833 - DNA, 75 bp, synthetic construct
  source 1..75: mol_type = other DNA
tcgataacgcttttgaaggcggttacatggccgggcgctatttgattgaacgcggtcaccgcgaaatcggtgtta

SEQ ID NO: 878834 - DNA, 75 bp, synthetic construct
  source 1..75: mol_type = other DNA
tacgagtatcgcgaacagaaaattgccgccggttttacgcgtctggcggacgtcccggcggacgacatcgacggt

SEQ ID NO: 878835 - DNA, 75 bp, synthetic construct
  source 1..75: mol_type = other DNA
aagcccctgcatcaaccgaaaggttcggaacgcgacgcgtgggatgcgatggcgcatcaccagatggtcgtcgac

SEQ ID NO: 878836 - DNA, 75 bp, synthetic construct
  source 1..75: mol_type = other DNA
atgaaaccgtattaattcattatgtcggcccgacaaaaccttggcattactgggccggttatccaagcgcgcagc

SEQ ID NO: 878837 - DNA, 75 bp, synthetic construct
  source 1..75: mol_type = other DNA
catgtcgccagttgggcttcccgcaacggcggcgatgttcatcgtttaatgatcaccggattctgctggggtgga

SEQ ID NO: 878838 - DNA, 75 bp, synthetic construct
  source 1..75: mol_type = other DNA
cgtggtgattcccgcaccggaaacgggcgacgcagtgattaaaaacacgttctttttccctgatgtggatccgaa

SEQ ID NO: 878839 - DNA, 75 bp, synthetic construct
  source 1..75: mol_type = other DNA
tggcggacgttccggcggacgacatcgacggtgaaagcatcaaagttttttactacgagcgcgccgtgtgtgcga

SEQ ID NO: 878840 - DNA, 75 bp, synthetic construct
  source 1..75: mol_type = other DNA
gtgcatagtgaaaatcaaagtaaaggtgtgcattatgcaaaatcacagcgtctcttagaaattaaccatgcgcac

SEQ ID NO: 878841 - DNA, 75 bp, synthetic construct
  source 1..75: mol_type = other DNA
atgacgacagtaatactgaatcagcccgacgaaccgcaggacgtaccgggcgtggtgattcccgcaccggagacg

SEQ ID NO: 878842 - DNA, 75 bp, synthetic construct
  source 1..75: mol_type = other DNA
gattctgggtaatgcgtggaacaatcttgagaaacagcgtgcctatctgtcgatgatggcgcaaaaacgcgttga

SEQ ID NO: 878843 - DNA, 75 bp, synthetic construct
  source 1..75: mol_type = other DNA
gccctggaaaaatgaaccgttaatgcggccagttaactcaaactatgctcgttattgcgccaagcataattttaa

SEQ ID NO: 878844 - DNA, 75 bp, synthetic construct
  source 1..75: mol_type = other DNA
gataagtcgctgaattcaccgaaacaacctgttgatatcgcaaccgatcttaacgcgccggttctcggcttatat

SEQ ID NO: 878845 - DNA, 75 bp, synthetic construct
  source 1..75: mol_type = other DNA
agtcaatggcttcgttattagaagaagggcagcgacagaaaacctttaagaaagatattgatcccttacaaatca

SEQ ID NO: 878846 - DNA, 75 bp, synthetic construct
  source 1..75: mol_type = other DNA
accgtacacggaacaggatgtggcgcagcgggcctacaataacggtatggcagcctccggttttggaacgggagg

SEQ ID NO: 878847 - DNA, 75 bp, synthetic construct
  source 1..75: mol_type = other DNA
gggatacgcagagccagaaacaggatgtggcagacctgaaccgtgacgcagcacatgcaaaccagacgctgtccc

SEQ ID NO: 878848 - DNA, 75 bp, synthetic construct
  source 1..75: mol_type = other DNA
agcaggtatagcgggtggtgttgcaggtgggaatactgcgggtgtggctaccggagctgctgccgggaagaatgt

SEQ ID NO: 878849 - DNA, 75 bp, synthetic construct
  source 1..75: mol_type = other DNA
gcgcttgagcaggttctggctgcgctgcgtgaatctggcgtggaagccatcccacgggaggcgattcatgactga

SEQ ID NO: 878850 - DNA, 75 bp, synthetic construct
  source 1..75: mol_type = other DNA
cggcgtaattccggaatcactggagccgcacatcggcttgacgccgacggtcgaagcgatgattgaacctgcgct

SEQ ID NO: 878851 - DNA, 75 bp, synthetic construct
  source 1..75: mol_type = other DNA
gcacctgtattctatgaaggagatgttcgagataaggcgcttttaaagacaatatttaccgaacacgatattgat

SEQ ID NO: 878852 - DNA, 75 bp, synthetic construct
  source 1..75: mol_type = other DNA
acctttgcaatactatcgaaataatgtctctggcactttttctttagttgaggcaatggaggagtctggtgtaga

SEQ ID NO: 878853 - DNA, 75 bp, synthetic construct
  source 1..75: mol_type = other DNA
cgcagaagccgaaaagtggatggactgggcaaaccagacgctcagcaatgcccatcgtgggatcctgatgggatt

SEQ ID NO: 878854 - DNA, 75 bp, synthetic construct
  source 1..75: mol_type = other DNA
cctctgatatttgaaggcgatattagggatgttaggttacttaataaaatattctctgataataaaatttctggc

SEQ ID NO: 878855 - DNA, 75 bp, synthetic construct
  source 1..75: mol_type = other DNA
aaaacccactagatgaaaattgtataaccggtggaacaactaatccttatggttattcaaaatatatatcagaaa

SEQ ID NO: 878856 - DNA, 75 bp, synthetic construct
  source 1..75: mol_type = other DNA
tagtttagaaaatatgatagaagatgcctggaggtggcagttaaattatcctaatggtttttattcagttaattc

SEQ ID NO: 878857 - DNA, 75 bp, synthetic construct
  source 1..75: mol_type = other DNA
ttcctgtgaatgaaagttgtgctataggtggtactacaaatccgtatggaacgtccaagttatttgtagagaact

SEQ ID NO: 878858 - DNA, 75 bp, synthetic construct
  source 1..75: mol_type = other DNA
cacggcgggaatggagctgcttggcgacatggcaaatcgcgatcatctgattattgcggatgccattgtgtcgaa

SEQ ID NO: 878859 - DNA, 75 bp, synthetic construct
  source 1..75: mol_type = other DNA
caaacctacgcatcttgatagccatcatcatgtgcatatgttcccgcagattttcccgattgttgccaagtttgc

SEQ ID NO: 878860 - DNA, 75 bp, synthetic construct
  source 1..75: mol_type = other DNA
gggattcagcagtgcattctacggtgaagagatcagtgagtcgctgttcctgcaagtgcttgatgactccagtca

SEQ ID NO: 878861 - DNA, 75 bp, synthetic construct
  source 1..75: mol_type = other DNA
ccgatgactttggcctaagtaaaggccagaactacggcattatcgaggcctgccgaaacggtattgtcacatcga

SEQ ID NO: 878862 - DNA, 75 bp, synthetic construct
  source 1..75: mol_type = other DNA
atgaagctaatcctgcctttcccgcccagcgtgaacacgtactggcgacaccccaacaaaggggcattttctggt

SEQ ID NO: 878863 - DNA, 75 bp, synthetic construct
  source 1..75: mol_type = other DNA
ccagcgtgaacacttactggcgcgctcctaacaagggggcgctggctggtcgtcacctcattagcgctgaaggcc

SEQ ID NO: 878864 - DNA, 75 bp, synthetic construct
  source 1..75: mol_type = other DNA
ggaccggttatcccgaaagggaaggtcgagatcactatcagtaagtatgagaaaccggcgggtgcagccgcctga

SEQ ID NO: 878865 - DNA, 75 bp, synthetic construct
  source 1..75: mol_type = other DNA
gtgaacctcccacaagacggcatcaaattgcatcgtggtaacttcactgctatcggtcagcagatccagccttat

SEQ ID NO: 878866 - DNA, 75 bp, synthetic construct
  source 1..75: mol_type = other DNA
ctggcgacaccccaacaaaggggcgtttgctggtaagagcctgataagcgcggcggggcgaaaattccagagcgc

SEQ ID NO: 878867 - DNA, 75 bp, synthetic construct
  source 1..75: mol_type = other DNA
cggattctggatttgcgcatacgctaggcaagatagtgattcgtctggagaacggcgtcatcgttcgtgccagcg

SEQ ID NO: 878868 - DNA, 75 bp, synthetic construct
  source 1..75: mol_type = other DNA
gccggatgcgcgccgtcgggatatcgataattacaacaaagccctgtttgacgcgctgacgcatgcgggtgtctg

SEQ ID NO: 878869 - DNA, 75 bp, synthetic construct
  source 1..75: mol_type = other DNA
cgtcacctcattagcgctgatggtcgtaaataccagagcgctgcctgcgtggcgatcattgagcaattacgacgt

SEQ ID NO: 878870 - DNA, 75 bp, synthetic construct
  source 1..75: mol_type = other DNA
cttcagtggagatcgtgttgtttcctccggataaccggatggtattgaagttcgtcgtgatgcttatgggcgtta

SEQ ID NO: 878871 - DNA, 75 bp, synthetic construct
  source 1..75: mol_type = other DNA
acctttaaattattatgacaataatgtatttggaacgcttaatcttcttagcttaatgattgaacattgtgttta

SEQ ID NO: 878872 - DNA, 75 bp, synthetic construct
  source 1..75: mol_type = other DNA
ttgtatcggaactggtagattgaaaggagatgtgagaagtgattttattgggtttaatggtagtaaacaggtagg

SEQ ID NO: 878873 - DNA, 75 bp, synthetic construct
  source 1..75: mol_type = other DNA
tgctgcaacgaaaagaaaattacaactgtccagttaggcaggaaacttaatggcaggtatgcagatatgattgct

SEQ ID NO: 878874 - DNA, 75 bp, synthetic construct
  source 1..75: mol_type = other DNA
aaaccaccgaagaaagagaccatggaacgcgtgaaaggcattcttgagcagtacggtcataaggtaatgttctaa

SEQ ID NO: 878875 - DNA, 75 bp, synthetic construct
  source 1..75: mol_type = other DNA
tcttggccttgaggtgttatccagtatttatatgctggccatcctgaatatgattttgatgggggatggtagctc

SEQ ID NO: 878876 - DNA, 75 bp, synthetic construct
  source 1..75: mol_type = other DNA
atttttcgaaaaatggcggcgcaggcggtaatcgtcccgacgtaaaactccttgttaaggacaaatacggcaagc

SEQ ID NO: 878877 - DNA, 75 bp, synthetic construct
  source 1..75: mol_type = other DNA
gagatcgataacgcactggacgcttatttttcgaaaaatggcggcgcaggcggtaatcgtcccgacgtaaaactc

SEQ ID NO: 878878 - DNA, 75 bp, synthetic construct
  source 1..75: mol_type = other DNA
tgtggatcgactcaccggcacgtcgtgcggaagccgaaaaatggatggactgggcaaaccagacgctcagtaatg

SEQ ID NO: 878879 - DNA, 75 bp, synthetic construct
  source 1..75: mol_type = other DNA
tttcaccattaacgccacgcctattgtgattggcgagaaatgctggctggcaaccgatgtctttgttgcccctgg

SEQ ID NO: 878880 - DNA, 75 bp, synthetic construct
  source 1..75: mol_type = other DNA
tctccccgcaggcgggagaatgctttagcgatcgcttagtcattcgtgggtcagaccagaactattccgaagcgt

SEQ ID NO: 878881 - DNA, 75 bp, synthetic construct
  source 1..75: mol_type = other DNA
agtgatgcagcggcggtggctggtcttgtgatgacggtgctgaccgttggtctggtgtcgtgtgcaggaaaatca

SEQ ID NO: 878882 - DNA, 75 bp, synthetic construct
  source 1..75: mol_type = other DNA
attgaaattcagaagctggtacagagtggcggaaatcagaaagactttactgtccagatgacatgtccttatcat

SEQ ID NO: 878883 - DNA, 75 bp, synthetic construct
  source 1..75: mol_type = other DNA
catatctctttatgcaaaactcggatataaagggaatatgcagagtctgaaggctggtaatttttctgcaacagc

SEQ ID NO: 878884 - DNA, 75 bp, synthetic construct
  source 1..75: mol_type = other DNA
aaagaaatataatgaaattaaaatcaatattaataatgttgattctcaatttaaaagatacaagttattaagctt

SEQ ID NO: 878885 - DNA, 75 bp, synthetic construct
  source 1..75: mol_type = other DNA
tattttaatcctgtcggtgctcattctagtggtaaaataggtgaggctccatctggtatccctaataatcttgtc

SEQ ID NO: 878886 - DNA, 75 bp, synthetic construct
  source 1..75: mol_type = other DNA
gatgcagataaagctaattctttattggactggaaagccgaagaaactctagaacagatgttattggactcgtgg

SEQ ID NO: 878887 - DNA, 75 bp, synthetic construct
  source 1..75: mol_type = other DNA
tagacgttggttccggtagcgtccgggccgggatctttaccgcggcgggtcagcggctggcctttaccgttaaac

SEQ ID NO: 878888 - DNA, 75 bp, synthetic construct
  source 1..75: mol_type = other DNA
tttcggtaatgattataatacccatgatggtactggtgtgcgtgattatattcatgttatggatcttgccgaagg

SEQ ID NO: 878889 - DNA, 75 bp, synthetic construct
  source 1..75: mol_type = other DNA
caggatatataggttcgcatactgtgttggctctccaggaaaggaatgatgacgttgtagttcttgataatcttt

SEQ ID NO: 878890 - DNA, 75 bp, synthetic construct
  source 1..75: mol_type = other DNA
gctctttatggctctaaaggcaactcagcacattacggtgtattcaaaagcgccccaaaagaacaaggtccaatc

SEQ ID NO: 878891 - DNA, 75 bp, synthetic construct
  source 1..75: mol_type = other DNA
gtggggattctggcatctggggcaattcgccacggattatcagcaactgtttgccgagaagccgtcactgacgct

SEQ ID NO: 878892 - DNA, 75 bp, synthetic construct
  source 1..75: mol_type = other DNA
ctgataagcccgtggtcgcaaagcacaacggtaaaagacgccgccatgcagtggggattctggcatctggggcaa

SEQ ID NO: 878893 - DNA, 75 bp, synthetic construct
  source 1..75: mol_type = other DNA
ggcagatctcccctcactttcaaaattttattctattgataactacgcgaatagcttttgggttcatcatgattc

SEQ ID NO: 878894 - DNA, 75 bp, synthetic construct
  source 1..75: mol_type = other DNA
gtaaatatgagaacagctggcagcaattatttagtgcaggcgctggcacctcatggcaaaaaaattatggcaccg

SEQ ID NO: 878895 - DNA, 75 bp, synthetic construct
  source 1..75: mol_type = other DNA
ttacgctggtatcagaatgagcgtcgtcaatacagcagttcatgggcttttactgatttttccgacgggaaccaa

SEQ ID NO: 878896 - DNA, 75 bp, synthetic construct
  source 1..75: mol_type = other DNA
atgctgcagttgctgaatgggataagttacagcaacgattgcttgatgccagaaataaaatttacaatttttgct

SEQ ID NO: 878897 - DNA, 75 bp, synthetic construct
  source 1..75: mol_type = other DNA
cgaattaaaggaaattttacgcgctattgatggtgatgtgttcgcgccttactacagcgcgttaatgcgcttgct

SEQ ID NO: 878898 - DNA, 75 bp, synthetic construct
  source 1..75: mol_type = other DNA
ttatccttcctgcaggagcgagtaaatcaatacgtttaactcaatttaaaataccaaaaaaagaggaagtttata

SEQ ID NO: 878899 - DNA, 75 bp, synthetic construct
  source 1..75: mol_type = other DNA
caggctgcgcggtttgaacagcagcagagtgcgaagcaggctgcaatcagcgcaaaagcccgggggctgacggac

SEQ ID NO: 878900 - DNA, 75 bp, synthetic construct
  source 1..75: mol_type = other DNA
ctgttaatataatctatgcggctctaatcagatctttaccaagtgaacaaaatatatcactaaatatttctagaa

SEQ ID NO: 878901 - DNA, 75 bp, synthetic construct
  source 1..75: mol_type = other DNA
gcgccagcgtgccggaaggtcaactggttgttatcaacaacatcattgacattaatgaactcgaaacgcaactgc

SEQ ID NO: 878902 - DNA, 75 bp, synthetic construct
  source 1..75: mol_type = other DNA
ctcagcgaaaacacaaccagtaaagaggcggaagacattgcccgtgagggcagtctttccgccgaagatttcaca

SEQ ID NO: 878903 - DNA, 75 bp, synthetic construct
  source 1..75: mol_type = other DNA
actcccgcgaggagtacctgtcctttctcggagaagaagcagaacggaatataccgtatgatccggagcccgtcg

SEQ ID NO: 878904 - DNA, 75 bp, synthetic construct
  source 1..75: mol_type = other DNA
agccgaaacagtcaggagtcaaagtgtcagccggcgagcgtcaggaagaccagtgcgcatgctgccctgctgacg

SEQ ID NO: 878905 - DNA, 75 bp, synthetic construct
  source 1..75: mol_type = other DNA
acaatgatggttattcgcacttatttcttgataccaaggatgaaagttctaataaaacagataatttgattcagg

SEQ ID NO: 878906 - DNA, 75 bp, synthetic construct
  source 1..75: mol_type = other DNA
gctggtttccctggttgctgatgctcaaagcagggtggtttgagtaccgctggcaacaaaccggcgatcaacaat

SEQ ID NO: 878907 - DNA, 75 bp, synthetic construct
  source 1..75: mol_type = other DNA
cggtgagcgccaggaagaccaggcgcatgcagccctgctggcgcttgaaaccgagctcaggacgctggagaagca

SEQ ID NO: 878908 - DNA, 75 bp, synthetic construct
  source 1..75: mol_type = other DNA
atgttatatatgcggctctgattagaattttgccaataaatattaaaacgaatgcgagtgtatcgatatcaccta

SEQ ID NO: 878909 - DNA, 75 bp, synthetic construct
  source 1..75: mol_type = other DNA
agatgttgaactgacagagagttgtctgattgagaatgatgaactggcactgtctgttattcaacaatttagcca

SEQ ID NO: 878910 - DNA, 75 bp, synthetic construct
  source 1..75: mol_type = other DNA
ccaaccttcagggcgcatggaatgaccgggaaaatgcccggctggggctggcagcggccacgctgcagtcggata

SEQ ID NO: 878911 - DNA, 75 bp, synthetic construct
  source 1..75: mol_type = other DNA
accaggcgagtgagtcactggcagccctggtgaatgccggtgtgcgtggtggtgaacagtttgatgccatcaacc

SEQ ID NO: 878912 - DNA, 75 bp, synthetic construct
  source 1..75: mol_type = other DNA
caggtgcgctggcgtacgcctggtaccagggggattccacgctttcagcgtttaataaaaccctggttctttccg

SEQ ID NO: 878913 - DNA, 75 bp, synthetic construct
  source 1..75: mol_type = other DNA
cgcgctggggctgacggcggtgatcagttcttccattgaatcgagcttaggcttaacgcaactggcgcggattgc

SEQ ID NO: 878914 - DNA, 75 bp, synthetic construct
  source 1..75: mol_type = other DNA
ggatctgatgcaggcgcagcaggttcgtcgctggccggggagcccactgccgttagtggacgctgatgtacagga

SEQ ID NO: 878915 - DNA, 75 bp, synthetic construct
  source 1..75: mol_type = other DNA
ttttaagtgatgcgaaccacaccgctatggctatttattgtgatgctattttgagtaaagaccaaaaattttgtg

SEQ ID NO: 878916 - DNA, 75 bp, synthetic construct
  source 1..75: mol_type = other DNA
cattacgttccctagttattttgaacccagcaaactaaaatactggactcttgaacatcgtcttttaaatcagcg

SEQ ID NO: 878917 - DNA, 75 bp, synthetic construct
  source 1..75: mol_type = other DNA
gatttctgcacagaacaaccagtacggcgctggagtgatgagcgaaaagcggctgcccgtcgccggaatctggaa

SEQ ID NO: 878918 - DNA, 75 bp, synthetic construct
  source 1..75: mol_type = other DNA
ttgccagtaagaagtttgatgcagctgaactccgtgacggggcttacaggtgtaagacatttgaaaacaccccta

SEQ ID NO: 878919 - DNA, 75 bp, synthetic construct
  source 1..75: mol_type = other DNA
gaaggcctggagcagtgaaccggcctcgcttgacggtggcggtgatatctccgcgaagttcgccagcgccaccag

SEQ ID NO: 878920 - DNA, 75 bp, synthetic construct
  source 1..75: mol_type = other DNA
ccgcaaccatccgtgtgaacggtcaggagtttgccacgctggaaggcgcaaccttctcgccatccggttttgaac

SEQ ID NO: 878921 - DNA, 75 bp, synthetic construct
  source 1..75: mol_type = other DNA
ttatgctttgtacgtcatgcctgacaccaaaagtaaagaatcattaatcagactattcgactcaatcaaaactgt

SEQ ID NO: 878922 - DNA, 75 bp, synthetic construct
  source 1..75: mol_type = other DNA
gcaattatggcgtcaggtcaggcgatggtttccctggctgctgatgctcaaagcagggtggtttgagtaccgctg

SEQ ID NO: 878923 - DNA, 75 bp, synthetic construct
  source 1..75: mol_type = other DNA
cgaccgtggcggcgtagttatcgaaccaatgctgaccgaccagtggtacgtgcgtgccgatgtactggcgaaacc

SEQ ID NO: 878924 - DNA, 75 bp, synthetic construct
  source 1..75: mol_type = other DNA
agcgtcgcgtaaatgaaaaccgtggcttcctgcaaacgctggcacgtctggaaagcatcaccgtgctgcctgccg

SEQ ID NO: 878925 - DNA, 75 bp, synthetic construct
  source 1..75: mol_type = other DNA
ttaacgactatgaagtcggtaaacgtcacgcgctgccgatgatcaacatcctgacctttgacggcgatatccgtg

SEQ ID NO: 878926 - DNA, 75 bp, synthetic construct
  source 1..75: mol_type = other DNA
agttggatcccggtcgtttctggatttttgttaagccgggttattcgtaaagatcgcgatgagccgtttgtctat

SEQ ID NO: 878927 - DNA, 75 bp, synthetic construct
  source 1..75: mol_type = other DNA
ataacagtaaaattggtcacggagcgatcagtcgcattggtagaccgaataatccttttgaaccgcgtcgcaatc

SEQ ID NO: 878928 - DNA, 75 bp, synthetic construct
  source 1..75: mol_type = other DNA
gaagacgaagtgcgtaaagaaaataacctcggtgccgacgtcgcgctgcgtcaggacgaagacgttctcgatacc

SEQ ID NO: 878929 - DNA, 75 bp, synthetic construct
  source 1..75: mol_type = other DNA
cgaccgtggcggcgtagttatcgaaccaatgctgaccgaccagtggtacgtacgtgccgatgtactggcgaagcc

SEQ ID NO: 878930 - DNA, 75 bp, synthetic construct
  source 1..75: mol_type = other DNA
acccgtcacgactatggccgcgaagccttcatcgacaaaatctgggaatggaaagcagaatccggcggcaccatt

SEQ ID NO: 878931 - DNA, 75 bp, synthetic construct
  source 1..75: mol_type = other DNA
ggtgaaatcagccgtatcgagaacaagctggcgaatgaaggctttgtcgcccgcgcaccggaagcggtcatcgcg

SEQ ID NO: 878932 - DNA, 75 bp, synthetic construct
  source 1..75: mol_type = other DNA
tcaggacgaagacgttctcgacacctggttctcttctgcgctgtggaccttctctacccttggctggccggaaaa

SEQ ID NO: 878933 - DNA, 75 bp, synthetic construct
  source 1..75: mol_type = other DNA
ggcggttgaagcggttgagaacggcgacattcagttcgtaccgaagcagtacgaaaacatgtatttctcctggat

SEQ ID NO: 878934 - DNA, 75 bp, synthetic construct
  source 1..75: mol_type = other DNA
ctctcgtcagttgtggtggggtcaccgtatcccggcatggtatgacgaagcgggtaacgtttatgttggccgcaa

SEQ ID NO: 878935 - DNA, 75 bp, synthetic construct
  source 1..75: mol_type = other DNA
aacagcggtggttcctcttttgcttcgcgccccgtctggcgcaacacttctggtgattactcctggcgctccggt

SEQ ID NO: 878936 - DNA, 75 bp, synthetic construct
  source 1..75: mol_type = other DNA
ctgagagatattcttcatgggtgagttattatgaagggataaagctgaatccgctggcattgcgtaaatcggatg

SEQ ID NO: 878937 - DNA, 75 bp, synthetic construct
  source 1..75: mol_type = other DNA
cggcattgccgaagaccgatatccgcgctgttcatcaggcgctggatgctgaacaccggatctatgcgcgggagg

SEQ ID NO: 878938 - DNA, 75 bp, synthetic construct
  source 1..75: mol_type = other DNA
cggtttgcacttctggcaacttggcgagtcgcactactgggggcataacgcgattatccgcgtgaaaccgtttat

SEQ ID NO: 878939 - DNA, 75 bp, synthetic construct
  source 1..75: mol_type = other DNA
gcgggagttttctcattgaacatcagggccagcgttttgttgtgcgtcagccgcacgatcctgatgcgccgcggt

SEQ ID NO: 878940 - DNA, 75 bp, synthetic construct
  source 1..75: mol_type = other DNA
tgacgttggcgcaaactgttgtcgccacctggtacatgaagacgattctgccgtatcagggatgggcgttgatta

SEQ ID NO: 878941 - DNA, 75 bp, synthetic construct
  source 1..75: mol_type = other DNA
gaagaaagttactgaggaaaagagtacgacggcagtcaaaccaggcgtgctcaatgggcgctatcgtgtgacgtt

SEQ ID NO: 878942 - DNA, 75 bp, synthetic construct
  source 1..75: mol_type = other DNA
ctaccgaagggacgctttcctggcggcaagccacggcccaggcgagacgggctacaacgaaccagacgtgtttgc

SEQ ID NO: 878943 - DNA, 75 bp, synthetic construct
  source 1..75: mol_type = other DNA
agcgaaagctatgaccgtggcgattcgcacttttttacagcaaaacgccaatcgggaaggcgattgcctgaccat

SEQ ID NO: 878944 - DNA, 75 bp, synthetic construct
  source 1..75: mol_type = other DNA
attatcaacatgtaaacaaaggcgacggttgttacttttacatcctcgatggccatggttcagatgcaaaaccaa

SEQ ID NO: 878945 - DNA, 75 bp, synthetic construct
  source 1..75: mol_type = other DNA
cgctggtgtacccgcagtcagacggtacggtgtgtgcgatgaaagccacggcagaagggccgaagcggatggatt

SEQ ID NO: 878946 - DNA, 75 bp, synthetic construct
  source 1..75: mol_type = other DNA
ttgacccgacgcagattcaggttaccgatctggcgaaaacgattcaggacccgttggcggcgaagttgcgcgagc

SEQ ID NO: 878947 - DNA, 75 bp, synthetic construct
  source 1..75: mol_type = other DNA
actgaataaacagggttatgaagagtggcctttatatttgggagttgtaggttgccatactgttcttaattttct

SEQ ID NO: 878948 - DNA, 75 bp, synthetic construct
  source 1..75: mol_type = other DNA
aatgccgccacgataaccggcaatgtcaacgtgattggtaacgtgcaggccagcggcacattgcaggacagcggt

SEQ ID NO: 878949 - DNA, 75 bp, synthetic construct
  source 1..75: mol_type = other DNA
agatggcgtggtgctgggcgcagtttattctacggttgacaccgcgcctgtagcctcgcgcgacaaacgttacgt

SEQ ID NO: 878950 - DNA, 75 bp, synthetic construct
  source 1..75: mol_type = other DNA
tatcaccacatgacctcatcactgacgaaattgaatctcagatagaacaggcagttgaagacattaagttagtta

SEQ ID NO: 878951 - DNA, 75 bp, synthetic construct
  source 1..75: mol_type = other DNA
acctttgacggtattgcacagaatatggcagcgatgctgaccggcagcgaacagaactggcgtggtttcacccgt

SEQ ID NO: 878952 - DNA, 75 bp, synthetic construct
  source 1..75: mol_type = other DNA
aggccagagagatggcagcaaaggactgggccgagtctgaggcatcacggctgaaatataccgaagaggcgcaga

SEQ ID NO: 878953 - DNA, 75 bp, synthetic construct
  source 1..75: mol_type = other DNA
agcggaacgctttccggtgatcaaattacggtatcaagcggtcttctggaaaataccagcggtggcatcatcaat

SEQ ID NO: 878954 - DNA, 75 bp, synthetic construct
  source 1..75: mol_type = other DNA
gcacagttgattaacaacggcacgattaatcttggagcacaaggtacgacagataccggtatgataggtatgcag

SEQ ID NO: 878955 - DNA, 75 bp, synthetic construct
  source 1..75: mol_type = other DNA
ttagtctccaggattcccggggcggttcataatgccagcatgatggagatttataatactgcggtgtttaacaac

SEQ ID NO: 878956 - DNA, 75 bp, synthetic construct
  source 1..75: mol_type = other DNA
ccagagtgtgacaatctgaagagtaactggcttgcggtgctgcagcgcaattctcaggacaataaagactactgg

SEQ ID NO: 878957 - DNA, 75 bp, synthetic construct
  source 1..75: mol_type = other DNA
acgggtgttatcaatatcaatgttggtactggtcaggcgttttataacgatggcacaggaacaattgttaactat

SEQ ID NO: 878958 - DNA, 75 bp, synthetic construct
  source 1..75: mol_type = other DNA
agcagcgaagtgcattatggcgactatacgttgccggatgtgccgaagcccaatacggttagtgtaacgtcggga

SEQ ID NO: 878959 - DNA, 75 bp, synthetic construct
  source 1..75: mol_type = other DNA
cggctgctaccagtacgtttgatggaatcgggcaaaatatggctgacatgctgacgcgcggtaaggctgactggg

SEQ ID NO: 878960 - DNA, 75 bp, synthetic construct
  source 1..75: mol_type = other DNA
tcgaagctgaagatctcatcagcggtcagactgtcgcttgcgcctttaaagacttccccgatcacttcggctttt

SEQ ID NO: 878961 - DNA, 75 bp, synthetic construct
  source 1..75: mol_type = other DNA
atgaacatgccaatggagagctgtacgcaaatgaacgccgtagaaattgaacaagccatcactgatcttgcagag

SEQ ID NO: 878962 - DNA, 75 bp, synthetic construct
  source 1..75: mol_type = other DNA
tgcccgtctggggctggcagcggccacgctgcagtcggatatggaaaaagccggtgaactggccgccagggaccg

SEQ ID NO: 878963 - DNA, 75 bp, synthetic construct
  source 1..75: mol_type = other DNA
gaggcgaacctgatcgcccatctgatattccggtcacaaattttcgtggcattgagctgcgcgacttcccggcag

SEQ ID NO: 878964 - DNA, 75 bp, synthetic construct
  source 1..75: mol_type = other DNA
tgctgagtatcagtgcgatgtggtgtaccggggactaaaacttgcactggccgagtttcttcctctgcgtaatga

SEQ ID NO: 878965 - DNA, 75 bp, synthetic construct
  source 1..75: mol_type = other DNA
agattgactttgaaaatgaaggaggagagacatatatttgtggaaatcctccatacaagggtagccaaacccaaa

SEQ ID NO: 878966 - DNA, 75 bp, synthetic construct
  source 1..75: mol_type = other DNA
caccgacccgacgtcgggactgatggctatggcgcgccagttccgtaacgtgacggcagagcagattgcgtatgt

SEQ ID NO: 878967 - DNA, 75 bp, synthetic construct
  source 1..75: mol_type = other DNA
gccagtgcgcagaaggcatttgatgaggcggataaaaaatggcagtggtaccagagccggagccagcgccgcggt

SEQ ID NO: 878968 - DNA, 75 bp, synthetic construct
  source 1..75: mol_type = other DNA
gcaccgaaacgcgtttcctgaacgttcagcttctgcagaacagcatggacgcgcctagaatcatcgggtctttcc

SEQ ID NO: 878969 - DNA, 75 bp, synthetic construct
  source 1..75: mol_type = other DNA
agacagcttaaagcaagaaagttggaactcgaattcgataatcaatttaggcttaccgggcgtgcatttcttcat

SEQ ID NO: 878970 - DNA, 75 bp, synthetic construct
  source 1..75: mol_type = other DNA
ccgttcgtgacgtggtgcgaggagcgcgggctgatgtacgcgccgcaggtcagccagccacagcttgaaagttat

SEQ ID NO: 878971 - DNA, 75 bp, synthetic construct
  source 1..75: mol_type = other DNA
gcctgaaaagcgattttggcgtagtgaaaaacagtaaaggtaagctcggcgtcgattgcgtgttctctaccgaag

SEQ ID NO: 878972 - DNA, 75 bp, synthetic construct
  source 1..75: mol_type = other DNA
cgacgcagattcaggttaccgatctggcgaaaacgattcaggacccgctggcggcgaagttgcgcgagcgcctga

SEQ ID NO: 878973 - DNA, 75 bp, synthetic construct
  source 1..75: mol_type = other DNA
cttgcagcgtctactaaattagcttatttcacgaacaacgttttaaacgctgttaatgatgaaaaattagctggc

SEQ ID NO: 878974 - DNA, 75 bp, synthetic construct
  source 1..75: mol_type = other DNA
gtagccgtaccatcagagaagattgccctgcatgatgccaccctgcaggcctttctggacggtgttcctcccgat

SEQ ID NO: 878975 - DNA, 75 bp, synthetic construct
  source 1..75: mol_type = other DNA
ccagcctgccggttctgcgccttgccctcaataacgccagcacggtgacgttccaggacagcacgggggccccct

SEQ ID NO: 878976 - DNA, 75 bp, synthetic construct
  source 1..75: mol_type = other DNA
ctaaagcggaagtcatggccgaacgtattcgccagattaacccagagtgccgtgtaacggtggtggatgacttcg

SEQ ID NO: 878977 - DNA, 75 bp, synthetic construct
  source 1..75: mol_type = other DNA
ggttctgcgcgacaggcggttaaaaacccgcgacgggctatacgtttgcctgcgcgagggcgagcgcgaagggtg

SEQ ID NO: 878978 - DNA, 75 bp, synthetic construct
  source 1..75: mol_type = other DNA
ggatctgatgcaggcgcagcaggttcgtcgctggccgggtagcccgctgccgttagtggacgttgatgcactgga

SEQ ID NO: 878979 - DNA, 75 bp, synthetic construct
  source 1..75: mol_type = other DNA
ggcagatccccatggacgcggggatggttctgcgcgacaggcggttaaaaacccgcgacgggctatacgtttgct

SEQ ID NO: 878980 - DNA, 75 bp, synthetic construct
  source 1..75: mol_type = other DNA
aaagctggtactcagcaatatcgcttcattaaaaatgatttctataactatctggctgatgctttcaaagcgtaa

SEQ ID NO: 878981 - DNA, 75 bp, synthetic construct
  source 1..75: mol_type = other DNA
ccgtgatgcaatgactaatagttattctctggaaaaactggtttatctggttaaatccattaaagctggcaaatg

SEQ ID NO: 878982 - DNA, 75 bp, synthetic construct
  source 1..75: mol_type = other DNA
tcaaacccacgctcacgggcagcctggataaagtacgcgagcaggtgcaggcggcgcacgcgctggggctgacgg

SEQ ID NO: 878983 - DNA, 75 bp, synthetic construct
  source 1..75: mol_type = other DNA
accagtgtggtgccccgtatcagctccctcacggtaaatctgtcacccggagccagtctgccgcttgtccgaacc

SEQ ID NO: 878984 - DNA, 75 bp, synthetic construct
  source 1..75: mol_type = other DNA
atggggacgctgcactgctgaactatcatattgttggcgtcacccgtgatggtattcctgaaccctggcatcttg

SEQ ID NO: 878985 - DNA, 75 bp, synthetic construct
  source 1..75: mol_type = other DNA
gttacgtctcgatgcgaagctggtttacgacgataaaggtttttgtgccgatatcgtaaatctgattgtgaaagg

SEQ ID NO: 878986 - DNA, 75 bp, synthetic construct
  source 1..75: mol_type = other DNA
gcgggtaatccatttagcgaaatcgatctctttactggagaagagggcgacacatatcgaaatggccgcatcctt

SEQ ID NO: 878987 - DNA, 75 bp, synthetic construct
  source 1..75: mol_type = other DNA
cgtccgcgccggtttctgctgcgccgctgctgcaggtgagcggcgcactgatcgccattattgccctgatcctcg

SEQ ID NO: 878988 - DNA, 75 bp, synthetic construct
  source 1..75: mol_type = other DNA
ggccggaactctcaggcttaaaggtaaactgacgccggcgttattacagacacttatccgcgaaataaaagggag

SEQ ID NO: 878989 - DNA, 75 bp, synthetic construct
  source 1..75: mol_type = other DNA
tgtgctgtgagctggttctgccggccggaactctcaggatgaaaggtgaactgacaccggcgttattacagacat

SEQ ID NO: 878990 - DNA, 75 bp, synthetic construct
  source 1..75: mol_type = other DNA
tataccagtttgttggggcggagctattctggtggtggttctggcgctggtggcggaggcggtggtggctggtaa

SEQ ID NO: 878991 - DNA, 75 bp, synthetic construct
  source 1..75: mol_type = other DNA
cagcactgctgaactatcgtattgttggcgtcacccgtgacggcgttcctgaaccctggcatcttgactggcata

SEQ ID NO: 878992 - DNA, 75 bp, synthetic construct
  source 1..75: mol_type = other DNA
cgataaacaacgtttcttgcctcaaggcgactatcattatcaaattcattatcaggttaaaaatgctttcctgcg

SEQ ID NO: 878993 - DNA, 75 bp, synthetic construct
  source 1..75: mol_type = other DNA
aaataatgcggtattactgcccgcagagcagttattactggaagcgttatttcgtaaaggcgataaggtcgttct

SEQ ID NO: 878994 - DNA, 75 bp, synthetic construct
  source 1..75: mol_type = other DNA
tttgttctcattacagatgcacctgagtctgggggccaataccagtttgttggggcgaagttattccggtggtgg

SEQ ID NO: 878995 - DNA, 75 bp, synthetic construct
  source 1..75: mol_type = other DNA
tttctcttcgttgagttatccgaaaaacacggagatcccttcttatgaagaagggatctcgctctttgatgttga

SEQ ID NO: 878996 - DNA, 75 bp, synthetic construct
  source 1..75: mol_type = other DNA
gccgaacagcgcaacgcactgctggagatcatggatgatcggtatgggaaatactcgacgatagtggtcagtcag

SEQ ID NO: 878997 - DNA, 75 bp, synthetic construct
  source 1..75: mol_type = other DNA
catgaaattgacattatgcactggctgcttaacgaagattataaaaccgttaaggtttacttcccgcgtcagtcc

SEQ ID NO: 878998 - DNA, 75 bp, synthetic construct
  source 1..75: mol_type = other DNA
gattacgggataatgcagattaactccacacatattcccgggctgaaaaaaatgggcattatccggagtgagaaa

SEQ ID NO: 878999 - DNA, 75 bp, synthetic construct
  source 1..75: mol_type = other DNA
cattaaagacaaggatgaactgcttaaaaatccctgcctgaatattcataccggcgcctggatactggcccacca

SEQ ID NO: 879000 - DNA, 75 bp, synthetic construct
  source 1..75: mol_type = other DNA
atcacttctgaactgccatttggttattacagcattactcctgcagaagttaatgctaaaggtgaagttgtaact

SEQ ID NO: 879001 - DNA, 75 bp, synthetic construct
  source 1..75: mol_type = other DNA
caggatatcaccaatctggaaaaagcagcggcattaagcattgccagaatgcttaacatacccgcgttaatagct

SEQ ID NO: 879002 - DNA, 75 bp, synthetic construct
  source 1..75: mol_type = other DNA
atgcagaaacgagaacccgtcatcatcgcgccagactatacctatgatgaactttatgagtggatgcaccataaa

SEQ ID NO: 879003 - DNA, 75 bp, synthetic construct
  source 1..75: mol_type = other DNA
tcgcgccaggctataccgatgatgaaatttacgaatggatgtgcgggaaggtacgcgccattaatgacctgaagc

SEQ ID NO: 879004 - DNA, 75 bp, synthetic construct
  source 1..75: mol_type = other DNA
tcccacgataagaagagcattcgctttttgagcgcctttctggtggggatcacatggccgatgagttttccggtg

SEQ ID NO: 879005 - DNA, 75 bp, synthetic construct
  source 1..75: mol_type = other DNA
aatgtggccttgatggtgtggtgtgttctgctcaggaagctgtgcgctttaaacaggtattcggtcaggagttca

SEQ ID NO: 879006 - DNA, 75 bp, synthetic construct
  source 1..75: mol_type = other DNA
ctgacttaggcgtgtggatggttaacgttcatgcctccggtggggcacgtatgatgaccgcagcgcgtgaggctc

SEQ ID NO: 879007 - DNA, 75 bp, synthetic construct
  source 1..75: mol_type = other DNA
gcttctgaaaaccattgcacagcaggaaagcggcctggtcgccactgcgataaatcacaataaaaacaaatccgg

SEQ ID NO: 879008 - DNA, 75 bp, synthetic construct
  source 1..75: mol_type = other DNA
ttaccgccagcggattatactcagtcagcgttgctgaggcttagtaacaacaaatcacccgtgccaggtaacgtt

SEQ ID NO: 879009 - DNA, 75 bp, synthetic construct
  source 1..75: mol_type = other DNA
agttgatatggaagtggattattttaacaaatattatgggcgtggcagtgcgagtaaaatatataacagtaaagg

SEQ ID NO: 879010 - DNA, 75 bp, synthetic construct
  source 1..75: mol_type = other DNA
ttgccgaccgggtatcagtagctaaagggatcctgattgggaattttgcaaaggttgttggacttaagcaaaacg

SEQ ID NO: 879011 - DNA, 75 bp, synthetic construct
  source 1..75: mol_type = other DNA
cgattactggcgcgcactacaaaaccgcattcgtgaaggacatgtggaagatgtttatgcgtatcggcgcaggca

SEQ ID NO: 879012 - DNA, 75 bp, synthetic construct
  source 1..75: mol_type = other DNA
ttggtattagaatggataaaataaatggagaatcgctttcaaatatttcgtccttgccagcacaggctgagcatg

SEQ ID NO: 879013 - DNA, 75 bp, synthetic construct
  source 1..75: mol_type = other DNA
acaagctgagcatgctatttacgatatgtttgatagactggagcaaaaaggaattctttttgtcgatacaacaga

SEQ ID NO: 879014 - DNA, 75 bp, synthetic construct
  source 1..75: mol_type = other DNA
ttgttcccatgacatcgtatagcgttacgaccctggaacaattgcgccaacaacttgaggatgccagagtaaatg

SEQ ID NO: 879015 - DNA, 75 bp, synthetic construct
  source 1..75: mol_type = other DNA
ccgggctgaaaaaaatgggcattatccggagtgagaaagatctgttgaataatgtctgcctgaatattcagaccg

SEQ ID NO: 879016 - DNA, 75 bp, synthetic construct
  source 1..75: mol_type = other DNA
atgaaatctggaactaagctcttagttggtgcgttagcttttgttgttacaaacgtctatgctgctgaattgatg

SEQ ID NO: 879017 - DNA, 75 bp, synthetic construct
  source 1..75: mol_type = other DNA
ttgccgaccgggtatcagtagctaaagggatcctgattgggaattttgcaaaggtcgttggacttaaacaaaatg

SEQ ID NO: 879018 - DNA, 75 bp, synthetic construct
  source 1..75: mol_type = other DNA
tatcgtgagtggctgaaatcggcagatatggcactttataaagcaaagaaagccggacgtaaccgcaccgaagtg

SEQ ID NO: 879019 - DNA, 75 bp, synthetic construct
  source 1..75: mol_type = other DNA
atgcagattatttcagcaaacgatttcaaatttaaaaaacaggctttgacattgtgggtgggcatcgctaatatt

SEQ ID NO: 879020 - DNA, 75 bp, synthetic construct
  source 1..75: mol_type = other DNA
gtgaagatggtttggttgctacagaccacctgactgttgatagctacagtaccgttaatttaaccgaatctactg

SEQ ID NO: 879021 - DNA, 75 bp, synthetic construct
  source 1..75: mol_type = other DNA
atcgaccagtgctgcgaagagattgatttctttagtatcggcagtaacgacctgacgcagtatctgctggcggtg

SEQ ID NO: 879022 - DNA, 75 bp, synthetic construct
  source 1..75: mol_type = other DNA
tggtgggcgataactgccagttactgatttctggagccgacgaacaagaagcacaccagcgtttaagtcaatggc

SEQ ID NO: 879023 - DNA, 75 bp, synthetic construct
  source 1..75: mol_type = other DNA
gacgttgacgccgagcaatccgcactggaaaacggcctgacgctggtactgaaaaacattgagtttcgtctgctg

SEQ ID NO: 879024 - DNA, 75 bp, synthetic construct
  source 1..75: mol_type = other DNA
ctggggcgatgatgaagcgcaattcatcattatgttaaccctgaacaaacacgctgcgggcgatcagcatatgcg

SEQ ID NO: 879025 - DNA, 75 bp, synthetic construct
  source 1..75: mol_type = other DNA
gtgaggccgtcttctctaccggactgggctttagtttcgccattccacacagcaaatcagaacatattgagcagt

SEQ ID NO: 879026 - DNA, 75 bp, synthetic construct
  source 1..75: mol_type = other DNA
agttgcttaaccaggcgatggcctgccgtacttcactggaagtggagcatctgctggcgcagttccgtatgacgc

SEQ ID NO: 879027 - DNA, 75 bp, synthetic construct
  source 1..75: mol_type = other DNA
ggcggcgaaagcgcggatggcgcaacttgatagccgcgaatgccgccagttgctcaaccaggcaatggcctgccg

SEQ ID NO: 879028 - DNA, 75 bp, synthetic construct
  source 1..75: mol_type = other DNA
tcaacattccgacgctggttggtgtggatattgatgcccttactccgtggcagcatcaaacgatttatatcgacg

SEQ ID NO: 879029 - DNA, 75 bp, synthetic construct
  source 1..75: mol_type = other DNA
actgaaaagtggcggcaccacctcacataccgtaattcttgcccgttcgttcaacattccgacactggttggtgt

SEQ ID NO: 879030 - DNA, 75 bp, synthetic construct
  source 1..75: mol_type = other DNA
ctgctggcgcaattccgcatgacccaacaggacgcaccgctggtcaccgccgagtgcatcacactggaaagcgac

SEQ ID NO: 879031 - DNA, 75 bp, synthetic construct
  source 1..75: mol_type = other DNA
agcgccggtgcgctggggcgatgatgaagcgcaattcatcattatgttaaccctgaacaaacacgctgcgggcga

SEQ ID NO: 879032 - DNA, 75 bp, synthetic construct
  source 1..75: mol_type = other DNA
cctgacgcaatatctgctggcagtggatcgcgataacgctaaggttactcgtcactacaacagcctgaatccggc

SEQ ID NO: 879033 - DNA, 75 bp, synthetic construct
  source 1..75: mol_type = other DNA
gatctcgctgcatcctacgctgctgccgcaacagtggacgctggagcattatgtcgacatttttaacccgctgat

SEQ ID NO: 879034 - DNA, 75 bp, synthetic construct
  source 1..75: mol_type = other DNA
catggagccacgtaaaaatatccgtggcctgctgcatgcctatcagctgctaccgatggagatccgcatgcgcta

SEQ ID NO: 879035 - DNA, 75 bp, synthetic construct
  source 1..75: mol_type = other DNA
attgcaaaagaggcacattcttctgctgagggtattaagcattttttgaaaaaaaaccgtttggcatctgagttc

SEQ ID NO: 879036 - DNA, 75 bp, synthetic construct
  source 1..75: mol_type = other DNA
agggtagtttgttgcgcgaagggatgaaagtagtgattgccggacgtcctaacgccggtaaatcgagcctgttaa

SEQ ID NO: 879037 - DNA, 75 bp, synthetic construct
  source 1..75: mol_type = other DNA
caggatatcaccaatctggaaaaagcagcggcattaagcattgccaagaatgattacatacccacgttaatggct

SEQ ID NO: 879038 - DNA, 75 bp, synthetic construct
  source 1..75: mol_type = other DNA
ggctgaaaatctgtccgctctggagcaggatatcactaatctggaaaaagcagcggcattaagcattgccagaat

SEQ ID NO: 879039 - DNA, 75 bp, synthetic construct
  source 1..75: mol_type = other DNA
actttatgagtggatgcgccagaaaattaatgcagcgcaggatctgaaatgggccaatgaagccaggactaagca

SEQ ID NO: 879040 - DNA, 75 bp, synthetic construct
  source 1..75: mol_type = other DNA
tgcggctttttttaggcggcaggtgttacacggctgaaaaacttgaaaaggattatctggctgaagttgctaatt

SEQ ID NO: 879041 - DNA, 75 bp, synthetic construct
  source 1..75: mol_type = other DNA
acgttgcgctgttccgcctgtcaaagcgcgacaagcgagcaggcgaagtgatccgctacgacctaccggacggct

SEQ ID NO: 879042 - DNA, 75 bp, synthetic construct
  source 1..75: mol_type = other DNA
cgtgtttatgctgaaaagctacttcgacaccatccccgatgagatcgaagaagcggcgatgatggatggcctcaa

SEQ ID NO: 879043 - DNA, 75 bp, synthetic construct
  source 1..75: mol_type = other DNA
agcagaaaagggatactacgtgctaatgaattctcatggactcgatgtgccactgaaaccatagcagcatataaa

SEQ ID NO: 879044 - DNA, 75 bp, synthetic construct
  source 1..75: mol_type = other DNA
tgcggatgtttttgggggggcgttgctacacggctaaacaactcgagaaggactatctctctgaagtggcaggtt

SEQ ID NO: 879045 - DNA, 75 bp, synthetic construct
  source 1..75: mol_type = other DNA
gaaatgctgcgctttatttttgctaccattgcctatgatcccgatccagatttaaccccgctgactgtgagacgt

SEQ ID NO: 879046 - DNA, 75 bp, synthetic construct
  source 1..75: mol_type = other DNA
atgttaactgtggcttttctctatctgcctttggtgttcatgcttgaggcagatagcctcaagcacccgcagcaa

SEQ ID NO: 879047 - DNA, 75 bp, synthetic construct
  source 1..75: mol_type = other DNA
ggattggtgacgctggtggcctggcgttatcagcttatcggcccgacacctgtagggctgcgcgtgcgcttgtgt

SEQ ID NO: 879048 - DNA, 75 bp, synthetic construct
  source 1..75: mol_type = other DNA
atgagaaccttattggctatgctgttgtttccggtgatggcgcaagccgccggggaggggatgtggcaggcaagt

SEQ ID NO: 879049 - DNA, 75 bp, synthetic construct
  source 1..75: mol_type = other DNA
ccaggtcagcggcctgagtgaaccggtggttggcacaggttcaagcgtcgtaaggctgagcaggctgccgccgaa

SEQ ID NO: 879050 - DNA, 75 bp, synthetic construct
  source 1..75: mol_type = other DNA
ccatctgccgctgccgacttatctggtcgtccaggtacgtggcgaagcacacgatcaggaatttactatccactg

SEQ ID NO: 879051 - DNA, 75 bp, synthetic construct
  source 1..75: mol_type = other DNA
taatcatcaggaattgttgcagcaggcattaacgcatcgtagtgccagcagcaaacacaatgagcgtttagaatt

SEQ ID NO: 879052 - DNA, 75 bp, synthetic construct
  source 1..75: mol_type = other DNA
cagcgccatcaactgaagttgttggttgataagattgttgatgtcagcaaggaagaatcgtttgttgtctggcgt

SEQ ID NO: 879053 - DNA, 75 bp, synthetic construct
  source 1..75: mol_type = other DNA
gataattctaaatttgtcgataaacaatcgcgattagtgtttcagcaaataattaaaacatatccaaaagaaatg

SEQ ID NO: 879054 - DNA, 75 bp, synthetic construct
  source 1..75: mol_type = other DNA
attttaacctctgcatattcacaaccaagttcttctccgacccgcgccactattctcaccggacaatactcaatt

SEQ ID NO: 879055 - DNA, 75 bp, synthetic construct
  source 1..75: mol_type = other DNA
caaaaagtacatgcggagattggtgtagctggtattgatgatatgacagtaaatcaatataaaacagcggagagt

SEQ ID NO: 879056 - DNA, 75 bp, synthetic construct
  source 1..75: mol_type = other DNA
atggccgtcaactcaaacggttcaaacaatcgcgttgctgggcgtgattttcacgaaaagaatattcagatagag

SEQ ID NO: 879057 - DNA, 75 bp, synthetic construct
  source 1..75: mol_type = other DNA
gcccctacacatgattgatcattcctttggccctacaggagagtttatttttcctgtctctctggcaatgctgtc

SEQ ID NO: 879058 - DNA, 75 bp, synthetic construct
  source 1..75: mol_type = other DNA
ccaggttagcggcctgagcgaaccggtggttggcacaggttcaagccgtcgtaaggctgaacaggctgccgccga

SEQ ID NO: 879059 - DNA, 75 bp, synthetic construct
  source 1..75: mol_type = other DNA
atgacaaaggtccggtttccgttactaagatcgtcgacggcgctgagctgctgatcccgatggctggactcatca

SEQ ID NO: 879060 - DNA, 75 bp, synthetic construct
  source 1..75: mol_type = other DNA
gtttctgcatcatgatcccgccgccgaatgtcaccggcagtttgcatatgggtcacgccttccagcaaaccatca

SEQ ID NO: 879061 - DNA, 75 bp, synthetic construct
  source 1..75: mol_type = other DNA
taaacactcatccgccaacatcatctaagacacgtttaggttttcttaatgagtcttttagctttttgggatatg

SEQ ID NO: 879062 - DNA, 75 bp, synthetic construct
  source 1..75: mol_type = other DNA
tctccaccctaggttggccggaaaataccgacgcactgcgccagttccacccaaccagcgtgatggtatccggct

SEQ ID NO: 879063 - DNA, 75 bp, synthetic construct
  source 1..75: mol_type = other DNA
atcgaaaggttcgatgtggcacatccgctatccgctggctgatggcgcgaaaaccgcagacggtaaagattatct

SEQ ID NO: 879064 - DNA, 75 bp, synthetic construct
  source 1..75: mol_type = other DNA
aactggagcgttttgctgcacgtaaagcagtcgttgctgcggttgacgcgctcggcctgctggaagaaattaaac

SEQ ID NO: 879065 - DNA, 75 bp, synthetic construct
  source 1..75: mol_type = other DNA
cctcgcggattgctggtgggaatggtggcgcgggcatgggctgtggcgcttaggcgtaccggagatatggcaaat

SEQ ID NO: 879066 - DNA, 75 bp, synthetic construct
  source 1..75: mol_type = other DNA
tctggcaaaaaaagagtcttactcttcgggcggctttaccaccaaaaaaagcgtctaccgtttctcgcggcggct

SEQ ID NO: 879067 - DNA, 75 bp, synthetic construct
  source 1..75: mol_type = other DNA
ccatttgccgctaccgacttatctggtagtccaggtacgtggtgaggcgcacgatcaggaatttactatccactg

SEQ ID NO: 879068 - DNA, 75 bp, synthetic construct
  source 1..75: mol_type = other DNA
aggtttctatgacaatataaacaaacatcgacttaaaaagattctatcaaaaagagtgcattgtaaaagagcgtt

SEQ ID NO: 879069 - DNA, 75 bp, synthetic construct
  source 1..75: mol_type = other DNA
tttctttgtgagattttccctgattgtgtacctacgagtattgcttcaacttatattagaaatatctcggatgat

SEQ ID NO: 879070 - DNA, 75 bp, synthetic construct
  source 1..75: mol_type = other DNA
atatctggctctttggtgcagagtatttgatgaaggatttgtggaaataaaggataaagatggatttgcttatga

SEQ ID NO: 879071 - DNA, 75 bp, synthetic construct
  source 1..75: mol_type = other DNA
ttcttgtggtcgcagtcgctgcagccattcctttactcgccaacgctgcagataccccgtcaaccgccactgcgc

SEQ ID NO: 879072 - DNA, 75 bp, synthetic construct
  source 1..75: mol_type = other DNA
cgccagttaataaaagcatgtccgttggttgatctggagcatcctgtatatctgtgtttgcttgaactggagcag

SEQ ID NO: 879073 - DNA, 75 bp, synthetic construct
  source 1..75: mol_type = other DNA
gattacagtcagtgcaacctgcaacctccgctgaatatgaactacctggtgtttaatcaggagtatgtagacgat

SEQ ID NO: 879074 - DNA, 75 bp, synthetic construct
  source 1..75: mol_type = other DNA
gggcgcttgaaacactggcgagcgggcctgaaggtgaacctggtttccgtatatttgctcgttatctaaatcgac

SEQ ID NO: 879075 - DNA, 75 bp, synthetic construct
  source 1..75: mol_type = other DNA
gtgcaagtcaatgaagccgatgcgttgtacaccaaccccgctcaggcgcgtgaatttgccgaggcaaccggaatt

SEQ ID NO: 879076 - DNA, 75 bp, synthetic construct
  source 1..75: mol_type = other DNA
gctatggaaagaggaagtgttcattcgaacagacctgatttacctcctgttgattatgcactgccagagttgcct

SEQ ID NO: 879077 - DNA, 75 bp, synthetic construct
  source 1..75: mol_type = other DNA
ccccctaatacctggcttagtgctatctgggggcgtggtgactaccaccctcactggaccactgaaaaagagatg

SEQ ID NO: 879078 - DNA, 75 bp, synthetic construct
  source 1..75: mol_type = other DNA
tgggatgttcatggagttctttaaccagaaacctgacttcgcctgataatcgtgttttatcctctgtaagggatg

SEQ ID NO: 879079 - DNA, 75 bp, synthetic construct
  source 1..75: mol_type = other DNA
tatttaaagtcatcaaagacaagttcgcgccgcagaaagagatgtctgccgctcacgttcgtgcctgctatcaac

SEQ ID NO: 879080 - DNA, 75 bp, synthetic construct
  source 1..75: mol_type = other DNA
gctgcttcaggaagcgccagaaaaaatcaccgatctgggcgaacaaattgtgattcgccatctctatatcgaacg

SEQ ID NO: 879081 - DNA, 75 bp, synthetic construct
  source 1..75: mol_type = other DNA
gtttttctttcaggagttactgctttctgcggaacggaagaaaagggcagcgggttcttgcccaccagaatggac

SEQ ID NO: 879082 - DNA, 75 bp, synthetic construct
  source 1..75: mol_type = other DNA
actatggaaagaggtgctgttcattcgaatagacctgatttacctcctgttgattatgcaccgccagagttaccg

SEQ ID NO: 879083 - DNA, 75 bp, synthetic construct
  source 1..75: mol_type = other DNA
cagaaacctgacttctcctgacagtcgtattttatcctctgtaagggatgcagttgctagctcggataatggggc

SEQ ID NO: 879084 - DNA, 75 bp, synthetic construct
  source 1..75: mol_type = other DNA
agtgatattggtattaatataatcatgccacctaaaatggataatattttggattctggttatgattactgccca

SEQ ID NO: 879085 - DNA, 75 bp, synthetic construct
  source 1..75: mol_type = other DNA
gaatacccgagtggatatgtctttcgctcgcggcttgcgcgccattcttcgccaggatccggatgttgtgatggt

SEQ ID NO: 879086 - DNA, 75 bp, synthetic construct
  source 1..75: mol_type = other DNA
attgcgcaggatattgatcaatccgtcgatctcctctccctctcagaagaaatgcctgcgaatgaagatctactg

SEQ ID NO: 879087 - DNA, 75 bp, synthetic construct
  source 1..75: mol_type = other DNA
actccacactaacagtgcatcaggcgcagtgacccggctccgcgacatgggcgtcgaatcattcctgctttcgtc

SEQ ID NO: 879088 - DNA, 75 bp, synthetic construct
  source 1..75: mol_type = other DNA
ggttctacctgggaaggcggcgttcgcgtaccgactttcgtgtactggaaaggcatgatccagccgcgtaaatct

SEQ ID NO: 879089 - DNA, 75 bp, synthetic construct
  source 1..75: mol_type = other DNA
ccgtcgctaagaggtctttgctgcgactgccatgttcgggtcgcagcctgttttgcgagacgctttccgcaattt

SEQ ID NO: 879090 - DNA, 75 bp, synthetic construct
  source 1..75: mol_type = other DNA
cggtattatcctggtgacagggccgacaggctccggtaaaagcaccacgctctacgccatcctttcggcgcttaa

SEQ ID NO: 879091 - DNA, 75 bp, synthetic construct
  source 1..75: mol_type = other DNA
aaggtgatgataaaacagcgaaaacgccgcagtgggcttcgcaaattacaggtatcccggtagaccgtatcatca

SEQ ID NO: 879092 - DNA, 75 bp, synthetic construct
  source 1..75: mol_type = other DNA
cggtaaaatcaaagaatcttacctaacatttgatcacgctatcaccaagacaaatataaatgaccacatctataa

SEQ ID NO: 879093 - DNA, 75 bp, synthetic construct
  source 1..75: mol_type = other DNA
gaagtcataaacaagatttacagtaaaaaccctcacaaccttgtaattcgtgaaataaaatcaaaaataaaaagc

SEQ ID NO: 879094 - DNA, 75 bp, synthetic construct
  source 1..75: mol_type = other DNA
attgcgcaggatatcgatcaatccgtcgatcttctctcgctttcggaagagatgcccgcaaatgaagatctcctg

SEQ ID NO: 879095 - DNA, 75 bp, synthetic construct
  source 1..75: mol_type = other DNA
gaggttagtatctgcatcaaagaggatatcaagagaataactagctatcgcatgaccggaatttctgatgtcgct

SEQ ID NO: 879096 - DNA, 75 bp, synthetic construct
  source 1..75: mol_type = other DNA
ggctgctggtcgtgaagatgaatggcttcctattcgcccgggcaccgatgccgcgctggttgcgggtattgcttg

SEQ ID NO: 879097 - DNA, 75 bp, synthetic construct
  source 1..75: mol_type = other DNA
aacagaaggcagatctattgtttgtcttttctaaatatcctggaactttcaaagtgctcgactacgtgagcgcat

SEQ ID NO: 879098 - DNA, 75 bp, synthetic construct
  source 1..75: mol_type = other DNA
ccggaaggctatcagttgcagcaagtgctcatgatgagccgccataacttacgtgcgccgctggcgaacaatggc

SEQ ID NO: 879099 - DNA, 75 bp, synthetic construct
  source 1..75: mol_type = other DNA
atgaaaaaaacgctaatcgccgcagccgtggcagggatagttctactctcttcgaacgcacaggcacaaactgtg

SEQ ID NO: 879100 - DNA, 75 bp, synthetic construct
  source 1..75: mol_type = other DNA
atggatttatcgctattaaaagcgttgagcgaggcagatgcgatcgcctcctcggaacaggaagtacggcagatc

SEQ ID NO: 879101 - DNA, 75 bp, synthetic construct
  source 1..75: mol_type = other DNA
ttgaatatgtttatcagagtgcggaacagttacgtaatgccgatgcgttaacccttcaggacctgcgcagcgcgt

SEQ ID NO: 879102 - DNA, 75 bp, synthetic construct
  source 1..75: mol_type = other DNA
tgacgctggaattaacaggttgcccgacagacgctaatggtttttgcccgatagataagtttgatagcgtgttga

SEQ ID NO: 879103 - DNA, 75 bp, synthetic construct
  source 1..75: mol_type = other DNA
actggcgcattccctgggtgtgacattccagtccaccaccaggaaaaaatgggcaccatggacccaacctttaac

SEQ ID NO: 879104 - DNA, 75 bp, synthetic construct
  source 1..75: mol_type = other DNA
aggcgatcgcgtcacctttgataccacttttcaggttctccctcaccagcgggtgatggggaaagcctttgatga

SEQ ID NO: 879105 - DNA, 75 bp, synthetic construct
  source 1..75: mol_type = other DNA
atggagcaacttttatctgcccttattcaacgtcttacgcgtgagacggttgttcaactgacggatttcagatga

SEQ ID NO: 879106 - DNA, 75 bp, synthetic construct
  source 1..75: mol_type = other DNA
ggagtacaaacgccagctggctgagctgggcgacaaggttgaataccagaaacgcctgaatgagctggcacagca

SEQ ID NO: 879107 - DNA, 75 bp, synthetic construct
  source 1..75: mol_type = other DNA
ttggcaatgtacgcatggctgcccgccagctgcagccagtgcggatcaccactcgtgaagagtgcaaaattcccg

SEQ ID NO: 879108 - DNA, 75 bp, synthetic construct
  source 1..75: mol_type = other DNA
gttcagcaatggcggcacggacggtggggcggtgcacttaaccggcactggcgtacccacagtggtgatggggcc

SEQ ID NO: 879109 - DNA, 75 bp, synthetic construct
  source 1..75: mol_type = other DNA
gggatcggtgctgatccgcctcaatgaatcgatggggccgaaggtgatgatctgcgcacatatggatgaagtggg

SEQ ID NO: 879110 - DNA, 75 bp, synthetic construct
  source 1..75: mol_type = other DNA
tcgagtatgtgtaccagagttcgcagcagttgcgtaatgccgacgccttaaccctgcaagcacctgctcagcgcg

SEQ ID NO: 879111 - DNA, 75 bp, synthetic construct
  source 1..75: mol_type = other DNA
ccggtggtcagaatccctggcttattctgctgcaacagggcggtcaggtgaaagactcgttcggtggtcttatcc

SEQ ID NO: 879112 - DNA, 75 bp, synthetic construct
  source 1..75: mol_type = other DNA
gaaggtggttatgtgggcggtgccggaagtccggcgcagatgcggcgggctgaaggcattaattttaatcagaac

SEQ ID NO: 879113 - DNA, 75 bp, synthetic construct
  source 1..75: mol_type = other DNA
acctcgctggcggtggcgacaggtgcgctggcgtatgcctggtaccggggagacgccacgctttcagaatttaat

SEQ ID NO: 879114 - DNA, 75 bp, synthetic construct
  source 1..75: mol_type = other DNA
cggtagcgcttctgaaaccaatctttttgccatgctggatagcgccatcgcagccctgaaaacgccggtcgcgga

SEQ ID NO: 879115 - DNA, 75 bp, synthetic construct
  source 1..75: mol_type = other DNA
tgtgctgactgttcgcgcggaattaggcacgcagctgaacgaactggagtcgctggattccttaggtagcgatcg

SEQ ID NO: 879116 - DNA, 75 bp, synthetic construct
  source 1..75: mol_type = other DNA
gcggactgaaaaactcgctgaacaatgtgctgactgttcgcgcggaattaggcacgcagctgaacgaactggagt

SEQ ID NO: 879117 - DNA, 75 bp, synthetic construct
  source 1..75: mol_type = other DNA
aactggagtcgctggattcattaggtagcgatcgcgctttagggcaaacgcagcagatgagcgatctggttgatg

SEQ ID NO: 879118 - DNA, 75 bp, synthetic construct
  source 1..75: mol_type = other DNA
aataccactgatggtaacgggcgctacatttttgcgggttataaaacagaaaccgcgccgtttagcgaagagaaa

SEQ ID NO: 879119 - DNA, 75 bp, synthetic construct
  source 1..75: mol_type = other DNA
tgctcaggaaaaaattgtctacgccagcaatggcaccttgagtgacgatgaccgggcctcgctggctacggatat

SEQ ID NO: 879120 - DNA, 75 bp, synthetic construct
  source 1..75: mol_type = other DNA
gagcagattgcgtatgttgcacagctgcagcgttccggagacgaggccggtgccttacaggcggcgaacgatgct

SEQ ID NO: 879121 - DNA, 75 bp, synthetic construct
  source 1..75: mol_type = other DNA
gaaaaagccgaagtcgtcaggcgtcaaagtgtcagccggtgagcgtcaggaagaccagccgcatgccgcactgct

SEQ ID NO: 879122 - DNA, 75 bp, synthetic construct
  source 1..75: mol_type = other DNA
gaaaaagccgaagtcgtcaggcgtcaaagtgtcagccggtgagcgtcaggaagaccagacgcatgccgccctgct

SEQ ID NO: 879123 - DNA, 75 bp, synthetic construct
  source 1..75: mol_type = other DNA
gaaaaagccgaagtcgtcaggcgttaaagtgtcagccggtgagcgtcaggaagaccagacgcatgccgctctgct

SEQ ID NO: 879124 - DNA, 75 bp, synthetic construct
  source 1..75: mol_type = other DNA
cggatatgctcgccagtgcgcagaaggcatttgatgaggcggataaaaaatggcagtggtaccagagccggagcc

SEQ ID NO: 879125 - DNA, 75 bp, synthetic construct
  source 1..75: mol_type = other DNA
gaaaaagccgaagtcgtcaggcgtgaaagtgtcagccggtgagcgtcaggaagaccaggcgcatgccgcactgct

SEQ ID NO: 879126 - DNA, 75 bp, synthetic construct
  source 1..75: mol_type = other DNA
gaaaaagccgaagtcgtcaggcgtgaaagtgtcagccggtgagcgtcaggaagaccagacgcatgccgcgctgct

SEQ ID NO: 879127 - DNA, 75 bp, synthetic construct
  source 1..75: mol_type = other DNA
cttgaaaccgagctcaggacgctggaaaagcatgccggtgcgaatgagaaaatcagccagcagcgccgtgattta

SEQ ID NO: 879128 - DNA, 75 bp, synthetic construct
  source 1..75: mol_type = other DNA
gaaaaagccgaagtcgtcaggcgtaaaagtgtcagccggtgagcgtcaggaagaccagacgcatgccgcactgct

SEQ ID NO: 879129 - DNA, 75 bp, synthetic construct
  source 1..75: mol_type = other DNA
caacacgctgatggcgtcggcaaaaaaggattatgaatcgacgctgaaaaagccgtcaggtgtgaaggtgtctgc

SEQ ID NO: 879130 - DNA, 75 bp, synthetic construct
  source 1..75: mol_type = other DNA
ccacagatgatgaaggcggtgtatgacatggcccgcaagggtgcccgtgatgaaatccaggcacagatgcgcgat

SEQ ID NO: 879131 - DNA, 75 bp, synthetic construct
  source 1..75: mol_type = other DNA
tatgggaacgttggatccccttgggacgaatatcaaactgggaaaaacgagctattcagaattcctgaaccaatt

SEQ ID NO: 879132 - DNA, 75 bp, synthetic construct
  source 1..75: mol_type = other DNA
atccatggaaaattagtagaacttatgccgcaaagtcgagccaaacttgacgccaacctgaaggattttgaggca

SEQ ID NO: 879133 - DNA, 75 bp, synthetic construct
  source 1..75: mol_type = other DNA
agatggcccgcaagggggcacaggatgaactccggctgcagttgcgtgatggcggtatgttatcagggagcggtg

SEQ ID NO: 879134 - DNA, 75 bp, synthetic construct
  source 1..75: mol_type = other DNA
tatgaacctgcggggattgttcatcgcggggagtttgtcttcacgaaggaggcgaccagccggattggtgtcggc

SEQ ID NO: 879135 - DNA, 75 bp, synthetic construct
  source 1..75: mol_type = other DNA
cggcggacggaaggcattaattttaatcagaacaatcacgtggtgattcagaacgacggcaccaacggacaggcg

SEQ ID NO: 879136 - DNA, 75 bp, synthetic construct
  source 1..75: mol_type = other DNA
agttcggactgacaccgcttggtcattttaccgttaaccctgagattcaacctggcgcgcagcgtttacatgaaa

SEQ ID NO: 879137 - DNA, 75 bp, synthetic construct
  source 1..75: mol_type = other DNA
ggctgaagtccggctggggcgagtgggcggaaagtgcgacggacagtttttcgcaggttaaaagtgctgccacgc

SEQ ID NO: 879138 - DNA, 75 bp, synthetic construct
  source 1..75: mol_type = other DNA
atggcagcacatcgcgttccgccacagatgatggggattatgccaagtaacgttggtgggtttggggatgtggag

SEQ ID NO: 879139 - DNA, 75 bp, synthetic construct
  source 1..75: mol_type = other DNA
gccttgtttttgtaagaaacgaactaatccccctccaaaaaaggctgcaagaactcaatgattggttacaagaag

SEQ ID NO: 879140 - DNA, 75 bp, synthetic construct
  source 1..75: mol_type = other DNA
ggatgagtttctgaacatcaagaacgtgagccgcgatgacatgatggcagcgcaccgtgtgccgccacagatgat

SEQ ID NO: 879141 - DNA, 75 bp, synthetic construct
  source 1..75: mol_type = other DNA
tcattggtagcgtgattttcggtaagctgggtaatcagtacgcatctgtgctggtcagtgcggcgattgcgctat

SEQ ID NO: 879142 - DNA, 75 bp, synthetic construct
  source 1..75: mol_type = other DNA
ttgtggggcagtatttcggttggcgtatgaccttcttcgcgatcggtatcggggcatttatcacccttctgtgcc

SEQ ID NO: 879143 - DNA, 75 bp, synthetic construct
  source 1..75: mol_type = other DNA
ctgccagcaatccttgtgcgcaatattatccagttgctgcgcgaagggaaaaaggtcgaaattattgttggtgat

SEQ ID NO: 879144 - DNA, 75 bp, synthetic construct
  source 1..75: mol_type = other DNA
caccattttcctctgctcgcggatcacgcacgtcgccgttctggcgagtatcgcgtatggagcgcggcggcttcg

SEQ ID NO: 879145 - DNA, 75 bp, synthetic construct
  source 1..75: mol_type = other DNA
ctgacgccgcagcaactgcaacggtatttcatgcgagggacgggaccgcatcaagggctggtacgcgtgcgtcag

SEQ ID NO: 879146 - DNA, 75 bp, synthetic construct
  source 1..75: mol_type = other DNA
atgtgcaaagcttaggcgtgatttatatcaatcataatttcgccactgaaagcgaagcacgtcaggcattaaatg

SEQ ID NO: 879147 - DNA, 75 bp, synthetic construct
  source 1..75: mol_type = other DNA
tcgcgccgccgtgcatcacagctcaccgattgccgttaagcgtgacattctcagcagtacctatatcccgcaccg

SEQ ID NO: 879148 - DNA, 75 bp, synthetic construct
  source 1..75: mol_type = other DNA
acagaagcgactgcaggaactgaacgactggtgtggcgagaaaataattagttttgaaccttatacacttgagta

SEQ ID NO: 879149 - DNA, 75 bp, synthetic construct
  source 1..75: mol_type = other DNA
atgcagccttatgagttcaccagaggcaacatttttcatctgatggagccggatattaaccaagagatttacggg

SEQ ID NO: 879150 - DNA, 75 bp, synthetic construct
  source 1..75: mol_type = other DNA
cttggcgctctgagtatcttttggggcatcgcaatgatggttatcgggctgggtatgcaggtgaaagtgctggca

SEQ ID NO: 879151 - DNA, 75 bp, synthetic construct
  source 1..75: mol_type = other DNA
ttctggaccgccgagaattactggactatatggaatgcgtacagatggaccgttggtatgagccgcccgtcagct

SEQ ID NO: 879152 - DNA, 75 bp, synthetic construct
  source 1..75: mol_type = other DNA
ctccgcaatgcgatgaaaagcgccaaaggaccaggtaacttccgcaacctatttatgtactcgcctaacgggaaa

SEQ ID NO: 879153 - DNA, 75 bp, synthetic construct
  source 1..75: mol_type = other DNA
cgctggtatgagcctcccgtcagctttgacggactggcgcgcaccttccgcgctgccgtacatcacagttcacca

SEQ ID NO: 879154 - DNA, 75 bp, synthetic construct
  source 1..75: mol_type = other DNA
ctcggcgtactgagcattttctgggggatcgcgatgatgatcatcgggcttgggatgcaggttaaagtgctggcg

SEQ ID NO: 879155 - DNA, 75 bp, synthetic construct
  source 1..75: mol_type = other DNA
gactgtggtggtcgttaccgcccattacacggcatacagctatatcgaaccttttgtgcaaaatgttgcgggatt

SEQ ID NO: 879156 - DNA, 75 bp, synthetic construct
  source 1..75: mol_type = other DNA
aagtgcgacggacagtttttcgcaggttaaaagtgtggccacgcagacctttgacggtattgcacagaatatggc

SEQ ID NO: 879157 - DNA, 75 bp, synthetic construct
  source 1..75: mol_type = other DNA
gtactaccacgtgattctgatgcgggaaccggggagtaacggcaatatgcacgccagcgcggatatttatcgcta

SEQ ID NO: 879158 - DNA, 75 bp, synthetic construct
  source 1..75: mol_type = other DNA
gtactgtcacccgaattgagtttattcgttcagagccgcaccatctgtttgatgagcaggttgtaaaggcgatgg

SEQ ID NO: 879159 - DNA, 75 bp, synthetic construct
  source 1..75: mol_type = other DNA
tgttaattgtcgtctgtgtgacgatactgtgttttgtctggatgctgagggattcgctttgcggattccgtgtcg

SEQ ID NO: 879160 - DNA, 75 bp, synthetic construct
  source 1..75: mol_type = other DNA
tacatgggcagccattgaaattaataaccaccaggccagaaatatggacgacgtacagagcttaggcgtgattta

SEQ ID NO: 879161 - DNA, 75 bp, synthetic construct
  source 1..75: mol_type = other DNA
gggtggtgccggaagtccggcgcagatgcggcgggtggaaggcattaattttaatcagaacaatcacgtggtgat

SEQ ID NO: 879162 - DNA, 75 bp, synthetic construct
  source 1..75: mol_type = other DNA
agctgggagacaaagttgaacaccagaaacggctgaatgagctggcacagcaggctgcgcggtttgagcagcagc

SEQ ID NO: 879163 - DNA, 75 bp, synthetic construct
  source 1..75: mol_type = other DNA
tgaagtataccggagaggcgcagaaggcgtatgagcgcctgctgacgccactggagaaatataccgcccggcagg

SEQ ID NO: 879164 - DNA, 75 bp, synthetic construct
  source 1..75: mol_type = other DNA
aagagacagatgcgcagggcgcaacgtactaccatccgatcctgatacgggaaccgggaagtaacggcaatatgc

SEQ ID NO: 879165 - DNA, 75 bp, synthetic construct
  source 1..75: mol_type = other DNA
ttcagaacgacggtatcaacggacaggccgggccgcagctgatgaaagcggtgtatgagatggcccgtaaaggtg

SEQ ID NO: 879166 - DNA, 75 bp, synthetic construct
  source 1..75: mol_type = other DNA
aaggcattcaaatcgatgtgggatgccattctggatatcggtcgtcctgaatcctcagcggatatgctcgccagt

SEQ ID NO: 879167 - DNA, 75 bp, synthetic construct
  source 1..75: mol_type = other DNA
gcaatttcactcagtgcgactcaatgctgattggcgctaattgtggggcgcataccttcccgtatgtcgaatgtc

SEQ ID NO: 879168 - DNA, 75 bp, synthetic construct
  source 1..75: mol_type = other DNA
caaagacgtgttctcggagctgccgttggaatttgccgttgaagcacaaaaactcctcgccatcagtcttgaaca

SEQ ID NO: 879169 - DNA, 75 bp, synthetic construct
  source 1..75: mol_type = other DNA
gcgaataataacgatgtggaaaagcttaagaagtcgctgaaagatgcacgtggcaacggtgcttttaaaaacctg

SEQ ID NO: 879170 - DNA, 75 bp, synthetic construct
  source 1..75: mol_type = other DNA
tggcggagcagggaattattttctgttcctttggcgaggcgatccacgatcacccggaactggtgcgtaaatatc

SEQ ID NO: 879171 - DNA, 75 bp, synthetic construct
  source 1..75: mol_type = other DNA
tgatgccattttcgattctgtttcggttgccaccacttatcgcgaaaaactggcggagcaggggatcattttctg

SEQ ID NO: 879172 - DNA, 75 bp, synthetic construct
  source 1..75: mol_type = other DNA
ggtcatcagcaagcggataccggcaccaagatgatccacatcggtaaaaacaccaaatcgaccattatctcgaaa

SEQ ID NO: 879173 - DNA, 75 bp, synthetic construct
  source 1..75: mol_type = other DNA
ctcctttttataatgaaactaccggtggggacagtggttccggtttttatctctatgataatataaaaaaagaat

SEQ ID NO: 879174 - DNA, 75 bp, synthetic construct
  source 1..75: mol_type = other DNA
gcccgcaagggtgcccgtgatgaaatccaggcacagatgcgcgatggtggtctgttctccggaggtggacgatga

SEQ ID NO: 879175 - DNA, 75 bp, synthetic construct
  source 1..75: mol_type = other DNA
acatgtgccgcgaggaggcgcaggctacactccggctgcagtcgcgagacggtggcatgttatcggggtgcggac

SEQ ID NO: 879176 - DNA, 75 bp, synthetic construct
  source 1..75: mol_type = other DNA
gcgcgccggaatatctggccgcgctacaaagcgccatgctgaacggtgaagcaacggtgttccgccgcaactact

SEQ ID NO: 879177 - DNA, 75 bp, synthetic construct
  source 1..75: mol_type = other DNA
atacaagaaagcctgaaagagttaaacgactggctggggatcgacgtggtgcgcttcaacccttacgcactgttg

SEQ ID NO: 879178 - DNA, 75 bp, synthetic construct
  source 1..75: mol_type = other DNA
atgggaaagagtaagaaaaaccgcgctgcgtcgacgaaacagatccagcataaaagccagacttcagccgaagca

SEQ ID NO: 879179 - DNA, 75 bp, synthetic construct
  source 1..75: mol_type = other DNA
gacatggcccgcaagggggcgcaggatgagattcaggcgcagatgcgtgatggcggcgtcttttccggaggcagg

SEQ ID NO: 879180 - DNA, 75 bp, synthetic construct
  source 1..75: mol_type = other DNA
ccgtttttctgaagaggcagcgcgggtaaaaaaagaactgggtgaaaccagtgcgcttgctgatttgatgtccgg

SEQ ID NO: 879181 - DNA, 75 bp, synthetic construct
  source 1..75: mol_type = other DNA
ctgacacgcggaaaggctgactgggctgactttacccgctccacgctctccatgctgacacaaattctgctgaag

SEQ ID NO: 879182 - DNA, 75 bp, synthetic construct
  source 1..75: mol_type = other DNA
tggtcgttaaccttgacgttaactcgacaaaattcaacgagcagctcagctacgtcaaaaaagaattaaaacaga

SEQ ID NO: 879183 - DNA, 75 bp, synthetic construct
  source 1..75: mol_type = other DNA
gatagggccacaggcgctgaaggcggtttatgacgtagcccgtaaggcggcaatggatgttgtgaccgggcagat

SEQ ID NO: 879184 - DNA, 75 bp, synthetic construct
  source 1..75: mol_type = other DNA
ccacgctttcagcgtttaataaaaccctggttctttccggtaatcagtccggactgactgccgatcgtatgctga

SEQ ID NO: 879185 - DNA, 75 bp, synthetic construct
  source 1..75: mol_type = other DNA
tattcctcttgccgggattgtcactggctgcgaacagtggcggcataaccttgcaatgcgcaggttacaagctgg

SEQ ID NO: 879186 - DNA, 75 bp, synthetic construct
  source 1..75: mol_type = other DNA
gcttatgccagccaaagacggtaacaactacggctttgaatacattcgtcgccctggtaccgaaacgcgattcct

SEQ ID NO: 879187 - DNA, 75 bp, synthetic construct
  source 1..75: mol_type = other DNA
cctaccgtaaccagctggcgtttatcgatagttttcttccgggggatgaataacaccaactacaacatggcggtc

SEQ ID NO: 879188 - DNA, 75 bp, synthetic construct
  source 1..75: mol_type = other DNA
cgtggaggtggaaaaagttgctgaagccttcgggaagctgaccagtgacccgacgtcggggctggcggcgatggc

SEQ ID NO: 879189 - DNA, 75 bp, synthetic construct
  source 1..75: mol_type = other DNA
ctgtcaggcgggggagagcattacgcgcgaaacggcgttggtgcgttcctgtggtctctacttttcgccgcagcg

SEQ ID NO: 879190 - DNA, 75 bp, synthetic construct
  source 1..75: mol_type = other DNA
gcactatgtcagggcttataacagccttcgatatcgatactgctgtcggtgtacagctcgacatcctcggtctgt

SEQ ID NO: 879191 - DNA, 75 bp, synthetic construct
  source 1..75: mol_type = other DNA
ggctatctcaccgttaaagcagctggcgtatgggccggtgacgtggaaacgccttcggtagaaacaccgtcagaa

SEQ ID NO: 879192 - DNA, 75 bp, synthetic construct
  source 1..75: mol_type = other DNA
cggatgcgctggcgaaggccacatctgcactgaagaacacctggtctgcggaggagcagcttcgtggaagctgga

SEQ ID NO: 879193 - DNA, 75 bp, synthetic construct
  source 1..75: mol_type = other DNA
tggctacgactttgaaatcgtgaaagccgaagagcttcaggaatatctggatgctggctggttttcacatcctga

SEQ ID NO: 879194 - DNA, 75 bp, synthetic construct
  source 1..75: mol_type = other DNA
gtcggatatggaaaaagccggtgaactggcggcaagggacagggctgagcgtgagtcgtcacagctgaagtatac

SEQ ID NO: 879195 - DNA, 75 bp, synthetic construct
  source 1..75: mol_type = other DNA
tatggcgataatccgcaggcgctggcccgggtcaccggggcactgaaacagacatgggtggatgaagacatgctg

SEQ ID NO: 879196 - DNA, 75 bp, synthetic construct
  source 1..75: mol_type = other DNA
acggttcttattctgacagtggtaagcgttgttgtcttgtatctttcgtcagataagtttatgcctgttaagcgc

SEQ ID NO: 879197 - DNA, 75 bp, synthetic construct
  source 1..75: mol_type = other DNA
cgcagcaaaagtgggcttgtgtgcaatttattgccgaggtatctctgattgcaaactgcaagccatcagacttaa

SEQ ID NO: 879198 - DNA, 75 bp, synthetic construct
  source 1..75: mol_type = other DNA
gtttgcatttacaacaacaagacgcagtggcggttgctatcgtgcgtggcgctaaaacgtgctttttgcaacgtt

SEQ ID NO: 879199 - DNA, 75 bp, synthetic construct
  source 1..75: mol_type = other DNA
tgttaccttggagtcgcgaactgccgcagcgtcatcacattatgttggcgtttcccgccagtcgcacattacagc

SEQ ID NO: 879200 - DNA, 75 bp, synthetic construct
  source 1..75: mol_type = other DNA
atgaggaagcacaatgagtcgtcgcgcaggtacgccaacagcaaaaaagtgacgcagttagtgaacgtggaagag

SEQ ID NO: 879201 - DNA, 75 bp, synthetic construct
  source 1..75: mol_type = other DNA
caggagcgattaaccacctacctgttaagttccgatgctgatatctggttgattaccggctctccgcagccgctg

SEQ ID NO: 879202 - DNA, 75 bp, synthetic construct
  source 1..75: mol_type = other DNA
caatgttaccgcctttccgctggttcaggagcgattaaccacctacctgttaagttccgatgctgatatctggtt

SEQ ID NO: 879203 - DNA, 75 bp, synthetic construct
  source 1..75: mol_type = other DNA
agctgatgaaggcggtgtatgacatggcccgcaagggggcgcaggatgagattcaggcgcagatgcgtgatggcg

SEQ ID NO: 879204 - DNA, 75 bp, synthetic construct
  source 1..75: mol_type = other DNA
ctggaaaaacacagcggtgcgaatgagaaaatcagccagcagcgtcgcgatttatggaaagcggaaaatcagtat

SEQ ID NO: 879205 - DNA, 75 bp, synthetic construct
  source 1..75: mol_type = other DNA
atcagccggcagcgccgtgatttatggaaggcggaaagtcagtatgcggtcctgaaagaggctgccacgaaacga

SEQ ID NO: 879206 - DNA, 75 bp, synthetic construct
  source 1..75: mol_type = other DNA
tgtttatgacgtagcccgtaaggcggcaatggatgtcgtgaccgggcagatgcgtgatggtggtctgttctccgg

SEQ ID NO: 879207 - DNA, 75 bp, synthetic construct
  source 1..75: mol_type = other DNA
aaccgaagtcgtcaggtgtcagagtgtcagccggggagcgtcaggaagaccgggcgcatgcagccctgctggcgc

SEQ ID NO: 879208 - DNA, 75 bp, synthetic construct
  source 1..75: mol_type = other DNA
caggcgctggctgcacaaaaagccgggatttccgtcgggcagtataaagcggccatgcgtaccctgcctgcacag

SEQ ID NO: 879209 - DNA, 75 bp, synthetic construct
  source 1..75: mol_type = other DNA
ctgaccagcactactgataccagtggtaacattcacgctggtgtgttcaacatcgaaagcaaccgcttcgtactt

SEQ ID NO: 879210 - DNA, 75 bp, synthetic construct
  source 1..75: mol_type = other DNA
gtcaggtgaaagactcgttcggtggtcttatcccgatgttccggggactggcgggagccgtctcgctacctgccg

SEQ ID NO: 879211 - DNA, 75 bp, synthetic construct
  source 1..75: mol_type = other DNA
ggcggataagttcgcacagcaacaacgggcaaaacgggcagccattgaggcgaaaaaccgggggcttactgaccg

SEQ ID NO: 879212 - DNA, 75 bp, synthetic construct
  source 1..75: mol_type = other DNA
ataatgccgctgactctcatgttgtagatgtatttaacattggtactgccatcactctggatcaggaagttgatc

SEQ ID NO: 879213 - DNA, 75 bp, synthetic construct
  source 1..75: mol_type = other DNA
tggggcgaaatcttcctgctggtggcgttttttgtcggtctggcgctgggcgatgacggtaaagtgcgtgcgctg

SEQ ID NO: 879214 - DNA, 75 bp, synthetic construct
  source 1..75: mol_type = other DNA
cggtctcactgaccgtcaggcgcagcgggagtctgaagcgcagcgtcttcgggacgtgtacggtgataatccggc

SEQ ID NO: 879215 - DNA, 75 bp, synthetic construct
  source 1..75: mol_type = other DNA
aatcgacgctgaaaaagccgaagtcgtcaggagtcaaagtgtcagccggtgagcgtcaggaagaccaggcgcatg

SEQ ID NO: 879216 - DNA, 75 bp, synthetic construct
  source 1..75: mol_type = other DNA
gcttcctcggggacggccattgaggctgcggcggcgaacttccatttcgcgaccggaggatttacggggacgggc

SEQ ID NO: 879217 - DNA, 75 bp, synthetic construct
  source 1..75: mol_type = other DNA
ccgtggtctgaacgtcagcgaagcttctgtactggttacgcgcgcgtccgatcacaatccgctactcgttgaatt

SEQ ID NO: 879218 - DNA, 75 bp, synthetic construct
  source 1..75: mol_type = other DNA
ctggcaaagtcggcgctggtgacggtctacccattgccagatacgcgtttattgatggtggtgaatattcacgcc

SEQ ID NO: 879219 - DNA, 75 bp, synthetic construct
  source 1..75: mol_type = other DNA
tcaggctgcggcggcgaacttccatttcgcgaccgggggatttacggggacggggggtaaatatgaacctgcggg

SEQ ID NO: 879220 - DNA, 75 bp, synthetic construct
  source 1..75: mol_type = other DNA
gatgcggcggacggaaggcattaattttaatcagaacaatcacgtggtgattcagaacgacggctccaacggaca

SEQ ID NO: 879221 - DNA, 75 bp, synthetic construct
  source 1..75: mol_type = other DNA
gagttagtacagtttgcgaccgctaactatcttgccgccgatcaggtacccgctttcgtgctgccacaacatcct

SEQ ID NO: 879222 - DNA, 75 bp, synthetic construct
  source 1..75: mol_type = other DNA
ggattgttcatcgcggggagtttgtcttcacgaaggaggcgaccagccggattggtgtcggcaatctgtaccgcc

SEQ ID NO: 879223 - DNA, 75 bp, synthetic construct
  source 1..75: mol_type = other DNA
tcggtggcaccggaagtccggcgcagatgcggcgggccgaaggcattaattttaatcagaacaatcacgtggtga

SEQ ID NO: 879224 - DNA, 75 bp, synthetic construct
  source 1..75: mol_type = other DNA
ccgggcgatgtttatcagacgctgacgacccgccatccctctgcggaatctcgccgttatctttataaagtgaat

SEQ ID NO: 879225 - DNA, 75 bp, synthetic construct
  source 1..75: mol_type = other DNA
atatgatcctgattcaggatacatgtatctcagcgatgaaacttatcgtgtcattcttaaagcgaagattgcgat

SEQ ID NO: 879226 - DNA, 75 bp, synthetic construct
  source 1..75: mol_type = other DNA
attgtgctggaaggtttttaccttctaaagcgaaaaacaataataaaccctgccggatgcgatgctgacgcatct

SEQ ID NO: 879227 - DNA, 75 bp, synthetic construct
  source 1..75: mol_type = other DNA
agtcgtgctgattatcgatctgggcagcaaatacctgatcctccagaactttgctctgggggatacggtcccgct

SEQ ID NO: 879228 - DNA, 75 bp, synthetic construct
  source 1..75: mol_type = other DNA
cggtgagcgccaggaagaccaggcgcatgcagccctgctggcgcttgaaaccgagctcaggacgctggaaaaaca

SEQ ID NO: 879229 - DNA, 75 bp, synthetic construct
  source 1..75: mol_type = other DNA
gccacgaaaggctttgatgagcagacccgtcgcctgaaagaaaacatggggacactggagacctgggcggataaa

SEQ ID NO: 879230 - DNA, 75 bp, synthetic construct
  source 1..75: mol_type = other DNA
acctgccagttattacccaaagcgaaagcctggctggcgaaaaaaaaagccgcagtggcggcgtatattacaagc

SEQ ID NO: 879231 - DNA, 75 bp, synthetic construct
  source 1..75: mol_type = other DNA
gtttctgcttcgccagccaccacgggcgcgcggacgatgaccgcctggacgcaggatctcatctatgcgggcgat

SEQ ID NO: 879232 - DNA, 75 bp, synthetic construct
  source 1..75: mol_type = other DNA
cgctgaagccagaaacctcggtaacggttaaatcgctgcttgattcattagcgacgttacctgcgcaaaacaaag

SEQ ID NO: 879233 - DNA, 75 bp, synthetic construct
  source 1..75: mol_type = other DNA
tggtggtggatgatgacattagccactgcaccatcttgcaggcattgctgcgcggctggggctataacgtcgcgc

SEQ ID NO: 879234 - DNA, 75 bp, synthetic construct
  source 1..75: mol_type = other DNA
atcttgccgcagaggtgaatgccgggcgttttcgccaggatctctactatcgcctgaatgtggtggcgattgaag

SEQ ID NO: 879235 - DNA, 75 bp, synthetic construct
  source 1..75: mol_type = other DNA
gatcacaagcaataccgcgttctcgcagattggcttcttcttatcgttgagccaattagcggcgtttatttcagc

SEQ ID NO: 879236 - DNA, 75 bp, synthetic construct
  source 1..75: mol_type = other DNA
gcggggagtttgtcttcacgaaggaggcaaccagccggattggcgtcggcaacctgtaccgcctgatgcggggct

SEQ ID NO: 879237 - DNA, 75 bp, synthetic construct
  source 1..75: mol_type = other DNA
gattatccggtgaaggttcgcaagcttatccgtcgcttgcgtcgtatccgtatcgaccgattaattagccgtatc

SEQ ID NO: 879238 - DNA, 75 bp, synthetic construct
  source 1..75: mol_type = other DNA
cggcagcgccgtgatttatggaaagcggaaagtcagtatgcggtcctgaaagaggccgcaacgaaacggcagtta

SEQ ID NO: 879239 - DNA, 75 bp, synthetic construct
  source 1..75: mol_type = other DNA
ctggcgtatgcctggtatcagggggactcaaccctgtccagtttcaataaaacgctggtcctttccggtaatcag

SEQ ID NO: 879240 - DNA, 75 bp, synthetic construct
  source 1..75: mol_type = other DNA
gccgggaaagatgtgttccgctcgcaggggaaatccggcacgccgagccgcagtttcttgtttgatcctgccagc

SEQ ID NO: 879241 - DNA, 75 bp, synthetic construct
  source 1..75: mol_type = other DNA
gccctggtgaatgccggtgtgcgtggtggtgaacagtttgatgccatcaaccagagtgtcgcgcgttttgcttct

SEQ ID NO: 879242 - DNA, 75 bp, synthetic construct
  source 1..75: mol_type = other DNA
tcagagtgtggcgcgttttgcttctgcatccggtgtggaagtggacaaggttgcagaggctttcggaaaactgac

SEQ ID NO: 879243 - DNA, 75 bp, synthetic construct
  source 1..75: mol_type = other DNA
aaatgctgaataaggcacagcaggcattcgatgaggcggataaaaaatggcagtggtatcagagtcgcagccacc

SEQ ID NO: 879244 - DNA, 75 bp, synthetic construct
  source 1..75: mol_type = other DNA
aacatgggaacgctggagacctgggcggataaggtcggcagtgcgtttaaatccatgtgggatgcagtgctggat

SEQ ID NO: 879245 - DNA, 75 bp, synthetic construct
  source 1..75: mol_type = other DNA
caggcgctggctgcgcaaaaagccgggatttccgtcgggcagtataaagcggccatgcgcaccctgcccgcacag

SEQ ID NO: 879246 - DNA, 75 bp, synthetic construct
  source 1..75: mol_type = other DNA
aaccgtaagatgtcagacattatgtttgaatgggttacacagaatattatgaatggtcgcggcgttaatcgtctg

SEQ ID NO: 879247 - DNA, 75 bp, synthetic construct
  source 1..75: mol_type = other DNA
cgttcacccggcaccacaggaaatgcaggagacatccgctaccccggcgataacagcagacaaaaatactctggt

SEQ ID NO: 879248 - DNA, 75 bp, synthetic construct
  source 1..75: mol_type = other DNA
ctgtccctgccactgtcgataagcatgggattgctgtgcgcatgcaccgtaactgacgccctgcgcacctggctg

SEQ ID NO: 879249 - DNA, 75 bp, synthetic construct
  source 1..75: mol_type = other DNA
cagcacgcagcaaaaaggggcgcatcaaacgtcagatgtttacaaagctgcgcaccaccaaatacctgaaaactg

SEQ ID NO: 879250 - DNA, 75 bp, synthetic construct
  source 1..75: mol_type = other DNA
atactcgatttttatctgttcagaacgctgaatgaagtgcgggaaatcacgggaaaatggttgtcagaatataac

SEQ ID NO: 879251 - DNA, 75 bp, synthetic construct
  source 1..75: mol_type = other DNA
catcgatgtcaataaccaggctttccgccagttcggttttggcggaaccccctgggtgttatccgataccggctg

SEQ ID NO: 879252 - DNA, 75 bp, synthetic construct
  source 1..75: mol_type = other DNA
gtgccattaaatgaaggcattcaactcccggttcccccgaaaaaagacgtccaggtcccggagaaaacaatcaca

SEQ ID NO: 879253 - DNA, 75 bp, synthetic construct
  source 1..75: mol_type = other DNA
gtggctgaattgcagaaggtggacgactggctgagtgccttgctggcgaatctggagcctgccgcaagaagccgc

SEQ ID NO: 879254 - DNA, 75 bp, synthetic construct
  source 1..75: mol_type = other DNA
tcgataaacaacagcggcaaaccagctggctgattgtcgccctggcaacgttactcgcggcactcgctacctttc

SEQ ID NO: 879255 - DNA, 75 bp, synthetic construct
  source 1..75: mol_type = other DNA
aaacggtgcgcctgacctttgccgacagtgcaccgggcgttagtgacgatcaactgcaaaaattgtttgagcgtt

SEQ ID NO: 879256 - DNA, 75 bp, synthetic construct
  source 1..75: mol_type = other DNA
tctggagccagctgcaagaagccgtatgatgcggcagctggcgcaggaactgcgccggacacagcagcagaatat

SEQ ID NO: 879257 - DNA, 75 bp, synthetic construct
  source 1..75: mol_type = other DNA
gattttatcaaccaactgcgacaaggcgacaccaaccaggtgcttgctttgttaaatcaaaccctcagctcataa

SEQ ID NO: 879258 - DNA, 75 bp, synthetic construct
  source 1..75: mol_type = other DNA
atgcactccacgggatttggttccggcatcgccgtgccgcacggtaaaagcgcctgcgttaaacaaccgttcgtg

SEQ ID NO: 879259 - DNA, 75 bp, synthetic construct
  source 1..75: mol_type = other DNA
tctggaaccagcctcgagaagccgcatgatgcaccagctggcgcaggaacttcgccggacacagcagcagaatat

SEQ ID NO: 879260 - DNA, 75 bp, synthetic construct
  source 1..75: mol_type = other DNA
ccgccagcgcggattctgccagcgtacagtttgaaggtaaggtgcagagcattgcccgcgttcaccattatggcc

SEQ ID NO: 879261 - DNA, 75 bp, synthetic construct
  source 1..75: mol_type = other DNA
tctggagccagccgcaagaagccgcatgatgcgtcagctggcgcaggaactgcgccggacacagcagcagaacat

SEQ ID NO: 879262 - DNA, 75 bp, synthetic construct
  source 1..75: mol_type = other DNA
tgcgcgatcgcgtcagtagcaaaggacctgaggtccgttacgcagaacgccgccttctgggtgtaaatgatgatg

SEQ ID NO: 879263 - DNA, 75 bp, synthetic construct
  source 1..75: mol_type = other DNA
tgtgactccgggaaagattgccggagcggcaaaatccagtaccgggtaaggctggcggaaatcgacaccccagag

SEQ ID NO: 879264 - DNA, 75 bp, synthetic construct
  source 1..75: mol_type = other DNA
gccaaaaaagtggcactggttgcctgtatgcgtaagttgctgaccattatgaacgcaatgctcagaaaaaacgaa

SEQ ID NO: 879265 - DNA, 75 bp, synthetic construct
  source 1..75: mol_type = other DNA
atggcagcgcttgtggtaacctggtttaatccggtgataaaggcgttttacatgcatctgtcagcagccggaaaa

SEQ ID NO: 879266 - DNA, 75 bp, synthetic construct
  source 1..75: mol_type = other DNA
agcagttatgaaccgcgcagggcaacagcacgcagcaaaaaggggcgcatcaaacgtcagatgtttacaaagctg

SEQ ID NO: 879267 - DNA, 75 bp, synthetic construct
  source 1..75: mol_type = other DNA
actggttgagtgccttgctggcgaatctggagccagccgcaagaagcagcatgatgcgccagctggcgcaggaac

SEQ ID NO: 879268 - DNA, 75 bp, synthetic construct
  source 1..75: mol_type = other DNA
attgcccgtgttcaccattacggcctgcgcgatcgcgtcagtcgcaaaggaccggaggtccgctatgcagagcgc

SEQ ID NO: 879269 - DNA, 75 bp, synthetic construct
  source 1..75: mol_type = other DNA
gccggaggtacgttatgctgagcggcggctattgggtttcaacgatgaagctactcttcaaattaagacaatttt

SEQ ID NO: 879270 - DNA, 75 bp, synthetic construct
  source 1..75: mol_type = other DNA
accggaggtccgctatgcagagcgccgcttgctgggttatagtaataatagttatctaatcgttagtgatttact

SEQ ID NO: 879271 - DNA, 75 bp, synthetic construct
  source 1..75: mol_type = other DNA
tgcgccggacacagcagcagaacatcaggatgcagcgcaatcctgatggcagcagttatgagccgcgcagggtaa

SEQ ID NO: 879272 - DNA, 75 bp, synthetic construct
  source 1..75: mol_type = other DNA
agacgaactgggcaaactggcacaggacttcaaccagctcgccagtacgctggagaaaaaccagcagatgcgccg

SEQ ID NO: 879273 - DNA, 75 bp, synthetic construct
  source 1..75: mol_type = other DNA
cgaaggctggtttaccgacgatacggcaaaacgttttgaagcctatcactggcatgttgtccatgaaatcgacgg

SEQ ID NO: 879274 - DNA, 75 bp, synthetic construct
  source 1..75: mol_type = other DNA
ggcggttcggcggatctggctcccagcaacctgaccatctggaaaggttctgtttcgctgaaggaagatccagcg

SEQ ID NO: 879275 - DNA, 75 bp, synthetic construct
  source 1..75: mol_type = other DNA
cgatcacttcacctatgtgtttatgggcgacggctgcctgatggaaggtatttcccacgaagtctgttcgctggc

SEQ ID NO: 879276 - DNA, 75 bp, synthetic construct
  source 1..75: mol_type = other DNA
gcgatagcagagcgtacgctggcggcgcaatttaatcagccggatcatgaaattgtcgatcacttcacctatgtg

SEQ ID NO: 879277 - DNA, 75 bp, synthetic construct
  source 1..75: mol_type = other DNA
gggaattatattcactacggggtgcgtgaatttggtatgaccgctatcgccaatggcattgcgcaccacggcggc

SEQ ID NO: 879278 - DNA, 75 bp, synthetic construct
  source 1..75: mol_type = other DNA
ggcatgttgttcacgacatcgacggtcacaatccgcaggcagtgaaagaagcgattcttaaagcgcaaagcgtga

SEQ ID NO: 879279 - DNA, 75 bp, synthetic construct
  source 1..75: mol_type = other DNA
gtctgaaatatattacagccgcatgaccggtctgaatgaatcatcggaaatatcagagggaacttataatgagag

SEQ ID NO: 879280 - DNA, 75 bp, synthetic construct
  source 1..75: mol_type = other DNA
gcaggcgaccagtgcgcacactacgctggtggaaattgagaagtacaatggaacagtggagcaggtgacggcgtt

SEQ ID NO: 879281 - DNA, 75 bp, synthetic construct
  source 1..75: mol_type = other DNA
ggcggcacggttttaataaataaaaattgggaggttgatatggatttattttataaatctaaaacagaacctttt

SEQ ID NO: 879282 - DNA, 75 bp, synthetic construct
  source 1..75: mol_type = other DNA
aatgtgcgcgtggtttccttaccctcgacggatatttttgacgcccaggatgaggaatatcgtgagtcggtgctg

SEQ ID NO: 879283 - DNA, 75 bp, synthetic construct
  source 1..75: mol_type = other DNA
aaaacaagcacttagctgtaacccggaagcctgggctgaacaacctggtgcgtgtcctgatatcaatacgctcta

SEQ ID NO: 879284 - DNA, 75 bp, synthetic construct
  source 1..75: mol_type = other DNA
acctgtctgaatgaatcatcagaaatatcagaggatacttataatgaaagaaaacaaaaagaatcaggaattcaa

SEQ ID NO: 879285 - DNA, 75 bp, synthetic construct
  source 1..75: mol_type = other DNA
ggaatgaacatgtacgatcggcttgctgtcttacggaaaaccgatttcacgggtgacattaccgacccgaagggc

SEQ ID NO: 879286 - DNA, 75 bp, synthetic construct
  source 1..75: mol_type = other DNA
aaaaagcaccggtagatttgatcccactgctggaagtggcgggcggcgcatttcgcgaacgattcgccagccgtg

SEQ ID NO: 879287 - DNA, 75 bp, synthetic construct
  source 1..75: mol_type = other DNA
aaacggtgcgcctgacctttgccgacagtgcgccaggtgtcagtgacgatcagctacaaaaattgtttgaacgtt

SEQ ID NO: 879288 - DNA, 75 bp, synthetic construct
  source 1..75: mol_type = other DNA
aggtcggtacactgaccaaactggttgacgatctccatcagttgtcgatgtctgatgaaggcgctctcgcctatc

SEQ ID NO: 879289 - DNA, 75 bp, synthetic construct
  source 1..75: mol_type = other DNA
ctgcaaatgcttggcgacgcacttggcgagcagtacgcccagcatggcaactggcgcttcctgcgtaacaacgat

SEQ ID NO: 879290 - DNA, 75 bp, synthetic construct
  source 1..75: mol_type = other DNA
ataacttactggaaaacagtctacgttacacagacagcggcggcagcctgcaaatctccgccgaacagcgcgata

SEQ ID NO: 879291 - DNA, 75 bp, synthetic construct
  source 1..75: mol_type = other DNA
tgacgatctccatcaattgtcgatgtctgatgaaggcgctctcgcctatcaaaaagcaccggtagatttgatccc

SEQ ID NO: 879292 - DNA, 75 bp, synthetic construct
  source 1..75: mol_type = other DNA
atgttgatatggcaaatgcctatattggtcgatggcttagtgaaacagcaaatcaacgcattcatgcaacaacta

SEQ ID NO: 879293 - DNA, 75 bp, synthetic construct
  source 1..75: mol_type = other DNA
aagccaaaggtcataatgtaccggacgttcttgtttccatcagcgccatactgaaaacgtcggttcccgatggcg

SEQ ID NO: 879294 - DNA, 75 bp, synthetic construct
  source 1..75: mol_type = other DNA
actggtttttatcagccggattcaggcaaaaagaattagggcaaaaatgctttctctttgcgcccgccggatacg

SEQ ID NO: 879295 - DNA, 75 bp, synthetic construct
  source 1..75: mol_type = other DNA
ccggcaaattgtttctggcgattttcgccacctgcattgtcttgctgatcagtatgcactgggcggtgcgtatca

SEQ ID NO: 879296 - DNA, 75 bp, synthetic construct
  source 1..75: mol_type = other DNA
cgccacctgcattgtcttgctgatcagtatgcactgggcggtgcgtatcagttttgagcgtggctttattgatta

SEQ ID NO: 879297 - DNA, 75 bp, synthetic construct
  source 1..75: mol_type = other DNA
gcagtttgaggggcgggtgcagcgcattgcccgcgtacaccactatggtctgcgcgatcgggttagccgcaaggg

SEQ ID NO: 879298 - DNA, 75 bp, synthetic construct
  source 1..75: mol_type = other DNA
aaggttcttccaccgaaagtagccgaagaggctaagccagtagtaggtgttggaaaatggcaggtatccacgaaa

SEQ ID NO: 879299 - DNA, 75 bp, synthetic construct
  source 1..75: mol_type = other DNA
tggatggaacggccattgggatgtgtgcattacccaacggcaaacgctgtagcgagcagtcgcttgccgccggaa

SEQ ID NO: 879300 - DNA, 75 bp, synthetic construct
  source 1..75: mol_type = other DNA
ggcgctaaggcagaactggcactggcagagaagctggggcatgcagttattttccaggaggcaaccagtgagaaa

SEQ ID NO: 879301 - DNA, 75 bp, synthetic construct
  source 1..75: mol_type = other DNA
tggcaaatccgcgtgccgcgtattcttgctgcgctgttactgggcgcggcgctggcaggagccggaaccacctat

SEQ ID NO: 879302 - DNA, 75 bp, synthetic construct
  source 1..75: mol_type = other DNA
atctgtaaactcaaaatctaaaacggaaaagctagtaacaacagaggctcagcaaccaaatctttctgagatatc

SEQ ID NO: 879303 - DNA, 75 bp, synthetic construct
  source 1..75: mol_type = other DNA
gtgcatcatttatatcaattagtgtactgcctgttcacgcagcaactgaacataagaacttcaatgcagtactcc

SEQ ID NO: 879304 - DNA, 75 bp, synthetic construct
  source 1..75: mol_type = other DNA
ttcacttcagaggaggtcggtaagatacaacaacaatggtctgaaataaaatcctgtatcaaggagacctttatt

SEQ ID NO: 879305 - DNA, 75 bp, synthetic construct
  source 1..75: mol_type = other DNA
cttactgatgtcaatagcggtagcgcactggcagggtgatttcagaaaagaactggatgaactgacaaaaaacat

SEQ ID NO: 879306 - DNA, 75 bp, synthetic construct
  source 1..75: mol_type = other DNA
gataatgccagctataaatgggctaaatatgcctggaacagtgttaatggttatcctggcactgttgtttattat

SEQ ID NO: 879307 - DNA, 75 bp, synthetic construct
  source 1..75: mol_type = other DNA
ataccgttttaaacccggcagtacttccggacgggctgactcagccgcagtacatggatatttgcatggcaatga

SEQ ID NO: 879308 - DNA, 75 bp, synthetic construct
  source 1..75: mol_type = other DNA
tgcacgaaatattcaaatacgagcaacatgattcgcctgatgatattttatttaacgttgtcgtaccagaacttg

SEQ ID NO: 879309 - DNA, 75 bp, synthetic construct
  source 1..75: mol_type = other DNA
agtcattcctgtggcctactggctttacaaaaagcaaaccagtggacatccattatatacaacgattaacctcct

SEQ ID NO: 879310 - DNA, 75 bp, synthetic construct
  source 1..75: mol_type = other DNA
attacgttctggttgctgggcgggttgtctaccgtgactctacgtgatctctgctatgcgacaccgctcatcctg

SEQ ID NO: 879311 - DNA, 75 bp, synthetic construct
  source 1..75: mol_type = other DNA
ccgctggcgcacacggttgtgctgctcaatagcggtggcgacaccacccaggcggccgccattttaagtggtttg

SEQ ID NO: 879312 - DNA, 75 bp, synthetic construct
  source 1..75: mol_type = other DNA
atcaacaccggtagccatctgatcccgctaagtctcgcctggcgttcgcttgccgatcatcagagtgctgccgct

SEQ ID NO: 879313 - DNA, 75 bp, synthetic construct
  source 1..75: mol_type = other DNA
gtatggaccgccggcaaaaagaagggggaagcgaagccgggatcagaaattctgtggactgacggtcttggcgtg

SEQ ID NO: 879314 - DNA, 75 bp, synthetic construct
  source 1..75: mol_type = other DNA
ggaaactccccggaagaggtttattgttgtcaggctggggagagcataacgcgcgataccgcgctggtacgttcc

SEQ ID NO: 879315 - DNA, 75 bp, synthetic construct
  source 1..75: mol_type = other DNA
ttgtctccgagaattttttctacgaaagcgaaatttacaacacccgcttgtatatcttcaccgaccgccctctgt

SEQ ID NO: 879316 - DNA, 75 bp, synthetic construct
  source 1..75: mol_type = other DNA
catggatgccgtcactcacaaccgataaacaaggcaaagcgtatttcacgttcctgatgcctgattcgttaaccc

SEQ ID NO: 879317 - DNA, 75 bp, synthetic construct
  source 1..75: mol_type = other DNA
atcaacaccggtagccgtctactccccctaagccttgcctggcgtgcgcttgccgatcatcagagtgctgccgcc

SEQ ID NO: 879318 - DNA, 75 bp, synthetic construct
  source 1..75: mol_type = other DNA
gcgagcggcgagtgaaaatgctggaacgcccacggcgcgaagaggttgataccgcggcatggatgccatcgctaa

SEQ ID NO: 879319 - DNA, 75 bp, synthetic construct
  source 1..75: mol_type = other DNA
atgacccgcggtgtgaccgatgacagcggtaccttgcagttacaacatatatcgccagaacgttcatacattctg

SEQ ID NO: 879320 - DNA, 75 bp, synthetic construct
  source 1..75: mol_type = other DNA
ctgggcgacgggctgaacaatacgctaacctggctgtgggataactggtatggcaaatctcgccgtgtaatgcag

SEQ ID NO: 879321 - DNA, 75 bp, synthetic construct
  source 1..75: mol_type = other DNA
ctggggcgtaacaatgtgcgtaccagctccagtctgtcgtttatcagctacgaccaggcgctctccagcgagccg

SEQ ID NO: 879322 - DNA, 75 bp, synthetic construct
  source 1..75: mol_type = other DNA
ggtaaggatgctgaaggcggcgtttttgtctccgagaacttcttctacgaaagtgaaatctacaacacccgcttg

SEQ ID NO: 879323 - DNA, 75 bp, synthetic construct
  source 1..75: mol_type = other DNA
cgtatcactgctgcaaatggaactactgcaactgccgaggtgatttcctatatcccttcgcaggtagttggcgag

SEQ ID NO: 879324 - DNA, 75 bp, synthetic construct
  source 1..75: mol_type = other DNA
atgtcgaaattagggatctcatcactgtttaaaagtgtactgcttactgcagctctggcagtttcatttaccgca

SEQ ID NO: 879325 - DNA, 75 bp, synthetic construct
  source 1..75: mol_type = other DNA
tcaacgtacgagttgtacgaaggtgacgctacctacaaagccgctatcgacaaagcattaaaaccggtcggactg

SEQ ID NO: 879326 - DNA, 75 bp, synthetic construct
  source 1..75: mol_type = other DNA
gttatatcgttaccaacggaacatcgacgtcgaacaaaattgtgggtatgtacgccgcgccatccggcagtacgc

SEQ ID NO: 879327 - DNA, 75 bp, synthetic construct
  source 1..75: mol_type = other DNA
atgcgaattctgaactgttatatagcgaatgacagcaaggggcattttgttacggcgaaagaagcagcgaagcac

SEQ ID NO: 879328 - DNA, 75 bp, synthetic construct
  source 1..75: mol_type = other DNA
tgctgtgtgtcctgtggatgcacgttaacacttcagcggggcaatgacggacaacaaccgtggtttgaacatgac

SEQ ID NO: 879329 - DNA, 75 bp, synthetic construct
  source 1..75: mol_type = other DNA
tacggcgaaagaagccgcgaagcacaaccgacaggacgttttgtgctgtgtgtcctgtggttgtccgttaacact

SEQ ID NO: 879330 - DNA, 75 bp, synthetic construct
  source 1..75: mol_type = other DNA
cagcctccctagcagcaatgctggtggttgcccctcaggtatgggcagaaaccttcaatgcgagggttgtgggcg

SEQ ID NO: 879331 - DNA, 75 bp, synthetic construct
  source 1..75: mol_type = other DNA
gtttggtcgaatgattaaagtcgagcaaatcgacaaagaccgttatggccgtctggtcgccaacctttatgtcga

SEQ ID NO: 879332 - DNA, 75 bp, synthetic construct
  source 1..75: mol_type = other DNA
gctagaagccgaggctaaagccgataagcgaggcctttgggcattaccggaatcagagagaactcccccttggga

SEQ ID NO: 879333 - DNA, 75 bp, synthetic construct
  source 1..75: mol_type = other DNA
ccgcgccgtgaatttactcgcgacagcatcgaagagaaagtcgctgccaccacgcaagcacaatggccggttcat

SEQ ID NO: 879334 - DNA, 75 bp, synthetic construct
  source 1..75: mol_type = other DNA
gcgggaagagtctgacggctggtttttcgatatctggcaaccgccgcaggtggatgaagccgaatgctggcccgt

SEQ ID NO: 879335 - DNA, 75 bp, synthetic construct
  source 1..75: mol_type = other DNA
tagagtatcggcaaatatgatcctgccttatccaccgggcgtaccgctgctgatgccaggagaaatgctgaccaa

SEQ ID NO: 879336 - DNA, 75 bp, synthetic construct
  source 1..75: mol_type = other DNA
ggtgaaggtgagaaagtggttttgtgtgatgtgtgacgaagattatgaaggagaaaagtgctgcccgcgttgtgg

SEQ ID NO: 879337 - DNA, 75 bp, synthetic construct
  source 1..75: mol_type = other DNA
aggttgcgtcaaattcgggaagattatatgggctgtcgtaaagaaactggagtggcttattccggatgaaaaatc

SEQ ID NO: 879338 - DNA, 75 bp, synthetic construct
  source 1..75: mol_type = other DNA
gacgctcaaaaatcaaacctgctaacgaaagaaggggctgagggtgcagcgcgcgcgcacgtatccgtcacgaat

SEQ ID NO: 879339 - DNA, 75 bp, synthetic construct
  source 1..75: mol_type = other DNA
tgcactatgactcccgtgaaaccaacgtcgtgctgaaaccggggatgaccttcaccatcgagccaatggtcaacg

SEQ ID NO: 879340 - DNA, 75 bp, synthetic construct
  source 1..75: mol_type = other DNA
tgacccgccacgatccgatcttaaccctggtgctggtaggcattgcgttaggaacgttgtgcggagcggggatat

SEQ ID NO: 879341 - DNA, 75 bp, synthetic construct
  source 1..75: mol_type = other DNA
gcggcaatcctgtggggattatccattgtttacatccagctgtacgcattttgcggcgggctgatggtggtcgcg

SEQ ID NO: 879342 - DNA, 75 bp, synthetic construct
  source 1..75: mol_type = other DNA
cttattattgcgtcggactatgctgaatatgtggcagaggcacggtacagaagaaaattcacggaggatgtaagc

SEQ ID NO: 879343 - DNA, 75 bp, synthetic construct
  source 1..75: mol_type = other DNA
ggatgggcaaagatatcattttttctcaagatattgtagcgttgctagcggttaactttttttgtttagtcgcga

SEQ ID NO: 879344 - DNA, 75 bp, synthetic construct
  source 1..75: mol_type = other DNA
attgttcaagccattgaattctgaaaataaatatgacattgttggttatttttatattattcacagaatatttaa

SEQ ID NO: 879345 - DNA, 75 bp, synthetic construct
  source 1..75: mol_type = other DNA
gcagaccctgataatcacctgacccacgaagagcgctctgttttgcagaaaaaagtcaataaaactatggggcgg

SEQ ID NO: 879346 - DNA, 75 bp, synthetic construct
  source 1..75: mol_type = other DNA
attaaagacggtttccacggcgacacctcgaaaatgtttatcgtcggtaagccaaccatcatgggagaacgcctg

SEQ ID NO: 879347 - DNA, 75 bp, synthetic construct
  source 1..75: mol_type = other DNA
aatgaacaacacgcggtttctgcctgcctcggctatcacggttatccgaaatccgtttgcatctctattaatgaa

SEQ ID NO: 879348 - DNA, 75 bp, synthetic construct
  source 1..75: mol_type = other DNA
atttatatagcaagacaacactatcaaaagaacttccgctaataaagcaaacaataataaaagagataaaaaaga

SEQ ID NO: 879349 - DNA, 75 bp, synthetic construct
  source 1..75: mol_type = other DNA
tgaatgaaatttatcgcggcgaagacagcattgtccgccactggctgaaagcaccgtggaatatggacggttggc

SEQ ID NO: 879350 - DNA, 75 bp, synthetic construct
  source 1..75: mol_type = other DNA
aatccggtgtttaaagccccgagcgtacataaatacgataccgaggattatcgccatgtcgatccgcagtttggc

SEQ ID NO: 879351 - DNA, 75 bp, synthetic construct
  source 1..75: mol_type = other DNA
atgcacaaactgcgcagtcagccacagcctggcgtaacggcatggcgggcggctgtcgatctctccactggacaa

SEQ ID NO: 879352 - DNA, 75 bp, synthetic construct
  source 1..75: mol_type = other DNA
atgcataaacagcgcagtcagccgcatccaggcgtaacagcatggcgggctgcgctctctctctccaccgggcag

SEQ ID NO: 879353 - DNA, 75 bp, synthetic construct
  source 1..75: mol_type = other DNA
tggtgaatgaaatttatcgcggggaagacagcattgtccgccactggctgaaagcgccgtggaatatggacggct

SEQ ID NO: 879354 - DNA, 75 bp, synthetic construct
  source 1..75: mol_type = other DNA
gataattaccgcgccggcctttctcatcaacagcaattgcgtatgtttaatcagctcgatagccacgatactgcg

SEQ ID NO: 879355 - DNA, 75 bp, synthetic construct
  source 1..75: mol_type = other DNA
tcaggcggtggatattgaagtcagccgtcacgaagacttttcgtcggtgattcagtcaagacgcgcctggtttag

SEQ ID NO: 879356 - DNA, 75 bp, synthetic construct
  source 1..75: mol_type = other DNA
aagtaatgctcgcgctggcgatttttgcgttggccgccatggcggtgttacagattgccagcggtgcgctgagta

SEQ ID NO: 879357 - DNA, 75 bp, synthetic construct
  source 1..75: mol_type = other DNA
acactggtcaagttaaaaatgcctttgagtttgggtttgctcgttatgagaaggcgatggaagaactttcaaagg

SEQ ID NO: 879358 - DNA, 75 bp, synthetic construct
  source 1..75: mol_type = other DNA
ttgccatcgatgtaccggatatcggcccacaatgggctgcggatcagattttttatcagatcttccctgatcgtt

SEQ ID NO: 879359 - DNA, 75 bp, synthetic construct
  source 1..75: mol_type = other DNA
atcagcaggtttttgaggagaaaacggtagcaggctgggtggctgaaaaccagaccgcactgctctatctgatga

SEQ ID NO: 879360 - DNA, 75 bp, synthetic construct
  source 1..75: mol_type = other DNA
tgcgctggctgccacggcggtgttacagattgccagcggtgcgctgagtaatcagcacgttcttgaggaaaaaac

SEQ ID NO: 879361 - DNA, 75 bp, synthetic construct
  source 1..75: mol_type = other DNA
tgatccgttttgccgtaagccatttccgtggcaggtggaaaaacaagatgcggagctattctcgttgtaccagcg

SEQ ID NO: 879362 - DNA, 75 bp, synthetic construct
  source 1..75: mol_type = other DNA
gctgacgtaacagctcaggctgtagcgacctggtcggcaacagccaaaaagacaccaccagtaagctggttgtga

SEQ ID NO: 879363 - DNA, 75 bp, synthetic construct
  source 1..75: mol_type = other DNA
gtcgttgtacgaagccattctgtatccatcgtctgaaaacttcgtgaagtatttccggctgcagaactactggac

SEQ ID NO: 879364 - DNA, 75 bp, synthetic construct
  source 1..75: mol_type = other DNA
cggcaggaacgctcgcggccttcgccctgatccgctactacgacgatccccccggacggctgaaccgtcgggata

SEQ ID NO: 879365 - DNA, 75 bp, synthetic construct
  source 1..75: mol_type = other DNA
aaaaaagcgactgatatgacgattccggtggatattgataccgttgcatcccgactgcgacgctattatggtttt

SEQ ID NO: 879366 - DNA, 75 bp, synthetic construct
  source 1..75: mol_type = other DNA
aaaagaatggtgcagggacacgggtatatgtggtttatcactcttcgttcagcgggcatttaacggaggagtatg

SEQ ID NO: 879367 - DNA, 75 bp, synthetic construct
  source 1..75: mol_type = other DNA
tcaccgcgcaacgtttacacccaatgcaatatttgctggtggggctttcattggtgatgttttatttgctcttgc

SEQ ID NO: 879368 - DNA, 75 bp, synthetic construct
  source 1..75: mol_type = other DNA
ccaactgatgaattaatttcattatttgatataaattgttcagtgtttattagcaaaattaaaaataatttagag

SEQ ID NO: 879369 - DNA, 75 bp, synthetic construct
  source 1..75: mol_type = other DNA
aagccgcaagtgcttcagcatctgctgccgctgcatctgtaccagctgatgaaggtctcgataacctgctggctg

SEQ ID NO: 879370 - DNA, 75 bp, synthetic construct
  source 1..75: mol_type = other DNA
tggttgatgaagagatcctgcgtgcagctgaagctgagttcaaaccggaagaagcgaaagctccggaagccaccg

SEQ ID NO: 879371 - DNA, 75 bp, synthetic construct
  source 1..75: mol_type = other DNA
cgccaaacgtggcaaaaacactgatttgacccgcttaaaagacggcatcaactatatccgcatcttccctaataa

SEQ ID NO: 879372 - DNA, 75 bp, synthetic construct
  source 1..75: mol_type = other DNA
aatataaactataatttggaaaaaatgtcccaaaccctgttcaaatcctggtttgtggattttgatccagtgatt

SEQ ID NO: 879373 - DNA, 75 bp, synthetic construct
  source 1..75: mol_type = other DNA
aaattcgctcgcttttcccaagtgaatttgaagaaacggagttgggttgggtgccaaaaggctggaagattgata

SEQ ID NO: 879374 - DNA, 75 bp, synthetic construct
  source 1..75: mol_type = other DNA
atggtggcgatcccgctgctgttcgggcgcttaacggcggcagattacgaggacaacgttgcgcaagataaacgc

SEQ ID NO: 879375 - DNA, 75 bp, synthetic construct
  source 1..75: mol_type = other DNA
tatcaggccgtggaaatgtggctgcgcagacgtgcagcaggtaagaaaaatgggagcgtgacaaatgaccctgag

SEQ ID NO: 879376 - DNA, 75 bp, synthetic construct
  source 1..75: mol_type = other DNA
agtgatgatcccattacaccgcgcctgtttatcagccgtgtgatcctgggcagttttgtttcagtcatcgctggc

SEQ ID NO: 879377 - DNA, 75 bp, synthetic construct
  source 1..75: mol_type = other DNA
attcactgctgattatgggggcgctcattgctgttgcgaaggtgctggccagtgatgatcccattacaccgcgcc

SEQ ID NO: 879378 - DNA, 75 bp, synthetic construct
  source 1..75: mol_type = other DNA
acataccggggcatcctgacgctaatgatggttggataattcctggtgcgtcgtggaaaccgtcacactggatgc

SEQ ID NO: 879379 - DNA, 75 bp, synthetic construct
  source 1..75: mol_type = other DNA
tggttgccacgggggccagctctatgtcgtgggagtaccgttacaccctgaacgcggtgattgaggatttcagcg

SEQ ID NO: 879380 - DNA, 75 bp, synthetic construct
  source 1..75: mol_type = other DNA
cgttacgggaaaagttattcacctttgaggtggatattctgcgcaacgatgtctgtgatatcagcctcaacctgc

SEQ ID NO: 879381 - DNA, 75 bp, synthetic construct
  source 1..75: mol_type = other DNA
gccctgaaaaggcgacttaataatcacgtaatacagcacattggtgctatgccgctggataaatgcgagctacgg

SEQ ID NO: 879382 - DNA, 75 bp, synthetic construct
  source 1..75: mol_type = other DNA
cttactacgtcgcgttaatccgcctcctgattgtcttcggagccagaacggtagaactgaggttatcggagatcg

SEQ ID NO: 879383 - DNA, 75 bp, synthetic construct
  source 1..75: mol_type = other DNA
aatgggatctgaaagaaatgttgtggacagtgccaaaagagcacagcaaaacgaaggtaacgatattcaggccaa

SEQ ID NO: 879384 - DNA, 75 bp, synthetic construct
  source 1..75: mol_type = other DNA
atggtcaatgccattttttgcgcccacggcaaattagcctgcgccatgctggaatcggttcagatggtgtacggc

SEQ ID NO: 879385 - DNA, 75 bp, synthetic construct
  source 1..75: mol_type = other DNA
acctctggcgctcgaactggtagacaaccaaagcagtatgaacgttgatgaattgtgtgaacacctgacacaaat

SEQ ID NO: 879386 - DNA, 75 bp, synthetic construct
  source 1..75: mol_type = other DNA
ccggcgcacctttacaaccatgctgaacgatttaggcgttgatcctcacgtcgtggagcagcttacaggccacca

SEQ ID NO: 879387 - DNA, 75 bp, synthetic construct
  source 1..75: mol_type = other DNA
aaatgagaatccgccagttgggactggtgcgtggaaagacgctgttgactgggtactcgaagaggcttgtcaggc

SEQ ID NO: 879388 - DNA, 75 bp, synthetic construct
  source 1..75: mol_type = other DNA
ccagcgattgatgaaaactgcgcacatcgtgaacaagtgaaaaatgcttttgatttcggtttttctcgttatgag

SEQ ID NO: 879389 - DNA, 75 bp, synthetic construct
  source 1..75: mol_type = other DNA
acgccctcaataaagcagtgccttatgtccgtaataacccggacaaactgcatctgtttgtagataatggttcgc

SEQ ID NO: 879390 - DNA, 75 bp, synthetic construct
  source 1..75: mol_type = other DNA
ggcagtgtgtcgagcgttgaagctgtagcggaacccgatgaacctgaagagatgtggacggtgaaacgtggctga

SEQ ID NO: 879391 - DNA, 75 bp, synthetic construct
  source 1..75: mol_type = other DNA
gcgtgggtggacggtcagtcgttgcgcacctatcgccatgcgccgaacaccggcacgcgtaaatcctgggcggcg

SEQ ID NO: 879392 - DNA, 75 bp, synthetic construct
  source 1..75: mol_type = other DNA
ttcccgactcgccagcagcagcacattctggcggtttctctcgacagaactcgcctcgagcagatgccggtcaat

SEQ ID NO: 879393 - DNA, 75 bp, synthetic construct
  source 1..75: mol_type = other DNA
caatgccattacccttgagttcaccgacggcacgcgctttgaagaagtggtggtggagtaccccattggtcatgc

SEQ ID NO: 879394 - DNA, 75 bp, synthetic construct
  source 1..75: mol_type = other DNA
ggcagtgtgtcgagcgttgaagctgtggcagaacccgatgaacctgaagaaatgtgggcggtgaaacgtggctga

SEQ ID NO: 879395 - DNA, 75 bp, synthetic construct
  source 1..75: mol_type = other DNA
caaccagcaaagcggttgttgatgcctgggttgaagaatggaatcaggttgacggaagtcctggcgaaccactgt

SEQ ID NO: 879396 - DNA, 75 bp, synthetic construct
  source 1..75: mol_type = other DNA
gtagcatggaaagacgctgttgagtgggttatcgaagaggcttgtctggctgtaaaagcatcatcagggaaggat

SEQ ID NO: 879397 - DNA, 75 bp, synthetic construct
  source 1..75: mol_type = other DNA
aacgtggtgattgaggatttcagcggcgaccagaatctgttgatggccccggttttgctgtggctgcgggataac

SEQ ID NO: 879398 - DNA, 75 bp, synthetic construct
  source 1..75: mol_type = other DNA
tggttgccacgggggctaactccatgtcgtgggagtaccgttacaccctgaacgcggtgattgaggatttcagcg

SEQ ID NO: 879399 - DNA, 75 bp, synthetic construct
  source 1..75: mol_type = other DNA
aactgacggagtgtgtgctggtcagcactaacggcagtgtgtcgagtgttgaagctgtagcggaacccgatgaac

SEQ ID NO: 879400 - DNA, 75 bp, synthetic construct
  source 1..75: mol_type = other DNA
caccgttactcaaagtactttcagtctgtaagcagtattctggtgttaaagttctgaagggaatcgactttgtct

SEQ ID NO: 879401 - DNA, 75 bp, synthetic construct
  source 1..75: mol_type = other DNA
tttgccggaggaccggcaatcgtcaggactgaatctggatgcctcgctggcgtggaatgtttgcgcattaaccca

SEQ ID NO: 879402 - DNA, 75 bp, synthetic construct
  source 1..75: mol_type = other DNA
gattatattcgcaagaatggcggtaacggctggcagttcttcagcccggcgatgaacgaaatggtaaaagagcgt

SEQ ID NO: 879403 - DNA, 75 bp, synthetic construct
  source 1..75: mol_type = other DNA
tttcgactcttccgaagggcgagcaggtcaaaatgacaagttttctccccctggatgaaaagttctgcacggaga

SEQ ID NO: 879404 - DNA, 75 bp, synthetic construct
  source 1..75: mol_type = other DNA
tctgtttctgttgtgttttttgtgggggcaattgtgggatggatttcggtgtctgaaatatattacagccgcagg

SEQ ID NO: 879405 - DNA, 75 bp, synthetic construct
  source 1..75: mol_type = other DNA
aatccggaatggcggcggcgtgaacctgcatttgacggccggccgtgggatgaatgggtgatccgtgaacacctg

SEQ ID NO: 879406 - DNA, 75 bp, synthetic construct
  source 1..75: mol_type = other DNA
ggcagcgttaaaggaatgaatgaacctgctgatggtgcaatgaatttagttaagaccagtaatggttggaaagcc

SEQ ID NO: 879407 - DNA, 75 bp, synthetic construct
  source 1..75: mol_type = other DNA
caataacaccagtttccccatccgtcttgccaagcctcgacttgacccaactggcacagggaccaattcagtgat

SEQ ID NO: 879408 - DNA, 75 bp, synthetic construct
  source 1..75: mol_type = other DNA
cccctgcccgccgaagaaattccaggctggatgagcagcgtgttaccgctgaaaatctgataaattcctctcgcc

SEQ ID NO: 879409 - DNA, 75 bp, synthetic construct
  source 1..75: mol_type = other DNA
cctggccttacttgaagccattaccagcattgggcaaagcctcaatttaaccgtcgtggcggaaggcgtcgaaac

SEQ ID NO: 879410 - DNA, 75 bp, synthetic construct
  source 1..75: mol_type = other DNA
ggtcaatcgctttcgtgaaaaactcaaaccggatcagtatctctgtcgtatcgaaggtacgcagtttgtcctcgt

SEQ ID NO: 879411 - DNA, 75 bp, synthetic construct
  source 1..75: mol_type = other DNA
aaaccggatcagtatctctgtcgtatcgaaggtacgcagtttgtcctcgtgagcctggaaaacgacgtcagtaac

SEQ ID NO: 879412 - DNA, 75 bp, synthetic construct
  source 1..75: mol_type = other DNA
ttatttatatgtttctaatacggcaacggtcgatattgatactgttgatgatttccagttggctgcagaaattta

SEQ ID NO: 879413 - DNA, 75 bp, synthetic construct
  source 1..75: mol_type = other DNA
cttttttacatcattaccagatgcttgctttattgatagtgagcagagagagaatgcattattaatgattggtaa

SEQ ID NO: 879414 - DNA, 75 bp, synthetic construct
  source 1..75: mol_type = other DNA
aaatttgcaaaatgaattagcaatgattactagttcatcgctttctgaaacgattgaagggctaagcctgggata

SEQ ID NO: 879415 - DNA, 75 bp, synthetic construct
  source 1..75: mol_type = other DNA
aaaaccccgcatctgtttttaattctaattcattagattttgaattagaatctcagcaattaacgcaaaaaaatt

SEQ ID NO: 879416 - DNA, 75 bp, synthetic construct
  source 1..75: mol_type = other DNA
aaagataagaatgtagatctaattgtattctctgaaaatactttttttggtttcaaaaatagttatatagaaaag

SEQ ID NO: 879417 - DNA, 75 bp, synthetic construct
  source 1..75: mol_type = other DNA
cgtgagaagcacttaaaggttattattagggcgctatcgttcgatctgtcttatatgtcttcttttgaagataag

SEQ ID NO: 879418 - DNA, 75 bp, synthetic construct
  source 1..75: mol_type = other DNA
atcttcaattattagcgatttatgccgggtaatcatttttttatcgcttgataactatacagatattattgcaat

SEQ ID NO: 879419 - DNA, 75 bp, synthetic construct
  source 1..75: mol_type = other DNA
ggcgggatctggaccagatcgccgccgacaacggtttcgactttcatatcatcgacaatgaaatctattgggatg

SEQ ID NO: 879420 - DNA, 75 bp, synthetic construct
  source 1..75: mol_type = other DNA
cgatcgtgatgccggtgggcgcggtttgcagacatttgatttgcgtaccactattcatgtagttaccgggataga

SEQ ID NO: 879421 - DNA, 75 bp, synthetic construct
  source 1..75: mol_type = other DNA
ataaatggttcttttgcggccacagttatcttttatatgttttatttcttgagttattccttttgtcggatgggg

SEQ ID NO: 879422 - DNA, 75 bp, synthetic construct
  source 1..75: mol_type = other DNA
tgagtgttcacatatgttatgaggggttatttcctgagggtaaatctcaaaggaaagatatctccattgttcaat

SEQ ID NO: 879423 - DNA, 75 bp, synthetic construct
  source 1..75: mol_type = other DNA
caaattgatacctttttttgagaagaaaagtttttataattcaccagaaccatcgacatcaccttttctatatta

SEQ ID NO: 879424 - DNA, 75 bp, synthetic construct
  source 1..75: mol_type = other DNA
ttcaatccgattattcatggttaagtggcaatcacaaatatgacaatatccttattaatggaagcatactatcga

SEQ ID NO: 879425 - DNA, 75 bp, synthetic construct
  source 1..75: mol_type = other DNA
tccttgccttactcgaagccattaccagcattgggcaaagcctcaatttaaccgtcgtggctgaaggcatcgaaa

SEQ ID NO: 879426 - DNA, 75 bp, synthetic construct
  source 1..75: mol_type = other DNA
cgttttatctactcgtccgtcggtgcctggcagcaccatcagagcaaaaaagaagctcagcaatctgatcttacc

SEQ ID NO: 879427 - DNA, 75 bp, synthetic construct
  source 1..75: mol_type = other DNA
cgttttatctactcgtccgtcggtgcctggcagcaccatcagagcaaaaaagaagctcagcaatccacactctcc

SEQ ID NO: 879428 - DNA, 75 bp, synthetic construct
  source 1..75: mol_type = other DNA
aggatttgacaaaatcccctcctgttgtaggggctaaaattcttaatttatttgacgaaacaaaaaaagaaaaaa

SEQ ID NO: 879429 - DNA, 75 bp, synthetic construct
  source 1..75: mol_type = other DNA
gaagacttcagcggagagcttaagctggaaggggcggtgaccagcacccgtaatccgtgggtgtggaaagtcgga

SEQ ID NO: 879430 - DNA, 75 bp, synthetic construct
  source 1..75: mol_type = other DNA
tgtatgacgacctgaatgtgaatggtctgccgggtgaaagtacgatgatgaagacttctgagactccgggtgttc

SEQ ID NO: 879431 - DNA, 75 bp, synthetic construct
  source 1..75: mol_type = other DNA
gagggaaagtcaaacctgaatgtcagacagtctccggtttcacgtagtagagatacggtggttcctgtttctttg

SEQ ID NO: 879432 - DNA, 75 bp, synthetic construct
  source 1..75: mol_type = other DNA
tttcacgagaattaacacgacaaaaccacgccacagaaaagcagcgattgatctcgacaagttactccgggagaa

SEQ ID NO: 879433 - DNA, 75 bp, synthetic construct
  source 1..75: mol_type = other DNA
tgtatgcttctcgctggctgcttgcccccgtgtactttggcctttcgctggcgttagttgccctggcgctgaagt

SEQ ID NO: 879434 - DNA, 75 bp, synthetic construct
  source 1..75: mol_type = other DNA
gttaccgccaccccgatggcgtcatggcaggtcaatgccaccaccgtgaccgccatccgcctgcaaaaccagagc

SEQ ID NO: 879435 - DNA, 75 bp, synthetic construct
  source 1..75: mol_type = other DNA
agttacggaaagggtactgagggattttcgcttgaatggacagcaccaggcgtggcggaggtgacgctgcctgtc

SEQ ID NO: 879436 - DNA, 75 bp, synthetic construct
  source 1..75: mol_type = other DNA
atgcttcgcaatgatgtcattcagtctgtcaaccagttctggttttctgaacgtgatatgcgcggagcccttctt

SEQ ID NO: 879437 - DNA, 75 bp, synthetic construct
  source 1..75: mol_type = other DNA
atgatgaccatcagcgatatcattgaaattattatcgtttgcgcactgatatttttcccgctgggctatctggcg

SEQ ID NO: 879438 - DNA, 75 bp, synthetic construct
  source 1..75: mol_type = other DNA
gggacattcaccttcaggatgcaggcggccggggtgttgcgtcatatgcaggacggacaaccggtgtataccggc

SEQ ID NO: 879439 - DNA, 75 bp, synthetic construct
  source 1..75: mol_type = other DNA
gcagttctttgatgagcatctggcaacttacccaacacgtagctgcgtgcaggtcgctcgtttgccaaaagatgt

SEQ ID NO: 879440 - DNA, 75 bp, synthetic construct
  source 1..75: mol_type = other DNA
aatcttcctgccaaacagccacgccctgcaggaagaagccatgcctctgtatatcaatatggggcttaatcgccg

SEQ ID NO: 879441 - DNA, 75 bp, synthetic construct
  source 1..75: mol_type = other DNA
tgcagtattgcattacggggctgcaacatcctatacgtctgccaaacaaccctatttatctggatagcctcattg

SEQ ID NO: 879442 - DNA, 75 bp, synthetic construct
  source 1..75: mol_type = other DNA
tgaagattgttcgcgtatcgtatacgtggaggctggctggtgttccttcgtgggtagataaaagtgcattcgctg

SEQ ID NO: 879443 - DNA, 75 bp, synthetic construct
  source 1..75: mol_type = other DNA
catgcgtttacgctaaaagccacctttgagcaggataaaaacgacagtacccacgcctattttacccgccctgcg

SEQ ID NO: 879444 - DNA, 75 bp, synthetic construct
  source 1..75: mol_type = other DNA
ttctggtacatgaacatcattctgcaatacgaatccaacgccagttcgctgtctttagggcgcttcgaccagtat

SEQ ID NO: 879445 - DNA, 75 bp, synthetic construct
  source 1..75: mol_type = other DNA
gtaccaaaacgcgattactactatgtatccgaacaaggtcgtcgcctgtatcagcttgcactagggccacttgcg

SEQ ID NO: 879446 - DNA, 75 bp, synthetic construct
  source 1..75: mol_type = other DNA
gcactgtctatggtcaacgatgcgtcttctgctattgcagagactaactccggtttggtcagccagggttacatc

SEQ ID NO: 879447 - DNA, 75 bp, synthetic construct
  source 1..75: mol_type = other DNA
agtggtgaattacggctgaacggcgagatgccggaacactggagggtgtcactgtcagtaaacattgaatatcag

SEQ ID NO: 879448 - DNA, 75 bp, synthetic construct
  source 1..75: mol_type = other DNA
gctttatgtcccagctattcaataccaataacggttacgttgatgaagacgccttgtccatggtcaacgatgcat

SEQ ID NO: 879449 - DNA, 75 bp, synthetic construct
  source 1..75: mol_type = other DNA
gtatctcttccgtcgcattgaagaatcactcgatggccgtccgacgctgattattctcgatgaagcctggctgat

SEQ ID NO: 879450 - DNA, 75 bp, synthetic construct
  source 1..75: mol_type = other DNA
gcagtagtcgatgacggcgtaattgtctgcaaaaacggctccttcatggcgtccttcttttataagggcgcagac

SEQ ID NO: 879451 - DNA, 75 bp, synthetic construct
  source 1..75: mol_type = other DNA
ggcaagccacggcccaggcggggcagggggagcgttacgaccagatactcgcgtttgcttatcccgacaacagcc

SEQ ID NO: 879452 - DNA, 75 bp, synthetic construct
  source 1..75: mol_type = other DNA
gccgtatcgcgatcagagcgacatctataactacgactcgtctctgctgcaatctgactactctggcctgttccg

SEQ ID NO: 879453 - DNA, 75 bp, synthetic construct
  source 1..75: mol_type = other DNA
gatcctcaaagggccgaaaggctgggcgaatctgaacaccaaagataccaacgtctgggaaggtgattaccagat

SEQ ID NO: 879454 - DNA, 75 bp, synthetic construct
  source 1..75: mol_type = other DNA
ttatcggcggcgttggcggctggtttggttttgcacatgcctcgctggagtccattttaggttacctgttggccc

SEQ ID NO: 879455 - DNA, 75 bp, synthetic construct
  source 1..75: mol_type = other DNA
gccaaatatggatgccaccatcacgccgcattatatgcatcgtcgtggcaacatcatgtgggagaacgaattccg

SEQ ID NO: 879456 - DNA, 75 bp, synthetic construct
  source 1..75: mol_type = other DNA
taactgggggagtctgaataccgaagccaaactgatggcgacgcattatcaacagaccaatcttgactggtataa

SEQ ID NO: 879457 - DNA, 75 bp, synthetic construct
  source 1..75: mol_type = other DNA
aacgatgtcggtcctttcgatacgcgaatttacggccaggcggtgcactttgttaacaccagagatgacatgcca

SEQ ID NO: 879458 - DNA, 75 bp, synthetic construct
  source 1..75: mol_type = other DNA
ctcgctggagtccattttaggttacctgttggccccattggcgtgggtgatgggggttgactggagtgatgcaaa

SEQ ID NO: 879459 - DNA, 75 bp, synthetic construct
  source 1..75: mol_type = other DNA
cttacctcaatttctcaccttatctgcaaacagctggcactctcgatgctaaaaccgtggcgattatttccttcg

SEQ ID NO: 879460 - DNA, 75 bp, synthetic construct
  source 1..75: mol_type = other DNA
tggcgggattatgctttggttaccgccagggcgttgggtcgctgaaaaagtcgcttttggcgtgcataaagtgat

SEQ ID NO: 879461 - DNA, 75 bp, synthetic construct
  source 1..75: mol_type = other DNA
cgaaacaccgccaaaaagcattattgaagccgctgcgacaggggcaatgaccgggctgaaaatcgccgccggtgt

SEQ ID NO: 879462 - DNA, 75 bp, synthetic construct
  source 1..75: mol_type = other DNA
aagatcagcctgcgtaccgttggcgcggcgttagtgttacaggtcgtgattggcggcattatgctttggttaccg

SEQ ID NO: 879463 - DNA, 75 bp, synthetic construct
  source 1..75: mol_type = other DNA
acgggcgttggcagcagcaacgctttccaacctgatgagcgcgaccattgccgggttctttattggtttagcgta

SEQ ID NO: 879464 - DNA, 75 bp, synthetic construct
  source 1..75: mol_type = other DNA
acggtactgacgcgctgcgcttcaccctggcggcgctggcttctaccggtcgtgacatcaactgggatatgaagc

SEQ ID NO: 879465 - DNA, 75 bp, synthetic construct
  source 1..75: mol_type = other DNA
ggtgcgatgaccggactgaaaatagccgcaggtgtggcgacggtggtgatggcgtttgtggcgattattgcgctg

SEQ ID NO: 879466 - DNA, 75 bp, synthetic construct
  source 1..75: mol_type = other DNA
acgggcgctggcagcagcaacgctttccaacctgatgagtgcgactattgccgggttctttattggtctggcgta

SEQ ID NO: 879467 - DNA, 75 bp, synthetic construct
  source 1..75: mol_type = other DNA
cgccggaaatcgcccagcttggtttacgggcgctggcagcaacgctttccaacctgatgagtgcgactattgccg

SEQ ID NO: 879468 - DNA, 75 bp, synthetic construct
  source 1..75: mol_type = other DNA
cattggcgtaatggggctgctgatccgcattcttggcagtatttttcagaaagccctcaacatcagcaaaatcga

SEQ ID NO: 879469 - DNA, 75 bp, synthetic construct
  source 1..75: mol_type = other DNA
gcaccgctggcgtggatcatgggtgtggactggagtgatgccaaccttgcgggtagcctgattgggcagaaactg

SEQ ID NO: 879470 - DNA, 75 bp, synthetic construct
  source 1..75: mol_type = other DNA
ggatggtggtattgctggcaattgcgttcttattgtctgtgaataaaaaaagtatcagcttacgcacagttgggg

SEQ ID NO: 879471 - DNA, 75 bp, synthetic construct
  source 1..75: mol_type = other DNA
accgtgtgctgtattactttatcccactgctgctggcgctgatctgttacctgttgctggaaagccaggcgaaga

SEQ ID NO: 879472 - DNA, 75 bp, synthetic construct
  source 1..75: mol_type = other DNA
ggctggggagcatacatccaaaggcacaattatcgccgccctactcgcttaccgtgtgctgtattactttatccc

SEQ ID NO: 879473 - DNA, 75 bp, synthetic construct
  source 1..75: mol_type = other DNA
tcgatcaaactacgctgcgtattctcggcattggcttactgatgattatcgcggtttatttgtggttttgcgctt

SEQ ID NO: 879474 - DNA, 75 bp, synthetic construct
  source 1..75: mol_type = other DNA
cgccggaaatcgcccagcttggtttacgggcgctggcagcagcgacgctttccaacctgatgagcgcgaccattg

SEQ ID NO: 879475 - DNA, 75 bp, synthetic construct
  source 1..75: mol_type = other DNA
tagaaacggataccgaaggctatctcaaagaaagcagccagtggagtgagccgctggcggtggtgattgcagaga

SEQ ID NO: 879476 - DNA, 75 bp, synthetic construct
  source 1..75: mol_type = other DNA
atgctgatcttcgaaggtaaagagatagaaacggataccgaaggctatctcaaagaaagcagccagtggagcgaa

SEQ ID NO: 879477 - DNA, 75 bp, synthetic construct
  source 1..75: mol_type = other DNA
ggcggtacgtgatgtacaacaacctgttccttaataacccggtgactgaagtcatgacgtcatcaccggtctgga

SEQ ID NO: 879478 - DNA, 75 bp, synthetic construct
  source 1..75: mol_type = other DNA
tctatggtctgcgtactttgcgtggctttatagcgcgattccagttaaccgcaccttatgtgcgctctatgccat

SEQ ID NO: 879479 - DNA, 75 bp, synthetic construct
  source 1..75: mol_type = other DNA
tctgcgcccttactcataaccttcgtggattctgggcgaaaaccgcgaaagataatgccaccctggaacgttatc

SEQ ID NO: 879480 - DNA, 75 bp, synthetic construct
  source 1..75: mol_type = other DNA
aacgttatcgtcgggcgctgaatattaaatttaaccaaccggaacaagctgcacggaccttatccggtggcaacc

SEQ ID NO: 879481 - DNA, 75 bp, synthetic construct
  source 1..75: mol_type = other DNA
tatcatattttgataggtttattgtttcaaatcaacttggggctgctaatgttgctttttatactgcaccatcag

SEQ ID NO: 879482 - DNA, 75 bp, synthetic construct
  source 1..75: mol_type = other DNA
gcggtatcgcgacgaccgcgcgtgaagaaaacgtcattggccattacatcactgaccgcgatcacatcattaaga

SEQ ID NO: 879483 - DNA, 75 bp, synthetic construct
  source 1..75: mol_type = other DNA
ctcgcgccgataagcggccgggaatgagttatgcgcaactgcgccagcgactacagggacgttatcaggaactgc

SEQ ID NO: 879484 - DNA, 75 bp, synthetic construct
  source 1..75: mol_type = other DNA
ctcgcgccgataagcggccgggaatgagttccgcgcgactgcgccagcaactacaggaacgtgatcaggaactgc

SEQ ID NO: 879485 - DNA, 75 bp, synthetic construct
  source 1..75: mol_type = other DNA
acgccaatttcctgcgcgaactggccgaaaacctgcctcgtattttgccagaaagcagcacagacaagtctgcac

SEQ ID NO: 879486 - DNA, 75 bp, synthetic construct
  source 1..75: mol_type = other DNA
cgaaagcctgcctcgtatttttccagaaggcagtacagataagtctgcactattgcaacgcctcgctaatgaaga

SEQ ID NO: 879487 - DNA, 75 bp, synthetic construct
  source 1..75: mol_type = other DNA
ggactgaatctcgatgcttcactggcgtggatgtctcagcccgtaatgatatctaccagctgttgcgcagcatcg

SEQ ID NO: 879488 - DNA, 75 bp, synthetic construct
  source 1..75: mol_type = other DNA
tggatgtctcggcgcgtaatgatatctaccaactgttgcgcagcatcgccgcacagaatgtggctatgctgctta

SEQ ID NO: 879489 - DNA, 75 bp, synthetic construct
  source 1..75: mol_type = other DNA
gggcctggctgggctggtgggggccggacgcacagaactggccgagagacgttctatggtctgcgtactttgcgt

SEQ ID NO: 879490 - DNA, 75 bp, synthetic construct
  source 1..75: mol_type = other DNA
agtcaacagatcatcctctggcagttaagtatctgacaaaccttgctcactatcgctcttttgtcgattttacat

SEQ ID NO: 879491 - DNA, 75 bp, synthetic construct
  source 1..75: mol_type = other DNA
attctttcttttcagttacagccctgttctttatggacatggtaagactctgtattaaatgggataagaactcag

SEQ ID NO: 879492 - DNA, 75 bp, synthetic construct
  source 1..75: mol_type = other DNA
cttgatcgttgtcgatccccgttttacgcgtaccgcttctgtggcggatatttacgcacctattcgttccggtac

SEQ ID NO: 879493 - DNA, 75 bp, synthetic construct
  source 1..75: mol_type = other DNA
tcgttcgtctgtatgaacaagacgcgctgcggatgggtaaaaaagagcagttcccgtatgtgggtacgacctatc

SEQ ID NO: 879494 - DNA, 75 bp, synthetic construct
  source 1..75: mol_type = other DNA
ctcatgatcaggttgagagaatagctaaaattgtcgccagagaagttgttggtaaattaggaaaagaaatcagag

SEQ ID NO: 879495 - DNA, 75 bp, synthetic construct
  source 1..75: mol_type = other DNA
gcataaaatcatcagtatatggtgtttctgcgggtgagcatagtgatgctgttaatggagaaatttcttcaagaa

SEQ ID NO: 879496 - DNA, 75 bp, synthetic construct
  source 1..75: mol_type = other DNA
gttaatagttctgttctgaactatggtatgaagtcatcagtatatagtgtttctgcaggtgagcatagtgatact

SEQ ID NO: 879497 - DNA, 75 bp, synthetic construct
  source 1..75: mol_type = other DNA
attcatctttacgatcatcacgtgggtctggtggtggagcaactgcgctgcattactaacggccaaagcacggac

SEQ ID NO: 879498 - DNA, 75 bp, synthetic construct
  source 1..75: mol_type = other DNA
tttaaatctgcaatgtttaaagattttgtccttggcagattctttaatattattgaatttgtttccccaccgaca

SEQ ID NO: 879499 - DNA, 75 bp, synthetic construct
  source 1..75: mol_type = other DNA
tatggaacaaaaccgggctgagttgtctcccgaaaaccttagtaggcatcagaaatattacgaagagttgattga

SEQ ID NO: 879500 - DNA, 75 bp, synthetic construct
  source 1..75: mol_type = other DNA
ctgaaagtgtgcgaagtgctggcctccaccagcgtacccgatcgcacaacgaccttcctgtacgcgctgggctgg

SEQ ID NO: 879501 - DNA, 75 bp, synthetic construct
  source 1..75: mol_type = other DNA
cgcgtaacgacggtgaaattctggcgggtatctaccatcacctgcgcgagctgtaccaggccgaaggtggtaaag

SEQ ID NO: 879502 - DNA, 75 bp, synthetic construct
  source 1..75: mol_type = other DNA
aaatcagcgaaacgctggcggcggcgaaaggcattaataatggcgatcgtgtcactgtctcaagcaaacgtggct

SEQ ID NO: 879503 - DNA, 75 bp, synthetic construct
  source 1..75: mol_type = other DNA
caaggttatagtctgtgacacatcagtattactggaaccagcatcgtactttgtcattggaactgttgttttgtt

SEQ ID NO: 879504 - DNA, 75 bp, synthetic construct
  source 1..75: mol_type = other DNA
gaagtcgccgcgattaaagatatcggcaactactttgaccgcgcagaatatattaaatggaaatcgtttcgtgat

SEQ ID NO: 879505 - DNA, 75 bp, synthetic construct
  source 1..75: mol_type = other DNA
tgcaggcgtctcacccgctgcgcgacggcaaggttatcgtggaggatattgaggacaatccgggcttcttccgcg

SEQ ID NO: 879506 - DNA, 75 bp, synthetic construct
  source 1..75: mol_type = other DNA
tggaataacgatggcgtattcttctattccaccggtcatgacagcaacggcgacagcgtccttgataccaacggc

SEQ ID NO: 879507 - DNA, 75 bp, synthetic construct
  source 1..75: mol_type = other DNA
tgttgaagtggtcatttcgaatccggtgtcaggcggcgtgccagctaatctggagcgcttgtttgatcgcttcta

SEQ ID NO: 879508 - DNA, 75 bp, synthetic construct
  source 1..75: mol_type = other DNA
tttaataccggtctggtttttatttcggtttttctgggctggctgaccacacgaatcggcctgaaaccattgcgg

SEQ ID NO: 879509 - DNA, 75 bp, synthetic construct
  source 1..75: mol_type = other DNA
gcgtccgactgttcgctattccgcacttccaggtagaagggatggacgtcaacctgtcactggtttctcagatgc

SEQ ID NO: 879510 - DNA, 75 bp, synthetic construct
  source 1..75: mol_type = other DNA
aaaatacctgtggacaaacgcctcgttcgcctttgccgccaatatggtgaagagctttgtgaataatggctggtg

SEQ ID NO: 879511 - DNA, 75 bp, synthetic construct
  source 1..75: mol_type = other DNA
aaaaagagcgctggtctgatggtaaagatccggctgcttttatcaaaacgggtctggatgctgccgggatgagcc

SEQ ID NO: 879512 - DNA, 75 bp, synthetic construct
  source 1..75: mol_type = other DNA
agttcccagatggttcccgactatatggcgtgagcaacggtagcggcgttcttctgcgacccttgtttctctcgc

SEQ ID NO: 879513 - DNA, 75 bp, synthetic construct
  source 1..75: mol_type = other DNA
ggtgagcccattgctgccctggtttcggcctgggaatttgatgcatctgctcaggacgtggcgctgctgaaaaat

SEQ ID NO: 879514 - DNA, 75 bp, synthetic construct
  source 1..75: mol_type = other DNA
cgaactccacgcagaaaccggcgctgtatgacactgcggatgcaacggctaacagccgcattaatgcccgtctgc

SEQ ID NO: 879515 - DNA, 75 bp, synthetic construct
  source 1..75: mol_type = other DNA
cttttatcggttccgtcggaccgaaattcttccttaaaaattcgatggaagaagtcgccgcgattaaagatatcg

SEQ ID NO: 879516 - DNA, 75 bp, synthetic construct
  source 1..75: mol_type = other DNA
actccgggaaaaaacgatggggtgtgacgtatcacgagggcaggaacgggaaatttctggtattggccgtccggg

SEQ ID NO: 879517 - DNA, 75 bp, synthetic construct
  source 1..75: mol_type = other DNA
gcgcagaacgcatcacagcgaagcgattaaccgaccgtgaccgcgagttatggaatgtttccgcaatcgctgatg

SEQ ID NO: 879518 - DNA, 75 bp, synthetic construct
  source 1..75: mol_type = other DNA
tatcgcgcaaaaaatcgccgagctgaacaagaatacagggaaagaagtctctgaaattcgcttcaccgcacgaga

SEQ ID NO: 879519 - DNA, 75 bp, synthetic construct
  source 1..75: mol_type = other DNA
atgagaagatatcaaaatatccttaaagaacatggtattaaacaaagcatgtccagaaaaggcaattgtctggat

SEQ ID NO: 879520 - DNA, 75 bp, synthetic construct
  source 1..75: mol_type = other DNA
aatatgctcgatcaggcattcaaaaagcttaatcctcacgagcatcctgttctgcactctgaccagggatggcag

SEQ ID NO: 879521 - DNA, 75 bp, synthetic construct
  source 1..75: mol_type = other DNA
gtgctttcagctgccgcaccgtttaaagtcggtggtcgcaaaaatgacccggcaagctatgtggaggtggaaaaa

SEQ ID NO: 879522 - DNA, 75 bp, synthetic construct
  source 1..75: mol_type = other DNA
gcaatgagattgacagcgatgcgctgtatctcgatgaaattacgcttaccagcgagcaggatgcagttctgcgct

SEQ ID NO: 879523 - DNA, 75 bp, synthetic construct
  source 1..75: mol_type = other DNA
ccccggtctcttccattcaggaaatagatttatggcaaaacagcgaaacgctggctgatgcctcacccgatgagc

SEQ ID NO: 879524 - DNA, 75 bp, synthetic construct
  source 1..75: mol_type = other DNA
cgcactgattttcgcaaaaatgtcagaattgaactgctggatgtcagtaaagaacatctgcggcaggactttgat

SEQ ID NO: 879525 - DNA, 75 bp, synthetic construct
  source 1..75: mol_type = other DNA
ggcaggtcagttgggaagttttattgagggtgatggcaacaacgcattcaaaattgttaaaacgacttttgggtg

SEQ ID NO: 879526 - DNA, 75 bp, synthetic construct
  source 1..75: mol_type = other DNA
acatggggcatttcggtcaataaacccaacgccgcgaaacagcaggggcaattgctggaaaaagcgcgaaatgaa

SEQ ID NO: 879527 - DNA, 75 bp, synthetic construct
  source 1..75: mol_type = other DNA
agcgagcaggatgcagttctgcgctatggtcaggtggaagtaccgctcccgccgggagccgacgttgagcgcaca

SEQ ID NO: 879528 - DNA, 75 bp, synthetic construct
  source 1..75: mol_type = other DNA
tttgcgtatcagtcgggatttatatcaaccaaaccatttgaaggagtaaaaaaattacagcgaaacagaataaag

SEQ ID NO: 879529 - DNA, 75 bp, synthetic construct
  source 1..75: mol_type = other DNA
acgatggtgatggtggcgttgattgtggtgttttatctactgcgctacttttttgccagcgccacggcgtatacc

SEQ ID NO: 879530 - DNA, 75 bp, synthetic construct
  source 1..75: mol_type = other DNA
cccgtgccgggtgccgtggtggcgatggtgggtatctccatcatcgccattctttcgccgtggctgctgtttagc

SEQ ID NO: 879531 - DNA, 75 bp, synthetic construct
  source 1..75: mol_type = other DNA
acgtaatacagcagattggtgctatgccgctggataaatgcgagctacggcactggctggcctgttttgaccagg

SEQ ID NO: 879532 - DNA, 75 bp, synthetic construct
  source 1..75: mol_type = other DNA
aacgccgcgatcccatcgtggaagagatctgcgagcacgtccattacatcaaatacccctcccggagaggctcgc

SEQ ID NO: 879533 - DNA, 75 bp, synthetic construct
  source 1..75: mol_type = other DNA
ttaaattcaccgcaaaatccctctcctgggcggtttccggtttttctaattcggttatctggctgattttcgccg

SEQ ID NO: 879534 - DNA, 75 bp, synthetic construct
  source 1..75: mol_type = other DNA
atgaaaccttccactgaatggtggcgataccttgcgccgctggcggtcatcgccattattgctctacttccggtt

SEQ ID NO: 879535 - DNA, 75 bp, synthetic construct
  source 1..75: mol_type = other DNA
ggatggtggtattgctggcaattgcgtttttgttgtcagtgaataaaaaaagcatcagtttacgcaccgtaggtg

SEQ ID NO: 879536 - DNA, 75 bp, synthetic construct
  source 1..75: mol_type = other DNA
ccgccggtgtggcgacggtggtaatggcatttgtggcaattattgcgctgatcaacggcattattggtggagttg

SEQ ID NO: 879537 - DNA, 75 bp, synthetic construct
  source 1..75: mol_type = other DNA
ttgcgggttcgatgatgattggctatgccggaatgggcgtgccgattgactatttgttagccgcttcgctgatgg

SEQ ID NO: 879538 - DNA, 75 bp, synthetic construct
  source 1..75: mol_type = other DNA
gaattacaccgtacaggaagcgttaaagcccgtaacggttggcgatgcgctcacctactggcttgagtattacgt

SEQ ID NO: 879539 - DNA, 75 bp, synthetic construct
  source 1..75: mol_type = other DNA
aaaaccagcgggagcggcagcagaaaaacctgcggcggctgaaaaacccgcagcatcagataaggggacgtcctg

SEQ ID NO: 879540 - DNA, 75 bp, synthetic construct
  source 1..75: mol_type = other DNA
aaaaccagcgggagcggcagcagaaaaaactgcggcggtggctgaaaaaaccgcagcatcagataaggggacgtc

SEQ ID NO: 879541 - DNA, 75 bp, synthetic construct
  source 1..75: mol_type = other DNA
cgccgatgctgaagtcaggcgatcaggtgccgcgctgggcagagacagaactgcaagcgatgggcccactctgtt

SEQ ID NO: 879542 - DNA, 75 bp, synthetic construct
  source 1..75: mol_type = other DNA
ttattcctatgtgatgcacctcgtctctcgcgtagtcggcgaactgcgtcacgatcttgacgccctgcacgctta

SEQ ID NO: 879543 - DNA, 75 bp, synthetic construct
  source 1..75: mol_type = other DNA
gcgcaacgcgaagccgatattgaaaacgaaaaactccgcaaagagaccgaggatttgcgtgcggctgcggaatca

SEQ ID NO: 879544 - DNA, 75 bp, synthetic construct
  source 1..75: mol_type = other DNA
cgcaaggcccggagttttcccgttttgtgatgggctactggcgattgatggactggaatatgtccgcccgccagt

SEQ ID NO: 879545 - DNA, 75 bp, synthetic construct
  source 1..75: mol_type = other DNA
ctcgccgtttctctctgccctgcccgtcaccgctggcggcctattacgtgctgaaaaagagtaatcccagcccgt

SEQ ID NO: 879546 - DNA, 75 bp, synthetic construct
  source 1..75: mol_type = other DNA
tatcttgctgaaacgctgatggtgattgaccatcagaagaaaagcacacgcatccaggccagcctttttggtcag

SEQ ID NO: 879547 - DNA, 75 bp, synthetic construct
  source 1..75: mol_type = other DNA
ggcgcggtaggttatttcaccgcgcacggcgatctcgacacctgcattgtgatccgctcggcgctggtggaaaac

SEQ ID NO: 879548 - DNA, 75 bp, synthetic construct
  source 1..75: mol_type = other DNA
tcgactccagccaacttatctgatgcagaacgcgcttttgctgggcgcgtttctcttttccccgtaggtctatac

SEQ ID NO: 879549 - DNA, 75 bp, synthetic construct
  source 1..75: mol_type = other DNA
cacaaaagatctccgaggatttttctctcataaaaaattattgtattaagaaaagcgaatcgatgtctccaggta

SEQ ID NO: 879550 - DNA, 75 bp, synthetic construct
  source 1..75: mol_type = other DNA
actggttcctcgggatgttgccgctcagtattttactggtcctgctggttccctggctggcttacgtgctgtacc

SEQ ID NO: 879551 - DNA, 75 bp, synthetic construct
  source 1..75: mol_type = other DNA
ttttccttttttggacaatataaaacacttatcgaagatctgattgaacattttagatatggaaatggggtaatg

SEQ ID NO: 879552 - DNA, 75 bp, synthetic construct
  source 1..75: mol_type = other DNA
ccaacgaagagatagcggaacgtctgggaatagctccagattggatggataccactgactccagccaacttacct

SEQ ID NO: 879553 - DNA, 75 bp, synthetic construct
  source 1..75: mol_type = other DNA
ccaacgaagagatagcggaacgtctgggaattgatccaaattggatggatagcatcgactccaaccaacttatct

SEQ ID NO: 879554 - DNA, 75 bp, synthetic construct
  source 1..75: mol_type = other DNA
caaaactggactcaagtaccgtcaccaggactgcatctgaaacgcgaccgcgcaacatcgcatttaattacgtcg

SEQ ID NO: 879555 - DNA, 75 bp, synthetic construct
  source 1..75: mol_type = other DNA
cgctctgattaacggtgcgcctgccacgctggatacactgaaagaaattgccgcagctatcaacaatgacccgaa

SEQ ID NO: 879556 - DNA, 75 bp, synthetic construct
  source 1..75: mol_type = other DNA
gcatctttcatttataaaggccctactaagagccgcagagcgtgaatggaaaatgctggataaggcaccaattat

SEQ ID NO: 879557 - DNA, 75 bp, synthetic construct
  source 1..75: mol_type = other DNA
agaccggagtgctcccaagctatacccaactgggcatggccgcactgttgcctcatgagtcgttgagctatcttc

SEQ ID NO: 879558 - DNA, 75 bp, synthetic construct
  source 1..75: mol_type = other DNA
accgcgcactgcgtgaaatccacgaacgtgctgatgccgttcgtcgccagcgtttccaggcgatggctgccgaag

SEQ ID NO: 879559 - DNA, 75 bp, synthetic construct
  source 1..75: mol_type = other DNA
gtcggtcgtactggcaacgcgtcagtatgtcgacgataaggttattgaggtcaaagtctatgccgatagcctgct

SEQ ID NO: 879560 - DNA, 75 bp, synthetic construct
  source 1..75: mol_type = other DNA
gaaaagtaagagcgaacaactatggcatcagtttaaccttgcgcgcaaacaaccttttacccgctgggtgatggc

SEQ ID NO: 879561 - DNA, 75 bp, synthetic construct
  source 1..75: mol_type = other DNA
acgggttcagcgggtgaacattggttctgtcagacgctggcaggagtgggacattgcacctggcgatcaaattct

SEQ ID NO: 879562 - DNA, 75 bp, synthetic construct
  source 1..75: mol_type = other DNA
acagtgggacgatgactactggaaggaaggggaaagtgagattgaagacggtgtttacgatcagttaagcgcccg

SEQ ID NO: 879563 - DNA, 75 bp, synthetic construct
  source 1..75: mol_type = other DNA
gttgtctgtcgaaactgaagttcctcgtcaccatcgacccactgaacactgaaacctctaacttctggcagaacc

SEQ ID NO: 879564 - DNA, 75 bp, synthetic construct
  source 1..75: mol_type = other DNA
caccttgcgcctaatcatttgacagagcatgcaaggaaaatagacgacatttttggtgataatgtcccaaatatg

SEQ ID NO: 879565 - DNA, 75 bp, synthetic construct
  source 1..75: mol_type = other DNA
tgtcatcaagataccagcggtcagaaacaagcgagtcagatggctggaaaaggaggaagcaaaacgccttattga

SEQ ID NO: 879566 - DNA, 75 bp, synthetic construct
  source 1..75: mol_type = other DNA
cgttttgtcgcacggttgttggatgtctatatcgtcgatgcacaaggtaatgaagtatccagtcgtgaaacgatt

SEQ ID NO: 879567 - DNA, 75 bp, synthetic construct
  source 1..75: mol_type = other DNA
tataaatgaagctcgaagccataaccttcaaaaattaatcactacaagccttagtaactttaaaggttttcagct

SEQ ID NO: 879568 - DNA, 75 bp, synthetic construct
  source 1..75: mol_type = other DNA
aaactttactacggtgcaaattttgcatcgtgggaaaaaggtcggtacggaacgcatctggtatggcgataaaga

SEQ ID NO: 879569 - DNA, 75 bp, synthetic construct
  source 1..75: mol_type = other DNA
ggcgtatttcgcgatgtaaccaaaatcaaacatatactcatgccaacatacatcatgatgtttaaaagcatcttt

SEQ ID NO: 879570 - DNA, 75 bp, synthetic construct
  source 1..75: mol_type = other DNA
gaatggtggtattactggctattgcgtttttgctgtcagtaaacaaaaagaagatcagcctgcgtaccgttggcg

SEQ ID NO: 879571 - DNA, 75 bp, synthetic construct
  source 1..75: mol_type = other DNA
atgtcttccataaggacagtgaaataccgttctggaataaaccatacactattctggaaaaggacggtgtaaaga

SEQ ID NO: 879572 - DNA, 75 bp, synthetic construct
  source 1..75: mol_type = other DNA
gtatcctgctgacactaccgctctgggcttgtgcaaaagaggttactattatttatactaacgatctccatgctc

SEQ ID NO: 879573 - DNA, 75 bp, synthetic construct
  source 1..75: mol_type = other DNA
ctgaatgccgggataaaccggaagatggtactggagctaaccgggctttcagatgagcaactcaacatgctgaag

SEQ ID NO: 879574 - DNA, 75 bp, synthetic construct
  source 1..75: mol_type = other DNA
atgtcgaaattagggatctcatcactgtttaaaagtgtactgctgaccgcagctctggcggtttcatttaccgca

SEQ ID NO: 879575 - DNA, 75 bp, synthetic construct
  source 1..75: mol_type = other DNA
gtcactgtctccagcaagcgtggctttatccgcgcggtggctgtggtaacgcgccgtctgaagccgctgaatgta

SEQ ID NO: 879576 - DNA, 75 bp, synthetic construct
  source 1..75: mol_type = other DNA
gccgaagggtaagcagaagaaaggcctggtcgaagtcaacatggccgcgctcactattcaggctttaagtgaatg

SEQ ID NO: 879577 - DNA, 75 bp, synthetic construct
  source 1..75: mol_type = other DNA
atgcgtccaaacattacaatcatcatcccagaaccatacctgcctctagacgagtattgccgccgtactggtact

SEQ ID NO: 879578 - DNA, 75 bp, synthetic construct
  source 1..75: mol_type = other DNA
gaccgtcagcggtgaggatggttatgtctactgccttgtggagcaccagagtaccgaaaacgcgtatatggcctt

SEQ ID NO: 879579 - DNA, 75 bp, synthetic construct
  source 1..75: mol_type = other DNA
taagcgcccgtcttacgcagtggcaacgctgctttgggagcgagccccgcgacgtgatgatgccgcctttaaatg

SEQ ID NO: 879580 - DNA, 75 bp, synthetic construct
  source 1..75: mol_type = other DNA
gacgaagactacgctccaatctgtttttcttctcacggtggcttctacggttacgatgaaggcttagatatgctg

SEQ ID NO: 879581 - DNA, 75 bp, synthetic construct
  source 1..75: mol_type = other DNA
gttacaacattcttttcaactctgatgaatctcatttctctagtgcatggtatgcgttttgccgtaataagaagc

SEQ ID NO: 879582 - DNA, 75 bp, synthetic construct
  source 1..75: mol_type = other DNA
tttgacgtagagctgttggacgtgaaaccagcgccgaaggctgatgcaaagccggaagctgatgcgaaagccgca

SEQ ID NO: 879583 - DNA, 75 bp, synthetic construct
  source 1..75: mol_type = other DNA
cttatccggcctacaggattgcacatgtagggcggataaggcgttcacgccgcatccgccagtggcgcggtgcaa

SEQ ID NO: 879584 - DNA, 75 bp, synthetic construct
  source 1..75: mol_type = other DNA
ccacaaccgcgctatattccgctcagccaacccatgcctttactggcaaatacgccgtttattgtcaccggctcc

SEQ ID NO: 879585 - DNA, 75 bp, synthetic construct
  source 1..75: mol_type = other DNA
acaatacaacaacattccggcaattattgttcgtgatgacctgccgtttgatgttcgtgaatatgacgttgattt

SEQ ID NO: 879586 - DNA, 75 bp, synthetic construct
  source 1..75: mol_type = other DNA
atatcgtgtcaccaccaccaaagagatcctcattgaacgcggtcttgcgcattactctctaagcaccgccgcgca

SEQ ID NO: 879587 - DNA, 75 bp, synthetic construct
  source 1..75: mol_type = other DNA
gttgtatcggcttatcccgggtgaagaggatatgaactttaccttacagcctgtcaacagcaatgagattgacag

SEQ ID NO: 879588 - DNA, 75 bp, synthetic construct
  source 1..75: mol_type = other DNA
aggggagtttccgcctgccagaaaatgccgtcgccggaggttatgagttacgcctggcttaccgcaaacaggtct

SEQ ID NO: 879589 - DNA, 75 bp, synthetic construct
  source 1..75: mol_type = other DNA
gatcccaccgaattctaccctggtgtttgacgtagagctgttggacgtgaaaccagcgccgaaggctgatgcaaa

SEQ ID NO: 879590 - DNA, 75 bp, synthetic construct
  source 1..75: mol_type = other DNA
gccgtttattctgacaaaaagaaaacatccaggttcttttatctgctgacacctgtcagataccttctggctgct

SEQ ID NO: 879591 - DNA, 75 bp, synthetic construct
  source 1..75: mol_type = other DNA
accggtggggagcgtgggctgcagcagataacagtggtgtggactggcagccgatagcagcaggctttaaggggc

SEQ ID NO: 879592 - DNA, 75 bp, synthetic construct
  source 1..75: mol_type = other DNA
ggataaggtgtttacgccgcatccgccagtggcgcggtgcagatgccggatgcgacgcttgccgcgtcttatccg

SEQ ID NO: 879593 - DNA, 75 bp, synthetic construct
  source 1..75: mol_type = other DNA
aagttgcgcgcgtacgcaatgagtggtggaaagcggaattacccttcgtcaccgatggcgtagttgtacgagcgg

SEQ ID NO: 879594 - DNA, 75 bp, synthetic construct
  source 1..75: mol_type = other DNA
gtcaggaacagttcatttcacgcttagtctggctggggtcaaaacaggttctggggctggatggcattggtgagg

SEQ ID NO: 879595 - DNA, 75 bp, synthetic construct
  source 1..75: mol_type = other DNA
ccggatggaccgcagttaatgaccgatcgtttaaaagagctggctaccgcaggttttactctaacgcagacgtat

SEQ ID NO: 879596 - DNA, 75 bp, synthetic construct
  source 1..75: mol_type = other DNA
ttcgctcgattccttctgtaccacaatccgtcagcggacctttagccaacagtacgctgcagggcgaaatatttc

SEQ ID NO: 879597 - DNA, 75 bp, synthetic construct
  source 1..75: mol_type = other DNA
gtggttgtgcgaggggcgaaagaacccgaatcccgccattggctaccaggccaggcagaatggctggtggcctgg

SEQ ID NO: 879598 - DNA, 75 bp, synthetic construct
  source 1..75: mol_type = other DNA
tgccgcctttaaacggtgcggttatacatccggttgcccatacgggtgtacgcaaaatggcggataaaatcgcat

SEQ ID NO: 879599 - DNA, 75 bp, synthetic construct
  source 1..75: mol_type = other DNA
gtggaaagcaaaattacccttcgtcaccgatggcgtggttgtgcgagcggcgaaagaacccgaatcccgccattg

SEQ ID NO: 879600 - DNA, 75 bp, synthetic construct
  source 1..75: mol_type = other DNA
acgcgagcaaaatcgatgcgattataaatcgcaatggcacaaatacggcacaagaggaaaacgtggtttacttaa

SEQ ID NO: 879601 - DNA, 75 bp, synthetic construct
  source 1..75: mol_type = other DNA
ggataaggcaccaattattaaagtgcctcaaccaaagaataaacggatccgctggctggagccccatgaagcaca

SEQ ID NO: 879602 - DNA, 75 bp, synthetic construct
  source 1..75: mol_type = other DNA
acagtgggacgatgactactggaaggaagggaaaagtgaggttgaagacggtgtttacgatcagttaagcgcccg

SEQ ID NO: 879603 - DNA, 75 bp, synthetic construct
  source 1..75: mol_type = other DNA
ttctctgggcgtttttgtctgggcatggccggatggaccgcagttaatgaccgatcgtttaaaagagctggctac

SEQ ID NO: 879604 - DNA, 75 bp, synthetic construct
  source 1..75: mol_type = other DNA
gttgatggcgttgcggtaaccctggtttatcgggacgggaaactgaacaaagcaatcagtcgcggcaatggcctg

SEQ ID NO: 879605 - DNA, 75 bp, synthetic construct
  source 1..75: mol_type = other DNA
tgggtttcgggttgttgagcctcaccatgacgggacaccgcactggcatatgttgctttttatgcgtccgcagga

SEQ ID NO: 879606 - DNA, 75 bp, synthetic construct
  source 1..75: mol_type = other DNA
atgctgaataaccagccgccgtactggactgaacatgaggccaatgaaggtcaactggaaatgcgtaaggcggaa

SEQ ID NO: 879607 - DNA, 75 bp, synthetic construct
  source 1..75: mol_type = other DNA
tacgcggaggacgtgcagcgcgttcagggtgtctattctcccttagttccagattcagaggtttgtacacgtctg

SEQ ID NO: 879608 - DNA, 75 bp, synthetic construct
  source 1..75: mol_type = other DNA
gttgaatcccgtcacagaggatagcgttacgctatctcctgagagtctactagccacagactgggagtactgcta

SEQ ID NO: 879609 - DNA, 75 bp, synthetic construct
  source 1..75: mol_type = other DNA
tatccagttggatggcgcaaatgttctatgagttcactggccagctgaaaggagcgccgaaggacgcgcgtgata

SEQ ID NO: 879610 - DNA, 75 bp, synthetic construct
  source 1..75: mol_type = other DNA
tgcgtttatcggcacgggcagcagttttctcgcttttgctgcgctggcggcgaaacatcagattgataatcctgg

SEQ ID NO: 879611 - DNA, 75 bp, synthetic construct
  source 1..75: mol_type = other DNA
ggaaacacgcaaggctgaatccgggattcttcgcatgatggcgctggaatggtgggtgctgcgtctgaagcgtgc

SEQ ID NO: 879612 - DNA, 75 bp, synthetic construct
  source 1..75: mol_type = other DNA
gttatatcgccaaatacatatccaaaaacattgatggatttgcgctggatggtgagcaggatgatgaaacagggg

SEQ ID NO: 879613 - DNA, 75 bp, synthetic construct
  source 1..75: mol_type = other DNA
catgagatacccgactggttagccgggtattttggccgtcgctatgaaaagctttttgctcgtcgtgacgggcgt

SEQ ID NO: 879614 - DNA, 75 bp, synthetic construct
  source 1..75: mol_type = other DNA
catgagatacccgactggttagccgggtattttggccgtcgctatgaaaagcttttttctggccgtgacgggcgt

SEQ ID NO: 879615 - DNA, 75 bp, synthetic construct
  source 1..75: mol_type = other DNA
cagaaaaagcggaatctggagttctttaaaaagtttgatctgctgaatgatgaggggctgcgcatttcactggac

SEQ ID NO: 879616 - DNA, 75 bp, synthetic construct
  source 1..75: mol_type = other DNA
ggtgagcaggatgatgaaacaggggaaaatctgcgggatatggccaaatccgtttctgcatgggcttcacgctgg

SEQ ID NO: 879617 - DNA, 75 bp, synthetic construct
  source 1..75: mol_type = other DNA
gtcttgatcaataaagataaagcagcaggtatttcattatttgatgctaactctcagtttaagaaagccaagttt

SEQ ID NO: 879618 - DNA, 75 bp, synthetic construct
  source 1..75: mol_type = other DNA
tgcgtttatcggtacgggcagcagttttctcgcttttgctgcgctggcggcgaaacatcagattgataatcccgg

SEQ ID NO: 879619 - DNA, 75 bp, synthetic construct
  source 1..75: mol_type = other DNA
gctggtggtaacgccattcctgcctggtgattcgttgctgtttgttgcaggtgcattggcgtcactggaaactaa

SEQ ID NO: 879620 - DNA, 75 bp, synthetic construct
  source 1..75: mol_type = other DNA
attttattttgcatatagatgtgcacctggcggagctggtcgcgcagtatggcgtctgggtttatgccattttgt

SEQ ID NO: 879621 - DNA, 75 bp, synthetic construct
  source 1..75: mol_type = other DNA
gcctgcgggctccgcatggtacgccgccgcaatgctgtctgaaggcgttacgtcaggttcgccgtttccggcagg

SEQ ID NO: 879622 - DNA, 75 bp, synthetic construct
  source 1..75: mol_type = other DNA
gagtgctgacaagtccgggcgtccctcccgccagtcagcgtaaggcggttgaactggtcaatcgcttccgtcgtg

SEQ ID NO: 879623 - DNA, 75 bp, synthetic construct
  source 1..75: mol_type = other DNA
ccgtcagccacgcgatgtgtttcctgtcagtcagtctttgaagcaaaaaacaaacattaccggagaacggcatga

SEQ ID NO: 879624 - DNA, 75 bp, synthetic construct
  source 1..75: mol_type = other DNA
tgggggcatccatcccctgcggaaggtctggtagatctgccgctgatttgcgactggccaaaccgcccgaaacag

SEQ ID NO: 879625 - DNA, 75 bp, synthetic construct
  source 1..75: mol_type = other DNA
catgcagagatgttgacgattacccatccggcgtatggcaatagtatgacgtttaaagcgccagcggatttttaa

SEQ ID NO: 879626 - DNA, 75 bp, synthetic construct
  source 1..75: mol_type = other DNA
tttgttgctacatgcagagatgctgacgattacccatccggcgtatggcaatagtatgacgtttaaagcaccagc

SEQ ID NO: 879627 - DNA, 75 bp, synthetic construct
  source 1..75: mol_type = other DNA
ttgtgccgatcgtcagaacgttcgccccgtttgttgcgggaatgggccacatgtcgtaccgtcatttcgccgctt

SEQ ID NO: 879628 - DNA, 75 bp, synthetic construct
  source 1..75: mol_type = other DNA
cgggcggttgttcggtgaaaagttattcagtaatcccaattcgaaaattttccgtcgcagttatctcgacaaaac

SEQ ID NO: 879629 - DNA, 75 bp, synthetic construct
  source 1..75: mol_type = other DNA
cagaagcgagagccgatggcaccgcgtttgttgctacatgcagagatgttgacgattacccatccggcgtatggc

SEQ ID NO: 879630 - DNA, 75 bp, synthetic construct
  source 1..75: mol_type = other DNA
taaaaccctgggtgaatggatagaccagaaaaagcggaaccttgagttctttaaaaagtttgacctgctgaatga

SEQ ID NO: 879631 - DNA, 75 bp, synthetic construct
  source 1..75: mol_type = other DNA
tagccgatctcaccaaagttgaccgttactcttacgtgatgcatctcgtctcccgcgtggtcggtgagctgcgcc

SEQ ID NO: 879632 - DNA, 75 bp, synthetic construct
  source 1..75: mol_type = other DNA
ttaagcggtgccccgaaagtgcgcgccatgcagttaattgccgaagcggaaggtcgtcgacgcggcagctacggc

SEQ ID NO: 879633 - DNA, 75 bp, synthetic construct
  source 1..75: mol_type = other DNA
aaaaagttatcaatggctggaataaaaaactggcggatattgtacgccaaccagtcggtgaatcatcgattgcat

SEQ ID NO: 879634 - DNA, 75 bp, synthetic construct
  source 1..75: mol_type = other DNA
atgtctgaatctgtacagagcaatagcgccgtcctggtgcacttcacgctaaaactcgacgatggcaccaccgct

SEQ ID NO: 879635 - DNA, 75 bp, synthetic construct
  source 1..75: mol_type = other DNA
tttttgttggagaacggaataatgtatcgcctcgctggaaaaatgacgccttactcgcatcacctggatgcgggg

SEQ ID NO: 879636 - DNA, 75 bp, synthetic construct
  source 1..75: mol_type = other DNA
tttgttggagaacggaataatgtatcgcctcgctggaaaaatgacgccttactcgcatcacctggatgcggggcg

SEQ ID NO: 879637 - DNA, 75 bp, synthetic construct
  source 1..75: mol_type = other DNA
gccactctttcgtcagttcgtgacgttgcctctcagagcgcgccatcagatgccgaaaaggtgcctgagtggatg

SEQ ID NO: 879638 - DNA, 75 bp, synthetic construct
  source 1..75: mol_type = other DNA
agaagcgaaaaaagttccggtatggatggggcgccttatgcatgttgttgcagaggcattcggatgccatacata

SEQ ID NO: 879639 - DNA, 75 bp, synthetic construct
  source 1..75: mol_type = other DNA
ccagggcgttgggtcgctgaaaaagtcgcttttggcgtgcataaagtgatggcgtacagcgatgcaggtagcgca

SEQ ID NO: 879640 - DNA, 75 bp, synthetic construct
  source 1..75: mol_type = other DNA
ataacatgtccgatgtcgtgatcgattatttgaagaaaggccacaagattacgcctgcacaggtaaatgaaatgc

SEQ ID NO: 879641 - DNA, 75 bp, synthetic construct
  source 1..75: mol_type = other DNA
aggtatcgccggtgtgtgacgttttacggtttcagtgaacgtcctcaggtggcggcttatgcgtttgatgttctg

SEQ ID NO: 879642 - DNA, 75 bp, synthetic construct
  source 1..75: mol_type = other DNA
accggggttatgaggcgggtaagaacgccaggttgcatcatggtgttgaaggtgaaaatacggccgccattggtc

SEQ ID NO: 879643 - DNA, 75 bp, synthetic construct
  source 1..75: mol_type = other DNA
ttctcaggccacactggatgctggtgtcagctggcaacggggaacccgctggtttggtgcacagccggcaccgga

SEQ ID NO: 879644 - DNA, 75 bp, synthetic construct
  source 1..75: mol_type = other DNA
tggtttgcgtggatatttggcgtgctgtgctggatgacgacatttacacgggtgtggagtgggtatctgacgctg

SEQ ID NO: 879645 - DNA, 75 bp, synthetic construct
  source 1..75: mol_type = other DNA
tcgatatttctctcgattttcttttttacgcactggtgccttttgggtttatcctcgccgcaccggagcaaaacg

SEQ ID NO: 879646 - DNA, 75 bp, synthetic construct
  source 1..75: mol_type = other DNA
agtatttcaacttaccaactattcttaccaccagttttgaaaccggtcctaacggcccattagttccagaactga

SEQ ID NO: 879647 - DNA, 75 bp, synthetic construct
  source 1..75: mol_type = other DNA
gccgtacgctggagtcttaccgccatttatgcacgtgttccctgatgctgaacaatcaaccgccgtactgggcag

SEQ ID NO: 879648 - DNA, 75 bp, synthetic construct
  source 1..75: mol_type = other DNA
aaaccttatccacgtccttttccgaaaaaaccagattgccttatggattcttcgaatgaggataataccgtatga

SEQ ID NO: 879649 - DNA, 75 bp, synthetic construct
  source 1..75: mol_type = other DNA
ttgaatctcaggatgaatttttaagtaagttggcagagatttctggcgtggaaaatcgaacctataaccttactc

SEQ ID NO: 879650 - DNA, 75 bp, synthetic construct
  source 1..75: mol_type = other DNA
cgcaactatgaaatcgacctgatgatcgacattctctgccgccgccgtaaaaacaatccggtggtagtgggctaa

SEQ ID NO: 879651 - DNA, 75 bp, synthetic construct
  source 1..75: mol_type = other DNA
accttgcagaacaaaaacaacagttgactaacgaactggctgccgctgcgccgaaggtagcgtttgttgatcggt

SEQ ID NO: 879652 - DNA, 75 bp, synthetic construct
  source 1..75: mol_type = other DNA
tatcgttgtcgcgcagctgtcgccggagtttaccgcgcgtctggttgatcgctggcaggagcttgagcaggcaca

SEQ ID NO: 879653 - DNA, 75 bp, synthetic construct
  source 1..75: mol_type = other DNA
ttgtggtgactgatgcgtcaggaacttttaacgaaattacccgacattcggcgtgggatcgtatgtcgcaagcag

SEQ ID NO: 879654 - DNA, 75 bp, synthetic construct
  source 1..75: mol_type = other DNA
aatctacccaccattcttactaccagttttgaaaccggtcctaacggcccattagtccctgaactgaaagcacag

SEQ ID NO: 879655 - DNA, 75 bp, synthetic construct
  source 1..75: mol_type = other DNA
ataaaaatgatgctgctgttttgttagttgatcaccaggccggtttactttccctcgtgcgggatattgaacctg

SEQ ID NO: 879656 - DNA, 75 bp, synthetic construct
  source 1..75: mol_type = other DNA
acagccgatgctaatgtgaaacaacagtacctggagttccgtagtgaaggagcaaaaacctttgagctgcgtgaa

SEQ ID NO: 879657 - DNA, 75 bp, synthetic construct
  source 1..75: mol_type = other DNA
ggttgggttatggtgccgaaggagttaaccccggaaatgatgagagccgttcagattagaagtgagcttgggggg

SEQ ID NO: 879658 - DNA, 75 bp, synthetic construct
  source 1..75: mol_type = other DNA
aggtgggagttactgtatccatcggatgtaggtccgtacaaatggattttgttaggggataaaatttggcatgtt

SEQ ID NO: 879659 - DNA, 75 bp, synthetic construct
  source 1..75: mol_type = other DNA
caatacgggtcatattgacgtcaataattcagctactggcatgagcatcacgaccagcgagggggccatctccca

SEQ ID NO: 879660 - DNA, 75 bp, synthetic construct
  source 1..75: mol_type = other DNA
aagatcgactgctgacaatccagcattggcgcgaaacatacggaccgggtagcaacgttgtgcttccagcagaag

SEQ ID NO: 879661 - DNA, 75 bp, synthetic construct
  source 1..75: mol_type = other DNA
gctttataccgctcagccagtgccggtaactccggatggttggataagctgtagtgcgcgaatgcccgctcaaga

SEQ ID NO: 879662 - DNA, 75 bp, synthetic construct
  source 1..75: mol_type = other DNA
aaatgtcttcttaaaaactcgcgtgaagaaaggtgcctctattggtgcaaatgcaactattctaccaggtataga

SEQ ID NO: 879663 - DNA, 75 bp, synthetic construct
  source 1..75: mol_type = other DNA
ggtaccgtagtcactaaagatgttgcaccttatacagtcattgcaggtaatccaggtaaagttattagggatatt

SEQ ID NO: 879664 - DNA, 75 bp, synthetic construct
  source 1..75: mol_type = other DNA
ttcctgatgatgttattgttattggaaatccagctaaaataatacgatctatatcaagcgattatcatctaaaat

SEQ ID NO: 879665 - DNA, 75 bp, synthetic construct
  source 1..75: mol_type = other DNA
gcggcacctatagtataaccggaaactcatcatggactgcattatgcagacttgagtcaggatatataacggttc

SEQ ID NO: 879666 - DNA, 75 bp, synthetic construct
  source 1..75: mol_type = other DNA
atctagcaaatacatatatcttaataatgcaactgcaaattttaatggtacggtaattcccgacaacaccactga

SEQ ID NO: 879667 - DNA, 75 bp, synthetic construct
  source 1..75: mol_type = other DNA
tattaagtatggcgctatcgtgcctccacgtgtcacgctggaggggtgcggtatggattcctgtggattaattaa

SEQ ID NO: 879668 - DNA, 75 bp, synthetic construct
  source 1..75: mol_type = other DNA
gctttataccgccaagccagtgccggtaactccggatggttgggttatggtgccgaaggagttaacgccggaaat

SEQ ID NO: 879669 - DNA, 75 bp, synthetic construct
  source 1..75: mol_type = other DNA
ggcacccgattctttgggttcgacatggacaatgactatatcgtcggtttcgacgccggcgcatgggggaaatta

SEQ ID NO: 879670 - DNA, 75 bp, synthetic construct
  source 1..75: mol_type = other DNA
tcgtgggacaccgaacgggttggctgggaccaggggatttggcagggaccatatgacccaaacgacggttttatc

SEQ ID NO: 879671 - DNA, 75 bp, synthetic construct
  source 1..75: mol_type = other DNA
taccggcagattacgtgccttcgcgctatgacattaacccgattgaccaggttaacagcgagctatggtgggcga

SEQ ID NO: 879672 - DNA, 75 bp, synthetic construct
  source 1..75: mol_type = other DNA
ttttctgccaccacgatgctgttttcactgggtgccagcatgatactgggtggtgtggcacagatgctggcccga

SEQ ID NO: 879673 - DNA, 75 bp, synthetic construct
  source 1..75: mol_type = other DNA
gtgacgggtggtgcctatggcgtggagatcgttggcgacagcgccacgctaaacaatgaaggagatatttcggtt

SEQ ID NO: 879674 - DNA, 75 bp, synthetic construct
  source 1..75: mol_type = other DNA
atttcttgcacatgttgatctgatgacccggccacttattgatgttgcggctgccaccagagggctgattactgc

SEQ ID NO: 879675 - DNA, 75 bp, synthetic construct
  source 1..75: mol_type = other DNA
ggctgagttcagcatcaaggctatgtgccgcgtgctccgtgtggcccgcagcggctggtatacgtggtgtcagcg

SEQ ID NO: 879676 - DNA, 75 bp, synthetic construct
  source 1..75: mol_type = other DNA
cacaccagccttattttacaatcaaataataaaatattctcaatagtagatgaatctatttttaaaaatattaat

SEQ ID NO: 879677 - DNA, 75 bp, synthetic construct
  source 1..75: mol_type = other DNA
agacagagctaggccgtaaggctgagctcttcgacgctttattaatcatgctccaggaggccggttcgaggggta

SEQ ID NO: 879678 - DNA, 75 bp, synthetic construct
  source 1..75: mol_type = other DNA
gttctttgcacacgttgacctgtccaccaggccactgagcgatgtttccgatgcaatgtcacggctaatacccga

SEQ ID NO: 879679 - DNA, 75 bp, synthetic construct
  source 1..75: mol_type = other DNA
gcactatgtcagggcttataacagccttcgatattgatactgctgtcggtgtacagctcgacatcctcggtctgt

SEQ ID NO: 879680 - DNA, 75 bp, synthetic construct
  source 1..75: mol_type = other DNA
tgctcatttttttaccccatatgaaaatgacagtaaataccttgagcttgacagatttgaaaaaacagggattgc

SEQ ID NO: 879681 - DNA, 75 bp, synthetic construct
  source 1..75: mol_type = other DNA
attatcacaataaataatagtgaggattctatttatcaacaattatcgttattgattaataactatggtttaatt

SEQ ID NO: 879682 - DNA, 75 bp, synthetic construct
  source 1..75: mol_type = other DNA
ccgtgttccttggcgtcgggacttatcagtcaatgcgcggcgggctggaaaacgaagacgccgatggcgtgtacg

SEQ ID NO: 879683 - DNA, 75 bp, synthetic construct
  source 1..75: mol_type = other DNA
acctttcgttgtatgaggatgactggagcgggccgcattatgactggccgcgtggtcgggtgctggaaagcgacg

SEQ ID NO: 879684 - DNA, 75 bp, synthetic construct
  source 1..75: mol_type = other DNA
ccggatgatcgcgttgctgattcagttgatgaaagataatgatgcgccgccagagcagtttcagcgcctgggatt

SEQ ID NO: 879685 - DNA, 75 bp, synthetic construct
  source 1..75: mol_type = other DNA
ccctggttaccttcttaaaggtcatggcgtacatacgtatgagcatattagggcattagccatcgcagcgagcca

SEQ ID NO: 879686 - DNA, 75 bp, synthetic construct
  source 1..75: mol_type = other DNA
aagacggatatagttcttaaaatcaatgacttatattatatcattgacgctaaatattatagcgcaagtaatgct

SEQ ID NO: 879687 - DNA, 75 bp, synthetic construct
  source 1..75: mol_type = other DNA
ggtataaccctacaaagtctcagatagaaaatgtttatagtctcgcaaatactagcgagttaaaaatatgtatag

SEQ ID NO: 879688 - DNA, 75 bp, synthetic construct
  source 1..75: mol_type = other DNA
ccttgcaggataaaaatggcaacccattaaaagataaagaaatcaccttctctgtgccaaacgacgtcgcaagtc

SEQ ID NO: 879689 - DNA, 75 bp, synthetic construct
  source 1..75: mol_type = other DNA
gtgacggtagaactgagagatgaaaatgacaaacctgttaaggaacaaaaacagcaactgaataacgcagtcagc

SEQ ID NO: 879690 - DNA, 75 bp, synthetic construct
  source 1..75: mol_type = other DNA
atatcaactgacaaaacaatatggtgtcacctggcttttttcggaagacggcaaaaactggtatgaagaacagaa

SEQ ID NO: 879691 - DNA, 75 bp, synthetic construct
  source 1..75: mol_type = other DNA
ctcatgccgccacctttgaaaacagttacgtcggcagtatgccgtgtatgcctgcccggcgggagttgcataccg

SEQ ID NO: 879692 - DNA, 75 bp, synthetic construct
  source 1..75: mol_type = other DNA
agaagaaagcaggcagaatatttaacgcctttatcgagatcggacagtatctcccggactggcgtgttagtaaaa

SEQ ID NO: 879693 - DNA, 75 bp, synthetic construct
  source 1..75: mol_type = other DNA
taggtaatattgcagacagacatcgtcgcaatctcaaaaaagtttatcccggtatcaaagtttatgcgatgtcag

SEQ ID NO: 879694 - DNA, 75 bp, synthetic construct
  source 1..75: mol_type = other DNA
tatgttatgttaataaaactgaccactaatattggtctggccgatgatgctgagtggctattctataatgctagt

SEQ ID NO: 879695 - DNA, 75 bp, synthetic construct
  source 1..75: mol_type = other DNA
cggtagttgacgccatcgaagcccgctttaaagccctcggcgcaccggtggaattgatcaaagtgcacaacacgc

SEQ ID NO: 879696 - DNA, 75 bp, synthetic construct
  source 1..75: mol_type = other DNA
ttgtgtggattgaaatacaaagatcctcttatccgattctggtttatattgatacttgagttaagtggaaaggaa

SEQ ID NO: 879697 - DNA, 75 bp, synthetic construct
  source 1..75: mol_type = other DNA
gatcgctgatattatgggttacagagatattaataagtatgtttttacatatgagagtcctgcgtcagaaagtga

SEQ ID NO: 879698 - DNA, 75 bp, synthetic construct
  source 1..75: mol_type = other DNA
tccgatatttagtaagaaagagacgaacactcagcaaattaaaacactagaaactctccgcgacaccctgcttcc

SEQ ID NO: 879699 - DNA, 75 bp, synthetic construct
  source 1..75: mol_type = other DNA
cgggcgtaactcaggtggcggtatttgataccagtttccaccagacgatggctccggaagcttatttatacggcc

SEQ ID NO: 879700 - DNA, 75 bp, synthetic construct
  source 1..75: mol_type = other DNA
ggggtgagcagacttaccggtatgtgccgaatccgtgtgggtatgttgatccgctgggattagcattttgcccca

SEQ ID NO: 879701 - DNA, 75 bp, synthetic construct
  source 1..75: mol_type = other DNA
ctggtgaataacgccgccgcgaccatgaccgatattgtcagttcggtgacccgcgtgaacgacattatgggagaa

SEQ ID NO: 879702 - DNA, 75 bp, synthetic construct
  source 1..75: mol_type = other DNA
atgagtgaagaaaaaattacacctgatgaagtcagggcacatcttcgccttgatgacttttccggagaaggcgaa

SEQ ID NO: 879703 - DNA, 75 bp, synthetic construct
  source 1..75: mol_type = other DNA
ggccgtcgccgcgcggagatcgtggcagggtcagaacatattgttccggcagatgcggtgatcatggcgtttggt

SEQ ID NO: 879704 - DNA, 75 bp, synthetic construct
  source 1..75: mol_type = other DNA
aattctgggaatggtgcagctggtcctgttattgatgctattgaggaatactttttacggaacaatattccgatt

SEQ ID NO: 879705 - DNA, 75 bp, synthetic construct
  source 1..75: mol_type = other DNA
ttaacctgagcatgaacagcggtagcgaaacggcagtggacagcattgttgggctgaaactggactatgccggta

SEQ ID NO: 879706 - DNA, 75 bp, synthetic construct
  source 1..75: mol_type = other DNA
ggcaaaacgccgataacgcacgacaggcgtcggaactggcaaaaaatgccgcgacaacggcgcaggcgggcggtg

SEQ ID NO: 879707 - DNA, 75 bp, synthetic construct
  source 1..75: mol_type = other DNA
ggttttttatttagtagttctctcaacttttcgttctgctctctgaacttttcctgtatttctttttgcatggcg

SEQ ID NO: 879708 - DNA, 75 bp, synthetic construct
  source 1..75: mol_type = other DNA
ggggatggaacctgtatacatatccgctgagcccggtgaatagcatggatccattaggattatatgaatttaaat

SEQ ID NO: 879709 - DNA, 75 bp, synthetic construct
  source 1..75: mol_type = other DNA
aagtggttcgttactctgcttaaccaaagaaaatctgactagtttcggtcttaatacggaatttattgaatcatt

SEQ ID NO: 879710 - DNA, 75 bp, synthetic construct
  source 1..75: mol_type = other DNA
agttagagagcaatctggcggagctgcgtggcggcagcgattacgcgcaacgtaaaatcaagatagccgctgctc

SEQ ID NO: 879711 - DNA, 75 bp, synthetic construct
  source 1..75: mol_type = other DNA
ttatggtggccttccacacgttagttcatccggtgatgatggatttttccctggtggcggcggtgctggtgcatc

SEQ ID NO: 879712 - DNA, 75 bp, synthetic construct
  source 1..75: mol_type = other DNA
ggtaattctgctggcggaattccgggagctccatctgttgggacaatattctcagtggctggtcagggaggacag

SEQ ID NO: 879713 - DNA, 75 bp, synthetic construct
  source 1..75: mol_type = other DNA
gaagcagcagaggcatgatttttcgtgggaggataaacctccaatcgaacctcattctcttgctgaagcattaaa

SEQ ID NO: 879714 - DNA, 75 bp, synthetic construct
  source 1..75: mol_type = other DNA
ggtaccgcattatcaaaagcaggtatctcgctaaacagaatgtcagaagatattgatataaagctcgtgccaaca

SEQ ID NO: 879715 - DNA, 75 bp, synthetic construct
  source 1..75: mol_type = other DNA
ttcattaacggggtccgcttggaaaacggaaattatcctacgctaagcctgttttttgtacagattactattcac

SEQ ID NO: 879716 - DNA, 75 bp, synthetic construct
  source 1..75: mol_type = other DNA
actggttatccctgcatcgtcgtcttgctgaagatggtttgtacctgtctcagatggacggaaaatttctggtga

SEQ ID NO: 879717 - DNA, 75 bp, synthetic construct
  source 1..75: mol_type = other DNA
tatgttgcgcagacagcggtcgctggtttacgcagtgaacctgtacatgactggttatccctgcatcgtcgtctt

SEQ ID NO: 879718 - DNA, 75 bp, synthetic construct
  source 1..75: mol_type = other DNA
tgcctgccgtgagcttgaactgaagcatggttttgctccggataacggttgctgggtccatgcgccgggaaatcg

SEQ ID NO: 879719 - DNA, 75 bp, synthetic construct
  source 1..75: mol_type = other DNA
taactcaatatggtggtggaattaatggtagtattgttttgcatgataagggaatcacatttggtcagcgcatca

SEQ ID NO: 879720 - DNA, 75 bp, synthetic construct
  source 1..75: mol_type = other DNA
aggctggtgctgacgaaggacggacaaatttttctcaacggcacaaaaattcatttgcagggtaaggagcaggtt

SEQ ID NO: 879721 - DNA, 75 bp, synthetic construct
  source 1..75: mol_type = other DNA
accttgtcttcgcctgcaataatgactcatagtgttaaagatttaatacgggatggtaaggctgggcttaaacat

SEQ ID NO: 879722 - DNA, 75 bp, synthetic construct
  source 1..75: mol_type = other DNA
tacctttgctgaaagagatattagacaattaaaaagcaagatcttaattggtgaaggcaatacctcttctgatgt

SEQ ID NO: 879723 - DNA, 75 bp, synthetic construct
  source 1..75: mol_type = other DNA
tgattcaggcatggatcgatgatggaaacacaactatcgcgccagaaaaaattcaggtcccatttattctcactc

SEQ ID NO: 879724 - DNA, 75 bp, synthetic construct
  source 1..75: mol_type = other DNA
aagactcggccaattttggaatgctggttaagaccttcacccacgcagtgaaagacatccctttatgtggcccta

SEQ ID NO: 879725 - DNA, 75 bp, synthetic construct
  source 1..75: mol_type = other DNA
ggtttaatgaactgaagtttgacgatgcgacagggaaagaacaggtctacatccacgcgcagaagaacatgaaca

SEQ ID NO: 879726 - DNA, 75 bp, synthetic construct
  source 1..75: mol_type = other DNA
gcaggtttcaaatctgtaacaggtgaaaaagggttatttaagcttaaggacaaaaatgacaaaccactccccttt

SEQ ID NO: 879727 - DNA, 75 bp, synthetic construct
  source 1..75: mol_type = other DNA
caatgggatgatggaattaatgccttcatactcaactatgatgccaaagcctggcacagggatgtgaactatgat

SEQ ID NO: 879728 - DNA, 75 bp, synthetic construct
  source 1..75: mol_type = other DNA
cggcgtgtgaaatatgattcaagtaataatgagtcatattacgcgtcattgaatccaggggtgaatataggcagt

SEQ ID NO: 879729 - DNA, 75 bp, synthetic construct
  source 1..75: mol_type = other DNA
tttatatgcagaaagagatttgagagaattaaaaagcaagcttctcttgggggaaagttctacaggttcagaaat

SEQ ID NO: 879730 - DNA, 75 bp, synthetic construct
  source 1..75: mol_type = other DNA
ttccaaaacaagcaataatgaatgataatagtgatttggcacataaatcacaatgggatgatggtattaatgcat

SEQ ID NO: 879731 - DNA, 75 bp, synthetic construct
  source 1..75: mol_type = other DNA
gtggtttaaatggcagcattgtattacatgaccaagggattacatttggtcaacggattaatggtgcagcagctt

SEQ ID NO: 879732 - DNA, 75 bp, synthetic construct
  source 1..75: mol_type = other DNA
cctggttttcgtattggttgggtcgccgccggaaaacatgcacgtaaaattcaacgcttgcagttgatgagtacg

SEQ ID NO: 879733 - DNA, 75 bp, synthetic construct
  source 1..75: mol_type = other DNA
cttagggcggaaatactccgaggataaaagccgtcataaagataatgagcaagccatcttttggctgaaaaaagc

SEQ ID NO: 879734 - DNA, 75 bp, synthetic construct
  source 1..75: mol_type = other DNA
cagggtaatcggcatgctcagtttcaaattgcatgggattataacgctggcgaaggggtggaccaggactataag

SEQ ID NO: 879735 - DNA, 75 bp, synthetic construct
  source 1..75: mol_type = other DNA
tgattgatactgaaaccaccggaacatcccatcattcagggattatttcctttgcggcagccttttttaatcctg

SEQ ID NO: 879736 - DNA, 75 bp, synthetic construct
  source 1..75: mol_type = other DNA
ctgtatcgtaaagttcagtcatccggaaccagagatgtcagtcaggaaattcgtgagattgaagatttactgtag

SEQ ID NO: 879737 - DNA, 75 bp, synthetic construct
  source 1..75: mol_type = other DNA
gacctgtatcgtaaagttcaggcatccggtaccagggatgtcagtcaagaaatccgtgagattgaagatttactg

SEQ ID NO: 879738 - DNA, 75 bp, synthetic construct
  source 1..75: mol_type = other DNA
gatctttatgaagacggtaaaggtgttgcccaaaacaaagctcttgccgcattctggtatttgaaaagcgcacag

SEQ ID NO: 879739 - DNA, 75 bp, synthetic construct
  source 1..75: mol_type = other DNA
tgttgatgccacagggtctgagtctatcggacgagatgcgcaggcattacgagaagtcgcattaaaaacaggtct

SEQ ID NO: 879740 - DNA, 75 bp, synthetic construct
  source 1..75: mol_type = other DNA
gccggatgtgacggccgcaggaaagaaaggccgggcgaaaaaactcaaaaatcatttcacgccggaacagattgc

SEQ ID NO: 879741 - DNA, 75 bp, synthetic construct
  source 1..75: mol_type = other DNA
cgatgaccaggtgtttcagaaggtactgaaaaacctgcacattgaatcactggaatcggctttatttgtactgaa

SEQ ID NO: 879742 - DNA, 75 bp, synthetic construct
  source 1..75: mol_type = other DNA
cagaaatgctgtggccgttctggaatgagagggatgtccggactgttgaaggactggctgcgcatcttggtatcc

SEQ ID NO: 879743 - DNA, 75 bp, synthetic construct
  source 1..75: mol_type = other DNA
acttattcaggtgcttaaaagcaagaatatggatatgtcagccgttatcctggaaatgcacgacaggctacggct

SEQ ID NO: 879744 - DNA, 75 bp, synthetic construct
  source 1..75: mol_type = other DNA
ttcgtgccggaatgatcggtgaaataggtgtttcaccgacatttaccgaagccgagcataacagcttgcgggctt

SEQ ID NO: 879745 - DNA, 75 bp, synthetic construct
  source 1..75: mol_type = other DNA
aaataatattgaaaggaaagaaattaaaaatttgttcactgatatttccacattaatctcaaataagagaaatat

SEQ ID NO: 879746 - DNA, 75 bp, synthetic construct
  source 1..75: mol_type = other DNA
acatttttccctactctggcaaccttacaaacgccgtggcgttggaacaatgcacaaacgccagatttgggacag

SEQ ID NO: 879747 - DNA, 75 bp, synthetic construct
  source 1..75: mol_type = other DNA
gacctgatggcatttaaatcaaagcttcagaatggcgaagatttgaaaaatgtcaccctacgtcccgacgatgaa

SEQ ID NO: 879748 - DNA, 75 bp, synthetic construct
  source 1..75: mol_type = other DNA
gtgagcttcccggttctgacaaccttagataccccatggcgctggaataatgtgaatgctcctgcgctgggtgaa

SEQ ID NO: 879749 - DNA, 75 bp, synthetic construct
  source 1..75: mol_type = other DNA
agcaacggcggcaccggcacacaaattaacggtgacgatgcgaccgcgaacaacaacggcaaaaccattgtcgac

SEQ ID NO: 879750 - DNA, 75 bp, synthetic construct
  source 1..75: mol_type = other DNA
ggccatgagtcctcaaatggaccgtacaggatcaatattaacggtagtattcagttaaaacagcaaccgcgtact

SEQ ID NO: 879751 - DNA, 75 bp, synthetic construct
  source 1..75: mol_type = other DNA
gcctccgatgaagttgccaggcttgcgcagagatgtgcgcctgatgtttcacccttaacgatggcgtacatcgtc

SEQ ID NO: 879752 - DNA, 75 bp, synthetic construct
  source 1..75: mol_type = other DNA
tagcaggatttaactcataccaaaccgccaagggacaaaaaaaacatctagtggtaaatggggcatttaactcag

SEQ ID NO: 879753 - DNA, 75 bp, synthetic construct
  source 1..75: mol_type = other DNA
acatcactgggtcgacctttctgatcaagaaactggcattgctttaatagcaaaaaacaaatatggctatcgtgt

SEQ ID NO: 879754 - DNA, 75 bp, synthetic construct
  source 1..75: mol_type = other DNA
tgcagggctgatataaataaattcgaccacagcaagataaaaatatcgaatatattccttgaacacaaatcagcc

SEQ ID NO: 879755 - DNA, 75 bp, synthetic construct
  source 1..75: mol_type = other DNA
attgcagttgaacgtcagtattccccaggcggcaatgaatgccagcgccagaggatacgtggatccgtccgaatg

SEQ ID NO: 879756 - DNA, 75 bp, synthetic construct
  source 1..75: mol_type = other DNA
gttgatgccactgaagcgaaaagtacgctggccgacaagagcgaacatacagggcagtcataccgttttctttat

SEQ ID NO: 879757 - DNA, 75 bp, synthetic construct
  source 1..75: mol_type = other DNA
cggcagcgggatgaaacgcaacacgctgacggcgatggcaggcacttcgatccgggaaacggcacggatcgacaa

SEQ ID NO: 879758 - DNA, 75 bp, synthetic construct
  source 1..75: mol_type = other DNA
gcggtccgtacagctctggcgtactggcaggcggcgagcactttgaatatcagaaagcttctgcggccatccagc

SEQ ID NO: 879759 - DNA, 75 bp, synthetic construct
  source 1..75: mol_type = other DNA
gcaaaattggcttaggcggcgcaccactcggcaacatgttccgtgccattccggaagaagaggcccacgccaccg

SEQ ID NO: 879760 - DNA, 75 bp, synthetic construct
  source 1..75: mol_type = other DNA
ctgaaacgcctgaaaacagatcgtctggatattgtctggatccacgacccggcgcaggacttctacggtgacagc

SEQ ID NO: 879761 - DNA, 75 bp, synthetic construct
  source 1..75: mol_type = other DNA
ggaactccaaacaggtcgacatgtttggctaacagctaacggtttatccccgctggcgcggggaactccgataac

SEQ ID NO: 879762 - DNA, 75 bp, synthetic construct
  source 1..75: mol_type = other DNA
cggggaactctgattttggtggcgggggtgactgggggaatacggtttatccccgctggcgcggggaactctacc

SEQ ID NO: 879763 - DNA, 75 bp, synthetic construct
  source 1..75: mol_type = other DNA
acaccgcgtttgtatcggtttatccccgctggcgcggggaacactttactacaataggtggacacgctacggcgc

SEQ ID NO: 879764 - DNA, 75 bp, synthetic construct
  source 1..75: mol_type = other DNA
ttgtctaattcgtcagattctgaccagacggttcaggctgtacgcttacttttatatggtagagatcatgtcatc

SEQ ID NO: 879765 - DNA, 75 bp, synthetic construct
  source 1..75: mol_type = other DNA
atcttattaaagggttactacaaactatgccatatgccagcaatataagtattgcggtattagatgataatgtat

SEQ ID NO: 879766 - DNA, 75 bp, synthetic construct
  source 1..75: mol_type = other DNA
aataatagttcatttagctacggagataaccgattcgagaagtctcaaggtagcaagtggacatttcaggaataa

SEQ ID NO: 879767 - DNA, 75 bp, synthetic construct
  source 1..75: mol_type = other DNA
ccgctggcgcggggaactcgcgcagcgagcaaaatctactggccgggctaacggtttatccccgctggcgcgggg

SEQ ID NO: 879768 - DNA, 75 bp, synthetic construct
  source 1..75: mol_type = other DNA
attgaagtgaacggtaacggcaaagtcagcggcgtaaaaatggtacgtaccgaaatgggcgaaccggatgccaaa

SEQ ID NO: 879769 - DNA, 75 bp, synthetic construct
  source 1..75: mol_type = other DNA
ttatccccgctggcgcggggaactcggcgaacaaccgacccctgttggacccgacgacggtttatccccgctggc

SEQ ID NO: 879770 - DNA, 75 bp, synthetic construct
  source 1..75: mol_type = other DNA
ctggcgcggggaacacacactatccgggcggtattacgcccaaatatccggtttatccccgctggcgcggggaac

SEQ ID NO: 879771 - DNA, 75 bp, synthetic construct
  source 1..75: mol_type = other DNA
ttgtacgacgccttcctgaagctggcggacaaaaaaggtcaggtgtttgattacgatctggaggcgctggccttc

SEQ ID NO: 879772 - DNA, 75 bp, synthetic construct
  source 1..75: mol_type = other DNA
gtgtttgattacgatctggaggcactggccttcatcggtaagcagcaagaagagccagagcatttccgtctggat

SEQ ID NO: 879773 - DNA, 75 bp, synthetic construct
  source 1..75: mol_type = other DNA
atggtgccaaaaatggcggtgctggtagcctccattccgcaatttgtgctgggcggcgctggtctagtgatgttc

SEQ ID NO: 879774 - DNA, 75 bp, synthetic construct
  source 1..75: mol_type = other DNA
ccggaagacattctgcgctggaccggcggcaacgcggtgatcgccaccggcagcccgttcgagccggtaagctat

SEQ ID NO: 879775 - DNA, 75 bp, synthetic construct
  source 1..75: mol_type = other DNA
ggggcggggtcggccggatgcggcatcgccgaacacatcgtcacgcagatgattgcggaagggctgagcgacgaa

SEQ ID NO: 879776 - DNA, 75 bp, synthetic construct
  source 1..75: mol_type = other DNA
ttgacgatatattgcataatgccaccaagcagaatatttcggtgattgtcgtaaccgacggggagcggatcctcg

SEQ ID NO: 879777 - DNA, 75 bp, synthetic construct
  source 1..75: mol_type = other DNA
gcggcgcgagcgccttatccgacctacggttcaggcctgtaggcatgataagacgcgtcagcgtcgcatctggta

SEQ ID NO: 879778 - DNA, 75 bp, synthetic construct
  source 1..75: mol_type = other DNA
acacatcaacgttatcgattacaactgacagggagccggtttatccccgctggcgcggggaacacccgaacggct

SEQ ID NO: 879779 - DNA, 75 bp, synthetic construct
  source 1..75: mol_type = other DNA
caatggcgcgcacatattcaactgatggcgtaacggtttatccccgctggcgcggggaacactctaaacataacc

SEQ ID NO: 879780 - DNA, 75 bp, synthetic construct
  source 1..75: mol_type = other DNA
aaaatggtggacggggccgggtgacggtttacgaaccgcagcaagctgccgcacatagcgaacgggcggtgatgt

SEQ ID NO: 879781 - DNA, 75 bp, synthetic construct
  source 1..75: mol_type = other DNA
taggtggatttgttgatctgaactgtggttggtattgtcaggatgctttactgaactggtattgtaataaaaata

SEQ ID NO: 879782 - DNA, 75 bp, synthetic construct
  source 1..75: mol_type = other DNA
tctgttattccgcagaacctgtcgttccagcattacgctgacctgtttaatggtcaggtgaactacatgacgtgg

SEQ ID NO: 879783 - DNA, 75 bp, synthetic construct
  source 1..75: mol_type = other DNA
cacgatgtcttccttaaacaaatgtgggctaaaaatggcggtaatggctggggatttgttccagatgtttttctg

SEQ ID NO: 879784 - DNA, 75 bp, synthetic construct
  source 1..75: mol_type = other DNA
gcttcaagaggcgtatctgcgtcgcggtgtccgtgtggagcggagtctgaacgttgatcgtctgacctggaccgt

SEQ ID NO: 879785 - DNA, 75 bp, synthetic construct
  source 1..75: mol_type = other DNA
gtgacctggtttgaactcggggagaacgacaaaaaccagatgctgtacagcatgaaggtgcgcccgccgctgtgg

SEQ ID NO: 879786 - DNA, 75 bp, synthetic construct
  source 1..75: mol_type = other DNA
aggtgagcaccctctgcatcagccagttccgctacagcgcacaaatccgcccttcttccgtggtgaccaaagact

SEQ ID NO: 879787 - DNA, 75 bp, synthetic construct
  source 1..75: mol_type = other DNA
ttgatgatttacgctatgttgagcgtgtaacctttactggctttttagaaggcgtgcaggtttcatgctgggaaa

SEQ ID NO: 879788 - DNA, 75 bp, synthetic construct
  source 1..75: mol_type = other DNA
gtcagggatgatgtgattgatttacataatgaagagcttggtgattctgctcgctcaactgggctgagggcctat

SEQ ID NO: 879789 - DNA, 75 bp, synthetic construct
  source 1..75: mol_type = other DNA
atgaagcaaccgtgggagctaaacccagctctaacaatagagcgacttaaacaacttgcatccctaattcgaaat

SEQ ID NO: 879790 - DNA, 75 bp, synthetic construct
  source 1..75: mol_type = other DNA
ttccacaacaggtgagaagctggcattcggttccaatgccttcctgcacttctacaagttacatgcatccttgaa

SEQ ID NO: 879791 - DNA, 75 bp, synthetic construct
  source 1..75: mol_type = other DNA
ctcacctgcttgggttgttacgtatcaaattaaaccttatgaagaaagaaaagctttccactaatgaaatttacc

SEQ ID NO: 879792 - DNA, 75 bp, synthetic construct
  source 1..75: mol_type = other DNA
cgcacctgcttgggttgttacgtatcaaattgaccttactgaaaaaagaaaagctgtccaccaatgaaatttatc

SEQ ID NO: 879793 - DNA, 75 bp, synthetic construct
  source 1..75: mol_type = other DNA
cgctgttcagcgagccgcatccttcccgtgagttttgtgtccagtacggtgaaactgattacgatttcctgtgcc

SEQ ID NO: 879794 - DNA, 75 bp, synthetic construct
  source 1..75: mol_type = other DNA
cactaaagccaaatactcagatcctctataaatcggttgtgtacaacaccatgtacacagaatttgaggatatgc

SEQ ID NO: 879795 - DNA, 75 bp, synthetic construct
  source 1..75: mol_type = other DNA
gactgctgaatcctgccaacgggagcatgagaaggcaaaatcgcagatcgagcaggataagatcatgctcgacag

SEQ ID NO: 879796 - DNA, 75 bp, synthetic construct
  source 1..75: mol_type = other DNA
atattttcccaacactcggcatgtattcgggactaaaagcttgccatgaaaaaaacaacctaccatttgatatta

SEQ ID NO: 879797 - DNA, 75 bp, synthetic construct
  source 1..75: mol_type = other DNA
tcgctcgcggtgcgcagatccatttagtgaccgtcaacgactatggcgtaaatgttacgtctgagcatgccttat

SEQ ID NO: 879798 - DNA, 75 bp, synthetic construct
  source 1..75: mol_type = other DNA
tggtaataatttaccgcaggatcgcgagtctgttttctggtttagtttcagtcaactaccttatctgaataagaa

SEQ ID NO: 879799 - DNA, 75 bp, synthetic construct
  source 1..75: mol_type = other DNA
ccctatatcattaatatccatgttgaggatgaacgtggttctgacaagaatgtaccgtttatgccaaccccgcag

SEQ ID NO: 879800 - DNA, 75 bp, synthetic construct
  source 1..75: mol_type = other DNA
cgtatacatcgctcaacagctgagagtttgctgtattttgcgaggcgctacaatgcgatagtgagagtctggatc

SEQ ID NO: 879801 - DNA, 75 bp, synthetic construct
  source 1..75: mol_type = other DNA
gtgggtattgcatttttctggcctgaacagggcgcgaagcacagtgaagtggtcatgaacaccgagctgggctgg

SEQ ID NO: 879802 - DNA, 75 bp, synthetic construct
  source 1..75: mol_type = other DNA
cggttgtcgccggagcagacgaggtgcggcaggttatccgctacgccgacacgttcgagcgcctagtggatgatt

SEQ ID NO: 879803 - DNA, 75 bp, synthetic construct
  source 1..75: mol_type = other DNA
acggcaggtgcctgcttttccggcaacaagcaggaatctcagcgctgaagcaggaattagaggtaaaaacgccct

SEQ ID NO: 879804 - DNA, 75 bp, synthetic construct
  source 1..75: mol_type = other DNA
ttatcgcagcatacaatcgtgcagaatatctgatagagcgacagagtttgatgcaatggtggagtgattacgttc

SEQ ID NO: 879805 - DNA, 75 bp, synthetic construct
  source 1..75: mol_type = other DNA
gcttcacaaagttcctttgagtaaagaagctttgcgcatccttgaattaatgaaatcaataagtgggcatagaga

SEQ ID NO: 879806 - DNA, 75 bp, synthetic construct
  source 1..75: mol_type = other DNA
agtgcgaattgggccggatatgcggatggccatggtgggatcgccggcgtattttgctgcaaaccctgcgcctga

SEQ ID NO: 879807 - DNA, 60 bp, synthetic construct
  source 1..60: mol_type = other DNA
atgtcactgatgacaagcgtaagattgcctgatgcgctgcgcttatcaggccttgtatta

SEQ ID NO: 879808 - DNA, 75 bp, synthetic construct
  source 1..75: mol_type = other DNA
gataaggcttacgagacttacaccacatcgagcccaagcgatccattcccgacagtaaagcgtgtcgatgcccag

SEQ ID NO: 879809 - DNA, 75 bp, synthetic construct
  source 1..75: mol_type = other DNA
tttatccaggggtgtgacgcgataaagcaggccacaggggccacggtactggtggttcaccattccggcaaggat

SEQ ID NO: 879810 - DNA, 75 bp, synthetic construct
  source 1..75: mol_type = other DNA
tccgatctggtggtgaccgctattgccgaaggtcgtaaggcggcagacggtattatgaactggctggaagtttaa

SEQ ID NO: 879811 - DNA, 75 bp, synthetic construct
  source 1..75: mol_type = other DNA
agcatggggaggccgcagggtaagtaagggcgcggttatctatatcgctggcgaaggcagtatgggcgtaaaacg

SEQ ID NO: 879812 - DNA, 75 bp, synthetic construct
  source 1..75: mol_type = other DNA
cggcgatatcgtccgtggttccgatctggtcgttaccgctattgccgaaggtcgtaaggcggcagacggcattat

SEQ ID NO: 879813 - DNA, 75 bp, synthetic construct
  source 1..75: mol_type = other DNA
cgcttgataatcaggaagaacctgaaaaactgaccattgaacctactgttaaaaatcagtcattacctttagcgg

SEQ ID NO: 879814 - DNA, 75 bp, synthetic construct
  source 1..75: mol_type = other DNA
gatttaatcgatcagtataatattaaagctaaggtaacagtgttaggtgggattggattggatcttaatgagttt

SEQ ID NO: 879815 - DNA, 75 bp, synthetic construct
  source 1..75: mol_type = other DNA
tatcaggtaacgttccgtaaaaaactgtacggcgatcttgatacattactgtcggatcttgatgaatggctggct

SEQ ID NO: 879816 - DNA, 75 bp, synthetic construct
  source 1..75: mol_type = other DNA
atgataaattattagaactaggtgatttcaaatatgaagaaagatttaacaacgaaactaacgaagatattcagt

SEQ ID NO: 879817 - DNA, 75 bp, synthetic construct
  source 1..75: mol_type = other DNA
aatgtagagaatatttcgtactacgttttaaaaagcaccatagattttgaatggcgcagtcaggttaaatgtgga

SEQ ID NO: 879818 - DNA, 75 bp, synthetic construct
  source 1..75: mol_type = other DNA
tatacttcattgggattgtgaccactttgttgttttgagaaaaataaaaagggataaatttattgttcatgatcc

SEQ ID NO: 879819 - DNA, 75 bp, synthetic construct
  source 1..75: mol_type = other DNA
gaccgtctgtgcgaaggttcctgcaccctgaacgatgagtttggcgcagtgaccatcggcaacattgagcgctat

SEQ ID NO: 879820 - DNA, 75 bp, synthetic construct
  source 1..75: mol_type = other DNA
cagcttcagagtctgtattaactgcttcggtcatgtagtcgctaatacgttcagcggtgattttcgttatttcat

SEQ ID NO: 879821 - DNA, 75 bp, synthetic construct
  source 1..75: mol_type = other DNA
aaaaacttgcaggattctctgaaaactcaggaagtagttgcgcaggagcagaaagatctgcgtatccgtcagatt

SEQ ID NO: 879822 - DNA, 75 bp, synthetic construct
  source 1..75: mol_type = other DNA
cattcatccattaactaaaaacagcatcaatgaaaaaaaaccagggtttattgtctgtgatttaaacacaacacc

SEQ ID NO: 879823 - DNA, 75 bp, synthetic construct
  source 1..75: mol_type = other DNA
cttcttaaagatgtaaaggatataaacgacagggctcttaaaaacctactctttaactattttttaaaaagagag

SEQ ID NO: 879824 - DNA, 75 bp, synthetic construct
  source 1..75: mol_type = other DNA
gagcaagctagaacatggctaaaacaattaggcttagtgagttatgggaaaacaaaagccatgggtgacgaaaca

SEQ ID NO: 879825 - DNA, 75 bp, synthetic construct
  source 1..75: mol_type = other DNA
gcgtcgccccttctgtcgcttttggccttggtacagcaaatcgtttgtatcttaattatctgcatgtcactcagc

SEQ ID NO: 879826 - DNA, 75 bp, synthetic construct
  source 1..75: mol_type = other DNA
cggtcttgcgccgtcaacggcagtcgaagcatgggtaggaccgcagcatggcctacaggattttgaactcgatga

SEQ ID NO: 879827 - DNA, 75 bp, synthetic construct
  source 1..75: mol_type = other DNA
agctggactgaaagctcgtcactttcatgcgttatgcagaggtgacgcaacgcttgaggatataggattccaaat

SEQ ID NO: 879828 - DNA, 75 bp, synthetic construct
  source 1..75: mol_type = other DNA
acaataccaaacactacatatgcttcttttggaaacagcactgacagtgatattgtcattaataaccctgatacg

SEQ ID NO: 879829 - DNA, 75 bp, synthetic construct
  source 1..75: mol_type = other DNA
gatttgaaaatagaacgtatagattttgtgggtactgatgcaacagttgccagtgcgatagaacgcgtggatttt

SEQ ID NO: 879830 - DNA, 75 bp, synthetic construct
  source 1..75: mol_type = other DNA
ctatttaaacgctttagagaaggctgctgagaaacattctatatcatttaaagatatttatgtggttgaaaaagg

SEQ ID NO: 879831 - DNA, 75 bp, synthetic construct
  source 1..75: mol_type = other DNA
ctctcaggcccttccctggtggatgcgtggcgttcattcaagactgaatggcaggctatttatgcgggacagcca

SEQ ID NO: 879832 - DNA, 75 bp, synthetic construct
  source 1..75: mol_type = other DNA
tgttgcacgataatgagcaaaggttgaatgcagatttgccagttggcggctatgaggctacagacctgcagggca

SEQ ID NO: 879833 - DNA, 75 bp, synthetic construct
  source 1..75: mol_type = other DNA
atagaacgtattgattttgtcggaaaggatgactccgttggaagcactatagagcgtgtggattttgttctttat

SEQ ID NO: 879834 - DNA, 75 bp, synthetic construct
  source 1..75: mol_type = other DNA
cctctgaacaccataacttccgttgcttggttgtcagaaaaggcgagtttcacctcgaggcattcaaaaacattt

SEQ ID NO: 879835 - DNA, 75 bp, synthetic construct
  source 1..75: mol_type = other DNA
gaagggcgtgagggtgatagaaaagtatatggaatagaaaaaaggaatatatccacatttgtagagagacgaata

SEQ ID NO: 879836 - DNA, 75 bp, synthetic construct
  source 1..75: mol_type = other DNA
gagaagaaaattaaattttcaattttatcaaagagtcgtgcacaagagtttaatatagacaagatttttgacgaa

SEQ ID NO: 879837 - DNA, 75 bp, synthetic construct
  source 1..75: mol_type = other DNA
cgagtgggcggaaagtgcgacggacagtttttcgcaggttaaaagtgctgccacgcagacctttgacggtattgc

SEQ ID NO: 879838 - DNA, 75 bp, synthetic construct
  source 1..75: mol_type = other DNA
tcatatttggatcatgctaaatcctttgacatttataattgagcaggctcggactgtgttgatttgggggggggt

SEQ ID NO: 879839 - DNA, 75 bp, synthetic construct
  source 1..75: mol_type = other DNA
tcaccggaaccggctggctgccacaaaaggatgttgaagaggccggacagtatgatttactgaagctgggttttc

SEQ ID NO: 879840 - DNA, 75 bp, synthetic construct
  source 1..75: mol_type = other DNA
cttcatatagtccgtggtatggccgaggcttaatacaagttacaggggaaagtaattacaccgcctatggggaat

SEQ ID NO: 879841 - DNA, 75 bp, synthetic construct
  source 1..75: mol_type = other DNA
cgtcacgcaaaattaacctgcaacagcacacaataaattctatttttcgcgtagcaacgcataaacaagtattta

SEQ ID NO: 879842 - DNA, 75 bp, synthetic construct
  source 1..75: mol_type = other DNA
taaatgaatgcgcggcgttatttggcgttacccgtcgcacgatattccggtggatgaataagattaaaggttggc

SEQ ID NO: 879843 - DNA, 75 bp, synthetic construct
  source 1..75: mol_type = other DNA
tggtgtgggtctcggcgtgatggttagccgtgccacacgcgtcacggataacatgatgatggcggccagccgcac

SEQ ID NO: 879844 - DNA, 75 bp, synthetic construct
  source 1..75: mol_type = other DNA
agcagaaactacgtagtaatcatcagccattaagccgccagcgttggcaatttggcagttatacccagtttctcg

SEQ ID NO: 879845 - DNA, 75 bp, synthetic construct
  source 1..75: mol_type = other DNA
caggcatcgcaagaattaatgcctgacgaattacgaggatttaccctgagtgaaggcatgtgttactgggatgat

SEQ ID NO: 879846 - DNA, 75 bp, synthetic construct
  source 1..75: mol_type = other DNA
atgaatgatagcgaattaatgacggtgaacgaggtagcagctttattcggcgttacccgtcgcacgatattccgg

SEQ ID NO: 879847 - DNA, 75 bp, synthetic construct
  source 1..75: mol_type = other DNA
tctttgggcgtattcttgcgagacattaatcaattcatcacgctttttaccactgccttaatgtttctgagccct

SEQ ID NO: 879848 - DNA, 75 bp, synthetic construct
  source 1..75: mol_type = other DNA
acagagtatcggtttcagtgatgtaacccctgtaattgagcaacgtgatgcagagaataaaacaacctggaccct

SEQ ID NO: 879849 - DNA, 75 bp, synthetic construct
  source 1..75: mol_type = other DNA
caggcatctgtaattgctgatatttattctgataaagcggcaaatatctcgcttggtagggaaatcaatgctgaa

SEQ ID NO: 879850 - DNA, 75 bp, synthetic construct
  source 1..75: mol_type = other DNA
accggctgaccggactgattgagtcgctgtcaccgtcagggcgtcgtcgactggcggtagatattgcgaagaagc

SEQ ID NO: 879851 - DNA, 75 bp, synthetic construct
  source 1..75: mol_type = other DNA
gcagagccaaccccagattatgcgagtgaatgccgagttgaaattggtcagaatacgcttaccggcgaaaaaatt

SEQ ID NO: 879852 - DNA, 75 bp, synthetic construct
  source 1..75: mol_type = other DNA
ggagtccagggaacatcaaattcgctcttagtggctttattgagcaatctgacaaatctcgagacgtttcgcttt

SEQ ID NO: 879853 - DNA, 75 bp, synthetic construct
  source 1..75: mol_type = other DNA
ggcagcagtatgatgaggagtccggcctgtattacaaccgccaccgctattatgacccgctgcaggggcggtata

SEQ ID NO: 879854 - DNA, 75 bp, synthetic construct
  source 1..75: mol_type = other DNA
agggaatgtgtacaacaaagatttaaaaaggttagactcttttaagaataataataagaatatcgatgttgatta

SEQ ID NO: 879855 - DNA, 75 bp, synthetic construct
  source 1..75: mol_type = other DNA
tttttctaccaaaaaaaacaagtgtttaatttatataggaaagtcatttcgccagattataaaaaagggcaaata

SEQ ID NO: 879856 - DNA, 75 bp, synthetic construct
  source 1..75: mol_type = other DNA
tcatggttttttaagtgaagtggtaaataaagcaccgttgattattttgggaaatacaaactatgtgaagaaagt

SEQ ID NO: 879857 - DNA, 75 bp, synthetic construct
  source 1..75: mol_type = other DNA
tatttgtgctgaatccggctaatgagaatctgttacgcattatgtacattggcgcgccgttggcgaaagacagag

SEQ ID NO: 879858 - DNA, 75 bp, synthetic construct
  source 1..75: mol_type = other DNA
ttctcatcgatgcgttactgcatccgtaatgtaggtcgaaaagataaagggcttactgcatttggtggggatttt

SEQ ID NO: 879859 - DNA, 75 bp, synthetic construct
  source 1..75: mol_type = other DNA
aaatcaaataaccctgataacaaaaatatacatcatcgtttgtgggttacggggaatatatatcctaaagatata

SEQ ID NO: 879860 - DNA, 75 bp, synthetic construct
  source 1..75: mol_type = other DNA
tgaagcccgtcagcagactggcgctacagtggcaggccgtggatggcatgacggcattaatacggcgtcacctgc

SEQ ID NO: 879861 - DNA, 75 bp, synthetic construct
  source 1..75: mol_type = other DNA
aacatttttttaccaccagtgataatacagcgttgttttatcggcactggcccgctttacagccaggggcgaaaa

SEQ ID NO: 879862 - DNA, 75 bp, synthetic construct
  source 1..75: mol_type = other DNA
tttatggaacaattccgtatcagcgcagatgaaatgcagaagtacgacatcattattgatgcgacaggacgccca

SEQ ID NO: 879863 - DNA, 75 bp, synthetic construct
  source 1..75: mol_type = other DNA
tgttgagcagatggaagcagactgggattccaacgatctggaagcgacatataaagaagttgatgcacagataca

SEQ ID NO: 879864 - DNA, 75 bp, synthetic construct
  source 1..75: mol_type = other DNA
cgtgaatttttagaacgtaaataccaggtttacctgacgctttgggatcaacaacaggtagttaaccaactgatg

SEQ ID NO: 879865 - DNA, 75 bp, synthetic construct
  source 1..75: mol_type = other DNA
caaaggtttagcggtctcgcccagcggacctgcgaatcaggacatcattatgtggatggatcatcgcgcaacagc

SEQ ID NO: 879866 - DNA, 75 bp, synthetic construct
  source 1..75: mol_type = other DNA
agcagttgattagcgaagcacctaagctgtcagtaaacatggaaaaaggcatcgagacggctgtaaacaatgcca

SEQ ID NO: 879867 - DNA, 75 bp, synthetic construct
  source 1..75: mol_type = other DNA
acgcaacggcaaaacaggttagtgagatgaaaaaccttgcgcacctgatttacgaaacaaacgccgcgcgtgagc

SEQ ID NO: 879868 - DNA, 75 bp, synthetic construct
  source 1..75: mol_type = other DNA
cgtagcaagtcagatggggatctcaatgggtgagctacgtcgccgcatgttggatggcaaactgacggctgagga

SEQ ID NO: 879869 - DNA, 75 bp, synthetic construct
  source 1..75: mol_type = other DNA
ggggggagcgtataaattccgtaacgaacaaaccagcttagataccagtttaaatggtaaagtaaacgcatgggg

SEQ ID NO: 879870 - DNA, 75 bp, synthetic construct
  source 1..75: mol_type = other DNA
aagaggacgatttcgaagagcaattaaccgattgttatatggatgaaacaacgctgccgtctggcaaggtggttt

SEQ ID NO: 879871 - DNA, 75 bp, synthetic construct
  source 1..75: mol_type = other DNA
atctttgctagagcagataaaaaaacaccttgaaaacgatgagtcattgagtgatggtctaaaaatatccggcta

SEQ ID NO: 879872 - DNA, 75 bp, synthetic construct
  source 1..75: mol_type = other DNA
agcacccgcctacagcaaacgatgaaacaagtggcaatgggcgtaataagagaacagagtaccaggcccggggga

SEQ ID NO: 879873 - DNA, 75 bp, synthetic construct
  source 1..75: mol_type = other DNA
tgtataacaaagagaattatatcaagaggacgttgctttcaataattgatacttttgggagagtctataacgaga

SEQ ID NO: 879874 - DNA, 75 bp, synthetic construct
  source 1..75: mol_type = other DNA
ggaatgacttcacgggacgtgagaaggagttgtacaccgtcacgctcaacaagaacttcgaggactggaagacct

SEQ ID NO: 879875 - DNA, 75 bp, synthetic construct
  source 1..75: mol_type = other DNA
caaacctaaggaaatagacgaatactacaatggcctcattaaatatgaagcagactataaaaaatattgtgataa

SEQ ID NO: 879876 - DNA, 75 bp, synthetic construct
  source 1..75: mol_type = other DNA
tctgtcattatctgtttgtggggttgccaagcgcaatccagcaggcgcatcacttaacgcccatatgattgcaga

SEQ ID NO: 879877 - DNA, 75 bp, synthetic construct
  source 1..75: mol_type = other DNA
ggcacggtggagatcagtgtcaccagccagacggcgggcaccagtacagtcaccgccagcatcaacaacagcagc

SEQ ID NO: 879878 - DNA, 75 bp, synthetic construct
  source 1..75: mol_type = other DNA
caaatttcaggttgccgtcggatttgtgccggtactgaaagacctggtggatgggtttacggacattctcattgc

SEQ ID NO: 879879 - DNA, 75 bp, synthetic construct
  source 1..75: mol_type = other DNA
agagaaattcagtttaaagattatagaatacctcaagtacttgatgtagttgacgttcatttattacgaaaagct

SEQ ID NO: 879880 - DNA, 75 bp, synthetic construct
  source 1..75: mol_type = other DNA
ccactcaccccagagcaaaatcagcaacgcttcaatttccgccgtctgcatgaggaggtcggtcgccgctggacg

SEQ ID NO: 879881 - DNA, 69 bp, synthetic construct
  source 1..69: mol_type = other DNA
tgttgtcaggttttacctctcaacgtgcgggggttttctctttccagcaaccaatgccaccagggataa

SEQ ID NO: 879882 - DNA, 75 bp, synthetic construct
  source 1..75: mol_type = other DNA
atggagcaaaccgcgcataccctgaacctcggatatgtctcccgccgccaacctgccgcttcaacccatggtggg

SEQ ID NO: 879883 - DNA, 75 bp, synthetic construct
  source 1..75: mol_type = other DNA
ttaacgccagcggtgatgatttttatgtcccggacaacagtcatttttattatgatcggctaccaggacagaaat

SEQ ID NO: 879884 - DNA, 75 bp, synthetic construct
  source 1..75: mol_type = other DNA
atatccggaaacagcccctccgtcagcaggagctgcctgtaagactcttccggggcggggactgaccccaccacc

SEQ ID NO: 879885 - DNA, 75 bp, synthetic construct
  source 1..75: mol_type = other DNA
gcgttatgctgcagaggtatatcctgaattcacaggcgtggtctccacagggcatagtctatccggaatactggc

SEQ ID NO: 879886 - DNA, 75 bp, synthetic construct
  source 1..75: mol_type = other DNA
aactttaacaggtgatacatctaatgcttcctatagtgccgctcgtttgagtgagaagattcagcaaaatacatt

SEQ ID NO: 879887 - DNA, 75 bp, synthetic construct
  source 1..75: mol_type = other DNA
cggaggtaatacaccgtaagagcggggaaaaccgaacagaagtggagctggtcacactcacgtgggtggactggt

SEQ ID NO: 879888 - DNA, 75 bp, synthetic construct
  source 1..75: mol_type = other DNA
atgatatttgggcgaagttttttcttgaggcaggaaaacagctcccgtgcgcaggttgatgaagcattacgcgtc

SEQ ID NO: 879889 - DNA, 75 bp, synthetic construct
  source 1..75: mol_type = other DNA
tgaaggatatatatattgtgactttttttgatttctggggaaaaacgcgacgcggcgataaagacgtgttcgacg

SEQ ID NO: 879890 - DNA, 75 bp, synthetic construct
  source 1..75: mol_type = other DNA
tcacactacgcggccacgacgtcgaagaattcactggtgtcgtgcgtcgatacggtgcaagcaaggaagtacagg

SEQ ID NO: 879891 - DNA, 75 bp, synthetic construct
  source 1..75: mol_type = other DNA
tcgccgttacggtgcgagccgggacgtgcaggaaatgattgatgcggcgaatcagccagcggaggttgctcatct

SEQ ID NO: 879892 - DNA, 75 bp, synthetic construct
  source 1..75: mol_type = other DNA
gaggctggcagaaagcgcggatggagcagcagatgtatgaatggttcggcagggtgccgcagttcatcatcacgc

SEQ ID NO: 879893 - DNA, 75 bp, synthetic construct
  source 1..75: mol_type = other DNA
ctcacaactgtatataaacacagttatagacttactttccttgcaatcgatatcacatggagtgggcaatgaacg

SEQ ID NO: 879894 - DNA, 75 bp, synthetic construct
  source 1..75: mol_type = other DNA
aaaaccgtgtacataagggtgtacataatcaaaaacagcattataaagaaaccagccaaaatgaggcattgaagc

SEQ ID NO: 879895 - DNA, 75 bp, synthetic construct
  source 1..75: mol_type = other DNA
attaatcggggtaattcgagatgaaatatattcgagcgtgtttagctcgggtgtgtgtagtgatacctcttgcaa

SEQ ID NO: 879896 - DNA, 75 bp, synthetic construct
  source 1..75: mol_type = other DNA
tggggggtgagtgaggaggattaccggcgttatcagtcactgatgtccggcccccgggggatacagtctcccgga

SEQ ID NO: 879897 - DNA, 75 bp, synthetic construct
  source 1..75: mol_type = other DNA
ggcgctggctgcgttctggtgagggacagatgccggtggtactgcagcagggggcggacggatggcgcgtggctg

SEQ ID NO: 879898 - DNA, 75 bp, synthetic construct
  source 1..75: mol_type = other DNA
aaggaagagtatgcccgtacggagaaggagctggcttttcagcgggaggttgatgcggcatggcagcgtctttat

SEQ ID NO: 879899 - DNA, 75 bp, synthetic construct
  source 1..75: mol_type = other DNA
tacggtgccagcaaagatgtgcaggagctggtggacgcggccaatgcgccagcggaagtcgctcaccttgatatc

SEQ ID NO: 879900 - DNA, 75 bp, synthetic construct
  source 1..75: mol_type = other DNA
aactggagagaacgaatataccgtaatcgaacaaacaggtggcaaatcctttaaagttatacagtttgatgcagg

SEQ ID NO: 879901 - DNA, 75 bp, synthetic construct
  source 1..75: mol_type = other DNA
tgcctgagatttatcaggccagcaccggtaagcagtacatgatacccggcgacaatggcaaggtgatcagcaaca

SEQ ID NO: 879902 - DNA, 75 bp, synthetic construct
  source 1..75: mol_type = other DNA
caagcagtcagaacgcaatctggcactgtctaagctccagggggaggcccgcgcgcggttgcaggctcaatacgc

SEQ ID NO: 879903 - DNA, 75 bp, synthetic construct
  source 1..75: mol_type = other DNA
gcgacattcagcaatataccgacaattacaaccaacaatataacgttaatgttggtaaatctcagcggcagcaat

SEQ ID NO: 879904 - DNA, 75 bp, synthetic construct
  source 1..75: mol_type = other DNA
tatgtaacagtaataggtctggggggcagcaaaaaacaggcagaagaaggtgaatttgaaccggtgatgctggct

SEQ ID NO: 879905 - DNA, 75 bp, synthetic construct
  source 1..75: mol_type = other DNA
gacaacaatcaattaccataccttgctcaggcatggatagaaaatgaaaagcaagaaaaaatcacaacgggaccg

SEQ ID NO: 879906 - DNA, 75 bp, synthetic construct
  source 1..75: mol_type = other DNA
aattcattttggataaaagggagtaactgcgctggggagttttctgcatgggacgaaggttatgcttttttaaaa

SEQ ID NO: 879907 - DNA, 75 bp, synthetic construct
  source 1..75: mol_type = other DNA
gatagccagaacaacattatttctccgacaggcggaactcttccgctttctatcccggatgatgaggatagtatt

SEQ ID NO: 879908 - DNA, 75 bp, synthetic construct
  source 1..75: mol_type = other DNA
cttatccgccagttaacttcatcgcctccgagaactggcagccatacacccggctcattcccgccaacgaagtgc

SEQ ID NO: 879909 - DNA, 75 bp, synthetic construct
  source 1..75: mol_type = other DNA
aagagaactatcagacctgagcaataacccttcaccggaagcacttcaggaactggcgaaaaaactccaggaaat

SEQ ID NO: 879910 - DNA, 75 bp, synthetic construct
  source 1..75: mol_type = other DNA
acgcgtctgatgctttcattacgttaggcgatcgcgcactggcggctgttggcggtgcgtctccaagcatcaaaa

SEQ ID NO: 879911 - DNA, 75 bp, synthetic construct
  source 1..75: mol_type = other DNA
attttcctctttcgtcatggatatcatcttatatattttttggtaaaaaaaataatatcgataaacttcttccat

SEQ ID NO: 879912 - DNA, 75 bp, synthetic construct
  source 1..75: mol_type = other DNA
ggcagtggccattccggaagcgacgggcggagtgaatgccaaagaactgaaggatggcgtacaggcagaagtgac

SEQ ID NO: 879913 - DNA, 75 bp, synthetic construct
  source 1..75: mol_type = other DNA
gtagttgttgatgacacaggaaagtatgaaataaatctaaatggctgggacatcaaggatgcagatggcgctgaa

SEQ ID NO: 879914 - DNA, 75 bp, synthetic construct
  source 1..75: mol_type = other DNA
gcagacaaagtgaagaacaacacagaggtgacggcaacagcgaaagatccgggtggtaatgaaagtgctccagtc

SEQ ID NO: 879915 - DNA, 75 bp, synthetic construct
  source 1..75: mol_type = other DNA
gatattataagcgtaaaattctatagaaatgaagaaatagaatgtgcttgtgattttctgatggataaagacgcg

SEQ ID NO: 879916 - DNA, 75 bp, synthetic construct
  source 1..75: mol_type = other DNA
tttgttttcctttatatcaaactcagatttattaataatttcgaatcttgcagttcaaaacattatttatgatta

SEQ ID NO: 879917 - DNA, 75 bp, synthetic construct
  source 1..75: mol_type = other DNA
gtggacggatacacaacgtatactcctgtaggtgataaatctgttgaactccatatccaacaggatatattagta

SEQ ID NO: 879918 - DNA, 75 bp, synthetic construct
  source 1..75: mol_type = other DNA
acatattgaaattacacgttataaagttgatgttgataacgataatatattgtatgaagtagttgatgagataat

SEQ ID NO: 879919 - DNA, 75 bp, synthetic construct
  source 1..75: mol_type = other DNA
ccagtggtcagggtaaagctacccagtttggcgtggatactgtagctccgtcagaaccagcactgaaggctgaga

SEQ ID NO: 879920 - DNA, 75 bp, synthetic construct
  source 1..75: mol_type = other DNA
ttacactgacagtgactcatccggataaaaccaccagaaccgagacgcatactgttagcaaagatgaggctgcag

SEQ ID NO: 879921 - DNA, 75 bp, synthetic construct
  source 1..75: mol_type = other DNA
ttaccaagactaccagggcgggggaaaccccgctctaccctcactcctgaaattatgccttcacgataagattgt

SEQ ID NO: 879922 - DNA, 75 bp, synthetic construct
  source 1..75: mol_type = other DNA
cagcagctctgttgccacgctacgatttacctgcaccaatgcttgaccgaccagcaaaaggggcggatggcgcac

SEQ ID NO: 879923 - DNA, 75 bp, synthetic construct
  source 1..75: mol_type = other DNA
tcagatggaaatggcacgtcgcagtactcaagggactgtcgcggaagtgcttggcaaagattttgtgaaatttga

SEQ ID NO: 879924 - DNA, 75 bp, synthetic construct
  source 1..75: mol_type = other DNA
atgattttatgcgtcaacatcgattcagtgaggtgaatttcgatacccaacagatgatcgattttattaacagat

SEQ ID NO: 879925 - DNA, 75 bp, synthetic construct
  source 1..75: mol_type = other DNA
agcaggcggtcattctcaacgcaccacgccaccagaaactgaaggagatgagtgaaggcattgtgtcgatgtttc

SEQ ID NO: 879926 - DNA, 75 bp, synthetic construct
  source 1..75: mol_type = other DNA
agatagctgtcgcaatggatgcgccgcgtcatcagaagctgaaagagctgagcgaggggatcgtggagatgtacc

SEQ ID NO: 879927 - DNA, 75 bp, synthetic construct
  source 1..75: mol_type = other DNA
attgttaataaaaactttattgagaatatgaagaaaatatttagccattgtccttatataaaagatccaattata

SEQ ID NO: 879928 - DNA, 75 bp, synthetic construct
  source 1..75: mol_type = other DNA
aatatttgtgcttgtttcatttaaattattagataataagttgatatatttttcaagagcggcagaaagcatttc

SEQ ID NO: 879929 - DNA, 75 bp, synthetic construct
  source 1..75: mol_type = other DNA
gtcactttgatacccggttatatgaataattttaataccggacaggttgtttttcgtcccattgccggaaatgtg

SEQ ID NO: 879930 - DNA, 75 bp, synthetic construct
  source 1..75: mol_type = other DNA
ttatttccattgaaccagcagagcaagcggcgaggtttcaccgacatcatctgcgaaaactgcaaataccttcca

SEQ ID NO: 879931 - DNA, 75 bp, synthetic construct
  source 1..75: mol_type = other DNA
ttgaaatccgttctggcagtaaaactggtgatgcaattaaaaattcttaatattgttaataaaaactttattgag

SEQ ID NO: 879932 - DNA, 75 bp, synthetic construct
  source 1..75: mol_type = other DNA
tgcctggtatctttataaagagtggattcgtagtgatgatgtttcacctatatttatagaaactgaagaaaagtt

SEQ ID NO: 879933 - DNA, 75 bp, synthetic construct
  source 1..75: mol_type = other DNA
gcgaatgtcgacagggaattttaaagattgcattacagaacaattggaattaactattgattattcagatatatt

SEQ ID NO: 879934 - DNA, 75 bp, synthetic construct
  source 1..75: mol_type = other DNA
ggctctacgatcaacggatgatacgatcaaagcaaatgcctggcatctttataaagagtggattcgtagtgatga

SEQ ID NO: 879935 - DNA, 75 bp, synthetic construct
  source 1..75: mol_type = other DNA
tatataaaagatcccattatacgcagttatatccattctgatgaagataacaagttcgatgattttatgcgtcaa

SEQ ID NO: 879936 - DNA, 75 bp, synthetic construct
  source 1..75: mol_type = other DNA
tcccagcgcttacatgatatgttgaatcctacaaaagataccaattggaattccacgtatatctataaatccaga

SEQ ID NO: 879937 - DNA, 75 bp, synthetic construct
  source 1..75: mol_type = other DNA
gcgcgtatttttgttcgcggcttagctacggctgagcacgccgcggcgatagagattacgtttaatgcgcgttaa

SEQ ID NO: 879938 - DNA, 75 bp, synthetic construct
  source 1..75: mol_type = other DNA
ttggagagacaatcaccatcacggtaacgctccgggatgcgttcgataatctggtaaccggtgcagcttcacagt

SEQ ID NO: 879939 - DNA, 75 bp, synthetic construct
  source 1..75: mol_type = other DNA
ttgcgggatgagtttggtaaccctgctttagggctgacatcagaagtcatcgagtcttatattgataatttcgcg

SEQ ID NO: 879940 - DNA, 75 bp, synthetic construct
  source 1..75: mol_type = other DNA
cttgccgggcagacggtcagcgtgatggcaggcaacggcgcaacgactgccccgacggtgaccactcagccggat

SEQ ID NO: 879941 - DNA, 75 bp, synthetic construct
  source 1..75: mol_type = other DNA
acagcagcagcctgagccggaacgtgacgtttatcgccgatgtcaggacggcgaagatcgcggatctggtggtca

SEQ ID NO: 879942 - DNA, 75 bp, synthetic construct
  source 1..75: mol_type = other DNA
cgaaagcggagctgtgctggcttattcctccatcgttaccgacaaaacgacctacaccgctggcggtgcgataaa

SEQ ID NO: 879943 - DNA, 75 bp, synthetic construct
  source 1..75: mol_type = other DNA
acagcttcgtatacacgaagttttagtggtagctggggcggatatacctgtcagtgttttattatctgatgaatt

SEQ ID NO: 879944 - DNA, 75 bp, synthetic construct
  source 1..75: mol_type = other DNA
gcggtgtggtcgaggtgagcggtacagataaaaatgaaacgggtaactggagcgaagagtctgatggcgtttaca

SEQ ID NO: 879945 - DNA, 75 bp, synthetic construct
  source 1..75: mol_type = other DNA
aaatcgctggtttcttccttacaaaccaaatacgcgctgaaaggttatgacatcgaagccgccgccctgcaatca

SEQ ID NO: 879946 - DNA, 75 bp, synthetic construct
  source 1..75: mol_type = other DNA
ctggttaccggcctggccgcagttgggtggtaagttagtctatgaacaatattacggcgatgaagtggcgctatt

SEQ ID NO: 879947 - DNA, 75 bp, synthetic construct
  source 1..75: mol_type = other DNA
ccgggccggacggcaccgtggaaatctccgtcaccagccagacggcgggcatcagtgccgtcactgccagcatca

SEQ ID NO: 879948 - DNA, 75 bp, synthetic construct
  source 1..75: mol_type = other DNA
ccagcatcaacaacagcattctgaaccagaacgtgacatttatcccggatgtcagcaccgcgaagatcgcggatc

SEQ ID NO: 879949 - DNA, 75 bp, synthetic construct
  source 1..75: mol_type = other DNA
gatctggtggtcattaaggatggttcagaggcagacggttcgacggcgaacacgctgcaggtgaaggtgaccgat

SEQ ID NO: 879950 - DNA, 75 bp, synthetic construct
  source 1..75: mol_type = other DNA
agcagccagagccggaacgtcacgtttatcgccgatgtcaggacggcgcagatcgcgagtctggaggtgacgcag

SEQ ID NO: 879951 - DNA, 75 bp, synthetic construct
  source 1..75: mol_type = other DNA
gcgcagcgttagtgtttcatgaaatattttttcctgaatcatcaacggcaatggcgttaattttggcaatgggaa

SEQ ID NO: 879952 - DNA, 75 bp, synthetic construct
  source 1..75: mol_type = other DNA
ggcattgtttggcctggtcattgatcgcgtgagtacgctgattctgtttgtggtggtgtttctcggtttgctggt

SEQ ID NO: 879953 - DNA, 75 bp, synthetic construct
  source 1..75: mol_type = other DNA
tggttgcggaccgtgataaagtccaaaatgttaaaaacatagttgacgatctaaaaaagagaaaacgtgctgaat

SEQ ID NO: 879954 - DNA, 75 bp, synthetic construct
  source 1..75: mol_type = other DNA
aatcaaacctttgaagaatataggcagttaggttatgcatgtcaaattaaaaaatatcagtcttatgaagaagca

SEQ ID NO: 879955 - DNA, 75 bp, synthetic construct
  source 1..75: mol_type = other DNA
gcatcgacgacaccgactttaataaagttataagcgacccaacaactatagtggatttgcccctatatttccaga

SEQ ID NO: 879956 - DNA, 75 bp, synthetic construct
  source 1..75: mol_type = other DNA
ctcttcaggcagcggatatccggcgtagtggagaggatacatttatcattcagcagcagcgtcaggaagcccttg

SEQ ID NO: 879957 - DNA, 75 bp, synthetic construct
  source 1..75: mol_type = other DNA
cgttgttcttaaagatgcccagggtaactttattaccgatggtgtcgttcagcttaatgaggaaaacgtacaagt

SEQ ID NO: 879958 - DNA, 75 bp, synthetic construct
  source 1..75: mol_type = other DNA
aggtcattaaggatggttcagaggcggacggtgcgacggcgaacacgctgcgtgcgagggtaaccgatgcattcg

SEQ ID NO: 879959 - DNA, 75 bp, synthetic construct
  source 1..75: mol_type = other DNA
tggtgatgcaggacggctcagtggcagatggcacgacggcgaacacgctgcgggcgagggtgaccgatgcgttcg

SEQ ID NO: 879960 - DNA, 75 bp, synthetic construct
  source 1..75: mol_type = other DNA
cagatcgcggacctggtggtcattaaggacgactcagtggcagacggtgcaatggcgaatatgctgcgggcgagg

SEQ ID NO: 879961 - DNA, 75 bp, synthetic construct
  source 1..75: mol_type = other DNA
gtttgtcgccgatgtcagcacggcgcagatcgcgagtctggaggtgacgcaggataactcagaggcagacggtgc

SEQ ID NO: 879962 - DNA, 75 bp, synthetic construct
  source 1..75: mol_type = other DNA
ggtcagcgtgttggcaggcaacggtgccacgactgccccgacggtcaccacgcagccggacggcacggtggagat

SEQ ID NO: 879963 - DNA, 75 bp, synthetic construct
  source 1..75: mol_type = other DNA
atgaagataatctgcagattattattggcgatggcatgtttgtgtctggcaaacatatcctgggctactgtttgt

SEQ ID NO: 879964 - DNA, 75 bp, synthetic construct
  source 1..75: mol_type = other DNA
gcagtgccatgcgtaacagtgcatttgtctatcccgatcatgggcgaatctggctgacgcagcgtgtgctgcgtg

SEQ ID NO: 879965 - DNA, 75 bp, synthetic construct
  source 1..75: mol_type = other DNA
ggttcacagcgtgccggaaaagtcctcatttgtactcaggtcttagagcagagcgttgattgtgacctggacgaa

SEQ ID NO: 879966 - DNA, 75 bp, synthetic construct
  source 1..75: mol_type = other DNA
tcccaataatgataatacgatgtcgagctattatattggtattctcctagattacctggagagtgatgtaaatac

SEQ ID NO: 879967 - DNA, 75 bp, synthetic construct
  source 1..75: mol_type = other DNA
aatggaaaagccagtacgaggacggcttactgagcgaggatgacatacaggaatgcatgcctgttgtagtggtca

SEQ ID NO: 879968 - DNA, 75 bp, synthetic construct
  source 1..75: mol_type = other DNA
gagtatttcaggcctcagtggcagtgatggttgggccatttataatggtaatgcccaatacgcgaatgggtacgt

SEQ ID NO: 879969 - DNA, 75 bp, synthetic construct
  source 1..75: mol_type = other DNA
atacagtgttaacacttcttctgcaggcgctcatacgcactctgtatcgggtactgctgcaagcgcaggtgcaca

SEQ ID NO: 879970 - DNA, 75 bp, synthetic construct
  source 1..75: mol_type = other DNA
ggtgcagacgctggtgttcatcacctcgttgacgttcattccagcgattttactgatgatgaccagtttcacccg

SEQ ID NO: 879971 - DNA, 75 bp, synthetic construct
  source 1..75: mol_type = other DNA
tgaatttattaatgttattagctactccactcagcgaaaagagcatgtggaaatacggtatgaaaaagtcaatgc

SEQ ID NO: 879972 - DNA, 75 bp, synthetic construct
  source 1..75: mol_type = other DNA
ggcactgtttccgcgaatagagatccccgcattctgggatgatgacgagggcattgaacttataaaacacctttc

SEQ ID NO: 879973 - DNA, 75 bp, synthetic construct
  source 1..75: mol_type = other DNA
cactaaaatatacaaataaaaacaaggcaaaaaaaaatataattgtatacatgcatgttattacatatgacttat

SEQ ID NO: 879974 - DNA, 75 bp, synthetic construct
  source 1..75: mol_type = other DNA
gctggcgcgcgatgatcatgatgcagatctatcggttaaatcagcacagctgctggaaggcgaattcctcggact

SEQ ID NO: 879975 - DNA, 75 bp, synthetic construct
  source 1..75: mol_type = other DNA
ggcattcacgacatccagccagaaacttacatcaggctcttgctaaagaccctgtattttttacctcactaatga

SEQ ID NO: 879976 - DNA, 75 bp, synthetic construct
  source 1..75: mol_type = other DNA
cgcaatctgcgatcccggcgacagcactggcagactgtacgctcacaaacggtaaggctctgtctgctcttgcac

SEQ ID NO: 879977 - DNA, 75 bp, synthetic construct
  source 1..75: mol_type = other DNA
gcccgatgacacactcaggctggccgatatcatcgctgacagtcagcatcccgatgccgcaacgatcgcggaaga

SEQ ID NO: 879978 - DNA, 75 bp, synthetic construct
  source 1..75: mol_type = other DNA
gtctaaagtaggtcaaaacacgcataactatctttttgatttagatacagttcggaaattaaacattaaggagtc

SEQ ID NO: 879979 - DNA, 75 bp, synthetic construct
  source 1..75: mol_type = other DNA
tattattatacacaactaagaggcgcttttttatcggctattcatcatcagatcattcaaaatcaactggataca

SEQ ID NO: 879980 - DNA, 75 bp, synthetic construct
  source 1..75: mol_type = other DNA
aatggcgagcggtattcagcgagtgctgatggttaaccagctggtcggcaaggcgaatatgcagttgattgcccg

SEQ ID NO: 879981 - DNA, 75 bp, synthetic construct
  source 1..75: mol_type = other DNA
ccattgaagggaaaacggccactttccgtaaaggtaacttcaccgaagcctgtaagacatttattccgaaatcac

SEQ ID NO: 879982 - DNA, 75 bp, synthetic construct
  source 1..75: mol_type = other DNA
tttggactcaagtaggtaatcagctaacttcccaccaactaaagcgctttgagaatacattccattcggtggtga

SEQ ID NO: 879983 - DNA, 75 bp, synthetic construct
  source 1..75: mol_type = other DNA
aagttcttgagtttgctagaagtcgagcaatggagagtggttttgaagttggtgtttacaaccgccgtggcgtaa

SEQ ID NO: 879984 - DNA, 75 bp, synthetic construct
  source 1..75: mol_type = other DNA
gcaaatcctaagcaggcccgtgatctagcaagccaggcatatcaagttttgcatgattgggcaattgtacccggg

SEQ ID NO: 879985 - DNA, 75 bp, synthetic construct
  source 1..75: mol_type = other DNA
tttatcttcttatggatgcattaaaacaggccggaaaaaactcatcaatagtttatgctccaggacatgcttttc

SEQ ID NO: 879986 - DNA, 75 bp, synthetic construct
  source 1..75: mol_type = other DNA
acgttactgagtcacagaatgatatcctttgacaaagagaataatataattacatcagaaacagccgcactggca

SEQ ID NO: 879987 - DNA, 75 bp, synthetic construct
  source 1..75: mol_type = other DNA
tttgggaattctttatggactcaaagccacgaaaggctcagaaagcgaaacttgggttcaagaaatatgggaaca

SEQ ID NO: 879988 - DNA, 75 bp, synthetic construct
  source 1..75: mol_type = other DNA
tttgaatggcccggtacacagtttccgctttgaattcggtccaggtgtgcgttacgacaaatataccgacaatgc

SEQ ID NO: 879989 - DNA, 75 bp, synthetic construct
  source 1..75: mol_type = other DNA
gccatcagtaacggcggcaccggcacgcaggttaacggtgatgaagccaccgtgaacaataacggtaaaaccacc

SEQ ID NO: 879990 - DNA, 75 bp, synthetic construct
  source 1..75: mol_type = other DNA
ctgaaccgttcactgagccgttcaggttcagtttcttttttccagccacaccatcacctttacgaaggcggagag

SEQ ID NO: 879991 - DNA, 75 bp, synthetic construct
  source 1..75: mol_type = other DNA
ccagtgcaggtatgacattgcccctggccctggagaaccaggagagctgcaggacacgtctggaagagatgttaa

SEQ ID NO: 879992 - DNA, 75 bp, synthetic construct
  source 1..75: mol_type = other DNA
ttcctcgaccgtatcgcgacgcacattctggattaccaggatgaaggtaaagtcgagttcttcgaaggtaacttt

SEQ ID NO: 879993 - DNA, 75 bp, synthetic construct
  source 1..75: mol_type = other DNA
ctgacaggttcagcaaagcgcggggcatatcacgccgtaaacgcgccagaatcgccgcagagcgttttaattgcc

SEQ ID NO: 879994 - DNA, 75 bp, synthetic construct
  source 1..75: mol_type = other DNA
gaagggcaacgtttacccgtctgtatgccggaatgcgccagaacgtcacacagggcgaatctgattacctgcaat

SEQ ID NO: 879995 - DNA, 75 bp, synthetic construct
  source 1..75: mol_type = other DNA
acaaacgactacgaaggccatcatgtatttgacatctggtaccgcaatacctcagcagtgaaacccacggccatt

SEQ ID NO: 879996 - DNA, 75 bp, synthetic construct
  source 1..75: mol_type = other DNA
tgagcaactgccattctgcgatgtgaccgacgtcttccgctttgttaacgggcagtgtcgatttcttcccgccat

SEQ ID NO: 879997 - DNA, 75 bp, synthetic construct
  source 1..75: mol_type = other DNA
tttcagatgaattggttgcagaaggtgaacagtctgcggttctggccgaaatgaaaatcccctttctgcaaaagt

SEQ ID NO: 879998 - DNA, 75 bp, synthetic construct
  source 1..75: mol_type = other DNA
gtgttcattgccgttttttgcctgatgcgacgctggccgcgtcttatcaggcctacaagacccgagcacagaacc

SEQ ID NO: 879999 - DNA, 75 bp, synthetic construct
  source 1..75: mol_type = other DNA
cctggcaacacattttgctgaacggacattataccttccagaacaataatgaacttattgacctggatacattgg

SEQ ID NO: 880000 - DNA, 75 bp, synthetic construct
  source 1..75: mol_type = other DNA
agcagtcgccaaagtcggcggcaagaaggagttaacagggaaaaatgacattgaaacggacatcagtaatcagtg

SEQ ID NO: 880001 - DNA, 75 bp, synthetic construct
  source 1..75: mol_type = other DNA
accgagtacgaagagtataagaaacgcacgctgggcgcagacgcgctggagccgaagcgtatcaagtacaagcgt

SEQ ID NO: 880002 - DNA, 75 bp, synthetic construct
  source 1..75: mol_type = other DNA
caggacggtacgctggacgtcagcggcggtgctcacggaattgatatcaccggaaacggtgctattgcaaacacg

SEQ ID NO: 880003 - DNA, 75 bp, synthetic construct
  source 1..75: mol_type = other DNA
actttatcaattacaggtgacaacaaaatcaccgatgggtgcgcttgtctatggctccggaggtctgctgattga

SEQ ID NO: 880004 - DNA, 75 bp, synthetic construct
  source 1..75: mol_type = other DNA
ctggatgtcagcggcggcggtcacggtattgatatcaccggcgacagcgccaaagtggataacaaaggcggtatg

SEQ ID NO: 880005 - DNA, 75 bp, synthetic construct
  source 1..75: mol_type = other DNA
ggtcaaaattggctcaaatgccaaaagagcattaaaagacatcgtactctcccgctatgcctgttacctggtagt

SEQ ID NO: 880006 - DNA, 75 bp, synthetic construct
  source 1..75: mol_type = other DNA
acggctgttggtgtggcgacgttggcagttgttgcagcaaatgacagtggcgatggcggttctcataacacctca

SEQ ID NO: 880007 - DNA, 75 bp, synthetic construct
  source 1..75: mol_type = other DNA
gaaagaaggctggagtgcgaacgccacgctggaaggtgggccgaatctgagctatgtgaaaagtcagcgaactgc

SEQ ID NO: 880008 - DNA, 75 bp, synthetic construct
  source 1..75: mol_type = other DNA
aacgatttcctgctgtccatctggacagcaactcgctgtataccagtgatgaacgtctgattacctcagcgggca

SEQ ID NO: 880009 - DNA, 75 bp, synthetic construct
  source 1..75: mol_type = other DNA
ggatcaacgcggaacgacttcagcgaagccaggagctgctggagacgaccagccacagtattgaaaaggtcgccg

SEQ ID NO: 880010 - DNA, 75 bp, synthetic construct
  source 1..75: mol_type = other DNA
aaggtaactttactgagtacgaagagtacaagaaacgcacgctgggcgcagacgcactggagccgaagcgtatca

SEQ ID NO: 880011 - DNA, 75 bp, synthetic construct
  source 1..75: mol_type = other DNA
gattgatatcaccggcgacagcgccacggtggacaacaagggcggtatgacggttaccgatccggattccatcgg

SEQ ID NO: 880012 - DNA, 75 bp, synthetic construct
  source 1..75: mol_type = other DNA
attggcgacatcactgcacgttatgccccgctcaccgagagcctgaaaaaacgcatggccgaactgcagtccggt

SEQ ID NO: 880013 - DNA, 75 bp, synthetic construct
  source 1..75: mol_type = other DNA
acggtttcgcaaaatggctacatcatttaccaaaaagaggttcccccgggaccatttactatcgcagatttgcaa

SEQ ID NO: 880014 - DNA, 75 bp, synthetic construct
  source 1..75: mol_type = other DNA
aaaaaacaccagcccgacacaggcgcccactcaaaatctccagaaacgaaaccgatacgcggatcgcgcaccgca

SEQ ID NO: 880015 - DNA, 75 bp, synthetic construct
  source 1..75: mol_type = other DNA
caaagtaacgacttacggtgcgaattcgcaaaaaaaaagtgcgaacaaatctgcgaattcgcagaaggagaaagg

SEQ ID NO: 880016 - DNA, 75 bp, synthetic construct
  source 1..75: mol_type = other DNA
acaaggtactgactgaaaccgatcatgccaaccctgatccggaaatcgtggatattgcctgcggtcgctcctctg

SEQ ID NO: 880017 - DNA, 75 bp, synthetic construct
  source 1..75: mol_type = other DNA
caacttgaaaatataaaaaatttcaaagcatattacgactcagaactcaataagtttgcttccgattttcgaaat

SEQ ID NO: 880018 - DNA, 75 bp, synthetic construct
  source 1..75: mol_type = other DNA
actaatatgatagaaagtgaccgaattaagtttattgaatctatcataaaaaaaatcattccaccggcagatgta

SEQ ID NO: 880019 - DNA, 75 bp, synthetic construct
  source 1..75: mol_type = other DNA
cctgggcagggatctccatgttctttatgcgctttatgctcggcttctcggaagcgccatcattcccggcgaacg

SEQ ID NO: 880020 - DNA, 75 bp, synthetic construct
  source 1..75: mol_type = other DNA
ctgcaaccatctggcgcaatggcaaatgaacagacaacgcctgaagcagtggaaccggatgcaactgaacatcat

SEQ ID NO: 880021 - DNA, 75 bp, synthetic construct
  source 1..75: mol_type = other DNA
atcacgatgcgcggtcaggatttatctgcttctactgcgcgacgcgggcaggatttggcaatgcagcgagcgtca

SEQ ID NO: 880022 - DNA, 75 bp, synthetic construct
  source 1..75: mol_type = other DNA
ggtaaattctgttgatgcgaaatatcaagaactgcgggcagaactccatgaagcccggaaaaacattccatcaaa

SEQ ID NO: 880023 - DNA, 75 bp, synthetic construct
  source 1..75: mol_type = other DNA
aaccagccagcactgacaataccaacgtcaacggcgaagacatgacagaaattgaggagaacatgctcctgccag

SEQ ID NO: 880024 - DNA, 75 bp, synthetic construct
  source 1..75: mol_type = other DNA
ttggctacatggcaacaggctggtaattcaggcgcgcttcttgccgggttaggcggcatgaactccaacgctccg

SEQ ID NO: 880025 - DNA, 75 bp, synthetic construct
  source 1..75: mol_type = other DNA
tggcgaggcggcagatcacccaattaaggtgaacggtcatcatgaaagtacatccaccagcagagcgggtattca

SEQ ID NO: 880026 - DNA, 75 bp, synthetic construct
  source 1..75: mol_type = other DNA
tttttgttaatactaatccttttttagaagcaatgaataaggagagacttaatcataaaggatattgtgataaaa

SEQ ID NO: 880027 - DNA, 75 bp, synthetic construct
  source 1..75: mol_type = other DNA
tttataactgtacgatagcgaaacttgatgctcatgggatggattttttggcaaacgcattcaataagtctggtg

SEQ ID NO: 880028 - DNA, 75 bp, synthetic construct
  source 1..75: mol_type = other DNA
tttataactgtaatatagcaggacttgatgctcatagaatggattttttagcaaattcgttcaacaagtctaact

SEQ ID NO: 880029 - DNA, 75 bp, synthetic construct
  source 1..75: mol_type = other DNA
tatctcctttaattgttgtgatttgaggagggccaatttagacaattattacagagaagattggtgcaaagactg

SEQ ID NO: 880030 - DNA, 75 bp, synthetic construct
  source 1..75: mol_type = other DNA
attgataggtgtcgtcagagatgaaatctggaatgaagtttttaccgatgctgtatgttctgactttcgatgtaa

SEQ ID NO: 880031 - DNA, 75 bp, synthetic construct
  source 1..75: mol_type = other DNA
atgcataaaacatttctaagttatcatcatgctaatgaacaggatttaaaagatagtataatagagacgtatggt

SEQ ID NO: 880032 - DNA, 75 bp, synthetic construct
  source 1..75: mol_type = other DNA
ttatcaataagaataaatacttgcttctgtgttatgataatgttgatgtcttcactaagaaaatgtcttctcttg

SEQ ID NO: 880033 - DNA, 75 bp, synthetic construct
  source 1..75: mol_type = other DNA
ttcttattaatactaatccttttttagaatcaatgaataaggaaaggcttagtcataaaggatattctgataaaa

SEQ ID NO: 880034 - DNA, 75 bp, synthetic construct
  source 1..75: mol_type = other DNA
gactctgacaataagatacgttctaagcttactattgttcaaaatcatagacgcgagaatcaatataaagctaat

SEQ ID NO: 880035 - DNA, 75 bp, synthetic construct
  source 1..75: mol_type = other DNA
tgttgaaaataaatcgtacgagggaaaatatcattttgataatagtaggattgagttttttattttcaaagatat

SEQ ID NO: 880036 - DNA, 75 bp, synthetic construct
  source 1..75: mol_type = other DNA
ttctattgatccagattcaatttatttagaagatggtgttacaccgataaaatacatttatatgaatctggacgg

SEQ ID NO: 880037 - DNA, 75 bp, synthetic construct
  source 1..75: mol_type = other DNA
aaaaacatcagtgacgcgatgcgtaatattctggattggttcaaacggtatcccgatattgtgaaaaatataact

SEQ ID NO: 880038 - DNA, 75 bp, synthetic construct
  source 1..75: mol_type = other DNA
gggaactgtgtttaattattgtaatttgaatagtattaatatgaagtgtagtcttggtaatgcgagttccgatga

SEQ ID NO: 880039 - DNA, 75 bp, synthetic construct
  source 1..75: mol_type = other DNA
acgaaacagcctgaaccagtagcgcaacaggaagtggaaaaagtctgcaccgcctgcggtcagaccggcggcggc

SEQ ID NO: 880040 - DNA, 75 bp, synthetic construct
  source 1..75: mol_type = other DNA
cacgacggatatcccaggacatcagcacccgtgatgagggcggagacgggaaagtggtggttatcgggcggggat

SEQ ID NO: 880041 - DNA, 75 bp, synthetic construct
  source 1..75: mol_type = other DNA
aaaattaccatcaaactggatgctccggcagccaatgacgccattaactggactgctcaattgccggttactgtt

SEQ ID NO: 880042 - DNA, 75 bp, synthetic construct
  source 1..75: mol_type = other DNA
gcatcccggcgtttgtcggtctggcgttgctttcctctttcttatgcatgtttattgccagcggttccgcaatct

SEQ ID NO: 880043 - DNA, 75 bp, synthetic construct
  source 1..75: mol_type = other DNA
gttaaaaaatatacataacgtcattaatgaatacatgtataaaacaaatcgacaggttcttgttctgtcttcttt

SEQ ID NO: 880044 - DNA, 75 bp, synthetic construct
  source 1..75: mol_type = other DNA
actgaataccggagcactggggcatggtttccctgtggctgtaggacttgcgctggcggcgaaaaaaagtcaaag

SEQ ID NO: 880045 - DNA, 75 bp, synthetic construct
  source 1..75: mol_type = other DNA
cagtattaaagcctcggtatacaccgtatctggggcggaggagttgtccgctaacacaaccgctttttctcggga

SEQ ID NO: 880046 - DNA, 75 bp, synthetic construct
  source 1..75: mol_type = other DNA
atttctctaatttgaatatcgacctggacgatatagattgggacctgataacaaatccacaggccactgcttcga

SEQ ID NO: 880047 - DNA, 75 bp, synthetic construct
  source 1..75: mol_type = other DNA
gcatctttattttttactggtgttaaacctctgtattcaataataaaaggctgtacggaaatattttacgactgg

SEQ ID NO: 880048 - DNA, 75 bp, synthetic construct
  source 1..75: mol_type = other DNA
cggtaactgagcgtgaactgatcaatggtgtgatgaggtacattgatgaagctccatgctcacttggagataaga

SEQ ID NO: 880049 - DNA, 75 bp, synthetic construct
  source 1..75: mol_type = other DNA
gcagtcgcttacgcggaagcgtagtcgaaattctcagctggcatcaaaggacgcaaacgtctacagcgccgaatg

SEQ ID NO: 880050 - DNA, 75 bp, synthetic construct
  source 1..75: mol_type = other DNA
gtcaatttaatacttgagaagagagtagcatctagaataatagtaatgagactgatgaactcttttaacaccaac

SEQ ID NO: 880051 - DNA, 75 bp, synthetic construct
  source 1..75: mol_type = other DNA
ttttaatagaaaatcaataggaataaaatcgacaataattgaagaagaacaaacaccattgattgttttcacagt

SEQ ID NO: 880052 - DNA, 75 bp, synthetic construct
  source 1..75: mol_type = other DNA
agatacgagcaagccagagagctatcaatagacttgcttaagaagtggcttgtagagtataaattcagagagtgg

SEQ ID NO: 880053 - DNA, 75 bp, synthetic construct
  source 1..75: mol_type = other DNA
acgaccattcgttcagcctgctgtttaattctttaagaatattgccggaaacagaagttggagagcttcatttat

SEQ ID NO: 880054 - DNA, 75 bp, synthetic construct
  source 1..75: mol_type = other DNA
tgtggtttaagtgcaagacataccggagaaagtatttcttaggtgatggaatgactgatattgccaaaatgaaca

SEQ ID NO: 880055 - DNA, 75 bp, synthetic construct
  source 1..75: mol_type = other DNA
ccagtttgggccagattccccttcatttatgcaggatttcgaggcgctcaccggagataaagttccggtcgcttc

SEQ ID NO: 880056 - DNA, 75 bp, synthetic construct
  source 1..75: mol_type = other DNA
gccataatgccctgcacgatgcgcgttaccaggcaaaatacgtttcagctatctggcaaaaactgttcccgaatc

SEQ ID NO: 880057 - DNA, 75 bp, synthetic construct
  source 1..75: mol_type = other DNA
ctccagaagcaatgcaatcatggctgcaaaacaacgccggtgagttagctcgtgttggcgttaatcctcatgacg

SEQ ID NO: 880058 - DNA, 75 bp, synthetic construct
  source 1..75: mol_type = other DNA
caccttgggatggctgctcttggtccgattgattacttcaatgttcaggacaagatggctggtcgtgagattgac

SEQ ID NO: 880059 - DNA, 75 bp, synthetic construct
  source 1..75: mol_type = other DNA
tgcaagttgttgcttctgcattgatgggcgtgtatttgtcagaatatataaagaaacaaaaggtaaattatgttt

SEQ ID NO: 880060 - DNA, 75 bp, synthetic construct
  source 1..75: mol_type = other DNA
cggtggagtgtcattttgggggcgggcgattaaacagcaaggtgatagttattttacaccgttgcttgttttttg

SEQ ID NO: 880061 - DNA, 75 bp, synthetic construct
  source 1..75: mol_type = other DNA
ggcggatttaatcacttctactacaagattagtggtgaaataggtgttgcagcccataatgattttttccttttt

SEQ ID NO: 880062 - DNA, 75 bp, synthetic construct
  source 1..75: mol_type = other DNA
gtacgaatgtcgtcagagatgagaatctccttaagcgccggataaagtattacatcaaatcaggccggggcggca

SEQ ID NO: 880063 - DNA, 75 bp, synthetic construct
  source 1..75: mol_type = other DNA
ttccacgattaactcaaatgctttttaattactcatcagattcatcaacacatacacgtatttctattattactc

SEQ ID NO: 880064 - DNA, 75 bp, synthetic construct
  source 1..75: mol_type = other DNA
attgttattgcttatttgtatatttcattttgttagggcaaagaatatatttaagtttttttcgcttatatttat

SEQ ID NO: 880065 - DNA, 75 bp, synthetic construct
  source 1..75: mol_type = other DNA
cttgtcagcacggaaggggcaacagaatggtgcgcagaatacgatgaatggggcaacctgctgaatgaagagaac

SEQ ID NO: 880066 - DNA, 75 bp, synthetic construct
  source 1..75: mol_type = other DNA
tatgactcccgtaataaaagaattcatgtactggtggggagataatttagattatggtactattaatatccaatc

SEQ ID NO: 880067 - DNA, 75 bp, synthetic construct
  source 1..75: mol_type = other DNA
ctactccgctacgtcctcgtcagagtgcttgttgtctttaaactgttcggtcgtacatggacgcttgaccttaag

SEQ ID NO: 880068 - DNA, 75 bp, synthetic construct
  source 1..75: mol_type = other DNA
cggagcagaacaatggtcagcaagacaacttggaaaactactgggttattcagagtatcgtcactttatacctgt

SEQ ID NO: 880069 - DNA, 75 bp, synthetic construct
  source 1..75: mol_type = other DNA
aagatcgtcctggcacactcggtttgcctaacgtaggtaagtggcgcaacgacccgacagaacttgcgcaagtta

SEQ ID NO: 880070 - DNA, 75 bp, synthetic construct
  source 1..75: mol_type = other DNA
gccaggccgaccaaccggtggtcaaaccaaaagaagaagttgatcatacttataaaaaatttcgcattgaaatca

SEQ ID NO: 880071 - DNA, 75 bp, synthetic construct
  source 1..75: mol_type = other DNA
aatccggcacgcataccgcgatgaacggtacgcggatgccgttcacatcggcggagctggctgcctgtgccgcct

SEQ ID NO: 880072 - DNA, 75 bp, synthetic construct
  source 1..75: mol_type = other DNA
ttgtcctgccggttgtgccttccaaccttttcactggtatcgacgtagaagcacaggggcgagcaaccagaccga

SEQ ID NO: 880073 - DNA, 75 bp, synthetic construct
  source 1..75: mol_type = other DNA
taaggaaaaatcagtaatttccgcactctggacctttgaagaaaaggacaagttcgcacgcaagcgtgtgaaagg

SEQ ID NO: 880074 - DNA, 75 bp, synthetic construct
  source 1..75: mol_type = other DNA
ttttccttcgcactattaagtcctagctggctggcactgacgttcttcgcgctggtcagctttatggcgctaaaa

SEQ ID NO: 880075 - DNA, 75 bp, synthetic construct
  source 1..75: mol_type = other DNA
gcggagctggccgcctgtgcagccgcttatgatccggcagtgcatgaagcgccgctggttatcggtcatccgacg

SEQ ID NO: 880076 - DNA, 75 bp, synthetic construct
  source 1..75: mol_type = other DNA
gcagggatgtttgcccgcctgcgcgatttcctgatcagcaagttcagcctcgacgaggccgacagcgttttgccg

SEQ ID NO: 880077 - DNA, 75 bp, synthetic construct
  source 1..75: mol_type = other DNA
tgcggttgttgatacacactggcgtgatggtgatgttttcactttgaacattgctaacactactattgatgatga

SEQ ID NO: 880078 - DNA, 75 bp, synthetic construct
  source 1..75: mol_type = other DNA
gccttcggcaatgttcattgtcattttacttaactctcttgtgtatatgccaacactcggtttgagtaatacaat

SEQ ID NO: 880079 - DNA, 75 bp, synthetic construct
  source 1..75: mol_type = other DNA
gtttgatatcgatgacacggtacttttttccagcccgggcttctggcgcggcaaaaaaccttctcaccagaaagc

SEQ ID NO: 880080 - DNA, 75 bp, synthetic construct
  source 1..75: mol_type = other DNA
gggtacatactctgctgaaaccatggaacttctttgacgaaacgccaacgctaggggcgctgaagaaagataagt

SEQ ID NO: 880081 - DNA, 75 bp, synthetic construct
  source 1..75: mol_type = other DNA
aggcccatttattagatattactaacgaaagaaggtttgctgataacagaaccatgtttactcaacatatcgaaa

SEQ ID NO: 880082 - DNA, 75 bp, synthetic construct
  source 1..75: mol_type = other DNA
aaaccggtggttgtgctatcgaataatgacggttgcgttatcgcccgaaacgctgattatgtggaattgcaagta

SEQ ID NO: 880083 - DNA, 75 bp, synthetic construct
  source 1..75: mol_type = other DNA
agaagccaatctgcgagaacgcggtactgcttgtgatcaaacaaatcggctatgaggggctggaaagcggtcacg

SEQ ID NO: 880084 - DNA, 75 bp, synthetic construct
  source 1..75: mol_type = other DNA
gataacaatatctcagttaccgattccacagtgacttcaggttctgtaactactctggaagacagtggtttgatc

SEQ ID NO: 880085 - DNA, 75 bp, synthetic construct
  source 1..75: mol_type = other DNA
cactctggctatcacctctcaggctaatgcaactacttatgacacctggacttattacgacaatccaactaccgc

SEQ ID NO: 880086 - DNA, 75 bp, synthetic construct
  source 1..75: mol_type = other DNA
ttatgaagctctttacttcactgattcttataaagatggtgatgtaaccaagcacacaaatgatcttacccagca

SEQ ID NO: 880087 - DNA, 75 bp, synthetic construct
  source 1..75: mol_type = other DNA
atggacgaagtcaataaaattgaacacggtaaaattttaaacacagacacacccgataattctgcttcgaattta

SEQ ID NO: 880088 - DNA, 75 bp, synthetic construct
  source 1..75: mol_type = other DNA
agtactttcaacgcaaacttctatcctcaaggtcattggatttgcccctatatttccagacatctgttatcactt

SEQ ID NO: 880089 - DNA, 75 bp, synthetic construct
  source 1..75: mol_type = other DNA
tggttctaagtgggtaggctcagctactacatcagcaaatgttgatgatgaatctactgcttcgactgactggta

SEQ ID NO: 880090 - DNA, 75 bp, synthetic construct
  source 1..75: mol_type = other DNA
aatctacaaattccagaggaatatttacagtattacacaccaaaaattaataatatttataaatttttggttcgt

SEQ ID NO: 880091 - DNA, 75 bp, synthetic construct
  source 1..75: mol_type = other DNA
tgaaaatgtcaaatactgtaatcctgattctccagaggattggtctgaagcaatcaaatttgctatcaatctaaa

SEQ ID NO: 880092 - DNA, 75 bp, synthetic construct
  source 1..75: mol_type = other DNA
actaaatcagtaagttggcagcatcacccggcatttggttctgatcatgtggatctcgacgcggccgcgaaggca

SEQ ID NO: 880093 - DNA, 75 bp, synthetic construct
  source 1..75: mol_type = other DNA
gtaaatgtttacgttgaaaaacaaggcgctaacggcattgaagggcgtttaacggcggatcaactcaatagtgca

SEQ ID NO: 880094 - DNA, 75 bp, synthetic construct
  source 1..75: mol_type = other DNA
gcctgggccgaggcctacgaagcggcattgcggcaggaagggctaatcgactacgacgatatggtggtattcggc

SEQ ID NO: 880095 - DNA, 75 bp, synthetic construct
  source 1..75: mol_type = other DNA
ctgcgtgaaagccgacgtcttttctatgtggggctgacccgcgcacgggacgaggtgcatatgctgtattccggt

SEQ ID NO: 880096 - DNA, 75 bp, synthetic construct
  source 1..75: mol_type = other DNA
agagaataaattaaatcagggctttgaattaaattcagggtggagagagttgagttcgattatttcaactcttta

SEQ ID NO: 880097 - DNA, 75 bp, synthetic construct
  source 1..75: mol_type = other DNA
aagggctccaaggatcgggccttgatgttacccgagagcttggcacccagcctgcgcgagcagctgtcgcgtgca

SEQ ID NO: 880098 - DNA, 75 bp, synthetic construct
  source 1..75: mol_type = other DNA
aagacgttttacggcctaaagcgctggatagcacctatccatccaacgaaccatacaacggtgaacgccaagtcg

SEQ ID NO: 880099 - DNA, 75 bp, synthetic construct
  source 1..75: mol_type = other DNA
tcacgaaagaagcatacgaaaaagtactaccactccctgaaatggatgaagcacaggccacactgaggagtggtc

SEQ ID NO: 880100 - DNA, 75 bp, synthetic construct
  source 1..75: mol_type = other DNA
ttatgattgagcgagtcgaaatgattgcgcgtctaacggctgaagggacttgtaaggaaagagaccgtgaaatcg

SEQ ID NO: 880101 - DNA, 75 bp, synthetic construct
  source 1..75: mol_type = other DNA
ttgcgctcattttactcttggcaagtacgtagattccatcgtaatggaagttatggcagattcagtgaaaaaatt

SEQ ID NO: 880102 - DNA, 75 bp, synthetic construct
  source 1..75: mol_type = other DNA
agtagtttgtaattctcacaaggaaaaagataagtttactttttgtaaaagggttgtaattataccaaattcaat

SEQ ID NO: 880103 - DNA, 75 bp, synthetic construct
  source 1..75: mol_type = other DNA
acggtttcactggtgccgatggtgcgttactcatggaactggcaagcaggagagacgttgaaacagtcaggcttc

SEQ ID NO: 880104 - DNA, 75 bp, synthetic construct
  source 1..75: mol_type = other DNA
gacagtaagattgatagatatcatgcttcaaaagagcactttgatgagtttatttcacattgctacaaatacaac

SEQ ID NO: 880105 - DNA, 75 bp, synthetic construct
  source 1..75: mol_type = other DNA
ttgagtttgaactgatgttcaagaaaaatcagtggtcaacagatgatatttcgcggcttggtttttctatggcat

SEQ ID NO: 880106 - DNA, 75 bp, synthetic construct
  source 1..75: mol_type = other DNA
ccgtgaagcgttaattagcattgatggtaaacaatataaggttcttgctgatgtcaaacgtgaggatttggctag

SEQ ID NO: 880107 - DNA, 75 bp, synthetic construct
  source 1..75: mol_type = other DNA
gaagaagcggcggtagaagccggttatgaagtgaaaattgaaacccagggcgcggacggtatccagaatcgcctg

SEQ ID NO: 880108 - DNA, 75 bp, synthetic construct
  source 1..75: mol_type = other DNA
acggacggccggtagatgcggcttccatttccggcgccgagtgggaggcgttgaaacagacggcgcagttaggtg

SEQ ID NO: 880109 - DNA, 75 bp, synthetic construct
  source 1..75: mol_type = other DNA
tgcccgagttgccggtggcgatactggacaccgagggcgagcaaccggttcagttcggcgggtttaagaccgcga

SEQ ID NO: 880110 - DNA, 75 bp, synthetic construct
  source 1..75: mol_type = other DNA
ttttgtagaggcaacgattcaagcaagtaaagaaacttacataacctctgcaatacaatacgcaccaaaaaaagg

SEQ ID NO: 880111 - DNA, 75 bp, synthetic construct
  source 1..75: mol_type = other DNA
gattacagcgagagtcagaaaggacgaagctaccggatggatttttgcagaggcaacaattcaggcaattgatgg

SEQ ID NO: 880112 - DNA, 75 bp, synthetic construct
  source 1..75: mol_type = other DNA
cccggcgcaagggacaggagttaactaggctgctttgggcacttcgcaccgaccagcaacctgcgtgcgattttg

SEQ ID NO: 880113 - DNA, 75 bp, synthetic construct
  source 1..75: mol_type = other DNA
cacggctacatcgacattgtccgagagcagcacaacacacgtgaatttattaaaggtagggcattacttcgattt

SEQ ID NO: 880114 - DNA, 75 bp, synthetic construct
  source 1..75: mol_type = other DNA
atgaataaagggctgattgataaaaataacaatttttttatccaacttatcgatcaggccttacgatcaacggat

SEQ ID NO: 880115 - DNA, 75 bp, synthetic construct
  source 1..75: mol_type = other DNA
gaccttgcgattgaaccgcagattacgactaatgatctgcgtctgatgttgaggctggctcttgccggcggagga

SEQ ID NO: 880116 - DNA, 75 bp, synthetic construct
  source 1..75: mol_type = other DNA
aacactacatacagcatcaacgcttacagtttcgtcatctacatatagctatgttgctgaaactatatttggcga

SEQ ID NO: 880117 - DNA, 75 bp, synthetic construct
  source 1..75: mol_type = other DNA
cagcagtttagagctattgatgcgtcaacaattaattgttatttttctcaagtaaatatgtcagataacggatat

SEQ ID NO: 880118 - DNA, 75 bp, synthetic construct
  source 1..75: mol_type = other DNA
gccattattccccgggaagccgccgcggaaatttccgctgcctgccagacgctgaatatcgactggccgcgtctg

SEQ ID NO: 880119 - DNA, 75 bp, synthetic construct
  source 1..75: mol_type = other DNA
caacagattgtcatcacggagcctctgctggataatcgtgggcaggtgaatcaccggacattaaagggtctgttt

SEQ ID NO: 880120 - DNA, 75 bp, synthetic construct
  source 1..75: mol_type = other DNA
caagcccatatggatcttgccattgcgctgcaagcgcagatcatcgaatcgattcctgagttgatgctctctgtc

SEQ ID NO: 880121 - DNA, 75 bp, synthetic construct
  source 1..75: mol_type = other DNA
ctctccaggcgctgctggcgatcctcgacggcgtactgatcaactacatcgccatttgtctggcttcggcacgta

SEQ ID NO: 880122 - DNA, 75 bp, synthetic construct
  source 1..75: mol_type = other DNA
ctgcgcgatctgattggtatcgataacgctgaagcggcttacgccattcagcacataaatgtgcaacatgacgtt

SEQ ID NO: 880123 - DNA, 75 bp, synthetic construct
  source 1..75: mol_type = other DNA
gtggtgaagacgtgcactggagcatgctcggtgataaccaaaaattgttccgctggcgctgtcgtgccgccacct

SEQ ID NO: 880124 - DNA, 75 bp, synthetic construct
  source 1..75: mol_type = other DNA
aagcgccagtcaaaaaccgtgccgtataaagagatcgaacgctacggcattgatcgtaaccgttcgccgctgaag

SEQ ID NO: 880125 - DNA, 75 bp, synthetic construct
  source 1..75: mol_type = other DNA
aactgaaagcgcgtggttacgaacatgctggcgtctacaacccggaaggggtcggtggtacgcacgttatgtacg

SEQ ID NO: 880126 - DNA, 75 bp, synthetic construct
  source 1..75: mol_type = other DNA
gggcatggccgcagccggtgcagccggtgcggcggccgcaatcgctactgttgcaacagctggggcagcagcccc

SEQ ID NO: 880127 - DNA, 75 bp, synthetic construct
  source 1..75: mol_type = other DNA
ttgtcggcgcggtgctcttgctatctgcaactagtgcgatggctgccggggtcgatttggcgcagagcaacacgt

SEQ ID NO: 880128 - DNA, 75 bp, synthetic construct
  source 1..75: mol_type = other DNA
gaaaaattctgtggagtcggtttttcctccatcgattgctgaatgggcatcaaatagccttgctccatcacaaat

SEQ ID NO: 880129 - DNA, 75 bp, synthetic construct
  source 1..75: mol_type = other DNA
ccgtgaacgtctctcccgggcagcagactcaccaacccgcgaggcatatgacagtgcaggcattcatgccggtta

SEQ ID NO: 880130 - DNA, 75 bp, synthetic construct
  source 1..75: mol_type = other DNA
gatacgcttgaacctgaattacaggctgcggcctgtgtgaaccaaaataaactgaaggattaccataatatgcca

SEQ ID NO: 880131 - DNA, 75 bp, synthetic construct
  source 1..75: mol_type = other DNA
ggccgcattcaaagtgcgcattgatgccggggtcgcaccgcttgactggcgtggcatggttaaagtcaaaaaaca

SEQ ID NO: 880132 - DNA, 75 bp, synthetic construct
  source 1..75: mol_type = other DNA
cacggtaacctggttgctgctgatttgagtatcgatggcatggacaacgctcgcaaggccatgatgctgcagaaa

SEQ ID NO: 880133 - DNA, 75 bp, synthetic construct
  source 1..75: mol_type = other DNA
agctgttgaacgagatggggcgcgagtccacgccatccaataaaaataccccggctcatatttatgccggtaacg

SEQ ID NO: 880134 - DNA, 75 bp, synthetic construct
  source 1..75: mol_type = other DNA
ttttcgcgacaagtttaatgacaaagtggttgctgaaatgcgcggggtgattgacgaacacggctattcaccgtt

SEQ ID NO: 880135 - DNA, 75 bp, synthetic construct
  source 1..75: mol_type = other DNA
caggtcgatggtttccgttctcaggtcgcgtccatgtgtctggcgcaaacgttagcggtttcactggcgctggcg

SEQ ID NO: 880136 - DNA, 75 bp, synthetic construct
  source 1..75: mol_type = other DNA
catgccgatgttcccccttcgacactgattcgttttgctaatgcgtttggttttagcggatttaatgaaatgaaa

SEQ ID NO: 880137 - DNA, 75 bp, synthetic construct
  source 1..75: mol_type = other DNA
ccttactgcaggatgatatccgcagtcgctatgatagccttagcaaacgtcttaaacaagttgctcagtatatac

SEQ ID NO: 880138 - DNA, 75 bp, synthetic construct
  source 1..75: mol_type = other DNA
tcagaattttgccacggttctgtcagaggcccgtcttgatgacagcagcccgacggattattacctggtggcagc

SEQ ID NO: 880139 - DNA, 75 bp, synthetic construct
  source 1..75: mol_type = other DNA
ggccaccacgctgtggctcgtgcgatttgttacggacaacgcggagagatcagaaagcgttatcgtgaagggtag

SEQ ID NO: 880140 - DNA, 75 bp, synthetic construct
  source 1..75: mol_type = other DNA
caattatatagactggaaagttggtgtagttgaaacagcaagaggatggcttgtacatatggctaaaatatctga

SEQ ID NO: 880141 - DNA, 75 bp, synthetic construct
  source 1..75: mol_type = other DNA
tatgcagttcttccgcgtgcgtgaaacctccatgaaaatggcagagatccttaccggtgcacgtaaaacctacgg

SEQ ID NO: 880142 - DNA, 75 bp, synthetic construct
  source 1..75: mol_type = other DNA
agtatctgcacctggcctttgatggttatcccaccgggcttgatgagaactatatcgaaacgctgacccgacaat

SEQ ID NO: 880143 - DNA, 75 bp, synthetic construct
  source 1..75: mol_type = other DNA
gtatattacaaggcgagacggggtacaacgaaccagacgtgtttgcggtctgtcgtttagtctcaggtttcccct

SEQ ID NO: 880144 - DNA, 75 bp, synthetic construct
  source 1..75: mol_type = other DNA
ttggtcgtatcggtcgactggtgttgcgtcgattacttgaagtcaaaagcaacattgaagtggtcaacaaaaact

SEQ ID NO: 880145 - DNA, 75 bp, synthetic construct
  source 1..75: mol_type = other DNA
acatattcttgcgagatgtatccccagcaaagatagtaatatcatctatactgtcagtatatattggaggtttgg

SEQ ID NO: 880146 - DNA, 75 bp, synthetic construct
  source 1..75: mol_type = other DNA
ataataatgtcaaataccatttcgctgatagctatactaacattatttacactattgccgtttataatagcatcc

SEQ ID NO: 880147 - DNA, 75 bp, synthetic construct
  source 1..75: mol_type = other DNA
aaaataattaatctttatgaaatagacgatctctgtgcaaaaagaataatatctctgcttcctgaatctgagaaa

SEQ ID NO: 880148 - DNA, 75 bp, synthetic construct
  source 1..75: mol_type = other DNA
aggtcacaattaaggccgatgaattcctgaatggaaaacggaaagtaaaagatgaagttagtaaattaaacaaag

SEQ ID NO: 880149 - DNA, 75 bp, synthetic construct
  source 1..75: mol_type = other DNA
aacgatacaatttaaggaaaaaatccataatggtatccatacagaatacatcacagatcaaaaacacagtaataa

SEQ ID NO: 880150 - DNA, 75 bp, synthetic construct
  source 1..75: mol_type = other DNA
cgctggaaccattctccagttattacgtcagactcaggatagccaattttctacgttggggaaaaaaaatgggca

SEQ ID NO: 880151 - DNA, 75 bp, synthetic construct
  source 1..75: mol_type = other DNA
gctttggtaacctggcgataccgcgtgtgggtcaggaggtcattgtggacttcctcaacggcgatccggaccagc

SEQ ID NO: 880152 - DNA, 75 bp, synthetic construct
  source 1..75: mol_type = other DNA
cgcgcggaacaagccgttctccggagatatggccgggacggcgaattgcgctgacggggcatccgcaggcgaacc

SEQ ID NO: 880153 - DNA, 75 bp, synthetic construct
  source 1..75: mol_type = other DNA
aagaaatcccgtattaccgcacagcaggtaaaagagcaggaaaaggttgccgccactcttggtcaacttgattca

SEQ ID NO: 880154 - DNA, 75 bp, synthetic construct
  source 1..75: mol_type = other DNA
atagtcaatgttataaagtttcaggcaataaattctcggatttaagactaactcttgtagataaaaacagctcga

SEQ ID NO: 880155 - DNA, 75 bp, synthetic construct
  source 1..75: mol_type = other DNA
gatgcacatcgaagcgaagaagtgggcgcgcagcaaagccatcgatttcctggcgtttgaagagggctatttcag

SEQ ID NO: 880156 - DNA, 75 bp, synthetic construct
  source 1..75: mol_type = other DNA
ggtcgccatcgctatcgcggctaccgccaccacaagtcattctccccgtggtatgagatgcgctgctgggtccgt

SEQ ID NO: 880157 - DNA, 75 bp, synthetic construct
  source 1..75: mol_type = other DNA
cctttaaccgtgccgcccatgccatgctctactatgcggcgggctggtttggccgccatcgctaccggggctacc

SEQ ID NO: 880158 - DNA, 75 bp, synthetic construct
  source 1..75: mol_type = other DNA
atgggagttttaattctaaattctacattattagccaagcatttgaattttacactacgcaatcacttatgacac

SEQ ID NO: 880159 - DNA, 75 bp, synthetic construct
  source 1..75: mol_type = other DNA
gctgatggggttacgttcacaggaagcagtacgctgttccggttcactaaaacctggcgcgaagcactggcgcac

SEQ ID NO: 880160 - DNA, 75 bp, synthetic construct
  source 1..75: mol_type = other DNA
atcgccacggcaggacggttctgtggacgcctgatggaactgaacgttcagatacgctatgtccaccatttaaag

SEQ ID NO: 880161 - DNA, 75 bp, synthetic construct
  source 1..75: mol_type = other DNA
aattctttttttggttgctaaattctctggagtgtctggattatgtgattattaatttaactccagaaagcaaaa

SEQ ID NO: 880162 - DNA, 75 bp, synthetic construct
  source 1..75: mol_type = other DNA
atgattatttttctgatcaccagactggtgaacggaggtgattatttttataataacttttcattcacagtcacc

SEQ ID NO: 880163 - DNA, 75 bp, synthetic construct
  source 1..75: mol_type = other DNA
ctttttgcgagcttcgcaaaaattgtgctgtacacaatcgacggtgacttttcatattcagcagcttgagcagga

SEQ ID NO: 880164 - DNA, 75 bp, synthetic construct
  source 1..75: mol_type = other DNA
tcaacgccgtcttttacggcaagtccgactggctcaacatcccgacggaagtccctctgccggcaccgcttgccg

SEQ ID NO: 880165 - DNA, 75 bp, synthetic construct
  source 1..75: mol_type = other DNA
agtatggacgttgagtatggtcagtacagcgtcatcctgtggattgagggttctcagccatcacatgttgggacc

SEQ ID NO: 880166 - DNA, 75 bp, synthetic construct
  source 1..75: mol_type = other DNA
gagagggtggattgctaccgccaacggcctagcggcagtggccgccgaacagcatgacatgctgctgccactgga

SEQ ID NO: 880167 - DNA, 75 bp, synthetic construct
  source 1..75: mol_type = other DNA
gaaatcgcatcctgaaattgatattcagctcaccattgattatggtttgaccgatgtcgtttctgaacgttttga

SEQ ID NO: 880168 - DNA, 75 bp, synthetic construct
  source 1..75: mol_type = other DNA
tggacggcccagaggcttgaagaacttctttatgagccacagtcaaagccacatactttgccggaaaggtttgtt

SEQ ID NO: 880169 - DNA, 75 bp, synthetic construct
  source 1..75: mol_type = other DNA
aaataaaatatttttatattctttatctaaaagcaaagggaattaatgaaccatacattaatattataaaaaaac

SEQ ID NO: 880170 - DNA, 75 bp, synthetic construct
  source 1..75: mol_type = other DNA
cccatcacgctgcgcctgaacggccagagcacgtcactgccgccccagaatttcattctgaccatgatgattgag

SEQ ID NO: 880171 - DNA, 75 bp, synthetic construct
  source 1..75: mol_type = other DNA
atgccatgttgggcgacgttatgcgtctggcagatcgaacatcctgaactgaggcagacgattgaggcgttgagg

SEQ ID NO: 880172 - DNA, 75 bp, synthetic construct
  source 1..75: mol_type = other DNA
ttgtttgatgcttttagtcagggtttgcataatgttgctcgtaatggcagtccacggtatgcaggtttactacgt

SEQ ID NO: 880173 - DNA, 75 bp, synthetic construct
  source 1..75: mol_type = other DNA
tcttttcaatgactttctatttaaccatcaacaagatgaacaattagcaatggcatatatggccgctctgccgtt

SEQ ID NO: 880174 - DNA, 75 bp, synthetic construct
  source 1..75: mol_type = other DNA
cacccaaaagtgaccaggttattatgttgcaaaatcaatacgttcgtgaaatgcgaaaatatggcgtacgaggtt

SEQ ID NO: 880175 - DNA, 75 bp, synthetic construct
  source 1..75: mol_type = other DNA
cgcagaagagataaccaaagcgatgagcgtaaagcctaaaccgaagtggaacgctgtatgccccccatccttcgc

SEQ ID NO: 880176 - DNA, 75 bp, synthetic construct
  source 1..75: mol_type = other DNA
ttttaaacaaaaaacttgaaaaatacttcagattactttgtgatgtaactggatataatgaacacgaactattat

SEQ ID NO: 880177 - DNA, 75 bp, synthetic construct
  source 1..75: mol_type = other DNA
caggcggcgcattttcttccctgcgcctgcgcggcctgatgttcagcccgccgcttgccgccgtaccggaggccg

SEQ ID NO: 880178 - DNA, 75 bp, synthetic construct
  source 1..75: mol_type = other DNA
ctggaaaatataaaaacatggggagtaatagcgttaacattattattattaatacccgaaaaattatcccccctg

SEQ ID NO: 880179 - DNA, 75 bp, synthetic construct
  source 1..75: mol_type = other DNA
ttgccaaagcacgagcggcaacgctactcggcgctgccaggttgatggaactacgtaaaccgccacgccagatac

SEQ ID NO: 880180 - DNA, 75 bp, synthetic construct
  source 1..75: mol_type = other DNA
ctgacggagaaaaagctgtttcaggcactggcagtgaatggacccttctctgccatccgccgtctggttcgcccc

SEQ ID NO: 880181 - DNA, 75 bp, synthetic construct
  source 1..75: mol_type = other DNA
attttcatcttgccaggatcgcacgtaatcacgttattcggggactttatctgcgggatattacccttcaggtaa

SEQ ID NO: 880182 - DNA, 75 bp, synthetic construct
  source 1..75: mol_type = other DNA
ttatctgctggatattgcccttcaggcaagtccttttctcgccagcatactggagcgtaatcaatattgatctgc

SEQ ID NO: 880183 - DNA, 75 bp, synthetic construct
  source 1..75: mol_type = other DNA
tcaccgcaaaatctgaccacactaactgtgccacttaaaatcagctctgcgattaatgcgatgtcggagttgaat

SEQ ID NO: 880184 - DNA, 75 bp, synthetic construct
  source 1..75: mol_type = other DNA
cgaacaggtattatatctttttaggagtaaaattgtgttgattttactacaaaaacatatgcttttgaccagtgt

SEQ ID NO: 880185 - DNA, 75 bp, synthetic construct
  source 1..75: mol_type = other DNA
tactgcatattttttcctgcgataatactaactctaccagtaaatcatcagggctacatgaccaataaaatgtaa

SEQ ID NO: 880186 - DNA, 75 bp, synthetic construct
  source 1..75: mol_type = other DNA
tgctgaagataaggattattattttttaggacattttcaagaattatcaaatatttatagtatcgatgagtcatt

SEQ ID NO: 880187 - DNA, 75 bp, synthetic construct
  source 1..75: mol_type = other DNA
tccaacatcagcaatacgtttcgcataatcaccccatggcaatatacgtttgagaatgccgctatttccgtgact

SEQ ID NO: 880188 - DNA, 75 bp, synthetic construct
  source 1..75: mol_type = other DNA
gtgactatcccgaaccgacactggaatacggtttccattagtactaataaaaccattgatataagaagtgaggat

SEQ ID NO: 880189 - DNA, 75 bp, synthetic construct
  source 1..75: mol_type = other DNA
gtttggtaattgcattgtgtattaatgccatagccggaacaaccactctcatgagtgcggctccaagaagaactt

SEQ ID NO: 880190 - DNA, 75 bp, synthetic construct
  source 1..75: mol_type = other DNA
tatttgcaacagtgccaaaaagagtgcgtccaggctaaagcggaaatctatagcgcatttttctcgcttaccatt

SEQ ID NO: 880191 - DNA, 75 bp, synthetic construct
  source 1..75: mol_type = other DNA
acaccgtgaccgtgccggataaaaagactgccaccgctgcgctgtcggctgaagatatcgccgctgcccatctgc

SEQ ID NO: 880192 - DNA, 75 bp, synthetic construct
  source 1..75: mol_type = other DNA
ccgtgcaaccgggtgcgcaaattagcccaacgacgccgctgatggcggtcgttccagccaccaatatgtgggtgg

SEQ ID NO: 880193 - DNA, 75 bp, synthetic construct
  source 1..75: mol_type = other DNA
tgaccgtcgtcaactccgcatcaaacatcaccactgaaaccatcgacggcaagccacatatcgtggttcgcggca

SEQ ID NO: 880194 - DNA, 75 bp, synthetic construct
  source 1..75: mol_type = other DNA
cggcctgctcaacaagaccaaattcttcttcaccaatgcctctaatttctctttcgacgatatctcccgcgctat

SEQ ID NO: 880195 - DNA, 75 bp, synthetic construct
  source 1..75: mol_type = other DNA
ggcggcagagccgcagacgcggcgtgagcgcaaccatgcggagatggagcgggcgctggtcagcaggaagcgcag

SEQ ID NO: 880196 - DNA, 75 bp, synthetic construct
  source 1..75: mol_type = other DNA
caaaagagaccgtgcggaaaatgatgattgccgagaaaacctggcaccctcgcccgtcctcaaaccctgaatcag

SEQ ID NO: 880197 - DNA, 75 bp, synthetic construct
  source 1..75: mol_type = other DNA
cacccagcaaatggtgtacggagaaagtcctcattgcatcaacagggctaaagccaggaaccattgagcgggcca

SEQ ID NO: 880198 - DNA, 75 bp, synthetic construct
  source 1..75: mol_type = other DNA
aaaactggcgtgaccagaagcagattatttcagttatctgtaaagatggtattaagattgacgactccattatta

SEQ ID NO: 880199 - DNA, 75 bp, synthetic construct
  source 1..75: mol_type = other DNA
ctaacaacgaaatcctcaaagcgaaaccccgcgaaaaagacttcaccctgcatgatggtgatggcctgttcttac

SEQ ID NO: 880200 - DNA, 75 bp, synthetic construct
  source 1..75: mol_type = other DNA
gtgatactggttgtctggagattcagggggccagtctatgcaggtacgatcacaggtaaagtgacggaacaacat

SEQ ID NO: 880201 - DNA, 75 bp, synthetic construct
  source 1..75: mol_type = other DNA
tcacagtgccagaccagcactccgctgaacccatcattccagatggtcaattctgaaaacgaccagtggaaagac

SEQ ID NO: 880202 - DNA, 75 bp, synthetic construct
  source 1..75: mol_type = other DNA
aatcgaggctcgcgacctgctggcgggtttcccgctggtgttcgtctcctgcaaaccgctggaggtgcgccatgg

SEQ ID NO: 880203 - DNA, 75 bp, synthetic construct
  source 1..75: mol_type = other DNA
acgcttttaccacattttctgtctgcaggttttccccaacatggtagcccataatttttctggagcaggcatcgg

SEQ ID NO: 880204 - DNA, 75 bp, synthetic construct
  source 1..75: mol_type = other DNA
ctgacgctgccgaaggaagaaaaacggcttccggcgcaggtgttcagcgaacaggagacgcggcaggtgctgggc

SEQ ID NO: 880205 - DNA, 75 bp, synthetic construct
  source 1..75: mol_type = other DNA
cgccgggtgaaaggtgtggtgacctggtttgaactgggggagaacgacaaaaaccagatgctgtacagcatgaag

SEQ ID NO: 880206 - DNA, 75 bp, synthetic construct
  source 1..75: mol_type = other DNA
tgggtttattatctttctatgtcagtgcctctgaattttctgagcaggatttaatcgagttaggaaaaaaagaaa

SEQ ID NO: 880207 - DNA, 75 bp, synthetic construct
  source 1..75: mol_type = other DNA
agctttagccggtttattacagcaagcatctatcacagtagtaagtgccggagccgatgaaacacgaactgatca

SEQ ID NO: 880208 - DNA, 75 bp, synthetic construct
  source 1..75: mol_type = other DNA
tggccatgaatgacgttggatgccgggcaactgcccgcattatgggcgttggcctcaactacggttttacgtcac

SEQ ID NO: 880209 - DNA, 75 bp, synthetic construct
  source 1..75: mol_type = other DNA
aagcatcctcggcacgattttgcaggaaaacggggtgaccgactggaggccgctgttcagcgagcctcatccttc

SEQ ID NO: 880210 - DNA, 75 bp, synthetic construct
  source 1..75: mol_type = other DNA
aagcatcctcggcacgattttgcaggaaaacggggtgaccgattggaggccgctgttcagcgagccccatccttc

SEQ ID NO: 880211 - DNA, 75 bp, synthetic construct
  source 1..75: mol_type = other DNA
atgggccagaaaaataatggattatacgcgcggtgaactcagttatttaaaaataattgagcaaaaaaaaggagt

SEQ ID NO: 880212 - DNA, 75 bp, synthetic construct
  source 1..75: mol_type = other DNA
cactcgatggccacgcagatgctggacaacggcgcggacacgcggcatatccaggcgatcctcgggcatgagaag

SEQ ID NO: 880213 - DNA, 75 bp, synthetic construct
  source 1..75: mol_type = other DNA
gtagacacctgttcgtgacgtaccacggcaaaggactgaaccggggaacactgacgcagatcggcggggaaacca

SEQ ID NO: 880214 - DNA, 75 bp, synthetic construct
  source 1..75: mol_type = other DNA
taatgaaaaattgcttgataaagctaactttgattacgaaaaaagaacacgcgaagttgctccagagatacgtct

SEQ ID NO: 880215 - DNA, 75 bp, synthetic construct
  source 1..75: mol_type = other DNA
gtcgaccaagatgattggggaaaccttggagcagcattgcgagattgagtttaaccgtctccgagccaccgcatt

SEQ ID NO: 880216 - DNA, 75 bp, synthetic construct
  source 1..75: mol_type = other DNA
gggccagaaaaataatggattatactcgcggtgaactcagttatttaaaaataattgagcaaaaaaggagttttt

SEQ ID NO: 880217 - DNA, 75 bp, synthetic construct
  source 1..75: mol_type = other DNA
tgttatggcatgcaaaaaaaactacagtaataacgaagttgccggctgtttaactctgtcttatcgtgaggttaa

SEQ ID NO: 880218 - DNA, 75 bp, synthetic construct
  source 1..75: mol_type = other DNA
tgttatggcctgcaaaaaaagctatagaaataacgaagttgcaggttgtttaactttgtcttatcgtgggattaa

SEQ ID NO: 880219 - DNA, 75 bp, synthetic construct
  source 1..75: mol_type = other DNA
ataaattctcgcttaatgcacttaatgaggaaggagttgaacatttaaaagggtatttggcgtatgtaaataaaa

SEQ ID NO: 880220 - DNA, 75 bp, synthetic construct
  source 1..75: mol_type = other DNA
atgactctcagaacttttcctgtattacacgatctctccgattctctgtttgcggaccgttttaaccgcatcgat

SEQ ID NO: 880221 - DNA, 75 bp, synthetic construct
  source 1..75: mol_type = other DNA
tcaccccgcatatgcactgggatcgagagtggtatttcaccaccgaagagtcacgtattctgctggtcaataata

SEQ ID NO: 880222 - DNA, 75 bp, synthetic construct
  source 1..75: mol_type = other DNA
acaaagtgagtttttcgtcccgagagtgattgaaacatttaatctcggaaggaagccacgagaacatactgaccg

SEQ ID NO: 880223 - DNA, 75 bp, synthetic construct
  source 1..75: mol_type = other DNA
tgcgaatggcggcagaaaatgcaacccctggcgaatggtgttctgatgattatgggttaattgctgatgccgggc

SEQ ID NO: 880224 - DNA, 75 bp, synthetic construct
  source 1..75: mol_type = other DNA
ctgttcactcgcagtacccgcagcattgagttaacggagtccgggcgttatttttccgcaaagctaccgacctgc

SEQ ID NO: 880225 - DNA, 75 bp, synthetic construct
  source 1..75: mol_type = other DNA
tgcccttaccggatttatcagggaccacaggccatacaggtacaattactgttctgcgttatatacagtcaggtg

SEQ ID NO: 880226 - DNA, 75 bp, synthetic construct
  source 1..75: mol_type = other DNA
aagcgtgtggtgttatcgtggaaaaaatttgtgctattcatgcaaaatcagttaatagcactgccagtaacgacc

SEQ ID NO: 880227 - DNA, 75 bp, synthetic construct
  source 1..75: mol_type = other DNA
acgaatctgtaatattaatttatttgcatattgattcttctgtcagaaatatagtcattgattccttcagtgagg

SEQ ID NO: 880228 - DNA, 75 bp, synthetic construct
  source 1..75: mol_type = other DNA
gtcgtcggcctaatgttattgcagaagcaataaaagccggaggttctcttgatgattttcttatatctcaggata

SEQ ID NO: 880229 - DNA, 75 bp, synthetic construct
  source 1..75: mol_type = other DNA
cagagagttgtctgattgagaatgatgaactggcactgtctgttattcaacaatttagccaactaggtgcgcaag

SEQ ID NO: 880230 - DNA, 75 bp, synthetic construct
  source 1..75: mol_type = other DNA
ccacccggttccgtcgtttacccacccaaccccgtctattacccaccggaaaccgtctattacccaccgaggggt

SEQ ID NO: 880231 - DNA, 75 bp, synthetic construct
  source 1..75: mol_type = other DNA
accgacatacgttcggactgttttggtgaaccgctgacgtatcaacttgacgtcggaacgaagcaactcagattt

SEQ ID NO: 880232 - DNA, 75 bp, synthetic construct
  source 1..75: mol_type = other DNA
tcgcgcaaagtttggcacgtcagaccttcaggcgccctatgagcatatcaaaaccttcgacacagcaatcctcag

SEQ ID NO: 880233 - DNA, 75 bp, synthetic construct
  source 1..75: mol_type = other DNA
caggggcaacacgttggcagtggctctcgtttaatggactgcgaacttatcatccggggatcaacacgcgcgtta

SEQ ID NO: 880234 - DNA, 75 bp, synthetic construct
  source 1..75: mol_type = other DNA
ttggcgatagcaccgttttgctgcccaactcagcggcgctgtttattgtcctgatgctgtgtaaaacgtcgcggt

SEQ ID NO: 880235 - DNA, 75 bp, synthetic construct
  source 1..75: mol_type = other DNA
gatcaacaatggcgttttaatgcgactacagaatttactgtagatgaaaataaagacattattgttagtagagta

SEQ ID NO: 880236 - DNA, 75 bp, synthetic construct
  source 1..75: mol_type = other DNA
ggtggattcgggccatggatggttacgccagatgaaattcctgaccctcaaaatctgaatattatcacccgtctt

SEQ ID NO: 880237 - DNA, 75 bp, synthetic construct
  source 1..75: mol_type = other DNA
tggcgatccgacgctatttatccgttttgctgatactcagacgggccaccgttgtgggttaataaaaccgaccct

SEQ ID NO: 880238 - DNA, 75 bp, synthetic construct
  source 1..75: mol_type = other DNA
aagctggcaaaaaccaccgagattcaggcgcagctggatgacctggaccgcctgaacaacgcgctaagcgcgatg

SEQ ID NO: 880239 - DNA, 75 bp, synthetic construct
  source 1..75: mol_type = other DNA
aatacaaagctattgcacaggctagagagatagcaaaacaatatgagcaaggggctatcagcctggcgcgtatga

SEQ ID NO: 880240 - DNA, 75 bp, synthetic construct
  source 1..75: mol_type = other DNA
actcgatctgccgaaaccgaagcaagggccggaaaccattaataaggttaccgaatattcgatgcctgctgaata

SEQ ID NO: 880241 - DNA, 75 bp, synthetic construct
  source 1..75: mol_type = other DNA
tatttttaatgaggaaacattgtattttactgtttttggtggggattttattatggatgatttaaaaaaagtaaa

SEQ ID NO: 880242 - DNA, 75 bp, synthetic construct
  source 1..75: mol_type = other DNA
ggaggaagaaatccgggcagaccgcgtgagcagtgaaagccgggcgtggcttgcgcagtgcgggctgacggtgga

SEQ ID NO: 880243 - DNA, 75 bp, synthetic construct
  source 1..75: mol_type = other DNA
aggagctggttgcggaaatgggcagcgcttttctttgtgcgcagttaagcgtcgagggagaagtgaaccatgaaa

SEQ ID NO: 880244 - DNA, 75 bp, synthetic construct
  source 1..75: mol_type = other DNA
cggatgtattctaatgttgctgacagtttctaaaagtcaagccccatcaaacgaagcagaaaaattatatattgc

SEQ ID NO: 880245 - DNA, 75 bp, synthetic construct
  source 1..75: mol_type = other DNA
ataaccgttccggaggcacagaagctggttgagttaagaacggatgcaccggcagagctggaagtcccggtcagt

SEQ ID NO: 880246 - DNA, 75 bp, synthetic construct
  source 1..75: mol_type = other DNA
tgttcattacacagccagtaatgcagagagatttgaaggagtgtggcagcctaaaataaaatcgcgagcaagaca

SEQ ID NO: 880247 - DNA, 75 bp, synthetic construct
  source 1..75: mol_type = other DNA
tcagatatggatttacaaggaaagtgtttatatatcaggaggatgaaaagtggttttagtactatacatccattg

SEQ ID NO: 880248 - DNA, 75 bp, synthetic construct
  source 1..75: mol_type = other DNA
tttcgcgcctgccggcaggcacgtgaagcatcagagtatttactgatgcagcgggcttcgcaggcgcgggtcgca

SEQ ID NO: 880249 - DNA, 75 bp, synthetic construct
  source 1..75: mol_type = other DNA
tttaaagagaactttaaaagataaccttcctctagatcaggattttatagacagactaaagagatattttaaaga

SEQ ID NO: 880250 - DNA, 75 bp, synthetic construct
  source 1..75: mol_type = other DNA
aacgttagcaatgaagcgacagggttcagcatcacaaccaacagtgggaaggtttcgctggcaggcagtatgcag

SEQ ID NO: 880251 - DNA, 75 bp, synthetic construct
  source 1..75: mol_type = other DNA
gccctccgggtaaaaatgcggaaacaacatctgctgaagaatacagagagcatgcggaaaatcttgtaaaagcta

SEQ ID NO: 880252 - DNA, 75 bp, synthetic construct
  source 1..75: mol_type = other DNA
acctgataacaaagaggcccgtatcacccttaagactgctctgatggtggatggaaaaaaagtggcactaatcgc

SEQ ID NO: 880253 - DNA, 75 bp, synthetic construct
  source 1..75: mol_type = other DNA
agtgagaaaacgcaatatctgggggtggtgaatggtcaggtggtggggaacagcgtggtgaaagtcacccggacc

SEQ ID NO: 880254 - DNA, 75 bp, synthetic construct
  source 1..75: mol_type = other DNA
atgaatcagacgacactccagttcccccaactcctggcggagatgagataataccggacgatccggatgatacgc

SEQ ID NO: 880255 - DNA, 75 bp, synthetic construct
  source 1..75: mol_type = other DNA
gttaagaatacaatattttatatgtctataggagcaatgatttatttgttaatgatattttttaaattccatagc

SEQ ID NO: 880256 - DNA, 75 bp, synthetic construct
  source 1..75: mol_type = other DNA
tggaatcagcatccggagatggcattgattcgttcagtcctgaaaacagcggcagaagaggtggagagcccactt

SEQ ID NO: 880257 - DNA, 75 bp, synthetic construct
  source 1..75: mol_type = other DNA
caacctgtcagcggttacctggtgaaaagccgcagtctgttcagtgggaatgggagccccggagacagcccgttt

SEQ ID NO: 880258 - DNA, 75 bp, synthetic construct
  source 1..75: mol_type = other DNA
ctcagcaaccactgtacagcctgaagataatgcgccatccggcagcccgccagaaacatcaacagaggccagtac

SEQ ID NO: 880259 - DNA, 75 bp, synthetic construct
  source 1..75: mol_type = other DNA
gagccgccgggaatatgatgaaccgggcaggctggtatcggagacatcgcgcagcggggagacagtacgctaccg

SEQ ID NO: 880260 - DNA, 75 bp, synthetic construct
  source 1..75: mol_type = other DNA
agtccgggatacgttgcagtctgcaacagacgtagaggaaaagtcatcggaggagcagagcctccatgatgatac

SEQ ID NO: 880261 - DNA, 75 bp, synthetic construct
  source 1..75: mol_type = other DNA
agtcccggatacgttgcagtctgcaacagacacggaggaaaaggctccggaggagtcgagtgtccatgatgatac

SEQ ID NO: 880262 - DNA, 75 bp, synthetic construct
  source 1..75: mol_type = other DNA
acctgacgggctggatgtcgctgtcacggaaaccgcaagtgacctggtacggctgggacggcgaccggctgacca

SEQ ID NO: 880263 - DNA, 75 bp, synthetic construct
  source 1..75: mol_type = other DNA
atgatgaggagtccggcctgtattataaccgccaccgctattatgacccgctgcgggggaggtatatcactcagg

SEQ ID NO: 880264 - DNA, 75 bp, synthetic construct
  source 1..75: mol_type = other DNA
atcagcgaggatgagaacgcattcctcctcaagctggatctgccggaggtccccaaggatgccgtgcgcgtcagc

SEQ ID NO: 880265 - DNA, 75 bp, synthetic construct
  source 1..75: mol_type = other DNA
ggtttagtagtacatcgtactttgtatgccttttcagacaatactatgagtgtacgccacgtaaatatctaaaac

SEQ ID NO: 880266 - DNA, 75 bp, synthetic construct
  source 1..75: mol_type = other DNA
ttgataccaggatgtcgcttgccattaaattgctaaagcaaaatcatccgataaaatatgtgtctgaaatgtgtg

SEQ ID NO: 880267 - DNA, 75 bp, synthetic construct
  source 1..75: mol_type = other DNA
ataccctgatgatgaacacgtattatgatttcagaaacagcagtgcattcacgccatgggtatctgttgggatgg

SEQ ID NO: 880268 - DNA, 75 bp, synthetic construct
  source 1..75: mol_type = other DNA
cgccatctttaacacgctgtcgcggctgaaggcgaaggtcgacatctgggtggatggcgtggcggccagtctggc

SEQ ID NO: 880269 - DNA, 75 bp, synthetic construct
  source 1..75: mol_type = other DNA
aaacggcaaattcaaatctctcggtcatttccccaccaaacaactcgcagcggctgcgcggcgaaaacacattca

SEQ ID NO: 880270 - DNA, 75 bp, synthetic construct
  source 1..75: mol_type = other DNA
cgcgggaaatgctcgaaccggcgcataaagggcttccggacgatccggcactgatccgacaactggcctacgtga

SEQ ID NO: 880271 - DNA, 75 bp, synthetic construct
  source 1..75: mol_type = other DNA
gcatggaaggcaaacgcgtggtggtccttggcggtggcgacactgcgatggactgcgtgcgtacgtctgtacgcc

SEQ ID NO: 880272 - DNA, 75 bp, synthetic construct
  source 1..75: mol_type = other DNA
aaaatgtggtgttcaacgataaacggtttggctgcgtgtacagcctgaaagccagtctttctggtgtgccggata

SEQ ID NO: 880273 - DNA, 75 bp, synthetic construct
  source 1..75: mol_type = other DNA
atgaaagtcatcagcgggcatagagagtgggtgttccccagtatcaaagctccactcaatcacatgcatgaacaa

SEQ ID NO: 880274 - DNA, 75 bp, synthetic construct
  source 1..75: mol_type = other DNA
tataacaagctcgatgaatataggtgcagagattgcagacttaattaatgtattgattcgtcatgactttaagat

SEQ ID NO: 880275 - DNA, 75 bp, synthetic construct
  source 1..75: mol_type = other DNA
ctggtttttatgatttgcatccatctagtatttttgttggtgattttcagaaattacgtattggtaaaattgttt

SEQ ID NO: 880276 - DNA, 75 bp, synthetic construct
  source 1..75: mol_type = other DNA
ctggtttatatgagttgcatccatctagtatttatgttggtgactttcaaaaattacgcgttggcaaaattgttt

SEQ ID NO: 880277 - DNA, 75 bp, synthetic construct
  source 1..75: mol_type = other DNA
agagacgacctgataaagaaggtctgggaggatcatggtttatctggttcttcggcgagtctgaatgttgccata

SEQ ID NO: 880278 - DNA, 75 bp, synthetic construct
  source 1..75: mol_type = other DNA
gttcaggattgtattggtctaccaggtttccccagtggagcgccgaatgtccggcggaaactggaacaacttgtg

SEQ ID NO: 880279 - DNA, 75 bp, synthetic construct
  source 1..75: mol_type = other DNA
tgaggtcggggaatataacacatatgaagcatataactcagagaagcaatattttaccagagaggactatacgta

SEQ ID NO: 880280 - DNA, 75 bp, synthetic construct
  source 1..75: mol_type = other DNA
aatgcttatctggtcgtcccccaaattaattatactatggatttaaacatagaagactctagctcagaagagtta

SEQ ID NO: 880281 - DNA, 75 bp, synthetic construct
  source 1..75: mol_type = other DNA
cggatgtctgctggtgatgctgccagcgatgggcctgttctatgtatccgacctgatgggcggtgcgaaaaacct

SEQ ID NO: 880282 - DNA, 75 bp, synthetic construct
  source 1..75: mol_type = other DNA
cggtgacggcagaggacgggctggcggtcagccggatttgcgaggcggtgcaccgcagtctggagagcgggaaac

SEQ ID NO: 880283 - DNA, 75 bp, synthetic construct
  source 1..75: mol_type = other DNA
agaagtggcggcgcagcaggtttctgatcaacagctggaaactgcccgcttccgcttcccgtacaacacgccgac

SEQ ID NO: 880284 - DNA, 75 bp, synthetic construct
  source 1..75: mol_type = other DNA
cggtcaaaaagcagattgatgagtttatccgccgctgggataacttcccgattgccccggagcgccggccaatcc

SEQ ID NO: 880285 - DNA, 75 bp, synthetic construct
  source 1..75: mol_type = other DNA
aagcggcagaagcatggcgacgggctgccggggtagggtgtaacgaaaaaagcagccttcattactccaggagtc

SEQ ID NO: 880286 - DNA, 75 bp, synthetic construct
  source 1..75: mol_type = other DNA
gatacgaatgactgagtcatatcatttggttctttatcttctgagaactattgagaaagaaaaggaggtaagaat

SEQ ID NO: 880287 - DNA, 75 bp, synthetic construct
  source 1..75: mol_type = other DNA
gactgcacctctatataaacagcaaggctatgaagaaacaattgattcgataaacaaaaagcttgaagacataga

SEQ ID NO: 880288 - DNA, 75 bp, synthetic construct
  source 1..75: mol_type = other DNA
ggacttcctcaacggcgatccggaccagccgattattatggggcgtacctaccaccaggaaaaccgcacacccgg

SEQ ID NO: 880289 - DNA, 75 bp, synthetic construct
  source 1..75: mol_type = other DNA
tgcaggaaaacggggtgaccgagtggagcccgctgttcagcgagccacatccttcccgtgagttttgtgtccagt

SEQ ID NO: 880290 - DNA, 75 bp, synthetic construct
  source 1..75: mol_type = other DNA
aaacgcggaataaacaccatcgccagaaatgcaaacaggagcctgatggctcctgtttttcattgcacagtttgc

SEQ ID NO: 880291 - DNA, 75 bp, synthetic construct
  source 1..75: mol_type = other DNA
ttgccccggagcgccgcgccaatccagcctgggcgcagaacaccgtcgatggcgaagagatcaacctgttcgata

SEQ ID NO: 880292 - DNA, 75 bp, synthetic construct
  source 1..75: mol_type = other DNA
tcccggcagacagaacatggcgaccacagccgttgctgaaaccgctggtggacggcccgcagagcgccgtcgtga

SEQ ID NO: 880293 - DNA, 75 bp, synthetic construct
  source 1..75: mol_type = other DNA
caggaggtgattgtggacttcctcaacggcgatccggaccagccgattattatggggcgtacctaccaccaggaa

SEQ ID NO: 880294 - DNA, 75 bp, synthetic construct
  source 1..75: mol_type = other DNA
ggtgataccggatgggctggcagcagaaggaagcagtaaacgggactggaatcgcttcctggacatacattaccg

SEQ ID NO: 880295 - DNA, 75 bp, synthetic construct
  source 1..75: mol_type = other DNA
tcatcgacaagctggaacggtaccggaaggaaacgggaaacgtgataggtaagggtgtgaacagggatgcagctg

SEQ ID NO: 880296 - DNA, 75 bp, synthetic construct
  source 1..75: mol_type = other DNA
ttaaacgatcgtgactttattgcatcagttgttgaccgggctatttttcatttcgcgattaatagtatatgtaat

SEQ ID NO: 880297 - DNA, 75 bp, synthetic construct
  source 1..75: mol_type = other DNA
tgatgacaacagcttaaaattatttgcttcgctgttaatttcactttcatattctagtgcctacacagatttagc

SEQ ID NO: 880298 - DNA, 75 bp, synthetic construct
  source 1..75: mol_type = other DNA
aacgcgaagcgcgtaaccgttgcccgtccggttgtgttgctgtattcgctgcccgtattcgtcagggggaaacct

SEQ ID NO: 880299 - DNA, 75 bp, synthetic construct
  source 1..75: mol_type = other DNA
ctcacaccacggcgctgatagtttttatcctttgggttctatgccgcgttgctgtaattctttgcggagaacgcg

SEQ ID NO: 880300 - DNA, 75 bp, synthetic construct
  source 1..75: mol_type = other DNA
tctggcgttttatcacctttggcacgtcagaacgtcaaattatccacgtaaccgcctggacggaacgcgaagcgc

SEQ ID NO: 880301 - DNA, 75 bp, synthetic construct
  source 1..75: mol_type = other DNA
tatgactaccccggacgtttcaagggtgcccacgggcagaactttgcccgctggcagatggacggctggcgaaac

SEQ ID NO: 880302 - DNA, 75 bp, synthetic construct
  source 1..75: mol_type = other DNA
gtcgaaagcgcagatcatccagcaggccggtaactccgtgttggcaaaagctaaccaggtaccgcagcaggttct

SEQ ID NO: 880303 - DNA, 75 bp, synthetic construct
  source 1..75: mol_type = other DNA
gcagaacctgcggccctgcttatgttacggaaaaagttcaatgtcatctggggcaatagcggggaagatgctagt

SEQ ID NO: 880304 - DNA, 75 bp, synthetic construct
  source 1..75: mol_type = other DNA
ctatctgacagctcagtttgaaaaattatctcaacgtgatatgaagaagtacctgggagagatgaagagtctggc

SEQ ID NO: 880305 - DNA, 75 bp, synthetic construct
  source 1..75: mol_type = other DNA
ttccgtccacacaacatggaatggctggcaaaacacagcgtcgagctggattcgcaggggcgcattatcgccccg

SEQ ID NO: 880306 - DNA, 75 bp, synthetic construct
  source 1..75: mol_type = other DNA
ttgatttcaaaaatgcgctctggacgatacctgcagaacgtgaagaactacaaggagtgaaacactccagccgtg

SEQ ID NO: 880307 - DNA, 75 bp, synthetic construct
  source 1..75: mol_type = other DNA
ttgcgctcgtgaagatacttttcattatggtgttacttattggcatctggcgcatcagcttcatggggttacaac

SEQ ID NO: 880308 - DNA, 75 bp, synthetic construct
  source 1..75: mol_type = other DNA
atgaatacagtaacttacttagaacgcggtaacatcactgatatcatggttaacgatgtatatatgggggcggta

SEQ ID NO: 880309 - DNA, 75 bp, synthetic construct
  source 1..75: mol_type = other DNA
ccaggtgaatattgtcatcaacaacctgctctacacccccccaggccgtcgcccagctgctggcgtggctgaatg

SEQ ID NO: 880310 - DNA, 75 bp, synthetic construct
  source 1..75: mol_type = other DNA
ccaggccagagactggctgagctggctggaaagtatgccaagcgagctgcaacaggtgaatgatggcgtggaacg

SEQ ID NO: 880311 - DNA, 75 bp, synthetic construct
  source 1..75: mol_type = other DNA
gcatccctgaaagcgttgcaacaacaacggaaagcgatcaggcggtaatggatgaggatatggctcttgaggttg

SEQ ID NO: 880312 - DNA, 75 bp, synthetic construct
  source 1..75: mol_type = other DNA
gaaattcagaatacaagatagtcatggtaatatcgttgaagatgataaatgtgtaggagttatcgtttcgcatcc

SEQ ID NO: 880313 - DNA, 75 bp, synthetic construct
  source 1..75: mol_type = other DNA
tgggtattattttggttgtgtattatccaatatatcatgttttgaaagcgacttatcaaacaccatcttttcaaa

SEQ ID NO: 880314 - DNA, 75 bp, synthetic construct
  source 1..75: mol_type = other DNA
accaaacgcctggaagaaggccagtttatctggtcatcggtacgtgaaggcaaggtatccattacccgctcgcag

SEQ ID NO: 880315 - DNA, 75 bp, synthetic construct
  source 1..75: mol_type = other DNA
aaaataactgtaccatctgtaccagaccatcacgaagccagacacagcaagggctggagagtggtacagttattt

SEQ ID NO: 880316 - DNA, 75 bp, synthetic construct
  source 1..75: mol_type = other DNA
aactggctagctcgccttctattatcgacaaccgatcgcgccagcatctgaatgacgtcggtcttactgcctggg

SEQ ID NO: 880317 - DNA, 75 bp, synthetic construct
  source 1..75: mol_type = other DNA
ttgaagccgcgatcaactccctgccgtctccggatgaaccggatgcagctgaacggtttggggaagttgagcgag

SEQ ID NO: 880318 - DNA, 75 bp, synthetic construct
  source 1..75: mol_type = other DNA
tactgggcgcgcttgtactgcccagaagtcatccttggcgtctacagcccagatgaagttgaaccgcgcacagag

SEQ ID NO: 880319 - DNA, 75 bp, synthetic construct
  source 1..75: mol_type = other DNA
ggtacgcggttgggaaagtgctgatgaacaaggactgtcggtacgggtaggtgccgttattcgcggtgaaagtga

SEQ ID NO: 880320 - DNA, 75 bp, synthetic construct
  source 1..75: mol_type = other DNA
gttgagcggtggtatcgcttctgcaatggcaatgaccggtctgccgcaggcttatacaccgggtgccagcatggc

SEQ ID NO: 880321 - DNA, 75 bp, synthetic construct
  source 1..75: mol_type = other DNA
tggatgaaatcgcagagcgcacatgcggcctgcaagatggaatgggctgggccatcgaccagaccagcagcgggc

SEQ ID NO: 880322 - DNA, 75 bp, synthetic construct
  source 1..75: mol_type = other DNA
ttcgagcagcttggagccgatgatcaatcgatcctgctggcattgactgctcagcttggcatagagcgtcttgta

SEQ ID NO: 880323 - DNA, 75 bp, synthetic construct
  source 1..75: mol_type = other DNA
tcgtgtgggtgatatgtacacatcaagcgatatttttgattctgttcgcttcagcggtgtgcggttgtttcgtga

SEQ ID NO: 880324 - DNA, 75 bp, synthetic construct
  source 1..75: mol_type = other DNA
ttaaatttattggggtggcaactgcattctgatgccagtttcagtaaaacaaataacaatccaggggtgtggaaa

SEQ ID NO: 880325 - DNA, 75 bp, synthetic construct
  source 1..75: mol_type = other DNA
tgcgccgctggcgtctgatccttggagaagatgccgacaatgcctgtaacgtggcgctggatgccagagagtccg

SEQ ID NO: 880326 - DNA, 75 bp, synthetic construct
  source 1..75: mol_type = other DNA
gcgagcagcagcgggcacttacaccaaaggccagccggttgcagtagccaacggtcagatcactgcggttgtaga

SEQ ID NO: 880327 - DNA, 75 bp, synthetic construct
  source 1..75: mol_type = other DNA
tgtgacttgggttcgccagccaccggaagagggcattacggatatggcgtattttcccttttacctgtatgccat

SEQ ID NO: 880328 - DNA, 75 bp, synthetic construct
  source 1..75: mol_type = other DNA
tggtctgcaggaaaaaatgtcgtttttcagtattgttcattggctgggaagtccagtatctgtgcagttttgagc

SEQ ID NO: 880329 - DNA, 75 bp, synthetic construct
  source 1..75: mol_type = other DNA
ccgagtgaagtttacaagcaagcgaatggaaagagagtggcaggaattctgcaaaaaacacgatctgaaaaacga

SEQ ID NO: 880330 - DNA, 75 bp, synthetic construct
  source 1..75: mol_type = other DNA
tgggatcgttcgataagattatcgcggggagcgatctttcccgggtaaaaggtgatgaaatcaccctgggcagcg

SEQ ID NO: 880331 - DNA, 75 bp, synthetic construct
  source 1..75: mol_type = other DNA
ccgcggcgtttagcgctaagctgcgtcagtttatcgaacgcaatcatttgccgctggtggtcaaagactggcgtg

SEQ ID NO: 880332 - DNA, 75 bp, synthetic construct
  source 1..75: mol_type = other DNA
ccttcttggtatattaataccactaaatcctattatacttctatacggggaacacatattaccactaccttcgtt

SEQ ID NO: 880333 - DNA, 75 bp, synthetic construct
  source 1..75: mol_type = other DNA
atgcaaaacgcctacaggctcaacgtaatctggaagctgctcttgctcaagttggggaagatggttttcaggtac

SEQ ID NO: 880334 - DNA, 75 bp, synthetic construct
  source 1..75: mol_type = other DNA
acagtgtatatgatgccgccaatcaaaagccacatgaggcgggattatttgaggatcttaaccaacgtataaagg

SEQ ID NO: 880335 - DNA, 75 bp, synthetic construct
  source 1..75: mol_type = other DNA
ttattgggattgatacaaggacaccgacgacttttttagagcagtttaatgctgtaaaagataaaaagaaggcat

SEQ ID NO: 880336 - DNA, 75 bp, synthetic construct
  source 1..75: mol_type = other DNA
atgacccctgcatttgcttcctggaatgaatttttcgcaatgggcggttacgccttttttgtctggctggcggtg

SEQ ID NO: 880337 - DNA, 75 bp, synthetic construct
  source 1..75: mol_type = other DNA
gactcaattcgatcaataaccagcgtttcaaaagtgaggtatgaaaataaaaaaattttaaaatggctatttcag

SEQ ID NO: 880338 - DNA, 75 bp, synthetic construct
  source 1..75: mol_type = other DNA
atattttacgtgactatctagtcgttgaacacacagaaaaagcttttatggatacaatttttaaaaacataattt

SEQ ID NO: 880339 - DNA, 75 bp, synthetic construct
  source 1..75: mol_type = other DNA
caattgatagcctcttgtactgctggcttcgactcaattcctgaatggatggctccatccttcaatgttgcagct

SEQ ID NO: 880340 - DNA, 75 bp, synthetic construct
  source 1..75: mol_type = other DNA
ttgagcaggccgtcatcggcgggatcatgctcgcagcgggccgcacagacggcgttgacatggcgactgacgcga

SEQ ID NO: 880341 - DNA, 75 bp, synthetic construct
  source 1..75: mol_type = other DNA
gacgttcctcaggcatgggtaatgaaaaattaccaaaactatgttgatccatcgttatgggaaaatggcattaat

SEQ ID NO: 880342 - DNA, 75 bp, synthetic construct
  source 1..75: mol_type = other DNA
cagttgctccaggagtaaaaattggccttggcgagcatgaaactgggtatttttctacgcatccttttttctttg

SEQ ID NO: 880343 - DNA, 75 bp, synthetic construct
  source 1..75: mol_type = other DNA
cccggaccagaaaggtttcactcgcgaagagtacgacagcatcgccgacgaatacctggctaaacaggccgcgcg

SEQ ID NO: 880344 - DNA, 75 bp, synthetic construct
  source 1..75: mol_type = other DNA
ttgtgatgatgacctgacgccaatgattggcgaatggaaagggtggcgacattgtgtcgtctaccgcccgggcca

SEQ ID NO: 880345 - DNA, 75 bp, synthetic construct
  source 1..75: mol_type = other DNA
cggcgatatcgtccgtggttctgatctggtggtaaccgctattgccgaaggtcgtaaggcggcagatgggatcat

SEQ ID NO: 880346 - DNA, 75 bp, synthetic construct
  source 1..75: mol_type = other DNA
tactatgacccgttgcagggaaggtatatcacccaggatccgatagggctgagaggtgaatggaatctgtataaa

SEQ ID NO: 880347 - DNA, 75 bp, synthetic construct
  source 1..75: mol_type = other DNA
ctggtcagtcagagggatgcgcaggggcgggagacccgttatgagtacagcgccgcaggcgacctgacagcaacg

SEQ ID NO: 880348 - DNA, 75 bp, synthetic construct
  source 1..75: mol_type = other DNA
gaaaccagtgcgcagcaccttcaacagtcactccgtctgccggggcagcagtatgatgaggagtcggggctgtac

SEQ ID NO: 880349 - DNA, 75 bp, synthetic construct
  source 1..75: mol_type = other DNA
caattgtcgcagaagccacgcgtcgtctgcgcccgaatgcgaaaatcctcaacatctgtgacatgccaatcggta

SEQ ID NO: 880350 - DNA, 75 bp, synthetic construct
  source 1..75: mol_type = other DNA
acaattataaaggtttaaataagctgtccctccccacctcaagtaaatttacctttagccataaaggtaacgtcc

SEQ ID NO: 880351 - DNA, 75 bp, synthetic construct
  source 1..75: mol_type = other DNA
ctcggctttacgcagcagtcattctggaatgacggccgtttaaggtggctgcagctgggcacgaacaaatacggt

SEQ ID NO: 880352 - DNA, 75 bp, synthetic construct
  source 1..75: mol_type = other DNA
cattcagggcagaactgagtgcgaacccggcagaaacggttgttgagggaccgtttagtaaagacgtaatcctga

SEQ ID NO: 880353 - DNA, 75 bp, synthetic construct
  source 1..75: mol_type = other DNA
gatataggtaatggtctgctattgaagatatttcataacgatggaacagcaacggaatttaaccgcttctcacaa

SEQ ID NO: 880354 - DNA, 75 bp, synthetic construct
  source 1..75: mol_type = other DNA
ggccgtcgccgcgcggagatcgtggctggttccgaacatatcgttccggcggatgcagtaatcatggcgttcggt

SEQ ID NO: 880355 - DNA, 75 bp, synthetic construct
  source 1..75: mol_type = other DNA
atcctaatagctcaataaccggtgaaactacgataccagtagaaacttacacacctgatgattcttttttttggg

SEQ ID NO: 880356 - DNA, 75 bp, synthetic construct
  source 1..75: mol_type = other DNA
cagatggccgcgcaactggaggcggaatacatcccggagaggaaacttcatctttaccactgtgaccaccgtggg

SEQ ID NO: 880357 - DNA, 75 bp, synthetic construct
  source 1..75: mol_type = other DNA
cggtttcacgtaacgcagaaaacgtgctgctaatacaggatgcgccagaactggcggcaatgtaccagggcgaat

SEQ ID NO: 880358 - DNA, 75 bp, synthetic construct
  source 1..75: mol_type = other DNA
tgggctgcaagatcgcaaacagatgcgcgtgcgctactacggcctgaaccactggtggtcggcgatatcccgcag

SEQ ID NO: 880359 - DNA, 75 bp, synthetic construct
  source 1..75: mol_type = other DNA
atagcacaactgtaacgggcgctgccgcgtcatccaccgatactgtggccgccgtgcacacctcaggaacgcaag

SEQ ID NO: 880360 - DNA, 75 bp, synthetic construct
  source 1..75: mol_type = other DNA
gatcgtctgtgcgaaggttcctgtaccctgaacgatgagtttggcgcagtgaccatcggcaatattgagcgttat

SEQ ID NO: 880361 - DNA, 75 bp, synthetic construct
  source 1..75: mol_type = other DNA
acctttccccaattacccataatcagatcccagttattaccacagaactattggcgcacctctatggcgcggatg

SEQ ID NO: 880362 - DNA, 75 bp, synthetic construct
  source 1..75: mol_type = other DNA
aaatcgcccgtgattatagccccgtagggccgctgatccgcggcagtggttttgcccgtgatttgcgctttgatc

SEQ ID NO: 880363 - DNA, 75 bp, synthetic construct
  source 1..75: mol_type = other DNA
gcccgatgactggccggaagatatgcatccgctgcgcaaagatgcgatggattatcgactgcgccctgaaccgac

SEQ ID NO: 880364 - DNA, 75 bp, synthetic construct
  source 1..75: mol_type = other DNA
tcgtcatcgccgaaggtctggctaccaccttaagcgcctggcagctacagcacgacgcgatggccgtgatggcag

SEQ ID NO: 880365 - DNA, 75 bp, synthetic construct
  source 1..75: mol_type = other DNA
gcccaatattcgcctgacggataagcagattctgatagaaacggtttcaggtgaaaaaatggaaatgtgtaacgg

SEQ ID NO: 880366 - DNA, 75 bp, synthetic construct
  source 1..75: mol_type = other DNA
gtcgcagaaggtgatgtgagcacacctgttgtggtgaagccgtcggatggagaaggcacagtaatcagcgccacc

SEQ ID NO: 880367 - DNA, 75 bp, synthetic construct
  source 1..75: mol_type = other DNA
agataatatatcatcaatgtttaaaatattcttccttaagaacagacctgaaaggatgagaattaatggaaatat

SEQ ID NO: 880368 - DNA, 75 bp, synthetic construct
  source 1..75: mol_type = other DNA
ggcaacccatactgcgagtggaaatgcccggtacacaactacatcccgaactggctgaagctcgccaatgagggg

SEQ ID NO: 880369 - DNA, 75 bp, synthetic construct
  source 1..75: mol_type = other DNA
atccccctatgtctatccatttgtgctgggattcagtgattgataaaaaagtgtatgaaacctggataacgctgg

SEQ ID NO: 880370 - DNA, 75 bp, synthetic construct
  source 1..75: mol_type = other DNA
atccccctatgtctatccatttttgctgggaatcagtgattgataaaaaagtgtatgaaacctggataacgctgg

SEQ ID NO: 880371 - DNA, 75 bp, synthetic construct
  source 1..75: mol_type = other DNA
ataccggaatacacccgggagcgatgataaaccgcgctcaagctaaagcggcgccagaccacgaaaagatccgcg

SEQ ID NO: 880372 - DNA, 75 bp, synthetic construct
  source 1..75: mol_type = other DNA
atgcattcacttgcgtatcaacacaataccggaatacacccgggagcgatgataaaccgcgctcaagctaaagcg

SEQ ID NO: 880373 - DNA, 75 bp, synthetic construct
  source 1..75: mol_type = other DNA
ctgaatgtctataacgcgttgccgacgctgtttctcagtaacgatcacaccggcagcagcgagctgtgcacgctg

SEQ ID NO: 880374 - DNA, 75 bp, synthetic construct
  source 1..75: mol_type = other DNA
ttttctttcttcttattggcgttggtgtcattgctcgtaaagtgggagttattactccaggattttctgttgtcc

SEQ ID NO: 880375 - DNA, 75 bp, synthetic construct
  source 1..75: mol_type = other DNA
attgggtattgtcaaacctgggggctatcccagcacacacaagagtttgatattctctttgacgacaaggaaaac

SEQ ID NO: 880376 - DNA, 75 bp, synthetic construct
  source 1..75: mol_type = other DNA
cgagaacgtgcgccagctgacaccggcaatcatggccgttcttccgctggagtatcgtcatcgacttcttccgga

SEQ ID NO: 880377 - DNA, 75 bp, synthetic construct
  source 1..75: mol_type = other DNA
gccggagcggcaatggcgctctcgtcgattaccgtagtgagtaacgccaaccggttgctgcggtttaaaccgaag

SEQ ID NO: 880378 - DNA, 75 bp, synthetic construct
  source 1..75: mol_type = other DNA
gctactcgcctgggtattgtggcgaatactgcgtattatcagccgtcaccgtttgaatttgaagcagaagaaata

SEQ ID NO: 880379 - DNA, 75 bp, synthetic construct
  source 1..75: mol_type = other DNA
gatcacctttacctacctgggactgaaagtgaatgaacacgctgcggttcacttcgcaggcacccccagccgtaa

SEQ ID NO: 880380 - DNA, 75 bp, synthetic construct
  source 1..75: mol_type = other DNA
aatgggtggcagacagagtgcagtatattcgcggtttaaagtcgccgaatgaacaacagcgcctgatggtattgc

SEQ ID NO: 880381 - DNA, 75 bp, synthetic construct
  source 1..75: mol_type = other DNA
gcatgttacgcctggctctatcgtcatgaccgacactggctgatggttgcgaaccaggtcaggcagcgccgacag

SEQ ID NO: 880382 - DNA, 75 bp, synthetic construct
  source 1..75: mol_type = other DNA
gtttcatccagcctctccactgtttctgccccgtgatcttcgcgtgagtcccgtgggcgaagaggctatcagact

SEQ ID NO: 880383 - DNA, 75 bp, synthetic construct
  source 1..75: mol_type = other DNA
cggaaattactttcagcggaaaaatcgctctcgagcgagggctggatgttcgttatatcactgagcgcgcagtat

SEQ ID NO: 880384 - DNA, 75 bp, synthetic construct
  source 1..75: mol_type = other DNA
atggtattgccaggctttgtacctttatttttctcaggcggcccgattggtgtattagggaaggtgcgaacaagt

SEQ ID NO: 880385 - DNA, 75 bp, synthetic construct
  source 1..75: mol_type = other DNA
atggttaattgttttttggttaggatttagttggaccacgtcgattattatcgccggggtattaacgggtatatt

SEQ ID NO: 880386 - DNA, 75 bp, synthetic construct
  source 1..75: mol_type = other DNA
atgtgctggacaccagcgcagacacccagccgctgtatgacctggtgggtttcaagccacagacgtcagtgaagg

SEQ ID NO: 880387 - DNA, 75 bp, synthetic construct
  source 1..75: mol_type = other DNA
gagttatgagttattccctaatgtccatgaagatggtggtattggataccaattcctgtacgaaggcgatgagct

SEQ ID NO: 880388 - DNA, 75 bp, synthetic construct
  source 1..75: mol_type = other DNA
tatggattgaactggaaggcgttgaatatgcattcccggatccacaaacacaaaacgaaacgcaacaagcaggat

SEQ ID NO: 880389 - DNA, 75 bp, synthetic construct
  source 1..75: mol_type = other DNA
ccgctgtatgaatcacgcctgaagggaaagctgcacgttatcagcaagcgttacactcagcgcattgagcgacat

SEQ ID NO: 880390 - DNA, 75 bp, synthetic construct
  source 1..75: mol_type = other DNA
tgtgctgacggggcatccgcaggcgaacctgaaccgggaatggcaggtggtggcgagcgatcttcacggcgaaca

SEQ ID NO: 880391 - DNA, 75 bp, synthetic construct
  source 1..75: mol_type = other DNA
tctacaaaggtgatacgttacgcatctatacaagtagtttgttgatcgaagaagtaggtacggaaaacgacaact

SEQ ID NO: 880392 - DNA, 75 bp, synthetic construct
  source 1..75: mol_type = other DNA
gtgccgggacggcggggcgcggggacggcgctggagaaccagtttgtggtaatcccggcagaccggacgtggcgg

SEQ ID NO: 880393 - DNA, 75 bp, synthetic construct
  source 1..75: mol_type = other DNA
ccggcgcacggggtcgcgaagaagccggtttagcgcaatccgaaagtgcgcacaaaacgcgagatgtgtaccaaa

SEQ ID NO: 880394 - DNA, 75 bp, synthetic construct
  source 1..75: mol_type = other DNA
ccgtgtttcgactttctccggagattatatccgcgtaactgacaacaaggggaaaacgcacgatgtgctgaccgg

SEQ ID NO: 880395 - DNA, 75 bp, synthetic construct
  source 1..75: mol_type = other DNA
atgctcatcacgaagctggaaaacctgtccatctactacatggatgacagccatcgccgcgtgattgaggaaaac

SEQ ID NO: 880396 - DNA, 75 bp, synthetic construct
  source 1..75: mol_type = other DNA
gagggggaagatttttggccgaaacgctatgccatctggggacgtctggttgcccaccaaccggggcagattggc

SEQ ID NO: 880397 - DNA, 75 bp, synthetic construct
  source 1..75: mol_type = other DNA
aagttattatctatcaacaacagaatgagcaattatatccagcacaggcgttgttcgttcatatgatgataaata

SEQ ID NO: 880398 - DNA, 75 bp, synthetic construct
  source 1..75: mol_type = other DNA
atgctgcgttcgccgtagaacaacagaacggcatcgacgatctgcgcctcgcaatgctgcaggctcagctggcac

SEQ ID NO: 880399 - DNA, 75 bp, synthetic construct
  source 1..75: mol_type = other DNA
ccaggtgatctccgctgaagccctgaaaacctttgcttccagcgtggaaggcggtaagcgcatcagcatcccggt

SEQ ID NO: 880400 - DNA, 75 bp, synthetic construct
  source 1..75: mol_type = other DNA
attaagccgtccgacattccgaccctgaaagattacaccgcccgcctggtggatcagaaatggctgcgtctcgcg

SEQ ID NO: 880401 - DNA, 75 bp, synthetic construct
  source 1..75: mol_type = other DNA
tcacaaacgaaatcttccgcgttccggtgcgccgcaagcgtaagccagcgattaagccgtccgacattccgaccc

SEQ ID NO: 880402 - DNA, 75 bp, synthetic construct
  source 1..75: mol_type = other DNA
ggctcggggcgatgttttctggtaaagagtaccagatactgcttcctggtgaaattcacattaaagaaagtggta

SEQ ID NO: 880403 - DNA, 75 bp, synthetic construct
  source 1..75: mol_type = other DNA
ggaaggtttcaccactgacggcattgccacaaaaatccgcattgatgccggtgtggcaccgctagactggcgtgg

SEQ ID NO: 880404 - DNA, 75 bp, synthetic construct
  source 1..75: mol_type = other DNA
agaaatcgctgccggaaaaatgatccacctgaagttcactcgtcgtctgcatcagacgcgaggctcatccatgtt

SEQ ID NO: 880405 - DNA, 75 bp, synthetic construct
  source 1..75: mol_type = other DNA
acagcagtccgactgattattaccttgctgcagcaaaaggtcgcgacaccattgaggtggcatggctggacggca

SEQ ID NO: 880406 - DNA, 75 bp, synthetic construct
  source 1..75: mol_type = other DNA
cggaaggcattgtgttttcctgatgcatgttcacctggtcttcgttactaaataccgacgtcagatttttgacta

SEQ ID NO: 880407 - DNA, 75 bp, synthetic construct
  source 1..75: mol_type = other DNA
atgagagcgtcacatctatatagcgaagttcatgaatttagtaacaaacattttcatctaaatagttgggtaaag

SEQ ID NO: 880408 - DNA, 75 bp, synthetic construct
  source 1..75: mol_type = other DNA
taccaggcagtgaatacaaatacgcgtccacgtccgatcgcagcgagccaattgcactggcaacttatggcgaac

SEQ ID NO: 880409 - DNA, 75 bp, synthetic construct
  source 1..75: mol_type = other DNA
ggatggatatcaatgcctggctggtttcccgctcactgtggaatgcggatcagtctaaggatgtagagacgcttt

SEQ ID NO: 880410 - DNA, 75 bp, synthetic construct
  source 1..75: mol_type = other DNA
gcagaaactcaactcctgttttagatgatattgagaaggatataataagaatttccagaacattagccatgctac

SEQ ID NO: 880411 - DNA, 75 bp, synthetic construct
  source 1..75: mol_type = other DNA
agttacgctgcagtcgtgactgatgaagaggaaagtaaacagtttgtagattacataatacaaaagtactcgatc

SEQ ID NO: 880412 - DNA, 75 bp, synthetic construct
  source 1..75: mol_type = other DNA
acttctgatttcatcactgatagattcaatatacactaatatttatttggtagttatagggaagtcctttagcgc

SEQ ID NO: 880413 - DNA, 75 bp, synthetic construct
  source 1..75: mol_type = other DNA
gcgaattcgtcgcagccctgacaggtcacgaacgcattgaggcgaaagcctgcgtactcgccgccggcgggtttg

SEQ ID NO: 880414 - DNA, 75 bp, synthetic construct
  source 1..75: mol_type = other DNA
ggtggtaaagccctcgtgaacgcctattaccgcagtgcagaaaagctgggggtacagattcgctacaacacgccg

SEQ ID NO: 880415 - DNA, 75 bp, synthetic construct
  source 1..75: mol_type = other DNA
tggcgcgcttggtgattcgaacctcttcccagtgtcgtgactggatgcgtcagcatggggttaattttcagcctc

SEQ ID NO: 880416 - DNA, 75 bp, synthetic construct
  source 1..75: mol_type = other DNA
gatgagcatccgccagttaaagccactttaacatttagaggagcccctgtacttggtacatatggcatagctgca

SEQ ID NO: 880417 - DNA, 75 bp, synthetic construct
  source 1..75: mol_type = other DNA
agggatgcttggtgttacagaaatgcttggaagtattgtatttttgctttctgatgcgtcaaaatatgtaacggg

SEQ ID NO: 880418 - DNA, 75 bp, synthetic construct
  source 1..75: mol_type = other DNA
ttatccctccagtgcagagaaaatcggccagttttctctgcctgcagtccgcatgccgtatcgggccttgggttc

SEQ ID NO: 880419 - DNA, 75 bp, synthetic construct
  source 1..75: mol_type = other DNA
ttcaacgaatacaattaagtgtcattttggatttcaaaactcaagctatatcgtcattatccagtgtcataatct

SEQ ID NO: 880420 - DNA, 75 bp, synthetic construct
  source 1..75: mol_type = other DNA
tcaacatctcagcaatgataacattcagcaggaaaaaattattgagaacgttatatttttgggaactcttcctaa

SEQ ID NO: 880421 - DNA, 75 bp, synthetic construct
  source 1..75: mol_type = other DNA
atgctcctcttgaattcgatgaagaaaccccagtagcaaaagctattaataaggccagaaaaatatttcaggcaa

SEQ ID NO: 880422 - DNA, 75 bp, synthetic construct
  source 1..75: mol_type = other DNA
attataaggctctgccgaatgatgatgacattaatgtcgacgttcagcaaagtgctaatgatgatcaaaatgtcg

SEQ ID NO: 880423 - DNA, 75 bp, synthetic construct
  source 1..75: mol_type = other DNA
tggcgggcaatgttcgtcatcatcggcgtggcggggattcctttcctcgcggcggcggtcgggatgtgggttaac

SEQ ID NO: 880424 - DNA, 75 bp, synthetic construct
  source 1..75: mol_type = other DNA
aatcgatcaccgactggtatgcgcaaaaagaacgcggcacggcgctggggatttttaactcatctaccgttatcg

SEQ ID NO: 880425 - DNA, 75 bp, synthetic construct
  source 1..75: mol_type = other DNA
catccttcccgtgagttttgtgtccagtacggcgaaaccgattacgatttcctgtgccggatggcggcggaggaa

SEQ ID NO: 880426 - DNA, 75 bp, synthetic construct
  source 1..75: mol_type = other DNA
aaccttaaaaacgaaacaccacaaagcctccagtcaaagatcattaaaaacaaaacaactaagacggaattactc

SEQ ID NO: 880427 - DNA, 75 bp, synthetic construct
  source 1..75: mol_type = other DNA
atgaaccgatttataaagtcctctttatttattattgtcttcctgctttctgggtgttcaacatcagggaaccag

SEQ ID NO: 880428 - DNA, 75 bp, synthetic construct
  source 1..75: mol_type = other DNA
cgaagcggcagctcgtgctgtgtacctgaaagctaaagccagataccacccctcaacgcctgacgatttattgca

SEQ ID NO: 880429 - DNA, 75 bp, synthetic construct
  source 1..75: mol_type = other DNA
aagtattctttctttatggaacagagaaatactgtcctggatgggctgaaccctgcagggcgttcgtttaccgtc

SEQ ID NO: 880430 - DNA, 75 bp, synthetic construct
  source 1..75: mol_type = other DNA
tgagcatcttgaactctgctgtggtaaggcaaggctggtgctgacgaaggacggaagcatatttctcaatggtac

SEQ ID NO: 880431 - DNA, 75 bp, synthetic construct
  source 1..75: mol_type = other DNA
atgatcatcgaaaaagtcatgaacaataattgtgtacaggcatcggtgaacggacaggaggttatcatttctggg

SEQ ID NO: 880432 - DNA, 75 bp, synthetic construct
  source 1..75: mol_type = other DNA
cgaagttagctcatcaatattaccatcgcacataacatgtaatggtgttggtattaataaaatagaaacaagcta

SEQ ID NO: 880433 - DNA, 75 bp, synthetic construct
  source 1..75: mol_type = other DNA
cccccgggattccgctacggctctgccatcgcaatccccccgtttatctccggacagccagattcccgattattt

SEQ ID NO: 880434 - DNA, 75 bp, synthetic construct
  source 1..75: mol_type = other DNA
ggaatgggaaaataacttattctgtttccggtgaatctgagttcgctaaaaaatttcagggtaaagctttgcctt

SEQ ID NO: 880435 - DNA, 75 bp, synthetic construct
  source 1..75: mol_type = other DNA
actgttgtggatggaatacaaggcacaggcgggggacaaagcgatgggatactcgcacttctgccgttgctaccg

SEQ ID NO: 880436 - DNA, 75 bp, synthetic construct
  source 1..75: mol_type = other DNA
tttcgtccacacagcatggaatggctggcaaaacacagcgttgagctggattcgcaagggcgtattatcgctcca

SEQ ID NO: 880437 - DNA, 75 bp, synthetic construct
  source 1..75: mol_type = other DNA
ctaaattaccctcatctacacgggagcggattttagcaacggaaagtaaaactccagtgctaaccgaagtaacaa

SEQ ID NO: 880438 - DNA, 75 bp, synthetic construct
  source 1..75: mol_type = other DNA
gtggagcaaggacttttaccagaaggggaaaagattacctccgttgacgttaaagactggataccaaagcgtcga

SEQ ID NO: 880439 - DNA, 75 bp, synthetic construct
  source 1..75: mol_type = other DNA
ttgtgaattcactccatgcgtataatataggaagttgtgttttaaattggtgtgttaatccagaaactgataaaa

SEQ ID NO: 880440 - DNA, 75 bp, synthetic construct
  source 1..75: mol_type = other DNA
ttatccgcgtttttttgccagtctggcaggctttgttacggcaggtgtgatcttactcagcaatagtggacacgc

SEQ ID NO: 880441 - DNA, 75 bp, synthetic construct
  source 1..75: mol_type = other DNA
agcaagtcggttatttacgtaaccatcatggtgtaaaagacccagagattgttcgtcaacttgaacatacaatgt

SEQ ID NO: 880442 - DNA, 75 bp, synthetic construct
  source 1..75: mol_type = other DNA
tgcaatgtaacccacaaattgttaacggtgcgttgggcaggttaggcgcggcccggattgcgtttacccggctgt

SEQ ID NO: 880443 - DNA, 75 bp, synthetic construct
  source 1..75: mol_type = other DNA
aaagcttccgtcggttgtaacggcatcgatgttttcctcggttccttcagtatgattaaacaacagaccgagaaa

SEQ ID NO: 880444 - DNA, 75 bp, synthetic construct
  source 1..75: mol_type = other DNA
acgcgctcaaatcttgccattaacactgtaaattgcaatcgaagtcattgggattgtaacaaagttgccagaaga

SEQ ID NO: 880445 - DNA, 75 bp, synthetic construct
  source 1..75: mol_type = other DNA
gccgggagtaccgttacagcgacacgggaaggctgacgggcgtccacaccacggcggcgaacctggatatcgata

SEQ ID NO: 880446 - DNA, 75 bp, synthetic construct
  source 1..75: mol_type = other DNA
cttttatgccgcccgtccgatggcagaaccactggtactcagcagggcgcaattgcactcaggtctgccgacaac

SEQ ID NO: 880447 - DNA, 75 bp, synthetic construct
  source 1..75: mol_type = other DNA
atctgccggagtcctttgagatcccctggaatccgaacacccgtaccgaggtgagcaccctctgcatcagccagt

SEQ ID NO: 880448 - DNA, 75 bp, synthetic construct
  source 1..75: mol_type = other DNA
atggaagattatatccgcgaaaaatcgcagaaaagtcgtgataaaaaggaccgtgaagataacgtttcccgttat

SEQ ID NO: 880449 - DNA, 75 bp, synthetic construct
  source 1..75: mol_type = other DNA
cgcgccgaaagagattgttggcctctgtggcggcgtctttaacgtctttggcaatgttgcctccattgtcactcc

SEQ ID NO: 880450 - DNA, 75 bp, synthetic construct
  source 1..75: mol_type = other DNA
tacccgtcggctgggagaccatattcatgaaaaccggcacagcaaccactatgaggatgagatgtttgtgattaa

SEQ ID NO: 880451 - DNA, 75 bp, synthetic construct
  source 1..75: mol_type = other DNA
caaaataaacttactttagctgatgattggtttaatttatcaaagtttaatatcataaacaatatatattatatt

SEQ ID NO: 880452 - DNA, 75 bp, synthetic construct
  source 1..75: mol_type = other DNA
gacgcattgatggggatttctgataacccactgatcatattgctgctgattaatatcgtcttattaattgtcggc

SEQ ID NO: 880453 - DNA, 75 bp, synthetic construct
  source 1..75: mol_type = other DNA
cgcagaaaagtcgtgataaaaaggaccgtgaagataacgtttcccgttataaaggattaccttcccgtaacctcg

SEQ ID NO: 880454 - DNA, 75 bp, synthetic construct
  source 1..75: mol_type = other DNA
ctgacggaaagcatcggaagtaaaactgccccggactgggccatgaaacaggattttcgctgtggctgctggctc

SEQ ID NO: 880455 - DNA, 75 bp, synthetic construct
  source 1..75: mol_type = other DNA
gtctcgcagtccaaccccggcgatgcggttccgctcaagaaccctgcctccccagatggctgggctgtagttgac

SEQ ID NO: 880456 - DNA, 75 bp, synthetic construct
  source 1..75: mol_type = other DNA
tttattaaggctggtgacgatattaattctggcgatacagaaaactgtccatctgtagttatttctttaaaacag

SEQ ID NO: 880457 - DNA, 75 bp, synthetic construct
  source 1..75: mol_type = other DNA
taaccgatcacactgatgtgatttgctccaccagcattgagcgcattgttaccggacgtaatgcagcgttgggcc

SEQ ID NO: 880458 - DNA, 75 bp, synthetic construct
  source 1..75: mol_type = other DNA
gaagccaacatcctgagtacctttgaacaactccaccacaataagcaggacgttttcgaacgtgggattatcaat

SEQ ID NO: 880459 - DNA, 75 bp, synthetic construct
  source 1..75: mol_type = other DNA
ggaactgctcatatcacctttaagcggcaagaactggtcgataagctgaatgacatcatcgcacgtcactaccct

SEQ ID NO: 880460 - DNA, 75 bp, synthetic construct
  source 1..75: mol_type = other DNA
gactgtagatggcagccaaaaagtagatgaacgaggtacaacaaataacactcatattatcaaccatggccggca

SEQ ID NO: 880461 - DNA, 75 bp, synthetic construct
  source 1..75: mol_type = other DNA
gtttcgctctgctcgcttggagctatgatgataattgctctatgtggcttggttatggggtctgacgctcagtgg

SEQ ID NO: 880462 - DNA, 75 bp, synthetic construct
  source 1..75: mol_type = other DNA
aatgaaaccatcaccactccccgtctgagcttccgttttcttaacgtcagcccgacggtggagcggcaattacag

SEQ ID NO: 880463 - DNA, 75 bp, synthetic construct
  source 1..75: mol_type = other DNA
agcctgccgaattacaagaaggcatgcgcttcgctcagattgaagtcaacatggggcaatggggtgtttttcact

SEQ ID NO: 880464 - DNA, 75 bp, synthetic construct
  source 1..75: mol_type = other DNA
aggaggtgattgtggacttcctcaacggcgacccggaccagccgattattatggggcgtacctaccaccatgaaa

SEQ ID NO: 880465 - DNA, 75 bp, synthetic construct
  source 1..75: mol_type = other DNA
cggtgccaggacggcagggagcggggacggcgctggagaaccattttgcggtgatcccggcagacagaacatggc

SEQ ID NO: 880466 - DNA, 75 bp, synthetic construct
  source 1..75: mol_type = other DNA
gacgggtggtgagcgtggttttcccgtgcagacgctgaaaacggagatccagcatggcctgccagccttttttat

SEQ ID NO: 880467 - DNA, 75 bp, synthetic construct
  source 1..75: mol_type = other DNA
ttcccaacgataaaggcggcagcatctcagttagcttcagcactgcatttttcactggtcgatggtggaacattg

SEQ ID NO: 880468 - DNA, 75 bp, synthetic construct
  source 1..75: mol_type = other DNA
gaagcctttatgacccgctggattggatgggcgatgcagcaaaatgatggcgacgtattggttgtctgcggtggc

SEQ ID NO: 880469 - DNA, 75 bp, synthetic construct
  source 1..75: mol_type = other DNA
tccggttatcaggacatcacgcaaggaagtctggcgacgaacacaaccataaatggtggtcgacagtatgttgaa

SEQ ID NO: 880470 - DNA, 75 bp, synthetic construct
  source 1..75: mol_type = other DNA
gcaaaggtgaaatagatccacagtggcgtattgaaaccagtcatacccgtgaaatggcaccacgttcagcaaagg

SEQ ID NO: 880471 - DNA, 75 bp, synthetic construct
  source 1..75: mol_type = other DNA
ccgcgatattctcgccagtattagcgaagataaacgtatccaggtactccttatttcgtggtgcttcggtggttt

SEQ ID NO: 880472 - DNA, 75 bp, synthetic construct
  source 1..75: mol_type = other DNA
gtacagaatcttaaagcctcaatagactatggcgcactcaaaggattatggccgattgtcattgttatcctcggc

SEQ ID NO: 880473 - DNA, 75 bp, synthetic construct
  source 1..75: mol_type = other DNA
gcggttatgttgtgctggatatctccctgaagccaaagcagggtagtcaggttctgatccagcacggcggcggga

SEQ ID NO: 880474 - DNA, 75 bp, synthetic construct
  source 1..75: mol_type = other DNA
cagaaaatgtctggaatggcgaggccattctcgctgaaatcaaagcgatggggtataccgatgggcgctccatgc

SEQ ID NO: 880475 - DNA, 75 bp, synthetic construct
  source 1..75: mol_type = other DNA
agtgattattacgcacaaaatattggtgaatccagtctcagaacaattcatcttgcacaattacgtgatgttctt

SEQ ID NO: 880476 - DNA, 75 bp, synthetic construct
  source 1..75: mol_type = other DNA
ttctgatctctcacagcccttcatgtctgaaccgcgacgatatgaacatgcagaaagacgctattttcggcggca

SEQ ID NO: 880477 - DNA, 75 bp, synthetic construct
  source 1..75: mol_type = other DNA
aagctgattctgatgtacgccgccgcgcttatggctacgtcgtctggtgcgcgccgcatcaaatcacagggtgcg

SEQ ID NO: 880478 - DNA, 75 bp, synthetic construct
  source 1..75: mol_type = other DNA
ggctgaatattgcctgtaaacccggtgaacgttttcttttcttctacggcgatcggctcgaaaccaacgggctgg

SEQ ID NO: 880479 - DNA, 75 bp, synthetic construct
  source 1..75: mol_type = other DNA
aaaaaacacggttatcacgctcggtagcaagggctcgctcgcatttgatggcaaaaaattcattcattcgccagc

SEQ ID NO: 880480 - DNA, 75 bp, synthetic construct
  source 1..75: mol_type = other DNA
attccgcaacgtgaatttctggggctgtcttctgccaaccagcaggagctgcaacaggttatcagtcatttctgg

SEQ ID NO: 880481 - DNA, 75 bp, synthetic construct
  source 1..75: mol_type = other DNA
aacagtgcgtactcgcccattaccatcagtagcgaagatacgctggatgtctttggtgtggtgatccacgtcgtt

SEQ ID NO: 880482 - DNA, 75 bp, synthetic construct
  source 1..75: mol_type = other DNA
ctgcactgtaagcagaaacgcaagttcagggcgaccacaaactctgaccacaatctgccggttacgccgaatctg

SEQ ID NO: 880483 - DNA, 75 bp, synthetic construct
  source 1..75: mol_type = other DNA
attgattgcagtaagtcagtatcaaagatgactgaccaggaaaaaaaccagtgcggtaaatctggcgagtttaca

SEQ ID NO: 880484 - DNA, 75 bp, synthetic construct
  source 1..75: mol_type = other DNA
gagcgcggttttgtcggcatgataagacgcatctgcgtcgcatcaggcaccggtgcacaaccgccggatgcggcg

SEQ ID NO: 880485 - DNA, 75 bp, synthetic construct
  source 1..75: mol_type = other DNA
cgttgctacagctcatattgcggagaaatcggaccggctccggataaccttatcgccagagattttaaggcggag

SEQ ID NO: 880486 - DNA, 75 bp, synthetic construct
  source 1..75: mol_type = other DNA
atgacgcatattcggatcgaaaaaggaacggggggctggggcggcccgcttgagctggaaaccacgccgggcaaa

SEQ ID NO: 880487 - DNA, 75 bp, synthetic construct
  source 1..75: mol_type = other DNA
tttaatggaagcccacgccgaagaactggcgctgctggaaaccctcgacaccggtaaaccgattcgtcacagcct

SEQ ID NO: 880488 - DNA, 75 bp, synthetic construct
  source 1..75: mol_type = other DNA
aagcggtgctgaataaactcgccgatttaatggaagccaacgccgaagagctggcactgctggaaactctcgaca

SEQ ID NO: 880489 - DNA, 75 bp, synthetic construct
  source 1..75: mol_type = other DNA
ttgtggatgtagacccgaatgcgtccttaagccgcgaagagattttcggtccggtgctggtggtcacgcgtttca

SEQ ID NO: 880490 - DNA, 75 bp, synthetic construct
  source 1..75: mol_type = other DNA
agcaggtggtaaaagcgccaacatcgtttttgctgactgcccggatttgcaacaggcggcaagcgcgaccgccgc

SEQ ID NO: 880491 - DNA, 75 bp, synthetic construct
  source 1..75: mol_type = other DNA
taccggttcaacccgtaccgggaaacaactgctgaaagatgcgggcgacagcaacatgaaacgcgtctggctgga

SEQ ID NO: 880492 - DNA, 75 bp, synthetic construct
  source 1..75: mol_type = other DNA
gaagcggggcaggcgctgtcgcgccataacgatatcgacgccatcgcctttaccggttcaacccgcaccgggaaa

SEQ ID NO: 880493 - DNA, 75 bp, synthetic construct
  source 1..75: mol_type = other DNA
cgtggctggggaaatttaccacggtgaaacaggaatgcccgacctgcggtaatgaatcccctgaatatctgaaag

SEQ ID NO: 880494 - DNA, 75 bp, synthetic construct
  source 1..75: mol_type = other DNA
tttaccagccgcaaatcttcgcagaaacgggtgaactgtacggcatcgaagcccttgctcgctggcacgatcccc

SEQ ID NO: 880495 - DNA, 75 bp, synthetic construct
  source 1..75: mol_type = other DNA
gtggcagcacaggatcagggggaatttgagcagatctaccgccgtctgtaccacgttctgcataaactgcgcggc

SEQ ID NO: 880496 - DNA, 75 bp, synthetic construct
  source 1..75: mol_type = other DNA
attcgtctcgccgggctggcgaaagaggccggtctgccggatggtgtgctgaacgtggtgaccggttttggtcat

SEQ ID NO: 880497 - DNA, 75 bp, synthetic construct
  source 1..75: mol_type = other DNA
atgaaacctttgaaaccgttgatccggtcacccaggcaccgctggcgaaaattgcccgcggcaagagcgtcgata

SEQ ID NO: 880498 - DNA, 75 bp, synthetic construct
  source 1..75: mol_type = other DNA
tgttttccaacaggcatagtattctgcgtattccgctctattcgatcacggattggcatcgaagtccgatcagcg

SEQ ID NO: 880499 - DNA, 75 bp, synthetic construct
  source 1..75: mol_type = other DNA
ttcagttgtccaggccttccgaaatcaaccgactgaaggcgctggtcgcgaaactgcagcgtatgcagttcggta

SEQ ID NO: 880500 - DNA, 75 bp, synthetic construct
  source 1..75: mol_type = other DNA
tacgtcctgattcaggcagcagatactgatctggcatttgccaccagtataacctcgcagacgctggcggccggt

SEQ ID NO: 880501 - DNA, 75 bp, synthetic construct
  source 1..75: mol_type = other DNA
gcggcgatattcgctactcggtcaccggtaaagacagccctattgattcctatgtcctgattcaggcagccgata

SEQ ID NO: 880502 - DNA, 75 bp, synthetic construct
  source 1..75: mol_type = other DNA
gggggcgggtactctttggcatgacgcggcatcttatggataatgtagccgggcaatgtggcgcaacatggcaat

SEQ ID NO: 880503 - DNA, 75 bp, synthetic construct
  source 1..75: mol_type = other DNA
tgtatgtttagattcatgctacgattcttttatttctgacataagagctatttcctgtgggaatagtgatttttt

SEQ ID NO: 880504 - DNA, 75 bp, synthetic construct
  source 1..75: mol_type = other DNA
ctgcgggaatgtctacctcaatgttaatgaagcgaatgaaagattacgccaattccgtcggccatgaatcagtta

SEQ ID NO: 880505 - DNA, 75 bp, synthetic construct
  source 1..75: mol_type = other DNA
gatgccaatggaaacctgattgatgcgccaccaacctctcaacctgccagcattgcaactgacggtgtttataag

SEQ ID NO: 880506 - DNA, 75 bp, synthetic construct
  source 1..75: mol_type = other DNA
tgagagatatcttcttctgtcttgtaacagaagaacagaaaatcgggcttttgcgcctgaatattgcggagaaaa

SEQ ID NO: 880507 - DNA, 75 bp, synthetic construct
  source 1..75: mol_type = other DNA
atgccgccgtcgaactctctccggttgctggacgaaacgttctcggtatcagagacggaatcatcagcgaccagg

SEQ ID NO: 880508 - DNA, 75 bp, synthetic construct
  source 1..75: mol_type = other DNA
tgatcggggtgatgggcgctattttgctttcgtttggtgtatggatgatttatccgccaggaggcttaatcagtg

SEQ ID NO: 880509 - DNA, 75 bp, synthetic construct
  source 1..75: mol_type = other DNA
acgaagcgttcctctacgcgactaccatcaccacgcttgccgctggctataccgttgcggatctgcaccgggcga

SEQ ID NO: 880510 - DNA, 75 bp, synthetic construct
  source 1..75: mol_type = other DNA
gaaggacaacatcaccgattcctgggtgctgattcaggccatcagtaaccacgaagcgttcctctacgcgactac

SEQ ID NO: 880511 - DNA, 75 bp, synthetic construct
  source 1..75: mol_type = other DNA
atcgccagcacgactggatgagtctgaaagcgacggtaatctctacgttaacggtctaccaggcatgtcacagcc

SEQ ID NO: 880512 - DNA, 75 bp, synthetic construct
  source 1..75: mol_type = other DNA
tacaatataatttatggatatctgaaaatgttattgcatcattatcaacagttgagataactgaggggaacttcg

SEQ ID NO: 880513 - DNA, 75 bp, synthetic construct
  source 1..75: mol_type = other DNA
ttttatgaatacaaaccggatgactggtatcagcgttcggctggagataaagcgccaaaatggacgccaccctat

SEQ ID NO: 880514 - DNA, 75 bp, synthetic construct
  source 1..75: mol_type = other DNA
ttccgagccggaaaaacctgatgagccgcaggtcgtcattaatcaggacgacttaattgaaatgggcagtcaggg

SEQ ID NO: 880515 - DNA, 75 bp, synthetic construct
  source 1..75: mol_type = other DNA
aggtggaagcactgacggcgatggtgaatgagggcaaaccgttctgcgaaatctgtgcgaaagcaaaacaggccg

SEQ ID NO: 880516 - DNA, 75 bp, synthetic construct
  source 1..75: mol_type = other DNA
gccatcagaccaccatgacattaagcattggttacgcgatgaccattgagcacgcctctgcggaaaaattacaag

SEQ ID NO: 880517 - DNA, 66 bp, synthetic construct
  source 1..66: mol_type = other DNA
atgctggatagcaccgtcaagctaaattccgtactgaacggtcccctcgcccctttggggagaggg

SEQ ID NO: 880518 - DNA, 75 bp, synthetic construct
  source 1..75: mol_type = other DNA
taagcgattagccagttctttaaaaagcgtcaataaatcaagcaatctacctgataaggcgatggaatatctgaa

SEQ ID NO: 880519 - DNA, 75 bp, synthetic construct
  source 1..75: mol_type = other DNA
gacttcagcactccatacgccacctgtgccagcttgcgcatcatcgcgccgagaatcacctttcctttcttgcca

SEQ ID NO: 880520 - DNA, 75 bp, synthetic construct
  source 1..75: mol_type = other DNA
gtagatactgttatggcctgcaagttttttcctggtccggtttcccggattgcaggcatgccagacacagcgccg

SEQ ID NO: 880521 - DNA, 75 bp, synthetic construct
  source 1..75: mol_type = other DNA
gccttatccggcctacaaagtcgtataaattcaatatattgcagtttattggtagatactgttatggcctgcaag

SEQ ID NO: 880522 - DNA, 75 bp, synthetic construct
  source 1..75: mol_type = other DNA
agcatggccgggtgcgggtgaaatttttgtgggatcgttatcacaaacaggatgagaacagttcctgctggatca

SEQ ID NO: 880523 - DNA, 75 bp, synthetic construct
  source 1..75: mol_type = other DNA
cgctttacgctgaccgatcatccggctgacgatctgaaccgggaatggcaggtgatcgccagcgaactgcacggc

SEQ ID NO: 880524 - DNA, 75 bp, synthetic construct
  source 1..75: mol_type = other DNA
gtgcaacgcacaaccctttatggctacgcgaatatgcagacgtgacaggttgcgatatccacctgatgcaagaag

SEQ ID NO: 880525 - DNA, 75 bp, synthetic construct
  source 1..75: mol_type = other DNA
aatttggaacaaaaattgcagggtgcggaggatttattaacataactcaaaatgctaaaaaagtatatttctgcg

SEQ ID NO: 880526 - DNA, 75 bp, synthetic construct
  source 1..75: mol_type = other DNA
cagcagtaaaaaatagaaatgaaatctttcatataccattctctaaaaggcacttggtaaatgcccaaagatact

SEQ ID NO: 880527 - DNA, 75 bp, synthetic construct
  source 1..75: mol_type = other DNA
atccacttactgacttttacaagcttgaaattttagtcgatcgactattcaaacatttagtaattaaacaaaaaa

SEQ ID NO: 880528 - DNA, 75 bp, synthetic construct
  source 1..75: mol_type = other DNA
tgatcgtactaaagtcgaagaccttgatctcacctggacgttggtggcaaacggctaccgtattcggcaggcgaa

SEQ ID NO: 880529 - DNA, 75 bp, synthetic construct
  source 1..75: mol_type = other DNA
aatgcagggaatggtttaccgaactggatagctcattcccataccatatggaatgttgcaaatgcaaatgtgacg

SEQ ID NO: 880530 - DNA, 75 bp, synthetic construct
  source 1..75: mol_type = other DNA
tgaccgctgccaaaatggagcatgaaggccaccagcttaccccggtagaggttcgggagatggaacgtattattg

SEQ ID NO: 880531 - DNA, 75 bp, synthetic construct
  source 1..75: mol_type = other DNA
aacatcactatggcgaagaacgctatcgcccatgttcattgctgcgccaacgggcgcttctggagagcggttatg

SEQ ID NO: 880532 - DNA, 75 bp, synthetic construct
  source 1..75: mol_type = other DNA
atctgattggtcaggacgtcaattttgctgtcacctgttcggtgtttaacgctttctggcaggagcgtcgttttt

SEQ ID NO: 880533 - DNA, 75 bp, synthetic construct
  source 1..75: mol_type = other DNA
aatttgaggatggtaaagagccacctgttagcgccaatcttgatgttgctggtggcaggcttgtttcggttctat

SEQ ID NO: 880534 - DNA, 75 bp, synthetic construct
  source 1..75: mol_type = other DNA
atataacacaggcatcagaattcttttcttctgatgaatataaagattctggggtggaagaggctatactagatg

SEQ ID NO: 880535 - DNA, 75 bp, synthetic construct
  source 1..75: mol_type = other DNA
acaacgcagaaagcacgctggcttctgctatcagcgcaaccgacacgtcgctgatcgttagcgcaggaactggtg

SEQ ID NO: 880536 - DNA, 75 bp, synthetic construct
  source 1..75: mol_type = other DNA
agcagggcaaaacagtgctgcaaattgcagattacccaggaatgctgatttggcgaacggtagcaatgatcatca

SEQ ID NO: 880537 - DNA, 75 bp, synthetic construct
  source 1..75: mol_type = other DNA
tgatgtctcatatcgcggttcagtcaatgccccgtcagcatctgccactatgaacaatacctggtggcaactaac

SEQ ID NO: 880538 - DNA, 75 bp, synthetic construct
  source 1..75: mol_type = other DNA
gtctattatcatggtggctgttttgtcagtggtggttttgtaacccatgataatcagtttcgacagcttgctttc

SEQ ID NO: 880539 - DNA, 75 bp, synthetic construct
  source 1..75: mol_type = other DNA
aagcagcaggtaacgtttaaggctgatcgctttaaggtacatgaagccgctcaatcagccagcaataatgaagag

SEQ ID NO: 880540 - DNA, 75 bp, synthetic construct
  source 1..75: mol_type = other DNA
ttcacaccaccgcagcgaaccttgatatccgcatcccgtatgccacagacccggcaggtaaccgcctgcccgacc

SEQ ID NO: 880541 - DNA, 75 bp, synthetic construct
  source 1..75: mol_type = other DNA
caaaaaacagaagaaactgcatcaatttttgcagaaaaactatgtgaggcaaaagctatggtttcgcatagtcac

SEQ ID NO: 880542 - DNA, 75 bp, synthetic construct
  source 1..75: mol_type = other DNA
tgaccatcgccaaacttgagcacggaggccaccagcttacacaggcagatcaacgggagatagaacgctcagtta

SEQ ID NO: 880543 - DNA, 75 bp, synthetic construct
  source 1..75: mol_type = other DNA
cacagcggaatatgacccattacgcgatgaaggtgaggaactgttttcccgtatgattcaacaaggagtaaagtg

SEQ ID NO: 880544 - DNA, 75 bp, synthetic construct
  source 1..75: mol_type = other DNA
gatataatcagtctttcaataaaattgctgcaactgattcaggtgctataataaccaatacgtcaaccaaaaaat

SEQ ID NO: 880545 - DNA, 75 bp, synthetic construct
  source 1..75: mol_type = other DNA
gtgtggtatccgttaaaaaaaaatggacgcataactccatttaatgaggtttcttataagccagaaatgttaaat

SEQ ID NO: 880546 - DNA, 75 bp, synthetic construct
  source 1..75: mol_type = other DNA
tacaatcgttaaatatgacgattttcaggcaaaaaattgtccaacggttgtccaacggttgtccaacgcaaacac

SEQ ID NO: 880547 - DNA, 75 bp, synthetic construct
  source 1..75: mol_type = other DNA
gcgcggtggtaaggcagcacagccggacggccatacgctggcgcggctgtggggggcgctgcgccggatatccgg

SEQ ID NO: 880548 - DNA, 75 bp, synthetic construct
  source 1..75: mol_type = other DNA
ggtaccagggcgtggtgcctgctgatcgggtccttcaaatctacgcggctaccggcgtaactccacacgagctgc

SEQ ID NO: 880549 - DNA, 75 bp, synthetic construct
  source 1..75: mol_type = other DNA
gtaatacacaactgtccatgcagggacatgccactgaacatgccatttatcgggatggagctttctcttgttcac

SEQ ID NO: 880550 - DNA, 75 bp, synthetic construct
  source 1..75: mol_type = other DNA
gttataaagtgatgatgggccgtccgcaggagtgggggcacaatattgccggcggatttttctccggcggcgaag

SEQ ID NO: 880551 - DNA, 75 bp, synthetic construct
  source 1..75: mol_type = other DNA
caaaccggtcgtgttatcgggattaataaaacggtcagcgaatggtcatctttacccgtaaaaggtacagaaaag

SEQ ID NO: 880552 - DNA, 75 bp, synthetic construct
  source 1..75: mol_type = other DNA
aggcggttccggtggaggatttggcgtcggggaagataccggttctgtagatacttctggaggccaaccctcagg

SEQ ID NO: 880553 - DNA, 75 bp, synthetic construct
  source 1..75: mol_type = other DNA
gagcaagggttaaggtcgaagccggatgtatgatgggttatctttccacctcgtttcatgccgttgatttaagcg

SEQ ID NO: 880554 - DNA, 75 bp, synthetic construct
  source 1..75: mol_type = other DNA
ttatgtgtacgccccgcttctggttcataacttctggctgggcgctgttttgggtggcgtttacctggggatcat

SEQ ID NO: 880555 - DNA, 75 bp, synthetic construct
  source 1..75: mol_type = other DNA
gcaatcagactcgcgtatccgagaacttcgctggcaaggactatggccagactgaaatcccgtcatgggcgaggg

SEQ ID NO: 880556 - DNA, 75 bp, synthetic construct
  source 1..75: mol_type = other DNA
tgcagaaatctggtcgtcatgggtggcatatcgtcgcgacctgaaaaagccgatcaagtctcagcagacggtcac

SEQ ID NO: 880557 - DNA, 75 bp, synthetic construct
  source 1..75: mol_type = other DNA
caccttaatcgacagcgctcacgctgactcggtacacacctttattcgtgaaggcgaaggcaaggggcaactgct

SEQ ID NO: 880558 - DNA, 75 bp, synthetic construct
  source 1..75: mol_type = other DNA
gcaacatgaaacgcgtctggctggaggcgggcggcaaaagcgccaacatcgttttcgccgactgcccggatttac

SEQ ID NO: 880559 - DNA, 75 bp, synthetic construct
  source 1..75: mol_type = other DNA
cgacagcaacatgaaacgcgtctggctggaagcgggcggcaaaagcgccaacatcgttttcgccgactgtccgga

SEQ ID NO: 880560 - DNA, 75 bp, synthetic construct
  source 1..75: mol_type = other DNA
ggggaacgtgatgcagcgaatgttattagtgactattgccgtgctgacggggggtgtgtgccgatttggggccag

SEQ ID NO: 880561 - DNA, 75 bp, synthetic construct
  source 1..75: mol_type = other DNA
gaatccctttttcacgatgcattcggaaacaggatttctttgctttgggggccgccgggtacaggaaagaccacg

SEQ ID NO: 880562 - DNA, 75 bp, synthetic construct
  source 1..75: mol_type = other DNA
tctcccgcgcgcaccgtatgagtcgccgcctgaaagccggttccgtcttcgtcaataactacaacgacggcgata

SEQ ID NO: 880563 - DNA, 75 bp, synthetic construct
  source 1..75: mol_type = other DNA
ttaaaaatagtgccggggatatttatcgttcatccgtagggatgggtagtaaatcatctaaagcaacgttaaaga

SEQ ID NO: 880564 - DNA, 75 bp, synthetic construct
  source 1..75: mol_type = other DNA
gagtacatccacagggtagtgcttgaaggtgaatttatcggcaaacaagagaagaaaaccaacgagctttctgca

SEQ ID NO: 880565 - DNA, 75 bp, synthetic construct
  source 1..75: mol_type = other DNA
taaattgcactaacagcatcaccatttcagacgtcaagattcatatggattcagaggggcgttactcgcttaatg

SEQ ID NO: 880566 - DNA, 75 bp, synthetic construct
  source 1..75: mol_type = other DNA
gccttgtatggttatgggattatgccaaccgctcacaggcattattccgcgaactgtatccggcgctaaaacaaa

SEQ ID NO: 880567 - DNA, 75 bp, synthetic construct
  source 1..75: mol_type = other DNA
tgatgagtgtcctgttgcaaaatggatggcactatggcagaaaagaaaacatagataaatatataaagtgtttat

SEQ ID NO: 880568 - DNA, 75 bp, synthetic construct
  source 1..75: mol_type = other DNA
caaaaggtttggctggggcatttcaagataaagcagaaaaattaaaccggagcatacgttggtgggtatgtggac

SEQ ID NO: 880569 - DNA, 75 bp, synthetic construct
  source 1..75: mol_type = other DNA
gatgacgatgaatttggcggcgatgacacacaaaaaaaatgggagtggagtcgctattatgcctggcgggcgtac

SEQ ID NO: 880570 - DNA, 75 bp, synthetic construct
  source 1..75: mol_type = other DNA
ccaatggatttgcccctatatttccagacacctgttatcacttaacccattactggcctgctgccgcagatattc

SEQ ID NO: 880571 - DNA, 75 bp, synthetic construct
  source 1..75: mol_type = other DNA
tgcagtggcaagtcttcctggaacggagattagtgaggcgcataagcgttttattactgaattaggaagaaaagc

SEQ ID NO: 880572 - DNA, 75 bp, synthetic construct
  source 1..75: mol_type = other DNA
aaattcgataaaggatcttaaatctgcagtctggggaatgacatctgttgctcttgctgcattttgcggttggcg

SEQ ID NO: 880573 - DNA, 75 bp, synthetic construct
  source 1..75: mol_type = other DNA
gatcacgacggttataaaattctttgtaagccgctgctttccggtaactatgaaattactgaacttgatccggcg

SEQ ID NO: 880574 - DNA, 75 bp, synthetic construct
  source 1..75: mol_type = other DNA
aagcgattttccagccaggggtacgtcgaacccgggaaatacaatttacaggttcaactaaataaacagccgctg

SEQ ID NO: 880575 - DNA, 75 bp, synthetic construct
  source 1..75: mol_type = other DNA
ccatgctcagtatctcgatggccgccgtgaaatgatgcaatggtacgctgattacattgattcgctttccagaca

SEQ ID NO: 880576 - DNA, 75 bp, synthetic construct
  source 1..75: mol_type = other DNA
acagggttttaattccgcgtggatcgaaacacagttagcccatgtagataaaaatgctatcaggggaacttataa

SEQ ID NO: 880577 - DNA, 75 bp, synthetic construct
  source 1..75: mol_type = other DNA
aaggtgatgatgcagtggtatgggaattatcttaacagtcttattgttgatagagatagttcaatatcctttcca

SEQ ID NO: 880578 - DNA, 75 bp, synthetic construct
  source 1..75: mol_type = other DNA
cgctacgcgattataactgggcgcgctgaatacaacccagctcctgatttagcaatagctttggctgtccctaag

SEQ ID NO: 880579 - DNA, 75 bp, synthetic construct
  source 1..75: mol_type = other DNA
gcagctctcaacagaaaactcattcgaagctatatgtcgggagtggcactcaaataaagccgatcgctggacagt

SEQ ID NO: 880580 - DNA, 75 bp, synthetic construct
  source 1..75: mol_type = other DNA
atcatcacaaaaacagcaactcagatcatcatgttaactggcgtacgcacgcaagaattacgctttgctcgctgg

SEQ ID NO: 880581 - DNA, 75 bp, synthetic construct
  source 1..75: mol_type = other DNA
agatcttgaggcttacacaggtagcataatcactaaaaatgcaactaaaattgtgatgcttactggagtcaggac

SEQ ID NO: 880582 - DNA, 75 bp, synthetic construct
  source 1..75: mol_type = other DNA
cgctacgcgatcatcactggccgcgctgaatacaatccagcacctgatttagctatcgcattagctgtaccgaag

SEQ ID NO: 880583 - DNA, 75 bp, synthetic construct
  source 1..75: mol_type = other DNA
atggctacgtggaaacagggtattaattctggtggttttctggctggaattggtgcgcaaaatgagaatgcgcca

SEQ ID NO: 880584 - DNA, 75 bp, synthetic construct
  source 1..75: mol_type = other DNA
acatcggtaagcgtcccatagctgaaattaagcctatggaattgctggaaacccttcgcagaatggaaaaacgcg

SEQ ID NO: 880585 - DNA, 75 bp, synthetic construct
  source 1..75: mol_type = other DNA
aaaacttaactacgaaaataccttcgaagctattgcccgtgaatggcaccatctgagagcggatcgttggtcatt

SEQ ID NO: 880586 - DNA, 75 bp, synthetic construct
  source 1..75: mol_type = other DNA
cgaccgtaggctacagcgaggcggaagcgcaccatgacggcatcaaaactgatagtcgcacgctaacgctggaca

SEQ ID NO: 880587 - DNA, 75 bp, synthetic construct
  source 1..75: mol_type = other DNA
gcaaaacatcgcgcacaaaaagcagtggatgagctggtggactgtgtggcagagctggaaaccaaggttgggaag

SEQ ID NO: 880588 - DNA, 75 bp, synthetic construct
  source 1..75: mol_type = other DNA
atggcgctgaccgatgttaaagtgaaaactgcgaagccaaaagaaaagccctataagctggctgatggcggcggt

SEQ ID NO: 880589 - DNA, 75 bp, synthetic construct
  source 1..75: mol_type = other DNA
cagatttgctggtaaagaaaagatgctttctattggcgtttatcccgatgtttcactggccgacgcgcgcgaaaa

SEQ ID NO: 880590 - DNA, 75 bp, synthetic construct
  source 1..75: mol_type = other DNA
caaagaaagaggaaaaaatcgcccagcaaatgactctgaaaaacactttcgaagctgttgctcgcgagtggcatc

SEQ ID NO: 880591 - DNA, 75 bp, synthetic construct
  source 1..75: mol_type = other DNA
gcaaatgagtttgaaaaacactttcgaggccgttgctcgcgagtggcatcagtcgaaagctgatcggtggtcgtt

SEQ ID NO: 880592 - DNA, 75 bp, synthetic construct
  source 1..75: mol_type = other DNA
gaggatatcgattttgagacaaaattatgggagattccggcagaaggtaatgaagatgaagcgacctcatattgt

SEQ ID NO: 880593 - DNA, 75 bp, synthetic construct
  source 1..75: mol_type = other DNA
ctttctattggcgtatcccccgatgtatcgctagccgatgctcgcgaaaaacgcagtgaagccaggaaaatcctc

SEQ ID NO: 880594 - DNA, 75 bp, synthetic construct
  source 1..75: mol_type = other DNA
ttatgcccatctgcatccgcagcggctgaaagcaaccggtcagctgattgagcaacatattggtaatgcactggc

SEQ ID NO: 880595 - DNA, 75 bp, synthetic construct
  source 1..75: mol_type = other DNA
cactgatccgcgttatgagcgggacaaatgccgggccattcctacccttcaggaggccttcagccagtattattt

SEQ ID NO: 880596 - DNA, 75 bp, synthetic construct
  source 1..75: mol_type = other DNA
tatgggaagtgcctccgacccggatgaaaatgaggaaggaacatattgttcccctctcaaatcaggcaattcggt

SEQ ID NO: 880597 - DNA, 75 bp, synthetic construct
  source 1..75: mol_type = other DNA
tcattatgctaactggcgtacgaactcaagaattgcgtttcgcacgctgggaggatatcgattttgagacaaaat

SEQ ID NO: 880598 - DNA, 75 bp, synthetic construct
  source 1..75: mol_type = other DNA
aatcaaaccaatggaattactggaggcattgcgtaaaatggaaaaacgcggagccttggagaaaatgcgcaaggt

SEQ ID NO: 880599 - DNA, 75 bp, synthetic construct
  source 1..75: mol_type = other DNA
gaaaaacaccttacctgctcacaaaacaacccaaggtacattctcactccatggaaatagtatctccgtacaaaa

SEQ ID NO: 880600 - DNA, 75 bp, synthetic construct
  source 1..75: mol_type = other DNA
ggccgcaatagccgtaagaagccaatcagcaaggaaagcgtaaatcaggttatcgagctactgggttataaggga

SEQ ID NO: 880601 - DNA, 75 bp, synthetic construct
  source 1..75: mol_type = other DNA
ggtgcctggcatacggaaggttcaatggtgaaagtcacggcggatgacgttgagctaattcatttcccgttttaa

SEQ ID NO: 880602 - DNA, 75 bp, synthetic construct
  source 1..75: mol_type = other DNA
aagaaaaaaatacctattttagggaaagttctttctctaataaattttgtcgtatttggtgttgagattgcttct

SEQ ID NO: 880603 - DNA, 75 bp, synthetic construct
  source 1..75: mol_type = other DNA
gaggctggacctgaagccattatgccgcttacccgtgctgctgatggttcgcttggcgttcgggctgttggcact

SEQ ID NO: 880604 - DNA, 75 bp, synthetic construct
  source 1..75: mol_type = other DNA
taagtggtgcgctggggttggttggtggtgtgccgggactcgtcatgctgggggcgacggcctggtacacgatgt

SEQ ID NO: 880605 - DNA, 75 bp, synthetic construct
  source 1..75: mol_type = other DNA
ttatttctctcgccgatgagtggaattcagtcaatgcccgtctgaagcaggcctcacagtccagtgatgattttc

SEQ ID NO: 880606 - DNA, 75 bp, synthetic construct
  source 1..75: mol_type = other DNA
acggaaaactgacagcggataaagtggtccccgcgttaatcagccagctggggatattacgtgatgaatatgcgg

SEQ ID NO: 880607 - DNA, 75 bp, synthetic construct
  source 1..75: mol_type = other DNA
gttacacaaacgggtacattgttgatgtcatgtatgacaatcgcccaagtaagtatccagctgtgttcagaacgt

SEQ ID NO: 880608 - DNA, 75 bp, synthetic construct
  source 1..75: mol_type = other DNA
cgatgattttacttttacaccaagaaagaaaacccacatcgagccaaagagagaaaaagttaaagtcagacgtgt

SEQ ID NO: 880609 - DNA, 75 bp, synthetic construct
  source 1..75: mol_type = other DNA
aaatatttcaaagagttagcacataagaaactgagacaaattgcagaagacttgttaaaagagaatcctgttaat

SEQ ID NO: 880610 - DNA, 75 bp, synthetic construct
  source 1..75: mol_type = other DNA
gcaggcagcttaaggatgccatcactggtgtcattaacgaacaggccagcatgccgggctcgcctctgtggcgat

SEQ ID NO: 880611 - DNA, 75 bp, synthetic construct
  source 1..75: mol_type = other DNA
tcagcgatataagcagaacatcatgcgagatattcgccctggcggtgacatctggaacgcaatgaaaggaacccg

SEQ ID NO: 880612 - DNA, 75 bp, synthetic construct
  source 1..75: mol_type = other DNA
tattttttaatgtagttcgtatttgtatcagcttagctctatctgatgataaaaaaaagatacttcattatacaa

SEQ ID NO: 880613 - DNA, 75 bp, synthetic construct
  source 1..75: mol_type = other DNA
tcgctgaatgagaaatatctggaagagcgtctcagcgatcagcaggattattatgcaaaggctgatgctttacgc

SEQ ID NO: 880614 - DNA, 75 bp, synthetic construct
  source 1..75: mol_type = other DNA
tctttaaacagctaaagcctatcaccggccattatccctatatttttattggcaggaacaatcgtagcaaaccaa

SEQ ID NO: 880615 - DNA, 75 bp, synthetic construct
  source 1..75: mol_type = other DNA
taagtaaagaaacagtcacacaagttatagagttgttggggtataaaggtcgagcaacaggacacggattccgac

SEQ ID NO: 880616 - DNA, 75 bp, synthetic construct
  source 1..75: mol_type = other DNA
tatgggagataccagcggaacgtatgaaaatgcgtagacctcacattgttcctttatctactcaggtagttgacc

SEQ ID NO: 880617 - DNA, 75 bp, synthetic construct
  source 1..75: mol_type = other DNA
aggaaactatcagttagtttttcctgggcgtaacaatccgaacaagcctatgagtgaggctagcatcaaccagtt

SEQ ID NO: 880618 - DNA, 75 bp, synthetic construct
  source 1..75: mol_type = other DNA
cgctacgcaattgcaacaggtagggcggagtacaatcctgcggcggatctctccagcgctctcgaagtacaccaa

SEQ ID NO: 880619 - DNA, 75 bp, synthetic construct
  source 1..75: mol_type = other DNA
tagttatgctaactggtgttagaacacaggaaatgcgttttgctacatgggacgaggttgatcttgagaaaggca

SEQ ID NO: 880620 - DNA, 75 bp, synthetic construct
  source 1..75: mol_type = other DNA
tagccatccagtcaggtgatcgacagcaggtgcgagatctgatgaccaaatatcctcgtcaattagagaagattc

SEQ ID NO: 880621 - DNA, 75 bp, synthetic construct
  source 1..75: mol_type = other DNA
gagatgcgtcgtttaggtatccctccagaaactattgctgaaatgcaggttaatgacccgcagggcttccagcat

SEQ ID NO: 880622 - DNA, 75 bp, synthetic construct
  source 1..75: mol_type = other DNA
tctttgatttcagaatcagatgtgtacgatcctacacaccccgtatccgttgaaggcgttattcaaggtataaca

SEQ ID NO: 880623 - DNA, 75 bp, synthetic construct
  source 1..75: mol_type = other DNA
ggcagaaacaaccgtagcaaaccgatttcgaaagaaagtgtgtcacaagtaattgagttacttggttataaagga

SEQ ID NO: 880624 - DNA, 75 bp, synthetic construct
  source 1..75: mol_type = other DNA
tagttttagcgctgcggcacaggagctgcatcgcgttccttctgcggtcagctataccgtgcgtcagctggaaga

SEQ ID NO: 880625 - DNA, 75 bp, synthetic construct
  source 1..75: mol_type = other DNA
atgtaccccaaactggcaaaggcttaccccgcgaataaattaccggatttacggggtgagtttattcgtggctgg

SEQ ID NO: 880626 - DNA, 75 bp, synthetic construct
  source 1..75: mol_type = other DNA
tcggaggaggcagaaaaaattagacagtgcgcgctacgttcgattgggcaatttgaatggttcggtatgattgaa

SEQ ID NO: 880627 - DNA, 75 bp, synthetic construct
  source 1..75: mol_type = other DNA
cagcaccacagcagcggcattgtgatacagggcgcgtttaatcacttcccggggatggacttccgtgcggttgat

SEQ ID NO: 880628 - DNA, 75 bp, synthetic construct
  source 1..75: mol_type = other DNA
ctcatattgcaattggtatttattttaatccagaaatagcgcctgcaccttttatttctctcattgaaactaacc

SEQ ID NO: 880629 - DNA, 75 bp, synthetic construct
  source 1..75: mol_type = other DNA
gtgttcaaccagtggtagcagccagccgccccgacgtgaactcattgaacataatgttgctggtggatttgatgc

SEQ ID NO: 880630 - DNA, 75 bp, synthetic construct
  source 1..75: mol_type = other DNA
gaaatctacgagcccctgttggatctcctggaacgttatggaccgcagcgccgtgaccagagcccggacatgccg

SEQ ID NO: 880631 - DNA, 75 bp, synthetic construct
  source 1..75: mol_type = other DNA
agatcctatgctttatagcaagcgactttttgcacaaaacaattacttcctatttgatgaaaatggaaactggcg

SEQ ID NO: 880632 - DNA, 75 bp, synthetic construct
  source 1..75: mol_type = other DNA
aagctgatacagtccggcgtaaacggttcggggagatgatgcgagcgcctgcctaccagtggaagaagccagcgc

SEQ ID NO: 880633 - DNA, 75 bp, synthetic construct
  source 1..75: mol_type = other DNA
tgtacgcttactgacaaaatggcgattgagaaggtgcaattgacttatttggatttggtcgtggcgaggtggtga

SEQ ID NO: 880634 - DNA, 75 bp, synthetic construct
  source 1..75: mol_type = other DNA
tgaaaaacgtcaacaatcctgaagctcaggctgcgtatggcagagcaacagatgctattaataaaatagaatcag

SEQ ID NO: 880635 - DNA, 75 bp, synthetic construct
  source 1..75: mol_type = other DNA
gtctggaagcgtttgataaccgtcaacgcagttatacctattccattattcaggcaccgttcccggtggtggatt

SEQ ID NO: 880636 - DNA, 75 bp, synthetic construct
  source 1..75: mol_type = other DNA
cggtcgcgttcgttcgctgacaacctctgacggcggcactgtggttgaacgtctggaagcgtttgataaccgtca

SEQ ID NO: 880637 - DNA, 75 bp, synthetic construct
  source 1..75: mol_type = other DNA
tactttcaaccgataacagattttcggttgtttcttccccgagattacgtgtgaagaataatacagaggcttcgt

SEQ ID NO: 880638 - DNA, 75 bp, synthetic construct
  source 1..75: mol_type = other DNA
tttgccagttgcgccaaatctgctgaaccagatgttcgctcctacagcaacaaatcaggtctggggggcggacct

SEQ ID NO: 880639 - DNA, 75 bp, synthetic construct
  source 1..75: mol_type = other DNA
tattgttcttggtgatatttcaagtgggatagctctgtcatcctcgggtatattagaatcaactattttagatgt

SEQ ID NO: 880640 - DNA, 75 bp, synthetic construct
  source 1..75: mol_type = other DNA
ttcttggtactgatggagtggatccgatcatatcaagattaagaacattcaacatgagaaggggaggaattaaga

SEQ ID NO: 880641 - DNA, 75 bp, synthetic construct
  source 1..75: mol_type = other DNA
tggtggaaatatgcaatctacatatttgtatccaatcgcaagcggtagctacaagccaacagtaaatataccgtg

SEQ ID NO: 880642 - DNA, 75 bp, synthetic construct
  source 1..75: mol_type = other DNA
cgtttaaaggtgattgcatgggttctatacttactatattaaatagtgcaataaggactgacactaatttattgg

SEQ ID NO: 880643 - DNA, 75 bp, synthetic construct
  source 1..75: mol_type = other DNA
cgcacaaatccgcccatcttccgtggtgaccaaagactacacctttaaacgacccggctgggcagggcgttttga

SEQ ID NO: 880644 - DNA, 75 bp, synthetic construct
  source 1..75: mol_type = other DNA
taattcaacattttctaaacagtccaaaagtattcttaaattttatcgcaattgctatgcttccaggatttttat

SEQ ID NO: 880645 - DNA, 75 bp, synthetic construct
  source 1..75: mol_type = other DNA
atgaacagttgctgaaacagctgcggtccgctgatatcgatatcgccctgacctacgatctagtgccagccaatg

SEQ ID NO: 880646 - DNA, 75 bp, synthetic construct
  source 1..75: mol_type = other DNA
agctggaatattttgtcgcatccggtgaagctggcagcattattggcgcgtcggaacgtattcatgtttcatcgc

SEQ ID NO: 880647 - DNA, 75 bp, synthetic construct
  source 1..75: mol_type = other DNA
atcgtgagggtggccttgcggcgcgacagcatcatccaggtcaagacggtgatcctgatcgggctgatcgccctg

SEQ ID NO: 880648 - DNA, 75 bp, synthetic construct
  source 1..75: mol_type = other DNA
attcacacaagtattaccgctaagcggtcttggttttcttgatgatcaacaaatcgcaaaagatttttcaataat

SEQ ID NO: 880649 - DNA, 75 bp, synthetic construct
  source 1..75: mol_type = other DNA
gctggaaatattgttacgttactacagcgactttcagcgttaggtattagtagtgataagttgtcaacacctggt

SEQ ID NO: 880650 - DNA, 75 bp, synthetic construct
  source 1..75: mol_type = other DNA
tttgttatttctggttatctgataactggaataatttttaatcaaactgagaagggaactttcagttacattaat

SEQ ID NO: 880651 - DNA, 75 bp, synthetic construct
  source 1..75: mol_type = other DNA
tccagtgacttttaaagttgagcgtggtgtttgggatgatagtggaacaatattgaaaaacacattgtccgatgg

SEQ ID NO: 880652 - DNA, 75 bp, synthetic construct
  source 1..75: mol_type = other DNA
gtgattctggtgctgctaccgttgcaaatgctttccggtggatccacgccgcgcgaaagtatgccgcagatggtg

SEQ ID NO: 880653 - DNA, 75 bp, synthetic construct
  source 1..75: mol_type = other DNA
ggcatttttgcggtttttatctttattattcagtttgttgcgtgggtaaccggctcatttaaaccgtctggtctg

SEQ ID NO: 880654 - DNA, 75 bp, synthetic construct
  source 1..75: mol_type = other DNA
tagttattcggtaattaaggctaaatcaggtgtaagccattcttgtcctgaaaagagtgacctatttggttaccc

SEQ ID NO: 880655 - DNA, 75 bp, synthetic construct
  source 1..75: mol_type = other DNA
atgtactccctgaaaattaaatgcccgtactgccttcatcaggttcatatttctctgaatgaggtcacccagtac

SEQ ID NO: 880656 - DNA, 75 bp, synthetic construct
  source 1..75: mol_type = other DNA
aaagataaaaaaataactcttttagaatactcatcggcgttgttagttagttttacaggacgaagggcatcacag

SEQ ID NO: 880657 - DNA, 75 bp, synthetic construct
  source 1..75: mol_type = other DNA
tttattaacagggaaaacgagtttatcttgcataaaaaaaaccgcaatgccatgtcatgggtgtatttattttaa

SEQ ID NO: 880658 - DNA, 75 bp, synthetic construct
  source 1..75: mol_type = other DNA
aaaatacaagcggaatgtttataaaatgatgttggaatgtaaaaatgaggagatcaaatccggagaaaaaagcga

SEQ ID NO: 880659 - DNA, 75 bp, synthetic construct
  source 1..75: mol_type = other DNA
caacgttgtggtgaggtgtttcgctatgcaattgttactggtcgagccgactataaccctgctcccgatcttgcc

SEQ ID NO: 880660 - DNA, 75 bp, synthetic construct
  source 1..75: mol_type = other DNA
cgctatgcaattgtcacaggtagggccgactacaaccccgctcccgaccttgccagcgcgttagctacgccgaaa

SEQ ID NO: 880661 - DNA, 75 bp, synthetic construct
  source 1..75: mol_type = other DNA
ctcgatatcttattgatttgccttaaagggattaccgtgacaaaaagtatttcgttaagtaaacgcatcttcgtt

SEQ ID NO: 880662 - DNA, 75 bp, synthetic construct
  source 1..75: mol_type = other DNA
tacaaggtcaagaacaacgagatagagggcagcaacggcacgcggtttaccttcaaaggtctgcgcaacaacatc

SEQ ID NO: 880663 - DNA, 75 bp, synthetic construct
  source 1..75: mol_type = other DNA
atgtgtacgctgtacgacgcaccgataggctctgttcgctggcgctggacgtatggcggtcgcggtggtggcaag

SEQ ID NO: 880664 - DNA, 75 bp, synthetic construct
  source 1..75: mol_type = other DNA
tacttctgaaataacatcagcaaaagcatactcaacggacttttgcacagaatgcaacaacccattaatgatcac

SEQ ID NO: 880665 - DNA, 75 bp, synthetic construct
  source 1..75: mol_type = other DNA
aaaaacaaaattataccaattataattgttaactctgaaataggtgaattaaaaggtaatacaaataattttatt

SEQ ID NO: 880666 - DNA, 75 bp, synthetic construct
  source 1..75: mol_type = other DNA
caaattccgtttgaggctgctcgcttaggttgcgatgtctatgcctctgacttaaacccgatctcctgcatgctt

SEQ ID NO: 880667 - DNA, 75 bp, synthetic construct
  source 1..75: mol_type = other DNA
ggcatgcgtgccttactcattctctatctcacccatcagcttggttttgatgataaccatgccatcagcctgttc

SEQ ID NO: 880668 - DNA, 75 bp, synthetic construct
  source 1..75: mol_type = other DNA
caccgttaaagttgggtgataccctgatgaacagattacctaaaatggctgctattcaggagcggtacaccttcc

SEQ ID NO: 880669 - DNA, 75 bp, synthetic construct
  source 1..75: mol_type = other DNA
tctatttgagtggaggatttcttttgtgtctgttagtcggttgtatcgggcatattgatagaactaatgaaacaa

SEQ ID NO: 880670 - DNA, 75 bp, synthetic construct
  source 1..75: mol_type = other DNA
cagtggctcgtgccttcgaataaaaaaatcgggaaagaccttcctatgtctaaagtagcaatagcccaggcatta

SEQ ID NO: 880671 - DNA, 75 bp, synthetic construct
  source 1..75: mol_type = other DNA
tagttcttgctgcactggcagcaattgctggtgcttttggtctgggcaaatcacgcggtaccagaatcgctgaaa

SEQ ID NO: 880672 - DNA, 75 bp, synthetic construct
  source 1..75: mol_type = other DNA
cctttaccattttctttacaagagattagcgcaatagggaatcttcttagtgaactcccccctctacctcacaac

SEQ ID NO: 880673 - DNA, 75 bp, synthetic construct
  source 1..75: mol_type = other DNA
cgtcctcgaggttgccctccgtgccctggggtacgaaaaaggcaatctgctgtcacgcattgaactggcacggca

SEQ ID NO: 880674 - DNA, 75 bp, synthetic construct
  source 1..75: mol_type = other DNA
gcagcagatcgccgggtagagacaacgaaagaggccagcaatgtacagcaaactgttaaccatatgtctggcgac

SEQ ID NO: 880675 - DNA, 75 bp, synthetic construct
  source 1..75: mol_type = other DNA
tcgcgcggcaccagcaaagccgaagcgaaagccaaccagcaacgcaccgaagaaaaggccgctgccactgaagca

SEQ ID NO: 880676 - DNA, 75 bp, synthetic construct
  source 1..75: mol_type = other DNA
gtcgccaaacgcagggtagagacaataaaaggggctagggatgtacagcagactgttaaccatctttctgatgac

SEQ ID NO: 880677 - DNA, 75 bp, synthetic construct
  source 1..75: mol_type = other DNA
gtaccactggccagtgctcttaattgtgacctgatgtggttgttaacgggaaaatcagaagcaaaggagcagcaa

SEQ ID NO: 880678 - DNA, 75 bp, synthetic construct
  source 1..75: mol_type = other DNA
ctggaaaacatgaatcagattaaagttaactttcccgccattgatttagctgacaataaaaacatgatagcagtt

SEQ ID NO: 880679 - DNA, 75 bp, synthetic construct
  source 1..75: mol_type = other DNA
aacgtgagacgtaatgacaagaaggtgaaaggctcgtatcgcttcatcagtcagccagtgagggaggttatcaag

SEQ ID NO: 880680 - DNA, 75 bp, synthetic construct
  source 1..75: mol_type = other DNA
aagctgacggcggaggatcacggtatcactgacttcaagccggtcctgcttttcaagtcgaataaaattgctgta

SEQ ID NO: 880681 - DNA, 75 bp, synthetic construct
  source 1..75: mol_type = other DNA
aatatccggttggtagcgtctttatttatcagccgaatccggttttacgtggtggtaaggtcgtcagcaccgttg

SEQ ID NO: 880682 - DNA, 75 bp, synthetic construct
  source 1..75: mol_type = other DNA
ctatcggctcacaggccttcatgattgattcagtaaagccgaaccttcctgttactccgggtatgatcaatctct

SEQ ID NO: 880683 - DNA, 75 bp, synthetic construct
  source 1..75: mol_type = other DNA
atgtttcggatcgccatctatttttttgtgctgaatcgggaaaacattttcagcttgtggccttttattgttgat

SEQ ID NO: 880684 - DNA, 75 bp, synthetic construct
  source 1..75: mol_type = other DNA
gagtgtgacgatgttctctatgaatactggacgaagggttttgtcgttaatccccgtcgaatgagtgtgatggaa

SEQ ID NO: 880685 - DNA, 75 bp, synthetic construct
  source 1..75: mol_type = other DNA
ccacaaagacagcgctgtctggtgtgcaggccggacaggctgtggcaatggcctccgcaaccggtgacccgaatg

SEQ ID NO: 880686 - DNA, 75 bp, synthetic construct
  source 1..75: mol_type = other DNA
taatctgctggcggaagagtccgtgaccggcagcagttcatactcgaaaaagaaaacggtcattgatgaaaccgt

SEQ ID NO: 880687 - DNA, 75 bp, synthetic construct
  source 1..75: mol_type = other DNA
catcattagagcaggcggacattgacgtgcatcaggatggcagcggcacgattgaacacgccagactgaaagaag

SEQ ID NO: 880688 - DNA, 75 bp, synthetic construct
  source 1..75: mol_type = other DNA
cctctctggagcaggcggacattgacgtgcatcaggatggcggaggtacggttgaacacgccagattgaaagaag

SEQ ID NO: 880689 - DNA, 75 bp, synthetic construct
  source 1..75: mol_type = other DNA
tcaggcagatcaacaatgtcagtttgcttttagtacaccggattcagaacccacaacctctgtattacaaggcac

SEQ ID NO: 880690 - DNA, 75 bp, synthetic construct
  source 1..75: mol_type = other DNA
gccgcagcccgtgaactcagcctgtatgaatcacagctctacaactggcgcagtaaacagcaaaatcagcagacg

SEQ ID NO: 880691 - DNA, 75 bp, synthetic construct
  source 1..75: mol_type = other DNA
ttgcaaaagtgtgcaaaaactccggctttctgaggatcccgaaaaattttaatgcactgaataacaagggatttt

SEQ ID NO: 880692 - DNA, 75 bp, synthetic construct
  source 1..75: mol_type = other DNA
gccggcactgacgtactatgcgaacgatggctgggtggaaattgacaacaacatcgctagaaaatgccctgcggg

SEQ ID NO: 880693 - DNA, 75 bp, synthetic construct
  source 1..75: mol_type = other DNA
ctcactcaagcagggctagttgaaggttttcagtgggtagatggaagcttcacagaacatattgaacttattgaa

SEQ ID NO: 880694 - DNA, 75 bp, synthetic construct
  source 1..75: mol_type = other DNA
aatacccttaaaactaagggtttgctgttaaatggtgattatgtcaatatcggtacgggtaaagacgcgctctct

SEQ ID NO: 880695 - DNA, 75 bp, synthetic construct
  source 1..75: mol_type = other DNA
tcgcttgaacgtgcccgtgtagcggcggcccaggccgatcctgttgagcaggggcgtttcttttttgactaccgt

SEQ ID NO: 880696 - DNA, 75 bp, synthetic construct
  source 1..75: mol_type = other DNA
ccactgtgttgaacaagctggcggagaagctggccaaagaccagaacggcgctgatattcctgacccggcgctct

SEQ ID NO: 880697 - DNA, 75 bp, synthetic construct
  source 1..75: mol_type = other DNA
gtagttcggtggcgggcgcgtttatcggcacctcgtctgttaccgcctatattgaaagtacttctggtgtggcag

SEQ ID NO: 880698 - DNA, 75 bp, synthetic construct
  source 1..75: mol_type = other DNA
gatgtgatactggaaatctgccatcaggcagatgtggagccggggatattcactgaaccgccccgggtttcctgg

SEQ ID NO: 880699 - DNA, 75 bp, synthetic construct
  source 1..75: mol_type = other DNA
ggacggcaatgagaagagtgcaaaagccgttgagcgaatgctgaatttcttctgccgggaagggatgttaagcac

SEQ ID NO: 880700 - DNA, 75 bp, synthetic construct
  source 1..75: mol_type = other DNA
tatgcaaatagtgctatatggcttgggactgttgttttatcaattctattttctgcactagatattaaaagcatt

SEQ ID NO: 880701 - DNA, 75 bp, synthetic construct
  source 1..75: mol_type = other DNA
ataaactttatggtatatcaataatatcgttctatctatttcttcatttccctgttctatcgtttagaattagtg

SEQ ID NO: 880702 - DNA, 75 bp, synthetic construct
  source 1..75: mol_type = other DNA
cctcgtaacggctatgggacaaaaggaccgaatcctttcgatcaatttacatttaagcgaggcgatcgagtaatt

SEQ ID NO: 880703 - DNA, 75 bp, synthetic construct
  source 1..75: mol_type = other DNA
ctggataatacgggaagtcatcttcttgccagcgggtttgtcagcctgtcgggttcacaactgaataatcagtcc

SEQ ID NO: 880704 - DNA, 75 bp, synthetic construct
  source 1..75: mol_type = other DNA
tttggtgggggagcgcttcatctgcgacgcaatcagaaggttcggttgatggcgatggaaaagcaaaaaacatat

SEQ ID NO: 880705 - DNA, 75 bp, synthetic construct
  source 1..75: mol_type = other DNA
ctggctcatttcctgtcgtcaggcgttcaactcccgactgcagattatggcacgctgcaagaacacctgacgcag

SEQ ID NO: 880706 - DNA, 75 bp, synthetic construct
  source 1..75: mol_type = other DNA
acaggcgatttatgatattgccagcaacattcgcgataattacggcaatattaagtggtatctggctgaaatagg

SEQ ID NO: 880707 - DNA, 75 bp, synthetic construct
  source 1..75: mol_type = other DNA
cgagttaaatgccgggatagcgccgtaaaccccaatgccccctttatgccggagtggttatttgactattacgag

SEQ ID NO: 880708 - DNA, 75 bp, synthetic construct
  source 1..75: mol_type = other DNA
tacaacttcaataattttggtgcaatttatcttctgactgaaggtggcccgacaaatccggaatatagatttgct

SEQ ID NO: 880709 - DNA, 75 bp, synthetic construct
  source 1..75: mol_type = other DNA
caataaacaacgctgacatttattgcatttacgctgtttcagtaatagatcataacaagatagggtttgatgacg

SEQ ID NO: 880710 - DNA, 75 bp, synthetic construct
  source 1..75: mol_type = other DNA
atgacagattcaataaatgccaatgttgtagtaagtatgccatcgcaactcttcactatggctcgttcttttaaa

SEQ ID NO: 880711 - DNA, 75 bp, synthetic construct
  source 1..75: mol_type = other DNA
atggtgatgtcagccatgcgagcgggagggcaatctgctgcgcaggttttatcacattacggcgcattcggtttt

SEQ ID NO: 880712 - DNA, 75 bp, synthetic construct
  source 1..75: mol_type = other DNA
acaactttgaagtgatgaaaggaattagcgcgcgaggcattattgtttccgataaagcaacgcaatttgaggtca

SEQ ID NO: 880713 - DNA, 75 bp, synthetic construct
  source 1..75: mol_type = other DNA
gaaggaagggattagttatctactgaatcagcatgacattcccagcatctggtatgagctggcacgcgataaatt

SEQ ID NO: 880714 - DNA, 75 bp, synthetic construct
  source 1..75: mol_type = other DNA
aatttcccgatcgagactgctacggctactacggttgtgagcggaacttactccggcgggcagattgcagtaaaa

SEQ ID NO: 880715 - DNA, 75 bp, synthetic construct
  source 1..75: mol_type = other DNA
gaatatgtgatgcatcagtggctgtgggatctcttccctggcggcaaagaaaggcaatttctttatcgtcgggaa

SEQ ID NO: 880716 - DNA, 75 bp, synthetic construct
  source 1..75: mol_type = other DNA
gattgagggagccacgttcgggctggataacgttgatccagcggtttttatcgatgctgaggtggataccttcga

SEQ ID NO: 880717 - DNA, 75 bp, synthetic construct
  source 1..75: mol_type = other DNA
tattcactagagttttgaattataacaaggaaaacaatgggttttattctttaaaatatagtgttctttattttg

SEQ ID NO: 880718 - DNA, 75 bp, synthetic construct
  source 1..75: mol_type = other DNA
tttttcctattctattctgatttctgcttgcgttattgaaggttttcaggggttaaaaagtgattctagattgat

SEQ ID NO: 880719 - DNA, 75 bp, synthetic construct
  source 1..75: mol_type = other DNA
actgacaccattacccgtctgacgatcggcagtggtacggacctggcttccggcatcgtggaggggaactatccc

SEQ ID NO: 880720 - DNA, 75 bp, synthetic construct
  source 1..75: mol_type = other DNA
aacgactcaggccgcagtggcagaaggcactatcaccatccgggacagggacaatcagaagcagaatccggcaga

SEQ ID NO: 880721 - DNA, 75 bp, synthetic construct
  source 1..75: mol_type = other DNA
gacggatcacaaatacccttgcggcacctgaaattaacacgccggcagagaaaaatatcagcccgggaatggctc

SEQ ID NO: 880722 - DNA, 75 bp, synthetic construct
  source 1..75: mol_type = other DNA
tatatagaacatattgaacgtacacttaatcatggtagtttgacaagccgtgaagttacagtactgcgtgaaatt

SEQ ID NO: 880723 - DNA, 75 bp, synthetic construct
  source 1..75: mol_type = other DNA
aaggatcagtgatatcacgaacatgtcccattacattatgtgaaccagaaaaaggggttttcatgagaaactcta

SEQ ID NO: 880724 - DNA, 75 bp, synthetic construct
  source 1..75: mol_type = other DNA
gggatcttttccctggcggcaaagaaaggcaatttctttatcgtcgggaagaactccaggggggtgcccctatta

SEQ ID NO: 880725 - DNA, 75 bp, synthetic construct
  source 1..75: mol_type = other DNA
gattgatatttatactgccatatgccatacccacatttgtaacgttacttattttccgtcttcttttaaatggaa

SEQ ID NO: 880726 - DNA, 75 bp, synthetic construct
  source 1..75: mol_type = other DNA
caacgtaatagttggggatattttctctcatgaaacaaagaattctttcatatatgccgaatcgggaattgttgc

SEQ ID NO: 880727 - DNA, 75 bp, synthetic construct
  source 1..75: mol_type = other DNA
tgaattcaaatgtttgtatgttgtatgataaaatggcattaatacatcttgttaaaacaagggcggctcatcctt

SEQ ID NO: 880728 - DNA, 75 bp, synthetic construct
  source 1..75: mol_type = other DNA
atgagtcgcagaagaaaattgctatgcaggctgatattgagcagttagtgaagatttcaacgaagtacgcaaagg

SEQ ID NO: 880729 - DNA, 75 bp, synthetic construct
  source 1..75: mol_type = other DNA
aatatgaatcacagaagaagattgctatgcaggctgatattgagcagcttacgaagatttctcagaagtatgcaa

SEQ ID NO: 880730 - DNA, 75 bp, synthetic construct
  source 1..75: mol_type = other DNA
gttaaccagatagagacggtgggcagtaaccagataatgcgaccaccggggcctgccgctggcgctcatcagcga

SEQ ID NO: 880731 - DNA, 75 bp, synthetic construct
  source 1..75: mol_type = other DNA
gttaagcccgcatctttacctggcgaccaacagcgcacagggggccgtggtggatactggggtggtcagagcggg

SEQ ID NO: 880732 - DNA, 75 bp, synthetic construct
  source 1..75: mol_type = other DNA
ataacacaaaaataattattccttgtatcgctctggtattgctggcacagtttattggtaaaggaatgtcagtag

SEQ ID NO: 880733 - DNA, 75 bp, synthetic construct
  source 1..75: mol_type = other DNA
aaaagattgatagttttggcgactggtcaccacagactgaacatccagtacatattattcagcgtcaagagcatg

SEQ ID NO: 880734 - DNA, 75 bp, synthetic construct
  source 1..75: mol_type = other DNA
ctcaaacgggaaattggagaattagctttacaagcaataaaacaaggcgatataagcgaacaatcactacctgat

SEQ ID NO: 880735 - DNA, 75 bp, synthetic construct
  source 1..75: mol_type = other DNA
ttcagcaacaaaagatctttcggtaagtaatgacaagctacttactttagcacacgcatcaaatataactaaatt

SEQ ID NO: 880736 - DNA, 75 bp, synthetic construct
  source 1..75: mol_type = other DNA
cctgaaaacagggagtctgccggggacggcggctgtggatgtcgtaacccgccccggacagaaggccggtggtta

SEQ ID NO: 880737 - DNA, 75 bp, synthetic construct
  source 1..75: mol_type = other DNA
ggtaaggttggttctctttccgggcttgatgcgactatccctgtcggtgcaagcacagtgactattgctgcacct

SEQ ID NO: 880738 - DNA, 75 bp, synthetic construct
  source 1..75: mol_type = other DNA
cccggaaggtcagccggtgctacgtaaacaggttgagcgcctctccctgctgctgaacgaaatccccggcgtgga

SEQ ID NO: 880739 - DNA, 75 bp, synthetic construct
  source 1..75: mol_type = other DNA
ggctacggtgccgggtggggtgaccggagcgagcgtggacctgacggtgggccggatgctctaccaggatgacac

SEQ ID NO: 880740 - DNA, 75 bp, synthetic construct
  source 1..75: mol_type = other DNA
tttcgatgctgatgaccgccatctgcaactgctggcctgtgcggcacaaaagcggacggaaacgtatctgaaccg

SEQ ID NO: 880741 - DNA, 75 bp, synthetic construct
  source 1..75: mol_type = other DNA
aatagtacaaaagtttcaaaaatcatttgcgaacccgataagggcatttatgatgctctgaataaaggtattcaa

SEQ ID NO: 880742 - DNA, 75 bp, synthetic construct
  source 1..75: mol_type = other DNA
atggttcaaaaggtatgtatgaaatgccagctttgaatgctcaactcaacattctggcaaagcgttatttccata

SEQ ID NO: 880743 - DNA, 75 bp, synthetic construct
  source 1..75: mol_type = other DNA
gcggtcagtcatctggataaaaaaacacaattatcagccgggaatgcagatgaatttacgaatgttgataagacc

SEQ ID NO: 880744 - DNA, 75 bp, synthetic construct
  source 1..75: mol_type = other DNA
ggcggtgctaaatccaagcgtgtagcagttcctacatcagcgcgttctctgaagccgtgggaggcattagggatc

SEQ ID NO: 880745 - DNA, 75 bp, synthetic construct
  source 1..75: mol_type = other DNA
aattatctctataatgaaaaaacatcatataaattggtatattgcgatcgttactagaaaattttctaaattgac

SEQ ID NO: 880746 - DNA, 75 bp, synthetic construct
  source 1..75: mol_type = other DNA
cttataatagtgaaaaaacgcttcttgatacattactctctctggaaaaacaaacacattcagatattgaatata

SEQ ID NO: 880747 - DNA, 75 bp, synthetic construct
  source 1..75: mol_type = other DNA
tatgcagaagaattgtttactaaaatcgttaaccttatggatgataataaagacgaagtagaaaacgtcgaaaaa

SEQ ID NO: 880748 - DNA, 75 bp, synthetic construct
  source 1..75: mol_type = other DNA
ctgcggacgcacattcgaagatgcatttatccttgcaaattcggctttattcgggctggtagggagaaatactca

SEQ ID NO: 880749 - DNA, 75 bp, synthetic construct
  source 1..75: mol_type = other DNA
agtaaaatatataacaatcaaatgtcagcacacactgaaagcatatatggaggagctatccaagaagctattaat

SEQ ID NO: 880750 - DNA, 75 bp, synthetic construct
  source 1..75: mol_type = other DNA
tgaatgcacggaatgatattttacgttttgctgccctgatatataaaaattaccataaaataccaatattttatg

SEQ ID NO: 880751 - DNA, 75 bp, synthetic construct
  source 1..75: mol_type = other DNA
ataaaagttattcatttataaatagaccgacagttagggatattaaaggaatacagaagtccaagaacatgtcgg

SEQ ID NO: 880752 - DNA, 75 bp, synthetic construct
  source 1..75: mol_type = other DNA
tatttagtacctaagtttttggatgaaatggagaaggtagattgggaaaaaatgggattaactttctgcgacaaa

SEQ ID NO: 880753 - DNA, 75 bp, synthetic construct
  source 1..75: mol_type = other DNA
aaaaattttgcataagttcagcaacacaaagatcccccccccctttttctataacggttcatttgagactccccc

SEQ ID NO: 880754 - DNA, 75 bp, synthetic construct
  source 1..75: mol_type = other DNA
gaaattattgccaggcttttattgtcgctaaattatcagccgggtaagccagtcattaaaactgcggagggtgag

SEQ ID NO: 880755 - DNA, 75 bp, synthetic construct
  source 1..75: mol_type = other DNA
aagagatatatcgatacatgatttagtaactcattcggatatttatcattttactgataagtgttatttaaatta

SEQ ID NO: 880756 - DNA, 75 bp, synthetic construct
  source 1..75: mol_type = other DNA
gcttataaatttctttgacgcaataaattttggaaaaatagatctttttatatttgataattttgctgaattatt

SEQ ID NO: 880757 - DNA, 75 bp, synthetic construct
  source 1..75: mol_type = other DNA
actcagcggcgcgtggcgttggtgcaggcacagcttggcgataccgcagcggcacagcagacatttaacaggttg

SEQ ID NO: 880758 - DNA, 75 bp, synthetic construct
  source 1..75: mol_type = other DNA
gttacgacaagctatttaacggggcaccgccagatatcgaaatggcgctggaatactggggggcaatgacgcaaa

SEQ ID NO: 880759 - DNA, 75 bp, synthetic construct
  source 1..75: mol_type = other DNA
ttcccgagaatcttgctgatgaaatcagggcaatggcgaaggtgcataaccgtagtctgaatgacgaaatgctca

SEQ ID NO: 880760 - DNA, 75 bp, synthetic construct
  source 1..75: mol_type = other DNA
agttgcgactgctgtaacggcaaagggcgatatccgtgtgaatgccggtcatgacatcgtactgggtactgccac

SEQ ID NO: 880761 - DNA, 75 bp, synthetic construct
  source 1..75: mol_type = other DNA
atccggggttatactttaagcggaactatagatgacaatcatatttcagttaatcaaggggatatttatagtata

SEQ ID NO: 880762 - DNA, 75 bp, synthetic construct
  source 1..75: mol_type = other DNA
aaatcctctccggcagtaacctcacgctgacggcgcaggtgctggcgaacaccggcagcggactggtacaggctg

SEQ ID NO: 880763 - DNA, 75 bp, synthetic construct
  source 1..75: mol_type = other DNA
gagttaaaaaaaacagatctaaagtttgagctaagtaaacaatatagctatgtaaacacgatcgataatcagtta

SEQ ID NO: 880764 - DNA, 75 bp, synthetic construct
  source 1..75: mol_type = other DNA
acctttggctccatgaccggctcaggttacatcgctgcctcccgggataagatgaagagccgctttgactccgtt

SEQ ID NO: 880765 - DNA, 75 bp, synthetic construct
  source 1..75: mol_type = other DNA
tatccggcagtacgctgaatgccgggaataatctgtctgttgtcgcaaccggtaaaaacaggggcgataaccgcg

SEQ ID NO: 880766 - DNA, 75 bp, synthetic construct
  source 1..75: mol_type = other DNA
cagcagtcagggttttggttacacggcacgggcattacttgaacgtcgcgtcacgtccaactggtttgttggtac

SEQ ID NO: 880767 - DNA, 75 bp, synthetic construct
  source 1..75: mol_type = other DNA
tggaaaaagtgacgaagtctttgagttagtatataagttaattgatgatgcttgcaggttgtggggggagaaaat

SEQ ID NO: 880768 - DNA, 75 bp, synthetic construct
  source 1..75: mol_type = other DNA
agagttgcagagaaacatgatataaaacttgatggacataaagggaaacagttcacttcgaagttaggaagagaa

SEQ ID NO: 880769 - DNA, 75 bp, synthetic construct
  source 1..75: mol_type = other DNA
tatcggaatgcaccagctgctggagtgctcggcgactgcctccgaccgtgaaggtatcgcatttttgatcctgac

SEQ ID NO: 880770 - DNA, 75 bp, synthetic construct
  source 1..75: mol_type = other DNA
gattgccccagagttgagaggtaaaacaatgctttttggccaatggcttaaccaaaaagaaattcctgatccata

SEQ ID NO: 880771 - DNA, 75 bp, synthetic construct
  source 1..75: mol_type = other DNA
gtacgggaaatatatgtcgttctccaattggggaacgttttttacagaaagccttgcctacaaagaaaattgatt

SEQ ID NO: 880772 - DNA, 75 bp, synthetic construct
  source 1..75: mol_type = other DNA
cattgcacctgaggtaagaggcaaaacaatgctatttggttattggttaggtaatagagaaataccagacccata

SEQ ID NO: 880773 - DNA, 75 bp, synthetic construct
  source 1..75: mol_type = other DNA
tcaactcgcgcaagctctatacgttaatgaacgtctacgttgccgcgcctgatcacccgattcatcaggagccgg

SEQ ID NO: 880774 - DNA, 75 bp, synthetic construct
  source 1..75: mol_type = other DNA
ttaataaaaacgtcatgcgcgatgagaaaacgtttaataaccttggtactgctttagataaagcatctcatgcca

SEQ ID NO: 880775 - DNA, 75 bp, synthetic construct
  source 1..75: mol_type = other DNA
tgggagctgggtgcgtctggctcgtggtcgcattcgcgcaccaaaaccatgccgcgttatccgctgatgaacctg

SEQ ID NO: 880776 - DNA, 75 bp, synthetic construct
  source 1..75: mol_type = other DNA
atgataaaaaatttgctctgtgaagatattatgcctggtcgatggaccactcaacttgtcaataagcacttaggt

SEQ ID NO: 880777 - DNA, 75 bp, synthetic construct
  source 1..75: mol_type = other DNA
aagctggcgtaattcacccttaagaccgcttattgaagaactgtccgcatctctggacgacgagactcgtgagga

SEQ ID NO: 880778 - DNA, 75 bp, synthetic construct
  source 1..75: mol_type = other DNA
tcactgacgatccccgattgatggctcatctgaatgactgtgtcctaaatccggggcctccgatggtggcccgtc

SEQ ID NO: 880779 - DNA, 75 bp, synthetic construct
  source 1..75: mol_type = other DNA
aaagagttgggggataaaaccagctatgttggcccggctgatgaaacgcaaatagccgagcaaattcagttagtc

SEQ ID NO: 880780 - DNA, 75 bp, synthetic construct
  source 1..75: mol_type = other DNA
tattaaggatttcaggtttaatccttgattctttaggtaatgactccaacttattgatagtgttttatgttcaga

SEQ ID NO: 880781 - DNA, 75 bp, synthetic construct
  source 1..75: mol_type = other DNA
ggttctcaaaattaacggtaaagccgttgcccgtatgggagataccaccgaacatggtggtgtgatcgtggaagg

SEQ ID NO: 880782 - DNA, 75 bp, synthetic construct
  source 1..75: mol_type = other DNA
gagggtattggattgaacatacaaaatatttttcgctggcttgaaaaggatacgcctgatgctgttgacaaaatt

SEQ ID NO: 880783 - DNA, 75 bp, synthetic construct
  source 1..75: mol_type = other DNA
gaaacagcaaattcacgcggtattaaagtggtgacctttgattcaggcatcaactcggacattccggtgagtttt

SEQ ID NO: 880784 - DNA, 75 bp, synthetic construct
  source 1..75: mol_type = other DNA
gaaacagcaaattcacgcggtatcaaagtggtgacctttgattcaggcatcaattcagacattccggtgagtttt

SEQ ID NO: 880785 - DNA, 75 bp, synthetic construct
  source 1..75: mol_type = other DNA
tacgcctgacgatcgaccgtgccctgattaaaggcagtccggttttgattcaatggacgcctgcagcgggcagta

SEQ ID NO: 880786 - DNA, 75 bp, synthetic construct
  source 1..75: mol_type = other DNA
ggtgtccggcgatatcacggacatcaccacaccggacgggcgggagacgaaattttactataacgacgggaacca

SEQ ID NO: 880787 - DNA, 75 bp, synthetic construct
  source 1..75: mol_type = other DNA
ctggtggcggcgaagagattcattgcggtctgagtgttggctttaaccctgaccagcagagtattgctgtctcgg

SEQ ID NO: 880788 - DNA, 75 bp, synthetic construct
  source 1..75: mol_type = other DNA
aaaaccggtagcatgagtaaaattcgcgaaatttataatactcatgatcaccccggcgacagcgggggaaccacc

SEQ ID NO: 880789 - DNA, 75 bp, synthetic construct
  source 1..75: mol_type = other DNA
gtgcagggaaaaacgaagattaatgccgatacgcaggttctgggcaatatcggtgcctcacaggagatcaccgac

SEQ ID NO: 880790 - DNA, 75 bp, synthetic construct
  source 1..75: mol_type = other DNA
ggtccgtcgcggcgtggtggacgaggtgatcccgggtagcccggtgatggttcgggtggatatcggggatgtgct

SEQ ID NO: 880791 - DNA, 75 bp, synthetic construct
  source 1..75: mol_type = other DNA
atttttacacatgcaggtaatattggccaagtttctttaattcctgaagattctgaatatgacagatatataatt

SEQ ID NO: 880792 - DNA, 75 bp, synthetic construct
  source 1..75: mol_type = other DNA
taaaatgccagatgaaaataatagattacaaaaaaagtcagaaaaaatttatttgtctgttgcgaatgtgggtaa

SEQ ID NO: 880793 - DNA, 75 bp, synthetic construct
  source 1..75: mol_type = other DNA
aagaaaggtttattttaatgagaagatgcttaatttaaatgataatgatgaaaaagtcaaaatcgaaaatgatat

SEQ ID NO: 880794 - DNA, 75 bp, synthetic construct
  source 1..75: mol_type = other DNA
cttgtgaaaatgaatggcacaaaccaggatcagtgtaaccgtatatacacatctcttgccgttattcagaatatg

SEQ ID NO: 880795 - DNA, 75 bp, synthetic construct
  source 1..75: mol_type = other DNA
cttaatgatgtagttcaaggtatcagtcgttggctaaaagaaaatcatcttatggtggaagctattaagaaaact

SEQ ID NO: 880796 - DNA, 75 bp, synthetic construct
  source 1..75: mol_type = other DNA
gatatagataatcatctaaaacttaataattgctgtttatatgctgcttgtttgggcgagttaaccggtggaaat

SEQ ID NO: 880797 - DNA, 75 bp, synthetic construct
  source 1..75: mol_type = other DNA
aagatggagactgtaaagaagcaagtgttattgcaagtggattattatcttgcaagatagcaaagcttaatggtg

SEQ ID NO: 880798 - DNA, 75 bp, synthetic construct
  source 1..75: mol_type = other DNA
gttctacggcatcaggctggacggataatggcgacggacctggactgcgcagatttctctcggcactacggcggg

SEQ ID NO: 880799 - DNA, 75 bp, synthetic construct
  source 1..75: mol_type = other DNA
agtttctttaattcctgaagattctgaatatgacagatatataatttcccaacgtcaatttttcttacgcgtaaa

SEQ ID NO: 880800 - DNA, 75 bp, synthetic construct
  source 1..75: mol_type = other DNA
tgaaaaatttgtaatctctcagagccaattctacttaagagttgataggaaaaaatgttcacctttttatatgat

SEQ ID NO: 880801 - DNA, 75 bp, synthetic construct
  source 1..75: mol_type = other DNA
aacacttacggaggacaagtctggatagacaatcaaagcaagaacagtggtgtatatatggtgccaacaccaccg

SEQ ID NO: 880802 - DNA, 75 bp, synthetic construct
  source 1..75: mol_type = other DNA
tacaagtcacggtatccgatcctttccaggatggcgaaaaagtgcaacaggataaggtggacgtagcaatctccg

SEQ ID NO: 880803 - DNA, 75 bp, synthetic construct
  source 1..75: mol_type = other DNA
gttaaacctggaaccgaatggcactgcgacaacgaatgagcaagggcaggctattttcaccgctaccactactgt

SEQ ID NO: 880804 - DNA, 75 bp, synthetic construct
  source 1..75: mol_type = other DNA
atttcttcgaaaagttaaaaaacaaatcgccgcaggccgctttgagttacaaggttgcttttgggtcgaatgcga

SEQ ID NO: 880805 - DNA, 75 bp, synthetic construct
  source 1..75: mol_type = other DNA
agcgggcatttcaacattccatacggtaattataaaaatccgtatttccctgaaaaagaaattcgcgcatttgca

SEQ ID NO: 880806 - DNA, 75 bp, synthetic construct
  source 1..75: mol_type = other DNA
gtccaatagcgatacgcccctgactcgctccctttatcgcaactttacccgcaattgcatcaatgcaaaacgcag

SEQ ID NO: 880807 - DNA, 75 bp, synthetic construct
  source 1..75: mol_type = other DNA
tggcaatcaatacggtgcgacaggtttcgctttccaacggtcagttacagggggaacgctggctatcgaggggct

SEQ ID NO: 880808 - DNA, 75 bp, synthetic construct
  source 1..75: mol_type = other DNA
aacagtagcgagtacgcgctttcgcgtatattgttcgagggctttatcaccgcttgtcagcaccatatcgctgaa

SEQ ID NO: 880809 - DNA, 75 bp, synthetic construct
  source 1..75: mol_type = other DNA
gaacagcttttcaaaatgaaaaaccgttcggttattccaaatgggggcaatggtgctacacgtgaggtcgaaacc

SEQ ID NO: 880810 - DNA, 75 bp, synthetic construct
  source 1..75: mol_type = other DNA
atatacttcaggggtatataaccctgcgaatgacgaatcaacatttattgatgacttatttaataatgataatag

SEQ ID NO: 880811 - DNA, 75 bp, synthetic construct
  source 1..75: mol_type = other DNA
tatcctataactgttaaaaattccaaactgcggaaatcactatttgattatctacggaataaaaatatcggggtc

SEQ ID NO: 880812 - DNA, 75 bp, synthetic construct
  source 1..75: mol_type = other DNA
gcgttagtgccttagaagcgaaactcatgtctgcgaaaaataatggaactttacctaaagttgttgttcctgtcg

SEQ ID NO: 880813 - DNA, 75 bp, synthetic construct
  source 1..75: mol_type = other DNA
atgtggaaagtattggcgcacgcatcaaaagcgcccgtacaaaactgggattaaccgaatctgatcttgcccgca

SEQ ID NO: 880814 - DNA, 75 bp, synthetic construct
  source 1..75: mol_type = other DNA
gcaaaaatcggtggtgaaggggatctggcaatcaatacggtgcgacaggtttcgctttccaacggtcagttacag

SEQ ID NO: 880815 - DNA, 75 bp, synthetic construct
  source 1..75: mol_type = other DNA
atggatttcccgaacaaaagactgatgacagtattgagatcagtgaagaggtctggagaatacttcttagtgaaa

SEQ ID NO: 880816 - DNA, 75 bp, synthetic construct
  source 1..75: mol_type = other DNA
tggaggagcttgccctcgctatggaacacatcaccgttgaactcggagagcttgccatccagatcgcggaagaat

SEQ ID NO: 880817 - DNA, 75 bp, synthetic construct
  source 1..75: mol_type = other DNA
gtctgcgttgttacctgaatgtagcaacttttgggtaaactctctgcatggacaaggggcgaaggtcgttagccc

SEQ ID NO: 880818 - DNA, 75 bp, synthetic construct
  source 1..75: mol_type = other DNA
ggttcagaaacctgaaaagcagcctgctgaacaatgccttggtgctgagaagccgtaaggttgagctgctggaac

SEQ ID NO: 880819 - DNA, 75 bp, synthetic construct
  source 1..75: mol_type = other DNA
atgctagaagataaactaaagtatttacttgaaatttatacagaaaatgacagaaagataaaagagctggaacag

SEQ ID NO: 880820 - DNA, 75 bp, synthetic construct
  source 1..75: mol_type = other DNA
atgtacacccatggcctgctggcgattatctccaccaaaaaacgctacggcggctttgcccgcgcggtgggcctg

SEQ ID NO: 880821 - DNA, 75 bp, synthetic construct
  source 1..75: mol_type = other DNA
aggctcaacttggcatcggattgaacgagaattgtacagtgaagatgttacttactgtgattcagcagttcagtt

SEQ ID NO: 880822 - DNA, 75 bp, synthetic construct
  source 1..75: mol_type = other DNA
gagccaactcaggccatgattaaagcgtggctatcagagattgctaactttcgcggtcatgctgctggttacagg

SEQ ID NO: 880823 - DNA, 75 bp, synthetic construct
  source 1..75: mol_type = other DNA
cgcccactggctggatgaaaaattaccccagttattcgtcgcctttggctggcttactcaccctggtaaaatcgt

SEQ ID NO: 880824 - DNA, 75 bp, synthetic construct
  source 1..75: mol_type = other DNA
agtattttatggtgttttcattgtaaagcctcaaatcacaagttttatttttaataatctcaagggatatgaaat

SEQ ID NO: 880825 - DNA, 75 bp, synthetic construct
  source 1..75: mol_type = other DNA
tggtcgtaatactatgaaaattggcaatgccagagatttattcattaatttagaagagaaagaagagcctaaatc

SEQ ID NO: 880826 - DNA, 75 bp, synthetic construct
  source 1..75: mol_type = other DNA
cttgagagaggaataaatatatcagtaagattgcaaaagaagaaatcaacagtaaatccatttatcgcaatcaga

SEQ ID NO: 880827 - DNA, 75 bp, synthetic construct
  source 1..75: mol_type = other DNA
gacacggaatatggcttaactgccagtgtcaaaatctctcccaggctctggaatatagcgatcgcttacaggcag

SEQ ID NO: 880828 - DNA, 75 bp, synthetic construct
  source 1..75: mol_type = other DNA
gtcaccgggtcaggtgctgtatgcggcgcggccctgacgtcacatcctcatgttgcgaaaatcagttttaccggt

SEQ ID NO: 880829 - DNA, 75 bp, synthetic construct
  source 1..75: mol_type = other DNA
gtaatttcttacttgttatatattcatccttatattttaacattacaaaacatttcgcttttaaaatatgtatgg

SEQ ID NO: 880830 - DNA, 75 bp, synthetic construct
  source 1..75: mol_type = other DNA
tgttatatcaaagctgttcggttattgtgtgataaaaatgatcaactgaaaaaatcgattaaatattttattggt

SEQ ID NO: 880831 - DNA, 75 bp, synthetic construct
  source 1..75: mol_type = other DNA
gaatggcgctttaacctgcgcacgtctaacaccgagccggtggtgcgtctgaacgttgagtccagagctgatgtg

SEQ ID NO: 880832 - DNA, 75 bp, synthetic construct
  source 1..75: mol_type = other DNA
acgtggagtccagagcggatactgcgttaatgaatgcaaaaacgaccgagctgttacacctgttaagcggggaat

SEQ ID NO: 880833 - DNA, 75 bp, synthetic construct
  source 1..75: mol_type = other DNA
ttgctcggcttttacgcgcaactcgaaggtttaagtcgtaataccagccagcccaatgatacggcgttggttagt

SEQ ID NO: 880834 - DNA, 75 bp, synthetic construct
  source 1..75: mol_type = other DNA
cggtttgtggaaatggggaccgtgaatatgccaccgcacccgtttgtgcgtccggcgtttgatgtgcgcagtgaa

SEQ ID NO: 880835 - DNA, 75 bp, synthetic construct
  source 1..75: mol_type = other DNA
gcaacaaggaatagatcctgaatatttgaaaaatataaacttccgagtcaaaaattctactggaacagcaagtcg

SEQ ID NO: 880836 - DNA, 75 bp, synthetic construct
  source 1..75: mol_type = other DNA
tatctcttatgaatgtcagaaaaagcgaataagtggatttgatggctctgttgtttcggaacccggctataatgt

SEQ ID NO: 880837 - DNA, 75 bp, synthetic construct
  source 1..75: mol_type = other DNA
acgaatatcagcaaaccggaacgctcacaatgatgggctgcccggaactgacggcgggcaataaaattgaactga

SEQ ID NO: 880838 - DNA, 75 bp, synthetic construct
  source 1..75: mol_type = other DNA
cgttgcagctgcataagggccaaggtaacttgggcgttgatcttagaaaggcttaccttcccggcgttgacatga

SEQ ID NO: 880839 - DNA, 75 bp, synthetic construct
  source 1..75: mol_type = other DNA
actggttgccatggtttaccgaggagcagaggttgtatggcgatcctgcaaaaatgcttaacaatcttgctgcat

SEQ ID NO: 880840 - DNA, 75 bp, synthetic construct
  source 1..75: mol_type = other DNA
ttcatgcacatattaccgagagtaacctcgagaagtttttccattcaccagcaacaaatatcaaagactatgacg

SEQ ID NO: 880841 - DNA, 75 bp, synthetic construct
  source 1..75: mol_type = other DNA
atgcttaacaatcttgcagcttgtaattctggtgaaagtgaaaagaatatttatgccgaacatatcaactttaat

SEQ ID NO: 880842 - DNA, 75 bp, synthetic construct
  source 1..75: mol_type = other DNA
cgatggcagtacgctgggcgatcgcctgaattactgggatgtgaaaatgagtattcagtatgactttatgctgaa

SEQ ID NO: 880843 - DNA, 75 bp, synthetic construct
  source 1..75: mol_type = other DNA
gcgggagttccgtctggtgctgaccacgcaggcgcagcgggcggaagaggcccgtaaacagcacaccgcttcctt

SEQ ID NO: 880844 - DNA, 75 bp, synthetic construct
  source 1..75: mol_type = other DNA
acctgaccggaaaactcacgcagagtgaagatgaggggcttgtcatcctctggtactacgatgaatcggaccgta

SEQ ID NO: 880845 - DNA, 75 bp, synthetic construct
  source 1..75: mol_type = other DNA
ctttgaaaaagaaaataaatcaggaaagagtctaaaagacatatacccttttttatatatttttgggttttgtaa

SEQ ID NO: 880846 - DNA, 75 bp, synthetic construct
  source 1..75: mol_type = other DNA
tgttaccagcaataaaaacggcgtattacgggaaaatccgctgcaattatcagatgacgatctcgattatatttc

SEQ ID NO: 880847 - DNA, 75 bp, synthetic construct
  source 1..75: mol_type = other DNA
caacgcttccgggaaactgctggcgttagatagccagttaaccaatgatttttcagaaaaaacagctatttccag

SEQ ID NO: 880848 - DNA, 75 bp, synthetic construct
  source 1..75: mol_type = other DNA
atgccggtgccgcagccggtgtcgtcgccggtccatttggattaatcatttcctattctattgctgcgggcgtag

SEQ ID NO: 880849 - DNA, 75 bp, synthetic construct
  source 1..75: mol_type = other DNA
tctatgatgccagccgcaaagaggctgcgttacctgtcgcaaacaaaggcgcagaaacgggtgatgctgccaact

SEQ ID NO: 880850 - DNA, 75 bp, synthetic construct
  source 1..75: mol_type = other DNA
atctgctatttgccgcagccgaccgcgcgggctatgtcaacggtagcggcaaactgaaacgcaaggaattagccg

SEQ ID NO: 880851 - DNA, 75 bp, synthetic construct
  source 1..75: mol_type = other DNA
aaccagttaatcaacaaatcgagactaagggcgacgctattgtaggagaaccagtcatgaaggacttaagcaaca

SEQ ID NO: 880852 - DNA, 75 bp, synthetic construct
  source 1..75: mol_type = other DNA
agttgtgtaagaaagtgacaagttggatgtattcgcatcctggagagagaattagatatgaacgttttaagacac

SEQ ID NO: 880853 - DNA, 75 bp, synthetic construct
  source 1..75: mol_type = other DNA
atcaccctctggcattacgatgcgtcagaccgtatcacccggcgcacggtgaacggcgacccggcggaacagtgg

SEQ ID NO: 880854 - DNA, 75 bp, synthetic construct
  source 1..75: mol_type = other DNA
catggggtaggtctgtatctatgtcgagaaaaccttgctgttgcacatcataaaatatggtattcagaacctgat

SEQ ID NO: 880855 - DNA, 75 bp, synthetic construct
  source 1..75: mol_type = other DNA
tattattaataaaatcactcccaaaaaaattgctaccgaagaaattgctactaaacaaagtactgctgaagaaat

SEQ ID NO: 880856 - DNA, 75 bp, synthetic construct
  source 1..75: mol_type = other DNA
acccaatcattcgcccacgtgcaggaaagctgcttgggctgccaccaagctttccgtaaacctttcgtggagcat

SEQ ID NO: 880857 - DNA, 75 bp, synthetic construct
  source 1..75: mol_type = other DNA
aatttaccggacgatgttgatgatgttgcggttgcggccagcgccaatgcacaaaatatactggtgcgtccgctg

SEQ ID NO: 880858 - DNA, 75 bp, synthetic construct
  source 1..75: mol_type = other DNA
atattcgccgtatgcggttactgtacagtcgccgtcgcgcctttcttggtgaactgattgaacgtcactgtggaa

SEQ ID NO: 880859 - DNA, 75 bp, synthetic construct
  source 1..75: mol_type = other DNA
tatttttttagcgttgaataaatttaaggaaagaacgaaaataaattacagggattatagagaagtatcaaaata

SEQ ID NO: 880860 - DNA, 75 bp, synthetic construct
  source 1..75: mol_type = other DNA
atggctatatcatcatatagtacagttacagataaatttgctactctgactaaaatgccagatgaaaatctgaat

SEQ ID NO: 880861 - DNA, 75 bp, synthetic construct
  source 1..75: mol_type = other DNA
atgacccaccgcaaacacagccacgcatttggaactatcaccctgaccgttacggcctgcctgcttttatggggt

SEQ ID NO: 880862 - DNA, 75 bp, synthetic construct
  source 1..75: mol_type = other DNA
agttgttaatgagggaatgctagtaaaagcattgaagatagcgcaacgagagcacataaaatatgtacatatcag

SEQ ID NO: 880863 - DNA, 75 bp, synthetic construct
  source 1..75: mol_type = other DNA
aatgatgaaaaagtcaaaatcaaaaatgatataaagaaaatagataaaaaaattgaagaaatagataatgcaatc

SEQ ID NO: 880864 - DNA, 75 bp, synthetic construct
  source 1..75: mol_type = other DNA
aagtactcagtttggatatttataagcatgatatacaatttgacgagaaggctttacaatcagggatattgaaaa

SEQ ID NO: 880865 - DNA, 75 bp, synthetic construct
  source 1..75: mol_type = other DNA
tatcatacaaatgacgctgctagattctgcttttcccagaattgatgggtttataaacttaactctaagtcagtt

SEQ ID NO: 880866 - DNA, 75 bp, synthetic construct
  source 1..75: mol_type = other DNA
tccaggccttacctcattttcgctttatccagcagtcactgcttgcgtttgttccggtggaaaacccaccggaat

SEQ ID NO: 880867 - DNA, 75 bp, synthetic construct
  source 1..75: mol_type = other DNA
attttaacagatgagggttttattacatggagggattttgatcgtatagcatggcctatattaagaggtaaatgt

SEQ ID NO: 880868 - DNA, 75 bp, synthetic construct
  source 1..75: mol_type = other DNA
attgattaaagaggttttttacttaaataataaagacaataaagataaaaaatatgctgacagaattaatgagat

SEQ ID NO: 880869 - DNA, 75 bp, synthetic construct
  source 1..75: mol_type = other DNA
tgcagttgagcgccagaaaagcggcaatcgctgaacggattgccgcccataaaattgcccgcagtaaagtgtcgg

SEQ ID NO: 880870 - DNA, 75 bp, synthetic construct
  source 1..75: mol_type = other DNA
acagccggttacgggcagcagtggcgggagctctgctgtttcccggcctcgcgctggcggcaacggtcgacaagt

SEQ ID NO: 880871 - DNA, 75 bp, synthetic construct
  source 1..75: mol_type = other DNA
aacgaatgtaccctgacaccgcacacccgggtaccgggcaacagcccgggaggcgagttgtctgccactgtggtg

SEQ ID NO: 880872 - DNA, 75 bp, synthetic construct
  source 1..75: mol_type = other DNA
actgaagaaattgctactaaacaaagtactgctgaagaaattattgcaacgcaattattgaatgatccagaataa

SEQ ID NO: 880873 - DNA, 75 bp, synthetic construct
  source 1..75: mol_type = other DNA
atactaaaggagttgctactgaagaaattaccactaaacaaagtactgctgaacaaattactgacaacgcaatta

SEQ ID NO: 880874 - DNA, 75 bp, synthetic construct
  source 1..75: mol_type = other DNA
gtgaagtttctgaacaccgtgggggcagccagagtatacgggcgggacattcatacgggggccggtgaatggacc

SEQ ID NO: 880875 - DNA, 75 bp, synthetic construct
  source 1..75: mol_type = other DNA
atttaaagagggcgattttgccgggctcagtgatatggcgcagttcgataaaattgttgagcgggcgctcagtct

SEQ ID NO: 880876 - DNA, 75 bp, synthetic construct
  source 1..75: mol_type = other DNA
tgggaggatcatggtttatctggttcttcggtgagtctgaatgttgccataagtgaaatcagaaaagcatttcgt

SEQ ID NO: 880877 - DNA, 75 bp, synthetic construct
  source 1..75: mol_type = other DNA
ttgttagtagagtatttaaaataaatattaactcgaaagataatcataatgatgttgaagaaaatacaatgcatt

SEQ ID NO: 880878 - DNA, 75 bp, synthetic construct
  source 1..75: mol_type = other DNA
gccattgtccctggctatatcaaatatgaatccgcagcacaaaaggaggcaaaagggttatgggcagacaccaac

SEQ ID NO: 880879 - DNA, 75 bp, synthetic construct
  source 1..75: mol_type = other DNA
aggccgtcattacctttggcgggaacctggataattcatggaaacgatctgcagatggtctgcaaaaaagcctga

SEQ ID NO: 880880 - DNA, 75 bp, synthetic construct
  source 1..75: mol_type = other DNA
tggcataccttgcaaaattcgggaatgtggatgttgcccgccgtatggctgaaaaaaatggtcagggcgaatggc

SEQ ID NO: 880881 - DNA, 75 bp, synthetic construct
  source 1..75: mol_type = other DNA
gcagtccaggccgtttaccggaaagcgcatttcagcggtggtggagcgtccgacgattctgttgtagtgcattga

SEQ ID NO: 880882 - DNA, 75 bp, synthetic construct
  source 1..75: mol_type = other DNA
cggcaattgatgcgcatgatgatgcagtccaggccgtttaccggaaagcgcatttcagcggcggtgggtcgcccg

SEQ ID NO: 880883 - DNA, 75 bp, synthetic construct
  source 1..75: mol_type = other DNA
atgaaaatcaggcatgagcacatcgaatcagtgttgttagccctagccgctgaaaaagggcaggcgtgggtcgct

SEQ ID NO: 880884 - DNA, 75 bp, synthetic construct
  source 1..75: mol_type = other DNA
ccgccttggctggcagagtacgtttgccatgagtagtgtgctgctcctttgcgcgggcgtactgacctttgttac

SEQ ID NO: 880885 - DNA, 75 bp, synthetic construct
  source 1..75: mol_type = other DNA
ttgcttctgaatttatgcccgtcagcctgctcacgccgattacccgcgatttaggcgtgacggaggggctggcag

SEQ ID NO: 880886 - DNA, 75 bp, synthetic construct
  source 1..75: mol_type = other DNA
taattgcagatataaaaaaaaccaaccgtaaaggttggttttttcttgggattatgcacgagagtagtttaattg

SEQ ID NO: 880887 - DNA, 75 bp, synthetic construct
  source 1..75: mol_type = other DNA
atgaatactcttaccaaagaatggttacagaacacgattaccagcattgagtcagcacgggatgaaataccattc

SEQ ID NO: 880888 - DNA, 75 bp, synthetic construct
  source 1..75: mol_type = other DNA
cagtgattgcagcgcatgacccgtcagacaccggcccagatgccaaaggatatgcagtgcgacatggatcagttg

SEQ ID NO: 880889 - DNA, 75 bp, synthetic construct
  source 1..75: mol_type = other DNA
atataccccgactatgacgaaaacggtaatcgctactgcatcgtcaagcagatcaactacacagctaatccatgg

SEQ ID NO: 880890 - DNA, 75 bp, synthetic construct
  source 1..75: mol_type = other DNA
cgatgtacaaattttgcgttcagcggaaaacctggtaccggaaaaaaccatctggcggcggctatcgggaatcgc

SEQ ID NO: 880891 - DNA, 75 bp, synthetic construct
  source 1..75: mol_type = other DNA
taaacgacgccgtgaaagaaaatgctatcaggcagataagagagatccagcctgatagcaaaagcccgctgataa

SEQ ID NO: 880892 - DNA, 75 bp, synthetic construct
  source 1..75: mol_type = other DNA
atggagaagtgcttttggtttaagtggtttgttacttctggtagcggtggtgatgacatgggtcacatcctgtca

SEQ ID NO: 880893 - DNA, 75 bp, synthetic construct
  source 1..75: mol_type = other DNA
gatgattggtgtggcgattggcggattctggtcgatgtctgcggcaacggcgattcgtctggtgccgcagcaaca

SEQ ID NO: 880894 - DNA, 75 bp, synthetic construct
  source 1..75: mol_type = other DNA
atttttttaagtgcgctttgcaagtaaacccagcgggatacagtaagtatcgtgggaaagaatcactcagcgagg

SEQ ID NO: 880895 - DNA, 75 bp, synthetic construct
  source 1..75: mol_type = other DNA
gataacgtgcgcgtaaattgcatcacgccggggcttatccagacggatattaccgcaggtaagctgagcgatgag

SEQ ID NO: 880896 - DNA, 75 bp, synthetic construct
  source 1..75: mol_type = other DNA
ttgtaactggcgcggcctccgtacgcggtttgggtttcgcaacggcaaagttatttgcagaaaatggtgcaaaag

SEQ ID NO: 880897 - DNA, 75 bp, synthetic construct
  source 1..75: mol_type = other DNA
cggcggagttggggggcattttgcgtatacttatgtagtggatgttgataatccagaatcatcgacagaatctgt

SEQ ID NO: 880898 - DNA, 75 bp, synthetic construct
  source 1..75: mol_type = other DNA
aacaccgatcctgttcttcctgtcctgcagggagaagtacgacagcagaaacgtggtctgtgggcagacagcgct

SEQ ID NO: 880899 - DNA, 75 bp, synthetic construct
  source 1..75: mol_type = other DNA
gcattcaggacattactggattcagaaagtgatcgttttcagccttccgcctggcagaaatttattcagcaatta

SEQ ID NO: 880900 - DNA, 75 bp, synthetic construct
  source 1..75: mol_type = other DNA
cgaaggtctgctgatggacatcaacgagggtgctgactgggctacttcgctggcgattgaagacggcgctgacca

SEQ ID NO: 880901 - DNA, 75 bp, synthetic construct
  source 1..75: mol_type = other DNA
cgtatcaggccggagcatgggctgatgaagtcgtacagggtgacaacgttcgcactattggcgatgtattccgca

SEQ ID NO: 880902 - DNA, 75 bp, synthetic construct
  source 1..75: mol_type = other DNA
atgacctcgattaatcctatctttgaaccgttcattgaggcgcatcgctacaaagtcgccaaaggcggtcgaggt

SEQ ID NO: 880903 - DNA, 75 bp, synthetic construct
  source 1..75: mol_type = other DNA
ggcacgctacctcttcttgcgccattaactttgctgaagcattacttggcagagtatcctgatgattatttgctt

SEQ ID NO: 880904 - DNA, 75 bp, synthetic construct
  source 1..75: mol_type = other DNA
cgtgaactgcaaaacagtatcagcgattcggtaatccggctgcttgaagacaccatagagcgtgaagggtatacg

SEQ ID NO: 880905 - DNA, 75 bp, synthetic construct
  source 1..75: mol_type = other DNA
atgcagaccccgacgacatgctgagtttcgacaaagaagcgataggcgagaagatgctggagaagctgtttgcag

SEQ ID NO: 880906 - DNA, 75 bp, synthetic construct
  source 1..75: mol_type = other DNA
cggcggacgtatcagtttcgactttctgcgccttaacgtggaaaatatcaaaggttacgcaaacttcgatgccgc

SEQ ID NO: 880907 - DNA, 75 bp, synthetic construct
  source 1..75: mol_type = other DNA
gttggcgatattgtcgaacagggccagccgctggcgcagcttaaccgcaccaaaacggaatccgacgtccaggaa

SEQ ID NO: 880908 - DNA, 75 bp, synthetic construct
  source 1..75: mol_type = other DNA
ctgaacaaagccaccaccgggctgacgcaggggattagcctggtcaaccgcgaactggcgatgacccagccactg

SEQ ID NO: 880909 - DNA, 75 bp, synthetic construct
  source 1..75: mol_type = other DNA
ggccaatgaactggaaaacaaactcagcgacgtgcgcacgcaatattacgttcaggcgcgcgaagagttagcgaa

SEQ ID NO: 880910 - DNA, 75 bp, synthetic construct
  source 1..75: mol_type = other DNA
acaagggtttacccgcagtcggggcgtatctccgcgttagcgggccgtgagggccgcttacgggcgtgtatgaca

SEQ ID NO: 880911 - DNA, 75 bp, synthetic construct
  source 1..75: mol_type = other DNA
ctacgcagacgccatgaacgacgggatgaacacgcttacctgccccgttaagaaaaatgaaatcgtaaaggatat

SEQ ID NO: 880912 - DNA, 75 bp, synthetic construct
  source 1..75: mol_type = other DNA
aatttcaaaagatttgtgcaatatttttattttcttgaagaaaaagaaaatagattacagaaagagcaacgatca

SEQ ID NO: 880913 - DNA, 75 bp, synthetic construct
  source 1..75: mol_type = other DNA
cggcggcgatcggggatttggctttcagatgttcacactggtgctgattgcgttttttattgtgtcgaccatcat

SEQ ID NO: 880914 - DNA, 75 bp, synthetic construct
  source 1..75: mol_type = other DNA
gcgcaggatccagattcatctgctggataaatatcgcaaagtaccgcccgagcctgttcatgctgatattccggt

SEQ ID NO: 880915 - DNA, 75 bp, synthetic construct
  source 1..75: mol_type = other DNA
ttcactgccgggcttaagaaatatggcgttgtccctaacctggacaaatcaggctttgttgtgctgggaacatca

SEQ ID NO: 880916 - DNA, 75 bp, synthetic construct
  source 1..75: mol_type = other DNA
aattctgtatcatctgaacgtgaaagttggcgatattgtcgaacagggccagccgctggcgcagcttaaccgcac

SEQ ID NO: 880917 - DNA, 75 bp, synthetic construct
  source 1..75: mol_type = other DNA
tccgtactttacgcaaagaagcgcgtgaaattggctatgatgtgtttcttgagatcgctgaaaaggttttagccg

SEQ ID NO: 880918 - DNA, 75 bp, synthetic construct
  source 1..75: mol_type = other DNA
cagctgacgcacaccatcgcccaccgggtgggtcgctatctggaacggcaaggcctgctggaacgggatgtcgaa

SEQ ID NO: 880919 - DNA, 75 bp, synthetic construct
  source 1..75: mol_type = other DNA
tgaaagccgccatgagcagtatgccggacgaagaaagccgctggagtctgcgcgttgatgccgactggcacagag

SEQ ID NO: 880920 - DNA, 75 bp, synthetic construct
  source 1..75: mol_type = other DNA
ctgggctttggccccttcgtaactggtatcctgcaaccagagtttcgtggtgacaaagagttcgttacgggcgat

SEQ ID NO: 880921 - DNA, 75 bp, synthetic construct
  source 1..75: mol_type = other DNA
ctcaatgttaaagcgatgaaccgccccgggtttcctggagagtattttatctgtgaactcaggctgccagatcat

SEQ ID NO: 880922 - DNA, 75 bp, synthetic construct
  source 1..75: mol_type = other DNA
aggttagggatctggtccgctctgaagttgagaccaacaaccagcaggctttcaacatgctgatgcagggcgggc

SEQ ID NO: 880923 - DNA, 75 bp, synthetic construct
  source 1..75: mol_type = other DNA
atggtccccaccgactggaaatgccccaacggtatctggggtgtggttgaccgttctaatggtgacgccatggag

SEQ ID NO: 880924 - DNA, 75 bp, synthetic construct
  source 1..75: mol_type = other DNA
gttgggaactattcttatgcccttcataaccgcttatcagaatcactttaatcccacgatcaaacaactcattaa

SEQ ID NO: 880925 - DNA, 75 bp, synthetic construct
  source 1..75: mol_type = other DNA
tagatgaagtaacgaggttgtgtgcaatgtcccgcgcgacattatacaggatgctcgccagcaacaattttcctc

SEQ ID NO: 880926 - DNA, 75 bp, synthetic construct
  source 1..75: mol_type = other DNA
cttcgggagatgaggaagaacaaatagaagcacaaccaaaggaagtactaacgctggctggcgcctggaacatgt

SEQ ID NO: 880927 - DNA, 75 bp, synthetic construct
  source 1..75: mol_type = other DNA
cgcaccaatttctgaatgatgagcagtgcaatattcagccgatagttgctcaggaataccgcgagattgtcactc

SEQ ID NO: 880928 - DNA, 75 bp, synthetic construct
  source 1..75: mol_type = other DNA
aacgttacatggcagtgttgctaactgtcttgggaggggaaactgatgtaacggcgataaccaagcaggacatta

SEQ ID NO: 880929 - DNA, 75 bp, synthetic construct
  source 1..75: mol_type = other DNA
tatcgctcaatgaacatccagcaactgattgaatgtgatgatgtatcaccgaatgagttagtaggagtggaagcc

SEQ ID NO: 880930 - DNA, 75 bp, synthetic construct
  source 1..75: mol_type = other DNA
gcgcaatcttcagccgatagttgttcaggaataccgggagactgttacaccttcagaagatgaggaagaacaaac

SEQ ID NO: 880931 - DNA, 75 bp, synthetic construct
  source 1..75: mol_type = other DNA
ggagttactgatgctgagcaccaattaaaaaaagcgttatatgaacaaactcaatcaactccagataaatcaatc

SEQ ID NO: 880932 - DNA, 75 bp, synthetic construct
  source 1..75: mol_type = other DNA
atgcatcaagacacgttggagaggctagctcatttattgcatgttgcggagttaaaataaatagcactatccatg

SEQ ID NO: 880933 - DNA, 75 bp, synthetic construct
  source 1..75: mol_type = other DNA
caaaggaaccttaactcacgctatcgcttctttagagagttctgcacctgaagtgagaagttcagaaaccagcag

SEQ ID NO: 880934 - DNA, 75 bp, synthetic construct
  source 1..75: mol_type = other DNA
cagtaataacggagaagtgatccgtgaggctgctaaaaaagggaggggtattgctcttttaccattatttattgt

SEQ ID NO: 880935 - DNA, 75 bp, synthetic construct
  source 1..75: mol_type = other DNA
ttttattagtcctgtttatgtcaaacccaaaatgagtaataaaagaattatcgctcaatcaggagcatttttact

SEQ ID NO: 880936 - DNA, 75 bp, synthetic construct
  source 1..75: mol_type = other DNA
tctggtaaagcgtgggattttgattcagagcgggcggaatataggcattaataatgtggtcagtgaatggtcaac

SEQ ID NO: 880937 - DNA, 75 bp, synthetic construct
  source 1..75: mol_type = other DNA
tgataaagtcgaattcgattttgagagttcttctttgttgacacttgaaggtcctaatggatatggcaaaacaag

SEQ ID NO: 880938 - DNA, 75 bp, synthetic construct
  source 1..75: mol_type = other DNA
aatgcctggatgagaaagaacagtgaaatgacatccgaaaagaaagttgctgttgcagctggcattggacctgcc

SEQ ID NO: 880939 - DNA, 75 bp, synthetic construct
  source 1..75: mol_type = other DNA
ctgaccaccggcggaaaaacaggtgatcttcgcattatgccgttattcaacggccagccagctaccaccgacgcc

SEQ ID NO: 880940 - DNA, 75 bp, synthetic construct
  source 1..75: mol_type = other DNA
aggcttggtctgaaacgcccgggttactggagtgcaaagaagatgaaatcctgcggcaatattgtccttcaggag

SEQ ID NO: 880941 - DNA, 75 bp, synthetic construct
  source 1..75: mol_type = other DNA
tggcgtgaagaaaacccgcgaaatagcggcatacctgaacagaagtgcgacagcagttcgtgccatggcgtatct

SEQ ID NO: 880942 - DNA, 75 bp, synthetic construct
  source 1..75: mol_type = other DNA
tgcctatagcactgatacatctggttcctggctgttcaaaaatactgaacaaccgcaatcaactcaacttaagac

SEQ ID NO: 880943 - DNA, 75 bp, synthetic construct
  source 1..75: mol_type = other DNA
ggatggaacctgtatacatatccgctgagcccggtgaatagcatggatccattaggattatatgaatttaaatca

SEQ ID NO: 880944 - DNA, 75 bp, synthetic construct
  source 1..75: mol_type = other DNA
tatatccgggagtaatataacgatcaacaattatggcagtattcgaccaggtcgtggggggaatggggggcatgg

SEQ ID NO: 880945 - DNA, 75 bp, synthetic construct
  source 1..75: mol_type = other DNA
ggtaatggtggtgatggggggacgggtggcaatggaggtttcgctgtatccggaaataatatccacataaataat

SEQ ID NO: 880946 - DNA, 75 bp, synthetic construct
  source 1..75: mol_type = other DNA
tcgtggcgcggtatatccctccggtcagtctgttattctgccggaacgggtgatcccggttgtggagtctgcatt

SEQ ID NO: 880947 - DNA, 75 bp, synthetic construct
  source 1..75: mol_type = other DNA
gccacgaagggggacataaccgctggcgtgatggtacaggtcagctgaaaacacagggtaaccgttatgttgttc

SEQ ID NO: 880948 - DNA, 75 bp, synthetic construct
  source 1..75: mol_type = other DNA
acagctctgtaacggataaactggtgattaaaggtgatgcatccggtcagacccgtgtggctgttactaatgccg

SEQ ID NO: 880949 - DNA, 75 bp, synthetic construct
  source 1..75: mol_type = other DNA
cacagtctgttgacaacctctaatggtataacaggactctctgatgaaaatatttatcagcataatagtttattg

SEQ ID NO: 880950 - DNA, 75 bp, synthetic construct
  source 1..75: mol_type = other DNA
tgagtatcctaatgattacttgcttacacagaattacttcgatccctatccggaagaactggctctaagactgat

SEQ ID NO: 880951 - DNA, 75 bp, synthetic construct
  source 1..75: mol_type = other DNA
cgtcttgatcttgccgatgccattttgctcagcaaagctaaaaaagatctctcatttgccgagattgccgacggc

SEQ ID NO: 880952 - DNA, 75 bp, synthetic construct
  source 1..75: mol_type = other DNA
tgctttcagaagccgatcttctgatttttgcttatcagaatactggggagtctgctagcggggcggtacgttatg

SEQ ID NO: 880953 - DNA, 75 bp, synthetic construct
  source 1..75: mol_type = other DNA
acggtgatgtgctggatgcgatttgcgccgcgcactatggcagcgaaaatctcgctgacacgataatccaggttc

SEQ ID NO: 880954 - DNA, 75 bp, synthetic construct
  source 1..75: mol_type = other DNA
gacgaacagtgcgagctctggtgtttacctgaaagatgcaagaattacatccaccaatggtaatatcacggctaa

SEQ ID NO: 880955 - DNA, 75 bp, synthetic construct
  source 1..75: mol_type = other DNA
agcagattgtctttgccctgaaacaggccgatctgggtacgagcgtgcccgaagtctgccgtaagctgggcatct

SEQ ID NO: 880956 - DNA, 75 bp, synthetic construct
  source 1..75: mol_type = other DNA
acgaaaacagccgaatccagattcgtcgcggatgataaaaatgcggtacttgcggtctctcctgaacgagtagag

SEQ ID NO: 880957 - DNA, 75 bp, synthetic construct
  source 1..75: mol_type = other DNA
tcactcgtcgagactgtaaaatcagaactagatatttatgattatgatactcataccattagagttagtgatata

SEQ ID NO: 880958 - DNA, 75 bp, synthetic construct
  source 1..75: mol_type = other DNA
tgatcctggcatgattcgatttgacggaaaaaatatggaaaaatataacccagatgattcgtatcaaggtaagtt

SEQ ID NO: 880959 - DNA, 75 bp, synthetic construct
  source 1..75: mol_type = other DNA
agaatcaataacttagggttcagtgttcagtacgagcattacgtcttcgagggcgaacaaggtaagcgagacagt

SEQ ID NO: 880960 - DNA, 75 bp, synthetic construct
  source 1..75: mol_type = other DNA
gcgattcatgtcattagtgcgttctcaacaatgcacagtctggtcatcggacagatcaagacggatgagaaattc

SEQ ID NO: 880961 - DNA, 75 bp, synthetic construct
  source 1..75: mol_type = other DNA
gaggaagaaatccgggcagaccgcgtgagtgacgaaagccgggcgtggcttgcgcagtgcgggctgacggtggag

SEQ ID NO: 880962 - DNA, 75 bp, synthetic construct
  source 1..75: mol_type = other DNA
cctgccgctggcgctcatcagcgaagacggcaatactgtgtggagtgcagaatacgatgaatggggcaaccagct

SEQ ID NO: 880963 - DNA, 75 bp, synthetic construct
  source 1..75: mol_type = other DNA
atggggatctggctggtagtgatggcctttgcggtgtatgcctttttctctggcgggccgggtaatttgcagtgg

SEQ ID NO: 880964 - DNA, 75 bp, synthetic construct
  source 1..75: mol_type = other DNA
ctatgatccgttgcaggggagatatatcacccaggacccgatagggctgagaggtgaatggaatctgtataaata

SEQ ID NO: 880965 - DNA, 75 bp, synthetic construct
  source 1..75: mol_type = other DNA
tacctgagcgaaaagttcacctttatcactgcgaccaccggggactgccgctggcgctcatcagcgaagacggca

SEQ ID NO: 880966 - DNA, 75 bp, synthetic construct
  source 1..75: mol_type = other DNA
cctcacacctgccagaagataataatgctcgtcgcttgttgtatgctttcggcgtgactgccgggtttatgctcg

SEQ ID NO: 880967 - DNA, 75 bp, synthetic construct
  source 1..75: mol_type = other DNA
gtggatcacttttcatccgtcgttgacactccagagatacgtctaaagactacttttgttttcgcttcattaaga

SEQ ID NO: 880968 - DNA, 75 bp, synthetic construct
  source 1..75: mol_type = other DNA
actcggtggccagtttttgttgaccacttcaatatttggtcattgcgttcgtcggtagatgcttttgtacattta

SEQ ID NO: 880969 - DNA, 75 bp, synthetic construct
  source 1..75: mol_type = other DNA
ggaagaaaaatgcctttcatgggaaagttatttttgtcattaatcaaacatggaataataagatttttttatccg

SEQ ID NO: 880970 - DNA, 75 bp, synthetic construct
  source 1..75: mol_type = other DNA
atttgaatgtatttatcaacatctcagcattagtaaagcggcagaatcattatatataacgccctctgctgttag

SEQ ID NO: 880971 - DNA, 75 bp, synthetic construct
  source 1..75: mol_type = other DNA
aagtttttgatgaactcaaacaacgtaacgatgtttctgaaacagatttggcatttaaagaaatgacctacttgc

SEQ ID NO: 880972 - DNA, 75 bp, synthetic construct
  source 1..75: mol_type = other DNA
gtgctgaatggcttaataaaataaaagtgtattttaaacagtttaaaattacccctgatagggctgggaaaatct

SEQ ID NO: 880973 - DNA, 75 bp, synthetic construct
  source 1..75: mol_type = other DNA
ggcgggtacgaaatacagcctgtgactgtgacaattaacgctgtgaaagctgctactgaagagggtgaggaggtc

SEQ ID NO: 880974 - DNA, 75 bp, synthetic construct
  source 1..75: mol_type = other DNA
attcagaaacagaattccggcttgatctacactccctgaacggaggtggtgccgatgaaaaaatcacgatttacg

SEQ ID NO: 880975 - DNA, 75 bp, synthetic construct
  source 1..75: mol_type = other DNA
atttcatctttatccacgagttctggtattggtaatttgtattacgcctgttcacaagcatttcatggtgcgaac

SEQ ID NO: 880976 - DNA, 75 bp, synthetic construct
  source 1..75: mol_type = other DNA
attgccgattccaactcgatgattgccaccgacctgcgtcagaaagtgtatgaactgatgcaggaaagtaaaagt

SEQ ID NO: 880977 - DNA, 75 bp, synthetic construct
  source 1..75: mol_type = other DNA
tcagcaaaatttgaacgcaaacccatctactggatgctgagtgaagtcgccaaacgcttaggaccagacgtttat

SEQ ID NO: 880978 - DNA, 75 bp, synthetic construct
  source 1..75: mol_type = other DNA
gtgtgccaccctggaaacgtccctggcgctctgcgcgtaatggcgtggggcttccggagatgatgccggcaaatg

SEQ ID NO: 880979 - DNA, 75 bp, synthetic construct
  source 1..75: mol_type = other DNA
tttaatgtgtcgtcggccggtgcgaacaactggacgccgacaacgtacatcagtgatttactggttgtggtcatg

SEQ ID NO: 880980 - DNA, 75 bp, synthetic construct
  source 1..75: mol_type = other DNA
tactggctataaatgcaggaaatatgaaattcgtcggtccctgtgagtttactgaagatgtcagaatcaacggta

SEQ ID NO: 880981 - DNA, 75 bp, synthetic construct
  source 1..75: mol_type = other DNA
attataagcgttattctaggccagaaattatagctttggttcataaatggttgacaaaaaataatacatttaagc

SEQ ID NO: 880982 - DNA, 75 bp, synthetic construct
  source 1..75: mol_type = other DNA
agaaatcagcaataccgccaatcaggggatgctgcagggtaagcactatctgaacgcctgggccagtctgccgct

SEQ ID NO: 880983 - DNA, 75 bp, synthetic construct
  source 1..75: mol_type = other DNA
tatcatctgctgatgacattgttgaaaaagatattatcaggaatgctttggaagtggtgcttctttttacattag

SEQ ID NO: 880984 - DNA, 75 bp, synthetic construct
  source 1..75: mol_type = other DNA
ccaacagcctgtcgctgttcggctgctccggttgcggcaagacgcgcacgctggagcggattctgggcatgtacc

SEQ ID NO: 880985 - DNA, 75 bp, synthetic construct
  source 1..75: mol_type = other DNA
tgattgacctggcattacagaaacacgatacgccagttggcccactgttcgtggcagtacgccacggtcgtatca

SEQ ID NO: 880986 - DNA, 75 bp, synthetic construct
  source 1..75: mol_type = other DNA
acatgacgaaatggtgtgagaagtgggacgccatgcacgaccgcttcgttaaagaggttgacgaactacaggcca

SEQ ID NO: 880987 - DNA, 75 bp, synthetic construct
  source 1..75: mol_type = other DNA
tgtcgggcgttccgccaggacagagacgcactgctggaagcgcggaataaatacttaaacagtgcgagagaagag

SEQ ID NO: 880988 - DNA, 75 bp, synthetic construct
  source 1..75: mol_type = other DNA
atggaagttatgcagttgctattcgacaaggtaacattgatataaaaaatagttctattacaacaaaaggcacta

SEQ ID NO: 880989 - DNA, 75 bp, synthetic construct
  source 1..75: mol_type = other DNA
taccaaaggatttaacaccagaaaaatacaataaaatttatctgccaggggatggttctgctggcctactgatcc

SEQ ID NO: 880990 - DNA, 75 bp, synthetic construct
  source 1..75: mol_type = other DNA
tgaagcttactacgacgcaactagaaacaaatggtggaccatagatgacgaaacggttcgaaaggtaacacactg

SEQ ID NO: 880991 - DNA, 75 bp, synthetic construct
  source 1..75: mol_type = other DNA
agcaggatgccggggaaaactggatcgatgctttccgtgaacgtattgagcaagcacaaagcaccgaagaaacaa

SEQ ID NO: 880992 - DNA, 75 bp, synthetic construct
  source 1..75: mol_type = other DNA
acataaaaacacatccgcctgccgtgcggaacgcgaaacaacaattattgagcaagatgccggggaaaactggat

SEQ ID NO: 880993 - DNA, 75 bp, synthetic construct
  source 1..75: mol_type = other DNA
ttcagggaatcggctggctaatggtgctggccccgttcttctttcttacttatggcatgacgaatcagtttaccg

SEQ ID NO: 880994 - DNA, 75 bp, synthetic construct
  source 1..75: mol_type = other DNA
ctagaggcgaattaattattgctaatgcaattggtgtgtcacctcaagaaatatggccttctaggtattttgaaa

SEQ ID NO: 880995 - DNA, 75 bp, synthetic construct
  source 1..75: mol_type = other DNA
taattcctgtacggccacaggtacaccggttctggtgtattacctgtcaggtactatcaattctttggaatcatg

SEQ ID NO: 880996 - DNA, 75 bp, synthetic construct
  source 1..75: mol_type = other DNA
atgcgaataatttcaggggatagtagtgtgttaagactccggcttcttttgactgctgttttaatgctgtgggga

SEQ ID NO: 880997 - DNA, 75 bp, synthetic construct
  source 1..75: mol_type = other DNA
tttcagaactgattgctagcaaatttagtaaaaagcaatattatgtatttagatgtttgattgtaattgaagtga

SEQ ID NO: 880998 - DNA, 75 bp, synthetic construct
  source 1..75: mol_type = other DNA
gatctgtttgctgggaaaccacagcaggaggttgtgttggctgcgctggaagatacctgggagactctttccaaa

SEQ ID NO: 880999 - DNA, 75 bp, synthetic construct
  source 1..75: mol_type = other DNA
gttgaaatggctggtaaacccatcagcgccaaccactattgccgtacaagagagtaactacccacttaaatttaa

SEQ ID NO: 881000 - DNA, 75 bp, synthetic construct
  source 1..75: mol_type = other DNA
tgcaaccaaaaaagataaagagattatcgaccgacgattacaaatgcgtacaaatgatttttattcgttattaaa

SEQ ID NO: 881001 - DNA, 75 bp, synthetic construct
  source 1..75: mol_type = other DNA
cagccgtcggtgcgtgaagtgcgttttggtgacgggtactcacagcgtatggcggcagggctgaatgctgacctg

SEQ ID NO: 881002 - DNA, 75 bp, synthetic construct
  source 1..75: mol_type = other DNA
gatattgatgcatcaggaaaacaacttaatattcggcgtattaaaaatggttctcgacaacacatcctcttcttc

SEQ ID NO: 881003 - DNA, 75 bp, synthetic construct
  source 1..75: mol_type = other DNA
agaagcgacggcgcaggctcaggaagtgctggcgcaactcgcagacctcaagaaacaactggaaggcatgaccgg

SEQ ID NO: 881004 - DNA, 75 bp, synthetic construct
  source 1..75: mol_type = other DNA
ttacctgtttggcatcatgaaaggggaggcgcatccgtttgtcgcaacaaagcagaataagttcaatccacttca

SEQ ID NO: 881005 - DNA, 75 bp, synthetic construct
  source 1..75: mol_type = other DNA
tttccctatcactcaaaaagggtcttcactacgtattgttgatgaattaccagaacagctttatgaaaccctttg

SEQ ID NO: 881006 - DNA, 75 bp, synthetic construct
  source 1..75: mol_type = other DNA
taataatctttatggtagtgaaattcggataagagatattaatgagaattttgttgggatggattttacctgtga

SEQ ID NO: 881007 - DNA, 75 bp, synthetic construct
  source 1..75: mol_type = other DNA
gtgcctccaggtgacgttaaccagttaacaattaacgccggatacagagaatccacccataacactgtttttggt

SEQ ID NO: 881008 - DNA, 75 bp, synthetic construct
  source 1..75: mol_type = other DNA
tcgctgccgcatcggggtatcagtccgtgacttcagagccagcgctcaatcttaaaagacctaaaacgcttgatg

SEQ ID NO: 881009 - DNA, 75 bp, synthetic construct
  source 1..75: mol_type = other DNA
tcccagactcgccacgatcacgatttgctggatcgcaaagtggcgctggcttggcttggcgatgacttcacgtat

SEQ ID NO: 881010 - DNA, 75 bp, synthetic construct
  source 1..75: mol_type = other DNA
accttcccgtaacctcggtgttgccattcgtgaatatgcaccgggagcagagatcattcttgatggtcgtgtctt

SEQ ID NO: 881011 - DNA, 75 bp, synthetic construct
  source 1..75: mol_type = other DNA
gagcgactcaaccggataaaatagcccaaatgtgccagcaagcgggcgtaccgacactgaatctggatctgccgg

SEQ ID NO: 881012 - DNA, 75 bp, synthetic construct
  source 1..75: mol_type = other DNA
tgaagagatggcgcgtgccagaggattactgccaatcatcacctgtacgcggcgacagccagaactggaaattga

SEQ ID NO: 881013 - DNA, 75 bp, synthetic construct
  source 1..75: mol_type = other DNA
gattatagattccggtgacaccacggtgcggcgcattgagatctcaccggaattgatccccagtctgaatgtggt

SEQ ID NO: 881014 - DNA, 75 bp, synthetic construct
  source 1..75: mol_type = other DNA
ccattctatttcaggaaggagtgtccgttaaactcaggctacctcaaggaacgcattttttgaatggactgctat

SEQ ID NO: 881015 - DNA, 75 bp, synthetic construct
  source 1..75: mol_type = other DNA
tggcaacgggaataaataaggttcgttgtgatgcaggaatggaagagaaacatgtaaatgccttggatatattca

SEQ ID NO: 881016 - DNA, 75 bp, synthetic construct
  source 1..75: mol_type = other DNA
ctgatgccactcttgcaacacgttacgctgccgagcattttggtaaaacatgggccgcgcctggcttgagccaag

SEQ ID NO: 881017 - DNA, 75 bp, synthetic construct
  source 1..75: mol_type = other DNA
tcgtgacccaggagcgtgagtcgcagccgcaaacgccttatcgtaagcgcatagagctggagaagaaacggcact

SEQ ID NO: 881018 - DNA, 75 bp, synthetic construct
  source 1..75: mol_type = other DNA
aacaaactggaacgcagaacgggcatccgcccttcacgcagccaggtgattgaaaagtttttgagtatcgggctg

SEQ ID NO: 881019 - DNA, 75 bp, synthetic construct
  source 1..75: mol_type = other DNA
gtggcggtcagagcgctgataaatcttaatgagcgctttattgatgcagtatcgaatcagacaggtattattggt

SEQ ID NO: 881020 - DNA, 75 bp, synthetic construct
  source 1..75: mol_type = other DNA
attttttgaagcaatatggtgattttgaaaatggtattcctgttcacgataccattgccagagttgtatcccagg

SEQ ID NO: 881021 - DNA, 75 bp, synthetic construct
  source 1..75: mol_type = other DNA
tgccccaaatccaaggagccagaaggattttcaatccggttttattagtatttatatcttgcttggtgaacacat

SEQ ID NO: 881022 - DNA, 75 bp, synthetic construct
  source 1..75: mol_type = other DNA
tcacacttcgcgcctggcctatcagtattaccggtcaaaaaccgaccgaagggccgtttagcgcgctggggtatt

SEQ ID NO: 881023 - DNA, 75 bp, synthetic construct
  source 1..75: mol_type = other DNA
gaactacattgaagttggtacctggtactactttaataagaacatgaacgtttatactgcatacaaattcaacat

SEQ ID NO: 881024 - DNA, 75 bp, synthetic construct
  source 1..75: mol_type = other DNA
atatctcacgtttggttgattcgcttacacgatggaaacataaaaagactcttcttgagagtcagaagatattca

SEQ ID NO: 881025 - DNA, 75 bp, synthetic construct
  source 1..75: mol_type = other DNA
cgcagggtggtgaaaaagttatgttgataaatatgcataaagaacgctcagtcattgaatttcagctacctcata

SEQ ID NO: 881026 - DNA, 75 bp, synthetic construct
  source 1..75: mol_type = other DNA
taacaaacagcacacattctatctcgaagcggattacacgcagggtaacctctttgatcagaagcaagtcaacgg

SEQ ID NO: 881027 - DNA, 75 bp, synthetic construct
  source 1..75: mol_type = other DNA
acagcaatatcacgggtggtgggttactggcttaccgcgtgggctataactcttctatgtattctgtttacctgc

SEQ ID NO: 881028 - DNA, 75 bp, synthetic construct
  source 1..75: mol_type = other DNA
tggcgtgctcggtgtgcccgggtgggatgacttcgggcaacccggtaaatccgctgctgggggcgaaggtgctgc

SEQ ID NO: 881029 - DNA, 75 bp, synthetic construct
  source 1..75: mol_type = other DNA
agggtgacatgacccgcaagggactggatattgtgcagggttcagcaggggtgctgataggtgcgccgacgggcg

SEQ ID NO: 881030 - DNA, 75 bp, synthetic construct
  source 1..75: mol_type = other DNA
cggaatatgatgaacgtcgttgtagtggtagtaagaacgagcactgttatagtaatttcagaaggttatatgcat

SEQ ID NO: 881031 - DNA, 75 bp, synthetic construct
  source 1..75: mol_type = other DNA
taatatttacgcgtcaggtaatctaactgccggaacgataaaatctaatggcacaattgaatcaactggcagaat

SEQ ID NO: 881032 - DNA, 75 bp, synthetic construct
  source 1..75: mol_type = other DNA
cagcaagcggtgatggcctgaaaggtatttttataacaataaccgatcaaacatctggatataaatgtgttatac

SEQ ID NO: 881033 - DNA, 75 bp, synthetic construct
  source 1..75: mol_type = other DNA
gggggatttataattacgccaatggcaaaaaccacgcagcatacagtaaatggaaccagacaaccattgacaatc

SEQ ID NO: 881034 - DNA, 75 bp, synthetic construct
  source 1..75: mol_type = other DNA
cgatgctttcaaaggtaaaacaaaatctgtgggggccggactctatgcttccgccatgtttgattccggtgccta

SEQ ID NO: 881035 - DNA, 75 bp, synthetic construct
  source 1..75: mol_type = other DNA
tgtttcctcaagctaataagataaagagaatcgacggtaaaaaggggccgttttatagtcaagcgttctcacgtt

SEQ ID NO: 881036 - DNA, 75 bp, synthetic construct
  source 1..75: mol_type = other DNA
atcagtatccgttgaatcccatacaagtgatagacccaatggggttagatgcgattgagaatatgacatcaggtg

SEQ ID NO: 881037 - DNA, 75 bp, synthetic construct
  source 1..75: mol_type = other DNA
cagttgtgagtatctcacgtcctcactgcgctgggcaaaaaaacatcgcaaaatctggagcaggcacgcaaaaca

SEQ ID NO: 881038 - DNA, 75 bp, synthetic construct
  source 1..75: mol_type = other DNA
acgatggacgcactgtacaactgtcagacgggcgaactgtcagcattgtaggtaagcttcatggcgcaggcgcta

SEQ ID NO: 881039 - DNA, 75 bp, synthetic construct
  source 1..75: mol_type = other DNA
aatggtttttaccccaaggagattttcaggaagcatggagtgtaattaattcatattgtagtgataggggctata

SEQ ID NO: 881040 - DNA, 75 bp, synthetic construct
  source 1..75: mol_type = other DNA
aatgcgcttgccgggcagacggtcagtgtgacagcaggcaacggcgcaacggttgccccgacggtgattacagag

SEQ ID NO: 881041 - DNA, 75 bp, synthetic construct
  source 1..75: mol_type = other DNA
gcgaacacgctgcgggtgagggtcaccgatgcgttcgggaatgcgctgaatgggcagacggtcagcgtgttggcg

SEQ ID NO: 881042 - DNA, 75 bp, synthetic construct
  source 1..75: mol_type = other DNA
atggtagtgtccgctattgccagtacacctcaaaacactacgctaatgagttgggatgccgtgctctatgatcta

SEQ ID NO: 881043 - DNA, 75 bp, synthetic construct
  source 1..75: mol_type = other DNA
aattatttggcttgtttttttgtgcgctggattacgtttggaaaaaacaagatataaatatatttggagcaggta

SEQ ID NO: 881044 - DNA, 75 bp, synthetic construct
  source 1..75: mol_type = other DNA
atgctgaaaatgatgacctctgctgtacccgccctcattctgtcacttgctgcattcagtgccagtgccgctcaa

SEQ ID NO: 881045 - DNA, 75 bp, synthetic construct
  source 1..75: mol_type = other DNA
atccagttggtcaagcccacgaagggattgaagaagtaccaggatcattaggtaaagatcggaacctggatttta

SEQ ID NO: 881046 - DNA, 75 bp, synthetic construct
  source 1..75: mol_type = other DNA
tatcagcctttaccgccactatgacaaccgtggccggttaacctcggtgaaagacgcacagggccgtgaaacgca

SEQ ID NO: 881047 - DNA, 75 bp, synthetic construct
  source 1..75: mol_type = other DNA
gcgttgctaaccgacattagtgatcaggttaattggtacggtaagaagctgtcgccggaagactggaaagcggta

SEQ ID NO: 881048 - DNA, 75 bp, synthetic construct
  source 1..75: mol_type = other DNA
caacatcgcgcaaagcgatgcgacattacagggtttgcgtcagctcatttttatctggccttgtgcactggcaat

SEQ ID NO: 881049 - DNA, 75 bp, synthetic construct
  source 1..75: mol_type = other DNA
caaagccgcattcgtattttgctctctcagggggttattcacgccaaacagaaacccctgaataaaaaagagctc

SEQ ID NO: 881050 - DNA, 75 bp, synthetic construct
  source 1..75: mol_type = other DNA
ttaacgacgatgcggcgtttcatctctaccaccgccgcaccgcggctgacgccgtgctctgtgaactgttaccgg

SEQ ID NO: 881051 - DNA, 75 bp, synthetic construct
  source 1..75: mol_type = other DNA
gccaccgtgtcgctgtccactacggctacgacgataagggccgcctgaccggcgaacggcagacggtggagaacc

SEQ ID NO: 881052 - DNA, 75 bp, synthetic construct
  source 1..75: mol_type = other DNA
acaaaaactcactgataatattaatggtcaaacattaacagatgatcagaaaaagtttttattacaagaacagga

SEQ ID NO: 881053 - DNA, 75 bp, synthetic construct
  source 1..75: mol_type = other DNA
tgaattatgagttactccttaatgagcaactactagcaggtacagaagattttgaaaaacgtaaaaatgagatta

SEQ ID NO: 881054 - DNA, 75 bp, synthetic construct
  source 1..75: mol_type = other DNA
agaatataaacgatttgatgaaaatattctaagtgctacagagtcaggtagatcattcttatatgactttatgca

SEQ ID NO: 881055 - DNA, 75 bp, synthetic construct
  source 1..75: mol_type = other DNA
gaatggaaaaccggtattcgtgccgaaggttctgtttataccggttataccttctttcgtaaaatttctgccgca

SEQ ID NO: 881056 - DNA, 75 bp, synthetic construct
  source 1..75: mol_type = other DNA
gacagttgatattcgcactggacagaaaacagtgctggactatttgattaagccattcaataaagccagagaagc

SEQ ID NO: 881057 - DNA, 75 bp, synthetic construct
  source 1..75: mol_type = other DNA
ctaaccgctggtttaaatatggctgatgaaaaatatttcgattcacaaattagccaaaaggaattactaaatgca

SEQ ID NO: 881058 - DNA, 75 bp, synthetic construct
  source 1..75: mol_type = other DNA
ccaaatatgcgctgaaaggttatgacattgaagccgcctccctgcaatcagcgggcggaaaagtagcagtttccg

SEQ ID NO: 881059 - DNA, 75 bp, synthetic construct
  source 1..75: mol_type = other DNA
gaggcagacggttcgacggcgaacacgctgcaggtgaaggtgaccgatgcgttcgggaatgcacttgccggacag

SEQ ID NO: 881060 - DNA, 75 bp, synthetic construct
  source 1..75: mol_type = other DNA
atttcgccttaagcgaatggaaagacaacggcaacggaacctatacccaaatagttaccgccgggaagacgtctg

SEQ ID NO: 881061 - DNA, 75 bp, synthetic construct
  source 1..75: mol_type = other DNA
ggctgctgcccctacgcatattaatcctgcgcactcggatactgccgcgtcactgatcctgccgaacgttaaaac

SEQ ID NO: 881062 - DNA, 75 bp, synthetic construct
  source 1..75: mol_type = other DNA
acggtgccacgactgctccgacggtcaccacgcagccggacggcacggtggaaatcagtgtcaccagtcagacgg

SEQ ID NO: 881063 - DNA, 75 bp, synthetic construct
  source 1..75: mol_type = other DNA
ggtcattaaggatggttcagaggcggacggttcgacggcgaacacgctgcgggcgagggtgaccgatgcgttcgg

SEQ ID NO: 881064 - DNA, 75 bp, synthetic construct
  source 1..75: mol_type = other DNA
ctgcgggtgagggtgaccgatgcgttcgggaatgcgctgaatggacagacggtcagcgtgacggcaggaaacagc

SEQ ID NO: 881065 - DNA, 75 bp, synthetic construct
  source 1..75: mol_type = other DNA
tgtgcaaaatcttaaagcgtctgggttaattacagctaactcaggaatcgcaacattaacaggtcatgactggaa

SEQ ID NO: 881066 - DNA, 75 bp, synthetic construct
  source 1..75: mol_type = other DNA
ttataacgcccaaattattcaacgatcggacaatacctgcgaacttaccattaatgaaccattaaagaaccatta

SEQ ID NO: 881067 - DNA, 75 bp, synthetic construct
  source 1..75: mol_type = other DNA
tgtggtcgcacccggtcagagtgggtttattgctcccgatggaacagttgataagcactatgaagatcagctgaa

SEQ ID NO: 881068 - DNA, 75 bp, synthetic construct
  source 1..75: mol_type = other DNA
accatggagggaaattacgtatctggtttgtttataaaggcgtaagagtcagggaaaacctggggttcctgacac

SEQ ID NO: 881069 - DNA, 75 bp, synthetic construct
  source 1..75: mol_type = other DNA
cttacaaaacaaacagggactggaaatcgttttgttttacagaacttaggtaatacagaactatcatttgccgca

SEQ ID NO: 881070 - DNA, 75 bp, synthetic construct
  source 1..75: mol_type = other DNA
aaaaaaatggataccgcttgatgtttctcatggtggtactggtgcggcaactattgatggtgccagaacgaatct

SEQ ID NO: 881071 - DNA, 75 bp, synthetic construct
  source 1..75: mol_type = other DNA
caaaaactcaatcaacgattgtcgcggacaaaacgatatatatcgctggggatagcataacggtgaccgttgttc

SEQ ID NO: 881072 - DNA, 75 bp, synthetic construct
  source 1..75: mol_type = other DNA
cgggcagatggtcagcgtgacggcaggcaacagcgcaacggttgcttcgacggtcaccacgcatccggacggcac

SEQ ID NO: 881073 - DNA, 75 bp, synthetic construct
  source 1..75: mol_type = other DNA
ctgttagtgttttattatctgatgaatttggtaatcctgtgaatgacggtctggaattgctgacagaggatgccg

SEQ ID NO: 881074 - DNA, 75 bp, synthetic construct
  source 1..75: mol_type = other DNA
gcgggcgagggtgaccgatgcgttcggtaatacgcttgccggacagacggtcagcgtgttggcggacaacggtgc

SEQ ID NO: 881075 - DNA, 75 bp, synthetic construct
  source 1..75: mol_type = other DNA
tttgtggaagtcgagtcgctgagtgttaatggtgtaaaattcagggcgacagatggttttccagaaacagggttt

SEQ ID NO: 881076 - DNA, 75 bp, synthetic construct
  source 1..75: mol_type = other DNA
cggcgaacacgctgcgggcgagggtgaccgatgcattcggtaatacgttgggcgggcagacggtcagcgtgttgg

SEQ ID NO: 881077 - DNA, 75 bp, synthetic construct
  source 1..75: mol_type = other DNA
gcacggtggagatcagtgtcaccagccagacggcgggagtcagtgcggtcaccaccagcatcaacagcagcagtc

SEQ ID NO: 881078 - DNA, 75 bp, synthetic construct
  source 1..75: mol_type = other DNA
aggacggcgaagatcgctgatctggtggtgatgcaggacggctcagtggcagatggcacgacggcgaacacgctg

SEQ ID NO: 881079 - DNA, 75 bp, synthetic construct
  source 1..75: mol_type = other DNA
ggaatcagtgcagtcactgccagcatcaacagcagcagtcagagccgggacgtgacatttatcgccgatgtcagg

SEQ ID NO: 881080 - DNA, 75 bp, synthetic construct
  source 1..75: mol_type = other DNA
ggttcgacggcgaatacgctgcaggtgaaggtcaccgatgctaacggtaatacgcttgccggacaggcggtcagc

SEQ ID NO: 881081 - DNA, 75 bp, synthetic construct
  source 1..75: mol_type = other DNA
cggagctggtggtgacgcaggacggctcagtggctgatggttcgacggcgaatacgctgcgggtgaaggtcaccg

SEQ ID NO: 881082 - DNA, 75 bp, synthetic construct
  source 1..75: mol_type = other DNA
gtcaccagccagaccgccggaaccagtgcggtcaccgccagcatcaacaacagcagccagagccggaacgtgacg

SEQ ID NO: 881083 - DNA, 75 bp, synthetic construct
  source 1..75: mol_type = other DNA
gccggacggcacggtggaaatcagtgtcaccagccagacggcgggagtcagtgcagtcactgcaaccatcaacag

SEQ ID NO: 881084 - DNA, 75 bp, synthetic construct
  source 1..75: mol_type = other DNA
acggagatgtcctggatgcaatttgtgccgtgcattacggtactgaaaatctgtcagactcggtgactcaggttc

SEQ ID NO: 881085 - DNA, 75 bp, synthetic construct
  source 1..75: mol_type = other DNA
ctattaaaaatgacgagaatgccactatcggcgatcttaagttaaacgtacaagcccttggtattatgtatacag

SEQ ID NO: 881086 - DNA, 75 bp, synthetic construct
  source 1..75: mol_type = other DNA
caattaaagatgaatcaaaggctactatcggttctctgacattaaacgtccaggctatcggtgtaatgtatacac

SEQ ID NO: 881087 - DNA, 75 bp, synthetic construct
  source 1..75: mol_type = other DNA
ctggctgacagacgtcctggcgcgtctgccggaatggccagaggagcgactggcagagttgctgccccttgaggg

SEQ ID NO: 881088 - DNA, 75 bp, synthetic construct
  source 1..75: mol_type = other DNA
ccacctgaacagaggtgatatgctcacctcagaacaacacaggtgcttcaatgaaaaaaagaaatttcagcgcag

SEQ ID NO: 881089 - DNA, 75 bp, synthetic construct
  source 1..75: mol_type = other DNA
aagtgaagtggcacactgaatttggccacctgaacagaggtgatatgctcacctcagaacaacacaggtgcttca

SEQ ID NO: 881090 - DNA, 75 bp, synthetic construct
  source 1..75: mol_type = other DNA
gcattgaaatggagaatgaaatattaaaaaaggctaccgcgctcttgatgtcagactccctgaacagttctcgat

SEQ ID NO: 881091 - DNA, 75 bp, synthetic construct
  source 1..75: mol_type = other DNA
tattccttttctctcctctattcctgtaatcggtaatgtgttcaagtataaaacaagtaatatcagtaatattgt

SEQ ID NO: 881092 - DNA, 75 bp, synthetic construct
  source 1..75: mol_type = other DNA
aagatcaatttattgatatgaaattcattacccaacttactggcctgagcgacaaatggttttacaagctgatac

SEQ ID NO: 881093 - DNA, 75 bp, synthetic construct
  source 1..75: mol_type = other DNA
ttcctgcactaccggaagtcctgtgggtacaacacaacggacagggtgtgacgacaccccgacagacaccggcgt

SEQ ID NO: 881094 - DNA, 75 bp, synthetic construct
  source 1..75: mol_type = other DNA
gtgaatgacctgtttgcctggcttgaagagcaggagccgtgctgtccgcccgacgggccattaaataaggcgatt

SEQ ID NO: 881095 - DNA, 75 bp, synthetic construct
  source 1..75: mol_type = other DNA
ctgcgccttcaggttttggtaaatccacaattctgcaatatttactcggtcttgataccccaactgagggcgata

SEQ ID NO: 881096 - DNA, 75 bp, synthetic construct
  source 1..75: mol_type = other DNA
ttatcatccgaaataaaagagcatttacacatggaggtattctcattcatgaaaacaccccttgtgaggttcagg

SEQ ID NO: 881097 - DNA, 75 bp, synthetic construct
  source 1..75: mol_type = other DNA
actatgcagcagcacttcaattggtcgataactggtatgcaatatgtattctgtttgtccaggcaattgcaccaa

SEQ ID NO: 881098 - DNA, 75 bp, synthetic construct
  source 1..75: mol_type = other DNA
tttgcatcatgcatcgttttgtgccgggtattagtgctattatcggcatcgtcagtccggttggtgatttgggat

SEQ ID NO: 881099 - DNA, 75 bp, synthetic construct
  source 1..75: mol_type = other DNA
caggcaaagacagttataaccattttgacacatggtttactggacgttatatggctttcggtatgaatacctcac

SEQ ID NO: 881100 - DNA, 75 bp, synthetic construct
  source 1..75: mol_type = other DNA
cctcgccgtcattcccctggttctattcctcgctgcgtgggctagtggtgggcggcaatcagatccgcatcgaaa

SEQ ID NO: 881101 - DNA, 75 bp, synthetic construct
  source 1..75: mol_type = other DNA
ctgcaacaacctgtggacagtggacgaacctgcactgagtctccattgaagaccgcccctggtcttaatcgagga

SEQ ID NO: 881102 - DNA, 75 bp, synthetic construct
  source 1..75: mol_type = other DNA
gaaggcctcgcgcagtaccgtcagcaacgcgctgatgatgttgcggatcacccgctggctgagcctgtgccagcg

SEQ ID NO: 881103 - DNA, 75 bp, synthetic construct
  source 1..75: mol_type = other DNA
agcacctctggccggagcattaatacttgattattataactggaatgtaatatttattgtaatgggtgcatttag

SEQ ID NO: 881104 - DNA, 75 bp, synthetic construct
  source 1..75: mol_type = other DNA
gaaggtgatcgcgtcagaagtgctaagaaggactcaatatctaagtcaataaggaatgcgaaaaaaagagctgag

SEQ ID NO: 881105 - DNA, 75 bp, synthetic construct
  source 1..75: mol_type = other DNA
attttgttgatgcgcagattgagactggaaggaaggttatcattggacaattcgggaaggcttacaatgtaaccg

SEQ ID NO: 881106 - DNA, 75 bp, synthetic construct
  source 1..75: mol_type = other DNA
tggcgctgttgagcatggctgtcagcagtctctgccgggcgggggcgcatgatatccctgagggctatgtgcgcg

SEQ ID NO: 881107 - DNA, 75 bp, synthetic construct
  source 1..75: mol_type = other DNA
atgctggacgccgatcccaactctccaggcttcaacagctacgcaagcgtgtcagacctgcgggcatttgccgtc

SEQ ID NO: 881108 - DNA, 75 bp, synthetic construct
  source 1..75: mol_type = other DNA
ccccgatgcccaggcacataacgaaacttcaccagtcacccgtatcaaagaaatgcagtattataatggtgcctg

SEQ ID NO: 881109 - DNA, 75 bp, synthetic construct
  source 1..75: mol_type = other DNA
aaattatggcgtctccggagcatttgaagtcactgcaacctcttataatgtggacgttgccgcaaaactgcaaca

SEQ ID NO: 881110 - DNA, 75 bp, synthetic construct
  source 1..75: mol_type = other DNA
cgtcgctgacaccccggcccctgccagtgcaccggagatgaatgcggcagataacgccgctgcggaacctgcccc

SEQ ID NO: 881111 - DNA, 75 bp, synthetic construct
  source 1..75: mol_type = other DNA
atgaaaaacgaaaccttcggtgctcgcctcttatacaggcgaaaaaaattaaaactgtctcaggccgcattaggt

SEQ ID NO: 881112 - DNA, 75 bp, synthetic construct
  source 1..75: mol_type = other DNA
atcattaacggcatttcatgaacgattaatggaactggccagaggcagtattgaaaaatccagtaaggatgaacg

SEQ ID NO: 881113 - DNA, 75 bp, synthetic construct
  source 1..75: mol_type = other DNA
aatactcttggggaaatagcagacaaaatcaacagcgtctcggttccgttaaatgttgatgcgctagttcaactt

SEQ ID NO: 881114 - DNA, 75 bp, synthetic construct
  source 1..75: mol_type = other DNA
aaaagaagcggccttgcaacgtgagaaacagaaaaacaaggagcttcagcaacgccttgccgatcagttcgcact

SEQ ID NO: 881115 - DNA, 75 bp, synthetic construct
  source 1..75: mol_type = other DNA
aaattgcatttggtgacgatcgccgccgtacaaccaaacacttctcaaaagaagacgagaaggagtttaatcgca

SEQ ID NO: 881116 - DNA, 75 bp, synthetic construct
  source 1..75: mol_type = other DNA
tacccaacaagaaattcttgctgcctttggagagcctcagacacgcgctacgaatgatgggcaggagatgtggaa

SEQ ID NO: 881117 - DNA, 75 bp, synthetic construct
  source 1..75: mol_type = other DNA
ttctggcgatgtatttaactcttggctggtgttgggcatgcatcctggtccgattagtgggattagctaatttat

SEQ ID NO: 881118 - DNA, 75 bp, synthetic construct
  source 1..75: mol_type = other DNA
agaaaagatggttaatgaattaaaaattagaacaagaatgatgaaaatcctccggaatggcaaaatcaatatata

SEQ ID NO: 881119 - DNA, 75 bp, synthetic construct
  source 1..75: mol_type = other DNA
ggacaattttttagtgcaacgagtccagaagagttacttggattagttgcaatgtgggaagttcgtggtaatgac

SEQ ID NO: 881120 - DNA, 75 bp, synthetic construct
  source 1..75: mol_type = other DNA
agaaaaatcgcgcttaatactaaggctatttgatgatgttaaattggtttttgataaagtgcctctcagtatttt

SEQ ID NO: 881121 - DNA, 75 bp, synthetic construct
  source 1..75: mol_type = other DNA
tcagaaaaaggccctgttgtcaaagctgaataaagaacttcgcaaaggggctgatgagtcagaaacgctcagaca

SEQ ID NO: 881122 - DNA, 75 bp, synthetic construct
  source 1..75: mol_type = other DNA
atgacgttgaagtacggtaataaaagcgttccattcggtgcaattgtcactcacggagagaataaaaatggcagc

SEQ ID NO: 881123 - DNA, 75 bp, synthetic construct
  source 1..75: mol_type = other DNA
gccacaggcaataaaaatgccgaaagcgccagtcattccagtcactcgagatgaagcagtcgatatcaacactta

SEQ ID NO: 881124 - DNA, 75 bp, synthetic construct
  source 1..75: mol_type = other DNA
gcgaaatattatctgatacggcaattaactttcttaaggagtatggcacagcttgcgccccatatgttgctttat

SEQ ID NO: 881125 - DNA, 75 bp, synthetic construct
  source 1..75: mol_type = other DNA
cacgcccgttaccccggcagcccgatgttatttctgggcgatgatgatctccccaaacccgggcgtccggggaat

SEQ ID NO: 881126 - DNA, 75 bp, synthetic construct
  source 1..75: mol_type = other DNA
attaaatggagatgcaacaccaaacattagaacaatgagcaataagaaaatagaatgcctggagaagagtgaagt

SEQ ID NO: 881127 - DNA, 75 bp, synthetic construct
  source 1..75: mol_type = other DNA
atggaaatgcttgggaatatattagtgataattatttccatgataattatatcttgtgattattataatgctggc

SEQ ID NO: 881128 - DNA, 75 bp, synthetic construct
  source 1..75: mol_type = other DNA
ctaacagttacgaagttattagccgtgctgatttaaaaatgaatggtggttccataacaactaatggcattaata

SEQ ID NO: 881129 - DNA, 75 bp, synthetic construct
  source 1..75: mol_type = other DNA
agtggatgacggtgtaactggatatataaataatgccagtgtgatgactagtggtgatggatcttatggtatttc

SEQ ID NO: 881130 - DNA, 75 bp, synthetic construct
  source 1..75: mol_type = other DNA
gatggtaaaggggactatacttgtggtggccaagaccaacggggagaatcaaaaggagatggtctatgggggcca

SEQ ID NO: 881131 - DNA, 75 bp, synthetic construct
  source 1..75: mol_type = other DNA
tatcgatacatcaggaataggtactcctggtgcggaattagttaacaacgatgcttatcgctacgaacgcgtgtt

SEQ ID NO: 881132 - DNA, 75 bp, synthetic construct
  source 1..75: mol_type = other DNA
tgcatggtgacgactttgaaccttttgttgaaatgaactggatccataacagtaaagattttgctgtctcaatga

SEQ ID NO: 881133 - DNA, 75 bp, synthetic construct
  source 1..75: mol_type = other DNA
ttgagaacgacctcgcatcgctacgtctcgcagttaggggcggatctgttaaccggtggttttaccgacagtgac

SEQ ID NO: 881134 - DNA, 75 bp, synthetic construct
  source 1..75: mol_type = other DNA
gcctggcgggcgtttctacctcaacagtttctcacgttatcaataaagatcgcttcgtcagtgaagcgattaccg

SEQ ID NO: 881135 - DNA, 75 bp, synthetic construct
  source 1..75: mol_type = other DNA
cttgagcaggatttatctccctccggtccgttaagtgcgtttcggggacatgtttcaaaaaaaacagaaaacatt

SEQ ID NO: 881136 - DNA, 75 bp, synthetic construct
  source 1..75: mol_type = other DNA
atccgggagtgaagcagtcagacctcagtgaagagcagaagcagacgataagtacgctggcaactgtgtcagcag

SEQ ID NO: 881137 - DNA, 75 bp, synthetic construct
  source 1..75: mol_type = other DNA
tttttaatgtgcctgatgacaataagagttatgataaattattaaaatccgtcagcgaaaatggtttaaatggag

SEQ ID NO: 881138 - DNA, 75 bp, synthetic construct
  source 1..75: mol_type = other DNA
ttcgatgatattttatttatggatgatgactttgatgataactcccctgatgatggtcccgttgagaatagtcct

SEQ ID NO: 881139 - DNA, 75 bp, synthetic construct
  source 1..75: mol_type = other DNA
tttttaatgcgcctgcttacaacaagagtaatgaaaaatcattagaacgcgtcagcgaaaacggtttaagtggag

SEQ ID NO: 881140 - DNA, 75 bp, synthetic construct
  source 1..75: mol_type = other DNA
tctgataaaggggggattttcacatatgcagattcaaacggaataatgtattctaatggtgaatatccttggcag

SEQ ID NO: 881141 - DNA, 75 bp, synthetic construct
  source 1..75: mol_type = other DNA
ctggaaaccccgctgaagctgacttttaccgaagatatgattccaattaaagcagagaattctagcatctattct

SEQ ID NO: 881142 - DNA, 75 bp, synthetic construct
  source 1..75: mol_type = other DNA
tatttactcctggcgttcaggggggagagttagttcgtaattttattatctttggaggtgaaaacgcggatcatt

SEQ ID NO: 881143 - DNA, 75 bp, synthetic construct
  source 1..75: mol_type = other DNA
acatgccgggtggcatgatatccgccggaggtcacagcggacatgcggaaggaacgactcaggccgcagtggcag

SEQ ID NO: 881144 - DNA, 75 bp, synthetic construct
  source 1..75: mol_type = other DNA
ccgtcacatcatcaattgggaaagggattacaaatatcggtggtgctatcatcggtctgattaatcctctgaacc

SEQ ID NO: 881145 - DNA, 75 bp, synthetic construct
  source 1..75: mol_type = other DNA
aagtaatttcgatagaataatccatagtggcaattggaaagatgaagtacgaaaaaaagttgctgctggaagatt

SEQ ID NO: 881146 - DNA, 75 bp, synthetic construct
  source 1..75: mol_type = other DNA
aatgcctattgcccgggtattgtgcggacaccaatgatggaaggcatcgcccggaaagtggccgatgaaaatggt

SEQ ID NO: 881147 - DNA, 75 bp, synthetic construct
  source 1..75: mol_type = other DNA
atcctaaagtactggctctgcagagttcagctgcgggtagcgcaacaaatgttggtgtgcagatactggacagaa

SEQ ID NO: 881148 - DNA, 75 bp, synthetic construct
  source 1..75: mol_type = other DNA
tactatccgttcataaagaaatggagcgatagttcacagggtttaatgcatgataaactgtatctatttacggaa

SEQ ID NO: 881149 - DNA, 75 bp, synthetic construct
  source 1..75: mol_type = other DNA
ttctttccttgatgttattttctgttacagggtgtagttttaatcaacttcccggtacaataattagccggtcgc

SEQ ID NO: 881150 - DNA, 75 bp, synthetic construct
  source 1..75: mol_type = other DNA
tgtgccgacgattcgcttcaacggtaccagtgttcacttcgataaaaagacgtacagtctgcgcgataatagcct

SEQ ID NO: 881151 - DNA, 75 bp, synthetic construct
  source 1..75: mol_type = other DNA
tatggctgaacgacagcgaaaccacggagaaactgaccgatgacaccccggacacaccgccagctcgtaagcgtt

SEQ ID NO: 881152 - DNA, 75 bp, synthetic construct
  source 1..75: mol_type = other DNA
ctgtcgtgcaggaaggaaaaaccacctatgtcctgctttccgaaataaacaatatcacgctgcctgaactgaatg

SEQ ID NO: 881153 - DNA, 75 bp, synthetic construct
  source 1..75: mol_type = other DNA
ctacggtaaatattggcgtgcgtcaaaaagggcgtattgccgcgcaaagcgtactcaattgtgatgctacaacgg

SEQ ID NO: 881154 - DNA, 75 bp, synthetic construct
  source 1..75: mol_type = other DNA
gatattgcctactctgtgcttgacgcagaagataccatcaagaaagggtttgcctcataccaggatttgcgtgat

SEQ ID NO: 881155 - DNA, 75 bp, synthetic construct
  source 1..75: mol_type = other DNA
ggtgatttgatccgcacaattcctctggattttgttaaggatctcgagacgatcgaatacattggcgataatcag

SEQ ID NO: 881156 - DNA, 75 bp, synthetic construct
  source 1..75: mol_type = other DNA
cagatagttaatgatggtttttacattaacaaaaaaattgagatattactctcttctgataccccgattggcgtt

SEQ ID NO: 881157 - DNA, 75 bp, synthetic construct
  source 1..75: mol_type = other DNA
atgggcaagggaatgcgagtgctaagatcattgagatgatcaaatccatgaattttgtaccgagcaagacattct

SEQ ID NO: 881158 - DNA, 75 bp, synthetic construct
  source 1..75: mol_type = other DNA
agtacatggcaacagatcgagcaggatggtttttcaattgatgagaaaattgaaattttgctctcctctgattct

SEQ ID NO: 881159 - DNA, 75 bp, synthetic construct
  source 1..75: mol_type = other DNA
ggagggatgggaacaaaggctgatgatttgtttgttattccgctgtgccgtaaatgtcataacgaactgcacgct

SEQ ID NO: 881160 - DNA, 75 bp, synthetic construct
  source 1..75: mol_type = other DNA
tgtatcacatggttttgagaagaataaaactataattacaaatgctgagaggcatcgagataaaaatattgtatt

SEQ ID NO: 881161 - DNA, 75 bp, synthetic construct
  source 1..75: mol_type = other DNA
gcaggcgctgaaaaaagctcgccttaaggcgcatacgtcgatagctaacactcgccgccgcaagtctatccgcat

SEQ ID NO: 881162 - DNA, 75 bp, synthetic construct
  source 1..75: mol_type = other DNA
tattatgaaacaatgaagaaaaataaagctgatgcttttttttattttgatgagtgttattttgaaaaattaatg

SEQ ID NO: 881163 - DNA, 75 bp, synthetic construct
  source 1..75: mol_type = other DNA
aaaaaccacctttcgtttaaggaaaaatgcgaacagatggccgtgtattttattgattcatttttctattactcc

SEQ ID NO: 881164 - DNA, 75 bp, synthetic construct
  source 1..75: mol_type = other DNA
atacagtatttagtggacaaggaaattccctccatgaatatgatagttcatatgccagaaggtttgagaataaga

SEQ ID NO: 881165 - DNA, 75 bp, synthetic construct
  source 1..75: mol_type = other DNA
taactgtaaataaaaaaataaatgtaagcagagagtatataaagaatacaagagcgatggcgcattctttatact

SEQ ID NO: 881166 - DNA, 75 bp, synthetic construct
  source 1..75: mol_type = other DNA
gacattatccggataaacgcagtgcccgtgctcagcgcgatgactggctgaagaaagagatacagcgcgtatacg

SEQ ID NO: 881167 - DNA, 75 bp, synthetic construct
  source 1..75: mol_type = other DNA
atgccatactttcagtatcctgatgagtttcccctgagctcgctgcctccactcattcgtgatgccgttattgaa

SEQ ID NO: 881168 - DNA, 75 bp, synthetic construct
  source 1..75: mol_type = other DNA
ggatcccgctctctgccaacaggtgctggacgactgcctgtggcggatcgccgcccacgatatccaccgccccct

SEQ ID NO: 881169 - DNA, 75 bp, synthetic construct
  source 1..75: mol_type = other DNA
cggcgaatattaaaggattaacctttacgtacgaaccgaaagtattgcgtcacttcaccgcaaaacttaaagaag

SEQ ID NO: 881170 - DNA, 75 bp, synthetic construct
  source 1..75: mol_type = other DNA
ttggctctttcctgttaggccgcgatccgaaaaccggtaaacaactgccatgcccggctgaactgctgcgtttaa

SEQ ID NO: 881171 - DNA, 75 bp, synthetic construct
  source 1..75: mol_type = other DNA
tcatgaacgattaatggaactggccagaggcagtattgaaaaatccagtaaggatgaacgttattgtctgcattt

SEQ ID NO: 881172 - DNA, 75 bp, synthetic construct
  source 1..75: mol_type = other DNA
cttcatttgagtatgctttcaccgttgggctaataacttttcgcgttgtagttcgtggcaatgcggaatacatga

SEQ ID NO: 881173 - DNA, 75 bp, synthetic construct
  source 1..75: mol_type = other DNA
atggtgaattactgtcttatatcattggcgctgacattatgggcccgtcgaccgtccggcacggtccatcacagt

SEQ ID NO: 881174 - DNA, 75 bp, synthetic construct
  source 1..75: mol_type = other DNA
aagccggattactggcatcaacaggaagtactggcgactcgtatgacaacgcgatggcggagagcatcaatggtc

SEQ ID NO: 881175 - DNA, 75 bp, synthetic construct
  source 1..75: mol_type = other DNA
acagcgataaaggctctcagtatgtgtcactggcctatacggagcgactaaaagaagccggattactggcatcaa

SEQ ID NO: 881176 - DNA, 75 bp, synthetic construct
  source 1..75: mol_type = other DNA
ccagtcgtgatgtgaaggctggggtaaatgctctgggcgaatcaacggttaccttttatccaaaagaaggtgagt

SEQ ID NO: 881177 - DNA, 75 bp, synthetic construct
  source 1..75: mol_type = other DNA
cactggagcaggcgttgtgggcccgtcggccgtccggcacagtccatcacagtgataaaggttctcagtatgtat

SEQ ID NO: 881178 - DNA, 75 bp, synthetic construct
  source 1..75: mol_type = other DNA
gtatacgatgaaaatcaccaggtatacggtgtgcgtaaagtctggcgtcagttgttacgggaaggtatcagagtg

SEQ ID NO: 881179 - DNA, 75 bp, synthetic construct
  source 1..75: mol_type = other DNA
gtaattagcagcactaagtatcgaattgcactacttgatgacgatgctaatatcaccgaaagcttaaaagaaatc

SEQ ID NO: 881180 - DNA, 75 bp, synthetic construct
  source 1..75: mol_type = other DNA
taaacacagaatactcagcactgaaagtagctgaccaatggaacatttttccgacaaatgatttaaaagatgaac

SEQ ID NO: 881181 - DNA, 75 bp, synthetic construct
  source 1..75: mol_type = other DNA
catggatatgattgagtttttccgtatttattatgaggataataaagaaattcaagatgcgatctggaacgatgg

SEQ ID NO: 881182 - DNA, 75 bp, synthetic construct
  source 1..75: mol_type = other DNA
gtgatccggaggctgactcatttgatgcattagcaatcactatggctggcctggctgatatcgatgaaggcaccg

SEQ ID NO: 881183 - DNA, 75 bp, synthetic construct
  source 1..75: mol_type = other DNA
tggcagggcttcgtctatgtggcgttcatcattgatgtgtttgccggatacattgtggggtggcgggtctcatcg

SEQ ID NO: 881184 - DNA, 75 bp, synthetic construct
  source 1..75: mol_type = other DNA
ggaaacgacattcgtgctggatgcactggagcaggcgttatgggcccgtcgaccgtccggcacggtccatcacag

SEQ ID NO: 881185 - DNA, 75 bp, synthetic construct
  source 1..75: mol_type = other DNA
tacttggcgtaaatcattactggcacggcggtattcatgccggaatgtcatcgtctccggcctcggtgctggatc

SEQ ID NO: 881186 - DNA, 75 bp, synthetic construct
  source 1..75: mol_type = other DNA
agaggaattgaattctattcgagatcaaatcaatgatgaaatgcacttctttgcaataccaatggatcttagtga

SEQ ID NO: 881187 - DNA, 75 bp, synthetic construct
  source 1..75: mol_type = other DNA
ggttttgagccaaaaatcattctctatcctgagaggggctataggccttcagattataaggagagtttttcaaca

SEQ ID NO: 881188 - DNA, 75 bp, synthetic construct
  source 1..75: mol_type = other DNA
gcacgatttagctgagctaaactttcactgtattgaggctgaacacacgaccgattttacccgcacgctggatga

SEQ ID NO: 881189 - DNA, 75 bp, synthetic construct
  source 1..75: mol_type = other DNA
cggtatgtaagtccagggatgaaagcccggttgtgaagatggccaacggaggatttctggatgcaacgcactgga

SEQ ID NO: 881190 - DNA, 75 bp, synthetic construct
  source 1..75: mol_type = other DNA
accagaacgatgtggagcagctcagtcagcacgatttagcggggctaaattttcactgtattgaagctgaacaca

SEQ ID NO: 881191 - DNA, 75 bp, synthetic construct
  source 1..75: mol_type = other DNA
atgattgtttcactaagaaagatgaaaaacagaaatatcttcttttcactttcagagcaaacattcattagccga

SEQ ID NO: 881192 - DNA, 75 bp, synthetic construct
  source 1..75: mol_type = other DNA
cttagatttgataaccgctttaccaaaaacgtacttcttgtcgcagtggatgacgtaagtatacttgcaaaactg

SEQ ID NO: 881193 - DNA, 75 bp, synthetic construct
  source 1..75: mol_type = other DNA
ttatccactgtttgtctttgctattatatgcatatccttatttttatctaaaaaacttggaggggaaaaactatg

SEQ ID NO: 881194 - DNA, 75 bp, synthetic construct
  source 1..75: mol_type = other DNA
acagaaataacattggctcaatttgaacagtcttcatctccaacattgaaggctcattggctaagagttgctctt

SEQ ID NO: 881195 - DNA, 75 bp, synthetic construct
  source 1..75: mol_type = other DNA
ggtgtgtgatgttttatggataaataaccgtaaggatatagattctgctaataaagcaatagagtcatatgctct

SEQ ID NO: 881196 - DNA, 75 bp, synthetic construct
  source 1..75: mol_type = other DNA
ctgggcgtggtcatggccagccaaccgccgtattctctacaatcgcgcttcggcagatccatcaggaaaaccgtg

SEQ ID NO: 881197 - DNA, 75 bp, synthetic construct
  source 1..75: mol_type = other DNA
atgatgaacatacgttatccggtacggaaagccgatggacgagactacaagaactatgacgagctgctgaccgac

SEQ ID NO: 881198 - DNA, 75 bp, synthetic construct
  source 1..75: mol_type = other DNA
atccgctgctgcgggagaattttgtcgagcgcgtcttcgccctgcatgaactcaacgccctgcgcgcccgcggcc

SEQ ID NO: 881199 - DNA, 75 bp, synthetic construct
  source 1..75: mol_type = other DNA
cacaaaaatagatcatttgctatcgtggataaatagtcgattaggaggaatattctaccaactgctggcgcaggc

SEQ ID NO: 881200 - DNA, 75 bp, synthetic construct
  source 1..75: mol_type = other DNA
agttttgttgttcacttgatattggcatgaataccagagatcaaaagttaaaaatgcgagttgataagctatgtg

SEQ ID NO: 881201 - DNA, 75 bp, synthetic construct
  source 1..75: mol_type = other DNA
taaatctaatgcggcgtatgtcggcgcacctttctacagcaagttttcgccggcatatggtgactatcaactggc

SEQ ID NO: 881202 - DNA, 75 bp, synthetic construct
  source 1..75: mol_type = other DNA
cacagtctttgagcctgtaaacagttttacagaaaaaccagaagacgctggcgagacttcagcgacagttaagcc

SEQ ID NO: 881203 - DNA, 75 bp, synthetic construct
  source 1..75: mol_type = other DNA
tagatgggaaagtaaaaccagcggcaaatcagggtactctcctgcctgcgctaacgaatggcaggcgagaatatg

SEQ ID NO: 881204 - DNA, 75 bp, synthetic construct
  source 1..75: mol_type = other DNA
ttacctaacgggatcaccctctccgggttacatctgggcaatatcgatttgctcggcgctatcatgaggcagttg

SEQ ID NO: 881205 - DNA, 75 bp, synthetic construct
  source 1..75: mol_type = other DNA
gcacagtgcgctgaatcacggcgtgtttgatgatgtggtggtgccgcctgtgccattgaaagtgatggtgaaagc

SEQ ID NO: 881206 - DNA, 75 bp, synthetic construct
  source 1..75: mol_type = other DNA
atcgtttttactggaacagcggccggagccgtttgctctggtgcaacgtcttcaggacggtaaacccgccggaga

SEQ ID NO: 881207 - DNA, 75 bp, synthetic construct
  source 1..75: mol_type = other DNA
gtcctgaacgatatcaacggcgaactggtgaatctgtaccgtgtggttaaaaatcatcttgaagagtttgtgcgc

SEQ ID NO: 881208 - DNA, 75 bp, synthetic construct
  source 1..75: mol_type = other DNA
tgtttggtgccagcgcccgccgtgctgccggttacggcttctggcagatggctgtcgcggtaaaaggtgatctga

SEQ ID NO: 881209 - DNA, 75 bp, synthetic construct
  source 1..75: mol_type = other DNA
ttctctggaaagtattccaggcatacacggaaatggactcctggtctggcgttctcaaatcactgatgtatgccg

SEQ ID NO: 881210 - DNA, 75 bp, synthetic construct
  source 1..75: mol_type = other DNA
ctatactacacaggtcataaccctttatacgatgaattttcacgaataaaccgacttgcatacaaccttcctatt

SEQ ID NO: 881211 - DNA, 75 bp, synthetic construct
  source 1..75: mol_type = other DNA
tgggtattatctttactaccccagccgcaagcagcatccgccagcttttgcgttgttgatcgatgcgcttcgcta

SEQ ID NO: 881212 - DNA, 75 bp, synthetic construct
  source 1..75: mol_type = other DNA
agatatttactcatctaatctaaccttagagaaggtcttatctctttataataaatccgctggggtaattgcaat

SEQ ID NO: 881213 - DNA, 75 bp, synthetic construct
  source 1..75: mol_type = other DNA
taatggatgagaatgatctatttcttgaaagtgaagttgaatttcaaaataaaaaaggtaataaatgttatggta

SEQ ID NO: 881214 - DNA, 75 bp, synthetic construct
  source 1..75: mol_type = other DNA
gagtatacgcgagcggtttatccccgctggcgcggggaactctctcaaagtatacatttgttcttaaagcatttt

SEQ ID NO: 881215 - DNA, 75 bp, synthetic construct
  source 1..75: mol_type = other DNA
atatatggaagcgacccggtttatccccgctggcgcggggaactccacagcgccgacgtcagtgccgataatccc

SEQ ID NO: 881216 - DNA, 75 bp, synthetic construct
  source 1..75: mol_type = other DNA
ccctgccgtctgacagcagtagcggtttatccccgctggcgcggggaactcgcagaactgagaattctcaaatgg

SEQ ID NO: 881217 - DNA, 75 bp, synthetic construct
  source 1..75: mol_type = other DNA
attaccaggcccagcaacttcgttaatttgttgcaacaatgtgtcttcgaagcggatgtttttctttgtgctgcc

SEQ ID NO: 881218 - DNA, 75 bp, synthetic construct
  source 1..75: mol_type = other DNA
ttttcagtaatgctacatcgactacaatatcagcatttaatacagcgtcatcaagcgtacgtaccgttggaaaaa

SEQ ID NO: 881219 - DNA, 75 bp, synthetic construct
  source 1..75: mol_type = other DNA
aaagaatgggtagataatcattggtctagattgaatagtaccggttctacaccgccgccactgttaatctcgcta

SEQ ID NO: 881220 - DNA, 75 bp, synthetic construct
  source 1..75: mol_type = other DNA
gcgcggcgagctgcgggaggtgatcctcaactatcgcgccgggctgctgccgatcctcgcgccgctgacgctgct

SEQ ID NO: 881221 - DNA, 75 bp, synthetic construct
  source 1..75: mol_type = other DNA
aacagctcgaggtcaggacatccagatacgtggacagaacatcagcgcacagaatgctgctctttcccgagaaat

SEQ ID NO: 881222 - DNA, 75 bp, synthetic construct
  source 1..75: mol_type = other DNA
atgacacataaaacaaaggcgacccggatcagaggtcgccaatgggaaaacactaaacataagcccgaacatcat

SEQ ID NO: 881223 - DNA, 75 bp, synthetic construct
  source 1..75: mol_type = other DNA
tcaaggtcgcggggacgccacgggcagtcaatgtcggtttatccccgctggcgcggggaactcactaaacataac

SEQ ID NO: 881224 - DNA, 75 bp, synthetic construct
  source 1..75: mol_type = other DNA
ttacacggtaacggcaactgatgctgccggtaatcagacgtctattaaagatcagttcacaatcaattatcagga

SEQ ID NO: 881225 - DNA, 75 bp, synthetic construct
  source 1..75: mol_type = other DNA
agaattatccacaaggtaattatgcttataacattcaggttaccatgccgtcgggggatattttcgctgataaag

SEQ ID NO: 881226 - DNA, 75 bp, synthetic construct
  source 1..75: mol_type = other DNA
actggcaattggttccagtgtctatacctttgcagcggatgcatccggaagatggagttttactctgccggagca

SEQ ID NO: 881227 - DNA, 75 bp, synthetic construct
  source 1..75: mol_type = other DNA
ctttactatacagggcattattcattatatgatgaatactctcgtataaataggttggcatataaccttcctatt

SEQ ID NO: 881228 - DNA, 75 bp, synthetic construct
  source 1..75: mol_type = other DNA
taaagctgaaaacaaatatcttttttacacattaaagacaaacaaacaagcaggtctctctcctgaaggttttgg

SEQ ID NO: 881229 - DNA, 75 bp, synthetic construct
  source 1..75: mol_type = other DNA
ccgtcgtcagactaaacacctcatgggatacacaacatggaacaggcgttgccacaggcatgtccattggatggt

SEQ ID NO: 881230 - DNA, 75 bp, synthetic construct
  source 1..75: mol_type = other DNA
tcgtagctgccactcgactgaaagccggtttatccccgctggcgcggggaacacgtcgcctgttcaactttaaac

SEQ ID NO: 881231 - DNA, 75 bp, synthetic construct
  source 1..75: mol_type = other DNA
acggtttatccccgctggcgcggggaacactgtacgcggcgagttttagcgacaggtcatcccggtttatccccg

SEQ ID NO: 881232 - DNA, 75 bp, synthetic construct
  source 1..75: mol_type = other DNA
tatccccgctggcgcggggaactcgcgggtatgctccgctccgtgttcgacaaactcggtttatccccgctggcg

SEQ ID NO: 881233 - DNA, 75 bp, synthetic construct
  source 1..75: mol_type = other DNA
tggtggttattataactttaatgatcttaaccatggtaactatgtaaaatctgaccatgcattttattttgttta

SEQ ID NO: 881234 - DNA, 75 bp, synthetic construct
  source 1..75: mol_type = other DNA
tttgtcatttggtgcggcagttgcaactatttttgatggcgatactactgatagcgctgtagcgcatattatcgg

SEQ ID NO: 881235 - DNA, 75 bp, synthetic construct
  source 1..75: mol_type = other DNA
gcggggaacacggcatcagccagcgtgaacagctatcaaacggcgatttatccccgctggcgcggggaacaccga

SEQ ID NO: 881236 - DNA, 75 bp, synthetic construct
  source 1..75: mol_type = other DNA
aaatatattgttacgaatccagccgattatgataaatattccgatatggttaaaaagcatgtaatagatggtgag

SEQ ID NO: 881237 - DNA, 75 bp, synthetic construct
  source 1..75: mol_type = other DNA
gaaattagatggttccccaaaaatttgaaagaagcgtatattgaatataataagattgaggttattcctgcgata

SEQ ID NO: 881238 - DNA, 75 bp, synthetic construct
  source 1..75: mol_type = other DNA
atcaagtgagttagtcagttgtcttggaaatggtaagtttacaccaattagtgaagacagcaaattatttaatat

SEQ ID NO: 881239 - DNA, 75 bp, synthetic construct
  source 1..75: mol_type = other DNA
gcgagcgggaaaaagcgcagcggcgcagcctggcagagacgctccagcaggaagggagtgagaacggccacggcg

SEQ ID NO: 881240 - DNA, 75 bp, synthetic construct
  source 1..75: mol_type = other DNA
tagtgagatgactgatgagattatcagtttactttataatgaaaaaaaaatacgacaaattgctgaaaatgggaa

SEQ ID NO: 881241 - DNA, 75 bp, synthetic construct
  source 1..75: mol_type = other DNA
tgcgcagtgcgggctgacggtggagcaactggccagacaggtggagccggaatacacaccggcgcgaaaagttca

SEQ ID NO: 881242 - DNA, 75 bp, synthetic construct
  source 1..75: mol_type = other DNA
ggcttgagttttggaaagaaaaacttagtaaaataagaaatcatacttatgcgtgtattttttctggtgcccaga

SEQ ID NO: 881243 - DNA, 75 bp, synthetic construct
  source 1..75: mol_type = other DNA
aaagaaggcggatcgaatgacctcaaagaaaatgtagatagagcattggtgagaatgtttaaatgtgttaagctt

SEQ ID NO: 881244 - DNA, 75 bp, synthetic construct
  source 1..75: mol_type = other DNA
agccttgtttccatccataaatcagggattctaagtttagagaaaaagttgaaacttccatcttatatatcttta

SEQ ID NO: 881245 - DNA, 75 bp, synthetic construct
  source 1..75: mol_type = other DNA
tcagcgatgacatggcacaagcgttaagccaggccacacagcagagtcttgaagcctcccgccaatgggtggaac

SEQ ID NO: 881246 - DNA, 75 bp, synthetic construct
  source 1..75: mol_type = other DNA
ctttcccgtctgcctcgcctttataaagataagtcatcctggaatacgctggtccgggatgtgccttatagtgaa

SEQ ID NO: 881247 - DNA, 75 bp, synthetic construct
  source 1..75: mol_type = other DNA
ggagaaacgccctcttcgggttggcagggatgcagaaatggattcactcattcggcaattagcagaagataaagg

SEQ ID NO: 881248 - DNA, 75 bp, synthetic construct
  source 1..75: mol_type = other DNA
atttggtgtggatatcagccatcataacggcaggaacttcccgatcgaactgttggcaaaaaataagtctgtgtt

SEQ ID NO: 881249 - DNA, 75 bp, synthetic construct
  source 1..75: mol_type = other DNA
atgctaattgatcaaaatacaattatttttcaaggcaatgccaatagcggcgattttttagctaattatgcttac

SEQ ID NO: 881250 - DNA, 75 bp, synthetic construct
  source 1..75: mol_type = other DNA
ctatagccatctaaagttcgttactgattatttcaccaatttacctaacaaaaccattaaacgcgaacgtcatta

SEQ ID NO: 881251 - DNA, 75 bp, synthetic construct
  source 1..75: mol_type = other DNA
cgcaaagattaaaagagcatatgaatataacttatactcatatgatgatattattgtagttgattttgacaaaaa

SEQ ID NO: 881252 - DNA, 75 bp, synthetic construct
  source 1..75: mol_type = other DNA
gcgtgatgctggtcctgctgtcctggatgccagctcaggcaacggccgcagccagcaacgcgggtgatggccgct

SEQ ID NO: 881253 - DNA, 75 bp, synthetic construct
  source 1..75: mol_type = other DNA
gatctctggtattgcatcagccgaagcgaggatgcatggtatgttgataaacttacctcactttgtgcccaggcc

SEQ ID NO: 881254 - DNA, 75 bp, synthetic construct
  source 1..75: mol_type = other DNA
ttgatgcactggtacaacgaccagagtgtgacgtaattctcattgaggcagatggctcgcgtggaatgccgttaa

SEQ ID NO: 881255 - DNA, 75 bp, synthetic construct
  source 1..75: mol_type = other DNA
tatagcgcagggctgtatgccacctggtttgccgatgacatcagtaaaaaaggcgcatacattgactcctgggcg

SEQ ID NO: 881256 - DNA, 75 bp, synthetic construct
  source 1..75: mol_type = other DNA
cgattagaaggatttttaggcaaaccaattgccagactaaaccctagacgtggttttgatttctggttacgtgaa

SEQ ID NO: 881257 - DNA, 75 bp, synthetic construct
  source 1..75: mol_type = other DNA
tatatcgacagataataaatttattggactgttggttcctcttggtattttatcaagcccatttttaattgaaaa

SEQ ID NO: 881258 - DNA, 75 bp, synthetic construct
  source 1..75: mol_type = other DNA
caacgggggattactcaattggtttgctaagtcaaacgagtggaaacctgaatactgacaccataataagagtca

SEQ ID NO: 881259 - DNA, 75 bp, synthetic construct
  source 1..75: mol_type = other DNA
gtcgttattgatggaaatacctctggaacaacccgagttaaagttaccaatgcaggaggcagtggagcttacacg

SEQ ID NO: 881260 - DNA, 75 bp, synthetic construct
  source 1..75: mol_type = other DNA
ggattgatttttggaatgataaactgagtaatataaaaaaccatacatatgcttgtattttttctggagctcaaa

SEQ ID NO: 881261 - DNA, 75 bp, synthetic construct
  source 1..75: mol_type = other DNA
ctattcgacgtcgggtttctacaccctttccgacaccatgtataaacacatggatggctacgaatttaatgacgg

SEQ ID NO: 881262 - DNA, 75 bp, synthetic construct
  source 1..75: mol_type = other DNA
tttgctctaaatttttccctgccgctcaatctgttgctccccagaagtaatgatagctataccaggaaaaaaaat

SEQ ID NO: 881263 - DNA, 75 bp, synthetic construct
  source 1..75: mol_type = other DNA
gaagaatctcagcagctatttgcaacgggcggttattcctctgaaaggcgaactgaccgtaggtgatgattatac

SEQ ID NO: 881264 - DNA, 75 bp, synthetic construct
  source 1..75: mol_type = other DNA
cccgatcaaatttgtcatatcagttaccagcttaccgaacaacaaattaactctgcgattacgcgaatggatgcc

SEQ ID NO: 881265 - DNA, 75 bp, synthetic construct
  source 1..75: mol_type = other DNA
cccaggccacgttgcagtggggcggaccgtggggaacgacctggtatggtggtggacaatatgctgaatattacc

SEQ ID NO: 881266 - DNA, 75 bp, synthetic construct
  source 1..75: mol_type = other DNA
ccctgccgctcaatctgttgctccccagaagtaatgatagctataccaggaaaaaaaattacgcatggatgacct

SEQ ID NO: 881267 - DNA, 75 bp, synthetic construct
  source 1..75: mol_type = other DNA
gtgacaatgttgaagacaggcgcaacagctctggtggtccgtctatgggcggtcccggttttcgcctgccaagcg

SEQ ID NO: 881268 - DNA, 75 bp, synthetic construct
  source 1..75: mol_type = other DNA
gcgaatgggtgaacccggcgattgatagcgacgcgctggcaaatcaaatcacgatggcgggcctggaagttgatg

SEQ ID NO: 881269 - DNA, 75 bp, synthetic construct
  source 1..75: mol_type = other DNA
gtatcagttgaagagttacgcctgattgtgaagcttggcctgctgccgaaacctgcgggcgttcgatacgattat

SEQ ID NO: 881270 - DNA, 75 bp, synthetic construct
  source 1..75: mol_type = other DNA
ttgggatgaagggatcaacgcgctattactgggatattcgtttagcggggctaacagtattcatagcagcgcaga

SEQ ID NO: 881271 - DNA, 75 bp, synthetic construct
  source 1..75: mol_type = other DNA
aattatactgaatgcagcacagggtattaccctgaccagcagggggggcgcctatatcaaacttaaagatggggc

SEQ ID NO: 881272 - DNA, 75 bp, synthetic construct
  source 1..75: mol_type = other DNA
atcaacgcggtcaattagccctaatgaagacgaagccgcaaaattcacctcggtgattctggcaaccacggaaga

SEQ ID NO: 881273 - DNA, 75 bp, synthetic construct
  source 1..75: mol_type = other DNA
ggcgacgctcccgatcaaatttgtcatatcagttacgagcttaccgaacaacaaattaacgctgcgattacgcgg

SEQ ID NO: 881274 - DNA, 75 bp, synthetic construct
  source 1..75: mol_type = other DNA
tatgtcccatggtgaggattactcatcagcaccaaatagcattaagaaatgtgcaaaaaaatatggtttcgagcc

SEQ ID NO: 881275 - DNA, 75 bp, synthetic construct
  source 1..75: mol_type = other DNA
ctggtaattgttctaatgattattatgaacatctgaaaaatcaaaaagaagctatttgcaaccaaaaaagaaagt

SEQ ID NO: 881276 - DNA, 75 bp, synthetic construct
  source 1..75: mol_type = other DNA
cgagcgagttactctcttgggtaaaaaagataatgttgttgattattatcatgattctgatgcttttgtgctggc

SEQ ID NO: 881277 - DNA, 75 bp, synthetic construct
  source 1..75: mol_type = other DNA
tatcggaaacaccagcaataccagacaccgctaaggtttttgattgtggctataataagatacaagaaattcgat

SEQ ID NO: 881278 - DNA, 75 bp, synthetic construct
  source 1..75: mol_type = other DNA
tgtttgtaaataatttcagtctgggaataataggactgctttgtgcaatctttgcttatatgacagtggggccgg

SEQ ID NO: 881279 - DNA, 75 bp, synthetic construct
  source 1..75: mol_type = other DNA
acggcggcaaccagtaataaaaccgttcaacgcattttggttgcctgtgattcaggcatggggtccagcgcaatg

SEQ ID NO: 881280 - DNA, 75 bp, synthetic construct
  source 1..75: mol_type = other DNA
ctaacagtattcatagcagtacagacagtgattccacagatagctattttcttaatctaaacagtggcgtgaatt

SEQ ID NO: 881281 - DNA, 75 bp, synthetic construct
  source 1..75: mol_type = other DNA
gggtataccgctgcgatttggcgcgatagcaacgctggatggggtacagaccaatagcggcataattgatgacga

SEQ ID NO: 881282 - DNA, 75 bp, synthetic construct
  source 1..75: mol_type = other DNA
aaacttatgtctcgccaggcgcttttgagattagtgatctctactccacgtcgtcgagcggtgatttgctggttg

SEQ ID NO: 881283 - DNA, 75 bp, synthetic construct
  source 1..75: mol_type = other DNA
tgaaggcgacccggaccggccgtatatcgcccatgcgctgcacgactcccgccatgcagaccccgtcaccgaagc

SEQ ID NO: 881284 - DNA, 75 bp, synthetic construct
  source 1..75: mol_type = other DNA
cactggcagatcaaagtgaacataaaggtcagtcgtatcgtttcctgtatgccaaaacgcttaaccagtttggca

SEQ ID NO: 881285 - DNA, 75 bp, synthetic construct
  source 1..75: mol_type = other DNA
taggttcgtggagattgcgcaacaattcaacatggagtcgtagtagcggacaacccgcagaatggaagaatctca

SEQ ID NO: 881286 - DNA, 75 bp, synthetic construct
  source 1..75: mol_type = other DNA
gggttatccgcacggatgatgagcggactcaccggtaccattacgacagtcagcaccggctggtgcactacacgc

SEQ ID NO: 881287 - DNA, 75 bp, synthetic construct
  source 1..75: mol_type = other DNA
ctggatgtcgctgtcacggaaaccgcaagtgacctggtacggctgggacggcgaccggctgaccacaatacagaa

SEQ ID NO: 881288 - DNA, 75 bp, synthetic construct
  source 1..75: mol_type = other DNA
gattgggctgaaggggggatggaatttttatcagtatccgctgaatccggttcagtatatagattcaatgggact

SEQ ID NO: 881289 - DNA, 75 bp, synthetic construct
  source 1..75: mol_type = other DNA
ccgggctggacgatggcgacatcgttacggtgaaagaagcgacggacgccctgctgcattgtgcggagcagcttc

SEQ ID NO: 881290 - DNA, 75 bp, synthetic construct
  source 1..75: mol_type = other DNA
ggcggcacgccggaaacggcggtacagcaaagcgaattactctacgccggggcgaatcgtcataccggcctgcgg

SEQ ID NO: 881291 - DNA, 75 bp, synthetic construct
  source 1..75: mol_type = other DNA
ggcagaccgcgtgagcagtgaaagccgggcgtggcttgcgcagtgcgggctgacggtggagcaactggccagaca

SEQ ID NO: 881292 - DNA, 75 bp, synthetic construct
  source 1..75: mol_type = other DNA
gatatagaaactggagtttggattccgactgtaggtggtaatgccacatattatcagcagaaaggaaattatgtc

SEQ ID NO: 881293 - DNA, 75 bp, synthetic construct
  source 1..75: mol_type = other DNA
aaagttcctgatttcttatatgatcttaaaaaacccaaggggtttcgtgctctctatcgaaatttgactaatgat

SEQ ID NO: 881294 - DNA, 75 bp, synthetic construct
  source 1..75: mol_type = other DNA
gtaccgcacttacacggataaaaacaagcccacagtgcaggatattggcgcattatccgcaacaggtaacgcagt

SEQ ID NO: 881295 - DNA, 75 bp, synthetic construct
  source 1..75: mol_type = other DNA
atccaaccgatacgattgtaaaaatcaaaaataaagagattatgtctattcctgacagaaggtttttagctagag

SEQ ID NO: 881296 - DNA, 75 bp, synthetic construct
  source 1..75: mol_type = other DNA
ggcgttatggtactgattgcaggtggcaacgtggtgcgttttgcgcctgcgctcaatgtcagcgaagaagaggtg

SEQ ID NO: 881297 - DNA, 75 bp, synthetic construct
  source 1..75: mol_type = other DNA
tgggtcaggagatggtttcagaattggagggttaccatatgtatcaagcaataaagctgcatatgttggaagtac

SEQ ID NO: 881298 - DNA, 75 bp, synthetic construct
  source 1..75: mol_type = other DNA
ttctccgcaagagattgaaccggaacagtggctggttgccgtgtggggtgggctgactatgtgccgcgctgggcg

SEQ ID NO: 881299 - DNA, 75 bp, synthetic construct
  source 1..75: mol_type = other DNA
aaatcgttaccacgttaggccctgctactgatcgcgataataaccttgaaaaagttatcgctgccggcgcgaacg

SEQ ID NO: 881300 - DNA, 75 bp, synthetic construct
  source 1..75: mol_type = other DNA
agtactatcgaaaatgttgcagtagcgtatccacagaaaaaagaacaaaccgccattgccaatgccctatccgat

SEQ ID NO: 881301 - DNA, 75 bp, synthetic construct
  source 1..75: mol_type = other DNA
gtaaatgccttatccggcctacaaagtatcgcaaattcaatacattgcaaaaaaacacgtaggcctgataagcgt

SEQ ID NO: 881302 - DNA, 75 bp, synthetic construct
  source 1..75: mol_type = other DNA
atgccacgagcgctgattggttcctgtctgctggttctggtgctctacaccctgctggcgctggtgatttccggc

SEQ ID NO: 881303 - DNA, 75 bp, synthetic construct
  source 1..75: mol_type = other DNA
atgtgttgtatgcgcaggcgctggaaatggccgatcccggtatggataaggctgatattttccgggaagcagtga

SEQ ID NO: 881304 - DNA, 75 bp, synthetic construct
  source 1..75: mol_type = other DNA
gtgaaggctgtatatgaccttgccaatggaaaacaacctgccgacgccacactgaccgcactggcaggccttgcc

SEQ ID NO: 881305 - DNA, 75 bp, synthetic construct
  source 1..75: mol_type = other DNA
cttaagactcggtgcagacgactatgtgataaaaccttttaatccgtcagaggttattgccagagttgaagccgt

SEQ ID NO: 881306 - DNA, 75 bp, synthetic construct
  source 1..75: mol_type = other DNA
tcaagtgctggatatgctagaggcgcatagcgacagttccattgttccgttaagcaaaagcacgccggatgtcga

SEQ ID NO: 881307 - DNA, 75 bp, synthetic construct
  source 1..75: mol_type = other DNA
tgtggcagcgtttttgccaattttatcatcagaatcctttgcaaaggctgcgcgatgcgaaagaacgcgaccaac

SEQ ID NO: 881308 - DNA, 60 bp, synthetic construct
  source 1..60: mol_type = other DNA
atgattcggttgtacccggaacaactccgcgcgcagctcaatgaagggctgcgcgcggcg

SEQ ID NO: 881309 - DNA, 75 bp, synthetic construct
  source 1..75: mol_type = other DNA
gggaaaggtgaaggcgataaagaaaaagtcggcatcgactataaaggattgcctgctgacgtcgtgcctggcgac

SEQ ID NO: 881310 - DNA, 75 bp, synthetic construct
  source 1..75: mol_type = other DNA
gggacgaatcagatacctgatatgggtagcttcacgctttctgtttcaggtactggatatcaaaaattaccatct

SEQ ID NO: 881311 - DNA, 75 bp, synthetic construct
  source 1..75: mol_type = other DNA
ggctgatcggtgttgatgctattcgtggggctgcaatgagagtaatcggtaataagtttggtggctctaaggagt

SEQ ID NO: 881312 - DNA, 75 bp, synthetic construct
  source 1..75: mol_type = other DNA
ccatcagcggtcaggtcacgggaacggcggttgccgggaatacggtgattgtcaccattggcggcaatcaatata

SEQ ID NO: 881313 - DNA, 75 bp, synthetic construct
  source 1..75: mol_type = other DNA
ctccgcaggcaacagcggcacggcctcgcacactgtcaccgtggcgctcggcgctccggtgctcgccattaacac

SEQ ID NO: 881314 - DNA, 75 bp, synthetic construct
  source 1..75: mol_type = other DNA
tacaggcggatgggagctggagcgtcggcattccggcggcaaacgtcagcgcatggcctgcggggccgttagccg

SEQ ID NO: 881315 - DNA, 75 bp, synthetic construct
  source 1..75: mol_type = other DNA
aacccggcgcaggtactcaccatcgccagcatcagcaccgacacggggagttcggcaactgactttatcaccagc

SEQ ID NO: 881316 - DNA, 75 bp, synthetic construct
  source 1..75: mol_type = other DNA
gcggggaacgttgggcagaccgcaacgcaaaacgtggtggtcgacaccaccagcccggaagcggcgaaaagtatc

SEQ ID NO: 881317 - DNA, 75 bp, synthetic construct
  source 1..75: mol_type = other DNA
aagcggtttgacctggacatatcttgacgggcgtacgctgactgacggcaactacaactatcaggtacgggtgat

SEQ ID NO: 881318 - DNA, 75 bp, synthetic construct
  source 1..75: mol_type = other DNA
tgtttgggcagattattgtggaagttataataataataaatgcagagtacagcttattactcgaccgtattcaga

SEQ ID NO: 881319 - DNA, 75 bp, synthetic construct
  source 1..75: mol_type = other DNA
aatcaacaaaaattatactcctgtcggaggagatcgaattttttgtattaatttcagcccagatacactgaatga

SEQ ID NO: 881320 - DNA, 75 bp, synthetic construct
  source 1..75: mol_type = other DNA
aatcaacaaaaattatactcctgtcggtggggatcgcatttttggtattaacttcagcccagacacactgaatga

SEQ ID NO: 881321 - DNA, 75 bp, synthetic construct
  source 1..75: mol_type = other DNA
cggcaccctgacgtggtacggctcgattgtggcatttgataaagagggcgacggctatctcgacttctggattgg

SEQ ID NO: 881322 - DNA, 75 bp, synthetic construct
  source 1..75: mol_type = other DNA
ccagatcccgcggtgaaaaccatcgccatcagcgcgatcaccaccgatacgggcttgatcactaacgattttgtc

SEQ ID NO: 881323 - DNA, 75 bp, synthetic construct
  source 1..75: mol_type = other DNA
tgatcggtacagtagttaccttgggcggagcaggcataaccatttggcagtctaaagaagcccgtaactataaaa

SEQ ID NO: 881324 - DNA, 75 bp, synthetic construct
  source 1..75: mol_type = other DNA
cccggtggtgtcgaaaacggtggtggtcgatacgattaaccccaccgcgacgccgaccattgtgtcgtacactga

SEQ ID NO: 881325 - DNA, 75 bp, synthetic construct
  source 1..75: mol_type = other DNA
ctacgccagccagtttagcgtggcggtggactggaaccacgacggcctgatggatatcgcccgtatcgcccagac

SEQ ID NO: 881326 - DNA, 75 bp, synthetic construct
  source 1..75: mol_type = other DNA
tgattttgtcctgacggtcgatacctctattccgaccacgctggcgcaaattaccagccagaccacgcgcgatac

SEQ ID NO: 881327 - DNA, 75 bp, synthetic construct
  source 1..75: mol_type = other DNA
cggaagcggcgaaaagtatcaccattaccggtatcagcgatgacaccggagccagcagcagcgattttattacca

SEQ ID NO: 881328 - DNA, 75 bp, synthetic construct
  source 1..75: mol_type = other DNA
cgtttcaggcgctgttaagaccgctgatgttctggctgaacaggcgcggcgtcaccgctaatcacattacactgt

SEQ ID NO: 881329 - DNA, 75 bp, synthetic construct
  source 1..75: mol_type = other DNA
gcaccgggctgcttctgctgattttgtccggcgcgctattctccaccagcagctacgcgctgacctgtaagcgtg

SEQ ID NO: 881330 - DNA, 75 bp, synthetic construct
  source 1..75: mol_type = other DNA
aacaacgccgaacagctcgccgggcagaccatcagcggcaccaccaccgccgaagtgggccagacggtgacggtc

SEQ ID NO: 881331 - DNA, 75 bp, synthetic construct
  source 1..75: mol_type = other DNA
aaggccatatcacccgcgcccaggtatttaccgacagcctcaaccccgcgccgctggaagccctcgccgggcgac

SEQ ID NO: 881332 - DNA, 75 bp, synthetic construct
  source 1..75: mol_type = other DNA
ggctaatcggggtcgatgctattcgtggggctgcaatgagagtaatcggtaataagtttggtggctctaaggagt

SEQ ID NO: 881333 - DNA, 75 bp, synthetic construct
  source 1..75: mol_type = other DNA
tcaccggaggagcagcattttacctgggggaatggttgtaaaaaagcagtgaaaaacagtaaatacagagtatcg

SEQ ID NO: 881334 - DNA, 75 bp, synthetic construct
  source 1..75: mol_type = other DNA
tcagcaactggcctgcgggaacgctgaacattaccgttagcggcgcgaacagtgccggaacgcaaaccagcatta

SEQ ID NO: 881335 - DNA, 75 bp, synthetic construct
  source 1..75: mol_type = other DNA
gcggcgggcagcaccgtcaccgttgaactgggcggcaaaacttacaccgccacggtccaggctgatttaagttgg

SEQ ID NO: 881336 - DNA, 75 bp, synthetic construct
  source 1..75: mol_type = other DNA
ccatcgccagtatcagcaccgacacggggagttcggcaactgactttatcaccagcgataccacgctcacgctga

SEQ ID NO: 881337 - DNA, 75 bp, synthetic construct
  source 1..75: mol_type = other DNA
tgaactataacgcgaacgccaacaccggtcgtaataacacctcagcctttggctcagcggacctgaaagccaata

SEQ ID NO: 881338 - DNA, 75 bp, synthetic construct
  source 1..75: mol_type = other DNA
gctgaatttaaccgccgttacccagccgcatcgcgccgcccggcgacggtgaagtgttgggtttttcaacgataa

SEQ ID NO: 881339 - DNA, 75 bp, synthetic construct
  source 1..75: mol_type = other DNA
tccgcatcattaaaaaccacgcccagcttatggcgttgctcgacgcgctggcgctggttattccggtcacggaag

SEQ ID NO: 881340 - DNA, 75 bp, synthetic construct
  source 1..75: mol_type = other DNA
tgattttacttacgtcagcacatggcagggcttcgtttatgtggcgttcatcattgatgtgttcgccggatacat

SEQ ID NO: 881341 - DNA, 75 bp, synthetic construct
  source 1..75: mol_type = other DNA
gggtaaaaaggtccgtacgaccatcagccggaaagccgttgccgcaggcgaccgcgtaaaccgtcagttcgtggc

SEQ ID NO: 881342 - DNA, 75 bp, synthetic construct
  source 1..75: mol_type = other DNA
tatgcgccggggcgttatctggttgacctgtccctgaacgggaaggaggccgggaaacagatactggatgtgaca

SEQ ID NO: 881343 - DNA, 75 bp, synthetic construct
  source 1..75: mol_type = other DNA
aggcgcgtcctgtggggtgatgaagagactttcgattacggcacagagcccgactcgcctgacacccctccgcac

SEQ ID NO: 881344 - DNA, 75 bp, synthetic construct
  source 1..75: mol_type = other DNA
agtctttcggataccaggtagagcctgactcgtctgatacccctccgcatcgtatccggctattggcctatggtg

SEQ ID NO: 881345 - DNA, 75 bp, synthetic construct
  source 1..75: mol_type = other DNA
cccgccatcctattgaatctctcgatgatatttattctttcagcgatgagttaaaagcgactgccgctttataca

SEQ ID NO: 881346 - DNA, 75 bp, synthetic construct
  source 1..75: mol_type = other DNA
aggaagaacgtatccgacttggacttgatcaagacggctttggacaacttgggggcgtgaagaaaaacgcacaaa

SEQ ID NO: 881347 - DNA, 75 bp, synthetic construct
  source 1..75: mol_type = other DNA
cgacaagacacgcccccgcgatgcgcccgcaaagcgtcgcgcccttgcggtgctggtagggcatgttatccgcca

SEQ ID NO: 881348 - DNA, 75 bp, synthetic construct
  source 1..75: mol_type = other DNA
ccccggcatgtacgggcatgaataccaccgcgatggcgttcctttgtcgcttgatggtgacagcgaccgctacat

SEQ ID NO: 881349 - DNA, 75 bp, synthetic construct
  source 1..75: mol_type = other DNA
aaaatgatgtagttgtatctacgggggtagatggtattcctaatgaaaaaccttcggagataaatataaaaaatg

SEQ ID NO: 881350 - DNA, 75 bp, synthetic construct
  source 1..75: mol_type = other DNA
tcttttatattcaatggcttattttcctgctaattggtaataccatgaaaaataccatgctcagaaaaggcttaa

SEQ ID NO: 881351 - DNA, 75 bp, synthetic construct
  source 1..75: mol_type = other DNA
aaccgaaaccgtcctgcaactggcagagctgctctacggcggtcgccagtacctgaccaccatcaatatgtccga

SEQ ID NO: 881352 - DNA, 75 bp, synthetic construct
  source 1..75: mol_type = other DNA
ccgtatctgccgctgtcgaaagagacgcttgccaccatcattgtcgggaaactggcccgtctggataacgtgctg

SEQ ID NO: 881353 - DNA, 75 bp, synthetic construct
  source 1..75: mol_type = other DNA
caagtttctcagcacacctgagggtaggaagtggttagaggaaaaacagaaagaaaggcaggaaatccagcttgt

SEQ ID NO: 881354 - DNA, 75 bp, synthetic construct
  source 1..75: mol_type = other DNA
tgcgctttatcgtggtgtcacgccggtctattttgacagtgcaagtgatggcgtagttgcggccagcgaagcggt

SEQ ID NO: 881355 - DNA, 75 bp, synthetic construct
  source 1..75: mol_type = other DNA
atgctgttacactggcatttttacctttgaatgtagcacacccaatactgacctctggtgcaattgcctgtgtcg

SEQ ID NO: 881356 - DNA, 75 bp, synthetic construct
  source 1..75: mol_type = other DNA
aacgcatctgcaacactggactactctgattcaaaaattaatatcggtaatggatatatcggtgggggtgaaaaa

SEQ ID NO: 881357 - DNA, 75 bp, synthetic construct
  source 1..75: mol_type = other DNA
tttggtggggggtattcatttaaaactggaaattatagtcgtactaactttgattcagatatggttgaatataat

SEQ ID NO: 881358 - DNA, 75 bp, synthetic construct
  source 1..75: mol_type = other DNA
tgtcagtggcccagggaagttctgcttcggtagatgtgacaatcactaatgcagtgctgtctgctgactctctgt

SEQ ID NO: 881359 - DNA, 75 bp, synthetic construct
  source 1..75: mol_type = other DNA
gataagtttgaacaatattacgatgggttttatcataatccagtttgtaatggcagaaccctacaaaaaatgtca

SEQ ID NO: 881360 - DNA, 75 bp, synthetic construct
  source 1..75: mol_type = other DNA
gaagacggctggcttatcaccagaaacaacaaggggtggatgaacacgacgcacggaggcggtttcaccatgact

SEQ ID NO: 881361 - DNA, 75 bp, synthetic construct
  source 1..75: mol_type = other DNA
ggacagacaaaccgggggattacggactcacctgttcggcaggtcacattgccgtcgtcatgacgggtgatgatc

SEQ ID NO: 881362 - DNA, 75 bp, synthetic construct
  source 1..75: mol_type = other DNA
gcaaaaaaattggcgatcctctaaatataaatcatgcttcacagctttttcgatactttcatgtaacaaatgcaa

SEQ ID NO: 881363 - DNA, 75 bp, synthetic construct
  source 1..75: mol_type = other DNA
agaaaatggactctggctataattgcagatgtatttaatgtatcagaaataaccataagaaaaagattggaatct

SEQ ID NO: 881364 - DNA, 75 bp, synthetic construct
  source 1..75: mol_type = other DNA
tggaaactgaatattatagcagatgaattcaatgtatcagaaataaccatcagaaaaagacttgaacttgagaat

SEQ ID NO: 881365 - DNA, 75 bp, synthetic construct
  source 1..75: mol_type = other DNA
gagattacgtctggcgtaataatcttaagctgggatccggaaaataccgctcattacgcacagtcgacaccacat

SEQ ID NO: 881366 - DNA, 75 bp, synthetic construct
  source 1..75: mol_type = other DNA
gtggtggcctatgccaaccaggatttggtctattccgatctggctgcaggacgtctggatgctgcgttacaagat

SEQ ID NO: 881367 - DNA, 75 bp, synthetic construct
  source 1..75: mol_type = other DNA
ttaaataaagttgagctaatgatggggccaatagatcctgatgacaatagcactttatataatgactcatcctgt

SEQ ID NO: 881368 - DNA, 75 bp, synthetic construct
  source 1..75: mol_type = other DNA
gtaggcctgataagacgcgttagcgtagcatcaggcactgaatgccggatgcggcgtaaaacgccttatccgtcc

SEQ ID NO: 881369 - DNA, 75 bp, synthetic construct
  source 1..75: mol_type = other DNA
ttagatcttagctttggaggaacaaaggaaaataataattaccccttgatgcagatgtgtgttgatacttatttt

SEQ ID NO: 881370 - DNA, 75 bp, synthetic construct
  source 1..75: mol_type = other DNA
ataaaggtatcaacaaacttggcggcggtttgtcggctgaagcgctgaccgaaaaagacaaagcagacattaaga

SEQ ID NO: 881371 - DNA, 75 bp, synthetic construct
  source 1..75: mol_type = other DNA
ttactgtttttggtggggattttattatggatgatttaaaaaaaagtaaaaaatacggaagcatgggtatggtat

SEQ ID NO: 881372 - DNA, 75 bp, synthetic construct
  source 1..75: mol_type = other DNA
ttcactgaacatgttttcgccctgatgcacctgctgggattcgcttttgcgccgaggatccgggatcttcatgac

SEQ ID NO: 881373 - DNA, 75 bp, synthetic construct
  source 1..75: mol_type = other DNA
gagaagcagcagaaagaactaaggaagattatcgatattggaagtttgaaaaaccctttcaaacctgaagtgcaa

SEQ ID NO: 881374 - DNA, 75 bp, synthetic construct
  source 1..75: mol_type = other DNA
ttaggtcatcctttatcaatatcagcctaccacaagattattgataaaatacgttcgtcaagtttattactaaat

SEQ ID NO: 881375 - DNA, 75 bp, synthetic construct
  source 1..75: mol_type = other DNA
agtgcggacggactggatgtcatgatgctggcagctgagcaaatgaatatcccgctgacggcggtatggcatgca

SEQ ID NO: 881376 - DNA, 75 bp, synthetic construct
  source 1..75: mol_type = other DNA
gggtactcggctggagtgagcgggtgccggggggggggatgaggtgctgcctgccccattgccgccgtaccgggt

SEQ ID NO: 881377 - DNA, 75 bp, synthetic construct
  source 1..75: mol_type = other DNA
agatgaagccagaagttggttaagcaggttcacgcgatggtacaacctggaacacaagccagcggtattaagtat

SEQ ID NO: 881378 - DNA, 75 bp, synthetic construct
  source 1..75: mol_type = other DNA
ccaggtgtggatctgggatattagttatatcccatcatgggttaaggggcagcatttttatctctatatgatcgt

SEQ ID NO: 881379 - DNA, 75 bp, synthetic construct
  source 1..75: mol_type = other DNA
ggggcaggcgatggttatgcagaggtgaattttgatggtgttaatggttatacattatcgacgaatttcctctgc

SEQ ID NO: 881380 - DNA, 75 bp, synthetic construct
  source 1..75: mol_type = other DNA
aatcgacttccaatgatgaagcaatgtttaaagattatataaaacaatctgtagtcgatgcatggtttggtgggg

SEQ ID NO: 881381 - DNA, 75 bp, synthetic construct
  source 1..75: mol_type = other DNA
ccggacaaaaacgcccgcgccggtgggagcctcggccccggccggaaaatgcctgcggatatccgcttacagctg

SEQ ID NO: 881382 - DNA, 75 bp, synthetic construct
  source 1..75: mol_type = other DNA
accactaccattacgacagcctgcaccgcctggtccattacatccgtatccaatatgaggagccgctggtcgaga

SEQ ID NO: 881383 - DNA, 75 bp, synthetic construct
  source 1..75: mol_type = other DNA
cctctggcactacgatgcgtcggaccgcatcacgcaccggacggtgaacggcgacccggcagagcagtggcagta

SEQ ID NO: 881384 - DNA, 75 bp, synthetic construct
  source 1..75: mol_type = other DNA
accgtgtcgctgtccactacggctacgacgataagggccgcctgacgggcgaacggcagacggtggagaacccgg

SEQ ID NO: 881385 - DNA, 75 bp, synthetic construct
  source 1..75: mol_type = other DNA
gtggtcccatgcgcagttacacgttgttggcgaaaatgtatgcgcttggtgtgctaagttcttattcccggccaa

SEQ ID NO: 881386 - DNA, 75 bp, synthetic construct
  source 1..75: mol_type = other DNA
taccgatcgcgataacaaccttgagaaggttatcgccgcgggtgcaaacgtcgtacgaatgaatttttctcatgg

SEQ ID NO: 881387 - DNA, 75 bp, synthetic construct
  source 1..75: mol_type = other DNA
tcaggacagcattctcggacataacgaaaattcatctgaccgagcgaagaccagtcacggttatggcgaaacaag

SEQ ID NO: 881388 - DNA, 75 bp, synthetic construct
  source 1..75: mol_type = other DNA
ttgaaaaaaagttatatcgaactgtaaatacaactacttataatgtaccacacttgcatggtggtgaatatcgct

SEQ ID NO: 881389 - DNA, 75 bp, synthetic construct
  source 1..75: mol_type = other DNA
gctgcaccacatcacactccagcataaggtgctggctattctacaaattcgtaacgtcagaatgaaaccctacta

SEQ ID NO: 881390 - DNA, 75 bp, synthetic construct
  source 1..75: mol_type = other DNA
ttattttagcattgctatctgctaccaggcactaaataaacaagaaatttctaaagaaacacgggctatttatga

SEQ ID NO: 881391 - DNA, 75 bp, synthetic construct
  source 1..75: mol_type = other DNA
atgccaggtatacgggactgcgccaatgacgccagtacgctggttgaccatgctcagacacttttcgacgacatt

SEQ ID NO: 881392 - DNA, 75 bp, synthetic construct
  source 1..75: mol_type = other DNA
aagcggcagcgcagaacctatcggaagttccgctgggcgttgaggcgctgctgattaggcaccggaggtggaact

SEQ ID NO: 881393 - DNA, 75 bp, synthetic construct
  source 1..75: mol_type = other DNA
tgccgggatgccaggagcgcaggccacggcgcgacaagggtggcgcgaccgttctggtcgctgcaaacccggggt

SEQ ID NO: 881394 - DNA, 75 bp, synthetic construct
  source 1..75: mol_type = other DNA
ctgccttttggtaataaaaacgaaaagagcggtaaaaagaacgttcagctaaggaaggtgcgaataagcggggaa

SEQ ID NO: 881395 - DNA, 75 bp, synthetic construct
  source 1..75: mol_type = other DNA
acgacgatacgctttcccctgaagataaaattatttcggttgcatcctgtacgacaaactgtctggcacctgtgg

SEQ ID NO: 881396 - DNA, 75 bp, synthetic construct
  source 1..75: mol_type = other DNA
cagtatcctggtatgataatgagtatggttttgtgactcaactggtcagagtgttgaataaatatatttcccttt

SEQ ID NO: 881397 - DNA, 75 bp, synthetic construct
  source 1..75: mol_type = other DNA
ttatcaccacaagcagttcgacatagtgattgtgaaggtatgggtattgtttatgaaaatacacctgaatatcag

SEQ ID NO: 881398 - DNA, 75 bp, synthetic construct
  source 1..75: mol_type = other DNA
cgagcaagccgtattatttgttctgctggcggcaggctccgttgcgctggggggcatgagcgacgggcagcattg

SEQ ID NO: 881399 - DNA, 75 bp, synthetic construct
  source 1..75: mol_type = other DNA
agaatatcttaatatagataataaaataaaaaatagtgatacgtttcagatccatgatttttcttttaaagcata

SEQ ID NO: 881400 - DNA, 75 bp, synthetic construct
  source 1..75: mol_type = other DNA
actaattacttgattgtcagcagcccggcgaaagcgattcgtgaactcagcgagcaggagctggcattgagaaag

SEQ ID NO: 881401 - DNA, 75 bp, synthetic construct
  source 1..75: mol_type = other DNA
atttgctcactatttcaggtgtgcaggaatccctcccgcgtcagttgcggtttattgacctgatggagtcatata

SEQ ID NO: 881402 - DNA, 75 bp, synthetic construct
  source 1..75: mol_type = other DNA
gctatggcattgagtttattaccagcgagcaagccgtattatttgttctgctggcggcaggctccgttgcgctgg

SEQ ID NO: 881403 - DNA, 75 bp, synthetic construct
  source 1..75: mol_type = other DNA
tgcaaaaatgggatataaagttatcccgggtgatgaaaatgcaccactcaaacgtatgactctgcaaccgtcatc

SEQ ID NO: 881404 - DNA, 75 bp, synthetic construct
  source 1..75: mol_type = other DNA
gaatatcgaaattaattaccggaaatagctgtaacaatcgctatttccgcaagatacacatgttcagaggtgcaa

SEQ ID NO: 881405 - DNA, 75 bp, synthetic construct
  source 1..75: mol_type = other DNA
tttgttcgccatgatggcaaatgacacggtggcactgtacctcgcgacacgcaacatactgacaagaatatccat

SEQ ID NO: 881406 - DNA, 75 bp, synthetic construct
  source 1..75: mol_type = other DNA
ttgttactcctgaaggttttgctgtccgttcatctgggaagttaaccaatgtaacgttatgggcgtcatcattgc

SEQ ID NO: 881407 - DNA, 75 bp, synthetic construct
  source 1..75: mol_type = other DNA
cggctgaagtgcagggctggttacccggtagtgagcttcatacagatttaatggctctgctgcatgtctatcttg

SEQ ID NO: 881408 - DNA, 75 bp, synthetic construct
  source 1..75: mol_type = other DNA
taaattaccagagatgatagatttctcatcagaaaaaatacatgattatatcgacataatcattgaagattatga

SEQ ID NO: 881409 - DNA, 75 bp, synthetic construct
  source 1..75: mol_type = other DNA
gatgcagtggcctacaccatggcggcgaccagtacgcgtaatctccaggaaggtgacgatcctgaccgtgggctg

SEQ ID NO: 881410 - DNA, 75 bp, synthetic construct
  source 1..75: mol_type = other DNA
gcggcttcctgagcatcggcaagagccgcgccaaggtgttcatggagaagaacaccggcgtcacctttgccgatg

SEQ ID NO: 881411 - DNA, 75 bp, synthetic construct
  source 1..75: mol_type = other DNA
aggctgtggagctgcaagacttcaccgccgccatcgagcgcatcgtggccggcctggaaaggaagaaccgtgtgc

SEQ ID NO: 881412 - DNA, 75 bp, synthetic construct
  source 1..75: mol_type = other DNA
ttggctactggatcgtcgccggcctgttgctgctgacgctgcagaactactggcaggcggccaagaccgtcgagc

SEQ ID NO: 881413 - DNA, 75 bp, synthetic construct
  source 1..75: mol_type = other DNA
tcaggagccggacggtctgccgccggtggagtggctgacgtatggcagcggttatcttgcggggatgaagctggg

SEQ ID NO: 881414 - DNA, 75 bp, synthetic construct
  source 1..75: mol_type = other DNA
gctggcgcaacctgacgggcttaagaggattggcacaaaagttaattacggtataccggttggatctactttaac

SEQ ID NO: 881415 - DNA, 75 bp, synthetic construct
  source 1..75: mol_type = other DNA
tacaccattctatccacgcagtccgtatggtgttgctaaactgtatgctcactggatgacagtaaactaccgtga

SEQ ID NO: 881416 - DNA, 75 bp, synthetic construct
  source 1..75: mol_type = other DNA
aatcccaatttgcatcttgttgaatatgatctgacagatctttctgccagtattcgtctaatgcaaacaacgaat

SEQ ID NO: 881417 - DNA, 75 bp, synthetic construct
  source 1..75: mol_type = other DNA
tttcagcaatgcacttattattatcttttaccgttcaggcttgggcaactctgtcttcctggtggcagtgcgcgg

SEQ ID NO: 881418 - DNA, 75 bp, synthetic construct
  source 1..75: mol_type = other DNA
caccttctgactcatgctcaggatgctgaatacgttgccgatatcattatatcgtggagcgaatgttacctataa

SEQ ID NO: 881419 - DNA, 75 bp, synthetic construct
  source 1..75: mol_type = other DNA
tacggatgtgattgatgtaaaaacaatgagttatacacgagaagtaccgactcgctttttcccgaaaaattatca

SEQ ID NO: 881420 - DNA, 75 bp, synthetic construct
  source 1..75: mol_type = other DNA
aagtagagttaattgttatagatcaaaatacattgtcgattgcggatttattttctgatatagctgaaagagtga

SEQ ID NO: 881421 - DNA, 75 bp, synthetic construct
  source 1..75: mol_type = other DNA
gctgagaaccaaccctgcggtacgcatggattcaacgcaaagtacctcgttgaaccagggagatattcgcccgga

SEQ ID NO: 881422 - DNA, 75 bp, synthetic construct
  source 1..75: mol_type = other DNA
gttgcctgcatgcgctcccgattcagtaatctgattgagttaaggcgaaatccggaaatagaagtcgctcgtatt

SEQ ID NO: 881423 - DNA, 75 bp, synthetic construct
  source 1..75: mol_type = other DNA
tcgggccgctgggttacaccgttaacgcccaccgtcggcccatctccagttctttgctggcctttggtgggcaaa

SEQ ID NO: 881424 - DNA, 75 bp, synthetic construct
  source 1..75: mol_type = other DNA
acgttattaatactatttttaacgcattacccactctgtttaatacgtttaaattcgataaaaaaaaatatgaag

SEQ ID NO: 881425 - DNA, 75 bp, synthetic construct
  source 1..75: mol_type = other DNA
gtggtttcggtttatgatcctaatgtaactaacgataaaataagaattatgagcgaaagcaaagaggatattaaa

SEQ ID NO: 881426 - DNA, 75 bp, synthetic construct
  source 1..75: mol_type = other DNA
cagcgatgagcgggtgattcgtgcagctggcggcgctggtgcactgtctgactggttattacgtcacgtgaaatc

SEQ ID NO: 881427 - DNA, 75 bp, synthetic construct
  source 1..75: mol_type = other DNA
tgtggtacggcgaaaaaatccatgttgctgtcgcccaggaagttcctggcacaggtgtggatacccctgaagatc

SEQ ID NO: 881428 - DNA, 75 bp, synthetic construct
  source 1..75: mol_type = other DNA
atgttggcgcacgtgacaaaatgcgcagactgatacgccgactggattcagaaatggagcgcagcggcaatagtc

SEQ ID NO: 881429 - DNA, 75 bp, synthetic construct
  source 1..75: mol_type = other DNA
ctaagtcatcgcgatggagcaaaagtacatttaggtacacggcctacagaaaaacagtatgaaactctcgaaaat

SEQ ID NO: 881430 - DNA, 75 bp, synthetic construct
  source 1..75: mol_type = other DNA
tttttatgctgctggcgatgcttggtgtgccgttgcagatctttttggcggtttctattattcactatagttggc

SEQ ID NO: 881431 - DNA, 75 bp, synthetic construct
  source 1..75: mol_type = other DNA
gcaattgatggaaaaacactccggcattcttatgacaagagtcgccgcaggggagcgattcatgtcattagtgcg

SEQ ID NO: 881432 - DNA, 75 bp, synthetic construct
  source 1..75: mol_type = other DNA
ttccaagagttaaacttaatggtcaatgttattttccggggcgcccccaaaaccgtatagtatgccgacacattg

SEQ ID NO: 881433 - DNA, 75 bp, synthetic construct
  source 1..75: mol_type = other DNA
gtctggcccaggaaattaacatttcagcttccgatattgtagatcttctgaccgctaaaagtcttgcgcgcgaca

SEQ ID NO: 881434 - DNA, 75 bp, synthetic construct
  source 1..75: mol_type = other DNA
aaattttacctcaacgctcagacgctcttgataaacaaaaattaaatctaaactcagatagaaaagaaaaagaat

SEQ ID NO: 881435 - DNA, 75 bp, synthetic construct
  source 1..75: mol_type = other DNA
ggctccgttcacgacagcccgccccgtcagggggacgcccggaaaaggcataagcaggagaacaacaaaacagac

SEQ ID NO: 881436 - DNA, 75 bp, synthetic construct
  source 1..75: mol_type = other DNA
cacatcatttagataatgaacaggtgtataaattcctgagagccaaaaatagatcatccagccatgttttatacc

SEQ ID NO: 881437 - DNA, 75 bp, synthetic construct
  source 1..75: mol_type = other DNA
gataaccctcgatacattgcggagaaaaattatatggaagctttactcaaaaaagcatctccccataccgtacgc

SEQ ID NO: 881438 - DNA, 75 bp, synthetic construct
  source 1..75: mol_type = other DNA
gtgtattggttccgatagtaccgtattgataaatggtatttacgagtcagaagtaaacagcgaacgactcatggg

SEQ ID NO: 881439 - DNA, 75 bp, synthetic construct
  source 1..75: mol_type = other DNA
accaaattctgaatgtgtcgaatacgttcggcaaattcaaaaaccaatttgttggggtatcgccaagcggtaagg

SEQ ID NO: 881440 - DNA, 75 bp, synthetic construct
  source 1..75: mol_type = other DNA
cccagccacattaaaaaagctcgcttcggcgagctttttgcttttctgcgttcattcaatgtcgaatgcgatgtt

SEQ ID NO: 881441 - DNA, 75 bp, synthetic construct
  source 1..75: mol_type = other DNA
tggtgttgcaaccgctattggaagcctggctctgatgaatcccctaatgatttttatcaaaatcattaagttaag

SEQ ID NO: 881442 - DNA, 75 bp, synthetic construct
  source 1..75: mol_type = other DNA
gatgctgagctaaacagtattcgcgagcggttgaacataatgaaagcgagtccacacaacaataatgtctggggg

SEQ ID NO: 881443 - DNA, 75 bp, synthetic construct
  source 1..75: mol_type = other DNA
cattgaaaccgggatgcgatttaccgatggtaactggaacctgacgccgtatgcatcgttaacggggttcaccgc

SEQ ID NO: 881444 - DNA, 75 bp, synthetic construct
  source 1..75: mol_type = other DNA
gatggcgtgggtgtttactttaccggcggcgatttttctttctggtgggttgtactggatagcattgcagttgat

SEQ ID NO: 881445 - DNA, 75 bp, synthetic construct
  source 1..75: mol_type = other DNA
tctgtttcagaacgacaaacgggcgtgaaagaaaaaaaagtaacggtgtgtaaagtggaaagaaaatcccatccg

SEQ ID NO: 881446 - DNA, 75 bp, synthetic construct
  source 1..75: mol_type = other DNA
gaaacgcctggtagctcaactgaaagcactacgttccgacctacaccatcaactggcaagcgtaggttgcgatct

SEQ ID NO: 881447 - DNA, 75 bp, synthetic construct
  source 1..75: mol_type = other DNA
taaaaaagctcgcttcggcgagctttttgcttttctgcgttcattcaatgtcgaatgcgatgttgacacgtctta

SEQ ID NO: 881448 - DNA, 75 bp, synthetic construct
  source 1..75: mol_type = other DNA
actggttatatggccaaggaactagctgacgagatgctgacggatccaagtaaacattttgtccggtacccttgg

SEQ ID NO: 881449 - DNA, 75 bp, synthetic construct
  source 1..75: mol_type = other DNA
ggaaccttccgaagcccataaaatccttgctagactacccattagaacttattggacaaccaactatgacacttt

SEQ ID NO: 881450 - DNA, 75 bp, synthetic construct
  source 1..75: mol_type = other DNA
cggctggttcctttacaaggcgttgaacttgatgcattgaaaagtggtcgcattgccttgctgttttgcttacct

SEQ ID NO: 881451 - DNA, 75 bp, synthetic construct
  source 1..75: mol_type = other DNA
aggattttgtaaaacttgaatacagcgttctcgaccttaccgagtacaacggcctgaccattaatggcaacatga

SEQ ID NO: 881452 - DNA, 75 bp, synthetic construct
  source 1..75: mol_type = other DNA
aaatgcgcaacgggaaggggctgttctgctccatggtggcaaaacagttttaccgtcgcggacacagaattgcgg

SEQ ID NO: 881453 - DNA, 75 bp, synthetic construct
  source 1..75: mol_type = other DNA
gtatttttgtgaagaattcagatggttcagatgtatgtactttatttgatgccgctgcattttctcgtttgactg

SEQ ID NO: 881454 - DNA, 75 bp, synthetic construct
  source 1..75: mol_type = other DNA
gccgacctggtacaacaagtcagtcgaaaccgattaaatagagcaaggacatacagagggcggtcatcaagtcaa

SEQ ID NO: 881455 - DNA, 75 bp, synthetic construct
  source 1..75: mol_type = other DNA
aaattatcatgtacccgcaccggagtcagtagaacaacaggttaacgccccagcagatgagctgccgcttgatta

SEQ ID NO: 881456 - DNA, 75 bp, synthetic construct
  source 1..75: mol_type = other DNA
aatttctccggtcgaactcgatccatcgctgatggtttttcttgacgatcataattccgcgcaggcgagtaatag

SEQ ID NO: 881457 - DNA, 75 bp, synthetic construct
  source 1..75: mol_type = other DNA
cgggtctgcatggtgtcgatgacgcttttctgcgtgccttcctggcgcaggacgttgtagacatgttcagcggcg

SEQ ID NO: 881458 - DNA, 75 bp, synthetic construct
  source 1..75: mol_type = other DNA
tctttattcatggaaaacggatatgaccttcagacaggtgcatggttctgtcttatttcttcccatctgtatagt

SEQ ID NO: 881459 - DNA, 75 bp, synthetic construct
  source 1..75: mol_type = other DNA
taaatgccaaagtgctgagttgaaattaaaaaatgagcacttattaaaggagaacaaagatgggcagatatctac

SEQ ID NO: 881460 - DNA, 75 bp, synthetic construct
  source 1..75: mol_type = other DNA
cgcaaaaaccgaacggcagattccattttcacgggcgatctacgccacacaggctctgggttgcagtgactgctc

SEQ ID NO: 881461 - DNA, 75 bp, synthetic construct
  source 1..75: mol_type = other DNA
gcaacagaattatattctgggatacggcacatcgctattaatattttgacgaatgataaagtattcaaggcaggg

SEQ ID NO: 881462 - DNA, 75 bp, synthetic construct
  source 1..75: mol_type = other DNA
aaagaggatgacgtgaattttcactttgaattttatgtggaaaattttattcgtttaagagaaaaatatagtaaa

SEQ ID NO: 881463 - DNA, 75 bp, synthetic construct
  source 1..75: mol_type = other DNA
gaccctaaaaaggttacatgattttgagttgacaacaaacatacaattgactaaagatgttatatttaatggtaa

SEQ ID NO: 881464 - DNA, 75 bp, synthetic construct
  source 1..75: mol_type = other DNA
tgaatttcgcagtgaagccctgaagcttgctgaacgcatcggtgttgctgccgcagcagtgaactcagcctgtat

SEQ ID NO: 881465 - DNA, 75 bp, synthetic construct
  source 1..75: mol_type = other DNA
actggctggagttgttccagagctggtggcgtggagatacgccgctgggcgcagtgattatgtcgattgttatgg

SEQ ID NO: 881466 - DNA, 75 bp, synthetic construct
  source 1..75: mol_type = other DNA
ttgtaatcatatcattttgtttggttgcatgtcagatgaataatattaaaggtaattcaggtggttcattttcgt

SEQ ID NO: 881467 - DNA, 75 bp, synthetic construct
  source 1..75: mol_type = other DNA
ggaaagcggcgctgagacgggctggtattgatgatttcagatttcacgacttgagacacacctgggcaagttggc

SEQ ID NO: 881468 - DNA, 75 bp, synthetic construct
  source 1..75: mol_type = other DNA
atgtctgcacccggatggaaattacaccctctaaagggagctgatcttaaaggccattgggctatatctgtaaac

SEQ ID NO: 881469 - DNA, 75 bp, synthetic construct
  source 1..75: mol_type = other DNA
ctgaaaggtcacaagattgaccatgcgcatatctgcatcgaagcgaccggcacctatatggaacctgtcgctgag

SEQ ID NO: 881470 - DNA, 75 bp, synthetic construct
  source 1..75: mol_type = other DNA
ccgtgccaaggtattcatggagaagaacactggcgtgacctttgccgatgtcgctggcgtcgatgaagccaaggc

SEQ ID NO: 881471 - DNA, 75 bp, synthetic construct
  source 1..75: mol_type = other DNA
ctgcccgaaaccgaccccgtacacaagatctcgatcatcccgcgcggcatcggcgcgctgggctacaccttgcag

SEQ ID NO: 881472 - DNA, 75 bp, synthetic construct
  source 1..75: mol_type = other DNA
cagccggggcaagacgacgatcgtggcaacgagggtcgaacccgatcttgccgatcgcctgtcgaagtacgacgt

SEQ ID NO: 881473 - DNA, 75 bp, synthetic construct
  source 1..75: mol_type = other DNA
cgcatgaaaaaacaaaagctacagttaaaagatgagatgctcaaaatcctgcagcaggagagcgtcaaagaggtg

SEQ ID NO: 881474 - DNA, 75 bp, synthetic construct
  source 1..75: mol_type = other DNA
gttattccagagactattggtggtaattatattataaataatgtttgtaattcttgtaattcaaaccttggataa

SEQ ID NO: 881475 - DNA, 75 bp, synthetic construct
  source 1..75: mol_type = other DNA
gtgctggagcgttgtgcgcgcgaactgctggcgcgggaaacgctcgacgagaacgacatccttcaattgacccaa

SEQ ID NO: 881476 - DNA, 75 bp, synthetic construct
  source 1..75: mol_type = other DNA
attgtggcgataataagataaaagaaattcaatacttcccaaatcatctggagaaagcacgtatggagtgtgata

SEQ ID NO: 881477 - DNA, 75 bp, synthetic construct
  source 1..75: mol_type = other DNA
cgaaaatgttaaatcagaattaaaagcgcttatcccggataacagcgaggccactcaggccattctctcagagcc

SEQ ID NO: 881478 - DNA, 75 bp, synthetic construct
  source 1..75: mol_type = other DNA
gaaaatttttacaactaatgacagaaaacgttaaatcagagttacttcttcagatggcggacaataacgaagtaa

SEQ ID NO: 881479 - DNA, 75 bp, synthetic construct
  source 1..75: mol_type = other DNA
ctgccagtaggtgcaatttggattgcacctactgctatgtatatcgcggggctgatacaagctggcaggatcaac

SEQ ID NO: 881480 - DNA, 75 bp, synthetic construct
  source 1..75: mol_type = other DNA
tcatgttgggtgaatgtgtttaactcgtgtcgagatttcttaaatagatcaaaagaatactctaatagtaaaaaa

SEQ ID NO: 881481 - DNA, 75 bp, synthetic construct
  source 1..75: mol_type = other DNA
tatggattattagcctgatgagcagcaacgttatggcattaactctgaacgaagccagaagtcaggggcgggtag

SEQ ID NO: 881482 - DNA, 75 bp, synthetic construct
  source 1..75: mol_type = other DNA
acagatgagatagcgaaactggcagggcaaaaacttgtcgcgcgtgcgaagccgggtgaatatgtacaggggatt

SEQ ID NO: 881483 - DNA, 75 bp, synthetic construct
  source 1..75: mol_type = other DNA
atgacccctgaacacttccggcaatggttcgctacgctgccggagaaataccagcgcgtagcccgttccatgtac

SEQ ID NO: 881484 - DNA, 75 bp, synthetic construct
  source 1..75: mol_type = other DNA
catattccgtgtgctgacttctctggtttcctgggttgtatcgtttattccgcgccgcccggagcggagcgaaac

SEQ ID NO: 881485 - DNA, 75 bp, synthetic construct
  source 1..75: mol_type = other DNA
tcagccggggtacgtattggtgcccccaccggcgtggcctgttcggtgtgccccggcggagtgacgtccggccat

SEQ ID NO: 881486 - DNA, 75 bp, synthetic construct
  source 1..75: mol_type = other DNA
tcaggtagtagccgacagtgtgatcagcgccagaacggtacgccccggcgggaaggcaggacagcggggacaggc

SEQ ID NO: 881487 - DNA, 75 bp, synthetic construct
  source 1..75: mol_type = other DNA
gtctgccagggcagcagcatgatgaggaatcagggctgtactataaccgtcaccggtactacgatccgttgcagg

SEQ ID NO: 881488 - DNA, 75 bp, synthetic construct
  source 1..75: mol_type = other DNA
ggcggctggtggacgacccgcaggtaaaacagaccagcaagggaacagcgatgacgctggcgcgtatggcggtat

SEQ ID NO: 881489 - DNA, 75 bp, synthetic construct
  source 1..75: mol_type = other DNA
tcattgaaagtcatttggagcgttttcatattgttgatgcgacatcttctttatatattacaggtgatgagaaag

SEQ ID NO: 881490 - DNA, 75 bp, synthetic construct
  source 1..75: mol_type = other DNA
gaagttgctggtgaaacaattaattattttgatccatatacatttgatgatcttgcagatagaattaacaaatta

SEQ ID NO: 881491 - DNA, 75 bp, synthetic construct
  source 1..75: mol_type = other DNA
cgccgacagcgggaagaaaagcgcaatgaattgctggcgctgattgaatcggagggcttttcaccgacagagctg

SEQ ID NO: 881492 - DNA, 75 bp, synthetic construct
  source 1..75: mol_type = other DNA
aattatcgaacaaatataagttaaaaacaagaagttcaaaaggtaaagataccttttgggggcatatattaaagc

SEQ ID NO: 881493 - DNA, 75 bp, synthetic construct
  source 1..75: mol_type = other DNA
cgagttgacggctgtgccagaccgcataatcgccggtaccccgcagaacagctccggcagcgtcattaccgccac

SEQ ID NO: 881494 - DNA, 75 bp, synthetic construct
  source 1..75: mol_type = other DNA
gggatagcgatcgtctgaaaatggacgccatcagcaccaacctgacattgtcacttgaaggaaatcgctacctgc

SEQ ID NO: 881495 - DNA, 75 bp, synthetic construct
  source 1..75: mol_type = other DNA
ctgcaccagacgccggactacgaagccggtgaggacttcttcacctgctaccagggtgatgtcgttttctggcgc

SEQ ID NO: 881496 - DNA, 75 bp, synthetic construct
  source 1..75: mol_type = other DNA
gcgtctcgcagataacaaacgctgggcgctgatggcggggggggggcttgccgtggcggcgacggcgattatcgt

SEQ ID NO: 881497 - DNA, 75 bp, synthetic construct
  source 1..75: mol_type = other DNA
tgccgttcgccgttccgacctgaacgaccgcccacaccgcgaatccgtcaacgcacccgatgaaacaaccgcccg

SEQ ID NO: 881498 - DNA, 75 bp, synthetic construct
  source 1..75: mol_type = other DNA
ccaccttcatccggactgttgagctgggaagtctgagtaaagctgctgaagcccagcaaatatcacctcaggcgg

SEQ ID NO: 881499 - DNA, 75 bp, synthetic construct
  source 1..75: mol_type = other DNA
tatcactcaggatccgattggactgaaggggggatggaatttttatcagtatccgttgaatccggtcataaatgt

SEQ ID NO: 881500 - DNA, 75 bp, synthetic construct
  source 1..75: mol_type = other DNA
cctgatttttgggatcaaaaccttaaaaatgaaagaactataaaaaactggttcgattgtattagccaaggtgag

SEQ ID NO: 881501 - DNA, 75 bp, synthetic construct
  source 1..75: mol_type = other DNA
ctaattcaacacattcatcaatcgtcacagaaattgaagagtttgtcgatgagtttattgaaaagattggagagt

SEQ ID NO: 881502 - DNA, 75 bp, synthetic construct
  source 1..75: mol_type = other DNA
acaatctcaccttatcgttgctcagctttgtgccgcaggtggtcccggtcgagcctgtcattccgctgtggaaag

SEQ ID NO: 881503 - DNA, 75 bp, synthetic construct
  source 1..75: mol_type = other DNA
taccggcgcaaccacgactgctactaccactggtggcgtggctgctggcgatggcggttctcataacacctcaac

SEQ ID NO: 881504 - DNA, 75 bp, synthetic construct
  source 1..75: mol_type = other DNA
ggctttgagtttggttgcgatgatagcgaaaaactgcgtgttacgttctccctggactgttgcgatcgtgaagcc

SEQ ID NO: 881505 - DNA, 75 bp, synthetic construct
  source 1..75: mol_type = other DNA
taacgctctacgcatgccatgcaggaaaatatcactcggccaacactgttaaagtttacgttcgttatcttttag

SEQ ID NO: 881506 - DNA, 75 bp, synthetic construct
  source 1..75: mol_type = other DNA
gggcaagcctgccagtggtcgggccgtattgtctcaggaacaggacggcattaaatcgcaaacccacagcgccag

SEQ ID NO: 881507 - DNA, 75 bp, synthetic construct
  source 1..75: mol_type = other DNA
gggcaaccctgccagtggtcgggccgtattatctcaggaacaggacggcattaaatcgcagacccacagcgccag

SEQ ID NO: 881508 - DNA, 75 bp, synthetic construct
  source 1..75: mol_type = other DNA
gggcaaacctgccagtggtcgggccgtattctctcaggaacaggacggcattaaatcgcagacccacagcgccag

SEQ ID NO: 881509 - DNA, 75 bp, synthetic construct
  source 1..75: mol_type = other DNA
tcagggccagcgcttaataatgatggatgtattaatgccgccaaaggcaaagttgttactctgcaaaaacacaca

SEQ ID NO: 881510 - DNA, 75 bp, synthetic construct
  source 1..75: mol_type = other DNA
aggccaatggggaagcgcatgtcacgctcaaaggtaaaaaagcgggtacgcatacggttaccgcaacgctgagta

SEQ ID NO: 881511 - DNA, 75 bp, synthetic construct
  source 1..75: mol_type = other DNA
ttaccgcgtcagcgtgatgccggatctcgacctcagcaccatcgacgaaactcaggaacactacggcgacgcgcc

SEQ ID NO: 881512 - DNA, 75 bp, synthetic construct
  source 1..75: mol_type = other DNA
ttaaaacgtctccgagactctgaaagaaaaacattttcaatggatgaattggaaaataacgattataatgcaatt

SEQ ID NO: 881513 - DNA, 75 bp, synthetic construct
  source 1..75: mol_type = other DNA
aaagtgagccgtgttcctgacggcgttgctgaatacagcgtatgggggctgaagctgccgacgttgcgccagcgc

SEQ ID NO: 881514 - DNA, 75 bp, synthetic construct
  source 1..75: mol_type = other DNA
ttacattcaacaatactaacagctatcaggaactgaacttcaaagctcgtatggaatccccaagcaaagatgcta

SEQ ID NO: 881515 - DNA, 75 bp, synthetic construct
  source 1..75: mol_type = other DNA
gaaaatcaaccgcgaagagagcgtgctggacagcgacactaatcaggtggcgatgggcgtgcccggttcgctcag

SEQ ID NO: 881516 - DNA, 75 bp, synthetic construct
  source 1..75: mol_type = other DNA
ttaaaacaagactttagcgcaagcgcacccaaccagaaatgggcaggcgatatcacttatggtgtgcccggagtt

SEQ ID NO: 881517 - DNA, 75 bp, synthetic construct
  source 1..75: mol_type = other DNA
tgggtgcgaaaaaggtgatggtattgatccagcgtcgcgcttatgtggatctggttcaggggagcgttatcgata

SEQ ID NO: 881518 - DNA, 75 bp, synthetic construct
  source 1..75: mol_type = other DNA
gtggtaaagggatgttgatggcgattgagtttgttgataacgaaatcggctataactttgccagcgagatgttcc

SEQ ID NO: 881519 - DNA, 75 bp, synthetic construct
  source 1..75: mol_type = other DNA
atgcacattcagcaattcaataacctgaaaaaaatagcaactcagttcagcaatgactaccagctgtcatctgaa

SEQ ID NO: 881520 - DNA, 75 bp, synthetic construct
  source 1..75: mol_type = other DNA
tcatcgacgcagcgcgtgaaagttgcgagttcgaagaggtcgtgtcgacatttaagcgcgagctgaccggcatca

SEQ ID NO: 881521 - DNA, 75 bp, synthetic construct
  source 1..75: mol_type = other DNA
tgcaaacaaaggatggcggaaaccagcattccatgtcagccaatgtttctggatcgacaactgcagtaaacagct

SEQ ID NO: 881522 - DNA, 75 bp, synthetic construct
  source 1..75: mol_type = other DNA
gttgattactttcagcgcgagtatagctggggtgagaaacatattgaagagctggttacagacttaacatctgcg

SEQ ID NO: 881523 - DNA, 75 bp, synthetic construct
  source 1..75: mol_type = other DNA
gatgaacaagttcttgaaagtatttggcaacatgaattacgacaactacaaaggttaaagggatatcctggagta

SEQ ID NO: 881524 - DNA, 75 bp, synthetic construct
  source 1..75: mol_type = other DNA
acggtaatttcgtcaattatttgtcgggcagacgtggaatataccaggcaggtattaaagcctcattcagcagta

SEQ ID NO: 881525 - DNA, 75 bp, synthetic construct
  source 1..75: mol_type = other DNA
ctcggcggcggcgtgatgccgattggcgcaaccatcgccactgaagaggtgttttccgttctgttcgacaacccg

SEQ ID NO: 881526 - DNA, 75 bp, synthetic construct
  source 1..75: mol_type = other DNA
aaaaccggtgatgatgttgctgcagtgatccttgagccgattcagggcgaaggtggcgtcattctgccgccgccg

SEQ ID NO: 881527 - DNA, 75 bp, synthetic construct
  source 1..75: mol_type = other DNA
agcattaacgcaccaactggaatatgtattttatatccaccattggggtattgcacctactttaagtttcccttt

SEQ ID NO: 881528 - DNA, 75 bp, synthetic construct
  source 1..75: mol_type = other DNA
ggctggagagcactggaaaaaaattttttaatcgtaattgatacatcagtagaatttgaacattcacttggtcag

SEQ ID NO: 881529 - DNA, 75 bp, synthetic construct
  source 1..75: mol_type = other DNA
acagcgaatgtttcaggagtcagggctggccctgcgctgtaatgatgacagttttatctggacctgcgaggtttg

SEQ ID NO: 881530 - DNA, 75 bp, synthetic construct
  source 1..75: mol_type = other DNA
tgcgttattcgcgacggtcagcacattggcacgcgtgatgctgctggaatgagtgaagacgatattatcaccatg

SEQ ID NO: 881531 - DNA, 75 bp, synthetic construct
  source 1..75: mol_type = other DNA
aagatagaagattacagatgtataataaataagcacgatccatcttcaagaatgtttgtaggtaaggcaattaat

SEQ ID NO: 881532 - DNA, 75 bp, synthetic construct
  source 1..75: mol_type = other DNA
acaaacgcagcctcgaaggggagctggcgcagagcatcatgtcgctggacgcggtggagagcgcgcgggtgcatc

SEQ ID NO: 881533 - DNA, 75 bp, synthetic construct
  source 1..75: mol_type = other DNA
cgaagaggcgctggaatggctgaaaacagcgggccgggtaagtgcgattaacgtcagggcggaacagttacatca

SEQ ID NO: 881534 - DNA, 75 bp, synthetic construct
  source 1..75: mol_type = other DNA
ccactcccggcgggttgctggatcattcgctggaggttgcctgcaacgccatccgactgcgccagggttatctgc

SEQ ID NO: 881535 - DNA, 75 bp, synthetic construct
  source 1..75: mol_type = other DNA
ttgaggctgcatacaaagacagcatggcgatggatgccagtccggcggatgagttaaagcgcaggctggctaagc

SEQ ID NO: 881536 - DNA, 75 bp, synthetic construct
  source 1..75: mol_type = other DNA
taccgggcatggatttcgtcatacaatgagtactgttctacacgagcaaggattcaatagtgcatggattgaaat

SEQ ID NO: 881537 - DNA, 75 bp, synthetic construct
  source 1..75: mol_type = other DNA
aacgctgcgtcctctgctcagtaacggcttactggtcggaattttactggctgttcttatggataatcttattcc

SEQ ID NO: 881538 - DNA, 75 bp, synthetic construct
  source 1..75: mol_type = other DNA
atgaatgcacaaataaagaagttaaccctggcgtttccggcgtttcgactgcgtctcgcagataacaaacgctgg

SEQ ID NO: 881539 - DNA, 75 bp, synthetic construct
  source 1..75: mol_type = other DNA
caatcgtctcggtttagttcaggaccgcacgcgttacttacgtcgactcgaatttttgggtgatatgatgatatc

SEQ ID NO: 881540 - DNA, 75 bp, synthetic construct
  source 1..75: mol_type = other DNA
aacaaagctacagcggtaattcagtctgaacggcagaagaagttaggaatcaccaaaggaatctggcgtcactca

SEQ ID NO: 881541 - DNA, 75 bp, synthetic construct
  source 1..75: mol_type = other DNA
gttggtttgagtgcgactttgaacaagtaaaaaaaataaaagaagctaatgaagaatttttcaaacattctgaaa

SEQ ID NO: 881542 - DNA, 75 bp, synthetic construct
  source 1..75: mol_type = other DNA
gctataatgagagatatggatggttatttttcccttctaactatgaatcaagagttattcagaggggtataggaa

SEQ ID NO: 881543 - DNA, 75 bp, synthetic construct
  source 1..75: mol_type = other DNA
tatcattgaaacaaattatttgttaaaacaccatttaatgaattatgctgataaagatatttctggtgtttttgg

SEQ ID NO: 881544 - DNA, 75 bp, synthetic construct
  source 1..75: mol_type = other DNA
aacgcagtagacagcgataaaacaaaaacaccgccttcccccactgcccgccattaccccgacagtacacatgca

SEQ ID NO: 881545 - DNA, 75 bp, synthetic construct
  source 1..75: mol_type = other DNA
caggctggcgggggctgacgacaacgcttcttccttaactgtccctcccggaaagccagaaccgacgcccgcgcg

SEQ ID NO: 881546 - DNA, 75 bp, synthetic construct
  source 1..75: mol_type = other DNA
tgcgtgatcaccccggcaaaggggctgtaccactgcttcggctgtggcgcgaaaggctcggttatcgactggcag

SEQ ID NO: 881547 - DNA, 75 bp, synthetic construct
  source 1..75: mol_type = other DNA
acggtaaaaagctgtgggttgcgttatggcgtcgaaatggcgcgcatcatgcgtgctgctcaattcctgtatctg

SEQ ID NO: 881548 - DNA, 75 bp, synthetic construct
  source 1..75: mol_type = other DNA
atgatccgcccgttcatcaaatgggcagggggtaaaacccgtgtcctccctgacctgctgccgcatcttcctaaa

SEQ ID NO: 881549 - DNA, 75 bp, synthetic construct
  source 1..75: mol_type = other DNA
caccgacaaagacaaccgccagaaggccaaagaagtgatcggcgtgctgcctgtctgcgactgctgcgggcgtta

SEQ ID NO: 881550 - DNA, 75 bp, synthetic construct
  source 1..75: mol_type = other DNA
aagttatcatcatacttttttaacgttactcttttaaggcagaaagagctaagcgcatctaaagctagaaatgtt

SEQ ID NO: 881551 - DNA, 75 bp, synthetic construct
  source 1..75: mol_type = other DNA
tcccaacaataaataggcataaagttttacttaacacattgaatgatcttaacaatcaaaaagatgtatgtttcg

SEQ ID NO: 881552 - DNA, 75 bp, synthetic construct
  source 1..75: mol_type = other DNA
tgaccgtcacggcaggctgacagagaaaaccgacctcatcccggaaggggttatccgctggctgacagacatcag

SEQ ID NO: 881553 - DNA, 75 bp, synthetic construct
  source 1..75: mol_type = other DNA
atgctctcaaagaggacgggcacgaaaagggtgcggcaaaacagcgctttgagtcacgtcatcttaatcagggcg

SEQ ID NO: 881554 - DNA, 75 bp, synthetic construct
  source 1..75: mol_type = other DNA
ccttataaaaacatagagttattaatgaatgaatttattaaatatgattctgattcggtattgataattatggga

SEQ ID NO: 881555 - DNA, 75 bp, synthetic construct
  source 1..75: mol_type = other DNA
tttcgacaagttattttttcctggtaatcatcgttctgatggggctcagccacttgaggttgatttttcatttta

SEQ ID NO: 881556 - DNA, 75 bp, synthetic construct
  source 1..75: mol_type = other DNA
tgtttttgttcttttcttcgctttcttttgctgaggagaaagaagatccggataagcttgttcagtgttttggcc

SEQ ID NO: 881557 - DNA, 75 bp, synthetic construct
  source 1..75: mol_type = other DNA
ctgcgcctgctggaagtcattgaacagatcgggagttactcaaagcagattcgttcggcaatcgaagatggggta

SEQ ID NO: 881558 - DNA, 75 bp, synthetic construct
  source 1..75: mol_type = other DNA
tcgctatcttaatgttgactactccgccgtgacgggtttacttgttcaggtcgcccgtgaaacagatgatcgcgt

SEQ ID NO: 881559 - DNA, 75 bp, synthetic construct
  source 1..75: mol_type = other DNA
ggcctgtcggctaccgcgcttctgcttccggcgctgatccagctccagaagtccgctgaactgaaaatcatcaat

SEQ ID NO: 881560 - DNA, 75 bp, synthetic construct
  source 1..75: mol_type = other DNA
tggtatttcctattatcgtccgtggattttcctgatcaccgatggcgcaccaaccgatgagtggcaggctgccgc

SEQ ID NO: 881561 - DNA, 75 bp, synthetic construct
  source 1..75: mol_type = other DNA
acggttgggggacttactttgaagatcctgatggtgaagacggcgacgatgaagattttgtcgacgaagatgatg

SEQ ID NO: 881562 - DNA, 75 bp, synthetic construct
  source 1..75: mol_type = other DNA
tattgcccagcggctacgagctgatggacaaagacgaagtgctcggcagcagccagttcgtgcagaacgtgcgct

SEQ ID NO: 881563 - DNA, 75 bp, synthetic construct
  source 1..75: mol_type = other DNA
agatttgtctttctcgtccggttcttgatggtatgactttttctgatgtttataaaggtgatgacgggacccgtt

SEQ ID NO: 881564 - DNA, 75 bp, synthetic construct
  source 1..75: mol_type = other DNA
caattggcttacagttaatattgacaaactggtaaatacaaataatggaactgctcttccttttactttacagtt

SEQ ID NO: 881565 - DNA, 75 bp, synthetic construct
  source 1..75: mol_type = other DNA
tgtttttgttcttttcctcgttttctttcgctgaagagaaagaaaatccggatgcacttgttcagtgtgcaggcc

SEQ ID NO: 881566 - DNA, 75 bp, synthetic construct
  source 1..75: mol_type = other DNA
ccgcattttcaacggtactaaaggcttgcttgatgtggcccgcgcggctctgtttctttacctcaaccgccacgg

SEQ ID NO: 881567 - DNA, 75 bp, synthetic construct
  source 1..75: mol_type = other DNA
tggccatgaatggcgttggatgccgggcaactgcccgcattatggtaagcgtaaaccgaccgccgtatgtagcca

SEQ ID NO: 881568 - DNA, 75 bp, synthetic construct
  source 1..75: mol_type = other DNA
tgaacgccagcgcgtcgaagcagaacagcgtgcagctcgcgagaagcaggaagcggaagagcgtgcacgacgcga

SEQ ID NO: 881569 - DNA, 75 bp, synthetic construct
  source 1..75: mol_type = other DNA
ctggagcccttattgataattgggttttagtagaaaaaaaaggggctggcggtaacggagaagtttggcatgcaa

SEQ ID NO: 881570 - DNA, 75 bp, synthetic construct
  source 1..75: mol_type = other DNA
tgctgccgtacttctattcttgcgttgacctgattcgttttgaaggcgttaacatccgcaactttgtcagcctga

SEQ ID NO: 881571 - DNA, 75 bp, synthetic construct
  source 1..75: mol_type = other DNA
gtacgaaggtggaccagcaaatatacctgaagcaattgcatccggtacgccaataatatcaactcctgtgggtat

SEQ ID NO: 881572 - DNA, 75 bp, synthetic construct
  source 1..75: mol_type = other DNA
tgtcatctgatactgtaagcgggatatttacagatcttctctcttattacaaaagatattgcgataaagatatat

SEQ ID NO: 881573 - DNA, 75 bp, synthetic construct
  source 1..75: mol_type = other DNA
gtattctctcaggaacaggacggcattaaatcgcatacccacagcgccagcgcatccagtactgatttggggacg

SEQ ID NO: 881574 - DNA, 75 bp, synthetic construct
  source 1..75: mol_type = other DNA
gtattctctcaggaacaggacggcattaaatcgcaaacccacagcgccagcgcatccagtacagatttggggacg

SEQ ID NO: 881575 - DNA, 75 bp, synthetic construct
  source 1..75: mol_type = other DNA
gtattatctcaggaacaggacggcattaaatcgcaaacccacagcgccagcgcatccagtaccgatttggggacg

SEQ ID NO: 881576 - DNA, 75 bp, synthetic construct
  source 1..75: mol_type = other DNA
gtattgtctcaggaacaggacggcattaaatcgcagacccacagcgccagcgcatccagtaccgatttggggacg

SEQ ID NO: 881577 - DNA, 75 bp, synthetic construct
  source 1..75: mol_type = other DNA
gtattctctcaggaacaggacggcattaaatcgcagacccacagcgccagcgcatccagtacggatttggggacg

SEQ ID NO: 881578 - DNA, 75 bp, synthetic construct
  source 1..75: mol_type = other DNA
gtattctctcaggaacaggacggcattaaatcgcacacccacagcgccagcgcatccagtaccgatttggggacg

SEQ ID NO: 881579 - DNA, 75 bp, synthetic construct
  source 1..75: mol_type = other DNA
ccaatgttaactttactaatttctatggtgactggcacaatatacgctaaattgagagagatagataaaattgaa

SEQ ID NO: 881580 - DNA, 75 bp, synthetic construct
  source 1..75: mol_type = other DNA
gtgactcaaattcatcctcaaaaaaacaaagtaattattcactttttgtcgattctttatacacaccatattcct

SEQ ID NO: 881581 - DNA, 75 bp, synthetic construct
  source 1..75: mol_type = other DNA
atcggtattcactctccgtcggcgcagtatttcgccatcgccatgctgctgatgtttattgtcggttttgccatg

SEQ ID NO: 881582 - DNA, 75 bp, synthetic construct
  source 1..75: mol_type = other DNA
atgacaacccagaattatccgtttaccggcaatgatcgtcaaagcatgacttttacaccgatccttgatggcacc

SEQ ID NO: 881583 - DNA, 75 bp, synthetic construct
  source 1..75: mol_type = other DNA
ggcgctgcgtattgagtcccttcagccgcatatggccaacggcctgattcgcatcagtcccgcacatcagactct

SEQ ID NO: 881584 - DNA, 75 bp, synthetic construct
  source 1..75: mol_type = other DNA
atgctgttaacatcagctattgcatccaattcattttccaccggaatgcaggttcttcgtgctcaaatggccgcc

SEQ ID NO: 881585 - DNA, 75 bp, synthetic construct
  source 1..75: mol_type = other DNA
ctgggtagcgcggcgatcccctgtttgttgattttgattggtcgattcgaactgcctgaatctccccgctggtta

SEQ ID NO: 881586 - DNA, 75 bp, synthetic construct
  source 1..75: mol_type = other DNA
ctttcacctgatgaactcattgaatctttgtatgaatttttattttgtattaaactaaccattgcaaacatcact

SEQ ID NO: 881587 - DNA, 75 bp, synthetic construct
  source 1..75: mol_type = other DNA
gcaattgagtaccccagcctgcgggtgattcatttagctgaaaaccagggtaaagcgctggcgctcaagaccggt

SEQ ID NO: 881588 - DNA, 75 bp, synthetic construct
  source 1..75: mol_type = other DNA
aaccatcggcgctgcgatggcacagcgctacaagaatatcgaagtgattgccattaacgacggttcaacggacga

SEQ ID NO: 881589 - DNA, 75 bp, synthetic construct
  source 1..75: mol_type = other DNA
caagatttccatatccagtgatcggaggagatagattacgtatttatgaaatatgtaaagagctgtctcgtaaat

SEQ ID NO: 881590 - DNA, 75 bp, synthetic construct
  source 1..75: mol_type = other DNA
taccatcacaaacccgaaagagacgtcgcaaaaatatgacgcacgagcatgaatcagacaaattcgcgccgtgtg

SEQ ID NO: 881591 - DNA, 75 bp, synthetic construct
  source 1..75: mol_type = other DNA
acaccagacacagccactgcccaccgtcgccgcgcctgttttgagtgcaccgctgggttctcacgaatggcaaca

SEQ ID NO: 881592 - DNA, 75 bp, synthetic construct
  source 1..75: mol_type = other DNA
ccggggttgtggggcgtattgctggtggcctgggggctattgcaacttatacccgctctcgtatcggtgctgtat

SEQ ID NO: 881593 - DNA, 75 bp, synthetic construct
  source 1..75: mol_type = other DNA
tgaaaggcagaataaattaattaagcagggatatgatagtgaatttattgggcgttattctggagatcgggaacg

SEQ ID NO: 881594 - DNA, 75 bp, synthetic construct
  source 1..75: mol_type = other DNA
tgatatggtaattaactgggcggaaaccggtaaattaaacgctcaggactttgcggcgacattcattcaatctgt

SEQ ID NO: 881595 - DNA, 75 bp, synthetic construct
  source 1..75: mol_type = other DNA
tgctcagacgctaccacttcccctgcaacaggtagtcgaagcattgaatcagggcgaaacgcccgatcagattat

SEQ ID NO: 881596 - DNA, 75 bp, synthetic construct
  source 1..75: mol_type = other DNA
cattaccgctgttcactgggggcagtaatctggcgcaacttcgctacgcagaagcgcaaaagcgcggactcattg

SEQ ID NO: 881597 - DNA, 75 bp, synthetic construct
  source 1..75: mol_type = other DNA
agtctggtatgaagtgggcagacgaagaccagcgtgatgaaattggcaatctagcggcaggcggtcaaattgcct

SEQ ID NO: 881598 - DNA, 75 bp, synthetic construct
  source 1..75: mol_type = other DNA
ttggcctggtggggacagcgccgggcgcctctggtggcgtgtgcgcttccggcaccgccggctcctggctgctgg

SEQ ID NO: 881599 - DNA, 75 bp, synthetic construct
  source 1..75: mol_type = other DNA
gattgaagacagtatccaggaggcgatgctggcatatgttgaccgcccgctcgatcgccagaatgcggatgacat

SEQ ID NO: 881600 - DNA, 75 bp, synthetic construct
  source 1..75: mol_type = other DNA
aaaaaattttttgtttatttcattaagactaatttttcatattttacctctccccataattaaaatcctttataa

SEQ ID NO: 881601 - DNA, 75 bp, synthetic construct
  source 1..75: mol_type = other DNA
cttaaaaaattaacagaagctcaaaaagagcaattgagagatgcagcgaaagttctcgattccaaaaaagaagag

SEQ ID NO: 881602 - DNA, 75 bp, synthetic construct
  source 1..75: mol_type = other DNA
ctgaacgatgaactgaacactgcagaaaccctggcagcagggcagttgtatattgattatgactttgggccgaag

SEQ ID NO: 881603 - DNA, 75 bp, synthetic construct
  source 1..75: mol_type = other DNA
tgtgactgaagcggtgaatgcgctgggggattcgcctgtgacggcggctgtcagctccctgaatgcaggaggcgc

SEQ ID NO: 881604 - DNA, 75 bp, synthetic construct
  source 1..75: mol_type = other DNA
gaaactacaaaaagtggtatgcaaacaactgatctgtcacgtttttcaaaaaatacgcacaactaccaggaactt

SEQ ID NO: 881605 - DNA, 75 bp, synthetic construct
  source 1..75: mol_type = other DNA
ttctgcagccacagtttacggttgaacaactacgtgagctgggtattaaggtggatgaaatcccggcgctggctg

SEQ ID NO: 881606 - DNA, 75 bp, synthetic construct
  source 1..75: mol_type = other DNA
cgatagctttcattgcggtaattgctgtaatgtgtacagtggatctttcattatatgtaccttcaatttacaccg

SEQ ID NO: 881607 - DNA, 75 bp, synthetic construct
  source 1..75: mol_type = other DNA
agcgagaagctggaatatatccccgcacaggttgtggtccaccgctatatccgcccgcagtacagctgtccctgc

SEQ ID NO: 881608 - DNA, 75 bp, synthetic construct
  source 1..75: mol_type = other DNA
attacaaccgccaccgctattatgacccgctgcaggggcgatatatcactcaggatccgattgggctgaaagggg

SEQ ID NO: 881609 - DNA, 75 bp, synthetic construct
  source 1..75: mol_type = other DNA
agagtttgtcgcgggcagcacgggaaacctggcttgccagcgaatttacggcgcagaacacccgcttaacgctga

SEQ ID NO: 881610 - DNA, 75 bp, synthetic construct
  source 1..75: mol_type = other DNA
tttataattggatggaatattaataatcttatagatataataaatacatccttgtcagattcattcagaaatgta

SEQ ID NO: 881611 - DNA, 75 bp, synthetic construct
  source 1..75: mol_type = other DNA
cgccgcggctccgggcgtacacaaatcgcccgcagaagcgcggccgtctggaccgatggctgtgtagaagtactc

SEQ ID NO: 881612 - DNA, 75 bp, synthetic construct
  source 1..75: mol_type = other DNA
gagaaaatcaaatcttttattatctgcattaaaaattgaaaatgttacactgcgtaagaatatttccgaattgca

SEQ ID NO: 881613 - DNA, 75 bp, synthetic construct
  source 1..75: mol_type = other DNA
tcttgcatcaccgaatgaagttaagggaattgcaggaatatccattaaatcagatgttgaggattttgaaataat

SEQ ID NO: 881614 - DNA, 75 bp, synthetic construct
  source 1..75: mol_type = other DNA
tggtatttgaaaaagatgataagcagcagactatagttaagaaatcttattttgacgagaatggtttcctaaaaa

SEQ ID NO: 881615 - DNA, 75 bp, synthetic construct
  source 1..75: mol_type = other DNA
atagttaagaaatcttattttgacgagaatggtttcctaaaaaattggccggttggctttttctcgggtaagtag

SEQ ID NO: 881616 - DNA, 75 bp, synthetic construct
  source 1..75: mol_type = other DNA
gcgccactgaacagcccggcactgaccggaacgccgtccacgccaacaccgccggatgatgcagcaggtaatgaa

SEQ ID NO: 881617 - DNA, 75 bp, synthetic construct
  source 1..75: mol_type = other DNA
ctttcgtgagcatatcggcatatttaagtggattcacgcccaggacgcagcggagcaggctgtagaggctatcag

SEQ ID NO: 881618 - DNA, 75 bp, synthetic construct
  source 1..75: mol_type = other DNA
agataccgccgatccatcaggaaacctctatggtgtaatgaccccagcaggaaacacgcctggcaatatcaacct

SEQ ID NO: 881619 - DNA, 75 bp, synthetic construct
  source 1..75: mol_type = other DNA
attcttgaaattatctgggcttcagctttaactactacaactaacggcgtaaacaagatttatttttttttacag

SEQ ID NO: 881620 - DNA, 75 bp, synthetic construct
  source 1..75: mol_type = other DNA
actgaacgagctggcagcggcgctgggcggcgacccgaactttgcgacaacggtcactaatgcactggcagataa

SEQ ID NO: 881621 - DNA, 75 bp, synthetic construct
  source 1..75: mol_type = other DNA
ccgtgcgccactgaacagcccggcactgaccggaacgccgtccacgccaacaccaccagatgatgcagcaggtaa

SEQ ID NO: 881622 - DNA, 75 bp, synthetic construct
  source 1..75: mol_type = other DNA
ggtatccagtttggtggggataaacgtctctctgatgaaatgcctgaaccgccccgggaatcctggagactaaac

SEQ ID NO: 881623 - DNA, 75 bp, synthetic construct
  source 1..75: mol_type = other DNA
agaaacttgattcattaagttactttaaaaattggttcagctaccttagctctggtgattttgaaaaatataagg

SEQ ID NO: 881624 - DNA, 75 bp, synthetic construct
  source 1..75: mol_type = other DNA
atgtgacagacattaccaggaatgcgacttacccggtgctgattgacagcattgcggtggaagtgaacaacgcgg

SEQ ID NO: 881625 - DNA, 75 bp, synthetic construct
  source 1..75: mol_type = other DNA
gttgatcgtaatggcagtctggcgctgggtttgtgggcgctcagcggcggtagaataaccggagacagtttggct

SEQ ID NO: 881626 - DNA, 75 bp, synthetic construct
  source 1..75: mol_type = other DNA
taatggcgttaataataaaggggatttattgaatatcagcgggagtagtgctggtaatcacgtattggctatccg

SEQ ID NO: 881627 - DNA, 75 bp, synthetic construct
  source 1..75: mol_type = other DNA
tgagttggggggatatctgtatgatgtgcgtaaaaatggcactaactgggagctttacgcttccgggacagttcc

SEQ ID NO: 881628 - DNA, 75 bp, synthetic construct
  source 1..75: mol_type = other DNA
ttgaaaagtgggttgctgaatgcacagccagtaatttacctgcacgccctgacactattatttttgccctgatgg

SEQ ID NO: 881629 - DNA, 75 bp, synthetic construct
  source 1..75: mol_type = other DNA
ggataatcgtagcgataaactcccctacctcgcttattcctggctcgaaaatgaaaaaggggagaaaagcgatga

SEQ ID NO: 881630 - DNA, 75 bp, synthetic construct
  source 1..75: mol_type = other DNA
cataaagaaatttccgaattgctggattcagtaacctgtaagcacttatctaccgaagaacatgactatatggat

SEQ ID NO: 881631 - DNA, 75 bp, synthetic construct
  source 1..75: mol_type = other DNA
gcaaaaatattggctttctgtttgcctgactatttttcctcacactttttatccttttgttgaatatataccatt

SEQ ID NO: 881632 - DNA, 75 bp, synthetic construct
  source 1..75: mol_type = other DNA
ccctttttatctcctgctccgacagccgtctggtccctgagctggtgacgcaacgtgaacctggcgatctgttcg

SEQ ID NO: 881633 - DNA, 75 bp, synthetic construct
  source 1..75: mol_type = other DNA
atgacatttatgaaaggacttccccttttgttgttggttaccagtctgtgtagccacgctgcactacaacccgac

SEQ ID NO: 881634 - DNA, 75 bp, synthetic construct
  source 1..75: mol_type = other DNA
caggtcgctattcaaagtcgtattaaattgttctggcgaccggctgcattacgcaagaaagcaggagaaaaggtc

SEQ ID NO: 881635 - DNA, 75 bp, synthetic construct
  source 1..75: mol_type = other DNA
ctggcgtcggcagcgacgcattatcgtcgctgtttagccacggaatgcaggtctggtcatttgcgccctcggtaa

SEQ ID NO: 881636 - DNA, 75 bp, synthetic construct
  source 1..75: mol_type = other DNA
agctgtggaacccggatacctgtccggcaaatctgctgccgtggctggcgtgggcgttttcggtcgacaggtggg

SEQ ID NO: 881637 - DNA, 75 bp, synthetic construct
  source 1..75: mol_type = other DNA
gtaaacagccgcttaatgatgtgttaacggctgtcagccagataacaccggaagaaaacacgctgccttatttca

SEQ ID NO: 881638 - DNA, 75 bp, synthetic construct
  source 1..75: mol_type = other DNA
atggaacaggatgctcgtttactcagtgcaatgcaaaagatgtgtgaccaaaaaatgccacttaatactcttgag

SEQ ID NO: 881639 - DNA, 75 bp, synthetic construct
  source 1..75: mol_type = other DNA
tgtcaaagctgagcaacaaacggtcgatattggcctgcgtcgctatcaagccggcgtcggtgattacctgaccgt

SEQ ID NO: 881640 - DNA, 75 bp, synthetic construct
  source 1..75: mol_type = other DNA
gtgcaggacatttccggcaaggtatacacaggcggcatggtgtatgacggcgatattattaccgtttacccgata

SEQ ID NO: 881641 - DNA, 75 bp, synthetic construct
  source 1..75: mol_type = other DNA
tgcggtaaactggtacattgaagcgcatgatacgcgcagtaatatgagccgaaccaattacagctacaaccatca

SEQ ID NO: 881642 - DNA, 75 bp, synthetic construct
  source 1..75: mol_type = other DNA
actggccatgataataccgggactgataacgaaccgggtaaccaacttgccggttttgactttaagttcaaactc

SEQ ID NO: 881643 - DNA, 75 bp, synthetic construct
  source 1..75: mol_type = other DNA
ttggtcagacgcagccggcagataactcgttaggcctggcgttcaacaatagcggcgaatggtgggatgtccacc

SEQ ID NO: 881644 - DNA, 75 bp, synthetic construct
  source 1..75: mol_type = other DNA
cttgccaagtgcgaacatcagtccttgatcaatgcttatgacaatgccttgcttgccaccgatgatttcatcgct

SEQ ID NO: 881645 - DNA, 75 bp, synthetic construct
  source 1..75: mol_type = other DNA
actcagcaatttctgggatgggttaaccggtaaagacaataccgccgcaaacgatcccaatgaaccgggtaacca

SEQ ID NO: 881646 - DNA, 75 bp, synthetic construct
  source 1..75: mol_type = other DNA
gcggatcagcaacggatcgcgcttcaatgtcaacggtgcttacggtgcggtgaagttctggaaccagtggctctc

SEQ ID NO: 881647 - DNA, 75 bp, synthetic construct
  source 1..75: mol_type = other DNA
ttagtagtaaatgataacgatctgcgaaacgaccttgcctggctttccgaacgcggggtcatccatctgagcctg

SEQ ID NO: 881648 - DNA, 75 bp, synthetic construct
  source 1..75: mol_type = other DNA
atgataaaaattgcgcgaattgccgtgacattgggcttgctttcctcattgggagcccaggcttacgcggccggg

SEQ ID NO: 881649 - DNA, 75 bp, synthetic construct
  source 1..75: mol_type = other DNA
gtggtgctggcccgtatcaatcagcgactgtctgctttaaaagccgattttcgggtcaccggttatacctcaacc

SEQ ID NO: 881650 - DNA, 75 bp, synthetic construct
  source 1..75: mol_type = other DNA
aacgccaacggcgcctacggcgcggtgaagttctggaaccagtggctctcttttggtcaggttccgcagtggtgg

SEQ ID NO: 881651 - DNA, 75 bp, synthetic construct
  source 1..75: mol_type = other DNA
tcactgtggtacaccaatgcgaacaatagcgacagcgacgacgttggggccagcgcagggatagaaataccattt

SEQ ID NO: 881652 - DNA, 75 bp, synthetic construct
  source 1..75: mol_type = other DNA
gtatagaagggcatcatggatggggaaaagatgcgctaaattggtatttagaagcccatgatacgagaacaaaca

SEQ ID NO: 881653 - DNA, 75 bp, synthetic construct
  source 1..75: mol_type = other DNA
agaaattatctgttagtcataattaatggtgaggttatgcaaggaacggatgtatatatcaacaatgctttattt

SEQ ID NO: 881654 - DNA, 75 bp, synthetic construct
  source 1..75: mol_type = other DNA
tcactaagtgatttgttttctattagagacaatttagaagagtatggcatgcgggcacaaaacttgaaatttact

SEQ ID NO: 881655 - DNA, 75 bp, synthetic construct
  source 1..75: mol_type = other DNA
aaactgccgcaggtcagcgacggcatgattcaggggaaatcggtgcgtctgatcctcaaaaaaagaggccacacc

SEQ ID NO: 881656 - DNA, 75 bp, synthetic construct
  source 1..75: mol_type = other DNA
cggtgcgggcaaaaccacgctgatgcggatgctggcgggattactgaaacccgatagcggcagcgccacggtgat

SEQ ID NO: 881657 - DNA, 75 bp, synthetic construct
  source 1..75: mol_type = other DNA
taaagatttagttacgcaagataaaagcattaatggccctataatcattagatgcaacaaagtttctggtgagga

SEQ ID NO: 881658 - DNA, 75 bp, synthetic construct
  source 1..75: mol_type = other DNA
ttcaaccaattcagcaaaatgctatcaaagaacttttaggagaaaaggaaatcctccaattcatagagaggataa

SEQ ID NO: 881659 - DNA, 75 bp, synthetic construct
  source 1..75: mol_type = other DNA
tgtaatggaagcaaatgaaagtaacgataaccctgattttttagaagtgattattcaatctcaaggattctggga

SEQ ID NO: 881660 - DNA, 75 bp, synthetic construct
  source 1..75: mol_type = other DNA
gtagcgttttcaactcttgatacacgtcttcctatgagcaaatcgcgtattttgctcaatccacgcgatattgac

SEQ ID NO: 881661 - DNA, 75 bp, synthetic construct
  source 1..75: mol_type = other DNA
acagatgaaccttataatgttacccgggcactgttattaatggtgatactgacagcaacccgctcgggcgaagca

SEQ ID NO: 881662 - DNA, 75 bp, synthetic construct
  source 1..75: mol_type = other DNA
aagctcacaaggcatcgtccttagtaaagtatggacaaaagaaattagaaatgtggcgcaagctcctacaaatac

SEQ ID NO: 881663 - DNA, 75 bp, synthetic construct
  source 1..75: mol_type = other DNA
gtagcattttcaagtcttgaaacacgtcttccgatgagtaaatcgcgcattttgctcaatccacgcgatattgac

SEQ ID NO: 881664 - DNA, 75 bp, synthetic construct
  source 1..75: mol_type = other DNA
gttcaaccatgctggataaacgttatgtcatcactaacggtaatcagctggcgattcaaaatgacctagattcta

SEQ ID NO: 881665 - DNA, 75 bp, synthetic construct
  source 1..75: mol_type = other DNA
cccacagtcttaacattcaaaacaccacaacgccacctgaacaatccccagttaaaagcaaacgattcactacct

SEQ ID NO: 881666 - DNA, 75 bp, synthetic construct
  source 1..75: mol_type = other DNA
tcggagaggatgagtctggttatcttccatcggcaaacatgttcctcggcgggattgaagggcaccacggctggg

SEQ ID NO: 881667 - DNA, 75 bp, synthetic construct
  source 1..75: mol_type = other DNA
ttcgcaggcgatgacgcatctggaagagctgtcgaagcagatcctgccgaatgggatgaatattgagtggacgga

SEQ ID NO: 881668 - DNA, 75 bp, synthetic construct
  source 1..75: mol_type = other DNA
gaaatggtaccgatcggcagtatggtgaatatcagtaccacctacgggccggatccggtgatccgctacaacggt

SEQ ID NO: 881669 - DNA, 75 bp, synthetic construct
  source 1..75: mol_type = other DNA
gaaccggaagccgtcagcgaaccgtggattgccatgccggaagaggagcgcaaaaacgtcgacctgccgtcgctg

SEQ ID NO: 881670 - DNA, 75 bp, synthetic construct
  source 1..75: mol_type = other DNA
tcgcgggggctggcggaaaaactgacggcacgattaaatgagctttacgccgcacgcttacagcgttccccgtct

SEQ ID NO: 881671 - DNA, 75 bp, synthetic construct
  source 1..75: mol_type = other DNA
ggttaccagcggcggcaccattccggatcgtggcatgtatagcgtgttattacccgaaggtgaagaaaaggccgg

SEQ ID NO: 881672 - DNA, 75 bp, synthetic construct
  source 1..75: mol_type = other DNA
aaaaacgcgctgaggaatcgggcgttactttgctgtacacgccttttgcccgtgaagcgtttgttttcatcgtca

SEQ ID NO: 881673 - DNA, 75 bp, synthetic construct
  source 1..75: mol_type = other DNA
gtgttatttcccggcctcggtgtttgcaatggatattctgggcaacgtagtagaagaagcgggtctgggtcagga

SEQ ID NO: 881674 - DNA, 75 bp, synthetic construct
  source 1..75: mol_type = other DNA
ggggattgataatttaatggcgcggttaccgggcgagctttccggcggccagcgacagcgcgtggcgttagcgcg

SEQ ID NO: 881675 - DNA, 75 bp, synthetic construct
  source 1..75: mol_type = other DNA
tctcaacaccacgaatgacatcgaaaaactgcgtgctatggcacttgccatggtacaaaaagtcatgtcggagaa

SEQ ID NO: 881676 - DNA, 75 bp, synthetic construct
  source 1..75: mol_type = other DNA
acccgcaccagctgcagcagctcatccgcctgccgggtcagcagtatgatgaggagtccggcctctattacaacc

SEQ ID NO: 881677 - DNA, 75 bp, synthetic construct
  source 1..75: mol_type = other DNA
gtcacctgacggtcgcgcagaacatcgggctggggcttaatccgggattgaagctgaacgcggcgcagcaggaga

SEQ ID NO: 881678 - DNA, 75 bp, synthetic construct
  source 1..75: mol_type = other DNA
atgtgatcaacacaaccaaaggcgagaaggtaatagccaagacgctgaacaactggtggaatcaggctaaacgtg

SEQ ID NO: 881679 - DNA, 75 bp, synthetic construct
  source 1..75: mol_type = other DNA
atggctgatcattttgagtacgaggaagattttgaaacagatgattttgatatcaaaaaaacgagagtgagattt

SEQ ID NO: 881680 - DNA, 75 bp, synthetic construct
  source 1..75: mol_type = other DNA
ggatctaagcctgaaaccatgtgaacagttatctgaacaattggattatcaggaggccgacgatcgttttgttgg

SEQ ID NO: 881681 - DNA, 75 bp, synthetic construct
  source 1..75: mol_type = other DNA
aacagcaacagattaacgaaaatctaaaaattgaggcaatccgttggtatcagaagctgcaggagattacttatc

SEQ ID NO: 881682 - DNA, 75 bp, synthetic construct
  source 1..75: mol_type = other DNA
attttggtgaatatcttgtaggaaataagatggagcttataaactttttaaaacagaaatataaaggttattata

SEQ ID NO: 881683 - DNA, 75 bp, synthetic construct
  source 1..75: mol_type = other DNA
atggctgcactaaaaccagaagtgagagcctttatcattcaagagcttgcatgctttgatacgccatcccaaatc

SEQ ID NO: 881684 - DNA, 75 bp, synthetic construct
  source 1..75: mol_type = other DNA
aagccgccattgttcaaatgcttgcgtgctatgacacgccttcgcaggtggtcgaggctgtccagaaagatttcg

SEQ ID NO: 881685 - DNA, 75 bp, synthetic construct
  source 1..75: mol_type = other DNA
gattttatcgagaagttagtagctacactcgatattccaaagcgacacattgaattatctttatggataatagat

SEQ ID NO: 881686 - DNA, 75 bp, synthetic construct
  source 1..75: mol_type = other DNA
atgaagttaaaattcatctccatggctgtattttcagccctgaccctgggtgttgcgacaaatgcgtctgctgcc

SEQ ID NO: 881687 - DNA, 75 bp, synthetic construct
  source 1..75: mol_type = other DNA
catctccatccttcatttattaataaatttatggcattgcttgataatttattagaaaagacaggctcttcagct

SEQ ID NO: 881688 - DNA, 75 bp, synthetic construct
  source 1..75: mol_type = other DNA
cgtgaatcaaaatccaaattaaacttgaatgatttaatagtgcaactagcgaggagtaacgacgctatcggctat

SEQ ID NO: 881689 - DNA, 75 bp, synthetic construct
  source 1..75: mol_type = other DNA
tcctgttgaactctataatataaaggatgattcttatattattaatttatctctttcaaatggtacaatgtcaca

SEQ ID NO: 881690 - DNA, 75 bp, synthetic construct
  source 1..75: mol_type = other DNA
tgtcacggtgctggacggcgaaaagctcacctaccgcatcgacccgcagagcgggcagattctggtgccggaaga

SEQ ID NO: 881691 - DNA, 75 bp, synthetic construct
  source 1..75: mol_type = other DNA
cctcagattagaaaaaaccacaggatctgagaatgagtggtgggcgaaaattaagccgtcccagcatgatgattg

SEQ ID NO: 881692 - DNA, 75 bp, synthetic construct
  source 1..75: mol_type = other DNA
accgcagtttgataaagcgcgagaaacaaaagtattgccgcttaccggcgtcgtttcgccgcgcacggaaaacac

SEQ ID NO: 881693 - DNA, 75 bp, synthetic construct
  source 1..75: mol_type = other DNA
aatctatttgcgaagataaagagttcgctggtttaatatgtaaggataatagtggcagatatttctcaacagcac

SEQ ID NO: 881694 - DNA, 75 bp, synthetic construct
  source 1..75: mol_type = other DNA
acctgctgaatgaagagaacccgcatcagctgcagcagcttatccggctgccggggcagcagtatgatgaggagt

SEQ ID NO: 881695 - DNA, 75 bp, synthetic construct
  source 1..75: mol_type = other DNA
tactgacaatcaagcagtggcgcgaaacatacggacctggtagcaacgttgtactgccagcagaagaggcggaag

SEQ ID NO: 881696 - DNA, 75 bp, synthetic construct
  source 1..75: mol_type = other DNA
ggtgccctgtacaaatatatgcgaaaaaaattccctgatgaactattcagagccatcagggtggatcccaaaact

SEQ ID NO: 881697 - DNA, 75 bp, synthetic construct
  source 1..75: mol_type = other DNA
gatatcaattcacgccattcgcagttaatgcttaaggcaccaatagtctccggaactattatatcatcggtgaaa

SEQ ID NO: 881698 - DNA, 75 bp, synthetic construct
  source 1..75: mol_type = other DNA
agcacctaaccgaggagaaagaaaaggatcatatccattcaatagcccttgccctaatggtactgagaaagtatc

SEQ ID NO: 881699 - DNA, 75 bp, synthetic construct
  source 1..75: mol_type = other DNA
tggactgaaggggggatggaacctgtatggatatcaattgaatccgatatcagacatcgaccccctgggtttatc

SEQ ID NO: 881700 - DNA, 75 bp, synthetic construct
  source 1..75: mol_type = other DNA
cttcaactattagatgccagtaatctaagattgacagtgagtaagcaacggaacgctatcacacagcaactaatc

SEQ ID NO: 881701 - DNA, 75 bp, synthetic construct
  source 1..75: mol_type = other DNA
gtgcgtagagtggggaaggaagaagaggaggttgacccgttggacacgccggcgcagaagatcctgcttgaccac

SEQ ID NO: 881702 - DNA, 75 bp, synthetic construct
  source 1..75: mol_type = other DNA
acagcatggcgtcgcagttcgccgatgcggtcaacaaccagctggcgcagggctacgatctcaacggtaaccccg

SEQ ID NO: 881703 - DNA, 75 bp, synthetic construct
  source 1..75: mol_type = other DNA
tactggaacgttttgggccacagcgttcacattaccgacctgatatgccgttctggcgattacaaggcgacggat

SEQ ID NO: 881704 - DNA, 75 bp, synthetic construct
  source 1..75: mol_type = other DNA
atgtttgaaaattattatattggacgagcatacagaaaaagcaaatcacctttacatataaagcgtggacaaaaa

SEQ ID NO: 881705 - DNA, 75 bp, synthetic construct
  source 1..75: mol_type = other DNA
ggagacatggtacggctgggacggcgacaggctgacgacggtacagaccgacaccacgcgtatccagacggtata

SEQ ID NO: 881706 - DNA, 75 bp, synthetic construct
  source 1..75: mol_type = other DNA
acgggcaggctggagagcgtgcgtaccctcgcaccggacctggacatccgcatcccgtatgccaccgacccggcg

SEQ ID NO: 881707 - DNA, 75 bp, synthetic construct
  source 1..75: mol_type = other DNA
ccacctgagcgaaggccaccgtgtcgctgtccactacggctacgacgataagggccgcctgaccggcgaacggca

SEQ ID NO: 881708 - DNA, 75 bp, synthetic construct
  source 1..75: mol_type = other DNA
atacccaacgtcaaacactcaccgtaccgtttacaccctctaatgctgagatggcactttacgaaagtattagtg

SEQ ID NO: 881709 - DNA, 75 bp, synthetic construct
  source 1..75: mol_type = other DNA
aaaatgggtcaaacgctacgccgcgcattagatggcagtaaaaagctattacttactgcaacacccttacaaaac

SEQ ID NO: 881710 - DNA, 75 bp, synthetic construct
  source 1..75: mol_type = other DNA
gttacgcgggaaggccggagatgcgctaccgctacgacgataccgggcgggtggtggagcagctgaacccggcag

SEQ ID NO: 881711 - DNA, 75 bp, synthetic construct
  source 1..75: mol_type = other DNA
cgcacctacagcagctaccggactatgactcctgccccggtgggcgttttcggccccggctggaaagcgccttct

SEQ ID NO: 881712 - DNA, 75 bp, synthetic construct
  source 1..75: mol_type = other DNA
cgcacctacagcagctaccggactaagactcctgccccggtgggcgtgttaggccccggctggaaagcgccttct

SEQ ID NO: 881713 - DNA, 75 bp, synthetic construct
  source 1..75: mol_type = other DNA
ggtccttacgccagccagcgtggtcagatcacgctgtttgtgaccgaacgcgcggtattccaggttaaggacggt

SEQ ID NO: 881714 - DNA, 75 bp, synthetic construct
  source 1..75: mol_type = other DNA
cctgaccggaaaactcacgcagagtgaagatgaggggcttgtcaccctctggtactacgatgaatcggaccgtat

SEQ ID NO: 881715 - DNA, 75 bp, synthetic construct
  source 1..75: mol_type = other DNA
tttgtgaaggcggaaaagtaagaattggcgttacgagttattcgatgttgaatctgtttgtagagtattggcttc

SEQ ID NO: 881716 - DNA, 75 bp, synthetic construct
  source 1..75: mol_type = other DNA
cgcacctacagcagctaccggactaggactcctgccccggtgggcgtcttgggccccggctggaaagcgccttct

SEQ ID NO: 881717 - DNA, 75 bp, synthetic construct
  source 1..75: mol_type = other DNA
tcaaccaggaaagccagtacgggtgataaatcctgatgatgaatcgatacgaattttttcatggcttgctgataa

SEQ ID NO: 881718 - DNA, 75 bp, synthetic construct
  source 1..75: mol_type = other DNA
agcaccagtatttctgcaccggagcagatccttgatttcagctataaaattccactgcttaagaaccccctggaa

SEQ ID NO: 881719 - DNA, 75 bp, synthetic construct
  source 1..75: mol_type = other DNA
gaaaatacactggcgataaagaaggaaaaagacacgctattgtcaacggtgttcttatgattcatcgcggatggg

SEQ ID NO: 881720 - DNA, 75 bp, synthetic construct
  source 1..75: mol_type = other DNA
agtctaaagtaaaacataagaaatattttgggtttagtctgctttttaatccatattactggatttttgttaagc

SEQ ID NO: 881721 - DNA, 75 bp, synthetic construct
  source 1..75: mol_type = other DNA
tgcaatacctattacagaaaatggacaactcataggattaaaaacattacatgaattattaaaaagtaagagata

SEQ ID NO: 881722 - DNA, 75 bp, synthetic construct
  source 1..75: mol_type = other DNA
actataatagatatgccaagcttattacaaaaatatatcgaaaatgatgagatgatttcgatatatcctcttact

SEQ ID NO: 881723 - DNA, 75 bp, synthetic construct
  source 1..75: mol_type = other DNA
gaccactcactgataattgccctaaaccaatgcttaaagtaggtgataaacctattttagagacagtggtaagaa

SEQ ID NO: 881724 - DNA, 75 bp, synthetic construct
  source 1..75: mol_type = other DNA
ggcccagtatggacagattttcggggtaatgccgtcattccatcaatccagccgtggcgaacatcaggagttgag

SEQ ID NO: 881725 - DNA, 75 bp, synthetic construct
  source 1..75: mol_type = other DNA
atctgacacgctggagtgcaatgaacggcggcgttatcgtagcagaaaattatcaggcggcatcaatccggtcga

SEQ ID NO: 881726 - DNA, 75 bp, synthetic construct
  source 1..75: mol_type = other DNA
taacccagcgcactatgcggatgccattcgttataatgctcgaacgcctctgcaaggttctttgctgccgttaac

SEQ ID NO: 881727 - DNA, 75 bp, synthetic construct
  source 1..75: mol_type = other DNA
atggacaatacgaactcgcggtaggtaaagcacattctgatgaagaaaatcgtcaatggtctccttcagctccgc

SEQ ID NO: 881728 - DNA, 75 bp, synthetic construct
  source 1..75: mol_type = other DNA
cgctgtacttgaagtgctggaaggccgaggttttaaaaatgctaagatcaaaaaaccttgtgtgactgctgatta

SEQ ID NO: 881729 - DNA, 75 bp, synthetic construct
  source 1..75: mol_type = other DNA
atcatgccgtattcaccttacattcccagaagatgcaccaaaagatgtgttctatgagacagcaacaggagagtg

SEQ ID NO: 881730 - DNA, 75 bp, synthetic construct
  source 1..75: mol_type = other DNA
ctccagaaacaaacatcttatagagacctcctataataagttgaaatcaaaagaaatcacatttcaacaatacag

SEQ ID NO: 881731 - DNA, 75 bp, synthetic construct
  source 1..75: mol_type = other DNA
aaagtaaaagttaaagaattccgatgtgtgatgattgaagataaaataactaaaagctcatattgtatttcccct

SEQ ID NO: 881732 - DNA, 75 bp, synthetic construct
  source 1..75: mol_type = other DNA
cgggttaaacttataccaatatgcgcctaatcctcagggatggattgatccattaggtcttagtaaaacccatac

SEQ ID NO: 881733 - DNA, 75 bp, synthetic construct
  source 1..75: mol_type = other DNA
atttttttcctcattatcggtctggcattataaaagaattattaaagtcaaatgaatatgagttccatttttttg

SEQ ID NO: 881734 - DNA, 75 bp, synthetic construct
  source 1..75: mol_type = other DNA
tctggatacgcacactctacgatcgccatcgttttgtcacgcgcggcacgttgggctggattgaaacgggtgact

SEQ ID NO: 881735 - DNA, 75 bp, synthetic construct
  source 1..75: mol_type = other DNA
tgctgttttatcctggggtgatgattagccgcacgcgttctcgtggtggcctgatgccaacctggggcgactcgc

SEQ ID NO: 881736 - DNA, 75 bp, synthetic construct
  source 1..75: mol_type = other DNA
ttttcgattcagccagaacctatttatttagctgacatgttacctgaccttacgatgttagagcgaatgatcgca

SEQ ID NO: 881737 - DNA, 75 bp, synthetic construct
  source 1..75: mol_type = other DNA
gcgctgggaggtcataggtgacgcccttgtcttcaaacgtattgccgagccggacgagagttatttacgcgcccg

SEQ ID NO: 881738 - DNA, 75 bp, synthetic construct
  source 1..75: mol_type = other DNA
ttgctggcagtgggaaatcatcggtgatgcgctggtgtttaaacgcattgcggaaccggacgagagttatctgcg

SEQ ID NO: 881739 - DNA, 75 bp, synthetic construct
  source 1..75: mol_type = other DNA
ccttttagccagtggactaccgaagatctgaaagagtggacggaagtaaaccagctggaatatttaaccctgatg

SEQ ID NO: 881740 - DNA, 75 bp, synthetic construct
  source 1..75: mol_type = other DNA
aaatggcaactctcaaagacagtggcgttgacacagcggcagcagcaactacctctctaatcctggtcaggcagg

SEQ ID NO: 881741 - DNA, 75 bp, synthetic construct
  source 1..75: mol_type = other DNA
agtgcaattaccgctgctgaaaacagcggtagccttgcagaaggtttctccagtgtggttctgacattaaactat

SEQ ID NO: 881742 - DNA, 75 bp, synthetic construct
  source 1..75: mol_type = other DNA
ttgaccatcagaaaaaagcacccgcattcaggccagcctgtttgctccgaatgaagaagaaaaacaacgtctcac

SEQ ID NO: 881743 - DNA, 75 bp, synthetic construct
  source 1..75: mol_type = other DNA
actccagtgtctgaaaaatagtcaggtagatgtcaaacggtacaaattgccttccctgaagatgtggcacagtta

SEQ ID NO: 881744 - DNA, 75 bp, synthetic construct
  source 1..75: mol_type = other DNA
aatgtcggtatccaaattttggaccgtacgggggaggtattaatactggatggggcaacttttagcgctaaaact

SEQ ID NO: 881745 - DNA, 75 bp, synthetic construct
  source 1..75: mol_type = other DNA
ccattccaggctcgttatattgctctcgggcagtccgtagctggtactgcaaacgctgatgcgaccttcaaagtt

SEQ ID NO: 881746 - DNA, 75 bp, synthetic construct
  source 1..75: mol_type = other DNA
cgtcagaggcacccacaggacagcacggggctttctctcgcttgataagttcatcagttcaggtcccgatgctca

SEQ ID NO: 881747 - DNA, 75 bp, synthetic construct
  source 1..75: mol_type = other DNA
aactgcgcagaatagcgttggtacacctgctttatttttggctatgatgaacggacatactgacaacgtaaaaat

SEQ ID NO: 881748 - DNA, 75 bp, synthetic construct
  source 1..75: mol_type = other DNA
gtatcccgccacaacccttcagcacaaaacgttattgcaggccttaacgattatgtgatggatctctcagtgaga

SEQ ID NO: 881749 - DNA, 75 bp, synthetic construct
  source 1..75: mol_type = other DNA
ccttaagctagcaagtgtcaacggatcatcatacgttggtaccagatttggtgatacacttgaacagacgctaaa

SEQ ID NO: 881750 - DNA, 75 bp, synthetic construct
  source 1..75: mol_type = other DNA
tcagaaacctgctctcccgcatgctggctgcgctgaatgcggcagaacatctgacaacagatgcagaacgacgtc

SEQ ID NO: 881751 - DNA, 75 bp, synthetic construct
  source 1..75: mol_type = other DNA
tttttgagacttcatttgtcttgttgtactgcattatttttctggttttaataaaaaaagtaaaattatactgca

SEQ ID NO: 881752 - DNA, 75 bp, synthetic construct
  source 1..75: mol_type = other DNA
gaatatattgccgttccaggctcgatatattgctctcgggcagtcagtagctggtactgcaaacgcagatgcgac

SEQ ID NO: 881753 - DNA, 75 bp, synthetic construct
  source 1..75: mol_type = other DNA
atacttgatggtgccacttttagcgctaaaactgacttgattgatggcacgaatatattgccgttccaggctcga

SEQ ID NO: 881754 - DNA, 75 bp, synthetic construct
  source 1..75: mol_type = other DNA
aaattcccaagttctactttatttaacagagcaattggtggaatgaggtactatgaccttggaaaagatacacca

SEQ ID NO: 881755 - DNA, 75 bp, synthetic construct
  source 1..75: mol_type = other DNA
acgacccgaacgataccaacgttgccgtcagaggcacccacaggacagcacggggctttctctcgcttgataagt

SEQ ID NO: 881756 - DNA, 75 bp, synthetic construct
  source 1..75: mol_type = other DNA
atgacgagcgaaaataacagcttacctctcaatcttcaggaagtggacaaggcaaccggcgaagttgttaagctg

SEQ ID NO: 881757 - DNA, 75 bp, synthetic construct
  source 1..75: mol_type = other DNA
gcaacgcttatatcggcctgaccggctggcgtagcgcaccagaattggataatgacttcgaagcccgcccggcca

SEQ ID NO: 881758 - DNA, 75 bp, synthetic construct
  source 1..75: mol_type = other DNA
cgcctattaaagctaaccatttgcgaagcatactggattatattgaacaggaacagttaactgccgaaaatcgta

SEQ ID NO: 881759 - DNA, 75 bp, synthetic construct
  source 1..75: mol_type = other DNA
gcctagagaatgggattagtgccttacccgactggaagagatggattattttgcttgggcgatttacggggatga

SEQ ID NO: 881760 - DNA, 75 bp, synthetic construct
  source 1..75: mol_type = other DNA
gttcaaagactgaagcgatgaagcgttccttacgtttcgcagatcgtccttggctgattactgaaaccgccacga

SEQ ID NO: 881761 - DNA, 75 bp, synthetic construct
  source 1..75: mol_type = other DNA
acagggaagagcaaggcgaaccggaaaaacgttacagacgcgactgaggagcttgtacagctggccattgccaaa

SEQ ID NO: 881762 - DNA, 75 bp, synthetic construct
  source 1..75: mol_type = other DNA
aattaatggcatcgcctttaaatacaagttgagcaaagctagcacatggaacccctgctttatacatcgccatga

SEQ ID NO: 881763 - DNA, 75 bp, synthetic construct
  source 1..75: mol_type = other DNA
taatgaatattttagcaatgaaaacacgtgatggtgagcctggattatttgctgcaatggaaaataatcaccctt

SEQ ID NO: 881764 - DNA, 75 bp, synthetic construct
  source 1..75: mol_type = other DNA
acggacatactgacaacgtgaaaatatttatgcaagaaattcagtcactggtagataatcacatcattcatgaag

SEQ ID NO: 881765 - DNA, 75 bp, synthetic construct
  source 1..75: mol_type = other DNA
ttatatatcgacgctgggtgcttttgcaaaaaaacattcttttagtcaacatcagttatttacactattggccgc

SEQ ID NO: 881766 - DNA, 75 bp, synthetic construct
  source 1..75: mol_type = other DNA
tatggacaatgcctgcaacgattatagcgattgctggcatttttttaacaatattaggctggatagtcacagcaa

SEQ ID NO: 881767 - DNA, 75 bp, synthetic construct
  source 1..75: mol_type = other DNA
cataagcattataaaactgtagaaacatattatgctgctattaatgcaatcagccaaagcctgagttttagtgct

SEQ ID NO: 881768 - DNA, 75 bp, synthetic construct
  source 1..75: mol_type = other DNA
ttgttgtactgcattattttttctggttttaataaaaaaagtaaaattatactgcatatggttaatttaattgta

SEQ ID NO: 881769 - DNA, 75 bp, synthetic construct
  source 1..75: mol_type = other DNA
cgataacgatgacctttgccgccacgccactgttgttacagatgttacccgcgccgtttcaggactggaccacgc

SEQ ID NO: 881770 - DNA, 75 bp, synthetic construct
  source 1..75: mol_type = other DNA
cttggcgtggttaaaattcaggtctggttaaacgactggaataatgattttttcaatgcgctaagccagaaataa

SEQ ID NO: 881771 - DNA, 75 bp, synthetic construct
  source 1..75: mol_type = other DNA
cttattatctgaaaaattctgaatggggtaatataaggaaattacaacgatatatatcactgttagtcttattac

SEQ ID NO: 881772 - DNA, 75 bp, synthetic construct
  source 1..75: mol_type = other DNA
cgtcgcagttttaaggcttctcggacggaccgagcatgctcaccaaccgcggagcgccacattcttgtggtatga

SEQ ID NO: 881773 - DNA, 75 bp, synthetic construct
  source 1..75: mol_type = other DNA
attacaaccgccaccgctattatgacccgctgcaggggcggtatatcactcaggatccgattgggctgaaggggg

SEQ ID NO: 881774 - DNA, 75 bp, synthetic construct
  source 1..75: mol_type = other DNA
ttctgccccacacaactgaagcattgactgtgacggttgaaacaagcgaaacaccagcaacaaccgtcatctcag

SEQ ID NO: 881775 - DNA, 75 bp, synthetic construct
  source 1..75: mol_type = other DNA
gctgatgtgtttataaatgctgggcgagtggaatatcattattttgatacattggtgatagctcttggttcaaat

SEQ ID NO: 881776 - DNA, 75 bp, synthetic construct
  source 1..75: mol_type = other DNA
gttgatgttttttttaattctagtgctggtgagtatcattattttgatactgttgttctggcattgggatctaat

SEQ ID NO: 881777 - DNA, 75 bp, synthetic construct
  source 1..75: mol_type = other DNA
gaggcttgcattaggtgatgaaatcataaaacaatctgtttttttaaagctgattgagaaaaaaattagttttta

SEQ ID NO: 881778 - DNA, 75 bp, synthetic construct
  source 1..75: mol_type = other DNA
taaatcgtattgtattggtgtggtcatttcaatggcggttttcttttattttatacctcggtatggatggagtgg

SEQ ID NO: 881779 - DNA, 75 bp, synthetic construct
  source 1..75: mol_type = other DNA
ggtgatgagtataaggtaatatcttctgcaacatttttgataatgtttatggctcttattaaatataatttttgg

SEQ ID NO: 881780 - DNA, 75 bp, synthetic construct
  source 1..75: mol_type = other DNA
caggatatggcttatgatatctatccggatgatgaaacagatacccatcacccagtttctccttctctctatttg

SEQ ID NO: 881781 - DNA, 75 bp, synthetic construct
  source 1..75: mol_type = other DNA
cgcgtcatacagtacgtcctggaacaatatctcgctgtcggttaactggtcacgcaaccgcaacagcggcggcta

SEQ ID NO: 881782 - DNA, 75 bp, synthetic construct
  source 1..75: mol_type = other DNA
tggcgcttgagcgtaaagaacctcttcaccagattgtgaatcgcctggacatcatgctgccgggcaatcgcccct

SEQ ID NO: 881783 - DNA, 75 bp, synthetic construct
  source 1..75: mol_type = other DNA
ccgcacgctatctcggaggcacgttccggcgcggaggtatagcagttagtccgggtaatgatcttaggcaagcaa

SEQ ID NO: 881784 - DNA, 75 bp, synthetic construct
  source 1..75: mol_type = other DNA
ccggaaggggttatccgcacggatgatgagcgcacccaccagtaccattacgacagtcagcaccggctggtgcac

SEQ ID NO: 881785 - DNA, 75 bp, synthetic construct
  source 1..75: mol_type = other DNA
gctttcactggcggtcaacgccgacagtctggcgacgtggttgcttccggcactggctcctgtgttggctgattc

SEQ ID NO: 881786 - DNA, 75 bp, synthetic construct
  source 1..75: mol_type = other DNA
gtacaacgcattattgatgatctacgtgatgaaatggcgagaaagatagcagaaagcgattcagataatggctgg

SEQ ID NO: 881787 - DNA, 75 bp, synthetic construct
  source 1..75: mol_type = other DNA
cagacctggtaggcatgaatcgaaatcttgtttcacgccgtttgcgtgagctggagcttgttggcgggaatggtg

SEQ ID NO: 881788 - DNA, 75 bp, synthetic construct
  source 1..75: mol_type = other DNA
ttcgtgcgaattttgaaacacgtctgggtgaaagtgcgttgtttaccataattcgtgaggatggtcagcctttgc

SEQ ID NO: 881789 - DNA, 75 bp, synthetic construct
  source 1..75: mol_type = other DNA
aagcaacagaacaatttatgtttgccagccagcagttgtttttaggtataccacaggtggcattacgtccccagt

SEQ ID NO: 881790 - DNA, 75 bp, synthetic construct
  source 1..75: mol_type = other DNA
cctgagcgggctgaaggaaagcggtaagctgaaggcgcagtggggagagaacagtctgtgccatgcggattaccg

SEQ ID NO: 881791 - DNA, 75 bp, synthetic construct
  source 1..75: mol_type = other DNA
cctggaatagcaatgagaagaggagtcaccggactactctgagtctcagtcaatctctgggaacattcggatatg

SEQ ID NO: 881792 - DNA, 75 bp, synthetic construct
  source 1..75: mol_type = other DNA
ccgcaattgaagggagtagctcctgaggcattatgggatgacggtatacctgcatttctgtttaactggaaggtg

SEQ ID NO: 881793 - DNA, 75 bp, synthetic construct
  source 1..75: mol_type = other DNA
gggaaacagttggcgcatccgttatgacaaatcctttaaactgacagacactagtttttcagctgcgagttatca

SEQ ID NO: 881794 - DNA, 75 bp, synthetic construct
  source 1..75: mol_type = other DNA
acaccctggattcagaactatttagtgaatgcgccgctgcgtcaaacggcgcgccatgtggaagcctggcataaa

SEQ ID NO: 881795 - DNA, 75 bp, synthetic construct
  source 1..75: mol_type = other DNA
tattagtgcgtgggatcggtgaaggtgcctatgatggttatgataattcagcaaattcatttcatcatgccgtcg

SEQ ID NO: 881796 - DNA, 75 bp, synthetic construct
  source 1..75: mol_type = other DNA
attaatctcgcccggcgaagtggtttataaatatcgtcatgtggatactgtggaatatattgcagcgaaagcggc

SEQ ID NO: 881797 - DNA, 75 bp, synthetic construct
  source 1..75: mol_type = other DNA
gcgcagcggcgatggttcactgcggcgagaccagtggtgcagaaacctggctcgaagcagccattactgattacc

SEQ ID NO: 881798 - DNA, 75 bp, synthetic construct
  source 1..75: mol_type = other DNA
taatccgcaacaatgatagtcatttctatgatcttttcgtttcaactggcaaagagcgccgaataaagcctgaac

SEQ ID NO: 881799 - DNA, 75 bp, synthetic construct
  source 1..75: mol_type = other DNA
gatcggtgaaggtgcctatgatggttatcataattcagcaaattcatttcatcatgccgccgtgatgcactgcct

SEQ ID NO: 881800 - DNA, 75 bp, synthetic construct
  source 1..75: mol_type = other DNA
taccggtgtgttccctgatatagcgcagatcgcccgcttgcaaaagatagtcgaagagttgggtgttgtgaccga

SEQ ID NO: 881801 - DNA, 75 bp, synthetic construct
  source 1..75: mol_type = other DNA
cttccgttatcccgccagggcgaacaacatccggcatatgcttcagagcatgaaaacctgcgtggtccgggctac

SEQ ID NO: 881802 - DNA, 75 bp, synthetic construct
  source 1..75: mol_type = other DNA
tctcaaagataacagtaatatgggagggctaaagtcggctattattgaattagagcatagtggggggttatatcc

SEQ ID NO: 881803 - DNA, 75 bp, synthetic construct
  source 1..75: mol_type = other DNA
catttggatagtgtggaatatattgcagcgaaagcggcctttcagacatctgagctaaataatatcgcccaccgg

SEQ ID NO: 881804 - DNA, 75 bp, synthetic construct
  source 1..75: mol_type = other DNA
cccccctggattgagcactatttactgaaggcgccactgcgtcaaacggcgcgctatgtggaagcctggcataaa

SEQ ID NO: 881805 - DNA, 75 bp, synthetic construct
  source 1..75: mol_type = other DNA
attttcttatactagtcagctaaatgaagcgctgacctggataaaacagttaatccacaacaatgatggtcattt

SEQ ID NO: 881806 - DNA, 75 bp, synthetic construct
  source 1..75: mol_type = other DNA
ttgagatgatccctagtgaacattctggctttaaaagcctgttatttgcgattaagtttcttggaaatgcgggta

SEQ ID NO: 881807 - DNA, 75 bp, synthetic construct
  source 1..75: mol_type = other DNA
gtaaggatccaggcgatactttcagtaatttcataagccactggctcttccctgccccccatcgttcagccgatt

SEQ ID NO: 881808 - DNA, 75 bp, synthetic construct
  source 1..75: mol_type = other DNA
gaagcagaccgcatcacacagcgaacggtgaatggtgaaaccgcagaacagtggcggtacgacgaacgcggctgg

SEQ ID NO: 881809 - DNA, 75 bp, synthetic construct
  source 1..75: mol_type = other DNA
agcccgcgccagacccggagttacagctacagcgacaccggcaggctgaccggcgtccacaccacggcagcgaac

SEQ ID NO: 881810 - DNA, 75 bp, synthetic construct
  source 1..75: mol_type = other DNA
tcgaattgttcattaaaaatccgcttgaaaacggccttactcgtggtgaacaaatggaactggcacgtattgctc

SEQ ID NO: 881811 - DNA, 75 bp, synthetic construct
  source 1..75: mol_type = other DNA
taaatatggcgatgctaatatcaatcattattataaaaacttagaaataaaacacacacaacccaaaaatagagc

SEQ ID NO: 881812 - DNA, 75 bp, synthetic construct
  source 1..75: mol_type = other DNA
ggaagtaattgaacaaagggaaagcaattctgacagcgccccctatacgttattaaaaaactatgctgacagatt

SEQ ID NO: 881813 - DNA, 75 bp, synthetic construct
  source 1..75: mol_type = other DNA
tgtaattatatctcttctcttatctgttcttgggaaagttgaagtggtttcagtagcaaatggtaagtttactca

SEQ ID NO: 881814 - DNA, 75 bp, synthetic construct
  source 1..75: mol_type = other DNA
tcgaattgttcattaaaaacccgcttgaaaacggccttactcgtggcgaacaaatggaactggcacgtattgctc

SEQ ID NO: 881815 - DNA, 75 bp, synthetic construct
  source 1..75: mol_type = other DNA
tatattcggataatcgcaaaaaggttagtgagttagcttataatctagacaaaaaatttaatcctcaaaaacaaa

SEQ ID NO: 881816 - DNA, 75 bp, synthetic construct
  source 1..75: mol_type = other DNA
agcggtgtggctgacgcatgacccggaatacccggagaatttacctgccgcgccactggtgcgctacgactggac

SEQ ID NO: 881817 - DNA, 75 bp, synthetic construct
  source 1..75: mol_type = other DNA
caacgtttctgccgaggcgatcagaaaggctggcgccatgcaaacagtcaagttggctcaggagtttcccgaact

SEQ ID NO: 881818 - DNA, 75 bp, synthetic construct
  source 1..75: mol_type = other DNA
ggtaacgcactatcagttgcgaacgtcaacattaccaatgatttatcaatagcattgaagaagcactacgcttca

SEQ ID NO: 881819 - DNA, 75 bp, synthetic construct
  source 1..75: mol_type = other DNA
tggcaaatggcggcgtgttaaccatggagtcagacacctcttctgacaaaacacaggtcaatacgggcggacggg

SEQ ID NO: 881820 - DNA, 75 bp, synthetic construct
  source 1..75: mol_type = other DNA
cgccctgaactgatgcgcctgctggatgatgcgcaggccggagaggtcttacttgtcgagagcatcgacaggcta

SEQ ID NO: 881821 - DNA, 75 bp, synthetic construct
  source 1..75: mol_type = other DNA
ctgccaacctcgtggcagttgctgaacgaaaccgcgtcagagctaaccagcggcatcctgagagccgttaatgca

SEQ ID NO: 881822 - DNA, 75 bp, synthetic construct
  source 1..75: mol_type = other DNA
gaacttaataatcacttcttgtttgctgaatgcctgaactatgtgcaaataggctctcctgaaaaagttttaatt

SEQ ID NO: 881823 - DNA, 75 bp, synthetic construct
  source 1..75: mol_type = other DNA
aatggctggcggtcacagaatgtggcaaatggccgggcttaaagctcagcgggcgcagacggatgtaaataataa

SEQ ID NO: 881824 - DNA, 75 bp, synthetic construct
  source 1..75: mol_type = other DNA
acacgttaagcaatacttggggaggttttatcaaattatcgcgctggcggccctgtacggcgcgaatatccgcat

SEQ ID NO: 881825 - DNA, 75 bp, synthetic construct
  source 1..75: mol_type = other DNA
atggctgatgcatcaaaacttaaaactaaaagggtccgtggtgggctgggtgtacccccaggccccgacgaattg

SEQ ID NO: 881826 - DNA, 75 bp, synthetic construct
  source 1..75: mol_type = other DNA
atgacagccgtgcagaagttgatggatgctgaaagctatatcggtggaagcgacgccgtggcgaaaggactggca

SEQ ID NO: 881827 - DNA, 75 bp, synthetic construct
  source 1..75: mol_type = other DNA
atggcgttaaccatgcgagcgtgcctgatgcgctacgcttatcaggccttgtattatccctccagtgcagagaaa

SEQ ID NO: 881828 - DNA, 75 bp, synthetic construct
  source 1..75: mol_type = other DNA
tgctcggcgtattttttacttccatagtgatctttattttgtcagaagaaactttactctttcgttttttctctg

SEQ ID NO: 881829 - DNA, 75 bp, synthetic construct
  source 1..75: mol_type = other DNA
acgaacatgatttttgaggcgtgcgggtttagcaacccctctatgaatacaaatgcgcctataagcctacaagtg

SEQ ID NO: 881830 - DNA, 75 bp, synthetic construct
  source 1..75: mol_type = other DNA
gcggcgacatgttcgaaggtctggctatttataacctgctccgcgaatacgaaggccgtgtcacggtgaaggtgc

SEQ ID NO: 881831 - DNA, 75 bp, synthetic construct
  source 1..75: mol_type = other DNA
cgcgcgctacccaacccaaccctgaaattttagctgagctggatgtcgcattaagcggcctggctaacgcatgcc

SEQ ID NO: 881832 - DNA, 75 bp, synthetic construct
  source 1..75: mol_type = other DNA
gaaagcctgttctttctcaatgtcctggacattccacctaatagtgagaaaaatgaaggtaaaaaccagattaaa

SEQ ID NO: 881833 - DNA, 75 bp, synthetic construct
  source 1..75: mol_type = other DNA
tggtgagttcaggatcatgcgctacagaacgcatccgcagccttatctggaaaaccctgaaaatgtaaggaggga

SEQ ID NO: 881834 - DNA, 75 bp, synthetic construct
  source 1..75: mol_type = other DNA
atgggattcccgagcccggcagcagactacgttgaagatcgcatatcactcgacaagaggcttatcgcgcatcct

SEQ ID NO: 881835 - DNA, 75 bp, synthetic construct
  source 1..75: mol_type = other DNA
ccggtgtttggtgtgatcacgtacagcatcaacgatgctcgctctggcgagttcgacgactgcccggtgatgtga

SEQ ID NO: 881836 - DNA, 75 bp, synthetic construct
  source 1..75: mol_type = other DNA
tcgaattgttcattaaaaagccgcttgaaaacggccttactcgtggggaacaaatggaactggcacgtattgctc

SEQ ID NO: 881837 - DNA, 75 bp, synthetic construct
  source 1..75: mol_type = other DNA
tcgaattgttcattaaaaagccgcttgaaaacgggcttactcgtggcgaacaaatggaactggcacgtattgctc

SEQ ID NO: 881838 - DNA, 75 bp, synthetic construct
  source 1..75: mol_type = other DNA
gtgacggcgggcagtccggagaaggcgtttgtggaagagcctgtaacgtcccgcaggggcggggaggtgacgcat

SEQ ID NO: 881839 - DNA, 75 bp, synthetic construct
  source 1..75: mol_type = other DNA
atggcggtcagatattatatcagttctgctgatttaacagaagagaagtttgcaacagagattcgaaatcactgg

SEQ ID NO: 881840 - DNA, 75 bp, synthetic construct
  source 1..75: mol_type = other DNA
tgttggaattaaccaacgaccttaacaacgaagtaaaattgtctgcaatttatgctctcggcgagagtgcttcag

SEQ ID NO: 881841 - DNA, 75 bp, synthetic construct
  source 1..75: mol_type = other DNA
aagaaacgctggtactagcaccctggtcagaacagaccgtcaccacatcttccgttgttagccagtacaatgtta

SEQ ID NO: 881842 - DNA, 75 bp, synthetic construct
  source 1..75: mol_type = other DNA
tatgaattggccacaggtgaaaaagttggtggtagaggacatgtattgaaagcacaggattatacaagggcttta

SEQ ID NO: 881843 - DNA, 75 bp, synthetic construct
  source 1..75: mol_type = other DNA
tatcctgatttatatgaggttgttgggggctataaagatctgaagaaagctatagcggagtgtaacaaatcttca

SEQ ID NO: 881844 - DNA, 75 bp, synthetic construct
  source 1..75: mol_type = other DNA
acagcagaattattttcagggatcagacatatcgccattaatattttgacgaaatataaggtattcaaggcaggg

SEQ ID NO: 881845 - DNA, 75 bp, synthetic construct
  source 1..75: mol_type = other DNA
gaaattgctgatgccggtgcggaggcccagcgtctggcccgtggttatcttggtctggggacgcttgccacaaaa

SEQ ID NO: 881846 - DNA, 75 bp, synthetic construct
  source 1..75: mol_type = other DNA
atgttttgcctttttatggtttacaaagaaggagtggatatgatttagaaatcatatccactcaacctaacggag

SEQ ID NO: 881847 - DNA, 75 bp, synthetic construct
  source 1..75: mol_type = other DNA
tgccagaagtggcacatcgttcttgttgaagatgcggctgaaagtctgggctctttctacaagggtaaacacacc

SEQ ID NO: 881848 - DNA, 75 bp, synthetic construct
  source 1..75: mol_type = other DNA
ctcagacaccactcattagacgatatcctcaatgatgagacactcctgacggagccatctaacaatgcttctgaa

SEQ ID NO: 881849 - DNA, 75 bp, synthetic construct
  source 1..75: mol_type = other DNA
ggcgttcacaccaccgcagcgaatctggatatccgcatcccgtatgccacagacccggcaggtaaccgcctgccc

SEQ ID NO: 881850 - DNA, 75 bp, synthetic construct
  source 1..75: mol_type = other DNA
tcaaaaaacaatatcagaaaataaatttatagcacttgaaatatcagaaacatatcctgagctaactcagaacaa

SEQ ID NO: 881851 - DNA, 75 bp, synthetic construct
  source 1..75: mol_type = other DNA
gcgtgccgatgtgcaggaaaaagtgaacatattgctggctgcaggatgcgagattcgcctcggtggtcaggcgga

SEQ ID NO: 881852 - DNA, 75 bp, synthetic construct
  source 1..75: mol_type = other DNA
tacatcaccccgcgacacatcatcacgactgtatcgctggctgagttaaagcggatcgggaatctggaggctgca

SEQ ID NO: 881853 - DNA, 75 bp, synthetic construct
  source 1..75: mol_type = other DNA
tctttttcatttcaatacgccaggtcaaggtattaatgatgtaaccacatgccagtataaggtattgtttgatca

SEQ ID NO: 881854 - DNA, 75 bp, synthetic construct
  source 1..75: mol_type = other DNA
ttattcgggaatgttataaaacctcaaaatttattccattgcacgcaccaatattttctggtaacgaaagaactt

SEQ ID NO: 881855 - DNA, 75 bp, synthetic construct
  source 1..75: mol_type = other DNA
tgaccagtgaaggtcttgatatggcggctgcccgcccgtttgccattgaaaaaggtgcccccgcccttcgcgcta

SEQ ID NO: 881856 - DNA, 75 bp, synthetic construct
  source 1..75: mol_type = other DNA
atgcagcagttagccagtttcttatccggtacctggcagtctggccggggccgtagccgtttgattcatcacgct

SEQ ID NO: 881857 - DNA, 75 bp, synthetic construct
  source 1..75: mol_type = other DNA
tgaaatactggactgttttggtaatttagggctagtttcacgcagtatcaactcagagtacggcaacaaacccta

SEQ ID NO: 881858 - DNA, 75 bp, synthetic construct
  source 1..75: mol_type = other DNA
aattggagcgatacagcgtaaagctgaggttgccgccgctgccgaatgtagagccaagattagtagcgcagttcc

SEQ ID NO: 881859 - DNA, 75 bp, synthetic construct
  source 1..75: mol_type = other DNA
ctaatgcgagtgattttattgttgaaaatctagggaaaatattaaagggaaataaagactattaccgcggtttga

SEQ ID NO: 881860 - DNA, 75 bp, synthetic construct
  source 1..75: mol_type = other DNA
gctgggcgtcagcgttatttatggtattagttggggatgtaccggcggagcgcaaggggcatttttatctaacct

SEQ ID NO: 881861 - DNA, 75 bp, synthetic construct
  source 1..75: mol_type = other DNA
aaggcaaaacggtaggccaaaaagatgctattatactgcctacaggtgatactatcgtaatttatgatggttctc

SEQ ID NO: 881862 - DNA, 75 bp, synthetic construct
  source 1..75: mol_type = other DNA
ccgctacgaatttgaatgcattaaaaagattaactccatcacaggccgtcactacatgtgaccaaaaagcaaaag

SEQ ID NO: 881863 - DNA, 75 bp, synthetic construct
  source 1..75: mol_type = other DNA
gaatttcgtgactcggggaattcatttgaggaaaaacgttttcgggctgagtttatggccctgagagaggctaaa

SEQ ID NO: 881864 - DNA, 75 bp, synthetic construct
  source 1..75: mol_type = other DNA
ggggatcagcacggaagcggcggctgcgttcaatccgcaaatgcacgtcagtgtaattgataactggtattttat

SEQ ID NO: 881865 - DNA, 75 bp, synthetic construct
  source 1..75: mol_type = other DNA
tttttctttgttgtctcgctggcttatggcatcgctacccgcacaattcgacgtcaggcggatttaccgcattta

SEQ ID NO: 881866 - DNA, 75 bp, synthetic construct
  source 1..75: mol_type = other DNA
gcatctgtgatacagtccatacatttgttgcggacgtcgctcctgagtcactgactggtctgcaaacagtttatc

SEQ ID NO: 881867 - DNA, 75 bp, synthetic construct
  source 1..75: mol_type = other DNA
aagtttgaaatagatctctattggaagcgtgctacatacttcttcgcattcttcactgtaataacagctgcattt

SEQ ID NO: 881868 - DNA, 75 bp, synthetic construct
  source 1..75: mol_type = other DNA
ttgaaataagaccagaagataaggactttttcgcagaatttattgattgtgaaggtccaattatccaagattcaa

SEQ ID NO: 881869 - DNA, 75 bp, synthetic construct
  source 1..75: mol_type = other DNA
agaagcgacaataatcttagatacaaaagattttattatatggtacctttggtactattaattcctcttgcgttt

SEQ ID NO: 881870 - DNA, 75 bp, synthetic construct
  source 1..75: mol_type = other DNA
catcttgatgatgctttcttccggggctataaaaaccttgaacctgaggctaaagcacagttaagaaaaatattg

SEQ ID NO: 881871 - DNA, 75 bp, synthetic construct
  source 1..75: mol_type = other DNA
ttcttttattgaaaagtcttggttacatgccagtacaaaatggtcttgctcatctcttgatacaccagccttatt

SEQ ID NO: 881872 - DNA, 75 bp, synthetic construct
  source 1..75: mol_type = other DNA
ttgtctaaggaaggtgcgaataagcaggtcatttcttcccaagctgactcgctgattaaaatttctcggatctgg

SEQ ID NO: 881873 - DNA, 75 bp, synthetic construct
  source 1..75: mol_type = other DNA
gatattctatgggattattattttacatgatattccctacctgattgctaaaaaacgtaatcatcctcatgccga

SEQ ID NO: 881874 - DNA, 75 bp, synthetic construct
  source 1..75: mol_type = other DNA
tctacggacgcttttacctggtgaatttcgataacgtgaaagtgatttcactggccgaaaataaagaatgtggcg

SEQ ID NO: 881875 - DNA, 75 bp, synthetic construct
  source 1..75: mol_type = other DNA
aaagcaaagcattactttctcgcttgcaaaaacgcattattggtcaagattacgctctgtcagttatatcttctc

SEQ ID NO: 881876 - DNA, 75 bp, synthetic construct
  source 1..75: mol_type = other DNA
attttacttcgtcggcgtcaaaataatcccatattgacaggagatcccggggtaggaaaaacctgtattattgaa

SEQ ID NO: 881877 - DNA, 75 bp, synthetic construct
  source 1..75: mol_type = other DNA
gaaaacgtcaggagaaagaagcattcgggatcgatcaaccgaaggaatcaacaagtctcacgatctttggaacgt

SEQ ID NO: 881878 - DNA, 75 bp, synthetic construct
  source 1..75: mol_type = other DNA
gcgcctaagtgagctaaaaaaactcacaccggagatgatccgtgacggcaaagcgctcaaagaagaactggagcc

SEQ ID NO: 881879 - DNA, 75 bp, synthetic construct
  source 1..75: mol_type = other DNA
tcgaattgttcattaaaaatccgcttgaaaacggtcttactcgtggcgaacaaatggaactggcacgtattgctc

SEQ ID NO: 881880 - DNA, 75 bp, synthetic construct
  source 1..75: mol_type = other DNA
tctcaagtcttatctcacaacctatggatgggtaacgcttggcgcgtggtatcagacctttgccactgctaacca

SEQ ID NO: 881881 - DNA, 75 bp, synthetic construct
  source 1..75: mol_type = other DNA
acagaataattgggaacatgctcatcttacatttattccgcccttgccgaacaaattaaatagtaatatttcccc

SEQ ID NO: 881882 - DNA, 75 bp, synthetic construct
  source 1..75: mol_type = other DNA
aggttcttattcatcgggatataaagccagacaatatattcatagataacggaatatttaaaatagctgattttg

SEQ ID NO: 881883 - DNA, 75 bp, synthetic construct
  source 1..75: mol_type = other DNA
tttacgggcgcttttacctggttaatttcgataacgtcaaagcagtctccatgtctgacagtgaagaatgtggcg

SEQ ID NO: 881884 - DNA, 75 bp, synthetic construct
  source 1..75: mol_type = other DNA
ctcagctgaaaaccactaacgatgccgtggcagccaacaccaccaatatcgccacgaacaccactaacatcacca

SEQ ID NO: 881885 - DNA, 75 bp, synthetic construct
  source 1..75: mol_type = other DNA
aaatcatcaatcagcttgccggtaacaccagcgaaacctacatcgaagataacggtgcgggcattaactatgtac

SEQ ID NO: 881886 - DNA, 75 bp, synthetic construct
  source 1..75: mol_type = other DNA
cagccatgatggcaaggccagcatcatcacaaacgttgctgatggtaacattggcgaaggcagcactgacgccat

SEQ ID NO: 881887 - DNA, 75 bp, synthetic construct
  source 1..75: mol_type = other DNA
ctgtggcgtgaatattcgcccgtcacgtatgccagaaccgatgcgctgttgttctggctgggcattgatttctcg

SEQ ID NO: 881888 - DNA, 75 bp, synthetic construct
  source 1..75: mol_type = other DNA
tcgaattgttcattaaaaaaccgcttgaaaacggacttactcgtggcgaacaaatggaactggcacgtattgctc

SEQ ID NO: 881889 - DNA, 75 bp, synthetic construct
  source 1..75: mol_type = other DNA
gttgacagtctcggtgacgattccctgctgtggaacgctacggcgggggcattcagtgccgcgcacggtaccgaa

SEQ ID NO: 881890 - DNA, 75 bp, synthetic construct
  source 1..75: mol_type = other DNA
tcgaattgttcattaaaaaaccgcttgaaaacggccttactcgtggagaacaaatggaactggcacgtattgctc

SEQ ID NO: 881891 - DNA, 75 bp, synthetic construct
  source 1..75: mol_type = other DNA
tcgggcttgatgatggctctttctggcccgtactggaaggtatcccggcaacagagatgttcaaagttattccac

SEQ ID NO: 881892 - DNA, 75 bp, synthetic construct
  source 1..75: mol_type = other DNA
atgttcaaagttattccactgtcgccaggccatacctatgggatgtttatggaacgctttaaagagttaactgag

SEQ ID NO: 881893 - DNA, 75 bp, synthetic construct
  source 1..75: mol_type = other DNA
agctgttaatttctgccctggttgctgggggaatgttgtcgtcgtttggggtacaggctcaggcaggaagggaca

SEQ ID NO: 881894 - DNA, 75 bp, synthetic construct
  source 1..75: mol_type = other DNA
tcgcactgggtgcatcttcaacagcaactggcgaccgttcgacggcttttggtcgttacgcaaagacgaatggtt

SEQ ID NO: 881895 - DNA, 75 bp, synthetic construct
  source 1..75: mol_type = other DNA
gcgtctgggttataccttagcgctaagtgatatgattatcgcgcccgcaacgccatcaaacacagcgcgagcagg

SEQ ID NO: 881896 - DNA, 75 bp, synthetic construct
  source 1..75: mol_type = other DNA
ctacaatcgatttgatccaatccccccattcagacttgtcgcttagcgagctaaaacaacatgcagagtattacg

SEQ ID NO: 881897 - DNA, 75 bp, synthetic construct
  source 1..75: mol_type = other DNA
gacacgcagccgtgcggcgattggctggacgccgctgacgcgtgacggtggtcagcaacttgggcgtaagttcca

SEQ ID NO: 881898 - DNA, 75 bp, synthetic construct
  source 1..75: mol_type = other DNA
gaggacacgcaggccattgacactatccttgatgagcatgccactatgcaatcgctgggaaaggatactggtacg

SEQ ID NO: 881899 - DNA, 75 bp, synthetic construct
  source 1..75: mol_type = other DNA
caccggtgccagcccggcagcaggtgatagccttacactggtaacaacgggcggcggtgatgctgcatttacgtt

SEQ ID NO: 881900 - DNA, 75 bp, synthetic construct
  source 1..75: mol_type = other DNA
cttttgccattgcggtgagcgaagaaaatgctgcgggtggacgtgtcgtgacagcacccaccaacggcgcgagcg

SEQ ID NO: 881901 - DNA, 75 bp, synthetic construct
  source 1..75: mol_type = other DNA
ctccacatccttttgaattccagaacgcaaacgaattattaaaactttgtcagcaaaacggattatctgtcgcgg

SEQ ID NO: 881902 - DNA, 75 bp, synthetic construct
  source 1..75: mol_type = other DNA
cgcacctacagcagttatcggacaaaaacgcccgcgccggtggggagcctcggccccggctggaaaatgcctgcg

SEQ ID NO: 881903 - DNA, 75 bp, synthetic construct
  source 1..75: mol_type = other DNA
aggtcgtggtttctgagggcgcttcttttagaacgcatggtgccgtggataccagcaaagcggatgtttcgctcg

SEQ ID NO: 881904 - DNA, 75 bp, synthetic construct
  source 1..75: mol_type = other DNA
tgttgatatcggtacgtatgaatataccttgctggataatggcaaccatagctggagtttggcagagaatcgcgc

SEQ ID NO: 881905 - DNA, 75 bp, synthetic construct
  source 1..75: mol_type = other DNA
atgcacccgcaatgttggtgggtaaggtagtggttgctgagggcgcttcttttagaacgcatggtgccgtggata

SEQ ID NO: 881906 - DNA, 75 bp, synthetic construct
  source 1..75: mol_type = other DNA
gaacaaaccgtctcggtcagttcgatatcaagaatggtattgctaataatatgttgttggaaaacggcggaagtt

SEQ ID NO: 881907 - DNA, 75 bp, synthetic construct
  source 1..75: mol_type = other DNA
tatcaaagatggggttgctaacaatatgctgttggaaaacggcggaagtttgcgggttgaagagaatgacttcgc

SEQ ID NO: 881908 - DNA, 75 bp, synthetic construct
  source 1..75: mol_type = other DNA
aatttagtataaaagatggtgtgtcaaaaaattatgaactggatgatggttccgggctcattgttatggaggaca

SEQ ID NO: 881909 - DNA, 75 bp, synthetic construct
  source 1..75: mol_type = other DNA
aaagccctctatctttggatcgttggctggtattttttcaggcgttaaaaataataacgctatgcttgaggggtt

SEQ ID NO: 881910 - DNA, 75 bp, synthetic construct
  source 1..75: mol_type = other DNA
gagcttgctgagcaacttatagaacaaaccggcgataatactctgacgttaatggataaaggttattactcacca

SEQ ID NO: 881911 - DNA, 75 bp, synthetic construct
  source 1..75: mol_type = other DNA
taaaacggtcaacatccttggtagttataagattaggtctggtgtgatagaacaaggtaacgcctctacaatctc

SEQ ID NO: 881912 - DNA, 75 bp, synthetic construct
  source 1..75: mol_type = other DNA
atacagatttattctattatttatcagagcctatatctgttgggaatagaatatgggataacgtcttgaaaatgc

SEQ ID NO: 881913 - DNA, 75 bp, synthetic construct
  source 1..75: mol_type = other DNA
tatgggagcagcgcctcgtctggaagccgctggattatcctggtgtttattatcaaatcggcggcgttctgaacc

SEQ ID NO: 881914 - DNA, 75 bp, synthetic construct
  source 1..75: mol_type = other DNA
aaagtggatatggcgaacccggcgagctgtcagctttttgggcaaaaattggatcgcctgcgcaaccataccgcc

SEQ ID NO: 881915 - DNA, 75 bp, synthetic construct
  source 1..75: mol_type = other DNA
aaaccggcgataatactctgacgttaatggataaaggttattactcaccaggactgttaaatgcctggagcctgg

SEQ ID NO: 881916 - DNA, 75 bp, synthetic construct
  source 1..75: mol_type = other DNA
cgtgttcaaacaggtagaccgtgaagaaagtctgattcacctcatgcgcgtcaatttactcaagcgaatggaaag

SEQ ID NO: 881917 - DNA, 75 bp, synthetic construct
  source 1..75: mol_type = other DNA
aagttttgccatcagcggcagtgccacgctcagtccaactgggctcggtgacgtgcgctccgactctctgcacat

SEQ ID NO: 881918 - DNA, 75 bp, synthetic construct
  source 1..75: mol_type = other DNA
aatcagctgcaacaaaaacgcatcgccagtgagttttcgcaatggctggcaaacaaggctgaagtgaaagccagt

SEQ ID NO: 881919 - DNA, 75 bp, synthetic construct
  source 1..75: mol_type = other DNA
aaaaaacaaccatatacatgggaagactccagtcgcgcactagttgcagggttaaagaagtatattaacaagaat

SEQ ID NO: 881920 - DNA, 75 bp, synthetic construct
  source 1..75: mol_type = other DNA
ttaaacacagcggtattgccgctggagcgcaggtggtgacatcggcagcaccgctccccgcatgggcagaagaga

SEQ ID NO: 881921 - DNA, 75 bp, synthetic construct
  source 1..75: mol_type = other DNA
gaagaatatccgcagtggtaaagaagctgttcaggtagatgacaactacccgctggccccgtacttcctgatcta

SEQ ID NO: 881922 - DNA, 75 bp, synthetic construct
  source 1..75: mol_type = other DNA
gaatcatctacacgagcaaaatatttccctcgatcagctgcaggacggtttccttgatgaaatcctcgccccgtg

SEQ ID NO: 881923 - DNA, 75 bp, synthetic construct
  source 1..75: mol_type = other DNA
gtgataacagatgtctggaaatataggggcaaatccaatacacaacaatatatatttggcgactttgtattaaaa

SEQ ID NO: 881924 - DNA, 75 bp, synthetic construct
  source 1..75: mol_type = other DNA
gatgaacattcagtgtctaatgtgctatttaagcaagcacatttactcaaacctaattcgccagacgtttattat

SEQ ID NO: 881925 - DNA, 75 bp, synthetic construct
  source 1..75: mol_type = other DNA
ttgcttcatgacccccgtttgctcagtgtaaaaaatgaatttaatactattggtgtgatgcgtacttctgcgtaa

SEQ ID NO: 881926 - DNA, 75 bp, synthetic construct
  source 1..75: mol_type = other DNA
atgcaactgcaacatggaaaaaataatacacaacaatatatatttggcgactttgtattaaaaaacaatggaata

SEQ ID NO: 881927 - DNA, 75 bp, synthetic construct
  source 1..75: mol_type = other DNA
agaatgatttatggtcaaatgttttgcttcatgacccccgtttgctcagtgtgaaaaacgaatttaatactattg

SEQ ID NO: 881928 - DNA, 75 bp, synthetic construct
  source 1..75: mol_type = other DNA
acaagtaattaatattcttattgaaaaaatacccaatattaattttaaatctattaatacacaacaaatgccatc

SEQ ID NO: 881929 - DNA, 75 bp, synthetic construct
  source 1..75: mol_type = other DNA
gagaatgtatttttaataagtgatctggtaacatggatatatgaacctgggtttacattcattttgtttgtaaat

SEQ ID NO: 881930 - DNA, 75 bp, synthetic construct
  source 1..75: mol_type = other DNA
gggcaccgtcgccgcatcgttgaagagccggagtataaccgcgtctcaacgtacagctcttcgaatgatgcctac

SEQ ID NO: 881931 - DNA, 75 bp, synthetic construct
  source 1..75: mol_type = other DNA
gaaaggcgaaaaagttctcctggacaccaccgggccgattgcgcgcacgaataccagttatgacggcacagatcg

SEQ ID NO: 881932 - DNA, 75 bp, synthetic construct
  source 1..75: mol_type = other DNA
ttgcatgagaataaacagtgtaagtatatcgaaacggtctatggtcgtggataccgttttactgtacctattgtg

SEQ ID NO: 881933 - DNA, 75 bp, synthetic construct
  source 1..75: mol_type = other DNA
tttaatagaaaaaagcattactcttgagcccaataaaatgggtataagtgttcttaaactaattatactttatta

SEQ ID NO: 881934 - DNA, 75 bp, synthetic construct
  source 1..75: mol_type = other DNA
tgcaacaaaattaaaaggatacgctgaaagtgatggtagtgaatctggtattttaagtgctgggttgctattaaa

SEQ ID NO: 881935 - DNA, 75 bp, synthetic construct
  source 1..75: mol_type = other DNA
ttctgatctatggcgcatctataaaaaatgacattatgaagttactggcaaatattaacaccaacaaaatcaatg

SEQ ID NO: 881936 - DNA, 75 bp, synthetic construct
  source 1..75: mol_type = other DNA
tttaatgatactgaaattgaatgtcagaaagtcacaggcaataaggcaaagcatattcttaaggatatggtgatg

SEQ ID NO: 881937 - DNA, 75 bp, synthetic construct
  source 1..75: mol_type = other DNA
gctgttttgccgaggaggttaaaggtgattattctcattacaggaccttttcatttgatattggtaatcaatata

SEQ ID NO: 881938 - DNA, 75 bp, synthetic construct
  source 1..75: mol_type = other DNA
agtcacaggcaataaggcaaagcatattcttgaggatatagaaaaattctatcgtaacaaacccgatacttatta

SEQ ID NO: 881939 - DNA, 75 bp, synthetic construct
  source 1..75: mol_type = other DNA
ggatataattattgcaaaaatagatttgtttattcaaagaatcactcataatttatggcatgcacgtaaaaaaat

SEQ ID NO: 881940 - DNA, 75 bp, synthetic construct
  source 1..75: mol_type = other DNA
accgaataaaattggtactggaaaaaacaggacttaagcaggcagaactagcccgcaggattggtgttgcccagc

SEQ ID NO: 881941 - DNA, 75 bp, synthetic construct
  source 1..75: mol_type = other DNA
tatgaatctgaatatcattatgagcatgatatgaatggtatgtataatttaattgattctgctgattatcagcga

SEQ ID NO: 881942 - DNA, 75 bp, synthetic construct
  source 1..75: mol_type = other DNA
atcgagtggagaactgctcttaagcatactgctgctaagtaatataagtaaggtcaaaaatcaacattttattta

SEQ ID NO: 881943 - DNA, 75 bp, synthetic construct
  source 1..75: mol_type = other DNA
tctgctggttccgtgctgtcgtggtggttcagcgttcaccaccggagctgatggcacatacagtgacgcgagtgg

SEQ ID NO: 881944 - DNA, 75 bp, synthetic construct
  source 1..75: mol_type = other DNA
taatgctggttcgtgaaaatgataatcatcgttggctaatagaagacatcgatgacggtggtaatgctgccaact

SEQ ID NO: 881945 - DNA, 75 bp, synthetic construct
  source 1..75: mol_type = other DNA
tttgcctttatgttgcatatagtcataaaagattatttctattatcgattcaaaaatacaataaccgttattctg

SEQ ID NO: 881946 - DNA, 75 bp, synthetic construct
  source 1..75: mol_type = other DNA
aagacaaaagtttaagtgttcttttgttttttgggtttatatttttccttacacgtagctttccatttattcaat

SEQ ID NO: 881947 - DNA, 75 bp, synthetic construct
  source 1..75: mol_type = other DNA
gccgttgctcagttcatcccccgctcctgagaccttacttgaaaggctaaaaggcttatccggcaaagaaaaaat

SEQ ID NO: 881948 - DNA, 75 bp, synthetic construct
  source 1..75: mol_type = other DNA
ggaaattgaacgcctgatgttcgattacgttctgtttgacggtgtgcaactgtctaagcagccggaacacttcga

SEQ ID NO: 881949 - DNA, 75 bp, synthetic construct
  source 1..75: mol_type = other DNA
gctgggatgatctgacgattgaagaccttctggtcgcttaccggaaagcaaaagccgatagcttctttgagaata

SEQ ID NO: 881950 - DNA, 75 bp, synthetic construct
  source 1..75: mol_type = other DNA
caatgccttatgctgaggatatcagatatctttaccgatgggatagtcgcccgcctgaagttataaataaaagtg

SEQ ID NO: 881951 - DNA, 75 bp, synthetic construct
  source 1..75: mol_type = other DNA
ggatggattcccgtttcaatctggaaagatgttttccaaaaatgttggacttatctggagaaacagattaacgat

SEQ ID NO: 881952 - DNA, 75 bp, synthetic construct
  source 1..75: mol_type = other DNA
gataacttcctgcgtcatcttggtatttatggctaccgagcaggctttatccgtcgttatgttacctggcagcca

SEQ ID NO: 881953 - DNA, 75 bp, synthetic construct
  source 1..75: mol_type = other DNA
tatcgacatctcgactttctgggttagtgttcctgttttattcttcgttttagcaattcggagtgttggcaacga

SEQ ID NO: 881954 - DNA, 75 bp, synthetic construct
  source 1..75: mol_type = other DNA
aaaaatccaaatggattatttgattaagaatctttttgacttgggggatttagattccgagattccaacagtaga

SEQ ID NO: 881955 - DNA, 75 bp, synthetic construct
  source 1..75: mol_type = other DNA
tactctatctattatatccaagcaatccttacatcaaagtaccttgagtggtttgcttcaatatatggtgatatt

SEQ ID NO: 881956 - DNA, 75 bp, synthetic construct
  source 1..75: mol_type = other DNA
gactaattgataaatacaaaagcgatattgattattatcgttctgccagatacaacgaaactcaactaagaacgg

SEQ ID NO: 881957 - DNA, 75 bp, synthetic construct
  source 1..75: mol_type = other DNA
ataagatatattcacgaggcttgcctgctgttaaaatctatcagtataaaaataatgctggttttgtaaaacagt

SEQ ID NO: 881958 - DNA, 75 bp, synthetic construct
  source 1..75: mol_type = other DNA
caataccttatactgacgatatcaactttctttaccgatgggatagtcgcccgcctgaagttataaataaaattg

SEQ ID NO: 881959 - DNA, 75 bp, synthetic construct
  source 1..75: mol_type = other DNA
cggcgaaaaaatccatgttgctgtcgcccaggaagttcctggcacaggtgtggatacccctgaagatctcgagcg

SEQ ID NO: 881960 - DNA, 75 bp, synthetic construct
  source 1..75: mol_type = other DNA
ctttgggcgtatcagtatcttccctaaagaactttggtctagtgctattactccagagttaaaatctgtttttaa

SEQ ID NO: 881961 - DNA, 75 bp, synthetic construct
  source 1..75: mol_type = other DNA
agttcgggaaaggcaaagcctggcatgtggcctcccgcaacgatttagccttccagcgcgatttctttaccaccc

SEQ ID NO: 881962 - DNA, 75 bp, synthetic construct
  source 1..75: mol_type = other DNA
attgacgccgatgtcgatttaacgccgtaccagttagtgattgccccaatgttatatatggtgcgcgacggcttt

SEQ ID NO: 881963 - DNA, 75 bp, synthetic construct
  source 1..75: mol_type = other DNA
aaagcgcgctacaaaaccctggatgcgctgaaccacgcatggtggagcaccttctggagccacacctatagcgac

SEQ ID NO: 881964 - DNA, 75 bp, synthetic construct
  source 1..75: mol_type = other DNA
cggcctgaacttcttttgttatacatagctattactatcgctttttattttaaaagaaaaaatactcacctttat

SEQ ID NO: 881965 - DNA, 75 bp, synthetic construct
  source 1..75: mol_type = other DNA
taagtatgataatcgctttccttataggtataaggcagaaggatgtttgctgttatttaattgtatgcatgtctt

SEQ ID NO: 881966 - DNA, 75 bp, synthetic construct
  source 1..75: mol_type = other DNA
tgatgcactttgtccagattatgcattgactttaaagtcagggaagaaagaatgcatagttatttactcaataat

SEQ ID NO: 881967 - DNA, 75 bp, synthetic construct
  source 1..75: mol_type = other DNA
tttcagtggcgtaagagtcgtggcgccgtggagaagtttcatggtgcggtggttgatcacgtcggtcatctggag

SEQ ID NO: 881968 - DNA, 75 bp, synthetic construct
  source 1..75: mol_type = other DNA
tccggcagggtgttctgaaattgaagttggcgcgaacacggtttcattacaggacgcgacgcaaaatcccccgac

SEQ ID NO: 881969 - DNA, 75 bp, synthetic construct
  source 1..75: mol_type = other DNA
atttattactaaatgctctatgcgaagcagacccagaacagcgcaaaaaaaattttaatgagctaatttttgaaa

SEQ ID NO: 881970 - DNA, 75 bp, synthetic construct
  source 1..75: mol_type = other DNA
gttcgtcatctgtgcgagctgattcatgtcgaaaacgctcagccgctggcgacctaccgggatgatttctacgcc

SEQ ID NO: 881971 - DNA, 75 bp, synthetic construct
  source 1..75: mol_type = other DNA
cgaaggtcgctgcgttattgcatggcgccgactataacccggagcaatgggagaattaccccggtattattgaaa

SEQ ID NO: 881972 - DNA, 75 bp, synthetic construct
  source 1..75: mol_type = other DNA
cagactcgttacaccactcttgaggcacttaatcaggcatggtggacaggcttctggagccatacatacagtgac

SEQ ID NO: 881973 - DNA, 75 bp, synthetic construct
  source 1..75: mol_type = other DNA
atgacccccctgacaaaacttgagtttgcgccagtcggtagaggcgacagaaaaagcattgttgaacgctgtttc

SEQ ID NO: 881974 - DNA, 75 bp, synthetic construct
  source 1..75: mol_type = other DNA
cgacagcaagcatccttcaggttatacgataataaataacaccgcctttacaaataacactgccgaaggttatgg

SEQ ID NO: 881975 - DNA, 75 bp, synthetic construct
  source 1..75: mol_type = other DNA
tcattaagccagtgcggtttaatgaatcaagatctcttcatttctactctgaatatgaaggacttcaattcgaca

SEQ ID NO: 881976 - DNA, 75 bp, synthetic construct
  source 1..75: mol_type = other DNA
atggacggcgtcttgaaaactgttgaaaagaccacacgtactttacaactgtttctgacgctggtggcggtgatt

SEQ ID NO: 881977 - DNA, 75 bp, synthetic construct
  source 1..75: mol_type = other DNA
aggttatggcggggcgatatataccaatagcgcgacggctccctatcttattgatatttctgttgatgacagcta

SEQ ID NO: 881978 - DNA, 75 bp, synthetic construct
  source 1..75: mol_type = other DNA
tcgctgatgggcaatggctggttttttcggatatgaccaataacgccagcggtggggccgtatttttgcaacaag

SEQ ID NO: 881979 - DNA, 75 bp, synthetic construct
  source 1..75: mol_type = other DNA
cgatccgtgaagatgggaaagtaacaccggcatcgcaccagcacagtgaggcgctcactgaatttgccattgatt

SEQ ID NO: 881980 - DNA, 75 bp, synthetic construct
  source 1..75: mol_type = other DNA
cccgtcaaccatcaggggcccctgcctgacatcgcccgaacatattcccccacgcaacctgccgcgctgacgtag

SEQ ID NO: 881981 - DNA, 75 bp, synthetic construct
  source 1..75: mol_type = other DNA
actaaaaaaagcaaaggtttatattattggtagcaaagaggaatatataaatacttttattcacaaagttaatca

SEQ ID NO: 881982 - DNA, 75 bp, synthetic construct
  source 1..75: mol_type = other DNA
tatcgttgctaatagcgaaaacaactactgaattagtcaaagaggatagcattaaaaatggttcatacacttttt

SEQ ID NO: 881983 - DNA, 75 bp, synthetic construct
  source 1..75: mol_type = other DNA
atcaaagaagaaatagaaaattgctttgttttttctcgtataagttggtatgacatgcttaaaataaagcgtaaa

SEQ ID NO: 881984 - DNA, 75 bp, synthetic construct
  source 1..75: mol_type = other DNA
aatctcaagctgttatcgggaaaaagttccgaccggaagaaattcttgaggatttacgtaataacccaggtgtag

SEQ ID NO: 881985 - DNA, 75 bp, synthetic construct
  source 1..75: mol_type = other DNA
gtagttctgaccctcttaaagatggtttgttatcagccctcagaagtgagggatgtaaaaatcagggctggctgg

SEQ ID NO: 881986 - DNA, 75 bp, synthetic construct
  source 1..75: mol_type = other DNA
cgcgctacgcttccacgcgcctgccaggtaagccgctggtggatattaacggcaaacccatgattgttcatgtac

SEQ ID NO: 881987 - DNA, 75 bp, synthetic construct
  source 1..75: mol_type = other DNA
gcgctgcattgccagaaattaaaccttccagtggcctgttcggttatacccgagggcttaaaacaattccggatg

SEQ ID NO: 881988 - DNA, 75 bp, synthetic construct
  source 1..75: mol_type = other DNA
attcactatttgattttctttacatagaccgtgtacgcgttagctccctcacagcccagcttcacaatgctggtg

SEQ ID NO: 881989 - DNA, 75 bp, synthetic construct
  source 1..75: mol_type = other DNA
catgaagatgttgctcgcgccgttgaagccgcggggggggaagtatgcatgacgcgagccgatcatcagtcaggc

SEQ ID NO: 881990 - DNA, 75 bp, synthetic construct
  source 1..75: mol_type = other DNA
cgagcgcatcatcgtggcaaccgatcatgaggatgtcgcccgcgccgttgaagccgctggcggtgaagtatgtat

SEQ ID NO: 881991 - DNA, 75 bp, synthetic construct
  source 1..75: mol_type = other DNA
atgaacctggcgggattcggcgtggatggcttaacgctggtgctgttgagttttggtatcgccagctttattggt

SEQ ID NO: 881992 - DNA, 75 bp, synthetic construct
  source 1..75: mol_type = other DNA
catgcgttgggagaagcgggatgtgtgaaagcgacctatgggaccggttcttccgtcatggcccccgtcaactct

SEQ ID NO: 881993 - DNA, 75 bp, synthetic construct
  source 1..75: mol_type = other DNA
ctatcgactggttgagcaggccaaagagagaggattaattagcgttgaccaggacatcgcatacaagaaagacga

SEQ ID NO: 881994 - DNA, 75 bp, synthetic construct
  source 1..75: mol_type = other DNA
gaacccgaaaaaatacagcgtcggcatgttgtgtcaggtactggctgcaatgggcggcgaatacctgggcaacaa

SEQ ID NO: 881995 - DNA, 75 bp, synthetic construct
  source 1..75: mol_type = other DNA
gcattgcgctgttgcgagaagccatcaaaaacgttgataaaatcaaagaaattcaaacgtttatcgatcaagaac

SEQ ID NO: 881996 - DNA, 75 bp, synthetic construct
  source 1..75: mol_type = other DNA
taaggtattcaaggcagggttaagacgtaagatgcgaaaagcagccatggacagaaactatctcgcgtcagtcct

SEQ ID NO: 881997 - DNA, 75 bp, synthetic construct
  source 1..75: mol_type = other DNA
acaagcatgaaattgattttagtggatttacaagcctgttagaacggttagtaaaagtcataaatcactttgaca

SEQ ID NO: 881998 - DNA, 75 bp, synthetic construct
  source 1..75: mol_type = other DNA
ttcttgttgttgctgtcgccgccgctcttcctctcatggccagcgcagcagataccccgtcaactgccaccgcac

SEQ ID NO: 881999 - DNA, 75 bp, synthetic construct
  source 1..75: mol_type = other DNA
gttacgttattcaccggaatatgatgggaaagagttcggattttggcatttagtatcagagggaaaaatagaaga

SEQ ID NO: 882000 - DNA, 75 bp, synthetic construct
  source 1..75: mol_type = other DNA
atgcttcaaatgccagatttattgtacttcaatggaagttggcaagagtatatagacgatgtatattatgttgtc

SEQ ID NO: 882001 - DNA, 75 bp, synthetic construct
  source 1..75: mol_type = other DNA
ccatttcttatatccgatctcaatattcttcgccggtcgctgcataaaagcgacgacctgagagacatacgggac

SEQ ID NO: 882002 - DNA, 75 bp, synthetic construct
  source 1..75: mol_type = other DNA
ctggcaaacaactatcagcagctccgtgctgcgctccatgcgttagccagacggttcacgtttgcagccgaaccg

SEQ ID NO: 882003 - DNA, 75 bp, synthetic construct
  source 1..75: mol_type = other DNA
gcagtttgttgttgccgtttaacgccagcgcgggtcgaataacgatgagtaacccagatcaatcgacgatggaaa

SEQ ID NO: 882004 - DNA, 75 bp, synthetic construct
  source 1..75: mol_type = other DNA
aagatatcgaactgaaacgacgtaacggcattaaacgcgacaaagaagaaacattatcggacggcggcggactct

SEQ ID NO: 882005 - DNA, 75 bp, synthetic construct
  source 1..75: mol_type = other DNA
ctataaaggtagaattaaaagaaaagacagaagaaattctgtcaaaaatatctaaattattaaacgagaacctca

SEQ ID NO: 882006 - DNA, 75 bp, synthetic construct
  source 1..75: mol_type = other DNA
ttacgacgtagcttcaagcgccaataatactgctgcccaggttcagtccttcctgacgccgaaagcaggtgatac

SEQ ID NO: 882007 - DNA, 75 bp, synthetic construct
  source 1..75: mol_type = other DNA
atctgaaaaagatcgactcttctacattgaagctgaccagcttcaatgttaacggtaaaggcgctgttgataatg

SEQ ID NO: 882008 - DNA, 75 bp, synthetic construct
  source 1..75: mol_type = other DNA
ctggtacgggtctgtttgacggtgagtatctggtggccagcaagcaagcggggccatttgatttcaccctcggga

SEQ ID NO: 882009 - DNA, 75 bp, synthetic construct
  source 1..75: mol_type = other DNA
cggcggcatcagttacagcgatgatatcgggccactgggttacaccgttaacgcccaccgtcgtcccatctccag

SEQ ID NO: 882010 - DNA, 75 bp, synthetic construct
  source 1..75: mol_type = other DNA
cacacaaaacagcctgccttattgcacagcacgggaaaaattacatgcatattgcctgcttgtttctgcgtaaag

SEQ ID NO: 882011 - DNA, 75 bp, synthetic construct
  source 1..75: mol_type = other DNA
tcgaattctggcccgagaaaaaaagattgatctcggtccataacaccgatcttacgatcgttctgacaacgccag

SEQ ID NO: 882012 - DNA, 75 bp, synthetic construct
  source 1..75: mol_type = other DNA
acaaaacctgatggggtggttgttagggcatcctgagagtcatgcagagttgttgcagttatctgaattgatgat

SEQ ID NO: 882013 - DNA, 75 bp, synthetic construct
  source 1..75: mol_type = other DNA
ccaatgcagcgctgtgcagacatattaggtgccgaaaacgtcactgatgcgatatccggtcttttagcgatttta

SEQ ID NO: 882014 - DNA, 75 bp, synthetic construct
  source 1..75: mol_type = other DNA
gtgaagatagactcaattttgagttatgtcgtcaagaaattgtgtcgggtcaacatttggagtggctcaaacata

SEQ ID NO: 882015 - DNA, 75 bp, synthetic construct
  source 1..75: mol_type = other DNA
cttggttgaatggctactggcacgtccacagatacacgaagaattactggaactatctcaacttatggttaatcg

SEQ ID NO: 882016 - DNA, 75 bp, synthetic construct
  source 1..75: mol_type = other DNA
aaatttcagcatattatggcattgaactatgttctacatgagaaatcactacgagattctcacgtcatcccttta

SEQ ID NO: 882017 - DNA, 75 bp, synthetic construct
  source 1..75: mol_type = other DNA
aatatcctagttatagaaccattccgtttttctcacatgaaataatcagagcgacactatcccgacgcgtttttt

SEQ ID NO: 882018 - DNA, 75 bp, synthetic construct
  source 1..75: mol_type = other DNA
taccggtatccttaccgttaataacggtgcaacaatcaatgccaattcgtttatctgggttactctcgcccctgg

SEQ ID NO: 882019 - DNA, 75 bp, synthetic construct
  source 1..75: mol_type = other DNA
cataggtagaaattctgaaggttccatcactttattaaaccataccgactggcagtttaatctcactgcacccag

SEQ ID NO: 882020 - DNA, 75 bp, synthetic construct
  source 1..75: mol_type = other DNA
ggttgcaacggtaccaagaaaaggattcaaaatagaaaagacagttaacgttgagcgccaatcgatcatcacaac

SEQ ID NO: 882021 - DNA, 75 bp, synthetic construct
  source 1..75: mol_type = other DNA
ttgccattcaaatgagcagttacttactgtgtttgacactaccatcatctgcgaaattgacgattggcgaataaa

SEQ ID NO: 882022 - DNA, 75 bp, synthetic construct
  source 1..75: mol_type = other DNA
tctatcctcaacagggtaaagatacccaaacggtggtatttagtgattattctcactttccgaacattgttctgc

SEQ ID NO: 882023 - DNA, 75 bp, synthetic construct
  source 1..75: mol_type = other DNA
taactctgaaggttccctcactttatccgaccataccaactggcagtttgatacccctacctccaaaatgtattt

SEQ ID NO: 882024 - DNA, 75 bp, synthetic construct
  source 1..75: mol_type = other DNA
gtcgtcagtggcaacagcacctggactaaatctactgttactacctttaatgcagcaacagctaccgatgtgctg

SEQ ID NO: 882025 - DNA, 75 bp, synthetic construct
  source 1..75: mol_type = other DNA
gttaaatccacaattactacagctgataacacttcgattgtactgaatggttcaagcgatggtactggtaatgct

SEQ ID NO: 882026 - DNA, 75 bp, synthetic construct
  source 1..75: mol_type = other DNA
tcgaaataaaaccaattgtattattaattggcatggtaattcaggtaaacgagaaaactttccgattattaatat

SEQ ID NO: 882027 - DNA, 75 bp, synthetic construct
  source 1..75: mol_type = other DNA
gttctggatttataggttctgaaatagtaaaaaagttaaaatcagaaaaaaaagatgtatatgtgccaaggcgtg

SEQ ID NO: 882028 - DNA, 75 bp, synthetic construct
  source 1..75: mol_type = other DNA
tatctatgatgataaaggcgctgctgtttatgcggcggcggatggttctctgactacagaaactacaagtaaatc

SEQ ID NO: 882029 - DNA, 75 bp, synthetic construct
  source 1..75: mol_type = other DNA
atgttgataacaacggggcgttgaccacatctgatactgtagatttttacctacaggatgatggttcagtgacta

SEQ ID NO: 882030 - DNA, 75 bp, synthetic construct
  source 1..75: mol_type = other DNA
atacaactgggcgcttaacgaaaaacggctctggtgcttctttgactgaggctagtctgtccacacttgcagcca

SEQ ID NO: 882031 - DNA, 75 bp, synthetic construct
  source 1..75: mol_type = other DNA
ccgggagtaccgtaaagcccgggaagccggtgaagagacattccgggggttcatgtcaaaacacgccaatgtgga

SEQ ID NO: 882032 - DNA, 75 bp, synthetic construct
  source 1..75: mol_type = other DNA
ataataaagacaataaagataaaaaagatgtagccagaattaatgagattaaggaaatactaaagacaatagatg

SEQ ID NO: 882033 - DNA, 75 bp, synthetic construct
  source 1..75: mol_type = other DNA
tttttaagatggtgaggcacttcgggttccttgccaaccgtgtgtgtggagagaagctgccgcaggtgtaccgtg

SEQ ID NO: 882034 - DNA, 75 bp, synthetic construct
  source 1..75: mol_type = other DNA
aggcccgttataaaaataaacaatacattatgggaaagtaatacagcagcagcgtttctgaacagaaagtcacag

SEQ ID NO: 882035 - DNA, 75 bp, synthetic construct
  source 1..75: mol_type = other DNA
tatcgacccctcttgaacatatatctcaggggaccacatcggtgtctgttattaaccacaccccaccgggcagtt

SEQ ID NO: 882036 - DNA, 75 bp, synthetic construct
  source 1..75: mol_type = other DNA
ccgccgtgccagagccagtggcgatgtcgcgctgtggctggttcagacggatgcgtttaaggatcgtgtaaataa

SEQ ID NO: 882037 - DNA, 75 bp, synthetic construct
  source 1..75: mol_type = other DNA
agaagctacagctaacccgctggccgctctggacgacgcaatcagccagatcgacaaattccgttcatccctggg

SEQ ID NO: 882038 - DNA, 75 bp, synthetic construct
  source 1..75: mol_type = other DNA
tggtgcgactgcggctacgcttgatggtttattcaagaaagctggtgatggtcaatcaatcgggtttaagaagac

SEQ ID NO: 882039 - DNA, 75 bp, synthetic construct
  source 1..75: mol_type = other DNA
gctgcaactgcgggtaatgccgcggtgggagcgctgggcgcaacggcagttgataataccacggcagatgttgcc

SEQ ID NO: 882040 - DNA, 75 bp, synthetic construct
  source 1..75: mol_type = other DNA
tcgtgaactgacggttcaggcgacgaccggaactaactccacctctgacctggactccatccaggacgaaatcaa

SEQ ID NO: 882041 - DNA, 75 bp, synthetic construct
  source 1..75: mol_type = other DNA
aacggcaaaggtactattgcgaacaaagcggcaaccattagtgatctggcggcgacgggggcgaatgttactaac

SEQ ID NO: 882042 - DNA, 75 bp, synthetic construct
  source 1..75: mol_type = other DNA
ctaaagatgtcattctggcacaactgcaatctgcaagtcaggcagcagcaaccgctaccgacggtgatactgtcg

SEQ ID NO: 882043 - DNA, 75 bp, synthetic construct
  source 1..75: mol_type = other DNA
actatcaaagcagatgctgctcaaactgccacggtttatacatacaatgcatcagctggtaacttctcattcagt

SEQ ID NO: 882044 - DNA, 75 bp, synthetic construct
  source 1..75: mol_type = other DNA
aaaaataacgatacagttaccactagtgctccagtaactgcttttggtgccaccaccacaaacaatattaaactt

SEQ ID NO: 882045 - DNA, 75 bp, synthetic construct
  source 1..75: mol_type = other DNA
acatacaacagcgctacaggtgattttacatatagtgcaactattgcagctggtacaaattctggtgatagtaac

SEQ ID NO: 882046 - DNA, 75 bp, synthetic construct
  source 1..75: mol_type = other DNA
aatggtggcggggctgttgctaatactgcagcgactaaagatgatttggtcgctgcatcagtttcagctgcggta

SEQ ID NO: 882047 - DNA, 75 bp, synthetic construct
  source 1..75: mol_type = other DNA
tccagttccaccgccgatcccctgaaagctctggacgaagccatcagctccatcgacaaattccgctcctccctc

SEQ ID NO: 882048 - DNA, 75 bp, synthetic construct
  source 1..75: mol_type = other DNA
acgcacatgtcagtgccgaaggtatggcaaatctgacaaaaagcaattttaccattgatatgggcggtacaggta

SEQ ID NO: 882049 - DNA, 75 bp, synthetic construct
  source 1..75: mol_type = other DNA
gcagaaagttaatatttcccaggatggaaaaattactgcggcagatgataatgcgacgctgtatttagataaaca

SEQ ID NO: 882050 - DNA, 75 bp, synthetic construct
  source 1..75: mol_type = other DNA
aaattcagtgggcaaaggacggcagcctgacgccggaagaggtagatcatgtcattgcgttggcgcagaaactga

SEQ ID NO: 882051 - DNA, 75 bp, synthetic construct
  source 1..75: mol_type = other DNA
aagcggggcaggtttatttctacggcattggtatgtcagccatatccgtcctgtatgccaaatatcgattcatga

SEQ ID NO: 882052 - DNA, 75 bp, synthetic construct
  source 1..75: mol_type = other DNA
tgtggacgtgggccgttcttaccaggggattgcggaacaatatacaaacagtcaatttattgatttcggtaaaac

SEQ ID NO: 882053 - DNA, 75 bp, synthetic construct
  source 1..75: mol_type = other DNA
aaacaggaagcggcgcggctactcggctggggccgcaacaccctgacgcgtaagttaaaagagctggggatggag

SEQ ID NO: 882054 - DNA, 75 bp, synthetic construct
  source 1..75: mol_type = other DNA
gtctcagatatcgtgccggaagtacctgtttcaggtgaagaggatgaggtcgtttctaatcctctgcgcgacatg

SEQ ID NO: 882055 - DNA, 75 bp, synthetic construct
  source 1..75: mol_type = other DNA
aacagatacgtaaaatatatgaagtctttgatagggatagaaatagacttgaatttcttaactatatgatgaaga

SEQ ID NO: 882056 - DNA, 75 bp, synthetic construct
  source 1..75: mol_type = other DNA
ttcccatcccggtaacacctgaaggcgctaacgtgaaatttatcaaacaagagatgctcgattatttctaccggg

SEQ ID NO: 882057 - DNA, 75 bp, synthetic construct
  source 1..75: mol_type = other DNA
acacgccgccgttcaaggtaagtgactttgcaccgcacatcaacgaagcgccattatctctggaagaagctatga

SEQ ID NO: 882058 - DNA, 75 bp, synthetic construct
  source 1..75: mol_type = other DNA
aaaatacaacctgtttacctaatgccagaagttaaagactggttagttcgtctgggccgggaagatttgattgag

SEQ ID NO: 882059 - DNA, 75 bp, synthetic construct
  source 1..75: mol_type = other DNA
aagtctggagaaataaaaccgctggtttcctcgatacagaccaaatatgccctgaaaggctataacatcgaagcc

SEQ ID NO: 882060 - DNA, 75 bp, synthetic construct
  source 1..75: mol_type = other DNA
tatgaaaaatattcgaacggtaaagcgtgcattttccgagatgctcgtacgattcgaaaatttccaggagatatg

SEQ ID NO: 882061 - DNA, 75 bp, synthetic construct
  source 1..75: mol_type = other DNA
cggtcatgctgcaactgattagtgaagaatataacgaatcacgcaaagttggacgtacaggctctattactggat

SEQ ID NO: 882062 - DNA, 75 bp, synthetic construct
  source 1..75: mol_type = other DNA
acattaccacacacaccaccgaaagcaaaaggtagcgtatttacactccgcgatctgttatgtctggacgctctg

SEQ ID NO: 882063 - DNA, 75 bp, synthetic construct
  source 1..75: mol_type = other DNA
tgatcgcggcacagttgattgtgtccagtgaaaaagttggcggtctgccggtggtcttcgcgccgtatatgcctg

SEQ ID NO: 882064 - DNA, 75 bp, synthetic construct
  source 1..75: mol_type = other DNA
cacgttgatggataaatggcaacgtaaagcgccggatctggtcgtgattctgtcggctgacctgcttaccagtag

SEQ ID NO: 882065 - DNA, 75 bp, synthetic construct
  source 1..75: mol_type = other DNA
cggtcagaaatgccgcttacaacgaatatggtgctatcacctgcgaggttcaatttgagggggccgtggatgcca

SEQ ID NO: 882066 - DNA, 75 bp, synthetic construct
  source 1..75: mol_type = other DNA
aatgccaacctgattggtcgcgaagagctgcaacacgcccgcgacgccgtcaccagtgcccaggcgcaactggac

SEQ ID NO: 882067 - DNA, 75 bp, synthetic construct
  source 1..75: mol_type = other DNA
atcaggcgatgattctggggactaaactggaagatcagcctgccgtgcaacaggctgccaccgaagtacgtaacg

SEQ ID NO: 882068 - DNA, 75 bp, synthetic construct
  source 1..75: mol_type = other DNA
gatggatgaatggcacaaacgtaatcctgacaacgtggtgatcctggcaggcgacctgttgaccaccggcaactt

SEQ ID NO: 882069 - DNA, 75 bp, synthetic construct
  source 1..75: mol_type = other DNA
agattgatagacgagttgttttacaagttagatttcatttatagtgaaatgctggaactacttgagaataaagaa

SEQ ID NO: 882070 - DNA, 75 bp, synthetic construct
  source 1..75: mol_type = other DNA
ttatcgtctaggaagaaactggaagtaactgctgagagcaaatatattctcgatttgcctcaatggctagaagtc

SEQ ID NO: 882071 - DNA, 75 bp, synthetic construct
  source 1..75: mol_type = other DNA
ggctgcgtgatggtattcgccgcccgtattcgtcagggggtgtccgtcctggcgtttggcagacaggccgaagca

SEQ ID NO: 882072 - DNA, 75 bp, synthetic construct
  source 1..75: mol_type = other DNA
ttgccgttcgtaatgctgcgtataacgaaaatggcgggataaactgcgaggtgcagtttgaagatgcggtgaatg

SEQ ID NO: 882073 - DNA, 75 bp, synthetic construct
  source 1..75: mol_type = other DNA
cggcgaaacgggaagagattaatatctggcgtgatgtgcaggagaatatggaatacgtgatggaattcaacggaa

SEQ ID NO: 882074 - DNA, 75 bp, synthetic construct
  source 1..75: mol_type = other DNA
aaggcgctatcaatgctaaatactcccgtgataaagagtccgaagcagatgatttctcctttgatctgttgaaga

SEQ ID NO: 882075 - DNA, 75 bp, synthetic construct
  source 1..75: mol_type = other DNA
caattaaggcattggttgatagtggctacctgagtgatagcaggacaaagaaaatacaacctgtttacctaatgc

SEQ ID NO: 882076 - DNA, 75 bp, synthetic construct
  source 1..75: mol_type = other DNA
tgcaaatatagttaaactaaccgattgtactcagttactgttaaaaccaaatgaggctgtattatgggaagcatt

SEQ ID NO: 882077 - DNA, 75 bp, synthetic construct
  source 1..75: mol_type = other DNA
cctcccggtctgtggaaaaccggcagatataccgggttcagcaacaaaatcagtgagctgaccggtaacggtccc

SEQ ID NO: 882078 - DNA, 75 bp, synthetic construct
  source 1..75: mol_type = other DNA
caccgtaattcgccagatgaaaatcctggttgagttaggactcattgagccatacggggaatatgttattggtca

SEQ ID NO: 882079 - DNA, 75 bp, synthetic construct
  source 1..75: mol_type = other DNA
aagccaaccgttgccgaggggtccggacgtgcacaaacatttcgcaccattctaaccgtatccagcactgccagc

SEQ ID NO: 882080 - DNA, 75 bp, synthetic construct
  source 1..75: mol_type = other DNA
gggaaagtaagttattcacactttcaagcgcaaataccgctgcccgtaatgcatcatttaacttgtggggaaatt

SEQ ID NO: 882081 - DNA, 75 bp, synthetic construct
  source 1..75: mol_type = other DNA
caaccctgacaaaagtcgggcgggatattcttgcgaaatcgaccgttgccgctgttatcgaatacctcggtttac

SEQ ID NO: 882082 - DNA, 75 bp, synthetic construct
  source 1..75: mol_type = other DNA
gggctgcagaacttctcgcagtctggcggcatcaccggcatggcgtagggtaaagcagcgttctcccagtgcatc

SEQ ID NO: 882083 - DNA, 75 bp, synthetic construct
  source 1..75: mol_type = other DNA
ttcagcagtacgttaagcggcatctcggggtggggtatagccatggtgccggtgtggaatccccgtggaatgcgg

SEQ ID NO: 882084 - DNA, 75 bp, synthetic construct
  source 1..75: mol_type = other DNA
gtttatgcagcgaattatccggcccataagcaaggagcagccctgagggcacaacttagccttcacaactggaat

SEQ ID NO: 882085 - DNA, 75 bp, synthetic construct
  source 1..75: mol_type = other DNA
atgacgaatttgatcaatataaaaaataggttagttattcattatttaaggactatatactatgaaaaaattata

SEQ ID NO: 882086 - DNA, 75 bp, synthetic construct
  source 1..75: mol_type = other DNA
ctgtttaaatatgagtcagtatgcatcgccgcgatggaacatttaaaaagtaaagcaacggcccctatacaaaac

SEQ ID NO: 882087 - DNA, 75 bp, synthetic construct
  source 1..75: mol_type = other DNA
gtatgaatagtgagcaggcgagcagcatggcgcgtggttgggcgtcttcagaagcctctggcacgatgactgatt

SEQ ID NO: 882088 - DNA, 75 bp, synthetic construct
  source 1..75: mol_type = other DNA
ccaaaacgtcggtttacaggaaacggtaaatcaggcttctggcgcattacaaaaaaaccagaacggcgcggatat

SEQ ID NO: 882089 - DNA, 75 bp, synthetic construct
  source 1..75: mol_type = other DNA
gatggttccggttctggtgatggtggtggttctgcaagcgatgatatcccagccggtccggttgttgataacaat

SEQ ID NO: 882090 - DNA, 75 bp, synthetic construct
  source 1..75: mol_type = other DNA
cgcttaaccaggcgtggctcacagccagcggtgaaggcgcggcgctgacagaaaaacatattaatgcggccttta

SEQ ID NO: 882091 - DNA, 75 bp, synthetic construct
  source 1..75: mol_type = other DNA
gtagcggtggcttaatcgctatcgaccatgaagggaatgtcgcgctaccgtttaacaccgaaggaatgtatcgcg

SEQ ID NO: 882092 - DNA, 75 bp, synthetic construct
  source 1..75: mol_type = other DNA
ggtagttaatattccaactacgcgtaccgatcagtccgggcaagtcacggcgacaataaccagtacattggcaga

SEQ ID NO: 882093 - DNA, 75 bp, synthetic construct
  source 1..75: mol_type = other DNA
aaggcggtgtatgacatggcccgcaagggggcgcaggatgagctccggctgcagttgcgtgatggcggtatgtta

SEQ ID NO: 882094 - DNA, 75 bp, synthetic construct
  source 1..75: mol_type = other DNA
ctatgaaacaaactgggaaggacgctttacgcttgccgacctcaacattcacggtaagcgagcgttgggcatgga

SEQ ID NO: 882095 - DNA, 75 bp, synthetic construct
  source 1..75: mol_type = other DNA
tattcatcttgcgggttgcgtgattgaggttatgggcgttaaagcagcaatgactattcgtgtgaccactccgag

SEQ ID NO: 882096 - DNA, 75 bp, synthetic construct
  source 1..75: mol_type = other DNA
aaagctgagtatagtgctgacttccccggggttaaggctaatgaacgggttgattacgctttattttgtcatgat

SEQ ID NO: 882097 - DNA, 75 bp, synthetic construct
  source 1..75: mol_type = other DNA
ccgacatgattctgctggtgaaatccaccatcaccaccagaaacagcaggagtgcagccacagccaggcgcagtt

SEQ ID NO: 882098 - DNA, 75 bp, synthetic construct
  source 1..75: mol_type = other DNA
tgcttgaacgatttatgtatacgagcattattgctggtttttctatctgtatgattcctgacgagttttctattt

SEQ ID NO: 882099 - DNA, 75 bp, synthetic construct
  source 1..75: mol_type = other DNA
gaccgatagccagaacaacattatttcccctgctggtggaacattaccgctctctattcctgatgatgcagacag

SEQ ID NO: 882100 - DNA, 75 bp, synthetic construct
  source 1..75: mol_type = other DNA
aaaccaggggataaaatttgggaatcagatgacattaaaatccccgtctattgtaacaacaatactaacggggat

SEQ ID NO: 882101 - DNA, 75 bp, synthetic construct
  source 1..75: mol_type = other DNA
cggtctgaatgtggtgtccggcgatatcacggacatcaccacaccggacgggcgggagacgaaattttactataa

SEQ ID NO: 882102 - DNA, 75 bp, synthetic construct
  source 1..75: mol_type = other DNA
tgagctatttgcccatgatggcacggtcaacattagcggatcgtttcgccgtaatacatgcgtgctggcacagga

SEQ ID NO: 882103 - DNA, 75 bp, synthetic construct
  source 1..75: mol_type = other DNA
cgatctgggagaagaagcgctttcagaaacctgttctacttatccacgtaacaaaaggcactacgcggatacaac

SEQ ID NO: 882104 - DNA, 75 bp, synthetic construct
  source 1..75: mol_type = other DNA
tcgttattcgatgacgctttcatgtccagaagtagcccggctggtattgttcgatgccgacagcatgttagtgca

SEQ ID NO: 882105 - DNA, 75 bp, synthetic construct
  source 1..75: mol_type = other DNA
ccatcaatacatgacctggggaatgtaaaaatgacggcgtcaaatgccaccctgacagcaggtaattatgcaatg

SEQ ID NO: 882106 - DNA, 75 bp, synthetic construct
  source 1..75: mol_type = other DNA
agaaaagtaaaagtagattgatagctttagtttttgttagcttattattgacatcaataaaagttgcagctatgg

SEQ ID NO: 882107 - DNA, 75 bp, synthetic construct
  source 1..75: mol_type = other DNA
tgtatgtgacacgcccttccctgcaaggctatatcaccacgcgggatgagttaaccgaagccagtaatgaactgt

SEQ ID NO: 882108 - DNA, 75 bp, synthetic construct
  source 1..75: mol_type = other DNA
tgatcagggaagtgggggaagctcgtcaggtagacatggctgctcgtttgggagtttcgcaaccgacggtggcta

SEQ ID NO: 882109 - DNA, 75 bp, synthetic construct
  source 1..75: mol_type = other DNA
ttgaaacggataatctggattctgttcttattgggattaacgtggggctgtgagctatttgcccatgatggcacg

SEQ ID NO: 882110 - DNA, 75 bp, synthetic construct
  source 1..75: mol_type = other DNA
cctcaattaatttttatgttacacgtcaaaatgattacaactacgtattctctacaggcaggacaccacgcttca

SEQ ID NO: 882111 - DNA, 75 bp, synthetic construct
  source 1..75: mol_type = other DNA
tacttcaccactgttaaaatacaaaaatacaaaaagatgataacattagtgatgaaatccttgaaaatatcactt

SEQ ID NO: 882112 - DNA, 75 bp, synthetic construct
  source 1..75: mol_type = other DNA
aaatccgatacaatgatcgaattaattcagaatggcgtgataaaacatccattagactctacggacatcgagtta

SEQ ID NO: 882113 - DNA, 75 bp, synthetic construct
  source 1..75: mol_type = other DNA
aaaaaatgctgcaaataacctacttttcatatgcaagaaccattgcaacttatgtcgactctgcttcaaaggaat

SEQ ID NO: 882114 - DNA, 75 bp, synthetic construct
  source 1..75: mol_type = other DNA
tataaaaaattaatggcatctattaagaaggttaggaaagaaaataaagtatcaaaagatattggaaatatatta

SEQ ID NO: 882115 - DNA, 75 bp, synthetic construct
  source 1..75: mol_type = other DNA
agcaacaacagcttataggacatctcacaaagaaaggcttctatcgaggagctaatattaaaataaccatttttc

SEQ ID NO: 882116 - DNA, 75 bp, synthetic construct
  source 1..75: mol_type = other DNA
gccagcaacgtgtttttgtctgggctacagaaaccccgggcctgatggccgcgctcagggaacagagtaatgact

SEQ ID NO: 882117 - DNA, 75 bp, synthetic construct
  source 1..75: mol_type = other DNA
atgagcgcgctggccgatttaagccagttaccgatccccgatgtagtggaaacagtcgattttgaaaccctgttc

SEQ ID NO: 882118 - DNA, 75 bp, synthetic construct
  source 1..75: mol_type = other DNA
aattgctggatggggttgaggttgagtggttgccactctcaaaagtattcaacttaaggaatggttatacaccgt

SEQ ID NO: 882119 - DNA, 75 bp, synthetic construct
  source 1..75: mol_type = other DNA
tacgcattattcacaccaaaggtgtgtcattgcctgatgatcgcgagtcagtcttctggctgaatattaaaaata

SEQ ID NO: 882120 - DNA, 75 bp, synthetic construct
  source 1..75: mol_type = other DNA
gaaaaagtattacgcattattcacaccaaaggtgtgtcattacctgaggatcgtgagtctgttttttggctgaat

SEQ ID NO: 882121 - DNA, 75 bp, synthetic construct
  source 1..75: mol_type = other DNA
tgtacaccactgtgcaggatggcggtcgtcacggtttttgccagtcgggtatcagccactgtggcgcactggata

SEQ ID NO: 882122 - DNA, 75 bp, synthetic construct
  source 1..75: mol_type = other DNA
atccgctttaaattcggtatctctcttgaacaagctgctgtcgtgaaatatgccgatctcaccatgttagccacc

SEQ ID NO: 882123 - DNA, 75 bp, synthetic construct
  source 1..75: mol_type = other DNA
ataatgaaactattattagttaatataattaaattacgttacggagtaatttctgtaatttgtagttctattgtg

SEQ ID NO: 882124 - DNA, 75 bp, synthetic construct
  source 1..75: mol_type = other DNA
tcgaacccgcgtgaaaagctgacgatgaaccgctggcacatgaagctggctgggctcctggaacaggttgaggtg

SEQ ID NO: 882125 - DNA, 75 bp, synthetic construct
  source 1..75: mol_type = other DNA
aaataatttattgtggggggatagaaagcactcttgagagaacacgtagctttatcaattatctcaaaattaata

SEQ ID NO: 882126 - DNA, 75 bp, synthetic construct
  source 1..75: mol_type = other DNA
cgtctgccagggcagcagcatgatgaggaatcagggctgtactataaccgtcaccggtactacgatccgttgcag

SEQ ID NO: 882127 - DNA, 75 bp, synthetic construct
  source 1..75: mol_type = other DNA
actggtcacagattagcaatgataagcgccttgtgttatcagtggttgtctttaccctttctaatctccttgtat

SEQ ID NO: 882128 - DNA, 75 bp, synthetic construct
  source 1..75: mol_type = other DNA
tgagttaatctccctacctgaaaattctccgcttttgacagaacttcatgtaaatggtaacaacttgaatatact

SEQ ID NO: 882129 - DNA, 75 bp, synthetic construct
  source 1..75: mol_type = other DNA
accaccaacgccggggtacgtgaaactgagcgtaaatccattggtcttatccaccaggataacagcaccgatgcg

SEQ ID NO: 882130 - DNA, 75 bp, synthetic construct
  source 1..75: mol_type = other DNA
aatttacctccgcacagaacagacaaaaggccatttgtcagttcgctggggtgaaggcgctaacgatagctgcca

SEQ ID NO: 882131 - DNA, 75 bp, synthetic construct
  source 1..75: mol_type = other DNA
gcgctgatgcttggcggagtctatggcagttcgctgggggcatttggggcaaacctcacttggtcccatgcgcgt

SEQ ID NO: 882132 - DNA, 75 bp, synthetic construct
  source 1..75: mol_type = other DNA
tgggattggtctatagaaggaagaccaagcttatatccagaccatattagataccttagaccagaactttattca

SEQ ID NO: 882133 - DNA, 75 bp, synthetic construct
  source 1..75: mol_type = other DNA
attacatttcaactacaaaagaattggcggctgtttatgaacaggagagaagtctatataatgaaaataaaaaaa

SEQ ID NO: 882134 - DNA, 75 bp, synthetic construct
  source 1..75: mol_type = other DNA
actggcgttatcttaaacagcatgaaaaactgggtaatgtcttaaaccaagaaactaccttatattccgaaacgc

SEQ ID NO: 882135 - DNA, 75 bp, synthetic construct
  source 1..75: mol_type = other DNA
gaaatattgcaaaagaaaaacaatgcgtggatggtctgatgattatgtgtgctgcgattgcggatacaacgactc

SEQ ID NO: 882136 - DNA, 75 bp, synthetic construct
  source 1..75: mol_type = other DNA
cgcgattttttccacgcgtcgcacatccaatggatattaaaggttactggcagaaaactttaattcaggctcaaa

SEQ ID NO: 882137 - DNA, 75 bp, synthetic construct
  source 1..75: mol_type = other DNA
tcactctggtccggtgatttagtcgggtcagaagaaccggatgaacaaacgttcagtcagggatgtgcggcctga

SEQ ID NO: 882138 - DNA, 75 bp, synthetic construct
  source 1..75: mol_type = other DNA
ccgtcagccgtcttattggtgcgcctccgggatacgttggttttgatcagggcggtttgctgactgatgcggtca

SEQ ID NO: 882139 - DNA, 75 bp, synthetic construct
  source 1..75: mol_type = other DNA
cgcatgtacttgctgtaacgcgaatcagattcctgattcgaaagaacgtgctgttcatgactggaatcagcgcga

SEQ ID NO: 882140 - DNA, 75 bp, synthetic construct
  source 1..75: mol_type = other DNA
gcggaaaaatatatggctgcggtataaatattgcaccagcattacgtggactcggagagtttggcgaagaatttg

SEQ ID NO: 882141 - DNA, 75 bp, synthetic construct
  source 1..75: mol_type = other DNA
gagccaccggaaaaatccactccaaaatacactacagacccacagctattgagtatggatgtcgatattgcgaat

SEQ ID NO: 882142 - DNA, 75 bp, synthetic construct
  source 1..75: mol_type = other DNA
gcagggactggcgaaccgctgtataccggacagcctgcccgccgtggaatggctggcctacggtagcggttacct

SEQ ID NO: 882143 - DNA, 75 bp, synthetic construct
  source 1..75: mol_type = other DNA
cattgccacaacaattttctgagcagatgttttttgcctgcctttccattttttccacacacagaggtttcatgt

SEQ ID NO: 882144 - DNA, 75 bp, synthetic construct
  source 1..75: mol_type = other DNA
aatgatcccgtatcttttgcatttgcaagttcgagtggaaccgaaatcaagaagttcaaaaattctaaatgggac

SEQ ID NO: 882145 - DNA, 75 bp, synthetic construct
  source 1..75: mol_type = other DNA
gtgttgagcgtttttctgatgagaaacaatatgataatgagtatttcgtcttaaaaatgattgtcgcagatatac

SEQ ID NO: 882146 - DNA, 75 bp, synthetic construct
  source 1..75: mol_type = other DNA
tggtatcttcaaatgctcagttagtagatcttggattgttaagtgaagcgaccgatacgttgaataggcgctgga

SEQ ID NO: 882147 - DNA, 75 bp, synthetic construct
  source 1..75: mol_type = other DNA
caactggctaacaaaaatgacagggatattgtctggtcatctgaaaccagcgtagaaactttggagcaattacgg

SEQ ID NO: 882148 - DNA, 75 bp, synthetic construct
  source 1..75: mol_type = other DNA
tagacgacgtattatcaatgcaaaaatgaatagtggtaaaacactatcagcagatgatcaggcgttctatgatgc

SEQ ID NO: 882149 - DNA, 75 bp, synthetic construct
  source 1..75: mol_type = other DNA
aatatattcgaattacaaaaaatggcagatgcaggtgaagatgtatatgcaaaaatatacttcgcagcaaaggca

SEQ ID NO: 882150 - DNA, 75 bp, synthetic construct
  source 1..75: mol_type = other DNA
accgttattttgatgcaggtaaatcccagattacttacagaaatgaatggaatgaggaatttaaatccagagttt

SEQ ID NO: 882151 - DNA, 75 bp, synthetic construct
  source 1..75: mol_type = other DNA
caagctctctcacttcactattaccggaggagaggctaattatgttgtgctggaaaataccggcgaactgacggt

SEQ ID NO: 882152 - DNA, 75 bp, synthetic construct
  source 1..75: mol_type = other DNA
acacatttctggttaacaaattaaaagctcaaggaattatattctatgcaggtttgagtgagaccgagattactg

SEQ ID NO: 882153 - DNA, 75 bp, synthetic construct
  source 1..75: mol_type = other DNA
acaccgacagtgttctggcagatacgcagtttggttcgctaacgcgccccgtgaacgacagtgcaatgaacaact

SEQ ID NO: 882154 - DNA, 75 bp, synthetic construct
  source 1..75: mol_type = other DNA
actgattaaatcacaactcattaccagctatagccatagcaaagattacaactacgatccccattttggtcgtta

SEQ ID NO: 882155 - DNA, 75 bp, synthetic construct
  source 1..75: mol_type = other DNA
atttccggcaatttagcgaccaatatgttgctggaaaatggcggtaatttattggtattagcaggtaccgaagct

SEQ ID NO: 882156 - DNA, 75 bp, synthetic construct
  source 1..75: mol_type = other DNA
aattatggtaaggcgatcaataccgatatcgtctctggcctacaacaaattatggtaaacgggacagcggaaggt

SEQ ID NO: 882157 - DNA, 75 bp, synthetic construct
  source 1..75: mol_type = other DNA
attattgacaacgttgatgttattgattttaaacgattagagactgtagtagtagagcataagccaaatattgtt

SEQ ID NO: 882158 - DNA, 75 bp, synthetic construct
  source 1..75: mol_type = other DNA
aatatatcatctttcagccaatccaatagataaatacacattaatctcattggtttcagagatatatggtaagtc

SEQ ID NO: 882159 - DNA, 75 bp, synthetic construct
  source 1..75: mol_type = other DNA
aagggcaaccaggtacgtattggcgtaaatgccccgaaggaagtttctgttcatcgtgaagagatctaccagcgt

SEQ ID NO: 882160 - DNA, 75 bp, synthetic construct
  source 1..75: mol_type = other DNA
gtttaagttatgtcccgcaaactatcgcgtttctgattggtggttatggctgtcgcgccgcgctgcagaaatggc

SEQ ID NO: 882161 - DNA, 75 bp, synthetic construct
  source 1..75: mol_type = other DNA
gagtggttcctgaatcaagaaaaagaagttaagggtttcactaaagctatattttcaggactacctacagcgtat

SEQ ID NO: 882162 - DNA, 75 bp, synthetic construct
  source 1..75: mol_type = other DNA
tgcggtattgatgttcacaatgtgaataaaatacgcagcataatagaggaagtaaaacctgactatgtaattaat

SEQ ID NO: 882163 - DNA, 75 bp, synthetic construct
  source 1..75: mol_type = other DNA
atggccgaaagaagtccagttattccccataaatactggcggacactggatattagtttcgctacagaaaatagt

SEQ ID NO: 882164 - DNA, 75 bp, synthetic construct
  source 1..75: mol_type = other DNA
tgtcaatacagctaataaaatgatgtcattgcaatttgatggtagtactagagtcggtcttggtgggcgttcagt

SEQ ID NO: 882165 - DNA, 75 bp, synthetic construct
  source 1..75: mol_type = other DNA
ctgtcaggacccaacaagcgtacatatttcagttgataataactactgcaagactgatgacaacacagatcagta

SEQ ID NO: 882166 - DNA, 75 bp, synthetic construct
  source 1..75: mol_type = other DNA
cgaataatgataatataacagatcatttaactgaaccagagataatatttttacatgccgatcttcagcaatact

SEQ ID NO: 882167 - DNA, 75 bp, synthetic construct
  source 1..75: mol_type = other DNA
ttgttgtctcttctggagctcacgatgcgcaagatctaaagccagcaatagacgaaagaatagacccaaacacaa

SEQ ID NO: 882168 - DNA, 75 bp, synthetic construct
  source 1..75: mol_type = other DNA
gtggagaacgaagacggctctcacgttcctgtttcgcaaccaatcatcattaatgctgctggatatccggtatat

SEQ ID NO: 882169 - DNA, 75 bp, synthetic construct
  source 1..75: mol_type = other DNA
ggagaaagcatattcccatatttaacaatacttggtgatacgcttgattctgtagatttgggaacaccaagaaaa

SEQ ID NO: 882170 - DNA, 75 bp, synthetic construct
  source 1..75: mol_type = other DNA
ttaatagtttcaatagtttcaattgtgaccccacgagagaaacgccgaataataagaatgtaacagatcatttaa

SEQ ID NO: 882171 - DNA, 75 bp, synthetic construct
  source 1..75: mol_type = other DNA
tttcgctacagaaaatagtaaataaaaaaaataataaactacaaataaaatgcgtcatattggtgatgatgccaa

SEQ ID NO: 882172 - DNA, 75 bp, synthetic construct
  source 1..75: mol_type = other DNA
ttaatgacaattatcggtgatgaaattcctcttatatctgaaaaacagtcgctttcgaaggtgcttttaaatgat

SEQ ID NO: 882173 - DNA, 75 bp, synthetic construct
  source 1..75: mol_type = other DNA
aaatatggcgatgcactaatcaatgcttattatacacaattagaaaaaacacactcacaacccaaaaatagagca

SEQ ID NO: 882174 - DNA, 75 bp, synthetic construct
  source 1..75: mol_type = other DNA
ttaatgacaattatcggtaatgaaattcctcttatatctgaaaaacagtcgctttcaaaggtgcttttaaatgat

SEQ ID NO: 882175 - DNA, 75 bp, synthetic construct
  source 1..75: mol_type = other DNA
ttcctcttatatctgaaaaacagtcgctttcaaaggtgcttttaaatgataagaataatgaactgagtgatggta

SEQ ID NO: 882176 - DNA, 75 bp, synthetic construct
  source 1..75: mol_type = other DNA
aaatattttgccattctgacccatcagggcgcggcgcgactggcaaacgcgaccgcactcggtactaaactgaat

SEQ ID NO: 882177 - DNA, 75 bp, synthetic construct
  source 1..75: mol_type = other DNA
tggctgaccgggtgagtgaggaaagccgccgctggctggcatcgtgcggcctgacggtggagcagatacaaaacc

SEQ ID NO: 882178 - DNA, 75 bp, synthetic construct
  source 1..75: mol_type = other DNA
cgcgacagacgcgggaatacggctacagcgccacgggcaggctggagagtgtgcgcaccctcgcaccagacctgg

SEQ ID NO: 882179 - DNA, 75 bp, synthetic construct
  source 1..75: mol_type = other DNA
tggccgattatgccgaccgaatgggtacatactctgctgaaaccatggaacttctttgacgaaacgccaacgcta

SEQ ID NO: 882180 - DNA, 75 bp, synthetic construct
  source 1..75: mol_type = other DNA
atgagcgccacgcagctacctgctccaacacgcgacagccagcgtcaggcggcagcaagtcagtttcagcaacga

SEQ ID NO: 882181 - DNA, 75 bp, synthetic construct
  source 1..75: mol_type = other DNA
ttaaaaaatgccaatcattctgaactgcgcccgattgggtatcaggatgaagaagtcattcgccgaaaagtctat

SEQ ID NO: 882182 - DNA, 75 bp, synthetic construct
  source 1..75: mol_type = other DNA
gaccatcgcggcctgccgctggcgcttgtcagcacggaaggggcaacagaatggtgcgcagaatacgatgaatgg

SEQ ID NO: 882183 - DNA, 75 bp, synthetic construct
  source 1..75: mol_type = other DNA
gaaaaaatagattattacatcgatataatcattaaagattatgaaagcgtcaaagaaaatgcttatcttatcgat

SEQ ID NO: 882184 - DNA, 75 bp, synthetic construct
  source 1..75: mol_type = other DNA
ttggcagtacatctctatccttaagctatacacgaacagcctttaaaaaatatggaaagaacgataatgaagact

SEQ ID NO: 882185 - DNA, 75 bp, synthetic construct
  source 1..75: mol_type = other DNA
atcataacgttgcaaatctctaattatgaatttaagaaatctgcctttatggcagatttcttcaccttatcttag

SEQ ID NO: 882186 - DNA, 75 bp, synthetic construct
  source 1..75: mol_type = other DNA
cggtcttggacaatacagtaaggataacgagtcgctggacaacaccgacgccgttgtctggatgaccaccggcac

SEQ ID NO: 882187 - DNA, 75 bp, synthetic construct
  source 1..75: mol_type = other DNA
ttatggagagtagttagaaaatgggatagagaattgcctttaaaaatagttgaactcaatgagaatgttggatta

SEQ ID NO: 882188 - DNA, 75 bp, synthetic construct
  source 1..75: mol_type = other DNA
aatataacacatatgaagcatataactcagagaatcaatattttaccagagaggactatacgtataattacgacc

SEQ ID NO: 882189 - DNA, 75 bp, synthetic construct
  source 1..75: mol_type = other DNA
gtcggcctctcctgagcagcgccaggcagtccgcgagaaaatgcagactaacccgcagaaccagcagagaagaga

SEQ ID NO: 882190 - DNA, 75 bp, synthetic construct
  source 1..75: mol_type = other DNA
tatgaagaagagggcgacattgcaagaattgctcctttcattatatttaaagctcgatatgagataggctgcaac

SEQ ID NO: 882191 - DNA, 75 bp, synthetic construct
  source 1..75: mol_type = other DNA
taataaaattacatggtgattatctatttgatagcataaaaagctctttaaaagaaaccgagtcattagaaggta

SEQ ID NO: 882192 - DNA, 75 bp, synthetic construct
  source 1..75: mol_type = other DNA
cacaagggaatgtacggaagtaagccaaacggttatcggacggtcagaacatttcgtacagcctttacgttcagt

SEQ ID NO: 882193 - DNA, 75 bp, synthetic construct
  source 1..75: mol_type = other DNA
cattaatgctggcgcttttgcaacaagcccaccacaatactggcaccgtgttgaactaagcgatgatgctcagtt

SEQ ID NO: 882194 - DNA, 75 bp, synthetic construct
  source 1..75: mol_type = other DNA
tttaacagctcgtatacatcaacgcctcgatgaggatctgcctgaagtaatggaggctttgcttaataacatagc

SEQ ID NO: 882195 - DNA, 75 bp, synthetic construct
  source 1..75: mol_type = other DNA
cactttgtcggccaacgagtataataaatcctatttctatgagtaaaataaattggagggtaatatctcagttat

SEQ ID NO: 882196 - DNA, 75 bp, synthetic construct
  source 1..75: mol_type = other DNA
gccttgataatattgcatggatgataaagtataatgcgataaaaactgaataccaatcaagctatgatagaacag

SEQ ID NO: 882197 - DNA, 75 bp, synthetic construct
  source 1..75: mol_type = other DNA
ccaatgccgaagccagattaaacacattaattaatgatgcagataatgacaatataaaatcaaaatatttacgtc

SEQ ID NO: 882198 - DNA, 75 bp, synthetic construct
  source 1..75: mol_type = other DNA
ttaacggtttattatctgctgcgcaaaacctatgaaattaaacccgatgagcagttcctgttccacgcagcagct

SEQ ID NO: 882199 - DNA, 75 bp, synthetic construct
  source 1..75: mol_type = other DNA
atcggggaccgaccagtaattatctttaatgcccggttcgatatccgcattctgaaacagactgctgccgcacat

SEQ ID NO: 882200 - DNA, 75 bp, synthetic construct
  source 1..75: mol_type = other DNA
aattaagtactatcttcaggtgttgactaccccttacccgtcatcaggaatgattgctgccaatggattaccagt

SEQ ID NO: 882201 - DNA, 75 bp, synthetic construct
  source 1..75: mol_type = other DNA
aagaaatattttaacatatctaacaaaactccatctgtcattattcgaggtagactataatgaaaaaacacctcg

SEQ ID NO: 882202 - DNA, 75 bp, synthetic construct
  source 1..75: mol_type = other DNA
gctacaggatggttagtgttacttggttattgttatttcatttcgcgcgcaaagcatctcgcgtataataataag

SEQ ID NO: 882203 - DNA, 75 bp, synthetic construct
  source 1..75: mol_type = other DNA
atgaaagaaaataaatgcaaatttctgatgaaaaagatcaatgagaatcatattaagcgcgcagcaggtcttagc

SEQ ID NO: 882204 - DNA, 75 bp, synthetic construct
  source 1..75: mol_type = other DNA
gctgcgcgacttgatatcagtcgtgaagaagtactgaacgagctgtgggaactgaaaaaaggctggcttcgttga

SEQ ID NO: 882205 - DNA, 75 bp, synthetic construct
  source 1..75: mol_type = other DNA
actgaagtttgacgatgcgacagggaaagaacaggtctacatccacgcgcagaagaacatgaacaccgaggtgct

SEQ ID NO: 882206 - DNA, 75 bp, synthetic construct
  source 1..75: mol_type = other DNA
aaggtgaaatagtttttgaagatcaatctgtctcattttctgagccgttaagtgcgcagcgtgttggtattacta

SEQ ID NO: 882207 - DNA, 75 bp, synthetic construct
  source 1..75: mol_type = other DNA
cgcggggcgtactgaacttgcgcgtgcgatttttggtgcggattctattgacagcggaatgctaaaattaaatgg

SEQ ID NO: 882208 - DNA, 75 bp, synthetic construct
  source 1..75: mol_type = other DNA
ccgtgcggcgggtggtggagccgttcggctttctgattcgcattattgagtggtggcagaccggagagacaccgg

SEQ ID NO: 882209 - DNA, 75 bp, synthetic construct
  source 1..75: mol_type = other DNA
gaaatatcccagaaaatacagaataaatgcgaacagaaaacagcagaaggatgtgaagctgcaattaatattggg

SEQ ID NO: 882210 - DNA, 75 bp, synthetic construct
  source 1..75: mol_type = other DNA
cagccagcagtttcatgcgttgtgccgaagccgtcggaacacgcattacagacattccggtagacctcaatacgc

SEQ ID NO: 882211 - DNA, 75 bp, synthetic construct
  source 1..75: mol_type = other DNA
accggcaggctggatttcattctggacgttgagtccatttatggtgacaaattccgctatatttattcgcagaat

SEQ ID NO: 882212 - DNA, 75 bp, synthetic construct
  source 1..75: mol_type = other DNA
gtctctaatgatggtcggataaataaatcaggcctttacatcataaataatggaatggggacggcttttgtctca

SEQ ID NO: 882213 - DNA, 75 bp, synthetic construct
  source 1..75: mol_type = other DNA
aacgaaacgattatttccggcggcaccgcgcatgaaggcggggcggtccatgttattgacacaatgagagtgaat

SEQ ID NO: 882214 - DNA, 75 bp, synthetic construct
  source 1..75: mol_type = other DNA
cgtttcattcaatccacagatgaaatgtccgcggtaatggctcagtttcgtcaccgccgggattatgagaaaaag

SEQ ID NO: 882215 - DNA, 75 bp, synthetic construct
  source 1..75: mol_type = other DNA
ggattccacggttgaagcccggaacgaaatcctcgccttctttcgtcagccacatgttcaggcggcaataaatgc

SEQ ID NO: 882216 - DNA, 75 bp, synthetic construct
  source 1..75: mol_type = other DNA
tgatgaagagctgcttgcctcgctggaattaactcattatcaggtgtttaaaaaccgggtactctataccaaaga

SEQ ID NO: 882217 - DNA, 75 bp, synthetic construct
  source 1..75: mol_type = other DNA
gttctgtctcgaacccgacctgttaagccagtggcgggggtatgggagctctcagggcgtgtgcctggaatttga

SEQ ID NO: 882218 - DNA, 75 bp, synthetic construct
  source 1..75: mol_type = other DNA
gaatgtatcaggcgcatgtctggtctatctgctaataatccttcttgttggctttctcttcgccagcctttatac

SEQ ID NO: 882219 - DNA, 75 bp, synthetic construct
  source 1..75: mol_type = other DNA
cttacatccttgcgtaacctacgtgaagaattagcaaaccctgcaactgatttggatgttacgtttgatctcttg

SEQ ID NO: 882220 - DNA, 75 bp, synthetic construct
  source 1..75: mol_type = other DNA
atgaacggcctgaagggcatcatcgaatcaggctcactgtgggcgacgcacttttcctttctcaatgacagtaat

SEQ ID NO: 882221 - DNA, 75 bp, synthetic construct
  source 1..75: mol_type = other DNA
atgctattcagattgaaacaccattgtccagcaatgataatatcgctagcattaaagtgtctggttgttattttg

SEQ ID NO: 882222 - DNA, 75 bp, synthetic construct
  source 1..75: mol_type = other DNA
cgtcgtcgtggttctgacaggcagcgggatatggttcggcaccttcctcacaggcaacaagctggacgctcaggc

SEQ ID NO: 882223 - DNA, 75 bp, synthetic construct
  source 1..75: mol_type = other DNA
atgtgggaagcagcccagaaaatcctgagggttagctggaaaccgctgctcgtcgtcgtggttctgacaggcagc

SEQ ID NO: 882224 - DNA, 75 bp, synthetic construct
  source 1..75: mol_type = other DNA
tccggtccacatgacgtgcgggcgcagctccggctgtacctctgggagcaggaaaacggtaaggatgtcctgacc

SEQ ID NO: 882225 - DNA, 75 bp, synthetic construct
  source 1..75: mol_type = other DNA
ttacgagcgacgctggctgacagaggaataccacaaggcgtggaaaagtggtggtacatggaatcgctgcgaatg

SEQ ID NO: 882226 - DNA, 75 bp, synthetic construct
  source 1..75: mol_type = other DNA
atgtacgcccccgacagcgccctgccagtcgatcttatcgaacagcagtgctggagtcgtgccacggacacctac

SEQ ID NO: 882227 - DNA, 75 bp, synthetic construct
  source 1..75: mol_type = other DNA
cgctgcaaaagcctgtgcggaaattgaaaaaacgccggtcagtattcgtgagctgtggaacccggacacctgccc

SEQ ID NO: 882228 - DNA, 75 bp, synthetic construct
  source 1..75: mol_type = other DNA
gacgcgccgtttatgacagcgatgattatcaggaaggtatgaatgcattcctggaaaaacgtaaacctaatttcg

SEQ ID NO: 882229 - DNA, 75 bp, synthetic construct
  source 1..75: mol_type = other DNA
tcgatggtcgaaggtagcgtctggggaggtgcttttgaaatgatcatgagttccgatctgatcatcgctgccagc

SEQ ID NO: 882230 - DNA, 75 bp, synthetic construct
  source 1..75: mol_type = other DNA
ttatcatcaacaaagttgcggtcattgagtttaactatggccgcaaactcaatgcattgagtaaagtctttattg

SEQ ID NO: 882231 - DNA, 75 bp, synthetic construct
  source 1..75: mol_type = other DNA
catgctgacgaactgatgaagtgggagcgtattccgttatccgtacccctgaaggtggggcaggagcgggtgatt

SEQ ID NO: 882232 - DNA, 75 bp, synthetic construct
  source 1..75: mol_type = other DNA
atgttgttcaacttaattatgtgaacgcgggcggtaaacgttatcagggtaaaggcgtttcatggtttatctcgc

SEQ ID NO: 882233 - DNA, 75 bp, synthetic construct
  source 1..75: mol_type = other DNA
tcaccatcaacaaagttgcggtaattgagtttaactatggccgcaaactcaatgcattaagtaaagtctttattg

SEQ ID NO: 882234 - DNA, 75 bp, synthetic construct
  source 1..75: mol_type = other DNA
gtctgaatttgcacgttgccattatgggtatatacaaatccctccagtgacaactttccgcgccgacggaccaga

SEQ ID NO: 882235 - DNA, 75 bp, synthetic construct
  source 1..75: mol_type = other DNA
gtgaatgagaaagggttttctttaattgaaggtgtggttgtaataatgctttcaactgtcattgttatggggata

SEQ ID NO: 882236 - DNA, 75 bp, synthetic construct
  source 1..75: mol_type = other DNA
tattcagtttaatcctgtaccaaattgggtagttgacgcatcctatgagtacaccaaattgggcgatgtgaaagt

SEQ ID NO: 882237 - DNA, 75 bp, synthetic construct
  source 1..75: mol_type = other DNA
gaaatatcccagaaaatacagaataaatgtgatcagaaaccagcaggagattgtgaagatataattaatattgaa

SEQ ID NO: 882238 - DNA, 75 bp, synthetic construct
  source 1..75: mol_type = other DNA
ttgtagttccaagttataatcgtctggattacttattgcaatcaattaaaagtattaaaaaacaatcgtacacgg

SEQ ID NO: 882239 - DNA, 75 bp, synthetic construct
  source 1..75: mol_type = other DNA
aaagtcatcagcgggcatagagagtgggtgttccccagtatcaaagctccactcaatcacatgcatgaacaaact

SEQ ID NO: 882240 - DNA, 75 bp, synthetic construct
  source 1..75: mol_type = other DNA
cctgtgcgctcggggcggcaacggtgttttctgcggtttcactgccgctgtcggtgcaggcggtggagctggtcc

SEQ ID NO: 882241 - DNA, 75 bp, synthetic construct
  source 1..75: mol_type = other DNA
aggaagcccgccgcattctggcgcgggatcacgtttgcttttttgccggacgtattcgcacagggggcgcacatg

SEQ ID NO: 882242 - DNA, 75 bp, synthetic construct
  source 1..75: mol_type = other DNA
caattaccgccaaaattcaccatatcgccgcagagactgagcaggaagcccgccgcattctggcgcgggatcacg

SEQ ID NO: 882243 - DNA, 75 bp, synthetic construct
  source 1..75: mol_type = other DNA
ctgaacctcacaaaacctgacatccacgcacggggaatgacgacaaatgatgacattttaaaccaagaaataatc

SEQ ID NO: 882244 - DNA, 75 bp, synthetic construct
  source 1..75: mol_type = other DNA
tgtggaactggcgtacctgcccggtaaacctgctgccgtatctggcgtgggcgctgtcggtcgaccggtgggatg

SEQ ID NO: 882245 - DNA, 75 bp, synthetic construct
  source 1..75: mol_type = other DNA
atcagccctttgccgattctgatagctatatgggcaataagcgcatttatatttgcggtcttactccttcaccaa

SEQ ID NO: 882246 - DNA, 75 bp, synthetic construct
  source 1..75: mol_type = other DNA
atgagttcgtggaggtgcgccgtgatactgaatgaacctgccgcccagaaagaagcctttaatctggctggcctg

SEQ ID NO: 882247 - DNA, 75 bp, synthetic construct
  source 1..75: mol_type = other DNA
ttgaaaaacacatgttctactaattggaagcatcaccaagaatgcgatggatggtatatttacgaaaaaataatt

SEQ ID NO: 882248 - DNA, 75 bp, synthetic construct
  source 1..75: mol_type = other DNA
aataaatctccttacctcacaacacgacaagcctgcattgcggctcttcagtctccgctgcatactgtccaggtg

SEQ ID NO: 882249 - DNA, 75 bp, synthetic construct
  source 1..75: mol_type = other DNA
gacgtttatacaggtggtatcagcaatggaacgacaattaagggtggtaattcacactgtagtggcacactaaat

SEQ ID NO: 882250 - DNA, 75 bp, synthetic construct
  source 1..75: mol_type = other DNA
gctgaacgttacgctattcacgatgtgtacgatgaaggaaccatccgggcagcggcgatgagcgaagaggagcat

SEQ ID NO: 882251 - DNA, 75 bp, synthetic construct
  source 1..75: mol_type = other DNA
gctgtactgttttacatgtactggaattgtgatattggggaggtagacgatgctacggccaacgaagcactctca

SEQ ID NO: 882252 - DNA, 75 bp, synthetic construct
  source 1..75: mol_type = other DNA
aagatttgcgagaaatataaatcgaccattgaggcgtttaaaaaagagcaactagcgttaccagtattagttcgg

SEQ ID NO: 882253 - DNA, 75 bp, synthetic construct
  source 1..75: mol_type = other DNA
cagtacaaacggccctgctggtgccatggttcttggtggttttcatgcgcaatacagcacaaattacgccgtaca

SEQ ID NO: 882254 - DNA, 75 bp, synthetic construct
  source 1..75: mol_type = other DNA
aactgcatcagcaaactccgcgacagcagccaaaaaatcagaaaccaacgcgaaaaatagcgaggcagcagcaaa

SEQ ID NO: 882255 - DNA, 75 bp, synthetic construct
  source 1..75: mol_type = other DNA
aattacagctaactcaggaatcgcaacattaacaggtcatgactggaacgctcagcatactgataacgtcgacaa

SEQ ID NO: 882256 - DNA, 75 bp, synthetic construct
  source 1..75: mol_type = other DNA
tcagaaatgagaaaataccttaaaagcatcaacgagtgtatgttccttatgaaaaacatagctcatcaaaattaa

SEQ ID NO: 882257 - DNA, 75 bp, synthetic construct
  source 1..75: mol_type = other DNA
ttctacgtgttgatctgcatgacccaattgatacagaaaatatggataacccattctttcaacccagggttgact

SEQ ID NO: 882258 - DNA, 75 bp, synthetic construct
  source 1..75: mol_type = other DNA
actggcaatcgttttgttttacagaacttaggtaatacagaactatcatttgccgcaaaagtatggggatcaagt

SEQ ID NO: 882259 - DNA, 75 bp, synthetic construct
  source 1..75: mol_type = other DNA
tgtcctgttttttatttctggtgtaggttctgcctggccagaacttggttttacctcaataaacccggacaacac

SEQ ID NO: 882260 - DNA, 75 bp, synthetic construct
  source 1..75: mol_type = other DNA
tgatgacggcacaggatatcacatccggttgggctaccgacctggcgctgggcattctcagtgatgaagaaaaag

SEQ ID NO: 882261 - DNA, 75 bp, synthetic construct
  source 1..75: mol_type = other DNA
tgttcgtaaattactgaactcaattttcactgaagaagaaccagaacaaccagaaagcgctccagcctcattaac

SEQ ID NO: 882262 - DNA, 75 bp, synthetic construct
  source 1..75: mol_type = other DNA
taattgtagatagtgcgatactgagatcaacggttgaaaaacctttacaaataaggagcgctaacccagcaataa

SEQ ID NO: 882263 - DNA, 75 bp, synthetic construct
  source 1..75: mol_type = other DNA
aatacctgcgttttggcacaggatagcaggcagattaatgtatcgttgggcgacgtttcgttaagtcgtttttcg

SEQ ID NO: 882264 - DNA, 75 bp, synthetic construct
  source 1..75: mol_type = other DNA
cagggaagtatccgtcgttcaacagccatcaagccattaaatggtaagcgtccggatgttgatattgtcgttgta

SEQ ID NO: 882265 - DNA, 75 bp, synthetic construct
  source 1..75: mol_type = other DNA
atgacggatgaactggacaaggccagcggccttgagatggcagaccgtgaacgggcattaaatgccctgttaaac

SEQ ID NO: 882266 - DNA, 75 bp, synthetic construct
  source 1..75: mol_type = other DNA
taagcaacatggctaccaaaatggtagagttaggggcgagtgaacatcatgtggctttgttgcaattgatgaatt

SEQ ID NO: 882267 - DNA, 75 bp, synthetic construct
  source 1..75: mol_type = other DNA
catgacatagattcagccatggcatcccgagcgatctgcagaaccgcccatccgggacaatacgtattactactg

SEQ ID NO: 882268 - DNA, 75 bp, synthetic construct
  source 1..75: mol_type = other DNA
cgaaaggttatcatggacgattatctgagcaacgaatgcgtgagattattactgaacccgatggagtttattatt

SEQ ID NO: 882269 - DNA, 75 bp, synthetic construct
  source 1..75: mol_type = other DNA
atattttttccttactgatggcgatattgatttttcgaattgtttagctaaaccatgttggttaacgtatttaat

SEQ ID NO: 882270 - DNA, 75 bp, synthetic construct
  source 1..75: mol_type = other DNA
gcatgctttactttgggttggctaccagagccgtgttatatggcgttgttgcttttgcggcagtttactacggaa

SEQ ID NO: 882271 - DNA, 75 bp, synthetic construct
  source 1..75: mol_type = other DNA
ctagacagccaaacgacggtagctattgaggtggaaaataaggaattaacaagccgtattttgaatacaggcgca

SEQ ID NO: 882272 - DNA, 75 bp, synthetic construct
  source 1..75: mol_type = other DNA
gcagcattttaaaactagcaatgcggcatattcacaactatgtgaaaaattatctttattaaaaagctcgcccag

SEQ ID NO: 882273 - DNA, 75 bp, synthetic construct
  source 1..75: mol_type = other DNA
gcagaattttaaaactagcaattcggcatattcaaaactatgtggaaaattatctttatttaaaagcgtgcccag

SEQ ID NO: 882274 - DNA, 75 bp, synthetic construct
  source 1..75: mol_type = other DNA
aacaatagaaaagagcgacctttcatatgggtattattttggttgtgtattatccaatatattatgttttgaaag

SEQ ID NO: 882275 - DNA, 75 bp, synthetic construct
  source 1..75: mol_type = other DNA
cgatggtgccgcaaggctgacgcagcttacgcgcagcggcaaccagcagtggcggctgcactacgatgcggcggg

SEQ ID NO: 882276 - DNA, 75 bp, synthetic construct
  source 1..75: mol_type = other DNA
cgacgcagtgtgtggtctttgaagatgccgatttcggtattcaggcggcccgtgcagcaggcatggacgccgtgg

SEQ ID NO: 882277 - DNA, 75 bp, synthetic construct
  source 1..75: mol_type = other DNA
acctggcgtattgctcaggcaattattgagctgaatcaggccgatctcgacccgcatgcgttagcgcgtgaaaaa

SEQ ID NO: 882278 - DNA, 75 bp, synthetic construct
  source 1..75: mol_type = other DNA
agaacaatggtccagaaaagaggcgacagagttgtgtagtaactggaacctgatgctcggcggtgcgcttgaggt

SEQ ID NO: 882279 - DNA, 75 bp, synthetic construct
  source 1..75: mol_type = other DNA
gccattttcacagctacgctaactacattgatcacaaatacaatgacgccgacgcgcaggatgaaaagcaaacaa

SEQ ID NO: 882280 - DNA, 75 bp, synthetic construct
  source 1..75: mol_type = other DNA
agttatgttctgtatatcaggacaaaatgtagattcagaagaacatgtatcaaccagcaaagcggttgttgatgc

SEQ ID NO: 882281 - DNA, 75 bp, synthetic construct
  source 1..75: mol_type = other DNA
aatgccatcgcattgggagagggtagtgccgctggtggcagcaacagccttgctttcggtagccagtccagggca

SEQ ID NO: 882282 - DNA, 75 bp, synthetic construct
  source 1..75: mol_type = other DNA
gacaggtgcaggagcttctgtcagcagtaaaaataccttcactgttgcaaaaggtaataatgcatcagcgacgct

SEQ ID NO: 882283 - DNA, 75 bp, synthetic construct
  source 1..75: mol_type = other DNA
gccacagcaccatacaccgcatgtcgtggaacgatacgctggatgaacgtaatagctggggcatgtctgccggac

SEQ ID NO: 882284 - DNA, 75 bp, synthetic construct
  source 1..75: mol_type = other DNA
gtggatgccaccaacagcacgatttcgctcgccgcttatcgcttctcagatcgtcattttcacagctacgccaac

SEQ ID NO: 882285 - DNA, 75 bp, synthetic construct
  source 1..75: mol_type = other DNA
ttacgggattggcggaacatataaagacggggtattcacctttcctccggcgccagaggtaccaaaagaggattt

SEQ ID NO: 882286 - DNA, 75 bp, synthetic construct
  source 1..75: mol_type = other DNA
cactgggatactatcaaagcgacgaccgttgaggcgtggaacagcgtggtggcatttctggggcaaatctggagc

SEQ ID NO: 882287 - DNA, 75 bp, synthetic construct
  source 1..75: mol_type = other DNA
agttttaagcaggtatgcagcgatgtctggaacaacatcaccacgaccacgcgcaccgtatgggaggggataaag

SEQ ID NO: 882288 - DNA, 75 bp, synthetic construct
  source 1..75: mol_type = other DNA
atactcgtataaaagaacagcgcgctagatgttgggactatgggacgagttatagttatcccactgtagcatttg

SEQ ID NO: 882289 - DNA, 75 bp, synthetic construct
  source 1..75: mol_type = other DNA
taatttaactattcaatcagtattaaaaaagactatgagtagtcaaccaggaaaattaagcggctcagctgtaat

SEQ ID NO: 882290 - DNA, 75 bp, synthetic construct
  source 1..75: mol_type = other DNA
gccggaaggcttcacacatctgaacgaacaatttcagagctacacgccgtatcagtttgcggtgtcacgtaatga

SEQ ID NO: 882291 - DNA, 75 bp, synthetic construct
  source 1..75: mol_type = other DNA
gagcagcgtttgtctctgaatgtatcccttctaaatcctgttgaaaaaacgactcatatcgatatctatatctga

SEQ ID NO: 882292 - DNA, 75 bp, synthetic construct
  source 1..75: mol_type = other DNA
tccgcgaaaccggtacaattggcgacgtaattgagttcatccgtgctcaacggaagccaagacttccagataagg

SEQ ID NO: 882293 - DNA, 75 bp, synthetic construct
  source 1..75: mol_type = other DNA
ttacatatgctgatagaggccacctgttaaaacaagttgtatcatcagtagtatcatccgggtgtgataatataa

SEQ ID NO: 882294 - DNA, 75 bp, synthetic construct
  source 1..75: mol_type = other DNA
tcacatacaattagaaatagggtgttttttgaactttacgcgacaacaaacaatgtgccaatatatgttgttaat

SEQ ID NO: 882295 - DNA, 75 bp, synthetic construct
  source 1..75: mol_type = other DNA
ctggcacagccgctgtttctgcctgcgatgctggttttactacttgcgagcttatggtttgggataacggtatgg

SEQ ID NO: 882296 - DNA, 75 bp, synthetic construct
  source 1..75: mol_type = other DNA
gatgaaaaacgctctctacatgcgtatttaacgtggcaacttcataccccagccaatatgacaggaatgaaaagt

SEQ ID NO: 882297 - DNA, 75 bp, synthetic construct
  source 1..75: mol_type = other DNA
ggacaagctagagcacctttatttggttttttcggcgatcattggcaaaaaatctatggtggtggatgtggaaag

SEQ ID NO: 882298 - DNA, 75 bp, synthetic construct
  source 1..75: mol_type = other DNA
cggcgactgtctggtcagcttcggtgcgcagtatagagggtttgcgcgcccttgtcaccccgcgttgcgcattcc

SEQ ID NO: 882299 - DNA, 75 bp, synthetic construct
  source 1..75: mol_type = other DNA
tgttcattttgacgacgactttaagttgtgcctacgcaggggttgggcttgatgcaaccagaattatttacaatg

SEQ ID NO: 882300 - DNA, 75 bp, synthetic construct
  source 1..75: mol_type = other DNA
aatcaccctactggaaacacaactggcgcagttgcagaaactgaaccgccccgggtttcctggagagtgttttat

SEQ ID NO: 882301 - DNA, 75 bp, synthetic construct
  source 1..75: mol_type = other DNA
gaaacatcccagaaaatacagaataattgcgaacggaaaacaacaggagaatgtgaagctgcaattaatattgaa

SEQ ID NO: 882302 - DNA, 75 bp, synthetic construct
  source 1..75: mol_type = other DNA
ctcagaaacaggatattaagtgcgctccctggaatgggagggcgaaacgtctttgcaggaaaaaatatcggagtg

SEQ ID NO: 882303 - DNA, 75 bp, synthetic construct
  source 1..75: mol_type = other DNA
taaaacacggttgtatttaagctatacccccgccagtggtacgcttcgggaacttcaggtaaaaaacagatggtt

SEQ ID NO: 882304 - DNA, 75 bp, synthetic construct
  source 1..75: mol_type = other DNA
gcacactcctcggagatcgggtgatggaccgtatgaccatgaatggtggtcgttgggtgaattttaactgggaga

SEQ ID NO: 882305 - DNA, 75 bp, synthetic construct
  source 1..75: mol_type = other DNA
gtatttggcaatcggtataccccttgcttcaaagtggtgaccttgatcctgtttttgaaatgaaagcaaaaaaag

SEQ ID NO: 882306 - DNA, 75 bp, synthetic construct
  source 1..75: mol_type = other DNA
ctcaggttggacatcaaatgatgacaatgtagttgtatttcagtcaatcgaagaggccatggacaggctagctga

SEQ ID NO: 882307 - DNA, 75 bp, synthetic construct
  source 1..75: mol_type = other DNA
cttacacctaagaaattaaataaattaaaactattagatcaactcggagtagttaactgtggatatatgaagcca

SEQ ID NO: 882308 - DNA, 75 bp, synthetic construct
  source 1..75: mol_type = other DNA
tataaaggatacatttgatagtttaaccacaagattgcttgttcagaaagttgtttttgcctcattaggaattat

SEQ ID NO: 882309 - DNA, 75 bp, synthetic construct
  source 1..75: mol_type = other DNA
ttgatctgggtggtgttgacggtctgctgcacatcaccgacatggcgtggaaacgcgttaaacatccgagcgaaa

SEQ ID NO: 882310 - DNA, 75 bp, synthetic construct
  source 1..75: mol_type = other DNA
tgtgcgttatctgtttgagtgccgggaaccagccagtaaagcccctaagtttgtgcagtttagtgatcatattat

SEQ ID NO: 882311 - DNA, 75 bp, synthetic construct
  source 1..75: mol_type = other DNA
ctggtgtacagcaatcgcctcggtaacaaagcatcaggtgatgggtggaaatatcgtgggcgtggcctgattcag

SEQ ID NO: 882312 - DNA, 75 bp, synthetic construct
  source 1..75: mol_type = other DNA
atttgaactacacaccatctgcgctggtggcgacgttcggaaagaggatcacacagcagcaggctgatgcccttg

SEQ ID NO: 882313 - DNA, 75 bp, synthetic construct
  source 1..75: mol_type = other DNA
tgcacgctggtttccgcacattgatgcggcaatgaaagagtttggaatcacagcagttaacgatcaggccatgtt

SEQ ID NO: 882314 - DNA, 75 bp, synthetic construct
  source 1..75: mol_type = other DNA
atgaaaaaaatactcgtttcaggtatatcattttatgaaatagaaggtgtagcaacactctttaaaagtatcgag

SEQ ID NO: 882315 - DNA, 75 bp, synthetic construct
  source 1..75: mol_type = other DNA
gcaactatcacagctgcggccaggcgctcaaactggatctggtttcttatcccgaactactggaacgagatgaat

SEQ ID NO: 882316 - DNA, 75 bp, synthetic construct
  source 1..75: mol_type = other DNA
atcatcaatggtgggcagaacggcattaacgaccgcagtgaacgttacgccaaagctaaagccgcactggtatga

SEQ ID NO: 882317 - DNA, 75 bp, synthetic construct
  source 1..75: mol_type = other DNA
gaaggaaggtaagttcccgaaacggattaaaattggcgctacagcagtggcataccgcctctccgaaatccaagc

SEQ ID NO: 882318 - DNA, 75 bp, synthetic construct
  source 1..75: mol_type = other DNA
gcgacaccatgacggtgaccgattttaccgtcaacggtaccacctggcaggcaggcgagacggccaatctggcgg

SEQ ID NO: 882319 - DNA, 75 bp, synthetic construct
  source 1..75: mol_type = other DNA
agcgacaccgccgccacccattcgggcgaggcgaaaaccatcgacgtgctgggcaacgacagcttcagcaacagc

SEQ ID NO: 882320 - DNA, 75 bp, synthetic construct
  source 1..75: mol_type = other DNA
aacgtcaaccacgacctgaacggcgcagcggcgggcgatgtcaccatcaccctgcatctggacgacggcgactcg

SEQ ID NO: 882321 - DNA, 75 bp, synthetic construct
  source 1..75: mol_type = other DNA
ggcgcgacctacgcgccgggggacatcattacgatcccgggccagggcacgctggtggttaaccgcgacggcagc

SEQ ID NO: 882322 - DNA, 75 bp, synthetic construct
  source 1..75: mol_type = other DNA
gcaaggtgcgctataccccgaacgcgggctttaacggcactgacagctttacctataccgtcaccagcggcggcg

SEQ ID NO: 882323 - DNA, 75 bp, synthetic construct
  source 1..75: mol_type = other DNA
cgccaccacccacgcgggcatggcgaaagtcatcgacgtgctggcgaacgacagattcagcaacagcgacaaagc

SEQ ID NO: 882324 - DNA, 75 bp, synthetic construct
  source 1..75: mol_type = other DNA
ataccgccacgctcagcggctggcaggtcagcaccacggacgccagcgaaaccgtcatagtcacggtgagcctga

SEQ ID NO: 882325 - DNA, 75 bp, synthetic construct
  source 1..75: mol_type = other DNA
gtctccgcccaggataacgcctttatcacccgcttcgccgaactgactcaggcggacgtggcggcctccagcgac

SEQ ID NO: 882326 - DNA, 75 bp, synthetic construct
  source 1..75: mol_type = other DNA
cgattaaaagcgagatgattgataacaaaggcgaaatgtcctgcatgtctcatcaactgatcgtcggtgacaagc

SEQ ID NO: 882327 - DNA, 75 bp, synthetic construct
  source 1..75: mol_type = other DNA
cgaacccgccaccccggacgataagttcaccttcacgatttctgacggcgacaaagagcagaccggcaacgcgtt

SEQ ID NO: 882328 - DNA, 75 bp, synthetic construct
  source 1..75: mol_type = other DNA
ctgcaaaaaaatgtcggcggcagctgggtgacgctcggcgaatacgccacctttacgcaggccgacctcgacagc

SEQ ID NO: 882329 - DNA, 75 bp, synthetic construct
  source 1..75: mol_type = other DNA
aacccggaccaggccattaccggcgtgacccagggcgcgcacggctccgtcgctattgaaaacgggcagctggtt

SEQ ID NO: 882330 - DNA, 75 bp, synthetic construct
  source 1..75: mol_type = other DNA
gagcgcgtcacgcagattattaacggcgggcagaacggcattaaagaccgccgtgaacgttatgccaaagcaaaa

SEQ ID NO: 882331 - DNA, 75 bp, synthetic construct
  source 1..75: mol_type = other DNA
aaaatagttaaaaaactagcaggtccgtatgatataaaaagatacgagaaggataattatcagtcggcaaatttt

SEQ ID NO: 882332 - DNA, 75 bp, synthetic construct
  source 1..75: mol_type = other DNA
gcttattactgcctcacgacgaagtatgaacacgtcctgcgtttctctggtgctggtgatatgggtattgatgtc

SEQ ID NO: 882333 - DNA, 75 bp, synthetic construct
  source 1..75: mol_type = other DNA
ataagccgccgagcccagcaaccgctgttacggcagctcaggtggcgaacggccccatttttccaccgcagcaaa

SEQ ID NO: 882334 - DNA, 75 bp, synthetic construct
  source 1..75: mol_type = other DNA
tgacgttgacgttttttgcgctgataagttttctggcattgaaagaatattgtacgcttatatcggctttgttga

SEQ ID NO: 882335 - DNA, 75 bp, synthetic construct
  source 1..75: mol_type = other DNA
ccatgttgttgtttctggtggtggagagatctacaagagtctgatcgcccatgccgacacgctacatatctcgac

SEQ ID NO: 882336 - DNA, 75 bp, synthetic construct
  source 1..75: mol_type = other DNA
ataaaagccagttgatgggcgcgtgtcgtggctataaagatatcaacatgctggcgattcagttgctgaatgaag

SEQ ID NO: 882337 - DNA, 75 bp, synthetic construct
  source 1..75: mol_type = other DNA
ggtgggatgccgtggattttcttcacgacccagaaacgggactttactatcgtgacaagcgatatatgcctttac

SEQ ID NO: 882338 - DNA, 75 bp, synthetic construct
  source 1..75: mol_type = other DNA
gctgggccgctggtgaattttgctgacgatcaggtctgtcttcaaagctatctggaggtctatcaaacattaggt

SEQ ID NO: 882339 - DNA, 75 bp, synthetic construct
  source 1..75: mol_type = other DNA
agacagaaaaaataaacatcagagacaaaaagaaaattttaaaagaacttgccgtgctcaatattactgatgcca

SEQ ID NO: 882340 - DNA, 75 bp, synthetic construct
  source 1..75: mol_type = other DNA
agtaccaatagagttttatattcgcttactcttaatgaaagctcgcttctcagtcaggaagtaaaaaactgggct

SEQ ID NO: 882341 - DNA, 75 bp, synthetic construct
  source 1..75: mol_type = other DNA
tttttttgagtgccatttcagtcaatgtgatggcatctccagttgtaagcaatgataaacccagaagcccattta

SEQ ID NO: 882342 - DNA, 75 bp, synthetic construct
  source 1..75: mol_type = other DNA
ccgcaggggttctgaaagagctcgggcacgtaacacgactcagtatctataagacactggtcaaagccggacatc

SEQ ID NO: 882343 - DNA, 75 bp, synthetic construct
  source 1..75: mol_type = other DNA
cagcgcgtgacgctggaattaagcggttgcccgatagatgccaacggtttttgcccaatggataagtttgatcgc

SEQ ID NO: 882344 - DNA, 75 bp, synthetic construct
  source 1..75: mol_type = other DNA
caggattttgtacgtcaggaagctggcgaacggcacgcctggagttttgccattcacaatccgaaagcgagcatt

SEQ ID NO: 882345 - DNA, 75 bp, synthetic construct
  source 1..75: mol_type = other DNA
catccttgaagtgtcaaatcctgtattattatcttctactgttactacagatggatatactgttttcaataaaaa

SEQ ID NO: 882346 - DNA, 75 bp, synthetic construct
  source 1..75: mol_type = other DNA
cgtggatacgctggtctaccgctacagctactcgtttgatggcgagacgtggcacaccgtgccggtgacgtatga

SEQ ID NO: 882347 - DNA, 75 bp, synthetic construct
  source 1..75: mol_type = other DNA
caagagcgacatgcggcccgttcggcggcatggtacttcacgttacgtggttgccttctatattcgggggatgtt

SEQ ID NO: 882348 - DNA, 75 bp, synthetic construct
  source 1..75: mol_type = other DNA
gcctgcgcgagcagctgtcgcgtgcacgggcatggtggctgaaggaccaggccgagggccgcagcggcgttgcgc

SEQ ID NO: 882349 - DNA, 75 bp, synthetic construct
  source 1..75: mol_type = other DNA
tgatgcggtcgcgaaaataccggtaccggcggacggtaaaagtatcacccccgatgatgtgcgtccgatgattga

SEQ ID NO: 882350 - DNA, 75 bp, synthetic construct
  source 1..75: mol_type = other DNA
tcatgattttttattacggttctttataagtattggtgtgataggagcattggtttatcattctatattttttgt

SEQ ID NO: 882351 - DNA, 75 bp, synthetic construct
  source 1..75: mol_type = other DNA
tggatcttcttctgaacctgttgtggatgatgtcctccctgcctctgagtatgctcacaaaagcgctgttttcgt

SEQ ID NO: 882352 - DNA, 75 bp, synthetic construct
  source 1..75: mol_type = other DNA
atgcacataactaatttgggattgcatcaggtttcatttcaaagcggagattcctgtaaaggcgcagaagaaacc

SEQ ID NO: 882353 - DNA, 75 bp, synthetic construct
  source 1..75: mol_type = other DNA
ccggcttcaacccggacccgtccctgtgccgccagggcgaggactactacatcgccacctcgaccttcgagtggt

SEQ ID NO: 882354 - DNA, 75 bp, synthetic construct
  source 1..75: mol_type = other DNA
atattgagccagcttttattgaaagacttgagaaaaaatatggagaatcaaccattaagtctatcaagaaatact

SEQ ID NO: 882355 - DNA, 75 bp, synthetic construct
  source 1..75: mol_type = other DNA
acggtggtgatacacctgttcctccagatgacggtggcgacgtcactccaccaaaagagcccaaaatcttcaata

SEQ ID NO: 882356 - DNA, 75 bp, synthetic construct
  source 1..75: mol_type = other DNA
gaaatctgagtccgccatcccggctgagcagttcaaaaacgcccaaggcgagctggaaatccaggtaggtgacga

SEQ ID NO: 882357 - DNA, 75 bp, synthetic construct
  source 1..75: mol_type = other DNA
gatgattgcatagaactatgtgccgggattggtcgcctcagctactaccagtacttaagaaataagccaacgcac

SEQ ID NO: 882358 - DNA, 75 bp, synthetic construct
  source 1..75: mol_type = other DNA
atttgcttacctccaggataacttctgcaaaaacaatgacgccttcaagtttgcatgagttaacagctaacataa

SEQ ID NO: 882359 - DNA, 75 bp, synthetic construct
  source 1..75: mol_type = other DNA
atgggcgattttggcccgacaatgggggaacgcttacctttcagtccagagatagatgatgaccatctgcacaag

SEQ ID NO: 882360 - DNA, 75 bp, synthetic construct
  source 1..75: mol_type = other DNA
atttttgatgatttcaccaccgctaataaatgggtggattttgactttaaggcaaaatcatcggctatgaaaatg

SEQ ID NO: 882361 - DNA, 75 bp, synthetic construct
  source 1..75: mol_type = other DNA
acatacgatgaaaaagaattcatccttcagaactacgccggggatgccgttggggcaactggtgctttcttcact

SEQ ID NO: 882362 - DNA, 75 bp, synthetic construct
  source 1..75: mol_type = other DNA
gcaattgcttcgggaagaggcattaccagcgcagcccggtatgagctggagggtttaaccgctaaagccatattt

SEQ ID NO: 882363 - DNA, 75 bp, synthetic construct
  source 1..75: mol_type = other DNA
gccaatgtttatgactattttgaatcaatcggagcagacagcgaggctgcgctagaacaattacatgcggatttt

SEQ ID NO: 882364 - DNA, 75 bp, synthetic construct
  source 1..75: mol_type = other DNA
tgttgtcgtcacattgtacatgttatctgtaaggaccgactcattgacgatcaatttcatgattatgtttcgata

SEQ ID NO: 882365 - DNA, 75 bp, synthetic construct
  source 1..75: mol_type = other DNA
gaaatgtttctttaaaaatgagcgtctgtattttaatagattgctacctgcttttgataatattcaaaaaataga

SEQ ID NO: 882366 - DNA, 75 bp, synthetic construct
  source 1..75: mol_type = other DNA
aatgtatcgatgttaaaggatatgaaacattctggaagtgcaatggagttagttaagaaaaattttgttaaaatt

SEQ ID NO: 882367 - DNA, 75 bp, synthetic construct
  source 1..75: mol_type = other DNA
atcgtcattaaaaaatgaaaaagtttattattcattcgccgaaaatgatcatgactcttctcgctcaattccaat

SEQ ID NO: 882368 - DNA, 75 bp, synthetic construct
  source 1..75: mol_type = other DNA
acaaccattgaggggggactgcagactgttttcggtggcggaagtgtctccgggactctcattaataacggggaa

SEQ ID NO: 882369 - DNA, 75 bp, synthetic construct
  source 1..75: mol_type = other DNA
ggcggaagtgacagcattagcggttgaggcggaatctgccatcgccgttcgactgtccagcgcttttgagacact

SEQ ID NO: 882370 - DNA, 75 bp, synthetic construct
  source 1..75: mol_type = other DNA
gatctgccggatgagccgaccggcaacgttgccccttcctggctgacagacccgatacctgagattaacgggcgg

SEQ ID NO: 882371 - DNA, 75 bp, synthetic construct
  source 1..75: mol_type = other DNA
actaccttaaacccgcaatagaaagtcttgagacggccagagaagcacatctgaccaatgcccgacgcatggacg

SEQ ID NO: 882372 - DNA, 75 bp, synthetic construct
  source 1..75: mol_type = other DNA
tttgacctgccggatgagccaacaggcgatggcgcgccttcatggctgactgagccgacgccacagattaacggg

SEQ ID NO: 882373 - DNA, 75 bp, synthetic construct
  source 1..75: mol_type = other DNA
tttgacctgccggaagagccaacaggcgatgtcgcgccttcatggctgactgagccgacgccacagattaacggg

SEQ ID NO: 882374 - DNA, 75 bp, synthetic construct
  source 1..75: mol_type = other DNA
tttgacctgccggaagagccaacaggctatggcgcgccttcatggctgactgagccgacgccacagattaacggg

SEQ ID NO: 882375 - DNA, 75 bp, synthetic construct
  source 1..75: mol_type = other DNA
ctggcgctggggatgatgatgatgagtcccgtcacgatatccaccccggtcaaactgatcctgtttgtggcaatg

SEQ ID NO: 882376 - DNA, 75 bp, synthetic construct
  source 1..75: mol_type = other DNA
ttctggtcaatgggatgctgaagtttcaccgattgagataaaaggtgtatggacttcagccgataaaaaacacca

SEQ ID NO: 882377 - DNA, 75 bp, synthetic construct
  source 1..75: mol_type = other DNA
actgcagactgttttcggtggtggaagtgtctccggaactctcattaataccggggaacagcaagtttccggcgg

SEQ ID NO: 882378 - DNA, 75 bp, synthetic construct
  source 1..75: mol_type = other DNA
atgccgccctacgtgaaacctgcggcgcactcgttagagcaatgaaactcagcatattggttaaagaaaatccgc

SEQ ID NO: 882379 - DNA, 75 bp, synthetic construct
  source 1..75: mol_type = other DNA
cacagacagtgaggaagatgttcaggaagaaccgagaaagcgtttaagtctttctgaaaaagcaatatcactcgg

SEQ ID NO: 882380 - DNA, 75 bp, synthetic construct
  source 1..75: mol_type = other DNA
tcagaagaggtcgagcgtaaacagaaccgtatttactaccgcaagccacgcagtgaaatgggtgtgacttgtgtt

SEQ ID NO: 882381 - DNA, 75 bp, synthetic construct
  source 1..75: mol_type = other DNA
ccatgaaagaagaagcgcgcttaatccttagcgaaaccaaacgcttccaaatcatttctgagaagaaccctatca

SEQ ID NO: 882382 - DNA, 75 bp, synthetic construct
  source 1..75: mol_type = other DNA
ctctgggtggtccaaactgccgctgatgcaggagaaatattcgctgcgggactgtggcttcatattgatggtctg

SEQ ID NO: 882383 - DNA, 75 bp, synthetic construct
  source 1..75: mol_type = other DNA
gcgatcgctttcgcattacaaataacagtccgttccatattacggtcgccaatatttcgctgggtaaaacgaaat

SEQ ID NO: 882384 - DNA, 75 bp, synthetic construct
  source 1..75: mol_type = other DNA
tccctggtttgagcgtatccaatacgtgttagcgagacatcccgttctgttggcggtgttggcaacactcagtgt

SEQ ID NO: 882385 - DNA, 75 bp, synthetic construct
  source 1..75: mol_type = other DNA
aaatataaaccagagtatgtctttattcgtaataagccgatggcaatgaccgtcgggatatggtgttttgccttt

SEQ ID NO: 882386 - DNA, 75 bp, synthetic construct
  source 1..75: mol_type = other DNA
ctgaatgttgcaacgccgtttgtcctggttggactggggctgatattcccgctgctggcgcgtaaagcgaatagt

SEQ ID NO: 882387 - DNA, 75 bp, synthetic construct
  source 1..75: mol_type = other DNA
cagaaccttttatttttttctattttttatattatagattgaaacccggatttacttttattaaaaataagattt

SEQ ID NO: 882388 - DNA, 75 bp, synthetic construct
  source 1..75: mol_type = other DNA
atcgtcggcggaatcccggacaaattaaaagacgacaagcagattgacatgctggtacaggccaccgaaagctgg

SEQ ID NO: 882389 - DNA, 75 bp, synthetic construct
  source 1..75: mol_type = other DNA
acatcaaactgctggtggtgtttggtcgtgacgacaaagacctgttgcaggcagcgaaaggtatcgcccagggca

SEQ ID NO: 882390 - DNA, 75 bp, synthetic construct
  source 1..75: mol_type = other DNA
ttccctgaccaaatcgttagcttcatcggaaagttgggctcaagcgaaatcggcagagacacgaaagaaaaaatt

SEQ ID NO: 882391 - DNA, 75 bp, synthetic construct
  source 1..75: mol_type = other DNA
tgtttttaccaggcaaatacagcatcggctacagtaattcataagccttcctcaggaggagtattacccgctatc

SEQ ID NO: 882392 - DNA, 75 bp, synthetic construct
  source 1..75: mol_type = other DNA
tgtttttaccaggcaaatacagcatcggctacagatacagtaatcagtaagtcttcctctggagaagtattacca

SEQ ID NO: 882393 - DNA, 75 bp, synthetic construct
  source 1..75: mol_type = other DNA
agttcctgcaatcatttaacctgagtagcaaacaggaggcgaaccgcctgctgctgcgtattcctgtgttacaag

SEQ ID NO: 882394 - DNA, 75 bp, synthetic construct
  source 1..75: mol_type = other DNA
tcatcggcggtcttgaggttcaggatattgagccgatgcaactgctggaagtaatccgcagatttgaagatcgcg

SEQ ID NO: 882395 - DNA, 75 bp, synthetic construct
  source 1..75: mol_type = other DNA
ggttattccactaccatctatactacgggtagcagccaggtcgtgattgggcgtgccacagcactgcaatacagc

SEQ ID NO: 882396 - DNA, 75 bp, synthetic construct
  source 1..75: mol_type = other DNA
tagcttcgtcgaactctgctcaaactcacttaggtgcaacgaattctgctggcgcgcatacccactcagtatcag

SEQ ID NO: 882397 - DNA, 75 bp, synthetic construct
  source 1..75: mol_type = other DNA
tcacaggcgcatcagcagtcagccagtggtcacaaaatgggtcagtacataaggtagtgtctgcggccagtgtga

SEQ ID NO: 882398 - DNA, 75 bp, synthetic construct
  source 1..75: mol_type = other DNA
cactttcctctatattagcgataccttttgtatctcatgcagaatttaaaggcggttttgcagatatcggcgtgc

SEQ ID NO: 882399 - DNA, 75 bp, synthetic construct
  source 1..75: mol_type = other DNA
gggccaaaattttactgcttttattgcccttatattctggttacttgcaagccgcaaatacattgatcgttggca

SEQ ID NO: 882400 - DNA, 75 bp, synthetic construct
  source 1..75: mol_type = other DNA
ccgcacgcatgtatggtctttggtcgtatggtgtagagtcatcagacaacttttatatcggtgatacaaatccac

SEQ ID NO: 882401 - DNA, 75 bp, synthetic construct
  source 1..75: mol_type = other DNA
gacagacactcttatgaaagattccaaatcaaaaatcgatgatcttctacagcaggtctccaaatcatcatcatc

SEQ ID NO: 882402 - DNA, 75 bp, synthetic construct
  source 1..75: mol_type = other DNA
gcaacggatacatatgccgatgcggatggtggcgttccatggaatgccgaatcaggcgcttacaatgtcacccgc

SEQ ID NO: 882403 - DNA, 75 bp, synthetic construct
  source 1..75: mol_type = other DNA
actcgtctcggctttgttcagctttcagcgaggcccaatgttttcggtgctgtaccgatgtttttagcgattcag

SEQ ID NO: 882404 - DNA, 75 bp, synthetic construct
  source 1..75: mol_type = other DNA
aggcgtgatccctgatatgcgtggctggacgattaagggcaagcccgccagtggtcgtgccgtattgtctcagga

SEQ ID NO: 882405 - DNA, 75 bp, synthetic construct
  source 1..75: mol_type = other DNA
cttttcagctctctctggttaatccctgtttttcttttcccagagagaataaaggttacagcagcattaatcggc

SEQ ID NO: 882406 - DNA, 75 bp, synthetic construct
  source 1..75: mol_type = other DNA
tccggcaggctgacgggtatcttcagcccggacggcacatcacagcgcaccggctacgacgaacgcggccgggtg

SEQ ID NO: 882407 - DNA, 75 bp, synthetic construct
  source 1..75: mol_type = other DNA
atgaaatacatcaataaattaggtaatgactccaacttattgatagtgttttatgttcagataatgcccgatgac

SEQ ID NO: 882408 - DNA, 75 bp, synthetic construct
  source 1..75: mol_type = other DNA
gaaaaagggtcaggttaagaacatgtaaccatgttttttctgaacgtcttgctgttatcagtcatggacgataca

SEQ ID NO: 882409 - DNA, 75 bp, synthetic construct
  source 1..75: mol_type = other DNA
gaaaaacaacccccggactagatgaattatacaaaacggaacaaaatatgtttgtgtttaataatgttgtctcct

SEQ ID NO: 882410 - DNA, 75 bp, synthetic construct
  source 1..75: mol_type = other DNA
ttgctattctgctatggactcgtcttagcccgatatatataccatcatactggcgctacattatacctttattta

SEQ ID NO: 882411 - DNA, 75 bp, synthetic construct
  source 1..75: mol_type = other DNA
atacctgttcaggtacggctgttaaccagccaaccttaaatatgattatgcaacgttatggcagcgccttttctg

SEQ ID NO: 882412 - DNA, 75 bp, synthetic construct
  source 1..75: mol_type = other DNA
tatataaagatagccgcggtgaattggattatccattcaccatttcattgtcagggcgcgaaaaaaaaatttggg

SEQ ID NO: 882413 - DNA, 75 bp, synthetic construct
  source 1..75: mol_type = other DNA
agagcagtaccagcgcttattggtacgtctggattatttgacgaagctcgacactaaagcatcaggccagcgtaa

SEQ ID NO: 882414 - DNA, 75 bp, synthetic construct
  source 1..75: mol_type = other DNA
gcaagcgcagaaaaaattgaagcaaatgaaatacatcaataaattaagtggtgagcttatcgatatcgccgacaa

SEQ ID NO: 882415 - DNA, 75 bp, synthetic construct
  source 1..75: mol_type = other DNA
aactttccggtaaaagtgaagttaccgccaggtgtggccaaacatgtattccagctcacagcaatgaacgaatgt

SEQ ID NO: 882416 - DNA, 75 bp, synthetic construct
  source 1..75: mol_type = other DNA
aataataaagcagactctctggtaggaatggggctaggaaataatgatactggggtaattgccaaaactgaccgt

SEQ ID NO: 882417 - DNA, 75 bp, synthetic construct
  source 1..75: mol_type = other DNA
gggaatatcaccgatagccggattttcacctgatacagcatatgacgcggtaacgctggcgacggcaagggaccc

SEQ ID NO: 882418 - DNA, 75 bp, synthetic construct
  source 1..75: mol_type = other DNA
ataacatacccgaaagtgcattaggtatttgcactagtacagaccaacaaattgaccgtgtagaaactacgataa

SEQ ID NO: 882419 - DNA, 75 bp, synthetic construct
  source 1..75: mol_type = other DNA
agaaacgatgatggatgaacacattaccaccgaggaaaatcaaggttcaaatctatcggggccttttttacccgg

SEQ ID NO: 882420 - DNA, 75 bp, synthetic construct
  source 1..75: mol_type = other DNA
tctgatgatggtgatgaatatgactattcacccgcaaaagaagagtgggtaattaccgcagcgaacgcgaaaccg

SEQ ID NO: 882421 - DNA, 75 bp, synthetic construct
  source 1..75: mol_type = other DNA
taattatgcaatatgaaccttttttaaagtatgcgggtgcaccatcttacaaggagtcttataaatctttattat

SEQ ID NO: 882422 - DNA, 75 bp, synthetic construct
  source 1..75: mol_type = other DNA
ataaaaaaaagtttgttataggctcttatgccaaattgttattagaacaatctaaattaaatagaatgcacagga

SEQ ID NO: 882423 - DNA, 75 bp, synthetic construct
  source 1..75: mol_type = other DNA
aattcatgcgttgtcagcctatctgaccccgggttgccaggactatctgaataccgaggcccggaaaagaagcaa

SEQ ID NO: 882424 - DNA, 75 bp, synthetic construct
  source 1..75: mol_type = other DNA
aagttgacccaacttactcaacatcagcctgattaccagaccagactggccgacatcgaacgacggttacagcaa

SEQ ID NO: 882425 - DNA, 75 bp, synthetic construct
  source 1..75: mol_type = other DNA
tcgcctgatacggcctatgacgctgtgactctggcaacggcgagagatccggaggccgcccgtatgcggtaccga

SEQ ID NO: 882426 - DNA, 75 bp, synthetic construct
  source 1..75: mol_type = other DNA
atgcacgcatgacgctgatgccgcctgaagcattctccgttcagccatatgccttctaccagaacctggcgggat

SEQ ID NO: 882427 - DNA, 75 bp, synthetic construct
  source 1..75: mol_type = other DNA
ggaagaagaaacggatcaggacgctgtatgaggttctgacggatgccgttaactactacgtaaatcacgggtggg

SEQ ID NO: 882428 - DNA, 75 bp, synthetic construct
  source 1..75: mol_type = other DNA
acgccagaatgtacctgctaccgccggaagccttcagcgtccagccctgtgccttctatcagcaaatcccgggat

SEQ ID NO: 882429 - DNA, 75 bp, synthetic construct
  source 1..75: mol_type = other DNA
tttgctgacggtctatttgaagatgttgctgccgcctttgaagaaatccgcaccgcagaaggaccagagcaagcc

SEQ ID NO: 882430 - DNA, 75 bp, synthetic construct
  source 1..75: mol_type = other DNA
atcgaccagggcaagcgtgtcatcgttggtgtcaacaagtacaaactggatcacgaagacgaaaccgatgtactt

SEQ ID NO: 882431 - DNA, 75 bp, synthetic construct
  source 1..75: mol_type = other DNA
gcattaacattcccaatatacttaaaacaggaacaatttttacgctgcgttatgaagcccgggatagtttctttt

SEQ ID NO: 882432 - DNA, 75 bp, synthetic construct
  source 1..75: mol_type = other DNA
ggaatagctcccggctggcatgggttgtggcctctgagttagccagaggacatggcttcgtccttgcgaaaaaca

SEQ ID NO: 882433 - DNA, 75 bp, synthetic construct
  source 1..75: mol_type = other DNA
ttttttctttcttttattcagtgatgaaaacttcatctgatatagctgatattctatcgcatatttgcacttgcc

SEQ ID NO: 882434 - DNA, 75 bp, synthetic construct
  source 1..75: mol_type = other DNA
tccttttagtataaaggaatacaaaattaacgcagttgataaaactgaagttgaatggagtgttgttaccgattt

SEQ ID NO: 882435 - DNA, 75 bp, synthetic construct
  source 1..75: mol_type = other DNA
tccgtatatacctgcatcgattatttatatggaggtcagtgacgggtcgcaaggcgcctcgttaacgctttatga

SEQ ID NO: 882436 - DNA, 75 bp, synthetic construct
  source 1..75: mol_type = other DNA
agctccttctggaccttatagaacgtaaggttgtggatttcactgatgcatctgttgcaggcacgtggattgaga

SEQ ID NO: 882437 - DNA, 75 bp, synthetic construct
  source 1..75: mol_type = other DNA
cgttaatagactattttgttcagtgattcgcaaaataataaataagcatggtcatgtgatgcatgcggataaaac

SEQ ID NO: 882438 - DNA, 75 bp, synthetic construct
  source 1..75: mol_type = other DNA
aagtctgctatcgcgaattactttgccagattatctacattctggaaagaagggatgttctaatgttactaatgc

SEQ ID NO: 882439 - DNA, 75 bp, synthetic construct
  source 1..75: mol_type = other DNA
gtcgaggcttgcatttacaacttaatgatacaagcgcagagcaaatactcaatttagcagccgtatcgagagcac

SEQ ID NO: 882440 - DNA, 75 bp, synthetic construct
  source 1..75: mol_type = other DNA
atcacagccggtgtttatggatttagccaaaaaaggtgtggtagcagatttgattggcgcaggcgcaatcatcag

SEQ ID NO: 882441 - DNA, 75 bp, synthetic construct
  source 1..75: mol_type = other DNA
aatgtcagtgaactggcagaggtgtttgcgcgcattaagcagattgctggtcaggaacatattgatccgctgcaa

SEQ ID NO: 882442 - DNA, 75 bp, synthetic construct
  source 1..75: mol_type = other DNA
cgcggtcaatcctgtggcaatgacaccttctcgctggcggtttacccgtcatcacagccggtgtttatggatctc

SEQ ID NO: 882443 - DNA, 75 bp, synthetic construct
  source 1..75: mol_type = other DNA
ttctgagcgtttttttgacataaaaattatagaaggagaaaacataaattggactgtaattactgattttggtgg

SEQ ID NO: 882444 - DNA, 75 bp, synthetic construct
  source 1..75: mol_type = other DNA
cgctggaagccgctttcgaccgttatctggtgccaagccagtgtgttaccggcgtgattgcgcaaagctatcatc

SEQ ID NO: 882445 - DNA, 75 bp, synthetic construct
  source 1..75: mol_type = other DNA
aaatctgccgcaccgtcgatccactggccggatcttattacgttgagtcgttgaccgatcagatcgttaaacaag

SEQ ID NO: 882446 - DNA, 75 bp, synthetic construct
  source 1..75: mol_type = other DNA
gaaaaaaataggctctgcgacaacgttatatgcaaatacttcacgcgtcggctggattatcgccggctctgttga

SEQ ID NO: 882447 - DNA, 75 bp, synthetic construct
  source 1..75: mol_type = other DNA
ttcttcggcatcggcatggatctgtttatgaacgtcgccatgttgcgtgcggcacgttatttatggagcgaagag

SEQ ID NO: 882448 - DNA, 75 bp, synthetic construct
  source 1..75: mol_type = other DNA
cgcacgttatctctggagtgaggcggtaagtggatttggagccaaagatccgaaatcactggcactgcgcaccca

SEQ ID NO: 882449 - DNA, 75 bp, synthetic construct
  source 1..75: mol_type = other DNA
ccgtaacctcgctgccgggcaaaagggtctttccgttgcttttgacctcgccacccaccgtggttacgactctga

SEQ ID NO: 882450 - DNA, 75 bp, synthetic construct
  source 1..75: mol_type = other DNA
atttgctgttgacggagtattgcattatgcaaaattcttgtcagaaaaatatactgttattgcagttgccgtaag

SEQ ID NO: 882451 - DNA, 75 bp, synthetic construct
  source 1..75: mol_type = other DNA
cgtggctctttacttacctttgaaaatagtcatgattatccgatgttggtccaaacaagaataatatctgaagat

SEQ ID NO: 882452 - DNA, 75 bp, synthetic construct
  source 1..75: mol_type = other DNA
actggtgatggcattttactttgtgcctgaacaacttcttactgatgttattaatacatgggaaagtgctactac

SEQ ID NO: 882453 - DNA, 75 bp, synthetic construct
  source 1..75: mol_type = other DNA
cggcgagaccagaatgttgttcaccacctggtgctgtctgtgctgtctgtgctggctggccgggttggggatgct

SEQ ID NO: 882454 - DNA, 75 bp, synthetic construct
  source 1..75: mol_type = other DNA
atataaagtattcactccctcaccgctatgacatggctaacgtaaatgacatgctcgatttaatatgtgccacgg

SEQ ID NO: 882455 - DNA, 75 bp, synthetic construct
  source 1..75: mol_type = other DNA
cagatgattttaaaattgttgaaacagttccgggatggacgcatgacattactaataatggctcggatgagctag

SEQ ID NO: 882456 - DNA, 75 bp, synthetic construct
  source 1..75: mol_type = other DNA
ttagtgagccgggaattatttcaattgaggatttaccacctggctggggattacttcatgaaccgccccgggttt

SEQ ID NO: 882457 - DNA, 75 bp, synthetic construct
  source 1..75: mol_type = other DNA
tgaatgatttgctcgacggtgagaaaagttattccacggcagagagcgccgaccagcgaatccgcgaaatattgc

SEQ ID NO: 882458 - DNA, 75 bp, synthetic construct
  source 1..75: mol_type = other DNA
cagcttaaaggtatgcgtctgtcagaaatgcagacacatggtcagcgggtgaaatgcctggtcagcccctaccac

SEQ ID NO: 882459 - DNA, 75 bp, synthetic construct
  source 1..75: mol_type = other DNA
tgtccgccaggggcgcaacaatgctccggatgaacaggtagagacgctggtgtggaacgagtggcagaagtcggg

SEQ ID NO: 882460 - DNA, 75 bp, synthetic construct
  source 1..75: mol_type = other DNA
cattggttgatgccctggcgaataataaggggcgaagaaaattatgcctcccgcttcatcgggctgatgtgtgaa

SEQ ID NO: 882461 - DNA, 75 bp, synthetic construct
  source 1..75: mol_type = other DNA
tgcctggcacgcctcatgtcggtatcgatgagtgggcatggcatcgaggccatcgtgacggcacgttaatagtca

SEQ ID NO: 882462 - DNA, 75 bp, synthetic construct
  source 1..75: mol_type = other DNA
atgtcattagtgcgttctcaacaatgcacagtctggtcatcggacagatcaggacggatgagaaatccaatgaaa

SEQ ID NO: 882463 - DNA, 75 bp, synthetic construct
  source 1..75: mol_type = other DNA
catttcaattcaattcaattcaattcaattcaattcaattcaattcaattcaattcaattcaattcaattcaatt

SEQ ID NO: 882464 - DNA, 75 bp, synthetic construct
  source 1..75: mol_type = other DNA
aaatgaacatctacgccaaactgtatccatcagacaagatgggctatgcacgaaaataacactcattgtagaaga

SEQ ID NO: 882465 - DNA, 75 bp, synthetic construct
  source 1..75: mol_type = other DNA
gcgaagcggcgctggcacggttggtggcagtgattaaagaattaacaacagaacaaaaagcccgacgaccgacac

SEQ ID NO: 882466 - DNA, 75 bp, synthetic construct
  source 1..75: mol_type = other DNA
cattcgagcgtccagcctgccagagtattacaaagagcgcctgctcgctgccagccatcatctgattagcagcga

SEQ ID NO: 882467 - DNA, 75 bp, synthetic construct
  source 1..75: mol_type = other DNA
ggcccacccgtgcatcgaaagagcgcaggctggcatcgaaagcacaaaaatcaagcgtgaaggcgatgcgcggca

SEQ ID NO: 882468 - DNA, 75 bp, synthetic construct
  source 1..75: mol_type = other DNA
tatgggcgtaccgtctgcgacgagctgggcgttcttggcaagcccgccaataccaaagtcggcatcactattgat

SEQ ID NO: 882469 - DNA, 75 bp, synthetic construct
  source 1..75: mol_type = other DNA
tacctgtactcgacggatgccactgaaagaaaaaaaggcattgagcatcttattaataccgataaattgacgaga

SEQ ID NO: 882470 - DNA, 75 bp, synthetic construct
  source 1..75: mol_type = other DNA
aaacacggattatttttgatcagcaatatccagatagtctgattaagtggtcataccatatgagtgatctcaaaa

SEQ ID NO: 882471 - DNA, 75 bp, synthetic construct
  source 1..75: mol_type = other DNA
agtattagcaatgaacacgcagagaaatttatcagtcttttagtgttgggtgttttatattctattgaaaaaaag

SEQ ID NO: 882472 - DNA, 75 bp, synthetic construct
  source 1..75: mol_type = other DNA
agaaagtataactatgttcatggtgagtttcaatttaaaataagctactttaagcaaattgaagatataatatac

SEQ ID NO: 882473 - DNA, 75 bp, synthetic construct
  source 1..75: mol_type = other DNA
tcagtctacattattaaaatcctatccagaatataaagatattattttaaataaaacagaagttattcatccacc

SEQ ID NO: 882474 - DNA, 75 bp, synthetic construct
  source 1..75: mol_type = other DNA
agcattcacacagcagcgtgacctagttgcaaaagatttcgatagtgtgctttttaaggctctcacagcagcaga

SEQ ID NO: 882475 - DNA, 75 bp, synthetic construct
  source 1..75: mol_type = other DNA
cgagccaataaggtggcgacacaagggaaagatgcgctgcaggagctggaaagatggcaaggcgctgcctgtagc

SEQ ID NO: 882476 - DNA, 75 bp, synthetic construct
  source 1..75: mol_type = other DNA
acgtctggctcaggtctatgcgctcgtgtcatcagcccatcggacagtatccagctgtgaggcgtcgatttatct

SEQ ID NO: 882477 - DNA, 75 bp, synthetic construct
  source 1..75: mol_type = other DNA
tttatcgcccaaagggagtaatcggcataccagaaacagaattcccccggttgtcctgtcataaaattaataata

SEQ ID NO: 882478 - DNA, 75 bp, synthetic construct
  source 1..75: mol_type = other DNA
gcgctcttgacggaacaaccacaatcaatactgatggtattgtagccggagcaaaaattaagaatgatggcgatt

SEQ ID NO: 882479 - DNA, 75 bp, synthetic construct
  source 1..75: mol_type = other DNA
gcaacagccagcgcgacattatccggaaaatggccgccattctcgtctgtgcggaaattgaagtcagagccattg

SEQ ID NO: 882480 - DNA, 75 bp, synthetic construct
  source 1..75: mol_type = other DNA
cagtatgatggatattcccgttggtcagcaaagcgttattataatggcgaaatttataatcaggaactcaccgaa

SEQ ID NO: 882481 - DNA, 75 bp, synthetic construct
  source 1..75: mol_type = other DNA
ctggtttgttactcagcattctggtaccggttgatgcgggtaaataccggaagggcggtagcgtgccatcgcaaa

SEQ ID NO: 882482 - DNA, 75 bp, synthetic construct
  source 1..75: mol_type = other DNA
gaagcgaacggcatcaaaaatgcgcatgaaggcgcttgcggaactgaaaaccggcctggctccccgcaaaatgga

SEQ ID NO: 882483 - DNA, 75 bp, synthetic construct
  source 1..75: mol_type = other DNA
gggcggtatatcaccccggacccgattgggttgagaggtggatggaatatgtatcagtatccgttgaatcccata

SEQ ID NO: 882484 - DNA, 75 bp, synthetic construct
  source 1..75: mol_type = other DNA
agcttgaatccggaaacgatgttcgtctgattgaggtggacggttcttcctttgggctaacggacgttctccgct

SEQ ID NO: 882485 - DNA, 75 bp, synthetic construct
  source 1..75: mol_type = other DNA
tcaagatttatctaaagttcctagtatgctctatgaaaccatttctgttgatgtgccgtttagagaacgttatgt

SEQ ID NO: 882486 - DNA, 75 bp, synthetic construct
  source 1..75: mol_type = other DNA
gctatgggaattcaaggcgcaggaataaagtttggtgatccttattggcaccatggtagcactgtctgctttttt

SEQ ID NO: 882487 - DNA, 75 bp, synthetic construct
  source 1..75: mol_type = other DNA
actatagacacgttaatgattcagattcagtaacaagcattccaccggagttagagttagataataaactctatg

SEQ ID NO: 882488 - DNA, 75 bp, synthetic construct
  source 1..75: mol_type = other DNA
cgaatctggatatccgcatcccgtatgccacggacccggcgggcaaccgcctgcccgacccggagctgcacccgg

SEQ ID NO: 882489 - DNA, 75 bp, synthetic construct
  source 1..75: mol_type = other DNA
gacagacatcagccatatcagcgaagggcaccgggtggcggtgcattacaggtatgatgagaaaggccggctgac

SEQ ID NO: 882490 - DNA, 75 bp, synthetic construct
  source 1..75: mol_type = other DNA
tccatttcttctcatattcattggtggtgcgataggcggtttcgtaggtatagttggggcaatgattaatgccag

SEQ ID NO: 882491 - DNA, 75 bp, synthetic construct
  source 1..75: mol_type = other DNA
atagtctattggctgagttgcttggattgattcatccgagtgaggatttttcgggtgacgatttggctttatatt

SEQ ID NO: 882492 - DNA, 75 bp, synthetic construct
  source 1..75: mol_type = other DNA
agttaatataatgaaggttaagtataatataaataagaataataatttccccatgttatttaactcatctcattt

SEQ ID NO: 882493 - DNA, 75 bp, synthetic construct
  source 1..75: mol_type = other DNA
ttgttgagttcacactatccagccctatggatctgcaggggctgatgatacctacccgccagcttcattctctgt

SEQ ID NO: 882494 - DNA, 75 bp, synthetic construct
  source 1..75: mol_type = other DNA
ggtttacgcctaaaggcagtctgctttcgacactgaccttcgaaaatggcgaagtcgcccgctcaaaacgagaga

SEQ ID NO: 882495 - DNA, 75 bp, synthetic construct
  source 1..75: mol_type = other DNA
cagctctacaatgaattccacgcattatatatagataaagcaggaatatggagcgcatttgagggtgtatttgca

SEQ ID NO: 882496 - DNA, 75 bp, synthetic construct
  source 1..75: mol_type = other DNA
attgatgtagcgatagatattaaacaccggcaccgtaacaaagtttctttaacttttgatgaagtgaaagcactt

SEQ ID NO: 882497 - DNA, 75 bp, synthetic construct
  source 1..75: mol_type = other DNA
ctcccgccagggcaaatccagcctgggaatttgggagcgtcctgtttcaacatggtcagaagccgagattcagga

SEQ ID NO: 882498 - DNA, 75 bp, synthetic construct
  source 1..75: mol_type = other DNA
gctgctggatgtctgggcgggctggagtaatgagaaggtccgcagcgcaatgctggggcgcttttttatccggct

SEQ ID NO: 882499 - DNA, 75 bp, synthetic construct
  source 1..75: mol_type = other DNA
attgccgtactggctgccagagccgttggctatgagggaaatgcgcatgtcaccatcgccgctctgatcgagttt

SEQ ID NO: 882500 - DNA, 75 bp, synthetic construct
  source 1..75: mol_type = other DNA
aatatcaatattcctgggcgtagcgctcttcttttagggaaaacaggagaaccgctgaactatctctatttgtaa

SEQ ID NO: 882501 - DNA, 75 bp, synthetic construct
  source 1..75: mol_type = other DNA
tggtttcgattgtaactccgatatataactctgctaagtgggttaagcatttaattaaagtagttcaagaacaaa

SEQ ID NO: 882502 - DNA, 75 bp, synthetic construct
  source 1..75: mol_type = other DNA
tactttgaatttcataacaacaatccaatcagtagttggactagtggctttgatgatgggaaacttatattttca

SEQ ID NO: 882503 - DNA, 75 bp, synthetic construct
  source 1..75: mol_type = other DNA
aggccccttcttttgatccggcaggttcgtttctggacagtacctgttatgacaacgggatagttacccgaaccc

SEQ ID NO: 882504 - DNA, 75 bp, synthetic construct
  source 1..75: mol_type = other DNA
caacgttaaaatcgggttcgccggatgacgagtctacggagcttggacctttaagctcgctggcgcatctcgaac

SEQ ID NO: 882505 - DNA, 75 bp, synthetic construct
  source 1..75: mol_type = other DNA
gattggtttttaacgccgcaggggcagagtctggtggaagatgtgggttatgtaccgatatacccggtgttgaaa

SEQ ID NO: 882506 - DNA, 75 bp, synthetic construct
  source 1..75: mol_type = other DNA
ttcttccacaactatcaggcactgttggcaaagggcagcggtccctatttctatctgccgaaaacccagtcctag

SEQ ID NO: 882507 - DNA, 75 bp, synthetic construct
  source 1..75: mol_type = other DNA
acgacgtgaagcgcggtttgcgaaacggcgttgctccttacataccggcggccttttgccgggatgccaggagcg

SEQ ID NO: 882508 - DNA, 75 bp, synthetic construct
  source 1..75: mol_type = other DNA
acgacgtgaagcgcggtttgcgaaacggcgttgctccttacataccggcggccttttgcagggatgcccggagcg

SEQ ID NO: 882509 - DNA, 75 bp, synthetic construct
  source 1..75: mol_type = other DNA
acgacgtgaagcgcggtttgcgaaacggcgttgctccttacatacccgcggccttttgctgggatgcctggagcg

SEQ ID NO: 882510 - DNA, 75 bp, synthetic construct
  source 1..75: mol_type = other DNA
acgctaatcttttttatgatgtgacaaattattgcgttgatcttgaaaacatctcaaatgaaatactggaaatat

SEQ ID NO: 882511 - DNA, 75 bp, synthetic construct
  source 1..75: mol_type = other DNA
gaacagcttttgcataagtggccaacggaagtaagttcagctgacacttcttcatatgagaatgattatcaccgt

SEQ ID NO: 882512 - DNA, 75 bp, synthetic construct
  source 1..75: mol_type = other DNA
gccttttgccgggatgcccggagcgcaggccacggcgcgacagaggcggcgcgaccggaacggtcgctgcaagcc

SEQ ID NO: 882513 - DNA, 75 bp, synthetic construct
  source 1..75: mol_type = other DNA
ggatatgggcacaggtagcgcgttctcactgcttccggcgcaaaacgccaccggtaactggatcaaagtcgttca

SEQ ID NO: 882514 - DNA, 75 bp, synthetic construct
  source 1..75: mol_type = other DNA
gtacgtttgctcgaggttttgataatgtccgccagggggatgaactggatgtcccggcacaagttagtgaaaaaa

SEQ ID NO: 882515 - DNA, 75 bp, synthetic construct
  source 1..75: mol_type = other DNA
cttgaacttcagtccagaggaagtttttcacttgatgcagaagataatgataattactatcttaccaagggattt

SEQ ID NO: 882516 - DNA, 75 bp, synthetic construct
  source 1..75: mol_type = other DNA
acgacgtgaagcgcggtttgcgaaacggcgttgctccttacataccagcggccttttgcggggatgccgggagcg

SEQ ID NO: 882517 - DNA, 75 bp, synthetic construct
  source 1..75: mol_type = other DNA
gcaaaagatgactcccgcagccaaataggggggcgtttagggatttatttaacccgtgacttacccctgctggaa

SEQ ID NO: 882518 - DNA, 75 bp, synthetic construct
  source 1..75: mol_type = other DNA
ggtagtgatttatctggacatacagagcaaaggaggctggtcattggatgcggaggataatgataactattactt

SEQ ID NO: 882519 - DNA, 75 bp, synthetic construct
  source 1..75: mol_type = other DNA
ccggccaactggcggccacggaacacatggcaatggataataccatcaaagccaacctgcatacttttgacgatc

SEQ ID NO: 882520 - DNA, 75 bp, synthetic construct
  source 1..75: mol_type = other DNA
ggtatttgggttatcaccgtgcagccatctatgcgatgaaacactctgttatgcctgagatcgccaaattaagaa

SEQ ID NO: 882521 - DNA, 75 bp, synthetic construct
  source 1..75: mol_type = other DNA
gatgctcgacgatcctgaaatgcgtgagatggcgcaggatgaactgcgcgaagctaaagaaaaaagcgagcaact

SEQ ID NO: 882522 - DNA, 75 bp, synthetic construct
  source 1..75: mol_type = other DNA
cctggaactatacggactcgatcaagcgctcattgggcaaccatcatgatgataacaatgatgatttcggcaaag

SEQ ID NO: 882523 - DNA, 75 bp, synthetic construct
  source 1..75: mol_type = other DNA
gtggcggcatctggcagtaccggacgttcctggttctatggaatttgatctcaacaaaaactggcaactggcgtg

SEQ ID NO: 882524 - DNA, 75 bp, synthetic construct
  source 1..75: mol_type = other DNA
agaaaactcaacgaagaactggcaagaacgctggccgtcgttaaccgaaaagcggcaattgtccgctatgtgcat

SEQ ID NO: 882525 - DNA, 75 bp, synthetic construct
  source 1..75: mol_type = other DNA
agcgtcagcagttcgacgccgttatgcgccagcgcacgccagccatgacactgagaggcgtagccacaagaccac

SEQ ID NO: 882526 - DNA, 75 bp, synthetic construct
  source 1..75: mol_type = other DNA
agtcatccttaaatcaggtaatgaaaaagaaaaatattttacaaagtctgatcttagtcattttcttaaaagtga

SEQ ID NO: 882527 - DNA, 75 bp, synthetic construct
  source 1..75: mol_type = other DNA
agcctgtatggaataataaccccctcttctgcccaaaagcataacccgctaaatcctttcctttccgggcatctt

SEQ ID NO: 882528 - DNA, 75 bp, synthetic construct
  source 1..75: mol_type = other DNA
aaattcttaggcaacgttgagcctgatggatcagtattcagcaaatatcaattactggaggaggatggcacctcg

SEQ ID NO: 882529 - DNA, 75 bp, synthetic construct
  source 1..75: mol_type = other DNA
accaataatgtttggcgcgatggcaaccgcctctctcgaaacgggcacagtcaccgggattctcgatcagattta

SEQ ID NO: 882530 - DNA, 75 bp, synthetic construct
  source 1..75: mol_type = other DNA
caccgacgtactatcccccctcgtcatcagacataataaagaaaaaaaccagacgacttactacccttcgcaaaa

SEQ ID NO: 882531 - DNA, 75 bp, synthetic construct
  source 1..75: mol_type = other DNA
gagtagagtttctgtctgccaaagaaatatcatttattaaatcgaatttgacagctgttatgggtgatgctgcca

SEQ ID NO: 882532 - DNA, 75 bp, synthetic construct
  source 1..75: mol_type = other DNA
gaggggcgcggcacctggtactgcaatcagtgtggtgccggtgacggcctgaaactggttgaaaaggtgtttggt

SEQ ID NO: 882533 - DNA, 75 bp, synthetic construct
  source 1..75: mol_type = other DNA
gatgcagccaaaacacaacaggaagaactcgaagctggtaaagaagcggtcgcagccggaattacgttgtttggt

SEQ ID NO: 882534 - DNA, 75 bp, synthetic construct
  source 1..75: mol_type = other DNA
aatttaccgcaaactgtcgaaaattttcgtattgcctgattgtgcaagatatcctgcgttcagattaccttcgaa

SEQ ID NO: 882535 - DNA, 75 bp, synthetic construct
  source 1..75: mol_type = other DNA
ctatatactatgaacaaaattatatacatcctgtcgggagcatttttgctgcgattcaaaaaaatgagagtctcc

SEQ ID NO: 882536 - DNA, 75 bp, synthetic construct
  source 1..75: mol_type = other DNA
cccttcaaaagggagacgggaaaattgctactggtaaaatagaaacattcctgaatgtcacaatggaacatatgt

SEQ ID NO: 882537 - DNA, 75 bp, synthetic construct
  source 1..75: mol_type = other DNA
aaaaaaatgagagtctcctaaagtttccttcggtaatatcaatgcttaatgtcaatcttctttttaatccactga

SEQ ID NO: 882538 - DNA, 75 bp, synthetic construct
  source 1..75: mol_type = other DNA
gggaaattccaccagtgttaccggacagcagggaaggcgatgtcagggagttggatcgtctgttgatgacgacag

SEQ ID NO: 882539 - DNA, 75 bp, synthetic construct
  source 1..75: mol_type = other DNA
ggtaatgcggttaagttccagagcagcacgatgctgtcttttcgccgtagctaccgcaccagcaatctcttgagc

SEQ ID NO: 882540 - DNA, 75 bp, synthetic construct
  source 1..75: mol_type = other DNA
tcaaacattgctgacgatgctaagccatctgcctgggttccgacatattcaaacccagcaagccactcttcaggc

SEQ ID NO: 882541 - DNA, 75 bp, synthetic construct
  source 1..75: mol_type = other DNA
gaaattgaactggcggcattatgcgatagctcgcgtaacaccctacgtgaggcattgcgttttctgcatggcgaa

SEQ ID NO: 882542 - DNA, 75 bp, synthetic construct
  source 1..75: mol_type = other DNA
tccctacagccgtatcgcaagcgaccatcgaaaaatggttgaaaggactggaacagacaacggaattagcctttt

SEQ ID NO: 882543 - DNA, 75 bp, synthetic construct
  source 1..75: mol_type = other DNA
cttgccagcggcgaagtggcgcagattagccttgatagcggcgcgacctggacaacgctcaccaccaacggtaca

SEQ ID NO: 882544 - DNA, 75 bp, synthetic construct
  source 1..75: mol_type = other DNA
aacggcaaagccagctacgtcaacggcgtggcaacgctggatgcgcaggccggaaacatcggtgactttgtcaaa

SEQ ID NO: 882545 - DNA, 75 bp, synthetic construct
  source 1..75: mol_type = other DNA
cgctgggggcgacgctttctgccggtgagttcgcgcaaatcagcctcgacggcggcgtcacctggactacgttaa

SEQ ID NO: 882546 - DNA, 75 bp, synthetic construct
  source 1..75: mol_type = other DNA
tgtcacatccctgctataaggtccagctgagcaacggtgagctgagaccgttttcggttgaaaaggcaatagacg

SEQ ID NO: 882547 - DNA, 75 bp, synthetic construct
  source 1..75: mol_type = other DNA
gaggcaccggataaagccagcgcggccattacctgctgtatcattcggagtatctggcgcgatctgatgaagcgc

SEQ ID NO: 882548 - DNA, 75 bp, synthetic construct
  source 1..75: mol_type = other DNA
gaagatggtgtactggagggtaaacaacttacgccacgccgtctgcacaccatctttgaaaccaatatgcaggcg

SEQ ID NO: 882549 - DNA, 75 bp, synthetic construct
  source 1..75: mol_type = other DNA
ccacccaatctgcgcctacatttaaccaaaaagaagttgaaaagattcttacttctcttgagcaaactgaagaat

SEQ ID NO: 882550 - DNA, 75 bp, synthetic construct
  source 1..75: mol_type = other DNA
tgacgatcgtctcagttaccaggctgtttcctcaatagccgtcggcgaaaagaatggctggttccagcttaatct

SEQ ID NO: 882551 - DNA, 75 bp, synthetic construct
  source 1..75: mol_type = other DNA
atgctgttcttcgttgcagaacagaccccaattatgatgcccgttatcgcgaggttgtatctaaaactcagaacg

SEQ ID NO: 882552 - DNA, 75 bp, synthetic construct
  source 1..75: mol_type = other DNA
acggcaataacgccaatattagcaacggcacggtgacggttaacgcggcgattgattacacaccgacctggacta

SEQ ID NO: 882553 - DNA, 75 bp, synthetic construct
  source 1..75: mol_type = other DNA
tggcggcgcagaaagcagcggatgcatattggggaaaagatgcaaacggtaagcaaatgacccgcgaagaagcct

SEQ ID NO: 882554 - DNA, 75 bp, synthetic construct
  source 1..75: mol_type = other DNA
tgaaggccacactctatgacaacggtggcctaggtctggatcttaagcgcgattgcaaatggttacaaatggttg

SEQ ID NO: 882555 - DNA, 75 bp, synthetic construct
  source 1..75: mol_type = other DNA
taacgactacgccgggaccctgaccggcggacgcatcctgtccatcgatgctgccagccgcacactgacgctgga

SEQ ID NO: 882556 - DNA, 75 bp, synthetic construct
  source 1..75: mol_type = other DNA
ccggcggacgtgtcctgtccatcgatgccgccagccgtaccctgacgctggaccgggaggtgacactgccggaga

SEQ ID NO: 882557 - DNA, 75 bp, synthetic construct
  source 1..75: mol_type = other DNA
caaagttaaaggggataagccagtactgcatcctggtgctaaaaatcatttacctgtcgagggaaaacaggaaac

SEQ ID NO: 882558 - DNA, 75 bp, synthetic construct
  source 1..75: mol_type = other DNA
tttttttcccttcggaaacacagttgctcccggtaacgaatagagggagaacttatgatgtgcctcgaaaacact

SEQ ID NO: 882559 - DNA, 75 bp, synthetic construct
  source 1..75: mol_type = other DNA
tgacctggataggcaaaaacgagcgcaaaaagttagagccgcgcattttgttagaagacccgagcaagtcttatc

SEQ ID NO: 882560 - DNA, 75 bp, synthetic construct
  source 1..75: mol_type = other DNA
atgacctctaacaccagtatcgataacgaagggcacattacacaaaacctgggtttaacggagacactactcgat

SEQ ID NO: 882561 - DNA, 75 bp, synthetic construct
  source 1..75: mol_type = other DNA
cgcaaacccgaacgggctggaatctcaatggctttgaggtggggttcaggccatgcgtcaggctgatgatttacg

SEQ ID NO: 882562 - DNA, 75 bp, synthetic construct
  source 1..75: mol_type = other DNA
aatgacgtgcgcctgatgcgcgagctggatggccggagccatcgtgaaatctgcgagcttttccagtgggccagc

SEQ ID NO: 882563 - DNA, 75 bp, synthetic construct
  source 1..75: mol_type = other DNA
aagtgttaccgaaaacgggaaaaaccttcccggaaacggtagacacccaagactataacaagaacaatattaaaa

SEQ ID NO: 882564 - DNA, 75 bp, synthetic construct
  source 1..75: mol_type = other DNA
tggtggctgatattcaggacgatcgtgaaagtgtgaaacggaagcttgaaaaagggattgagttctttctggata

SEQ ID NO: 882565 - DNA, 75 bp, synthetic construct
  source 1..75: mol_type = other DNA
tctggcactctccgtgctggcagaaatcgcctctgtacgtctccatcatgaggaggattcatgcctgccccccgt

SEQ ID NO: 882566 - DNA, 75 bp, synthetic construct
  source 1..75: mol_type = other DNA
ttccggcctcagccagcgctcagatcgataccgatacggcggtcattttgctgtgccatgatctcaaccgggagc

SEQ ID NO: 882567 - DNA, 75 bp, synthetic construct
  source 1..75: mol_type = other DNA
agctgaaatgaacatggaactgttggttttgctctcagatgatagttatcggaacagcccttttacatcctggtt

SEQ ID NO: 882568 - DNA, 75 bp, synthetic construct
  source 1..75: mol_type = other DNA
ttgaaatttgcggccacggcttccgcacaatggcctgtagttcgttaattgagtcagggctatggtcgaaggatg

SEQ ID NO: 882569 - DNA, 75 bp, synthetic construct
  source 1..75: mol_type = other DNA
cgggttatgggttatgacactaaagttgaaatttgcggccacggcttccgcacaatggcctgtagttcgttaatt

SEQ ID NO: 882570 - DNA, 75 bp, synthetic construct
  source 1..75: mol_type = other DNA
atccgtaaagtctatggcaccgtaagcgactggcccatagcttcaacaactgaagttgctgctgcgatggatgaa

SEQ ID NO: 882571 - DNA, 75 bp, synthetic construct
  source 1..75: mol_type = other DNA
aaaatttcaagggattgaaaaatgtaagtttaaagaaaagcatggcaatggaaggccatactctcgtggggactg

SEQ ID NO: 882572 - DNA, 75 bp, synthetic construct
  source 1..75: mol_type = other DNA
aacagcctttgttttggcctactggatggcacaagacagatcggtttcgcccgtctggtgacagactttgccact

SEQ ID NO: 882573 - DNA, 75 bp, synthetic construct
  source 1..75: mol_type = other DNA
aattctccaggatttggtacaggtaaataaaaatattgatgccaaacgacaggatagcgagagtctgcctgactt

SEQ ID NO: 882574 - DNA, 75 bp, synthetic construct
  source 1..75: mol_type = other DNA
atgaaacagtaaccataatgttcgaggaggataagaactcattgctgaaaaccgataagtcagcatggctaaaga

SEQ ID NO: 882575 - DNA, 75 bp, synthetic construct
  source 1..75: mol_type = other DNA
attgatttagtagctatgattggttatatcgacgtaactaattataactatgtaactgatgagaaaacctattgg

SEQ ID NO: 882576 - DNA, 75 bp, synthetic construct
  source 1..75: mol_type = other DNA
tcgatcatgacgtctttgattactgggtaaataaagggtgtgacataaaccacagagattatggtggcaaagcgg

SEQ ID NO: 882577 - DNA, 75 bp, synthetic construct
  source 1..75: mol_type = other DNA
actttatagcgccactggatttaataatgaaaactatggatactataaacgttctggtgacggtttttatagaaa

SEQ ID NO: 882578 - DNA, 75 bp, synthetic construct
  source 1..75: mol_type = other DNA
tgtcatgggcagaaacacactataaagcacaaaatcatattgagaatcatattcaggattgtgaattactaggcc

SEQ ID NO: 882579 - DNA, 75 bp, synthetic construct
  source 1..75: mol_type = other DNA
gatgtaatacgtattggtatggaagcaattccagcagctgaatcgaaattcacacaaagatcatcaaatgccaaa

SEQ ID NO: 882580 - DNA, 75 bp, synthetic construct
  source 1..75: mol_type = other DNA
cgcagaacgcaaaattatcttcagtcagaagcagggtgtgatgaaaacggtcggtataaatactgacctttccgc

SEQ ID NO: 882581 - DNA, 75 bp, synthetic construct
  source 1..75: mol_type = other DNA
cgcacctagatgcaatttcgcgttatagtatagactcgtgggtaaaaacattatgttcgactcatatcagagaag

SEQ ID NO: 882582 - DNA, 75 bp, synthetic construct
  source 1..75: mol_type = other DNA
ctggtaatatggtaagcagagagtttatcaaaataagtattgatggaaaggtaataaagggaaattcaaaagtcg

SEQ ID NO: 882583 - DNA, 75 bp, synthetic construct
  source 1..75: mol_type = other DNA
gatggttctgtttttgatatctgtaatctgaagcttaaagttactaaacaaacacaagaacttatagagcatttt

SEQ ID NO: 882584 - DNA, 75 bp, synthetic construct
  source 1..75: mol_type = other DNA
aaatggtgacacgttcttctatgaaggtgaagtcaccatatcctcagatagcgcagctatcttccccttaactac

SEQ ID NO: 882585 - DNA, 75 bp, synthetic construct
  source 1..75: mol_type = other DNA
cagtaaagtaatcattgataaaaatgtcaccctgagattcgacagtgatctgtactcactgtttaaatcgttgca

SEQ ID NO: 882586 - DNA, 75 bp, synthetic construct
  source 1..75: mol_type = other DNA
gtacagggcagtttataagcgcagccatgcgtggcgagatcaaacgccgccaacggaaaaaaaccaaagaatcag

SEQ ID NO: 882587 - DNA, 75 bp, synthetic construct
  source 1..75: mol_type = other DNA
aggagccggaaaatccgccctaatcgaattagcaaaaagggaaacaaagaataatataatgattattaatggtga

SEQ ID NO: 882588 - DNA, 75 bp, synthetic construct
  source 1..75: mol_type = other DNA
aaacgggaaaaagcgcacggttccgatatcggaagaactggagaaagagatcaagaccagcgacaccgggccact

SEQ ID NO: 882589 - DNA, 75 bp, synthetic construct
  source 1..75: mol_type = other DNA
actctgaccggcgacgatcgacgcgtggcactgttatgcctaagcaccggcgcacgctggggcgaaggtagcacg

SEQ ID NO: 882590 - DNA, 75 bp, synthetic construct
  source 1..75: mol_type = other DNA
cagttacaatagagatgaatattccatcgcctgatggtaagagtacagaaaaattaggaccaataacgtatagtt

SEQ ID NO: 882591 - DNA, 75 bp, synthetic construct
  source 1..75: mol_type = other DNA
atgggtggtcgtatatcatctccgttttctgatgtttctgcaggtactaacagtgagtttatcaaaataaagata

SEQ ID NO: 882592 - DNA, 75 bp, synthetic construct
  source 1..75: mol_type = other DNA
tatttagttcacaagcggcaaccaattgcgatattgcaacgcttatacaaaatgaaatcagcggaagtgcacaag

SEQ ID NO: 882593 - DNA, 75 bp, synthetic construct
  source 1..75: mol_type = other DNA
acagttagatctcctgaaggctcaggggccgggtgatgcttacatcgttattatggttgccggaactaacgaagg

SEQ ID NO: 882594 - DNA, 75 bp, synthetic construct
  source 1..75: mol_type = other DNA
tcggcgaattatacactgatatcagcgcagaacagtggagcgctgataaaaatggttgttatcagcgaaggcact

SEQ ID NO: 882595 - DNA, 75 bp, synthetic construct
  source 1..75: mol_type = other DNA
cgcgtcaatgtacccttcacctggaaacgtagtttttctgaagtagtagatgaagatgggttactttggctggaa

SEQ ID NO: 882596 - DNA, 75 bp, synthetic construct
  source 1..75: mol_type = other DNA
atttttccctgatgcttaccggcaatggctggatagcatttacgatgatgcggaaatggatgagccagaatgggt

SEQ ID NO: 882597 - DNA, 75 bp, synthetic construct
  source 1..75: mol_type = other DNA
tttgaaaaagccaaaacagcactggcttccagcgtacgccagacccaccaactgatgattaacagcaagcagttg

SEQ ID NO: 882598 - DNA, 75 bp, synthetic construct
  source 1..75: mol_type = other DNA
gatcagaaacagctggagcaatacccactgcgcatcggtttgtccacgctggtgagcgtcaataccactaaccgt

SEQ ID NO: 882599 - DNA, 75 bp, synthetic construct
  source 1..75: mol_type = other DNA
caacggcaatcagtagccctcagagtaatggaatggcagaacggttcgtgaaaacgatgaaggaagactacattg

SEQ ID NO: 882600 - DNA, 75 bp, synthetic construct
  source 1..75: mol_type = other DNA
aaagggaaattatggagtcaaattctcgctgatgtctcgggattacccgtcaatattccggtggtcaaagaagcc

SEQ ID NO: 882601 - DNA, 75 bp, synthetic construct
  source 1..75: mol_type = other DNA
aacgtagtccaggcgtggcgcgatagtgttgcgacctacgggtatgtttacttctctaatcattcaaaaaatcag

SEQ ID NO: 882602 - DNA, 75 bp, synthetic construct
  source 1..75: mol_type = other DNA
taacagtacaggcaccgtcaagtttaactgccaattcaattaatattaaactggcagccacttcatttgcgaatg

SEQ ID NO: 882603 - DNA, 75 bp, synthetic construct
  source 1..75: mol_type = other DNA
atgtgccgtaaatttaatcatggtgcagccggtctgtattggtttaaccaggattcactttcagagcaatctctc

SEQ ID NO: 882604 - DNA, 75 bp, synthetic construct
  source 1..75: mol_type = other DNA
cgacgttgattttgattggttaattacccagcattgtcccgcagatttgcttttccaacgattgggccgtttaca

SEQ ID NO: 882605 - DNA, 75 bp, synthetic construct
  source 1..75: mol_type = other DNA
tgtgaaaagaggttcaaggctcgcaaggttctgcagtgggctgaagaatatagtttgcaggataacgatgaaacc

SEQ ID NO: 882606 - DNA, 75 bp, synthetic construct
  source 1..75: mol_type = other DNA
aaccgtaaaagtgatgtacaccggtgcaacagccctgccgaaagaccgtgaaagcgtctactggtttaacgtgct

SEQ ID NO: 882607 - DNA, 75 bp, synthetic construct
  source 1..75: mol_type = other DNA
atgtttcccttggttaaaaaaacggttagtgcattatttgtaagtactctgttagccagtgcgcctgcattcgct

SEQ ID NO: 882608 - DNA, 75 bp, synthetic construct
  source 1..75: mol_type = other DNA
aaagtgtgttctggtttaacgtgctggaagtccccccaaaaatcagcaacacccccactgacaacaacatgctgc

SEQ ID NO: 882609 - DNA, 75 bp, synthetic construct
  source 1..75: mol_type = other DNA
atatcccaactcataatcgcgctaatttactaaaaaaagctgtagaatctgtactaagacaaacatatccacatg

SEQ ID NO: 882610 - DNA, 75 bp, synthetic construct
  source 1..75: mol_type = other DNA
tatccgcctgccggatgcgctggcattcttcggcggtacgcgcttcgtaccaattatctcctcgctggtgatggc

SEQ ID NO: 882611 - DNA, 75 bp, synthetic construct
  source 1..75: mol_type = other DNA
tgcgtatggaaaacaaaggcagccgcccgctgctggtacaaacctggatcgataccgggagtgaaaacgcggatc

SEQ ID NO: 882612 - DNA, 75 bp, synthetic construct
  source 1..75: mol_type = other DNA
tgcaattggcattccgtacgcgtatcaaattattttatcgcccggaaggtttaaacggactgccatcagatgcac

SEQ ID NO: 882613 - DNA, 75 bp, synthetic construct
  source 1..75: mol_type = other DNA
caaagtgagttctgcaaaagttcacttctttgccattaatgattttggcggcgcgattgaaggcaatgcaactct

SEQ ID NO: 882614 - DNA, 75 bp, synthetic construct
  source 1..75: mol_type = other DNA
aaaacccgacgcggaaaaaatggctaaccaaagcatgttgcaattggccttccgtactcgcatcaaactgtttta

SEQ ID NO: 882615 - DNA, 75 bp, synthetic construct
  source 1..75: mol_type = other DNA
ataaaaagaggtcttctcgccggaattaaaggtgaaaaaattaccacggtagagaaaaaagaggcgccggatgtc

SEQ ID NO: 882616 - DNA, 75 bp, synthetic construct
  source 1..75: mol_type = other DNA
atccacttttcattcggccctttttccgcaccaccgccaacgcttgaaagcatcgtggcggacaaaacggctgaa

SEQ ID NO: 882617 - DNA, 75 bp, synthetic construct
  source 1..75: mol_type = other DNA
aggcatgagtggtaaagcaagttctgccaaagtgcatttcttcgccataaatgactttggtggtgcaattgaagg

SEQ ID NO: 882618 - DNA, 75 bp, synthetic construct
  source 1..75: mol_type = other DNA
tttggatgatgacgacgagtttacacctgaaaggataaaagcttttatagattttgcacatgcgaaacaaataaa

SEQ ID NO: 882619 - DNA, 75 bp, synthetic construct
  source 1..75: mol_type = other DNA
atgcaaacagtagatatatcgctagtggcaggcccagcagacgcctcgcagtccatccttaagaacaaccagtca

SEQ ID NO: 882620 - DNA, 75 bp, synthetic construct
  source 1..75: mol_type = other DNA
ctgtaataatcacagcgcccccaagatccggtggtgctatttaccaaacagctcctcctgaatcgcgttcggtgt

SEQ ID NO: 882621 - DNA, 75 bp, synthetic construct
  source 1..75: mol_type = other DNA
tgaattaatccttaatacattaaataagatggctgaaagctttggctttacggataaccctcgatacattgcgga

SEQ ID NO: 882622 - DNA, 75 bp, synthetic construct
  source 1..75: mol_type = other DNA
cctgtttgatgtcggcattatgttgattgcgggcgtagtgggctatttcatgcagaaagggggatatccggcgtc

SEQ ID NO: 882623 - DNA, 75 bp, synthetic construct
  source 1..75: mol_type = other DNA
atgctactagttcttggactgctctctttgaaagtcatcggtaatgtggtgaaaattcccggcaatattctcaca

SEQ ID NO: 882624 - DNA, 75 bp, synthetic construct
  source 1..75: mol_type = other DNA
accaaagccctggatatggtagaggagcggaaacgtgagtatcgtgcaaatggtatttcgtattatcgtccgtgg

SEQ ID NO: 882625 - DNA, 75 bp, synthetic construct
  source 1..75: mol_type = other DNA
aagatcattcaggtgtctggttggtgtttaacgttgatcattctggacggcagagtttagtgccccctgtgacat

SEQ ID NO: 882626 - DNA, 75 bp, synthetic construct
  source 1..75: mol_type = other DNA
tgtggactgtcgttgatgataacccacgtcagtctgcaagcgtgaaggttggcatacagattctgttgcttgatg

SEQ ID NO: 882627 - DNA, 75 bp, synthetic construct
  source 1..75: mol_type = other DNA
cgcgggtagacgactatattcgcccgtatcaggcgaactggttctggaatctctcgctaaaagactggcggcgct

SEQ ID NO: 882628 - DNA, 75 bp, synthetic construct
  source 1..75: mol_type = other DNA
cctggctggcgtggcactcagaaaactgggctcccccctctacatggaaagaaggtgttgccggggtcctgatgg

SEQ ID NO: 882629 - DNA, 75 bp, synthetic construct
  source 1..75: mol_type = other DNA
ggcactactagttttatctttaacggtggtttgccgactaatgttggtgaatcagaacttatgtctggtgatgag

SEQ ID NO: 882630 - DNA, 75 bp, synthetic construct
  source 1..75: mol_type = other DNA
atcttcaatggtggtcttccaattaatgtccctggctctgaattcctgaagggtgacagtgctgcatcacgtacg

SEQ ID NO: 882631 - DNA, 75 bp, synthetic construct
  source 1..75: mol_type = other DNA
agacgttactttgcgcatggaaaacaaaggcgcccgcccattattagtccagacctggattgataccggcagcga

SEQ ID NO: 882632 - DNA, 75 bp, synthetic construct
  source 1..75: mol_type = other DNA
cggccccgcatcttctggtctcgagcacaggtgatgtgatggggtatttcgtggcaaccgcctattcagataaca

SEQ ID NO: 882633 - DNA, 75 bp, synthetic construct
  source 1..75: mol_type = other DNA
ggatgcggtgggttcattaacggatgtcgcctcccgcgtcatgctgtcgtttggtgagtttgaattcagtattga

SEQ ID NO: 882634 - DNA, 75 bp, synthetic construct
  source 1..75: mol_type = other DNA
gatcgtctggtaacagctgctcttggcaccgctgtaactctggatgttgaaagtaacatcaatatcagcaacaac

SEQ ID NO: 882635 - DNA, 75 bp, synthetic construct
  source 1..75: mol_type = other DNA
ccgactcacattgcgatttgcctatactataaactcggggagactccattgcctttagttattgaaacaggaaaa

SEQ ID NO: 882636 - DNA, 75 bp, synthetic construct
  source 1..75: mol_type = other DNA
ttggattgtatgcttgttagtgcttgtgctgatttgttttctcaacgctataggaaagcattttattctaaaata

SEQ ID NO: 882637 - DNA, 75 bp, synthetic construct
  source 1..75: mol_type = other DNA
gacggaggcggtgaacacgctgtatgacctggcgaataaggctgagccgcaactgctggtcagcggagaaggtga

SEQ ID NO: 882638 - DNA, 75 bp, synthetic construct
  source 1..75: mol_type = other DNA
catgcacaggtgaaccgacagaagaaatgagaacgccagtggctcacgctgctggcaaatatggctggtttaaaa

SEQ ID NO: 882639 - DNA, 75 bp, synthetic construct
  source 1..75: mol_type = other DNA
aacgagcaacagtggaagggttagagaaaaggttactgtggaagcaccgggagcagttaagccctactcgccttg

SEQ ID NO: 882640 - DNA, 75 bp, synthetic construct
  source 1..75: mol_type = other DNA
aaaatacttctcagtggaatggttatccattacaaattggtcgttttcggaaagataaagcgatgccagctttaa

SEQ ID NO: 882641 - DNA, 75 bp, synthetic construct
  source 1..75: mol_type = other DNA
ccagacagttcgccgcttttgcgggtctgacaccacggcgttatgaatcaggtagcagtgtgagaggggcgagcc

SEQ ID NO: 882642 - DNA, 75 bp, synthetic construct
  source 1..75: mol_type = other DNA
agcgtcttgagaagcagataaaagacctgacagacgatgatccggatatgaaacaccgcaggaaactgctggaaa

SEQ ID NO: 882643 - DNA, 75 bp, synthetic construct
  source 1..75: mol_type = other DNA
ggatcaccctgaattaactattccagcgggttcttatcgtagcgctgccgactcaggtaactgggttcattccaa

SEQ ID NO: 882644 - DNA, 75 bp, synthetic construct
  source 1..75: mol_type = other DNA
cgggagatcccggaggacctccgggaccaaaaggtgacactggccccagaggggagccggggcctcagggcccgg

SEQ ID NO: 882645 - DNA, 75 bp, synthetic construct
  source 1..75: mol_type = other DNA
ggaaaggaggcccagctggatttattcgactctgctacgccttcagctggcagcgaggcgttaatggctgttctc

SEQ ID NO: 882646 - DNA, 75 bp, synthetic construct
  source 1..75: mol_type = other DNA
cgaaattacctcagtcttcaaagaaatgtacgatgcagacgtctctccggcgctgatatcgaaagtcaccgatgc

SEQ ID NO: 882647 - DNA, 75 bp, synthetic construct
  source 1..75: mol_type = other DNA
gcaggatatttcccgcgatttatgggatcagggtgataaacctgttccaccgctgcgccagttattctggcatca

SEQ ID NO: 882648 - DNA, 75 bp, synthetic construct
  source 1..75: mol_type = other DNA
tttacggcaacacctcccgtttcacgtattgatgctaaacgcggtcaaaccatcaaattgatgtataccggcagc

SEQ ID NO: 882649 - DNA, 75 bp, synthetic construct
  source 1..75: mol_type = other DNA
tgcagatgaaggcgcattacagaaatcgaggtctgttctaccgttcttcaagagacggttatggttttgaggaag

SEQ ID NO: 882650 - DNA, 75 bp, synthetic construct
  source 1..75: mol_type = other DNA
gcgtatgcaaaagcaggggtcatgctggcagattttagcgggaaggaggcccagcttgatttattcgactctgct

SEQ ID NO: 882651 - DNA, 75 bp, synthetic construct
  source 1..75: mol_type = other DNA
gccacttttggtggaggattactcttcgctagggaaaaataaaactctttcatcatatgattttttagctagcat

SEQ ID NO: 882652 - DNA, 75 bp, synthetic construct
  source 1..75: mol_type = other DNA
gctaccggccccagaggaccacaaggggaaaaaggggataaaggtgaccccggcccggcaggccctgccggtgag

SEQ ID NO: 882653 - DNA, 75 bp, synthetic construct
  source 1..75: mol_type = other DNA
aaaacagaagtcacctccagcacagtcgttttcccctctttttatggcggtgcgcagggggaaaatgcagcccct

SEQ ID NO: 882654 - DNA, 75 bp, synthetic construct
  source 1..75: mol_type = other DNA
tcaggagacgccggatgccagacgggaaaatatcgttatttcaccgggctttgcgcgcctggaccgcctgatccg

SEQ ID NO: 882655 - DNA, 75 bp, synthetic construct
  source 1..75: mol_type = other DNA
gatattcggcttctccgcgtttacctggctgatgggcacggcgacctctgttctggggctgaagtgcattcgtct

SEQ ID NO: 882656 - DNA, 75 bp, synthetic construct
  source 1..75: mol_type = other DNA
cctacataaacactaaaaaaaccaattatcgtttcgttgtgctggcactgatttttattgtctatgccattaact

SEQ ID NO: 882657 - DNA, 75 bp, synthetic construct
  source 1..75: mol_type = other DNA
gggggcggatatgaagacgctggcacaaatcagcgttcgtcagcctttgcctctgcaaggattacaattccgtga

SEQ ID NO: 882658 - DNA, 75 bp, synthetic construct
  source 1..75: mol_type = other DNA
aattccgtgaactgtttagctggttatccagttcattacgttcggtttcccgctccacgccgggaacggaagttg

SEQ ID NO: 882659 - DNA, 75 bp, synthetic construct
  source 1..75: mol_type = other DNA
aaaggctataagaaagcacaaagtgaagtagacaagattgctcaacagaaagctaaagccgaaaaacagaatcaa

SEQ ID NO: 882660 - DNA, 75 bp, synthetic construct
  source 1..75: mol_type = other DNA
tcattgaggatataaacacaccatgcaaaacgtcagaaatcgccatccgttttgacatgagtacttatcaggctc

SEQ ID NO: 882661 - DNA, 75 bp, synthetic construct
  source 1..75: mol_type = other DNA
ttattcaggaaataaagacaccatgcagaacgactgatattgcctcgcgttttgaaatgagtgcctatcaggccc

SEQ ID NO: 882662 - DNA, 75 bp, synthetic construct
  source 1..75: mol_type = other DNA
tgttgcttacaaaaattggaatatatacagaaggcgaaaattataattattcaccatttaagtatgttctttatt

SEQ ID NO: 882663 - DNA, 75 bp, synthetic construct
  source 1..75: mol_type = other DNA
taatctaaccgccgaaaaattgaaaacaccggaaatatcattgagtgtacagacttgcaagagacaaccaacgcc

SEQ ID NO: 882664 - DNA, 75 bp, synthetic construct
  source 1..75: mol_type = other DNA
acaggaaaagattcaggcaattgtccgcaacctggccagacaaaactgttccggagacagtaagaacatttgcag

SEQ ID NO: 882665 - DNA, 75 bp, synthetic construct
  source 1..75: mol_type = other DNA
atgtcatttctcttacccatccaactgttcaaaattcttgctgatgagacccgtctgggcatcgttttactgcta

SEQ ID NO: 882666 - DNA, 75 bp, synthetic construct
  source 1..75: mol_type = other DNA
ttgctcgtctgtatcacgagctatctctggagcaggttgctgagaaggttgaaaaaacacgccagtatgtacagc

SEQ ID NO: 882667 - DNA, 75 bp, synthetic construct
  source 1..75: mol_type = other DNA
cctgaacaatataagaaagatgaggttccaatagttaatactaagcagcatccctatttagataatgtcataaat

SEQ ID NO: 882668 - DNA, 75 bp, synthetic construct
  source 1..75: mol_type = other DNA
gttgttatcctattagtaaagtagctaaggtctgtggttatgccagtgtctcatactttacttatgtatttagac

SEQ ID NO: 882669 - DNA, 75 bp, synthetic construct
  source 1..75: mol_type = other DNA
aatgcccgtctgcccgtgcaggaaaaagaccgcgcgccggtggcgctgaaaggggccgcgctcacgcgccgcccc

SEQ ID NO: 882670 - DNA, 75 bp, synthetic construct
  source 1..75: mol_type = other DNA
atctgggtattaatgggatttatttttgtcctatttttacctcagcttccaaccataaatatgacaccatcgatc

SEQ ID NO: 882671 - DNA, 75 bp, synthetic construct
  source 1..75: mol_type = other DNA
gaattacaccctgggcggcaatctgaccaacaacggtacgctgatgaccggaatgtcaggacagcaagctggcaa

SEQ ID NO: 882672 - DNA, 75 bp, synthetic construct
  source 1..75: mol_type = other DNA
gaaagaccttaagctgctgctgggcaacagccagtggcgcatcatgtgcgcgttcaagatgatggcgacctgctc

SEQ ID NO: 882673 - DNA, 75 bp, synthetic construct
  source 1..75: mol_type = other DNA
tttatccatgcggaactggcgcgtggggaaattccgcctgtgttaccggatagtagagaaggggacgttaagaaa

SEQ ID NO: 882674 - DNA, 75 bp, synthetic construct
  source 1..75: mol_type = other DNA
gttaaaggaaattgaacgtcgctatggcgtgaaagtgctgtacgcctgcgaatcggggagtcgcggctggggatt

SEQ ID NO: 882675 - DNA, 75 bp, synthetic construct
  source 1..75: mol_type = other DNA
tgcctcgcccgacagcgactacgatgtacggtttttgtatgttcacccgctggaatggtatctgcgagtagagtc

SEQ ID NO: 882676 - DNA, 75 bp, synthetic construct
  source 1..75: mol_type = other DNA
tgatgcgcgatcttgcaagtatgggacaacttgtgaaattaccgacaagaagggaaagggccttcccgagagtgg

SEQ ID NO: 882677 - DNA, 75 bp, synthetic construct
  source 1..75: mol_type = other DNA
ttctgacgtggtggactacgaggagagccgcagcggtcgccgcctcgacgggctggtgttctccacctacctgtt

SEQ ID NO: 882678 - DNA, 75 bp, synthetic construct
  source 1..75: mol_type = other DNA
gctcacttaagcccggccagtgccgggttttttgatgtctatagcctgagtgcatgtctatactgcatgaaatcg

SEQ ID NO: 882679 - DNA, 75 bp, synthetic construct
  source 1..75: mol_type = other DNA
ctggcattgctgcgtgaaagcgggctattgctggatcgcaagcagggtaagtgggttcattaccgcttatcgccg

SEQ ID NO: 882680 - DNA, 75 bp, synthetic construct
  source 1..75: mol_type = other DNA
gcaaacagaaagaaaataaagaaaaggacgctaaagccaaattagataaggagagtaaacggaataagccaggga

SEQ ID NO: 882681 - DNA, 75 bp, synthetic construct
  source 1..75: mol_type = other DNA
gaacaggcccgcgcagaactgaatcaggctaataaagatgttgccagaaaccaggaacgacaggctaaagctgtt

SEQ ID NO: 882682 - DNA, 75 bp, synthetic construct
  source 1..75: mol_type = other DNA
tcagcactgtcaaaggccttccggtgtcaacaacccttccccgtggtattacggaggataaaggccggactgccg

SEQ ID NO: 882683 - DNA, 75 bp, synthetic construct
  source 1..75: mol_type = other DNA
cgcgccagcggggataaaccgcatccgttcaaattccatcagatagcaaaccagtgttccccgcgccagcgggga

SEQ ID NO: 882684 - DNA, 75 bp, synthetic construct
  source 1..75: mol_type = other DNA
taaatgtgttccccgcgccagcggggataaaccggcgtctcgagcgccggacgattcaaaaccagcgtgttcccc

SEQ ID NO: 882685 - DNA, 75 bp, synthetic construct
  source 1..75: mol_type = other DNA
ggccttatgtgttccccgcgtcagcggggataaaccggacatcattttcacagcgacgcaaacagccgtgtgttc

SEQ ID NO: 882686 - DNA, 75 bp, synthetic construct
  source 1..75: mol_type = other DNA
gatggcgggatcaaagattcgcccgttcattcacctgtggcatccaattacgcccgttctatttggaatggaata

SEQ ID NO: 882687 - DNA, 75 bp, synthetic construct
  source 1..75: mol_type = other DNA
cagttgagtattggtgattacccggctgtttctctttctcaggcgcgagaccgtaggcagcaattccgaacctgg

SEQ ID NO: 882688 - DNA, 75 bp, synthetic construct
  source 1..75: mol_type = other DNA
gaagctcctggtagctcagttaatgtaagtgtcagaattaatattgccaatggttatctgaaacttgggccagtg

SEQ ID NO: 882689 - DNA, 75 bp, synthetic construct
  source 1..75: mol_type = other DNA
atggctgccctgaaaggaccgtttaaatttggtctttggggggtggctttatatggtgtattgccatcacaaata

SEQ ID NO: 882690 - DNA, 75 bp, synthetic construct
  source 1..75: mol_type = other DNA
ctgacggttcaggatggagttcggaaaataacccatggggtggtggttccggtagtggtgttcactggggaggtg

SEQ ID NO: 882691 - DNA, 75 bp, synthetic construct
  source 1..75: mol_type = other DNA
gtggcaattgataagcaacaaggactttcatgcacaatcaccttcggtaaagagattgatgaaagtagaaattat

SEQ ID NO: 882692 - DNA, 75 bp, synthetic construct
  source 1..75: mol_type = other DNA
atcgtaaattatggatataacttatcaagtacaagagctatagctagggccgtatctcaagcagaaataaataag

SEQ ID NO: 882693 - DNA, 75 bp, synthetic construct
  source 1..75: mol_type = other DNA
ttagtctggcttgtccaggggtgggttgaagatgtaaaagaaaacaaaactaacatttttaatgttgtacctagc

SEQ ID NO: 882694 - DNA, 75 bp, synthetic construct
  source 1..75: mol_type = other DNA
gcgcgttttgccttcactgcgttacccggtggtgacctgcttgccagagatcggcatagttgacgacccgatggg

SEQ ID NO: 882695 - DNA, 75 bp, synthetic construct
  source 1..75: mol_type = other DNA
ctggaggggggtgggcagaaaggttcaggtgtgctggaggtactaccaccggcgttgtgcaactcggcatatcac

SEQ ID NO: 882696 - DNA, 75 bp, synthetic construct
  source 1..75: mol_type = other DNA
ccgtctgggcatcgttttactgctcagcgaactgggagagttatgcgtctgcgatctctgcactgctctcgacca

SEQ ID NO: 882697 - DNA, 75 bp, synthetic construct
  source 1..75: mol_type = other DNA
accaaagccctgaatatggttgaggagcgcaaacgtgagtatcgtgcaaatggtatttcgtattatcgcccgtgg

SEQ ID NO: 882698 - DNA, 75 bp, synthetic construct
  source 1..75: mol_type = other DNA
ctcgctgacctgtctgagcagcgctatctggctggcgcattactgatgggggtgccagtagatatatttatccag

SEQ ID NO: 882699 - DNA, 75 bp, synthetic construct
  source 1..75: mol_type = other DNA
ttgagcgacataatctgaatctgagacaacacctggcaaggccgggacggaagtcactgtcgttctcaaaatcgg

SEQ ID NO: 882700 - DNA, 75 bp, synthetic construct
  source 1..75: mol_type = other DNA
cctagatttgcaataaacactcatttaaaaaaatcgagcccactaaagaaattaattgaaagcactctaaggatt

SEQ ID NO: 882701 - DNA, 75 bp, synthetic construct
  source 1..75: mol_type = other DNA
tgcacttggttacgtatatttgatgtatgtcaaagagtactcattgatatatccttttataatcagttcgatata

SEQ ID NO: 882702 - DNA, 75 bp, synthetic construct
  source 1..75: mol_type = other DNA
catcagccttggagaggtggctgcactctgcgtaagcggagggttaacggtggacgacgcaaccgcattgattag

SEQ ID NO: 882703 - DNA, 75 bp, synthetic construct
  source 1..75: mol_type = other DNA
gctcaccattgaagacgctcagatccgtcagggtctggagatcatcagccagtgttttgctgaggcgaagcagta

SEQ ID NO: 882704 - DNA, 75 bp, synthetic construct
  source 1..75: mol_type = other DNA
gctcaccattgaagacgctcagatccgtcagggtctggagattatcggtcagtgttttgatgaggcgaagcagta

SEQ ID NO: 882705 - DNA, 75 bp, synthetic construct
  source 1..75: mol_type = other DNA
catacaatggaagtgattgtaagaggtaatcacgagacacttttttaccgtaatattattggagtttatataaaa

SEQ ID NO: 882706 - DNA, 75 bp, synthetic construct
  source 1..75: mol_type = other DNA
tggggcttattaccggcagttttctgaatgttgtgatccgacgctatccagttatgctccggcaacagatagctg

SEQ ID NO: 882707 - DNA, 75 bp, synthetic construct
  source 1..75: mol_type = other DNA
ttttgaattcaatgatccccattgaacgtaatggtgaagtcctcggttatatctgggccaatgaattaaccgaag

SEQ ID NO: 882708 - DNA, 75 bp, synthetic construct
  source 1..75: mol_type = other DNA
cctcgcgaaacggttttttcttcgtttcgctgaagtctgactatgaagaatcagaacgtggctggccttcagatg

SEQ ID NO: 882709 - DNA, 75 bp, synthetic construct
  source 1..75: mol_type = other DNA
cggggagcgtcacggtaagcgcagtcacgaccgctggtggaatgcaaacagtagatataacgctggtggcaggcc

SEQ ID NO: 882710 - DNA, 75 bp, synthetic construct
  source 1..75: mol_type = other DNA
cgtattccttatgagttgaaggaagacggcacgcttaaaatgacagaaaagaaagtcatgcggcaaaaactgaat

SEQ ID NO: 882711 - DNA, 75 bp, synthetic construct
  source 1..75: mol_type = other DNA
tctcgaaagagaacaaaaaacgttatacaaatcagcgtactttcgccaacttttctgcaagggatgcgattatga

SEQ ID NO: 882712 - DNA, 75 bp, synthetic construct
  source 1..75: mol_type = other DNA
ttctcaataaaaaaaaatgaaaatcatttttttatagaatatcccaaagcatttccttcgcatggtttattttca

SEQ ID NO: 882713 - DNA, 75 bp, synthetic construct
  source 1..75: mol_type = other DNA
accgtggcatgccagtaccgcggcgcaagaaatgccggtaatgagtaaagtcgaacaaatgcaggcaacgcccgc

SEQ ID NO: 882714 - DNA, 75 bp, synthetic construct
  source 1..75: mol_type = other DNA
tttatcaggaaaacataggcaaaccatattttaagggagttattaataatttaaaaaattatgcccaaatattat

SEQ ID NO: 882715 - DNA, 75 bp, synthetic construct
  source 1..75: mol_type = other DNA
cttaccgggccgacagggaaaaaatcctgagcaacacctttgccgatcggttgttcagtaccgaacgtgaaggtg

SEQ ID NO: 882716 - DNA, 75 bp, synthetic construct
  source 1..75: mol_type = other DNA
gaaaaggcgcggcgacacgattaaggatgaagcgcaccacgctgctgtcacgaatgcagcgtctggggatctcgg

SEQ ID NO: 882717 - DNA, 75 bp, synthetic construct
  source 1..75: mol_type = other DNA
tccactttataatgcactttcaggattaattgaagagaactttacattttatgttggcggggaaggaccttgtta

SEQ ID NO: 882718 - DNA, 75 bp, synthetic construct
  source 1..75: mol_type = other DNA
aaagtatacaaaagcaggtaatgactccaacttattgatagtgttttatgttcagataatgcccgatgactttgt

SEQ ID NO: 882719 - DNA, 75 bp, synthetic construct
  source 1..75: mol_type = other DNA
gcccccgatgctcacgaaaaagccagaacatctttcatggctgaactggaaaggcgtgcagaagaatttcagaac

SEQ ID NO: 882720 - DNA, 75 bp, synthetic construct
  source 1..75: mol_type = other DNA
atacaggtgatctgaagggcagtacgccttctatcatgacatttccgtatggtgaatcagatgataggtatacga

SEQ ID NO: 882721 - DNA, 75 bp, synthetic construct
  source 1..75: mol_type = other DNA
atgatgcagtggtggtcggattatctggacgtgagccgcgaggggtacgttgcgccgtatatttatgcgcggcgg

SEQ ID NO: 882722 - DNA, 75 bp, synthetic construct
  source 1..75: mol_type = other DNA
agaaccacgcgcaatccccggtacgacgatattaaaagttccattttctcccgcggactggatacggtgccaaag

SEQ ID NO: 882723 - DNA, 75 bp, synthetic construct
  source 1..75: mol_type = other DNA
atgtgggggcataatcgggggcatatcagtaaatcgcatataaaaataatcaataaattcaaagtgattacttat

SEQ ID NO: 882724 - DNA, 75 bp, synthetic construct
  source 1..75: mol_type = other DNA
gatggctggcgtggcgcatgaagtacgtaatccgctaacggctattcgtggttatgtacagatcttgcgccaaca

SEQ ID NO: 882725 - DNA, 75 bp, synthetic construct
  source 1..75: mol_type = other DNA
tgactgccatgaatgccggtgcggcccgttacagcaagacagggaatgtggcaggtgtggtcacagcagaggatg

SEQ ID NO: 882726 - DNA, 75 bp, synthetic construct
  source 1..75: mol_type = other DNA
gggtatttgcgccacgctgggactgccgctgcctgtttgtattattgctggtgttttagcaggcggattgtgcgg

SEQ ID NO: 882727 - DNA, 75 bp, synthetic construct
  source 1..75: mol_type = other DNA
aatcaggcttcatccgcgacatctacttccgtcaggacagacctggcgtcgctatttttcttgaatgtgactctg

SEQ ID NO: 882728 - DNA, 75 bp, synthetic construct
  source 1..75: mol_type = other DNA
gccatcctcgtaacagaggaaaaacttgagacgcgttctaatttcgtcgtgtcctcactcaaggatattaactat

SEQ ID NO: 882729 - DNA, 75 bp, synthetic construct
  source 1..75: mol_type = other DNA
tccttcaaatacttgagaaagagaaaaagattgttgccagtaaattaagtgagcgtcttaaggtttctgaagaca

SEQ ID NO: 882730 - DNA, 75 bp, synthetic construct
  source 1..75: mol_type = other DNA
tcagcggtagccggagcacagtctggtaaggcggggggcgaaggtagttggttcgtgaattggttggaattctgt

SEQ ID NO: 882731 - DNA, 75 bp, synthetic construct
  source 1..75: mol_type = other DNA
ccgttgtttaaatcattcccgaacgatccgtccgcgcgtcgtattggcggctatttgatgtggatgatggtcatt

SEQ ID NO: 882732 - DNA, 75 bp, synthetic construct
  source 1..75: mol_type = other DNA
ctgtatcatcaacaccattatatgaatcaatcgcagatagtgactggtattttggtaatgatacgctagaactgc

SEQ ID NO: 882733 - DNA, 75 bp, synthetic construct
  source 1..75: mol_type = other DNA
gacgacccgcgcgaactgattgagcagtgcgcgttttatcgcctgatcggtgagtttgacacccatttatccccc

SEQ ID NO: 882734 - DNA, 75 bp, synthetic construct
  source 1..75: mol_type = other DNA
atgagaaatacaggagtgtggcatgagttcaacgcagaaaccgccgacgtcacggcagacacgacgcagccactg

SEQ ID NO: 882735 - DNA, 75 bp, synthetic construct
  source 1..75: mol_type = other DNA
atgttctctcttctctggaatatgatacaccgccgagaaatcatcaccttaacctctgataatcgtcatataccg

SEQ ID NO: 882736 - DNA, 75 bp, synthetic construct
  source 1..75: mol_type = other DNA
tgaaagataacatctactatagaggcgacattgcccatgaatacggcgtcgaatttaaagatctcctcatgaact

SEQ ID NO: 882737 - DNA, 75 bp, synthetic construct
  source 1..75: mol_type = other DNA
gctctacaggaaggtgtttttactggtcttaatccgtggcagcttgcggaagatgaatcatcaccaatctggaag

SEQ ID NO: 882738 - DNA, 75 bp, synthetic construct
  source 1..75: mol_type = other DNA
gcaccccagcttcaaatacatcccctccgtaaaagaagaacgtttccgcgcgtttttaggcgtaccaattattca

SEQ ID NO: 882739 - DNA, 75 bp, synthetic construct
  source 1..75: mol_type = other DNA
taacggcgaactggaggcgattctcacaccacaaggaaccctggcagaacaactgcgcgcaggcggcgcgggtat

SEQ ID NO: 882740 - DNA, 75 bp, synthetic construct
  source 1..75: mol_type = other DNA
tgatgcggtcgggagaattccggtaccggcggacggcaaaagtatcacccccgatgatgtgcgtccgatgcttga

SEQ ID NO: 882741 - DNA, 75 bp, synthetic construct
  source 1..75: mol_type = other DNA
gtgtcgcctgccgtgatacagggggcaccggatatcacccgtgaaatccagcaggatattgcccggcgaatgagg

SEQ ID NO: 882742 - DNA, 75 bp, synthetic construct
  source 1..75: mol_type = other DNA
tttgttcaggagcggggacataaaatagccagttactaccgggagaacataagcggtacaaaactcgaccgccgg

SEQ ID NO: 882743 - DNA, 75 bp, synthetic construct
  source 1..75: mol_type = other DNA
tactcaaagaaatcgactcaattaacaaagtcattcagcaattgctcgatttttcacgcccacgccacagtcaat

SEQ ID NO: 882744 - DNA, 75 bp, synthetic construct
  source 1..75: mol_type = other DNA
cgaataatctctacatgataaatatgccgctatttattattgatgaactgcatctaaccgataaactggctgggg

SEQ ID NO: 882745 - DNA, 75 bp, synthetic construct
  source 1..75: mol_type = other DNA
ttcaaacagttgaaaaaagatgtacgcgccatagccagccagcagattgatcgtctggaacaggctatgtgccag

SEQ ID NO: 882746 - DNA, 75 bp, synthetic construct
  source 1..75: mol_type = other DNA
gcttatccgcgcctggccgggtgaatcccagcataaacgcgcggtttacgggctggatgtgttagccagtatcgg

SEQ ID NO: 882747 - DNA, 75 bp, synthetic construct
  source 1..75: mol_type = other DNA
atcctcccccactttctccgtgctcgacaacatcaccgctagcgagctgattaacgatattgaatcactgtttga

SEQ ID NO: 882748 - DNA, 75 bp, synthetic construct
  source 1..75: mol_type = other DNA
tgatgtggttgaagtcgggagcaccgaaaacacggcggatgataccgacactgcgccgaaaaaacggagtaaatc

SEQ ID NO: 882749 - DNA, 75 bp, synthetic construct
  source 1..75: mol_type = other DNA
aaaagctggacaccgtagcggcacttaaacaagtgccagcgggtaattacctgatctctgatctgggtatcttct

SEQ ID NO: 882750 - DNA, 75 bp, synthetic construct
  source 1..75: mol_type = other DNA
acctttacttactttttccatgctcgacgacatcaccgccagcgaactcattaacgacatcgaatcactttttga

SEQ ID NO: 882751 - DNA, 75 bp, synthetic construct
  source 1..75: mol_type = other DNA
agcgctatatcagaataatgtgggcgttactatcgccgcggatcaccctggtcgcgaagtaatgcgtacaaatac

SEQ ID NO: 882752 - DNA, 75 bp, synthetic construct
  source 1..75: mol_type = other DNA
tcctggtgtactccatgcctggtctttggcaactgatcattgcataacccaatctgctttcacgtttacggtgtt

SEQ ID NO: 882753 - DNA, 75 bp, synthetic construct
  source 1..75: mol_type = other DNA
cccgtgatgatagccgacgccgagcaggggtacatcatccagcaactggtggcggcgttgtatcaatccgcagaa

SEQ ID NO: 882754 - DNA, 75 bp, synthetic construct
  source 1..75: mol_type = other DNA
tattatttggcttgaagattctttgttctgaagagttccctggatttactttggaagactatgaggatcttgagt

SEQ ID NO: 882755 - DNA, 75 bp, synthetic construct
  source 1..75: mol_type = other DNA
atcgctatttcagacggtgtaggtaattcccgaaatccgctcattttaatccatgaaaccacacagtttgaaatt

SEQ ID NO: 882756 - DNA, 75 bp, synthetic construct
  source 1..75: mol_type = other DNA
ggaaataaatggactttcgattattcaggcagtcggcgatatcttgttttcaatcaagattatatctcaaataaa

SEQ ID NO: 882757 - DNA, 75 bp, synthetic construct
  source 1..75: mol_type = other DNA
aaatcctgaaacgttttcgtcaggcggtgctttctgctgcggtaaccggaaaattaacagaaagatggcgtagtg

SEQ ID NO: 882758 - DNA, 75 bp, synthetic construct
  source 1..75: mol_type = other DNA
tgcaggtcaactgctcaggcaatggacagcgcctggctcgtcagcctgcgtgtgccacaggcgcctcgatcaaac

SEQ ID NO: 882759 - DNA, 75 bp, synthetic construct
  source 1..75: mol_type = other DNA
atgtgctccgggcagccgcagatcaaacaccgatcctcacgttataaccgagcgcccgcagccccttgctcgtgc

SEQ ID NO: 882760 - DNA, 75 bp, synthetic construct
  source 1..75: mol_type = other DNA
ggtgaagaaaaatcagacccgcattaccggcatggacaaccagatcctggcgttgtatgccagagggatgactac

SEQ ID NO: 882761 - DNA, 75 bp, synthetic construct
  source 1..75: mol_type = other DNA
ggtaaagaaaaatcagacccgtattaccgggatagataaccagatcctctcgttgtatgccaaagggatgaccac

SEQ ID NO: 882762 - DNA, 75 bp, synthetic construct
  source 1..75: mol_type = other DNA
caatctgacgcaatccatcctggcaaaagcgttccgtggtgagctcaccgcccagtggcgggccgaaaacccgga

SEQ ID NO: 882763 - DNA, 75 bp, synthetic construct
  source 1..75: mol_type = other DNA
cgcgaatacgcgtgcaaatggtgaccattttctgacattaagtaacaccctggcggcaggtggtgcgatggatca

SEQ ID NO: 882764 - DNA, 75 bp, synthetic construct
  source 1..75: mol_type = other DNA
gatttaggcggcctgtcatcggtttatattcttgatgatggtgatggtatagattttaatcactttgatttgaac

SEQ ID NO: 882765 - DNA, 75 bp, synthetic construct
  source 1..75: mol_type = other DNA
gggaaaaaagaagtcgatggcggctgggagttagtaataaaaatggttatacaaaataaaaactccgttggaaca

SEQ ID NO: 882766 - DNA, 75 bp, synthetic construct
  source 1..75: mol_type = other DNA
atatgattggtgcaagtttcttcagtgcgaagataaattattatgttgggaatagtttactatctttacctgcgg

SEQ ID NO: 882767 - DNA, 75 bp, synthetic construct
  source 1..75: mol_type = other DNA
gatgacgcgcagcacgccatcacggtggcgcagacggatattgatgccaacaaagccgccatcaccgacacccgt

SEQ ID NO: 882768 - DNA, 75 bp, synthetic construct
  source 1..75: mol_type = other DNA
gattttgcaacggcctggcgtgatctaattatcttgtttagaaaagctccatataattattcagcaccaaatgat

SEQ ID NO: 882769 - DNA, 75 bp, synthetic construct
  source 1..75: mol_type = other DNA
tgtcagcggcaatgaaaatgattggcagcagccaggttgattataaggaagaagttgtccgacggctggtgagtc

SEQ ID NO: 882770 - DNA, 75 bp, synthetic construct
  source 1..75: mol_type = other DNA
ttccctttaaagcaagccacattgaggagtgggttctagaagccctacctgttttaacattcaataaagagcgat

SEQ ID NO: 882771 - DNA, 75 bp, synthetic construct
  source 1..75: mol_type = other DNA
ctcgtaggctgcggatcagttggcggagaagttgcagataagctggctgcatcaggtgtcggtcacatccatttg

SEQ ID NO: 882772 - DNA, 75 bp, synthetic construct
  source 1..75: mol_type = other DNA
aggaacgattgtttcatgattatttaattaaagaaaaaattaatgtcccagttattaacacatgggttgaagggt

SEQ ID NO: 882773 - DNA, 75 bp, synthetic construct
  source 1..75: mol_type = other DNA
ataattaagtgcatcagatattttgattttatatatttgtttaaatttacgcgtgattttattaattttatagtt

SEQ ID NO: 882774 - DNA, 75 bp, synthetic construct
  source 1..75: mol_type = other DNA
gacaagaaatcatgcaggatgtggagacgcctttcttccttactcctatacatcatcaactctgacagcacttat

SEQ ID NO: 882775 - DNA, 75 bp, synthetic construct
  source 1..75: mol_type = other DNA
ggagggcatgctgttcttgatataccagaaacacctggttgcttacgatgtgcatacgtagattccgacaatttt

SEQ ID NO: 882776 - DNA, 75 bp, synthetic construct
  source 1..75: mol_type = other DNA
agcagccgttggcgtcttagggctggcttactataaaggctctcaggagcaggacgaatttaataaatctcttat

SEQ ID NO: 882777 - DNA, 75 bp, synthetic construct
  source 1..75: mol_type = other DNA
atcatgttgccgctgattctggcgtttgcagcatatgagttgtcaaccctgatcacgctgacgtttgtggtattt

SEQ ID NO: 882778 - DNA, 75 bp, synthetic construct
  source 1..75: mol_type = other DNA
ttgagcgggaggtaccacacattcacccgtatattagaagttctgcctttgttcaataacgagtgtgatatctgc

SEQ ID NO: 882779 - DNA, 75 bp, synthetic construct
  source 1..75: mol_type = other DNA
agaagcagtaaaaactcgctatgcgcatctgaatgccaactggctggagatgaataatcggctcagcaagggcga

SEQ ID NO: 882780 - DNA, 75 bp, synthetic construct
  source 1..75: mol_type = other DNA
aggcgctggcgaagaaagcgggcggcagcttcaaaacggtgaatgaccatatccatattacaaacggttcagtga

SEQ ID NO: 882781 - DNA, 75 bp, synthetic construct
  source 1..75: mol_type = other DNA
ccgctaatcgaaagcatgaaagtgcgcggactatcgcagcgcaaaatggttgaaacgctaaatgcttcacggaca

SEQ ID NO: 882782 - DNA, 75 bp, synthetic construct
  source 1..75: mol_type = other DNA
caaaacgtcggtattggttatattccacatcatctggcattgccgttattgaacagcggtaaattgcttaaaaag

SEQ ID NO: 882783 - DNA, 75 bp, synthetic construct
  source 1..75: mol_type = other DNA
tccggcctgtattacaaccgccaccgctattatgacccgctgcaggggaggtatatcactcaggatccgattggg

SEQ ID NO: 882784 - DNA, 75 bp, synthetic construct
  source 1..75: mol_type = other DNA
gcgagacccaacaaaccgcctacgcccgatccaagtaaattgccggacatagcgaaacaattaagactgccatat

SEQ ID NO: 882785 - DNA, 75 bp, synthetic construct
  source 1..75: mol_type = other DNA
tgatgcctgccatggctcgccatcaggatcggcgcagacttttgatgctggcactggcgttacaactggttggtt

SEQ ID NO: 882786 - DNA, 75 bp, synthetic construct
  source 1..75: mol_type = other DNA
aattgcgccaggcgagcggaatgagctttagcgtggctgccctgttgaccgctcttccggtggtcaccatgggcg

SEQ ID NO: 882787 - DNA, 75 bp, synthetic construct
  source 1..75: mol_type = other DNA
cactccacccactggcagcgaagcggcatccattagaaaacagtgaattgcgtcattatccagcggtttgtatcc

SEQ ID NO: 882788 - DNA, 75 bp, synthetic construct
  source 1..75: mol_type = other DNA
ttagaaataaaacgccctggtagtggtatatcgccaagtcgatgggatgaagttgttggttctgttgcgaaaaaa

SEQ ID NO: 882789 - DNA, 75 bp, synthetic construct
  source 1..75: mol_type = other DNA
agttggattaacattgcgtgctttggaatctattttttattcaagaaaattaatatcgaacaatattgatttgat

SEQ ID NO: 882790 - DNA, 75 bp, synthetic construct
  source 1..75: mol_type = other DNA
atggtacgagaccagcattcctccatggcctggcgattaagggggttaaatgccacggtacccgaccagcttccc

SEQ ID NO: 882791 - DNA, 75 bp, synthetic construct
  source 1..75: mol_type = other DNA
tattcttacgcagccaaaagggcttcagcagacagagatactttgctatcaacatacaaaacgtaatgggaatgg

SEQ ID NO: 882792 - DNA, 75 bp, synthetic construct
  source 1..75: mol_type = other DNA
aattggctctgggtaacggctggaaaattccgactgatgttgagatgcaaaatagaaatattgtacgaaaaagta

SEQ ID NO: 882793 - DNA, 75 bp, synthetic construct
  source 1..75: mol_type = other DNA
agcgcagaaatggcagagtatcaaatcgaaaatacacaagtaaaagagagccagtttcagatgcttaagcgtttg

SEQ ID NO: 882794 - DNA, 75 bp, synthetic construct
  source 1..75: mol_type = other DNA
taatgctggcgctggtgttacaactggtggggttctgcggctttatctggctgccgctgcaattgccggtattgt

SEQ ID NO: 882795 - DNA, 75 bp, synthetic construct
  source 1..75: mol_type = other DNA
ttgaaaacacccgaacacaccaaagaacgagagcattcatactctggcataacatgctggcaaggtgctacatga

SEQ ID NO: 882796 - DNA, 75 bp, synthetic construct
  source 1..75: mol_type = other DNA
tggtggtcgacgaagccgcagccatacctgcgccgttgttgcatcaactggtatcgcgttttcctcgaacgttgt

SEQ ID NO: 882797 - DNA, 75 bp, synthetic construct
  source 1..75: mol_type = other DNA
aatttttcatatcggctatggaattttatttagagaaaaaaatcgaattcaataaaaacacaatacaaaggaaga

SEQ ID NO: 882798 - DNA, 75 bp, synthetic construct
  source 1..75: mol_type = other DNA
gaacgcagcggcaacagccaggttttctatctcaaatacagcaaagccgaagatctggtcgatgtgctgaagtag

SEQ ID NO: 882799 - DNA, 75 bp, synthetic construct
  source 1..75: mol_type = other DNA
gaaatctcaaattgtcgccgacgaacgcaccaacagtgtgattgtcagtggtgacccggccacgcgggacaaaat

SEQ ID NO: 882800 - DNA, 75 bp, synthetic construct
  source 1..75: mol_type = other DNA
agactcgcagaactttgctcatttgagaaagtttaatatttcgccagaaatgctgctggatgcctgcatcaatgt

SEQ ID NO: 882801 - DNA, 75 bp, synthetic construct
  source 1..75: mol_type = other DNA
gcgctcttgagcgcctgaagaaactcattccgccaggagttcagccgaagttcaccagcgcggaagagctgctgg

SEQ ID NO: 882802 - DNA, 75 bp, synthetic construct
  source 1..75: mol_type = other DNA
gctacgcgttcgcgagtgctacgacggtggtcaatccgaggcttcacttctggatgacctctgcaaagtcgatct

SEQ ID NO: 882803 - DNA, 75 bp, synthetic construct
  source 1..75: mol_type = other DNA
gcaacaggcctcgacacaatggaatgaggcactcaaaacccgcgcacagagtagcccgcagttgcgtggctggtt

SEQ ID NO: 882804 - DNA, 75 bp, synthetic construct
  source 1..75: mol_type = other DNA
gtagcccagaaggtggcaagctctgttaatcgttacggctctgagtggtccagcattcctaagcgtagctctagc

SEQ ID NO: 882805 - DNA, 75 bp, synthetic construct
  source 1..75: mol_type = other DNA
agacgtgcagccattccgtaaaatcggatcgccgctacaggccagcgtgctggatgctgtgactgctaaaagcct

SEQ ID NO: 882806 - DNA, 75 bp, synthetic construct
  source 1..75: mol_type = other DNA
tacactatgtgggacctacaaaaccctggcatgagtgggctgactatccggtgtcacgtagttttttgatcgcca

SEQ ID NO: 882807 - DNA, 75 bp, synthetic construct
  source 1..75: mol_type = other DNA
taccgagattgcacgtctcaaacgccagctggcagaacgggatgaagagctggctatcctccaaaggccgcgaca

SEQ ID NO: 882808 - DNA, 75 bp, synthetic construct
  source 1..75: mol_type = other DNA
agatgaagtgtgaataccagcaaatatcggatttaacaaatacgtataacattaatgcaaattacttaacgggtt

SEQ ID NO: 882809 - DNA, 75 bp, synthetic construct
  source 1..75: mol_type = other DNA
cttgcaactggtgctacaattggcgcagggtatgttatatatagagtgattcgatttataccttcacttgcacca

SEQ ID NO: 882810 - DNA, 75 bp, synthetic construct
  source 1..75: mol_type = other DNA
ataattcagatgtcactaatattgactgactttggttttaatcttagttctacagaatatatagcaagaaattgt

SEQ ID NO: 882811 - DNA, 75 bp, synthetic construct
  source 1..75: mol_type = other DNA
gaatgatggtgcattacaaaaaataataataaaacaagcattaaagaataatagcaaaggaagagtagaaatgtg

SEQ ID NO: 882812 - DNA, 75 bp, synthetic construct
  source 1..75: mol_type = other DNA
tcttctgaacgtgaactggagatgtctaccgagattgcacgtctcaaacgccagctggcagaacgggatgaagag

SEQ ID NO: 882813 - DNA, 75 bp, synthetic construct
  source 1..75: mol_type = other DNA
tgccggtcgataccgtcatgcgcgtggtgccgcaactcataaagaccggcaagtacatccgtccggcgctgggca

SEQ ID NO: 882814 - DNA, 75 bp, synthetic construct
  source 1..75: mol_type = other DNA
acagtctttgggcctgtaaacagttttcagaaaaaccagaagacgctggcgagacttcagcgacagttaagccgc

SEQ ID NO: 882815 - DNA, 75 bp, synthetic construct
  source 1..75: mol_type = other DNA
gtctttatcaccggcatcaaccatccccgcgatgaagacaacctgatccatttactgatggaaggcaaacagcgc

SEQ ID NO: 882816 - DNA, 75 bp, synthetic construct
  source 1..75: mol_type = other DNA
agcgcccgccggccgtgccggtcggcaccagtgccgacctcaaggtgggtcagaaggtgttcgctatcggcaacc

SEQ ID NO: 882817 - DNA, 75 bp, synthetic construct
  source 1..75: mol_type = other DNA
cgcacggtgacgccgcgcggcgacctggccgccgacgaaaaaaacaccatcgagctgttcgagaaatcgcgcggg

SEQ ID NO: 882818 - DNA, 75 bp, synthetic construct
  source 1..75: mol_type = other DNA
cgaactgttcgaaaaatcgcgcgcctcggtggtctacatcaccaccgcgcaattagtacgcggtgtctggacgcg

SEQ ID NO: 882819 - DNA, 75 bp, synthetic construct
  source 1..75: mol_type = other DNA
atattgacaatggtggtgttgttgaaatgagtgtcatattgaatggtggtgattgggcaataaatccatcggctg

SEQ ID NO: 882820 - DNA, 75 bp, synthetic construct
  source 1..75: mol_type = other DNA
gcgccgtcgtgacgggaccggcaggcgaggaaatcttctgtgatgaacatggccgcgtgcgggtgaaatttaact

SEQ ID NO: 882821 - DNA, 75 bp, synthetic construct
  source 1..75: mol_type = other DNA
ctggaaagaccagcacagtgaactacatcccattgttacaacaggagattttcgttgggaaatgagtcgtcttcc

SEQ ID NO: 882822 - DNA, 75 bp, synthetic construct
  source 1..75: mol_type = other DNA
ccgataaaaaaacagttcagtaaaggagcaaacatttataaattgcaggctcatctggctcaaaaaatagcaggg

SEQ ID NO: 882823 - DNA, 75 bp, synthetic construct
  source 1..75: mol_type = other DNA
tatatttatcggtgagaatggtcttggtaaaagtcaggcacttaatcattttgtaaaagcagcattacagttacg

SEQ ID NO: 882824 - DNA, 75 bp, synthetic construct
  source 1..75: mol_type = other DNA
agtatgaacgaaaatctaaactgttaaaagaagctttaaaaagtgatgtttttcaaaaatcattcatgcgtaatg

SEQ ID NO: 882825 - DNA, 75 bp, synthetic construct
  source 1..75: mol_type = other DNA
tttcagctggttgacgaacgcattacggggataaagccggcagcactaagttttgaagctgcagcgtcggttcct

SEQ ID NO: 882826 - DNA, 75 bp, synthetic construct
  source 1..75: mol_type = other DNA
cagcgggtttaatgaactgaagtttgacgatgcgacagggaaagaacaggtctacatccacgcgcagaagaacat

SEQ ID NO: 882827 - DNA, 75 bp, synthetic construct
  source 1..75: mol_type = other DNA
catgcgactgaatacatcatggcggcgcgaaaccatttcgggatcagcagggaagaggctgaaaatcttactatg

SEQ ID NO: 882828 - DNA, 75 bp, synthetic construct
  source 1..75: mol_type = other DNA
gcgtaatcagggtaagttctttgcagaagtgcatgaggatgcttttgataagctaacgatgctgatccagcaagt

SEQ ID NO: 882829 - DNA, 75 bp, synthetic construct
  source 1..75: mol_type = other DNA
gatatggatttctggtattgcagaaccgataaaaaaacagttcagtaaaggagcaaacatttataaattgcaggc

SEQ ID NO: 882830 - DNA, 75 bp, synthetic construct
  source 1..75: mol_type = other DNA
aagtgatttgcttccctgccgatgtcggcgatctctccttgcatgaagagatgctcgacgcggcgcaaaacctgt

SEQ ID NO: 882831 - DNA, 75 bp, synthetic construct
  source 1..75: mol_type = other DNA
cccgtcaaaccaggacagttcatgctggatccgtgtggcacaggcgtgggcaggcaccggctttggcaacctggc

SEQ ID NO: 882832 - DNA, 75 bp, synthetic construct
  source 1..75: mol_type = other DNA
gcgtttttgaaaaattacgttggtggtgaaattggaagtgaggaaatttacagtatctatggtatcgattttgag

SEQ ID NO: 882833 - DNA, 75 bp, synthetic construct
  source 1..75: mol_type = other DNA
gcaaacctggcgctgcgcagggcgaaaagtgatgttcagaagtgggagcgagtctgcgccgcgctgcgggagctg

SEQ ID NO: 882834 - DNA, 75 bp, synthetic construct
  source 1..75: mol_type = other DNA
gtgtgaagcttgtgaaccctacgatatcaaggacattgatgaatggtatgacagtgacgttaacttattaggcga

SEQ ID NO: 882835 - DNA, 75 bp, synthetic construct
  source 1..75: mol_type = other DNA
tacgccgttgcacgactgaaagatggcggagtccaatttgaagttatgagccgggcagacgttgagaaagttcgt

SEQ ID NO: 882836 - DNA, 75 bp, synthetic construct
  source 1..75: mol_type = other DNA
aacgagacatgtatgggtaagggaattttctgaagagggaaaatgccactttcatctcggtcttttttttaataa

SEQ ID NO: 882837 - DNA, 75 bp, synthetic construct
  source 1..75: mol_type = other DNA
caggcgattggtgttgaattgtttaaccgccaggtgacgccgctgcaactctcggaacaaggtaaaatattccat

SEQ ID NO: 882838 - DNA, 75 bp, synthetic construct
  source 1..75: mol_type = other DNA
gccgggcgaaaaaagtgcgtttggtgatgtggagaaggccgcgcgggtttacgcaattaacgagctgatgcccgt

SEQ ID NO: 882839 - DNA, 75 bp, synthetic construct
  source 1..75: mol_type = other DNA
cactaccagcgcctatgcgctttttgtgtggcagtgattatgttgcaggaatgcaaaatacagaagctgatgctg

SEQ ID NO: 882840 - DNA, 75 bp, synthetic construct
  source 1..75: mol_type = other DNA
agggtgggggatgtgtttgatgccagggcactgcgttacatgctcagggaacaacataccggctggtgtatcctt

SEQ ID NO: 882841 - DNA, 75 bp, synthetic construct
  source 1..75: mol_type = other DNA
tgattctgtttatgggaaatcgggaataatgttaatgaaattcggtaatgtttattatgataatcccagccatcc

SEQ ID NO: 882842 - DNA, 75 bp, synthetic construct
  source 1..75: mol_type = other DNA
caataaatcgttgtctggtaaaaacaaccttctgttagtcgacttcattgagaaaaatggaaacagcaacggact

SEQ ID NO: 882843 - DNA, 75 bp, synthetic construct
  source 1..75: mol_type = other DNA
ccaggttgaacaactgatgacgctggcggagaaatttgacgttgagtacgatggttggggcacttactttgaaga

SEQ ID NO: 882844 - DNA, 75 bp, synthetic construct
  source 1..75: mol_type = other DNA
gtaaagatgtctttaaaggaagtgaacaggcgataggtttcagtaatgtaacgccggtcattacaacccgggaaa

SEQ ID NO: 882845 - DNA, 75 bp, synthetic construct
  source 1..75: mol_type = other DNA
tacaaaaagctgcttaaccgactggattacttagcaaaattagatactaagctatacggtgatggtgacagaaat

SEQ ID NO: 882846 - DNA, 75 bp, synthetic construct
  source 1..75: mol_type = other DNA
attacaggaaataatcttaatctaatatatgatgatgtccatatccaaaacaaaccaatgctaaattatgctaat

SEQ ID NO: 882847 - DNA, 75 bp, synthetic construct
  source 1..75: mol_type = other DNA
gcagtatcagatagtgttggtaatgctctcaatccactaatttctatccacgagacgacgcaaatagaaatcaag

SEQ ID NO: 882848 - DNA, 75 bp, synthetic construct
  source 1..75: mol_type = other DNA
accaacaataaaagtaccagtgaaagctattacaagggcccgatcccaaaaggatctattgttgagtgggataac

SEQ ID NO: 882849 - DNA, 75 bp, synthetic construct
  source 1..75: mol_type = other DNA
atatgcaggaatggctgttgatggtaattacgtaagaatgtttgttgagacaggggtaatcggtttacttgcata

SEQ ID NO: 882850 - DNA, 75 bp, synthetic construct
  source 1..75: mol_type = other DNA
tatttttttaaaggtaggactggtgtgggttttttaaagaaaaaaccagttctattttttttattatatgtatca

SEQ ID NO: 882851 - DNA, 75 bp, synthetic construct
  source 1..75: mol_type = other DNA
gcgcagcataacggaggcttcatccgcttctccagtcatgaaacaacatggcgaacgagcgcagcgagtgaggga

SEQ ID NO: 882852 - DNA, 75 bp, synthetic construct
  source 1..75: mol_type = other DNA
agtgtctagattgatcaagaatgatcaattgcgtaaaggaatgatgggatttgcattgccagtaaactcattgct

SEQ ID NO: 882853 - DNA, 75 bp, synthetic construct
  source 1..75: mol_type = other DNA
aaattcagaatcgcgatgtacaaactctttttagatctttagaacgttcagaattaaagctggacgatgctgagt

SEQ ID NO: 882854 - DNA, 75 bp, synthetic construct
  source 1..75: mol_type = other DNA
tacgcaggactagtccatttccctaaaaattgccgctatatattagatgtgaatgactttaactttgaggggctt

SEQ ID NO: 882855 - DNA, 75 bp, synthetic construct
  source 1..75: mol_type = other DNA
ggccgatcccctccaaccgtcggggaagtgagttcaaaaatcaggaagagatcctctctcatttggggggagaat

SEQ ID NO: 882856 - DNA, 75 bp, synthetic construct
  source 1..75: mol_type = other DNA
aggcgagcaggctatacgttgtatggctgatggggaagttgttgcttatcgtgtctgcaaggattatctgacgct

SEQ ID NO: 882857 - DNA, 75 bp, synthetic construct
  source 1..75: mol_type = other DNA
taaagtttcaagagaatttaagctgaaggttattgaagtttgtgaacgactggaaataaatccagattatttgat

SEQ ID NO: 882858 - DNA, 75 bp, synthetic construct
  source 1..75: mol_type = other DNA
cccgatggcaaaggcattcggctggagctaatcggcttcaggggaaatgaaacaataccggatacgcttcattga

SEQ ID NO: 882859 - DNA, 75 bp, synthetic construct
  source 1..75: mol_type = other DNA
gcctgccgctggcccttatcagcaaggaagggacaacagaatggtgcgcagaatacgatgaatggggcaacctgc

SEQ ID NO: 882860 - DNA, 75 bp, synthetic construct
  source 1..75: mol_type = other DNA
catgagttacattttacggcacaatacgcaaaaacagctgttgatgtgggtactggcgaagttagttctgcgata

SEQ ID NO: 882861 - DNA, 75 bp, synthetic construct
  source 1..75: mol_type = other DNA
gtgaaatataaaaaagggataatgaactcatttgcaaatattatttgctttcttaatttatcagttctttccctt

SEQ ID NO: 882862 - DNA, 75 bp, synthetic construct
  source 1..75: mol_type = other DNA
ttcgattgacctttccatccgaacatgaaattttaagtaagcatatcttatattatctatcgtcacgagaaaaac

SEQ ID NO: 882863 - DNA, 75 bp, synthetic construct
  source 1..75: mol_type = other DNA
caatacagtggtatatttggtgcgcggaaaactacccagaatttgggttttcggagatttatgctcacgagttag

SEQ ID NO: 882864 - DNA, 75 bp, synthetic construct
  source 1..75: mol_type = other DNA
ccttctgactcatggaatgcgcgtttcgcatttcatcaactgacacacatgaatttaaatcagtacgcagtagga

SEQ ID NO: 882865 - DNA, 75 bp, synthetic construct
  source 1..75: mol_type = other DNA
tacccagacatcccgtatcggctccattggcgtgatgatgagccatgtcagctatgccggtcatctggcgcaggc

SEQ ID NO: 882866 - DNA, 75 bp, synthetic construct
  source 1..75: mol_type = other DNA
attcattaacaaagcctggtctggaattccggggacaggtgctcaggacgctggtgaatcagttttttatattgc

SEQ ID NO: 882867 - DNA, 75 bp, synthetic construct
  source 1..75: mol_type = other DNA
acgtctcgaagctggatttcaacgattttattgacgcaatggctggcctggtgtgtgccgtgttcatcgttctga

SEQ ID NO: 882868 - DNA, 75 bp, synthetic construct
  source 1..75: mol_type = other DNA
tggcgcgatactgtgttaaaaaaatcaacggtttccgtgcagatgagcattatggacatcgcctacccgagtttt

SEQ ID NO: 882869 - DNA, 75 bp, synthetic construct
  source 1..75: mol_type = other DNA
atgcagaacttgcccccattaccgaaaatatcactcacgccttccctggcatcggcgctggttattacaacaaaa

SEQ ID NO: 882870 - DNA, 75 bp, synthetic construct
  source 1..75: mol_type = other DNA
gaaattcggaaagcgcagtcgagtgaagaactcgaaaagctctttgcagtgatgaaaacagaggcgcatctcaac

SEQ ID NO: 882871 - DNA, 75 bp, synthetic construct
  source 1..75: mol_type = other DNA
ggataatatagtcatagttccaccgttacttattgaagcgataaaaaagtatcgtaaatcaggtcaagcatccgt

SEQ ID NO: 882872 - DNA, 75 bp, synthetic construct
  source 1..75: mol_type = other DNA
tcgcgattgcttggttactgtgcggatttaatcgacttgaggcggctggctgcttttatcattatcggctttctg

SEQ ID NO: 882873 - DNA, 75 bp, synthetic construct
  source 1..75: mol_type = other DNA
tataaggagtggggtccggatgggcaaggcatcaacaatatagaaagccatgaacacgcgatgttgacattgctc

SEQ ID NO: 882874 - DNA, 75 bp, synthetic construct
  source 1..75: mol_type = other DNA
tttatcgcgagaagtcgatagatttaccaagggcatccgatccgcggtacatggaaatggctgattctaataaaa

SEQ ID NO: 882875 - DNA, 75 bp, synthetic construct
  source 1..75: mol_type = other DNA
ttttaaacccaataattactttattgaaaccaccaacgccagaggcgattcctgttggagggaaaagtcgtaaaa

SEQ ID NO: 882876 - DNA, 75 bp, synthetic construct
  source 1..75: mol_type = other DNA
acttttaaaagtgtatcaggatcgtcctcaatatatacatcaatggttcagcaacttggtgtttatgttgaaagt

SEQ ID NO: 882877 - DNA, 75 bp, synthetic construct
  source 1..75: mol_type = other DNA
tggtattttaagtgttatatatttcatgttgacaacttttttatttggttcaatatatccatatgaactaaatga

SEQ ID NO: 882878 - DNA, 75 bp, synthetic construct
  source 1..75: mol_type = other DNA
aaatcagctctatgtgaacgcttctgatatggatgacagcgatctgaatatttcagagagcgacaaagcttttac

SEQ ID NO: 882879 - DNA, 75 bp, synthetic construct
  source 1..75: mol_type = other DNA
agacaatgaccctaatggaccatgggtgtcatcagactttactgcgcaaggtttcagacctaatcagatgtatga

SEQ ID NO: 882880 - DNA, 75 bp, synthetic construct
  source 1..75: mol_type = other DNA
acagtggacatctgactctgttaaatggtggagaatctgcagcgatattggcaggtgacgggaaattcacggttg

SEQ ID NO: 882881 - DNA, 75 bp, synthetic construct
  source 1..75: mol_type = other DNA
catattgttagtgatgacgactttacagtgaataacaagattactagctggcctgacggtgatacaaaaatatac

SEQ ID NO: 882882 - DNA, 75 bp, synthetic construct
  source 1..75: mol_type = other DNA
acaaccacattaaatgatgatcaacttttaaagttatcagagcaggttcagcatgattcagaaatcattgctcgc

SEQ ID NO: 882883 - DNA, 75 bp, synthetic construct
  source 1..75: mol_type = other DNA
ggttttgcattcattaacaaaacctggtctggcgttccggggacaggtgctcaggacgctggtgaatcagttttt

SEQ ID NO: 882884 - DNA, 75 bp, synthetic construct
  source 1..75: mol_type = other DNA
taacggtacgacggtgagcggtacgaatagtgaaggtgcattctccatccacaataaagtggcagacaatgtgtt

SEQ ID NO: 882885 - DNA, 75 bp, synthetic construct
  source 1..75: mol_type = other DNA
gatgcaaaaacgatgttcaagcgcgctgaaaatgaaattaacaccatggctgaaaagctcggtgatgaatatcac

SEQ ID NO: 882886 - DNA, 75 bp, synthetic construct
  source 1..75: mol_type = other DNA
aggcccgcctggctgaggagaaacgtaaagccgatgagcaggctcgccgcgaagccgacgttaagcaccgcaagg

SEQ ID NO: 882887 - DNA, 75 bp, synthetic construct
  source 1..75: mol_type = other DNA
atttaagaagcatacaggatatacaccaaaacagtacagggaaaataaagtgtgggtgtttcataacatcagtgg

SEQ ID NO: 882888 - DNA, 75 bp, synthetic construct
  source 1..75: mol_type = other DNA
gaaataatgttcgccatgcgcgtgatgagatgagcagtctggtgctgctgatcgacacgccctggtatccgcctt

SEQ ID NO: 882889 - DNA, 75 bp, synthetic construct
  source 1..75: mol_type = other DNA
agctgccgccattacgcgtgtttcgtaagccacgctggttgatattactggcggtggcgactgccgggctgtttg

SEQ ID NO: 882890 - DNA, 75 bp, synthetic construct
  source 1..75: mol_type = other DNA
tggtcaacgcaacagttatgtgaaaacatggggttgcggaggtttcagcacgacattttctgcattagcagaaac

SEQ ID NO: 882891 - DNA, 75 bp, synthetic construct
  source 1..75: mol_type = other DNA
aaacacgactggatagaggctcagcgcaaagcgtatgagcttcacgctgataaattgttctggcacatcaggagc

SEQ ID NO: 882892 - DNA, 75 bp, synthetic construct
  source 1..75: mol_type = other DNA
accctcggacaggcgagtccatctcaggcttttatggattctcctggactacgttcttttttggtgccttcccgg

SEQ ID NO: 882893 - DNA, 75 bp, synthetic construct
  source 1..75: mol_type = other DNA
gaagccgcagcgcgccgtgaagctgaagagaaagcacgtgcagagctggctgaacgccagcgcattgaagcggaa

SEQ ID NO: 882894 - DNA, 75 bp, synthetic construct
  source 1..75: mol_type = other DNA
cgcctgaaagaagctgtgcgtccagctgagaccgaaattaagcgtttcgttgatgcctgtgacgagttgcgtgat

SEQ ID NO: 882895 - DNA, 75 bp, synthetic construct
  source 1..75: mol_type = other DNA
agccgaagaagaagctaaggcagcagctgaagctctcgcaaagcaaattgagtctgaccatgaaatagctatttt

SEQ ID NO: 882896 - DNA, 75 bp, synthetic construct
  source 1..75: mol_type = other DNA
tcccggtctgcggataatatcggtggggtctattatcgcccggttcagatttatattaataatgcctggagaacg

SEQ ID NO: 882897 - DNA, 75 bp, synthetic construct
  source 1..75: mol_type = other DNA
gaacaactcgcgcaggcgctggctgaacagccgggaatgaccgttgaccaggcaaaaacgttactggcggcggca

SEQ ID NO: 882898 - DNA, 75 bp, synthetic construct
  source 1..75: mol_type = other DNA
gcgaaaacgttgcttgcagctgcgccggttgccggtactgacagcacgggtgatcagattatggcgctgccggaa

SEQ ID NO: 882899 - DNA, 75 bp, synthetic construct
  source 1..75: mol_type = other DNA
atgtttgctcgttctctccgagagaccgagatttttgaccatgcagatacacttgggattaccgttggtgaagcc

SEQ ID NO: 882900 - DNA, 75 bp, synthetic construct
  source 1..75: mol_type = other DNA
gaagaagttttagactttatatgccctgtaacaatctttgaatcattaagaatgaatgaggcgaaaattattgct

SEQ ID NO: 882901 - DNA, 75 bp, synthetic construct
  source 1..75: mol_type = other DNA
agatgaggagcgtagccgactggatgcatgggagcgttacagcgttctggtcagtcgtgtggatcctgcaaatcc

SEQ ID NO: 882902 - DNA, 75 bp, synthetic construct
  source 1..75: mol_type = other DNA
gtggtcagcagaaaagagcgtgagccactgaatcgctgcgacatcctgtccacacttgctcatggtggggcaatg

SEQ ID NO: 882903 - DNA, 75 bp, synthetic construct
  source 1..75: mol_type = other DNA
gatacttcgccagtagttcaaccagttacacaacaatcaagtgttaaacatctcaaccaagaaccaattactcca

SEQ ID NO: 882904 - DNA, 75 bp, synthetic construct
  source 1..75: mol_type = other DNA
taccaaactgtggatctggtattgataagtgtgacctttaccccaatgttaagaacaggctgcgcgtcggtatag

SEQ ID NO: 882905 - DNA, 75 bp, synthetic construct
  source 1..75: mol_type = other DNA
gccgacccagtgctcgttggtcggtactggcgctggtcgcaattgggattgtgattggcattgcgctgattgtat

SEQ ID NO: 882906 - DNA, 75 bp, synthetic construct
  source 1..75: mol_type = other DNA
gtacctgatagcggtaaattacaatttcgttctggcactctaccttcgcagtggcatgtgtcattacccattagt

SEQ ID NO: 882907 - DNA, 75 bp, synthetic construct
  source 1..75: mol_type = other DNA
ggcgacggtttgggtgagttatggcgtggcgcaaaaggttttattgcgtcggctggcctcaccgcagatcctgtt

SEQ ID NO: 882908 - DNA, 75 bp, synthetic construct
  source 1..75: mol_type = other DNA
aagcccaactccggctggatgaggatttcgatgctgatgaccgccatctgcaactgctggcctgtgcggcacaaa

SEQ ID NO: 882909 - DNA, 75 bp, synthetic construct
  source 1..75: mol_type = other DNA
cttttcctgccggtccccggacaaagcacaaaggaagtcgccgccggctccgctttacccggccatgcagggcat

SEQ ID NO: 882910 - DNA, 75 bp, synthetic construct
  source 1..75: mol_type = other DNA
aattacatacccaggctgatattttagttgccagttctcagtggctggcccgccatccgcaggtgaaagctattg

SEQ ID NO: 882911 - DNA, 75 bp, synthetic construct
  source 1..75: mol_type = other DNA
tataatagaatctaaggggatgatggataaaaaacacatcgatgatgtattgagatatttaagaggtggacgtat

SEQ ID NO: 882912 - DNA, 75 bp, synthetic construct
  source 1..75: mol_type = other DNA
caccaccgttccggctgtggatatggcgaccctgcgtgacggcaatgccagcgcccaggtgcgggtgactaacgt

SEQ ID NO: 882913 - DNA, 75 bp, synthetic construct
  source 1..75: mol_type = other DNA
ggaatttaacagcccggaagaagcccgtgcacagattcattatcagtaccgttatttctacccgcaaactgaacc

SEQ ID NO: 882914 - DNA, 75 bp, synthetic construct
  source 1..75: mol_type = other DNA
tgtttttatagtctctgtccggttgtggtcctgtcaaaagtggtggagctggcgggagttgaacccgcgtccgaa

SEQ ID NO: 882915 - DNA, 75 bp, synthetic construct
  source 1..75: mol_type = other DNA
caccgcccagcgcttgatttcgaacgccttcccgaattgcttgatcgtatcgaatgctttaaaggtcgaaagttg

SEQ ID NO: 882916 - DNA, 75 bp, synthetic construct
  source 1..75: mol_type = other DNA
aacggtaagtcgaaatcgctcagtgagttgttcatgacccacccgccgctggataaacgaattgaagctctgcgt

SEQ ID NO: 882917 - DNA, 75 bp, synthetic construct
  source 1..75: mol_type = other DNA
ctgatggccgtattaccgctgatctcccccggggcgaagtcacccgagagaaactgattgcggcttcaacacctc

SEQ ID NO: 882918 - DNA, 75 bp, synthetic construct
  source 1..75: mol_type = other DNA
taccagagatcttcttgcccctatcaaagctgttgaagcttctgggcgactggaagttgcttcccgattacagca

SEQ ID NO: 882919 - DNA, 75 bp, synthetic construct
  source 1..75: mol_type = other DNA
aaggcactaaggtcgatgggttatgacacaaccgttgaggtatgtgggcatggattcagggcgatggcttgtagt

SEQ ID NO: 882920 - DNA, 75 bp, synthetic construct
  source 1..75: mol_type = other DNA
agaaaaaagcagataagattgagcaaagcgaagccctgacattcgaagctgttgcgagggactggcatactgcct

SEQ ID NO: 882921 - DNA, 75 bp, synthetic construct
  source 1..75: mol_type = other DNA
gatctccaggcactgggcaatggcgatttgatcattaacgcttcggtgaccaacgcgaatggcaatacgggcagc

SEQ ID NO: 882922 - DNA, 75 bp, synthetic construct
  source 1..75: mol_type = other DNA
attgaccgatggcagccacaccctgaccgccacggtcaatgacaaagcgggcaacccggcgagcaccacgcataa

SEQ ID NO: 882923 - DNA, 75 bp, synthetic construct
  source 1..75: mol_type = other DNA
gatggtagctggagcgtgggcgtcacggcggcgcaggttagcgcctggcctgcggggacgattaatattgccgtg

SEQ ID NO: 882924 - DNA, 75 bp, synthetic construct
  source 1..75: mol_type = other DNA
aaaaggtgcgccactgacccttaccggtagcactcaacaggccgagacaggacaaaccgtcacagtaaccctggc

SEQ ID NO: 882925 - DNA, 75 bp, synthetic construct
  source 1..75: mol_type = other DNA
aacctataccaccacgctggacgcttccggcaactggagcgtcggcgttccggcggcagatgtcactgcgctggg

SEQ ID NO: 882926 - DNA, 75 bp, synthetic construct
  source 1..75: mol_type = other DNA
aaaaggcgcggatctgcaaatttccggcaccagtaatcagccagcaggcaccacaattacgctgacgctgaacgg

SEQ ID NO: 882927 - DNA, 75 bp, synthetic construct
  source 1..75: mol_type = other DNA
gctgggtagcggcccgcaaaccgtgatggcgaccgttaccgatgcggcaggtaatagcgacagcgaaacgcacac

SEQ ID NO: 882928 - DNA, 75 bp, synthetic construct
  source 1..75: mol_type = other DNA
tttcgccgaagctttccgtttttcggcaagcgtttttatctggtatttctgatgggcagggatatgcgtaagcga

SEQ ID NO: 882929 - DNA, 75 bp, synthetic construct
  source 1..75: mol_type = other DNA
gtgctcaacggcaaaacctacacctccaccctggatgcctccggcaactggagcgttggcgttccagcggcggat

SEQ ID NO: 882930 - DNA, 75 bp, synthetic construct
  source 1..75: mol_type = other DNA
ccgtcaccatcaacacctttgcgggcgatgatgtggtgaacgcggcggaacacggcagatcgctggtgatcagcg

SEQ ID NO: 882931 - DNA, 75 bp, synthetic construct
  source 1..75: mol_type = other DNA
gtggtggatttcaccaacaccatcatcatcgccacgtccaacctgggttcggacatcatccagcgacggctgaag

SEQ ID NO: 882932 - DNA, 75 bp, synthetic construct
  source 1..75: mol_type = other DNA
atctgatttcgtaactgaaacccgcagattcagaatgcaagtccctcaaatatatatgtatattggtaaccgtct

SEQ ID NO: 882933 - DNA, 75 bp, synthetic construct
  source 1..75: mol_type = other DNA
ggggcgttcgcccgcgcagcgttgcgtgaatcatatttctgaaccggataccgaaattccgccgggtttcagggg

SEQ ID NO: 882934 - DNA, 75 bp, synthetic construct
  source 1..75: mol_type = other DNA
tgtgcttattggtgaaaacggtgcgggtaaatccacaatgatgaaaatgctggcgggggttgaaacaccttcctc

SEQ ID NO: 882935 - DNA, 75 bp, synthetic construct
  source 1..75: mol_type = other DNA
tttgattcacgctatgtgagagatgtcagacttggcacgcgtgttgttcaaactatgcaaagaggcgtgatgtat

SEQ ID NO: 882936 - DNA, 75 bp, synthetic construct
  source 1..75: mol_type = other DNA
acattcgacagtcctgatccacgaattaaacagttagcgcgtcgcagtacggtgacaccgggaggtgccgcctgt

SEQ ID NO: 882937 - DNA, 75 bp, synthetic construct
  source 1..75: mol_type = other DNA
cagaggagtcaggcaaccgtccgacgacctcagcgccttctgttgcgccagaatattactatgtgatcgcgcttg

SEQ ID NO: 882938 - DNA, 75 bp, synthetic construct
  source 1..75: mol_type = other DNA
gaacggcccgatagtctttgggtggccgattttacctacggtgtgcccggagttcagggcgggcatggatgctta

SEQ ID NO: 882939 - DNA, 75 bp, synthetic construct
  source 1..75: mol_type = other DNA
ctggcgaaaattttctgtctgtcagttgtaattgaagcaatcaatctgctaatgccggtggggacacagctggtt

SEQ ID NO: 882940 - DNA, 75 bp, synthetic construct
  source 1..75: mol_type = other DNA
taccctactttcagggcaatcacacacaattatggatcatgcacacaatatggaattgtggacgggggacgggct

SEQ ID NO: 882941 - DNA, 75 bp, synthetic construct
  source 1..75: mol_type = other DNA
aatctcggctggaatgggcagtggtttccctcactgtgcgccagctttgatcctgcggacaatctcaccgtcacc

SEQ ID NO: 882942 - DNA, 75 bp, synthetic construct
  source 1..75: mol_type = other DNA
ttgacttatcgactttaaggttgaatatcgaaatccctcaggcactgctgaatacacgtccaagaggatatattt

SEQ ID NO: 882943 - DNA, 75 bp, synthetic construct
  source 1..75: mol_type = other DNA
cacatatccatttatccatttatcgacaactgccggcggtgtgacatcacatcacacctggaaaaaccttcattt

SEQ ID NO: 882944 - DNA, 75 bp, synthetic construct
  source 1..75: mol_type = other DNA
tttatgtgttatttgcaattatctttgcttacgttcatgaaagaattaacttatttacttcacgaggtgtcaagt

SEQ ID NO: 882945 - DNA, 75 bp, synthetic construct
  source 1..75: mol_type = other DNA
gctggtaacaataacgaagctgttgatggaaataaaaaggaatccaaaagcggaccatcaaatccccctgtcaga

SEQ ID NO: 882946 - DNA, 75 bp, synthetic construct
  source 1..75: mol_type = other DNA
ccaatgatgagctttattttggtatgggcgataattgtgatataaaatcagaatgggtaaagctttcctctggag

SEQ ID NO: 882947 - DNA, 75 bp, synthetic construct
  source 1..75: mol_type = other DNA
acaagagcacggttgcagggagtgcaaatggagtcgacttttcatttggcggtgcgattatgtcgtctctcattt

SEQ ID NO: 882948 - DNA, 75 bp, synthetic construct
  source 1..75: mol_type = other DNA
tggtacgacgaatgcgttaggtggtagctctattgttcttggtgataatgataccggatttaaacagaatggaga

SEQ ID NO: 882949 - DNA, 75 bp, synthetic construct
  source 1..75: mol_type = other DNA
agttatcggcatttacggcttgctgggcgcaggacgtactgaactatttaagggattggtgggcctgatgccctg

SEQ ID NO: 882950 - DNA, 75 bp, synthetic construct
  source 1..75: mol_type = other DNA
gattaattgccggaggtcttgttgcaatttcttttgcgggactgattatgttaattgtgagtgatttgaacaacg

SEQ ID NO: 882951 - DNA, 75 bp, synthetic construct
  source 1..75: mol_type = other DNA
tgactctttatctcaacagaataccaagatcggtaatatatcctatatgcagtctttatattcttttcagaaaga

SEQ ID NO: 882952 - DNA, 75 bp, synthetic construct
  source 1..75: mol_type = other DNA
atgctgtatccgggcgtgaagcagtcagacctcagtgaagagcagaagcagacgataagtacgctggcaaccgtt

SEQ ID NO: 882953 - DNA, 75 bp, synthetic construct
  source 1..75: mol_type = other DNA
caacagtacactttgatcctgagaataaagtatctgtagttacaaattcatctggaaaggttgtaacagttaaat

SEQ ID NO: 882954 - DNA, 75 bp, synthetic construct
  source 1..75: mol_type = other DNA
caggtgtagagatcgcaatagtgaatggtaatgagatccgggtatgggataacgattatgataaccacccggata

SEQ ID NO: 882955 - DNA, 75 bp, synthetic construct
  source 1..75: mol_type = other DNA
gtttttttggggctctattttgcttcacgtttcattccagcgataagtgaaaaaatcttagaaattatagagttt

SEQ ID NO: 882956 - DNA, 75 bp, synthetic construct
  source 1..75: mol_type = other DNA
tatgggcggtgctgatgccattttacagaaagccaaacaggattatgaccagggtaatttccgctgggttgccca

SEQ ID NO: 882957 - DNA, 75 bp, synthetic construct
  source 1..75: mol_type = other DNA
tactactattagtaatagagagtattctggtcatgcattggatagaatgcaggacagagggataacgccatctgt

SEQ ID NO: 882958 - DNA, 75 bp, synthetic construct
  source 1..75: mol_type = other DNA
ggataacaattcagatatcgaggattttgcagatattctctcgccacgcctcggcagcgatattagtggtgtcag

SEQ ID NO: 882959 - DNA, 75 bp, synthetic construct
  source 1..75: mol_type = other DNA
gtgattaatgctgccggaaagaaaactaaccataccatttaccataaaggtaaaggccgcctgggaattgacaac

SEQ ID NO: 882960 - DNA, 75 bp, synthetic construct
  source 1..75: mol_type = other DNA
gttttgatcaaagcaaatatgacagcatcgtctggaacccaatcacttattatccggtgccaaaaccttctacct

SEQ ID NO: 882961 - DNA, 75 bp, synthetic construct
  source 1..75: mol_type = other DNA
catcattagccgatgcgaggcagaagagggaagagggaagaggcaaggaggcttgttgctgctggaatcgatcct

SEQ ID NO: 882962 - DNA, 75 bp, synthetic construct
  source 1..75: mol_type = other DNA
gctgttgagggtaaaaaaatcattattactgaggtctacagcgacggttcgagtagctttaattcttatccgttg

SEQ ID NO: 882963 - DNA, 75 bp, synthetic construct
  source 1..75: mol_type = other DNA
cgctcgtgtttgctgctccgatactggcttctgaagtgacggtgggtcaggtttgcaaggctgtttctgcggcaa

SEQ ID NO: 882964 - DNA, 75 bp, synthetic construct
  source 1..75: mol_type = other DNA
actttgataatcatgccggaacctggcaggcaacccagaagctgattgctttgggacataagagtattgcgctgt

SEQ ID NO: 882965 - DNA, 75 bp, synthetic construct
  source 1..75: mol_type = other DNA
atatgcggcttgttgaaagtcgcagggttgatgctctcatcattgcacacactctggatgacgatccccgtatca

SEQ ID NO: 882966 - DNA, 75 bp, synthetic construct
  source 1..75: mol_type = other DNA
gctgtaccacatttgcctcgagatgcgttcaaaggggattgagcgccagatgaccgaaggggagttaaaacggct

SEQ ID NO: 882967 - DNA, 75 bp, synthetic construct
  source 1..75: mol_type = other DNA
taggaatcgaattgtacttaattctgattatgatttaatagcgtcattgaattgtcttgattattttggtggtaa

SEQ ID NO: 882968 - DNA, 75 bp, synthetic construct
  source 1..75: mol_type = other DNA
cctcagcgcctttttcattgccgcggtaatggtattaaacggtgctgcgggcagtaaatacggtgtgccttttgg

SEQ ID NO: 882969 - DNA, 75 bp, synthetic construct
  source 1..75: mol_type = other DNA
gcaggcaacccagaagctgattgctttgggacataagagtattgcgctgttgagcgagaacagttcacattctta

SEQ ID NO: 882970 - DNA, 75 bp, synthetic construct
  source 1..75: mol_type = other DNA
ggggaggccgggttgacccgctgaccctgaatgccggcaacctgaagctgttctgtctgtgttattaccctgact

SEQ ID NO: 882971 - DNA, 75 bp, synthetic construct
  source 1..75: mol_type = other DNA
cgttgccgaaggatccggacgtgcacaaacatttcgcaccattctgaccgtatccagcactgccaccgtggcgct

SEQ ID NO: 882972 - DNA, 75 bp, synthetic construct
  source 1..75: mol_type = other DNA
atttcccgacagggttataccctttgtgttatgaataagttacaggactgtttgcggcgacgggatatttatgtt

SEQ ID NO: 882973 - DNA, 75 bp, synthetic construct
  source 1..75: mol_type = other DNA
cgcgattgcgagacctcctgacgccagttttcatgatgaaatggtggagcagtacggaagggtacgccgttttct

SEQ ID NO: 882974 - DNA, 75 bp, synthetic construct
  source 1..75: mol_type = other DNA
attatctggagacgcacaagagcttctgtgcgccggacgttgctgtgacaacaggtgtgacattaaccagcataa

SEQ ID NO: 882975 - DNA, 75 bp, synthetic construct
  source 1..75: mol_type = other DNA
atgccattttatcataatggttcgctaaaccaattaataaaaaagattaatcttacgagcagggagataatacgg

SEQ ID NO: 882976 - DNA, 75 bp, synthetic construct
  source 1..75: mol_type = other DNA
ggcggtgatagctcgttcggatcggtaatagcccctggtggtgaaggtggtggaaaatcaggagtcacaaacacg

SEQ ID NO: 882977 - DNA, 75 bp, synthetic construct
  source 1..75: mol_type = other DNA
cagtgaagaaggctttgcggagatgatgaattatcatcgctggctggcattaatttttgctgtcagcgaatatcg

SEQ ID NO: 882978 - DNA, 75 bp, synthetic construct
  source 1..75: mol_type = other DNA
cgtatctgccggtaaaaaaagcggacggcacacggaaaaagccggtggtggctgtcgtgctggagtggtttacct

SEQ ID NO: 882979 - DNA, 75 bp, synthetic construct
  source 1..75: mol_type = other DNA
gtggtcagactgttttttgcgctgctcagtggtcgggcgttaccaacaccagaggcgcatcagaagcgtgagcaa

SEQ ID NO: 882980 - DNA, 75 bp, synthetic construct
  source 1..75: mol_type = other DNA
gatagtacgacaacatgacgtgggtgatgctgggattgagcagatcatcaatgatttctgggatggtatggcaag

SEQ ID NO: 882981 - DNA, 75 bp, synthetic construct
  source 1..75: mol_type = other DNA
tgccgcctcgtttgctcgctctcgcgcaggtcgtgaagcactgattaccgtattgagcaaagcgaaagaagggat

SEQ ID NO: 882982 - DNA, 75 bp, synthetic construct
  source 1..75: mol_type = other DNA
gtgggcatgttcccgctgaccgtctacctgacggccctgcgcctggcgccgttgcagctgatggcgctgggacac

SEQ ID NO: 882983 - DNA, 75 bp, synthetic construct
  source 1..75: mol_type = other DNA
gggctggccgtcggaggaggaatatgcacatccccgctggtatatcccggtgaccgatgctgctgatttgtgtta

SEQ ID NO: 882984 - DNA, 75 bp, synthetic construct
  source 1..75: mol_type = other DNA
agtgccggaacaacctccaccattacccatccggttaccgtcgatctggcggcggtcgccataaccattaacact

SEQ ID NO: 882985 - DNA, 75 bp, synthetic construct
  source 1..75: mol_type = other DNA
acaacgagacgcacacggtcaccgttaaccttaccgcgccgaccattggcatcaaccccattgccagcgatgacg

SEQ ID NO: 882986 - DNA, 75 bp, synthetic construct
  source 1..75: mol_type = other DNA
tggcagttatcctgtcagcgtctcggtaaccgacaaagccggaaacacgggcagccagtcgctaaccgtcacggt

SEQ ID NO: 882987 - DNA, 75 bp, synthetic construct
  source 1..75: mol_type = other DNA
gaagcggggcagaccattaccgttattttcggtggcaaaagctacaccaccacggttgccgcggataatacctgg

SEQ ID NO: 882988 - DNA, 75 bp, synthetic construct
  source 1..75: mol_type = other DNA
caccgtgcagccagatttaagctggagcgtcagcgtgcctgcggcagatttgcaggcgctgggtaacggtgaact

SEQ ID NO: 882989 - DNA, 75 bp, synthetic construct
  source 1..75: mol_type = other DNA
cagcggcgtctccagcggcctggcggcaggcactacggtcaccgtgatgttgaacggcctggcgtacagcgccac

SEQ ID NO: 882990 - DNA, 75 bp, synthetic construct
  source 1..75: mol_type = other DNA
aacaccaactgcgcgacagggaacgaataatacccaaatcgcaagcacggcttatgtgatggccgcgattgccgc

SEQ ID NO: 882991 - DNA, 75 bp, synthetic construct
  source 1..75: mol_type = other DNA
ggcacatggaacctcggcgttccggcggcagacgtcagcaactggccagcgggtacggtcgatataaccgtaagc

SEQ ID NO: 882992 - DNA, 75 bp, synthetic construct
  source 1..75: mol_type = other DNA
tcaccgttacgctgggcggcaacacctacaccgccacggtgcaggctaatttaagctggagtgtggacgttccgg

SEQ ID NO: 882993 - DNA, 75 bp, synthetic construct
  source 1..75: mol_type = other DNA
ttaacgccacggaaaaaggcgcggatctgcaaattaccggcaccagtaatcagcccgcaggcaccacaataacgg

SEQ ID NO: 882994 - DNA, 75 bp, synthetic construct
  source 1..75: mol_type = other DNA
caacagcaattccgccagccataacgtgctggtcaacagcgcgttacctgccgtcaccattaacgcggtggcgac

SEQ ID NO: 882995 - DNA, 75 bp, synthetic construct
  source 1..75: mol_type = other DNA
accatcaacaccattgcgggcgacgatattattaacgccgccgaacacgggcaggcgctggtgatttccggttcc

SEQ ID NO: 882996 - DNA, 75 bp, synthetic construct
  source 1..75: mol_type = other DNA
ggattagcccccgtagaactgactgcccagaccaccgcaattgaaagcattgcgccgtaccttgatatcgtcggc

SEQ ID NO: 882997 - DNA, 75 bp, synthetic construct
  source 1..75: mol_type = other DNA
accgtggcaggcgatgatgtgattaacagcattgagcacactcaggcgttggtgatcaccggtagcagtagcgga

SEQ ID NO: 882998 - DNA, 75 bp, synthetic construct
  source 1..75: mol_type = other DNA
tggagtgttagcgtgccagcggcggatattcaggcgctgggtaacggcgacctgacagttaacgcctcggtcacc

SEQ ID NO: 882999 - DNA, 75 bp, synthetic construct
  source 1..75: mol_type = other DNA
gcaaaccatcagcgggcaggttactggagccgccgttggcgacacggtaaccgtgacgctgggcggcaataccta

SEQ ID NO: 883000 - DNA, 75 bp, synthetic construct
  source 1..75: mol_type = other DNA
tcatttattagcagattattatttggctgggtggatagatgaacaacgttatataaaagaagtctttgatgtaac

SEQ ID NO: 883001 - DNA, 75 bp, synthetic construct
  source 1..75: mol_type = other DNA
ttgttgacggtcgttttgatgccgggatccggctgggtgaaagtgtggataaggatatgattgcagtgcgaattg

SEQ ID NO: 883002 - DNA, 75 bp, synthetic construct
  source 1..75: mol_type = other DNA
cgcagggggatgtgaccattaccgccacggtcaccgactccgcaggcaacagcggcacggcctcgcacagtgtca

SEQ ID NO: 883003 - DNA, 75 bp, synthetic construct
  source 1..75: mol_type = other DNA
acggcaacagcgcccaggccgatcgcgcgtatagcgttgatgccaccgcgccgcttgtgaccatcaacaccatcg

SEQ ID NO: 883004 - DNA, 75 bp, synthetic construct
  source 1..75: mol_type = other DNA
caggcaacagtaattccgccagtcataatgtgctggtcaacagcgccttgcctgccgttaccattaacgcggtgg

SEQ ID NO: 883005 - DNA, 75 bp, synthetic construct
  source 1..75: mol_type = other DNA
acggtgggcagcaatctcacctggagcgtggacgttccagcggcagatattcaggcgctgggaaatggcgattta

SEQ ID NO: 883006 - DNA, 75 bp, synthetic construct
  source 1..75: mol_type = other DNA
cggcgacgccacggtacaggccagcgtcagcaatattaacggcaacacggcttcggcgacccacgcctacagcgt

SEQ ID NO: 883007 - DNA, 75 bp, synthetic construct
  source 1..75: mol_type = other DNA
gttgccgcggataatacctgggggctgacgatccctgccgccgatgttgcaaccttgccagacggcgcagcaaac

SEQ ID NO: 883008 - DNA, 75 bp, synthetic construct
  source 1..75: mol_type = other DNA
cgctgggtggcaacacctacaccgccacggtgcaggctaatttaagctggagcgttagcgtgccggcggcggata

SEQ ID NO: 883009 - DNA, 75 bp, synthetic construct
  source 1..75: mol_type = other DNA
taagcccgcatctttacctggcgaccaacagcgcacaggggccgtggtggatactggggtggtcagagcgggtgc

SEQ ID NO: 883010 - DNA, 75 bp, synthetic construct
  source 1..75: mol_type = other DNA
caagaagtaccgtgcctatcgtggagaacaggggcgaacttgtaataatttactgaagagacaattttatgctga

SEQ ID NO: 883011 - DNA, 75 bp, synthetic construct
  source 1..75: mol_type = other DNA
cactcaccgcacggcgatgctgcaactggtggacaggatcatcgtgatggatcaggggcggattgtgatggatgg

SEQ ID NO: 883012 - DNA, 75 bp, synthetic construct
  source 1..75: mol_type = other DNA
tccggatggagcattatcgtcgccgaagattgggctttctggtacagagaagcacacattgccgggtgtttaccg

SEQ ID NO: 883013 - DNA, 75 bp, synthetic construct
  source 1..75: mol_type = other DNA
accgccaccgctgcacaggataaccctatttcgataatcatcagcacccaggcgcccgatgcgagcgacctgctt

SEQ ID NO: 883014 - DNA, 75 bp, synthetic construct
  source 1..75: mol_type = other DNA
aatccagataagtatcctaattatcgtcttctgattcactcagccaaattacaaaatgaaataaagagccactat

SEQ ID NO: 883015 - DNA, 75 bp, synthetic construct
  source 1..75: mol_type = other DNA
ggcgcaacggcgcgggtaaatcgacgctactgcaaatgctcgccggaatgcgtatcgcccagcaggggcaggtgt

SEQ ID NO: 883016 - DNA, 75 bp, synthetic construct
  source 1..75: mol_type = other DNA
gacgatcctggcttcgcgcaccatcgcgccgctgtcgcagatatccggcgtgctctcgcgctggcagcaggcgaa

SEQ ID NO: 883017 - DNA, 75 bp, synthetic construct
  source 1..75: mol_type = other DNA
atggcgatattatgctggcctcgctggtggcgaacgtccttgcgctggcggcgatgattttctcgatgcaggttt

SEQ ID NO: 883018 - DNA, 75 bp, synthetic construct
  source 1..75: mol_type = other DNA
gcgggaagagttacttaccgacatggcgcggcagttggggatggggctgcggctggtcgagttctccgccgactc

SEQ ID NO: 883019 - DNA, 75 bp, synthetic construct
  source 1..75: mol_type = other DNA
aagcctggctggaggcgatgatcgccgtggcgcgttattaccgcctcgatttttctcaggagaacgtgcgcgcaa

SEQ ID NO: 883020 - DNA, 75 bp, synthetic construct
  source 1..75: mol_type = other DNA
acgaccgcgtggttccggcgcaatcctacccgacgctgtgggtgctgttcgccggggtgatgatggcgatcctgt

SEQ ID NO: 883021 - DNA, 75 bp, synthetic construct
  source 1..75: mol_type = other DNA
gtgcagcctcctcggcaacggcggcagaaaatgccgcgaaggaggcaaaaacatccgagatgaacgccaggtctt

SEQ ID NO: 883022 - DNA, 75 bp, synthetic construct
  source 1..75: mol_type = other DNA
gccacgaacgcttcagaggcggccacctcagcccgggatgcggaggcctcaaaagacgcggcaaaatcatcagaa

SEQ ID NO: 883023 - DNA, 75 bp, synthetic construct
  source 1..75: mol_type = other DNA
ttggcgtgatcacccgccgtgacaatcacgacaatatcagcattcagttcagcggtgacgaagggctggaaacta

SEQ ID NO: 883024 - DNA, 75 bp, synthetic construct
  source 1..75: mol_type = other DNA
aacgcaatgcagtgctcgtcgtagatggtaaggctgtggttgccagcctcaagaacaaagcaatgaccttcaacg

SEQ ID NO: 883025 - DNA, 75 bp, synthetic construct
  source 1..75: mol_type = other DNA
ctaccttcgcaaacccgaccacagaaaggagccagacccgccagacgtctgaccgcgctggcacaggaactggtt

SEQ ID NO: 883026 - DNA, 75 bp, synthetic construct
  source 1..75: mol_type = other DNA
acgttgggcttttatcggaccaactctgacggcgatgcttgtacaaccgacagcagagagagctataacgcctta

SEQ ID NO: 883027 - DNA, 75 bp, synthetic construct
  source 1..75: mol_type = other DNA
gcataccggcgtgcagcccgaatcttcagcccggatgtttcacgtacctatgtcgaatatctggccgataaggtt

SEQ ID NO: 883028 - DNA, 75 bp, synthetic construct
  source 1..75: mol_type = other DNA
gctgccgtatttgaagcattgtttcatggcgacgacgaatttaatttcgatgcagatcccggcgcggtggtgatt

SEQ ID NO: 883029 - DNA, 75 bp, synthetic construct
  source 1..75: mol_type = other DNA
gtggcgcccgaactgctgcgacaggtcagcgggatcggtaacaacctgaaccagattgctcgccgcctgaaccag

SEQ ID NO: 883030 - DNA, 75 bp, synthetic construct
  source 1..75: mol_type = other DNA
gcgtggcgcttcgtcaacatcattgcccgtgcgctggtggaactggggcagcgcccggactacctgctgatccag

SEQ ID NO: 883031 - DNA, 75 bp, synthetic construct
  source 1..75: mol_type = other DNA
gatctactgaagcgtctgtggacagaagcgcagcgcgccggacgcggagaccgctttatcctgttccatctggcg

SEQ ID NO: 883032 - DNA, 75 bp, synthetic construct
  source 1..75: mol_type = other DNA
tctattcagggaaacggtgcgctgggaataacagaaaatagttatattggtgcacactggaatttcaacggttat

SEQ ID NO: 883033 - DNA, 75 bp, synthetic construct
  source 1..75: mol_type = other DNA
agctctacgcagggctggcgaatgccgatgatgtgagtgctttcgagttaggtaataactggacggcagatttag

SEQ ID NO: 883034 - DNA, 75 bp, synthetic construct
  source 1..75: mol_type = other DNA
gtgcctcgttgctcgtcgtactgaccagccttgatcggcagcttggcgacctgctggagcagaaccgtgatcgtt

SEQ ID NO: 883035 - DNA, 75 bp, synthetic construct
  source 1..75: mol_type = other DNA
gccgctgcgtttgaagcattatttcatggcgacgacgaatttaatttcgatgccgatcccggcgcggtagtgatc

SEQ ID NO: 883036 - DNA, 75 bp, synthetic construct
  source 1..75: mol_type = other DNA
ccttactacatcaacttgattcaggttagcgtaaatggtcaaccgctaagcaacgcgggggttgtggctcctaaa

SEQ ID NO: 883037 - DNA, 75 bp, synthetic construct
  source 1..75: mol_type = other DNA
gctccgccacttattctcctgaagcccggtactacaggcacattgcgcttgctgagaacggaaagcgacatcttg

SEQ ID NO: 883038 - DNA, 75 bp, synthetic construct
  source 1..75: mol_type = other DNA
caacaattacgctggacacggaattcgcagggtgtgcaactcactaacccaacgccttactacattaacctgatt

SEQ ID NO: 883039 - DNA, 75 bp, synthetic construct
  source 1..75: mol_type = other DNA
catcaacgcttgccactcatacttagtaaaatcagcacccagcaatatgtctcgtgtattaaacgaattaaaaac

SEQ ID NO: 883040 - DNA, 75 bp, synthetic construct
  source 1..75: mol_type = other DNA
ggacctatattggtagcacagaaattcaacctaaaggatctctttttcagaacattaagcactattaatgcaaag

SEQ ID NO: 883041 - DNA, 75 bp, synthetic construct
  source 1..75: mol_type = other DNA
gagaatcgatatctattttactgactaataccagtcaggaatcctggcttattaacagtaaaatcaatcgcccaa

SEQ ID NO: 883042 - DNA, 75 bp, synthetic construct
  source 1..75: mol_type = other DNA
attgccattgcgctgggaaagcatccgtcagaaatctggccggaacgttacctcaatacgggaaataaacgtgaa

SEQ ID NO: 883043 - DNA, 75 bp, synthetic construct
  source 1..75: mol_type = other DNA
cctcaacgccaccaccaaacgtgaaccccgtaaaccgcttcacctcatgacaacaacagaaaactccgggacata

SEQ ID NO: 883044 - DNA, 75 bp, synthetic construct
  source 1..75: mol_type = other DNA
aatgaaactcaatgagttattaaaagcaaatggtattgataactataatattattagttttatcgatgcaaaaaa

SEQ ID NO: 883045 - DNA, 75 bp, synthetic construct
  source 1..75: mol_type = other DNA
aggggatctctcagggtttaagactaattgacctttcaggtaaaaaaacaaccgctgttttaaaagcaaaagatc

SEQ ID NO: 883046 - DNA, 75 bp, synthetic construct
  source 1..75: mol_type = other DNA
tctttacaggaagatggaggtttttttatcccactggaaacagcactcaggttgtctctcagtaacgaaatagat

SEQ ID NO: 883047 - DNA, 75 bp, synthetic construct
  source 1..75: mol_type = other DNA
agacgccattaaattaatggagaacttcaactctattaaaaatagtgacaagcacaaagccaacggtaacagata

SEQ ID NO: 883048 - DNA, 75 bp, synthetic construct
  source 1..75: mol_type = other DNA
aggactcgacaaccaaataccaaatttttcattgtttgttttattttcatcttaatggcatactctatatggtta

SEQ ID NO: 883049 - DNA, 75 bp, synthetic construct
  source 1..75: mol_type = other DNA
tttttgcatttatagttttgcaaaaaaaacaaattatccatcattaacattttttacaatattttgttttatggg

SEQ ID NO: 883050 - DNA, 75 bp, synthetic construct
  source 1..75: mol_type = other DNA
atggtagtataaaagctcttgtttttatgacactttcaaagcttacgatattttttggaaggtttcaatattaca

SEQ ID NO: 883051 - DNA, 75 bp, synthetic construct
  source 1..75: mol_type = other DNA
gcacaattggcagaagccaatcatccgcaaacaggtgactggttgtacgacgaccaaatcgatcttgccagggcg

SEQ ID NO: 883052 - DNA, 75 bp, synthetic construct
  source 1..75: mol_type = other DNA
gagccggtggcgtggttgctgtcaggaggcggggcaaaaaacaacgtcagcttcgatagtggcaatgcttatgcc

SEQ ID NO: 883053 - DNA, 75 bp, synthetic construct
  source 1..75: mol_type = other DNA
gcaaccaacagcacgtctgaaacactggccgcgacatcgaaagcggtaaaggtggtaatggatgaaacgaacaag

SEQ ID NO: 883054 - DNA, 75 bp, synthetic construct
  source 1..75: mol_type = other DNA
tgcttggcaagaattgaatacgtcattcaggtggtgagtgagttgttttcacattataaaaatacaataaaaaaa

SEQ ID NO: 883055 - DNA, 75 bp, synthetic construct
  source 1..75: mol_type = other DNA
atcaaaagataaacaatctagtgatattaaatcaataggagagttaattaagactcaagttttagggaagaaaaa

SEQ ID NO: 883056 - DNA, 75 bp, synthetic construct
  source 1..75: mol_type = other DNA
gaaaaatgtaatgcttacaactgccgttgtgtttactgccggtagtctggcggccgcgtttgcagccacattacc

SEQ ID NO: 883057 - DNA, 75 bp, synthetic construct
  source 1..75: mol_type = other DNA
ggaagcttatactgaaggttttattagtattgaaaggattattagttctaaagttgtcatgatttatattttttt

SEQ ID NO: 883058 - DNA, 75 bp, synthetic construct
  source 1..75: mol_type = other DNA
tgcttgttggtttggtgattgttatcgttgctacagagctgatggtgccaggaacggcagcagcggtcacaggca

SEQ ID NO: 883059 - DNA, 75 bp, synthetic construct
  source 1..75: mol_type = other DNA
ggacagatttatggtcaaaaagggacacatttatggttaaaaagggacagatttatggttcttggcgtttttatc

SEQ ID NO: 883060 - DNA, 75 bp, synthetic construct
  source 1..75: mol_type = other DNA
aaaggtccggatatgcctactgttcagggtggcagctctccggtaactcaggatggttggataagctgtagtgag

SEQ ID NO: 883061 - DNA, 75 bp, synthetic construct
  source 1..75: mol_type = other DNA
tactttaatcacattatagaggaacgttatacttcgagagatactctcaatggtctgagagcatataattacttg

SEQ ID NO: 883062 - DNA, 75 bp, synthetic construct
  source 1..75: mol_type = other DNA
aaaaaatgctctaattagtaagggaatcgatgaaataaacaatacagtttatgaatacattaaaacctataaaga

SEQ ID NO: 883063 - DNA, 75 bp, synthetic construct
  source 1..75: mol_type = other DNA
aatagcaatgaggagtatcagcaagaatactcgccgctttaccacaacgtggatgagagggatgaaaaactcaag

SEQ ID NO: 883064 - DNA, 75 bp, synthetic construct
  source 1..75: mol_type = other DNA
cgccgcccgctatcatcgtcccgctggcggcgcgcctgccgcgcgataccgcaagctggtcagccgccatctgca

SEQ ID NO: 883065 - DNA, 75 bp, synthetic construct
  source 1..75: mol_type = other DNA
tggcaccgggcgtattttgcttctccctgcgacgccctgtatcccctgcaaaacctgtcgctcaccgcgcagttg

SEQ ID NO: 883066 - DNA, 75 bp, synthetic construct
  source 1..75: mol_type = other DNA
aataccccatctgactatgctaaaaaggcatttcatagaacaacttgatactaccattaaggaaataatagcact

SEQ ID NO: 883067 - DNA, 75 bp, synthetic construct
  source 1..75: mol_type = other DNA
gcgatcaacaattagataggatcgagactactacattaggtattactgacaataagaagaaggtttatgtattag

SEQ ID NO: 883068 - DNA, 75 bp, synthetic construct
  source 1..75: mol_type = other DNA
cccgttactctgaaactcaggggggtatccggaacggccattccagttcaggggggctgctctatcgctgtaagc

SEQ ID NO: 883069 - DNA, 75 bp, synthetic construct
  source 1..75: mol_type = other DNA
cggcgctgggaaacgacccgaattttgcgaccaccatgactaacgcgcttgcgggtaagcaaccgaaagatgcca

SEQ ID NO: 883070 - DNA, 75 bp, synthetic construct
  source 1..75: mol_type = other DNA
taaaaataaaagaaattcatcgtctatatgaaaaaacacaaagcattctcgcatctaaaagtaacataacattta

SEQ ID NO: 883071 - DNA, 75 bp, synthetic construct
  source 1..75: mol_type = other DNA
tttatataataaaaaagataactatagaacttttgaaataaaaaagaaaaatggaaaaagtagaatcataaatgc

SEQ ID NO: 883072 - DNA, 75 bp, synthetic construct
  source 1..75: mol_type = other DNA
tgcttagtctcaattcggcgaataaagaagaagatgagacaatcccggagttacctaagttagagcctcagccct

SEQ ID NO: 883073 - DNA, 75 bp, synthetic construct
  source 1..75: mol_type = other DNA
agcaatgcagaatatcggcatgctgtttaaccgtaagttgctggccggcgcgctggttacggtgctggcgtatgc

SEQ ID NO: 883074 - DNA, 75 bp, synthetic construct
  source 1..75: mol_type = other DNA
tattcttgttgctgatgctgattggatgtgagcaacgtgacgagttaatttccaatttgtctcaaagacaggcaa

SEQ ID NO: 883075 - DNA, 75 bp, synthetic construct
  source 1..75: mol_type = other DNA
gccacgaaggcttcagaggcggccacctcagcccgcgatgcggaggcctcaaaagacgcggcaaaatcatcagaa

SEQ ID NO: 883076 - DNA, 75 bp, synthetic construct
  source 1..75: mol_type = other DNA
gccacgaacgcttcagaggcggcgacctcagcccgcgatgcggaggcctcaaaagacgcggcaaaatcatcagaa

SEQ ID NO: 883077 - DNA, 75 bp, synthetic construct
  source 1..75: mol_type = other DNA
gtgcagcttcctcggcaacggcggcagcaaattccgcgacggcggcaaaaacgtccgagacgaacgccaggtcat

SEQ ID NO: 883078 - DNA, 75 bp, synthetic construct
  source 1..75: mol_type = other DNA
gtgcagcttcctcggcaacggcggcagtaaattccgctacggcggcaaaaacgtccgagacgaaggccaggtcat

SEQ ID NO: 883079 - DNA, 75 bp, synthetic construct
  source 1..75: mol_type = other DNA
gctggggaaagagcaggtcatggtgcctgtcctgaacacagcgaatatacccagacacgcagagtctccggtgta

SEQ ID NO: 883080 - DNA, 75 bp, synthetic construct
  source 1..75: mol_type = other DNA
ctgctgaccagcgaaaaatggtttgccctgccgaaagagcgtctgtgggttaccgtctatgaaagcgacgacgaa

SEQ ID NO: 883081 - DNA, 75 bp, synthetic construct
  source 1..75: mol_type = other DNA
tgaatatttatatcccggattggcagagaaaaagcttttttcatgcactatttttgcaaatatttctatatgggg

SEQ ID NO: 883082 - DNA, 75 bp, synthetic construct
  source 1..75: mol_type = other DNA
atgcatttgggtgttggcttgaagagtcgctggttgatgttattgtgccaggaggggcagggtaagggggtgtat

SEQ ID NO: 883083 - DNA, 75 bp, synthetic construct
  source 1..75: mol_type = other DNA
ttggcttctcatctggtctcaccctgcaggtcttacgtacccgtgagtcgcccgatggctgcgagggcggtagtt

SEQ ID NO: 883084 - DNA, 75 bp, synthetic construct
  source 1..75: mol_type = other DNA
tggcgctggttgccgccactctgtttctgagcgcctgcgatgacaggggtgatgacctcaaagctatcagtaaat

SEQ ID NO: 883085 - DNA, 75 bp, synthetic construct
  source 1..75: mol_type = other DNA
gacggtaaaagctggagcaaaattcaggctttgatcggttgttcaagggctactatcgcaaaggtggctaaaaac

SEQ ID NO: 883086 - DNA, 75 bp, synthetic construct
  source 1..75: mol_type = other DNA
ctaaactggtcgaaagcctcaatgactcttatgttgaaagaaatgtccaatcttatcaatgatgagggaattaaa

SEQ ID NO: 883087 - DNA, 75 bp, synthetic construct
  source 1..75: mol_type = other DNA
atgggaatgtggtcgatcagggctgtgatgtcgccaccaaaagtgcattacaaaatattcatattggtgatttta

SEQ ID NO: 883088 - DNA, 75 bp, synthetic construct
  source 1..75: mol_type = other DNA
gttgcgccaacgttggtttcgactggacgacgcttggtccggtagtcgataaagtctacgaagagatcgacgagg

SEQ ID NO: 883089 - DNA, 75 bp, synthetic construct
  source 1..75: mol_type = other DNA
tggaaagcagatcgcagaaaataaaaaaacctgctggtgaggcagattcttttatttacaactttgacgttaagt

SEQ ID NO: 883090 - DNA, 75 bp, synthetic construct
  source 1..75: mol_type = other DNA
gaaggcgagacctacacaaaaagtgtaggtcggaaaaacggggctgacattgatgttatctccatgactatcaag

SEQ ID NO: 883091 - DNA, 75 bp, synthetic construct
  source 1..75: mol_type = other DNA
cgtcaccgccgtggtggtcgatcagttccagcaaaaattgcaaaacaaagtcattttgatgcgtcgccatgaaga

SEQ ID NO: 883092 - DNA, 75 bp, synthetic construct
  source 1..75: mol_type = other DNA
cgaaaaagcgtgaccgtattcaccgcattccggaagatcgcaaaaagaaaaaagcaaacgtaaaccgccattctg

SEQ ID NO: 883093 - DNA, 75 bp, synthetic construct
  source 1..75: mol_type = other DNA
attaaaagaaatattaagatatataaccgtgcagcgcatttcagaggtaattcagcgtctgatccaggagcgaat

SEQ ID NO: 883094 - DNA, 75 bp, synthetic construct
  source 1..75: mol_type = other DNA
tatccgtattcccggtattgtcattcgcgagggggaaggccttaatgatgaagatgtcatattaatgctaaatga

SEQ ID NO: 883095 - DNA, 75 bp, synthetic construct
  source 1..75: mol_type = other DNA
ttcccaccagcgcaaaacctgtttttgacaaaccggtcactaacagtgccccggcaattccggaagaccgaccga

SEQ ID NO: 883096 - DNA, 75 bp, synthetic construct
  source 1..75: mol_type = other DNA
atgactctgtttattcaccgcctggtagatgattatttccaggcagacataacctgtcctgaccagcaaaagata

SEQ ID NO: 883097 - DNA, 75 bp, synthetic construct
  source 1..75: mol_type = other DNA
gattgtcgatgctaatcatggtaaagaaaataatagttatagatttaaaaggggaagtgcaaaggagattaatat

SEQ ID NO: 883098 - DNA, 75 bp, synthetic construct
  source 1..75: mol_type = other DNA
taggaatttacttttactttaaattcaaaaagaaagggactgaagaaacggttgttgagggagatattaccgttg

SEQ ID NO: 883099 - DNA, 75 bp, synthetic construct
  source 1..75: mol_type = other DNA
ttcaggagaatatttgttgataaaagccaactcccagaaattgcaaagcatactattgatataatgaaatactgg

SEQ ID NO: 883100 - DNA, 75 bp, synthetic construct
  source 1..75: mol_type = other DNA
ggaattgagtttgcacggcggcttgttaaaggccaaaaaaaggttttatttattactttcaataaccttctttca

SEQ ID NO: 883101 - DNA, 75 bp, synthetic construct
  source 1..75: mol_type = other DNA
tccgtggctgaagaatctgttttctgtttgggtgattttattttgcccttcaatgggaccgctaccacacatcag

SEQ ID NO: 883102 - DNA, 75 bp, synthetic construct
  source 1..75: mol_type = other DNA
ctgtttgaatatgataaaggggctttgtcacttgagaagactcttgatgcagtcctggcatatgaacgcctccat

SEQ ID NO: 883103 - DNA, 75 bp, synthetic construct
  source 1..75: mol_type = other DNA
gagttctcggtaatagcaattcagagtttgcccgtatgcttgaaggtgacggagatgtcaaaacgtttactctta

SEQ ID NO: 883104 - DNA, 75 bp, synthetic construct
  source 1..75: mol_type = other DNA
aaagtgactcgcgcgtttcaggccgcagcagtgccagatgaaatggttgcagtattcccggtgataaatgatatt

SEQ ID NO: 883105 - DNA, 75 bp, synthetic construct
  source 1..75: mol_type = other DNA
gcattacatttccgcaagtatcacgacgtagttttttacaagcgacttccgcgcttatcactttgccttttattt

SEQ ID NO: 883106 - DNA, 75 bp, synthetic construct
  source 1..75: mol_type = other DNA
attaggttttgctggaaacgatttacctttaggagagcagagaatacgcgtcccaagtgaatcgattgatggagt

SEQ ID NO: 883107 - DNA, 75 bp, synthetic construct
  source 1..75: mol_type = other DNA
gcctacgcacagcttaccgctgaaatggcactgaatgaggctaaagccatcctgattgctgattgtgaaaatggg

SEQ ID NO: 883108 - DNA, 75 bp, synthetic construct
  source 1..75: mol_type = other DNA
ctcactatcattttatgatcggcctgatgtagaaaaagctgggattggtaatggaattgggtgcgggtttatatg

SEQ ID NO: 883109 - DNA, 75 bp, synthetic construct
  source 1..75: mol_type = other DNA
gcgtagataatgtttctaaaaaggatatattagaactgaaattacatagagctcgagatgagtataaaaaatata

SEQ ID NO: 883110 - DNA, 75 bp, synthetic construct
  source 1..75: mol_type = other DNA
ccggaactcagggcgctggatgcaaaagcgaaaggtcaggccatagctgatgcgctgttaatcgccaggcacggg

SEQ ID NO: 883111 - DNA, 75 bp, synthetic construct
  source 1..75: mol_type = other DNA
catttaccgctaccgtggatcggtgctggtggattaccgcattcttcgtaattttgttcgcatctatcattcagc

SEQ ID NO: 883112 - DNA, 75 bp, synthetic construct
  source 1..75: mol_type = other DNA
gacttgaatctgtcagtcatccggatgacagtatcctgattgtacttaaaacccggattgcaggtatggaggcta

SEQ ID NO: 883113 - DNA, 75 bp, synthetic construct
  source 1..75: mol_type = other DNA
tccgcaacggtatatcagccttgtttcctcaattgcagtttattgtaacaacgcattctccacaccttctggcct

SEQ ID NO: 883114 - DNA, 75 bp, synthetic construct
  source 1..75: mol_type = other DNA
ccgcgaagctccttgaagacgaatctaaaatagaattcatcgtactcagcgatctgttcatgactccgagcgcga

SEQ ID NO: 883115 - DNA, 75 bp, synthetic construct
  source 1..75: mol_type = other DNA
gcggttatgcaacttagtgctgatatggcgctgaatgaggctaaagccatcctgattgctgattgtgaaaatggg

SEQ ID NO: 883116 - DNA, 75 bp, synthetic construct
  source 1..75: mol_type = other DNA
attctcgacgtcgccagcgggaagaagaaaactttctcggatcaatggggactgcataaccagctggcggtgttt

SEQ ID NO: 883117 - DNA, 75 bp, synthetic construct
  source 1..75: mol_type = other DNA
gttatcagcctcgacagcaaggagtatgaaaaacttgttgaagcctgttacaaaacattgaagaaaatgatattg

SEQ ID NO: 883118 - DNA, 75 bp, synthetic construct
  source 1..75: mol_type = other DNA
ggaaaaccgtctctcggtagatactacgcagctgcccgataacgtcgatcttgagcaaacaacacagtttgtggt

SEQ ID NO: 883119 - DNA, 75 bp, synthetic construct
  source 1..75: mol_type = other DNA
gatgtccgtttgagaaacacgagtttgattaaacgcgtgagcatgatgatattagtagctgaccagagaaattat

SEQ ID NO: 883120 - DNA, 75 bp, synthetic construct
  source 1..75: mol_type = other DNA
gcggagatattacctatgcccctgtataccaaatcactattcaaaatgacggccagaatggagagattggccctc

SEQ ID NO: 883121 - DNA, 75 bp, synthetic construct
  source 1..75: mol_type = other DNA
taacccaggatcagaaatcgcttctcttacaccgggaagaaataaccacgttgatggagaaaaatgttgcgattg

SEQ ID NO: 883122 - DNA, 75 bp, synthetic construct
  source 1..75: mol_type = other DNA
caacataaatgagatttttggtatacaagaaacaaaaaatatgttagatcagtttgaaaatcggtatcctgatct

SEQ ID NO: 883123 - DNA, 75 bp, synthetic construct
  source 1..75: mol_type = other DNA
gtcttttttttatttttagttctatgtcagattatgcgtttgctgctgatgttaatacaaatgtagttaccgtta

SEQ ID NO: 883124 - DNA, 75 bp, synthetic construct
  source 1..75: mol_type = other DNA
aaggagcaacgtcgttcaaaatcctgtctacgactgggaataacaaactgcatggtgttgctgaaatctataagt

SEQ ID NO: 883125 - DNA, 75 bp, synthetic construct
  source 1..75: mol_type = other DNA
cttgagcaccagcaatatctggcaattacgctggcgatgctggagcaggctgatgcggtattcctgctgaacggg

SEQ ID NO: 883126 - DNA, 75 bp, synthetic construct
  source 1..75: mol_type = other DNA
tagtggatttttttgtaaactttcaagaaaaagaaacaataaattcatttgataaaatactaaagaaagaaataa

SEQ ID NO: 883127 - DNA, 75 bp, synthetic construct
  source 1..75: mol_type = other DNA
aatgcgaagagaaaactggaatattacaaacgcactcgtaagctacgagtctcgaagaaaaagttgacaacaagt

SEQ ID NO: 883128 - DNA, 75 bp, synthetic construct
  source 1..75: mol_type = other DNA
aaaaagccagttaacgttggaagttattaacgaaattggaagcaatttcaatttgagtatgcaaaaaacaaaata

SEQ ID NO: 883129 - DNA, 75 bp, synthetic construct
  source 1..75: mol_type = other DNA
aaaaagccagttaacattggaagttattaacgaaatcggaagcaattttaatttaaatatgcaaaaagcaaaata

SEQ ID NO: 883130 - DNA, 75 bp, synthetic construct
  source 1..75: mol_type = other DNA
gacatcgaaagcatcctcggcacgatattgcaggaaaacggggtgaccgagtggagcccgctgttcagcgagcca

SEQ ID NO: 883131 - DNA, 75 bp, synthetic construct
  source 1..75: mol_type = other DNA
attgcatcaacgatgatgagcattttgatggtattactgactattctcagtgccagtggttctaacgctgcggat

SEQ ID NO: 883132 - DNA, 75 bp, synthetic construct
  source 1..75: mol_type = other DNA
ttatcagatgaagcgtgggaaaagttaatgttgtctgatgaaagcaataaacaacacatacgcgaagccatcgtg

SEQ ID NO: 883133 - DNA, 75 bp, synthetic construct
  source 1..75: mol_type = other DNA
acaacatatccgtgaagctattgtggcgatggagcgtaataatcagaataactactgggaagcgctgggtaaggt

SEQ ID NO: 883134 - DNA, 75 bp, synthetic construct
  source 1..75: mol_type = other DNA
tcaccttacacttgcgaaggcacgaactttacgtgatgaatacttgtcgttgcttacaaatggtatagacccccc

SEQ ID NO: 883135 - DNA, 75 bp, synthetic construct
  source 1..75: mol_type = other DNA
ccaattgctgcgggtctttacatttccggaaccctcccggaaggctattggttaatgaagccagagcgtaaaatg

SEQ ID NO: 883136 - DNA, 75 bp, synthetic construct
  source 1..75: mol_type = other DNA
atgcgatttacatgctgaatggctggcagcggtcagcgggcgctaaggcagagctggcactggcggagaaactgg

SEQ ID NO: 883137 - DNA, 75 bp, synthetic construct
  source 1..75: mol_type = other DNA
gccgccagtggcttgcgcagtgcgggctgacggtggagcggctggcggcacagatagagccggtttatttgcctg

SEQ ID NO: 883138 - DNA, 75 bp, synthetic construct
  source 1..75: mol_type = other DNA
ctacggcagcgaacctggatatcgatatcccgtatgcgacggacccggcaggaaaccggctgccggacccggaac

SEQ ID NO: 883139 - DNA, 75 bp, synthetic construct
  source 1..75: mol_type = other DNA
gtatcttccagaacgaggacatcaaaagcatcctcggcacgatattgcaggaaaacggggtgaccgagtggagtc

SEQ ID NO: 883140 - DNA, 75 bp, synthetic construct
  source 1..75: mol_type = other DNA
ttaccgtattcctgatttttccagccatttctcaggccgagtcgccattcagttctctacagtcggcaaaagaga

SEQ ID NO: 883141 - DNA, 75 bp, synthetic construct
  source 1..75: mol_type = other DNA
tagagactatctggaagatggtgagtgcattgacagaattagcgaatcaataaaaacgaggaatatttctccagt

SEQ ID NO: 883142 - DNA, 75 bp, synthetic construct
  source 1..75: mol_type = other DNA
agttacttgggaacaccaaataacacctatctaaaatataatctcaaagctaaagggaatggagttacaattatc

SEQ ID NO: 883143 - DNA, 75 bp, synthetic construct
  source 1..75: mol_type = other DNA
agtcatctttgatatgcccgataacgttgtgtacacctgaatacggtgttcttatgaaaaattctcaggagtcta

SEQ ID NO: 883144 - DNA, 75 bp, synthetic construct
  source 1..75: mol_type = other DNA
ggattttctgttgagcctgtaaggggcggtttgctggatagagtattcagacgagagcatcggatggcagaaaga

SEQ ID NO: 883145 - DNA, 75 bp, synthetic construct
  source 1..75: mol_type = other DNA
aatgacgttcaccctcttagcagggaatccataacagcctccatgattataggaagagatgagtgttattttgac

SEQ ID NO: 883146 - DNA, 75 bp, synthetic construct
  source 1..75: mol_type = other DNA
gccattgcatcgggaatcataggggtatgtggtcaatttatttttggttttggcgttctggctagcattattggg

SEQ ID NO: 883147 - DNA, 75 bp, synthetic construct
  source 1..75: mol_type = other DNA
atcgattggcgtgctcatcaacggtgagggggcaacagtatccaatacgggtgatgttaacgttagcaatgaagc

SEQ ID NO: 883148 - DNA, 75 bp, synthetic construct
  source 1..75: mol_type = other DNA
cggtattgatatcaccggtgacagcgcgacggtggataacaagggcaccatgaccgtcaccgatccggagtccat

SEQ ID NO: 883149 - DNA, 75 bp, synthetic construct
  source 1..75: mol_type = other DNA
catgagttgtttgctgatgccttgccctttgcatcagaagttgtgctattcagtaaagttgcaagtgaagcctgg

SEQ ID NO: 883150 - DNA, 75 bp, synthetic construct
  source 1..75: mol_type = other DNA
agctttttgactgtgtgcgtcacaccctgaaatcccttgagctgtcaaaacatcagtatgtggcagctgttcata

SEQ ID NO: 883151 - DNA, 75 bp, synthetic construct
  source 1..75: mol_type = other DNA
caaatccgggacgatccccggagataatctgtggcctggtgtcccactgctttgatttgtcagaagtgacgctgc

SEQ ID NO: 883152 - DNA, 75 bp, synthetic construct
  source 1..75: mol_type = other DNA
ttgttctgattattgcagcgttacttatccggattatcctcaaaagtgtaaatcagcattctcctttgctgatgg

SEQ ID NO: 883153 - DNA, 75 bp, synthetic construct
  source 1..75: mol_type = other DNA
tgatactccgagtagataccactgatcggcaaccgctcgattcaacctgtcgcttcacgtatattttgaatatgt

SEQ ID NO: 883154 - DNA, 75 bp, synthetic construct
  source 1..75: mol_type = other DNA
cgcgtattgacagtattatacccaaatatagtagttttggcccttacatggggccggttgcaaaccagtcgacgt

SEQ ID NO: 883155 - DNA, 75 bp, synthetic construct
  source 1..75: mol_type = other DNA
gtgtgcagggaaatcattaccccgtttctggcccggggattttttcccgacgttctatgcctgtcatctggctgt

SEQ ID NO: 883156 - DNA, 75 bp, synthetic construct
  source 1..75: mol_type = other DNA
atattgatagtttactttgggccgattttagctgaaagagtgatgccactatcgttctatccagagcaattacaa

SEQ ID NO: 883157 - DNA, 75 bp, synthetic construct
  source 1..75: mol_type = other DNA
ggcaattcgacttctgtgccattgccagaatgggcaacgcagaggatgcccactactgccaggtagttgagagcc

SEQ ID NO: 883158 - DNA, 75 bp, synthetic construct
  source 1..75: mol_type = other DNA
atgttcgcctaacggccttgtaggccgcgataatacaggggcaatactttcgtgccaatccggtacgtgggggac

SEQ ID NO: 883159 - DNA, 75 bp, synthetic construct
  source 1..75: mol_type = other DNA
ctccatcttcggctcgcggctggcgctggagggcagcatcgcctacatcgtcaaccacgcgttcgctaaaagcct

SEQ ID NO: 883160 - DNA, 75 bp, synthetic construct
  source 1..75: mol_type = other DNA
atggaaaaagactatttgggaattagtagtactgtattagtgagtttattgtttgggcttgcgttggttttggtg

SEQ ID NO: 883161 - DNA, 75 bp, synthetic construct
  source 1..75: mol_type = other DNA
ttggattttccttgctataggtagctttatcgataaccaacgcggtgcaacattaagtagtactttggatccggc

SEQ ID NO: 883162 - DNA, 75 bp, synthetic construct
  source 1..75: mol_type = other DNA
ggcacctgcgtctgataataacaacacaactgcgtatatcagggctgtatcgcaacgactgggagtggctccccg

SEQ ID NO: 883163 - DNA, 75 bp, synthetic construct
  source 1..75: mol_type = other DNA
ccgccagccgaacccggcaacgccacgccatcgtttttggtaaccgataatcagggcgatcaacgcggtattctt

SEQ ID NO: 883164 - DNA, 75 bp, synthetic construct
  source 1..75: mol_type = other DNA
tgcaggaaaatcattaccccgtttctggcccggggattttttcccggtattctacgcctgtcatctggctgtgct

SEQ ID NO: 883165 - DNA, 75 bp, synthetic construct
  source 1..75: mol_type = other DNA
gccgacctgctcaacgctatcaaagatggccgctgggctgatgccgttagcatcggcaaacagatacttaatcag

SEQ ID NO: 883166 - DNA, 75 bp, synthetic construct
  source 1..75: mol_type = other DNA
ttaacgacctggcgaaagcgctggcgaaactactcaatattgaccccaaatcatggtccctgaagtgggatttca

SEQ ID NO: 883167 - DNA, 75 bp, synthetic construct
  source 1..75: mol_type = other DNA
gcattatccagcatgaaaatggaagaaatatctattctcaagagctgattaataaggctgccgtggcgggaatta

SEQ ID NO: 883168 - DNA, 75 bp, synthetic construct
  source 1..75: mol_type = other DNA
atccacgccgctattgatgaactggcatcgtgcgatgtgctcattattggcgcgccgatgattaatcacagcgtt

SEQ ID NO: 883169 - DNA, 75 bp, synthetic construct
  source 1..75: mol_type = other DNA
gtatcctgtaccgggatggaagacgtaaggtccacggaggtggtgagtgcgtcgatgattgcggcaaacagaagt

SEQ ID NO: 883170 - DNA, 75 bp, synthetic construct
  source 1..75: mol_type = other DNA
attggcaacacgatattcccgccgtaatgattactgacaccgctttttatcgtaataaacaataccacttgcccg

SEQ ID NO: 883171 - DNA, 75 bp, synthetic construct
  source 1..75: mol_type = other DNA
atctgggtgttactcttactacccaaactacgggtagtttccgtagtttcatggtcgagttgcaaatctgcaact

SEQ ID NO: 883172 - DNA, 75 bp, synthetic construct
  source 1..75: mol_type = other DNA
ctataaacatcgaactgagggggtacaggatgtgcgatatggccatgaaatgtattacggccccggcagtaacac

SEQ ID NO: 883173 - DNA, 75 bp, synthetic construct
  source 1..75: mol_type = other DNA
tgttttaattctaacggggaccagtactgttgatatgattgatcaatttttatcttcctcggtaaaggccgatat

SEQ ID NO: 883174 - DNA, 75 bp, synthetic construct
  source 1..75: mol_type = other DNA
tacatttccggggtatcagtcgatttgtttacttaaccgccatgaccaaagccggcagcaatgtcggctttttac

SEQ ID NO: 883175 - DNA, 75 bp, synthetic construct
  source 1..75: mol_type = other DNA
aaaggtggagctataagagatatttcaattcgtgatggtaattatggtacgtctataaatttaagcattccttta

SEQ ID NO: 883176 - DNA, 75 bp, synthetic construct
  source 1..75: mol_type = other DNA
ttgatgtattaaatgagcttgagcgaaaaaaactaagtaaggaaaatgaaattgaattatataaaatgcatattt

SEQ ID NO: 883177 - DNA, 75 bp, synthetic construct
  source 1..75: mol_type = other DNA
agatttctatttttactgggcaatcagcatataataaatcaagttttaaatcacctgagtatagcagtgcaggta

SEQ ID NO: 883178 - DNA, 75 bp, synthetic construct
  source 1..75: mol_type = other DNA
caatttattttccaaaaaaatgactttgtgcataagtttgttttttgtttttggggggggcgatagttgctcaca

SEQ ID NO: 883179 - DNA, 75 bp, synthetic construct
  source 1..75: mol_type = other DNA
gaacaacaggaattaagagactctctcaacagccatgattactggcttaaaccaatgaaaagcacggtttctttt

SEQ ID NO: 883180 - DNA, 75 bp, synthetic construct
  source 1..75: mol_type = other DNA
ccgtgacccggacaaactcgcagattatctgacaggagagattctgacggctctggctgactggttttatctcaa

SEQ ID NO: 883181 - DNA, 75 bp, synthetic construct
  source 1..75: mol_type = other DNA
tcaggcaggggatagtaaaaagttctcgctatccagctctaacacatccacgaagaatattacctttaatttatg

SEQ ID NO: 883182 - DNA, 75 bp, synthetic construct
  source 1..75: mol_type = other DNA
attttctcggtggtatccgtcgtgttcctgccgccaacgctggttgcctccagctacgggatgaactttgagttt

SEQ ID NO: 883183 - DNA, 75 bp, synthetic construct
  source 1..75: mol_type = other DNA
tgcaggcggcaatgggttttatcaacatcgagcagaaccgcatcatcaaaattttctcggtggtatccgtcgtgt

SEQ ID NO: 883184 - DNA, 75 bp, synthetic construct
  source 1..75: mol_type = other DNA
atgaacttcagtacgttgattccagctactgtggcccccacggaagcaggggagagaattattgcctgtcttgag

SEQ ID NO: 883185 - DNA, 75 bp, synthetic construct
  source 1..75: mol_type = other DNA
cattaccaatacacatattttacgtgcggaaggcgtcgacaaaacccaaccgggacgcgaactcgccgagcaaaa

SEQ ID NO: 883186 - DNA, 75 bp, synthetic construct
  source 1..75: mol_type = other DNA
atgaaaattctccatatcgatagcagtccaatgcttaagcattcaagttcgcggaaattaagccaggcgctggta

SEQ ID NO: 883187 - DNA, 75 bp, synthetic construct
  source 1..75: mol_type = other DNA
tttgattatgcggcaaaacctgtatatggcggaggtgatagagaatccccgaaaaccatagctaaaaaagccgag

SEQ ID NO: 883188 - DNA, 75 bp, synthetic construct
  source 1..75: mol_type = other DNA
tgcaacctattgatagtaaatctcctgttggcgaaaatgttgaatatgaacttgtttataatgaaattcgccaag

SEQ ID NO: 883189 - DNA, 75 bp, synthetic construct
  source 1..75: mol_type = other DNA
tagcatgtttaattcaggacttgtacggcgcaatggtatgcaggattcacagttggatactattcaacaacgtct

SEQ ID NO: 883190 - DNA, 75 bp, synthetic construct
  source 1..75: mol_type = other DNA
ttgtagcaggtgcgctgagttacagctgcggcacgcgcttgttgccgcgtctgcgtggcgtattgcacaccctgc

SEQ ID NO: 883191 - DNA, 75 bp, synthetic construct
  source 1..75: mol_type = other DNA
tgtcgatattgttgagggtcgttttgatgccgggatacgcctgggtgaaattgtcgataaagatatggttgcagt

SEQ ID NO: 883192 - DNA, 75 bp, synthetic construct
  source 1..75: mol_type = other DNA
tgtcgatattgttgacggtcgttttgatgccgggatacgcctgggtgaaattgtagataacgatatggttgcagt

SEQ ID NO: 883193 - DNA, 75 bp, synthetic construct
  source 1..75: mol_type = other DNA
tgtcgatattgttgaaggtcgttttgatgccgggatacgcctgggtgaaattgtcgataaggatatggttgcagt

SEQ ID NO: 883194 - DNA, 75 bp, synthetic construct
  source 1..75: mol_type = other DNA
aatatttatcttgagcttccagatcttacatgcgatctgttcggaggggatgaacgaacgaagttcagcatgtat

SEQ ID NO: 883195 - DNA, 75 bp, synthetic construct
  source 1..75: mol_type = other DNA
aatcgaaagaagagcaggacaaggctaacgtggacctggctgccagtggcgtagcgtacaaagagcgcctgaaca

SEQ ID NO: 883196 - DNA, 75 bp, synthetic construct
  source 1..75: mol_type = other DNA
gacgggcagacacgggtcacgctgaaatgcgatctgtttgtggtgacagaccgggccgggaagacggagaacgtg

SEQ ID NO: 883197 - DNA, 75 bp, synthetic construct
  source 1..75: mol_type = other DNA
gaaggtgatgtcaaacattcattagctaatataagtaaaataaaaaataagttaggatatgaaccactattcact

SEQ ID NO: 883198 - DNA, 75 bp, synthetic construct
  source 1..75: mol_type = other DNA
caatgatgaaccgctgtatatcaatggtgatggcgaaacaagtagagacttttgttttattgagaatgtcgtgca

SEQ ID NO: 883199 - DNA, 75 bp, synthetic construct
  source 1..75: mol_type = other DNA
catcaagcaaaccttgatgaggttaaagagtctgtttcagctgaacaatggtctgcttttacctttgtggaagga

SEQ ID NO: 883200 - DNA, 75 bp, synthetic construct
  source 1..75: mol_type = other DNA
tctgggagattgtcagaactcttaatgctgaaggtcaccagacgcttaaccagtacaaagcaggtaagtttggtc

SEQ ID NO: 883201 - DNA, 75 bp, synthetic construct
  source 1..75: mol_type = other DNA
gtgatcgataaaaacggatacctgcaacctgcaaagaaagatgcatttggcgttgctgatgagaatgaaggctat

SEQ ID NO: 883202 - DNA, 75 bp, synthetic construct
  source 1..75: mol_type = other DNA
agatcactaaaactcaaatctaccgttccgttgccagctcaaccgcgatcgaaacgggtgtttctgtgcaaaaaa

SEQ ID NO: 883203 - DNA, 75 bp, synthetic construct
  source 1..75: mol_type = other DNA
cttactataatgagagttacataatactaaaaaaggcagtagacagtactcttcaggatctggaaagattggaaa

SEQ ID NO: 883204 - DNA, 75 bp, synthetic construct
  source 1..75: mol_type = other DNA
ttacgtgatatgaagaatgcgctatcaaaactcaatcatgatatcgaagaggaaacaaagcggataaaggccatc

SEQ ID NO: 883205 - DNA, 75 bp, synthetic construct
  source 1..75: mol_type = other DNA
tgaaacaacattctacaaagttcaacaactatcatatgctcgttacggtagaaaacctgcttcagataagccaat

SEQ ID NO: 883206 - DNA, 75 bp, synthetic construct
  source 1..75: mol_type = other DNA
cgttgaacgtttgaaaatgctggcggatgagcggctgtataagagtaagaaaaacggcagggcgcagattagctg

SEQ ID NO: 883207 - DNA, 75 bp, synthetic construct
  source 1..75: mol_type = other DNA
ggatttaatgctgatgtgatagaggctgctttagcccattctgataaaaatgaagtaagaaaagcttataaccgc

SEQ ID NO: 883208 - DNA, 75 bp, synthetic construct
  source 1..75: mol_type = other DNA
atgcggttaataccggtctgatagatgccaacccggcttcgggtgtaggaatggcttttgagaaacccaaaaagc

SEQ ID NO: 883209 - DNA, 75 bp, synthetic construct
  source 1..75: mol_type = other DNA
atggcctttgagaaacctaaaaagcaaaacatgcttactctccggccagaagaattaccgaagctgatgcgttct

SEQ ID NO: 883210 - DNA, 75 bp, synthetic construct
  source 1..75: mol_type = other DNA
ttctttttaagaaagccattacatctttattaaaagagcaggggagtccgtggcgtactttaccctgggataccc

SEQ ID NO: 883211 - DNA, 75 bp, synthetic construct
  source 1..75: mol_type = other DNA
atcaactggctgcgatagagcagaaaaacagaaaattgccgcacagctgcaacaagacaaagaggccatttcctc

SEQ ID NO: 883212 - DNA, 75 bp, synthetic construct
  source 1..75: mol_type = other DNA
ccctcctttgtttgttatttcttttatcaactggctgcgatagagcagaaaaacagaaaattgccgcacagctgc

SEQ ID NO: 883213 - DNA, 75 bp, synthetic construct
  source 1..75: mol_type = other DNA
catcgtgaacatgtttttccgagtcggaatgacccaaagcaaccaatgaatagccagacggcaaatgctgcttta

SEQ ID NO: 883214 - DNA, 75 bp, synthetic construct
  source 1..75: mol_type = other DNA
tgatgtaagagataaagaatcgatgagcgaagtaatcatgatcgtctctcctggcaaatgggtatccgaagagca

SEQ ID NO: 883215 - DNA, 75 bp, synthetic construct
  source 1..75: mol_type = other DNA
gatgaggttgagcttatctaccatgatattcattctagattaaaacgtgtaaaaaaaacggagcgatataaccct

SEQ ID NO: 883216 - DNA, 75 bp, synthetic construct
  source 1..75: mol_type = other DNA
tagagccaatcaaagcacgtggggcgctagagacggtacgtcgtctggtgcagcgcattaatgagataatgattt

SEQ ID NO: 883217 - DNA, 75 bp, synthetic construct
  source 1..75: mol_type = other DNA
agatcgatctcgatgcaaagctctggactattccagccgtacggatgaaagcgaagcgtgagcacattgtaccgc

SEQ ID NO: 883218 - DNA, 75 bp, synthetic construct
  source 1..75: mol_type = other DNA
cagcgtattaacgagataatgatttatgcagttaacactggtttgattgatgctaaccctgcatctggtgttggc

SEQ ID NO: 883219 - DNA, 75 bp, synthetic construct
  source 1..75: mol_type = other DNA
cgatttcacgatcgccctcaatgacaatgccgcgatgacgattggactggatctcatcgagtgcattcggaagca

SEQ ID NO: 883220 - DNA, 75 bp, synthetic construct
  source 1..75: mol_type = other DNA
cagcaacccaatattgtatagataataaatctcaaacagcttttctggccagattcaaaccagattattttataa

SEQ ID NO: 883221 - DNA, 75 bp, synthetic construct
  source 1..75: mol_type = other DNA
atcgatgcaaaaagcttttatcttgttgccagcacacatctgcaagcggatgatatacaaaaagtatcacaattt

SEQ ID NO: 883222 - DNA, 75 bp, synthetic construct
  source 1..75: mol_type = other DNA
cgtctctggagggcgtactaatcttggattaggtgttgcggacatcccccaatttaagggtatcaaccttgttaa

SEQ ID NO: 883223 - DNA, 75 bp, synthetic construct
  source 1..75: mol_type = other DNA
gcagttgaccattgccgaaaacattttcctcggtcgtgagtttgttaatcgctttggcaaaattgactggaaaac

SEQ ID NO: 883224 - DNA, 75 bp, synthetic construct
  source 1..75: mol_type = other DNA
tccggaggctggcacatacaccacaaacctcgttgctgcgaacaccatgtttgtgacccgccttcatgaacgtct

SEQ ID NO: 883225 - DNA, 75 bp, synthetic construct
  source 1..75: mol_type = other DNA
atctgacgggtaaaacgctgaatctgggcaccaccgatgctaatggtgagattaatatcccagtatatgcaacac

SEQ ID NO: 883226 - DNA, 75 bp, synthetic construct
  source 1..75: mol_type = other DNA
atccagctccaagtggtgaaaaaccgtttaaggcgtatcaggaagcacagcgctggggagataactggaatgacg

SEQ ID NO: 883227 - DNA, 75 bp, synthetic construct
  source 1..75: mol_type = other DNA
cccccgggactgaaaacgaaacaataacccgcgcacagtgcgaggagcccggcgtgaagcaatcagcaggtaata

SEQ ID NO: 883228 - DNA, 75 bp, synthetic construct
  source 1..75: mol_type = other DNA
acttaaaaactattgctcggtttgacggtaaaaccttaagagatgccttttcgagaaaaatagcgacttttgatg

SEQ ID NO: 883229 - DNA, 75 bp, synthetic construct
  source 1..75: mol_type = other DNA
attaacggcaatgcggatgatattgtcgacactgttgccagaaggccaattcagaaattgattgggggaatatgg

SEQ ID NO: 883230 - DNA, 75 bp, synthetic construct
  source 1..75: mol_type = other DNA
gatgttggcgagcagatggtgaatcagcttttcagtaacccaagcgttatgttgttaagcgccgccgtgctcggt

SEQ ID NO: 883231 - DNA, 75 bp, synthetic construct
  source 1..75: mol_type = other DNA
gaaagtctctgatttataggaaaacatatgagccggggaatgatgttgttattgaattgaaatctttttcaagaa

SEQ ID NO: 883232 - DNA, 75 bp, synthetic construct
  source 1..75: mol_type = other DNA
gaagagaacccgcatcagctgcagcagctcatccgcctgccgggtcagcagtatgatgaggagtccggcctgtat

SEQ ID NO: 883233 - DNA, 75 bp, synthetic construct
  source 1..75: mol_type = other DNA
actggggaggcgactattcgcgaggggggctggttacggctgaaaatacgattatcggtggcaatgccaccggta

SEQ ID NO: 883234 - DNA, 75 bp, synthetic construct
  source 1..75: mol_type = other DNA
tatggagaaaacggcgtcgggaatgtcagcatcaccacgggggtgaagtggcacactgaatttggccacctgaac

SEQ ID NO: 883235 - DNA, 75 bp, synthetic construct
  source 1..75: mol_type = other DNA
ccttaattcaacgggctatggatttatcggaggaaatgcctccggtaagggaatagttaatatttcaacggatag

SEQ ID NO: 883236 - DNA, 75 bp, synthetic construct
  source 1..75: mol_type = other DNA
cccagcaaaagactctcacactggccctgaccaccacaccgttgaacgcaggcagcccagtgacgctgggcatcc

SEQ ID NO: 883237 - DNA, 75 bp, synthetic construct
  source 1..75: mol_type = other DNA
cttgcccgtctgcaccaggagctgaaaactaccatggtttatgtcacccacgaccagatagaagcgatgaccctg

SEQ ID NO: 883238 - DNA, 75 bp, synthetic construct
  source 1..75: mol_type = other DNA
ttactgttaaggataagaactccgttatcactaatctcggaactaatcttggttatgacggccacggcgaaatgg

SEQ ID NO: 883239 - DNA, 75 bp, synthetic construct
  source 1..75: mol_type = other DNA
acagcatgcggacatgcaggaattggtggtgggataaatgcggctatcacatattctgagaccaagtctttacct

SEQ ID NO: 883240 - DNA, 75 bp, synthetic construct
  source 1..75: mol_type = other DNA
gtcgacggacagcaacgtctgctgactttgcgaatgattcttgcggccttagatccgataaatcatcagatttcg

SEQ ID NO: 883241 - DNA, 75 bp, synthetic construct
  source 1..75: mol_type = other DNA
tatggccgtaaagttaatccagaagccgacaaattaacagatgaacataagtcaggtgtaaatcctggtggtaac

SEQ ID NO: 883242 - DNA, 75 bp, synthetic construct
  source 1..75: mol_type = other DNA
atcggaaccctgaatgtgcaggatcaagactctgttatcacggtacgcagactctataatggatatttcggtaat

SEQ ID NO: 883243 - DNA, 75 bp, synthetic construct
  source 1..75: mol_type = other DNA
gtatatcaccccggacccgattgggttgagaggtggatggaatatgtatcagtatccgttgaatcaccatacaag

SEQ ID NO: 883244 - DNA, 75 bp, synthetic construct
  source 1..75: mol_type = other DNA
ccagttacagagccagcacctgaacagcctggtgtatgaccgtgactacgggtggaatgacaacggcgacctggt

SEQ ID NO: 883245 - DNA, 75 bp, synthetic construct
  source 1..75: mol_type = other DNA
ttcggtttaccacagggcttagttatgagatttcgtcatcacaacagacacgagcggtaaaagatcgacgtgatg

SEQ ID NO: 883246 - DNA, 75 bp, synthetic construct
  source 1..75: mol_type = other DNA
atactttgcgccagatcctgacaacaaagatggtacgcgtaaatatgcgttattcagtgcaaaaatagaacctgt

SEQ ID NO: 883247 - DNA, 75 bp, synthetic construct
  source 1..75: mol_type = other DNA
atcgcttatgatgttggtggctgtgatagcttaattatcaataacgataatgggttgattgtaaaaagtaaatct

SEQ ID NO: 883248 - DNA, 75 bp, synthetic construct
  source 1..75: mol_type = other DNA
ggccgaaaacgccggatctggagtcttatttctccacgccgaccaggaaaactgatacccggacacctgatattg

SEQ ID NO: 883249 - DNA, 75 bp, synthetic construct
  source 1..75: mol_type = other DNA
gaaagccctgtgtggaatgcggcattcctgatccatgtatttttgatgttattagtgattttcctgaggccggtg

SEQ ID NO: 883250 - DNA, 75 bp, synthetic construct
  source 1..75: mol_type = other DNA
ttttggatttgattcacatgatgacggactggacctggcattatttcatgacggcattaaagggaagttcgaatt

SEQ ID NO: 883251 - DNA, 75 bp, synthetic construct
  source 1..75: mol_type = other DNA
caaagagtacgacgagaacattggcgcgtgggaggcgttcgccaccacatcagcaaaccagagcatcaccgtcac

SEQ ID NO: 883252 - DNA, 75 bp, synthetic construct
  source 1..75: mol_type = other DNA
tatacgcagtcagagtattataaaggcattgtatgaccatcttgttcttggcgattcaagaaaagttatctgtga

SEQ ID NO: 883253 - DNA, 75 bp, synthetic construct
  source 1..75: mol_type = other DNA
gtgatactccatttatatggttgtggaagtcgttatgttttggatcttccacaatggtcgtgagtgagaacagtg

SEQ ID NO: 883254 - DNA, 75 bp, synthetic construct
  source 1..75: mol_type = other DNA
caaagagtatgatgagaatatcggcgcctgggagacgttcgctaccacatccgcaaatcagactatcaccgttac

SEQ ID NO: 883255 - DNA, 75 bp, synthetic construct
  source 1..75: mol_type = other DNA
ctcaatgcaggtaatgctgcaggcaatgtcatcacacgaggaagcggaatatcagcaagctactctgatgtaaac

SEQ ID NO: 883256 - DNA, 75 bp, synthetic construct
  source 1..75: mol_type = other DNA
aagggagcaacggtgcgcttgctgttgcagacggcgggaccggggcaacgactgcagcagccgctcgatcaagcc

SEQ ID NO: 883257 - DNA, 75 bp, synthetic construct
  source 1..75: mol_type = other DNA
gcggtgatggtgaacggcgttatgagctatggtcgcgataaacatattacaggccgtgcgggacgcttcctgcgc

SEQ ID NO: 883258 - DNA, 75 bp, synthetic construct
  source 1..75: mol_type = other DNA
aaccaacaccgctggccgctcatacagggtgattatctctccagcctgattctggcgatttacgccctgcgtaat

SEQ ID NO: 883259 - DNA, 75 bp, synthetic construct
  source 1..75: mol_type = other DNA
gtaattgttcaggatgtgctctccatgcctgtatggctttgttagggtatgggataagagaggcgccagcgtcta

SEQ ID NO: 883260 - DNA, 75 bp, synthetic construct
  source 1..75: mol_type = other DNA
tccagcttgtgctctctactgaccagaggattgatttgtcagggaaaattgttcccggcgacagccatcagaagc

SEQ ID NO: 883261 - DNA, 75 bp, synthetic construct
  source 1..75: mol_type = other DNA
atgtttccatattgttttgctattacattaagatcattttgtattttgtttaacaatgaatatattgattttaat

SEQ ID NO: 883262 - DNA, 75 bp, synthetic construct
  source 1..75: mol_type = other DNA
ttaatcacctatgccgatcaatttcacagcaatgatttaaaaccattacccacatttaatcagttttatcatcaa

SEQ ID NO: 883263 - DNA, 75 bp, synthetic construct
  source 1..75: mol_type = other DNA
tgaaatattgttattccggtgaatgtctttctcgggatgatagggaactatcgctttattatgcgtggtttttcg

SEQ ID NO: 883264 - DNA, 75 bp, synthetic construct
  source 1..75: mol_type = other DNA
gcgtcgcttgaacgggcccgcgtggcggctgcacaggccgacccggctgaccgtggccgctttttctttgattac

SEQ ID NO: 883265 - DNA, 75 bp, synthetic construct
  source 1..75: mol_type = other DNA
tccgtaatggcattgaccgctatctcacgccttcccgggctcagccccgcacaacgtcagtcgtgaacgggcact

SEQ ID NO: 883266 - DNA, 75 bp, synthetic construct
  source 1..75: mol_type = other DNA
aataagaggtgtatacgaggctgctggatatgattacattgtttgcgttgaggatgagctggcaaaaaaaatcgt

SEQ ID NO: 883267 - DNA, 75 bp, synthetic construct
  source 1..75: mol_type = other DNA
cgttcttccggaatcacgattgataaccttgaagccaagtgcgcggcgctggcggcggagaatgcggcgcttaaa

SEQ ID NO: 883268 - DNA, 75 bp, synthetic construct
  source 1..75: mol_type = other DNA
gtaatggaatgaagcactttttccgtctgccggaaaatatggaaactatgggtgattgcggagccttcacctatg

SEQ ID NO: 883269 - DNA, 75 bp, synthetic construct
  source 1..75: mol_type = other DNA
aaccgcctgacggcgcatctgacggtaataaggcaatcactgaaacagagcatgatgcggtgaaggcgatgttca

SEQ ID NO: 883270 - DNA, 75 bp, synthetic construct
  source 1..75: mol_type = other DNA
gagcaaaagcctccttactataggtgctctgccggagatttttatttgccaacagcaatttcggcagacaatgct

SEQ ID NO: 883271 - DNA, 75 bp, synthetic construct
  source 1..75: mol_type = other DNA
ccgctgctcggtgcaaaggtccttccggtgaaaccgacatcgccctgcccgcccgctgccgttcatcctctcccg

SEQ ID NO: 883272 - DNA, 75 bp, synthetic construct
  source 1..75: mol_type = other DNA
ttgaataatggtatgccaagtgattgcgtattatttgaaactgatactaatactcttcctcaaaatggatatatg

SEQ ID NO: 883273 - DNA, 75 bp, synthetic construct
  source 1..75: mol_type = other DNA
tactttactgatgtattatcacatgtattagttattgataataaacgcggtggcggtaatttaattagtcaaata

SEQ ID NO: 883274 - DNA, 75 bp, synthetic construct
  source 1..75: mol_type = other DNA
ggtaaaaccaggagacactttagctttctctgttttggtatggttcgagaacgctggaggcaagttacagattta

SEQ ID NO: 883275 - DNA, 75 bp, synthetic construct
  source 1..75: mol_type = other DNA
gattggtataaaggcgctacgccaacattttctactactgatgttaatttgccgcttccaacacctgttattcaa

SEQ ID NO: 883276 - DNA, 75 bp, synthetic construct
  source 1..75: mol_type = other DNA
tggtggaagaggtggcgcgtaacgcgtccgcagtggcgcagaacacagcagcctcatccgaatcggcaacggcag

SEQ ID NO: 883277 - DNA, 75 bp, synthetic construct
  source 1..75: mol_type = other DNA
ctgcgttttatgcgtaatctcgggttaatggcggcggagcgtgctggcgtgttgaaacgtcaggcgctgaaatat

SEQ ID NO: 883278 - DNA, 75 bp, synthetic construct
  source 1..75: mol_type = other DNA
acggcgaagcgtgggccagttatcctgtcctcaagcgttaccagatgcggcgcatggcggataacttcattatgc

SEQ ID NO: 883279 - DNA, 75 bp, synthetic construct
  source 1..75: mol_type = other DNA
gcttaaaaaacgctcattcaagcaacatagggattcccctgtgctgacgaggaccgcgccagagcgggtcagtaa

SEQ ID NO: 883280 - DNA, 75 bp, synthetic construct
  source 1..75: mol_type = other DNA
caagctggcgatggatatggcaaaagagatgaacgcgggttatacgctgatttccgcggcccacgcgggctatct

SEQ ID NO: 883281 - DNA, 75 bp, synthetic construct
  source 1..75: mol_type = other DNA
tcacagctaatcgcatgatggatcgtgtgatgttggagaagaataaaccagcagaagacctgttacttgaatctg

SEQ ID NO: 883282 - DNA, 75 bp, synthetic construct
  source 1..75: mol_type = other DNA
caaatcgccgttcaccgggaggaaggcatcagcacttacagcagttataacccgcgtgggcaactggtcagtcag

SEQ ID NO: 883283 - DNA, 75 bp, synthetic construct
  source 1..75: mol_type = other DNA
gccccgctggcagagcgccgggcatccgtactgtcgctggacagcgagttactgcgcaatctactcggacaggtc

SEQ ID NO: 883284 - DNA, 75 bp, synthetic construct
  source 1..75: mol_type = other DNA
cgggcgccatacccgttatgttgactgcaacacaccggtaaaagttggcgagctggtgattgccgttcgtgcccg

SEQ ID NO: 883285 - DNA, 75 bp, synthetic construct
  source 1..75: mol_type = other DNA
gtttattaaacaatataatcagaagtggggggagcgatatgtacaatttggaattgaacttataaatgacagaag

SEQ ID NO: 883286 - DNA, 75 bp, synthetic construct
  source 1..75: mol_type = other DNA
aggcacaaacttttaatggtggtattaatggcaatttgacggtgaccggaaacggctcatttaacgatgttcaga

SEQ ID NO: 883287 - DNA, 75 bp, synthetic construct
  source 1..75: mol_type = other DNA
ctttggagtgcctatgacaaactcttagaccaatttgcatcaagaatgctaaaagctctgaatgctaataaagat

SEQ ID NO: 883288 - DNA, 75 bp, synthetic construct
  source 1..75: mol_type = other DNA
ttacacccggtaatggctgctttattaggacctatatcaaaacgtcagtttggacagaacgagcgttcaactttt

SEQ ID NO: 883289 - DNA, 75 bp, synthetic construct
  source 1..75: mol_type = other DNA
ctgtacagtttgtggctgagatggctgataagttttatgagcttatcaaggtggacccgatgccgcgcgatcaga

SEQ ID NO: 883290 - DNA, 75 bp, synthetic construct
  source 1..75: mol_type = other DNA
gcgcacagcctggggttaaaaacgatcgctgaaggcgtcgaaactgaggagcaggttaactggctgcgcaaacgc

SEQ ID NO: 883291 - DNA, 75 bp, synthetic construct
  source 1..75: mol_type = other DNA
aggcgaacctgaaccggggatgggcggtggttgtagctagggggggacggctcgcacctcaagaaaaaaaaaaca

SEQ ID NO: 883292 - DNA, 75 bp, synthetic construct
  source 1..75: mol_type = other DNA
gttgcaacgactggctcctggcagaagagcgaaaggtgaagaaggattgttcgacctgctgcgcgaactggggcc

SEQ ID NO: 883293 - DNA, 75 bp, synthetic construct
  source 1..75: mol_type = other DNA
taagtccgcacaggctcattaaagttctggagctttttaacgccagtcagagtaaagcattgccatttgctgaac

SEQ ID NO: 883294 - DNA, 75 bp, synthetic construct
  source 1..75: mol_type = other DNA
acgaaaacggctatgtctcagccagtctgtactgcaaccgctcattagctggaaatacatcgttttatgtatcag

SEQ ID NO: 883295 - DNA, 75 bp, synthetic construct
  source 1..75: mol_type = other DNA
aactctgccgataatattgcaggcgttcattacaggccagtgcaaaagtatataaatggcacttggtataatgtg

SEQ ID NO: 883296 - DNA, 75 bp, synthetic construct
  source 1..75: mol_type = other DNA
tgtcacacatttggggcggttctctttttgggtgtctaaatggttgtctacctgctcgatgtggtggaaatgccg

SEQ ID NO: 883297 - DNA, 75 bp, synthetic construct
  source 1..75: mol_type = other DNA
tttgtggataaggagtccggtgtgagttttgatgtttttcatgtgctttccgtttctttcccggtgacagcttgt

SEQ ID NO: 883298 - DNA, 75 bp, synthetic construct
  source 1..75: mol_type = other DNA
gccgttctacgaggatgtaaaagagatgccgctcggcgaggctctggagcagcataccggcgttccggtttattc

SEQ ID NO: 883299 - DNA, 75 bp, synthetic construct
  source 1..75: mol_type = other DNA
actccattcgaggaacttacaatcatgcgcaatatatattaaaccgcgaaaaaatgatgcaatggtattcagatc

SEQ ID NO: 883300 - DNA, 75 bp, synthetic construct
  source 1..75: mol_type = other DNA
tatctcgtgaagatatttgttgaggatttgcctccggatatccagatgggaaatgttgaaggaacagtaactttt

SEQ ID NO: 883301 - DNA, 75 bp, synthetic construct
  source 1..75: mol_type = other DNA
agcgtcttgcctgtatggatgatgccgccaggctgcgtgatgccctcggcgtacgactaccagagtcattgccag

SEQ ID NO: 883302 - DNA, 75 bp, synthetic construct
  source 1..75: mol_type = other DNA
acacaaaccagataaatatcttatcaatatacaacaaagtttgaattattcaatttatagcagcacaaccaaacg
